United States Patent Application Publication US 2005/0244851 A1 - sequence listing, part 15

SEQ ID NO: 559040 - DNA, 25 bp, Homo sapien
tccccaaagggcaaatctgcccgtg

SEQ ID NO: 559041 - DNA, 25 bp, Homo sapien
aatctgcccgtgctccatcgtatcg

SEQ ID NO: 559042 - DNA, 25 bp, Homo sapien
catgccgtgtccagaattgatgggt

SEQ ID NO: 559043 - DNA, 25 bp, Homo sapien
atgccgtgtccagaattgatgggtt

SEQ ID NO: 559044 - DNA, 25 bp, Homo sapien
tgccgtgtccagaattgatgggttc

SEQ ID NO: 559045 - DNA, 25 bp, Homo sapien
ttgttaaaacctggagatgatgcct

SEQ ID NO: 559046 - DNA, 25 bp, Homo sapien
ctgaggtagggcgttctgaagggct

SEQ ID NO: 559047 - DNA, 25 bp, Homo sapien
gcgttgttacagctgtgccacttgt

SEQ ID NO: 559048 - DNA, 25 bp, Homo sapien
ttgacactcccccaaacagactggg

SEQ ID NO: 559049 - DNA, 25 bp, Homo sapien
ctggtagtcatggcaggaatggatg

SEQ ID NO: 559050 - DNA, 25 bp, Homo sapien
gctggtagtcatggcaggaatggat

SEQ ID NO: 559051 - DNA, 25 bp, Homo sapien
tggtagtcatggcaggaatggatgc

SEQ ID NO: 559052 - DNA, 25 bp, Homo sapien
aattgtggagaggtgatagtcaaag

SEQ ID NO: 559053 - DNA, 25 bp, Homo sapien
catgcatcgtagcatcaaagataag

SEQ ID NO: 559054 - DNA, 25 bp, Homo sapien
aataaattgtggagaggtgatagtc

SEQ ID NO: 559055 - DNA, 25 bp, Homo sapien
agaggtgatagtcaaaggaaaggga

SEQ ID NO: 559056 - DNA, 25 bp, Homo sapien
ccttcagtgcaaaataaacgtggca

SEQ ID NO: 559057 - DNA, 25 bp, Homo sapien
cttcagtgcaaaataaacgtggcat

SEQ ID NO: 559058 - DNA, 25 bp, Homo sapien
attgccttcagtgcaaaataaacgt

SEQ ID NO: 559059 - DNA, 25 bp, Homo sapien
tgccttcagtgcaaaataaacgtgg

SEQ ID NO: 559060 - DNA, 25 bp, Homo sapien
ttcatttacagggatacaactagtg

SEQ ID NO: 559061 - DNA, 25 bp, Homo sapien
tttacagggatacaactagtgttac

SEQ ID NO: 559062 - DNA, 25 bp, Homo sapien
ggatacaactagtgttactggtaga

SEQ ID NO: 559063 - DNA, 25 bp, Homo sapien
ccattcatttacagggatacaacta

SEQ ID NO: 559064 - DNA, 25 bp, Homo sapien
gaaattacactccaccatgtgagag

SEQ ID NO: 559065 - DNA, 25 bp, Homo sapien
taatcactaccggttggagatcacg

SEQ ID NO: 559066 - DNA, 25 bp, Homo sapien
tctgagaaacgtgatccccataagt

SEQ ID NO: 559067 - DNA, 25 bp, Homo sapien
tctaagaagtcagtgtgaaacggcc

SEQ ID NO: 559068 - DNA, 25 bp, Homo sapien
gacaaatcaaaggaggagtaatgaa

SEQ ID NO: 559069 - DNA, 25 bp, Homo sapien
gattgggcagcttggtactactagg

SEQ ID NO: 559070 - DNA, 25 bp, Homo sapien
tgggcagcttggtactactaggaaa

SEQ ID NO: 559071 - DNA, 25 bp, Homo sapien
gcttggtactactaggaaatcctgt

SEQ ID NO: 559072 - DNA, 25 bp, Homo sapien
aaaatgctcatcacttgttgttaga

SEQ ID NO: 559073 - DNA, 25 bp, Homo sapien
gtttactgcaacactatttaccatg

SEQ ID NO: 559074 - DNA, 25 bp, Homo sapien
atgctcatcacttgttgttagagaa

SEQ ID NO: 559075 - DNA, 25 bp, Homo sapien
ggctgtggagaagtaggaacatttt

SEQ ID NO: 559076 - DNA, 25 bp, Homo sapien
tacctaatccatgtgggacttaaaa

SEQ ID NO: 559077 - DNA, 25 bp, Homo sapien
aatacctaatccatgtgggacttaa

SEQ ID NO: 559078 - DNA, 25 bp, Homo sapien
caaatacctaatccatgtgggactt

SEQ ID NO: 559079 - DNA, 25 bp, Homo sapien
taatccatgtgggacttaaaaccta

SEQ ID NO: 559080 - DNA, 25 bp, Homo sapien
tgcccatgacgtccagagttacctg

SEQ ID NO: 559081 - DNA, 25 bp, Homo sapien
tgtggactgggaggaacgccttact

SEQ ID NO: 559082 - DNA, 25 bp, Homo sapien
ttgctcctgcatcaaaaagaaactg

SEQ ID NO: 559083 - DNA, 25 bp, Homo sapien
aagaaactgaatttgggtgcccatg

SEQ ID NO: 559084 - DNA, 25 bp, Homo sapien
ctggtgcccttgcattgacggcagg

SEQ ID NO: 559085 - DNA, 25 bp, Homo sapien
ggcctggcggggacttagcacaatc

SEQ ID NO: 559086 - DNA, 25 bp, Homo sapien
tgactggtgcccttgcattgacggc

SEQ ID NO: 559087 - DNA, 25 bp, Homo sapien
ggcggggacttagcacaatcctttg

SEQ ID NO: 559088 - DNA, 25 bp, Homo sapien
gtttcccttagacactctttgtaca

SEQ ID NO: 559089 - DNA, 25 bp, Homo sapien
tttggcttgccattttgtttactct

SEQ ID NO: 559090 - DNA, 25 bp, Homo sapien
tggctgccatacttttggcttgcca

SEQ ID NO: 559091 - DNA, 25 bp, Homo sapien
gctgccatacttttggcttgccatt

SEQ ID NO: 559092 - DNA, 25 bp, Homo sapien
tgccatacttttggcttgccatttt

SEQ ID NO: 559093 - DNA, 25 bp, Homo sapien
cattttggaggactacccctaggca

SEQ ID NO: 559094 - DNA, 25 bp, Homo sapien
gggaccacatgaccagggcgaaatt

SEQ ID NO: 559095 - DNA, 25 bp, Homo sapien
cataggcagccagacgttaagatta

SEQ ID NO: 559096 - DNA, 25 bp, Homo sapien
cagacagcactggagagtggtccca

SEQ ID NO: 559097 - DNA, 25 bp, Homo sapien
ctggctcgccaaacccgtagagggt

SEQ ID NO: 559098 - DNA, 25 bp, Homo sapien
caaacccgtagagggtcttgagtgc

SEQ ID NO: 559099 - DNA, 25 bp, Homo sapien
ctcgccaaacccgtagagggtcttg

SEQ ID NO: 559100 - DNA, 25 bp, Homo sapien
cgccaaacccgtagagggtcttgag

SEQ ID NO: 559101 - DNA, 25 bp, Homo sapien
agtagctcaagaaccccggatacag

SEQ ID NO: 559102 - DNA, 25 bp, Homo sapien
tgagcccaagcagtagctcaagaac

SEQ ID NO: 559103 - DNA, 25 bp, Homo sapien
gtgagcccaagcagtagctcaagaa

SEQ ID NO: 559104 - DNA, 25 bp, Homo sapien
caagcagtagctcaagaaccccgga

SEQ ID NO: 559105 - DNA, 25 bp, Homo sapien
gcacagtaaagctaggaaagaatga

SEQ ID NO: 559106 - DNA, 25 bp, Homo sapien
tggacaaaacgcacagtaaagctag

SEQ ID NO: 559107 - DNA, 25 bp, Homo sapien
tgattggttgcggacagcaagttgt

SEQ ID NO: 559108 - DNA, 25 bp, Homo sapien
gttgcggacagcaagttgtccaggt

SEQ ID NO: 559109 - DNA, 25 bp, Homo sapien
aaacgaagccttggcccacaatcag

SEQ ID NO: 559110 - DNA, 25 bp, Homo sapien
cactttcaattttccagctgcggca

SEQ ID NO: 559111 - DNA, 25 bp, Homo sapien
caaagttgcacttctattcaaacga

SEQ ID NO: 559112 - DNA, 25 bp, Homo sapien
tcaattttccagctgcggcacagaa

SEQ ID NO: 559113 - DNA, 25 bp, Homo sapien
tcttatacagaagtcgtcatgggaa

SEQ ID NO: 559114 - DNA, 25 bp, Homo sapien
tatatccgacaatcttatacagaag

SEQ ID NO: 559115 - DNA, 25 bp, Homo sapien
tttgctatatccgacaatcttatac

SEQ ID NO: 559116 - DNA, 25 bp, Homo sapien
acagaagtcgtcatgggaaactcag

SEQ ID NO: 559117 - DNA, 25 bp, Homo sapien
catgcgtgatacttgcaccggtcga

SEQ ID NO: 559118 - DNA, 25 bp, Homo sapien
agcaggcccttacccgtggaattca

SEQ ID NO: 559119 - DNA, 25 bp, Homo sapien
tcagctctgaaagtccggttccaaa

SEQ ID NO: 559120 - DNA, 25 bp, Homo sapien
cagtgatggtcgtggagtgctttcc

SEQ ID NO: 559121 - DNA, 25 bp, Homo sapien
gccggccgaaggtcaagtttcagtg

SEQ ID NO: 559122 - DNA, 25 bp, Homo sapien
cggccgaaggtcaagtttcagtggt

SEQ ID NO: 559123 - DNA, 25 bp, Homo sapien
gcgccggccgaaggtcaagtttcag

SEQ ID NO: 559124 - DNA, 25 bp, Homo sapien
cgcgccggccgaaggtcaagtttca

SEQ ID NO: 559125 - DNA, 25 bp, Homo sapien
ggacaccgtctcacatcatcagtgg

SEQ ID NO: 559126 - DNA, 25 bp, Homo sapien
gaaattgtccgtgaagatgcctttg

SEQ ID NO: 559127 - DNA, 25 bp, Homo sapien
gaaataggagttcactggccctcaa

SEQ ID NO: 559128 - DNA, 25 bp, Homo sapien
gattgaactctagtggctaactgaa

SEQ ID NO: 559129 - DNA, 25 bp, Homo sapien
tccatgtcaatacatagctacctca

SEQ ID NO: 559130 - DNA, 25 bp, Homo sapien
cattgaatacattgtgggcatcttt

SEQ ID NO: 559131 - DNA, 25 bp, Homo sapien
taactactttgatgtctacctccac

SEQ ID NO: 559132 - DNA, 25 bp, Homo sapien
tatgtcccacataatcagttcccag

SEQ ID NO: 559133 - DNA, 25 bp, Homo sapien
tacatgccgatgagaaaacacaagc

SEQ ID NO: 559134 - DNA, 25 bp, Homo sapien
cacccatgacattggaaccgtgctg

SEQ ID NO: 559135 - DNA, 25 bp, Homo sapien
tgtaaatctataacctcctccgtct

SEQ ID NO: 559136 - DNA, 25 bp, Homo sapien
accgtgctgtagtttattattctca

SEQ ID NO: 559137 - DNA, 25 bp, Homo sapien
gcaggtgcccgccaccacgcctggc

SEQ ID NO: 559138 - DNA, 25 bp, Homo sapien
tgcctctgcctccacctccgcctcc

SEQ ID NO: 559139 - DNA, 25 bp, Homo sapien
tcctgcctctgcctccacctccgcc

SEQ ID NO: 559140 - DNA, 25 bp, Homo sapien
tgagtagctgggactgcaggtgccc

SEQ ID NO: 559141 - DNA, 25 bp, Homo sapien
aaatgaagcagtgctgtacctggtt

SEQ ID NO: 559142 - DNA, 25 bp, Homo sapien
agcagtgctgtacctggttgtgatc

SEQ ID NO: 559143 - DNA, 25 bp, Homo sapien
gaagcagtgctgtacctggttgtga

SEQ ID NO: 559144 - DNA, 25 bp, Homo sapien
tgaagcagtgctgtacctggttgtg

SEQ ID NO: 559145 - DNA, 25 bp, Homo sapien
aatacatgccataataagatggcag

SEQ ID NO: 559146 - DNA, 25 bp, Homo sapien
tggcagttaaacttcatcagtattt

SEQ ID NO: 559147 - DNA, 25 bp, Homo sapien
tacagaaaatgaattcgctgggcat

SEQ ID NO: 559148 - DNA, 25 bp, Homo sapien
atgtgcctgtaggaagctgaagtga

SEQ ID NO: 559149 - DNA, 25 bp, Homo sapien
tgaggctgcattgaactgtgatggc

SEQ ID NO: 559150 - DNA, 25 bp, Homo sapien
tgcattgaactgtgatggcaccacc

SEQ ID NO: 559151 - DNA, 25 bp, Homo sapien
cattgaactgtgatggcaccaccgc

SEQ ID NO: 559152 - DNA, 25 bp, Homo sapien
tttgaggctgcattgaactgtgatg

SEQ ID NO: 559153 - DNA, 25 bp, Homo sapien
tgtcggtgtaccaagcaacataatc

SEQ ID NO: 559154 - DNA, 25 bp, Homo sapien
gatattaagagctcagtgtgcctgg

SEQ ID NO: 559155 - DNA, 25 bp, Homo sapien
cctagaggacgggatggaaatgcca

SEQ ID NO: 559156 - DNA, 25 bp, Homo sapien
gcaagaatcttaggcagtgttccaa

SEQ ID NO: 559157 - DNA, 25 bp, Homo sapien
cagatgggcgtctagatgggactat

SEQ ID NO: 559158 - DNA, 25 bp, Homo sapien
gctgtcagcagatgtttacttaaag

SEQ ID NO: 559159 - DNA, 25 bp, Homo sapien
tattctggagtctatgcctcatacc

SEQ ID NO: 559160 - DNA, 25 bp, Homo sapien
tcctctaggaagatgataagatcag

SEQ ID NO: 559161 - DNA, 25 bp, Homo sapien
tctcttcttatctggaatggtagct

SEQ ID NO: 559162 - DNA, 25 bp, Homo sapien
tagtctttagtctgccaaggacact

SEQ ID NO: 559163 - DNA, 25 bp, Homo sapien
tgttacggacactgcacaaagatat

SEQ ID NO: 559164 - DNA, 25 bp, Homo sapien
gatataatcagatggactctacggt

SEQ ID NO: 559165 - DNA, 25 bp, Homo sapien
gctctggtttttattgcggtcagct

SEQ ID NO: 559166 - DNA, 25 bp, Homo sapien
tttttattgcggtcagctagaaaag

SEQ ID NO: 559167 - DNA, 25 bp, Homo sapien
ctggtttttattgcggtcagctaga

SEQ ID NO: 559168 - DNA, 25 bp, Homo sapien
ttattgcggtcagctagaaaagtga

SEQ ID NO: 559169 - DNA, 25 bp, Homo sapien
tgttttagttttcgcttgcctggga

SEQ ID NO: 559170 - DNA, 25 bp, Homo sapien
ttgtgttttagttttcgcttgcctg

SEQ ID NO: 559171 - DNA, 25 bp, Homo sapien
tgtgttttagttttcgcttgcctgg

SEQ ID NO: 559172 - DNA, 25 bp, Homo sapien
agttttcgcttgcctgggatttttg

SEQ ID NO: 559173 - DNA, 25 bp, Homo sapien
acccctgcaggctatgttgctgcca

SEQ ID NO: 559174 - DNA, 25 bp, Homo sapien
tggcgtctgatcaggaagggactct

SEQ ID NO: 559175 - DNA, 25 bp, Homo sapien
gattctataagtgtaagtcaaagcc

SEQ ID NO: 559176 - DNA, 25 bp, Homo sapien
gccaaccgaggagcgctgatgacgt

SEQ ID NO: 559177 - DNA, 25 bp, Homo sapien
ctgggtatcagatggtgatgctttg

SEQ ID NO: 559178 - DNA, 25 bp, Homo sapien
ggtatcagatggtgatgctttgtaa

SEQ ID NO: 559179 - DNA, 25 bp, Homo sapien
gtatcagatggtgatgctttgtaaa

SEQ ID NO: 559180 - DNA, 25 bp, Homo sapien
gatgctttgtaaatagtgtgcctca

SEQ ID NO: 559181 - DNA, 25 bp, Homo sapien
tttggttttgaggtatatatctagg

SEQ ID NO: 559182 - DNA, 25 bp, Homo sapien
attgtagctgtcttcgtgggtgtga

SEQ ID NO: 559183 - DNA, 25 bp, Homo sapien
acaaaggttccaattctccgtatct

SEQ ID NO: 559184 - DNA, 25 bp, Homo sapien
caattctccgtatctttgccaacac

SEQ ID NO: 559185 - DNA, 25 bp, Homo sapien
acttccatcgattctgtattccagg

SEQ ID NO: 559186 - DNA, 25 bp, Homo sapien
caggtcattgatcagacatggtggg

SEQ ID NO: 559187 - DNA, 25 bp, Homo sapien
gataaatttaggtccagagctgtaa

SEQ ID NO: 559188 - DNA, 25 bp, Homo sapien
cttggtgctacgtgataaatttagg

SEQ ID NO: 559189 - DNA, 25 bp, Homo sapien
gagtcatatcaaatggaaccaacca

SEQ ID NO: 559190 - DNA, 25 bp, Homo sapien
tgcttcagtactccagagcaatgcc

SEQ ID NO: 559191 - DNA, 25 bp, Homo sapien
gacgccacttttagtacgtacatat

SEQ ID NO: 559192 - DNA, 25 bp, Homo sapien
ttctggataagggagtagtgagccc

SEQ ID NO: 559193 - DNA, 25 bp, Homo sapien
gatgattcctatgatgtgttcacca

SEQ ID NO: 559194 - DNA, 25 bp, Homo sapien
gactgaagaagtccagtgtgtccag

SEQ ID NO: 559195 - DNA, 25 bp, Homo sapien
taggattttctaggctcggtaggca

SEQ ID NO: 559196 - DNA, 25 bp, Homo sapien
ttattggcctagtaatccttcagaa

SEQ ID NO: 559197 - DNA, 25 bp, Homo sapien
tcagcatggcaggcggttagaagca

SEQ ID NO: 559198 - DNA, 25 bp, Homo sapien
cagcatggcaggcggttagaagcag

SEQ ID NO: 559199 - DNA, 25 bp, Homo sapien
gcatggcaggcggttagaagcaggg

SEQ ID NO: 559200 - DNA, 25 bp, Homo sapien
catggcaggcggttagaagcagggg

SEQ ID NO: 559201 - DNA, 25 bp, Homo sapien
aagtctcctccatgagtcatgatag

SEQ ID NO: 559202 - DNA, 25 bp, Homo sapien
ccatgagtcatgatagccgcaggca

SEQ ID NO: 559203 - DNA, 25 bp, Homo sapien
catgttgtgagaccccagtgaccag

SEQ ID NO: 559204 - DNA, 25 bp, Homo sapien
gacagaaacagttgcgttgcgcatg

SEQ ID NO: 559205 - DNA, 25 bp, Homo sapien
tccctcttctccttgcctctcccac

SEQ ID NO: 559206 - DNA, 25 bp, Homo sapien
cgatttctccctcttctccttgcct

SEQ ID NO: 559207 - DNA, 25 bp, Homo sapien
ttctccctcttctccttgcctctcc

SEQ ID NO: 559208 - DNA, 25 bp, Homo sapien
tttctccctcttctccttgcctctc

SEQ ID NO: 559209 - DNA, 25 bp, Homo sapien
ttttccgaggattctgctggtaacc

SEQ ID NO: 559210 - DNA, 25 bp, Homo sapien
ggtaaccttgttgccgagctcctca

SEQ ID NO: 559211 - DNA, 25 bp, Homo sapien
taccagctctttactgacacgacac

SEQ ID NO: 559212 - DNA, 25 bp, Homo sapien
gacacgacactcagtctctcttgga

SEQ ID NO: 559213 - DNA, 25 bp, Homo sapien
ctcatagaatcgcaagaagattgtc

SEQ ID NO: 559214 - DNA, 25 bp, Homo sapien
gaaagccgtgttcctcatagtctgg

SEQ ID NO: 559215 - DNA, 25 bp, Homo sapien
catagtctgggtctgaaccttcctc

SEQ ID NO: 559216 - DNA, 25 bp, Homo sapien
ttgtcacaaacatgtgcttgccctg

SEQ ID NO: 559217 - DNA, 25 bp, Homo sapien
gggaacctgctagagctgccacaaa

SEQ ID NO: 559218 - DNA, 25 bp, Homo sapien
tgtacaaaagtgagcgcacctgccc

SEQ ID NO: 559219 - DNA, 25 bp, Homo sapien
tctcgtgtttagagtcagcgcctcc

SEQ ID NO: 559220 - DNA, 25 bp, Homo sapien
ggtcctcgggaacactaagctcatg

SEQ ID NO: 559221 - DNA, 25 bp, Homo sapien
aaaaaaattggcatggttgcacgtg

SEQ ID NO: 559222 - DNA, 25 bp, Homo sapien
aaaaaaaaattggcatggttgcacg

SEQ ID NO: 559223 - DNA, 25 bp, Homo sapien
aaaaattggcatggttgcacgtgcc

SEQ ID NO: 559224 - DNA, 25 bp, Homo sapien
aaaattggcatggttgcacgtgcct

SEQ ID NO: 559225 - DNA, 25 bp, Homo sapien
gggcggcattggtggaggctgctct

SEQ ID NO: 559226 - DNA, 25 bp, Homo sapien
ccgggaggcaaaggcgcctcctcat

SEQ ID NO: 559227 - DNA, 25 bp, Homo sapien
ggttccagcaatgcccctacaacat

SEQ ID NO: 559228 - DNA, 25 bp, Homo sapien
cctcctcatgctggctcaagggcgg

SEQ ID NO: 559229 - DNA, 25 bp, Homo sapien
atgactttgtaatttcttgggcttt

SEQ ID NO: 559230 - DNA, 25 bp, Homo sapien
ccactggcagcatgactttgtaatt

SEQ ID NO: 559231 - DNA, 25 bp, Homo sapien
tgaccagttattctcctagggaagg

SEQ ID NO: 559232 - DNA, 25 bp, Homo sapien
tggaaggttctgaggtgttgctgct

SEQ ID NO: 559233 - DNA, 25 bp, Homo sapien
tggctgccaataccaagttcctcct

SEQ ID NO: 559234 - DNA, 25 bp, Homo sapien
gttctggctgccaataccaagttcc

SEQ ID NO: 559235 - DNA, 25 bp, Homo sapien
cacgaggaagctatgtcctggattt

SEQ ID NO: 559236 - DNA, 25 bp, Homo sapien
cctaggtttggttgccacgaggaag

SEQ ID NO: 559237 - DNA, 25 bp, Homo sapien
ggacaccttgatgtcgccatcagag

SEQ ID NO: 559238 - DNA, 25 bp, Homo sapien
caggccacttttgaccttctaattc

SEQ ID NO: 559239 - DNA, 25 bp, Homo sapien
ccaggccacttttgaccttctaatt

SEQ ID NO: 559240 - DNA, 25 bp, Homo sapien
taattcctcttggattgaaacagac

SEQ ID NO: 559241 - DNA, 25 bp, Homo sapien
tctaattcctcttggattgaaacag

SEQ ID NO: 559242 - DNA, 25 bp, Homo sapien
tctccacacttgtttgtgggttcat

SEQ ID NO: 559243 - DNA, 25 bp, Homo sapien
cccaaatccacaatctccacacttg

SEQ ID NO: 559244 - DNA, 25 bp, Homo sapien
tgtctatctctttcctcttcccgtt

SEQ ID NO: 559245 - DNA, 25 bp, Homo sapien
ccgttctttcccaaatccacaatct

SEQ ID NO: 559246 - DNA, 25 bp, Homo sapien
taaacggccactttttgcatccaag

SEQ ID NO: 559247 - DNA, 25 bp, Homo sapien
tcttctggctgggaaaacgcagtct

SEQ ID NO: 559248 - DNA, 25 bp, Homo sapien
gaaacatgccgagtgccaaggaaaa

SEQ ID NO: 559249 - DNA, 25 bp, Homo sapien
ttggattcggtcaccagagaggccc

SEQ ID NO: 559250 - DNA, 25 bp, Homo sapien
cttgcactgtgactcttcagtcacc

SEQ ID NO: 559251 - DNA, 25 bp, Homo sapien
tgcactgtgactcttcagtcaccca

SEQ ID NO: 559252 - DNA, 25 bp, Homo sapien
ctgtgactcttcagtcacccatgtc

SEQ ID NO: 559253 - DNA, 25 bp, Homo sapien
cttcttgcactgtgactcttcagtc

SEQ ID NO: 559254 - DNA, 25 bp, Homo sapien
tggacaaatgccctccgggaaaata

SEQ ID NO: 559255 - DNA, 25 bp, Homo sapien
caagtagctgtgatggtaaataagt

SEQ ID NO: 559256 - DNA, 25 bp, Homo sapien
ttctgattgtttggacaaatgccct

SEQ ID NO: 559257 - DNA, 25 bp, Homo sapien
taaataagtacttctgattgtttgg

SEQ ID NO: 559258 - DNA, 25 bp, Homo sapien
gagaaggttgatatgcccacattat

SEQ ID NO: 559259 - DNA, 25 bp, Homo sapien
agaaggttgatatgcccacattatt

SEQ ID NO: 559260 - DNA, 25 bp, Homo sapien
tgtgagaaggttgatatgcccacat

SEQ ID NO: 559261 - DNA, 25 bp, Homo sapien
tgagaaggttgatatgcccacatta

SEQ ID NO: 559262 - DNA, 25 bp, Homo sapien
ctaacctctccgctgacttttgtca

SEQ ID NO: 559263 - DNA, 25 bp, Homo sapien
acctcagccagccatctgtctcgtc

SEQ ID NO: 559264 - DNA, 25 bp, Homo sapien
tctgtctcgtccctgagagccctaa

SEQ ID NO: 559265 - DNA, 25 bp, Homo sapien
cacactctcgagtcatcagtgccac

SEQ ID NO: 559266 - DNA, 25 bp, Homo sapien
catgccttctccatcggagctggtt

SEQ ID NO: 559267 - DNA, 25 bp, Homo sapien
ccttctccatcggagctggttcatc

SEQ ID NO: 559268 - DNA, 25 bp, Homo sapien
ttctccatcggagctggttcatcac

SEQ ID NO: 559269 - DNA, 25 bp, Homo sapien
tgccttctccatcggagctggttca

SEQ ID NO: 559270 - DNA, 25 bp, Homo sapien
ccccgacttgggagttgtgctgttc

SEQ ID NO: 559271 - DNA, 25 bp, Homo sapien
tgttcgtttgctgtccatcgggctg

SEQ ID NO: 559272 - DNA, 25 bp, Homo sapien
ttggcctgtcttgggcggagtcccc

SEQ ID NO: 559273 - DNA, 25 bp, Homo sapien
tgtccatcgggctgtaagctccttg

SEQ ID NO: 559274 - DNA, 25 bp, Homo sapien
cagttcctgctgcttcgttcgcgga

SEQ ID NO: 559275 - DNA, 25 bp, Homo sapien
tggcttatgcattggagggttcccc

SEQ ID NO: 559276 - DNA, 25 bp, Homo sapien
ttgaaacagcgactgccgcccagtt

SEQ ID NO: 559277 - DNA, 25 bp, Homo sapien
ttcgttcgcggactctgaattccac

SEQ ID NO: 559278 - DNA, 25 bp, Homo sapien
tgtactgtggacttcactgcttgtc

SEQ ID NO: 559279 - DNA, 25 bp, Homo sapien
tcatatggtatcgagagatgctgat

SEQ ID NO: 559280 - DNA, 25 bp, Homo sapien
catttattctgattctcatgggcag

SEQ ID NO: 559281 - DNA, 25 bp, Homo sapien
cacagatgggattgggctggagaga

SEQ ID NO: 559282 - DNA, 25 bp, Homo sapien
ccatccccagacgtccctgctcatt

SEQ ID NO: 559283 - DNA, 25 bp, Homo sapien
cacacactgtctggcttaatcttac

SEQ ID NO: 559284 - DNA, 25 bp, Homo sapien
ctcattcccggagcggcagctccag

SEQ ID NO: 559285 - DNA, 25 bp, Homo sapien
tgaacactcctgttcccacacactg

SEQ ID NO: 559286 - DNA, 25 bp, Homo sapien
tcctgggttcccatctcgggtgatc

SEQ ID NO: 559287 - DNA, 25 bp, Homo sapien
tcgggtgatcaggacaccatcgtgt

SEQ ID NO: 559288 - DNA, 25 bp, Homo sapien
tgggttcccatctcgggtgatcagg

SEQ ID NO: 559289 - DNA, 25 bp, Homo sapien
ggtgatcaggacaccatcgtgtgct

SEQ ID NO: 559290 - DNA, 25 bp, Homo sapien
tacctgggggtcattaacaaggtca

SEQ ID NO: 559291 - DNA, 25 bp, Homo sapien
aaatccttctcaaatctgccgcctt

SEQ ID NO: 559292 - DNA, 25 bp, Homo sapien
gtcttcgtaatgaaatgtacctggg

SEQ ID NO: 559293 - DNA, 25 bp, Homo sapien
tgttaatgaccccaggtacgtttca

SEQ ID NO: 559294 - DNA, 25 bp, Homo sapien
cagactctgtgctagacatgcggga

SEQ ID NO: 559295 - DNA, 25 bp, Homo sapien
cagtgatcagaacagtatctgccca

SEQ ID NO: 559296 - DNA, 25 bp, Homo sapien
tgtgcccagcttaatgatgctatta

SEQ ID NO: 559297 - DNA, 25 bp, Homo sapien
gatgctattaaactacacctgttaa

SEQ ID NO: 559298 - DNA, 25 bp, Homo sapien
tgcccagttgagaacgattgcaaat

SEQ ID NO: 559299 - DNA, 25 bp, Homo sapien
tagaagcaaatttggtgcccaagac

SEQ ID NO: 559300 - DNA, 25 bp, Homo sapien
gcccaagacaggtgccagattttaa

SEQ ID NO: 559301 - DNA, 25 bp, Homo sapien
gacactagcagtatgggtgcccagt

SEQ ID NO: 559302 - DNA, 25 bp, Homo sapien
tccgcattcacatctgaagggaggg

SEQ ID NO: 559303 - DNA, 25 bp, Homo sapien
aaaacacagctgtatagagcaaaac

SEQ ID NO: 559304 - DNA, 25 bp, Homo sapien
tggtggagacacatggctttgcatc

SEQ ID NO: 559305 - DNA, 25 bp, Homo sapien
cgtttgaacctttgatccgcattca

SEQ ID NO: 559306 - DNA, 25 bp, Homo sapien
taaacagattgtagttagatcataa

SEQ ID NO: 559307 - DNA, 25 bp, Homo sapien
gcaattaaggtttgttattgagtga

SEQ ID NO: 559308 - DNA, 25 bp, Homo sapien
tgctttgttttgagcaattaaggtt

SEQ ID NO: 559309 - DNA, 25 bp, Homo sapien
ttgaagcactctaaagagacttagc

SEQ ID NO: 559310 - DNA, 25 bp, Homo sapien
cacagggacgtcatggacaaaagac

SEQ ID NO: 559311 - DNA, 25 bp, Homo sapien
gacaaaagacgaggatgccagttcg

SEQ ID NO: 559312 - DNA, 25 bp, Homo sapien
tgccagttcgatgtgcgagcagaag

SEQ ID NO: 559313 - DNA, 25 bp, Homo sapien
gagtttcctgctattgacctggcgg

SEQ ID NO: 559314 - DNA, 25 bp, Homo sapien
ggataccacttttcctttgctactg

SEQ ID NO: 559315 - DNA, 25 bp, Homo sapien
gatagcctgacaaatggataccact

SEQ ID NO: 559316 - DNA, 25 bp, Homo sapien
tcactgagcattacaccagttttgg

SEQ ID NO: 559317 - DNA, 25 bp, Homo sapien
tagattgcttgagcactttccttgt

SEQ ID NO: 559318 - DNA, 25 bp, Homo sapien
ccactgttcaaggacttcagacagt

SEQ ID NO: 559319 - DNA, 25 bp, Homo sapien
acagtgctgaggtccgagatggtca

SEQ ID NO: 559320 - DNA, 25 bp, Homo sapien
cttatatttactttgcaaccggcca

SEQ ID NO: 559321 - DNA, 25 bp, Homo sapien
tatttactttgcaaccggccactgt

SEQ ID NO: 559322 - DNA, 25 bp, Homo sapien
gtagttctccctgagcagtaactgc

SEQ ID NO: 559323 - DNA, 25 bp, Homo sapien
gctgaagaagaatgtctctgcagta

SEQ ID NO: 559324 - DNA, 25 bp, Homo sapien
tgagcagtaactgcttggtaccttt

SEQ ID NO: 559325 - DNA, 25 bp, Homo sapien
gtggctgaagaagaatgtctctgca

SEQ ID NO: 559326 - DNA, 25 bp, Homo sapien
aggcccagaagtgcacgtgaagagt

SEQ ID NO: 559327 - DNA, 25 bp, Homo sapien
ccagaagtgcacgtgaagagtggta

SEQ ID NO: 559328 - DNA, 25 bp, Homo sapien
atatttttgaggcaacaaggcccag

SEQ ID NO: 559329 - DNA, 25 bp, Homo sapien
tttgaggcaacaaggcccagaagtg

SEQ ID NO: 559330 - DNA, 25 bp, Homo sapien
cagagctttctctagccatttgcaa

SEQ ID NO: 559331 - DNA, 25 bp, Homo sapien
tgagagcctaccttcaattgcatgg

SEQ ID NO: 559332 - DNA, 25 bp, Homo sapien
gggcatggagacacgtgaagaacat

SEQ ID NO: 559333 - DNA, 25 bp, Homo sapien
gcccggccaggtccttagctttgaa

SEQ ID NO: 559334 - DNA, 25 bp, Homo sapien
tttttaatttctagagcaccatttg

SEQ ID NO: 559335 - DNA, 25 bp, Homo sapien
gcaagtcttcgatgatgcagtccac

SEQ ID NO: 559336 - DNA, 25 bp, Homo sapien
tataaacatcgtcttcctccacaca

SEQ ID NO: 559337 - DNA, 25 bp, Homo sapien
ggttagtatctgacacccattttta

SEQ ID NO: 559338 - DNA, 25 bp, Homo sapien
caagttagaaggtacataacttagc

SEQ ID NO: 559339 - DNA, 25 bp, Homo sapien
tcaagttagaaggtacataacttag

SEQ ID NO: 559340 - DNA, 25 bp, Homo sapien
tgttttgtgaatcaagttagaaggt

SEQ ID NO: 559341 - DNA, 25 bp, Homo sapien
tttgtgaatcaagttagaaggtaca

SEQ ID NO: 559342 - DNA, 25 bp, Homo sapien
tgttcaccagggcagattggttatg

SEQ ID NO: 559343 - DNA, 25 bp, Homo sapien
taccagtccgatgatgcagtgaaca

SEQ ID NO: 559344 - DNA, 25 bp, Homo sapien
ttctgcaaaatctaccagtccgatg

SEQ ID NO: 559345 - DNA, 25 bp, Homo sapien
gattggttatgttcaacagcttcat

SEQ ID NO: 559346 - DNA, 25 bp, Homo sapien
accagcaccacctcccctctgagca

SEQ ID NO: 559347 - DNA, 25 bp, Homo sapien
cggctcggcccagcaccagcaccac

SEQ ID NO: 559348 - DNA, 25 bp, Homo sapien
agcaccagcaccacctcccctctga

SEQ ID NO: 559349 - DNA, 25 bp, Homo sapien
ccagcaccacctcccctctgagcat

SEQ ID NO: 559350 - DNA, 25 bp, Homo sapien
tggccttgctgataacacagtgaca

SEQ ID NO: 559351 - DNA, 25 bp, Homo sapien
gccttgctgataacacagtgacaca

SEQ ID NO: 559352 - DNA, 25 bp, Homo sapien
ctggtggccttgctgataacacagt

SEQ ID NO: 559353 - DNA, 25 bp, Homo sapien
ggtggccttgctgataacacagtga

SEQ ID NO: 559354 - DNA, 25 bp, Homo sapien
tccttctatagcagaaacatctttg

SEQ ID NO: 559355 - DNA, 25 bp, Homo sapien
ccttctatagcagaaacatctttgg

SEQ ID NO: 559356 - DNA, 25 bp, Homo sapien
ttccttctatagcagaaacatcttt

SEQ ID NO: 559357 - DNA, 25 bp, Homo sapien
atgactaagcccaggaacaatgcaa

SEQ ID NO: 559358 - DNA, 25 bp, Homo sapien
gatcatgactaagcccaggaacaat

SEQ ID NO: 559359 - DNA, 25 bp, Homo sapien
atgcaaatggaattgccccctgatg

SEQ ID NO: 559360 - DNA, 25 bp, Homo sapien
gcaaatggaattgccccctgatggg

SEQ ID NO: 559361 - DNA, 25 bp, Homo sapien
ttcttgcgggaagggaaagtcgcat

SEQ ID NO: 559362 - DNA, 25 bp, Homo sapien
tcggctaagcattcagagttctttg

SEQ ID NO: 559363 - DNA, 25 bp, Homo sapien
catgtagtttggtcatttggcgcca

SEQ ID NO: 559364 - DNA, 25 bp, Homo sapien
gttaaatccactaaaggcagtcatg

SEQ ID NO: 559365 - DNA, 25 bp, Homo sapien
ttaggaagcaccgtaataccgcaca

SEQ ID NO: 559366 - DNA, 25 bp, Homo sapien
cagcttggaggttaagatagaattg

SEQ ID NO: 559367 - DNA, 25 bp, Homo sapien
gcttggaggttaagatagaattgga

SEQ ID NO: 559368 - DNA, 25 bp, Homo sapien
aagcaccgtaataccgcacagcttg

SEQ ID NO: 559369 - DNA, 25 bp, Homo sapien
agtgttccggttctatttatcttca

SEQ ID NO: 559370 - DNA, 25 bp, Homo sapien
catcagttgatggaatcatcagtgt

SEQ ID NO: 559371 - DNA, 25 bp, Homo sapien
gatggaatcatcagtgttccggttc

SEQ ID NO: 559372 - DNA, 25 bp, Homo sapien
gaatcatcagtgttccggttctatt

SEQ ID NO: 559373 - DNA, 25 bp, Homo sapien
tatttagacagaccttcctgtcatt

SEQ ID NO: 559374 - DNA, 25 bp, Homo sapien
ccttcctgtcatttatctgactcac

SEQ ID NO: 559375 - DNA, 25 bp, Homo sapien
ctggtatttagacagaccttcctgt

SEQ ID NO: 559376 - DNA, 25 bp, Homo sapien
catttatctgactcacaggcacaac

SEQ ID NO: 559377 - DNA, 25 bp, Homo sapien
aaaaacccctcatcgcaaatagctg

SEQ ID NO: 559378 - DNA, 25 bp, Homo sapien
cactgagacctaccgtgttttgttt

SEQ ID NO: 559379 - DNA, 25 bp, Homo sapien
gctgtcagcctcctatgtgaacaaa

SEQ ID NO: 559380 - DNA, 25 bp, Homo sapien
aaaagcgctctctcacactgagacc

SEQ ID NO: 559381 - DNA, 25 bp, Homo sapien
ccacctctataaatggctgtttttc

SEQ ID NO: 559382 - DNA, 25 bp, Homo sapien
atccatcagggccacctctataaat

SEQ ID NO: 559383 - DNA, 25 bp, Homo sapien
tggttccagcaggttccatctccat

SEQ ID NO: 559384 - DNA, 25 bp, Homo sapien
acatttggttccagcaggttccatc

SEQ ID NO: 559385 - DNA, 25 bp, Homo sapien
catgttcgcgaagtccttggcctca

SEQ ID NO: 559386 - DNA, 25 bp, Homo sapien
cagcatgttcgcgaagtccttggcc

SEQ ID NO: 559387 - DNA, 25 bp, Homo sapien
gcatgttcgcgaagtccttggcctc

SEQ ID NO: 559388 - DNA, 25 bp, Homo sapien
tcagcatgttcgcgaagtccttggc

SEQ ID NO: 559389 - DNA, 25 bp, Homo sapien
tctccactcagaggaagttgacgtt

SEQ ID NO: 559390 - DNA, 25 bp, Homo sapien
cgtcgatgtcagttttccagtgtga

SEQ ID NO: 559391 - DNA, 25 bp, Homo sapien
catcccagcatggtgcaaagttaga

SEQ ID NO: 559392 - DNA, 25 bp, Homo sapien
gagcccaggccggttgtcacttcat

SEQ ID NO: 559393 - DNA, 25 bp, Homo sapien
attaagatgctccttggaaaatagc

SEQ ID NO: 559394 - DNA, 25 bp, Homo sapien
tggatttatatctaagcacgttgct

SEQ ID NO: 559395 - DNA, 25 bp, Homo sapien
tgctctgctacataagaagctgaca

SEQ ID NO: 559396 - DNA, 25 bp, Homo sapien
ggctccatctcctttactgtggtca

SEQ ID NO: 559397 - DNA, 25 bp, Homo sapien
ggaaccacgtgaatacagtatcttt

SEQ ID NO: 559398 - DNA, 25 bp, Homo sapien
tcggaaccacgtgaatacagtatct

SEQ ID NO: 559399 - DNA, 25 bp, Homo sapien
tttcggaaccacgtgaatacagtat

SEQ ID NO: 559400 - DNA, 25 bp, Homo sapien
ctttcggaaccacgtgaatacagta

SEQ ID NO: 559401 - DNA, 25 bp, Homo sapien
cgcaaggatgcattctggacgaggc

SEQ ID NO: 559402 - DNA, 25 bp, Homo sapien
ggcccagagcaatgtcgcaaggatg

SEQ ID NO: 559403 - DNA, 25 bp, Homo sapien
gcacatggcatttgttcttctcagg

SEQ ID NO: 559404 - DNA, 25 bp, Homo sapien
tcagggaccgtctgctgtgtttctc

SEQ ID NO: 559405 - DNA, 25 bp, Homo sapien
ttcatcaagggcggagagaaaagac

SEQ ID NO: 559406 - DNA, 25 bp, Homo sapien
cattcatcatgatggttacaggttt

SEQ ID NO: 559407 - DNA, 25 bp, Homo sapien
aattctcctccgtgtcacttggctg

SEQ ID NO: 559408 - DNA, 25 bp, Homo sapien
gatggttacaggtttcagtgatctt

SEQ ID NO: 559409 - DNA, 25 bp, Homo sapien
gcaccctcccttgataagagcctgg

SEQ ID NO: 559410 - DNA, 25 bp, Homo sapien
ggagttgagcacgagcagaacgcac

SEQ ID NO: 559411 - DNA, 25 bp, Homo sapien
agaacgcaccgagttacacacacag

SEQ ID NO: 559412 - DNA, 25 bp, Homo sapien
cagagcaattaatggcagctccgac

SEQ ID NO: 559413 - DNA, 25 bp, Homo sapien
ttactcatttgatgcaggagggtcg

SEQ ID NO: 559414 - DNA, 25 bp, Homo sapien
aatgcaaggtctgttcggtatccgt

SEQ ID NO: 559415 - DNA, 25 bp, Homo sapien
cattgtggtgtttgcgtaaatcccc

SEQ ID NO: 559416 - DNA, 25 bp, Homo sapien
tctgatggactggaacggctcccgg

SEQ ID NO: 559417 - DNA, 25 bp, Homo sapien
atgcgcacgaaggcaacaggttaaa

SEQ ID NO: 559418 - DNA, 25 bp, Homo sapien
gtagatgggttgattttcatgaatg

SEQ ID NO: 559419 - DNA, 25 bp, Homo sapien
gatgggttgattttcatgaatgtat

SEQ ID NO: 559420 - DNA, 25 bp, Homo sapien
gagtgtagatgggttgattttcatg

SEQ ID NO: 559421 - DNA, 25 bp, Homo sapien
tgaatagattactcgggccttcccc

SEQ ID NO: 559422 - DNA, 25 bp, Homo sapien
aattgtgtgattgatagatttcccc

SEQ ID NO: 559423 - DNA, 25 bp, Homo sapien
gggtcggtgtgttctttctgaagca

SEQ ID NO: 559424 - DNA, 25 bp, Homo sapien
catgccaggctcattgtcataatta

SEQ ID NO: 559425 - DNA, 25 bp, Homo sapien
ttaactgaatcaagcctgcctccac

SEQ ID NO: 559426 - DNA, 25 bp, Homo sapien
tacttcctacagtggatttctctcg

SEQ ID NO: 559427 - DNA, 25 bp, Homo sapien
cacagaattggcgtggtaattgctg

SEQ ID NO: 559428 - DNA, 25 bp, Homo sapien
taaaatccgaggattgtggtcctct

SEQ ID NO: 559429 - DNA, 25 bp, Homo sapien
taaagacagcaattttcgacatatt

SEQ ID NO: 559430 - DNA, 25 bp, Homo sapien
gacagcaattttcgacatattcaag

SEQ ID NO: 559431 - DNA, 25 bp, Homo sapien
gcaattttcgacatattcaagacag

SEQ ID NO: 559432 - DNA, 25 bp, Homo sapien
cgacatattcaagacagttgttcct

SEQ ID NO: 559433 - DNA, 25 bp, Homo sapien
gttggccccacgtcagcgtggccag

SEQ ID NO: 559434 - DNA, 25 bp, Homo sapien
gccactgttggagctgctgatcttt

SEQ ID NO: 559435 - DNA, 25 bp, Homo sapien
tggtcccacatcagcgtggccggtg

SEQ ID NO: 559436 - DNA, 25 bp, Homo sapien
agtgctgcgacccagttgctggctg

SEQ ID NO: 559437 - DNA, 25 bp, Homo sapien
gctgggatttgatagtcgaggcctt

SEQ ID NO: 559438 - DNA, 25 bp, Homo sapien
tctctgaataataaccagggcccat

SEQ ID NO: 559439 - DNA, 25 bp, Homo sapien
tagtcgaggccttcagtcctaacca

SEQ ID NO: 559440 - DNA, 25 bp, Homo sapien
gaataataaccagggcccatacacg

SEQ ID NO: 559441 - DNA, 25 bp, Homo sapien
ctcctttccagggaagtggcaagat

SEQ ID NO: 559442 - DNA, 25 bp, Homo sapien
ttccagggaagtggcaagatttttg

SEQ ID NO: 559443 - DNA, 25 bp, Homo sapien
gatttttggagctggcgagtctggg

SEQ ID NO: 559444 - DNA, 25 bp, Homo sapien
gcaagatttttggagctggcgagtc

SEQ ID NO: 559445 - DNA, 25 bp, Homo sapien
tggttgtttctccttgaagcataga

SEQ ID NO: 559446 - DNA, 25 bp, Homo sapien
actggttgtttctccttgaagcata

SEQ ID NO: 559447 - DNA, 25 bp, Homo sapien
ctggttgtttctccttgaagcatag

SEQ ID NO: 559448 - DNA, 25 bp, Homo sapien
gactggttgtttctccttgaagcat

SEQ ID NO: 559449 - DNA, 25 bp, Homo sapien
tatgacttaacgagctggaaagtcc

SEQ ID NO: 559450 - DNA, 25 bp, Homo sapien
gaaagtccacacgtatagattctgc

SEQ ID NO: 559451 - DNA, 25 bp, Homo sapien
tttttgattcgtagacaggtcgccc

SEQ ID NO: 559452 - DNA, 25 bp, Homo sapien
ggtatcattagcgacttgacgccca

SEQ ID NO: 559453 - DNA, 25 bp, Homo sapien
tcaatggcaggaattgaaggaccca

SEQ ID NO: 559454 - DNA, 25 bp, Homo sapien
ggcgtgcacacagctggatcaatgg

SEQ ID NO: 559455 - DNA, 25 bp, Homo sapien
ctggcagcatttaacggcgtgcaca

SEQ ID NO: 559456 - DNA, 25 bp, Homo sapien
tggagaattccaggaaagcatcagg

SEQ ID NO: 559457 - DNA, 25 bp, Homo sapien
actagaaggagagagtgacaagaac

SEQ ID NO: 559458 - DNA, 25 bp, Homo sapien
aggccactagaaggagagagtgaca

SEQ ID NO: 559459 - DNA, 25 bp, Homo sapien
tagaaggagagagtgacaagaacat

SEQ ID NO: 559460 - DNA, 25 bp, Homo sapien
gccactagaaggagagagtgacaag

SEQ ID NO: 559461 - DNA, 25 bp, Homo sapien
tggcacggcagaccccaaccttcat

SEQ ID NO: 559462 - DNA, 25 bp, Homo sapien
agtttggcacggcagaccccaacct

SEQ ID NO: 559463 - DNA, 25 bp, Homo sapien
acggcagaccccaaccttcatccat

SEQ ID NO: 559464 - DNA, 25 bp, Homo sapien
ggcagtttggcacggcagaccccaa

SEQ ID NO: 559465 - DNA, 25 bp, Homo sapien
tgtgccccacgttgatgcagagctc

SEQ ID NO: 559466 - DNA, 25 bp, Homo sapien
tgccaaagggtcagtcgaaacttct

SEQ ID NO: 559467 - DNA, 25 bp, Homo sapien
cccatgaagtctcccagagggtgag

SEQ ID NO: 559468 - DNA, 25 bp, Homo sapien
gaatggatagcatgccactgttgcc

SEQ ID NO: 559469 - DNA, 25 bp, Homo sapien
tctagtcactgtcactgtcctgcat

SEQ ID NO: 559470 - DNA, 25 bp, Homo sapien
tgcctctctagtcactgtcactgtc

SEQ ID NO: 559471 - DNA, 25 bp, Homo sapien
tagtcactgtcactgtcctgcatgt

SEQ ID NO: 559472 - DNA, 25 bp, Homo sapien
gtcactgtcactgtcctgcatgttc

SEQ ID NO: 559473 - DNA, 25 bp, Homo sapien
caattgtattcatacgctgtagaca

SEQ ID NO: 559474 - DNA, 25 bp, Homo sapien
ctgctgcaattgtattcatacgctg

SEQ ID NO: 559475 - DNA, 25 bp, Homo sapien
tattcatacgctgtagacagtgctg

SEQ ID NO: 559476 - DNA, 25 bp, Homo sapien
actcaagcacagaacagattttgga

SEQ ID NO: 559477 - DNA, 25 bp, Homo sapien
cttccttctccggaacggtgactgc

SEQ ID NO: 559478 - DNA, 25 bp, Homo sapien
cggtgactgccgtgactgggcttct

SEQ ID NO: 559479 - DNA, 25 bp, Homo sapien
tccggaacggtgactgccgtgactg

SEQ ID NO: 559480 - DNA, 25 bp, Homo sapien
gccgtgactgggcttctgccacctg

SEQ ID NO: 559481 - DNA, 25 bp, Homo sapien
cccaatcacgtgtcttgcaggaaag

SEQ ID NO: 559482 - DNA, 25 bp, Homo sapien
tatccccagacttggatatagttcc

SEQ ID NO: 559483 - DNA, 25 bp, Homo sapien
agcagctgatatccccagacttgga

SEQ ID NO: 559484 - DNA, 25 bp, Homo sapien
caggaaagcgtctctagcagctgat

SEQ ID NO: 559485 - DNA, 25 bp, Homo sapien
agtagcagctgtgctaccacttagg

SEQ ID NO: 559486 - DNA, 25 bp, Homo sapien
ctgggttccgaagccatccttatct

SEQ ID NO: 559487 - DNA, 25 bp, Homo sapien
ttatctgggttccgaagccatcctt

SEQ ID NO: 559488 - DNA, 25 bp, Homo sapien
tatctgggttccgaagccatcctta

SEQ ID NO: 559489 - DNA, 25 bp, Homo sapien
gcaccgatttctgatgtaactccat

SEQ ID NO: 559490 - DNA, 25 bp, Homo sapien
aatatgccaagtaatgcaccgattt

SEQ ID NO: 559491 - DNA, 25 bp, Homo sapien
cttgctgggccacagtaaaaatatg

SEQ ID NO: 559492 - DNA, 25 bp, Homo sapien
caagcacggatgataaaaaagactg

SEQ ID NO: 559493 - DNA, 25 bp, Homo sapien
acactgggtgaggccaagaaagtag

SEQ ID NO: 559494 - DNA, 25 bp, Homo sapien
gacactgggtgaggccaagaaagta

SEQ ID NO: 559495 - DNA, 25 bp, Homo sapien
actgggtgaggccaagaaagtaggc

SEQ ID NO: 559496 - DNA, 25 bp, Homo sapien
ctgggtgaggccaagaaagtaggca

SEQ ID NO: 559497 - DNA, 25 bp, Homo sapien
tattgagtgctatggcattctatag

SEQ ID NO: 559498 - DNA, 25 bp, Homo sapien
aatgtgccaacgttgcagcaagatt

SEQ ID NO: 559499 - DNA, 25 bp, Homo sapien
gtgccaacgttgcagcaagatttga

SEQ ID NO: 559500 - DNA, 25 bp, Homo sapien
cacaatagcatgagaagtcaatcat

SEQ ID NO: 559501 - DNA, 25 bp, Homo sapien
cacacaatagcatgagaagtcaatc

SEQ ID NO: 559502 - DNA, 25 bp, Homo sapien
ccttttttatgagggatgatctgct

SEQ ID NO: 559503 - DNA, 25 bp, Homo sapien
tgacttgttggctcagtacagcaca

SEQ ID NO: 559504 - DNA, 25 bp, Homo sapien
tctctgggatgagaacgccatgact

SEQ ID NO: 559505 - DNA, 25 bp, Homo sapien
tctgcacacgctgagagcacatcgt

SEQ ID NO: 559506 - DNA, 25 bp, Homo sapien
caattgtccgtgactgtgttccgta

SEQ ID NO: 559507 - DNA, 25 bp, Homo sapien
tacgtgtgagccttttcaattgtcc

SEQ ID NO: 559508 - DNA, 25 bp, Homo sapien
tgcccttctgtctggcttgggtgga

SEQ ID NO: 559509 - DNA, 25 bp, Homo sapien
cagggtctgggttccgtgagtcatt

SEQ ID NO: 559510 - DNA, 25 bp, Homo sapien
ggcagggcaatcaagcttggcttct

SEQ ID NO: 559511 - DNA, 25 bp, Homo sapien
gggcagggcaatcaagcttggcttc

SEQ ID NO: 559512 - DNA, 25 bp, Homo sapien
cagggcagggcaatcaagcttggct

SEQ ID NO: 559513 - DNA, 25 bp, Homo sapien
ccagggcagggcaatcaagcttggc

SEQ ID NO: 559514 - DNA, 25 bp, Homo sapien
cgagtaggtcctgtcccataataga

SEQ ID NO: 559515 - DNA, 25 bp, Homo sapien
cagctttaaggtgctccaagaggac

SEQ ID NO: 559516 - DNA, 25 bp, Homo sapien
cacagcctgggagggcatacgagta

SEQ ID NO: 559517 - DNA, 25 bp, Homo sapien
cagtgcctggttcacgcagctttaa

SEQ ID NO: 559518 - DNA, 25 bp, Homo sapien
ggagcctcaaagtcagcattgcagg

SEQ ID NO: 559519 - DNA, 25 bp, Homo sapien
gcattgcagggaacactcattcccc

SEQ ID NO: 559520 - DNA, 25 bp, Homo sapien
aggagcctcaaagtcagcattgcag

SEQ ID NO: 559521 - DNA, 25 bp, Homo sapien
caggagcctcaaagtcagcattgca

SEQ ID NO: 559522 - DNA, 25 bp, Homo sapien
tgttctcggtcctctgcagcctgat

SEQ ID NO: 559523 - DNA, 25 bp, Homo sapien
cccacaggcagtgtgactgattccc

SEQ ID NO: 559524 - DNA, 25 bp, Homo sapien
tgatgcacccagtggctatcctggc

SEQ ID NO: 559525 - DNA, 25 bp, Homo sapien
cttcctcgagggtgtgggctgccca

SEQ ID NO: 559526 - DNA, 25 bp, Homo sapien
taccctctatgagcggctgattcat

SEQ ID NO: 559527 - DNA, 25 bp, Homo sapien
gtcgcctctaccctctatgagcggc

SEQ ID NO: 559528 - DNA, 25 bp, Homo sapien
tgccactactctgttctcaccgtcg

SEQ ID NO: 559529 - DNA, 25 bp, Homo sapien
tactctgttctcaccgtcgcctcta

SEQ ID NO: 559530 - DNA, 25 bp, Homo sapien
tcacagtctacaattgtttattggc

SEQ ID NO: 559531 - DNA, 25 bp, Homo sapien
cacataaagcatattcagtaaatat

SEQ ID NO: 559532 - DNA, 25 bp, Homo sapien
cctaaaatggtagctgacacataaa

SEQ ID NO: 559533 - DNA, 25 bp, Homo sapien
tattggcttacttgtttcttagctg

SEQ ID NO: 559534 - DNA, 25 bp, Homo sapien
tgaatgcggcaactttgggaacacc

SEQ ID NO: 559535 - DNA, 25 bp, Homo sapien
tttcagagtaaacagggtgcctggc

SEQ ID NO: 559536 - DNA, 25 bp, Homo sapien
ttgatgccgctctaatccctggaag

SEQ ID NO: 559537 - DNA, 25 bp, Homo sapien
tatccgacagtagaattgatgccgc

SEQ ID NO: 559538 - DNA, 25 bp, Homo sapien
gtcaccctgagagcccttctgagag

SEQ ID NO: 559539 - DNA, 25 bp, Homo sapien
tagtcgtagcaggtcaccctgagag

SEQ ID NO: 559540 - DNA, 25 bp, Homo sapien
tagcaggtcaccctgagagcccttc

SEQ ID NO: 559541 - DNA, 25 bp, Homo sapien
ctcccaatagtcgtagcaggtcacc

SEQ ID NO: 559542 - DNA, 25 bp, Homo sapien
tttctggggacaattcaaatactga

SEQ ID NO: 559543 - DNA, 25 bp, Homo sapien
attcaaatactgaagcagactttca

SEQ ID NO: 559544 - DNA, 25 bp, Homo sapien
ctgaagcagactttcagcctttcag

SEQ ID NO: 559545 - DNA, 25 bp, Homo sapien
catatagtttttctggggacaattc

SEQ ID NO: 559546 - DNA, 25 bp, Homo sapien
tatttggtggacaggaaatgtgtag

SEQ ID NO: 559547 - DNA, 25 bp, Homo sapien
gactctgaatccacataacagtttc

SEQ ID NO: 559548 - DNA, 25 bp, Homo sapien
gatagaataatggtgctcagactct

SEQ ID NO: 559549 - DNA, 25 bp, Homo sapien
ttcagactggatgactcctttcaaa

SEQ ID NO: 559550 - DNA, 25 bp, Homo sapien
gagcattgaaacgtggccagcacaa

SEQ ID NO: 559551 - DNA, 25 bp, Homo sapien
gaggtctgcgttgcccagtgccacg

SEQ ID NO: 559552 - DNA, 25 bp, Homo sapien
agtgccacggccactatgacatgtg

SEQ ID NO: 559553 - DNA, 25 bp, Homo sapien
ctgctgaatgcacccgatgtgtgag

SEQ ID NO: 559554 - DNA, 25 bp, Homo sapien
taatcctgagaccatgtgcttgatc

SEQ ID NO: 559555 - DNA, 25 bp, Homo sapien
tgtctacgacgaatggtatttgcct

SEQ ID NO: 559556 - DNA, 25 bp, Homo sapien
cctccggagttgcaggtttttgtgc

SEQ ID NO: 559557 - DNA, 25 bp, Homo sapien
caagattcacggttatgtctacgac

SEQ ID NO: 559558 - DNA, 25 bp, Homo sapien
tgaaatatgagcaagtcacacaggg

SEQ ID NO: 559559 - DNA, 25 bp, Homo sapien
cactatttgaaatatgagcaagtca

SEQ ID NO: 559560 - DNA, 25 bp, Homo sapien
tatttgaaatatgagcaagtcacac

SEQ ID NO: 559561 - DNA, 25 bp, Homo sapien
tccactatttgaaatatgagcaagt

SEQ ID NO: 559562 - DNA, 25 bp, Homo sapien
attgttgcagctaggacccaccaag

SEQ ID NO: 559563 - DNA, 25 bp, Homo sapien
gttcccagaggagcacccattgttg

SEQ ID NO: 559564 - DNA, 25 bp, Homo sapien
ggatcctcattctgtgaagacacca

SEQ ID NO: 559565 - DNA, 25 bp, Homo sapien
aaaggaaggtgggagctagccccat

SEQ ID NO: 559566 - DNA, 25 bp, Homo sapien
tttaagtgaagcattccccattggg

SEQ ID NO: 559567 - DNA, 25 bp, Homo sapien
tctttttatgaggaactttaactgc

SEQ ID NO: 559568 - DNA, 25 bp, Homo sapien
gaggaactttaactgctggacttaa

SEQ ID NO: 559569 - DNA, 25 bp, Homo sapien
tttgtacatactcccagaagcccca

SEQ ID NO: 559570 - DNA, 25 bp, Homo sapien
gcaggcatctctcggtcatcctggg

SEQ ID NO: 559571 - DNA, 25 bp, Homo sapien
agcgcaggcatctctcggtcatcct

SEQ ID NO: 559572 - DNA, 25 bp, Homo sapien
tcatccccgggacggtcatccccag

SEQ ID NO: 559573 - DNA, 25 bp, Homo sapien
gcacagcgcaggcatctctcggtca

SEQ ID NO: 559574 - DNA, 25 bp, Homo sapien
cccagccactcttcctcggcccagc

SEQ ID NO: 559575 - DNA, 25 bp, Homo sapien
acacccagccactcttcctcggccc

SEQ ID NO: 559576 - DNA, 25 bp, Homo sapien
tgaggcaaacatcacacccagccac

SEQ ID NO: 559577 - DNA, 25 bp, Homo sapien
ctgaggcaaacatcacacccagcca

SEQ ID NO: 559578 - DNA, 25 bp, Homo sapien
acaccccaacactgggctgcaggag

SEQ ID NO: 559579 - DNA, 25 bp, Homo sapien
cccaacactgggctgcaggaggatc

SEQ ID NO: 559580 - DNA, 25 bp, Homo sapien
caccccaacactgggctgcaggagg

SEQ ID NO: 559581 - DNA, 25 bp, Homo sapien
gtctcctacaccccaacactgggct

SEQ ID NO: 559582 - DNA, 25 bp, Homo sapien
agcgttgtagctcatattttggcaa

SEQ ID NO: 559583 - DNA, 25 bp, Homo sapien
gatttagtaaaatgatcagtccgta

SEQ ID NO: 559584 - DNA, 25 bp, Homo sapien
ccgtagcgttgtagctcatattttg

SEQ ID NO: 559585 - DNA, 25 bp, Homo sapien
aaaatgatcagtccgtagcgttgta

SEQ ID NO: 559586 - DNA, 25 bp, Homo sapien
cgattctcccgccacaggctcccaa

SEQ ID NO: 559587 - DNA, 25 bp, Homo sapien
gtgatctgcctgccttggcgtccca

SEQ ID NO: 559588 - DNA, 25 bp, Homo sapien
atctgcctgccttggcgtcccaaag

SEQ ID NO: 559589 - DNA, 25 bp, Homo sapien
gcgattctcccgccacaggctccca

SEQ ID NO: 559590 - DNA, 25 bp, Homo sapien
catcatccagcgggaagcttggcat

SEQ ID NO: 559591 - DNA, 25 bp, Homo sapien
tctccacggccttcatcatccagcg

SEQ ID NO: 559592 - DNA, 25 bp, Homo sapien
cttcatcatccagcgggaagcttgg

SEQ ID NO: 559593 - DNA, 25 bp, Homo sapien
ttctaacccctctggcatcttcgtt

SEQ ID NO: 559594 - DNA, 25 bp, Homo sapien
tccctctagtgtaatctgcacttgg

SEQ ID NO: 559595 - DNA, 25 bp, Homo sapien
gcctggctccctctagtgtaatctg

SEQ ID NO: 559596 - DNA, 25 bp, Homo sapien
cggcctggctccctctagtgtaatc

SEQ ID NO: 559597 - DNA, 25 bp, Homo sapien
tctagtgtaatctgcacttggtata

SEQ ID NO: 559598 - DNA, 25 bp, Homo sapien
cacacaggtgttggtcctgaacaac

SEQ ID NO: 559599 - DNA, 25 bp, Homo sapien
gagtgaagaagagcgtgggcgtgct

SEQ ID NO: 559600 - DNA, 25 bp, Homo sapien
agatgtcactggagtgagtggaagt

SEQ ID NO: 559601 - DNA, 25 bp, Homo sapien
gagcgtgggcgtgctgggagagggt

SEQ ID NO: 559602 - DNA, 25 bp, Homo sapien
cagcttccgatctccccgcctttcc

SEQ ID NO: 559603 - DNA, 25 bp, Homo sapien
ctgtaccgccgtcccaggctccgtg

SEQ ID NO: 559604 - DNA, 25 bp, Homo sapien
tgtgctcacactcatgtgtcgtgtc

SEQ ID NO: 559605 - DNA, 25 bp, Homo sapien
tttcccaaatatgcacgccctgtac

SEQ ID NO: 559606 - DNA, 25 bp, Homo sapien
tactcaaaataaccgaaagcaggga

SEQ ID NO: 559607 - DNA, 25 bp, Homo sapien
gctttggagaatagtatggcagctc

SEQ ID NO: 559608 - DNA, 25 bp, Homo sapien
ctgctttggagaatagtatggcagc

SEQ ID NO: 559609 - DNA, 25 bp, Homo sapien
tttggagaatagtatggcagctcct

SEQ ID NO: 559610 - DNA, 25 bp, Homo sapien
ccctgtcggtgaagaggctgtttcg

SEQ ID NO: 559611 - DNA, 25 bp, Homo sapien
aaaagtactcaatggccactggcag

SEQ ID NO: 559612 - DNA, 25 bp, Homo sapien
tgttggaatcacaaccgccactttc

SEQ ID NO: 559613 - DNA, 25 bp, Homo sapien
tcctgtaggtgcacaaaaagtactc

SEQ ID NO: 559614 - DNA, 25 bp, Homo sapien
tgacaatggatacccttttgccggc

SEQ ID NO: 559615 - DNA, 25 bp, Homo sapien
tggcggctgttggacacaagacatc

SEQ ID NO: 559616 - DNA, 25 bp, Homo sapien
aaaatgtgttctgccgcgtttccag

SEQ ID NO: 559617 - DNA, 25 bp, Homo sapien
tgcggtaccaatacgcctgtgacaa

SEQ ID NO: 559618 - DNA, 25 bp, Homo sapien
tgacacagcccagtgactcacgcgg

SEQ ID NO: 559619 - DNA, 25 bp, Homo sapien
tactgacacagcccagtgactcacg

SEQ ID NO: 559620 - DNA, 25 bp, Homo sapien
gacacagcccagtgactcacgcggg

SEQ ID NO: 559621 - DNA, 25 bp, Homo sapien
tctcgtactgacacagcccagtgac

SEQ ID NO: 559622 - DNA, 25 bp, Homo sapien
ctgggcaaaaacatgtcaccagaga

SEQ ID NO: 559623 - DNA, 25 bp, Homo sapien
cagcaaggccgtcagaaccacccat

SEQ ID NO: 559624 - DNA, 25 bp, Homo sapien
tcaccagagaaggaacactgggcag

SEQ ID NO: 559625 - DNA, 25 bp, Homo sapien
caggatgttgccactgccagcaagg

SEQ ID NO: 559626 - DNA, 25 bp, Homo sapien
tcaagaacacgattaagagcccagg

SEQ ID NO: 559627 - DNA, 25 bp, Homo sapien
tagcctgagctagggaaagtgttag

SEQ ID NO: 559628 - DNA, 25 bp, Homo sapien
cccagggtggaatcaagctgaagaa

SEQ ID NO: 559629 - DNA, 25 bp, Homo sapien
aagcttctgctatcttctggtcaag

SEQ ID NO: 559630 - DNA, 25 bp, Homo sapien
tctcgcctattcctcccgggaggag

SEQ ID NO: 559631 - DNA, 25 bp, Homo sapien
gtgcgcgagcctggacgttcccctt

SEQ ID NO: 559632 - DNA, 25 bp, Homo sapien
gcacgcccagcgagggccgagttct

SEQ ID NO: 559633 - DNA, 25 bp, Homo sapien
ccccttttgtgctcgttttgcaggc

SEQ ID NO: 559634 - DNA, 25 bp, Homo sapien
tgctcgcgctgacttctcggagcgc

SEQ ID NO: 559635 - DNA, 25 bp, Homo sapien
agctgctcgcgctgacttctcggag

SEQ ID NO: 559636 - DNA, 25 bp, Homo sapien
tgacttctcggagcgcccggctggc

SEQ ID NO: 559637 - DNA, 25 bp, Homo sapien
gtgaagtcacagctgctcgcgctga

SEQ ID NO: 559638 - DNA, 25 bp, Homo sapien
gccctgtcgccagctcccgagggcc

SEQ ID NO: 559639 - DNA, 25 bp, Homo sapien
tcccgagggcctctccaaagggatc

SEQ ID NO: 559640 - DNA, 25 bp, Homo sapien
acgccactcccagccctgtcgccag

SEQ ID NO: 559641 - DNA, 25 bp, Homo sapien
tcccagccctgtcgccagctcccga

SEQ ID NO: 559642 - DNA, 25 bp, Homo sapien
ggctgtctgaatgcgagctctccgg

SEQ ID NO: 559643 - DNA, 25 bp, Homo sapien
ctgacccggccaggcgttccttggc

SEQ ID NO: 559644 - DNA, 25 bp, Homo sapien
tctgcccgcgtcctgacccggccag

SEQ ID NO: 559645 - DNA, 25 bp, Homo sapien
cagagcgacgcctccagctgccaat

SEQ ID NO: 559646 - DNA, 25 bp, Homo sapien
cagcggcgctctccaaaatgtgcca

SEQ ID NO: 559647 - DNA, 25 bp, Homo sapien
tcccgcctggatctttggtctcaaa

SEQ ID NO: 559648 - DNA, 25 bp, Homo sapien
tgttggcgactttaaagagaactcc

SEQ ID NO: 559649 - DNA, 25 bp, Homo sapien
gaggtggaagtcagtcaagacgcct

SEQ ID NO: 559650 - DNA, 25 bp, Homo sapien
tgtaggatgggcacttctcttcagc

SEQ ID NO: 559651 - DNA, 25 bp, Homo sapien
tcagccaacgcgtgagcagagcgcg

SEQ ID NO: 559652 - DNA, 25 bp, Homo sapien
tgacatttgcactcggctcagccaa

SEQ ID NO: 559653 - DNA, 25 bp, Homo sapien
tcgtattcctttaacgcctgctgct

SEQ ID NO: 559654 - DNA, 25 bp, Homo sapien
ttgtatgagagatatgccattatgt

SEQ ID NO: 559655 - DNA, 25 bp, Homo sapien
tgagagatatgccattatgtaaaac

SEQ ID NO: 559656 - DNA, 25 bp, Homo sapien
tatgagagatatgccattatgtaaa

SEQ ID NO: 559657 - DNA, 25 bp, Homo sapien
tttgtatgagagatatgccattatg

SEQ ID NO: 559658 - DNA, 25 bp, Homo sapien
ttgctctctattggaggtacacatt

SEQ ID NO: 559659 - DNA, 25 bp, Homo sapien
gaaccaataaatctgtggcaaagag

SEQ ID NO: 559660 - DNA, 25 bp, Homo sapien
ggcaaagagttaacctatgcatggt

SEQ ID NO: 559661 - DNA, 25 bp, Homo sapien
taaagaatagtgcaaactaccattg

SEQ ID NO: 559662 - DNA, 25 bp, Homo sapien
gaccttttttatcctagcttgacag

SEQ ID NO: 559663 - DNA, 25 bp, Homo sapien
caatcacagtagcacaagatatgga

SEQ ID NO: 559664 - DNA, 25 bp, Homo sapien
tgactgtgaatgttggcatcccaaa

SEQ ID NO: 559665 - DNA, 25 bp, Homo sapien
tggacacagttaggaggcagtatct

SEQ ID NO: 559666 - DNA, 25 bp, Homo sapien
acaaacaccatagggtttcatactg

SEQ ID NO: 559667 - DNA, 25 bp, Homo sapien
gacccggtggcaagtctgagtcacg

SEQ ID NO: 559668 - DNA, 25 bp, Homo sapien
cacgggtttgtctcaggctcggcat

SEQ ID NO: 559669 - DNA, 25 bp, Homo sapien
gctcggcattgtctcaggttaggat

SEQ ID NO: 559670 - DNA, 25 bp, Homo sapien
tccgcacaacttcagggttcccgta

SEQ ID NO: 559671 - DNA, 25 bp, Homo sapien
tgtatcgtccgcacaacttcagggt

SEQ ID NO: 559672 - DNA, 25 bp, Homo sapien
ctcagaggtggttccgttgctggaa

SEQ ID NO: 559673 - DNA, 25 bp, Homo sapien
actggcctggcaaacgtaccactca

SEQ ID NO: 559674 - DNA, 25 bp, Homo sapien
ggctgggtccagcacaggggacaag

SEQ ID NO: 559675 - DNA, 25 bp, Homo sapien
gggacagagtgctggagtgactcct

SEQ ID NO: 559676 - DNA, 25 bp, Homo sapien
gctggagtgactcctggctgggtcc

SEQ ID NO: 559677 - DNA, 25 bp, Homo sapien
gcacaggggacaagggggcgcccac

SEQ ID NO: 559678 - DNA, 25 bp, Homo sapien
tgtttcttccgatcactgctattgg

SEQ ID NO: 559679 - DNA, 25 bp, Homo sapien
gtcacagcctcgaatcttgcagtag

SEQ ID NO: 559680 - DNA, 25 bp, Homo sapien
gagtccccactgatgagtaaccaag

SEQ ID NO: 559681 - DNA, 25 bp, Homo sapien
tcactggtgtggacatgggaatgtt

SEQ ID NO: 559682 - DNA, 25 bp, Homo sapien
agacacactcccctcagggtctgta

SEQ ID NO: 559683 - DNA, 25 bp, Homo sapien
acacactcccctcagggtctgtaca

SEQ ID NO: 559684 - DNA, 25 bp, Homo sapien
cagacacactcccctcagggtctgt

SEQ ID NO: 559685 - DNA, 25 bp, Homo sapien
cgcagaccccctcccccgacagaca

SEQ ID NO: 559686 - DNA, 25 bp, Homo sapien
tagggaaggccgctcccctcgcgag

SEQ ID NO: 559687 - DNA, 25 bp, Homo sapien
ctcccggcagccgcctagggaaggc

SEQ ID NO: 559688 - DNA, 25 bp, Homo sapien
cccggatcggcttctgcgcccgcag

SEQ ID NO: 559689 - DNA, 25 bp, Homo sapien
gggacagtgcgcagggcgtggcctg

SEQ ID NO: 559690 - DNA, 25 bp, Homo sapien
caattccacgacagggtaggcctca

SEQ ID NO: 559691 - DNA, 25 bp, Homo sapien
aattccacgacagggtaggcctcac

SEQ ID NO: 559692 - DNA, 25 bp, Homo sapien
ggctcgggtcctcctacaactagaa

SEQ ID NO: 559693 - DNA, 25 bp, Homo sapien
gaaaggcagatgtcaactccagcac

SEQ ID NO: 559694 - DNA, 25 bp, Homo sapien
caactagaaccttctctagaaaggc

SEQ ID NO: 559695 - DNA, 25 bp, Homo sapien
agcaccctccagggcgagtgtgata

SEQ ID NO: 559696 - DNA, 25 bp, Homo sapien
cggtgggcgagtgcgagtggtctcc

SEQ ID NO: 559697 - DNA, 25 bp, Homo sapien
cagaagaaggtgtgcgtgaagagtg

SEQ ID NO: 559698 - DNA, 25 bp, Homo sapien
gggcggcccaaatccggcagcaaat

SEQ ID NO: 559699 - DNA, 25 bp, Homo sapien
gaaagcgcattcctgtcttcccgga

SEQ ID NO: 559700 - DNA, 25 bp, Homo sapien
ccacgtgctccaccgtgacgtgatt

SEQ ID NO: 559701 - DNA, 25 bp, Homo sapien
tgctccaccgtgacgtgattcacca

SEQ ID NO: 559702 - DNA, 25 bp, Homo sapien
tgtatgagtacgcttgtggatcttg

SEQ ID NO: 559703 - DNA, 25 bp, Homo sapien
acgtgctccaccgtgacgtgattca

SEQ ID NO: 559704 - DNA, 25 bp, Homo sapien
gcagcccggccagctcgtcggggtc

SEQ ID NO: 559705 - DNA, 25 bp, Homo sapien
atgagctcctgcttgattggctgcc

SEQ ID NO: 559706 - DNA, 25 bp, Homo sapien
agcccggccagctcgtcggggtcga

SEQ ID NO: 559707 - DNA, 25 bp, Homo sapien
cggccagctcgtcggggtcgatcca

SEQ ID NO: 559708 - DNA, 25 bp, Homo sapien
caggaaggccccagccgcccctggg

SEQ ID NO: 559709 - DNA, 25 bp, Homo sapien
cgccgcagccgccaggttcaggttt

SEQ ID NO: 559710 - DNA, 25 bp, Homo sapien
gccgccaggttcaggtttaagttca

SEQ ID NO: 559711 - DNA, 25 bp, Homo sapien
ggtgcgggtgctgcgcgggcgccgg

SEQ ID NO: 559712 - DNA, 25 bp, Homo sapien
catctggccgttgagcgggtgcggg

SEQ ID NO: 559713 - DNA, 25 bp, Homo sapien
gttcggcgcggccgtacagctcagc

SEQ ID NO: 559714 - DNA, 25 bp, Homo sapien
ggctccgtagccgtgcagggcggcc

SEQ ID NO: 559715 - DNA, 25 bp, Homo sapien
tgccgctggcggagatgaacatgcc

SEQ ID NO: 559716 - DNA, 25 bp, Homo sapien
tccctccggaggacgaagtccctgc

SEQ ID NO: 559717 - DNA, 25 bp, Homo sapien
ctgccggagcctccgggtgtgccgg

SEQ ID NO: 559718 - DNA, 25 bp, Homo sapien
gcgcgaccaaggctgcagcacgggc

SEQ ID NO: 559719 - DNA, 25 bp, Homo sapien
gcgcggagggctgcgcgccactgct

SEQ ID NO: 559720 - DNA, 25 bp, Homo sapien
gcgaccaaggctgcagcacgggcgg

SEQ ID NO: 559721 - DNA, 25 bp, Homo sapien
ccatgtgctcgggtccgagcggagt

SEQ ID NO: 559722 - DNA, 25 bp, Homo sapien
ctgggccatgtgctcgggtccgagc

SEQ ID NO: 559723 - DNA, 25 bp, Homo sapien
tccgagcggagtggtggccacgccg

SEQ ID NO: 559724 - DNA, 25 bp, Homo sapien
tgaggcccagcgtgctcgcctgggc

SEQ ID NO: 559725 - DNA, 25 bp, Homo sapien
gcggaggtgcgcgacggcggcccgg

SEQ ID NO: 559726 - DNA, 25 bp, Homo sapien
ggctggacctgagccgttgccaaat

SEQ ID NO: 559727 - DNA, 25 bp, Homo sapien
tgagccgttgccaaatccgctaatc

SEQ ID NO: 559728 - DNA, 25 bp, Homo sapien
aaatccgctaatctcagcgctggcg

SEQ ID NO: 559729 - DNA, 25 bp, Homo sapien
attctgaagcggctggacctgagcc

SEQ ID NO: 559730 - DNA, 25 bp, Homo sapien
tatcctccagcgattggcagagtga

SEQ ID NO: 559731 - DNA, 25 bp, Homo sapien
cacagtgggaccgagattttggaaa

SEQ ID NO: 559732 - DNA, 25 bp, Homo sapien
ggcagagtgaacaccacatttgagc

SEQ ID NO: 559733 - DNA, 25 bp, Homo sapien
tctgcccgccttcaaaaacatgtat

SEQ ID NO: 559734 - DNA, 25 bp, Homo sapien
actcatcggttctagatctgccact

SEQ ID NO: 559735 - DNA, 25 bp, Homo sapien
tactcatcggttctagatctgccac

SEQ ID NO: 559736 - DNA, 25 bp, Homo sapien
ctcatcggttctagatctgccactt

SEQ ID NO: 559737 - DNA, 25 bp, Homo sapien
gaggagatcgggcagcgattctaac

SEQ ID NO: 559738 - DNA, 25 bp, Homo sapien
gggcagcgattctaacttttgcctt

SEQ ID NO: 559739 - DNA, 25 bp, Homo sapien
tttgcctttcggagatacagtggcg

SEQ ID NO: 559740 - DNA, 25 bp, Homo sapien
ttgcctttcggagatacagtggcgg

SEQ ID NO: 559741 - DNA, 25 bp, Homo sapien
aatccatgcccctttctgcgttttg

SEQ ID NO: 559742 - DNA, 25 bp, Homo sapien
ttcttctgggggtttggcccgcata

SEQ ID NO: 559743 - DNA, 25 bp, Homo sapien
tttctgcgttttgcagcggaggtgc

SEQ ID NO: 559744 - DNA, 25 bp, Homo sapien
acggtggtgctggtcgtcagggcca

SEQ ID NO: 559745 - DNA, 25 bp, Homo sapien
cagaacccaggttggctgagttaac

SEQ ID NO: 559746 - DNA, 25 bp, Homo sapien
tatgtcaccgaacacagccaagttt

SEQ ID NO: 559747 - DNA, 25 bp, Homo sapien
gggatgctcgagctggcgcttgcgg

SEQ ID NO: 559748 - DNA, 25 bp, Homo sapien
gcggcttcccgctgcgcgtagtggg

SEQ ID NO: 559749 - DNA, 25 bp, Homo sapien
gaggccacgggacccgatctctggg

SEQ ID NO: 559750 - DNA, 25 bp, Homo sapien
tttacgactcgctggtcccgcgtgg

SEQ ID NO: 559751 - DNA, 25 bp, Homo sapien
tattgcccctgcaattgctttacga

SEQ ID NO: 559752 - DNA, 25 bp, Homo sapien
cagaaggactgggtgtcggcgggtt

SEQ ID NO: 559753 - DNA, 25 bp, Homo sapien
ggtttctgtgagagcggcctccctg

SEQ ID NO: 559754 - DNA, 25 bp, Homo sapien
taagttcaatacaatttgactgtta

SEQ ID NO: 559755 - DNA, 25 bp, Homo sapien
gttcaatacaatttgactgttatca

SEQ ID NO: 559756 - DNA, 25 bp, Homo sapien
tactaaagaataagttcaatacaat

SEQ ID NO: 559757 - DNA, 25 bp, Homo sapien
gaataagttcaatacaatttgactg

SEQ ID NO: 559758 - DNA, 25 bp, Homo sapien
cctgggagcccaaaggataggtctt

SEQ ID NO: 559759 - DNA, 25 bp, Homo sapien
tctggatatagttcgcctgggagcc

SEQ ID NO: 559760 - DNA, 25 bp, Homo sapien
tcttttagcaaactagagagggcct

SEQ ID NO: 559761 - DNA, 25 bp, Homo sapien
tacaagtttgagtggtgtggcaacc

SEQ ID NO: 559762 - DNA, 25 bp, Homo sapien
agaggctgcctgagccggcgcaaga

SEQ ID NO: 559763 - DNA, 25 bp, Homo sapien
tctgccagccatagtgagctagagg

SEQ ID NO: 559764 - DNA, 25 bp, Homo sapien
ctagaggattcttcccgcgtttttg

SEQ ID NO: 559765 - DNA, 25 bp, Homo sapien
gccggcgcaagagagcccgggttct

SEQ ID NO: 559766 - DNA, 25 bp, Homo sapien
ggacaggaaacgtccgcagcggtca

SEQ ID NO: 559767 - DNA, 25 bp, Homo sapien
ggtttaagccctgccgtgtctgacg

SEQ ID NO: 559768 - DNA, 25 bp, Homo sapien
aaactccggcctgagtctcgcttgg

SEQ ID NO: 559769 - DNA, 25 bp, Homo sapien
tgtctgacggcttcttctcccgaga

SEQ ID NO: 559770 - DNA, 25 bp, Homo sapien
ctcacactccctcgggtcgcggact

SEQ ID NO: 559771 - DNA, 25 bp, Homo sapien
ctgcgctgggtccacgcggcgcggt

SEQ ID NO: 559772 - DNA, 25 bp, Homo sapien
accgcagccgagacctgggagcccg

SEQ ID NO: 559773 - DNA, 25 bp, Homo sapien
gcgcggtcactagttccgggcccag

SEQ ID NO: 559774 - DNA, 25 bp, Homo sapien
cggagaggacgcctggactccgcct

SEQ ID NO: 559775 - DNA, 25 bp, Homo sapien
acggccgccgcggttgtgactgcat

SEQ ID NO: 559776 - DNA, 25 bp, Homo sapien
tgactgcattctaccggcgctgctc

SEQ ID NO: 559777 - DNA, 25 bp, Homo sapien
tgccgagcgcggagctcgcctcggt

SEQ ID NO: 559778 - DNA, 25 bp, Homo sapien
cccgaggcagatccaggcggcggcg

SEQ ID NO: 559779 - DNA, 25 bp, Homo sapien
tccgcgccttcgctacgcgcccggc

SEQ ID NO: 559780 - DNA, 25 bp, Homo sapien
tctccgcctggctttggactcttct

SEQ ID NO: 559781 - DNA, 25 bp, Homo sapien
tcctctccgcgccttcgctacgcgc

SEQ ID NO: 559782 - DNA, 25 bp, Homo sapien
gctcctggacgcgggtccgcagttc

SEQ ID NO: 559783 - DNA, 25 bp, Homo sapien
ggtgggcagcttcgcgcgccaccat

SEQ ID NO: 559784 - DNA, 25 bp, Homo sapien
cgcgcggatcgggagcgggagtcga

SEQ ID NO: 559785 - DNA, 25 bp, Homo sapien
gggcgggcgcgctggccatgctcct

SEQ ID NO: 559786 - DNA, 25 bp, Homo sapien
gaatgtgctcaacgggcagatgcgc

SEQ ID NO: 559787 - DNA, 25 bp, Homo sapien
gaacatgggtatgaacatggcagca

SEQ ID NO: 559788 - DNA, 25 bp, Homo sapien
tgttcgggcgctcggagcaataccg

SEQ ID NO: 559789 - DNA, 25 bp, Homo sapien
tatatgcggcagcagtgcatcaagc

SEQ ID NO: 559790 - DNA, 25 bp, Homo sapien
tgaaatgagtctggtgtgagccgaa

SEQ ID NO: 559791 - DNA, 25 bp, Homo sapien
gccgaagctgtaatgcgtttctcat

SEQ ID NO: 559792 - DNA, 25 bp, Homo sapien
ctgtggtttcgcagcagtttgtgaa

SEQ ID NO: 559793 - DNA, 25 bp, Homo sapien
tctaatgggcaccacagagtttgcg

SEQ ID NO: 559794 - DNA, 25 bp, Homo sapien
gacaaactgtgtacatagcggactc

SEQ ID NO: 559795 - DNA, 25 bp, Homo sapien
tagcagcgagggcaccttgtgatca

SEQ ID NO: 559796 - DNA, 25 bp, Homo sapien
gactggaaaaaatgagccgtgccaa

SEQ ID NO: 559797 - DNA, 25 bp, Homo sapien
caatgaatggtacgtgtgacgggtc

SEQ ID NO: 559798 - DNA, 25 bp, Homo sapien
tcctctttgcagaaccgacgggctt

SEQ ID NO: 559799 - DNA, 25 bp, Homo sapien
tcgataaagggtacctaggtcgcac

SEQ ID NO: 559800 - DNA, 25 bp, Homo sapien
cttgggaacgtcgaactctctctgc

SEQ ID NO: 559801 - DNA, 25 bp, Homo sapien
tccatggagactccctccttgggaa

SEQ ID NO: 559802 - DNA, 25 bp, Homo sapien
agcactagagggccgcgaggtcccg

SEQ ID NO: 559803 - DNA, 25 bp, Homo sapien
cactagagggccgcgaggtcccggg

SEQ ID NO: 559804 - DNA, 25 bp, Homo sapien
gagcactagagggccgcgaggtccc

SEQ ID NO: 559805 - DNA, 25 bp, Homo sapien
gcactagagggccgcgaggtcccgg

SEQ ID NO: 559806 - DNA, 25 bp, Homo sapien
catacaagttcctagggtgggccga

SEQ ID NO: 559807 - DNA, 25 bp, Homo sapien
aggacagagcgcctcaggcatcgtc

SEQ ID NO: 559808 - DNA, 25 bp, Homo sapien
caagagggccttaagtcagagaacc

SEQ ID NO: 559809 - DNA, 25 bp, Homo sapien
tgatcctttcctgcggtcatacaag

SEQ ID NO: 559810 - DNA, 25 bp, Homo sapien
gaagccggaggaccgctgagaccga

SEQ ID NO: 559811 - DNA, 25 bp, Homo sapien
ccggaagccggaggaccgctgagac

SEQ ID NO: 559812 - DNA, 25 bp, Homo sapien
tcccggaagccggaggaccgctgag

SEQ ID NO: 559813 - DNA, 25 bp, Homo sapien
gccggaggaccgctgagaccgaggc

SEQ ID NO: 559814 - DNA, 25 bp, Homo sapien
gaatcagcagtcatacagtgaaacc

SEQ ID NO: 559815 - DNA, 25 bp, Homo sapien
gggaggtaccgtgctctcattcaca

SEQ ID NO: 559816 - DNA, 25 bp, Homo sapien
gaaaatccacagatagacatggagg

SEQ ID NO: 559817 - DNA, 25 bp, Homo sapien
aaccacctgtgccatttgggaggta

SEQ ID NO: 559818 - DNA, 25 bp, Homo sapien
gctgcagcccatacttaaggactcc

SEQ ID NO: 559819 - DNA, 25 bp, Homo sapien
tgcagcccatacttaaggactccat

SEQ ID NO: 559820 - DNA, 25 bp, Homo sapien
tgctgcagcccatacttaaggactc

SEQ ID NO: 559821 - DNA, 25 bp, Homo sapien
ctgctgcagcccatacttaaggact

SEQ ID NO: 559822 - DNA, 25 bp, Homo sapien
aaccctgtgtaatttcatccgaacg

SEQ ID NO: 559823 - DNA, 25 bp, Homo sapien
aaacctacctactgaagtgtgaact

SEQ ID NO: 559824 - DNA, 25 bp, Homo sapien
gatgttttcctatcccagtcttcag

SEQ ID NO: 559825 - DNA, 25 bp, Homo sapien
gcagcagcagttcaatctgcacaca

SEQ ID NO: 559826 - DNA, 25 bp, Homo sapien
ccaaggaaaatattatttcatccag

SEQ ID NO: 559827 - DNA, 25 bp, Homo sapien
ttccaaggaaaatattatttcatcc

SEQ ID NO: 559828 - DNA, 25 bp, Homo sapien
aaggaaaatattatttcatccagga

SEQ ID NO: 559829 - DNA, 25 bp, Homo sapien
atttccaaggaaaatattatttcat

SEQ ID NO: 559830 - DNA, 25 bp, Homo sapien
tctagcagccagtacattgggactg

SEQ ID NO: 559831 - DNA, 25 bp, Homo sapien
caatcgcaaatgtctagagagtgtc

SEQ ID NO: 559832 - DNA, 25 bp, Homo sapien
tacacttgggactctttcagctgca

SEQ ID NO: 559833 - DNA, 25 bp, Homo sapien
gggactgatttcatgccaatcgcaa

SEQ ID NO: 559834 - DNA, 25 bp, Homo sapien
catagcactcggatgctgaccagag

SEQ ID NO: 559835 - DNA, 25 bp, Homo sapien
cactgcaacagagccacaaatgaag

SEQ ID NO: 559836 - DNA, 25 bp, Homo sapien
gctggtcaactacgaccaactggtg

SEQ ID NO: 559837 - DNA, 25 bp, Homo sapien
gacgaaatgcatctggacccgtgtg

SEQ ID NO: 559838 - DNA, 25 bp, Homo sapien
taacttgagggtcgcagaataggct

SEQ ID NO: 559839 - DNA, 25 bp, Homo sapien
aaagcctggagtaagcctgagcgca

SEQ ID NO: 559840 - DNA, 25 bp, Homo sapien
tgtctcttatgggaaagtgccctga

SEQ ID NO: 559841 - DNA, 25 bp, Homo sapien
tgttctctaaggtgaagcgaagctg

SEQ ID NO: 559842 - DNA, 25 bp, Homo sapien
gggcgatgaggggtgcccatcagaa

SEQ ID NO: 559843 - DNA, 25 bp, Homo sapien
tgagtcaaaaaacaatttaactcca

SEQ ID NO: 559844 - DNA, 25 bp, Homo sapien
tgaattgagtcaaaaaacaatttaa

SEQ ID NO: 559845 - DNA, 25 bp, Homo sapien
ctgaattgagtcaaaaaacaattta

SEQ ID NO: 559846 - DNA, 25 bp, Homo sapien
cataaaggacctgagcattcatgga

SEQ ID NO: 559847 - DNA, 25 bp, Homo sapien
cccttatcagattggcagtgttgag

SEQ ID NO: 559848 - DNA, 25 bp, Homo sapien
tagattcctctcctgaccaagacaa

SEQ ID NO: 559849 - DNA, 25 bp, Homo sapien
tattcacaggaggtactggacagcg

SEQ ID NO: 559850 - DNA, 25 bp, Homo sapien
ctttagaacatagaacactggcagt

SEQ ID NO: 559851 - DNA, 25 bp, Homo sapien
tagcaattgattctcataagccggt

SEQ ID NO: 559852 - DNA, 25 bp, Homo sapien
agtggtttcacaactatctggcaag

SEQ ID NO: 559853 - DNA, 25 bp, Homo sapien
tgtgtgcatgttcctgtagactgat

SEQ ID NO: 559854 - DNA, 25 bp, Homo sapien
aagaatggctaatttctccttggtc

SEQ ID NO: 559855 - DNA, 25 bp, Homo sapien
caagaaacagggatatagctgggca

SEQ ID NO: 559856 - DNA, 25 bp, Homo sapien
ggtctctgatagcaatgtcctcctg

SEQ ID NO: 559857 - DNA, 25 bp, Homo sapien
tgacgtgggaggatatcttgaggga

SEQ ID NO: 559858 - DNA, 25 bp, Homo sapien
caggatgttagctaacgaatataga

SEQ ID NO: 559859 - DNA, 25 bp, Homo sapien
gatgttagctaacgaatatagaaga

SEQ ID NO: 559860 - DNA, 25 bp, Homo sapien
tttacaggatgttagctaacgaata

SEQ ID NO: 559861 - DNA, 25 bp, Homo sapien
gttagctaacgaatatagaagaaat

SEQ ID NO: 559862 - DNA, 25 bp, Homo sapien
gagtatatgtgctctgaacgcccac

SEQ ID NO: 559863 - DNA, 25 bp, Homo sapien
ggtggtttagcatagtggagtatat

SEQ ID NO: 559864 - DNA, 25 bp, Homo sapien
gtttaaccagctcatctgtaagagg

SEQ ID NO: 559865 - DNA, 25 bp, Homo sapien
tcacttactagctgttcaccttcag

SEQ ID NO: 559866 - DNA, 25 bp, Homo sapien
tattaaagaacattgactcagctgg

SEQ ID NO: 559867 - DNA, 25 bp, Homo sapien
gaatttattaaagaacattgactca

SEQ ID NO: 559868 - DNA, 25 bp, Homo sapien
taaagaacattgactcagctgggtg

SEQ ID NO: 559869 - DNA, 25 bp, Homo sapien
gaacattgactcagctgggtgtagt

SEQ ID NO: 559870 - DNA, 25 bp, Homo sapien
gcttgttcctcagtgccgtaaataa

SEQ ID NO: 559871 - DNA, 25 bp, Homo sapien
atgcttgttcctcagtgccgtaaat

SEQ ID NO: 559872 - DNA, 25 bp, Homo sapien
gacattcataacctgaggtgtccac

SEQ ID NO: 559873 - DNA, 25 bp, Homo sapien
aggagacaaggacattcataacctg

SEQ ID NO: 559874 - DNA, 25 bp, Homo sapien
ttgagaatgcgtcggtaagggccac

SEQ ID NO: 559875 - DNA, 25 bp, Homo sapien
gggaccattggtttgcctagaatca

SEQ ID NO: 559876 - DNA, 25 bp, Homo sapien
tccgaggtcctgacaacaagttagt

SEQ ID NO: 559877 - DNA, 25 bp, Homo sapien
taggtaccagggctcaccaatcaga

SEQ ID NO: 559878 - DNA, 25 bp, Homo sapien
cagctgagaggtgaaaaggtgtgga

SEQ ID NO: 559879 - DNA, 25 bp, Homo sapien
gattgcatggaaggttttataagcc

SEQ ID NO: 559880 - DNA, 25 bp, Homo sapien
catgtcacagttcggtgcaggatag

SEQ ID NO: 559881 - DNA, 25 bp, Homo sapien
ctgtgtagtgcctagaaaagtctca

SEQ ID NO: 559882 - DNA, 25 bp, Homo sapien
tgcccaataggatgctccgagcagt

SEQ ID NO: 559883 - DNA, 25 bp, Homo sapien
taccacatcgaactggaaaggaggc

SEQ ID NO: 559884 - DNA, 25 bp, Homo sapien
tccgagcagtgcactcagaagaatg

SEQ ID NO: 559885 - DNA, 25 bp, Homo sapien
aaaggaggccaggatatgctgccca

SEQ ID NO: 559886 - DNA, 25 bp, Homo sapien
caaggcgcggaggtgactcaatgac

SEQ ID NO: 559887 - DNA, 25 bp, Homo sapien
gaacttcggattctcgggactccag

SEQ ID NO: 559888 - DNA, 25 bp, Homo sapien
tttgggcatttgtctggaacttcgg

SEQ ID NO: 559889 - DNA, 25 bp, Homo sapien
caatgacattgaccggcctggatgc

SEQ ID NO: 559890 - DNA, 25 bp, Homo sapien
ggctcgtgatttgccggagctcctg

SEQ ID NO: 559891 - DNA, 25 bp, Homo sapien
ttcactgggcttctagccgtgccgc

SEQ ID NO: 559892 - DNA, 25 bp, Homo sapien
ggcatcgggtttctggctcgtgatt

SEQ ID NO: 559893 - DNA, 25 bp, Homo sapien
ggaggcatccctcgttgcagctgtt

SEQ ID NO: 559894 - DNA, 25 bp, Homo sapien
tccttttaatgtgttggcagagact

SEQ ID NO: 559895 - DNA, 25 bp, Homo sapien
taatgtgttggcagagactgcatct

SEQ ID NO: 559896 - DNA, 25 bp, Homo sapien
cttttaatgtgttggcagagactgc

SEQ ID NO: 559897 - DNA, 25 bp, Homo sapien
ttttaatgtgttggcagagactgca

SEQ ID NO: 559898 - DNA, 25 bp, Homo sapien
gaagtgcgcaatactgctttccaga

SEQ ID NO: 559899 - DNA, 25 bp, Homo sapien
tcatgtgctgaagtgcgcaatactg

SEQ ID NO: 559900 - DNA, 25 bp, Homo sapien
catgtgctgaagtgcgcaatactgc

SEQ ID NO: 559901 - DNA, 25 bp, Homo sapien
tgctgaagtgcgcaatactgctttc

SEQ ID NO: 559902 - DNA, 25 bp, Homo sapien
ctgaatggagtgtggtgctagctat

SEQ ID NO: 559903 - DNA, 25 bp, Homo sapien
gtgctagctatggagttagagcctg

SEQ ID NO: 559904 - DNA, 25 bp, Homo sapien
cagagttctgccgtcattccaacaa

SEQ ID NO: 559905 - DNA, 25 bp, Homo sapien
agttctgccgtcattccaacaagta

SEQ ID NO: 559906 - DNA, 25 bp, Homo sapien
gggtgaagaacagtagccatagcta

SEQ ID NO: 559907 - DNA, 25 bp, Homo sapien
ttgttcatagcaggacacacaggag

SEQ ID NO: 559908 - DNA, 25 bp, Homo sapien
aacatagaatgttgggagttcagcc

SEQ ID NO: 559909 - DNA, 25 bp, Homo sapien
gctgcagactgactcgtaatgacca

SEQ ID NO: 559910 - DNA, 25 bp, Homo sapien
gcaggcccctgtggtcgctgttaca

SEQ ID NO: 559911 - DNA, 25 bp, Homo sapien
taaatatctaggagtggagtagctg

SEQ ID NO: 559912 - DNA, 25 bp, Homo sapien
tagggtagataaggagttggcaacc

SEQ ID NO: 559913 - DNA, 25 bp, Homo sapien
ttaggatgagctggccaattacccc

SEQ ID NO: 559914 - DNA, 25 bp, Homo sapien
ttgatgatatgtccctgctgtctgg

SEQ ID NO: 559915 - DNA, 25 bp, Homo sapien
ggacttggtgatgtctaagtaatta

SEQ ID NO: 559916 - DNA, 25 bp, Homo sapien
aagtaattagtgtatgttggttcca

SEQ ID NO: 559917 - DNA, 25 bp, Homo sapien
gaccgaggacgaataggacttggtg

SEQ ID NO: 559918 - DNA, 25 bp, Homo sapien
ctctcttctcagtcttgtgagaaca

SEQ ID NO: 559919 - DNA, 25 bp, Homo sapien
cattctcgccatctgtactttgcat

SEQ ID NO: 559920 - DNA, 25 bp, Homo sapien
gtactttgcatttggcacttcctgc

SEQ ID NO: 559921 - DNA, 25 bp, Homo sapien
cttgtgagaacattctcgccatctg

SEQ ID NO: 559922 - DNA, 25 bp, Homo sapien
ttgggattgcttcctttgctgcttg

SEQ ID NO: 559923 - DNA, 25 bp, Homo sapien
ccacttgggattgcttcctttgctg

SEQ ID NO: 559924 - DNA, 25 bp, Homo sapien
cacttgggattgcttcctttgctgc

SEQ ID NO: 559925 - DNA, 25 bp, Homo sapien
acttgggattgcttcctttgctgct

SEQ ID NO: 559926 - DNA, 25 bp, Homo sapien
ctgccaagttggagtagcaaaggga

SEQ ID NO: 559927 - DNA, 25 bp, Homo sapien
agtaggcatcttttaggaagacaga

SEQ ID NO: 559928 - DNA, 25 bp, Homo sapien
agtttagtaggcatcttttaggaag

SEQ ID NO: 559929 - DNA, 25 bp, Homo sapien
tgccaagttggagtagcaaagggaa

SEQ ID NO: 559930 - DNA, 25 bp, Homo sapien
tcttgagctccgtaactgcttttca

SEQ ID NO: 559931 - DNA, 25 bp, Homo sapien
gaaaacttcttgagctccgtaactg

SEQ ID NO: 559932 - DNA, 25 bp, Homo sapien
gtgaaaaatgactgtgctaaggaaa

SEQ ID NO: 559933 - DNA, 25 bp, Homo sapien
tgtgctaaggaaaacttcttgagct

SEQ ID NO: 559934 - DNA, 25 bp, Homo sapien
cgccttctccaagctccccggcgag

SEQ ID NO: 559935 - DNA, 25 bp, Homo sapien
tagcggtaacggtggagcgggagag

SEQ ID NO: 559936 - DNA, 25 bp, Homo sapien
ttagcggtaacggtggagcgggaga

SEQ ID NO: 559937 - DNA, 25 bp, Homo sapien
ccggcgagaaccaccaatagtgtgg

SEQ ID NO: 559938 - DNA, 25 bp, Homo sapien
gtgctgtggactgatttggtgatcc

SEQ ID NO: 559939 - DNA, 25 bp, Homo sapien
ccctgtgctgtggactgatttggtg

SEQ ID NO: 559940 - DNA, 25 bp, Homo sapien
ggactgatttggtgatccattaggt

SEQ ID NO: 559941 - DNA, 25 bp, Homo sapien
agggccagggctcttttggcctgca

SEQ ID NO: 559942 - DNA, 25 bp, Homo sapien
ttatggaatggatcagtgaggataa

SEQ ID NO: 559943 - DNA, 25 bp, Homo sapien
tttatggaatggatcagtgaggata

SEQ ID NO: 559944 - DNA, 25 bp, Homo sapien
ctttatggaatggatcagtgaggat

SEQ ID NO: 559945 - DNA, 25 bp, Homo sapien
tatggaatggatcagtgaggataac

SEQ ID NO: 559946 - DNA, 25 bp, Homo sapien
ttttcggccaccacggcaaacacga

SEQ ID NO: 559947 - DNA, 25 bp, Homo sapien
tgcaacggactgaaggcttggagca

SEQ ID NO: 559948 - DNA, 25 bp, Homo sapien
ggactctcaaagccccacagtggcg

SEQ ID NO: 559949 - DNA, 25 bp, Homo sapien
ctgggcgttttcggccaccacggca

SEQ ID NO: 559950 - DNA, 25 bp, Homo sapien
tcagcgcgctttatcaggctgggtg

SEQ ID NO: 559951 - DNA, 25 bp, Homo sapien
aggctgggtggggcggagagccctg

SEQ ID NO: 559952 - DNA, 25 bp, Homo sapien
ctgtggagagcagagagctggcggt

SEQ ID NO: 559953 - DNA, 25 bp, Homo sapien
ctgggtggggcggagagccctgtgg

SEQ ID NO: 559954 - DNA, 25 bp, Homo sapien
atcagactgctgctttctccgtagc

SEQ ID NO: 559955 - DNA, 25 bp, Homo sapien
tccgtagctcctggatgtactcgta

SEQ ID NO: 559956 - DNA, 25 bp, Homo sapien
gtagctcctggatgtactcgtatgc

SEQ ID NO: 559957 - DNA, 25 bp, Homo sapien
ttctccgtagctcctggatgtactc

SEQ ID NO: 559958 - DNA, 25 bp, Homo sapien
gaatgaatctatctactgcagctgt

SEQ ID NO: 559959 - DNA, 25 bp, Homo sapien
taaaagctacctcaacatggatgcc

SEQ ID NO: 559960 - DNA, 25 bp, Homo sapien
gctgggcgcatctgttaatgcagaa

SEQ ID NO: 559961 - DNA, 25 bp, Homo sapien
ctcaggttcatgtgaaaatggcgga

SEQ ID NO: 559962 - DNA, 25 bp, Homo sapien
cagctttcacaccagggagcagttt

SEQ ID NO: 559963 - DNA, 25 bp, Homo sapien
ttaaatgtggtcgaattcgctactg

SEQ ID NO: 559964 - DNA, 25 bp, Homo sapien
gaattcgctactggaaatcaaaggc

SEQ ID NO: 559965 - DNA, 25 bp, Homo sapien
gctttcacaccagggagcagtttca

SEQ ID NO: 559966 - DNA, 25 bp, Homo sapien
tggattttatacagtccctgctgtc

SEQ ID NO: 559967 - DNA, 25 bp, Homo sapien
agtttacgcgaagtgggattggatt

SEQ ID NO: 559968 - DNA, 25 bp, Homo sapien
cgcgaagtgggattggattttatac

SEQ ID NO: 559969 - DNA, 25 bp, Homo sapien
ttatgctgagtttacgcgaagtggg

SEQ ID NO: 559970 - DNA, 25 bp, Homo sapien
cttacatactgacgaataatattaa

SEQ ID NO: 559971 - DNA, 25 bp, Homo sapien
caaaatgactttcatgccacccttc

SEQ ID NO: 559972 - DNA, 25 bp, Homo sapien
catactgacgaataatattaacaca

SEQ ID NO: 559973 - DNA, 25 bp, Homo sapien
aaatgactttcatgccacccttcat

SEQ ID NO: 559974 - DNA, 25 bp, Homo sapien
tatctgtgcgttatacgtgggtgct

SEQ ID NO: 559975 - DNA, 25 bp, Homo sapien
tgctgggtagccaggcttatctgtg

SEQ ID NO: 559976 - DNA, 25 bp, Homo sapien
ttgaggaatccaacaatgagaagat

SEQ ID NO: 559977 - DNA, 25 bp, Homo sapien
tgagaagatagctagccttgaagac

SEQ ID NO: 559978 - DNA, 25 bp, Homo sapien
ttcctcaattcagcaaatggcaaga

SEQ ID NO: 559979 - DNA, 25 bp, Homo sapien
tataccattcaagctttccagaaaa

SEQ ID NO: 559980 - DNA, 25 bp, Homo sapien
gaaaacccctgtgagctttgaaatg

SEQ ID NO: 559981 - DNA, 25 bp, Homo sapien
actgggcttgaatttgtttatacca

SEQ ID NO: 559982 - DNA, 25 bp, Homo sapien
ttgaacagtatctgggctcaagaga

SEQ ID NO: 559983 - DNA, 25 bp, Homo sapien
ctagtcataggtgccatcatagcgc

SEQ ID NO: 559984 - DNA, 25 bp, Homo sapien
tacaggcacacttggctcataattt

SEQ ID NO: 559985 - DNA, 25 bp, Homo sapien
tccttaacatactgctcaaacccaa

SEQ ID NO: 559986 - DNA, 25 bp, Homo sapien
cccaggttcacaccgttctcttgcc

SEQ ID NO: 559987 - DNA, 25 bp, Homo sapien
cgcccagacgggagtacagtggcat

SEQ ID NO: 559988 - DNA, 25 bp, Homo sapien
acagtggcatgatctcggctcactg

SEQ ID NO: 559989 - DNA, 25 bp, Homo sapien
caagctcccctcccaggttcacacc

SEQ ID NO: 559990 - DNA, 25 bp, Homo sapien
tctctgtgttggaggttcagtgtca

SEQ ID NO: 559991 - DNA, 25 bp, Homo sapien
cagaagagaataaggagtggagact

SEQ ID NO: 559992 - DNA, 25 bp, Homo sapien
tcttttcggaagcattagtgcctct

SEQ ID NO: 559993 - DNA, 25 bp, Homo sapien
taaggtagtagcagtaagcatccca

SEQ ID NO: 559994 - DNA, 25 bp, Homo sapien
cttttctgagcatctgataattttt

SEQ ID NO: 559995 - DNA, 25 bp, Homo sapien
tccttgtgagcaagaatgatttcca

SEQ ID NO: 559996 - DNA, 25 bp, Homo sapien
atgtatcttgtttccccagcttgtt

SEQ ID NO: 559997 - DNA, 25 bp, Homo sapien
gtttccccagcttgttccttgtgag

SEQ ID NO: 559998 - DNA, 25 bp, Homo sapien
gttgttgcttaaaactcatacttcc

SEQ ID NO: 559999 - DNA, 25 bp, Homo sapien
tgaaatcacctttgtagcctatatt

SEQ ID NO: 560000 - DNA, 25 bp, Homo sapien
ttagattattagctgggaaatcatg

SEQ ID NO: 560001 - DNA, 25 bp, Homo sapien
taggtagtagctcagtagttgttgc

SEQ ID NO: 560002 - DNA, 25 bp, Homo sapien
gagtttggacaagtgtatctaccat

SEQ ID NO: 560003 - DNA, 25 bp, Homo sapien
ggttcattgcctcagaaatctttgt

SEQ ID NO: 560004 - DNA, 25 bp, Homo sapien
actagggttgctctttgtgttacac

SEQ ID NO: 560005 - DNA, 25 bp, Homo sapien
agggcacccggcgatacattgtttt

SEQ ID NO: 560006 - DNA, 25 bp, Homo sapien
cagttttcgttcagccacagaggga

SEQ ID NO: 560007 - DNA, 25 bp, Homo sapien
cacattcttccctagagttctctga

SEQ ID NO: 560008 - DNA, 25 bp, Homo sapien
agttctctgaagctagtctccagtt

SEQ ID NO: 560009 - DNA, 25 bp, Homo sapien
gattcctgggcaaagagaccacgga

SEQ ID NO: 560010 - DNA, 25 bp, Homo sapien
tgtcctcagctgcttagtaactctg

SEQ ID NO: 560011 - DNA, 25 bp, Homo sapien
cttagtaactctgggggagatagac

SEQ ID NO: 560012 - DNA, 25 bp, Homo sapien
gatcttggtgcttcccatgtcctca

SEQ ID NO: 560013 - DNA, 25 bp, Homo sapien
cttctccctagatcttggtgcttcc

SEQ ID NO: 560014 - DNA, 25 bp, Homo sapien
tgtatgtatggtgaagtatcccaga

SEQ ID NO: 560015 - DNA, 25 bp, Homo sapien
cacatttatatataagtttgtctat

SEQ ID NO: 560016 - DNA, 25 bp, Homo sapien
gtgataagataggaaacagtgggca

SEQ ID NO: 560017 - DNA, 25 bp, Homo sapien
tacagagaacctttagaacaaacat

SEQ ID NO: 560018 - DNA, 25 bp, Homo sapien
gcacttgtgagagccatgtgtgcac

SEQ ID NO: 560019 - DNA, 25 bp, Homo sapien
taaagtacccactatactacaggac

SEQ ID NO: 560020 - DNA, 25 bp, Homo sapien
cccagttccatttgagggaataaag

SEQ ID NO: 560021 - DNA, 25 bp, Homo sapien
tagactattggaatacctctccggg

SEQ ID NO: 560022 - DNA, 25 bp, Homo sapien
tacagcactcttggtttacgttcac

SEQ ID NO: 560023 - DNA, 25 bp, Homo sapien
cactcttggtttacgttcacactcg

SEQ ID NO: 560024 - DNA, 25 bp, Homo sapien
agtgtcagattacagcactcttggt

SEQ ID NO: 560025 - DNA, 25 bp, Homo sapien
cagattacagcactcttggtttacg

SEQ ID NO: 560026 - DNA, 25 bp, Homo sapien
tcatctgtgtccttgaccagccgct

SEQ ID NO: 560027 - DNA, 25 bp, Homo sapien
ttgcggccagccgactatcccaggt

SEQ ID NO: 560028 - DNA, 25 bp, Homo sapien
gggcttcttgcacgctatcctcact

SEQ ID NO: 560029 - DNA, 25 bp, Homo sapien
tctttggatcttcgcaccagaaagc

SEQ ID NO: 560030 - DNA, 25 bp, Homo sapien
tgcccgtgtactctggaaaattgct

SEQ ID NO: 560031 - DNA, 25 bp, Homo sapien
agctgcacctgtaccctcttgaatg

SEQ ID NO: 560032 - DNA, 25 bp, Homo sapien
cacaaaaatgtgaagatcctgcccg

SEQ ID NO: 560033 - DNA, 25 bp, Homo sapien
gcttgtctaattgggtgcacagctg

SEQ ID NO: 560034 - DNA, 25 bp, Homo sapien
ggaagcctgatttcacaaccaacac

SEQ ID NO: 560035 - DNA, 25 bp, Homo sapien
gaatacaaacagtgatagttccggg

SEQ ID NO: 560036 - DNA, 25 bp, Homo sapien
gaagacatgcagatatggaaccaga

SEQ ID NO: 560037 - DNA, 25 bp, Homo sapien
caaccaacaccttgcagagaataca

SEQ ID NO: 560038 - DNA, 25 bp, Homo sapien
cattctaccaggtagccttggctag

SEQ ID NO: 560039 - DNA, 25 bp, Homo sapien
gtatgggtacttggcgtctacttct

SEQ ID NO: 560040 - DNA, 25 bp, Homo sapien
tctgacttaaagatgtatgggtact

SEQ ID NO: 560041 - DNA, 25 bp, Homo sapien
tagccttggctagcatctgacttaa

SEQ ID NO: 560042 - DNA, 25 bp, Homo sapien
ctggtggacctctcttgatacagaa

SEQ ID NO: 560043 - DNA, 25 bp, Homo sapien
ctcccaacatttgcgaaatccatac

SEQ ID NO: 560044 - DNA, 25 bp, Homo sapien
ggtggacctctcttgatacagaata

SEQ ID NO: 560045 - DNA, 25 bp, Homo sapien
actccattagtgtggctggtggacc

SEQ ID NO: 560046 - DNA, 25 bp, Homo sapien
ctccgtcaaggaaccgaggactcag

SEQ ID NO: 560047 - DNA, 25 bp, Homo sapien
atcatagagatcagagttggtaaac

SEQ ID NO: 560048 - DNA, 25 bp, Homo sapien
aggactcagcttgatttctagaggt

SEQ ID NO: 560049 - DNA, 25 bp, Homo sapien
ttctagaggttcactctgggttcta

SEQ ID NO: 560050 - DNA, 25 bp, Homo sapien
caagctgcattggtccccactttct

SEQ ID NO: 560051 - DNA, 25 bp, Homo sapien
tccctgctcggtcacactctttgta

SEQ ID NO: 560052 - DNA, 25 bp, Homo sapien
gagaaacggatagaaagtatctggc

SEQ ID NO: 560053 - DNA, 25 bp, Homo sapien
gaaaccagagcctttctagtctgtt

SEQ ID NO: 560054 - DNA, 25 bp, Homo sapien
agaatagctcggtttttattgtagc

SEQ ID NO: 560055 - DNA, 25 bp, Homo sapien
tttttattgtagctccccactctcc

SEQ ID NO: 560056 - DNA, 25 bp, Homo sapien
ctccaccgagtcttcaatttggtgc

SEQ ID NO: 560057 - DNA, 25 bp, Homo sapien
ccgagtcttcaatttggtgcttggc

SEQ ID NO: 560058 - DNA, 25 bp, Homo sapien
cttattctagaagctgctgctcttc

SEQ ID NO: 560059 - DNA, 25 bp, Homo sapien
ttattctagaagctgctgctcttca

SEQ ID NO: 560060 - DNA, 25 bp, Homo sapien
gctgctgctcttcattttgtcttca

SEQ ID NO: 560061 - DNA, 25 bp, Homo sapien
cattttgtcttcagttttgtaaaag

SEQ ID NO: 560062 - DNA, 25 bp, Homo sapien
cgcgcagggacttggtgaattaatc

SEQ ID NO: 560063 - DNA, 25 bp, Homo sapien
cagggacttggtgaattaatctctt

SEQ ID NO: 560064 - DNA, 25 bp, Homo sapien
ctgtgccgcgcagggacttggtgaa

SEQ ID NO: 560065 - DNA, 25 bp, Homo sapien
tgccgcgcagggacttggtgaatta

SEQ ID NO: 560066 - DNA, 25 bp, Homo sapien
caaggcaactaagttagatgtggag

SEQ ID NO: 560067 - DNA, 25 bp, Homo sapien
tcctcaaggcaactaagttagatgt

SEQ ID NO: 560068 - DNA, 25 bp, Homo sapien
gcaactaagttagatgtggagtttc

SEQ ID NO: 560069 - DNA, 25 bp, Homo sapien
caactaagttagatgtggagtttct

SEQ ID NO: 560070 - DNA, 25 bp, Homo sapien
tgttggaaattcagtgaataagaaa

SEQ ID NO: 560071 - DNA, 25 bp, Homo sapien
gttggaaattcagtgaataagaaaa

SEQ ID NO: 560072 - DNA, 25 bp, Homo sapien
tggaaattcagtgaataagaaaata

SEQ ID NO: 560073 - DNA, 25 bp, Homo sapien
ctgttggaaattcagtgaataagaa

SEQ ID NO: 560074 - DNA, 25 bp, Homo sapien
ctcattcgggtagtgcaggtgagag

SEQ ID NO: 560075 - DNA, 25 bp, Homo sapien
gcaggtgagagacggcggctttagg

SEQ ID NO: 560076 - DNA, 25 bp, Homo sapien
cagtgctcattcgggtagtgcaggt

SEQ ID NO: 560077 - DNA, 25 bp, Homo sapien
cggctttaggggcaaggcagtgacc

SEQ ID NO: 560078 - DNA, 25 bp, Homo sapien
cttgtcccgtctgcagagcatgagg

SEQ ID NO: 560079 - DNA, 25 bp, Homo sapien
cgctgacggccgctccaggttgttg

SEQ ID NO: 560080 - DNA, 25 bp, Homo sapien
gccctgcgctgacggccgctccagg

SEQ ID NO: 560081 - DNA, 25 bp, Homo sapien
tgtggccgcgggcagtacccagccc

SEQ ID NO: 560082 - DNA, 25 bp, Homo sapien
gttgctcaaggctcaactgtacacc

SEQ ID NO: 560083 - DNA, 25 bp, Homo sapien
gctcaaggctcaactgtacaccgaa

SEQ ID NO: 560084 - DNA, 25 bp, Homo sapien
tcaagagcagcggagtcataagaaa

SEQ ID NO: 560085 - DNA, 25 bp, Homo sapien
ctgtctcaagagcagcggagtcata

SEQ ID NO: 560086 - DNA, 25 bp, Homo sapien
cttgaaagatctcaaacaaggcacc

SEQ ID NO: 560087 - DNA, 25 bp, Homo sapien
gaaagatctcaaacaaggcaccttc

SEQ ID NO: 560088 - DNA, 25 bp, Homo sapien
ctgtgtttccttgaaagatctcaaa

SEQ ID NO: 560089 - DNA, 25 bp, Homo sapien
gtttccttgaaagatctcaaacaag

SEQ ID NO: 560090 - DNA, 25 bp, Homo sapien
gatgggaccgaaccctgtatacgct

SEQ ID NO: 560091 - DNA, 25 bp, Homo sapien
gggatccatgtcaaaatccccaggg

SEQ ID NO: 560092 - DNA, 25 bp, Homo sapien
gatgcctaagactgcggatgggacc

SEQ ID NO: 560093 - DNA, 25 bp, Homo sapien
tagagaacttgaatatgcggcttgc

SEQ ID NO: 560094 - DNA, 25 bp, Homo sapien
agctcggcacttagcccacactgtg

SEQ ID NO: 560095 - DNA, 25 bp, Homo sapien
tttgtagttttaggtacagcagcaa

SEQ ID NO: 560096 - DNA, 25 bp, Homo sapien
gttttaggtacagcagcaaaactag

SEQ ID NO: 560097 - DNA, 25 bp, Homo sapien
tttccatttcagctcggcacttagc

SEQ ID NO: 560098 - DNA, 25 bp, Homo sapien
cttagcaatctcagcatactttttt

SEQ ID NO: 560099 - DNA, 25 bp, Homo sapien
gatcttagcaatctcagcatacttt

SEQ ID NO: 560100 - DNA, 25 bp, Homo sapien
tcttagcaatctcagcatacttttt

SEQ ID NO: 560101 - DNA, 25 bp, Homo sapien
atcttagcaatctcagcatactttt

SEQ ID NO: 560102 - DNA, 25 bp, Homo sapien
gagagaatttgttgattggaatgac

SEQ ID NO: 560103 - DNA, 25 bp, Homo sapien
gaatgactcaggttgactttcagga

SEQ ID NO: 560104 - DNA, 25 bp, Homo sapien
gctccagtgaaatgcctgagtgtga

SEQ ID NO: 560105 - DNA, 25 bp, Homo sapien
tgtgatgagaagagcgctgtcttgt

SEQ ID NO: 560106 - DNA, 25 bp, Homo sapien
tactcatcctagtgcagtcccgtta

SEQ ID NO: 560107 - DNA, 25 bp, Homo sapien
tgaggcttaaagcagggctctctaa

SEQ ID NO: 560108 - DNA, 25 bp, Homo sapien
tccacagtggcttgggtcataatga

SEQ ID NO: 560109 - DNA, 25 bp, Homo sapien
gggtcacataagctggtactaggaa

SEQ ID NO: 560110 - DNA, 25 bp, Homo sapien
ctgcatatggcaggtcggagcccat

SEQ ID NO: 560111 - DNA, 25 bp, Homo sapien
ttctgcatatggcaggtcggagccc

SEQ ID NO: 560112 - DNA, 25 bp, Homo sapien
cccacagtttctgcatatggcaggt

SEQ ID NO: 560113 - DNA, 25 bp, Homo sapien
cagtttctgcatatggcaggtcgga

SEQ ID NO: 560114 - DNA, 25 bp, Homo sapien
aagtgctatagtaaacttttcccag

SEQ ID NO: 560115 - DNA, 25 bp, Homo sapien
ctagatcagatctgcaaactacacc

SEQ ID NO: 560116 - DNA, 25 bp, Homo sapien
tcaggcaacactactctagatcaga

SEQ ID NO: 560117 - DNA, 25 bp, Homo sapien
tcacattagctattaacatgccctg

SEQ ID NO: 560118 - DNA, 25 bp, Homo sapien
cctttgcagctgaccattagtgatg

SEQ ID NO: 560119 - DNA, 25 bp, Homo sapien
cagattaaattcatgccaagtcatt

SEQ ID NO: 560120 - DNA, 25 bp, Homo sapien
ttaaattcatgccaagtcatttcct

SEQ ID NO: 560121 - DNA, 25 bp, Homo sapien
gtcacctttgcagctgaccattagt

SEQ ID NO: 560122 - DNA, 25 bp, Homo sapien
tcagcatccgcgctcacataactgg

SEQ ID NO: 560123 - DNA, 25 bp, Homo sapien
tctaaaatattcatagcctttgctg

SEQ ID NO: 560124 - DNA, 25 bp, Homo sapien
ctggtgaaactaggagatagttttg

SEQ ID NO: 560125 - DNA, 25 bp, Homo sapien
tgctgttcccaaaagacgtttgaaa

SEQ ID NO: 560126 - DNA, 25 bp, Homo sapien
cagattgaggcgatcagtgttaaaa

SEQ ID NO: 560127 - DNA, 25 bp, Homo sapien
aattgtggctcagtccattttcccc

SEQ ID NO: 560128 - DNA, 25 bp, Homo sapien
aaaaagctaaacaattgtggctcag

SEQ ID NO: 560129 - DNA, 25 bp, Homo sapien
aatggatggaatcaccaggctctcc

SEQ ID NO: 560130 - DNA, 25 bp, Homo sapien
ggacgggggccacatcgccctgtct

SEQ ID NO: 560131 - DNA, 25 bp, Homo sapien
catcgccctgtctcccgatttctcc

SEQ ID NO: 560132 - DNA, 25 bp, Homo sapien
ggccacatcgccctgtctcccgatt

SEQ ID NO: 560133 - DNA, 25 bp, Homo sapien
ctgctgccaggacgggggccacatc

SEQ ID NO: 560134 - DNA, 25 bp, Homo sapien
caatgctgttgatgattagccttaa

SEQ ID NO: 560135 - DNA, 25 bp, Homo sapien
ccattccttcaatgctgttgatgat

SEQ ID NO: 560136 - DNA, 25 bp, Homo sapien
tgttgatgattagccttaagatggt

SEQ ID NO: 560137 - DNA, 25 bp, Homo sapien
ttagccttaagatggttcttttctc

SEQ ID NO: 560138 - DNA, 25 bp, Homo sapien
cgcagacctcgggatcattgcaaca

SEQ ID NO: 560139 - DNA, 25 bp, Homo sapien
gcagccgcagacctcgggatcattg

SEQ ID NO: 560140 - DNA, 25 bp, Homo sapien
tctgcagaattacattactgctact

SEQ ID NO: 560141 - DNA, 25 bp, Homo sapien
gatcattgcaacatttagcgcatgg

SEQ ID NO: 560142 - DNA, 25 bp, Homo sapien
ctgccatctactggcgcctgtccac

SEQ ID NO: 560143 - DNA, 25 bp, Homo sapien
tctactggcgcctgtccacatgtca

SEQ ID NO: 560144 - DNA, 25 bp, Homo sapien
ctgtgggaagctgcaacagccatct

SEQ ID NO: 560145 - DNA, 25 bp, Homo sapien
gatacgtagtgcagccgctcttgga

SEQ ID NO: 560146 - DNA, 25 bp, Homo sapien
tttccttgatagggataagtttgta

SEQ ID NO: 560147 - DNA, 25 bp, Homo sapien
cttgatagggataagtttgtaggtg

SEQ ID NO: 560148 - DNA, 25 bp, Homo sapien
gtttgtaggtggtgaagggaataca

SEQ ID NO: 560149 - DNA, 25 bp, Homo sapien
tccttgatagggataagtttgtagg

SEQ ID NO: 560150 - DNA, 25 bp, Homo sapien
tagtgcctcctgatttctcaatagt

SEQ ID NO: 560151 - DNA, 25 bp, Homo sapien
ttagtgcctcctgatttctcaatag

SEQ ID NO: 560152 - DNA, 25 bp, Homo sapien
gcctcctgatttctcaatagtacag

SEQ ID NO: 560153 - DNA, 25 bp, Homo sapien
gtgcctcctgatttctcaatagtac

SEQ ID NO: 560154 - DNA, 25 bp, Homo sapien
gtttgcctggcatcgcgcttgtgtg

SEQ ID NO: 560155 - DNA, 25 bp, Homo sapien
tcacgtatcctaacgagaaggcagg

SEQ ID NO: 560156 - DNA, 25 bp, Homo sapien
tcttcagaggtaacgactacccctg

SEQ ID NO: 560157 - DNA, 25 bp, Homo sapien
taacatgaacttcccctgtggcaag

SEQ ID NO: 560158 - DNA, 25 bp, Homo sapien
tcacggagcgctttcaggcagcatg

SEQ ID NO: 560159 - DNA, 25 bp, Homo sapien
agagggtccaggctaatttccaaag

SEQ ID NO: 560160 - DNA, 25 bp, Homo sapien
tttccaaaggtattgtgaatgacat

SEQ ID NO: 560161 - DNA, 25 bp, Homo sapien
ggcagcatgctttacgaaggtagag

SEQ ID NO: 560162 - DNA, 25 bp, Homo sapien
cgctcgtgcatgggccattaaagga

SEQ ID NO: 560163 - DNA, 25 bp, Homo sapien
caggcagacggcacgtgtgcctgaa

SEQ ID NO: 560164 - DNA, 25 bp, Homo sapien
cctccagagtgaggccgctcgtgca

SEQ ID NO: 560165 - DNA, 25 bp, Homo sapien
tgtgcctgaagtcccgagccggcag

SEQ ID NO: 560166 - DNA, 25 bp, Homo sapien
cagcctttaacaatgaaatggtggg

SEQ ID NO: 560167 - DNA, 25 bp, Homo sapien
ctttaacaatgaaatggtgggattt

SEQ ID NO: 560168 - DNA, 25 bp, Homo sapien
gcctttaacaatgaaatggtgggat

SEQ ID NO: 560169 - DNA, 25 bp, Homo sapien
cctttaacaatgaaatggtgggatt

SEQ ID NO: 560170 - DNA, 25 bp, Homo sapien
gatattgatccgtgtttttccggtg

SEQ ID NO: 560171 - DNA, 25 bp, Homo sapien
tagacaccagggctgatattgatcc

SEQ ID NO: 560172 - DNA, 25 bp, Homo sapien
aactgcagcgggctggtaagccctc

SEQ ID NO: 560173 - DNA, 25 bp, Homo sapien
ttttccggtggtccggcgttgcaga

SEQ ID NO: 560174 - DNA, 25 bp, Homo sapien
ttgcggtctgaacaggcaggaaaca

SEQ ID NO: 560175 - DNA, 25 bp, Homo sapien
gctgcacgcagtgatttggtgctca

SEQ ID NO: 560176 - DNA, 25 bp, Homo sapien
gccgaaatcattcggaagtgcttca

SEQ ID NO: 560177 - DNA, 25 bp, Homo sapien
gctcactcttgcatcgaaacagttg

SEQ ID NO: 560178 - DNA, 25 bp, Homo sapien
gatgaatatctggtcttgagcaccg

SEQ ID NO: 560179 - DNA, 25 bp, Homo sapien
ttctgatgaatatctggtcttgagc

SEQ ID NO: 560180 - DNA, 25 bp, Homo sapien
gaatatctggtcttgagcaccgctt

SEQ ID NO: 560181 - DNA, 25 bp, Homo sapien
cttctgatgaatatctggtcttgag

SEQ ID NO: 560182 - DNA, 25 bp, Homo sapien
ttcctgcactttctttgagcgttct

SEQ ID NO: 560183 - DNA, 25 bp, Homo sapien
gaatgatcggcattgccaaatgtgt

SEQ ID NO: 560184 - DNA, 25 bp, Homo sapien
atgtgtccctgtcttagcatgtttt

SEQ ID NO: 560185 - DNA, 25 bp, Homo sapien
tggtcatggcagtctgcagtttgaa

SEQ ID NO: 560186 - DNA, 25 bp, Homo sapien
aaggagtgaagagaacttggtagaa

SEQ ID NO: 560187 - DNA, 25 bp, Homo sapien
tcgggcccccacgacatgcgaaaat

SEQ ID NO: 560188 - DNA, 25 bp, Homo sapien
agcacagagcaatgctgggtgacac

SEQ ID NO: 560189 - DNA, 25 bp, Homo sapien
tcagctggaggtgtctgcagctctt

SEQ ID NO: 560190 - DNA, 25 bp, Homo sapien
tgggtgacactcgggcccccacgac

SEQ ID NO: 560191 - DNA, 25 bp, Homo sapien
tttacaccaattagacagggagcgg

SEQ ID NO: 560192 - DNA, 25 bp, Homo sapien
tcaaaggagaggacgcaataagctg

SEQ ID NO: 560193 - DNA, 25 bp, Homo sapien
taatcggatgcgaacgtgaaccttg

SEQ ID NO: 560194 - DNA, 25 bp, Homo sapien
ggagatacatcaggcccactaggtt

SEQ ID NO: 560195 - DNA, 25 bp, Homo sapien
ctttgcaaatcacccacattagaag

SEQ ID NO: 560196 - DNA, 25 bp, Homo sapien
gagttgctaacgcactcacttgaag

SEQ ID NO: 560197 - DNA, 25 bp, Homo sapien
cctttgcccctagcgtgaccttggg

SEQ ID NO: 560198 - DNA, 25 bp, Homo sapien
tgggaaatccccaggccgcatttct

SEQ ID NO: 560199 - DNA, 25 bp, Homo sapien
ttgggaggccggcatgcagtcccca

SEQ ID NO: 560200 - DNA, 25 bp, Homo sapien
ggctgtgccacccatgtgaagccaa

SEQ ID NO: 560201 - DNA, 25 bp, Homo sapien
agtcctgggccctcagatgcctgca

SEQ ID NO: 560202 - DNA, 25 bp, Homo sapien
catgtgaagccaatgtacttggcgg

SEQ ID NO: 560203 - DNA, 25 bp, Homo sapien
tctgcattgtctctgcgctgcccct

SEQ ID NO: 560204 - DNA, 25 bp, Homo sapien
actgttctgacacccctgatggggg

SEQ ID NO: 560205 - DNA, 25 bp, Homo sapien
gatgggggcctctgcattgtctctg

SEQ ID NO: 560206 - DNA, 25 bp, Homo sapien
gccctcgaggctgattcttcgctct

SEQ ID NO: 560207 - DNA, 25 bp, Homo sapien
cattgccctaggaacctggacttgc

SEQ ID NO: 560208 - DNA, 25 bp, Homo sapien
gcccgtttcaaagactgggaggcca

SEQ ID NO: 560209 - DNA, 25 bp, Homo sapien
gaggcattggacgaatatggccaca

SEQ ID NO: 560210 - DNA, 25 bp, Homo sapien
tggacttgcccgtttcaaagactgg

SEQ ID NO: 560211 - DNA, 25 bp, Homo sapien
tctgaacgcagtctgagcaaaggcc

SEQ ID NO: 560212 - DNA, 25 bp, Homo sapien
ggaagcctcacgcttaacgccagtg

SEQ ID NO: 560213 - DNA, 25 bp, Homo sapien
cagttccccgggactatagacagaa

SEQ ID NO: 560214 - DNA, 25 bp, Homo sapien
tctggagggttttccggaagctgcc

SEQ ID NO: 560215 - DNA, 25 bp, Homo sapien
gggccacagaggcgccctctccccc

SEQ ID NO: 560216 - DNA, 25 bp, Homo sapien
ctttgaatcgtgggtggtttggctg

SEQ ID NO: 560217 - DNA, 25 bp, Homo sapien
tgaatcgtgggtggtttggctggaa

SEQ ID NO: 560218 - DNA, 25 bp, Homo sapien
ttgaatcgtgggtggtttggctgga

SEQ ID NO: 560219 - DNA, 25 bp, Homo sapien
caggccacagcgcaaatgctccgga

SEQ ID NO: 560220 - DNA, 25 bp, Homo sapien
gcagtgaagagcctgcctagacctg

SEQ ID NO: 560221 - DNA, 25 bp, Homo sapien
atgctccggagagtagccctcaggc

SEQ ID NO: 560222 - DNA, 25 bp, Homo sapien
cagcgcaaatgctccggagagtagc

SEQ ID NO: 560223 - DNA, 25 bp, Homo sapien
cagggtcccttcgatgggctccggt

SEQ ID NO: 560224 - DNA, 25 bp, Homo sapien
agggtcccttcgatgggctccggtg

SEQ ID NO: 560225 - DNA, 25 bp, Homo sapien
tcaagcattatacaggaacacccct

SEQ ID NO: 560226 - DNA, 25 bp, Homo sapien
cagtcatcacccaatttaattagcc

SEQ ID NO: 560227 - DNA, 25 bp, Homo sapien
tcacacacaattgattcaagcatta

SEQ ID NO: 560228 - DNA, 25 bp, Homo sapien
tatacaggaacacccctgtgcagct

SEQ ID NO: 560229 - DNA, 25 bp, Homo sapien
caatgtacacataggcgacaggctc

SEQ ID NO: 560230 - DNA, 25 bp, Homo sapien
caagagccgtgcaccgagttgaatc

SEQ ID NO: 560231 - DNA, 25 bp, Homo sapien
tgagacccagcgtagcctttttgtg

SEQ ID NO: 560232 - DNA, 25 bp, Homo sapien
gaagctaagcttctgtcaggcctga

SEQ ID NO: 560233 - DNA, 25 bp, Homo sapien
ttaggaagaatggtgctatacgcac

SEQ ID NO: 560234 - DNA, 25 bp, Homo sapien
tttctacaaattctacccagccgtg

SEQ ID NO: 560235 - DNA, 25 bp, Homo sapien
gatatacagcatgcttgccctgtgg

SEQ ID NO: 560236 - DNA, 25 bp, Homo sapien
gggttacaggccagaatcagtatag

SEQ ID NO: 560237 - DNA, 25 bp, Homo sapien
gagggaagcaccttgctattcgtat

SEQ ID NO: 560238 - DNA, 25 bp, Homo sapien
aacagcagaaacaacacgaggagga

SEQ ID NO: 560239 - DNA, 25 bp, Homo sapien
gaattaggcataacacgagttctct

SEQ ID NO: 560240 - DNA, 25 bp, Homo sapien
gagctcaaagcagagccaacagcag

SEQ ID NO: 560241 - DNA, 25 bp, Homo sapien
ttctcccgggggttgtagcgcagcc

SEQ ID NO: 560242 - DNA, 25 bp, Homo sapien
ggcccctcggagtcgtagctgtcat

SEQ ID NO: 560243 - DNA, 25 bp, Homo sapien
aggtggccctgctgtacacgaagca

SEQ ID NO: 560244 - DNA, 25 bp, Homo sapien
tagctgtcatggtgcgggagctggg

SEQ ID NO: 560245 - DNA, 25 bp, Homo sapien
ccggggcccggtcctccagcagctg

SEQ ID NO: 560246 - DNA, 25 bp, Homo sapien
cgcccggggcccggtcctccagcag

SEQ ID NO: 560247 - DNA, 25 bp, Homo sapien
tgcgcccggggcccggtcctccagc

SEQ ID NO: 560248 - DNA, 25 bp, Homo sapien
tctgcgcccggggcccggtcctcca

SEQ ID NO: 560249 - DNA, 25 bp, Homo sapien
ccgcgatcaccaacgggtagggctc

SEQ ID NO: 560250 - DNA, 25 bp, Homo sapien
cagcaccgtgcgctggtacagggcc

SEQ ID NO: 560251 - DNA, 25 bp, Homo sapien
agcatccgctcgtctaccgcgtaga

SEQ ID NO: 560252 - DNA, 25 bp, Homo sapien
gccgggcaactctcgaagtcatcca

SEQ ID NO: 560253 - DNA, 25 bp, Homo sapien
gcccgaaaggctgcggagccgtggg

SEQ ID NO: 560254 - DNA, 25 bp, Homo sapien
tgccgtacacgaagactagggccat

SEQ ID NO: 560255 - DNA, 25 bp, Homo sapien
tgaccccgcttcagggtgccgtaca

SEQ ID NO: 560256 - DNA, 25 bp, Homo sapien
tcagggtgccgtacacgaagactag

SEQ ID NO: 560257 - DNA, 25 bp, Homo sapien
ggccgccaccctctagagctgctga

SEQ ID NO: 560258 - DNA, 25 bp, Homo sapien
ggcgcggaggttgcggaggttccag

SEQ ID NO: 560259 - DNA, 25 bp, Homo sapien
cccttgtgtggtgggcgcggaggtt

SEQ ID NO: 560260 - DNA, 25 bp, Homo sapien
ggaggttccaggcaaggccgccacc

SEQ ID NO: 560261 - DNA, 25 bp, Homo sapien
ggcgctccttgtattaggacagtct

SEQ ID NO: 560262 - DNA, 25 bp, Homo sapien
ccttgtattaggacagtctgtcaaa

SEQ ID NO: 560263 - DNA, 25 bp, Homo sapien
gacagtctgtcaaacctgtcccaac

SEQ ID NO: 560264 - DNA, 25 bp, Homo sapien
ggaaaaggcgctccttgtattagga

SEQ ID NO: 560265 - DNA, 25 bp, Homo sapien
tcaggtcctggcagtctgacgcagc

SEQ ID NO: 560266 - DNA, 25 bp, Homo sapien
cagcgatcttggctccagcgtgaag

SEQ ID NO: 560267 - DNA, 25 bp, Homo sapien
ggcagtggtgcttcacgggactccc

SEQ ID NO: 560268 - DNA, 25 bp, Homo sapien
ccttccaaggtcttagagggcagtg

SEQ ID NO: 560269 - DNA, 25 bp, Homo sapien
tttaccacttgcctgggtctgggcc

SEQ ID NO: 560270 - DNA, 25 bp, Homo sapien
cacttgcctgggtctgggccacaga

SEQ ID NO: 560271 - DNA, 25 bp, Homo sapien
ccacttgcctgggtctgggccacag

SEQ ID NO: 560272 - DNA, 25 bp, Homo sapien
atatttaccacttgcctgggtctgg

SEQ ID NO: 560273 - DNA, 25 bp, Homo sapien
gtgaaaatgacaaaaggcaccagct

SEQ ID NO: 560274 - DNA, 25 bp, Homo sapien
tacaacagcgggcaaggagctatcc

SEQ ID NO: 560275 - DNA, 25 bp, Homo sapien
gcctaaaattgccaggactcggctg

SEQ ID NO: 560276 - DNA, 25 bp, Homo sapien
aagcagctgtctacaacagcgggca

SEQ ID NO: 560277 - DNA, 25 bp, Homo sapien
cagtgcaccacccagagggtccttg

SEQ ID NO: 560278 - DNA, 25 bp, Homo sapien
cctgttgtctttgttcccctggatc

SEQ ID NO: 560279 - DNA, 25 bp, Homo sapien
acccagagggtccttgtcaatctcc

SEQ ID NO: 560280 - DNA, 25 bp, Homo sapien
gttgtctttgttcccctggatcctg

SEQ ID NO: 560281 - DNA, 25 bp, Homo sapien
ccaatattccggcagtggaggtcct

SEQ ID NO: 560282 - DNA, 25 bp, Homo sapien
cacatgtgatcttggctgggaaagc

SEQ ID NO: 560283 - DNA, 25 bp, Homo sapien
tgtgactcgagctcttccctggagg

SEQ ID NO: 560284 - DNA, 25 bp, Homo sapien
gactcaagggtatgtcaggtccccg

SEQ ID NO: 560285 - DNA, 25 bp, Homo sapien
agagaatagcctgtcttcagtcttt

SEQ ID NO: 560286 - DNA, 25 bp, Homo sapien
ctccagagaatagcctgtcttcagt

SEQ ID NO: 560287 - DNA, 25 bp, Homo sapien
gagaatagcctgtcttcagtcttta

SEQ ID NO: 560288 - DNA, 25 bp, Homo sapien
ttttctccagagaatagcctgtctt

SEQ ID NO: 560289 - DNA, 25 bp, Homo sapien
gctttggtgggggacgtggggcagc

SEQ ID NO: 560290 - DNA, 25 bp, Homo sapien
agcacccgcaggtctaaatcgaggt

SEQ ID NO: 560291 - DNA, 25 bp, Homo sapien
gtgggggacgtggggcagcacccgc

SEQ ID NO: 560292 - DNA, 25 bp, Homo sapien
gcagcacccgcaggtctaaatcgag

SEQ ID NO: 560293 - DNA, 25 bp, Homo sapien
taatggcgttgtccttgggcacgca

SEQ ID NO: 560294 - DNA, 25 bp, Homo sapien
aatggcgttgtccttgggcacgcat

SEQ ID NO: 560295 - DNA, 25 bp, Homo sapien
cttaatggcgttgtccttgggcacg

SEQ ID NO: 560296 - DNA, 25 bp, Homo sapien
tggcgttgtccttgggcacgcatcg

SEQ ID NO: 560297 - DNA, 25 bp, Homo sapien
tctcagaaccgcagcagaatgtgcc

SEQ ID NO: 560298 - DNA, 25 bp, Homo sapien
aaagtctataacactggccagatgc

SEQ ID NO: 560299 - DNA, 25 bp, Homo sapien
tcgggctcctctttgggtgcaccag

SEQ ID NO: 560300 - DNA, 25 bp, Homo sapien
tcatgttcagcccatctccaagggc

SEQ ID NO: 560301 - DNA, 25 bp, Homo sapien
tgaaggtgattaggccacagaaggt

SEQ ID NO: 560302 - DNA, 25 bp, Homo sapien
gaaatgaaggtgattaggccacaga

SEQ ID NO: 560303 - DNA, 25 bp, Homo sapien
gtagaaatgaaggtgattaggccac

SEQ ID NO: 560304 - DNA, 25 bp, Homo sapien
aatgaaggtgattaggccacagaag

SEQ ID NO: 560305 - DNA, 25 bp, Homo sapien
gatccagtccacgaaagtaaatcta

SEQ ID NO: 560306 - DNA, 25 bp, Homo sapien
ccttcatgacgctgtggaaacgttg

SEQ ID NO: 560307 - DNA, 25 bp, Homo sapien
tctaaaaagcgtgttccagcctgcc

SEQ ID NO: 560308 - DNA, 25 bp, Homo sapien
gtttgtgccctaggacgctggcctt

SEQ ID NO: 560309 - DNA, 25 bp, Homo sapien
tgggttcctagagccaattctgagg

SEQ ID NO: 560310 - DNA, 25 bp, Homo sapien
gctgtggtcaggattcaggcatcct

SEQ ID NO: 560311 - DNA, 25 bp, Homo sapien
tctgcagatgtcgttccctgatgct

SEQ ID NO: 560312 - DNA, 25 bp, Homo sapien
ccctgatgctgatgtgttaaggata

SEQ ID NO: 560313 - DNA, 25 bp, Homo sapien
aaatccaagaggccaaagctgaacc

SEQ ID NO: 560314 - DNA, 25 bp, Homo sapien
aaagctaactggtccggacaatagc

SEQ ID NO: 560315 - DNA, 25 bp, Homo sapien
gaaatccaagaggccaaagctgaac

SEQ ID NO: 560316 - DNA, 25 bp, Homo sapien
taactggtccggacaatagcggcat

SEQ ID NO: 560317 - DNA, 25 bp, Homo sapien
tcatgagctgtccatctggtcgggc

SEQ ID NO: 560318 - DNA, 25 bp, Homo sapien
gcaaaatctggtttcccattgccaa

SEQ ID NO: 560319 - DNA, 25 bp, Homo sapien
tcttgaaacgcagtccgtctatagt

SEQ ID NO: 560320 - DNA, 25 bp, Homo sapien
gaaatgcctgtcacttattcagcag

SEQ ID NO: 560321 - DNA, 25 bp, Homo sapien
gtacagatgacaacagcaggaagag

SEQ ID NO: 560322 - DNA, 25 bp, Homo sapien
ctgcctcgtactcccaagtacagat

SEQ ID NO: 560323 - DNA, 25 bp, Homo sapien
caggaagaggtaattaacactcaaa

SEQ ID NO: 560324 - DNA, 25 bp, Homo sapien
gcctcgtactcccaagtacagatga

SEQ ID NO: 560325 - DNA, 25 bp, Homo sapien
gggattggcacctggtcttactctg

SEQ ID NO: 560326 - DNA, 25 bp, Homo sapien
cagaaacacacctcggggattggca

SEQ ID NO: 560327 - DNA, 25 bp, Homo sapien
tgcctcggtgtataagagcagcaga

SEQ ID NO: 560328 - DNA, 25 bp, Homo sapien
tgatgggtctgcctcggtgtataag

SEQ ID NO: 560329 - DNA, 25 bp, Homo sapien
gaatccttccacatgattcaagaaa

SEQ ID NO: 560330 - DNA, 25 bp, Homo sapien
aagttaagtccacttcacagggtga

SEQ ID NO: 560331 - DNA, 25 bp, Homo sapien
caaggaagtgttgccttagaatcca

SEQ ID NO: 560332 - DNA, 25 bp, Homo sapien
tagaatccagatccacagtaagcct

SEQ ID NO: 560333 - DNA, 25 bp, Homo sapien
cagaagtttcactaatggctccaaa

SEQ ID NO: 560334 - DNA, 25 bp, Homo sapien
tccttggcccacagagtaaaacagc

SEQ ID NO: 560335 - DNA, 25 bp, Homo sapien
aaaaagggccagaaatcgactgcat

SEQ ID NO: 560336 - DNA, 25 bp, Homo sapien
cacaagtgccaggagacgtttttag

SEQ ID NO: 560337 - DNA, 25 bp, Homo sapien
gcgcagggagcgacgccccaggttc

SEQ ID NO: 560338 - DNA, 25 bp, Homo sapien
ccaggttcccgcgggcgccaggaca

SEQ ID NO: 560339 - DNA, 25 bp, Homo sapien
gggacgccgagtgctgcggcctcga

SEQ ID NO: 560340 - DNA, 25 bp, Homo sapien
cgcgggcgccaggacaccccgcctg

SEQ ID NO: 560341 - DNA, 25 bp, Homo sapien
cagccggggctgtcggggagggcag

SEQ ID NO: 560342 - DNA, 25 bp, Homo sapien
tgtcggggagggcagggccagggcg

SEQ ID NO: 560343 - DNA, 25 bp, Homo sapien
gctgtcggggagggcagggccaggg

SEQ ID NO: 560344 - DNA, 25 bp, Homo sapien
tgccggcagccggggctgtcgggga

SEQ ID NO: 560345 - DNA, 25 bp, Homo sapien
aaatgaaactgtggccgaaggagac

SEQ ID NO: 560346 - DNA, 25 bp, Homo sapien
tagctccaggactaatttaagcccc

SEQ ID NO: 560347 - DNA, 25 bp, Homo sapien
gagacaatggaaggatgacatcacc

SEQ ID NO: 560348 - DNA, 25 bp, Homo sapien
gacaatgggttaaagcaatgccact

SEQ ID NO: 560349 - DNA, 25 bp, Homo sapien
gcaaaatggaaaacggccttcagat

SEQ ID NO: 560350 - DNA, 25 bp, Homo sapien
cacgaattccccgaatgtggctcca

SEQ ID NO: 560351 - DNA, 25 bp, Homo sapien
tagtgctagtccatacacgacaagg

SEQ ID NO: 560352 - DNA, 25 bp, Homo sapien
tgaaattgcacaagtcagagcatcc

SEQ ID NO: 560353 - DNA, 25 bp, Homo sapien
caagtctagatgtccccaacgatga

SEQ ID NO: 560354 - DNA, 25 bp, Homo sapien
tttcttctcagcagaccgtaattct

SEQ ID NO: 560355 - DNA, 25 bp, Homo sapien
tttcatagtgtttcttggccaagtc

SEQ ID NO: 560356 - DNA, 25 bp, Homo sapien
tcaagctgcaaggagatttcatagt

SEQ ID NO: 560357 - DNA, 25 bp, Homo sapien
ggtgatggatgctaggcactgccca

SEQ ID NO: 560358 - DNA, 25 bp, Homo sapien
ggcaagcttccaaagtacctacgat

SEQ ID NO: 560359 - DNA, 25 bp, Homo sapien
taggagaactcttcgcaaccatagc

SEQ ID NO: 560360 - DNA, 25 bp, Homo sapien
gaatgcttctgagtaacgtgccgta

SEQ ID NO: 560361 - DNA, 25 bp, Homo sapien
tgctttaattgccttgaggaataaa

SEQ ID NO: 560362 - DNA, 25 bp, Homo sapien
tttaattgccttgaggaataaagct

SEQ ID NO: 560363 - DNA, 25 bp, Homo sapien
aattgccttgaggaataaagcttca

SEQ ID NO: 560364 - DNA, 25 bp, Homo sapien
tttgctttaattgccttgaggaata

SEQ ID NO: 560365 - DNA, 25 bp, Homo sapien
tgttatgcaagtcgcccaggtcagg

SEQ ID NO: 560366 - DNA, 25 bp, Homo sapien
ccctgcagtggttggacttctgtaa

SEQ ID NO: 560367 - DNA, 25 bp, Homo sapien
catgaagcaaaagcagttcccagtt

SEQ ID NO: 560368 - DNA, 25 bp, Homo sapien
cattcctccagaaacactcggaagg

SEQ ID NO: 560369 - DNA, 25 bp, Homo sapien
tcttggggtagcagttgaggcccat

SEQ ID NO: 560370 - DNA, 25 bp, Homo sapien
ccatgccaatgccatttccagagct

SEQ ID NO: 560371 - DNA, 25 bp, Homo sapien
caatgccatttccagagctcttggg

SEQ ID NO: 560372 - DNA, 25 bp, Homo sapien
ctcttggggtagcagttgaggccca

SEQ ID NO: 560373 - DNA, 25 bp, Homo sapien
tctcccccaagaacctacaacactc

SEQ ID NO: 560374 - DNA, 25 bp, Homo sapien
caagaacctacaacactctgggccg

SEQ ID NO: 560375 - DNA, 25 bp, Homo sapien
ccccaagaacctacaacactctggg

SEQ ID NO: 560376 - DNA, 25 bp, Homo sapien
aacactctgggccgcccagaagcag

SEQ ID NO: 560377 - DNA, 25 bp, Homo sapien
gcaaagtgtcttcctaccctgatca

SEQ ID NO: 560378 - DNA, 25 bp, Homo sapien
tgagaaataaagacgcctaacctgt

SEQ ID NO: 560379 - DNA, 25 bp, Homo sapien
gaaggaatggccacctgtcaactac

SEQ ID NO: 560380 - DNA, 25 bp, Homo sapien
tgaattgattcttgcacagccttgc

SEQ ID NO: 560381 - DNA, 25 bp, Homo sapien
ttgctccaatccaagaggaggaggt

SEQ ID NO: 560382 - DNA, 25 bp, Homo sapien
catcaggacaacatacgggatgtca

SEQ ID NO: 560383 - DNA, 25 bp, Homo sapien
ctgtatggcctgtggtacccctgag

SEQ ID NO: 560384 - DNA, 25 bp, Homo sapien
ttccaagagggtcaagactccggcc

SEQ ID NO: 560385 - DNA, 25 bp, Homo sapien
ggtgggcttcccatatctgtgactg

SEQ ID NO: 560386 - DNA, 25 bp, Homo sapien
tgaaggaacagggatgaggaataac

SEQ ID NO: 560387 - DNA, 25 bp, Homo sapien
tgtgaaggaacagggatgaggaata

SEQ ID NO: 560388 - DNA, 25 bp, Homo sapien
gaaggaacagggatgaggaataaca

SEQ ID NO: 560389 - DNA, 25 bp, Homo sapien
agtgtgaaggaacagggatgaggaa

SEQ ID NO: 560390 - DNA, 25 bp, Homo sapien
tgtctctaggtaggaacaagcgcta

SEQ ID NO: 560391 - DNA, 25 bp, Homo sapien
tctgtatgtctaggcgaggaagcct

SEQ ID NO: 560392 - DNA, 25 bp, Homo sapien
gggcctctttagaacgcagcatctg

SEQ ID NO: 560393 - DNA, 25 bp, Homo sapien
tgactaaagacccaggcaatgagcc

SEQ ID NO: 560394 - DNA, 25 bp, Homo sapien
agtgctctgcgaggaaacacgtccc

SEQ ID NO: 560395 - DNA, 25 bp, Homo sapien
gaggaaacacgtcccctcactacat

SEQ ID NO: 560396 - DNA, 25 bp, Homo sapien
tgcccagtgctctgcgaggaaacac

SEQ ID NO: 560397 - DNA, 25 bp, Homo sapien
tgcgaggaaacacgtcccctcacta

SEQ ID NO: 560398 - DNA, 25 bp, Homo sapien
tgctggtggcctatataactcagat

SEQ ID NO: 560399 - DNA, 25 bp, Homo sapien
cttgctggtggcctatataactcag

SEQ ID NO: 560400 - DNA, 25 bp, Homo sapien
ttttgttggtcagaaaactctgggc

SEQ ID NO: 560401 - DNA, 25 bp, Homo sapien
ctggtggcctatataactcagataa

SEQ ID NO: 560402 - DNA, 25 bp, Homo sapien
tttgccaacgagaacatgagagagt

SEQ ID NO: 560403 - DNA, 25 bp, Homo sapien
tgggatttccccagcacgtttgcca

SEQ ID NO: 560404 - DNA, 25 bp, Homo sapien
catgagagagtgatcattaggtatt

SEQ ID NO: 560405 - DNA, 25 bp, Homo sapien
taattccagtgcctctcttccaact

SEQ ID NO: 560406 - DNA, 25 bp, Homo sapien
tgtgctctggtttcagcacggtggc

SEQ ID NO: 560407 - DNA, 25 bp, Homo sapien
cagcacggtggcatttctccacgca

SEQ ID NO: 560408 - DNA, 25 bp, Homo sapien
gcattcaaggcatccacgtggcgat

SEQ ID NO: 560409 - DNA, 25 bp, Homo sapien
gagtataatcatgttgttccaggcc

SEQ ID NO: 560410 - DNA, 25 bp, Homo sapien
caaaaacgttctgacttgtcctacg

SEQ ID NO: 560411 - DNA, 25 bp, Homo sapien
ttaccattagttagccagacgttcc

SEQ ID NO: 560412 - DNA, 25 bp, Homo sapien
tcgtccacgtaaagggacttctgca

SEQ ID NO: 560413 - DNA, 25 bp, Homo sapien
gacagtaagaccaaagacattcaca

SEQ ID NO: 560414 - DNA, 25 bp, Homo sapien
taacacaagcattactcgtccacgt

SEQ ID NO: 560415 - DNA, 25 bp, Homo sapien
atgcaatggctggtctttattggaa

SEQ ID NO: 560416 - DNA, 25 bp, Homo sapien
attggaaagatgaaactttatagca

SEQ ID NO: 560417 - DNA, 25 bp, Homo sapien
aactttatagcacattttgagtaac

SEQ ID NO: 560418 - DNA, 25 bp, Homo sapien
caatggctggtctttattggaaaga

SEQ ID NO: 560419 - DNA, 25 bp, Homo sapien
gatgcacccactattctcttgttgg

SEQ ID NO: 560420 - DNA, 25 bp, Homo sapien
tcacagatgcacccactattctctt

SEQ ID NO: 560421 - DNA, 25 bp, Homo sapien
tttgtgcggccaaaaccagatgaca

SEQ ID NO: 560422 - DNA, 25 bp, Homo sapien
ggccaaaaccagatgacagcactgt

SEQ ID NO: 560423 - DNA, 25 bp, Homo sapien
gtagtacattgtatgggtccagtct

SEQ ID NO: 560424 - DNA, 25 bp, Homo sapien
atgacctccatctctaggccagtca

SEQ ID NO: 560425 - DNA, 25 bp, Homo sapien
gtctcttccttgcagtcatcatgac

SEQ ID NO: 560426 - DNA, 25 bp, Homo sapien
gcagtcatcatgacctccatctcta

SEQ ID NO: 560427 - DNA, 25 bp, Homo sapien
cttgttatcaatagaaacaccacct

SEQ ID NO: 560428 - DNA, 25 bp, Homo sapien
gttatcaatagaaacaccacctcca

SEQ ID NO: 560429 - DNA, 25 bp, Homo sapien
ctacttgttatcaatagaaacacca

SEQ ID NO: 560430 - DNA, 25 bp, Homo sapien
tcaatagaaacaccacctccaggct

SEQ ID NO: 560431 - DNA, 25 bp, Homo sapien
ggccatgccattgggaccgccagcc

SEQ ID NO: 560432 - DNA, 25 bp, Homo sapien
agctccatgaagtaaccttgaaagc

SEQ ID NO: 560433 - DNA, 25 bp, Homo sapien
gaagtaaccttgaaagccatcgaca

SEQ ID NO: 560434 - DNA, 25 bp, Homo sapien
aaccttgaaagccatcgacaagcag

SEQ ID NO: 560435 - DNA, 25 bp, Homo sapien
cagggcggacgggactttaacatgt

SEQ ID NO: 560436 - DNA, 25 bp, Homo sapien
aagagctctgctcccttgaagaagg

SEQ ID NO: 560437 - DNA, 25 bp, Homo sapien
cgtgggtgacctcttaaacttgact

SEQ ID NO: 560438 - DNA, 25 bp, Homo sapien
tatagggagaagacaaccattcgtg

SEQ ID NO: 560439 - DNA, 25 bp, Homo sapien
aaataacccatctttccttccacag

SEQ ID NO: 560440 - DNA, 25 bp, Homo sapien
caggcacagggcaccccgcgcttac

SEQ ID NO: 560441 - DNA, 25 bp, Homo sapien
ttccacaggcacagggcaccccgcg

SEQ ID NO: 560442 - DNA, 25 bp, Homo sapien
tccttccacaggcacagggcacccc

SEQ ID NO: 560443 - DNA, 25 bp, Homo sapien
cagacgcccgaggttgtagtaacag

SEQ ID NO: 560444 - DNA, 25 bp, Homo sapien
tctgctgcttcaaaccgtttcaggc

SEQ ID NO: 560445 - DNA, 25 bp, Homo sapien
ggctattctgcactatgcctagatt

SEQ ID NO: 560446 - DNA, 25 bp, Homo sapien
tttaattgctgtccggtaactttgc

SEQ ID NO: 560447 - DNA, 25 bp, Homo sapien
atttgaacagccaaagacagcagct

SEQ ID NO: 560448 - DNA, 25 bp, Homo sapien
tcccggtagtatctgatggcagctg

SEQ ID NO: 560449 - DNA, 25 bp, Homo sapien
gctgtctggttgcctttatcagcca

SEQ ID NO: 560450 - DNA, 25 bp, Homo sapien
atcagccaggtttttgccaatgttg

SEQ ID NO: 560451 - DNA, 25 bp, Homo sapien
gacagagaataattgggccatcagc

SEQ ID NO: 560452 - DNA, 25 bp, Homo sapien
ctgcagacagagaataattgggcca

SEQ ID NO: 560453 - DNA, 25 bp, Homo sapien
gcagacagagaataattgggccatc

SEQ ID NO: 560454 - DNA, 25 bp, Homo sapien
cagagaataattgggccatcagcag

SEQ ID NO: 560455 - DNA, 25 bp, Homo sapien
ccctacaggggttaggagttgcttg

SEQ ID NO: 560456 - DNA, 25 bp, Homo sapien
caggggttaggagttgcttgtgctt

SEQ ID NO: 560457 - DNA, 25 bp, Homo sapien
gggttaggagttgcttgtgctttaa

SEQ ID NO: 560458 - DNA, 25 bp, Homo sapien
cctacaggggttaggagttgcttgt

SEQ ID NO: 560459 - DNA, 25 bp, Homo sapien
ccactagagttgagataacaaagtc

SEQ ID NO: 560460 - DNA, 25 bp, Homo sapien
taacaaagtctagtcacatgtggac

SEQ ID NO: 560461 - DNA, 25 bp, Homo sapien
tagaagaaagcatgattctgtccac

SEQ ID NO: 560462 - DNA, 25 bp, Homo sapien
gatggcacctttcttctatagctag

SEQ ID NO: 560463 - DNA, 25 bp, Homo sapien
ccgtggctgctgtgaccctctcttc

SEQ ID NO: 560464 - DNA, 25 bp, Homo sapien
ctcttctgagttgataaactgcttc

SEQ ID NO: 560465 - DNA, 25 bp, Homo sapien
gccgtggctgctgtgaccctctctt

SEQ ID NO: 560466 - DNA, 25 bp, Homo sapien
cttctgagttgataaactgcttcgg

SEQ ID NO: 560467 - DNA, 25 bp, Homo sapien
gaagatgagggtgactgctcgaggc

SEQ ID NO: 560468 - DNA, 25 bp, Homo sapien
gctcgaggcactttctagatccact

SEQ ID NO: 560469 - DNA, 25 bp, Homo sapien
aatacacattgattacagtgctggg

SEQ ID NO: 560470 - DNA, 25 bp, Homo sapien
tagataatacacattgattacagtg

SEQ ID NO: 560471 - DNA, 25 bp, Homo sapien
caagtgaagagcttggattcatcaa

SEQ ID NO: 560472 - DNA, 25 bp, Homo sapien
gcccaaagaggcacagctagtcaag

SEQ ID NO: 560473 - DNA, 25 bp, Homo sapien
tctgatagaaaagggcactgcaagt

SEQ ID NO: 560474 - DNA, 25 bp, Homo sapien
gtgaaaaaattcctaccagattgct

SEQ ID NO: 560475 - DNA, 25 bp, Homo sapien
cctcagtctgaatacgcaatgtcac

SEQ ID NO: 560476 - DNA, 25 bp, Homo sapien
tcccctgaagctacttcaaagggtg

SEQ ID NO: 560477 - DNA, 25 bp, Homo sapien
caaagggtgagtagatcatctggaa

SEQ ID NO: 560478 - DNA, 25 bp, Homo sapien
cattgatactgtctgcttttaaatg

SEQ ID NO: 560479 - DNA, 25 bp, Homo sapien
catctgtttcattgatactgtctgc

SEQ ID NO: 560480 - DNA, 25 bp, Homo sapien
aaaagctgttcctcactccgccact

SEQ ID NO: 560481 - DNA, 25 bp, Homo sapien
cccagcacgacagcggcaatgagtt

SEQ ID NO: 560482 - DNA, 25 bp, Homo sapien
tgttgatgaataagattcccagcac

SEQ ID NO: 560483 - DNA, 25 bp, Homo sapien
gctgcgcagcacacatctcagcgtg

SEQ ID NO: 560484 - DNA, 25 bp, Homo sapien
tctgttcatcagctggcaccactct

SEQ ID NO: 560485 - DNA, 25 bp, Homo sapien
cagtgagatgcatccggtcattctg

SEQ ID NO: 560486 - DNA, 25 bp, Homo sapien
catggtaattgtcaccagtgagatg

SEQ ID NO: 560487 - DNA, 25 bp, Homo sapien
taattgtcaccagtgagatgcatcc

SEQ ID NO: 560488 - DNA, 25 bp, Homo sapien
aaaagtcagcagcacacagtaccca

SEQ ID NO: 560489 - DNA, 25 bp, Homo sapien
aggtagaggacacgctctgcgacca

SEQ ID NO: 560490 - DNA, 25 bp, Homo sapien
cacagtacccaacgctggggaggta

SEQ ID NO: 560491 - DNA, 25 bp, Homo sapien
tatgtttgctcagggctccgaatcc

SEQ ID NO: 560492 - DNA, 25 bp, Homo sapien
atgggataacgagaaatcccaggcc

SEQ ID NO: 560493 - DNA, 25 bp, Homo sapien
tgggataacgagaaatcccaggccc

SEQ ID NO: 560494 - DNA, 25 bp, Homo sapien
cgcggggagaaatgggataacgaga

SEQ ID NO: 560495 - DNA, 25 bp, Homo sapien
gctgagcattgaaacacttctggaa

SEQ ID NO: 560496 - DNA, 25 bp, Homo sapien
cagggagatacgaagctgagcattg

SEQ ID NO: 560497 - DNA, 25 bp, Homo sapien
tctggaaccacctgatcattcccaa

SEQ ID NO: 560498 - DNA, 25 bp, Homo sapien
catcaccaccataaatttcagtcag

SEQ ID NO: 560499 - DNA, 25 bp, Homo sapien
tgaagcagtcatccgtagctcctct

SEQ ID NO: 560500 - DNA, 25 bp, Homo sapien
ccacctatggtgaaaaggatcgcaa

SEQ ID NO: 560501 - DNA, 25 bp, Homo sapien
tacaacagagggaatcatggcagcg

SEQ ID NO: 560502 - DNA, 25 bp, Homo sapien
gatcgcaaaatgctacttcctaggg

SEQ ID NO: 560503 - DNA, 25 bp, Homo sapien
agagtgctgcaagtgcaattaccct

SEQ ID NO: 560504 - DNA, 25 bp, Homo sapien
tgctgcaagtgcaattaccctccag

SEQ ID NO: 560505 - DNA, 25 bp, Homo sapien
tatcaggccaattaggcagaaccag

SEQ ID NO: 560506 - DNA, 25 bp, Homo sapien
cagggcttggcatatcaggccaatt

SEQ ID NO: 560507 - DNA, 25 bp, Homo sapien
tctgaagaggaggcccccgttcctg

SEQ ID NO: 560508 - DNA, 25 bp, Homo sapien
gaggccgggttgtccacctcggtga

SEQ ID NO: 560509 - DNA, 25 bp, Homo sapien
cattctgaagaggaggcccccgttc

SEQ ID NO: 560510 - DNA, 25 bp, Homo sapien
ggtacagatgtgcagcaattctgcc

SEQ ID NO: 560511 - DNA, 25 bp, Homo sapien
aatcagctggtacttgacattttcc

SEQ ID NO: 560512 - DNA, 25 bp, Homo sapien
acataaaagtgtggctgagccaggt

SEQ ID NO: 560513 - DNA, 25 bp, Homo sapien
aaggacatcgcaaagccccagaggt

SEQ ID NO: 560514 - DNA, 25 bp, Homo sapien
agatgtcaaataccgcatttaaacc

SEQ ID NO: 560515 - DNA, 25 bp, Homo sapien
gattcctaggaaaagccctcgagag

SEQ ID NO: 560516 - DNA, 25 bp, Homo sapien
cacagtctgcgtgtaggagttctac

SEQ ID NO: 560517 - DNA, 25 bp, Homo sapien
gaatgtgggagaagcgacacgtacc

SEQ ID NO: 560518 - DNA, 25 bp, Homo sapien
aaagcaagacaatcagccacgggag

SEQ ID NO: 560519 - DNA, 25 bp, Homo sapien
cagtgatcccttgctctttgcacag

SEQ ID NO: 560520 - DNA, 25 bp, Homo sapien
tgatcccttgctctttgcacagcat

SEQ ID NO: 560521 - DNA, 25 bp, Homo sapien
cagcacagtgatcccttgctctttg

SEQ ID NO: 560522 - DNA, 25 bp, Homo sapien
gcacagtgatcccttgctctttgca

SEQ ID NO: 560523 - DNA, 25 bp, Homo sapien
aaggtggaagaatgcgctccctcct

SEQ ID NO: 560524 - DNA, 25 bp, Homo sapien
gaaggtggaagaatgcgctccctcc

SEQ ID NO: 560525 - DNA, 25 bp, Homo sapien
tgggaatgcctctgagaatctccac

SEQ ID NO: 560526 - DNA, 25 bp, Homo sapien
gaccattctgacgagtctttttgag

SEQ ID NO: 560527 - DNA, 25 bp, Homo sapien
gaactctcactgagactgcaaacag

SEQ ID NO: 560528 - DNA, 25 bp, Homo sapien
gatgaccccaatggtcactgctgct

SEQ ID NO: 560529 - DNA, 25 bp, Homo sapien
caaaacatccccagacgtgtgaaca

SEQ ID NO: 560530 - DNA, 25 bp, Homo sapien
gctgccaatctgcatgggggctcga

SEQ ID NO: 560531 - DNA, 25 bp, Homo sapien
gcaccaacaagaagccaaaacatcc

SEQ ID NO: 560532 - DNA, 25 bp, Homo sapien
gggctcgagcaccaacaagaagcca

SEQ ID NO: 560533 - DNA, 25 bp, Homo sapien
tggtccctaagtggccttctgcgag

SEQ ID NO: 560534 - DNA, 25 bp, Homo sapien
ctggctgtacactatctcgtcggtg

SEQ ID NO: 560535 - DNA, 25 bp, Homo sapien
accactggtccctaagtggccttct

SEQ ID NO: 560536 - DNA, 25 bp, Homo sapien
tctcgtcggtggtgcgtgcaatttg

SEQ ID NO: 560537 - DNA, 25 bp, Homo sapien
ggactaactcctgatgtgcccaaca

SEQ ID NO: 560538 - DNA, 25 bp, Homo sapien
gtcaagatgagaaggcctgtcccca

SEQ ID NO: 560539 - DNA, 25 bp, Homo sapien
ccctggctctcaatgaaccatgagc

SEQ ID NO: 560540 - DNA, 25 bp, Homo sapien
ccgggaggcgctcttcacctcaaat

SEQ ID NO: 560541 - DNA, 25 bp, Homo sapien
ggtgtgcttactgagttcccttggg

SEQ ID NO: 560542 - DNA, 25 bp, Homo sapien
cttggggcagaacagtcctggcaga

SEQ ID NO: 560543 - DNA, 25 bp, Homo sapien
ctgggtgtgcttactgagttccctt

SEQ ID NO: 560544 - DNA, 25 bp, Homo sapien
ggggcagaacagtcctggcagaatc

SEQ ID NO: 560545 - DNA, 25 bp, Homo sapien
aagtccgggccttccgccacgtcat

SEQ ID NO: 560546 - DNA, 25 bp, Homo sapien
aagtccatgccagagcctcggagaa

SEQ ID NO: 560547 - DNA, 25 bp, Homo sapien
gagcctcggagaagtccgggccttc

SEQ ID NO: 560548 - DNA, 25 bp, Homo sapien
tcggagaagtccgggccttccgcca

SEQ ID NO: 560549 - DNA, 25 bp, Homo sapien
actcagtctcggtacagcctctctt

SEQ ID NO: 560550 - DNA, 25 bp, Homo sapien
tttgtccactcagtctcggtacagc

SEQ ID NO: 560551 - DNA, 25 bp, Homo sapien
cggtacagcctctcttcccgtgaca

SEQ ID NO: 560552 - DNA, 25 bp, Homo sapien
tacagcctctcttcccgtgacacat

SEQ ID NO: 560553 - DNA, 25 bp, Homo sapien
caaagggaattttgggagttgtgag

SEQ ID NO: 560554 - DNA, 25 bp, Homo sapien
gaggtggacggggataggcatccag

SEQ ID NO: 560555 - DNA, 25 bp, Homo sapien
gaacgaggtggacggggataggcat

SEQ ID NO: 560556 - DNA, 25 bp, Homo sapien
ggctgttctgatgtcgccgggccag

SEQ ID NO: 560557 - DNA, 25 bp, Homo sapien
taaaggaggccaatacatgtatctg

SEQ ID NO: 560558 - DNA, 25 bp, Homo sapien
tagtgacaggttctatcatatctcc

SEQ ID NO: 560559 - DNA, 25 bp, Homo sapien
tatcaaggtttagtactttcctcaa

SEQ ID NO: 560560 - DNA, 25 bp, Homo sapien
ccccacatgttaaatctatcaaggt

SEQ ID NO: 560561 - DNA, 25 bp, Homo sapien
gcaccaggcccacaactcctaattt

SEQ ID NO: 560562 - DNA, 25 bp, Homo sapien
cgcaccaggcccacaactcctaatt

SEQ ID NO: 560563 - DNA, 25 bp, Homo sapien
ttcaacctcgccaggtctctggcgg

SEQ ID NO: 560564 - DNA, 25 bp, Homo sapien
tctctggcggctgtgtctcttggga

SEQ ID NO: 560565 - DNA, 25 bp, Homo sapien
tatggggccggccaattcaacctcg

SEQ ID NO: 560566 - DNA, 25 bp, Homo sapien
gaagagtcacacgattcattatggg

SEQ ID NO: 560567 - DNA, 25 bp, Homo sapien
aggaggtctgcacggccgacaacac

SEQ ID NO: 560568 - DNA, 25 bp, Homo sapien
gcacacaggaggtctgcacggccga

SEQ ID NO: 560569 - DNA, 25 bp, Homo sapien
gaaagataacaagaagaacagggca

SEQ ID NO: 560570 - DNA, 25 bp, Homo sapien
ataacaagaagaacagggcacacag

SEQ ID NO: 560571 - DNA, 25 bp, Homo sapien
atgaatatgcaatgagcgctctgga

SEQ ID NO: 560572 - DNA, 25 bp, Homo sapien
tgaatatgcaatgagcgctctggaa

SEQ ID NO: 560573 - DNA, 25 bp, Homo sapien
ccctggtgggtcctatggggtatgt

SEQ ID NO: 560574 - DNA, 25 bp, Homo sapien
gggtgcagctgactatgagttccct

SEQ ID NO: 560575 - DNA, 25 bp, Homo sapien
gcagctgactatgagttccctggtg

SEQ ID NO: 560576 - DNA, 25 bp, Homo sapien
tgcagctgactatgagttccctggt

SEQ ID NO: 560577 - DNA, 25 bp, Homo sapien
taaaagccaatccagacaagcctgt

SEQ ID NO: 560578 - DNA, 25 bp, Homo sapien
gactggaatcccaaccctttagaga

SEQ ID NO: 560579 - DNA, 25 bp, Homo sapien
gacaggagcatctcagagctgtgac

SEQ ID NO: 560580 - DNA, 25 bp, Homo sapien
gaggacgcagaagctcaggtatcat

SEQ ID NO: 560581 - DNA, 25 bp, Homo sapien
tgttgtggagtagactttctccagc

SEQ ID NO: 560582 - DNA, 25 bp, Homo sapien
ctggcagagtatttatgtagtgtcc

SEQ ID NO: 560583 - DNA, 25 bp, Homo sapien
tctatttctagagtatgttgtggag

SEQ ID NO: 560584 - DNA, 25 bp, Homo sapien
ccaagatgggtacataaagggagcc

SEQ ID NO: 560585 - DNA, 25 bp, Homo sapien
tacagatgcctcgggcagacgacac

SEQ ID NO: 560586 - DNA, 25 bp, Homo sapien
gtgcatacagatgcctcgggcagac

SEQ ID NO: 560587 - DNA, 25 bp, Homo sapien
catacagatgcctcgggcagacgac

SEQ ID NO: 560588 - DNA, 25 bp, Homo sapien
gcatacagatgcctcgggcagacga

SEQ ID NO: 560589 - DNA, 25 bp, Homo sapien
gggcgaggtgcagcctccggccttt

SEQ ID NO: 560590 - DNA, 25 bp, Homo sapien
gcgcggccagcagggacgccctggg

SEQ ID NO: 560591 - DNA, 25 bp, Homo sapien
gaggtgcagcctccggcctttactg

SEQ ID NO: 560592 - DNA, 25 bp, Homo sapien
cagcctccggcctttactggtgtac

SEQ ID NO: 560593 - DNA, 25 bp, Homo sapien
ggatgttgaccacgtgaaagcccac

SEQ ID NO: 560594 - DNA, 25 bp, Homo sapien
accgagaagacgtccaccatgagga

SEQ ID NO: 560595 - DNA, 25 bp, Homo sapien
aggccgccaaacagaaccgagaaga

SEQ ID NO: 560596 - DNA, 25 bp, Homo sapien
tgttgaccacgtgaaagcccacggg

SEQ ID NO: 560597 - DNA, 25 bp, Homo sapien
aagtcaggacggtgagaggccggta

SEQ ID NO: 560598 - DNA, 25 bp, Homo sapien
ctgctcagtctactgccccagaagt

SEQ ID NO: 560599 - DNA, 25 bp, Homo sapien
tactgccccagaagtcatgatgcca

SEQ ID NO: 560600 - DNA, 25 bp, Homo sapien
gctcagtctactgccccagaagtca

SEQ ID NO: 560601 - DNA, 25 bp, Homo sapien
agtctactgccccagaagtcatgat

SEQ ID NO: 560602 - DNA, 25 bp, Homo sapien
ttctgtgccactagactgggctcca

SEQ ID NO: 560603 - DNA, 25 bp, Homo sapien
catgactatttttctgtgccactag

SEQ ID NO: 560604 - DNA, 25 bp, Homo sapien
tgtgccactagactgggctccatga

SEQ ID NO: 560605 - DNA, 25 bp, Homo sapien
atttttctgtgccactagactgggc

SEQ ID NO: 560606 - DNA, 25 bp, Homo sapien
aagtacccggtcagctgtgaagggc

SEQ ID NO: 560607 - DNA, 25 bp, Homo sapien
aatatttgattaagtggagcctcca

SEQ ID NO: 560608 - DNA, 25 bp, Homo sapien
gggcttcggcagaggatcttttcct

SEQ ID NO: 560609 - DNA, 25 bp, Homo sapien
tctacactcttacagaagtacccgg

SEQ ID NO: 560610 - DNA, 25 bp, Homo sapien
ggaatactaagtctgcaacaccctg

SEQ ID NO: 560611 - DNA, 25 bp, Homo sapien
cacagttgggcagttaagtttacca

SEQ ID NO: 560612 - DNA, 25 bp, Homo sapien
taacggcctctttgatccatatgtg

SEQ ID NO: 560613 - DNA, 25 bp, Homo sapien
gagaaaaatcgagagcaccatcggg

SEQ ID NO: 560614 - DNA, 25 bp, Homo sapien
gatccaaatcagtgtccaacacggc

SEQ ID NO: 560615 - DNA, 25 bp, Homo sapien
actactaacttagcccagaatggag

SEQ ID NO: 560616 - DNA, 25 bp, Homo sapien
gacaaagtctccatcatagctgcgt

SEQ ID NO: 560617 - DNA, 25 bp, Homo sapien
taacaatagcttctgagtcatcaaa

SEQ ID NO: 560618 - DNA, 25 bp, Homo sapien
tcccggctccagcattatgctggtt

SEQ ID NO: 560619 - DNA, 25 bp, Homo sapien
gctccagcattatgctggttaggaa

SEQ ID NO: 560620 - DNA, 25 bp, Homo sapien
gctcccggctccagcattatgctgg

SEQ ID NO: 560621 - DNA, 25 bp, Homo sapien
ccggctccagcattatgctggttag

SEQ ID NO: 560622 - DNA, 25 bp, Homo sapien
aaatattcatcaacactggtaggac

SEQ ID NO: 560623 - DNA, 25 bp, Homo sapien
ttcatcaacactggtaggaccgttt

SEQ ID NO: 560624 - DNA, 25 bp, Homo sapien
atattcatcaacactggtaggaccg

SEQ ID NO: 560625 - DNA, 25 bp, Homo sapien
tattcatcaacactggtaggaccgt

SEQ ID NO: 560626 - DNA, 25 bp, Homo sapien
caggcatctttctatagccttctgt

SEQ ID NO: 560627 - DNA, 25 bp, Homo sapien
cttctgtctgagtgaagatggagac

SEQ ID NO: 560628 - DNA, 25 bp, Homo sapien
ggcatctttctatagccttctgtct

SEQ ID NO: 560629 - DNA, 25 bp, Homo sapien
agatccaacaggcaacgggacacac

SEQ ID NO: 560630 - DNA, 25 bp, Homo sapien
actgcttgtctctcgagcctcacag

SEQ ID NO: 560631 - DNA, 25 bp, Homo sapien
ggaggctcagatttacaatccagag

SEQ ID NO: 560632 - DNA, 25 bp, Homo sapien
cacagcctggcatacggcatgctct

SEQ ID NO: 560633 - DNA, 25 bp, Homo sapien
caatccagagatgaaacaggccgca

SEQ ID NO: 560634 - DNA, 25 bp, Homo sapien
acacaggttagcacacagaccccaa

SEQ ID NO: 560635 - DNA, 25 bp, Homo sapien
cacaggttagcacacagaccccaac

SEQ ID NO: 560636 - DNA, 25 bp, Homo sapien
cgcagctcaggtcccggaaccaact

SEQ ID NO: 560637 - DNA, 25 bp, Homo sapien
caggtcccggaaccaactcctccag

SEQ ID NO: 560638 - DNA, 25 bp, Homo sapien
cgcgccctttgtcccatgtgcggct

SEQ ID NO: 560639 - DNA, 25 bp, Homo sapien
tttgtcccatgtgcggctcacacag

SEQ ID NO: 560640 - DNA, 25 bp, Homo sapien
ggccgcatctccctcccgggtgcgg

SEQ ID NO: 560641 - DNA, 25 bp, Homo sapien
ctccctcccgggtgcggaaactctg

SEQ ID NO: 560642 - DNA, 25 bp, Homo sapien
cccgggtgcggaaactctggcggct

SEQ ID NO: 560643 - DNA, 25 bp, Homo sapien
caaggagcctgagccccggccgcat

SEQ ID NO: 560644 - DNA, 25 bp, Homo sapien
atttctggcctgtctcgcgcttcgc

SEQ ID NO: 560645 - DNA, 25 bp, Homo sapien
tcgcgcttcgcctgcgcggtggtct

SEQ ID NO: 560646 - DNA, 25 bp, Homo sapien
cggcgtcctcgcagaacagccagaa

SEQ ID NO: 560647 - DNA, 25 bp, Homo sapien
gcggtggtctccacgctgggactgc

SEQ ID NO: 560648 - DNA, 25 bp, Homo sapien
cgcaggctcgggccacttggttcca

SEQ ID NO: 560649 - DNA, 25 bp, Homo sapien
acactcccactctcagaggtctttg

SEQ ID NO: 560650 - DNA, 25 bp, Homo sapien
ctcccatccaggggcccggcacacc

SEQ ID NO: 560651 - DNA, 25 bp, Homo sapien
caggctcgggccacttggttccaaa

SEQ ID NO: 560652 - DNA, 25 bp, Homo sapien
ctctggactggaatccgtatcctcg

SEQ ID NO: 560653 - DNA, 25 bp, Homo sapien
tctgtttttccagtatcgcagaatc

SEQ ID NO: 560654 - DNA, 25 bp, Homo sapien
aatccgatccgttgctccctctgga

SEQ ID NO: 560655 - DNA, 25 bp, Homo sapien
ggactggaatccgtatcctcggcat

SEQ ID NO: 560656 - DNA, 25 bp, Homo sapien
taaatgtgatatcgcctcaaggtcc

SEQ ID NO: 560657 - DNA, 25 bp, Homo sapien
tgtctgagaccagaaagcgctgggc

SEQ ID NO: 560658 - DNA, 25 bp, Homo sapien
ggctgagcaattgaacttggaattc

SEQ ID NO: 560659 - DNA, 25 bp, Homo sapien
aaagcgctgggcatctactgggcat

SEQ ID NO: 560660 - DNA, 25 bp, Homo sapien
cttcatcccagacgagcctctcctt

SEQ ID NO: 560661 - DNA, 25 bp, Homo sapien
ttcatttccagcttcatatgagtcc

SEQ ID NO: 560662 - DNA, 25 bp, Homo sapien
tttccagcttcatatgagtccccat

SEQ ID NO: 560663 - DNA, 25 bp, Homo sapien
catttccagcttcatatgagtcccc

SEQ ID NO: 560664 - DNA, 25 bp, Homo sapien
ctttgcggccctgatttctggcatc

SEQ ID NO: 560665 - DNA, 25 bp, Homo sapien
tgggctttgcggccctgatttctgg

SEQ ID NO: 560666 - DNA, 25 bp, Homo sapien
ttagtgggctttgcggccctgattt

SEQ ID NO: 560667 - DNA, 25 bp, Homo sapien
ggctttgcggccctgatttctggca

SEQ ID NO: 560668 - DNA, 25 bp, Homo sapien
aggaccaggcctgggaatactctgt

SEQ ID NO: 560669 - DNA, 25 bp, Homo sapien
ggtcgctgggctcagtgccctgctg

SEQ ID NO: 560670 - DNA, 25 bp, Homo sapien
cattctccctgcttactcgcatgcc

SEQ ID NO: 560671 - DNA, 25 bp, Homo sapien
actctgttcgtcaggaccttgtcca

SEQ ID NO: 560672 - DNA, 25 bp, Homo sapien
tcagcttcgagtgccaggcaaggct

SEQ ID NO: 560673 - DNA, 25 bp, Homo sapien
cagaaagagcagtcagcttcgagtg

SEQ ID NO: 560674 - DNA, 25 bp, Homo sapien
cagcagctcctgaactgcgaatcag

SEQ ID NO: 560675 - DNA, 25 bp, Homo sapien
ggctgggtcgcactctgttctgtag

SEQ ID NO: 560676 - DNA, 25 bp, Homo sapien
ccttcaagcagatagacccgagatt

SEQ ID NO: 560677 - DNA, 25 bp, Homo sapien
caagcagatagacccgagattcttt

SEQ ID NO: 560678 - DNA, 25 bp, Homo sapien
ttgcccccaggaaggcttgaggctg

SEQ ID NO: 560679 - DNA, 25 bp, Homo sapien
ctccttcaagcagatagacccgaga

SEQ ID NO: 560680 - DNA, 25 bp, Homo sapien
gagagggagtcttggtcatggcttc

SEQ ID NO: 560681 - DNA, 25 bp, Homo sapien
gaggcacttcaatgatgaggtgtcc

SEQ ID NO: 560682 - DNA, 25 bp, Homo sapien
gtcctgcttggagatctgataccgc

SEQ ID NO: 560683 - DNA, 25 bp, Homo sapien
tacgtgaatcaagagcaggaagtct

SEQ ID NO: 560684 - DNA, 25 bp, Homo sapien
ttacactggctttagtgagcctggc

SEQ ID NO: 560685 - DNA, 25 bp, Homo sapien
gctttagtgagcctggcagaggctc

SEQ ID NO: 560686 - DNA, 25 bp, Homo sapien
acactggctttagtgagcctggcag

SEQ ID NO: 560687 - DNA, 25 bp, Homo sapien
tggtgtgtaaggagatgacatctca

SEQ ID NO: 560688 - DNA, 25 bp, Homo sapien
gggcattgcgctgcgtctcttgctc

SEQ ID NO: 560689 - DNA, 25 bp, Homo sapien
tatctggggcattgcgctgcgtctc

SEQ ID NO: 560690 - DNA, 25 bp, Homo sapien
aggcatatctggggcattgcgctgc

SEQ ID NO: 560691 - DNA, 25 bp, Homo sapien
tggggcattgcgctgcgtctcttgc

SEQ ID NO: 560692 - DNA, 25 bp, Homo sapien
gggcattgcgctgcgtctcttgctc

SEQ ID NO: 560693 - DNA, 25 bp, Homo sapien
ctcttgctcccagagttcctgtacc

SEQ ID NO: 560694 - DNA, 25 bp, Homo sapien
cttgctcccagagttcctgtacctg

SEQ ID NO: 560695 - DNA, 25 bp, Homo sapien
gcatatctggggcattgcgctgcgt

SEQ ID NO: 560696 - DNA, 25 bp, Homo sapien
caccaaggcccattgctagttttgc

SEQ ID NO: 560697 - DNA, 25 bp, Homo sapien
tcgctgtctatacaacaagcagcca

SEQ ID NO: 560698 - DNA, 25 bp, Homo sapien
tgccatcatggatccagaaatctct

SEQ ID NO: 560699 - DNA, 25 bp, Homo sapien
tgggctgggactccgatcgctgtct

SEQ ID NO: 560700 - DNA, 25 bp, Homo sapien
taaggtctggccaccatccttggcc

SEQ ID NO: 560701 - DNA, 25 bp, Homo sapien
ttcccctaaggtctggccaccatcc

SEQ ID NO: 560702 - DNA, 25 bp, Homo sapien
cctaaggtctggccaccatccttgg

SEQ ID NO: 560703 - DNA, 25 bp, Homo sapien
aggtctggccaccatccttggccat

SEQ ID NO: 560704 - DNA, 25 bp, Homo sapien
tagggctatggtggccacctttcag

SEQ ID NO: 560705 - DNA, 25 bp, Homo sapien
gtgtttagggctatggtggccacct

SEQ ID NO: 560706 - DNA, 25 bp, Homo sapien
tttagggctatggtggccacctttc

SEQ ID NO: 560707 - DNA, 25 bp, Homo sapien
tgtttagggctatggtggccacctt

SEQ ID NO: 560708 - DNA, 25 bp, Homo sapien
ttgggctataaaactgtccacagag

SEQ ID NO: 560709 - DNA, 25 bp, Homo sapien
tacagtgcatgtgatttgggctata

SEQ ID NO: 560710 - DNA, 25 bp, Homo sapien
cagagcctttgaccccaatcattca

SEQ ID NO: 560711 - DNA, 25 bp, Homo sapien
tcaggccctcgaagtgtaacgtgtc

SEQ ID NO: 560712 - DNA, 25 bp, Homo sapien
gaaaagcccaggtctatctgaatat

SEQ ID NO: 560713 - DNA, 25 bp, Homo sapien
gcagaagcttcttgtccattacaag

SEQ ID NO: 560714 - DNA, 25 bp, Homo sapien
tgcagaagcttcttgtccattacaa

SEQ ID NO: 560715 - DNA, 25 bp, Homo sapien
gaaaggtagttcttcatgatcataa

SEQ ID NO: 560716 - DNA, 25 bp, Homo sapien
ccccagggctgtaggctagtatttg

SEQ ID NO: 560717 - DNA, 25 bp, Homo sapien
gctgtaggctagtatttgctttggg

SEQ ID NO: 560718 - DNA, 25 bp, Homo sapien
cctgattgaaaggtagttcttcatg

SEQ ID NO: 560719 - DNA, 25 bp, Homo sapien
ccaggcgagtttggactctccctct

SEQ ID NO: 560720 - DNA, 25 bp, Homo sapien
acacgcgtgcccaggcgagtttgga

SEQ ID NO: 560721 - DNA, 25 bp, Homo sapien
tgggtctggtacctgcactgatttg

SEQ ID NO: 560722 - DNA, 25 bp, Homo sapien
tatttatagtgtttgataatcagca

SEQ ID NO: 560723 - DNA, 25 bp, Homo sapien
gcatttccaccatcaatctccccag

SEQ ID NO: 560724 - DNA, 25 bp, Homo sapien
gttctcccattcagtgctgaatgcc

SEQ ID NO: 560725 - DNA, 25 bp, Homo sapien
aggaggttctcccattcagtgctga

SEQ ID NO: 560726 - DNA, 25 bp, Homo sapien
gaggttctcccattcagtgctgaat

SEQ ID NO: 560727 - DNA, 25 bp, Homo sapien
catttagcaggatgacatgccccga

SEQ ID NO: 560728 - DNA, 25 bp, Homo sapien
gctgctggcgcatccgtgacagctg

SEQ ID NO: 560729 - DNA, 25 bp, Homo sapien
gggacgtgcattacacggagaagca

SEQ ID NO: 560730 - DNA, 25 bp, Homo sapien
catgccccgaagtgaaagatgcgag

SEQ ID NO: 560731 - DNA, 25 bp, Homo sapien
tctcctttcaagacacacatggtct

SEQ ID NO: 560732 - DNA, 25 bp, Homo sapien
cactgcggtgctgggttactcttgg

SEQ ID NO: 560733 - DNA, 25 bp, Homo sapien
gctgggttactcttggaatcagcaa

SEQ ID NO: 560734 - DNA, 25 bp, Homo sapien
gcatcacaatcattcctggaagaca

SEQ ID NO: 560735 - DNA, 25 bp, Homo sapien
cacgtggcttgaacagatcatgtcc

SEQ ID NO: 560736 - DNA, 25 bp, Homo sapien
cagttccttgtgttatgcacgtggc

SEQ ID NO: 560737 - DNA, 25 bp, Homo sapien
gacagctggtcaggtctctcacaca

SEQ ID NO: 560738 - DNA, 25 bp, Homo sapien
tttggcaaatcctgtgattctcaaa

SEQ ID NO: 560739 - DNA, 25 bp, Homo sapien
ccacattgcagccaacggtaggaat

SEQ ID NO: 560740 - DNA, 25 bp, Homo sapien
catctgcttcttgtcaaagaggtgg

SEQ ID NO: 560741 - DNA, 25 bp, Homo sapien
cggaatggtcgtcttgccagcggca

SEQ ID NO: 560742 - DNA, 25 bp, Homo sapien
gtttttatagtctaccgcttccaca

SEQ ID NO: 560743 - DNA, 25 bp, Homo sapien
cttttggttgtgcaaaaaccttgct

SEQ ID NO: 560744 - DNA, 25 bp, Homo sapien
tttgggtcattaacttggttctcag

SEQ ID NO: 560745 - DNA, 25 bp, Homo sapien
tgcttttggttgtgcaaaaaccttg

SEQ ID NO: 560746 - DNA, 25 bp, Homo sapien
gggtcattaacttggttctcagcca

SEQ ID NO: 560747 - DNA, 25 bp, Homo sapien
gggatccagcaaggtatcgaacgac

SEQ ID NO: 560748 - DNA, 25 bp, Homo sapien
cacccaaggttgagtgtagaggtga

SEQ ID NO: 560749 - DNA, 25 bp, Homo sapien
cagacccttgcactgtttggatcct

SEQ ID NO: 560750 - DNA, 25 bp, Homo sapien
ttggactctgattttccctataaaa

SEQ ID NO: 560751 - DNA, 25 bp, Homo sapien
tcaaagttagtagtaagggcagaaa

SEQ ID NO: 560752 - DNA, 25 bp, Homo sapien
atatcaaagttagtagtaagggcag

SEQ ID NO: 560753 - DNA, 25 bp, Homo sapien
cctttttggactcattatattggaa

SEQ ID NO: 560754 - DNA, 25 bp, Homo sapien
acttggtcctttttggactcattat

SEQ ID NO: 560755 - DNA, 25 bp, Homo sapien
tctcctattctgtccatatttccca

SEQ ID NO: 560756 - DNA, 25 bp, Homo sapien
cttctcctattctgtccatatttcc

SEQ ID NO: 560757 - DNA, 25 bp, Homo sapien
ctcctattctgtccatatttcccat

SEQ ID NO: 560758 - DNA, 25 bp, Homo sapien
ttctcctattctgtccatatttccc

SEQ ID NO: 560759 - DNA, 25 bp, Homo sapien
gggcttttgatgtgtgtgatgtaca

SEQ ID NO: 560760 - DNA, 25 bp, Homo sapien
gctgatgtagccgggaacgtgctct

SEQ ID NO: 560761 - DNA, 25 bp, Homo sapien
tgtactctttccacgttcatcccgg

SEQ ID NO: 560762 - DNA, 25 bp, Homo sapien
ctctccggcatcctgggcttttgat

SEQ ID NO: 560763 - DNA, 25 bp, Homo sapien
gggtatataattcctaagtagacac

SEQ ID NO: 560764 - DNA, 25 bp, Homo sapien
tactaacatgtaggcagggcctctg

SEQ ID NO: 560765 - DNA, 25 bp, Homo sapien
gacacccatggtttcgtatatggct

SEQ ID NO: 560766 - DNA, 25 bp, Homo sapien
tatggctactaacatgtaggcaggg

SEQ ID NO: 560767 - DNA, 25 bp, Homo sapien
cacccgggatgcctttgaattggag

SEQ ID NO: 560768 - DNA, 25 bp, Homo sapien
gcagctggctgcagtttaatcgcca

SEQ ID NO: 560769 - DNA, 25 bp, Homo sapien
taatcgccaggtagttcatctcagc

SEQ ID NO: 560770 - DNA, 25 bp, Homo sapien
tgaactgtgggcttacacccgggat

SEQ ID NO: 560771 - DNA, 25 bp, Homo sapien
cgtagctttagctccctctgaactg

SEQ ID NO: 560772 - DNA, 25 bp, Homo sapien
ttaattccagctcgagtgttgccgt

SEQ ID NO: 560773 - DNA, 25 bp, Homo sapien
cgagtgttgccgtttgtggttgccc

SEQ ID NO: 560774 - DNA, 25 bp, Homo sapien
cttgttcccgtagctttagctccct

SEQ ID NO: 560775 - DNA, 25 bp, Homo sapien
gaccaagatctagccttgcttcagt

SEQ ID NO: 560776 - DNA, 25 bp, Homo sapien
tgactgatgcctgctttgtacttca

SEQ ID NO: 560777 - DNA, 25 bp, Homo sapien
tgcctgctttgtacttcagatctct

SEQ ID NO: 560778 - DNA, 25 bp, Homo sapien
tgaaatcatgtgatacaaaacatgg

SEQ ID NO: 560779 - DNA, 25 bp, Homo sapien
gtccttggtgttgtttcattttatt

SEQ ID NO: 560780 - DNA, 25 bp, Homo sapien
aataaaatgaaacaacaccaaggac

SEQ ID NO: 560781 - DNA, 25 bp, Homo sapien
tatagggaaatagtagctttgatgg

SEQ ID NO: 560782 - DNA, 25 bp, Homo sapien
tgtgtatagggaaatagtagctttg

SEQ ID NO: 560783 - DNA, 25 bp, Homo sapien
tgtatagggaaatagtagctttgat

SEQ ID NO: 560784 - DNA, 25 bp, Homo sapien
attgtgtatagggaaatagtagctt

SEQ ID NO: 560785 - DNA, 25 bp, Homo sapien
agcaaggcattgtgggaatgaggcc

SEQ ID NO: 560786 - DNA, 25 bp, Homo sapien
ctagttcagagcaaggcattgtggg

SEQ ID NO: 560787 - DNA, 25 bp, Homo sapien
tgggaatgaggcctgaacactgtac

SEQ ID NO: 560788 - DNA, 25 bp, Homo sapien
cctgaacactgtactgggggctgtt

SEQ ID NO: 560789 - DNA, 25 bp, Homo sapien
tccaggtcatgcagtaggtaaggaa

SEQ ID NO: 560790 - DNA, 25 bp, Homo sapien
tacactctacccgttgctgctgctt

SEQ ID NO: 560791 - DNA, 25 bp, Homo sapien
ttacggctatagattctctcaggag

SEQ ID NO: 560792 - DNA, 25 bp, Homo sapien
gacatgagactgacatgagaacatg

SEQ ID NO: 560793 - DNA, 25 bp, Homo sapien
tggttgcctctgtatagactgtgcg

SEQ ID NO: 560794 - DNA, 25 bp, Homo sapien
agggcagatggttgcctctgtatag

SEQ ID NO: 560795 - DNA, 25 bp, Homo sapien
gcgtgcgtgcacatgttgggagaca

SEQ ID NO: 560796 - DNA, 25 bp, Homo sapien
tctgtatagactgtgcgtgcgtgca

SEQ ID NO: 560797 - DNA, 25 bp, Homo sapien
caagttgtctatgcaggtcctgaga

SEQ ID NO: 560798 - DNA, 25 bp, Homo sapien
ttttgggactgtggcaggcaagcac

SEQ ID NO: 560799 - DNA, 25 bp, Homo sapien
tggattttggtctcttgagattctg

SEQ ID NO: 560800 - DNA, 25 bp, Homo sapien
gacccatccacatcagaagggccaa

SEQ ID NO: 560801 - DNA, 25 bp, Homo sapien
cttggcttgatttgccttattgcta

SEQ ID NO: 560802 - DNA, 25 bp, Homo sapien
ggcttggcttgatttgccttattgc

SEQ ID NO: 560803 - DNA, 25 bp, Homo sapien
gcttggcttgatttgccttattgct

SEQ ID NO: 560804 - DNA, 25 bp, Homo sapien
aggcttggcttgatttgccttattg

SEQ ID NO: 560805 - DNA, 25 bp, Homo sapien
cagtctagttgcaactctgaatcag

SEQ ID NO: 560806 - DNA, 25 bp, Homo sapien
gaaacagtctagttgcaactctgaa

SEQ ID NO: 560807 - DNA, 25 bp, Homo sapien
cgtgaaacagtctagttgcaactct

SEQ ID NO: 560808 - DNA, 25 bp, Homo sapien
catccgtgaaacagtctagttgcaa

SEQ ID NO: 560809 - DNA, 25 bp, Homo sapien
ctctgtccttctgaacttgtgagat

SEQ ID NO: 560810 - DNA, 25 bp, Homo sapien
tgtccttctgaacttgtgagattcc

SEQ ID NO: 560811 - DNA, 25 bp, Homo sapien
cttctgaacttgtgagattccatct

SEQ ID NO: 560812 - DNA, 25 bp, Homo sapien
gattccatctccaaatacgctttca

SEQ ID NO: 560813 - DNA, 25 bp, Homo sapien
gtgatcctggacaaactctggcctt

SEQ ID NO: 560814 - DNA, 25 bp, Homo sapien
ccgtgctctggtgatgggctgctgt

SEQ ID NO: 560815 - DNA, 25 bp, Homo sapien
ggcttcacctgaaagctgtgcagtc

SEQ ID NO: 560816 - DNA, 25 bp, Homo sapien
gggccacgcaacaaaggcttcacct

SEQ ID NO: 560817 - DNA, 25 bp, Homo sapien
tctctcctattgtgatttgagagga

SEQ ID NO: 560818 - DNA, 25 bp, Homo sapien
ggaactctctctcctattgtgattt

SEQ ID NO: 560819 - DNA, 25 bp, Homo sapien
tcctattgtgatttgagaggaattg

SEQ ID NO: 560820 - DNA, 25 bp, Homo sapien
ttttcaatctctccataaacccttc

SEQ ID NO: 560821 - DNA, 25 bp, Homo sapien
caaacctggaacacacctgccccat

SEQ ID NO: 560822 - DNA, 25 bp, Homo sapien
ttcaaacctggaacacacctgcccc

SEQ ID NO: 560823 - DNA, 25 bp, Homo sapien
gattcaaacctggaacacacctgcc

SEQ ID NO: 560824 - DNA, 25 bp, Homo sapien
ggattcaaacctggaacacacctgc

SEQ ID NO: 560825 - DNA, 25 bp, Homo sapien
tcctgtaacatggcttaagccattt

SEQ ID NO: 560826 - DNA, 25 bp, Homo sapien
ggttcctgtaacatggcttaagcca

SEQ ID NO: 560827 - DNA, 25 bp, Homo sapien
gttcctgtaacatggcttaagccat

SEQ ID NO: 560828 - DNA, 25 bp, Homo sapien
tgggttcctgtaacatggcttaagc

SEQ ID NO: 560829 - DNA, 25 bp, Homo sapien
cctggagcgcttgcctgaattcaca

SEQ ID NO: 560830 - DNA, 25 bp, Homo sapien
catatacgtagctctgggaaacagt

SEQ ID NO: 560831 - DNA, 25 bp, Homo sapien
caaggtggcttatggcaatggtctc

SEQ ID NO: 560832 - DNA, 25 bp, Homo sapien
tcctttaaacgttagtagagacaca

SEQ ID NO: 560833 - DNA, 25 bp, Homo sapien
gacgtcaaccaagtatctcagtgaa

SEQ ID NO: 560834 - DNA, 25 bp, Homo sapien
tttcagacccaccaatcgcttacgg

SEQ ID NO: 560835 - DNA, 25 bp, Homo sapien
gaacggtccgcactgttctcatttg

SEQ ID NO: 560836 - DNA, 25 bp, Homo sapien
ccttggaaatcgtcctgctgtgggt

SEQ ID NO: 560837 - DNA, 25 bp, Homo sapien
ttgattctggtacttcttgctggat

SEQ ID NO: 560838 - DNA, 25 bp, Homo sapien
caggaaagttttgtggcctacattt

SEQ ID NO: 560839 - DNA, 25 bp, Homo sapien
ctttgggagcgtcaggaaagttttg

SEQ ID NO: 560840 - DNA, 25 bp, Homo sapien
ttgctggatgactttgggagcgtca

SEQ ID NO: 560841 - DNA, 25 bp, Homo sapien
ttcagccggttcctaaatctttcag

SEQ ID NO: 560842 - DNA, 25 bp, Homo sapien
gacgtgaggctgctgatacaataat

SEQ ID NO: 560843 - DNA, 25 bp, Homo sapien
aattcaggcccgagggtagacgtga

SEQ ID NO: 560844 - DNA, 25 bp, Homo sapien
tctctgcagtgaaccatccgagggc

SEQ ID NO: 560845 - DNA, 25 bp, Homo sapien
gcttaagcccaagtacatcaacatg

SEQ ID NO: 560846 - DNA, 25 bp, Homo sapien
cctcttggtttatgagcttaagccc

SEQ ID NO: 560847 - DNA, 25 bp, Homo sapien
tgcttttcgccagtctctctttgtc

SEQ ID NO: 560848 - DNA, 25 bp, Homo sapien
aattgtcccatttggctcagcccgt

SEQ ID NO: 560849 - DNA, 25 bp, Homo sapien
ttcctgggctatcagagttctgtga

SEQ ID NO: 560850 - DNA, 25 bp, Homo sapien
cattccagatgtagggcacgcatgt

SEQ ID NO: 560851 - DNA, 25 bp, Homo sapien
atattcctgggctatcagagttctg

SEQ ID NO: 560852 - DNA, 25 bp, Homo sapien
attccagatgtagggcacgcatgtc

SEQ ID NO: 560853 - DNA, 25 bp, Homo sapien
ggtcttccaatccagtgaatagtct

SEQ ID NO: 560854 - DNA, 25 bp, Homo sapien
gcagtgaccccaaatcaagctactt

SEQ ID NO: 560855 - DNA, 25 bp, Homo sapien
tagcagtgaccccaaatcaagctac

SEQ ID NO: 560856 - DNA, 25 bp, Homo sapien
ttattggtatctattggtcttccaa

SEQ ID NO: 560857 - DNA, 25 bp, Homo sapien
gcagccggcttcttccagagaggcc

SEQ ID NO: 560858 - DNA, 25 bp, Homo sapien
tttccaagagcagccggcttcttcc

SEQ ID NO: 560859 - DNA, 25 bp, Homo sapien
cagagtccaggtctgtggacatttc

SEQ ID NO: 560860 - DNA, 25 bp, Homo sapien
tggacatttctaggtcgtttctttc

SEQ ID NO: 560861 - DNA, 25 bp, Homo sapien
taggttggccttgtttgctgtaaga

SEQ ID NO: 560862 - DNA, 25 bp, Homo sapien
ggaaaattagacagacgtagccatc

SEQ ID NO: 560863 - DNA, 25 bp, Homo sapien
gcagagaggtacaacctcagggatt

SEQ ID NO: 560864 - DNA, 25 bp, Homo sapien
gattctgcatcgcatgtaggttggc

SEQ ID NO: 560865 - DNA, 25 bp, Homo sapien
tcatatgattttccgtgccatctca

SEQ ID NO: 560866 - DNA, 25 bp, Homo sapien
caacatgatgggagttagctcgtca

SEQ ID NO: 560867 - DNA, 25 bp, Homo sapien
gcgcagctgcagaacatgaaaatgg

SEQ ID NO: 560868 - DNA, 25 bp, Homo sapien
tgtgttgctcgatgtctgccttccc

SEQ ID NO: 560869 - DNA, 25 bp, Homo sapien
atgcaacacggtccatgagagaggt

SEQ ID NO: 560870 - DNA, 25 bp, Homo sapien
aatgcaacacggtccatgagagagg

SEQ ID NO: 560871 - DNA, 25 bp, Homo sapien
ctgaatgcaacacggtccatgagag

SEQ ID NO: 560872 - DNA, 25 bp, Homo sapien
gaatgcaacacggtccatgagagag

SEQ ID NO: 560873 - DNA, 25 bp, Homo sapien
atcaaaatgactgtgttgtgggcca

SEQ ID NO: 560874 - DNA, 25 bp, Homo sapien
ctgtttgaaaaaggagatcaaaatg

SEQ ID NO: 560875 - DNA, 25 bp, Homo sapien
agatcaaaatgactgtgttgtgggc

SEQ ID NO: 560876 - DNA, 25 bp, Homo sapien
tttgaaaaaggagatcaaaatgact

SEQ ID NO: 560877 - DNA, 25 bp, Homo sapien
gagagacccagctgacggccttcct

SEQ ID NO: 560878 - DNA, 25 bp, Homo sapien
aggactcccttcttcacattgctcc

SEQ ID NO: 560879 - DNA, 25 bp, Homo sapien
caggaactccctgtgggtttgggat

SEQ ID NO: 560880 - DNA, 25 bp, Homo sapien
cctgaagcatggtagctgagcaatc

SEQ ID NO: 560881 - DNA, 25 bp, Homo sapien
cacctctctcatccaactcctacag

SEQ ID NO: 560882 - DNA, 25 bp, Homo sapien
catccaactcctacagtcgctatta

SEQ ID NO: 560883 - DNA, 25 bp, Homo sapien
tcctacagtcgctattacccctcat

SEQ ID NO: 560884 - DNA, 25 bp, Homo sapien
tctctcatccaactcctacagtcgc

SEQ ID NO: 560885 - DNA, 25 bp, Homo sapien
tgctgtgatccaggatttggaattg

SEQ ID NO: 560886 - DNA, 25 bp, Homo sapien
tatgccatccatttttctggacttt

SEQ ID NO: 560887 - DNA, 25 bp, Homo sapien
gtgatccaggatttggaattggtcc

SEQ ID NO: 560888 - DNA, 25 bp, Homo sapien
tttctggactttctgctgtgatcca

SEQ ID NO: 560889 - DNA, 25 bp, Homo sapien
tagttgtagcaccaacttgaagcct

SEQ ID NO: 560890 - DNA, 25 bp, Homo sapien
cagaccctcggtgcttagttgtagc

SEQ ID NO: 560891 - DNA, 25 bp, Homo sapien
tcgagccgtcttagggctaggcaag

SEQ ID NO: 560892 - DNA, 25 bp, Homo sapien
tgaagcctatttggtcagaagtggc

SEQ ID NO: 560893 - DNA, 25 bp, Homo sapien
gtgagggagccctcttttggaggag

SEQ ID NO: 560894 - DNA, 25 bp, Homo sapien
gaagagaatgtgaagtgagggagcc

SEQ ID NO: 560895 - DNA, 25 bp, Homo sapien
tgtgaagtgagggagccctcttttg

SEQ ID NO: 560896 - DNA, 25 bp, Homo sapien
agaatgtgaagtgagggagccctct

SEQ ID NO: 560897 - DNA, 25 bp, Homo sapien
gatatcgaaaaacaagggtcactct

SEQ ID NO: 560898 - DNA, 25 bp, Homo sapien
gacgtagggcttttgcaagtttcaa

SEQ ID NO: 560899 - DNA, 25 bp, Homo sapien
gaacttccagtcaaaacaacagggc

SEQ ID NO: 560900 - DNA, 25 bp, Homo sapien
tgtgctggaaggtccaactctctcc

SEQ ID NO: 560901 - DNA, 25 bp, Homo sapien
actctgcttagtggaggctccgtgg

SEQ ID NO: 560902 - DNA, 25 bp, Homo sapien
agggaacgggccacttcccgatgct

SEQ ID NO: 560903 - DNA, 25 bp, Homo sapien
ccgtggcctgtgaattagcatcaac

SEQ ID NO: 560904 - DNA, 25 bp, Homo sapien
atgaacactctgcttagtggaggct

SEQ ID NO: 560905 - DNA, 25 bp, Homo sapien
acacatagcctttgctttgtgctgc

SEQ ID NO: 560906 - DNA, 25 bp, Homo sapien
tggccattagcacctgctcagtgct

SEQ ID NO: 560907 - DNA, 25 bp, Homo sapien
ttctccattggtatggcatggagca

SEQ ID NO: 560908 - DNA, 25 bp, Homo sapien
caggctcacacacatagcctttgct

SEQ ID NO: 560909 - DNA, 25 bp, Homo sapien
agccatccctgccagcggtcagggt

SEQ ID NO: 560910 - DNA, 25 bp, Homo sapien
ctgccagcggtcagggttgcattgt

SEQ ID NO: 560911 - DNA, 25 bp, Homo sapien
ccacagggcctgatagccatccctg

SEQ ID NO: 560912 - DNA, 25 bp, Homo sapien
gggttgcattgtggcccccactcca

SEQ ID NO: 560913 - DNA, 25 bp, Homo sapien
tgtgaactaaagctataacccctgt

SEQ ID NO: 560914 - DNA, 25 bp, Homo sapien
tatataccttagtttacgcagacag

SEQ ID NO: 560915 - DNA, 25 bp, Homo sapien
taattttcccggaggacatgggcca

SEQ ID NO: 560916 - DNA, 25 bp, Homo sapien
tgtgtgatccctaacctgtgagttc

SEQ ID NO: 560917 - DNA, 25 bp, Homo sapien
ctaaatatccagaaggtcatcccca

SEQ ID NO: 560918 - DNA, 25 bp, Homo sapien
taaatatccagaaggtcatccccac

SEQ ID NO: 560919 - DNA, 25 bp, Homo sapien
gatttcatggttgtccttcctccaa

SEQ ID NO: 560920 - DNA, 25 bp, Homo sapien
caaaccgtaagttgactgaggacac

SEQ ID NO: 560921 - DNA, 25 bp, Homo sapien
tgaggacactgaatggcttattggt

SEQ ID NO: 560922 - DNA, 25 bp, Homo sapien
cacttcttaacttcagaaccgcagg

SEQ ID NO: 560923 - DNA, 25 bp, Homo sapien
ctggggtttccctgcgtcggctgca

SEQ ID NO: 560924 - DNA, 25 bp, Homo sapien
tgcgtcggctgcatcttgccgactt

SEQ ID NO: 560925 - DNA, 25 bp, Homo sapien
gagggcagacgccactgcccaaatt

SEQ ID NO: 560926 - DNA, 25 bp, Homo sapien
ttcctcctcgatccgacagcgtggg

SEQ ID NO: 560927 - DNA, 25 bp, Homo sapien
tcatatcttcgctggcaaaccaggg

SEQ ID NO: 560928 - DNA, 25 bp, Homo sapien
cccctccatgcctgagaatgtcatt

SEQ ID NO: 560929 - DNA, 25 bp, Homo sapien
gacatcttgtcctgggtaaccccca

SEQ ID NO: 560930 - DNA, 25 bp, Homo sapien
tgcttcgttcccctccatgcctgag

SEQ ID NO: 560931 - DNA, 25 bp, Homo sapien
gagacattgccaaccatcttcaggg

SEQ ID NO: 560932 - DNA, 25 bp, Homo sapien
ggctctgaaatcatcactttcccca

SEQ ID NO: 560933 - DNA, 25 bp, Homo sapien
tcattagccctgtctcactgtctgt

SEQ ID NO: 560934 - DNA, 25 bp, Homo sapien
ttcatctaaaaacagagggctctga

SEQ ID NO: 560935 - DNA, 25 bp, Homo sapien
tcagaaaccggctcagctcttgctg

SEQ ID NO: 560936 - DNA, 25 bp, Homo sapien
ggcattcgtgtcctcactgggctgg

SEQ ID NO: 560937 - DNA, 25 bp, Homo sapien
gatgatactgcacgactgctgctgt

SEQ ID NO: 560938 - DNA, 25 bp, Homo sapien
gttgtcctgactgttggcattcgtg

SEQ ID NO: 560939 - DNA, 25 bp, Homo sapien
tagaaggctgatcacagaaggagct

SEQ ID NO: 560940 - DNA, 25 bp, Homo sapien
tgcatcatgatctgaccactgtaag

SEQ ID NO: 560941 - DNA, 25 bp, Homo sapien
taatggactctgctaaagagggcag

SEQ ID NO: 560942 - DNA, 25 bp, Homo sapien
gaaggagctaatcccatgttcacga

SEQ ID NO: 560943 - DNA, 25 bp, Homo sapien
ctgcaagctcttccggatgtccacg

SEQ ID NO: 560944 - DNA, 25 bp, Homo sapien
gatgtccacggaccggtatgaaagc

SEQ ID NO: 560945 - DNA, 25 bp, Homo sapien
ctgctccctcgccaggagttcctcc

SEQ ID NO: 560946 - DNA, 25 bp, Homo sapien
cacatgcggatggtctgcttggcca

SEQ ID NO: 560947 - DNA, 25 bp, Homo sapien
taagtgcctgtaaagcaaaagatcc

SEQ ID NO: 560948 - DNA, 25 bp, Homo sapien
gtagtaagtgccatctaagtgcctg

SEQ ID NO: 560949 - DNA, 25 bp, Homo sapien
gatccaggctaggaaaaggctcgcg

SEQ ID NO: 560950 - DNA, 25 bp, Homo sapien
taagtctagtgttttgacgccaccc

SEQ ID NO: 560951 - DNA, 25 bp, Homo sapien
gacagcccctcttggcagtgtgatg

SEQ ID NO: 560952 - DNA, 25 bp, Homo sapien
ttcagaggctaccaaacaaacccag

SEQ ID NO: 560953 - DNA, 25 bp, Homo sapien
cagcaggcccatgcagttgtaggta

SEQ ID NO: 560954 - DNA, 25 bp, Homo sapien
ggcaataaggcagctcccaggatgc

SEQ ID NO: 560955 - DNA, 25 bp, Homo sapien
catcggtgtgttccaaagaggctga

SEQ ID NO: 560956 - DNA, 25 bp, Homo sapien
gagcactggtacattgggcttctct

SEQ ID NO: 560957 - DNA, 25 bp, Homo sapien
ctagagcccaaatcacagcctggag

SEQ ID NO: 560958 - DNA, 25 bp, Homo sapien
tgcacctgtgagctacccacttctg

SEQ ID NO: 560959 - DNA, 25 bp, Homo sapien
ctacgggacatcagggcacagccgc

SEQ ID NO: 560960 - DNA, 25 bp, Homo sapien
atgttcactggaggacggcaggaaa

SEQ ID NO: 560961 - DNA, 25 bp, Homo sapien
tgggacatgtgaccccacttcacga

SEQ ID NO: 560962 - DNA, 25 bp, Homo sapien
gaaagggcacttagcgcctgggaca

SEQ ID NO: 560963 - DNA, 25 bp, Homo sapien
ttgttaattgtactgcagaggcctt

SEQ ID NO: 560964 - DNA, 25 bp, Homo sapien
taattgtactgcagaggccttgaag

SEQ ID NO: 560965 - DNA, 25 bp, Homo sapien
actgcagaggccttgaaggctgaca

SEQ ID NO: 560966 - DNA, 25 bp, Homo sapien
ttgtactgcagaggccttgaaggct

SEQ ID NO: 560967 - DNA, 25 bp, Homo sapien
cagcaggaacttgacgcggaacgtg

SEQ ID NO: 560968 - DNA, 25 bp, Homo sapien
catgtgcttaaacaggagcttgtcc

SEQ ID NO: 560969 - DNA, 25 bp, Homo sapien
tgacgtcgccgccattgtggagcct

SEQ ID NO: 560970 - DNA, 25 bp, Homo sapien
tgtggagcctctccatttcgtagca

SEQ ID NO: 560971 - DNA, 25 bp, Homo sapien
gattcctacagagtccctttggctt

SEQ ID NO: 560972 - DNA, 25 bp, Homo sapien
tttctggcctgagcccaaggctgat

SEQ ID NO: 560973 - DNA, 25 bp, Homo sapien
tcatgtaaggaggaacgatgctgtc

SEQ ID NO: 560974 - DNA, 25 bp, Homo sapien
cctagaggattctgctgaactgtaa

SEQ ID NO: 560975 - DNA, 25 bp, Homo sapien
gaggtgaggcatgaaacaacaaccc

SEQ ID NO: 560976 - DNA, 25 bp, Homo sapien
gttgataagtctctttgaggtgagg

SEQ ID NO: 560977 - DNA, 25 bp, Homo sapien
gaggcatgaaacaacaacccactcc

SEQ ID NO: 560978 - DNA, 25 bp, Homo sapien
taagtctctttgaggtgaggcatga

SEQ ID NO: 560979 - DNA, 25 bp, Homo sapien
cgaagatcattgtaacttaaaagct

SEQ ID NO: 560980 - DNA, 25 bp, Homo sapien
tattatttgaaagtggcgaagatca

SEQ ID NO: 560981 - DNA, 25 bp, Homo sapien
tttgaaagtggcgaagatcattgta

SEQ ID NO: 560982 - DNA, 25 bp, Homo sapien
gtggcgaagatcattgtaacttaaa

SEQ ID NO: 560983 - DNA, 25 bp, Homo sapien
aagcagatttagcatgatgtaggca

SEQ ID NO: 560984 - DNA, 25 bp, Homo sapien
ctacaagcagatttagcatgatgta

SEQ ID NO: 560985 - DNA, 25 bp, Homo sapien
acaagcagatttagcatgatgtagg

SEQ ID NO: 560986 - DNA, 25 bp, Homo sapien
caagcagatttagcatgatgtaggc

SEQ ID NO: 560987 - DNA, 25 bp, Homo sapien
ctggagtacaaaacggaggctgaac

SEQ ID NO: 560988 - DNA, 25 bp, Homo sapien
taagccttgttcatgatgagagata

SEQ ID NO: 560989 - DNA, 25 bp, Homo sapien
ctaagtctaagccttgttcatgatg

SEQ ID NO: 560990 - DNA, 25 bp, Homo sapien
tctaagccttgttcatgatgagaga

SEQ ID NO: 560991 - DNA, 25 bp, Homo sapien
ctgattctaagtctaagccttgttc

SEQ ID NO: 560992 - DNA, 25 bp, Homo sapien
catgcataatcttgttccagtcttc

SEQ ID NO: 560993 - DNA, 25 bp, Homo sapien
tgcataatcttgttccagtcttcac

SEQ ID NO: 560994 - DNA, 25 bp, Homo sapien
gtcatgcataatcttgttccagtct

SEQ ID NO: 560995 - DNA, 25 bp, Homo sapien
catacagtcatgcataatcttgttc

SEQ ID NO: 560996 - DNA, 25 bp, Homo sapien
ttccagccgaagaaaaatttgcatg

SEQ ID NO: 560997 - DNA, 25 bp, Homo sapien
caattcggaacagtacggtaatagc

SEQ ID NO: 560998 - DNA, 25 bp, Homo sapien
atagcttttccagccgaagaaaaat

SEQ ID NO: 560999 - DNA, 25 bp, Homo sapien
tgtgacaattcggaacagtacggta

SEQ ID NO: 561000 - DNA, 25 bp, Homo sapien
catgcctactatgataaagaagctc

SEQ ID NO: 561001 - DNA, 25 bp, Homo sapien
taaagaagctcttgtacatgctgac

SEQ ID NO: 561002 - DNA, 25 bp, Homo sapien
gagaaacatgcctactatgataaag

SEQ ID NO: 561003 - DNA, 25 bp, Homo sapien
tacatgctgacgaccactgtcaaga

SEQ ID NO: 561004 - DNA, 25 bp, Homo sapien
aataagagtaacactaagcattttc

SEQ ID NO: 561005 - DNA, 25 bp, Homo sapien
ttaataagagtaacactaagcattt

SEQ ID NO: 561006 - DNA, 25 bp, Homo sapien
taataagagtaacactaagcatttt

SEQ ID NO: 561007 - DNA, 25 bp, Homo sapien
aatacaatcacacaagcgcccatca

SEQ ID NO: 561008 - DNA, 25 bp, Homo sapien
acaatcacacaagcgcccatcatgt

SEQ ID NO: 561009 - DNA, 25 bp, Homo sapien
atcacacaagcgcccatcatgtaag

SEQ ID NO: 561010 - DNA, 25 bp, Homo sapien
tcacacaagcgcccatcatgtaagt

SEQ ID NO: 561011 - DNA, 25 bp, Homo sapien
gacgtcaccaggagatcgtatcggt

SEQ ID NO: 561012 - DNA, 25 bp, Homo sapien
gcaggcgacattgctatgatcttca

SEQ ID NO: 561013 - DNA, 25 bp, Homo sapien
tcgtatcggtttcttctgctttgcc

SEQ ID NO: 561014 - DNA, 25 bp, Homo sapien
ggcaaagtgaagcaccacccataca

SEQ ID NO: 561015 - DNA, 25 bp, Homo sapien
ttccttaagcaaaaggccatagatt

SEQ ID NO: 561016 - DNA, 25 bp, Homo sapien
accagtgtagggcaaaataagaatc

SEQ ID NO: 561017 - DNA, 25 bp, Homo sapien
tgactagttctgatcatgggacatt

SEQ ID NO: 561018 - DNA, 25 bp, Homo sapien
tttgggaaacatcaaccagtgtagg

SEQ ID NO: 561019 - DNA, 25 bp, Homo sapien
aactgacattgttgccaaaggtacg

SEQ ID NO: 561020 - DNA, 25 bp, Homo sapien
acattgttgccaaaggtacggtcac

SEQ ID NO: 561021 - DNA, 25 bp, Homo sapien
tgacattgttgccaaaggtacggtc

SEQ ID NO: 561022 - DNA, 25 bp, Homo sapien
aaggtgaaaacaactgacattgttg

SEQ ID NO: 561023 - DNA, 25 bp, Homo sapien
tactctcggatgtagcagtgaatac

SEQ ID NO: 561024 - DNA, 25 bp, Homo sapien
tatagcagcttgtgatactctcgga

SEQ ID NO: 561025 - DNA, 25 bp, Homo sapien
tccatcggacacatacaggcttgcc

SEQ ID NO: 561026 - DNA, 25 bp, Homo sapien
cataaccgtgaatgcatatagcagc

SEQ ID NO: 561027 - DNA, 25 bp, Homo sapien
cgagtaatgcgattgtcctcttaaa

SEQ ID NO: 561028 - DNA, 25 bp, Homo sapien
aatggatgctgggttatgtcataca

SEQ ID NO: 561029 - DNA, 25 bp, Homo sapien
ctgggccaggacgagtaatgcgatt

SEQ ID NO: 561030 - DNA, 25 bp, Homo sapien
ttgacagagagcaacaccgactggg

SEQ ID NO: 561031 - DNA, 25 bp, Homo sapien
tcccagcggcctcacgattattatt

SEQ ID NO: 561032 - DNA, 25 bp, Homo sapien
gaagcacagcctttgggtggttgat

SEQ ID NO: 561033 - DNA, 25 bp, Homo sapien
taatagccttatggagagatctgtg

SEQ ID NO: 561034 - DNA, 25 bp, Homo sapien
tattaccttatgcacaacctcccag

SEQ ID NO: 561035 - DNA, 25 bp, Homo sapien
atgaataaaatcagagcattttggg

SEQ ID NO: 561036 - DNA, 25 bp, Homo sapien
tagtgcccaacatgaataaaatcag

SEQ ID NO: 561037 - DNA, 25 bp, Homo sapien
aataaaatcagagcattttgggtac

SEQ ID NO: 561038 - DNA, 25 bp, Homo sapien
agtgcccaacatgaataaaatcaga

SEQ ID NO: 561039 - DNA, 25 bp, Homo sapien
tgcgatcttcagtcggctcttcagg

SEQ ID NO: 561040 - DNA, 25 bp, Homo sapien
tcccatcttctctgatcgacggtca

SEQ ID NO: 561041 - DNA, 25 bp, Homo sapien
tgaagaggctgtgcgatcttcagtc

SEQ ID NO: 561042 - DNA, 25 bp, Homo sapien
tctgatcgacggtcagcaaagccgt

SEQ ID NO: 561043 - DNA, 25 bp, Homo sapien
ctccaacaaaaagggtcagtccaat

SEQ ID NO: 561044 - DNA, 25 bp, Homo sapien
cattgaaattagcaataactactcc

SEQ ID NO: 561045 - DNA, 25 bp, Homo sapien
tgcaacccaggaatacaaaaacatg

SEQ ID NO: 561046 - DNA, 25 bp, Homo sapien
ggtcagtccaatcatgcaacccagg

SEQ ID NO: 561047 - DNA, 25 bp, Homo sapien
gagaacttcaaacaacgccagcata

SEQ ID NO: 561048 - DNA, 25 bp, Homo sapien
cggccccacacgatgaataataaca

SEQ ID NO: 561049 - DNA, 25 bp, Homo sapien
cattgtcgaaattaaagttccgagg

SEQ ID NO: 561050 - DNA, 25 bp, Homo sapien
gccagcatagcgtttcccacattgt

SEQ ID NO: 561051 - DNA, 25 bp, Homo sapien
gaagcattggattttggatgtggat

SEQ ID NO: 561052 - DNA, 25 bp, Homo sapien
tgtaactgaaaatctttcgaaaggc

SEQ ID NO: 561053 - DNA, 25 bp, Homo sapien
ttcgaaaggcataaattacaattgc

SEQ ID NO: 561054 - DNA, 25 bp, Homo sapien
gatgattttatcgatttgcacaaag

SEQ ID NO: 561055 - DNA, 25 bp, Homo sapien
gactttgtccaaaaacggcatgctg

SEQ ID NO: 561056 - DNA, 25 bp, Homo sapien
gccccccaagatcaaggtagggaga

SEQ ID NO: 561057 - DNA, 25 bp, Homo sapien
ggcatgctgtatcttacacaaccat

SEQ ID NO: 561058 - DNA, 25 bp, Homo sapien
tgactgagcgtctgcccttggatgt

SEQ ID NO: 561059 - DNA, 25 bp, Homo sapien
caaacacggggcacccaaaatccag

SEQ ID NO: 561060 - DNA, 25 bp, Homo sapien
tacgatgagtttagtaatgccaacg

SEQ ID NO: 561061 - DNA, 25 bp, Homo sapien
agcatcaagcttagggttccctggg

SEQ ID NO: 561062 - DNA, 25 bp, Homo sapien
acgtcctctttgaccctaagccatg

SEQ ID NO: 561063 - DNA, 25 bp, Homo sapien
ttctttctggattaccagcatgatt

SEQ ID NO: 561064 - DNA, 25 bp, Homo sapien
tctggccttgttcttcagttttttc

SEQ ID NO: 561065 - DNA, 25 bp, Homo sapien
atttctggccttgttcttcagtttt

SEQ ID NO: 561066 - DNA, 25 bp, Homo sapien
acgagcattaatgtcagcaaaagaa

SEQ ID NO: 561067 - DNA, 25 bp, Homo sapien
taatgttgggatcattgcacttggc

SEQ ID NO: 561068 - DNA, 25 bp, Homo sapien
gaactccaaagcttgcaaaaacgag

SEQ ID NO: 561069 - DNA, 25 bp, Homo sapien
aaaaagctgaactccaaagcttgca

SEQ ID NO: 561070 - DNA, 25 bp, Homo sapien
gtggactactgtgaactggaatcaa

SEQ ID NO: 561071 - DNA, 25 bp, Homo sapien
ctcattagctgcattagaggtggac

SEQ ID NO: 561072 - DNA, 25 bp, Homo sapien
gctgcattagaggtggactactgtg

SEQ ID NO: 561073 - DNA, 25 bp, Homo sapien
gactactgtgaactggaatcaaagg

SEQ ID NO: 561074 - DNA, 25 bp, Homo sapien
tgaagccgctgaaaagttctcgaac

SEQ ID NO: 561075 - DNA, 25 bp, Homo sapien
cagtttgaatatgcgcagaggtctc

SEQ ID NO: 561076 - DNA, 25 bp, Homo sapien
ccgaaggaccattagaagctgagct

SEQ ID NO: 561077 - DNA, 25 bp, Homo sapien
gcaggtacattttgaggcatccaac

SEQ ID NO: 561078 - DNA, 25 bp, Homo sapien
tactccaccgaagtccctgatgaca

SEQ ID NO: 561079 - DNA, 25 bp, Homo sapien
ataaatatgtccattactccaccga

SEQ ID NO: 561080 - DNA, 25 bp, Homo sapien
taagctcaatgctcatgaatatcac

SEQ ID NO: 561081 - DNA, 25 bp, Homo sapien
atcttcagattaagctcaatgctca

SEQ ID NO: 561082 - DNA, 25 bp, Homo sapien
acggaaaaacagcaggtcagtattt

SEQ ID NO: 561083 - DNA, 25 bp, Homo sapien
ctgagattttgcagcggtaagcggt

SEQ ID NO: 561084 - DNA, 25 bp, Homo sapien
cagtattttacctcctagttgtaag

SEQ ID NO: 561085 - DNA, 25 bp, Homo sapien
cggaaaaacagcaggtcagtatttt

SEQ ID NO: 561086 - DNA, 25 bp, Homo sapien
cgaaacggggactcaaacatcatgg

SEQ ID NO: 561087 - DNA, 25 bp, Homo sapien
aagtaggtgcatgcatgactcttcg

SEQ ID NO: 561088 - DNA, 25 bp, Homo sapien
ggtaagtgaccaatcccagcaaatc

SEQ ID NO: 561089 - DNA, 25 bp, Homo sapien
ttacgatgatcatgacccagtccag

SEQ ID NO: 561090 - DNA, 25 bp, Homo sapien
cagctcctgtgacagggtctgtttt

SEQ ID NO: 561091 - DNA, 25 bp, Homo sapien
gcgttgaagcgtgctcggaccacca

SEQ ID NO: 561092 - DNA, 25 bp, Homo sapien
cacccggcaaaagtttctgaacctg

SEQ ID NO: 561093 - DNA, 25 bp, Homo sapien
gaacctgtgttctcgcccgacaatg

SEQ ID NO: 561094 - DNA, 25 bp, Homo sapien
gaacagtggcttatcgaagtatggg

SEQ ID NO: 561095 - DNA, 25 bp, Homo sapien
ttctatatctcactgtattggaatg

SEQ ID NO: 561096 - DNA, 25 bp, Homo sapien
catctttatttcactgtcttctctt

SEQ ID NO: 561097 - DNA, 25 bp, Homo sapien
gtgcatttctatatctcactgtatt

SEQ ID NO: 561098 - DNA, 25 bp, Homo sapien
tctctttgtgcatttctatatctca

SEQ ID NO: 561099 - DNA, 25 bp, Homo sapien
tctatgtcaacaatatggtagccaa

SEQ ID NO: 561100 - DNA, 25 bp, Homo sapien
catatgttggatttgatggcaattc

SEQ ID NO: 561101 - DNA, 25 bp, Homo sapien
tgcaatatggctgactctgcagttc

SEQ ID NO: 561102 - DNA, 25 bp, Homo sapien
ctaagttgcgcaggccatatgttgg

SEQ ID NO: 561103 - DNA, 25 bp, Homo sapien
gtttctgaaatccaaagcattgctt

SEQ ID NO: 561104 - DNA, 25 bp, Homo sapien
ttctgaaatccaaagcattgcttaa

SEQ ID NO: 561105 - DNA, 25 bp, Homo sapien
tttcataatcacgtttctgaaatcc

SEQ ID NO: 561106 - DNA, 25 bp, Homo sapien
attttcataatcacgtttctgaaat

SEQ ID NO: 561107 - DNA, 25 bp, Homo sapien
caagagattttcccctgctgatcct

SEQ ID NO: 561108 - DNA, 25 bp, Homo sapien
tcaagagattttcccctgctgatcc

SEQ ID NO: 561109 - DNA, 25 bp, Homo sapien
aagagattttcccctgctgatcctc

SEQ ID NO: 561110 - DNA, 25 bp, Homo sapien
ttgagtcaaagtttcaagagatttt

SEQ ID NO: 561111 - DNA, 25 bp, Homo sapien
gattgacctctcctttgcgggctgc

SEQ ID NO: 561112 - DNA, 25 bp, Homo sapien
cgctcttggcggatatgatgctgca

SEQ ID NO: 561113 - DNA, 25 bp, Homo sapien
tgcgggctgcccctcaaatgatccg

SEQ ID NO: 561114 - DNA, 25 bp, Homo sapien
cagcatgcgctgtcgggtgcaagct

SEQ ID NO: 561115 - DNA, 25 bp, Homo sapien
cccatgataggacgtttctgcataa

SEQ ID NO: 561116 - DNA, 25 bp, Homo sapien
gaaacagccttgtacagcctaagcc

SEQ ID NO: 561117 - DNA, 25 bp, Homo sapien
ggtatagaaagattcccatgatagg

SEQ ID NO: 561118 - DNA, 25 bp, Homo sapien
ttctgcataatgaaacagccttgta

SEQ ID NO: 561119 - DNA, 25 bp, Homo sapien
gtaaaacaagatgaggacccctgag

SEQ ID NO: 561120 - DNA, 25 bp, Homo sapien
ccctgaggatgattcaaatgtggga

SEQ ID NO: 561121 - DNA, 25 bp, Homo sapien
acacacattcccagttgcaaaaata

SEQ ID NO: 561122 - DNA, 25 bp, Homo sapien
aggacccctgaggatgattcaaatg

SEQ ID NO: 561123 - DNA, 25 bp, Homo sapien
ttataagagagatctttggagcttt

SEQ ID NO: 561124 - DNA, 25 bp, Homo sapien
tataagagagatctttggagcttta

SEQ ID NO: 561125 - DNA, 25 bp, Homo sapien
aagagagatctttggagctttatta

SEQ ID NO: 561126 - DNA, 25 bp, Homo sapien
taagagagatctttggagctttatt

SEQ ID NO: 561127 - DNA, 25 bp, Homo sapien
taaacaccactagttgtttatagac

SEQ ID NO: 561128 - DNA, 25 bp, Homo sapien
aagggtgtggaaaaagcctatacat

SEQ ID NO: 561129 - DNA, 25 bp, Homo sapien
tagacacagtagcagggggtccccg

SEQ ID NO: 561130 - DNA, 25 bp, Homo sapien
ctagttgtttatagacacagtagca

SEQ ID NO: 561131 - DNA, 25 bp, Homo sapien
tcccaagtagagacaacagcggatg

SEQ ID NO: 561132 - DNA, 25 bp, Homo sapien
caacagcggatgctaatgggtgagc

SEQ ID NO: 561133 - DNA, 25 bp, Homo sapien
tgctaatgggtgagctcgtcggtaa

SEQ ID NO: 561134 - DNA, 25 bp, Homo sapien
tgagctcgtcggtaatggcctcttg

SEQ ID NO: 561135 - DNA, 25 bp, Homo sapien
cgaggaacctcttggataagactaa

SEQ ID NO: 561136 - DNA, 25 bp, Homo sapien
ctccctggcgaggaacctcttggat

SEQ ID NO: 561137 - DNA, 25 bp, Homo sapien
cctggcgaggaacctcttggataag

SEQ ID NO: 561138 - DNA, 25 bp, Homo sapien
gaggaacctcttggataagactaaa

SEQ ID NO: 561139 - DNA, 25 bp, Homo sapien
taaactacaccattgttaggcaagt

SEQ ID NO: 561140 - DNA, 25 bp, Homo sapien
tgaagaaaccattcgcacagaagaa

SEQ ID NO: 561141 - DNA, 25 bp, Homo sapien
tatagctcaggtagttttaaggtgc

SEQ ID NO: 561142 - DNA, 25 bp, Homo sapien
tattggctgtgggtatcccctaaac

SEQ ID NO: 561143 - DNA, 25 bp, Homo sapien
gacttggcaggcagatactcgatgc

SEQ ID NO: 561144 - DNA, 25 bp, Homo sapien
cagccagtcgggagtaagcctaagt

SEQ ID NO: 561145 - DNA, 25 bp, Homo sapien
tgccttggaaagtctctgggaaccc

SEQ ID NO: 561146 - DNA, 25 bp, Homo sapien
taataccaggatggagttaccagcc

SEQ ID NO: 561147 - DNA, 25 bp, Homo sapien
tagtgactgcggtctccttttccag

SEQ ID NO: 561148 - DNA, 25 bp, Homo sapien
attttagtgactgcggtctcctttt

SEQ ID NO: 561149 - DNA, 25 bp, Homo sapien
tttagtgactgcggtctccttttcc

SEQ ID NO: 561150 - DNA, 25 bp, Homo sapien
agattttagtgactgcggtctcctt

SEQ ID NO: 561151 - DNA, 25 bp, Homo sapien
tgacagctcagctcctaaggaaagc

SEQ ID NO: 561152 - DNA, 25 bp, Homo sapien
ctcagctcctaaggaaagctgcttg

SEQ ID NO: 561153 - DNA, 25 bp, Homo sapien
agttgacagctcagctcctaaggaa

SEQ ID NO: 561154 - DNA, 25 bp, Homo sapien
cagctcagctcctaaggaaagctgc

SEQ ID NO: 561155 - DNA, 25 bp, Homo sapien
tattcataatacaaatgccagaatg

SEQ ID NO: 561156 - DNA, 25 bp, Homo sapien
aaggcttgccgtattcataatacaa

SEQ ID NO: 561157 - DNA, 25 bp, Homo sapien
tgccagaatgctgtctccgcaattt

SEQ ID NO: 561158 - DNA, 25 bp, Homo sapien
ctccgcaatttgtgcttccattaaa

SEQ ID NO: 561159 - DNA, 25 bp, Homo sapien
tccatgccccatgcacagtgttgag

SEQ ID NO: 561160 - DNA, 25 bp, Homo sapien
cactgacatatgaccttctgcttcc

SEQ ID NO: 561161 - DNA, 25 bp, Homo sapien
tgactggctgaagccaaggcactat

SEQ ID NO: 561162 - DNA, 25 bp, Homo sapien
actgcaatttcagactgactggctg

SEQ ID NO: 561163 - DNA, 25 bp, Homo sapien
gccacgtggcgcagctcaaaagctt

SEQ ID NO: 561164 - DNA, 25 bp, Homo sapien
tgtttacaaagtcgcatggctgcca

SEQ ID NO: 561165 - DNA, 25 bp, Homo sapien
tccaggaccctaaagaactctgcgg

SEQ ID NO: 561166 - DNA, 25 bp, Homo sapien
gaagcctggttattcgaaacagcag

SEQ ID NO: 561167 - DNA, 25 bp, Homo sapien
tggcggtcaataaactgcttcataa

SEQ ID NO: 561168 - DNA, 25 bp, Homo sapien
caattgctgagcgtttggagtggtc

SEQ ID NO: 561169 - DNA, 25 bp, Homo sapien
ctgttgctggcggtcaataaactgc

SEQ ID NO: 561170 - DNA, 25 bp, Homo sapien
tttttggtcgatgtatttgttgtcc

SEQ ID NO: 561171 - DNA, 25 bp, Homo sapien
gattttaggaactgtaaaatctgaa

SEQ ID NO: 561172 - DNA, 25 bp, Homo sapien
aatttttcaaagattcgcaggcgta

SEQ ID NO: 561173 - DNA, 25 bp, Homo sapien
ctttggtgtccgcatttgcttcact

SEQ ID NO: 561174 - DNA, 25 bp, Homo sapien
caggcgtaaagggagcttttctttg

SEQ ID NO: 561175 - DNA, 25 bp, Homo sapien
actttgacgtctttcccaacccatg

SEQ ID NO: 561176 - DNA, 25 bp, Homo sapien
tatcagccaccaaaactttgacgtc

SEQ ID NO: 561177 - DNA, 25 bp, Homo sapien
tgacgtctttcccaacccatgattt

SEQ ID NO: 561178 - DNA, 25 bp, Homo sapien
ttcggcactatcagccaccaaaact

SEQ ID NO: 561179 - DNA, 25 bp, Homo sapien
atacagaatttcttcaggtgggtgg

SEQ ID NO: 561180 - DNA, 25 bp, Homo sapien
aggtgggtgggcactgtcttttctg

SEQ ID NO: 561181 - DNA, 25 bp, Homo sapien
aatttcttcaggtgggtgggcactg

SEQ ID NO: 561182 - DNA, 25 bp, Homo sapien
tggcctgtgaaatccaatacagaat

SEQ ID NO: 561183 - DNA, 25 bp, Homo sapien
cgcaggctggcgtaggattccaagg

SEQ ID NO: 561184 - DNA, 25 bp, Homo sapien
agggtacgtccattgttccctgctg

SEQ ID NO: 561185 - DNA, 25 bp, Homo sapien
gattcctataatcaaagaaaggcag

SEQ ID NO: 561186 - DNA, 25 bp, Homo sapien
gcgtaggattccaagggtacgtcca

SEQ ID NO: 561187 - DNA, 25 bp, Homo sapien
cttgcgagctcttcttctcaaaggg

SEQ ID NO: 561188 - DNA, 25 bp, Homo sapien
tgacgatagctgtaatcctcctgcc

SEQ ID NO: 561189 - DNA, 25 bp, Homo sapien
tcctccatgcaacagaagctatagg

SEQ ID NO: 561190 - DNA, 25 bp, Homo sapien
tgatacaagaacgttccacccattg

SEQ ID NO: 561191 - DNA, 25 bp, Homo sapien
catcaagttctaagttgtccaaaat

SEQ ID NO: 561192 - DNA, 25 bp, Homo sapien
tcaagttctaagttgtccaaaataa

SEQ ID NO: 561193 - DNA, 25 bp, Homo sapien
cttcatcaagttctaagttgtccaa

SEQ ID NO: 561194 - DNA, 25 bp, Homo sapien
tcatcaagttctaagttgtccaaaa

SEQ ID NO: 561195 - DNA, 25 bp, Homo sapien
catgtattagctctcaactcaggga

SEQ ID NO: 561196 - DNA, 25 bp, Homo sapien
tccacttggaactaacggagacttg

SEQ ID NO: 561197 - DNA, 25 bp, Homo sapien
tgtgggtaccaacactgccgatgct

SEQ ID NO: 561198 - DNA, 25 bp, Homo sapien
gaagcatttagacttggagagccca

SEQ ID NO: 561199 - DNA, 25 bp, Homo sapien
agtaagtctggccagagtctggctt

SEQ ID NO: 561200 - DNA, 25 bp, Homo sapien
gacaggcgtcttgagtgccacagag

SEQ ID NO: 561201 - DNA, 25 bp, Homo sapien
caagccacgcagatgccaaggagaa

SEQ ID NO: 561202 - DNA, 25 bp, Homo sapien
aaaagagctgtgaggaacgcattcc

SEQ ID NO: 561203 - DNA, 25 bp, Homo sapien
gactgaagtctgacccaaggctttg

SEQ ID NO: 561204 - DNA, 25 bp, Homo sapien
gcaactggcactccgggtgagagat

SEQ ID NO: 561205 - DNA, 25 bp, Homo sapien
aactgtccctggcatgtagggcact

SEQ ID NO: 561206 - DNA, 25 bp, Homo sapien
tccgctgaagccctatttgaatgtg

SEQ ID NO: 561207 - DNA, 25 bp, Homo sapien
aatattctttatgacgctcctcttt

SEQ ID NO: 561208 - DNA, 25 bp, Homo sapien
tattctttatgacgctcctctttct

SEQ ID NO: 561209 - DNA, 25 bp, Homo sapien
ctaatattctttatgacgctcctct

SEQ ID NO: 561210 - DNA, 25 bp, Homo sapien
attctttatgacgctcctctttctc

SEQ ID NO: 561211 - DNA, 25 bp, Homo sapien
ttgtttgttggttagcctgtctgtg

SEQ ID NO: 561212 - DNA, 25 bp, Homo sapien
ggacatgaattaagctctttcccac

SEQ ID NO: 561213 - DNA, 25 bp, Homo sapien
tgtgttcgttattgctaatttccaa

SEQ ID NO: 561214 - DNA, 25 bp, Homo sapien
gcctgtctgtgttcgttattgctaa

SEQ ID NO: 561215 - DNA, 25 bp, Homo sapien
tgaaatagatggcaaccacgggtgc

SEQ ID NO: 561216 - DNA, 25 bp, Homo sapien
gcatttagagtttggtccattacgt

SEQ ID NO: 561217 - DNA, 25 bp, Homo sapien
tggcaaaaagatgatagagaatgaa

SEQ ID NO: 561218 - DNA, 25 bp, Homo sapien
gagtttggtccattacgtccaccca

SEQ ID NO: 561219 - DNA, 25 bp, Homo sapien
agcgtgttgttattgatacttgacc

SEQ ID NO: 561220 - DNA, 25 bp, Homo sapien
tatgaagcgtgttgttattgatact

SEQ ID NO: 561221 - DNA, 25 bp, Homo sapien
tgaaaatatgaagcgtgttgttatt

SEQ ID NO: 561222 - DNA, 25 bp, Homo sapien
tgttattgatacttgaccgcaccat

SEQ ID NO: 561223 - DNA, 25 bp, Homo sapien
gaactacctattcgcatgttattcc

SEQ ID NO: 561224 - DNA, 25 bp, Homo sapien
ctattcgcatgttattccatttttc

SEQ ID NO: 561225 - DNA, 25 bp, Homo sapien
tctctgaactacctattcgcatgtt

SEQ ID NO: 561226 - DNA, 25 bp, Homo sapien
agtaatgcacaggagtagagtttca

SEQ ID NO: 561227 - DNA, 25 bp, Homo sapien
cgagctgctttcattatgatggtca

SEQ ID NO: 561228 - DNA, 25 bp, Homo sapien
ctgaataactgattagggggcctgg

SEQ ID NO: 561229 - DNA, 25 bp, Homo sapien
caggcaaaatggtgcaattgagtaa

SEQ ID NO: 561230 - DNA, 25 bp, Homo sapien
ctgggagaggccgagctgctttcat

SEQ ID NO: 561231 - DNA, 25 bp, Homo sapien
tgtaatactacttgattactattat

SEQ ID NO: 561232 - DNA, 25 bp, Homo sapien
aatgtaatactacttgattactatt

SEQ ID NO: 561233 - DNA, 25 bp, Homo sapien
taatactacttgattactattatag

SEQ ID NO: 561234 - DNA, 25 bp, Homo sapien
aaatgtaatactacttgattactat

SEQ ID NO: 561235 - DNA, 25 bp, Homo sapien
tcggaaacgtagtaaatctgtccag

SEQ ID NO: 561236 - DNA, 25 bp, Homo sapien
tcttaatcagccgaactactcggag

SEQ ID NO: 561237 - DNA, 25 bp, Homo sapien
ttcttcgacaaagcagaacatctgc

SEQ ID NO: 561238 - DNA, 25 bp, Homo sapien
gacataacaatcaagaggctggcag

SEQ ID NO: 561239 - DNA, 25 bp, Homo sapien
taaaatttgatacgcatgtatggat

SEQ ID NO: 561240 - DNA, 25 bp, Homo sapien
tgtgccaacatcttatgtagtttaa

SEQ ID NO: 561241 - DNA, 25 bp, Homo sapien
tgtcattgtgcctttctcaagttca

SEQ ID NO: 561242 - DNA, 25 bp, Homo sapien
cgattgttacaatttgtgaatgcac

SEQ ID NO: 561243 - DNA, 25 bp, Homo sapien
tctgggtatacatgaagagtagttc

SEQ ID NO: 561244 - DNA, 25 bp, Homo sapien
gagtagttccaattacgagtagtag

SEQ ID NO: 561245 - DNA, 25 bp, Homo sapien
tatatccagtaaatcccaaacacca

SEQ ID NO: 561246 - DNA, 25 bp, Homo sapien
tcgaatttgtggagagatgagctaa

SEQ ID NO: 561247 - DNA, 25 bp, Homo sapien
gaatgggtttctacgttgtcaatca

SEQ ID NO: 561248 - DNA, 25 bp, Homo sapien
tcataggttggatttattgaagcgt

SEQ ID NO: 561249 - DNA, 25 bp, Homo sapien
gtatgtatacctcactcacacaatg

SEQ ID NO: 561250 - DNA, 25 bp, Homo sapien
gaagcgttgtacaactgtgtatgta

SEQ ID NO: 561251 - DNA, 25 bp, Homo sapien
ggaaatgaatcaggccacactgtga

SEQ ID NO: 561252 - DNA, 25 bp, Homo sapien
taccctggcaacgtgacatactgtg

SEQ ID NO: 561253 - DNA, 25 bp, Homo sapien
tctctaagaggcactgtccgcggtt

SEQ ID NO: 561254 - DNA, 25 bp, Homo sapien
gcaagattctagagtaagacccagg

SEQ ID NO: 561255 - DNA, 25 bp, Homo sapien
tccgccaggtagaactcgtcgtact

SEQ ID NO: 561256 - DNA, 25 bp, Homo sapien
acgtccacggtcaccatgctcagga

SEQ ID NO: 561257 - DNA, 25 bp, Homo sapien
tgtagtagttgctagccgccacgat

SEQ ID NO: 561258 - DNA, 25 bp, Homo sapien
aacatgtggaaaacggatgaccgca

SEQ ID NO: 561259 - DNA, 25 bp, Homo sapien
atctggcacatttctatgctcatta

SEQ ID NO: 561260 - DNA, 25 bp, Homo sapien
catttctatgctcattaaaattttt

SEQ ID NO: 561261 - DNA, 25 bp, Homo sapien
tctggcacatttctatgctcattaa

SEQ ID NO: 561262 - DNA, 25 bp, Homo sapien
ttcataacacagataggcaaatcat

SEQ ID NO: 561263 - DNA, 25 bp, Homo sapien
ctatactcctttcagcataatgttc

SEQ ID NO: 561264 - DNA, 25 bp, Homo sapien
tctatactcctttcagcataatgtt

SEQ ID NO: 561265 - DNA, 25 bp, Homo sapien
ttctatactcctttcagcataatgt

SEQ ID NO: 561266 - DNA, 25 bp, Homo sapien
tgcatcaggtgaagataaggagatc

SEQ ID NO: 561267 - DNA, 25 bp, Homo sapien
catcaggtgaagataaggagatctg

SEQ ID NO: 561268 - DNA, 25 bp, Homo sapien
caggtgaagataaggagatctgtag

SEQ ID NO: 561269 - DNA, 25 bp, Homo sapien
ctatgcatcaggtgaagataaggag

SEQ ID NO: 561270 - DNA, 25 bp, Homo sapien
tcataagccaagaaggtactgcctc

SEQ ID NO: 561271 - DNA, 25 bp, Homo sapien
cactggactgttctcggttaataaa

SEQ ID NO: 561272 - DNA, 25 bp, Homo sapien
taaagcacagttgcagaagtgacca

SEQ ID NO: 561273 - DNA, 25 bp, Homo sapien
cagcttctaagcgagaggtcaaata

SEQ ID NO: 561274 - DNA, 25 bp, Homo sapien
cttgttgacatccacagctaccagc

SEQ ID NO: 561275 - DNA, 25 bp, Homo sapien
gcttgttgacatccacagctaccag

SEQ ID NO: 561276 - DNA, 25 bp, Homo sapien
ggcttgttgacatccacagctacca

SEQ ID NO: 561277 - DNA, 25 bp, Homo sapien
ggggcttgttgacatccacagctac

SEQ ID NO: 561278 - DNA, 25 bp, Homo sapien
cttctcgatccccacatttgttgaa

SEQ ID NO: 561279 - DNA, 25 bp, Homo sapien
tgttgaaactgtactctgatttctg

SEQ ID NO: 561280 - DNA, 25 bp, Homo sapien
tggtggctgttgaggtagtgctgct

SEQ ID NO: 561281 - DNA, 25 bp, Homo sapien
gtagtgctgcttctcgatccccaca

SEQ ID NO: 561282 - DNA, 25 bp, Homo sapien
tgaaatagaagtaggaacgccaacg

SEQ ID NO: 561283 - DNA, 25 bp, Homo sapien
gaagaaaatgagagtgatgaaatag

SEQ ID NO: 561284 - DNA, 25 bp, Homo sapien
caacggggaaagctgtcaattgctc

SEQ ID NO: 561285 - DNA, 25 bp, Homo sapien
tgaggcggcctcatagacggtgaat

SEQ ID NO: 561286 - DNA, 25 bp, Homo sapien
gctggcaagcacgtccttgtggaat

SEQ ID NO: 561287 - DNA, 25 bp, Homo sapien
ttgtggaataccccatgacactgtc

SEQ ID NO: 561288 - DNA, 25 bp, Homo sapien
tgattggcttcgtgtcgagaaggga

SEQ ID NO: 561289 - DNA, 25 bp, Homo sapien
gatggagtccagcagatttctttgg

SEQ ID NO: 561290 - DNA, 25 bp, Homo sapien
aggcagttccttaatgctggcaagc

SEQ ID NO: 561291 - DNA, 25 bp, Homo sapien
agagctccagccatgaggactacat

SEQ ID NO: 561292 - DNA, 25 bp, Homo sapien
aatccacacccttcctcagcgttcc

SEQ ID NO: 561293 - DNA, 25 bp, Homo sapien
atgaggactacatcaggcagttcct

SEQ ID NO: 561294 - DNA, 25 bp, Homo sapien
ctctttccagccaagaggtggaggt

SEQ ID NO: 561295 - DNA, 25 bp, Homo sapien
agcgttcctgaacctgattggcttc

SEQ ID NO: 561296 - DNA, 25 bp, Homo sapien
ggtcgcctatatctgcagtgagagc

SEQ ID NO: 561297 - DNA, 25 bp, Homo sapien
aagtccagccgcagacttgatgaca

SEQ ID NO: 561298 - DNA, 25 bp, Homo sapien
gtttctttgagcctgtgcatgagaa

SEQ ID NO: 561299 - DNA, 25 bp, Homo sapien
aacagaaggcaagtccagccgcaga

SEQ ID NO: 561300 - DNA, 25 bp, Homo sapien
aaggcaagtccagccgcagacttga

SEQ ID NO: 561301 - DNA, 25 bp, Homo sapien
ttaacccctccagggatatggaaca

SEQ ID NO: 561302 - DNA, 25 bp, Homo sapien
ccctccagggatatggaacacccca

SEQ ID NO: 561303 - DNA, 25 bp, Homo sapien
taacccctccagggatatggaacac

SEQ ID NO: 561304 - DNA, 25 bp, Homo sapien
cctccagggatatggaacaccccat

SEQ ID NO: 561305 - DNA, 25 bp, Homo sapien
gtaacctgtgtgagtcagtacaccc

SEQ ID NO: 561306 - DNA, 25 bp, Homo sapien
taggtaacctgtgtgagtcagtaca

SEQ ID NO: 561307 - DNA, 25 bp, Homo sapien
ctaggtaacctgtgtgagtcagtac

SEQ ID NO: 561308 - DNA, 25 bp, Homo sapien
ggtaacctgtgtgagtcagtacacc

SEQ ID NO: 561309 - DNA, 25 bp, Homo sapien
acgacctcaagagagcaatcagaca

SEQ ID NO: 561310 - DNA, 25 bp, Homo sapien
tgtgctgtggctgatggagtaatac

SEQ ID NO: 561311 - DNA, 25 bp, Homo sapien
ctagcaagtatctgggctaacgacc

SEQ ID NO: 561312 - DNA, 25 bp, Homo sapien
tggctgatggagtaatactgactgg

SEQ ID NO: 561313 - DNA, 25 bp, Homo sapien
caggcactcactaccacgcctggtt

SEQ ID NO: 561314 - DNA, 25 bp, Homo sapien
accacacctggcctggaataatttt

SEQ ID NO: 561315 - DNA, 25 bp, Homo sapien
cacacctggcctggaataatttttt

SEQ ID NO: 561316 - DNA, 25 bp, Homo sapien
ggcactcactaccacgcctggttaa

SEQ ID NO: 561317 - DNA, 25 bp, Homo sapien
tcactgtaaatcacaacgattcaca

SEQ ID NO: 561318 - DNA, 25 bp, Homo sapien
aatcacaacgattcacaaatcctct

SEQ ID NO: 561319 - DNA, 25 bp, Homo sapien
taaatcacaacgattcacaaatcct

SEQ ID NO: 561320 - DNA, 25 bp, Homo sapien
tgtaaatcacaacgattcacaaatc

SEQ ID NO: 561321 - DNA, 25 bp, Homo sapien
tcctcaaaggtcagcaaaatgtgct

SEQ ID NO: 561322 - DNA, 25 bp, Homo sapien
gattttgtactgtctgccatcaaga

SEQ ID NO: 561323 - DNA, 25 bp, Homo sapien
gctgctttcttacggctgatatccg

SEQ ID NO: 561324 - DNA, 25 bp, Homo sapien
gttcatcatccaggctagtgctagc

SEQ ID NO: 561325 - DNA, 25 bp, Homo sapien
gctaattaacccctccaggtgtctc

SEQ ID NO: 561326 - DNA, 25 bp, Homo sapien
cttttaggtttaaacatggtgtgtg

SEQ ID NO: 561327 - DNA, 25 bp, Homo sapien
tgcaagctaattaacccctccaggt

SEQ ID NO: 561328 - DNA, 25 bp, Homo sapien
agacagctgcaagctaattaacccc

SEQ ID NO: 561329 - DNA, 25 bp, Homo sapien
gcttgctaagttctctcccacatct

SEQ ID NO: 561330 - DNA, 25 bp, Homo sapien
tgcttgctaagttctctcccacatc

SEQ ID NO: 561331 - DNA, 25 bp, Homo sapien
ttttgcttgctaagttctctcccac

SEQ ID NO: 561332 - DNA, 25 bp, Homo sapien
tttgcttgctaagttctctcccaca

SEQ ID NO: 561333 - DNA, 25 bp, Homo sapien
aaagccactgtagcccagctcttgc

SEQ ID NO: 561334 - DNA, 25 bp, Homo sapien
cattaaagccactgtagcccagctc

SEQ ID NO: 561335 - DNA, 25 bp, Homo sapien
ctatctcattaaagccactgtagcc

SEQ ID NO: 561336 - DNA, 25 bp, Homo sapien
taaagccactgtagcccagctcttg

SEQ ID NO: 561337 - DNA, 25 bp, Homo sapien
tgggcactggtagccttcttctagc

SEQ ID NO: 561338 - DNA, 25 bp, Homo sapien
ggcactggtagccttcttctagctc

SEQ ID NO: 561339 - DNA, 25 bp, Homo sapien
cactggtagccttcttctagctctg

SEQ ID NO: 561340 - DNA, 25 bp, Homo sapien
actggtagccttcttctagctctgg

SEQ ID NO: 561341 - DNA, 25 bp, Homo sapien
ccttcttatgttcagttgctgcttc

SEQ ID NO: 561342 - DNA, 25 bp, Homo sapien
aataccttcttatgttcagttgctg

SEQ ID NO: 561343 - DNA, 25 bp, Homo sapien
taccttcttatgttcagttgctgct

SEQ ID NO: 561344 - DNA, 25 bp, Homo sapien
ttctttaataccttcttatgttcag

SEQ ID NO: 561345 - DNA, 25 bp, Homo sapien
cattttaagcacaactctcactaga

SEQ ID NO: 561346 - DNA, 25 bp, Homo sapien
gaacaagtgactctctggagttggg

SEQ ID NO: 561347 - DNA, 25 bp, Homo sapien
tatttccgtagtcattttccctcag

SEQ ID NO: 561348 - DNA, 25 bp, Homo sapien
tagaagattaattgccctggaacac

SEQ ID NO: 561349 - DNA, 25 bp, Homo sapien
ccaagtatcccagtgtctgaccacg

SEQ ID NO: 561350 - DNA, 25 bp, Homo sapien
aacatggtctgcaagatactgaagg

SEQ ID NO: 561351 - DNA, 25 bp, Homo sapien
ctcctgcctaatgcagggtcttctc

SEQ ID NO: 561352 - DNA, 25 bp, Homo sapien
gaccacgttggccttctcccagctc

SEQ ID NO: 561353 - DNA, 25 bp, Homo sapien
ggctaacatcataccaaaggcggaa

SEQ ID NO: 561354 - DNA, 25 bp, Homo sapien
gttagacttgagttaaaatcctggc

SEQ ID NO: 561355 - DNA, 25 bp, Homo sapien
tagatgaagtcgaatcccatgaaac

SEQ ID NO: 561356 - DNA, 25 bp, Homo sapien
gatctggaacaagatcaggacgccc

SEQ ID NO: 561357 - DNA, 25 bp, Homo sapien
tttatgtctgggctaatagtaacgg

SEQ ID NO: 561358 - DNA, 25 bp, Homo sapien
ctgggctaatagtaacggtaaaatg

SEQ ID NO: 561359 - DNA, 25 bp, Homo sapien
agatggatgtttcagtaagctgaga

SEQ ID NO: 561360 - DNA, 25 bp, Homo sapien
tagtaacggtaaaatggtgctgaca

SEQ ID NO: 561361 - DNA, 25 bp, Homo sapien
tccctgctgccctgaaatctggcat

SEQ ID NO: 561362 - DNA, 25 bp, Homo sapien
tctgggttgtgcttggaaccccaaa

SEQ ID NO: 561363 - DNA, 25 bp, Homo sapien
tccacagtgaagctctaggtttatg

SEQ ID NO: 561364 - DNA, 25 bp, Homo sapien
aacacctaatgggacacttctggac

SEQ ID NO: 561365 - DNA, 25 bp, Homo sapien
cttatgaaaattacagagatatctt

SEQ ID NO: 561366 - DNA, 25 bp, Homo sapien
taaaatgcagttaatagataaactt

SEQ ID NO: 561367 - DNA, 25 bp, Homo sapien
ttcttatgaaaattacagagatatc

SEQ ID NO: 561368 - DNA, 25 bp, Homo sapien
gagatatctttgttaatcaactaga

SEQ ID NO: 561369 - DNA, 25 bp, Homo sapien
gctttgtgtcatttacaacacagtg

SEQ ID NO: 561370 - DNA, 25 bp, Homo sapien
ctttgtgtcatttacaacacagtga

SEQ ID NO: 561371 - DNA, 25 bp, Homo sapien
tttgtgtcatttacaacacagtgat

SEQ ID NO: 561372 - DNA, 25 bp, Homo sapien
aatggaaacactccatatttgttct

SEQ ID NO: 561373 - DNA, 25 bp, Homo sapien
tggaaacactccatatttgttctcc

SEQ ID NO: 561374 - DNA, 25 bp, Homo sapien
ggaaacactccatatttgttctccc

SEQ ID NO: 561375 - DNA, 25 bp, Homo sapien
atggaaacactccatatttgttctc

SEQ ID NO: 561376 - DNA, 25 bp, Homo sapien
aatgctcggatcataatcagtggcc

SEQ ID NO: 561377 - DNA, 25 bp, Homo sapien
ggtccttggcagttcaaatcggaaa

SEQ ID NO: 561378 - DNA, 25 bp, Homo sapien
tcggaaataaatccggaatgctcgg

SEQ ID NO: 561379 - DNA, 25 bp, Homo sapien
tcagtggccgtggaatccgcaacat

SEQ ID NO: 561380 - DNA, 25 bp, Homo sapien
tcaaaaacacaccagcgatctttca

SEQ ID NO: 561381 - DNA, 25 bp, Homo sapien
aacacaccagcgatctttcacatag

SEQ ID NO: 561382 - DNA, 25 bp, Homo sapien
gatctttcacataggaactatcccc

SEQ ID NO: 561383 - DNA, 25 bp, Homo sapien
taaatccatcaaaaacacaccagcg

SEQ ID NO: 561384 - DNA, 25 bp, Homo sapien
gaaatgacgctgatgatggcacaga

SEQ ID NO: 561385 - DNA, 25 bp, Homo sapien
gatagtgctcgaaggtcattggcgt

SEQ ID NO: 561386 - DNA, 25 bp, Homo sapien
caataatgtatccaaagtgaaggtc

SEQ ID NO: 561387 - DNA, 25 bp, Homo sapien
cacagatgcgcagcaaagagtgaac

SEQ ID NO: 561388 - DNA, 25 bp, Homo sapien
tgatggtccagagttactacacggc

SEQ ID NO: 561389 - DNA, 25 bp, Homo sapien
ctgcaatgatggtccagagttacta

SEQ ID NO: 561390 - DNA, 25 bp, Homo sapien
gcaatgatggtccagagttactaca

SEQ ID NO: 561391 - DNA, 25 bp, Homo sapien
gtccagagttactacacggcaccat

SEQ ID NO: 561392 - DNA, 25 bp, Homo sapien
tggtttgttaatccagaggatgtca

SEQ ID NO: 561393 - DNA, 25 bp, Homo sapien
gacagagactcatcaggaccaaagt

SEQ ID NO: 561394 - DNA, 25 bp, Homo sapien
tgtcagcattatccgacagagactc

SEQ ID NO: 561395 - DNA, 25 bp, Homo sapien
tcaggaccaaagtcagtgactggct

SEQ ID NO: 561396 - DNA, 25 bp, Homo sapien
tggtgagcaagcacaaaaccacagt

SEQ ID NO: 561397 - DNA, 25 bp, Homo sapien
ctttggtgagcaagcacaaaaccac

SEQ ID NO: 561398 - DNA, 25 bp, Homo sapien
tttggtgagcaagcacaaaaccaca

SEQ ID NO: 561399 - DNA, 25 bp, Homo sapien
ttggtgagcaagcacaaaaccacag

SEQ ID NO: 561400 - DNA, 25 bp, Homo sapien
gaaaagccttggattctgcagccta

SEQ ID NO: 561401 - DNA, 25 bp, Homo sapien
tacactgatcttagaaaggaaattg

SEQ ID NO: 561402 - DNA, 25 bp, Homo sapien
caacttcgctccttcatactaaggg

SEQ ID NO: 561403 - DNA, 25 bp, Homo sapien
cagggtctctcttccgtattttttg

SEQ ID NO: 561404 - DNA, 25 bp, Homo sapien
aggcccgaggtgtcgccggccctgg

SEQ ID NO: 561405 - DNA, 25 bp, Homo sapien
caggcccgaggtgtcgccggccctg

SEQ ID NO: 561406 - DNA, 25 bp, Homo sapien
ggggcatcccgcggcaggcgccccc

SEQ ID NO: 561407 - DNA, 25 bp, Homo sapien
cgcggcaggcgcccccgacacccac

SEQ ID NO: 561408 - DNA, 25 bp, Homo sapien
ctcagagctgtcatggtgcccgcgg

SEQ ID NO: 561409 - DNA, 25 bp, Homo sapien
cggcggcgacagtgggcgaccggca

SEQ ID NO: 561410 - DNA, 25 bp, Homo sapien
aggatcagtgccaggcgcggcgccc

SEQ ID NO: 561411 - DNA, 25 bp, Homo sapien
ccccagcgctcagagctgtcatggt

SEQ ID NO: 561412 - DNA, 25 bp, Homo sapien
gccagggtcggtactggcagttcct

SEQ ID NO: 561413 - DNA, 25 bp, Homo sapien
tcacgctcgccgtgtcactcactga

SEQ ID NO: 561414 - DNA, 25 bp, Homo sapien
ggcagttccttcttgccggctgcca

SEQ ID NO: 561415 - DNA, 25 bp, Homo sapien
tgcagtgatgccgaagggcgggcac

SEQ ID NO: 561416 - DNA, 25 bp, Homo sapien
gtctttcgtactcaacagcacggcg

SEQ ID NO: 561417 - DNA, 25 bp, Homo sapien
agcacggcggcggtgtgcacgggag

SEQ ID NO: 561418 - DNA, 25 bp, Homo sapien
tcctctcgggggtctttcgtactca

SEQ ID NO: 561419 - DNA, 25 bp, Homo sapien
tgtgcacgggagtccgccgggcaca

SEQ ID NO: 561420 - DNA, 25 bp, Homo sapien
cacggtaccgaggactagttccatt

SEQ ID NO: 561421 - DNA, 25 bp, Homo sapien
tcagactgtgcacggtaccgaggac

SEQ ID NO: 561422 - DNA, 25 bp, Homo sapien
agcccagcgtgcgagcgtgaggtca

SEQ ID NO: 561423 - DNA, 25 bp, Homo sapien
cgtgaggtcagactgtgcacggtac

SEQ ID NO: 561424 - DNA, 25 bp, Homo sapien
tctctgtccttggttgaactacctc

SEQ ID NO: 561425 - DNA, 25 bp, Homo sapien
ttcatgggcttcaaggaagtcatgg

SEQ ID NO: 561426 - DNA, 25 bp, Homo sapien
gacagtctcagagaattcatgggct

SEQ ID NO: 561427 - DNA, 25 bp, Homo sapien
gctcatgagccaaacaatcccaatg

SEQ ID NO: 561428 - DNA, 25 bp, Homo sapien
gcagccccgatagacttgcttgagg

SEQ ID NO: 561429 - DNA, 25 bp, Homo sapien
cactttgcgtagctctgtcttggat

SEQ ID NO: 561430 - DNA, 25 bp, Homo sapien
agatgtgcctgtacagaattcagcc

SEQ ID NO: 561431 - DNA, 25 bp, Homo sapien
gatgtcgctaagttttgtagcccca

SEQ ID NO: 561432 - DNA, 25 bp, Homo sapien
gtctttgaaaggttggcatatggcc

SEQ ID NO: 561433 - DNA, 25 bp, Homo sapien
aagtaggtggtaaaaatccatctgc

SEQ ID NO: 561434 - DNA, 25 bp, Homo sapien
gtagctgtgttatctgaagcactaa

SEQ ID NO: 561435 - DNA, 25 bp, Homo sapien
taaaaacaggtgagcgcaagtaggt

SEQ ID NO: 561436 - DNA, 25 bp, Homo sapien
atttgcagtttttcacccaacagtc

SEQ ID NO: 561437 - DNA, 25 bp, Homo sapien
cagagttgtctaaacttaaggcaga

SEQ ID NO: 561438 - DNA, 25 bp, Homo sapien
acctcagagttgtctaaacttaagg

SEQ ID NO: 561439 - DNA, 25 bp, Homo sapien
tcacccaacagtcattagttaatag

SEQ ID NO: 561440 - DNA, 25 bp, Homo sapien
taccaacagaagttgcgaatctcgg

SEQ ID NO: 561441 - DNA, 25 bp, Homo sapien
aatctcggggaacctggacaaggca

SEQ ID NO: 561442 - DNA, 25 bp, Homo sapien
ctgaagttctacaggagctggcgca

SEQ ID NO: 561443 - DNA, 25 bp, Homo sapien
aggagctggcgcatcccacctatac

SEQ ID NO: 561444 - DNA, 25 bp, Homo sapien
tatgtgagaggcttaatgatgtcaa

SEQ ID NO: 561445 - DNA, 25 bp, Homo sapien
tttctgcattgttgacagaagcaca

SEQ ID NO: 561446 - DNA, 25 bp, Homo sapien
aagcacaatgatggagctgtccagc

SEQ ID NO: 561447 - DNA, 25 bp, Homo sapien
catcttgtcgctttcagtttttgaa

SEQ ID NO: 561448 - DNA, 25 bp, Homo sapien
ccattcaaggactagggtgttttca

SEQ ID NO: 561449 - DNA, 25 bp, Homo sapien
cacatgtgcgtccttgaggttctga

SEQ ID NO: 561450 - DNA, 25 bp, Homo sapien
tgtgtaacctgaggactgaaggact

SEQ ID NO: 561451 - DNA, 25 bp, Homo sapien
tgaattcagttccagatgcacccgg

SEQ ID NO: 561452 - DNA, 25 bp, Homo sapien
tcccactactgtcactggcctcacc

SEQ ID NO: 561453 - DNA, 25 bp, Homo sapien
aatatttctgtggcccgtacttgaa

SEQ ID NO: 561454 - DNA, 25 bp, Homo sapien
ggtttctttaatatcggccagtcca

SEQ ID NO: 561455 - DNA, 25 bp, Homo sapien
tttaatatcggccagtccaaatatt

SEQ ID NO: 561456 - DNA, 25 bp, Homo sapien
acattttgggccctggtcatttctc

SEQ ID NO: 561457 - DNA, 25 bp, Homo sapien
tgggcctcaggcgtcctgttcttgg

SEQ ID NO: 561458 - DNA, 25 bp, Homo sapien
tcatttctctggtgggtgatacctg

SEQ ID NO: 561459 - DNA, 25 bp, Homo sapien
caggcagcgcttggaccccagagag

SEQ ID NO: 561460 - DNA, 25 bp, Homo sapien
ttcttcgggcccctgtgtgagtgcc

SEQ ID NO: 561461 - DNA, 25 bp, Homo sapien
agtgccatgagtgggtgtgcgagac

SEQ ID NO: 561462 - DNA, 25 bp, Homo sapien
catctgccacgtgactgagccgggc

SEQ ID NO: 561463 - DNA, 25 bp, Homo sapien
actgagccgggcatgttcttcgggc

SEQ ID NO: 561464 - DNA, 25 bp, Homo sapien
gtgcaggtaagagggcggcgctgtc

SEQ ID NO: 561465 - DNA, 25 bp, Homo sapien
aggtaagagggcggcgctgtctcct

SEQ ID NO: 561466 - DNA, 25 bp, Homo sapien
ggaggtcgaaactcctcttctggga

SEQ ID NO: 561467 - DNA, 25 bp, Homo sapien
ctcgggaggtcgaaactcctcttct

SEQ ID NO: 561468 - DNA, 25 bp, Homo sapien
ggcccatgcggagatccctacaagt

SEQ ID NO: 561469 - DNA, 25 bp, Homo sapien
tagggctgccttgcgagcccgtcga

SEQ ID NO: 561470 - DNA, 25 bp, Homo sapien
caaatgccctgaccacgtttgtggg

SEQ ID NO: 561471 - DNA, 25 bp, Homo sapien
gatgtattccatgcttcaaatttag

SEQ ID NO: 561472 - DNA, 25 bp, Homo sapien
gagtaactttcggagacctctccaa

SEQ ID NO: 561473 - DNA, 25 bp, Homo sapien
tccatgaaagttcctgtaggtcctt

SEQ ID NO: 561474 - DNA, 25 bp, Homo sapien
gctttcacctccatgaaagttcctg

SEQ ID NO: 561475 - DNA, 25 bp, Homo sapien
ttcctatgtttatgtgcccctgtgc

SEQ ID NO: 561476 - DNA, 25 bp, Homo sapien
tctgtaacagtatccttatggatat

SEQ ID NO: 561477 - DNA, 25 bp, Homo sapien
cttctattctgtgtgacattgagca

SEQ ID NO: 561478 - DNA, 25 bp, Homo sapien
ctgatatttagtgcctttttctgta

SEQ ID NO: 561479 - DNA, 25 bp, Homo sapien
tccttatggatatgaagaaccttct

SEQ ID NO: 561480 - DNA, 25 bp, Homo sapien
ttttcgggagctctactttcttaca

SEQ ID NO: 561481 - DNA, 25 bp, Homo sapien
tgtaagccatttttcgggagctcta

SEQ ID NO: 561482 - DNA, 25 bp, Homo sapien
ctttcttacattcatctgtgttcga

SEQ ID NO: 561483 - DNA, 25 bp, Homo sapien
cattcatctgtgttcgataaatgca

SEQ ID NO: 561484 - DNA, 25 bp, Homo sapien
cccaaataggttgatcccagaaact

SEQ ID NO: 561485 - DNA, 25 bp, Homo sapien
cctctaaattgttgatcccaaatag

SEQ ID NO: 561486 - DNA, 25 bp, Homo sapien
acttctagggtgttccttgatctcc

SEQ ID NO: 561487 - DNA, 25 bp, Homo sapien
actgagatgcctgtacttctagggt

SEQ ID NO: 561488 - DNA, 25 bp, Homo sapien
caggcatgtagatcatagtaaaggg

SEQ ID NO: 561489 - DNA, 25 bp, Homo sapien
tggaaagcctgggatgttgtagtat

SEQ ID NO: 561490 - DNA, 25 bp, Homo sapien
tcaggcatgtagatcatagtaaagg

SEQ ID NO: 561491 - DNA, 25 bp, Homo sapien
gggatgttgtagtatcaggcatgta

SEQ ID NO: 561492 - DNA, 25 bp, Homo sapien
gccatcctcaaaatatgtaattgca

SEQ ID NO: 561493 - DNA, 25 bp, Homo sapien
tttcctgtttcgttggaccaggaca

SEQ ID NO: 561494 - DNA, 25 bp, Homo sapien
cacagtccgtatgccatcctcaaaa

SEQ ID NO: 561495 - DNA, 25 bp, Homo sapien
catgtaaaccatggaggcagagtct

SEQ ID NO: 561496 - DNA, 25 bp, Homo sapien
cttttcgggccactacaacattctc

SEQ ID NO: 561497 - DNA, 25 bp, Homo sapien
gatgtttttccaatagtagtgtctg

SEQ ID NO: 561498 - DNA, 25 bp, Homo sapien
tttaatacgtctacagttccagccg

SEQ ID NO: 561499 - DNA, 25 bp, Homo sapien
gatttggtactcctggtatgcacat

SEQ ID NO: 561500 - DNA, 25 bp, Homo sapien
gcatctgagctcccttttttggctg

SEQ ID NO: 561501 - DNA, 25 bp, Homo sapien
gcaggtttgaaagttgcttcagcag

SEQ ID NO: 561502 - DNA, 25 bp, Homo sapien
caggtttgaaagttgcttcagcagc

SEQ ID NO: 561503 - DNA, 25 bp, Homo sapien
tctgctgtcattggcccttagctgc

SEQ ID NO: 561504 - DNA, 25 bp, Homo sapien
gtcttcacagtatcttcgtcagaag

SEQ ID NO: 561505 - DNA, 25 bp, Homo sapien
gcttttactccacttgggattggct

SEQ ID NO: 561506 - DNA, 25 bp, Homo sapien
cacagtatcttcgtcagaagcatca

SEQ ID NO: 561507 - DNA, 25 bp, Homo sapien
gttcgggtagaaagacacacatgct

SEQ ID NO: 561508 - DNA, 25 bp, Homo sapien
tattcatcagtgatactctcctctt

SEQ ID NO: 561509 - DNA, 25 bp, Homo sapien
gtccgtagcttatcaaaacagccag

SEQ ID NO: 561510 - DNA, 25 bp, Homo sapien
tggaaacactattaacaggcatcag

SEQ ID NO: 561511 - DNA, 25 bp, Homo sapien
gcagggttgtataacaggcacggtc

SEQ ID NO: 561512 - DNA, 25 bp, Homo sapien
cactctgcagggttgtataacaggc

SEQ ID NO: 561513 - DNA, 25 bp, Homo sapien
ctctgcagggttgtataacaggcac

SEQ ID NO: 561514 - DNA, 25 bp, Homo sapien
tctgcagggttgtataacaggcacg

SEQ ID NO: 561515 - DNA, 25 bp, Homo sapien
tttgtgcagaaggagtccatagctt

SEQ ID NO: 561516 - DNA, 25 bp, Homo sapien
aggagtccatagcttctttggctag

SEQ ID NO: 561517 - DNA, 25 bp, Homo sapien
tgcagaaggagtccatagcttcttt

SEQ ID NO: 561518 - DNA, 25 bp, Homo sapien
gaaggagtccatagcttctttggct

SEQ ID NO: 561519 - DNA, 25 bp, Homo sapien
gagtggcccacacaacgttagctcc

SEQ ID NO: 561520 - DNA, 25 bp, Homo sapien
aaactggcggtcctccagagtggcc

SEQ ID NO: 561521 - DNA, 25 bp, Homo sapien
tgtaaactggcggtcctccagagtg

SEQ ID NO: 561522 - DNA, 25 bp, Homo sapien
cacacaacgttagctccatttcaaa

SEQ ID NO: 561523 - DNA, 25 bp, Homo sapien
ttgaggcatagtttgcaggttctat

SEQ ID NO: 561524 - DNA, 25 bp, Homo sapien
cttgaggcatagtttgcaggttcta

SEQ ID NO: 561525 - DNA, 25 bp, Homo sapien
gaggcatagtttgcaggttctatgc

SEQ ID NO: 561526 - DNA, 25 bp, Homo sapien
aggcatagtttgcaggttctatgca

SEQ ID NO: 561527 - DNA, 25 bp, Homo sapien
gaagtcccagacctagaacccatag

SEQ ID NO: 561528 - DNA, 25 bp, Homo sapien
aagtcccagacctagaacccatagg

SEQ ID NO: 561529 - DNA, 25 bp, Homo sapien
tcccagacctagaacccataggtgg

SEQ ID NO: 561530 - DNA, 25 bp, Homo sapien
tcagaagtcccagacctagaaccca

SEQ ID NO: 561531 - DNA, 25 bp, Homo sapien
gaggcagatcttatgacgctggcca

SEQ ID NO: 561532 - DNA, 25 bp, Homo sapien
gtatggaggcagatcttatgacgct

SEQ ID NO: 561533 - DNA, 25 bp, Homo sapien
ctgagctgatcgtatggaggcagat

SEQ ID NO: 561534 - DNA, 25 bp, Homo sapien
gctgatcgtatggaggcagatctta

SEQ ID NO: 561535 - DNA, 25 bp, Homo sapien
tatcctccaggagatcgccgggtgt

SEQ ID NO: 561536 - DNA, 25 bp, Homo sapien
tgaaagccttagtgattccgggact

SEQ ID NO: 561537 - DNA, 25 bp, Homo sapien
ccgggactctcctcataagtgtgca

SEQ ID NO: 561538 - DNA, 25 bp, Homo sapien
tgatgatcgccgctgtgaagacctc

SEQ ID NO: 561539 - DNA, 25 bp, Homo sapien
tagtacaatagtgaaaactgcctgc

SEQ ID NO: 561540 - DNA, 25 bp, Homo sapien
ggtgttcaagttgcctcgctcaata

SEQ ID NO: 561541 - DNA, 25 bp, Homo sapien
taatggaatgggcaactgacaaagg

SEQ ID NO: 561542 - DNA, 25 bp, Homo sapien
tgttctctggctaggctgggtctca

SEQ ID NO: 561543 - DNA, 25 bp, Homo sapien
gagcatgcaaatcaacctggaccct

SEQ ID NO: 561544 - DNA, 25 bp, Homo sapien
gggaaccagcatcctttgcagactg

SEQ ID NO: 561545 - DNA, 25 bp, Homo sapien
ttgatgagaccacaagggaaccagc

SEQ ID NO: 561546 - DNA, 25 bp, Homo sapien
catagttgagacacatgaacctgaa

SEQ ID NO: 561547 - DNA, 25 bp, Homo sapien
caagcacacaggaggtagaatatca

SEQ ID NO: 561548 - DNA, 25 bp, Homo sapien
tttaaactcaccaaagaagattctc

SEQ ID NO: 561549 - DNA, 25 bp, Homo sapien
aaactggtcattaagtcatctgaca

SEQ ID NO: 561550 - DNA, 25 bp, Homo sapien
gccactaagttatttgtctactctc

SEQ ID NO: 561551 - DNA, 25 bp, Homo sapien
tgtacaataattgggacttccctta

SEQ ID NO: 561552 - DNA, 25 bp, Homo sapien
taaggaaaatatgcatccactgagt

SEQ ID NO: 561553 - DNA, 25 bp, Homo sapien
cttatacacattagtttaggcaacc

SEQ ID NO: 561554 - DNA, 25 bp, Homo sapien
taggcaacctttaattatttagagc

SEQ ID NO: 561555 - DNA, 25 bp, Homo sapien
caacagttcttgatacacaggtacc

SEQ ID NO: 561556 - DNA, 25 bp, Homo sapien
gaggagagccattatacccgttgtc

SEQ ID NO: 561557 - DNA, 25 bp, Homo sapien
aaattgaggatttagcccagtcgct

SEQ ID NO: 561558 - DNA, 25 bp, Homo sapien
taatgtcaattggaagggatgcagc

SEQ ID NO: 561559 - DNA, 25 bp, Homo sapien
gaagagaaatccgtaatagcacagg

SEQ ID NO: 561560 - DNA, 25 bp, Homo sapien
ctcgctgggcaaggcaaatgttacc

SEQ ID NO: 561561 - DNA, 25 bp, Homo sapien
caatgccgaccttgggagcacagta

SEQ ID NO: 561562 - DNA, 25 bp, Homo sapien
tattctgagatcatggcaaggcacc

SEQ ID NO: 561563 - DNA, 25 bp, Homo sapien
atcgagtgtacttgtgaagtatgtc

SEQ ID NO: 561564 - DNA, 25 bp, Homo sapien
tcacatgaagtgtcacagtcacaga

SEQ ID NO: 561565 - DNA, 25 bp, Homo sapien
caaggtatcgagtgtacttgtgaag

SEQ ID NO: 561566 - DNA, 25 bp, Homo sapien
tcagcaggcaaggtatcgagtgtac

SEQ ID NO: 561567 - DNA, 25 bp, Homo sapien
tagggcattccatggtctgagttta

SEQ ID NO: 561568 - DNA, 25 bp, Homo sapien
ggtagggcattccatggtctgagtt

SEQ ID NO: 561569 - DNA, 25 bp, Homo sapien
ctggtagggcattccatggtctgag

SEQ ID NO: 561570 - DNA, 25 bp, Homo sapien
agggcattccatggtctgagtttag

SEQ ID NO: 561571 - DNA, 25 bp, Homo sapien
cagccacggagcaggaatgtctggt

SEQ ID NO: 561572 - DNA, 25 bp, Homo sapien
ggacgaataagtcacaacacctgtg

SEQ ID NO: 561573 - DNA, 25 bp, Homo sapien
tcactcaactgtgctcaggacgaat

SEQ ID NO: 561574 - DNA, 25 bp, Homo sapien
cacttgcaacagagaagttcggaga

SEQ ID NO: 561575 - DNA, 25 bp, Homo sapien
tcgggaccgtttccccaacatcatg

SEQ ID NO: 561576 - DNA, 25 bp, Homo sapien
cttttacttggcgtcaccccaggct

SEQ ID NO: 561577 - DNA, 25 bp, Homo sapien
caaagatggttctcggtacatggca

SEQ ID NO: 561578 - DNA, 25 bp, Homo sapien
tcattattgcagacgcacttgtgct

SEQ ID NO: 561579 - DNA, 25 bp, Homo sapien
caaacattgcttggttaggtgtgag

SEQ ID NO: 561580 - DNA, 25 bp, Homo sapien
agcccacagaggacattactccctt

SEQ ID NO: 561581 - DNA, 25 bp, Homo sapien
gaatggtccatccatacctgcatag

SEQ ID NO: 561582 - DNA, 25 bp, Homo sapien
gacagaattcctgttgtaaagcaat

SEQ ID NO: 561583 - DNA, 25 bp, Homo sapien
tttatctaaatagtgtctggtggca

SEQ ID NO: 561584 - DNA, 25 bp, Homo sapien
gaaactacctgaataaactctgagg

SEQ ID NO: 561585 - DNA, 25 bp, Homo sapien
aactagggattaaagtcatctgcca

SEQ ID NO: 561586 - DNA, 25 bp, Homo sapien
gagaaaggacatataagagtgactg

SEQ ID NO: 561587 - DNA, 25 bp, Homo sapien
acaacatggatgagtagattacata

SEQ ID NO: 561588 - DNA, 25 bp, Homo sapien
attcctgttgtctgtacaacatgga

SEQ ID NO: 561589 - DNA, 25 bp, Homo sapien
catagcttgcccttccttatttaat

SEQ ID NO: 561590 - DNA, 25 bp, Homo sapien
ccaggctctaccagattcctgttgt

SEQ ID NO: 561591 - DNA, 25 bp, Homo sapien
aagttagaggaaggaacttgatctt

SEQ ID NO: 561592 - DNA, 25 bp, Homo sapien
caaaagttagaggaaggaacttgat

SEQ ID NO: 561593 - DNA, 25 bp, Homo sapien
aaagttagaggaaggaacttgatct

SEQ ID NO: 561594 - DNA, 25 bp, Homo sapien
agttagaggaaggaacttgatcttc

SEQ ID NO: 561595 - DNA, 25 bp, Homo sapien
tagagctattgtataaccagatgag

SEQ ID NO: 561596 - DNA, 25 bp, Homo sapien
tataaccagatgaggttaggtgtca

SEQ ID NO: 561597 - DNA, 25 bp, Homo sapien
ttgccagccactagagctattgtat

SEQ ID NO: 561598 - DNA, 25 bp, Homo sapien
gccactagagctattgtataaccag

SEQ ID NO: 561599 - DNA, 25 bp, Homo sapien
gcaccgtaatgaggataaatggcct

SEQ ID NO: 561600 - DNA, 25 bp, Homo sapien
tccagggataatgtgcacagcacgg

SEQ ID NO: 561601 - DNA, 25 bp, Homo sapien
acagcacgggccacaaactcaaatg

SEQ ID NO: 561602 - DNA, 25 bp, Homo sapien
tcaaatgcctctaatgaccaggtag

SEQ ID NO: 561603 - DNA, 25 bp, Homo sapien
tttattagccgggaacacatcggcc

SEQ ID NO: 561604 - DNA, 25 bp, Homo sapien
atcggccatgagtccccagattctg

SEQ ID NO: 561605 - DNA, 25 bp, Homo sapien
tctaactagataaagctggagctgt

SEQ ID NO: 561606 - DNA, 25 bp, Homo sapien
tcaccatgctatagattttgtcctc

SEQ ID NO: 561607 - DNA, 25 bp, Homo sapien
agtcttaaatagtcttaactaggct

SEQ ID NO: 561608 - DNA, 25 bp, Homo sapien
ggcacccactataaataatacaggt

SEQ ID NO: 561609 - DNA, 25 bp, Homo sapien
cataatagtcttaaatagtcttaac

SEQ ID NO: 561610 - DNA, 25 bp, Homo sapien
ggcagaggtagagattagggtgatg

SEQ ID NO: 561611 - DNA, 25 bp, Homo sapien
tcatctgaagcttgccattcaggga

SEQ ID NO: 561612 - DNA, 25 bp, Homo sapien
aaaggcagccttcgagggtgtctcc

SEQ ID NO: 561613 - DNA, 25 bp, Homo sapien
tttatacaaatcagtgtcagatctc

SEQ ID NO: 561614 - DNA, 25 bp, Homo sapien
cctcagttctgggacaatagactaa

SEQ ID NO: 561615 - DNA, 25 bp, Homo sapien
cagtcttggtaatatcataatttgc

SEQ ID NO: 561616 - DNA, 25 bp, Homo sapien
tcaccaaaacccaggtttgacatct

SEQ ID NO: 561617 - DNA, 25 bp, Homo sapien
gctgtcaccaaaacccaggtttgac

SEQ ID NO: 561618 - DNA, 25 bp, Homo sapien
tttgttgagcagtcttggtaatatc

SEQ ID NO: 561619 - DNA, 25 bp, Homo sapien
tatgctatggtcactggctgtaaca

SEQ ID NO: 561620 - DNA, 25 bp, Homo sapien
tctgtacagtgtgctccttggtacc

SEQ ID NO: 561621 - DNA, 25 bp, Homo sapien
gcagctgatggtcttccacaccatt

SEQ ID NO: 561622 - DNA, 25 bp, Homo sapien
ttgaagcaagcctaaacctccatcg

SEQ ID NO: 561623 - DNA, 25 bp, Homo sapien
attatgcagccgagtgagtttccca

SEQ ID NO: 561624 - DNA, 25 bp, Homo sapien
ggaaatcacggaaatcagcacatca

SEQ ID NO: 561625 - DNA, 25 bp, Homo sapien
tcagaatgcaatgggtaagctcacc

SEQ ID NO: 561626 - DNA, 25 bp, Homo sapien
taccaccaattatgcagccgagtga

SEQ ID NO: 561627 - DNA, 25 bp, Homo sapien
ctttactgatctgtttttccactga

SEQ ID NO: 561628 - DNA, 25 bp, Homo sapien
attagagtgttccttatactgtatt

SEQ ID NO: 561629 - DNA, 25 bp, Homo sapien
tctaactttactgatctgtttttcc

SEQ ID NO: 561630 - DNA, 25 bp, Homo sapien
agagtgttccttatactgtatttta

SEQ ID NO: 561631 - DNA, 25 bp, Homo sapien
tgctaaattagatcctctttttgaa

SEQ ID NO: 561632 - DNA, 25 bp, Homo sapien
tacgctctgctaaattagatcctct

SEQ ID NO: 561633 - DNA, 25 bp, Homo sapien
atgccccttacgctctgctaaatta

SEQ ID NO: 561634 - DNA, 25 bp, Homo sapien
ccttacgctctgctaaattagatcc

SEQ ID NO: 561635 - DNA, 25 bp, Homo sapien
taaagctaggtgcattcttcacact

SEQ ID NO: 561636 - DNA, 25 bp, Homo sapien
taattagccgtaaatctgcagaacc

SEQ ID NO: 561637 - DNA, 25 bp, Homo sapien
tatacctgagtccaccataaaggtg

SEQ ID NO: 561638 - DNA, 25 bp, Homo sapien
tgtgtgtcccatcattaagtgtaca

SEQ ID NO: 561639 - DNA, 25 bp, Homo sapien
cagaagggactgagataaataccac

SEQ ID NO: 561640 - DNA, 25 bp, Homo sapien
tttctagggccaaatcgcaagcatt

SEQ ID NO: 561641 - DNA, 25 bp, Homo sapien
cacgaactaatatcacagacagggc

SEQ ID NO: 561642 - DNA, 25 bp, Homo sapien
taaataccacatgggcaaaccaagc

SEQ ID NO: 561643 - DNA, 25 bp, Homo sapien
ttcaaagaaatttcggattcctgtc

SEQ ID NO: 561644 - DNA, 25 bp, Homo sapien
tcaaagaaatttcggattcctgtcc

SEQ ID NO: 561645 - DNA, 25 bp, Homo sapien
caaagaaatttcggattcctgtcct

SEQ ID NO: 561646 - DNA, 25 bp, Homo sapien
gatctcctgaattttaaacgagtgt

SEQ ID NO: 561647 - DNA, 25 bp, Homo sapien
ccagatctcctgaattttaaacgag

SEQ ID NO: 561648 - DNA, 25 bp, Homo sapien
ctcctgaattttaaacgagtgtcct

SEQ ID NO: 561649 - DNA, 25 bp, Homo sapien
atccagatctcctgaattttaaacg

SEQ ID NO: 561650 - DNA, 25 bp, Homo sapien
ctttgacaggggattcgaggaacca

SEQ ID NO: 561651 - DNA, 25 bp, Homo sapien
caatcatcaggcttaatgtaaatga

SEQ ID NO: 561652 - DNA, 25 bp, Homo sapien
tcatcaggcttaatgtaaatgacca

SEQ ID NO: 561653 - DNA, 25 bp, Homo sapien
tcgaggaaccaaaacaatcatcagg

SEQ ID NO: 561654 - DNA, 25 bp, Homo sapien
caccccatgtagatttctcctaagc

SEQ ID NO: 561655 - DNA, 25 bp, Homo sapien
gtagcccattgagataatacccccc

SEQ ID NO: 561656 - DNA, 25 bp, Homo sapien
ttatcaagaagaaactcggtggttc

SEQ ID NO: 561657 - DNA, 25 bp, Homo sapien
ccaaggtgctaactagttgcagctg

SEQ ID NO: 561658 - DNA, 25 bp, Homo sapien
catcatctctaatgctattacttgg

SEQ ID NO: 561659 - DNA, 25 bp, Homo sapien
tgcaatatagtctttgaaaaggtac

SEQ ID NO: 561660 - DNA, 25 bp, Homo sapien
gaaataaagaggttacattcagcct

SEQ ID NO: 561661 - DNA, 25 bp, Homo sapien
cctttctgtccaatatacctgcagg

SEQ ID NO: 561662 - DNA, 25 bp, Homo sapien
ggggttctctgtgcttgttaatcac

SEQ ID NO: 561663 - DNA, 25 bp, Homo sapien
ttggggttctctgtgcttgttaatc

SEQ ID NO: 561664 - DNA, 25 bp, Homo sapien
tggggttctctgtgcttgttaatca

SEQ ID NO: 561665 - DNA, 25 bp, Homo sapien
tgattacttcttcgttttctctcct

SEQ ID NO: 561666 - DNA, 25 bp, Homo sapien
ctgcattgattacttcttcgttttc

SEQ ID NO: 561667 - DNA, 25 bp, Homo sapien
ttgattacttcttcgttttctctcc

SEQ ID NO: 561668 - DNA, 25 bp, Homo sapien
gcattgattacttcttcgttttctc

SEQ ID NO: 561669 - DNA, 25 bp, Homo sapien
tcttcgcattcatacagcactgagt

SEQ ID NO: 561670 - DNA, 25 bp, Homo sapien
tatgcacacggctagcactgatgtt

SEQ ID NO: 561671 - DNA, 25 bp, Homo sapien
tattccgattatccatgctgggttg

SEQ ID NO: 561672 - DNA, 25 bp, Homo sapien
aagtctactgatgtgctgtggttgc

SEQ ID NO: 561673 - DNA, 25 bp, Homo sapien
gctctagagaagtctagtagcaacc

SEQ ID NO: 561674 - DNA, 25 bp, Homo sapien
agaggctcttacagttatcctgggc

SEQ ID NO: 561675 - DNA, 25 bp, Homo sapien
catcatcttggaagaggctcttaca

SEQ ID NO: 561676 - DNA, 25 bp, Homo sapien
gaagtctagtagcaaccatttgatt

SEQ ID NO: 561677 - DNA, 25 bp, Homo sapien
acaagcacaaaaagtgaggacctac

SEQ ID NO: 561678 - DNA, 25 bp, Homo sapien
aacaagcacaaaaagtgaggaccta

SEQ ID NO: 561679 - DNA, 25 bp, Homo sapien
gaacaagcacaaaaagtgaggacct

SEQ ID NO: 561680 - DNA, 25 bp, Homo sapien
tgcacaaaaagtaggaaggtctcca

SEQ ID NO: 561681 - DNA, 25 bp, Homo sapien
tagaagatgccggatgtttatactt

SEQ ID NO: 561682 - DNA, 25 bp, Homo sapien
gaaggtctccaactcaagcttctcc

SEQ ID NO: 561683 - DNA, 25 bp, Homo sapien
attttcataaacatgggcagccgct

SEQ ID NO: 561684 - DNA, 25 bp, Homo sapien
tgatccacctttcccaggacaagga

SEQ ID NO: 561685 - DNA, 25 bp, Homo sapien
ctgatccacctttcccaggacaagg

SEQ ID NO: 561686 - DNA, 25 bp, Homo sapien
cacctttcccaggacaaggacccat

SEQ ID NO: 561687 - DNA, 25 bp, Homo sapien
gatccacctttcccaggacaaggac

SEQ ID NO: 561688 - DNA, 25 bp, Homo sapien
ggtatcacacccacgcattctgcat

SEQ ID NO: 561689 - DNA, 25 bp, Homo sapien
tcttacacaatagccctaaggatgg

SEQ ID NO: 561690 - DNA, 25 bp, Homo sapien
caaatgagtgtgcaggaaaatccct

SEQ ID NO: 561691 - DNA, 25 bp, Homo sapien
aaataagtgctggtcctattgccaa

SEQ ID NO: 561692 - DNA, 25 bp, Homo sapien
aactctctaagataagtgcatttct

SEQ ID NO: 561693 - DNA, 25 bp, Homo sapien
caaaagattagattcacgtgtatac

SEQ ID NO: 561694 - DNA, 25 bp, Homo sapien
ggcagaaacaacagacatagaactt

SEQ ID NO: 561695 - DNA, 25 bp, Homo sapien
gcttctaagcattctcgcaaagatc

SEQ ID NO: 561696 - DNA, 25 bp, Homo sapien
gccgagatctttggcgtcttactta

SEQ ID NO: 561697 - DNA, 25 bp, Homo sapien
cgaatggccgagatctttggcgtct

SEQ ID NO: 561698 - DNA, 25 bp, Homo sapien
ttttacatgcattgaacgaatggcc

SEQ ID NO: 561699 - DNA, 25 bp, Homo sapien
cattgaacgaatggccgagatcttt

SEQ ID NO: 561700 - DNA, 25 bp, Homo sapien
ggcaacaacacgtagtcccactggt

SEQ ID NO: 561701 - DNA, 25 bp, Homo sapien
aggtaaccttctccattcatggcta

SEQ ID NO: 561702 - DNA, 25 bp, Homo sapien
tcccactggtatgaggttgaagagt

SEQ ID NO: 561703 - DNA, 25 bp, Homo sapien
cactccctggatggcaacaacacgt

SEQ ID NO: 561704 - DNA, 25 bp, Homo sapien
aacctttaaatgtgagcagtcttgc

SEQ ID NO: 561705 - DNA, 25 bp, Homo sapien
ctgaagggctgatgcgacaataaac

SEQ ID NO: 561706 - DNA, 25 bp, Homo sapien
tcttgctgacagcattctgaagggc

SEQ ID NO: 561707 - DNA, 25 bp, Homo sapien
cattgtctatcatgaatgggcagga

SEQ ID NO: 561708 - DNA, 25 bp, Homo sapien
ccactaataaagtaccgtagttcat

SEQ ID NO: 561709 - DNA, 25 bp, Homo sapien
actaataaagtaccgtagttcatgg

SEQ ID NO: 561710 - DNA, 25 bp, Homo sapien
taccgtagttcatggggatgctgac

SEQ ID NO: 561711 - DNA, 25 bp, Homo sapien
aaagtaccgtagttcatggggatgc

SEQ ID NO: 561712 - DNA, 25 bp, Homo sapien
catttgcaagtagtagccttgcctg

SEQ ID NO: 561713 - DNA, 25 bp, Homo sapien
tggttccatcgagagctccatcggg

SEQ ID NO: 561714 - DNA, 25 bp, Homo sapien
ctggtcactatacccttgagctggg

SEQ ID NO: 561715 - DNA, 25 bp, Homo sapien
tgcctgcaatataacctggtcacta

SEQ ID NO: 561716 - DNA, 25 bp, Homo sapien
cataagcctcacaatgtgtcaccat

SEQ ID NO: 561717 - DNA, 25 bp, Homo sapien
tttgtctctcagattcttctgtgtt

SEQ ID NO: 561718 - DNA, 25 bp, Homo sapien
tattttgtctctcagattcttctgt

SEQ ID NO: 561719 - DNA, 25 bp, Homo sapien
ctgtgttttatcaaacctgcagtat

SEQ ID NO: 561720 - DNA, 25 bp, Homo sapien
tcagaagaggacattttatacaagt

SEQ ID NO: 561721 - DNA, 25 bp, Homo sapien
attttgcaaactggtgactctcaga

SEQ ID NO: 561722 - DNA, 25 bp, Homo sapien
tacttaagttgacaagtattcccaa

SEQ ID NO: 561723 - DNA, 25 bp, Homo sapien
taaactaattaagctgtcagtttaa

SEQ ID NO: 561724 - DNA, 25 bp, Homo sapien
atgcagtagtaagccacagaaacag

SEQ ID NO: 561725 - DNA, 25 bp, Homo sapien
cagttttccttttcaaatccttcat

SEQ ID NO: 561726 - DNA, 25 bp, Homo sapien
ctgcagttttccttttcaaatcctt

SEQ ID NO: 561727 - DNA, 25 bp, Homo sapien
tgcagttttccttttcaaatccttc

SEQ ID NO: 561728 - DNA, 25 bp, Homo sapien
gcagttttccttttcaaatccttca

SEQ ID NO: 561729 - DNA, 25 bp, Homo sapien
ccactctggttctatcaacacgtcc

SEQ ID NO: 561730 - DNA, 25 bp, Homo sapien
cactctggttctatcaacacgtcca

SEQ ID NO: 561731 - DNA, 25 bp, Homo sapien
actctggttctatcaacacgtccat

SEQ ID NO: 561732 - DNA, 25 bp, Homo sapien
ccccactctggttctatcaacacgt

SEQ ID NO: 561733 - DNA, 25 bp, Homo sapien
gaaaggtacaaacatctgagctctg

SEQ ID NO: 561734 - DNA, 25 bp, Homo sapien
gccagttaaacctatagcagaccgt

SEQ ID NO: 561735 - DNA, 25 bp, Homo sapien
tagagacctccacctaatgggtaga

SEQ ID NO: 561736 - DNA, 25 bp, Homo sapien
tagtaaggactacactgccagctga

SEQ ID NO: 561737 - DNA, 25 bp, Homo sapien
tactcagcgcacattttggcacact

SEQ ID NO: 561738 - DNA, 25 bp, Homo sapien
cctttcgaatggcataggtagccac

SEQ ID NO: 561739 - DNA, 25 bp, Homo sapien
aggtagccactgaattccttatccc

SEQ ID NO: 561740 - DNA, 25 bp, Homo sapien
catgcttcttgctcagtacatgaag

SEQ ID NO: 561741 - DNA, 25 bp, Homo sapien
ttagaagcatgcatgctgttgctga

SEQ ID NO: 561742 - DNA, 25 bp, Homo sapien
aagcatgcatgctgttgctgaggaa

SEQ ID NO: 561743 - DNA, 25 bp, Homo sapien
tctaccagaacttcagactgaagat

SEQ ID NO: 561744 - DNA, 25 bp, Homo sapien
aatatgttcaatattatctaccaga

SEQ ID NO: 561745 - DNA, 25 bp, Homo sapien
gaagagtggcagttttttgtggacc

SEQ ID NO: 561746 - DNA, 25 bp, Homo sapien
aaggcccagtgtgtctacctccagg

SEQ ID NO: 561747 - DNA, 25 bp, Homo sapien
cagtttgtgggagcacaaggcccag

SEQ ID NO: 561748 - DNA, 25 bp, Homo sapien
gttttccagccagtttgtgggagca

SEQ ID NO: 561749 - DNA, 25 bp, Homo sapien
tatacaccattgtagtcagtggcta

SEQ ID NO: 561750 - DNA, 25 bp, Homo sapien
gctgattaagcatacatggcacata

SEQ ID NO: 561751 - DNA, 25 bp, Homo sapien
ataccatagctctcatgatcacagc

SEQ ID NO: 561752 - DNA, 25 bp, Homo sapien
gaaacaactgcattagcagccatgc

SEQ ID NO: 561753 - DNA, 25 bp, Homo sapien
gctgggggcaccgccaggatatcca

SEQ ID NO: 561754 - DNA, 25 bp, Homo sapien
ggatatccacatttgtccaaggtct

SEQ ID NO: 561755 - DNA, 25 bp, Homo sapien
ccacatttgtccaaggtctgggaac

SEQ ID NO: 561756 - DNA, 25 bp, Homo sapien
tgggggcaccgccaggatatccaca

SEQ ID NO: 561757 - DNA, 25 bp, Homo sapien
tcttgaggccgaagatgcgcacttt

SEQ ID NO: 561758 - DNA, 25 bp, Homo sapien
atcaagccgctagcgatggccgcgg

SEQ ID NO: 561759 - DNA, 25 bp, Homo sapien
gaagatatccaccaggttgccgttg

SEQ ID NO: 561760 - DNA, 25 bp, Homo sapien
gcagacggccggtcccagtgctgct

SEQ ID NO: 561761 - DNA, 25 bp, Homo sapien
ccgcttggccacgtccgagtggaga

SEQ ID NO: 561762 - DNA, 25 bp, Homo sapien
cgatcccgggaagccggacgtcgtg

SEQ ID NO: 561763 - DNA, 25 bp, Homo sapien
ggctcagtcctgaccgggacccatc

SEQ ID NO: 561764 - DNA, 25 bp, Homo sapien
tgctggtcaccgctcgtcgcaggaa

SEQ ID NO: 561765 - DNA, 25 bp, Homo sapien
caggttagatctgacttgagggtca

SEQ ID NO: 561766 - DNA, 25 bp, Homo sapien
tccctgagttggactatcaaatacg

SEQ ID NO: 561767 - DNA, 25 bp, Homo sapien
ataatagccaaaacgtgggagcaac

SEQ ID NO: 561768 - DNA, 25 bp, Homo sapien
tacagacagtagtatggtggttgcc

SEQ ID NO: 561769 - DNA, 25 bp, Homo sapien
gggctgaacgagtggttctttggag

SEQ ID NO: 561770 - DNA, 25 bp, Homo sapien
aatggatgccatttgcagataccat

SEQ ID NO: 561771 - DNA, 25 bp, Homo sapien
ggagccactggggtactatttagta

SEQ ID NO: 561772 - DNA, 25 bp, Homo sapien
acagctgcttggctgcggaactgca

SEQ ID NO: 561773 - DNA, 25 bp, Homo sapien
tttttgttgagagaacctcaatctc

SEQ ID NO: 561774 - DNA, 25 bp, Homo sapien
ccatttttgttgagagaacctcaat

SEQ ID NO: 561775 - DNA, 25 bp, Homo sapien
caagcagcattgcatccatttttgt

SEQ ID NO: 561776 - DNA, 25 bp, Homo sapien
cagcattgcatccatttttgttgag

SEQ ID NO: 561777 - DNA, 25 bp, Homo sapien
cacctgttctgtttgcacagactga

SEQ ID NO: 561778 - DNA, 25 bp, Homo sapien
ctgttctgtttgcacagactgaaaa

SEQ ID NO: 561779 - DNA, 25 bp, Homo sapien
ctgtttgcacagactgaaaaccatc

SEQ ID NO: 561780 - DNA, 25 bp, Homo sapien
tctgtttgcacagactgaaaaccat

SEQ ID NO: 561781 - DNA, 25 bp, Homo sapien
gctagcacagaactcactagttgaa

SEQ ID NO: 561782 - DNA, 25 bp, Homo sapien
gtttttatcaccaggtcactttcca

SEQ ID NO: 561783 - DNA, 25 bp, Homo sapien
cacaattccttggtatggacagaag

SEQ ID NO: 561784 - DNA, 25 bp, Homo sapien
agagaagggcatgcctagagcctga

SEQ ID NO: 561785 - DNA, 25 bp, Homo sapien
ataggggtttgccatgtcgtctagg

SEQ ID NO: 561786 - DNA, 25 bp, Homo sapien
gataggggtttgccatgtcgtctag

SEQ ID NO: 561787 - DNA, 25 bp, Homo sapien
tatgaaataatgcaggttggcttgg

SEQ ID NO: 561788 - DNA, 25 bp, Homo sapien
tagtcaatgttctctagagcgacag

SEQ ID NO: 561789 - DNA, 25 bp, Homo sapien
tccagaggtcgtagtcatggaaacc

SEQ ID NO: 561790 - DNA, 25 bp, Homo sapien
gagaatgcattgaaccagctggttt

SEQ ID NO: 561791 - DNA, 25 bp, Homo sapien
tatcaattgagtactgccagcagtt

SEQ ID NO: 561792 - DNA, 25 bp, Homo sapien
tgataaagcattcaggattcctgac

SEQ ID NO: 561793 - DNA, 25 bp, Homo sapien
tacagaagctcctttagggatgaac

SEQ ID NO: 561794 - DNA, 25 bp, Homo sapien
gaagttctcatggaaacaatctacc

SEQ ID NO: 561795 - DNA, 25 bp, Homo sapien
taactgctatggaatatgcgctcga

SEQ ID NO: 561796 - DNA, 25 bp, Homo sapien
tggtaaataaatcccaagattggca

SEQ ID NO: 561797 - DNA, 25 bp, Homo sapien
ctgtgggaactaaacaagatgatgt

SEQ ID NO: 561798 - DNA, 25 bp, Homo sapien
tatattgacgtcagaaaaggcctgg

SEQ ID NO: 561799 - DNA, 25 bp, Homo sapien
agtacaatcattattgggcattgtt

SEQ ID NO: 561800 - DNA, 25 bp, Homo sapien
acctttccggtttgtgatgatccac

SEQ ID NO: 561801 - DNA, 25 bp, Homo sapien
caccagtagcgcacaagtttttcaa

SEQ ID NO: 561802 - DNA, 25 bp, Homo sapien
tcataaggattttccataacaccag

SEQ ID NO: 561803 - DNA, 25 bp, Homo sapien
agacaaacccaggcaggatcgcctt

SEQ ID NO: 561804 - DNA, 25 bp, Homo sapien
agtatgaagcttatccatagctgag

SEQ ID NO: 561805 - DNA, 25 bp, Homo sapien
ttatccatagctgagagcatagaga

SEQ ID NO: 561806 - DNA, 25 bp, Homo sapien
caggagtatgaagcttatccatagc

SEQ ID NO: 561807 - DNA, 25 bp, Homo sapien
tgctgccactgagggagatgtcaca

SEQ ID NO: 561808 - DNA, 25 bp, Homo sapien
cattcagttttgaacagtccctaaa

SEQ ID NO: 561809 - DNA, 25 bp, Homo sapien
tgtcacattcagttttgaacagtcc

SEQ ID NO: 561810 - DNA, 25 bp, Homo sapien
gagggagatgtcacattcagttttg

SEQ ID NO: 561811 - DNA, 25 bp, Homo sapien
tgccgatccagtgacctgaaaatgc

SEQ ID NO: 561812 - DNA, 25 bp, Homo sapien
ttgccgatccagtgacctgaaaatg

SEQ ID NO: 561813 - DNA, 25 bp, Homo sapien
cttgtggaaatggacagaagagaag

SEQ ID NO: 561814 - DNA, 25 bp, Homo sapien
tgtggaaatggacagaagagaagga

SEQ ID NO: 561815 - DNA, 25 bp, Homo sapien
tggaaatggacagaagagaaggagg

SEQ ID NO: 561816 - DNA, 25 bp, Homo sapien
gaaatggacagaagagaaggagggg

SEQ ID NO: 561817 - DNA, 25 bp, Homo sapien
ggcaagaggcaagtagaacaaggaa

SEQ ID NO: 561818 - DNA, 25 bp, Homo sapien
gggcaagaggcaagtagaacaagga

SEQ ID NO: 561819 - DNA, 25 bp, Homo sapien
gcaagaggcaagtagaacaaggaat

SEQ ID NO: 561820 - DNA, 25 bp, Homo sapien
ggggcaagaggcaagtagaacaagg

SEQ ID NO: 561821 - DNA, 25 bp, Homo sapien
tccatccttctgggtagaagtgtat

SEQ ID NO: 561822 - DNA, 25 bp, Homo sapien
ccatccttctgggtagaagtgtatt

SEQ ID NO: 561823 - DNA, 25 bp, Homo sapien
gtccatccttctgggtagaagtgta

SEQ ID NO: 561824 - DNA, 25 bp, Homo sapien
gcttctggatctatcctctctatct

SEQ ID NO: 561825 - DNA, 25 bp, Homo sapien
ccattctcattattccgttttcctg

SEQ ID NO: 561826 - DNA, 25 bp, Homo sapien
gagcttctggatctatcctctctat

SEQ ID NO: 561827 - DNA, 25 bp, Homo sapien
tcattattccgttttcctggaattc

SEQ ID NO: 561828 - DNA, 25 bp, Homo sapien
ggctcagaatcctctactgagtcaa

SEQ ID NO: 561829 - DNA, 25 bp, Homo sapien
gccatcactggttatctcaactcca

SEQ ID NO: 561830 - DNA, 25 bp, Homo sapien
ctggttatctcaactccatgctttg

SEQ ID NO: 561831 - DNA, 25 bp, Homo sapien
ggttatctcaactccatgctttgca

SEQ ID NO: 561832 - DNA, 25 bp, Homo sapien
tcactggttatctcaactccatgct

SEQ ID NO: 561833 - DNA, 25 bp, Homo sapien
agggtcctgagtgccccgctcgaga

SEQ ID NO: 561834 - DNA, 25 bp, Homo sapien
cctctactagtgaagactttcaggg

SEQ ID NO: 561835 - DNA, 25 bp, Homo sapien
actttcagggtcctgagtgccccgc

SEQ ID NO: 561836 - DNA, 25 bp, Homo sapien
tctactagtgaagactttcagggtc

SEQ ID NO: 561837 - DNA, 25 bp, Homo sapien
tacaacttttctggagaactgtcta

SEQ ID NO: 561838 - DNA, 25 bp, Homo sapien
cagcaacgcatgaggattctaattc

SEQ ID NO: 561839 - DNA, 25 bp, Homo sapien
taaaattcctgagttactctgtttc

SEQ ID NO: 561840 - DNA, 25 bp, Homo sapien
tgtgtttattggtaattatacaact

SEQ ID NO: 561841 - DNA, 25 bp, Homo sapien
tatagcagcctaagttgactaaagc

SEQ ID NO: 561842 - DNA, 25 bp, Homo sapien
gacatcgaatttttgagccttcaga

SEQ ID NO: 561843 - DNA, 25 bp, Homo sapien
aattagtattcgcactggactgggc

SEQ ID NO: 561844 - DNA, 25 bp, Homo sapien
ggcagagctgtcacgaatggaatta

SEQ ID NO: 561845 - DNA, 25 bp, Homo sapien
aacacattctctgggcatgctagga

SEQ ID NO: 561846 - DNA, 25 bp, Homo sapien
gaaggagcattcagctaaaaatgag

SEQ ID NO: 561847 - DNA, 25 bp, Homo sapien
gccttgctatccttagaatgtgcct

SEQ ID NO: 561848 - DNA, 25 bp, Homo sapien
gagctttgcaagtctacctgccttg

SEQ ID NO: 561849 - DNA, 25 bp, Homo sapien
ggtgcgagaacagccatagtagctg

SEQ ID NO: 561850 - DNA, 25 bp, Homo sapien
gaaatagacaaagtgggcaacaaga

SEQ ID NO: 561851 - DNA, 25 bp, Homo sapien
gacatagtttttatcttcctatggc

SEQ ID NO: 561852 - DNA, 25 bp, Homo sapien
tagctgaacatactggatgggagag

SEQ ID NO: 561853 - DNA, 25 bp, Homo sapien
gtcaagctgtactaggatggcacca

SEQ ID NO: 561854 - DNA, 25 bp, Homo sapien
ggaacaacactgacccttgcagatg

SEQ ID NO: 561855 - DNA, 25 bp, Homo sapien
gggacatacactatcactggctttt

SEQ ID NO: 561856 - DNA, 25 bp, Homo sapien
tacggaggccgtccatgaggaaaag

SEQ ID NO: 561857 - DNA, 25 bp, Homo sapien
tgtcctattcatcccttctggatct

SEQ ID NO: 561858 - DNA, 25 bp, Homo sapien
ctattcatcccttctggatcttcac

SEQ ID NO: 561859 - DNA, 25 bp, Homo sapien
ctatgtcctattcatcccttctgga

SEQ ID NO: 561860 - DNA, 25 bp, Homo sapien
tattcatcccttctggatcttcacc

SEQ ID NO: 561861 - DNA, 25 bp, Homo sapien
tcccagagctttcttcatgaagcct

SEQ ID NO: 561862 - DNA, 25 bp, Homo sapien
gcaaccaagattttattcccagagc

SEQ ID NO: 561863 - DNA, 25 bp, Homo sapien
ccagagctttcttcatgaagcctac

SEQ ID NO: 561864 - DNA, 25 bp, Homo sapien
ctaagcaaccaagattttattccca

SEQ ID NO: 561865 - DNA, 25 bp, Homo sapien
catcttactgtaactaaccatggaa

SEQ ID NO: 561866 - DNA, 25 bp, Homo sapien
tcatggtgtgacaaacagtaacaaa

SEQ ID NO: 561867 - DNA, 25 bp, Homo sapien
tctggaattgcctcatacacaagaa

SEQ ID NO: 561868 - DNA, 25 bp, Homo sapien
aaaacttcacttgaccacagctgtg

SEQ ID NO: 561869 - DNA, 25 bp, Homo sapien
gaatcatcatgagaagtggtggtta

SEQ ID NO: 561870 - DNA, 25 bp, Homo sapien
aatcatcatgagaagtggtggttaa

SEQ ID NO: 561871 - DNA, 25 bp, Homo sapien
atcatcatgagaagtggtggttaaa

SEQ ID NO: 561872 - DNA, 25 bp, Homo sapien
gcttaacagacccattcaaatcaat

SEQ ID NO: 561873 - DNA, 25 bp, Homo sapien
aaatcaatatttcagcctacgcttg

SEQ ID NO: 561874 - DNA, 25 bp, Homo sapien
taaaagaacaccaagcttaacagac

SEQ ID NO: 561875 - DNA, 25 bp, Homo sapien
caaatcaatatttcagcctacgctt

SEQ ID NO: 561876 - DNA, 25 bp, Homo sapien
tgaggaccgcacagcagaggaaaat

SEQ ID NO: 561877 - DNA, 25 bp, Homo sapien
tattgcatggtgtcagaacgctgtc

SEQ ID NO: 561878 - DNA, 25 bp, Homo sapien
gagcctggcaccgagttatattagg

SEQ ID NO: 561879 - DNA, 25 bp, Homo sapien
taatcctccgactagagctgcaatg

SEQ ID NO: 561880 - DNA, 25 bp, Homo sapien
cacatgacagttagacgcagaacta

SEQ ID NO: 561881 - DNA, 25 bp, Homo sapien
tagacgcagaactattaatctgtcc

SEQ ID NO: 561882 - DNA, 25 bp, Homo sapien
taatctgtcccatgactgagactct

SEQ ID NO: 561883 - DNA, 25 bp, Homo sapien
gaactattaatctgtcccatgactg

SEQ ID NO: 561884 - DNA, 25 bp, Homo sapien
cttgggtcaaagctatgaatttcta

SEQ ID NO: 561885 - DNA, 25 bp, Homo sapien
aaagctatgaatttctaccttcagc

SEQ ID NO: 561886 - DNA, 25 bp, Homo sapien
gggtcaaagctatgaatttctacct

SEQ ID NO: 561887 - DNA, 25 bp, Homo sapien
gaatttctaccttcagcttctgaga

SEQ ID NO: 561888 - DNA, 25 bp, Homo sapien
gggtcaagacccggttggccagctg

SEQ ID NO: 561889 - DNA, 25 bp, Homo sapien
caagacccggttggccagctgactg

SEQ ID NO: 561890 - DNA, 25 bp, Homo sapien
ctggggtcaagacccggttggccag

SEQ ID NO: 561891 - DNA, 25 bp, Homo sapien
gtcaagacccggttggccagctgac

SEQ ID NO: 561892 - DNA, 25 bp, Homo sapien
gatgatgctgcacctgtgtgagaag

SEQ ID NO: 561893 - DNA, 25 bp, Homo sapien
gatgatgatgctgcacctgtgtgag

SEQ ID NO: 561894 - DNA, 25 bp, Homo sapien
tgatgctgcacctgtgtgagaagga

SEQ ID NO: 561895 - DNA, 25 bp, Homo sapien
tgctgcacctgtgtgagaaggagca

SEQ ID NO: 561896 - DNA, 25 bp, Homo sapien
ccagtttctccccatcctcacaacc

SEQ ID NO: 561897 - DNA, 25 bp, Homo sapien
aggctgtccatgaacctccaggcct

SEQ ID NO: 561898 - DNA, 25 bp, Homo sapien
ctaggctgtccatgaacctccaggc

SEQ ID NO: 561899 - DNA, 25 bp, Homo sapien
gtttctccccatcctcacaacccat

SEQ ID NO: 561900 - DNA, 25 bp, Homo sapien
tctgaagacaaaggaataaggcatc

SEQ ID NO: 561901 - DNA, 25 bp, Homo sapien
atgtactcaggtacacaggtggcag

SEQ ID NO: 561902 - DNA, 25 bp, Homo sapien
tcttctttggctgttggaaagtcag

SEQ ID NO: 561903 - DNA, 25 bp, Homo sapien
ggaaagtcagaggtgctaaaaccaa

SEQ ID NO: 561904 - DNA, 25 bp, Homo sapien
taaaagcatttggtcagagacagcg

SEQ ID NO: 561905 - DNA, 25 bp, Homo sapien
tcccttttaacaggcagcaattctg

SEQ ID NO: 561906 - DNA, 25 bp, Homo sapien
tatactatcccttggtgaagctgtc

SEQ ID NO: 561907 - DNA, 25 bp, Homo sapien
tcctaggtggttatcacaagatgcc

SEQ ID NO: 561908 - DNA, 25 bp, Homo sapien
tgccctaattctgcacatttgatga

SEQ ID NO: 561909 - DNA, 25 bp, Homo sapien
ctgtacacctgtgattggacctgcc

SEQ ID NO: 561910 - DNA, 25 bp, Homo sapien
tgtgattggacctgccctaattctg

SEQ ID NO: 561911 - DNA, 25 bp, Homo sapien
gacctgccctaattctgcacatttg

SEQ ID NO: 561912 - DNA, 25 bp, Homo sapien
aaatacagcaacctttctccccgca

SEQ ID NO: 561913 - DNA, 25 bp, Homo sapien
gcaaatcctcgttctagtacacggc

SEQ ID NO: 561914 - DNA, 25 bp, Homo sapien
cccgcagtatactcagggattcttg

SEQ ID NO: 561915 - DNA, 25 bp, Homo sapien
ctagtacacggccaggaggaaagaa

SEQ ID NO: 561916 - DNA, 25 bp, Homo sapien
ccaggatgataagcgccagagggtc

SEQ ID NO: 561917 - DNA, 25 bp, Homo sapien
ctgaccatcaagaaatccaggatga

SEQ ID NO: 561918 - DNA, 25 bp, Homo sapien
tttggactctttctcccgttctctg

SEQ ID NO: 561919 - DNA, 25 bp, Homo sapien
tagagtaatgcagaagtcactgacc

SEQ ID NO: 561920 - DNA, 25 bp, Homo sapien
cactggaggtagaaaaccacagtat

SEQ ID NO: 561921 - DNA, 25 bp, Homo sapien
tatttgcattctacaaggcacagtg

SEQ ID NO: 561922 - DNA, 25 bp, Homo sapien
tcagtaaccccgaggactaaggatc

SEQ ID NO: 561923 - DNA, 25 bp, Homo sapien
ccacagtataacttgccataggtca

SEQ ID NO: 561924 - DNA, 25 bp, Homo sapien
aaatcaccatccttgcagtagtgcc

SEQ ID NO: 561925 - DNA, 25 bp, Homo sapien
ctggcatgaaggttttcctttgccc

SEQ ID NO: 561926 - DNA, 25 bp, Homo sapien
ttcagcagccactggcatgaaggtt

SEQ ID NO: 561927 - DNA, 25 bp, Homo sapien
gcagccactggcatgaaggttttcc

SEQ ID NO: 561928 - DNA, 25 bp, Homo sapien
gatcttgcatatgttcgtattccta

SEQ ID NO: 561929 - DNA, 25 bp, Homo sapien
gactggatcttgcatatgttcgtat

SEQ ID NO: 561930 - DNA, 25 bp, Homo sapien
gcatatgttcgtattcctaacgcta

SEQ ID NO: 561931 - DNA, 25 bp, Homo sapien
tatgttcgtattcctaacgctatac

SEQ ID NO: 561932 - DNA, 25 bp, Homo sapien
ctgcaaaggcagacaaatgtgaacc

SEQ ID NO: 561933 - DNA, 25 bp, Homo sapien
tatacaggcctttttggacggccaa

SEQ ID NO: 561934 - DNA, 25 bp, Homo sapien
gcaacactaaacaaagccgtaaaca

SEQ ID NO: 561935 - DNA, 25 bp, Homo sapien
taggggaagatatgggcctaatatg

SEQ ID NO: 561936 - DNA, 25 bp, Homo sapien
ttgaaagcgtgtctttgaaattgag

SEQ ID NO: 561937 - DNA, 25 bp, Homo sapien
ctttgaaattgaggacgggaatgtc

SEQ ID NO: 561938 - DNA, 25 bp, Homo sapien
cagcttctgctatatcgagtgtgtt

SEQ ID NO: 561939 - DNA, 25 bp, Homo sapien
caaatgcttccgtaagacttgaaag

SEQ ID NO: 561940 - DNA, 25 bp, Homo sapien
gtttagaattccctcgttgctgcat

SEQ ID NO: 561941 - DNA, 25 bp, Homo sapien
gtggaggttaatactcatgtcatga

SEQ ID NO: 561942 - DNA, 25 bp, Homo sapien
cgttgctgcatgtggaggttaatac

SEQ ID NO: 561943 - DNA, 25 bp, Homo sapien
tcatgtcatgagcaccaaaagtctg

SEQ ID NO: 561944 - DNA, 25 bp, Homo sapien
taaacccacgacttcaaggctatag

SEQ ID NO: 561945 - DNA, 25 bp, Homo sapien
ccagcgtgttccttatagtgactga

SEQ ID NO: 561946 - DNA, 25 bp, Homo sapien
actttttcaatgtagcctcgggcca

SEQ ID NO: 561947 - DNA, 25 bp, Homo sapien
gacaaagagctttcctctcaagtga

SEQ ID NO: 561948 - DNA, 25 bp, Homo sapien
ttggaaaactgcctgtaaacagaat

SEQ ID NO: 561949 - DNA, 25 bp, Homo sapien
caagccatacgaacaaatagcacat

SEQ ID NO: 561950 - DNA, 25 bp, Homo sapien
tacatgtgggatttgaagtgcaatt

SEQ ID NO: 561951 - DNA, 25 bp, Homo sapien
gatactaggactttggttaacagct

SEQ ID NO: 561952 - DNA, 25 bp, Homo sapien
tagagatctgggtgctgccaatcac

SEQ ID NO: 561953 - DNA, 25 bp, Homo sapien
tctctaaggcatggccacttttgca

SEQ ID NO: 561954 - DNA, 25 bp, Homo sapien
gcaggtgattttgcctgccagggaa

SEQ ID NO: 561955 - DNA, 25 bp, Homo sapien
taatttttccccagctatctggtgg

SEQ ID NO: 561956 - DNA, 25 bp, Homo sapien
tgagctattctggtctttggtatta

SEQ ID NO: 561957 - DNA, 25 bp, Homo sapien
tatgagatgcaaaaagatagagact

SEQ ID NO: 561958 - DNA, 25 bp, Homo sapien
tatgaagcccacagagcaaatttcc

SEQ ID NO: 561959 - DNA, 25 bp, Homo sapien
gatagagactaatatccaggcttac

SEQ ID NO: 561960 - DNA, 25 bp, Homo sapien
gatgggcaagttctatagctacacc

SEQ ID NO: 561961 - DNA, 25 bp, Homo sapien
tacaggactgtatgaagatgcgcac

SEQ ID NO: 561962 - DNA, 25 bp, Homo sapien
cagtaggcttggcaatgatgggcaa

SEQ ID NO: 561963 - DNA, 25 bp, Homo sapien
cagccactgggcacatgtaactatt

SEQ ID NO: 561964 - DNA, 25 bp, Homo sapien
cagaacgggattcagtcatgcagcc

SEQ ID NO: 561965 - DNA, 25 bp, Homo sapien
aaacagcagagaagcgagtcgtaac

SEQ ID NO: 561966 - DNA, 25 bp, Homo sapien
ggcagtagcatagccacagaccaaa

SEQ ID NO: 561967 - DNA, 25 bp, Homo sapien
aagtgtcgtctgcagaacgggattc

SEQ ID NO: 561968 - DNA, 25 bp, Homo sapien
gtaaagaaataggtgagtaccatga

SEQ ID NO: 561969 - DNA, 25 bp, Homo sapien
tggtaaagaaataggtgagtaccat

SEQ ID NO: 561970 - DNA, 25 bp, Homo sapien
ggtgagtaccatgaaaaatcaccca

SEQ ID NO: 561971 - DNA, 25 bp, Homo sapien
gcagcaagtggtaaagaaataggtg

SEQ ID NO: 561972 - DNA, 25 bp, Homo sapien
ctcatcatgagggatccagtcacat

SEQ ID NO: 561973 - DNA, 25 bp, Homo sapien
cgtgtggaatgagaagcaagctctc

SEQ ID NO: 561974 - DNA, 25 bp, Homo sapien
ggcctttctttggagcatgcgtgtg

SEQ ID NO: 561975 - DNA, 25 bp, Homo sapien
tctttggagcatgcgtgtggaatga

SEQ ID NO: 561976 - DNA, 25 bp, Homo sapien
gaaaattgaacggagcgtccctctg

SEQ ID NO: 561977 - DNA, 25 bp, Homo sapien
ctttaggaaggcgtaggagactgaa

SEQ ID NO: 561978 - DNA, 25 bp, Homo sapien
tcagtcctccttctaaagaccagag

SEQ ID NO: 561979 - DNA, 25 bp, Homo sapien
tagagaggatgacctagccactgag

SEQ ID NO: 561980 - DNA, 25 bp, Homo sapien
aattttcttctttctcagtgtgcca

SEQ ID NO: 561981 - DNA, 25 bp, Homo sapien
acatccttcgcattcacaattttct

SEQ ID NO: 561982 - DNA, 25 bp, Homo sapien
caattttcttctttctcagtgtgcc

SEQ ID NO: 561983 - DNA, 25 bp, Homo sapien
tttcttctttctcagtgtgccacat

SEQ ID NO: 561984 - DNA, 25 bp, Homo sapien
gagaagtgctatccttacgtagtag

SEQ ID NO: 561985 - DNA, 25 bp, Homo sapien
tcatcttagaaaaggtctgacctag

SEQ ID NO: 561986 - DNA, 25 bp, Homo sapien
aaagtcctttgcagttgtttcacag

SEQ ID NO: 561987 - DNA, 25 bp, Homo sapien
tttacgccagatgatatcctgctgc

SEQ ID NO: 561988 - DNA, 25 bp, Homo sapien
gtcaggtcttacagacaaggtggcc

SEQ ID NO: 561989 - DNA, 25 bp, Homo sapien
gaagactgatgatacctttggcctg

SEQ ID NO: 561990 - DNA, 25 bp, Homo sapien
cctttaactaggagacagctcagtc

SEQ ID NO: 561991 - DNA, 25 bp, Homo sapien
taggtattactcagatgctccagcc

SEQ ID NO: 561992 - DNA, 25 bp, Homo sapien
tgtgtaaaaccgtgtgctcagggtt

SEQ ID NO: 561993 - DNA, 25 bp, Homo sapien
ccatttatcattaccacaagttgtc

SEQ ID NO: 561994 - DNA, 25 bp, Homo sapien
ggtgcaccatcatgttatagattcg

SEQ ID NO: 561995 - DNA, 25 bp, Homo sapien
cgaatgtcgctatgctgaattaata

SEQ ID NO: 561996 - DNA, 25 bp, Homo sapien
gggtcttcctctcctactatgtaat

SEQ ID NO: 561997 - DNA, 25 bp, Homo sapien
tcacacaactctatgcaacgtcagt

SEQ ID NO: 561998 - DNA, 25 bp, Homo sapien
tagtaggtattcatgtttcgcaaac

SEQ ID NO: 561999 - DNA, 25 bp, Homo sapien
ccaaaaggacttcttgccacgtaga

SEQ ID NO: 562000 - DNA, 25 bp, Homo sapien
tagggaagtcaagaatcctcctgtt

SEQ ID NO: 562001 - DNA, 25 bp, Homo sapien
tactgtcttctaaacatagcacacc

SEQ ID NO: 562002 - DNA, 25 bp, Homo sapien
agcacagtctcgaatatattttggg

SEQ ID NO: 562003 - DNA, 25 bp, Homo sapien
tagcacacctctgtcctatgcaagc

SEQ ID NO: 562004 - DNA, 25 bp, Homo sapien
aaatagaacgaggtgcactgtcccg

SEQ ID NO: 562005 - DNA, 25 bp, Homo sapien
ttgaagagcaaacgactggtggcac

SEQ ID NO: 562006 - DNA, 25 bp, Homo sapien
gaaagaagagcctgatctcgggcta

SEQ ID NO: 562007 - DNA, 25 bp, Homo sapien
gactgtgcattgtccaccctctaaa

SEQ ID NO: 562008 - DNA, 25 bp, Homo sapien
cacacatttgccgacattcaaaaac

SEQ ID NO: 562009 - DNA, 25 bp, Homo sapien
cacacacatttgccgacattcaaaa

SEQ ID NO: 562010 - DNA, 25 bp, Homo sapien
catttgccgacattcaaaaacccta

SEQ ID NO: 562011 - DNA, 25 bp, Homo sapien
cacatttgccgacattcaaaaaccc

SEQ ID NO: 562012 - DNA, 25 bp, Homo sapien
gattgagccgggtatgtctttctcc

SEQ ID NO: 562013 - DNA, 25 bp, Homo sapien
gcagagtggggcattctttctctga

SEQ ID NO: 562014 - DNA, 25 bp, Homo sapien
tgagccgggtatgtctttctccagc

SEQ ID NO: 562015 - DNA, 25 bp, Homo sapien
ctgagaacatctgaaaaacgtgagg

SEQ ID NO: 562016 - DNA, 25 bp, Homo sapien
taaatccctgggaatagaggctgtc

SEQ ID NO: 562017 - DNA, 25 bp, Homo sapien
ctggaagagaataaatccctgggaa

SEQ ID NO: 562018 - DNA, 25 bp, Homo sapien
tccctgggaatagaggctgtccctc

SEQ ID NO: 562019 - DNA, 25 bp, Homo sapien
gaataaatccctgggaatagaggct

SEQ ID NO: 562020 - DNA, 25 bp, Homo sapien
caaagtatagacagtgatatggcag

SEQ ID NO: 562021 - DNA, 25 bp, Homo sapien
ccatgttgttatagccaagaaggca

SEQ ID NO: 562022 - DNA, 25 bp, Homo sapien
gagagcattatattttcacgagaag

SEQ ID NO: 562023 - DNA, 25 bp, Homo sapien
gcagacagccaggatcattgattca

SEQ ID NO: 562024 - DNA, 25 bp, Homo sapien
caaaagacgatggaactcagaggca

SEQ ID NO: 562025 - DNA, 25 bp, Homo sapien
gcctatctgcttaatggagtggaaa

SEQ ID NO: 562026 - DNA, 25 bp, Homo sapien
tcatgtgtctgtccttagaaaggta

SEQ ID NO: 562027 - DNA, 25 bp, Homo sapien
tgtacacctatgacctatgttgcct

SEQ ID NO: 562028 - DNA, 25 bp, Homo sapien
aaatggtaagggtcacttgttgcct

SEQ ID NO: 562029 - DNA, 25 bp, Homo sapien
ttcacattcccaagtcgttctgcaa

SEQ ID NO: 562030 - DNA, 25 bp, Homo sapien
attgtaccccatacaatccatgtgg

SEQ ID NO: 562031 - DNA, 25 bp, Homo sapien
gggtcacttgttgccttcacattcc

SEQ ID NO: 562032 - DNA, 25 bp, Homo sapien
cctggtaactggcaaataggtggtc

SEQ ID NO: 562033 - DNA, 25 bp, Homo sapien
gatgagaactctttcaagtcccgct

SEQ ID NO: 562034 - DNA, 25 bp, Homo sapien
tgagagtactacaaacgcggtctgt

SEQ ID NO: 562035 - DNA, 25 bp, Homo sapien
tctctggccctcgatgaaatgtata

SEQ ID NO: 562036 - DNA, 25 bp, Homo sapien
tctccatttagggaatgcctgcaga

SEQ ID NO: 562037 - DNA, 25 bp, Homo sapien
caaccagtggacaaatcagctccgt

SEQ ID NO: 562038 - DNA, 25 bp, Homo sapien
gatggcctcttgtatcctaggatac

SEQ ID NO: 562039 - DNA, 25 bp, Homo sapien
tacaaagacaaggtacacagacagc

SEQ ID NO: 562040 - DNA, 25 bp, Homo sapien
aggcaatatcactttggacatagga

SEQ ID NO: 562041 - DNA, 25 bp, Homo sapien
cctaggcaatatcactttggacata

SEQ ID NO: 562042 - DNA, 25 bp, Homo sapien
acctaggcaatatcactttggacat

SEQ ID NO: 562043 - DNA, 25 bp, Homo sapien
gcaatatcactttggacataggaac

SEQ ID NO: 562044 - DNA, 25 bp, Homo sapien
caacaggtcactgtgtgtaatgttc

SEQ ID NO: 562045 - DNA, 25 bp, Homo sapien
tcactgtgtgtaatgttcccttccc

SEQ ID NO: 562046 - DNA, 25 bp, Homo sapien
gttttggttaaatgggtacatgctc

SEQ ID NO: 562047 - DNA, 25 bp, Homo sapien
aaatgggtacatgctcagaacgtgc

SEQ ID NO: 562048 - DNA, 25 bp, Homo sapien
ttagagatgggtaaagtcagcctgg

SEQ ID NO: 562049 - DNA, 25 bp, Homo sapien
tgagggttcggccattgtcccaaaa

SEQ ID NO: 562050 - DNA, 25 bp, Homo sapien
gaaaatacgttacaggtggagctca

SEQ ID NO: 562051 - DNA, 25 bp, Homo sapien
tgaaccaagatcctcatagttgggt

SEQ ID NO: 562052 - DNA, 25 bp, Homo sapien
ttgatggccaaacccctacatgagt

SEQ ID NO: 562053 - DNA, 25 bp, Homo sapien
ggagcgcttcatgcaagaacccaag

SEQ ID NO: 562054 - DNA, 25 bp, Homo sapien
tgagggacatttgtactgtgcccca

SEQ ID NO: 562055 - DNA, 25 bp, Homo sapien
caaaccatatcaagctgggagcaca

SEQ ID NO: 562056 - DNA, 25 bp, Homo sapien
tgaatcactgattccacctgttgtg

SEQ ID NO: 562057 - DNA, 25 bp, Homo sapien
cctggaatgatagctgtctcaatga

SEQ ID NO: 562058 - DNA, 25 bp, Homo sapien
gcccaagctccctggaatgatagct

SEQ ID NO: 562059 - DNA, 25 bp, Homo sapien
gatggcagcagatgggtcgctccac

SEQ ID NO: 562060 - DNA, 25 bp, Homo sapien
ctgtgggtaatgtcagaggggctgc

SEQ ID NO: 562061 - DNA, 25 bp, Homo sapien
gtgggtaatgtcagaggggctgcac

SEQ ID NO: 562062 - DNA, 25 bp, Homo sapien
tgtgggtaatgtcagaggggctgca

SEQ ID NO: 562063 - DNA, 25 bp, Homo sapien
tgtgatccatggttggacttcaggg

SEQ ID NO: 562064 - DNA, 25 bp, Homo sapien
cattaagtgaatggaggaacatgca

SEQ ID NO: 562065 - DNA, 25 bp, Homo sapien
tgggagttgattaacctgtgatcca

SEQ ID NO: 562066 - DNA, 25 bp, Homo sapien
cacagaccattacaattgggagttg

SEQ ID NO: 562067 - DNA, 25 bp, Homo sapien
tctggatttatcgaccctgtgggag

SEQ ID NO: 562068 - DNA, 25 bp, Homo sapien
catagctagtctgtgatagagcccg

SEQ ID NO: 562069 - DNA, 25 bp, Homo sapien
gaacagtctaggttcgccacatatg

SEQ ID NO: 562070 - DNA, 25 bp, Homo sapien
tagagcccgaagtaggaatctgtct

SEQ ID NO: 562071 - DNA, 25 bp, Homo sapien
cctttcaggagattcataatgtaca

SEQ ID NO: 562072 - DNA, 25 bp, Homo sapien
gagctgtttcccacgttcccgacac

SEQ ID NO: 562073 - DNA, 25 bp, Homo sapien
ggagctgtttcccacgttcccgaca

SEQ ID NO: 562074 - DNA, 25 bp, Homo sapien
cacgttcccgacaccctttcaggag

SEQ ID NO: 562075 - DNA, 25 bp, Homo sapien
tgggtcacagttgaaatctagttat

SEQ ID NO: 562076 - DNA, 25 bp, Homo sapien
taagggtgagcacatcactagcgaa

SEQ ID NO: 562077 - DNA, 25 bp, Homo sapien
tatgtaacctttccttgggtcacag

SEQ ID NO: 562078 - DNA, 25 bp, Homo sapien
gaagcccttgatcttcaggcaagaa

SEQ ID NO: 562079 - DNA, 25 bp, Homo sapien
tttggagtttcacctgactttatta

SEQ ID NO: 562080 - DNA, 25 bp, Homo sapien
cttttggagtttcacctgactttat

SEQ ID NO: 562081 - DNA, 25 bp, Homo sapien
gagtttcacctgactttattaccag

SEQ ID NO: 562082 - DNA, 25 bp, Homo sapien
tcttggccaggaatcctaaaagtct

SEQ ID NO: 562083 - DNA, 25 bp, Homo sapien
cttggccaggaatcctaaaagtctt

SEQ ID NO: 562084 - DNA, 25 bp, Homo sapien
tggcagagaaaggacgatttatttt

SEQ ID NO: 562085 - DNA, 25 bp, Homo sapien
atggcagagaaaggacgatttattt

SEQ ID NO: 562086 - DNA, 25 bp, Homo sapien
ggcagagaaaggacgatttatttta

SEQ ID NO: 562087 - DNA, 25 bp, Homo sapien
tatataaagcacgaaaactggccaa

SEQ ID NO: 562088 - DNA, 25 bp, Homo sapien
tccctcagaggaaccatgacctgtt

SEQ ID NO: 562089 - DNA, 25 bp, Homo sapien
tagtaacactatctgggagctaaag

SEQ ID NO: 562090 - DNA, 25 bp, Homo sapien
tgttgtcaagggacacagctggtac

SEQ ID NO: 562091 - DNA, 25 bp, Homo sapien
aaacagaactgccaggttcattatc

SEQ ID NO: 562092 - DNA, 25 bp, Homo sapien
acagaactgccaggttcattatctc

SEQ ID NO: 562093 - DNA, 25 bp, Homo sapien
aacagaactgccaggttcattatct

SEQ ID NO: 562094 - DNA, 25 bp, Homo sapien
tctgctttgcaaatgctcagaaaca

SEQ ID NO: 562095 - DNA, 25 bp, Homo sapien
tcatacattgtatactcagccaaga

SEQ ID NO: 562096 - DNA, 25 bp, Homo sapien
gaacagtgtggtggagaaaaagcaa

SEQ ID NO: 562097 - DNA, 25 bp, Homo sapien
caactattgggttagaattatgtcc

SEQ ID NO: 562098 - DNA, 25 bp, Homo sapien
gaaatgctggcaaaattctaacaga

SEQ ID NO: 562099 - DNA, 25 bp, Homo sapien
cagcccaacctgcagcctttagaca

SEQ ID NO: 562100 - DNA, 25 bp, Homo sapien
ggcagatcgggaggccagccctggg

SEQ ID NO: 562101 - DNA, 25 bp, Homo sapien
agcccaacctgcagcctttagacac

SEQ ID NO: 562102 - DNA, 25 bp, Homo sapien
agctccaggcagatcgggaggccag

SEQ ID NO: 562103 - DNA, 25 bp, Homo sapien
atctatgtgtcccaaacagtggtgg

SEQ ID NO: 562104 - DNA, 25 bp, Homo sapien
catatgtccgtactgcaaatgcagc

SEQ ID NO: 562105 - DNA, 25 bp, Homo sapien
gatgaccaggtcaagattgatcatt

SEQ ID NO: 562106 - DNA, 25 bp, Homo sapien
acagtggtggcaacaagggatgacc

SEQ ID NO: 562107 - DNA, 25 bp, Homo sapien
tgtgtatacaaaagggaaacattca

SEQ ID NO: 562108 - DNA, 25 bp, Homo sapien
tctctgaacctactgtccactgtaa

SEQ ID NO: 562109 - DNA, 25 bp, Homo sapien
tgtccactgtaaccatacttcattg

SEQ ID NO: 562110 - DNA, 25 bp, Homo sapien
ttctctaacggtgtgtatacaaaag

SEQ ID NO: 562111 - DNA, 25 bp, Homo sapien
gccacaatgtacagctaagttttat

SEQ ID NO: 562112 - DNA, 25 bp, Homo sapien
tttaaaagcttgtatccttcaacat

SEQ ID NO: 562113 - DNA, 25 bp, Homo sapien
ccacaatgtacagctaagttttata

SEQ ID NO: 562114 - DNA, 25 bp, Homo sapien
taaaagcttgtatccttcaacattt

SEQ ID NO: 562115 - DNA, 25 bp, Homo sapien
cagtgtcagacacctaccaagtgct

SEQ ID NO: 562116 - DNA, 25 bp, Homo sapien
tcccctagacaagatgatgaaagca

SEQ ID NO: 562117 - DNA, 25 bp, Homo sapien
tcacctacaacaatgggcctgagac

SEQ ID NO: 562118 - DNA, 25 bp, Homo sapien
tgcaattcccaagtcgaaagtcagc

SEQ ID NO: 562119 - DNA, 25 bp, Homo sapien
tcagcacagtaacataaagaggccg

SEQ ID NO: 562120 - DNA, 25 bp, Homo sapien
gatgatagcagcttggtactagcag

SEQ ID NO: 562121 - DNA, 25 bp, Homo sapien
gatagatgcaggatcagcactctca

SEQ ID NO: 562122 - DNA, 25 bp, Homo sapien
taacgaatatttttggcatcagctg

SEQ ID NO: 562123 - DNA, 25 bp, Homo sapien
taggtacagcgatattccatgagta

SEQ ID NO: 562124 - DNA, 25 bp, Homo sapien
gtacagcgatattccatgagtattc

SEQ ID NO: 562125 - DNA, 25 bp, Homo sapien
cataggtacagcgatattccatgag

SEQ ID NO: 562126 - DNA, 25 bp, Homo sapien
ctgtcataggtacagcgatattcca

SEQ ID NO: 562127 - DNA, 25 bp, Homo sapien
cacatgagaggattttcagggatct

SEQ ID NO: 562128 - DNA, 25 bp, Homo sapien
tgtgcccaatctatctccgtacgga

SEQ ID NO: 562129 - DNA, 25 bp, Homo sapien
tgtattccctaaagaagttaatgcc

SEQ ID NO: 562130 - DNA, 25 bp, Homo sapien
tctggcacaagaagatacacagtgc

SEQ ID NO: 562131 - DNA, 25 bp, Homo sapien
cctgctaagagtatgttggaaacac

SEQ ID NO: 562132 - DNA, 25 bp, Homo sapien
cagtcaaatgaaatagatcaggcca

SEQ ID NO: 562133 - DNA, 25 bp, Homo sapien
gaacttggacttaccagtcaggact

SEQ ID NO: 562134 - DNA, 25 bp, Homo sapien
gattatagtccatgacaaagtggaa

SEQ ID NO: 562135 - DNA, 25 bp, Homo sapien
tgcgagctttctgaggctgcttgct

SEQ ID NO: 562136 - DNA, 25 bp, Homo sapien
tattgaggagagaagccgttgctgc

SEQ ID NO: 562137 - DNA, 25 bp, Homo sapien
gaaagacgaaggcactccttgctgt

SEQ ID NO: 562138 - DNA, 25 bp, Homo sapien
ggcactccttgctgtctgatcacag

SEQ ID NO: 562139 - DNA, 25 bp, Homo sapien
ggtgctgcactggagttgccatatg

SEQ ID NO: 562140 - DNA, 25 bp, Homo sapien
tctgctgtgggactggagttatcct

SEQ ID NO: 562141 - DNA, 25 bp, Homo sapien
tccctggcatgcattcagttggtgc

SEQ ID NO: 562142 - DNA, 25 bp, Homo sapien
tatgactgcatcctgagtctctgct

SEQ ID NO: 562143 - DNA, 25 bp, Homo sapien
tcatggctactagtacaaaagctca

SEQ ID NO: 562144 - DNA, 25 bp, Homo sapien
tcagttgagcaaatagagggttgca

SEQ ID NO: 562145 - DNA, 25 bp, Homo sapien
gagggttgcattaatacccatgagc

SEQ ID NO: 562146 - DNA, 25 bp, Homo sapien
gttattagtacaacccactatttga

SEQ ID NO: 562147 - DNA, 25 bp, Homo sapien
acacaaaggcaatgtcagagatatt

SEQ ID NO: 562148 - DNA, 25 bp, Homo sapien
caaaggcaatgtcagagatattcag

SEQ ID NO: 562149 - DNA, 25 bp, Homo sapien
ggatgttacgcaagaagaggcccct

SEQ ID NO: 562150 - DNA, 25 bp, Homo sapien
agagtcaaaaccatggatgttacgc

SEQ ID NO: 562151 - DNA, 25 bp, Homo sapien
tagaaaagccatgagttccaaaatc

SEQ ID NO: 562152 - DNA, 25 bp, Homo sapien
gaattcttgagggtgtgaacacccc

SEQ ID NO: 562153 - DNA, 25 bp, Homo sapien
gaacaccccgttttccatgatgtgc

SEQ ID NO: 562154 - DNA, 25 bp, Homo sapien
tgcaaatttcacaccgcatgcctgt

SEQ ID NO: 562155 - DNA, 25 bp, Homo sapien
taaaaagctggagcatgcttgtctc

SEQ ID NO: 562156 - DNA, 25 bp, Homo sapien
aaagctgtgaacatttcagggaggc

SEQ ID NO: 562157 - DNA, 25 bp, Homo sapien
tgttaatcaggagcagaccaatcag

SEQ ID NO: 562158 - DNA, 25 bp, Homo sapien
gccatggctcctacgttattaagaa

SEQ ID NO: 562159 - DNA, 25 bp, Homo sapien
tataaatatggctgggacgttgtca

SEQ ID NO: 562160 - DNA, 25 bp, Homo sapien
aagtgttctgcaacctaactacaag

SEQ ID NO: 562161 - DNA, 25 bp, Homo sapien
ccatgctgaagggagaggaattagc

SEQ ID NO: 562162 - DNA, 25 bp, Homo sapien
ttcaaacaaccacagtaagcaggac

SEQ ID NO: 562163 - DNA, 25 bp, Homo sapien
tcttaaaggagttcagttggatttc

SEQ ID NO: 562164 - DNA, 25 bp, Homo sapien
agttcagttggatttcaccttggca

SEQ ID NO: 562165 - DNA, 25 bp, Homo sapien
tccttttgggactcaagatctttat

SEQ ID NO: 562166 - DNA, 25 bp, Homo sapien
ccttttgggactcaagatctttatc

SEQ ID NO: 562167 - DNA, 25 bp, Homo sapien
tacacggaagttctaccaatagcag

SEQ ID NO: 562168 - DNA, 25 bp, Homo sapien
caatatgtctgtcaggatacacgga

SEQ ID NO: 562169 - DNA, 25 bp, Homo sapien
gtgcgagggcactgacaatatgtct

SEQ ID NO: 562170 - DNA, 25 bp, Homo sapien
ccaatagcagtagccaaggtccaga

SEQ ID NO: 562171 - DNA, 25 bp, Homo sapien
tggccacattttgatgatgtaatca

SEQ ID NO: 562172 - DNA, 25 bp, Homo sapien
ttctttctgcgtaacaccagctaaa

SEQ ID NO: 562173 - DNA, 25 bp, Homo sapien
taaaaggcagctcttccactattca

SEQ ID NO: 562174 - DNA, 25 bp, Homo sapien
tttctggccacattttgatgatgta

SEQ ID NO: 562175 - DNA, 25 bp, Homo sapien
tctaagcgagttttcaacaaaaggc

SEQ ID NO: 562176 - DNA, 25 bp, Homo sapien
cttgatgacaaagtctaagcgagtt

SEQ ID NO: 562177 - DNA, 25 bp, Homo sapien
ttgagcatcagcacacaacacagcg

SEQ ID NO: 562178 - DNA, 25 bp, Homo sapien
ggtcagaaaccacggtctctccgaa

SEQ ID NO: 562179 - DNA, 25 bp, Homo sapien
tgtcgtaccagtaccagtggtcaag

SEQ ID NO: 562180 - DNA, 25 bp, Homo sapien
taccagtggtcaagatgctgaatta

SEQ ID NO: 562181 - DNA, 25 bp, Homo sapien
tataacatgtcgtaccagtaccagt

SEQ ID NO: 562182 - DNA, 25 bp, Homo sapien
taccagtaccagtggtcaagatgct

SEQ ID NO: 562183 - DNA, 25 bp, Homo sapien
atgatgaagcctgcgacctgcacgt

SEQ ID NO: 562184 - DNA, 25 bp, Homo sapien
tgtggtgctcacatggtggcttcct

SEQ ID NO: 562185 - DNA, 25 bp, Homo sapien
ggcttcctgtcctgcactgcgggag

SEQ ID NO: 562186 - DNA, 25 bp, Homo sapien
cctgcacgtggatgtggtgctcaca

SEQ ID NO: 562187 - DNA, 25 bp, Homo sapien
catggatggcaaattggtcctgggt

SEQ ID NO: 562188 - DNA, 25 bp, Homo sapien
ccactttcgagacggcccactctca

SEQ ID NO: 562189 - DNA, 25 bp, Homo sapien
tctcatggatggcaaattggtcctg

SEQ ID NO: 562190 - DNA, 25 bp, Homo sapien
tcagttccttgccatatgggagctc

SEQ ID NO: 562191 - DNA, 25 bp, Homo sapien
gcaccctcaactacccaggctcaaa

SEQ ID NO: 562192 - DNA, 25 bp, Homo sapien
ccctcaactacccaggctcaaataa

SEQ ID NO: 562193 - DNA, 25 bp, Homo sapien
ttgaattctttaactatcaaataga

SEQ ID NO: 562194 - DNA, 25 bp, Homo sapien
tgaattctttaactatcaaatagaa

SEQ ID NO: 562195 - DNA, 25 bp, Homo sapien
tgacagaattcaggtttgtgctgcc

SEQ ID NO: 562196 - DNA, 25 bp, Homo sapien
tacaagttagttggcaccagagagg

SEQ ID NO: 562197 - DNA, 25 bp, Homo sapien
tcctcaggctctcacaaatacaagt

SEQ ID NO: 562198 - DNA, 25 bp, Homo sapien
caagatacgctgacataatgcctcc

SEQ ID NO: 562199 - DNA, 25 bp, Homo sapien
tggaacagtcgcttcctccactggg

SEQ ID NO: 562200 - DNA, 25 bp, Homo sapien
ctgtgtttgtgcctacaattccaaa

SEQ ID NO: 562201 - DNA, 25 bp, Homo sapien
gcctacaattccaaaactggctctt

SEQ ID NO: 562202 - DNA, 25 bp, Homo sapien
tggctcttggaacagtcgcttcctc

SEQ ID NO: 562203 - DNA, 25 bp, Homo sapien
gcgccccaagtctctcccgcgcggc

SEQ ID NO: 562204 - DNA, 25 bp, Homo sapien
agagccggccgctcactgcccggtc

SEQ ID NO: 562205 - DNA, 25 bp, Homo sapien
ggccaccacggaagagcgaagatct

SEQ ID NO: 562206 - DNA, 25 bp, Homo sapien
cgcgggcggcagagccggccgctca

SEQ ID NO: 562207 - DNA, 25 bp, Homo sapien
cttgggcaattctcaggttggtgtg

SEQ ID NO: 562208 - DNA, 25 bp, Homo sapien
gcaattctcaggttggtgtgtcgtt

SEQ ID NO: 562209 - DNA, 25 bp, Homo sapien
tcatagctgaattagacatgcgggt

SEQ ID NO: 562210 - DNA, 25 bp, Homo sapien
cgggtggaaaggtgacaacactgtt

SEQ ID NO: 562211 - DNA, 25 bp, Homo sapien
atggggtgaatagaaacggtgtaag

SEQ ID NO: 562212 - DNA, 25 bp, Homo sapien
gatggggtgaatagaaacggtgtaa

SEQ ID NO: 562213 - DNA, 25 bp, Homo sapien
tggggtgaatagaaacggtgtaaga

SEQ ID NO: 562214 - DNA, 25 bp, Homo sapien
cgctgcacccgcaggcggcagaccc

SEQ ID NO: 562215 - DNA, 25 bp, Homo sapien
tcctctgcctcgcgctgcacccgca

SEQ ID NO: 562216 - DNA, 25 bp, Homo sapien
gcggcagacccctcggagcgcgcca

SEQ ID NO: 562217 - DNA, 25 bp, Homo sapien
acccgcaggcggcagacccctcgga

SEQ ID NO: 562218 - DNA, 25 bp, Homo sapien
ggcaaggttcggaggctggagggca

SEQ ID NO: 562219 - DNA, 25 bp, Homo sapien
gttgcattggcaaggttcggaggct

SEQ ID NO: 562220 - DNA, 25 bp, Homo sapien
cattggcaaggttcggaggctggag

SEQ ID NO: 562221 - DNA, 25 bp, Homo sapien
gcattggcaaggttcggaggctgga

SEQ ID NO: 562222 - DNA, 25 bp, Homo sapien
ctgaacggagctaggggacgccaca

SEQ ID NO: 562223 - DNA, 25 bp, Homo sapien
gctgccagcgtgagcggttccggga

SEQ ID NO: 562224 - DNA, 25 bp, Homo sapien
gcaccgcagtgccagcgtcaggagc

SEQ ID NO: 562225 - DNA, 25 bp, Homo sapien
ctgccactgcgggacggccgatctg

SEQ ID NO: 562226 - DNA, 25 bp, Homo sapien
catatgcgttcctttgctgaaaatg

SEQ ID NO: 562227 - DNA, 25 bp, Homo sapien
aaagaaaccacattgatttgggcga

SEQ ID NO: 562228 - DNA, 25 bp, Homo sapien
ggcgaaaagcaatccagcagcttag

SEQ ID NO: 562229 - DNA, 25 bp, Homo sapien
cactgcagcatatgcgttcctttgc

SEQ ID NO: 562230 - DNA, 25 bp, Homo sapien
aagaagagatccttgtggttgcata

SEQ ID NO: 562231 - DNA, 25 bp, Homo sapien
agagatccttgtggttgcataataa

SEQ ID NO: 562232 - DNA, 25 bp, Homo sapien
gatccttgtggttgcataataataa

SEQ ID NO: 562233 - DNA, 25 bp, Homo sapien
ccttgtggttgcataataataattt

SEQ ID NO: 562234 - DNA, 25 bp, Homo sapien
tgttttcggccagggtgaatgattt

SEQ ID NO: 562235 - DNA, 25 bp, Homo sapien
tctttgagacttctcagtgattgtt

SEQ ID NO: 562236 - DNA, 25 bp, Homo sapien
cagtgattgtttgttttcggccagg

SEQ ID NO: 562237 - DNA, 25 bp, Homo sapien
tttgagacttctcagtgattgtttg

SEQ ID NO: 562238 - DNA, 25 bp, Homo sapien
aaagcaaagagatcccaactgagat

SEQ ID NO: 562239 - DNA, 25 bp, Homo sapien
gagaacagtaatgcacaaaagatcc

SEQ ID NO: 562240 - DNA, 25 bp, Homo sapien
gatcaccaccggattattaccaaag

SEQ ID NO: 562241 - DNA, 25 bp, Homo sapien
tacttgatcgctatgaggatgggtg

SEQ ID NO: 562242 - DNA, 25 bp, Homo sapien
tcttgtagtaggtagagagcgccac

SEQ ID NO: 562243 - DNA, 25 bp, Homo sapien
tccgagattgagtctgacagccgaa

SEQ ID NO: 562244 - DNA, 25 bp, Homo sapien
agtttccaacaaccgtgagcatgag

SEQ ID NO: 562245 - DNA, 25 bp, Homo sapien
taatcaatcgccagtgctcagtggg

SEQ ID NO: 562246 - DNA, 25 bp, Homo sapien
tacaagttgaattggccctgaacaa

SEQ ID NO: 562247 - DNA, 25 bp, Homo sapien
gaacaatttgcggacatatgcagca

SEQ ID NO: 562248 - DNA, 25 bp, Homo sapien
cagtctacatagatataacggacaa

SEQ ID NO: 562249 - DNA, 25 bp, Homo sapien
caatgcctctagacctttataaccc

SEQ ID NO: 562250 - DNA, 25 bp, Homo sapien
cttctgctattggtatggaaatatt

SEQ ID NO: 562251 - DNA, 25 bp, Homo sapien
tattggtatggaaatattagatctc

SEQ ID NO: 562252 - DNA, 25 bp, Homo sapien
ccttgaaatagactggttgctattc

SEQ ID NO: 562253 - DNA, 25 bp, Homo sapien
gaaatattagatctccttgaaatag

SEQ ID NO: 562254 - DNA, 25 bp, Homo sapien
gcatccatcttcagggttgctagac

SEQ ID NO: 562255 - DNA, 25 bp, Homo sapien
catctgacttgaagagcatccatct

SEQ ID NO: 562256 - DNA, 25 bp, Homo sapien
tggcatgtagccagacaaacacagc

SEQ ID NO: 562257 - DNA, 25 bp, Homo sapien
taaaccagcatcatcatggatgcca

SEQ ID NO: 562258 - DNA, 25 bp, Homo sapien
ggcaatcttgcttctccccacatcc

SEQ ID NO: 562259 - DNA, 25 bp, Homo sapien
ctggggcaatcttgcttctccccac

SEQ ID NO: 562260 - DNA, 25 bp, Homo sapien
ggggcaatcttgcttctccccacat

SEQ ID NO: 562261 - DNA, 25 bp, Homo sapien
gggcaatcttgcttctccccacatc

SEQ ID NO: 562262 - DNA, 25 bp, Homo sapien
gacctggatccattcccaaacttct

SEQ ID NO: 562263 - DNA, 25 bp, Homo sapien
tagtgactgtttagacctggatcca

SEQ ID NO: 562264 - DNA, 25 bp, Homo sapien
catgtagccatcgctggtgattagt

SEQ ID NO: 562265 - DNA, 25 bp, Homo sapien
caaacttctcctgcttgcttggcat

SEQ ID NO: 562266 - DNA, 25 bp, Homo sapien
cccaggattaagcttgcagatgcaa

SEQ ID NO: 562267 - DNA, 25 bp, Homo sapien
ctacagtctctagtgtcctctggag

SEQ ID NO: 562268 - DNA, 25 bp, Homo sapien
caaagaggagcatagaattgggcct

SEQ ID NO: 562269 - DNA, 25 bp, Homo sapien
caagatgctgcccacgaagggaagc

SEQ ID NO: 562270 - DNA, 25 bp, Homo sapien
agctacctctttacgcactggcaaa

SEQ ID NO: 562271 - DNA, 25 bp, Homo sapien
tgcccaggcgaaaatccagaccaat

SEQ ID NO: 562272 - DNA, 25 bp, Homo sapien
tcttgtacccatagccctgggaggc

SEQ ID NO: 562273 - DNA, 25 bp, Homo sapien
gaatctgtgggctcaagtagcgata

SEQ ID NO: 562274 - DNA, 25 bp, Homo sapien
aatgggagcttcaacgtacgtctga

SEQ ID NO: 562275 - DNA, 25 bp, Homo sapien
tatgagtgattcttaaaatgggagc

SEQ ID NO: 562276 - DNA, 25 bp, Homo sapien
caatctattatgaggaacaagggct

SEQ ID NO: 562277 - DNA, 25 bp, Homo sapien
gggctagggaacaaacaccaaagca

SEQ ID NO: 562278 - DNA, 25 bp, Homo sapien
tatggtagtttattagccttggccc

SEQ ID NO: 562279 - DNA, 25 bp, Homo sapien
ggttggaaaccgcatgcataaggct

SEQ ID NO: 562280 - DNA, 25 bp, Homo sapien
tttaatgcaaaagaagtacacctgt

SEQ ID NO: 562281 - DNA, 25 bp, Homo sapien
catcgtagtgcagttttcaccgcta

SEQ ID NO: 562282 - DNA, 25 bp, Homo sapien
tcttcaaggccccaggttcgagatc

SEQ ID NO: 562283 - DNA, 25 bp, Homo sapien
cgtttgccaagcgaagggttcccat

SEQ ID NO: 562284 - DNA, 25 bp, Homo sapien
cccattattcctggctggcggtcca

SEQ ID NO: 562285 - DNA, 25 bp, Homo sapien
gcagcagccgcaccaaaaagtttca

SEQ ID NO: 562286 - DNA, 25 bp, Homo sapien
caaatggttagccatggctgtgact

SEQ ID NO: 562287 - DNA, 25 bp, Homo sapien
tcagattacctcagaacatcctggt

SEQ ID NO: 562288 - DNA, 25 bp, Homo sapien
gagagagtccccacgatgaaagcca

SEQ ID NO: 562289 - DNA, 25 bp, Homo sapien
tccagtcgccctggaggttgcaaat

SEQ ID NO: 562290 - DNA, 25 bp, Homo sapien
taaagtggtacgttgcgatagctca

SEQ ID NO: 562291 - DNA, 25 bp, Homo sapien
gatcgtagctaaaggactaggtcca

SEQ ID NO: 562292 - DNA, 25 bp, Homo sapien
gaaacctgctctccattgtgaccag

SEQ ID NO: 562293 - DNA, 25 bp, Homo sapien
gaccagtggaggtatcccatttcag

SEQ ID NO: 562294 - DNA, 25 bp, Homo sapien
tggagtacaggtggcacggtctcgg

SEQ ID NO: 562295 - DNA, 25 bp, Homo sapien
ttggtcaggctagtatcaaattcct

SEQ ID NO: 562296 - DNA, 25 bp, Homo sapien
atgttggtcaggctagtatcaaatt

SEQ ID NO: 562297 - DNA, 25 bp, Homo sapien
ctggagtacaggtggcacggtctcg

SEQ ID NO: 562298 - DNA, 25 bp, Homo sapien
tccagaagaacctgaacggaatggg

SEQ ID NO: 562299 - DNA, 25 bp, Homo sapien
tctctaggagctcatgggacacatg

SEQ ID NO: 562300 - DNA, 25 bp, Homo sapien
tataagtgctcctagtttaccaaga

SEQ ID NO: 562301 - DNA, 25 bp, Homo sapien
gagtttttgctctccatgaacaggg

SEQ ID NO: 562302 - DNA, 25 bp, Homo sapien
tacctttcacaagtcaagacttatc

SEQ ID NO: 562303 - DNA, 25 bp, Homo sapien
tgtgccaaaaacaaatctagcaggt

SEQ ID NO: 562304 - DNA, 25 bp, Homo sapien
gaggaactgacttaataaataacga

SEQ ID NO: 562305 - DNA, 25 bp, Homo sapien
gaatcacagacatgttgacttccat

SEQ ID NO: 562306 - DNA, 25 bp, Homo sapien
gacactgatggtaagaatacaaaaa

SEQ ID NO: 562307 - DNA, 25 bp, Homo sapien
caaaatcgttagtcttcagggaaat

SEQ ID NO: 562308 - DNA, 25 bp, Homo sapien
caaatgaccagtaagtgcatgaaaa

SEQ ID NO: 562309 - DNA, 25 bp, Homo sapien
cttcacacttactaggatgactgga

SEQ ID NO: 562310 - DNA, 25 bp, Homo sapien
taaatggaaagaatctacgctgggc

SEQ ID NO: 562311 - DNA, 25 bp, Homo sapien
ttcacacccaggctcaagacggagc

SEQ ID NO: 562312 - DNA, 25 bp, Homo sapien
gacctctcttgtgccccattgctgg

SEQ ID NO: 562313 - DNA, 25 bp, Homo sapien
tgggaaactactaaatggactgatc

SEQ ID NO: 562314 - DNA, 25 bp, Homo sapien
tacatgtgtaagtgccagacagctg

SEQ ID NO: 562315 - DNA, 25 bp, Homo sapien
tcacagtacaccatatgcactctgg

SEQ ID NO: 562316 - DNA, 25 bp, Homo sapien
accagcacaaatgagtggcagttgc

SEQ ID NO: 562317 - DNA, 25 bp, Homo sapien
cctcttgaggttcagagcatcagaa

SEQ ID NO: 562318 - DNA, 25 bp, Homo sapien
taacacattgctcaaaagacacagt

SEQ ID NO: 562319 - DNA, 25 bp, Homo sapien
gacacagtaacgttgtgaaaggcat

SEQ ID NO: 562320 - DNA, 25 bp, Homo sapien
taaacatgtaacttcgttggaacca

SEQ ID NO: 562321 - DNA, 25 bp, Homo sapien
tacaagttgtttctatgcactacct

SEQ ID NO: 562322 - DNA, 25 bp, Homo sapien
ctggctgggaaaggtacaccatggt

SEQ ID NO: 562323 - DNA, 25 bp, Homo sapien
tggatattcagccaacagtgttgtg

SEQ ID NO: 562324 - DNA, 25 bp, Homo sapien
gaccacatctgaggctaggacgtaa

SEQ ID NO: 562325 - DNA, 25 bp, Homo sapien
ttgaaggtttcccaggacatcaggc

SEQ ID NO: 562326 - DNA, 25 bp, Homo sapien
aatactggccacaatggaaacaagg

SEQ ID NO: 562327 - DNA, 25 bp, Homo sapien
gaaattcaattcctcggcatgttcc

SEQ ID NO: 562328 - DNA, 25 bp, Homo sapien
gcatgttcctccaagtattgacaca

SEQ ID NO: 562329 - DNA, 25 bp, Homo sapien
ggcctggtccggcaccaatttcaag

SEQ ID NO: 562330 - DNA, 25 bp, Homo sapien
ggccatgtcagccaattacaaactg

SEQ ID NO: 562331 - DNA, 25 bp, Homo sapien
tatgacgcagtcacctctactgtct

SEQ ID NO: 562332 - DNA, 25 bp, Homo sapien
aaagatgaatatgacgcagtcacct

SEQ ID NO: 562333 - DNA, 25 bp, Homo sapien
gcttaggggccatgtcagccaatta

SEQ ID NO: 562334 - DNA, 25 bp, Homo sapien
caggaagcaggtttcatgagaggct

SEQ ID NO: 562335 - DNA, 25 bp, Homo sapien
tgtcctgttagcaaactctgaagag

SEQ ID NO: 562336 - DNA, 25 bp, Homo sapien
tcccactctagatgcccttcttgtg

SEQ ID NO: 562337 - DNA, 25 bp, Homo sapien
tgaagtcgcacaggaaaagggcgcc

SEQ ID NO: 562338 - DNA, 25 bp, Homo sapien
gtagctggcgtaatctgtaggaaca

SEQ ID NO: 562339 - DNA, 25 bp, Homo sapien
cgataatgctcctgagtgtagctgg

SEQ ID NO: 562340 - DNA, 25 bp, Homo sapien
tcctttcctgcaaaccgataatgct

SEQ ID NO: 562341 - DNA, 25 bp, Homo sapien
cgtaactctctatggattcctggat

SEQ ID NO: 562342 - DNA, 25 bp, Homo sapien
tgaagagatggttctatcttgttgg

SEQ ID NO: 562343 - DNA, 25 bp, Homo sapien
tatgaagagatggttctatcttgtt

SEQ ID NO: 562344 - DNA, 25 bp, Homo sapien
ctatgaagagatggttctatcttgt

SEQ ID NO: 562345 - DNA, 25 bp, Homo sapien
aagagatggttctatcttgttggat

SEQ ID NO: 562346 - DNA, 25 bp, Homo sapien
cagcaaaattgcacgaatgagctgt

SEQ ID NO: 562347 - DNA, 25 bp, Homo sapien
cagcaagcttagatctatacataga

SEQ ID NO: 562348 - DNA, 25 bp, Homo sapien
gattcactgtatgacaaagctacca

SEQ ID NO: 562349 - DNA, 25 bp, Homo sapien
ttatttacaactgaatccatgccca

SEQ ID NO: 562350 - DNA, 25 bp, Homo sapien
tgaagatgtcatcgccaggaaaaca

SEQ ID NO: 562351 - DNA, 25 bp, Homo sapien
ttctaggactcccccggtgctgtct

SEQ ID NO: 562352 - DNA, 25 bp, Homo sapien
gtgctgtctttctgcggagccccct

SEQ ID NO: 562353 - DNA, 25 bp, Homo sapien
cagccacccggggagctgagtcctt

SEQ ID NO: 562354 - DNA, 25 bp, Homo sapien
gcgcggagctcagacacacgtccat

SEQ ID NO: 562355 - DNA, 25 bp, Homo sapien
acctgaaaggattagcatttgatga

SEQ ID NO: 562356 - DNA, 25 bp, Homo sapien
gcttctgtgcactctttaatcccca

SEQ ID NO: 562357 - DNA, 25 bp, Homo sapien
ctacacctgaaaggattagcatttg

SEQ ID NO: 562358 - DNA, 25 bp, Homo sapien
ttctgtgcactctttaatccccagt

SEQ ID NO: 562359 - DNA, 25 bp, Homo sapien
caggctggcaactcaaagaagggat

SEQ ID NO: 562360 - DNA, 25 bp, Homo sapien
catctgacacacatgagcgaggcca

SEQ ID NO: 562361 - DNA, 25 bp, Homo sapien
gaaagggtgacatcctgccacgtgt

SEQ ID NO: 562362 - DNA, 25 bp, Homo sapien
taaaatgagcttgcagcacacgcag

SEQ ID NO: 562363 - DNA, 25 bp, Homo sapien
aaggaatggactccattggagagac

SEQ ID NO: 562364 - DNA, 25 bp, Homo sapien
gccacaacgcggaattcctttcatt

SEQ ID NO: 562365 - DNA, 25 bp, Homo sapien
gatgtgccacaacgcggaattcctt

SEQ ID NO: 562366 - DNA, 25 bp, Homo sapien
gagagacgttctcccatgaggccat

SEQ ID NO: 562367 - DNA, 25 bp, Homo sapien
caagctaggttctaattctttcgat

SEQ ID NO: 562368 - DNA, 25 bp, Homo sapien
aataacttctttcaagctaggttct

SEQ ID NO: 562369 - DNA, 25 bp, Homo sapien
ctttcgattatttcaagttgacagg

SEQ ID NO: 562370 - DNA, 25 bp, Homo sapien
cttctttcaagctaggttctaattc

SEQ ID NO: 562371 - DNA, 25 bp, Homo sapien
gatgcccatggcaattgtgtaggat

SEQ ID NO: 562372 - DNA, 25 bp, Homo sapien
attgtgtaggatccatagaaatggc

SEQ ID NO: 562373 - DNA, 25 bp, Homo sapien
ccatggcaattgtgtaggatccata

SEQ ID NO: 562374 - DNA, 25 bp, Homo sapien
gcataatgaatactggggcacagaa

SEQ ID NO: 562375 - DNA, 25 bp, Homo sapien
ttcccagcacagcaataacgatggc

SEQ ID NO: 562376 - DNA, 25 bp, Homo sapien
taacgatggcattatcagtggcttc

SEQ ID NO: 562377 - DNA, 25 bp, Homo sapien
tactagtcttggatctcttcccagc

SEQ ID NO: 562378 - DNA, 25 bp, Homo sapien
ttacacacattgaagatcagctgat

SEQ ID NO: 562379 - DNA, 25 bp, Homo sapien
tgagcctgaccctacgcctcttggt

SEQ ID NO: 562380 - DNA, 25 bp, Homo sapien
ctgatagtaacagagctgagcctga

SEQ ID NO: 562381 - DNA, 25 bp, Homo sapien
gctctggctgatagtaacagagctg

SEQ ID NO: 562382 - DNA, 25 bp, Homo sapien
agcctgaccctacgcctcttggttg

SEQ ID NO: 562383 - DNA, 25 bp, Homo sapien
tccaaccttgttatgatgtcagcac

SEQ ID NO: 562384 - DNA, 25 bp, Homo sapien
tgggttttcacactcacatgtgaga

SEQ ID NO: 562385 - DNA, 25 bp, Homo sapien
tcaagtcatgtcctgtcaatgggca

SEQ ID NO: 562386 - DNA, 25 bp, Homo sapien
aatattgatacaaggctcagtgttt

SEQ ID NO: 562387 - DNA, 25 bp, Homo sapien
tcatccacatttagcctgagacact

SEQ ID NO: 562388 - DNA, 25 bp, Homo sapien
cactggtctataatacattcttttc

SEQ ID NO: 562389 - DNA, 25 bp, Homo sapien
tctctgctcagttggccggttgcct

SEQ ID NO: 562390 - DNA, 25 bp, Homo sapien
ttatgtaccagatgtctgggcacag

SEQ ID NO: 562391 - DNA, 25 bp, Homo sapien
tgcagatcacggtcagaagcacaca

SEQ ID NO: 562392 - DNA, 25 bp, Homo sapien
tagatgacctagactgaatttccgc

SEQ ID NO: 562393 - DNA, 25 bp, Homo sapien
tataacctccagtgagtctgccggt

SEQ ID NO: 562394 - DNA, 25 bp, Homo sapien
tacaactgtaatcgtggtcccaatg

SEQ ID NO: 562395 - DNA, 25 bp, Homo sapien
tcagtcccttctagagacataaagt

SEQ ID NO: 562396 - DNA, 25 bp, Homo sapien
gagggtatgaggcaatagcatctca

SEQ ID NO: 562397 - DNA, 25 bp, Homo sapien
tagcatctcactagcagaagtcact

SEQ ID NO: 562398 - DNA, 25 bp, Homo sapien
cagtgtcttcatattgctggcaaga

SEQ ID NO: 562399 - DNA, 25 bp, Homo sapien
tgtgtggtcatgtcccatactggtt

SEQ ID NO: 562400 - DNA, 25 bp, Homo sapien
cttgaggcggtatgggcacagttcc

SEQ ID NO: 562401 - DNA, 25 bp, Homo sapien
gacttcaagtcgtcaggcttatagg

SEQ ID NO: 562402 - DNA, 25 bp, Homo sapien
tgacttcgctacttttaacttgagg

SEQ ID NO: 562403 - DNA, 25 bp, Homo sapien
tgtttgtccactgcaaagggctggg

SEQ ID NO: 562404 - DNA, 25 bp, Homo sapien
tctgcttttgcatgattaggcggct

SEQ ID NO: 562405 - DNA, 25 bp, Homo sapien
aggcggctgttctccctatgagtga

SEQ ID NO: 562406 - DNA, 25 bp, Homo sapien
gaagatgcgggtgtgcactactgct

SEQ ID NO: 562407 - DNA, 25 bp, Homo sapien
ctgtaaagagccattccggcctttt

SEQ ID NO: 562408 - DNA, 25 bp, Homo sapien
tgtaaagagccattccggccttttc

SEQ ID NO: 562409 - DNA, 25 bp, Homo sapien
tacatggagagttcgctgtggacaa

SEQ ID NO: 562410 - DNA, 25 bp, Homo sapien
gacaagatgatcctgtaattcctgg

SEQ ID NO: 562411 - DNA, 25 bp, Homo sapien
tgttccctgaatccagataaagagg

SEQ ID NO: 562412 - DNA, 25 bp, Homo sapien
tctgacctgactcgtgaaggttggt

SEQ ID NO: 562413 - DNA, 25 bp, Homo sapien
ttttctctgtatctggtaatgctga

SEQ ID NO: 562414 - DNA, 25 bp, Homo sapien
tgcctcttggcagtgtatcctgaac

SEQ ID NO: 562415 - DNA, 25 bp, Homo sapien
atctatcgttttcacttcatgcctg

SEQ ID NO: 562416 - DNA, 25 bp, Homo sapien
gatggcattagtggaagtacaaagg

SEQ ID NO: 562417 - DNA, 25 bp, Homo sapien
tgggatatcaccaacgacggactct

SEQ ID NO: 562418 - DNA, 25 bp, Homo sapien
tatgtacagtctcccctatgtgtga

SEQ ID NO: 562419 - DNA, 25 bp, Homo sapien
ttctgtggagcatacaggaacgagg

SEQ ID NO: 562420 - DNA, 25 bp, Homo sapien
tcatctgcatgcgtagctctctcca

SEQ ID NO: 562421 - DNA, 25 bp, Homo sapien
tgactgtgggagagacacttttgca

SEQ ID NO: 562422 - DNA, 25 bp, Homo sapien
gactcttagacaacatgacacctgg

SEQ ID NO: 562423 - DNA, 25 bp, Homo sapien
catagaagtgcaagtgggagtgcct

SEQ ID NO: 562424 - DNA, 25 bp, Homo sapien
gaatgaagcagatttcctcggaacc

SEQ ID NO: 562425 - DNA, 25 bp, Homo sapien
ccttgttgactgatgttcacctgca

SEQ ID NO: 562426 - DNA, 25 bp, Homo sapien
gatctgggccatgtattttgttctg

SEQ ID NO: 562427 - DNA, 25 bp, Homo sapien
gtactcgggatgcattacacttttc

SEQ ID NO: 562428 - DNA, 25 bp, Homo sapien
tctgcctttacagctatgtactcgg

SEQ ID NO: 562429 - DNA, 25 bp, Homo sapien
gatagagaaggtattgtcagaaaca

SEQ ID NO: 562430 - DNA, 25 bp, Homo sapien
gctctgcctcaaaaattgtgccttc

SEQ ID NO: 562431 - DNA, 25 bp, Homo sapien
tacatcatttgagctatccacccca

SEQ ID NO: 562432 - DNA, 25 bp, Homo sapien
tgctgccttagttgcaaagtagcag

SEQ ID NO: 562433 - DNA, 25 bp, Homo sapien
taggaagagaactgtttcctgttta

SEQ ID NO: 562434 - DNA, 25 bp, Homo sapien
ggcaaatgtaggaagagaactgttt

SEQ ID NO: 562435 - DNA, 25 bp, Homo sapien
tcagaaggcaaatgtaggaagagaa

SEQ ID NO: 562436 - DNA, 25 bp, Homo sapien
aaatgtaggaagagaactgtttcct

SEQ ID NO: 562437 - DNA, 25 bp, Homo sapien
caggtctgattattccttgttggtc

SEQ ID NO: 562438 - DNA, 25 bp, Homo sapien
gctttttgtacttcacttgcgctat

SEQ ID NO: 562439 - DNA, 25 bp, Homo sapien
ccttggttgtaaaataccaggtctg

SEQ ID NO: 562440 - DNA, 25 bp, Homo sapien
tgtacttcacttgcgctatcaccct

SEQ ID NO: 562441 - DNA, 25 bp, Homo sapien
cattatgtctttcttagctgatatt

SEQ ID NO: 562442 - DNA, 25 bp, Homo sapien
atgcattatgtctttcttagctgat

SEQ ID NO: 562443 - DNA, 25 bp, Homo sapien
tgcattatgtctttcttagctgata

SEQ ID NO: 562444 - DNA, 25 bp, Homo sapien
ttatgtctttcttagctgatatttt

SEQ ID NO: 562445 - DNA, 25 bp, Homo sapien
taatgtccaactgaattccctgtga

SEQ ID NO: 562446 - DNA, 25 bp, Homo sapien
taggattccattccaagtgaggtgg

SEQ ID NO: 562447 - DNA, 25 bp, Homo sapien
tgtcagaagcacacttggttcacct

SEQ ID NO: 562448 - DNA, 25 bp, Homo sapien
ggaagcgcaggcatttgtcagaagc

SEQ ID NO: 562449 - DNA, 25 bp, Homo sapien
tgcttttgttcttgaatttgaatta

SEQ ID NO: 562450 - DNA, 25 bp, Homo sapien
ctgcttttgttcttgaatttgaatt

SEQ ID NO: 562451 - DNA, 25 bp, Homo sapien
caagtttgtcagtttcatacttgat

SEQ ID NO: 562452 - DNA, 25 bp, Homo sapien
gaagtacacaagtttgtcagtttca

SEQ ID NO: 562453 - DNA, 25 bp, Homo sapien
tgatagagatggtaaagaagtacac

SEQ ID NO: 562454 - DNA, 25 bp, Homo sapien
gagatggtaaagaagtacacaagtt

SEQ ID NO: 562455 - DNA, 25 bp, Homo sapien
taatgctagacacacagtatccaga

SEQ ID NO: 562456 - DNA, 25 bp, Homo sapien
gaacatggaggttgatccaccggaa

SEQ ID NO: 562457 - DNA, 25 bp, Homo sapien
tagtcctggtgtccggcttgataaa

SEQ ID NO: 562458 - DNA, 25 bp, Homo sapien
tctagtctgttacttgaggcaccac

SEQ ID NO: 562459 - DNA, 25 bp, Homo sapien
tgtcaatgggatcagaataccttgc

SEQ ID NO: 562460 - DNA, 25 bp, Homo sapien
tccttgcgagcccaactttgagact

SEQ ID NO: 562461 - DNA, 25 bp, Homo sapien
gaagcaggtgaatgcctgccaacag

SEQ ID NO: 562462 - DNA, 25 bp, Homo sapien
aacagaatctgggacaattgctgcc

SEQ ID NO: 562463 - DNA, 25 bp, Homo sapien
ggtagactctctattgattttatgt

SEQ ID NO: 562464 - DNA, 25 bp, Homo sapien
aatatgaccatgattttcttggcac

SEQ ID NO: 562465 - DNA, 25 bp, Homo sapien
tgtatctgtgaaattgacgacttct

SEQ ID NO: 562466 - DNA, 25 bp, Homo sapien
caagaaaattgcagctacattttct

SEQ ID NO: 562467 - DNA, 25 bp, Homo sapien
aaagtctctggcgaagttgctggta

SEQ ID NO: 562468 - DNA, 25 bp, Homo sapien
tgttagatagaatgcacctcgctgc

SEQ ID NO: 562469 - DNA, 25 bp, Homo sapien
taaactctaatgtatagctccggct

SEQ ID NO: 562470 - DNA, 25 bp, Homo sapien
ggtttaaagggtctccaatcagtga

SEQ ID NO: 562471 - DNA, 25 bp, Homo sapien
taaacccggcatgactttcactagt

SEQ ID NO: 562472 - DNA, 25 bp, Homo sapien
cacgtaggtcactgtcttctgtaac

SEQ ID NO: 562473 - DNA, 25 bp, Homo sapien
cagtgttgaccatgaaggattgttc

SEQ ID NO: 562474 - DNA, 25 bp, Homo sapien
cccagggcaactgcaggtaaatatc

SEQ ID NO: 562475 - DNA, 25 bp, Homo sapien
taattgaatatttaaccttgtttga

SEQ ID NO: 562476 - DNA, 25 bp, Homo sapien
gagttaaaacgagaaattcagcatt

SEQ ID NO: 562477 - DNA, 25 bp, Homo sapien
tttggattcagagttaaaacgagaa

SEQ ID NO: 562478 - DNA, 25 bp, Homo sapien
tggattcagagttaaaacgagaaat

SEQ ID NO: 562479 - DNA, 25 bp, Homo sapien
gaaggagtcttgtgtgctgctagaa

SEQ ID NO: 562480 - DNA, 25 bp, Homo sapien
taagtgttcatcagactccaggccc

SEQ ID NO: 562481 - DNA, 25 bp, Homo sapien
caggctgggcaaagttgctggcttt

SEQ ID NO: 562482 - DNA, 25 bp, Homo sapien
tgttggttcctatccagatcttggg

SEQ ID NO: 562483 - DNA, 25 bp, Homo sapien
tctctgtctggatgctctgtatggc

SEQ ID NO: 562484 - DNA, 25 bp, Homo sapien
tctgtatggcttagacacgtttcct

SEQ ID NO: 562485 - DNA, 25 bp, Homo sapien
cagtgaatctagatgctgaaaagct

SEQ ID NO: 562486 - DNA, 25 bp, Homo sapien
gatggcacatgactttcactagagg

SEQ ID NO: 562487 - DNA, 25 bp, Homo sapien
ctgaccatagtatttcacgtgagaa

SEQ ID NO: 562488 - DNA, 25 bp, Homo sapien
ttttcttcagatgtaagtgatgaag

SEQ ID NO: 562489 - DNA, 25 bp, Homo sapien
ccttttcttcagatgtaagtgatga

SEQ ID NO: 562490 - DNA, 25 bp, Homo sapien
ttcttcagatgtaagtgatgaagta

SEQ ID NO: 562491 - DNA, 25 bp, Homo sapien
aacaatatagcaaccagattaaatg

SEQ ID NO: 562492 - DNA, 25 bp, Homo sapien
ctgagaactagtgttgctagtaccc

SEQ ID NO: 562493 - DNA, 25 bp, Homo sapien
tgttgctagtacccaatacaacaat

SEQ ID NO: 562494 - DNA, 25 bp, Homo sapien
acaacaatatagcaaccagattaaa

SEQ ID NO: 562495 - DNA, 25 bp, Homo sapien
gatgaattaataactgaccaattct

SEQ ID NO: 562496 - DNA, 25 bp, Homo sapien
gaagatgaattaataactgaccaat

SEQ ID NO: 562497 - DNA, 25 bp, Homo sapien
tctcctgaagatgaattaataactg

SEQ ID NO: 562498 - DNA, 25 bp, Homo sapien
cctgaagatgaattaataactgacc

SEQ ID NO: 562499 - DNA, 25 bp, Homo sapien
tttcctgcttttggggcaactgtct

SEQ ID NO: 562500 - DNA, 25 bp, Homo sapien
tgcttttggggcaactgtcttccgt

SEQ ID NO: 562501 - DNA, 25 bp, Homo sapien
aagtttcctgcttttggggcaactg

SEQ ID NO: 562502 - DNA, 25 bp, Homo sapien
ctgcttttggggcaactgtcttccg

SEQ ID NO: 562503 - DNA, 25 bp, Homo sapien
taaccatgtgcaacatttggccagt

SEQ ID NO: 562504 - DNA, 25 bp, Homo sapien
cttccaaaaggatgcacaagctttc

SEQ ID NO: 562505 - DNA, 25 bp, Homo sapien
ggtatgcccaactcataaccatgtg

SEQ ID NO: 562506 - DNA, 25 bp, Homo sapien
gaagtccttgatttcagaggccctg

SEQ ID NO: 562507 - DNA, 25 bp, Homo sapien
tgtcttcgcaaagaatcgcccttta

SEQ ID NO: 562508 - DNA, 25 bp, Homo sapien
gaattttgtcttcgcaaagaatcgc

SEQ ID NO: 562509 - DNA, 25 bp, Homo sapien
cgccctttagaatgcttggtaggtc

SEQ ID NO: 562510 - DNA, 25 bp, Homo sapien
ggtaggtcttcattggctctgaaag

SEQ ID NO: 562511 - DNA, 25 bp, Homo sapien
gcattctataaatctctgactagat

SEQ ID NO: 562512 - DNA, 25 bp, Homo sapien
agttgcctatcaataagacaaaagc

SEQ ID NO: 562513 - DNA, 25 bp, Homo sapien
tctctgactagattaaccataatgt

SEQ ID NO: 562514 - DNA, 25 bp, Homo sapien
aatttctcagttgcctatcaataag

SEQ ID NO: 562515 - DNA, 25 bp, Homo sapien
aataagggaacattaaagaacatca

SEQ ID NO: 562516 - DNA, 25 bp, Homo sapien
tcaaattaactgtatgtgtactcaa

SEQ ID NO: 562517 - DNA, 25 bp, Homo sapien
tatgtgtactcaagataacatggct

SEQ ID NO: 562518 - DNA, 25 bp, Homo sapien
tttatcaaattaactgtatgtgtac

SEQ ID NO: 562519 - DNA, 25 bp, Homo sapien
cttgtccatttcagtaatttcttgg

SEQ ID NO: 562520 - DNA, 25 bp, Homo sapien
tgtccatttcagtaatttcttggat

SEQ ID NO: 562521 - DNA, 25 bp, Homo sapien
atttcttgtccatttcagtaatttc

SEQ ID NO: 562522 - DNA, 25 bp, Homo sapien
ttcttgtccatttcagtaatttctt

SEQ ID NO: 562523 - DNA, 25 bp, Homo sapien
catttgtcgaccgtcctttcactgc

SEQ ID NO: 562524 - DNA, 25 bp, Homo sapien
aaaacatcatttgtcgaccgtcctt

SEQ ID NO: 562525 - DNA, 25 bp, Homo sapien
catcatttgtcgaccgtcctttcac

SEQ ID NO: 562526 - DNA, 25 bp, Homo sapien
tgtcgaccgtcctttcactgccatg

SEQ ID NO: 562527 - DNA, 25 bp, Homo sapien
gggagcttgcattttctgtgccact

SEQ ID NO: 562528 - DNA, 25 bp, Homo sapien
cattttctgtgccactttctccaac

SEQ ID NO: 562529 - DNA, 25 bp, Homo sapien
ttatggggagcttgcattttctgtg

SEQ ID NO: 562530 - DNA, 25 bp, Homo sapien
ttctgtgccactttctccaacaagt

SEQ ID NO: 562531 - DNA, 25 bp, Homo sapien
cagctgtagcagtatcagatcaagc

SEQ ID NO: 562532 - DNA, 25 bp, Homo sapien
aatgtccgtaaaagtggcagtccac

SEQ ID NO: 562533 - DNA, 25 bp, Homo sapien
taatagaatgtgtgaggaaatgtcc

SEQ ID NO: 562534 - DNA, 25 bp, Homo sapien
aatactctgcctgaatgttgaaatg

SEQ ID NO: 562535 - DNA, 25 bp, Homo sapien
tttccagggatacaaattttgtcac

SEQ ID NO: 562536 - DNA, 25 bp, Homo sapien
tgccagaagtatcttgctcccaaga

SEQ ID NO: 562537 - DNA, 25 bp, Homo sapien
atttttaggttctcaaaagcaacag

SEQ ID NO: 562538 - DNA, 25 bp, Homo sapien
tctttcattgacacaaacattgagt

SEQ ID NO: 562539 - DNA, 25 bp, Homo sapien
gagaccccgaacaaaatcatcacca

SEQ ID NO: 562540 - DNA, 25 bp, Homo sapien
cgaaagaggtcttcatctctgagtt

SEQ ID NO: 562541 - DNA, 25 bp, Homo sapien
gacacaaacagtacaggctctttta

SEQ ID NO: 562542 - DNA, 25 bp, Homo sapien
gaaatacaaatgagaccccgaacaa

SEQ ID NO: 562543 - DNA, 25 bp, Homo sapien
catcatatctgtttaccaacaaatt

SEQ ID NO: 562544 - DNA, 25 bp, Homo sapien
aattggatcttttactgttcatcat

SEQ ID NO: 562545 - DNA, 25 bp, Homo sapien
cataaagtagcagtgatggtgtggc

SEQ ID NO: 562546 - DNA, 25 bp, Homo sapien
taacaagttgcaataccaggccagg

SEQ ID NO: 562547 - DNA, 25 bp, Homo sapien
aaacacctgcaagtttgtattctcc

SEQ ID NO: 562548 - DNA, 25 bp, Homo sapien
cacctgcaagtttgtattctcctga

SEQ ID NO: 562549 - DNA, 25 bp, Homo sapien
cctgcaagtttgtattctcctgatg

SEQ ID NO: 562550 - DNA, 25 bp, Homo sapien
acacctgcaagtttgtattctcctg

SEQ ID NO: 562551 - DNA, 25 bp, Homo sapien
catatgtggcccatgggttggacaa

SEQ ID NO: 562552 - DNA, 25 bp, Homo sapien
taaaaagctttcatgtactgctgag

SEQ ID NO: 562553 - DNA, 25 bp, Homo sapien
tagcttccttggcaatatcacggag

SEQ ID NO: 562554 - DNA, 25 bp, Homo sapien
taaaagaagtaagcagtccttcctc

SEQ ID NO: 562555 - DNA, 25 bp, Homo sapien
gatttatacgccttaattctatgta

SEQ ID NO: 562556 - DNA, 25 bp, Homo sapien
tacaatattaaggcctttacaggta

SEQ ID NO: 562557 - DNA, 25 bp, Homo sapien
gatgcaagatgggatgccagtgaca

SEQ ID NO: 562558 - DNA, 25 bp, Homo sapien
tttacaggtaaatctcaggcagaaa

SEQ ID NO: 562559 - DNA, 25 bp, Homo sapien
ggtaccaaacaaacagcatctagta

SEQ ID NO: 562560 - DNA, 25 bp, Homo sapien
ccatgtgtaagaattattccatatg

SEQ ID NO: 562561 - DNA, 25 bp, Homo sapien
tccatatgttaagctcttgttaggt

SEQ ID NO: 562562 - DNA, 25 bp, Homo sapien
ccaaacaaacagcatctagtaattt

SEQ ID NO: 562563 - DNA, 25 bp, Homo sapien
caaggttatatagccgctagctagg

SEQ ID NO: 562564 - DNA, 25 bp, Homo sapien
gattcctcgctcttaaccacttatg

SEQ ID NO: 562565 - DNA, 25 bp, Homo sapien
taacaattctgtgaggcaagcacta

SEQ ID NO: 562566 - DNA, 25 bp, Homo sapien
ggatttaaactcagggtagtctgct

SEQ ID NO: 562567 - DNA, 25 bp, Homo sapien
taaagtgcatttacatctgagaagc

SEQ ID NO: 562568 - DNA, 25 bp, Homo sapien
aaacttaaagtgcatttacatctga

SEQ ID NO: 562569 - DNA, 25 bp, Homo sapien
ttaaagtgcatttacatctgagaag

SEQ ID NO: 562570 - DNA, 25 bp, Homo sapien
acttaaagtgcatttacatctgaga

SEQ ID NO: 562571 - DNA, 25 bp, Homo sapien
ggtgatactttgacatggaaactgt

SEQ ID NO: 562572 - DNA, 25 bp, Homo sapien
tgtacatttttctacgggcactcag

SEQ ID NO: 562573 - DNA, 25 bp, Homo sapien
tgctagaaggcagagtatatatgtc

SEQ ID NO: 562574 - DNA, 25 bp, Homo sapien
ctttggacttggctacgtaacttgt

SEQ ID NO: 562575 - DNA, 25 bp, Homo sapien
gatccatgagcataaaatgtaagcc

SEQ ID NO: 562576 - DNA, 25 bp, Homo sapien
tgaagacacacggaacagaactgaa

SEQ ID NO: 562577 - DNA, 25 bp, Homo sapien
tctggagtccagactagtctaacca

SEQ ID NO: 562578 - DNA, 25 bp, Homo sapien
tgaccaacagctgatctgaagatcc

SEQ ID NO: 562579 - DNA, 25 bp, Homo sapien
agaaaattcaaagcgggtctcacgg

SEQ ID NO: 562580 - DNA, 25 bp, Homo sapien
tcggcggagttctaggacgacaact

SEQ ID NO: 562581 - DNA, 25 bp, Homo sapien
gacgacaactactcacaagggctgg

SEQ ID NO: 562582 - DNA, 25 bp, Homo sapien
tggagcccgctatttgattgccagc

SEQ ID NO: 562583 - DNA, 25 bp, Homo sapien
ttagcggaacgcctcccggctcgga

SEQ ID NO: 562584 - DNA, 25 bp, Homo sapien
cgcgggcaccgaacttagcggaacg

SEQ ID NO: 562585 - DNA, 25 bp, Homo sapien
ccccaccggctggtgcccgcgggca

SEQ ID NO: 562586 - DNA, 25 bp, Homo sapien
ccaccggctggtgcccgcgggcacc

SEQ ID NO: 562587 - DNA, 25 bp, Homo sapien
cgggcctgccgggtgctctccccgt

SEQ ID NO: 562588 - DNA, 25 bp, Homo sapien
gtgctctccccgtctcccaggaagc

SEQ ID NO: 562589 - DNA, 25 bp, Homo sapien
tgaggagtgacgcccgcgagcctca

SEQ ID NO: 562590 - DNA, 25 bp, Homo sapien
gcctcaaacgtctcaggcgggcctg

SEQ ID NO: 562591 - DNA, 25 bp, Homo sapien
ccttcagggagctgactagcgcgct

SEQ ID NO: 562592 - DNA, 25 bp, Homo sapien
tgactagcgcgctcgaagcgaccgc

SEQ ID NO: 562593 - DNA, 25 bp, Homo sapien
aaccgccgtcactcccttcagggag

SEQ ID NO: 562594 - DNA, 25 bp, Homo sapien
aggcaaaagtggccgcgggcaccca

SEQ ID NO: 562595 - DNA, 25 bp, Homo sapien
aaaggctccgcgctcattgccacag

SEQ ID NO: 562596 - DNA, 25 bp, Homo sapien
ctgtggaagcctgtcccctggatct

SEQ ID NO: 562597 - DNA, 25 bp, Homo sapien
ccgcagccacgtggatgctgtggaa

SEQ ID NO: 562598 - DNA, 25 bp, Homo sapien
agtggcctaggctgttgcacgcgat

SEQ ID NO: 562599 - DNA, 25 bp, Homo sapien
ggcagcccacacttcgctgtcctca

SEQ ID NO: 562600 - DNA, 25 bp, Homo sapien
cagcccacacttcgctgtcctcacc

SEQ ID NO: 562601 - DNA, 25 bp, Homo sapien
gggcagcccacacttcgctgtcctc

SEQ ID NO: 562602 - DNA, 25 bp, Homo sapien
agggcagcccacacttcgctgtcct

SEQ ID NO: 562603 - DNA, 25 bp, Homo sapien
gctccctcccagcgtgggccgcgtc

SEQ ID NO: 562604 - DNA, 25 bp, Homo sapien
tgctccctcccagcgtgggccgcgt

SEQ ID NO: 562605 - DNA, 25 bp, Homo sapien
cacgacgaccggcttttgtcctggc

SEQ ID NO: 562606 - DNA, 25 bp, Homo sapien
cccacgacgaccggcttttgtcctg

SEQ ID NO: 562607 - DNA, 25 bp, Homo sapien
ttttcacagcgaggcctcccctgat

SEQ ID NO: 562608 - DNA, 25 bp, Homo sapien
gcgtggttttcacagcgaggcctcc

SEQ ID NO: 562609 - DNA, 25 bp, Homo sapien
tcgacagggcgcgtggttttcacag

SEQ ID NO: 562610 - DNA, 25 bp, Homo sapien
acagggcgcgtggttttcacagcga

SEQ ID NO: 562611 - DNA, 25 bp, Homo sapien
tagaattaagtttggctgaataccc

SEQ ID NO: 562612 - DNA, 25 bp, Homo sapien
gctgctgtgcattaaggacccagat

SEQ ID NO: 562613 - DNA, 25 bp, Homo sapien
caataatatgggcttaaaaggagac

SEQ ID NO: 562614 - DNA, 25 bp, Homo sapien
ctgttccaaacacggctaataatta

SEQ ID NO: 562615 - DNA, 25 bp, Homo sapien
tattgtccatggaattaatacttaa

SEQ ID NO: 562616 - DNA, 25 bp, Homo sapien
actgcataagtagaaatgtgtcttc

SEQ ID NO: 562617 - DNA, 25 bp, Homo sapien
taaagtacagtcatgagaatactgc

SEQ ID NO: 562618 - DNA, 25 bp, Homo sapien
agtcttcagagcaccattattctaa

SEQ ID NO: 562619 - DNA, 25 bp, Homo sapien
aaatatttagagctatcaagaagtc

SEQ ID NO: 562620 - DNA, 25 bp, Homo sapien
tatttagagctatcaagaagtctta

SEQ ID NO: 562621 - DNA, 25 bp, Homo sapien
gagctatcaagaagtcttacacaag

SEQ ID NO: 562622 - DNA, 25 bp, Homo sapien
tcttacacaagtgaagaagacttac

SEQ ID NO: 562623 - DNA, 25 bp, Homo sapien
tattttcctgtaaagatgagaggga

SEQ ID NO: 562624 - DNA, 25 bp, Homo sapien
attttcctgtaaagatgagagggag

SEQ ID NO: 562625 - DNA, 25 bp, Homo sapien
tgctgctagaggcttttagggcttg

SEQ ID NO: 562626 - DNA, 25 bp, Homo sapien
aagctgctgctagaggcttttaggg

SEQ ID NO: 562627 - DNA, 25 bp, Homo sapien
catccatgggctgtactactgtaaa

SEQ ID NO: 562628 - DNA, 25 bp, Homo sapien
gaagtgttctgataccaaatcacgg

SEQ ID NO: 562629 - DNA, 25 bp, Homo sapien
gaagctgccagtctcacttagagcc

SEQ ID NO: 562630 - DNA, 25 bp, Homo sapien
gaagctatcattctggcccctaact

SEQ ID NO: 562631 - DNA, 25 bp, Homo sapien
ctataggaataaaagcaagtttgga

SEQ ID NO: 562632 - DNA, 25 bp, Homo sapien
gatcaatgttagtttttactctgac

SEQ ID NO: 562633 - DNA, 25 bp, Homo sapien
gaataaaagcaagtttggatcaatg

SEQ ID NO: 562634 - DNA, 25 bp, Homo sapien
gcaagtttggatcaatgttagtttt

SEQ ID NO: 562635 - DNA, 25 bp, Homo sapien
cggccataagctcagttctggttac

SEQ ID NO: 562636 - DNA, 25 bp, Homo sapien
gaggtcgtcctcagtctgtggttct

SEQ ID NO: 562637 - DNA, 25 bp, Homo sapien
ggatttggggctcactcacttgtaa

SEQ ID NO: 562638 - DNA, 25 bp, Homo sapien
tgtggttctacccttttcatgccct

SEQ ID NO: 562639 - DNA, 25 bp, Homo sapien
tttttcctatggcaagtacaaggga

SEQ ID NO: 562640 - DNA, 25 bp, Homo sapien
gtgatgattttcttggaaaatactg

SEQ ID NO: 562641 - DNA, 25 bp, Homo sapien
tgatgattttcttggaaaatactga

SEQ ID NO: 562642 - DNA, 25 bp, Homo sapien
gatgattttcttggaaaatactgac

SEQ ID NO: 562643 - DNA, 25 bp, Homo sapien
gcaaattcttgtcctgcttttgcta

SEQ ID NO: 562644 - DNA, 25 bp, Homo sapien
ttcttgcaaattcttgtcctgcttt

SEQ ID NO: 562645 - DNA, 25 bp, Homo sapien
cttgcaaattcttgtcctgcttttg

SEQ ID NO: 562646 - DNA, 25 bp, Homo sapien
tgcaaattcttgtcctgcttttgct

SEQ ID NO: 562647 - DNA, 25 bp, Homo sapien
tacagtgccatcgatatttatttga

SEQ ID NO: 562648 - DNA, 25 bp, Homo sapien
catagtagatggaatcctgcttcag

SEQ ID NO: 562649 - DNA, 25 bp, Homo sapien
tgttcatagtagatggaatcctgct

SEQ ID NO: 562650 - DNA, 25 bp, Homo sapien
caactagcaaatatggcaggcgata

SEQ ID NO: 562651 - DNA, 25 bp, Homo sapien
cagaaggcctggtaagaaacaagta

SEQ ID NO: 562652 - DNA, 25 bp, Homo sapien
tgagtttcacgtcattccccaccag

SEQ ID NO: 562653 - DNA, 25 bp, Homo sapien
gtggtgcccactgccttataaaagg

SEQ ID NO: 562654 - DNA, 25 bp, Homo sapien
gacatgtgcttatctcaagggttag

SEQ ID NO: 562655 - DNA, 25 bp, Homo sapien
gagtctctctttgcggctgtctcgc

SEQ ID NO: 562656 - DNA, 25 bp, Homo sapien
tagcttgcacggacatcatatccag

SEQ ID NO: 562657 - DNA, 25 bp, Homo sapien
agggaggacccgtgttagcttgcac

SEQ ID NO: 562658 - DNA, 25 bp, Homo sapien
gaaagcagcgtctatgagttctggg

SEQ ID NO: 562659 - DNA, 25 bp, Homo sapien
agaagacaaagtgcaacagattttc

SEQ ID NO: 562660 - DNA, 25 bp, Homo sapien
acaaagtgcaacagattttcctccc

SEQ ID NO: 562661 - DNA, 25 bp, Homo sapien
ctagaagacaaagtgcaacagattt

SEQ ID NO: 562662 - DNA, 25 bp, Homo sapien
agacaaagtgcaacagattttcctc

SEQ ID NO: 562663 - DNA, 25 bp, Homo sapien
gaatcagtcaaatcgtacgtaggca

SEQ ID NO: 562664 - DNA, 25 bp, Homo sapien
acaccaggaaaagatcggatggatg

SEQ ID NO: 562665 - DNA, 25 bp, Homo sapien
atggtttccagaacagaatcagtca

SEQ ID NO: 562666 - DNA, 25 bp, Homo sapien
tcccaaattaacaaagagctccaca

SEQ ID NO: 562667 - DNA, 25 bp, Homo sapien
tctgagaagcatcttgagaaaccga

SEQ ID NO: 562668 - DNA, 25 bp, Homo sapien
tcccatggattgacaaagaggagca

SEQ ID NO: 562669 - DNA, 25 bp, Homo sapien
gagcaagagaagtatgacggtactc

SEQ ID NO: 562670 - DNA, 25 bp, Homo sapien
gagaaaccgaagtcctgaagaacat

SEQ ID NO: 562671 - DNA, 25 bp, Homo sapien
cagaaagcttcagaatagtattatc

SEQ ID NO: 562672 - DNA, 25 bp, Homo sapien
tatcctgtaaaatctgggcttaaat

SEQ ID NO: 562673 - DNA, 25 bp, Homo sapien
caaacgcaggtacctgaaataacag

SEQ ID NO: 562674 - DNA, 25 bp, Homo sapien
taaggctccagaagagaataccctg

SEQ ID NO: 562675 - DNA, 25 bp, Homo sapien
ctaaaacctacatgttcaccatgag

SEQ ID NO: 562676 - DNA, 25 bp, Homo sapien
tctaaaacctacatgttcaccatga

SEQ ID NO: 562677 - DNA, 25 bp, Homo sapien
catccatgaaaattctaaaacctac

SEQ ID NO: 562678 - DNA, 25 bp, Homo sapien
tctgagcaatggtttcagggcagtt

SEQ ID NO: 562679 - DNA, 25 bp, Homo sapien
atctgagcaatggtttcagggcagt

SEQ ID NO: 562680 - DNA, 25 bp, Homo sapien
tcacagttctcatggtaaaccggcc

SEQ ID NO: 562681 - DNA, 25 bp, Homo sapien
caggctgcactatcttgcagaggac

SEQ ID NO: 562682 - DNA, 25 bp, Homo sapien
ctatcttgcagaggacagtcacagt

SEQ ID NO: 562683 - DNA, 25 bp, Homo sapien
cccgtagccaggctgcactatcttg

SEQ ID NO: 562684 - DNA, 25 bp, Homo sapien
tactatgaaggacccatcttttcgg

SEQ ID NO: 562685 - DNA, 25 bp, Homo sapien
aaatatatggggatttggccacatg

SEQ ID NO: 562686 - DNA, 25 bp, Homo sapien
cattctgtatcttactatgaaggac

SEQ ID NO: 562687 - DNA, 25 bp, Homo sapien
ccacatgttgcccttggaatttaat

SEQ ID NO: 562688 - DNA, 25 bp, Homo sapien
gcgggcgggaaggacgacgtctgct

SEQ ID NO: 562689 - DNA, 25 bp, Homo sapien
ctgaatatagaaatagcgggcggga

SEQ ID NO: 562690 - DNA, 25 bp, Homo sapien
aggacgacgtctgcttttagcccgg

SEQ ID NO: 562691 - DNA, 25 bp, Homo sapien
agcccgggtccccatatttcgctct

SEQ ID NO: 562692 - DNA, 25 bp, Homo sapien
aataaagtagcaaagtgccaaacat

SEQ ID NO: 562693 - DNA, 25 bp, Homo sapien
gcaataaagtagcaaagtgccaaac

SEQ ID NO: 562694 - DNA, 25 bp, Homo sapien
agaagcaataaagtagcaaagtgcc

SEQ ID NO: 562695 - DNA, 25 bp, Homo sapien
gaagcaataaagtagcaaagtgcca

SEQ ID NO: 562696 - DNA, 25 bp, Homo sapien
caacgcgactgcaaaggttgccgcc

SEQ ID NO: 562697 - DNA, 25 bp, Homo sapien
cctgccactggagcatcatttggga

SEQ ID NO: 562698 - DNA, 25 bp, Homo sapien
gacaatgatgaacttgagttgctcc

SEQ ID NO: 562699 - DNA, 25 bp, Homo sapien
tggcgttctgctgtcccggccgaga

SEQ ID NO: 562700 - DNA, 25 bp, Homo sapien
taattcgataccggcctgggctgcc

SEQ ID NO: 562701 - DNA, 25 bp, Homo sapien
ttaattcgataccggcctgggctgc

SEQ ID NO: 562702 - DNA, 25 bp, Homo sapien
cagctgccccgaaaacccagaagag

SEQ ID NO: 562703 - DNA, 25 bp, Homo sapien
tcagcttggcagtcggacccggagc

SEQ ID NO: 562704 - DNA, 25 bp, Homo sapien
ggagtcacgggctcaccgccctggt

SEQ ID NO: 562705 - DNA, 25 bp, Homo sapien
gtgacccctgtgcggccgtcggtct

SEQ ID NO: 562706 - DNA, 25 bp, Homo sapien
gctcttagcccggatgcagcaattg

SEQ ID NO: 562707 - DNA, 25 bp, Homo sapien
cggatgcagcaattgcccgtgggcc

SEQ ID NO: 562708 - DNA, 25 bp, Homo sapien
ggagccccagctcttagcccggatg

SEQ ID NO: 562709 - DNA, 25 bp, Homo sapien
tcaaacagtcgaatcggagccccag

SEQ ID NO: 562710 - DNA, 25 bp, Homo sapien
ggcaagctacctctcgcatgggaaa

SEQ ID NO: 562711 - DNA, 25 bp, Homo sapien
gttgtccagtgactcatacacggga

SEQ ID NO: 562712 - DNA, 25 bp, Homo sapien
tggaaaacttatccaacagcctggg

SEQ ID NO: 562713 - DNA, 25 bp, Homo sapien
cattggtatcccgactagtacatcg

SEQ ID NO: 562714 - DNA, 25 bp, Homo sapien
gtcttttgtgttctcaggtactgca

SEQ ID NO: 562715 - DNA, 25 bp, Homo sapien
tgcataagccgaccacagtataaga

SEQ ID NO: 562716 - DNA, 25 bp, Homo sapien
tctcaggtactgcataagccgacca

SEQ ID NO: 562717 - DNA, 25 bp, Homo sapien
taagccgaccacagtataagacttc

SEQ ID NO: 562718 - DNA, 25 bp, Homo sapien
cagcgtaacaaatggatatggtggt

SEQ ID NO: 562719 - DNA, 25 bp, Homo sapien
tcctggacttcagcgtaacaaatgg

SEQ ID NO: 562720 - DNA, 25 bp, Homo sapien
tatggtggtgtcccgtgaaaacctg

SEQ ID NO: 562721 - DNA, 25 bp, Homo sapien
gcttgccaggcaggattcaatccct

SEQ ID NO: 562722 - DNA, 25 bp, Homo sapien
tgtgctagatctgccctgctttcca

SEQ ID NO: 562723 - DNA, 25 bp, Homo sapien
cacctgtgtgctagatctgccctgc

SEQ ID NO: 562724 - DNA, 25 bp, Homo sapien
tgcacctgtgtgctagatctgccct

SEQ ID NO: 562725 - DNA, 25 bp, Homo sapien
tgtgtgctagatctgccctgctttc

SEQ ID NO: 562726 - DNA, 25 bp, Homo sapien
ttgtgtcccaagactgcattatgag

SEQ ID NO: 562727 - DNA, 25 bp, Homo sapien
tgtgtcccaagactgcattatgagt

SEQ ID NO: 562728 - DNA, 25 bp, Homo sapien
tcttgtgtcccaagactgcattatg

SEQ ID NO: 562729 - DNA, 25 bp, Homo sapien
gtgtcccaagactgcattatgagta

SEQ ID NO: 562730 - DNA, 25 bp, Homo sapien
ggtggttcatgtgtaaagcagacgt

SEQ ID NO: 562731 - DNA, 25 bp, Homo sapien
catgtgtaaagcagacgtctcttcc

SEQ ID NO: 562732 - DNA, 25 bp, Homo sapien
atgaattctgatggtattcaggcgg

SEQ ID NO: 562733 - DNA, 25 bp, Homo sapien
tattcaggcggtagggtggttcatg

SEQ ID NO: 562734 - DNA, 25 bp, Homo sapien
caagaaccttaggtctcgaaagact

SEQ ID NO: 562735 - DNA, 25 bp, Homo sapien
caaggtgctgaatgtgttggtaacc

SEQ ID NO: 562736 - DNA, 25 bp, Homo sapien
tagggtcttgttccaggactcaaat

SEQ ID NO: 562737 - DNA, 25 bp, Homo sapien
taagaaatgcccaagtcactcagag

SEQ ID NO: 562738 - DNA, 25 bp, Homo sapien
gcctagcctacagaaggggatatat

SEQ ID NO: 562739 - DNA, 25 bp, Homo sapien
gcttgaaatgcaaaggactgaaaga

SEQ ID NO: 562740 - DNA, 25 bp, Homo sapien
tgttcactcgtacatgcctagccta

SEQ ID NO: 562741 - DNA, 25 bp, Homo sapien
gattttgttacttcatactggaact

SEQ ID NO: 562742 - DNA, 25 bp, Homo sapien
atgtaagtacactggttccttccag

SEQ ID NO: 562743 - DNA, 25 bp, Homo sapien
gacaaaaggctgcatacgagtttct

SEQ ID NO: 562744 - DNA, 25 bp, Homo sapien
gttaaggacgcgcagctgtgacaca

SEQ ID NO: 562745 - DNA, 25 bp, Homo sapien
ggaagggcttctaggtcacaggtag

SEQ ID NO: 562746 - DNA, 25 bp, Homo sapien
ttaagtatcttcacacacggcggcg

SEQ ID NO: 562747 - DNA, 25 bp, Homo sapien
tgacggaagcaagtaaccaccaagg

SEQ ID NO: 562748 - DNA, 25 bp, Homo sapien
ttcaggatgccagcgtgacggaagc

SEQ ID NO: 562749 - DNA, 25 bp, Homo sapien
aaatatacgtcatgtgcggaggcgg

SEQ ID NO: 562750 - DNA, 25 bp, Homo sapien
cattagcggcgcagacgtttgggcc

SEQ ID NO: 562751 - DNA, 25 bp, Homo sapien
tgttggtatccttaacgccgcgttg

SEQ ID NO: 562752 - DNA, 25 bp, Homo sapien
gcagtccgtcgtagaagaattagag

SEQ ID NO: 562753 - DNA, 25 bp, Homo sapien
taatgcgctcccattagtgccgtcc

SEQ ID NO: 562754 - DNA, 25 bp, Homo sapien
aataaactcgtttatgtcaaaggag

SEQ ID NO: 562755 - DNA, 25 bp, Homo sapien
gcaatgagccgtgttcatgtctgtc

SEQ ID NO: 562756 - DNA, 25 bp, Homo sapien
gaaagacattctagtcatgacaacc

SEQ ID NO: 562757 - DNA, 25 bp, Homo sapien
tctgattacttgttctacaatcggt

SEQ ID NO: 562758 - DNA, 25 bp, Homo sapien
tcttataccgaaagtgatttttggc

SEQ ID NO: 562759 - DNA, 25 bp, Homo sapien
tattttcaggtcgtctaattttaca

SEQ ID NO: 562760 - DNA, 25 bp, Homo sapien
taattttgcgtatataaacttactg

SEQ ID NO: 562761 - DNA, 25 bp, Homo sapien
gctttgctgcagattttaacttttc

SEQ ID NO: 562762 - DNA, 25 bp, Homo sapien
gcacagggactatccatttgtcact

SEQ ID NO: 562763 - DNA, 25 bp, Homo sapien
cataccagatactctctaaatgagg

SEQ ID NO: 562764 - DNA, 25 bp, Homo sapien
cgatattcagccataagcacaggga

SEQ ID NO: 562765 - DNA, 25 bp, Homo sapien
gagtgtctagtcttgaatgttgcag

SEQ ID NO: 562766 - DNA, 25 bp, Homo sapien
tcccgtgaagaatggaggtgcgacc

SEQ ID NO: 562767 - DNA, 25 bp, Homo sapien
gattcgcagaactcagtgaaggaag

SEQ ID NO: 562768 - DNA, 25 bp, Homo sapien
gagaagatggtcctcgtgaccgcca

SEQ ID NO: 562769 - DNA, 25 bp, Homo sapien
aaaaccagtgcttcagattcgcaga

SEQ ID NO: 562770 - DNA, 25 bp, Homo sapien
gggcccacaaatctgactgtcttgg

SEQ ID NO: 562771 - DNA, 25 bp, Homo sapien
gaattcttggctgccttgacagctc

SEQ ID NO: 562772 - DNA, 25 bp, Homo sapien
tgctatccttacatgcggtcttctc

SEQ ID NO: 562773 - DNA, 25 bp, Homo sapien
gagattgcctgatgctccgctgcta

SEQ ID NO: 562774 - DNA, 25 bp, Homo sapien
tttcagtcactaccagaggtcccag

SEQ ID NO: 562775 - DNA, 25 bp, Homo sapien
tagtaaactgtgctgcgatgctagc

SEQ ID NO: 562776 - DNA, 25 bp, Homo sapien
gtagcgagtgtgtatagtagtaaac

SEQ ID NO: 562777 - DNA, 25 bp, Homo sapien
tgcgatgctagcctttcagtcacta

SEQ ID NO: 562778 - DNA, 25 bp, Homo sapien
atgccaaagaccaggccgtagggac

SEQ ID NO: 562779 - DNA, 25 bp, Homo sapien
cacagccttccaatgccaaagacca

SEQ ID NO: 562780 - DNA, 25 bp, Homo sapien
agcacagccttccaatgccaaagac

SEQ ID NO: 562781 - DNA, 25 bp, Homo sapien
ggcagcacagccttccaatgccaaa

SEQ ID NO: 562782 - DNA, 25 bp, Homo sapien
ggcctttggtgcctgttagcctgag

SEQ ID NO: 562783 - DNA, 25 bp, Homo sapien
gcaaagtgcttgtctaagtggaaat

SEQ ID NO: 562784 - DNA, 25 bp, Homo sapien
ggacaccgatatctttggcagcaaa

SEQ ID NO: 562785 - DNA, 25 bp, Homo sapien
gggagaatggaaggacaccgatatc

SEQ ID NO: 562786 - DNA, 25 bp, Homo sapien
tgccacgatgtcagagtctgtcctg

SEQ ID NO: 562787 - DNA, 25 bp, Homo sapien
tccgacaggtgacaggatgtaagct

SEQ ID NO: 562788 - DNA, 25 bp, Homo sapien
atattgcagagtaagctgcaagccc

SEQ ID NO: 562789 - DNA, 25 bp, Homo sapien
tctgtcctgtgagcacgaggtgcag

SEQ ID NO: 562790 - DNA, 25 bp, Homo sapien
gggaaatggctacccggcacaggca

SEQ ID NO: 562791 - DNA, 25 bp, Homo sapien
tagaaatggaaacccgagggagaga

SEQ ID NO: 562792 - DNA, 25 bp, Homo sapien
ggcacaggcacaacttcaaaagcag

SEQ ID NO: 562793 - DNA, 25 bp, Homo sapien
cgttcctggttgaattttgagctga

SEQ ID NO: 562794 - DNA, 25 bp, Homo sapien
gagcctgaagtctgccgattgtcgt

SEQ ID NO: 562795 - DNA, 25 bp, Homo sapien
cagcagagcctgaagtctgccgatt

SEQ ID NO: 562796 - DNA, 25 bp, Homo sapien
gcctgaagtctgccgattgtcgtct

SEQ ID NO: 562797 - DNA, 25 bp, Homo sapien
gcagagcctgaagtctgccgattgt

SEQ ID NO: 562798 - DNA, 25 bp, Homo sapien
ctcttagacgaaatgcttgctttgc

SEQ ID NO: 562799 - DNA, 25 bp, Homo sapien
ctgaatacggagtttgataaatgca

SEQ ID NO: 562800 - DNA, 25 bp, Homo sapien
gcagatgactgaatacggagtttga

SEQ ID NO: 562801 - DNA, 25 bp, Homo sapien
gctgggatgctgatgcaatctctct

SEQ ID NO: 562802 - DNA, 25 bp, Homo sapien
tggtcttcagaggtatgattctgat

SEQ ID NO: 562803 - DNA, 25 bp, Homo sapien
tgattctgatatacacgaacagtga

SEQ ID NO: 562804 - DNA, 25 bp, Homo sapien
ctttatatggtcttcagaggtatga

SEQ ID NO: 562805 - DNA, 25 bp, Homo sapien
ctgatatacacgaacagtgacaatg

SEQ ID NO: 562806 - DNA, 25 bp, Homo sapien
ccaccttcaccacttgccggataag

SEQ ID NO: 562807 - DNA, 25 bp, Homo sapien
ctgggcatgcaccttgttttcaccc

SEQ ID NO: 562808 - DNA, 25 bp, Homo sapien
gggcatgcaccttgttttcacccac

SEQ ID NO: 562809 - DNA, 25 bp, Homo sapien
gcaccttgttttcacccaccttcac

SEQ ID NO: 562810 - DNA, 25 bp, Homo sapien
tgtcttggccaatatctgcatgcat

SEQ ID NO: 562811 - DNA, 25 bp, Homo sapien
ttgtcttggccaatatctgcatgca

SEQ ID NO: 562812 - DNA, 25 bp, Homo sapien
tttgtcttggccaatatctgcatgc

SEQ ID NO: 562813 - DNA, 25 bp, Homo sapien
catccatctgtccatgcggttgaaa

SEQ ID NO: 562814 - DNA, 25 bp, Homo sapien
aatgaataatgtacaggcctggatc

SEQ ID NO: 562815 - DNA, 25 bp, Homo sapien
catgcggttgaaaggtgtgctccag

SEQ ID NO: 562816 - DNA, 25 bp, Homo sapien
gggaagtgactactagcatagctat

SEQ ID NO: 562817 - DNA, 25 bp, Homo sapien
tgtctctggaccttgagtagttgca

SEQ ID NO: 562818 - DNA, 25 bp, Homo sapien
acactcttgttcttaggtgagataa

SEQ ID NO: 562819 - DNA, 25 bp, Homo sapien
cactcttgttcttaggtgagataaa

SEQ ID NO: 562820 - DNA, 25 bp, Homo sapien
ctggaccttgagtagttgcacagct

SEQ ID NO: 562821 - DNA, 25 bp, Homo sapien
tcatagtttccttgatctctgtgag

SEQ ID NO: 562822 - DNA, 25 bp, Homo sapien
tcaccaaaggcaccgaaaacacaaa

SEQ ID NO: 562823 - DNA, 25 bp, Homo sapien
tctgacacagatcggaaacatgcca

SEQ ID NO: 562824 - DNA, 25 bp, Homo sapien
ggtagcctttgctttctcgttcacc

SEQ ID NO: 562825 - DNA, 25 bp, Homo sapien
ttctggcagtttgtttctagctctt

SEQ ID NO: 562826 - DNA, 25 bp, Homo sapien
gcacagaaccaataagttcacttcc

SEQ ID NO: 562827 - DNA, 25 bp, Homo sapien
gtaatttgtcctgcctgttcactcc

SEQ ID NO: 562828 - DNA, 25 bp, Homo sapien
gaggcgaaagggtaatttgtcctgc

SEQ ID NO: 562829 - DNA, 25 bp, Homo sapien
gtgggaacagagcagcttcgcacag

SEQ ID NO: 562830 - DNA, 25 bp, Homo sapien
aacacagtggccactggatacagca

SEQ ID NO: 562831 - DNA, 25 bp, Homo sapien
ccttagggggcaatatccctatgag

SEQ ID NO: 562832 - DNA, 25 bp, Homo sapien
agaaacacagtggccactggataca

SEQ ID NO: 562833 - DNA, 25 bp, Homo sapien
atatccctatgagaatgtgagtcag

SEQ ID NO: 562834 - DNA, 25 bp, Homo sapien
ctagagacaagcgaagatcaagcaa

SEQ ID NO: 562835 - DNA, 25 bp, Homo sapien
tagagacaagcgaagatcaagcaag

SEQ ID NO: 562836 - DNA, 25 bp, Homo sapien
ggcttctccggggaatgcttgttct

SEQ ID NO: 562837 - DNA, 25 bp, Homo sapien
aatgcttgttctcggggatgtggtt

SEQ ID NO: 562838 - DNA, 25 bp, Homo sapien
tctcggggatgtggttggattagcc

SEQ ID NO: 562839 - DNA, 25 bp, Homo sapien
ttctccggggaatgcttgttctcgg

SEQ ID NO: 562840 - DNA, 25 bp, Homo sapien
ggcccaggaacatagacttctcatt

SEQ ID NO: 562841 - DNA, 25 bp, Homo sapien
gagaccaagtcaccatatggcacca

SEQ ID NO: 562842 - DNA, 25 bp, Homo sapien
tgagaccaagtcaccatatggcacc

SEQ ID NO: 562843 - DNA, 25 bp, Homo sapien
agaggtttggcccaggaacatagac

SEQ ID NO: 562844 - DNA, 25 bp, Homo sapien
gcatcagcatcctcacggttcagca

SEQ ID NO: 562845 - DNA, 25 bp, Homo sapien
tgcatcagcatcctcacggttcagc

SEQ ID NO: 562846 - DNA, 25 bp, Homo sapien
caaaagctttatcctattccaattg

SEQ ID NO: 562847 - DNA, 25 bp, Homo sapien
tagtaatagaggcaatcagtttctc

SEQ ID NO: 562848 - DNA, 25 bp, Homo sapien
ttccaattgacactcatcaccacag

SEQ ID NO: 562849 - DNA, 25 bp, Homo sapien
gaggcttgctacttgcaaatttctc

SEQ ID NO: 562850 - DNA, 25 bp, Homo sapien
tagttattaggacaagcagaccgtc

SEQ ID NO: 562851 - DNA, 25 bp, Homo sapien
acattagagacgcttcccgcggaaa

SEQ ID NO: 562852 - DNA, 25 bp, Homo sapien
catgagagacacactgctgtaggca

SEQ ID NO: 562853 - DNA, 25 bp, Homo sapien
gcatatccacatgttggcggtccta

SEQ ID NO: 562854 - DNA, 25 bp, Homo sapien
tgtttggagaagctagctctgttgg

SEQ ID NO: 562855 - DNA, 25 bp, Homo sapien
agtatggattgaaactggggagaga

SEQ ID NO: 562856 - DNA, 25 bp, Homo sapien
ctgtttggagaagctagctctgttg

SEQ ID NO: 562857 - DNA, 25 bp, Homo sapien
agagtatggattgaaactggggaga

SEQ ID NO: 562858 - DNA, 25 bp, Homo sapien
caccagtacaatcccacgattctga

SEQ ID NO: 562859 - DNA, 25 bp, Homo sapien
tgagatacaaggtggtgtctttaac

SEQ ID NO: 562860 - DNA, 25 bp, Homo sapien
taacagacagagtaggtgttcggca

SEQ ID NO: 562861 - DNA, 25 bp, Homo sapien
tgtcttcaagtgcatttccccagtt

SEQ ID NO: 562862 - DNA, 25 bp, Homo sapien
tcagtggcctgcaactcttaaaggc

SEQ ID NO: 562863 - DNA, 25 bp, Homo sapien
gcaggctttcactaaaaggctcaga

SEQ ID NO: 562864 - DNA, 25 bp, Homo sapien
caaggaaggcgatgacaaccaacca

SEQ ID NO: 562865 - DNA, 25 bp, Homo sapien
tcgtatcagggatgaaacagggcct

SEQ ID NO: 562866 - DNA, 25 bp, Homo sapien
taaaagggttaatgatacctgattc

SEQ ID NO: 562867 - DNA, 25 bp, Homo sapien
tctggggcccttagattctgctgag

SEQ ID NO: 562868 - DNA, 25 bp, Homo sapien
gggttaatgatacctgattctcctc

SEQ ID NO: 562869 - DNA, 25 bp, Homo sapien
cttagattctgctgagtctcttctc

SEQ ID NO: 562870 - DNA, 25 bp, Homo sapien
aatctttatggtacaatatctgcat

SEQ ID NO: 562871 - DNA, 25 bp, Homo sapien
tctttatggtacaatatctgcatac

SEQ ID NO: 562872 - DNA, 25 bp, Homo sapien
taatctttatggtacaatatctgca

SEQ ID NO: 562873 - DNA, 25 bp, Homo sapien
ttaatctttatggtacaatatctgc

SEQ ID NO: 562874 - DNA, 25 bp, Homo sapien
tgccagctctaaaatagtgcggtgc

SEQ ID NO: 562875 - DNA, 25 bp, Homo sapien
taaaatagtgcggtgctgaagcaag

SEQ ID NO: 562876 - DNA, 25 bp, Homo sapien
tgcggtgctgaagcaagattctatc

SEQ ID NO: 562877 - DNA, 25 bp, Homo sapien
gtgtctgccagctctaaaatagtgc

SEQ ID NO: 562878 - DNA, 25 bp, Homo sapien
tacagggttggatactcccacaaat

SEQ ID NO: 562879 - DNA, 25 bp, Homo sapien
ttccaacatgttcttatgacaccga

SEQ ID NO: 562880 - DNA, 25 bp, Homo sapien
acaccgatttggatcagatgaggcc

SEQ ID NO: 562881 - DNA, 25 bp, Homo sapien
tcctggtccctgcatacgtttgtta

SEQ ID NO: 562882 - DNA, 25 bp, Homo sapien
agcccattcacctcaatcaaggaca

SEQ ID NO: 562883 - DNA, 25 bp, Homo sapien
gttttgatgtttgtgcacccttggg

SEQ ID NO: 562884 - DNA, 25 bp, Homo sapien
gaacatcagacattaaactgacagg

SEQ ID NO: 562885 - DNA, 25 bp, Homo sapien
tcgtggaggtgtctcagcccattca

SEQ ID NO: 562886 - DNA, 25 bp, Homo sapien
gccttggcaagcttgcaaatgtgta

SEQ ID NO: 562887 - DNA, 25 bp, Homo sapien
tactggcactggtttatcatttaga

SEQ ID NO: 562888 - DNA, 25 bp, Homo sapien
ccatgtgtactcgaaggccttggca

SEQ ID NO: 562889 - DNA, 25 bp, Homo sapien
tgtttgagccaaacgtgctttgaaa

SEQ ID NO: 562890 - DNA, 25 bp, Homo sapien
tcatcacactcagggcaatcactga

SEQ ID NO: 562891 - DNA, 25 bp, Homo sapien
gcactgtcatcacactcagggcaat

SEQ ID NO: 562892 - DNA, 25 bp, Homo sapien
tgtcatcacactcagggcaatcact

SEQ ID NO: 562893 - DNA, 25 bp, Homo sapien
cttgagcactgtcatcacactcagg

SEQ ID NO: 562894 - DNA, 25 bp, Homo sapien
tcaggctgcgtgagcctcagatcag

SEQ ID NO: 562895 - DNA, 25 bp, Homo sapien
ggtgtctccgatgcaacccagtaat

SEQ ID NO: 562896 - DNA, 25 bp, Homo sapien
tgagactctgtcaccgaatgcagga

SEQ ID NO: 562897 - DNA, 25 bp, Homo sapien
cactggattcgcaaatgcagcttga

SEQ ID NO: 562898 - DNA, 25 bp, Homo sapien
gagttgggtacgatttgtcttctcc

SEQ ID NO: 562899 - DNA, 25 bp, Homo sapien
tcaaggatcagatctgatagcgtaa

SEQ ID NO: 562900 - DNA, 25 bp, Homo sapien
tatggttgcttcagatcaaggatca

SEQ ID NO: 562901 - DNA, 25 bp, Homo sapien
gaatctgagctccaccagtcactga

SEQ ID NO: 562902 - DNA, 25 bp, Homo sapien
gttcaactcggatgatgttgtcttc

SEQ ID NO: 562903 - DNA, 25 bp, Homo sapien
tcttcagtgctgattcaggatcttt

SEQ ID NO: 562904 - DNA, 25 bp, Homo sapien
tgttgtcttcagtgctgattcagga

SEQ ID NO: 562905 - DNA, 25 bp, Homo sapien
tcacaaggcgttcaactcggatgat

SEQ ID NO: 562906 - DNA, 25 bp, Homo sapien
tgggattggtctatcatgcgagtat

SEQ ID NO: 562907 - DNA, 25 bp, Homo sapien
tatggttaatagcacggtatgacat

SEQ ID NO: 562908 - DNA, 25 bp, Homo sapien
gcgagtatggttaatagcacggtat

SEQ ID NO: 562909 - DNA, 25 bp, Homo sapien
tatcatgcgagtatggttaatagca

SEQ ID NO: 562910 - DNA, 25 bp, Homo sapien
gagtccagctttactacatgaagca

SEQ ID NO: 562911 - DNA, 25 bp, Homo sapien
gctgaggctcttgagtccagcttta

SEQ ID NO: 562912 - DNA, 25 bp, Homo sapien
tcctatctcatgtatgctgaggctc

SEQ ID NO: 562913 - DNA, 25 bp, Homo sapien
tcttgagtccagctttactacatga

SEQ ID NO: 562914 - DNA, 25 bp, Homo sapien
gtgtccagacgactgtagccctggg

SEQ ID NO: 562915 - DNA, 25 bp, Homo sapien
tgcagcaagctgaacaatacagttc

SEQ ID NO: 562916 - DNA, 25 bp, Homo sapien
gcagctgcagcaagctgaacaatac

SEQ ID NO: 562917 - DNA, 25 bp, Homo sapien
cttgttctagtgtccagacgactgt

SEQ ID NO: 562918 - DNA, 25 bp, Homo sapien
tcttgccccaggaaaattttgtcgc

SEQ ID NO: 562919 - DNA, 25 bp, Homo sapien
ttttgtcgcagtgtggaaagcagaa

SEQ ID NO: 562920 - DNA, 25 bp, Homo sapien
gggaagggatgtcttatagaaagca

SEQ ID NO: 562921 - DNA, 25 bp, Homo sapien
aagggatgtcttatagaaagcagca

SEQ ID NO: 562922 - DNA, 25 bp, Homo sapien
tctctttgcacatacagggctagct

SEQ ID NO: 562923 - DNA, 25 bp, Homo sapien
tttgcacatacagggctagcttctg

SEQ ID NO: 562924 - DNA, 25 bp, Homo sapien
tacagggctagcttctgagacccca

SEQ ID NO: 562925 - DNA, 25 bp, Homo sapien
gcacatacagggctagcttctgaga

SEQ ID NO: 562926 - DNA, 25 bp, Homo sapien
gaatgaatgttagatgactgagaag

SEQ ID NO: 562927 - DNA, 25 bp, Homo sapien
gccattgcaaatgaggctgccttag

SEQ ID NO: 562928 - DNA, 25 bp, Homo sapien
actgagaaggaagcaaatagacaca

SEQ ID NO: 562929 - DNA, 25 bp, Homo sapien
tgtggaagcctccatgggccattgt

SEQ ID NO: 562930 - DNA, 25 bp, Homo sapien
aagaagcgcgatgtcagaaacccag

SEQ ID NO: 562931 - DNA, 25 bp, Homo sapien
agctgaaccaatggctgcgggaaga

SEQ ID NO: 562932 - DNA, 25 bp, Homo sapien
gcggctgcatgcatgggacgctaca

SEQ ID NO: 562933 - DNA, 25 bp, Homo sapien
gatttgggcaaagtgggcggctgca

SEQ ID NO: 562934 - DNA, 25 bp, Homo sapien
gtgcagccaaggggaattctcttaa

SEQ ID NO: 562935 - DNA, 25 bp, Homo sapien
gcagccaaggggaattctcttaaaa

SEQ ID NO: 562936 - DNA, 25 bp, Homo sapien
tgcagccaaggggaattctcttaaa

SEQ ID NO: 562937 - DNA, 25 bp, Homo sapien
aggtcagtcccaggatcttggcatg

SEQ ID NO: 562938 - DNA, 25 bp, Homo sapien
ggcatgatttgagaagttcctgctg

SEQ ID NO: 562939 - DNA, 25 bp, Homo sapien
tgctgccgtccaccatttctggcca

SEQ ID NO: 562940 - DNA, 25 bp, Homo sapien
caagctcaggaatgtagccattcca

SEQ ID NO: 562941 - DNA, 25 bp, Homo sapien
catggtgcttactgtgggtggtccc

SEQ ID NO: 562942 - DNA, 25 bp, Homo sapien
tacaagaggagttctcagggtccct

SEQ ID NO: 562943 - DNA, 25 bp, Homo sapien
cttgggtgcaccagcagaatctgaa

SEQ ID NO: 562944 - DNA, 25 bp, Homo sapien
gaattgggccaccagtcacttggta

SEQ ID NO: 562945 - DNA, 25 bp, Homo sapien
gaaatcctccatttgccttataaaa

SEQ ID NO: 562946 - DNA, 25 bp, Homo sapien
ttttcgtcaggttgaaatcctccat

SEQ ID NO: 562947 - DNA, 25 bp, Homo sapien
ttgccttataaaacgatgactctgg

SEQ ID NO: 562948 - DNA, 25 bp, Homo sapien
gatgactctggctccgttccatttt

SEQ ID NO: 562949 - DNA, 25 bp, Homo sapien
cgggaaggtgaatacgacattgagc

SEQ ID NO: 562950 - DNA, 25 bp, Homo sapien
aatattgcggcaaaggcgagctgga

SEQ ID NO: 562951 - DNA, 25 bp, Homo sapien
gcgtgttctgcatccccgtttcaaa

SEQ ID NO: 562952 - DNA, 25 bp, Homo sapien
gagctgaacgatggtggaacatagc

SEQ ID NO: 562953 - DNA, 25 bp, Homo sapien
gaatacttagcaatggaagagcccc

SEQ ID NO: 562954 - DNA, 25 bp, Homo sapien
gccttgtaagccgaatggtccagaa

SEQ ID NO: 562955 - DNA, 25 bp, Homo sapien
ttgtctattccaaggcagcccaact

SEQ ID NO: 562956 - DNA, 25 bp, Homo sapien
ccagctggaggaacgcttgtctatt

SEQ ID NO: 562957 - DNA, 25 bp, Homo sapien
cagggtagaccagcaattctagcca

SEQ ID NO: 562958 - DNA, 25 bp, Homo sapien
ggagcaatgatccaggcgctttggt

SEQ ID NO: 562959 - DNA, 25 bp, Homo sapien
tatgagcacaatgaggatggcgccc

SEQ ID NO: 562960 - DNA, 25 bp, Homo sapien
gaaatattgttcctataatccacag

SEQ ID NO: 562961 - DNA, 25 bp, Homo sapien
gaaacaggaacaacgagagaaacca

SEQ ID NO: 562962 - DNA, 25 bp, Homo sapien
caggaacaacgagagaaaccagaga

SEQ ID NO: 562963 - DNA, 25 bp, Homo sapien
caaacattccaatggaaacaggaac

SEQ ID NO: 562964 - DNA, 25 bp, Homo sapien
ttccaatggaaacaggaacaacgag

SEQ ID NO: 562965 - DNA, 25 bp, Homo sapien
aaagagtcatacttcaatttcacca

SEQ ID NO: 562966 - DNA, 25 bp, Homo sapien
agagtcatacttcaatttcaccatg

SEQ ID NO: 562967 - DNA, 25 bp, Homo sapien
gctgtttttgcgacatgtggtttgt

SEQ ID NO: 562968 - DNA, 25 bp, Homo sapien
ttcaccatgttaaatttactgctgt

SEQ ID NO: 562969 - DNA, 25 bp, Homo sapien
ataaggaggcacagcggcatcattc

SEQ ID NO: 562970 - DNA, 25 bp, Homo sapien
caagcagtgtggagcatgtggtcat

SEQ ID NO: 562971 - DNA, 25 bp, Homo sapien
gaattacgatgctcccagagtcgac

SEQ ID NO: 562972 - DNA, 25 bp, Homo sapien
tcattccgagggcaagcagtgtgga

SEQ ID NO: 562973 - DNA, 25 bp, Homo sapien
gggcatgattccaaactgacagagg

SEQ ID NO: 562974 - DNA, 25 bp, Homo sapien
ggatggtcagcaccgtacttaggac

SEQ ID NO: 562975 - DNA, 25 bp, Homo sapien
gatttccacgttgcatcccatggag

SEQ ID NO: 562976 - DNA, 25 bp, Homo sapien
tataatgagcaccactacggcctgg

SEQ ID NO: 562977 - DNA, 25 bp, Homo sapien
ggccaagtccacagaagcgctggtc

SEQ ID NO: 562978 - DNA, 25 bp, Homo sapien
aggccaagtccacagaagcgctggt

SEQ ID NO: 562979 - DNA, 25 bp, Homo sapien
caagtccacagaagcgctggtccct

SEQ ID NO: 562980 - DNA, 25 bp, Homo sapien
gccaagtccacagaagcgctggtcc

SEQ ID NO: 562981 - DNA, 25 bp, Homo sapien
tctcttttgaaagccaccttaggga

SEQ ID NO: 562982 - DNA, 25 bp, Homo sapien
ggtagcattacaacacagagcacgt

SEQ ID NO: 562983 - DNA, 25 bp, Homo sapien
tacagaatcttatagggactgagcc

SEQ ID NO: 562984 - DNA, 25 bp, Homo sapien
gaaacttctagggtcttggtgcaaa

SEQ ID NO: 562985 - DNA, 25 bp, Homo sapien
tatctgagtggtcacgtcctgcctg

SEQ ID NO: 562986 - DNA, 25 bp, Homo sapien
ccttccagggcaaccgtgatttgta

SEQ ID NO: 562987 - DNA, 25 bp, Homo sapien
tcctaggtgtatcatgacttggccc

SEQ ID NO: 562988 - DNA, 25 bp, Homo sapien
gctactgggaaaaacctgagccatt

SEQ ID NO: 562989 - DNA, 25 bp, Homo sapien
gatgaatagcaaattcctgtaaatc

SEQ ID NO: 562990 - DNA, 25 bp, Homo sapien
tgaatagcaaattcctgtaaatcca

SEQ ID NO: 562991 - DNA, 25 bp, Homo sapien
cttttataacgtggatgaatagcaa

SEQ ID NO: 562992 - DNA, 25 bp, Homo sapien
tttgtctttgcttttataacgtgga

SEQ ID NO: 562993 - DNA, 25 bp, Homo sapien
cagtggccggttgtccccaggtgtc

SEQ ID NO: 562994 - DNA, 25 bp, Homo sapien
caggtgtccctggatcgatttaaca

SEQ ID NO: 562995 - DNA, 25 bp, Homo sapien
tcatcgttgtagcaatgtgtgaaag

SEQ ID NO: 562996 - DNA, 25 bp, Homo sapien
tggcttggtttggtcccagtaatag

SEQ ID NO: 562997 - DNA, 25 bp, Homo sapien
tccttgatcctccagcatagatgtt

SEQ ID NO: 562998 - DNA, 25 bp, Homo sapien
gatcttccttgatcctccagcatag

SEQ ID NO: 562999 - DNA, 25 bp, Homo sapien
tcttccttgatcctccagcatagat

SEQ ID NO: 563000 - DNA, 25 bp, Homo sapien
cttgatcttccttgatcctccagca

SEQ ID NO: 563001 - DNA, 25 bp, Homo sapien
tgctaccgcctgtttaagagatagg

SEQ ID NO: 563002 - DNA, 25 bp, Homo sapien
ttaaatgctaccgcctgtttaagag

SEQ ID NO: 563003 - DNA, 25 bp, Homo sapien
aatgctaccgcctgtttaagagata

SEQ ID NO: 563004 - DNA, 25 bp, Homo sapien
taccgcctgtttaagagataggtac

SEQ ID NO: 563005 - DNA, 25 bp, Homo sapien
caatgttaacactggagtaggaagt

SEQ ID NO: 563006 - DNA, 25 bp, Homo sapien
ctggagtaggaagtctttggtgtaa

SEQ ID NO: 563007 - DNA, 25 bp, Homo sapien
tgttggccttgttactttggttgaa

SEQ ID NO: 563008 - DNA, 25 bp, Homo sapien
caaactgtatccacaacaatgttaa

SEQ ID NO: 563009 - DNA, 25 bp, Homo sapien
gagcatggggatcagctgcgtctcc

SEQ ID NO: 563010 - DNA, 25 bp, Homo sapien
gctgagcatggggatcagctgcgtc

SEQ ID NO: 563011 - DNA, 25 bp, Homo sapien
ctggggagccatgtgctgagcatgg

SEQ ID NO: 563012 - DNA, 25 bp, Homo sapien
gcatggggatcagctgcgtctccag

SEQ ID NO: 563013 - DNA, 25 bp, Homo sapien
gattgagaacgtccaagaagattcc

SEQ ID NO: 563014 - DNA, 25 bp, Homo sapien
ggcaaagtgtccttgatcctcgtca

SEQ ID NO: 563015 - DNA, 25 bp, Homo sapien
aagattccagtagtcctgtggggca

SEQ ID NO: 563016 - DNA, 25 bp, Homo sapien
actgagctccccaggattgagaacg

SEQ ID NO: 563017 - DNA, 25 bp, Homo sapien
taagtgatgtgaagtctgctggaga

SEQ ID NO: 563018 - DNA, 25 bp, Homo sapien
gagaaagatgtctgttcacttcctt

SEQ ID NO: 563019 - DNA, 25 bp, Homo sapien
ctaagtgatgtgaagtctgctggag

SEQ ID NO: 563020 - DNA, 25 bp, Homo sapien
tgctggagaaagatgtctgttcact

SEQ ID NO: 563021 - DNA, 25 bp, Homo sapien
tatgaaacggtactgtgcaagagtt

SEQ ID NO: 563022 - DNA, 25 bp, Homo sapien
actgtgcaagagttattttctttca

SEQ ID NO: 563023 - DNA, 25 bp, Homo sapien
acaatatgaaacggtactgtgcaag

SEQ ID NO: 563024 - DNA, 25 bp, Homo sapien
aatatgaaacggtactgtgcaagag

SEQ ID NO: 563025 - DNA, 25 bp, Homo sapien
tcagaatgggattctctgcgatgcc

SEQ ID NO: 563026 - DNA, 25 bp, Homo sapien
gacccctcatctgacctaggctggg

SEQ ID NO: 563027 - DNA, 25 bp, Homo sapien
cattgttgtagtcactgaagaaggg

SEQ ID NO: 563028 - DNA, 25 bp, Homo sapien
cctttaagatccgactcagaatggg

SEQ ID NO: 563029 - DNA, 25 bp, Homo sapien
cattatcggtcagcttatctgagac

SEQ ID NO: 563030 - DNA, 25 bp, Homo sapien
cacagtgtgtcattatcggtcagct

SEQ ID NO: 563031 - DNA, 25 bp, Homo sapien
ttatctgagacatctgggaactgag

SEQ ID NO: 563032 - DNA, 25 bp, Homo sapien
tggcacacagtgtgtcattatcggt

SEQ ID NO: 563033 - DNA, 25 bp, Homo sapien
gcctgcactatctgctactgctgtg

SEQ ID NO: 563034 - DNA, 25 bp, Homo sapien
cactatctgctactgctgtgaccca

SEQ ID NO: 563035 - DNA, 25 bp, Homo sapien
ccaaagccaggtgctgcgtcttctg

SEQ ID NO: 563036 - DNA, 25 bp, Homo sapien
gcgtcttctggtggctcagtccacc

SEQ ID NO: 563037 - DNA, 25 bp, Homo sapien
gatgtgagcgttcaccactctggtt

SEQ ID NO: 563038 - DNA, 25 bp, Homo sapien
taactttgaaggctgtgatgcagct

SEQ ID NO: 563039 - DNA, 25 bp, Homo sapien
tgttgtaacctctgtatggaactcc

SEQ ID NO: 563040 - DNA, 25 bp, Homo sapien
tctacgctgtccagtatggtgaagg

SEQ ID NO: 563041 - DNA, 25 bp, Homo sapien
ctgacatgtttagaatgagcttttt

SEQ ID NO: 563042 - DNA, 25 bp, Homo sapien
tgacatgtttagaatgagctttttt

SEQ ID NO: 563043 - DNA, 25 bp, Homo sapien
catgtttagaatgagcttttttatc

SEQ ID NO: 563044 - DNA, 25 bp, Homo sapien
gacatgtttagaatgagctttttta

SEQ ID NO: 563045 - DNA, 25 bp, Homo sapien
gatgactcgaaggagatagtttcag

SEQ ID NO: 563046 - DNA, 25 bp, Homo sapien
gccttatgttctgtagatgactcga

SEQ ID NO: 563047 - DNA, 25 bp, Homo sapien
ggtaattaccagtgcaatcgcagca

SEQ ID NO: 563048 - DNA, 25 bp, Homo sapien
agtccaaattacctgctttgggaag

SEQ ID NO: 563049 - DNA, 25 bp, Homo sapien
ccctccccatccgtatccaggtctt

SEQ ID NO: 563050 - DNA, 25 bp, Homo sapien
agttcctcccttgacagtctcctag

SEQ ID NO: 563051 - DNA, 25 bp, Homo sapien
cttttaattttggtgagtgcgcgca

SEQ ID NO: 563052 - DNA, 25 bp, Homo sapien
gagtgcgcgcaagtacatctcccct

SEQ ID NO: 563053 - DNA, 25 bp, Homo sapien
gatgggcttacacactttactgtca

SEQ ID NO: 563054 - DNA, 25 bp, Homo sapien
gtcctgctggatgggcttacacact

SEQ ID NO: 563055 - DNA, 25 bp, Homo sapien
tacacactttactgtcacacttagt

SEQ ID NO: 563056 - DNA, 25 bp, Homo sapien
tgtcacacttagtggggtggcaact

SEQ ID NO: 563057 - DNA, 25 bp, Homo sapien
ttctgccaggagagtcttggtgaga

SEQ ID NO: 563058 - DNA, 25 bp, Homo sapien
gcctgctgtgccagttggtgattct

SEQ ID NO: 563059 - DNA, 25 bp, Homo sapien
ctttctagggctaagagttggggca

SEQ ID NO: 563060 - DNA, 25 bp, Homo sapien
ttggtgtggctgaactgagaagtcc

SEQ ID NO: 563061 - DNA, 25 bp, Homo sapien
ggagaagttccccacagagcctctt

SEQ ID NO: 563062 - DNA, 25 bp, Homo sapien
gtggctgacgatggagaagttcccc

SEQ ID NO: 563063 - DNA, 25 bp, Homo sapien
cactgagtgaaaagctccatgtggc

SEQ ID NO: 563064 - DNA, 25 bp, Homo sapien
tgtcctttgaatgattcgggtcact

SEQ ID NO: 563065 - DNA, 25 bp, Homo sapien
tgtctctgattcattaatggctgtg

SEQ ID NO: 563066 - DNA, 25 bp, Homo sapien
caatctcttctctagtggtgtctct

SEQ ID NO: 563067 - DNA, 25 bp, Homo sapien
ggatcaatctcttctctagtggtgt

SEQ ID NO: 563068 - DNA, 25 bp, Homo sapien
gtgtctctgattcattaatggctgt

SEQ ID NO: 563069 - DNA, 25 bp, Homo sapien
ggaataatggctgatcaataatttc

SEQ ID NO: 563070 - DNA, 25 bp, Homo sapien
acatcaggaatgggagtatctggaa

SEQ ID NO: 563071 - DNA, 25 bp, Homo sapien
tgggagcagcaagaatggacatcag

SEQ ID NO: 563072 - DNA, 25 bp, Homo sapien
gcaattcatccattgattcgctcat

SEQ ID NO: 563073 - DNA, 25 bp, Homo sapien
ggattcatggccgaaaaccttggag

SEQ ID NO: 563074 - DNA, 25 bp, Homo sapien
ccgttagactgccaaaaggattcat

SEQ ID NO: 563075 - DNA, 25 bp, Homo sapien
tgaatccatgaaccatgagtccgtt

SEQ ID NO: 563076 - DNA, 25 bp, Homo sapien
caaagagtccataaatcatgaatcc

SEQ ID NO: 563077 - DNA, 25 bp, Homo sapien
gaaaggcagtgcatgaactttctgt

SEQ ID NO: 563078 - DNA, 25 bp, Homo sapien
aaggcagtgcatgaactttctgtct

SEQ ID NO: 563079 - DNA, 25 bp, Homo sapien
tggaatgtcactgagaaggtcagaa

SEQ ID NO: 563080 - DNA, 25 bp, Homo sapien
tcactgagaaggtcagaaaggcagt

SEQ ID NO: 563081 - DNA, 25 bp, Homo sapien
aatgtagatgattgtgtaccatcct

SEQ ID NO: 563082 - DNA, 25 bp, Homo sapien
aactagataattgggaattgaaatc

SEQ ID NO: 563083 - DNA, 25 bp, Homo sapien
ggctttctggacagtattgccagta

SEQ ID NO: 563084 - DNA, 25 bp, Homo sapien
ttgtgtaccatcctctgcatactga

SEQ ID NO: 563085 - DNA, 25 bp, Homo sapien
ataggattccgacaatcgtttttgc

SEQ ID NO: 563086 - DNA, 25 bp, Homo sapien
ctctaataggattccgacaatcgtt

SEQ ID NO: 563087 - DNA, 25 bp, Homo sapien
ctgacccctctaataggattccgac

SEQ ID NO: 563088 - DNA, 25 bp, Homo sapien
gacccctctaataggattccgacaa

SEQ ID NO: 563089 - DNA, 25 bp, Homo sapien
cagtagacacgaggttgaattcaaa

SEQ ID NO: 563090 - DNA, 25 bp, Homo sapien
catgtttcgtgaaaaactggctggc

SEQ ID NO: 563091 - DNA, 25 bp, Homo sapien
tcaaatgtcactgcgccatgtttcg

SEQ ID NO: 563092 - DNA, 25 bp, Homo sapien
gaagctagcctacaaaattgtgcag

SEQ ID NO: 563093 - DNA, 25 bp, Homo sapien
cagaattggtaggaatgaaccaggt

SEQ ID NO: 563094 - DNA, 25 bp, Homo sapien
cctatgctggctcttacagaattgg

SEQ ID NO: 563095 - DNA, 25 bp, Homo sapien
cacacaggatgctgcctatgctggc

SEQ ID NO: 563096 - DNA, 25 bp, Homo sapien
gaacgcagaagaacactggtgagga

SEQ ID NO: 563097 - DNA, 25 bp, Homo sapien
ggtggacagtaccaatcttttacag

SEQ ID NO: 563098 - DNA, 25 bp, Homo sapien
tgtatctagctaaaccctgtccacc

SEQ ID NO: 563099 - DNA, 25 bp, Homo sapien
ctgtggataaaagatactcctgtat

SEQ ID NO: 563100 - DNA, 25 bp, Homo sapien
agggaagacagtccataaaggaggc

SEQ ID NO: 563101 - DNA, 25 bp, Homo sapien
gcagcctgaactcatcttcagggct

SEQ ID NO: 563102 - DNA, 25 bp, Homo sapien
tcaaggtgtgaacacttctgggaag

SEQ ID NO: 563103 - DNA, 25 bp, Homo sapien
aagtccaatgctcttggcagcctga

SEQ ID NO: 563104 - DNA, 25 bp, Homo sapien
gcttctctgccgcttaatgggtgac

SEQ ID NO: 563105 - DNA, 25 bp, Homo sapien
gggatggaatcttctccttactggg

SEQ ID NO: 563106 - DNA, 25 bp, Homo sapien
gaatcttctccttactgggctccgt

SEQ ID NO: 563107 - DNA, 25 bp, Homo sapien
ccttactgggctccgtttatgagca

SEQ ID NO: 563108 - DNA, 25 bp, Homo sapien
tccgtttatgagcacactgacattc

SEQ ID NO: 563109 - DNA, 25 bp, Homo sapien
agttcctggatctgaaaccttctga

SEQ ID NO: 563110 - DNA, 25 bp, Homo sapien
ggtgagtcgagttcctggatctgaa

SEQ ID NO: 563111 - DNA, 25 bp, Homo sapien
cacaggtgaggtgagtcgagttcct

SEQ ID NO: 563112 - DNA, 25 bp, Homo sapien
tacacaggtgaggtgagtcgagttc

SEQ ID NO: 563113 - DNA, 25 bp, Homo sapien
gctttcttccatattaaattgtcct

SEQ ID NO: 563114 - DNA, 25 bp, Homo sapien
caggaatgaggcactagggtgctct

SEQ ID NO: 563115 - DNA, 25 bp, Homo sapien
tcttccatattaaattgtcctctgt

SEQ ID NO: 563116 - DNA, 25 bp, Homo sapien
ggtagagaatttctgtggaaagttg

SEQ ID NO: 563117 - DNA, 25 bp, Homo sapien
gcagaaatgtgccgtcacgcagcac

SEQ ID NO: 563118 - DNA, 25 bp, Homo sapien
cagcagaaatgtgccgtcacgcagc

SEQ ID NO: 563119 - DNA, 25 bp, Homo sapien
tcagcagaaatgtgccgtcacgcag

SEQ ID NO: 563120 - DNA, 25 bp, Homo sapien
gttcagggccgtcagcagaaatgtg

SEQ ID NO: 563121 - DNA, 25 bp, Homo sapien
taaacttgacttgtgcatataaagc

SEQ ID NO: 563122 - DNA, 25 bp, Homo sapien
gccatttcgctgcaaatccacttta

SEQ ID NO: 563123 - DNA, 25 bp, Homo sapien
ggcaataagacaaatttcctagata

SEQ ID NO: 563124 - DNA, 25 bp, Homo sapien
ctagatatgtgccatttcgctgcaa

SEQ ID NO: 563125 - DNA, 25 bp, Homo sapien
ccccagctctctcagtaatgcgatt

SEQ ID NO: 563126 - DNA, 25 bp, Homo sapien
catctgtaaaccgttgctgcagaag

SEQ ID NO: 563127 - DNA, 25 bp, Homo sapien
ggttcagactcttctttgactgcca

SEQ ID NO: 563128 - DNA, 25 bp, Homo sapien
tggctccctttctagtgctcctgct

SEQ ID NO: 563129 - DNA, 25 bp, Homo sapien
ctctgcaaagtatccaacttctgag

SEQ ID NO: 563130 - DNA, 25 bp, Homo sapien
tctgcaaagtatccaacttctgaga

SEQ ID NO: 563131 - DNA, 25 bp, Homo sapien
ttttcaccacgactgctgctggcat

SEQ ID NO: 563132 - DNA, 25 bp, Homo sapien
cttttcaccacgactgctgctggca

SEQ ID NO: 563133 - DNA, 25 bp, Homo sapien
acattctccatctgttcagtgcaca

SEQ ID NO: 563134 - DNA, 25 bp, Homo sapien
tctgaaaggcctctaacattctcca

SEQ ID NO: 563135 - DNA, 25 bp, Homo sapien
ccatctgttcagtgcacacttgaaa

SEQ ID NO: 563136 - DNA, 25 bp, Homo sapien
ctagtctgaaaggcctctaacattc

SEQ ID NO: 563137 - DNA, 25 bp, Homo sapien
aattcttgagcatgaatagaaatca

SEQ ID NO: 563138 - DNA, 25 bp, Homo sapien
tcttgagcatgaatagaaatcaaag

SEQ ID NO: 563139 - DNA, 25 bp, Homo sapien
gagcatgaatagaaatcaaagatcc

SEQ ID NO: 563140 - DNA, 25 bp, Homo sapien
ttaaattcttgagcatgaatagaaa

SEQ ID NO: 563141 - DNA, 25 bp, Homo sapien
gatggcttttctcagatttagcctc

SEQ ID NO: 563142 - DNA, 25 bp, Homo sapien
tggcttttctcagatttagcctctt

SEQ ID NO: 563143 - DNA, 25 bp, Homo sapien
tgatggcttttctcagatttagcct

SEQ ID NO: 563144 - DNA, 25 bp, Homo sapien
atgatggcttttctcagatttagcc

SEQ ID NO: 563145 - DNA, 25 bp, Homo sapien
aaggatgattccaagatgggtggag

SEQ ID NO: 563146 - DNA, 25 bp, Homo sapien
gaaggatgattccaagatgggtgga

SEQ ID NO: 563147 - DNA, 25 bp, Homo sapien
aggatgattccaagatgggtggagg

SEQ ID NO: 563148 - DNA, 25 bp, Homo sapien
gatgattccaagatgggtggaggga

SEQ ID NO: 563149 - DNA, 25 bp, Homo sapien
gaccaagagccacggcccgtgggag

SEQ ID NO: 563150 - DNA, 25 bp, Homo sapien
tctgcttttgaaatcacgagtgcgg

SEQ ID NO: 563151 - DNA, 25 bp, Homo sapien
gaaatcacgagtgcggaagtagcag

SEQ ID NO: 563152 - DNA, 25 bp, Homo sapien
tgcggaagtagcagataaggctaga

SEQ ID NO: 563153 - DNA, 25 bp, Homo sapien
ttttgccgagctggaaatgtgcaca

SEQ ID NO: 563154 - DNA, 25 bp, Homo sapien
tgtacagggtgactgcaaacagggc

SEQ ID NO: 563155 - DNA, 25 bp, Homo sapien
gatatcccagaagcgaattgcctgc

SEQ ID NO: 563156 - DNA, 25 bp, Homo sapien
ttcatcaatgtcagccaagaaccat

SEQ ID NO: 563157 - DNA, 25 bp, Homo sapien
tctaaatgaggtggcaatttcccat

SEQ ID NO: 563158 - DNA, 25 bp, Homo sapien
gtgtcccattttgctaaccattatt

SEQ ID NO: 563159 - DNA, 25 bp, Homo sapien
aatccctagtgtctctaccttttag

SEQ ID NO: 563160 - DNA, 25 bp, Homo sapien
cttgtgatctaatctgcaatgaggc

SEQ ID NO: 563161 - DNA, 25 bp, Homo sapien
tcaaaagcagttctgcagagggcca

SEQ ID NO: 563162 - DNA, 25 bp, Homo sapien
caaaagcagttctgcagagggccat

SEQ ID NO: 563163 - DNA, 25 bp, Homo sapien
agactttattccattccctggcaaa

SEQ ID NO: 563164 - DNA, 25 bp, Homo sapien
ccctggcaaacaagatgtagttcct

SEQ ID NO: 563165 - DNA, 25 bp, Homo sapien
tctgacgcaagtgggaggaatctct

SEQ ID NO: 563166 - DNA, 25 bp, Homo sapien
gcttatactcctcttgctaaggtgc

SEQ ID NO: 563167 - DNA, 25 bp, Homo sapien
cctggatcttgatgatttaccaagt

SEQ ID NO: 563168 - DNA, 25 bp, Homo sapien
gctttatttttaattcgacatgtct

SEQ ID NO: 563169 - DNA, 25 bp, Homo sapien
ttaattcgacatgtcttcctcctgg

SEQ ID NO: 563170 - DNA, 25 bp, Homo sapien
cttcctcctggatcttgatgattta

SEQ ID NO: 563171 - DNA, 25 bp, Homo sapien
cccctcagtctctggatgggtgcat

SEQ ID NO: 563172 - DNA, 25 bp, Homo sapien
ctttggatggtcatatcgttggtag

SEQ ID NO: 563173 - DNA, 25 bp, Homo sapien
aacaaagatgttgcctccagcattc

SEQ ID NO: 563174 - DNA, 25 bp, Homo sapien
ttcaacaaagatgttgcctccagca

SEQ ID NO: 563175 - DNA, 25 bp, Homo sapien
tgaagtctaagagattattcctcat

SEQ ID NO: 563176 - DNA, 25 bp, Homo sapien
catatagtgctatgaagtctaagag

SEQ ID NO: 563177 - DNA, 25 bp, Homo sapien
cccagggtttaatgtcatatagtgc

SEQ ID NO: 563178 - DNA, 25 bp, Homo sapien
ctttcccagggtttaatgtcatata

SEQ ID NO: 563179 - DNA, 25 bp, Homo sapien
acttggctgttcccctttctcaatt

SEQ ID NO: 563180 - DNA, 25 bp, Homo sapien
ttggctgttcccctttctcaatttc

SEQ ID NO: 563181 - DNA, 25 bp, Homo sapien
gaatgtttttgaacttggctgttcc

SEQ ID NO: 563182 - DNA, 25 bp, Homo sapien
cttggctgttcccctttctcaattt

SEQ ID NO: 563183 - DNA, 25 bp, Homo sapien
ctgactttgcttggtcaagggctct

SEQ ID NO: 563184 - DNA, 25 bp, Homo sapien
tttctgactttgcttggtcaagggc

SEQ ID NO: 563185 - DNA, 25 bp, Homo sapien
ttgcttggtcaagggctctcactgg

SEQ ID NO: 563186 - DNA, 25 bp, Homo sapien
ctttgcttggtcaagggctctcact

SEQ ID NO: 563187 - DNA, 25 bp, Homo sapien
tcctccctttgaatcttttatcttg

SEQ ID NO: 563188 - DNA, 25 bp, Homo sapien
tcttctctttgttccgtttctatct

SEQ ID NO: 563189 - DNA, 25 bp, Homo sapien
tctttgttccgtttctatctcccaa

SEQ ID NO: 563190 - DNA, 25 bp, Homo sapien
ccctttgaatcttttatcttggctg

SEQ ID NO: 563191 - DNA, 25 bp, Homo sapien
tttctgtgggtccaatgatgctgac

SEQ ID NO: 563192 - DNA, 25 bp, Homo sapien
tgggtccaatgatgctgacagctgc

SEQ ID NO: 563193 - DNA, 25 bp, Homo sapien
gctgacagctgccataggtgctgcc

SEQ ID NO: 563194 - DNA, 25 bp, Homo sapien
atgctgacagctgccataggtgctg

SEQ ID NO: 563195 - DNA, 25 bp, Homo sapien
aattacatttgttgccaaatatatt

SEQ ID NO: 563196 - DNA, 25 bp, Homo sapien
tattaagtggacaaatgggtcactg

SEQ ID NO: 563197 - DNA, 25 bp, Homo sapien
catttgttgccaaatatattaagtg

SEQ ID NO: 563198 - DNA, 25 bp, Homo sapien
tatattaagtggacaaatgggtcac

SEQ ID NO: 563199 - DNA, 25 bp, Homo sapien
ctggactggtctcatggggactact

SEQ ID NO: 563200 - DNA, 25 bp, Homo sapien
ggtctcatggggactactcttcctt

SEQ ID NO: 563201 - DNA, 25 bp, Homo sapien
gactggtctcatggggactactctt

SEQ ID NO: 563202 - DNA, 25 bp, Homo sapien
tggtctcatggggactactcttcct

SEQ ID NO: 563203 - DNA, 25 bp, Homo sapien
gctgtagatgattccaccaacacca

SEQ ID NO: 563204 - DNA, 25 bp, Homo sapien
caccttgggccagctgtcttaggtt

SEQ ID NO: 563205 - DNA, 25 bp, Homo sapien
agcatttttcacaccttgggccagc

SEQ ID NO: 563206 - DNA, 25 bp, Homo sapien
tatcctttctcactacagtctgctg

SEQ ID NO: 563207 - DNA, 25 bp, Homo sapien
gccattgttacacttgtaaactcta

SEQ ID NO: 563208 - DNA, 25 bp, Homo sapien
gcttggcagcactcttgatggagtc

SEQ ID NO: 563209 - DNA, 25 bp, Homo sapien
ttggcagcactcttgatggagtctg

SEQ ID NO: 563210 - DNA, 25 bp, Homo sapien
gtgggaacagctgccattgttacac

SEQ ID NO: 563211 - DNA, 25 bp, Homo sapien
tatgttcagatttaaagcaggagca

SEQ ID NO: 563212 - DNA, 25 bp, Homo sapien
gcaggagcaacacagcattatctgg

SEQ ID NO: 563213 - DNA, 25 bp, Homo sapien
ctgcatggtaaagttatgttcagat

SEQ ID NO: 563214 - DNA, 25 bp, Homo sapien
cattatctggttgacaataacggtg

SEQ ID NO: 563215 - DNA, 25 bp, Homo sapien
tgtacggattgaaccagcaactgtg

SEQ ID NO: 563216 - DNA, 25 bp, Homo sapien
gcccagtgtcaaaattggaagacag

SEQ ID NO: 563217 - DNA, 25 bp, Homo sapien
cagctggacttgattagaggtgcat

SEQ ID NO: 563218 - DNA, 25 bp, Homo sapien
tggcgcctgtctgcagtgtacggat

SEQ ID NO: 563219 - DNA, 25 bp, Homo sapien
cgtatccaaaggatcttcagatttc

SEQ ID NO: 563220 - DNA, 25 bp, Homo sapien
agccacctgtgttggtgcctactcc

SEQ ID NO: 563221 - DNA, 25 bp, Homo sapien
gagccacctgtgttggtgcctactc

SEQ ID NO: 563222 - DNA, 25 bp, Homo sapien
cacctgtgttggtgcctactcctcc

SEQ ID NO: 563223 - DNA, 25 bp, Homo sapien
gccacctgtgttggtgcctactcct

SEQ ID NO: 563224 - DNA, 25 bp, Homo sapien
tgaaacctcaataggaaccctaata

SEQ ID NO: 563225 - DNA, 25 bp, Homo sapien
atgaaacctcaataggaaccctaat

SEQ ID NO: 563226 - DNA, 25 bp, Homo sapien
cctcaataggaaccctaatattcat

SEQ ID NO: 563227 - DNA, 25 bp, Homo sapien
acctcaataggaaccctaatattca

SEQ ID NO: 563228 - DNA, 25 bp, Homo sapien
gaactgttcagtctcagcccgagct

SEQ ID NO: 563229 - DNA, 25 bp, Homo sapien
caagacttcatatatgcccagtggg

SEQ ID NO: 563230 - DNA, 25 bp, Homo sapien
cagctgccatgggatactagtgcca

SEQ ID NO: 563231 - DNA, 25 bp, Homo sapien
tagatttatggccagatgttgcaga

SEQ ID NO: 563232 - DNA, 25 bp, Homo sapien
aaaggacaagtcagtaatacagagt

SEQ ID NO: 563233 - DNA, 25 bp, Homo sapien
aaaattaccccatgcacctgtgagt

SEQ ID NO: 563234 - DNA, 25 bp, Homo sapien
taaatagagaaaatcgtactgagct

SEQ ID NO: 563235 - DNA, 25 bp, Homo sapien
gagatagacaagtattgagaatcac

SEQ ID NO: 563236 - DNA, 25 bp, Homo sapien
ttgacatcgtacaaataaattgacc

SEQ ID NO: 563237 - DNA, 25 bp, Homo sapien
tctggattctggttatcttcttgac

SEQ ID NO: 563238 - DNA, 25 bp, Homo sapien
cgtacaaataaattgacctctgttt

SEQ ID NO: 563239 - DNA, 25 bp, Homo sapien
ggttatcttcttgacatcgtacaaa

SEQ ID NO: 563240 - DNA, 25 bp, Homo sapien
tctcatttgcatccagtcacctttg

SEQ ID NO: 563241 - DNA, 25 bp, Homo sapien
gacaccgagtacctggatggcagct

SEQ ID NO: 563242 - DNA, 25 bp, Homo sapien
agtgtcccagggctcgtggagacac

SEQ ID NO: 563243 - DNA, 25 bp, Homo sapien
gcagctctgccgtttgtctcatttg

SEQ ID NO: 563244 - DNA, 25 bp, Homo sapien
ggaggtctctggtggacgaagtgtg

SEQ ID NO: 563245 - DNA, 25 bp, Homo sapien
tctggtggacgaagtgtgcaggtgc

SEQ ID NO: 563246 - DNA, 25 bp, Homo sapien
gacgaagtgtgcaggtgcactgtca

SEQ ID NO: 563247 - DNA, 25 bp, Homo sapien
acgaagtgtgcaggtgcactgtcaa

SEQ ID NO: 563248 - DNA, 25 bp, Homo sapien
gctcagccagtccttacaattgtat

SEQ ID NO: 563249 - DNA, 25 bp, Homo sapien
taattgttgctgatccgctgatcac

SEQ ID NO: 563250 - DNA, 25 bp, Homo sapien
ttccttcctggacactggccctgtg

SEQ ID NO: 563251 - DNA, 25 bp, Homo sapien
cctgtggactttccgcttgctcagc

SEQ ID NO: 563252 - DNA, 25 bp, Homo sapien
ctgggcactgtctctaagattagtg

SEQ ID NO: 563253 - DNA, 25 bp, Homo sapien
cactgtctctaagattagtgaactc

SEQ ID NO: 563254 - DNA, 25 bp, Homo sapien
gggcactgtctctaagattagtgaa

SEQ ID NO: 563255 - DNA, 25 bp, Homo sapien
ggcactgtctctaagattagtgaac

SEQ ID NO: 563256 - DNA, 25 bp, Homo sapien
tgggttctgcccatgatatgtggaa

SEQ ID NO: 563257 - DNA, 25 bp, Homo sapien
tctatcagaccccatatagggtaac

SEQ ID NO: 563258 - DNA, 25 bp, Homo sapien
tattcataagttttctgcaggaagg

SEQ ID NO: 563259 - DNA, 25 bp, Homo sapien
taattagcatagactgagcagtgat

SEQ ID NO: 563260 - DNA, 25 bp, Homo sapien
tcacacactgaggccggtccggggt

SEQ ID NO: 563261 - DNA, 25 bp, Homo sapien
aatgtcacatatatgcactgtggaa

SEQ ID NO: 563262 - DNA, 25 bp, Homo sapien
cacactgaggccggtccggggttgg

SEQ ID NO: 563263 - DNA, 25 bp, Homo sapien
cacacactgaggccggtccggggtt

SEQ ID NO: 563264 - DNA, 25 bp, Homo sapien
catagcagggatgaagaaccagtac

SEQ ID NO: 563265 - DNA, 25 bp, Homo sapien
tcctgcaggtgcaacactggaccta

SEQ ID NO: 563266 - DNA, 25 bp, Homo sapien
ctctgtagagagaacctgtgtcttg

SEQ ID NO: 563267 - DNA, 25 bp, Homo sapien
ggcagtggcccagctttcactaatg

SEQ ID NO: 563268 - DNA, 25 bp, Homo sapien
ctaggtcgctaaggtgctctctggg

SEQ ID NO: 563269 - DNA, 25 bp, Homo sapien
atggatgctggtgacaagcatgttt

SEQ ID NO: 563270 - DNA, 25 bp, Homo sapien
ataaagaggcgctttgcaaatctgg

SEQ ID NO: 563271 - DNA, 25 bp, Homo sapien
tccagtccagtcaaaggatttccat

SEQ ID NO: 563272 - DNA, 25 bp, Homo sapien
gacatcagatggtagagttgtaaga

SEQ ID NO: 563273 - DNA, 25 bp, Homo sapien
ggtgacatttctcatcattcctgtg

SEQ ID NO: 563274 - DNA, 25 bp, Homo sapien
agcaccagagcatcttgacatcaga

SEQ ID NO: 563275 - DNA, 25 bp, Homo sapien
catgggtggagttaaggtgacattt

SEQ ID NO: 563276 - DNA, 25 bp, Homo sapien
gctaatccaagtggctttaccacag

SEQ ID NO: 563277 - DNA, 25 bp, Homo sapien
gttgctaatccaagtggctttacca

SEQ ID NO: 563278 - DNA, 25 bp, Homo sapien
atccaagtggctttaccacagctga

SEQ ID NO: 563279 - DNA, 25 bp, Homo sapien
cagtgttgctaatccaagtggcttt

SEQ ID NO: 563280 - DNA, 25 bp, Homo sapien
gacaaaaatttatagccgctgagga

SEQ ID NO: 563281 - DNA, 25 bp, Homo sapien
tcatggagcgaatgtagtctactct

SEQ ID NO: 563282 - DNA, 25 bp, Homo sapien
cagaactaaggagattcatggagcg

SEQ ID NO: 563283 - DNA, 25 bp, Homo sapien
aggacatggatgactttgctgcgga

SEQ ID NO: 563284 - DNA, 25 bp, Homo sapien
tagatgcaacaggacaccagtgaca

SEQ ID NO: 563285 - DNA, 25 bp, Homo sapien
cacacagtagctgatagacgctgaa

SEQ ID NO: 563286 - DNA, 25 bp, Homo sapien
cgcgctatgcgagtggtacaaagtt

SEQ ID NO: 563287 - DNA, 25 bp, Homo sapien
ccagtgacaagagtttacacacagt

SEQ ID NO: 563288 - DNA, 25 bp, Homo sapien
cctctgagcttaatctcccttgcat

SEQ ID NO: 563289 - DNA, 25 bp, Homo sapien
tgcagtccgcactgatcgcgggagc

SEQ ID NO: 563290 - DNA, 25 bp, Homo sapien
ttgctctaagctctgtgaatgtgcc

SEQ ID NO: 563291 - DNA, 25 bp, Homo sapien
gaataacctccaaggagtgattccc

SEQ ID NO: 563292 - DNA, 25 bp, Homo sapien
tcttgaccctagcactgaagttttg

SEQ ID NO: 563293 - DNA, 25 bp, Homo sapien
ctgtggagaggtgcctaagctacag

SEQ ID NO: 563294 - DNA, 25 bp, Homo sapien
gagaggtgcctaagctacagggtac

SEQ ID NO: 563295 - DNA, 25 bp, Homo sapien
aggtgcctaagctacagggtacagc

SEQ ID NO: 563296 - DNA, 25 bp, Homo sapien
ggagaggtgcctaagctacagggta

SEQ ID NO: 563297 - DNA, 25 bp, Homo sapien
tgctgagactccctcatgcaatggc

SEQ ID NO: 563298 - DNA, 25 bp, Homo sapien
tctgctgctgagactccctcatgca

SEQ ID NO: 563299 - DNA, 25 bp, Homo sapien
gctgctgagactccctcatgcaatg

SEQ ID NO: 563300 - DNA, 25 bp, Homo sapien
ctgagactccctcatgcaatggcat

SEQ ID NO: 563301 - DNA, 25 bp, Homo sapien
attaggcttaacacattctagacag

SEQ ID NO: 563302 - DNA, 25 bp, Homo sapien
aagagtattaggcttaacacattct

SEQ ID NO: 563303 - DNA, 25 bp, Homo sapien
ggcttaacacattctagacagaagg

SEQ ID NO: 563304 - DNA, 25 bp, Homo sapien
gagtattaggcttaacacattctag

SEQ ID NO: 563305 - DNA, 25 bp, Homo sapien
aagtgcattcaaagctgggctccac

SEQ ID NO: 563306 - DNA, 25 bp, Homo sapien
ctccttattcttctgtgtgatgaca

SEQ ID NO: 563307 - DNA, 25 bp, Homo sapien
ttctgtgtgatgacagatttctcaa

SEQ ID NO: 563308 - DNA, 25 bp, Homo sapien
tctgtgtgatgacagatttctcaaa

SEQ ID NO: 563309 - DNA, 25 bp, Homo sapien
gcttcctgaactccggtgtagttct

SEQ ID NO: 563310 - DNA, 25 bp, Homo sapien
aactccggtgtagttctccaattct

SEQ ID NO: 563311 - DNA, 25 bp, Homo sapien
ctgaactccggtgtagttctccaat

SEQ ID NO: 563312 - DNA, 25 bp, Homo sapien
ttagcttcctgaactccggtgtagt

SEQ ID NO: 563313 - DNA, 25 bp, Homo sapien
cttggcccttggttcttactcggag

SEQ ID NO: 563314 - DNA, 25 bp, Homo sapien
agaggcgatctcacagggcttctct

SEQ ID NO: 563315 - DNA, 25 bp, Homo sapien
tgtgtcctctccaatccggtccttg

SEQ ID NO: 563316 - DNA, 25 bp, Homo sapien
cctgtctgtgagaggcgatctcaca

SEQ ID NO: 563317 - DNA, 25 bp, Homo sapien
tgtcaaggttattgtgcagtgccat

SEQ ID NO: 563318 - DNA, 25 bp, Homo sapien
gaaggtcagggacacattgtcaagg

SEQ ID NO: 563319 - DNA, 25 bp, Homo sapien
gacacattgtcaaggttattgtgca

SEQ ID NO: 563320 - DNA, 25 bp, Homo sapien
cagggacacattgtcaaggttattg

SEQ ID NO: 563321 - DNA, 25 bp, Homo sapien
ctgtgtttatggcaggtcctagagc

SEQ ID NO: 563322 - DNA, 25 bp, Homo sapien
gagcatcatgctttgtccgggatga

SEQ ID NO: 563323 - DNA, 25 bp, Homo sapien
tatggcaggtcctagagcatcatgc

SEQ ID NO: 563324 - DNA, 25 bp, Homo sapien
caaatatagctgtgtttatggcagg

SEQ ID NO: 563325 - DNA, 25 bp, Homo sapien
taagagaatgtaggaaccagtaact

SEQ ID NO: 563326 - DNA, 25 bp, Homo sapien
ttggacaaggacaaatgccacgatc

SEQ ID NO: 563327 - DNA, 25 bp, Homo sapien
tgccacgatcaagtacaaattgttg

SEQ ID NO: 563328 - DNA, 25 bp, Homo sapien
caggtatttgcgcaataagttggac

SEQ ID NO: 563329 - DNA, 25 bp, Homo sapien
ctgctgagttggaccgtctgttttc

SEQ ID NO: 563330 - DNA, 25 bp, Homo sapien
tgctgagttggaccgtctgttttct

SEQ ID NO: 563331 - DNA, 25 bp, Homo sapien
ctgagttggaccgtctgttttctct

SEQ ID NO: 563332 - DNA, 25 bp, Homo sapien
agttggaccgtctgttttctcttct

SEQ ID NO: 563333 - DNA, 25 bp, Homo sapien
gagagcatttgccatgctttattca

SEQ ID NO: 563334 - DNA, 25 bp, Homo sapien
agagcatttgccatgctttattcat

SEQ ID NO: 563335 - DNA, 25 bp, Homo sapien
ctttgagagcatttgccatgcttta

SEQ ID NO: 563336 - DNA, 25 bp, Homo sapien
ttgagagcatttgccatgctttatt

SEQ ID NO: 563337 - DNA, 25 bp, Homo sapien
caatgagaaacaacgatgtgtttgc

SEQ ID NO: 563338 - DNA, 25 bp, Homo sapien
cgagcgctgagatttaattcagggc

SEQ ID NO: 563339 - DNA, 25 bp, Homo sapien
tccaagtctcttgcaaggtgaactg

SEQ ID NO: 563340 - DNA, 25 bp, Homo sapien
aactgggacaggcagcgtcttgatc

SEQ ID NO: 563341 - DNA, 25 bp, Homo sapien
gtctttattgcttagactaaggtcc

SEQ ID NO: 563342 - DNA, 25 bp, Homo sapien
gaaaacagccgaagagaagaagcaa

SEQ ID NO: 563343 - DNA, 25 bp, Homo sapien
tgcttagactaaggtcctccacata

SEQ ID NO: 563344 - DNA, 25 bp, Homo sapien
gaagcaaggttacatcaagtcttac

SEQ ID NO: 563345 - DNA, 25 bp, Homo sapien
aaatgatggctaccagtttttcctt

SEQ ID NO: 563346 - DNA, 25 bp, Homo sapien
aatgatggctaccagtttttccttt

SEQ ID NO: 563347 - DNA, 25 bp, Homo sapien
taaatgatggctaccagtttttcct

SEQ ID NO: 563348 - DNA, 25 bp, Homo sapien
tgatggctaccagtttttcctttct

SEQ ID NO: 563349 - DNA, 25 bp, Homo sapien
gagatgtcctcttgagacaaccagc

SEQ ID NO: 563350 - DNA, 25 bp, Homo sapien
ttttctgcagtttaagtccaaggtg

SEQ ID NO: 563351 - DNA, 25 bp, Homo sapien
tgaactccagtggtaccttttgcct

SEQ ID NO: 563352 - DNA, 25 bp, Homo sapien
ccttttgcctgtagagagatgtcct

SEQ ID NO: 563353 - DNA, 25 bp, Homo sapien
tctctttcatagtatttgcattcca

SEQ ID NO: 563354 - DNA, 25 bp, Homo sapien
tcaatagcaattactcaacatcaaa

SEQ ID NO: 563355 - DNA, 25 bp, Homo sapien
ctctttcatagtatttgcattccat

SEQ ID NO: 563356 - DNA, 25 bp, Homo sapien
agcagttagtacctgcaggtgccag

SEQ ID NO: 563357 - DNA, 25 bp, Homo sapien
cagttagtacctgcaggtgccagag

SEQ ID NO: 563358 - DNA, 25 bp, Homo sapien
gcagttagtacctgcaggtgccaga

SEQ ID NO: 563359 - DNA, 25 bp, Homo sapien
aaagccctggtatccaactggagtc

SEQ ID NO: 563360 - DNA, 25 bp, Homo sapien
agccctggtatccaactggagtcat

SEQ ID NO: 563361 - DNA, 25 bp, Homo sapien
gaatcttgctggaatgcaaagccct

SEQ ID NO: 563362 - DNA, 25 bp, Homo sapien
atcttgctggaatgcaaagccctgg

SEQ ID NO: 563363 - DNA, 25 bp, Homo sapien
taagagatgctaacagccgatttaa

SEQ ID NO: 563364 - DNA, 25 bp, Homo sapien
agtggtatgcctatatgcctttaaa

SEQ ID NO: 563365 - DNA, 25 bp, Homo sapien
tcaggtagacgctttgactttttaa

SEQ ID NO: 563366 - DNA, 25 bp, Homo sapien
cttctgggtggtgctacaagatgga

SEQ ID NO: 563367 - DNA, 25 bp, Homo sapien
ttaaagtgcctcaagcaagcaggta

SEQ ID NO: 563368 - DNA, 25 bp, Homo sapien
caagtggctgctcaagattaatttc

SEQ ID NO: 563369 - DNA, 25 bp, Homo sapien
gctgctcaagattaatttccattgg

SEQ ID NO: 563370 - DNA, 25 bp, Homo sapien
caagcaggtagcaagtggctgctca

SEQ ID NO: 563371 - DNA, 25 bp, Homo sapien
tggcatgtatgcctcagtgcaggtg

SEQ ID NO: 563372 - DNA, 25 bp, Homo sapien
tgcaggtgtatatctcagtgtctcc

SEQ ID NO: 563373 - DNA, 25 bp, Homo sapien
tccaggaaagggctagcactaaaca

SEQ ID NO: 563374 - DNA, 25 bp, Homo sapien
tggaaataggtacactgacagcagg

SEQ ID NO: 563375 - DNA, 25 bp, Homo sapien
acctcaagatgagcagaacagaaca

SEQ ID NO: 563376 - DNA, 25 bp, Homo sapien
cataaccattttgctatgagctcat

SEQ ID NO: 563377 - DNA, 25 bp, Homo sapien
cattttgctatgagctcatctccac

SEQ ID NO: 563378 - DNA, 25 bp, Homo sapien
tgagcagaacagaacataaccattt

SEQ ID NO: 563379 - DNA, 25 bp, Homo sapien
tgctgactctcagctttaagagggt

SEQ ID NO: 563380 - DNA, 25 bp, Homo sapien
gctgactctcagctttaagagggtt

SEQ ID NO: 563381 - DNA, 25 bp, Homo sapien
actctcagctttaagagggttgctg

SEQ ID NO: 563382 - DNA, 25 bp, Homo sapien
tgactctcagctttaagagggttgc

SEQ ID NO: 563383 - DNA, 25 bp, Homo sapien
gtggcttcgaaaccactgctgctga

SEQ ID NO: 563384 - DNA, 25 bp, Homo sapien
gatgtcaggttgattggtctctgta

SEQ ID NO: 563385 - DNA, 25 bp, Homo sapien
tccttgctgtagaatggatgtcagg

SEQ ID NO: 563386 - DNA, 25 bp, Homo sapien
tctgtactgtcatcaactgagatta

SEQ ID NO: 563387 - DNA, 25 bp, Homo sapien
tcgatcaagctttcattgatactta

SEQ ID NO: 563388 - DNA, 25 bp, Homo sapien
tggtagcctctcagcattgtaaaac

SEQ ID NO: 563389 - DNA, 25 bp, Homo sapien
aaaccaacagtcacaatatcgatca

SEQ ID NO: 563390 - DNA, 25 bp, Homo sapien
cccatggtagcctctcagcattgta

SEQ ID NO: 563391 - DNA, 25 bp, Homo sapien
gccatgcagtcaagttgtctactgg

SEQ ID NO: 563392 - DNA, 25 bp, Homo sapien
aagttgtctactgggttgagtttgt

SEQ ID NO: 563393 - DNA, 25 bp, Homo sapien
ctgtagttttaaagccatgcagtca

SEQ ID NO: 563394 - DNA, 25 bp, Homo sapien
gttttaaagccatgcagtcaagttg

SEQ ID NO: 563395 - DNA, 25 bp, Homo sapien
tttcaggtcactcggccccttgtac

SEQ ID NO: 563396 - DNA, 25 bp, Homo sapien
gtcactcggccccttgtactgatat

SEQ ID NO: 563397 - DNA, 25 bp, Homo sapien
aaggacatttcaggtcactcggccc

SEQ ID NO: 563398 - DNA, 25 bp, Homo sapien
actcggccccttgtactgatatttc

SEQ ID NO: 563399 - DNA, 25 bp, Homo sapien
attatcagtggacaccagtggaaca

SEQ ID NO: 563400 - DNA, 25 bp, Homo sapien
tatattatcagtggacaccagtgga

SEQ ID NO: 563401 - DNA, 25 bp, Homo sapien
tattatcagtggacaccagtggaac

SEQ ID NO: 563402 - DNA, 25 bp, Homo sapien
atattatcagtggacaccagtggaa

SEQ ID NO: 563403 - DNA, 25 bp, Homo sapien
tcatgcaacccaatattctgagcct

SEQ ID NO: 563404 - DNA, 25 bp, Homo sapien
gttctcatgcaacccaatattctga

SEQ ID NO: 563405 - DNA, 25 bp, Homo sapien
tgtagttctcatgcaacccaatatt

SEQ ID NO: 563406 - DNA, 25 bp, Homo sapien
cttgtagttctcatgcaacccaata

SEQ ID NO: 563407 - DNA, 25 bp, Homo sapien
ttcaccaatcacctttacctccttc

SEQ ID NO: 563408 - DNA, 25 bp, Homo sapien
tccacggactgtaggaagaggtgct

SEQ ID NO: 563409 - DNA, 25 bp, Homo sapien
tctccacggactgtaggaagaggtg

SEQ ID NO: 563410 - DNA, 25 bp, Homo sapien
ttttcccatctccacggactgtagg

SEQ ID NO: 563411 - DNA, 25 bp, Homo sapien
cccatctccacggactgtaggaaga

SEQ ID NO: 563412 - DNA, 25 bp, Homo sapien
cttgaacagagattttctgctccat

SEQ ID NO: 563413 - DNA, 25 bp, Homo sapien
tctgccaatgcttcactagctgtcc

SEQ ID NO: 563414 - DNA, 25 bp, Homo sapien
cccatagatcaattacaagatgagt

SEQ ID NO: 563415 - DNA, 25 bp, Homo sapien
catttagtgggcttatctgccaatg

SEQ ID NO: 563416 - DNA, 25 bp, Homo sapien
acacactaattaaaacccatagatc

SEQ ID NO: 563417 - DNA, 25 bp, Homo sapien
gtagagcttgcagtgggactgcctt

SEQ ID NO: 563418 - DNA, 25 bp, Homo sapien
tagagcttgcagtgggactgccttc

SEQ ID NO: 563419 - DNA, 25 bp, Homo sapien
agagcttgcagtgggactgccttct

SEQ ID NO: 563420 - DNA, 25 bp, Homo sapien
tcatgtaagcgctaaatgatttttc

SEQ ID NO: 563421 - DNA, 25 bp, Homo sapien
tctgcaggtgctcctcaatactggc

SEQ ID NO: 563422 - DNA, 25 bp, Homo sapien
tggtgaagagacaggactgcagccc

SEQ ID NO: 563423 - DNA, 25 bp, Homo sapien
ctctgcaggtgctcctcaatactgg

SEQ ID NO: 563424 - DNA, 25 bp, Homo sapien
cagccctcataaaggctctgcaggt

SEQ ID NO: 563425 - DNA, 25 bp, Homo sapien
ccaatattcgctcattcatatcctg

SEQ ID NO: 563426 - DNA, 25 bp, Homo sapien
catatcctgcgcacagtttttcact

SEQ ID NO: 563427 - DNA, 25 bp, Homo sapien
tcatatcctgcgcacagtttttcac

SEQ ID NO: 563428 - DNA, 25 bp, Homo sapien
gtgatttgacctccaatattcgctc

SEQ ID NO: 563429 - DNA, 25 bp, Homo sapien
gcacttagcccaagaaactttttca

SEQ ID NO: 563430 - DNA, 25 bp, Homo sapien
ttcatatagtgatcatcgatgtcac

SEQ ID NO: 563431 - DNA, 25 bp, Homo sapien
ttacgggggcatatcccctggcatt

SEQ ID NO: 563432 - DNA, 25 bp, Homo sapien
tcaacaaagttgttggtgcctttgc

SEQ ID NO: 563433 - DNA, 25 bp, Homo sapien
cttctacagctatcactggttgaat

SEQ ID NO: 563434 - DNA, 25 bp, Homo sapien
cagctatcactggttgaatttgcag

SEQ ID NO: 563435 - DNA, 25 bp, Homo sapien
tatcactggttgaatttgcagttga

SEQ ID NO: 563436 - DNA, 25 bp, Homo sapien
tacagctatcactggttgaatttgc

SEQ ID NO: 563437 - DNA, 25 bp, Homo sapien
gtttaaccacaacctctatttcagc

SEQ ID NO: 563438 - DNA, 25 bp, Homo sapien
tcaggccctaatcagctctgtttca

SEQ ID NO: 563439 - DNA, 25 bp, Homo sapien
agttcattttcattgatatctttgc

SEQ ID NO: 563440 - DNA, 25 bp, Homo sapien
cattttcattgatatctttgcacat

SEQ ID NO: 563441 - DNA, 25 bp, Homo sapien
cttgagttcattttcattgatatct

SEQ ID NO: 563442 - DNA, 25 bp, Homo sapien
tcattttcattgatatctttgcaca

SEQ ID NO: 563443 - DNA, 25 bp, Homo sapien
aattgttacagtttctgaggtagag

SEQ ID NO: 563444 - DNA, 25 bp, Homo sapien
tgtaggtcagatgagcgtatggatt

SEQ ID NO: 563445 - DNA, 25 bp, Homo sapien
attttctgtaggtcagatgagcgta

SEQ ID NO: 563446 - DNA, 25 bp, Homo sapien
gagagacaattaggtagcatttggc

SEQ ID NO: 563447 - DNA, 25 bp, Homo sapien
cggctatcgccaggaatatggcagc

SEQ ID NO: 563448 - DNA, 25 bp, Homo sapien
cagcacctttgttccagagagagga

SEQ ID NO: 563449 - DNA, 25 bp, Homo sapien
attccaccacggctatcgccaggaa

SEQ ID NO: 563450 - DNA, 25 bp, Homo sapien
ctccatctgattccaccacggctat

SEQ ID NO: 563451 - DNA, 25 bp, Homo sapien
ctcataggatttactgtgttagaca

SEQ ID NO: 563452 - DNA, 25 bp, Homo sapien
aaatgctcataggatttactgtgtt

SEQ ID NO: 563453 - DNA, 25 bp, Homo sapien
gtgttagacatcaaataaattcgta

SEQ ID NO: 563454 - DNA, 25 bp, Homo sapien
ggatttactgtgttagacatcaaat

SEQ ID NO: 563455 - DNA, 25 bp, Homo sapien
taacggcagcctcgtcgatatcagc

SEQ ID NO: 563456 - DNA, 25 bp, Homo sapien
tcacggatgccatgttgaggtggct

SEQ ID NO: 563457 - DNA, 25 bp, Homo sapien
gatatcagcttcacggatgccatgt

SEQ ID NO: 563458 - DNA, 25 bp, Homo sapien
tctcagctaggatgtggagcacatg

SEQ ID NO: 563459 - DNA, 25 bp, Homo sapien
agcttttccttagcacacgtaagac

SEQ ID NO: 563460 - DNA, 25 bp, Homo sapien
ttcagagtcagctctctcagtctga

SEQ ID NO: 563461 - DNA, 25 bp, Homo sapien
tcagatgtccaacaccgatccaatc

SEQ ID NO: 563462 - DNA, 25 bp, Homo sapien
tcagctctctcagtctgacaggcac

SEQ ID NO: 563463 - DNA, 25 bp, Homo sapien
ctgttgtggcaagaatgatgaatca

SEQ ID NO: 563464 - DNA, 25 bp, Homo sapien
tgaatcaaatgtaatagacagacca

SEQ ID NO: 563465 - DNA, 25 bp, Homo sapien
ttaattcacttgagatggagacatt

SEQ ID NO: 563466 - DNA, 25 bp, Homo sapien
tgtcatttaattcacttgagatgga

SEQ ID NO: 563467 - DNA, 25 bp, Homo sapien
tggcattcattatggatgaatcaaa

SEQ ID NO: 563468 - DNA, 25 bp, Homo sapien
ttttcttccgcgcatatggaatttt

SEQ ID NO: 563469 - DNA, 25 bp, Homo sapien
cttccgcgcatatggaattttttgc

SEQ ID NO: 563470 - DNA, 25 bp, Homo sapien
cttcaaattttcttccgcgcatatg

SEQ ID NO: 563471 - DNA, 25 bp, Homo sapien
tcaaattttcttccgcgcatatgga

SEQ ID NO: 563472 - DNA, 25 bp, Homo sapien
gattcacagtcatatgtcctccact

SEQ ID NO: 563473 - DNA, 25 bp, Homo sapien
ttcacagtcatatgtcctccactgc

SEQ ID NO: 563474 - DNA, 25 bp, Homo sapien
tttttgattcacagtcatatgtcct

SEQ ID NO: 563475 - DNA, 25 bp, Homo sapien
gaatatggttgcaggaatattgcag

SEQ ID NO: 563476 - DNA, 25 bp, Homo sapien
catagttgtaacactgaagtctgat

SEQ ID NO: 563477 - DNA, 25 bp, Homo sapien
ctgtgcacctctgcctctatgctgc

SEQ ID NO: 563478 - DNA, 25 bp, Homo sapien
caatgtaaaggtagaaatccagact

SEQ ID NO: 563479 - DNA, 25 bp, Homo sapien
tctctcaagttaacagccacaatgt

SEQ ID NO: 563480 - DNA, 25 bp, Homo sapien
agcctgtttccaagctttttcccag

SEQ ID NO: 563481 - DNA, 25 bp, Homo sapien
caaaatgccctcttcatttatgcag

SEQ ID NO: 563482 - DNA, 25 bp, Homo sapien
ttcatttatgcagaaagcctttcct

SEQ ID NO: 563483 - DNA, 25 bp, Homo sapien
tggctttggagcctgtttccaagct

SEQ ID NO: 563484 - DNA, 25 bp, Homo sapien
aaattcgttgaattccaatcctcat

SEQ ID NO: 563485 - DNA, 25 bp, Homo sapien
taaattcgttgaattccaatcctca

SEQ ID NO: 563486 - DNA, 25 bp, Homo sapien
agcctttttcataaattcgttgaat

SEQ ID NO: 563487 - DNA, 25 bp, Homo sapien
taatatgaaattgtggtcggactga

SEQ ID NO: 563488 - DNA, 25 bp, Homo sapien
tggcaggatgcacaaaagaaggcgt

SEQ ID NO: 563489 - DNA, 25 bp, Homo sapien
aagaaggcgtcagaactaatgatcc

SEQ ID NO: 563490 - DNA, 25 bp, Homo sapien
ccttaatggttagctgtaatgcaat

SEQ ID NO: 563491 - DNA, 25 bp, Homo sapien
cacgtctgttaccttgattgcataa

SEQ ID NO: 563492 - DNA, 25 bp, Homo sapien
aaattatatccgttgtgcacacgtc

SEQ ID NO: 563493 - DNA, 25 bp, Homo sapien
aacgtctacctcatagtgttaagag

SEQ ID NO: 563494 - DNA, 25 bp, Homo sapien
tgaaatgggagcaacaacgtctacc

SEQ ID NO: 563495 - DNA, 25 bp, Homo sapien
aacggagcaggttatacagaagaac

SEQ ID NO: 563496 - DNA, 25 bp, Homo sapien
gatgatattgttcgaccttcctctg

SEQ ID NO: 563497 - DNA, 25 bp, Homo sapien
tcctgctgaggaaggtagtatgaaa

SEQ ID NO: 563498 - DNA, 25 bp, Homo sapien
gttaaaactcaacccaggattgtca

SEQ ID NO: 563499 - DNA, 25 bp, Homo sapien
tacttttctcagcacccttgatgtc

SEQ ID NO: 563500 - DNA, 25 bp, Homo sapien
ggcatgtctacttttctcagcaccc

SEQ ID NO: 563501 - DNA, 25 bp, Homo sapien
taaatggcatgtctacttttctcag

SEQ ID NO: 563502 - DNA, 25 bp, Homo sapien
tgtctacttttctcagcacccttga

SEQ ID NO: 563503 - DNA, 25 bp, Homo sapien
gctagcacatgcaccaaggtgactt

SEQ ID NO: 563504 - DNA, 25 bp, Homo sapien
tgatgtgttgcttgctgctagcaca

SEQ ID NO: 563505 - DNA, 25 bp, Homo sapien
gaggcttgatgattagaagaatgtt

SEQ ID NO: 563506 - DNA, 25 bp, Homo sapien
tttcagcatcctgaaagaggcttga

SEQ ID NO: 563507 - DNA, 25 bp, Homo sapien
tgttttctttgactcatcttcggtt

SEQ ID NO: 563508 - DNA, 25 bp, Homo sapien
tctgttttctttgactcatcttcgg

SEQ ID NO: 563509 - DNA, 25 bp, Homo sapien
gttttctttgactcatcttcggttc

SEQ ID NO: 563510 - DNA, 25 bp, Homo sapien
tgtctgttttctttgactcatcttc

SEQ ID NO: 563511 - DNA, 25 bp, Homo sapien
ggagaggattcgtggattctcctca

SEQ ID NO: 563512 - DNA, 25 bp, Homo sapien
gattcgtggattctcctcaggcttt

SEQ ID NO: 563513 - DNA, 25 bp, Homo sapien
tcctggggcctacatgacttatgct

SEQ ID NO: 563514 - DNA, 25 bp, Homo sapien
ggttcctggggcctacatgacttat

SEQ ID NO: 563515 - DNA, 25 bp, Homo sapien
tgaagctgtttcctacccttcgggc

SEQ ID NO: 563516 - DNA, 25 bp, Homo sapien
caaccgtggaagctgacatttttcc

SEQ ID NO: 563517 - DNA, 25 bp, Homo sapien
tccactgcctgctgtgaagctgttt

SEQ ID NO: 563518 - DNA, 25 bp, Homo sapien
gtgcatttagcaaaggttcttgaag

SEQ ID NO: 563519 - DNA, 25 bp, Homo sapien
cttcaatgcatgcagtgagtgggtc

SEQ ID NO: 563520 - DNA, 25 bp, Homo sapien
gggtctgaattagaagaggtctgtc

SEQ ID NO: 563521 - DNA, 25 bp, Homo sapien
aactttttcccattgagtgcatcgt

SEQ ID NO: 563522 - DNA, 25 bp, Homo sapien
gcatcgtgtgctcttaaactccaca

SEQ ID NO: 563523 - DNA, 25 bp, Homo sapien
tacacataggtatcccagaagtccc

SEQ ID NO: 563524 - DNA, 25 bp, Homo sapien
gaagggatcatgtcggttcagacca

SEQ ID NO: 563525 - DNA, 25 bp, Homo sapien
tcatgggtccagcataggagagact

SEQ ID NO: 563526 - DNA, 25 bp, Homo sapien
tcctctgatccagcaaagcatgggt

SEQ ID NO: 563527 - DNA, 25 bp, Homo sapien
ccctgtccatcagtcttggaaggac

SEQ ID NO: 563528 - DNA, 25 bp, Homo sapien
ccatcagtcttggaaggactgcttg

SEQ ID NO: 563529 - DNA, 25 bp, Homo sapien
ggactgcttggccacttggttgtct

SEQ ID NO: 563530 - DNA, 25 bp, Homo sapien
gagcaccctgtccatcagtcttgga

SEQ ID NO: 563531 - DNA, 25 bp, Homo sapien
cttttccagttcttgaccgcgtgtc

SEQ ID NO: 563532 - DNA, 25 bp, Homo sapien
gtgacacgataattgtggaaaatcc

SEQ ID NO: 563533 - DNA, 25 bp, Homo sapien
cttgaccgcgtgtcatagtgaaatg

SEQ ID NO: 563534 - DNA, 25 bp, Homo sapien
tcatagtgaaatgtgacacgataat

SEQ ID NO: 563535 - DNA, 25 bp, Homo sapien
agagcagtgaggaggtgggaagggg

SEQ ID NO: 563536 - DNA, 25 bp, Homo sapien
gtgaggaggtgggaaggggcagtag

SEQ ID NO: 563537 - DNA, 25 bp, Homo sapien
agcagtgaggaggtgggaaggggca

SEQ ID NO: 563538 - DNA, 25 bp, Homo sapien
gaggaggtgggaaggggcagtagga

SEQ ID NO: 563539 - DNA, 25 bp, Homo sapien
tctccatggtcttccgcaatgccat

SEQ ID NO: 563540 - DNA, 25 bp, Homo sapien
ttctccatggtcttccgcaatgcca

SEQ ID NO: 563541 - DNA, 25 bp, Homo sapien
tttctccatggtcttccgcaatgcc

SEQ ID NO: 563542 - DNA, 25 bp, Homo sapien
atttctccatggtcttccgcaatgc

SEQ ID NO: 563543 - DNA, 25 bp, Homo sapien
aaagcaaagtcccatccagtgtctg

SEQ ID NO: 563544 - DNA, 25 bp, Homo sapien
atgagacgaatcatcagcttcctca

SEQ ID NO: 563545 - DNA, 25 bp, Homo sapien
agtgtctgtatccagatcagccttg

SEQ ID NO: 563546 - DNA, 25 bp, Homo sapien
gccttgaggaggatgagacgaatca

SEQ ID NO: 563547 - DNA, 25 bp, Homo sapien
agtttttactttcagccttattcat

SEQ ID NO: 563548 - DNA, 25 bp, Homo sapien
gatgagggccaacacatattaattt

SEQ ID NO: 563549 - DNA, 25 bp, Homo sapien
catttgctgcatatttatccaccag

SEQ ID NO: 563550 - DNA, 25 bp, Homo sapien
catttgtctccgatgttgatgaggg

SEQ ID NO: 563551 - DNA, 25 bp, Homo sapien
accagattgcagactatttccagac

SEQ ID NO: 563552 - DNA, 25 bp, Homo sapien
ggtggaggcgccacaaatccgatga

SEQ ID NO: 563553 - DNA, 25 bp, Homo sapien
agccagagtgggctctagagcacag

SEQ ID NO: 563554 - DNA, 25 bp, Homo sapien
gacttggacatgattataaaccaaa

SEQ ID NO: 563555 - DNA, 25 bp, Homo sapien
tgtcaacactatgaattacatgtag

SEQ ID NO: 563556 - DNA, 25 bp, Homo sapien
caccatctgcaatccacgggcatag

SEQ ID NO: 563557 - DNA, 25 bp, Homo sapien
aggtcctcaggaaacgcccatggga

SEQ ID NO: 563558 - DNA, 25 bp, Homo sapien
tgttcacccgcctcttgggaagacc

SEQ ID NO: 563559 - DNA, 25 bp, Homo sapien
gaaccattgtgacaggattcagcaa

SEQ ID NO: 563560 - DNA, 25 bp, Homo sapien
ttttcctgaatttgtgcctgatcat

SEQ ID NO: 563561 - DNA, 25 bp, Homo sapien
tcatttttcctgaatttgtgcctga

SEQ ID NO: 563562 - DNA, 25 bp, Homo sapien
catttttcctgaatttgtgcctgat

SEQ ID NO: 563563 - DNA, 25 bp, Homo sapien
tttttcctgaatttgtgcctgatca

SEQ ID NO: 563564 - DNA, 25 bp, Homo sapien
gtagcagtgggatctttgacagtca

SEQ ID NO: 563565 - DNA, 25 bp, Homo sapien
tagtagcagtgggatctttgacagt

SEQ ID NO: 563566 - DNA, 25 bp, Homo sapien
agtggacactggcagcagtagtagc

SEQ ID NO: 563567 - DNA, 25 bp, Homo sapien
atgaatgactttggcgtttttctgt

SEQ ID NO: 563568 - DNA, 25 bp, Homo sapien
cttggccctgaatttcttgagctga

SEQ ID NO: 563569 - DNA, 25 bp, Homo sapien
ttgtgattgcactgtaagacctgtt

SEQ ID NO: 563570 - DNA, 25 bp, Homo sapien
tacttgtgcatgcaagaaaatctct

SEQ ID NO: 563571 - DNA, 25 bp, Homo sapien
ggcaagcctgttgattattaccaga

SEQ ID NO: 563572 - DNA, 25 bp, Homo sapien
aaatttgttcagtgcttgatcttcc

SEQ ID NO: 563573 - DNA, 25 bp, Homo sapien
actaaatttgttcagtgcttgatct

SEQ ID NO: 563574 - DNA, 25 bp, Homo sapien
taaatttgttcagtgcttgatcttc

SEQ ID NO: 563575 - DNA, 25 bp, Homo sapien
ctaaatttgttcagtgcttgatctt

SEQ ID NO: 563576 - DNA, 25 bp, Homo sapien
tattcatcaacatattcaacccacg

SEQ ID NO: 563577 - DNA, 25 bp, Homo sapien
cgtgcttacttgaaacgtttccaag

SEQ ID NO: 563578 - DNA, 25 bp, Homo sapien
aaacgtttccaagtatgcatcctca

SEQ ID NO: 563579 - DNA, 25 bp, Homo sapien
tcaacccacgtgcttacttgaaacg

SEQ ID NO: 563580 - DNA, 25 bp, Homo sapien
tccagcaatgcaggcccattccgcc

SEQ ID NO: 563581 - DNA, 25 bp, Homo sapien
tgcaggcccattccgccttcccttg

SEQ ID NO: 563582 - DNA, 25 bp, Homo sapien
ttccagcaatgcaggcccattccgc

SEQ ID NO: 563583 - DNA, 25 bp, Homo sapien
gcaatgcaggcccattccgccttcc

SEQ ID NO: 563584 - DNA, 25 bp, Homo sapien
tttgatacaattttgtcgagtgttt

SEQ ID NO: 563585 - DNA, 25 bp, Homo sapien
caattttgtcgagtgttttgtaata

SEQ ID NO: 563586 - DNA, 25 bp, Homo sapien
gatgtttccaggatgcatggataat

SEQ ID NO: 563587 - DNA, 25 bp, Homo sapien
aggatgtttccaggatgcatggata

SEQ ID NO: 563588 - DNA, 25 bp, Homo sapien
gcccatataagttgcagctggcaga

SEQ ID NO: 563589 - DNA, 25 bp, Homo sapien
gaagcccatataagttgcagctggc

SEQ ID NO: 563590 - DNA, 25 bp, Homo sapien
tataagttgcagctggcagaaatag

SEQ ID NO: 563591 - DNA, 25 bp, Homo sapien
gagaagcccatataagttgcagctg

SEQ ID NO: 563592 - DNA, 25 bp, Homo sapien
acatgtaagttagcccttttatgct

SEQ ID NO: 563593 - DNA, 25 bp, Homo sapien
aacatgtaagttagcccttttatgc

SEQ ID NO: 563594 - DNA, 25 bp, Homo sapien
tcttcctgtgtatctgttcccctac

SEQ ID NO: 563595 - DNA, 25 bp, Homo sapien
taccacatcctttactcacactggt

SEQ ID NO: 563596 - DNA, 25 bp, Homo sapien
tctgttcccctaccacatcctttac

SEQ ID NO: 563597 - DNA, 25 bp, Homo sapien
tcacactggtaatctgatttttcat

SEQ ID NO: 563598 - DNA, 25 bp, Homo sapien
aaaggcaacctcttcattgtactct

SEQ ID NO: 563599 - DNA, 25 bp, Homo sapien
aaggcagaggagagtttcattaata

SEQ ID NO: 563600 - DNA, 25 bp, Homo sapien
tctggattctggatcatttatggtg

SEQ ID NO: 563601 - DNA, 25 bp, Homo sapien
aaggcaacctcttcattgtactctt

SEQ ID NO: 563602 - DNA, 25 bp, Homo sapien
tagattaccgaaatgctctgtgtca

SEQ ID NO: 563603 - DNA, 25 bp, Homo sapien
ctcctgtagagccagagtaattatc

SEQ ID NO: 563604 - DNA, 25 bp, Homo sapien
tcccctgtttctatgtcaccaatta

SEQ ID NO: 563605 - DNA, 25 bp, Homo sapien
accaattactttcagtgtgtcctcc

SEQ ID NO: 563606 - DNA, 25 bp, Homo sapien
gcatccagcagcgatctgcacttct

SEQ ID NO: 563607 - DNA, 25 bp, Homo sapien
ctctgggtgtccatccaagttcctt

SEQ ID NO: 563608 - DNA, 25 bp, Homo sapien
cctgtccttgtgcatccagcagcga

SEQ ID NO: 563609 - DNA, 25 bp, Homo sapien
ctgggtgtccatccaagttccttga

SEQ ID NO: 563610 - DNA, 25 bp, Homo sapien
ttccctgtttaattggtgtcagcat

SEQ ID NO: 563611 - DNA, 25 bp, Homo sapien
aattccctgtttaattggtgtcagc

SEQ ID NO: 563612 - DNA, 25 bp, Homo sapien
attccctgtttaattggtgtcagca

SEQ ID NO: 563613 - DNA, 25 bp, Homo sapien
aaattccctgtttaattggtgtcag

SEQ ID NO: 563614 - DNA, 25 bp, Homo sapien
tttttgtgccaaatgccttcatcag

SEQ ID NO: 563615 - DNA, 25 bp, Homo sapien
ttttgtgccaaatgccttcatcagc

SEQ ID NO: 563616 - DNA, 25 bp, Homo sapien
ctgaatttttgtgccaaatgccttc

SEQ ID NO: 563617 - DNA, 25 bp, Homo sapien
gaatttttgtgccaaatgccttcat

SEQ ID NO: 563618 - DNA, 25 bp, Homo sapien
tgccatcttgtcatggagctgctca

SEQ ID NO: 563619 - DNA, 25 bp, Homo sapien
gccatcttgtcatggagctgctcag

SEQ ID NO: 563620 - DNA, 25 bp, Homo sapien
ccatcttgtcatggagctgctcaga

SEQ ID NO: 563621 - DNA, 25 bp, Homo sapien
catcttgtcatggagctgctcagag

SEQ ID NO: 563622 - DNA, 25 bp, Homo sapien
catattggtgaatcataatagagca

SEQ ID NO: 563623 - DNA, 25 bp, Homo sapien
ctttgtttgcatcgtagacatattg

SEQ ID NO: 563624 - DNA, 25 bp, Homo sapien
gcatcgtagacatattggtgaatca

SEQ ID NO: 563625 - DNA, 25 bp, Homo sapien
taatagagcatattgatgaaagcat

SEQ ID NO: 563626 - DNA, 25 bp, Homo sapien
caggtattaaatagatgactgcaat

SEQ ID NO: 563627 - DNA, 25 bp, Homo sapien
tagatgactgcaatctgagaaactg

SEQ ID NO: 563628 - DNA, 25 bp, Homo sapien
taaatagatgactgcaatctgagaa

SEQ ID NO: 563629 - DNA, 25 bp, Homo sapien
tcaaatgaagaccaagtggccctga

SEQ ID NO: 563630 - DNA, 25 bp, Homo sapien
taaatgagatcagtgtaagtgaatc

SEQ ID NO: 563631 - DNA, 25 bp, Homo sapien
caatggccttaaatgagatcagtgt

SEQ ID NO: 563632 - DNA, 25 bp, Homo sapien
tgagatcagtgtaagtgaatcataa

SEQ ID NO: 563633 - DNA, 25 bp, Homo sapien
tggccttaaatgagatcagtgtaag

SEQ ID NO: 563634 - DNA, 25 bp, Homo sapien
tcagaattgtgctgaataactgtgt

SEQ ID NO: 563635 - DNA, 25 bp, Homo sapien
tttttccagaggatgatcagaaaga

SEQ ID NO: 563636 - DNA, 25 bp, Homo sapien
tgtttttcagaggatcaatttcttt

SEQ ID NO: 563637 - DNA, 25 bp, Homo sapien
agtataccctttctgacattttcta

SEQ ID NO: 563638 - DNA, 25 bp, Homo sapien
tgatcagaaagatgagtataccctt

SEQ ID NO: 563639 - DNA, 25 bp, Homo sapien
acattcttctaacactggttcggca

SEQ ID NO: 563640 - DNA, 25 bp, Homo sapien
ctaacactggttcggcaagtgacac

SEQ ID NO: 563641 - DNA, 25 bp, Homo sapien
tcttctaacactggttcggcaagtg

SEQ ID NO: 563642 - DNA, 25 bp, Homo sapien
ctggttcggcaagtgacaccaagcc

SEQ ID NO: 563643 - DNA, 25 bp, Homo sapien
aaaaaacattttatgggatttgcat

SEQ ID NO: 563644 - DNA, 25 bp, Homo sapien
catgaatttggttattgtcagaagc

SEQ ID NO: 563645 - DNA, 25 bp, Homo sapien
ttttcaggaatggtagtaatgctta

SEQ ID NO: 563646 - DNA, 25 bp, Homo sapien
atttttcaggaatggtagtaatgct

SEQ ID NO: 563647 - DNA, 25 bp, Homo sapien
gcctggccattccactgcttatgac

SEQ ID NO: 563648 - DNA, 25 bp, Homo sapien
tgagaccccaccgaggctggcagca

SEQ ID NO: 563649 - DNA, 25 bp, Homo sapien
tgcactccacacaacactgattgaa

SEQ ID NO: 563650 - DNA, 25 bp, Homo sapien
gattgaatgctgcactccatgcaac

SEQ ID NO: 563651 - DNA, 25 bp, Homo sapien
tcttcgcaaggtgtcgtgcagtgct

SEQ ID NO: 563652 - DNA, 25 bp, Homo sapien
cgcaaggtgtcgtgcagtgctacca

SEQ ID NO: 563653 - DNA, 25 bp, Homo sapien
tgtcgtgcagtgctaccaccactga

SEQ ID NO: 563654 - DNA, 25 bp, Homo sapien
tcaacttctcttcgcaaggtgtcgt

SEQ ID NO: 563655 - DNA, 25 bp, Homo sapien
gtgacctgctaccttttgccactgc

SEQ ID NO: 563656 - DNA, 25 bp, Homo sapien
agatccgctattgtgagtgacctgc

SEQ ID NO: 563657 - DNA, 25 bp, Homo sapien
gagtggcacaagatccgctattgtg

SEQ ID NO: 563658 - DNA, 25 bp, Homo sapien
tgtgagtgacctgctaccttttgcc

SEQ ID NO: 563659 - DNA, 25 bp, Homo sapien
cattacttaaagctaatgcaatggc

SEQ ID NO: 563660 - DNA, 25 bp, Homo sapien
taatgcaatggcatttggaactatg

SEQ ID NO: 563661 - DNA, 25 bp, Homo sapien
tggcatttggaactatgttcttcat

SEQ ID NO: 563662 - DNA, 25 bp, Homo sapien
taaagctaatgcaatggcatttgga

SEQ ID NO: 563663 - DNA, 25 bp, Homo sapien
caactttacgttgctgcgaataatc

SEQ ID NO: 563664 - DNA, 25 bp, Homo sapien
aactttacgttgctgcgaataatca

SEQ ID NO: 563665 - DNA, 25 bp, Homo sapien
actttacgttgctgcgaataatcat

SEQ ID NO: 563666 - DNA, 25 bp, Homo sapien
gatacgtgtggctatgctattcaca

SEQ ID NO: 563667 - DNA, 25 bp, Homo sapien
gagctttcaaaggaactctgttaca

SEQ ID NO: 563668 - DNA, 25 bp, Homo sapien
tacatttggctattacacactgctg

SEQ ID NO: 563669 - DNA, 25 bp, Homo sapien
ttttctaactgcctctcttggatga

SEQ ID NO: 563670 - DNA, 25 bp, Homo sapien
ttcttgactgtaaccgaaatcagga

SEQ ID NO: 563671 - DNA, 25 bp, Homo sapien
gaatgctttctttgcgatcgccaga

SEQ ID NO: 563672 - DNA, 25 bp, Homo sapien
gccagaggtggttatcaagaaggat

SEQ ID NO: 563673 - DNA, 25 bp, Homo sapien
gagactggtggaagacacgtcatcc

SEQ ID NO: 563674 - DNA, 25 bp, Homo sapien
ccctgttaggacttaggtttgcgct

SEQ ID NO: 563675 - DNA, 25 bp, Homo sapien
ggacttaggtttgcgctttctctgc

SEQ ID NO: 563676 - DNA, 25 bp, Homo sapien
tgttaggacttaggtttgcgctttc

SEQ ID NO: 563677 - DNA, 25 bp, Homo sapien
ttaggacttaggtttgcgctttctc

SEQ ID NO: 563678 - DNA, 25 bp, Homo sapien
tattccttcaaaagtcgacctttgc

SEQ ID NO: 563679 - DNA, 25 bp, Homo sapien
ttacaatggattgcttccaagattc

SEQ ID NO: 563680 - DNA, 25 bp, Homo sapien
gatggaccaaagcacagcacaatta

SEQ ID NO: 563681 - DNA, 25 bp, Homo sapien
agtcgacctttgcatacagattaca

SEQ ID NO: 563682 - DNA, 25 bp, Homo sapien
agggccacacagttctactttttgc

SEQ ID NO: 563683 - DNA, 25 bp, Homo sapien
gatatactcttgtcagtgtagcaaa

SEQ ID NO: 563684 - DNA, 25 bp, Homo sapien
tgtagtttgcattgtagccttacag

SEQ ID NO: 563685 - DNA, 25 bp, Homo sapien
tcctaaatgcttggctgagtgtatt

SEQ ID NO: 563686 - DNA, 25 bp, Homo sapien
ttctcataaacaacactatataaag

SEQ ID NO: 563687 - DNA, 25 bp, Homo sapien
tcataaacaacactatataaagaac

SEQ ID NO: 563688 - DNA, 25 bp, Homo sapien
tctcataaacaacactatataaaga

SEQ ID NO: 563689 - DNA, 25 bp, Homo sapien
ttttcattctcataaacaacactat

SEQ ID NO: 563690 - DNA, 25 bp, Homo sapien
ctacaaaataagggcgagcttccct

SEQ ID NO: 563691 - DNA, 25 bp, Homo sapien
aaataagggcgagcttccctttgtg

SEQ ID NO: 563692 - DNA, 25 bp, Homo sapien
caaaataagggcgagcttccctttg

SEQ ID NO: 563693 - DNA, 25 bp, Homo sapien
ttacccacagtgagagacggtggag

SEQ ID NO: 563694 - DNA, 25 bp, Homo sapien
cattttcagacagatttaaaatcac

SEQ ID NO: 563695 - DNA, 25 bp, Homo sapien
acagccattacccacagtgagagac

SEQ ID NO: 563696 - DNA, 25 bp, Homo sapien
gccattacccacagtgagagacggt

SEQ ID NO: 563697 - DNA, 25 bp, Homo sapien
caggtgtcaatgtccttcataagga

SEQ ID NO: 563698 - DNA, 25 bp, Homo sapien
cttcataaggattctggccctgaga

SEQ ID NO: 563699 - DNA, 25 bp, Homo sapien
gccacacggcaggtgtcaatgtcct

SEQ ID NO: 563700 - DNA, 25 bp, Homo sapien
tgtcacagccacacggcaggtgtca

SEQ ID NO: 563701 - DNA, 25 bp, Homo sapien
tattgcagcatatccgaaaggaggc

SEQ ID NO: 563702 - DNA, 25 bp, Homo sapien
taataagagcgttcccatcctagag

SEQ ID NO: 563703 - DNA, 25 bp, Homo sapien
ccacggctgctgtaatgcggcacag

SEQ ID NO: 563704 - DNA, 25 bp, Homo sapien
tggagggttgtcatgcacgtcaccg

SEQ ID NO: 563705 - DNA, 25 bp, Homo sapien
gttgtgtcggccagtgtcactcagc

SEQ ID NO: 563706 - DNA, 25 bp, Homo sapien
ctttctcctgtcaacctctgctgga

SEQ ID NO: 563707 - DNA, 25 bp, Homo sapien
ccccggaggagcaactttgtattca

SEQ ID NO: 563708 - DNA, 25 bp, Homo sapien
caacctctgctggaataaaccagtc

SEQ ID NO: 563709 - DNA, 25 bp, Homo sapien
agctctgctaactaattggtctata

SEQ ID NO: 563710 - DNA, 25 bp, Homo sapien
gggctgcatttagtctaattatagc

SEQ ID NO: 563711 - DNA, 25 bp, Homo sapien
tggtctatatgttgggcctgacttt

SEQ ID NO: 563712 - DNA, 25 bp, Homo sapien
gttgggcctgactttcagcacaatg

SEQ ID NO: 563713 - DNA, 25 bp, Homo sapien
gagataaggaggcaataagggttcc

SEQ ID NO: 563714 - DNA, 25 bp, Homo sapien
tgtcattttctgttgtcaaggtgtc

SEQ ID NO: 563715 - DNA, 25 bp, Homo sapien
ctttggttgttgcataaaggattcc

SEQ ID NO: 563716 - DNA, 25 bp, Homo sapien
tatgatgtactttgaattgatagct

SEQ ID NO: 563717 - DNA, 25 bp, Homo sapien
tgaaatcagagtcacatcaaagtgt

SEQ ID NO: 563718 - DNA, 25 bp, Homo sapien
ttgaaatcagagtcacatcaaagtg

SEQ ID NO: 563719 - DNA, 25 bp, Homo sapien
cttgaaatcagagtcacatcaaagt

SEQ ID NO: 563720 - DNA, 25 bp, Homo sapien
acttgaaatcagagtcacatcaaag

SEQ ID NO: 563721 - DNA, 25 bp, Homo sapien
agcagttgctctttaacctgaaaag

SEQ ID NO: 563722 - DNA, 25 bp, Homo sapien
gcagttgctctttaacctgaaaagg

SEQ ID NO: 563723 - DNA, 25 bp, Homo sapien
cagcagttgctctttaacctgaaaa

SEQ ID NO: 563724 - DNA, 25 bp, Homo sapien
tcagcagttgctctttaacctgaaa

SEQ ID NO: 563725 - DNA, 25 bp, Homo sapien
ggagaattcggataatagagacagt

SEQ ID NO: 563726 - DNA, 25 bp, Homo sapien
aaggagaattcggataatagagaca

SEQ ID NO: 563727 - DNA, 25 bp, Homo sapien
atgacaacaaggagaattcggataa

SEQ ID NO: 563728 - DNA, 25 bp, Homo sapien
caacaaggagaattcggataataga

SEQ ID NO: 563729 - DNA, 25 bp, Homo sapien
tgctgtggaatatacgaactatttc

SEQ ID NO: 563730 - DNA, 25 bp, Homo sapien
gtcaatccgtctgcttcctagtaag

SEQ ID NO: 563731 - DNA, 25 bp, Homo sapien
cacctctggtgcaaaagaagattca

SEQ ID NO: 563732 - DNA, 25 bp, Homo sapien
ttcagaattccggtcattgctgtgg

SEQ ID NO: 563733 - DNA, 25 bp, Homo sapien
taatagcgtctcagtacatcagccc

SEQ ID NO: 563734 - DNA, 25 bp, Homo sapien
cagccctatcattcacgtgcgtgtg

SEQ ID NO: 563735 - DNA, 25 bp, Homo sapien
tctatgaacgatcccactctgaggg

SEQ ID NO: 563736 - DNA, 25 bp, Homo sapien
ctcatctattaaagaggctcccagg

SEQ ID NO: 563737 - DNA, 25 bp, Homo sapien
tatgcttttcctgggagagttacac

SEQ ID NO: 563738 - DNA, 25 bp, Homo sapien
atgagaggagcgctctagaggccca

SEQ ID NO: 563739 - DNA, 25 bp, Homo sapien
aggcccacactatgcttttcctggg

SEQ ID NO: 563740 - DNA, 25 bp, Homo sapien
gagcgctctagaggcccacactatg

SEQ ID NO: 563741 - DNA, 25 bp, Homo sapien
tgaagtcctggtatttcgctttgcc

SEQ ID NO: 563742 - DNA, 25 bp, Homo sapien
acagctcctatctgaagtcctggta

SEQ ID NO: 563743 - DNA, 25 bp, Homo sapien
tgtcacagctcctatctgaagtcct

SEQ ID NO: 563744 - DNA, 25 bp, Homo sapien
cctggtatttcgctttgcctcatct

SEQ ID NO: 563745 - DNA, 25 bp, Homo sapien
ctactgagaaaacaaccacgggcat

SEQ ID NO: 563746 - DNA, 25 bp, Homo sapien
cacacgcacacactattgtctgaat

SEQ ID NO: 563747 - DNA, 25 bp, Homo sapien
tcagttttcaggaattctactgaga

SEQ ID NO: 563748 - DNA, 25 bp, Homo sapien
ttttcaggaattctactgagaaaac

SEQ ID NO: 563749 - DNA, 25 bp, Homo sapien
aagtcagggttctgcaatgtaccac

SEQ ID NO: 563750 - DNA, 25 bp, Homo sapien
ggaaaagttctagtgcaggccaaaa

SEQ ID NO: 563751 - DNA, 25 bp, Homo sapien
tgtgagatctattacaaggaaccct

SEQ ID NO: 563752 - DNA, 25 bp, Homo sapien
taatttcctaaatggcctcctggcc

SEQ ID NO: 563753 - DNA, 25 bp, Homo sapien
gacggaagccagcactaaaagttca

SEQ ID NO: 563754 - DNA, 25 bp, Homo sapien
gatgctgagacggaagccagcacta

SEQ ID NO: 563755 - DNA, 25 bp, Homo sapien
gaagcagatgctgagacggaagcca

SEQ ID NO: 563756 - DNA, 25 bp, Homo sapien
ctaaaagttcactgtggtgtaacac

SEQ ID NO: 563757 - DNA, 25 bp, Homo sapien
attttatccacttccctgtagaatt

SEQ ID NO: 563758 - DNA, 25 bp, Homo sapien
tatccacttccctgtagaatttggg

SEQ ID NO: 563759 - DNA, 25 bp, Homo sapien
ggtattttatccacttccctgtaga

SEQ ID NO: 563760 - DNA, 25 bp, Homo sapien
ttatccacttccctgtagaatttgg

SEQ ID NO: 563761 - DNA, 25 bp, Homo sapien
ttagcaaggtctttcatgctgttct

SEQ ID NO: 563762 - DNA, 25 bp, Homo sapien
atttagcaaggtctttcatgctgtt

SEQ ID NO: 563763 - DNA, 25 bp, Homo sapien
caaggtctttcatgctgttctccat

SEQ ID NO: 563764 - DNA, 25 bp, Homo sapien
ctcaacatcaaatttagcaaggtct

SEQ ID NO: 563765 - DNA, 25 bp, Homo sapien
gctgtgactcatcccgatgattggg

SEQ ID NO: 563766 - DNA, 25 bp, Homo sapien
tctacagacttgcagagcccaggat

SEQ ID NO: 563767 - DNA, 25 bp, Homo sapien
tgggatcaattacgcctgcaacagt

SEQ ID NO: 563768 - DNA, 25 bp, Homo sapien
agcccaggatgaactaatagcaacc

SEQ ID NO: 563769 - DNA, 25 bp, Homo sapien
gacctaggttctggaggaatttcaa

SEQ ID NO: 563770 - DNA, 25 bp, Homo sapien
tttcaaggctccatttcacgggcaa

SEQ ID NO: 563771 - DNA, 25 bp, Homo sapien
ctggtctgaaggtgacctaggttct

SEQ ID NO: 563772 - DNA, 25 bp, Homo sapien
tgagtaagcatcgagcagactgctg

SEQ ID NO: 563773 - DNA, 25 bp, Homo sapien
ctgggtttatcctctccactttgtc

SEQ ID NO: 563774 - DNA, 25 bp, Homo sapien
ctccactttgtcctgttgtgacaaa

SEQ ID NO: 563775 - DNA, 25 bp, Homo sapien
gctcctaaaccggtggcatttgctg

SEQ ID NO: 563776 - DNA, 25 bp, Homo sapien
gagtttgggaataacactcaccttc

SEQ ID NO: 563777 - DNA, 25 bp, Homo sapien
tcattctgtcgtgttgttttctctg

SEQ ID NO: 563778 - DNA, 25 bp, Homo sapien
gttttctctgaaggcgactcctcca

SEQ ID NO: 563779 - DNA, 25 bp, Homo sapien
attctgtcgtgttgttttctctgaa

SEQ ID NO: 563780 - DNA, 25 bp, Homo sapien
cttcattctgtcgtgttgttttctc

SEQ ID NO: 563781 - DNA, 25 bp, Homo sapien
aacctgggtggtcattttcaatgtg

SEQ ID NO: 563782 - DNA, 25 bp, Homo sapien
tatgccaaactttgctaacctgggt

SEQ ID NO: 563783 - DNA, 25 bp, Homo sapien
gacattggccttggatagagacttc

SEQ ID NO: 563784 - DNA, 25 bp, Homo sapien
tctaggatgtgagcattatgccaaa

SEQ ID NO: 563785 - DNA, 25 bp, Homo sapien
tcaattaaattcatcagtggggtga

SEQ ID NO: 563786 - DNA, 25 bp, Homo sapien
cactgctagcctgcttgggatgctg

SEQ ID NO: 563787 - DNA, 25 bp, Homo sapien
ggaggtctgcggctgcgtgcacaca

SEQ ID NO: 563788 - DNA, 25 bp, Homo sapien
tgcgtgcacacagtgccttccactg

SEQ ID NO: 563789 - DNA, 25 bp, Homo sapien
tcagttgtatccttcctgtctacag

SEQ ID NO: 563790 - DNA, 25 bp, Homo sapien
agttgtatccttcctgtctacaggc

SEQ ID NO: 563791 - DNA, 25 bp, Homo sapien
tacatcagttgtatccttcctgtct

SEQ ID NO: 563792 - DNA, 25 bp, Homo sapien
tttgttacatcagttgtatccttcc

SEQ ID NO: 563793 - DNA, 25 bp, Homo sapien
cacatcaagaaacatgcaaatactc

SEQ ID NO: 563794 - DNA, 25 bp, Homo sapien
catcaagaaacatgcaaatactcat

SEQ ID NO: 563795 - DNA, 25 bp, Homo sapien
catcacatcaagaaacatgcaaata

SEQ ID NO: 563796 - DNA, 25 bp, Homo sapien
tcacatcaagaaacatgcaaatact

SEQ ID NO: 563797 - DNA, 25 bp, Homo sapien
gatttatagcagtgacccgcttaaa

SEQ ID NO: 563798 - DNA, 25 bp, Homo sapien
agcagtgacccgcttaaaaatttct

SEQ ID NO: 563799 - DNA, 25 bp, Homo sapien
gacctcttgatttatagcagtgacc

SEQ ID NO: 563800 - DNA, 25 bp, Homo sapien
ctagcaatgacctcttgatttatag

SEQ ID NO: 563801 - DNA, 25 bp, Homo sapien
acaattgcacagataaaaacattaa

SEQ ID NO: 563802 - DNA, 25 bp, Homo sapien
aattgcacagataaaaacattaaga

SEQ ID NO: 563803 - DNA, 25 bp, Homo sapien
caattgcacagataaaaacattaag

SEQ ID NO: 563804 - DNA, 25 bp, Homo sapien
acgctccttccctgcccgctgaact

SEQ ID NO: 563805 - DNA, 25 bp, Homo sapien
cgctgaactcaaccgcatggacaca

SEQ ID NO: 563806 - DNA, 25 bp, Homo sapien
tgcccgctgaactcaaccgcatgga

SEQ ID NO: 563807 - DNA, 25 bp, Homo sapien
cttccctgcccgctgaactcaaccg

SEQ ID NO: 563808 - DNA, 25 bp, Homo sapien
ctccatggccgtcctcacgctgctg

SEQ ID NO: 563809 - DNA, 25 bp, Homo sapien
tccatggccgtcctcacgctgctgc

SEQ ID NO: 563810 - DNA, 25 bp, Homo sapien
gctccatggccgtcctcacgctgct

SEQ ID NO: 563811 - DNA, 25 bp, Homo sapien
ctgctccatggccgtcctcacgctg

SEQ ID NO: 563812 - DNA, 25 bp, Homo sapien
cctgtttcaacagcagtaggcacat

SEQ ID NO: 563813 - DNA, 25 bp, Homo sapien
gtcctgcaagtccttatccccttgt

SEQ ID NO: 563814 - DNA, 25 bp, Homo sapien
atccccttgttccactatagctttg

SEQ ID NO: 563815 - DNA, 25 bp, Homo sapien
gtcaagatcattccagtcctgcaag

SEQ ID NO: 563816 - DNA, 25 bp, Homo sapien
tgcagcgactggctgaaaaccagac

SEQ ID NO: 563817 - DNA, 25 bp, Homo sapien
ggctactctgaagcctcctggatct

SEQ ID NO: 563818 - DNA, 25 bp, Homo sapien
ccagacctaaggctctggctggctg

SEQ ID NO: 563819 - DNA, 25 bp, Homo sapien
cattcatgcagcgactggctgaaaa

SEQ ID NO: 563820 - DNA, 25 bp, Homo sapien
ttccactggagatatcctaagagag

SEQ ID NO: 563821 - DNA, 25 bp, Homo sapien
aatgtggcaggtggaatctcttact

SEQ ID NO: 563822 - DNA, 25 bp, Homo sapien
taataatgcggatctggtttgagct

SEQ ID NO: 563823 - DNA, 25 bp, Homo sapien
ggtttgagctattcaagcacatggc

SEQ ID NO: 563824 - DNA, 25 bp, Homo sapien
acattcattagtgctgcagttctgt

SEQ ID NO: 563825 - DNA, 25 bp, Homo sapien
cacattcattagtgctgcagttctg

SEQ ID NO: 563826 - DNA, 25 bp, Homo sapien
tcacattcattagtgctgcagttct

SEQ ID NO: 563827 - DNA, 25 bp, Homo sapien
tttagttggttcacttccctggata

SEQ ID NO: 563828 - DNA, 25 bp, Homo sapien
gagctttgcttattacacttatcat

SEQ ID NO: 563829 - DNA, 25 bp, Homo sapien
cattctagttatggctactgagtca

SEQ ID NO: 563830 - DNA, 25 bp, Homo sapien
tggttcacttccctggatatccttt

SEQ ID NO: 563831 - DNA, 25 bp, Homo sapien
tctcgctgcacgcattgactttcgg

SEQ ID NO: 563832 - DNA, 25 bp, Homo sapien
tatcgcccatagccatgctgcagca

SEQ ID NO: 563833 - DNA, 25 bp, Homo sapien
tcgatagccccgtggttctctccat

SEQ ID NO: 563834 - DNA, 25 bp, Homo sapien
acagcttgcagctttggcttatcga

SEQ ID NO: 563835 - DNA, 25 bp, Homo sapien
agcaagcccggtctggattctgttt

SEQ ID NO: 563836 - DNA, 25 bp, Homo sapien
gccttatttaattggtatttcttgc

SEQ ID NO: 563837 - DNA, 25 bp, Homo sapien
tgccttatttaattggtatttcttg

SEQ ID NO: 563838 - DNA, 25 bp, Homo sapien
caaagcaagcccggtctggattctg

SEQ ID NO: 563839 - DNA, 25 bp, Homo sapien
tccagctgcttccctgtcctgtagg

SEQ ID NO: 563840 - DNA, 25 bp, Homo sapien
cagctgcttccctgtcctgtaggcg

SEQ ID NO: 563841 - DNA, 25 bp, Homo sapien
ctcatgggtctccagctgcttccct

SEQ ID NO: 563842 - DNA, 25 bp, Homo sapien
gctgcttccctgtcctgtaggcggc

SEQ ID NO: 563843 - DNA, 25 bp, Homo sapien
atttctgttccctctaatgtttctg

SEQ ID NO: 563844 - DNA, 25 bp, Homo sapien
catttctgttccctctaatgtttct

SEQ ID NO: 563845 - DNA, 25 bp, Homo sapien
tttctgttccctctaatgtttctgt

SEQ ID NO: 563846 - DNA, 25 bp, Homo sapien
gcatttctgttccctctaatgtttc

SEQ ID NO: 563847 - DNA, 25 bp, Homo sapien
gctgaaaatagcagcgtaccagatt

SEQ ID NO: 563848 - DNA, 25 bp, Homo sapien
gactgctgaaaatagcagcgtacca

SEQ ID NO: 563849 - DNA, 25 bp, Homo sapien
tagactgctgaaaatagcagcgtac

SEQ ID NO: 563850 - DNA, 25 bp, Homo sapien
tgggaggaagcatagactgctgaaa

SEQ ID NO: 563851 - DNA, 25 bp, Homo sapien
cgatatacacttggcctgcatatgg

SEQ ID NO: 563852 - DNA, 25 bp, Homo sapien
ttcaagtgcatgtacgatatacact

SEQ ID NO: 563853 - DNA, 25 bp, Homo sapien
agtgcatgtacgatatacacttggc

SEQ ID NO: 563854 - DNA, 25 bp, Homo sapien
catgtacgatatacacttggcctgc

SEQ ID NO: 563855 - DNA, 25 bp, Homo sapien
gcaaacccatttgacaccttaacca

SEQ ID NO: 563856 - DNA, 25 bp, Homo sapien
ggaagacataagacccaagagtttc

SEQ ID NO: 563857 - DNA, 25 bp, Homo sapien
tttggaagacataagacccaagagt

SEQ ID NO: 563858 - DNA, 25 bp, Homo sapien
tgtagtcctgcaaacccatttgaca

SEQ ID NO: 563859 - DNA, 25 bp, Homo sapien
ttcttctctctcaaatacagccacg

SEQ ID NO: 563860 - DNA, 25 bp, Homo sapien
cctttagtttcttctctctcaaata

SEQ ID NO: 563861 - DNA, 25 bp, Homo sapien
tcttctctctcaaatacagccacga

SEQ ID NO: 563862 - DNA, 25 bp, Homo sapien
agtttcttctctctcaaatacagcc

SEQ ID NO: 563863 - DNA, 25 bp, Homo sapien
gccatgacaccttaacttggccttc

SEQ ID NO: 563864 - DNA, 25 bp, Homo sapien
gacaccttaacttggccttcagaac

SEQ ID NO: 563865 - DNA, 25 bp, Homo sapien
catgacaccttaacttggccttcag

SEQ ID NO: 563866 - DNA, 25 bp, Homo sapien
ttcctcactcaaaaccctatcatgg

SEQ ID NO: 563867 - DNA, 25 bp, Homo sapien
aaataacaagtacatcaatgtggct

SEQ ID NO: 563868 - DNA, 25 bp, Homo sapien
catcaatgtggctgactgagcttgt

SEQ ID NO: 563869 - DNA, 25 bp, Homo sapien
aagtacatcaatgtggctgactgag

SEQ ID NO: 563870 - DNA, 25 bp, Homo sapien
tacaaaaataacaagtacatcaatg

SEQ ID NO: 563871 - DNA, 25 bp, Homo sapien
cccaggtgtacaccgggtccatagg

SEQ ID NO: 563872 - DNA, 25 bp, Homo sapien
ggtgtacaccgggtccatagggcat

SEQ ID NO: 563873 - DNA, 25 bp, Homo sapien
ttcccaggtgtacaccgggtccata

SEQ ID NO: 563874 - DNA, 25 bp, Homo sapien
gtacaccgggtccatagggcatcaa

SEQ ID NO: 563875 - DNA, 25 bp, Homo sapien
agaggagttgacagtcaaaggagtc

SEQ ID NO: 563876 - DNA, 25 bp, Homo sapien
gtctcacactctatgggatactgcc

SEQ ID NO: 563877 - DNA, 25 bp, Homo sapien
tgacagtcaaaggagtcgtctcaca

SEQ ID NO: 563878 - DNA, 25 bp, Homo sapien
aaaggagtcgtctcacactctatgg

SEQ ID NO: 563879 - DNA, 25 bp, Homo sapien
tgcaagcaagttgagtgtgacctta

SEQ ID NO: 563880 - DNA, 25 bp, Homo sapien
catcagcgctggtctaactacttca

SEQ ID NO: 563881 - DNA, 25 bp, Homo sapien
tcaagtgcgagcctgcctgcaagca

SEQ ID NO: 563882 - DNA, 25 bp, Homo sapien
gcaagttgagtgtgaccttatgaat

SEQ ID NO: 563883 - DNA, 25 bp, Homo sapien
tttactatgatatgagtgtttgcag

SEQ ID NO: 563884 - DNA, 25 bp, Homo sapien
ataacatttactttcacccacttcg

SEQ ID NO: 563885 - DNA, 25 bp, Homo sapien
cacttcgttgactgaacaatttgaa

SEQ ID NO: 563886 - DNA, 25 bp, Homo sapien
ttgaatatgatctggatatgccctg

SEQ ID NO: 563887 - DNA, 25 bp, Homo sapien
gatcttggccttgttagcccattgg

SEQ ID NO: 563888 - DNA, 25 bp, Homo sapien
gaaagctaacaggtccatgcaggag

SEQ ID NO: 563889 - DNA, 25 bp, Homo sapien
gagcagtctgaatccacgaaacaac

SEQ ID NO: 563890 - DNA, 25 bp, Homo sapien
caggagttgacttgtgatcttggcc

SEQ ID NO: 563891 - DNA, 25 bp, Homo sapien
ggaaatgccttgctaaacactggta

SEQ ID NO: 563892 - DNA, 25 bp, Homo sapien
gggatactgatattgccctgtggtc

SEQ ID NO: 563893 - DNA, 25 bp, Homo sapien
taaacactggtaattgactgaaggg

SEQ ID NO: 563894 - DNA, 25 bp, Homo sapien
atgcagccatgggaaatgccttgct

SEQ ID NO: 563895 - DNA, 25 bp, Homo sapien
aacaccttctgactgaacggggcgg

SEQ ID NO: 563896 - DNA, 25 bp, Homo sapien
caggacattggcaaaacaccctgca

SEQ ID NO: 563897 - DNA, 25 bp, Homo sapien
tccatcgttcggtggcagctcccag

SEQ ID NO: 563898 - DNA, 25 bp, Homo sapien
tcttggcacctccatcgttcggtgg

SEQ ID NO: 563899 - DNA, 25 bp, Homo sapien
tggttatgaagacaaaagccggccc

SEQ ID NO: 563900 - DNA, 25 bp, Homo sapien
cattgtggaggctaagaagcagcgc

SEQ ID NO: 563901 - DNA, 25 bp, Homo sapien
cactagaaatagattaactcggcct

SEQ ID NO: 563902 - DNA, 25 bp, Homo sapien
tgattacgggctaactacacacagt

SEQ ID NO: 563903 - DNA, 25 bp, Homo sapien
gtttcactggcatctatctcgcatt

SEQ ID NO: 563904 - DNA, 25 bp, Homo sapien
catcatatccatggcctgccactag

SEQ ID NO: 563905 - DNA, 25 bp, Homo sapien
tcgcattcagttccgatatctgtga

SEQ ID NO: 563906 - DNA, 25 bp, Homo sapien
tgattgatctgagaacctgtgcact

SEQ ID NO: 563907 - DNA, 25 bp, Homo sapien
tacagaagcgcattgttcagcctct

SEQ ID NO: 563908 - DNA, 25 bp, Homo sapien
tcagcctctcttcatgccggaggag

SEQ ID NO: 563909 - DNA, 25 bp, Homo sapien
aaatgtgtgaagcataaaactccag

SEQ ID NO: 563910 - DNA, 25 bp, Homo sapien
tcttgttctcaaacatgaaaatgtg

SEQ ID NO: 563911 - DNA, 25 bp, Homo sapien
tctgggaagttgcagttctgccagg

SEQ ID NO: 563912 - DNA, 25 bp, Homo sapien
ggttctgctgggcactacaggaatc

SEQ ID NO: 563913 - DNA, 25 bp, Homo sapien
agccccgctcagtgtggcactccat

SEQ ID NO: 563914 - DNA, 25 bp, Homo sapien
aggaatcagcccagccccgctcagt

SEQ ID NO: 563915 - DNA, 25 bp, Homo sapien
gctcacttgggggtctacactctgc

SEQ ID NO: 563916 - DNA, 25 bp, Homo sapien
aaatctttatcctgaattccaatca

SEQ ID NO: 563917 - DNA, 25 bp, Homo sapien
cagggtgtctccagagtttcctcca

SEQ ID NO: 563918 - DNA, 25 bp, Homo sapien
cagctaatctttcttctcggtgatc

SEQ ID NO: 563919 - DNA, 25 bp, Homo sapien
ggtcttccttggcttctactgagaa

SEQ ID NO: 563920 - DNA, 25 bp, Homo sapien
ctgaaccctggcaccaggtcttcct

SEQ ID NO: 563921 - DNA, 25 bp, Homo sapien
accaggtcttccttggcttctactg

SEQ ID NO: 563922 - DNA, 25 bp, Homo sapien
ctactgagaaacctcctccagtcat

SEQ ID NO: 563923 - DNA, 25 bp, Homo sapien
gcctgggtttccgacaacggcatga

SEQ ID NO: 563924 - DNA, 25 bp, Homo sapien
ttccgacaacggcatgagccctagc

SEQ ID NO: 563925 - DNA, 25 bp, Homo sapien
acaacggcatgagccctagcatcat

SEQ ID NO: 563926 - DNA, 25 bp, Homo sapien
ctcctgaagcagagcaccggtggcc

SEQ ID NO: 563927 - DNA, 25 bp, Homo sapien
tcagtaaacacagccgggcggcaat

SEQ ID NO: 563928 - DNA, 25 bp, Homo sapien
taaagcacagcgtatccccaaatgt

SEQ ID NO: 563929 - DNA, 25 bp, Homo sapien
ttctcggcagatctgacagaggttg

SEQ ID NO: 563930 - DNA, 25 bp, Homo sapien
gaaaagcctgtacatctgctgaggc

SEQ ID NO: 563931 - DNA, 25 bp, Homo sapien
ggtggagtagttgcagtgagtccaa

SEQ ID NO: 563932 - DNA, 25 bp, Homo sapien
ggagtagttgcagtgagtccaagat

SEQ ID NO: 563933 - DNA, 25 bp, Homo sapien
aacagagcaagactcttaaaaaaca

SEQ ID NO: 563934 - DNA, 25 bp, Homo sapien
tgtgccactacactccagcctgggc

SEQ ID NO: 563935 - DNA, 25 bp, Homo sapien
tctttgccacaagataaaaactttc

SEQ ID NO: 563936 - DNA, 25 bp, Homo sapien
tccctgaagtcatcctctatatttt

SEQ ID NO: 563937 - DNA, 25 bp, Homo sapien
tggggtcattcttgatcgatggaca

SEQ ID NO: 563938 - DNA, 25 bp, Homo sapien
tagtaggaagcgaataatagtgatg

SEQ ID NO: 563939 - DNA, 25 bp, Homo sapien
tactgactgggcattttccccatga

SEQ ID NO: 563940 - DNA, 25 bp, Homo sapien
tccccatgattccattttaacttac

SEQ ID NO: 563941 - DNA, 25 bp, Homo sapien
gggcattttccccatgattccattt

SEQ ID NO: 563942 - DNA, 25 bp, Homo sapien
tgactgggcattttccccatgattc

SEQ ID NO: 563943 - DNA, 25 bp, Homo sapien
tgtcaaactcctgcctcctagccat

SEQ ID NO: 563944 - DNA, 25 bp, Homo sapien
gtgtcaaactcctgcctcctagcca

SEQ ID NO: 563945 - DNA, 25 bp, Homo sapien
cgtgtcaaactcctgcctcctagcc

SEQ ID NO: 563946 - DNA, 25 bp, Homo sapien
ccgtgtcaaactcctgcctcctagc

SEQ ID NO: 563947 - DNA, 25 bp, Homo sapien
taccagactagctgccaggaatgct

SEQ ID NO: 563948 - DNA, 25 bp, Homo sapien
aatctgcatatgtcacagtcttctg

SEQ ID NO: 563949 - DNA, 25 bp, Homo sapien
gctgaacacagatctgatcttcacg

SEQ ID NO: 563950 - DNA, 25 bp, Homo sapien
cacggtctttggtgaagctgagaca

SEQ ID NO: 563951 - DNA, 25 bp, Homo sapien
aagtctcagctttatggtgggatgg

SEQ ID NO: 563952 - DNA, 25 bp, Homo sapien
ttcagcgggtcatgggtcagctgtt

SEQ ID NO: 563953 - DNA, 25 bp, Homo sapien
gattcagcgggtcatgggtcagctg

SEQ ID NO: 563954 - DNA, 25 bp, Homo sapien
tctcagctttatggtgggatggatt

SEQ ID NO: 563955 - DNA, 25 bp, Homo sapien
tacttctagtctcaattccagatga

SEQ ID NO: 563956 - DNA, 25 bp, Homo sapien
gatatgacttgcacccttgtgccct

SEQ ID NO: 563957 - DNA, 25 bp, Homo sapien
tccagatgagaagtcgcagatatga

SEQ ID NO: 563958 - DNA, 25 bp, Homo sapien
tgatacttctagtctcaattccaga

SEQ ID NO: 563959 - DNA, 25 bp, Homo sapien
ggaacggcacaacttcctgccatct

SEQ ID NO: 563960 - DNA, 25 bp, Homo sapien
taagctgtccgaataactgcaatgg

SEQ ID NO: 563961 - DNA, 25 bp, Homo sapien
tcttctcgtgattgatgggctctct

SEQ ID NO: 563962 - DNA, 25 bp, Homo sapien
ctcttggcctttgggtgtgtagttc

SEQ ID NO: 563963 - DNA, 25 bp, Homo sapien
cacttgtctttgctgtccgtagcca

SEQ ID NO: 563964 - DNA, 25 bp, Homo sapien
tcacttgtctttgctgtccgtagcc

SEQ ID NO: 563965 - DNA, 25 bp, Homo sapien
acttgtctttgctgtccgtagccaa

SEQ ID NO: 563966 - DNA, 25 bp, Homo sapien
atgaaaatttgctagcacccccttt

SEQ ID NO: 563967 - DNA, 25 bp, Homo sapien
tgaaaatttgctagcaccccctttc

SEQ ID NO: 563968 - DNA, 25 bp, Homo sapien
tttcaaatcaggtcgttcaagtccc

SEQ ID NO: 563969 - DNA, 25 bp, Homo sapien
tttttcaaatcaggtcgttcaagtc

SEQ ID NO: 563970 - DNA, 25 bp, Homo sapien
caaatcaggtcgttcaagtccctga

SEQ ID NO: 563971 - DNA, 25 bp, Homo sapien
tgtctaactgttcatacttgttttt

SEQ ID NO: 563972 - DNA, 25 bp, Homo sapien
tgctctccatgcaaaacttccattt

SEQ ID NO: 563973 - DNA, 25 bp, Homo sapien
gctctccatgcaaaacttccatttc

SEQ ID NO: 563974 - DNA, 25 bp, Homo sapien
gatgctctccatgcaaaacttccat

SEQ ID NO: 563975 - DNA, 25 bp, Homo sapien
tgatgctctccatgcaaaacttcca

SEQ ID NO: 563976 - DNA, 25 bp, Homo sapien
acattgccctcccttctcacatgca

SEQ ID NO: 563977 - DNA, 25 bp, Homo sapien
cacatgcagcgaatccaggtgtcat

SEQ ID NO: 563978 - DNA, 25 bp, Homo sapien
ttcaccaaatccaccttgacattgc

SEQ ID NO: 563979 - DNA, 25 bp, Homo sapien
tggacttcaccaaatccaccttgac

SEQ ID NO: 563980 - DNA, 25 bp, Homo sapien
cttcattacactcagcataggcatc

SEQ ID NO: 563981 - DNA, 25 bp, Homo sapien
tcaggcttcattacactcagcatag

SEQ ID NO: 563982 - DNA, 25 bp, Homo sapien
ggcttcattacactcagcataggca

SEQ ID NO: 563983 - DNA, 25 bp, Homo sapien
caggcttcattacactcagcatagg

SEQ ID NO: 563984 - DNA, 25 bp, Homo sapien
gatggagatccaaatgcaattaaca

SEQ ID NO: 563985 - DNA, 25 bp, Homo sapien
gctggttcttcactagaaggcttca

SEQ ID NO: 563986 - DNA, 25 bp, Homo sapien
gcccatggcacattaacatgaaatt

SEQ ID NO: 563987 - DNA, 25 bp, Homo sapien
taaggtagggcaaatatctggatgg

SEQ ID NO: 563988 - DNA, 25 bp, Homo sapien
aaatgggatatctccacatgggcca

SEQ ID NO: 563989 - DNA, 25 bp, Homo sapien
tgggaaatgggatatctccacatgg

SEQ ID NO: 563990 - DNA, 25 bp, Homo sapien
tccttgtaactgaacagggagcagg

SEQ ID NO: 563991 - DNA, 25 bp, Homo sapien
cctccctccttgtaactgaacaggg

SEQ ID NO: 563992 - DNA, 25 bp, Homo sapien
ttttctggcagcttaaaattataaa

SEQ ID NO: 563993 - DNA, 25 bp, Homo sapien
tttctggcagcttaaaattataaaa

SEQ ID NO: 563994 - DNA, 25 bp, Homo sapien
atctagaattagttgcttcttcaac

SEQ ID NO: 563995 - DNA, 25 bp, Homo sapien
gcttcttcaacaatgttataagttt

SEQ ID NO: 563996 - DNA, 25 bp, Homo sapien
tgcatttttagtagatatggggttt

SEQ ID NO: 563997 - DNA, 25 bp, Homo sapien
gagccaccgtgcttggccgggtttg

SEQ ID NO: 563998 - DNA, 25 bp, Homo sapien
ccacgccaggctaatatttttgcat

SEQ ID NO: 563999 - DNA, 25 bp, Homo sapien
caccgtgcttggccgggtttgtttg

SEQ ID NO: 564000 - DNA, 25 bp, Homo sapien
tcaaagtgtaagaagcaaaacaaca

SEQ ID NO: 564001 - DNA, 25 bp, Homo sapien
agcaaaacaacaaatagggtgttgt

SEQ ID NO: 564002 - DNA, 25 bp, Homo sapien
tgtaagaagcaaaacaacaaatagg

SEQ ID NO: 564003 - DNA, 25 bp, Homo sapien
aagaagcaaaacaacaaatagggtg

SEQ ID NO: 564004 - DNA, 25 bp, Homo sapien
gactactggaaatgcgtcagtccac

SEQ ID NO: 564005 - DNA, 25 bp, Homo sapien
aatgcgtcagtccactctgggctca

SEQ ID NO: 564006 - DNA, 25 bp, Homo sapien
tggaaatgcgtcagtccactctggg

SEQ ID NO: 564007 - DNA, 25 bp, Homo sapien
tctcctggactactggaaatgcgtc

SEQ ID NO: 564008 - DNA, 25 bp, Homo sapien
tcaggaacttctctccattgaagaa

SEQ ID NO: 564009 - DNA, 25 bp, Homo sapien
ggaacttctctccattgaagaagtt

SEQ ID NO: 564010 - DNA, 25 bp, Homo sapien
ctcactcaggaacttctctccattg

SEQ ID NO: 564011 - DNA, 25 bp, Homo sapien
cttctcctcactcaggaacttctct

SEQ ID NO: 564012 - DNA, 25 bp, Homo sapien
gacagttgtatctcccccataccaa

SEQ ID NO: 564013 - DNA, 25 bp, Homo sapien
actgacagttgtatctcccccatac

SEQ ID NO: 564014 - DNA, 25 bp, Homo sapien
ccactgacagttgtatctcccccat

SEQ ID NO: 564015 - DNA, 25 bp, Homo sapien
tcccccataccaagcccaggtggtc

SEQ ID NO: 564016 - DNA, 25 bp, Homo sapien
taagtaaaagagatcagccaggagt

SEQ ID NO: 564017 - DNA, 25 bp, Homo sapien
accaaacctggcgtaggcagctgct

SEQ ID NO: 564018 - DNA, 25 bp, Homo sapien
gggagcattagaaggctgccccatc

SEQ ID NO: 564019 - DNA, 25 bp, Homo sapien
cagagtggtatcaagggaatatccc

SEQ ID NO: 564020 - DNA, 25 bp, Homo sapien
caaattactgtgctgctaagtcact

SEQ ID NO: 564021 - DNA, 25 bp, Homo sapien
agggcagaatttccccgtgacgctc

SEQ ID NO: 564022 - DNA, 25 bp, Homo sapien
agcctcaaactattccttcctcagg

SEQ ID NO: 564023 - DNA, 25 bp, Homo sapien
gaccccacaccaagatgatcatctt

SEQ ID NO: 564024 - DNA, 25 bp, Homo sapien
tagctgggaggacccaaaatgctgg

SEQ ID NO: 564025 - DNA, 25 bp, Homo sapien
tgattctgttggtccaggatttgga

SEQ ID NO: 564026 - DNA, 25 bp, Homo sapien
tatatgatgattctgttggtccagg

SEQ ID NO: 564027 - DNA, 25 bp, Homo sapien
tctgcttcacaatgccgatgattta

SEQ ID NO: 564028 - DNA, 25 bp, Homo sapien
cacagagctcccagggtgaatgttc

SEQ ID NO: 564029 - DNA, 25 bp, Homo sapien
gcatggcggcctcagtgcaatgtga

SEQ ID NO: 564030 - DNA, 25 bp, Homo sapien
acatttgcatggcagcacagagctc

SEQ ID NO: 564031 - DNA, 25 bp, Homo sapien
ggcctcagtgcaatgtgacatttgc

SEQ ID NO: 564032 - DNA, 25 bp, Homo sapien
tgaggttacctttcacaagacctgg

SEQ ID NO: 564033 - DNA, 25 bp, Homo sapien
gaaaggtgatgacacttgactccgg

SEQ ID NO: 564034 - DNA, 25 bp, Homo sapien
gaccggatctccttacaggcttgaa

SEQ ID NO: 564035 - DNA, 25 bp, Homo sapien
ggagctgggacttctaaccaatgga

SEQ ID NO: 564036 - DNA, 25 bp, Homo sapien
tatgagttccttgcctatgaggcct

SEQ ID NO: 564037 - DNA, 25 bp, Homo sapien
tcatggcaagaaactatgagttcct

SEQ ID NO: 564038 - DNA, 25 bp, Homo sapien
ctctagaacgaatgtggacctgcaa

SEQ ID NO: 564039 - DNA, 25 bp, Homo sapien
ctctaaggaccgcaggcagcctcta

SEQ ID NO: 564040 - DNA, 25 bp, Homo sapien
ctcatcttgggatgaatttcagtta

SEQ ID NO: 564041 - DNA, 25 bp, Homo sapien
ctcagccaagatgcctcatcttggg

SEQ ID NO: 564042 - DNA, 25 bp, Homo sapien
agccaagatgcctcatcttgggatg

SEQ ID NO: 564043 - DNA, 25 bp, Homo sapien
cttgggatgaatttcagttaattct

SEQ ID NO: 564044 - DNA, 25 bp, Homo sapien
tctgagatggttctttataattcct

SEQ ID NO: 564045 - DNA, 25 bp, Homo sapien
aaatttctattcattctcttaggag

SEQ ID NO: 564046 - DNA, 25 bp, Homo sapien
gcatgagattttgcagtaacagagt

SEQ ID NO: 564047 - DNA, 25 bp, Homo sapien
ttgcatgagattttgcagtaacaga

SEQ ID NO: 564048 - DNA, 25 bp, Homo sapien
tgagattggttccagctcggcgttt

SEQ ID NO: 564049 - DNA, 25 bp, Homo sapien
cagtgagattggttccagctcggcg

SEQ ID NO: 564050 - DNA, 25 bp, Homo sapien
agtgagattggttccagctcggcgt

SEQ ID NO: 564051 - DNA, 25 bp, Homo sapien
agattggttccagctcggcgtttgc

SEQ ID NO: 564052 - DNA, 25 bp, Homo sapien
aggagaggatgctgacccgctaagc

SEQ ID NO: 564053 - DNA, 25 bp, Homo sapien
gactttctgcatcaccagttcttct

SEQ ID NO: 564054 - DNA, 25 bp, Homo sapien
gacccgctaagctggcggtatttga

SEQ ID NO: 564055 - DNA, 25 bp, Homo sapien
ttgactttctgcatcaccagttctt

SEQ ID NO: 564056 - DNA, 25 bp, Homo sapien
tttctggaataaatcggacacttct

SEQ ID NO: 564057 - DNA, 25 bp, Homo sapien
ttttctggaataaatcggacacttc

SEQ ID NO: 564058 - DNA, 25 bp, Homo sapien
ttctggaataaatcggacacttctt

SEQ ID NO: 564059 - DNA, 25 bp, Homo sapien
tgttccatattgagggtctctgctt

SEQ ID NO: 564060 - DNA, 25 bp, Homo sapien
ggtctctgcttccttcgattgtatg

SEQ ID NO: 564061 - DNA, 25 bp, Homo sapien
agggatgtttctcgttgttccatat

SEQ ID NO: 564062 - DNA, 25 bp, Homo sapien
cgattgtatggtgcatctcctccta

SEQ ID NO: 564063 - DNA, 25 bp, Homo sapien
aggctataagttctcaagtccagga

SEQ ID NO: 564064 - DNA, 25 bp, Homo sapien
cctgtcttctcttattaggctataa

SEQ ID NO: 564065 - DNA, 25 bp, Homo sapien
tcttattaggctataagttctcaag

SEQ ID NO: 564066 - DNA, 25 bp, Homo sapien
gccatctttatacccatttctgata

SEQ ID NO: 564067 - DNA, 25 bp, Homo sapien
tcttgatatttacacaccccaaatg

SEQ ID NO: 564068 - DNA, 25 bp, Homo sapien
cacaccccaaatggatcagagataa

SEQ ID NO: 564069 - DNA, 25 bp, Homo sapien
caccccaaatggatcagagataacc

SEQ ID NO: 564070 - DNA, 25 bp, Homo sapien
acacaccccaaatggatcagagata

SEQ ID NO: 564071 - DNA, 25 bp, Homo sapien
tagttttccatattttcaaagtgcc

SEQ ID NO: 564072 - DNA, 25 bp, Homo sapien
ctagttttccatattttcaaagtgc

SEQ ID NO: 564073 - DNA, 25 bp, Homo sapien
cacagagccaggcataggaagaaca

SEQ ID NO: 564074 - DNA, 25 bp, Homo sapien
gaagaacatcatggttgagatcaga

SEQ ID NO: 564075 - DNA, 25 bp, Homo sapien
ggaagaacatcatggttgagatcag

SEQ ID NO: 564076 - DNA, 25 bp, Homo sapien
agagccaggcataggaagaacatca

SEQ ID NO: 564077 - DNA, 25 bp, Homo sapien
catgacagggccacagttgtatgcc

SEQ ID NO: 564078 - DNA, 25 bp, Homo sapien
aaagcacgtcaaatgctgacccaga

SEQ ID NO: 564079 - DNA, 25 bp, Homo sapien
tgaatacacaggaaaggagagcttg

SEQ ID NO: 564080 - DNA, 25 bp, Homo sapien
tgtgttcaatacaaggatggagcct

SEQ ID NO: 564081 - DNA, 25 bp, Homo sapien
caataggctggcaattagtaagggt

SEQ ID NO: 564082 - DNA, 25 bp, Homo sapien
taaatgcctatagtggtatcaaaac

SEQ ID NO: 564083 - DNA, 25 bp, Homo sapien
ttttcagtgccagaaagaatggtcc

SEQ ID NO: 564084 - DNA, 25 bp, Homo sapien
tattgacatcttgcagtatacccag

SEQ ID NO: 564085 - DNA, 25 bp, Homo sapien
tcactctgattgtggagtcagcctg

SEQ ID NO: 564086 - DNA, 25 bp, Homo sapien
tgagccacacatgagccagctcttc

SEQ ID NO: 564087 - DNA, 25 bp, Homo sapien
ctgagccacacatgagccagctctt

SEQ ID NO: 564088 - DNA, 25 bp, Homo sapien
gattgtggagtcagcctgagccaca

SEQ ID NO: 564089 - DNA, 25 bp, Homo sapien
tccctctaatgacgtattctgcatc

SEQ ID NO: 564090 - DNA, 25 bp, Homo sapien
tttccctctaatgacgtattctgca

SEQ ID NO: 564091 - DNA, 25 bp, Homo sapien
cctctaatgacgtattctgcatcag

SEQ ID NO: 564092 - DNA, 25 bp, Homo sapien
ctaatgacgtattctgcatcaggct

SEQ ID NO: 564093 - DNA, 25 bp, Homo sapien
ggacaccatgggctcttcaaacttc

SEQ ID NO: 564094 - DNA, 25 bp, Homo sapien
cagagccactcatttgcaagcaggc

SEQ ID NO: 564095 - DNA, 25 bp, Homo sapien
tcctcccggaaaataggctcctgga

SEQ ID NO: 564096 - DNA, 25 bp, Homo sapien
ctcatttgcaagcaggcctgagttc

SEQ ID NO: 564097 - DNA, 25 bp, Homo sapien
gaaactgaagcactagaccaagaat

SEQ ID NO: 564098 - DNA, 25 bp, Homo sapien
actgaagcactagaccaagaatgaa

SEQ ID NO: 564099 - DNA, 25 bp, Homo sapien
gaagcactagaccaagaatgaagaa

SEQ ID NO: 564100 - DNA, 25 bp, Homo sapien
cttggaaactgaagcactagaccaa

SEQ ID NO: 564101 - DNA, 25 bp, Homo sapien
gaaacaaccttagctgcacttccat

SEQ ID NO: 564102 - DNA, 25 bp, Homo sapien
gcgtggaaacaaccttagctgcact

SEQ ID NO: 564103 - DNA, 25 bp, Homo sapien
cctcttggctctgtacatctaggac

SEQ ID NO: 564104 - DNA, 25 bp, Homo sapien
tacatctaggacagcgtggaaacaa

SEQ ID NO: 564105 - DNA, 25 bp, Homo sapien
gaatttggctttatgatctgccaat

SEQ ID NO: 564106 - DNA, 25 bp, Homo sapien
tatgatctgccaattcgatgatctc

SEQ ID NO: 564107 - DNA, 25 bp, Homo sapien
tcgatgatctctgtaggtctactgt

SEQ ID NO: 564108 - DNA, 25 bp, Homo sapien
cactggaggaagcaattaggaattt

SEQ ID NO: 564109 - DNA, 25 bp, Homo sapien
aacaacagcccacacgatgatgacg

SEQ ID NO: 564110 - DNA, 25 bp, Homo sapien
cacacgatgatgacgttgacactaa

SEQ ID NO: 564111 - DNA, 25 bp, Homo sapien
tgacgttgacactaattgtaggcca

SEQ ID NO: 564112 - DNA, 25 bp, Homo sapien
acagcccacacgatgatgacgttga

SEQ ID NO: 564113 - DNA, 25 bp, Homo sapien
cgaatttgatcacggttctgtcaca

SEQ ID NO: 564114 - DNA, 25 bp, Homo sapien
aatgaccgaatttgatcacggttct

SEQ ID NO: 564115 - DNA, 25 bp, Homo sapien
ttctgtcacagccattgtgcaccat

SEQ ID NO: 564116 - DNA, 25 bp, Homo sapien
ggttctgtcacagccattgtgcacc

SEQ ID NO: 564117 - DNA, 25 bp, Homo sapien
cagtgacccataatgttcagcattc

SEQ ID NO: 564118 - DNA, 25 bp, Homo sapien
tcctctgtctcgcagctgacggagt

SEQ ID NO: 564119 - DNA, 25 bp, Homo sapien
tcgcagctgacggagtgggcatact

SEQ ID NO: 564120 - DNA, 25 bp, Homo sapien
atactggttgtatgccttggctctc

SEQ ID NO: 564121 - DNA, 25 bp, Homo sapien
ctggtgacaccagacactgtatgca

SEQ ID NO: 564122 - DNA, 25 bp, Homo sapien
gaattgggaagagggactacacttg

SEQ ID NO: 564123 - DNA, 25 bp, Homo sapien
cacgtgggtcctttcagttcctgta

SEQ ID NO: 564124 - DNA, 25 bp, Homo sapien
tgagtttcagttgccagctgttcca

SEQ ID NO: 564125 - DNA, 25 bp, Homo sapien
atagtcccatttccccttcatgtct

SEQ ID NO: 564126 - DNA, 25 bp, Homo sapien
cagatacacttggtaaatagtccca

SEQ ID NO: 564127 - DNA, 25 bp, Homo sapien
tacaagaagaattaccgtcaggtaa

SEQ ID NO: 564128 - DNA, 25 bp, Homo sapien
gtaataatgacctgtaagtacaaga

SEQ ID NO: 564129 - DNA, 25 bp, Homo sapien
tttggatatgatacacaacgatatt

SEQ ID NO: 564130 - DNA, 25 bp, Homo sapien
tgccctggtgatactgaatttggat

SEQ ID NO: 564131 - DNA, 25 bp, Homo sapien
ccctggtgatactgaatttggatat

SEQ ID NO: 564132 - DNA, 25 bp, Homo sapien
atatgatacacaacgatattcagct

SEQ ID NO: 564133 - DNA, 25 bp, Homo sapien
gctggaagagagcctgaggctccca

SEQ ID NO: 564134 - DNA, 25 bp, Homo sapien
tcctgctggaagagagcctgaggct

SEQ ID NO: 564135 - DNA, 25 bp, Homo sapien
cttcctgctggaagagagcctgagg

SEQ ID NO: 564136 - DNA, 25 bp, Homo sapien
agagcctgaggctcccagtcaagca

SEQ ID NO: 564137 - DNA, 25 bp, Homo sapien
caatggattacatcctctataaagc

SEQ ID NO: 564138 - DNA, 25 bp, Homo sapien
cttggaagacgtgtcctgcctttag

SEQ ID NO: 564139 - DNA, 25 bp, Homo sapien
tcctgcctttagtagcgtcacaatg

SEQ ID NO: 564140 - DNA, 25 bp, Homo sapien
tagcgtcacaatggattacatcctc

SEQ ID NO: 564141 - DNA, 25 bp, Homo sapien
cctctctgcatagttcttccatcac

SEQ ID NO: 564142 - DNA, 25 bp, Homo sapien
ctgcatagttcttccatcactctcc

SEQ ID NO: 564143 - DNA, 25 bp, Homo sapien
tctgcatagttcttccatcactctc

SEQ ID NO: 564144 - DNA, 25 bp, Homo sapien
tctctgcatagttcttccatcactc

SEQ ID NO: 564145 - DNA, 25 bp, Homo sapien
ctgtgaagttcctccacaaatacac

SEQ ID NO: 564146 - DNA, 25 bp, Homo sapien
tgtgaagttcctccacaaatacaca

SEQ ID NO: 564147 - DNA, 25 bp, Homo sapien
gaagttcctccacaaatacacattc

SEQ ID NO: 564148 - DNA, 25 bp, Homo sapien
tgaagttcctccacaaatacacatt

SEQ ID NO: 564149 - DNA, 25 bp, Homo sapien
atttcttgcaaagaggaatactcat

SEQ ID NO: 564150 - DNA, 25 bp, Homo sapien
cttcagatggatattagtgtcatta

SEQ ID NO: 564151 - DNA, 25 bp, Homo sapien
ttcttgcaaagaggaatactcatat

SEQ ID NO: 564152 - DNA, 25 bp, Homo sapien
gatggatattagtgtcattatggaa

SEQ ID NO: 564153 - DNA, 25 bp, Homo sapien
aatggtgtcagcaacttagaaataa

SEQ ID NO: 564154 - DNA, 25 bp, Homo sapien
cgcatataatggtgtcagcaactta

SEQ ID NO: 564155 - DNA, 25 bp, Homo sapien
tgtctgttttgatcgcatataatgg

SEQ ID NO: 564156 - DNA, 25 bp, Homo sapien
tttgatcgcatataatggtgtcagc

SEQ ID NO: 564157 - DNA, 25 bp, Homo sapien
aaattcactggtgctccaaagagca

SEQ ID NO: 564158 - DNA, 25 bp, Homo sapien
aattcactggtgctccaaagagcac

SEQ ID NO: 564159 - DNA, 25 bp, Homo sapien
cagtgtcaactgtgaggacgccagt

SEQ ID NO: 564160 - DNA, 25 bp, Homo sapien
cagtggatgctcacaagaccagaca

SEQ ID NO: 564161 - DNA, 25 bp, Homo sapien
ggccgtaggccagatttcatatgca

SEQ ID NO: 564162 - DNA, 25 bp, Homo sapien
ccagtgtgagccgataacaaggtca

SEQ ID NO: 564163 - DNA, 25 bp, Homo sapien
gtataagacaactttgttcctcagg

SEQ ID NO: 564164 - DNA, 25 bp, Homo sapien
caactttgttcctcaggtatgacca

SEQ ID NO: 564165 - DNA, 25 bp, Homo sapien
tctgaagtataagacaactttgttc

SEQ ID NO: 564166 - DNA, 25 bp, Homo sapien
cctcaggtatgaccagaaacaaaag

SEQ ID NO: 564167 - DNA, 25 bp, Homo sapien
cagtgtgcttggttgccagtgtctt

SEQ ID NO: 564168 - DNA, 25 bp, Homo sapien
tgtcttgccgccgtcctcaggcagg

SEQ ID NO: 564169 - DNA, 25 bp, Homo sapien
atcactgggtgtcctttgatctcag

SEQ ID NO: 564170 - DNA, 25 bp, Homo sapien
cagcacacagtctccttgtggaatt

SEQ ID NO: 564171 - DNA, 25 bp, Homo sapien
tgtttctgcaaatggagcaacatac

SEQ ID NO: 564172 - DNA, 25 bp, Homo sapien
aactatggcataggtgtttctgcaa

SEQ ID NO: 564173 - DNA, 25 bp, Homo sapien
ggtgtttctgcaaatggagcaacat

SEQ ID NO: 564174 - DNA, 25 bp, Homo sapien
tatcaactatggcataggtgtttct

SEQ ID NO: 564175 - DNA, 25 bp, Homo sapien
gattgaataagctctccaaaaccac

SEQ ID NO: 564176 - DNA, 25 bp, Homo sapien
tagaaagcacgctttcacccaggcc

SEQ ID NO: 564177 - DNA, 25 bp, Homo sapien
ccacaaggtccattctcagtagaaa

SEQ ID NO: 564178 - DNA, 25 bp, Homo sapien
cgtgactcagtcaagccaaccttct

SEQ ID NO: 564179 - DNA, 25 bp, Homo sapien
ttccatttgaaaacatccgagtggc

SEQ ID NO: 564180 - DNA, 25 bp, Homo sapien
aaacatccgagtggcagtcaccata

SEQ ID NO: 564181 - DNA, 25 bp, Homo sapien
ggcagtcaccatagcatgattatga

SEQ ID NO: 564182 - DNA, 25 bp, Homo sapien
ttgaaaacatccgagtggcagtcac

SEQ ID NO: 564183 - DNA, 25 bp, Homo sapien
ctttctgtttacaagctagagccac

SEQ ID NO: 564184 - DNA, 25 bp, Homo sapien
cttgcctttctgtttacaagctaga

SEQ ID NO: 564185 - DNA, 25 bp, Homo sapien
cctttctgtttacaagctagagcca

SEQ ID NO: 564186 - DNA, 25 bp, Homo sapien
tgcctttctgtttacaagctagagc

SEQ ID NO: 564187 - DNA, 25 bp, Homo sapien
gaccgccagtgcattaatccacaga

SEQ ID NO: 564188 - DNA, 25 bp, Homo sapien
ctgcggttgctggtggccaagatct

SEQ ID NO: 564189 - DNA, 25 bp, Homo sapien
gttgctggtggccaagatctgaccg

SEQ ID NO: 564190 - DNA, 25 bp, Homo sapien
ggccaagatctgaccgccagtgcat

SEQ ID NO: 564191 - DNA, 25 bp, Homo sapien
catatcctggtcaactatgtttccg

SEQ ID NO: 564192 - DNA, 25 bp, Homo sapien
gatttgtcgttgtgtgcaaagtgag

SEQ ID NO: 564193 - DNA, 25 bp, Homo sapien
tgactgtcagttaaaggcatatcct

SEQ ID NO: 564194 - DNA, 25 bp, Homo sapien
gcaaagtgagcagaattacatttgg

SEQ ID NO: 564195 - DNA, 25 bp, Homo sapien
ggagaagataatccctggaggctgt

SEQ ID NO: 564196 - DNA, 25 bp, Homo sapien
tttggagaagataatccctggaggc

SEQ ID NO: 564197 - DNA, 25 bp, Homo sapien
tggagaagataatccctggaggctg

SEQ ID NO: 564198 - DNA, 25 bp, Homo sapien
ttttggagaagataatccctggagg

SEQ ID NO: 564199 - DNA, 25 bp, Homo sapien
ctatggagatgagcttttaatattt

SEQ ID NO: 564200 - DNA, 25 bp, Homo sapien
aatgagcagctcaatgaacttctta

SEQ ID NO: 564201 - DNA, 25 bp, Homo sapien
tgaacttcttaatgaaggtggttga

SEQ ID NO: 564202 - DNA, 25 bp, Homo sapien
aatgaacttcttaatgaaggtggtt

SEQ ID NO: 564203 - DNA, 25 bp, Homo sapien
gagcagatgctacggcagcagcatc

SEQ ID NO: 564204 - DNA, 25 bp, Homo sapien
atgagcagatgctacggcagcagca

SEQ ID NO: 564205 - DNA, 25 bp, Homo sapien
tgagcagatgctacggcagcagcat

SEQ ID NO: 564206 - DNA, 25 bp, Homo sapien
gcagatgctacggcagcagcatctc

SEQ ID NO: 564207 - DNA, 25 bp, Homo sapien
gttggctgatgattttggctttcca

SEQ ID NO: 564208 - DNA, 25 bp, Homo sapien
gctgatgattttggctttccaactg

SEQ ID NO: 564209 - DNA, 25 bp, Homo sapien
tcaggttggctgatgattttggctt

SEQ ID NO: 564210 - DNA, 25 bp, Homo sapien
tggctgatgattttggctttccaac

SEQ ID NO: 564211 - DNA, 25 bp, Homo sapien
gtcgctgccactttctgctctatcc

SEQ ID NO: 564212 - DNA, 25 bp, Homo sapien
ctgctctatccagattccccctgca

SEQ ID NO: 564213 - DNA, 25 bp, Homo sapien
cttgtcaggcttgtcgctgccactt

SEQ ID NO: 564214 - DNA, 25 bp, Homo sapien
gaggatcttagagccatattttcct

SEQ ID NO: 564215 - DNA, 25 bp, Homo sapien
cactcctggagcaatagtttcgaga

SEQ ID NO: 564216 - DNA, 25 bp, Homo sapien
tacccatcggtatgtgaaaggcaca

SEQ ID NO: 564217 - DNA, 25 bp, Homo sapien
tatggccttcgtcttgatgagtgag

SEQ ID NO: 564218 - DNA, 25 bp, Homo sapien
cacaggtaggatccttcgtaaactc

SEQ ID NO: 564219 - DNA, 25 bp, Homo sapien
ccggccacttcacatagcgacatga

SEQ ID NO: 564220 - DNA, 25 bp, Homo sapien
tccctcttgcttcaaagactcagga

SEQ ID NO: 564221 - DNA, 25 bp, Homo sapien
agactcaggaaggtccatgtattcc

SEQ ID NO: 564222 - DNA, 25 bp, Homo sapien
ttggatggcaactccccggccactt

SEQ ID NO: 564223 - DNA, 25 bp, Homo sapien
cttttggcttgcctggtgcaatgcc

SEQ ID NO: 564224 - DNA, 25 bp, Homo sapien
tcttgcctgttagaagtatgttggt

SEQ ID NO: 564225 - DNA, 25 bp, Homo sapien
taagactcttgcctgttagaagtat

SEQ ID NO: 564226 - DNA, 25 bp, Homo sapien
gactcttgcctgttagaagtatgtt

SEQ ID NO: 564227 - DNA, 25 bp, Homo sapien
aagactcttgcctgttagaagtatg

SEQ ID NO: 564228 - DNA, 25 bp, Homo sapien
agtcagtgcggcttctcttttctgc

SEQ ID NO: 564229 - DNA, 25 bp, Homo sapien
catacttctgtaacgtagcgagtca

SEQ ID NO: 564230 - DNA, 25 bp, Homo sapien
tctgcttgatagaagtatgtgtcag

SEQ ID NO: 564231 - DNA, 25 bp, Homo sapien
ttttggaggtgcaaccacagagagc

SEQ ID NO: 564232 - DNA, 25 bp, Homo sapien
actgtgcatttggatgaacgtctgg

SEQ ID NO: 564233 - DNA, 25 bp, Homo sapien
catggtgccttctcagtggccacag

SEQ ID NO: 564234 - DNA, 25 bp, Homo sapien
acagcaacggcagactgtgcatttg

SEQ ID NO: 564235 - DNA, 25 bp, Homo sapien
gtgcatttggatgaacgtctggtcc

SEQ ID NO: 564236 - DNA, 25 bp, Homo sapien
aggaaacaacagtagcatgggcagg

SEQ ID NO: 564237 - DNA, 25 bp, Homo sapien
aaacaacagtagcatgggcaggagc

SEQ ID NO: 564238 - DNA, 25 bp, Homo sapien
ggaaacaacagtagcatgggcagga

SEQ ID NO: 564239 - DNA, 25 bp, Homo sapien
gaaacaacagtagcatgggcaggag

SEQ ID NO: 564240 - DNA, 25 bp, Homo sapien
ggatgcaaggtcgaacgttatcaac

SEQ ID NO: 564241 - DNA, 25 bp, Homo sapien
cgctcaggtgtttcaccagggatgg

SEQ ID NO: 564242 - DNA, 25 bp, Homo sapien
caaggtcgaacgttatcaacaatga

SEQ ID NO: 564243 - DNA, 25 bp, Homo sapien
aagtcgcttctgagcaaaacgctca

SEQ ID NO: 564244 - DNA, 25 bp, Homo sapien
atacttgtaaacgttccatgttcat

SEQ ID NO: 564245 - DNA, 25 bp, Homo sapien
ccaaatacttgtaaacgttccatgt

SEQ ID NO: 564246 - DNA, 25 bp, Homo sapien
aatacttgtaaacgttccatgttca

SEQ ID NO: 564247 - DNA, 25 bp, Homo sapien
caaatacttgtaaacgttccatgtt

SEQ ID NO: 564248 - DNA, 25 bp, Homo sapien
gtggttggtctgcaggatagaatat

SEQ ID NO: 564249 - DNA, 25 bp, Homo sapien
attgctcactaggtggttggtctgc

SEQ ID NO: 564250 - DNA, 25 bp, Homo sapien
tatgacatgagtgtaaacaaggtta

SEQ ID NO: 564251 - DNA, 25 bp, Homo sapien
catgagtgtaaacaaggttaaaagg

SEQ ID NO: 564252 - DNA, 25 bp, Homo sapien
taacagcattaagcgttcttggtct

SEQ ID NO: 564253 - DNA, 25 bp, Homo sapien
cctattgcaatctttggtaacagca

SEQ ID NO: 564254 - DNA, 25 bp, Homo sapien
gaggaacatagcactactgagggct

SEQ ID NO: 564255 - DNA, 25 bp, Homo sapien
cacagccacgtgaaccttctttgaa

SEQ ID NO: 564256 - DNA, 25 bp, Homo sapien
agaactaccaagggtgatttcccat

SEQ ID NO: 564257 - DNA, 25 bp, Homo sapien
gaactaccaagggtgatttcccatc

SEQ ID NO: 564258 - DNA, 25 bp, Homo sapien
ctggcttctttaccgattcccctct

SEQ ID NO: 564259 - DNA, 25 bp, Homo sapien
caataagaaaagcaggtgtcttggg

SEQ ID NO: 564260 - DNA, 25 bp, Homo sapien
cgtatcctaccatgtctacttgaca

SEQ ID NO: 564261 - DNA, 25 bp, Homo sapien
gattcccctctcttggcttcaccag

SEQ ID NO: 564262 - DNA, 25 bp, Homo sapien
aaagattgtcagagaaataagagat

SEQ ID NO: 564263 - DNA, 25 bp, Homo sapien
caaaatgtgcgtttcttcaaagccg

SEQ ID NO: 564264 - DNA, 25 bp, Homo sapien
tgcgtttcttcaaagccgtaatttc

SEQ ID NO: 564265 - DNA, 25 bp, Homo sapien
agccgtaatttccaaagattgtcag

SEQ ID NO: 564266 - DNA, 25 bp, Homo sapien
ccgggagatcagaaagatgcagata

SEQ ID NO: 564267 - DNA, 25 bp, Homo sapien
aggaggggcttgaccgggcagagca

SEQ ID NO: 564268 - DNA, 25 bp, Homo sapien
cagcggctgatttcccgggagatca

SEQ ID NO: 564269 - DNA, 25 bp, Homo sapien
tgatttcccgggagatcagaaagat

SEQ ID NO: 564270 - DNA, 25 bp, Homo sapien
tagtccaccactcggcatagtacca

SEQ ID NO: 564271 - DNA, 25 bp, Homo sapien
caccactcggcatagtaccacaggt

SEQ ID NO: 564272 - DNA, 25 bp, Homo sapien
gacgtcttagtccaccactcggcat

SEQ ID NO: 564273 - DNA, 25 bp, Homo sapien
atatcacccccgacgtcttagtcca

SEQ ID NO: 564274 - DNA, 25 bp, Homo sapien
gatccagtttatgtctagtagcaca

SEQ ID NO: 564275 - DNA, 25 bp, Homo sapien
cacaagtagcaaggaaggccatgtt

SEQ ID NO: 564276 - DNA, 25 bp, Homo sapien
tatgtctagtagcacaagtagcaag

SEQ ID NO: 564277 - DNA, 25 bp, Homo sapien
atggagatccagtttatgtctagta

SEQ ID NO: 564278 - DNA, 25 bp, Homo sapien
gtgcctccatctggacgtgtagtaa

SEQ ID NO: 564279 - DNA, 25 bp, Homo sapien
catctggacgtgtagtaagtggcag

SEQ ID NO: 564280 - DNA, 25 bp, Homo sapien
cctccatctggacgtgtagtaagtg

SEQ ID NO: 564281 - DNA, 25 bp, Homo sapien
cagtgcctccatctggacgtgtagt

SEQ ID NO: 564282 - DNA, 25 bp, Homo sapien
ccagtccatccataaggatggtctt

SEQ ID NO: 564283 - DNA, 25 bp, Homo sapien
ggtccagtccatccataaggatggt

SEQ ID NO: 564284 - DNA, 25 bp, Homo sapien
ccagaatacttcctcccgtacattt

SEQ ID NO: 564285 - DNA, 25 bp, Homo sapien
cttggtccagtccatccataaggat

SEQ ID NO: 564286 - DNA, 25 bp, Homo sapien
gacttgcctgactaagaagaacacc

SEQ ID NO: 564287 - DNA, 25 bp, Homo sapien
ttcctcaaggctaggacttgcctga

SEQ ID NO: 564288 - DNA, 25 bp, Homo sapien
gactaagaagaacacctctagggaa

SEQ ID NO: 564289 - DNA, 25 bp, Homo sapien
gaagaacacctctagggaagctgtc

SEQ ID NO: 564290 - DNA, 25 bp, Homo sapien
gttcacgttgaaagaaactatccag

SEQ ID NO: 564291 - DNA, 25 bp, Homo sapien
agacacagtccagccttcagtagag

SEQ ID NO: 564292 - DNA, 25 bp, Homo sapien
tcatcctgctgtggagtagctgctt

SEQ ID NO: 564293 - DNA, 25 bp, Homo sapien
catgcaataggtgtgagtagactac

SEQ ID NO: 564294 - DNA, 25 bp, Homo sapien
cttgagctgagtattcttctcggag

SEQ ID NO: 564295 - DNA, 25 bp, Homo sapien
attcttctcggagaaagaagcacca

SEQ ID NO: 564296 - DNA, 25 bp, Homo sapien
ttgagctgagtattcttctcggaga

SEQ ID NO: 564297 - DNA, 25 bp, Homo sapien
ccttgagctgagtattcttctcgga

SEQ ID NO: 564298 - DNA, 25 bp, Homo sapien
ctgtgactacctgggaaaagatgtt

SEQ ID NO: 564299 - DNA, 25 bp, Homo sapien
gaaaagatgtttttctcaatgtact

SEQ ID NO: 564300 - DNA, 25 bp, Homo sapien
aaagatgtttttctcaatgtactcc

SEQ ID NO: 564301 - DNA, 25 bp, Homo sapien
agatgtttttctcaatgtactccat

SEQ ID NO: 564302 - DNA, 25 bp, Homo sapien
gactcagctctgcagacaaaacaat

SEQ ID NO: 564303 - DNA, 25 bp, Homo sapien
gctttatttagtatagtcctaaggc

SEQ ID NO: 564304 - DNA, 25 bp, Homo sapien
ggaattcctcttcagcgatgatctg

SEQ ID NO: 564305 - DNA, 25 bp, Homo sapien
tttcaggtaagtcatctggactcag

SEQ ID NO: 564306 - DNA, 25 bp, Homo sapien
tttagagagcataaaaccttcttgc

SEQ ID NO: 564307 - DNA, 25 bp, Homo sapien
cgtaagtgtccatactttcaaagag

SEQ ID NO: 564308 - DNA, 25 bp, Homo sapien
ttagcaccaaacactcaacgtaagt

SEQ ID NO: 564309 - DNA, 25 bp, Homo sapien
gaatgtggctatctaacttagcacc

SEQ ID NO: 564310 - DNA, 25 bp, Homo sapien
ccgagtgccttcattactcattaga

SEQ ID NO: 564311 - DNA, 25 bp, Homo sapien
ctggcatgagataccgagtgccttc

SEQ ID NO: 564312 - DNA, 25 bp, Homo sapien
gcaagggccggactgggccaccatt

SEQ ID NO: 564313 - DNA, 25 bp, Homo sapien
tgagataccgagtgccttcattact

SEQ ID NO: 564314 - DNA, 25 bp, Homo sapien
cctgtgtttcaaacgctcttccgaa

SEQ ID NO: 564315 - DNA, 25 bp, Homo sapien
gtttcaaacgctcttccgaagcctg

SEQ ID NO: 564316 - DNA, 25 bp, Homo sapien
atgtgtgtccctgtgtttcaaacgc

SEQ ID NO: 564317 - DNA, 25 bp, Homo sapien
cttccgaagcctgtttttgatgtgg

SEQ ID NO: 564318 - DNA, 25 bp, Homo sapien
tttcctgcatatgcaatgcaactct

SEQ ID NO: 564319 - DNA, 25 bp, Homo sapien
cctgcatatgcaatgcaactctctg

SEQ ID NO: 564320 - DNA, 25 bp, Homo sapien
cgtttcctgcatatgcaatgcaact

SEQ ID NO: 564321 - DNA, 25 bp, Homo sapien
tcctgcatatgcaatgcaactctct

SEQ ID NO: 564322 - DNA, 25 bp, Homo sapien
acctgcatcagcattcactggctca

SEQ ID NO: 564323 - DNA, 25 bp, Homo sapien
ttacctgcatcagcattcactggct

SEQ ID NO: 564324 - DNA, 25 bp, Homo sapien
atttacctgcatcagcattcactgg

SEQ ID NO: 564325 - DNA, 25 bp, Homo sapien
ccatttacctgcatcagcattcact

SEQ ID NO: 564326 - DNA, 25 bp, Homo sapien
tgtagactgtggactgtttcccatg

SEQ ID NO: 564327 - DNA, 25 bp, Homo sapien
ttccttccacggctggttcaaagcc

SEQ ID NO: 564328 - DNA, 25 bp, Homo sapien
ttcccttcatggagtggaagacaca

SEQ ID NO: 564329 - DNA, 25 bp, Homo sapien
tgaagccagcttttccgctaacctt

SEQ ID NO: 564330 - DNA, 25 bp, Homo sapien
tgggccgtcactctgtagcttcaca

SEQ ID NO: 564331 - DNA, 25 bp, Homo sapien
gacacagttcagcagttcagtgcag

SEQ ID NO: 564332 - DNA, 25 bp, Homo sapien
tatctgcctgtaaagagccaagggc

SEQ ID NO: 564333 - DNA, 25 bp, Homo sapien
cacattgtggatggattgactgaca

SEQ ID NO: 564334 - DNA, 25 bp, Homo sapien
taggagtgtcccaggtgaggactgg

SEQ ID NO: 564335 - DNA, 25 bp, Homo sapien
ggagtgtcccaggtgaggactggaa

SEQ ID NO: 564336 - DNA, 25 bp, Homo sapien
gagtgtcccaggtgaggactggaac

SEQ ID NO: 564337 - DNA, 25 bp, Homo sapien
ttaggagtgtcccaggtgaggactg

SEQ ID NO: 564338 - DNA, 25 bp, Homo sapien
catattctcgacatttgataccaga

SEQ ID NO: 564339 - DNA, 25 bp, Homo sapien
gagtactggacaaaggcggtgtctc

SEQ ID NO: 564340 - DNA, 25 bp, Homo sapien
gattcagacactctgggagtactgg

SEQ ID NO: 564341 - DNA, 25 bp, Homo sapien
cttgctaagtagtcacagtaaattg

SEQ ID NO: 564342 - DNA, 25 bp, Homo sapien
gacgtgtagacaaggcccattcata

SEQ ID NO: 564343 - DNA, 25 bp, Homo sapien
tacattggtgttttggccaatgatc

SEQ ID NO: 564344 - DNA, 25 bp, Homo sapien
cattcatatttcacgggcccaaaga

SEQ ID NO: 564345 - DNA, 25 bp, Homo sapien
ctttgacctcaaggagagcatggac

SEQ ID NO: 564346 - DNA, 25 bp, Homo sapien
ctcaggtttggagctccctaactga

SEQ ID NO: 564347 - DNA, 25 bp, Homo sapien
gtttggagctccctaactgaagtct

SEQ ID NO: 564348 - DNA, 25 bp, Homo sapien
tactctgacagcgtgtgctcaggtt

SEQ ID NO: 564349 - DNA, 25 bp, Homo sapien
tggagctccctaactgaagtctggg

SEQ ID NO: 564350 - DNA, 25 bp, Homo sapien
gactgcaggtgccattactatagaa

SEQ ID NO: 564351 - DNA, 25 bp, Homo sapien
caaatgagtgcgtgtggccaaagac

SEQ ID NO: 564352 - DNA, 25 bp, Homo sapien
tccctggattcgactctcagctggg

SEQ ID NO: 564353 - DNA, 25 bp, Homo sapien
gaaaactgccttcgcctctgagtaa

SEQ ID NO: 564354 - DNA, 25 bp, Homo sapien
cagatccttaaaccctgaaacaagc

SEQ ID NO: 564355 - DNA, 25 bp, Homo sapien
tttctgcaggcagtttccgcaccag

SEQ ID NO: 564356 - DNA, 25 bp, Homo sapien
cgcaccagatccttaaaccctgaaa

SEQ ID NO: 564357 - DNA, 25 bp, Homo sapien
aaacaagcctgagcaaaagcggcat

SEQ ID NO: 564358 - DNA, 25 bp, Homo sapien
tgtaatattttgctgtgttgacttt

SEQ ID NO: 564359 - DNA, 25 bp, Homo sapien
gctgactgccgcctccgaagccagt

SEQ ID NO: 564360 - DNA, 25 bp, Homo sapien
tgactgccgcctccgaagccagtct

SEQ ID NO: 564361 - DNA, 25 bp, Homo sapien
tgccgcctccgaagccagtctgggt

SEQ ID NO: 564362 - DNA, 25 bp, Homo sapien
gctgctgactgccgcctccgaagcc

SEQ ID NO: 564363 - DNA, 25 bp, Homo sapien
tttcataacatcaacaaaccagatg

SEQ ID NO: 564364 - DNA, 25 bp, Homo sapien
gataccaggtaatgctgcgtcacgg

SEQ ID NO: 564365 - DNA, 25 bp, Homo sapien
gcaacgacatggtgtaaagtattcc

SEQ ID NO: 564366 - DNA, 25 bp, Homo sapien
taactcattctatatgataccaggt

SEQ ID NO: 564367 - DNA, 25 bp, Homo sapien
tcaaggtgtgagcttgcagctgaaa

SEQ ID NO: 564368 - DNA, 25 bp, Homo sapien
ctcaagtgacgctgtccagtgcggg

SEQ ID NO: 564369 - DNA, 25 bp, Homo sapien
tccttggctccagtatcctgatcac

SEQ ID NO: 564370 - DNA, 25 bp, Homo sapien
tcctgatcacaccagtagagggact

SEQ ID NO: 564371 - DNA, 25 bp, Homo sapien
gacccagttgttcgcaagttctcca

SEQ ID NO: 564372 - DNA, 25 bp, Homo sapien
tgttgagctacattgcacactgagg

SEQ ID NO: 564373 - DNA, 25 bp, Homo sapien
ttgatgaagcgagctggttgacctg

SEQ ID NO: 564374 - DNA, 25 bp, Homo sapien
gagcgagaggacgtcagcatgtctt

SEQ ID NO: 564375 - DNA, 25 bp, Homo sapien
gactgtctgcttttcattatgttcc

SEQ ID NO: 564376 - DNA, 25 bp, Homo sapien
gtagttcctcagtccagtgcaaagt

SEQ ID NO: 564377 - DNA, 25 bp, Homo sapien
cttttcattatgttccagtctcagg

SEQ ID NO: 564378 - DNA, 25 bp, Homo sapien
tgtagttcctcagtccagtgcaaag

SEQ ID NO: 564379 - DNA, 25 bp, Homo sapien
ctcaaggtcaaccacagtgtccttc

SEQ ID NO: 564380 - DNA, 25 bp, Homo sapien
tctggcctgagtaaaccttcatcac

SEQ ID NO: 564381 - DNA, 25 bp, Homo sapien
gccacataaaaggtgttctcaggga

SEQ ID NO: 564382 - DNA, 25 bp, Homo sapien
gtctggcctgagtaaaccttcatca

SEQ ID NO: 564383 - DNA, 25 bp, Homo sapien
tttgcattgggccacataaaaggtg

SEQ ID NO: 564384 - DNA, 25 bp, Homo sapien
gcacgttcagggtggtttggtggta

SEQ ID NO: 564385 - DNA, 25 bp, Homo sapien
attgggcacgttcagggtggtttgg

SEQ ID NO: 564386 - DNA, 25 bp, Homo sapien
cacgttcagggtggtttggtggtag

SEQ ID NO: 564387 - DNA, 25 bp, Homo sapien
tgggcacgttcagggtggtttggtg

SEQ ID NO: 564388 - DNA, 25 bp, Homo sapien
ctcagctccattaagtgtgtgattt

SEQ ID NO: 564389 - DNA, 25 bp, Homo sapien
gcgtcagctgtgtggagcctgctca

SEQ ID NO: 564390 - DNA, 25 bp, Homo sapien
tcagctccattaagtgtgtgatttg

SEQ ID NO: 564391 - DNA, 25 bp, Homo sapien
catgatcttaatccggaaaactgta

SEQ ID NO: 564392 - DNA, 25 bp, Homo sapien
ctgtaaactgtttagactaagaact

SEQ ID NO: 564393 - DNA, 25 bp, Homo sapien
ttcaacataagctgcttccaacata

SEQ ID NO: 564394 - DNA, 25 bp, Homo sapien
ttccacatgatcttaatccggaaaa

SEQ ID NO: 564395 - DNA, 25 bp, Homo sapien
agagaattggctgactttgtggttc

SEQ ID NO: 564396 - DNA, 25 bp, Homo sapien
gactttgtggttcagcaactggtat

SEQ ID NO: 564397 - DNA, 25 bp, Homo sapien
tggctgactttgtggttcagcaact

SEQ ID NO: 564398 - DNA, 25 bp, Homo sapien
gaattggctgactttgtggttcagc

SEQ ID NO: 564399 - DNA, 25 bp, Homo sapien
catgtgctaagccataatgcacatt

SEQ ID NO: 564400 - DNA, 25 bp, Homo sapien
tgtagatctctatttccctttcccc

SEQ ID NO: 564401 - DNA, 25 bp, Homo sapien
tgataacttcctcccctaggtcctc

SEQ ID NO: 564402 - DNA, 25 bp, Homo sapien
tgccaccttccagattgtagatctc

SEQ ID NO: 564403 - DNA, 25 bp, Homo sapien
ttcacccagagcatcccatgggaaa

SEQ ID NO: 564404 - DNA, 25 bp, Homo sapien
agtgacagctggaagcctcttgatc

SEQ ID NO: 564405 - DNA, 25 bp, Homo sapien
tgggatctggtctgtgagcaaaagc

SEQ ID NO: 564406 - DNA, 25 bp, Homo sapien
cctctccttctggatcagttttgtc

SEQ ID NO: 564407 - DNA, 25 bp, Homo sapien
tataccgaagttccttcactgcctc

SEQ ID NO: 564408 - DNA, 25 bp, Homo sapien
ttataccgaagttccttcactgcct

SEQ ID NO: 564409 - DNA, 25 bp, Homo sapien
ttccttcactgcctccatcactgtt

SEQ ID NO: 564410 - DNA, 25 bp, Homo sapien
aagttccttcactgcctccatcact

SEQ ID NO: 564411 - DNA, 25 bp, Homo sapien
gcctctttgcccataacatatttta

SEQ ID NO: 564412 - DNA, 25 bp, Homo sapien
agatggaccactgatggctggtgtg

SEQ ID NO: 564413 - DNA, 25 bp, Homo sapien
aggtaactatgacacagcaggaatg

SEQ ID NO: 564414 - DNA, 25 bp, Homo sapien
caggaatgttcatatgtgagaataa

SEQ ID NO: 564415 - DNA, 25 bp, Homo sapien
gtaactatgacacagcaggaatgtt

SEQ ID NO: 564416 - DNA, 25 bp, Homo sapien
ccgtgcccgtcaggtgactatgaaa

SEQ ID NO: 564417 - DNA, 25 bp, Homo sapien
cgtgcccgtcaggtgactatgaaaa

SEQ ID NO: 564418 - DNA, 25 bp, Homo sapien
catgaattgttgagctccacagtgt

SEQ ID NO: 564419 - DNA, 25 bp, Homo sapien
catgtgcttcgacatttatttcatt

SEQ ID NO: 564420 - DNA, 25 bp, Homo sapien
agttagagtccactcatcatgtgct

SEQ ID NO: 564421 - DNA, 25 bp, Homo sapien
acaatcaataaaacagggtcattcc

SEQ ID NO: 564422 - DNA, 25 bp, Homo sapien
gtggcaataatcaatagtttaccaa

SEQ ID NO: 564423 - DNA, 25 bp, Homo sapien
tgaaattgtggcaataatcaatagt

SEQ ID NO: 564424 - DNA, 25 bp, Homo sapien
ttgtggcaataatcaatagtttacc

SEQ ID NO: 564425 - DNA, 25 bp, Homo sapien
aattgtggcaataatcaatagttta

SEQ ID NO: 564426 - DNA, 25 bp, Homo sapien
gcttttcagggtacacatcattctc

SEQ ID NO: 564427 - DNA, 25 bp, Homo sapien
tcaagtatgccatgggttacgggct

SEQ ID NO: 564428 - DNA, 25 bp, Homo sapien
tgccatgggttacgggcttttcagg

SEQ ID NO: 564429 - DNA, 25 bp, Homo sapien
tgcagaaaatcaagtatgccatggg

SEQ ID NO: 564430 - DNA, 25 bp, Homo sapien
tctcaatcaggaacgtgaggaagcc

SEQ ID NO: 564431 - DNA, 25 bp, Homo sapien
tgagttagatcaggttgtaagaaag

SEQ ID NO: 564432 - DNA, 25 bp, Homo sapien
agaaagagaggatatctttcctgta

SEQ ID NO: 564433 - DNA, 25 bp, Homo sapien
gttagatcaggttgtaagaaagaga

SEQ ID NO: 564434 - DNA, 25 bp, Homo sapien
gaagggtcctgcctctaatgtaaaa

SEQ ID NO: 564435 - DNA, 25 bp, Homo sapien
taaaaggcatcagcgtgcctcaggg

SEQ ID NO: 564436 - DNA, 25 bp, Homo sapien
gctttcaggaatttgcacatccagg

SEQ ID NO: 564437 - DNA, 25 bp, Homo sapien
tcgctgatgaagacggaagggtcct

SEQ ID NO: 564438 - DNA, 25 bp, Homo sapien
acccatatgactttgcttacagcca

SEQ ID NO: 564439 - DNA, 25 bp, Homo sapien
ctttcttctatttacccatatgact

SEQ ID NO: 564440 - DNA, 25 bp, Homo sapien
tactttcagtagagaagacattgct

SEQ ID NO: 564441 - DNA, 25 bp, Homo sapien
tcagtagagaagacattgctctttc

SEQ ID NO: 564442 - DNA, 25 bp, Homo sapien
gagtatgcagccttcccgcctgtgc

SEQ ID NO: 564443 - DNA, 25 bp, Homo sapien
agagtatgcagccttcccgcctgtg

SEQ ID NO: 564444 - DNA, 25 bp, Homo sapien
ggagagtatgcagccttcccgcctg

SEQ ID NO: 564445 - DNA, 25 bp, Homo sapien
gtatgcagccttcccgcctgtgcct

SEQ ID NO: 564446 - DNA, 25 bp, Homo sapien
tcaaaacattgggatagagcgtggg

SEQ ID NO: 564447 - DNA, 25 bp, Homo sapien
cagtcttgttcccatggtatactca

SEQ ID NO: 564448 - DNA, 25 bp, Homo sapien
gatgtgaacttcatcagagcaagga

SEQ ID NO: 564449 - DNA, 25 bp, Homo sapien
tgcctggcaccaaagagtagacact

SEQ ID NO: 564450 - DNA, 25 bp, Homo sapien
cctgagaaatggtgttggtggagct

SEQ ID NO: 564451 - DNA, 25 bp, Homo sapien
tgtcatggccccaacgctcacactg

SEQ ID NO: 564452 - DNA, 25 bp, Homo sapien
aatggtgttggtggagctcctctct

SEQ ID NO: 564453 - DNA, 25 bp, Homo sapien
atggccccaacgctcacactgtgtc

SEQ ID NO: 564454 - DNA, 25 bp, Homo sapien
agtccattcagggaccccagtttgc

SEQ ID NO: 564455 - DNA, 25 bp, Homo sapien
cacagagaactgtcttgagtggccc

SEQ ID NO: 564456 - DNA, 25 bp, Homo sapien
attcagggaccccagtttgcctcca

SEQ ID NO: 564457 - DNA, 25 bp, Homo sapien
ggccctgagattacatatagatcca

SEQ ID NO: 564458 - DNA, 25 bp, Homo sapien
ctccaagaagacaacggtccgtgtt

SEQ ID NO: 564459 - DNA, 25 bp, Homo sapien
gcaaatacagccaacactgctgaca

SEQ ID NO: 564460 - DNA, 25 bp, Homo sapien
gaagacaacggtccgtgttgcaaat

SEQ ID NO: 564461 - DNA, 25 bp, Homo sapien
cggtccgtgttgcaaatacagccaa

SEQ ID NO: 564462 - DNA, 25 bp, Homo sapien
cccccaataaacacagacataattt

SEQ ID NO: 564463 - DNA, 25 bp, Homo sapien
taattgaaagtcatgacttagcccg

SEQ ID NO: 564464 - DNA, 25 bp, Homo sapien
gacttagcccgcatattttaaatat

SEQ ID NO: 564465 - DNA, 25 bp, Homo sapien
tttacattacaaggcactggaaggc

SEQ ID NO: 564466 - DNA, 25 bp, Homo sapien
ggtcctgtagactggtatttataac

SEQ ID NO: 564467 - DNA, 25 bp, Homo sapien
acttctattcaccataaaacaaatc

SEQ ID NO: 564468 - DNA, 25 bp, Homo sapien
cgcagagcctgagagcgagtggcga

SEQ ID NO: 564469 - DNA, 25 bp, Homo sapien
catttgcagggatggcccgacactc

SEQ ID NO: 564470 - DNA, 25 bp, Homo sapien
cagctttgcccggaacatttgcagg

SEQ ID NO: 564471 - DNA, 25 bp, Homo sapien
cgagtggcgagccaagataccagcg

SEQ ID NO: 564472 - DNA, 25 bp, Homo sapien
ggaccacgagtctgtcacatggaca

SEQ ID NO: 564473 - DNA, 25 bp, Homo sapien
cgatccttgcaattaggcagggcca

SEQ ID NO: 564474 - DNA, 25 bp, Homo sapien
tggtccctaaaattgagtcatcccg

SEQ ID NO: 564475 - DNA, 25 bp, Homo sapien
aaagcccagaaaagccggtgtgaca

SEQ ID NO: 564476 - DNA, 25 bp, Homo sapien
tatgtgcctcggtgagtccctgtgc

SEQ ID NO: 564477 - DNA, 25 bp, Homo sapien
tccatgccaggacgctatgtgcctc

SEQ ID NO: 564478 - DNA, 25 bp, Homo sapien
gctttcccaaaatgagctatgcggg

SEQ ID NO: 564479 - DNA, 25 bp, Homo sapien
gaggcttctccttggactttcctcc

SEQ ID NO: 564480 - DNA, 25 bp, Homo sapien
gtaactacagtacactatcacagga

SEQ ID NO: 564481 - DNA, 25 bp, Homo sapien
gatatttgatgttagacagcttcaa

SEQ ID NO: 564482 - DNA, 25 bp, Homo sapien
tatcacaggatttcctaaactagag

SEQ ID NO: 564483 - DNA, 25 bp, Homo sapien
gcttcaactccataagtttgtgaaa

SEQ ID NO: 564484 - DNA, 25 bp, Homo sapien
agcaaaagccatgaattctgtaatg

SEQ ID NO: 564485 - DNA, 25 bp, Homo sapien
caaatgctaaagcagcggtaactcc

SEQ ID NO: 564486 - DNA, 25 bp, Homo sapien
gcagcggtaactcccagtaggattt

SEQ ID NO: 564487 - DNA, 25 bp, Homo sapien
tacttttaggattccatcccgcaaa

SEQ ID NO: 564488 - DNA, 25 bp, Homo sapien
agtcactttttctgtggtgggagcc

SEQ ID NO: 564489 - DNA, 25 bp, Homo sapien
cgggtatcatacaagcagctcctgt

SEQ ID NO: 564490 - DNA, 25 bp, Homo sapien
cactttttctgtggtgggagccccg

SEQ ID NO: 564491 - DNA, 25 bp, Homo sapien
gggagccccgggtatcatacaagca

SEQ ID NO: 564492 - DNA, 25 bp, Homo sapien
gggccccgcacacaatgtggccaag

SEQ ID NO: 564493 - DNA, 25 bp, Homo sapien
aaaaagatggatggtagcaccctac

SEQ ID NO: 564494 - DNA, 25 bp, Homo sapien
gcaccctactggtgtttattaagga

SEQ ID NO: 564495 - DNA, 25 bp, Homo sapien
gatggtagcaccctactggtgttta

SEQ ID NO: 564496 - DNA, 25 bp, Homo sapien
tgcaacggactctactgctgatatc

SEQ ID NO: 564497 - DNA, 25 bp, Homo sapien
aataattgacaatcttgcaacggac

SEQ ID NO: 564498 - DNA, 25 bp, Homo sapien
gacaatcttgcaacggactctactg

SEQ ID NO: 564499 - DNA, 25 bp, Homo sapien
aatcttgcaacggactctactgctg

SEQ ID NO: 564500 - DNA, 25 bp, Homo sapien
aaactaagccatgagttgtccccac

SEQ ID NO: 564501 - DNA, 25 bp, Homo sapien
gagttgtccccacttttgattctgg

SEQ ID NO: 564502 - DNA, 25 bp, Homo sapien
gccatgagttgtccccacttttgat

SEQ ID NO: 564503 - DNA, 25 bp, Homo sapien
actaagccatgagttgtccccactt

SEQ ID NO: 564504 - DNA, 25 bp, Homo sapien
gctgttgttggcattgctatagatc

SEQ ID NO: 564505 - DNA, 25 bp, Homo sapien
agctgttgttggcattgctatagat

SEQ ID NO: 564506 - DNA, 25 bp, Homo sapien
agtgtagggtacacgagaagagaca

SEQ ID NO: 564507 - DNA, 25 bp, Homo sapien
ggtacacgagaagagacaccagcag

SEQ ID NO: 564508 - DNA, 25 bp, Homo sapien
gacatcaaagggagtgtagggtaca

SEQ ID NO: 564509 - DNA, 25 bp, Homo sapien
catcaaagggagtgtagggtacacg

SEQ ID NO: 564510 - DNA, 25 bp, Homo sapien
gagctctggtcttcgctgacccttg

SEQ ID NO: 564511 - DNA, 25 bp, Homo sapien
tcagggacaattgcctttgaatgaa

SEQ ID NO: 564512 - DNA, 25 bp, Homo sapien
ttgcaactcctgcagcgtaatccat

SEQ ID NO: 564513 - DNA, 25 bp, Homo sapien
cagtgccctgttcttaaatattgaa

SEQ ID NO: 564514 - DNA, 25 bp, Homo sapien
cagacgagaggtttcttgtccaaca

SEQ ID NO: 564515 - DNA, 25 bp, Homo sapien
taaaagttgagacagacgagaggtt

SEQ ID NO: 564516 - DNA, 25 bp, Homo sapien
cattgctggcgaaacaaagagaagc

SEQ ID NO: 564517 - DNA, 25 bp, Homo sapien
gagagctggcgtaaaagttgagaca

SEQ ID NO: 564518 - DNA, 25 bp, Homo sapien
acatccatttcgtcgtctctccatg

SEQ ID NO: 564519 - DNA, 25 bp, Homo sapien
tctctccatgccagccgccggagca

SEQ ID NO: 564520 - DNA, 25 bp, Homo sapien
cccagggctctgagacactccacat

SEQ ID NO: 564521 - DNA, 25 bp, Homo sapien
cagggcggtaggaagatccagatcc

SEQ ID NO: 564522 - DNA, 25 bp, Homo sapien
tagtgccctccaggtctaccagatg

SEQ ID NO: 564523 - DNA, 25 bp, Homo sapien
gcccatctgtagtgcgcacttccac

SEQ ID NO: 564524 - DNA, 25 bp, Homo sapien
cacgggtgagttcctttgtgctcca

SEQ ID NO: 564525 - DNA, 25 bp, Homo sapien
cacagaccctgagcacacgggtgag

SEQ ID NO: 564526 - DNA, 25 bp, Homo sapien
tgaacatttccaaacagttctcttt

SEQ ID NO: 564527 - DNA, 25 bp, Homo sapien
aagtcccgttgttcctgctgaccac

SEQ ID NO: 564528 - DNA, 25 bp, Homo sapien
tttccaagtcccgttgttcctgctg

SEQ ID NO: 564529 - DNA, 25 bp, Homo sapien
tccaagtcccgttgttcctgctgac

SEQ ID NO: 564530 - DNA, 25 bp, Homo sapien
agccttggctgataagattgtcaga

SEQ ID NO: 564531 - DNA, 25 bp, Homo sapien
cctctcttgccaaagtgaagctggg

SEQ ID NO: 564532 - DNA, 25 bp, Homo sapien
agaagcaccagccattccaaggaga

SEQ ID NO: 564533 - DNA, 25 bp, Homo sapien
tgcatgtccccggttcaccaatgtg

SEQ ID NO: 564534 - DNA, 25 bp, Homo sapien
gacgccttccttgaaatctgcctgc

SEQ ID NO: 564535 - DNA, 25 bp, Homo sapien
cacatgaaaggtgtcgacgccttcc

SEQ ID NO: 564536 - DNA, 25 bp, Homo sapien
gaggcaggtcatcgtcacaattcca

SEQ ID NO: 564537 - DNA, 25 bp, Homo sapien
tgggcacagggatttgtcctcatcg

SEQ ID NO: 564538 - DNA, 25 bp, Homo sapien
gttttaagcagattaggatcccatt

SEQ ID NO: 564539 - DNA, 25 bp, Homo sapien
gcagattaggatcccattggattcc

SEQ ID NO: 564540 - DNA, 25 bp, Homo sapien
ttaggtccatttgtggaaacgccca

SEQ ID NO: 564541 - DNA, 25 bp, Homo sapien
aacgcccacacgagtgttttaagca

SEQ ID NO: 564542 - DNA, 25 bp, Homo sapien
gacacgtctctttgcttcccgacgt

SEQ ID NO: 564543 - DNA, 25 bp, Homo sapien
tgacctgtgtgctgatcaagccgac

SEQ ID NO: 564544 - DNA, 25 bp, Homo sapien
tgatcaagccgacacgtctctttgc

SEQ ID NO: 564545 - DNA, 25 bp, Homo sapien
tgagctgatctctctaggaatgacc

SEQ ID NO: 564546 - DNA, 25 bp, Homo sapien
ggtgttatccagcttccggtccgta

SEQ ID NO: 564547 - DNA, 25 bp, Homo sapien
taaggagtgacccagtgtcctctga

SEQ ID NO: 564548 - DNA, 25 bp, Homo sapien
tacaaggaggtggtcaccattttcc

SEQ ID NO: 564549 - DNA, 25 bp, Homo sapien
aaattcctcttgactacaaggaggt

SEQ ID NO: 564550 - DNA, 25 bp, Homo sapien
tacactgtgaagacggccagattct

SEQ ID NO: 564551 - DNA, 25 bp, Homo sapien
tgagagggtaatctgcgtgcccact

SEQ ID NO: 564552 - DNA, 25 bp, Homo sapien
cgaagactgtgagggaagaagctat

SEQ ID NO: 564553 - DNA, 25 bp, Homo sapien
tccaccctgtgagaatgatgctata

SEQ ID NO: 564554 - DNA, 25 bp, Homo sapien
tatcccagggtttgaatggccatct

SEQ ID NO: 564555 - DNA, 25 bp, Homo sapien
tgctttgccaaaaagggagttgata

SEQ ID NO: 564556 - DNA, 25 bp, Homo sapien
gggagttgataagaaagagagctgg

SEQ ID NO: 564557 - DNA, 25 bp, Homo sapien
tctcatttccattgcgaacctttat

SEQ ID NO: 564558 - DNA, 25 bp, Homo sapien
tctggcttgccttcaaccagtatct

SEQ ID NO: 564559 - DNA, 25 bp, Homo sapien
gcttgccttcaaccagtatctcaaa

SEQ ID NO: 564560 - DNA, 25 bp, Homo sapien
ttgccttcaaccagtatctcaaaat

SEQ ID NO: 564561 - DNA, 25 bp, Homo sapien
tggcttgccttcaaccagtatctca

SEQ ID NO: 564562 - DNA, 25 bp, Homo sapien
caaattccaaagtcgggtgaccagg

SEQ ID NO: 564563 - DNA, 25 bp, Homo sapien
tatttgataacagcgagtgcctccc

SEQ ID NO: 564564 - DNA, 25 bp, Homo sapien
caaagtgtcgtaaggctcaatcggg

SEQ ID NO: 564565 - DNA, 25 bp, Homo sapien
cagggacgatcatacaagcaaggca

SEQ ID NO: 564566 - DNA, 25 bp, Homo sapien
ctcctagccttcttcgcagacagcc

SEQ ID NO: 564567 - DNA, 25 bp, Homo sapien
gccccactcccttctatgaactcct

SEQ ID NO: 564568 - DNA, 25 bp, Homo sapien
cactcccttctatgaactcctagcc

SEQ ID NO: 564569 - DNA, 25 bp, Homo sapien
tagccttcttcgcagacagcctagc

SEQ ID NO: 564570 - DNA, 25 bp, Homo sapien
cacaatttctatgaacggattaccc

SEQ ID NO: 564571 - DNA, 25 bp, Homo sapien
gactgaagctgttgttgccagcggc

SEQ ID NO: 564572 - DNA, 25 bp, Homo sapien
gattacccatggactgaagctgttg

SEQ ID NO: 564573 - DNA, 25 bp, Homo sapien
ggggactccagacatgagtgttcca

SEQ ID NO: 564574 - DNA, 25 bp, Homo sapien
acagaacgagtgagacagtaaggac

SEQ ID NO: 564575 - DNA, 25 bp, Homo sapien
cagaacgagtgagacagtaaggact

SEQ ID NO: 564576 - DNA, 25 bp, Homo sapien
aacgagtgagacagtaaggactaaa

SEQ ID NO: 564577 - DNA, 25 bp, Homo sapien
gaacgagtgagacagtaaggactaa

SEQ ID NO: 564578 - DNA, 25 bp, Homo sapien
aagccggcccttccaggcgtggcat

SEQ ID NO: 564579 - DNA, 25 bp, Homo sapien
ttaactagcccgaggtccgtgtgac

SEQ ID NO: 564580 - DNA, 25 bp, Homo sapien
tccgtgtgacaagtccggtatgcac

SEQ ID NO: 564581 - DNA, 25 bp, Homo sapien
tgcactgcgggggaaatgcacccca

SEQ ID NO: 564582 - DNA, 25 bp, Homo sapien
cctcaagggaggcatcgggacatta

SEQ ID NO: 564583 - DNA, 25 bp, Homo sapien
caaggccgaatgctacaagactagg

SEQ ID NO: 564584 - DNA, 25 bp, Homo sapien
cattaggtgtcctctgggaaagcac

SEQ ID NO: 564585 - DNA, 25 bp, Homo sapien
aagactaggtaagctgtccagcgcg

SEQ ID NO: 564586 - DNA, 25 bp, Homo sapien
tgagccgttgttgttgccgctgcgc

SEQ ID NO: 564587 - DNA, 25 bp, Homo sapien
gtagtcgccgctgaccttctcgtag

SEQ ID NO: 564588 - DNA, 25 bp, Homo sapien
tcctggacgatgtacaccgggtgcc

SEQ ID NO: 564589 - DNA, 25 bp, Homo sapien
agaagacgctgtccgcagtccttag

SEQ ID NO: 564590 - DNA, 25 bp, Homo sapien
gcatcctgaagcaatccctgcaaat

SEQ ID NO: 564591 - DNA, 25 bp, Homo sapien
tgaagcaatccctgcaaataaggcc

SEQ ID NO: 564592 - DNA, 25 bp, Homo sapien
atgcatcctgaagcaatccctgcaa

SEQ ID NO: 564593 - DNA, 25 bp, Homo sapien
tcctgaagcaatccctgcaaataag

SEQ ID NO: 564594 - DNA, 25 bp, Homo sapien
tgttccccgaatgtccggcgctgtt

SEQ ID NO: 564595 - DNA, 25 bp, Homo sapien
aaccgaggatgttgttccccgaatg

SEQ ID NO: 564596 - DNA, 25 bp, Homo sapien
ggcgctgttgccgtctgtgctagaa

SEQ ID NO: 564597 - DNA, 25 bp, Homo sapien
gaatgtccggcgctgttgccgtctg

SEQ ID NO: 564598 - DNA, 25 bp, Homo sapien
catttgtaccagcttctagttctgg

SEQ ID NO: 564599 - DNA, 25 bp, Homo sapien
gggacttgttgtcgaacttcttcca

SEQ ID NO: 564600 - DNA, 25 bp, Homo sapien
ctagttctggacgtcttgttggatc

SEQ ID NO: 564601 - DNA, 25 bp, Homo sapien
ttcctggttgatccagcagaacttg

SEQ ID NO: 564602 - DNA, 25 bp, Homo sapien
gtccaactttcatgaggatcttcat

SEQ ID NO: 564603 - DNA, 25 bp, Homo sapien
ttgtccaactttcatgaggatcttc

SEQ ID NO: 564604 - DNA, 25 bp, Homo sapien
tgtccaactttcatgaggatcttca

SEQ ID NO: 564605 - DNA, 25 bp, Homo sapien
cttgtccaactttcatgaggatctt

SEQ ID NO: 564606 - DNA, 25 bp, Homo sapien
cacccctccctcctggttatccagg

SEQ ID NO: 564607 - DNA, 25 bp, Homo sapien
aggccctccaaagacccatttgatg

SEQ ID NO: 564608 - DNA, 25 bp, Homo sapien
ggccctccaaagacccatttgatgt

SEQ ID NO: 564609 - DNA, 25 bp, Homo sapien
ccctccaaagacccatttgatgtag

SEQ ID NO: 564610 - DNA, 25 bp, Homo sapien
taacactgtactttgcaagggactg

SEQ ID NO: 564611 - DNA, 25 bp, Homo sapien
gagagtgctagacattttcattccc

SEQ ID NO: 564612 - DNA, 25 bp, Homo sapien
tccaaacagtaggtcagcaaacaag

SEQ ID NO: 564613 - DNA, 25 bp, Homo sapien
tcaagctgtaaagagataggctgcc

SEQ ID NO: 564614 - DNA, 25 bp, Homo sapien
tatcaatgcttttgtgcggagctcc

SEQ ID NO: 564615 - DNA, 25 bp, Homo sapien
gaaggctgtgttgcataagaatgaa

SEQ ID NO: 564616 - DNA, 25 bp, Homo sapien
tgaaactgctttgcacctttaagag

SEQ ID NO: 564617 - DNA, 25 bp, Homo sapien
ctataagacagtaggaggaaggctg

SEQ ID NO: 564618 - DNA, 25 bp, Homo sapien
cctggcaaggctggtaacatggaaa

SEQ ID NO: 564619 - DNA, 25 bp, Homo sapien
gagtctcactgacacacactgggaa

SEQ ID NO: 564620 - DNA, 25 bp, Homo sapien
tagcctcagtgataacgcaaccctg

SEQ ID NO: 564621 - DNA, 25 bp, Homo sapien
gctaacaagcttgggcaattccatg

SEQ ID NO: 564622 - DNA, 25 bp, Homo sapien
taaggacagctgttgcaaagggtcg

SEQ ID NO: 564623 - DNA, 25 bp, Homo sapien
aaagggtcgacacaccaaacctgct

SEQ ID NO: 564624 - DNA, 25 bp, Homo sapien
tctgggtgtcgcctctgaaaagaaa

SEQ ID NO: 564625 - DNA, 25 bp, Homo sapien
tatgcgaaggtagaataaccagccc

SEQ ID NO: 564626 - DNA, 25 bp, Homo sapien
tgcaaagaaaactctacggataaag

SEQ ID NO: 564627 - DNA, 25 bp, Homo sapien
ctgcaaagaaaactctacggataaa

SEQ ID NO: 564628 - DNA, 25 bp, Homo sapien
cttggtctggtttggcacagttgag

SEQ ID NO: 564629 - DNA, 25 bp, Homo sapien
tgaaattctagaccccagaggttag

SEQ ID NO: 564630 - DNA, 25 bp, Homo sapien
ccttcttaatagtgcatctgtctgc

SEQ ID NO: 564631 - DNA, 25 bp, Homo sapien
tgatggtgaatttgatatcttggtc

SEQ ID NO: 564632 - DNA, 25 bp, Homo sapien
cactttggggcaaataatatccaat

SEQ ID NO: 564633 - DNA, 25 bp, Homo sapien
ataatattcatactggccaacagtt

SEQ ID NO: 564634 - DNA, 25 bp, Homo sapien
cagttttagagtccactttggggca

SEQ ID NO: 564635 - DNA, 25 bp, Homo sapien
tggccaacagttttagagtccactt

SEQ ID NO: 564636 - DNA, 25 bp, Homo sapien
ctgtgggtatagtaccagtccttgt

SEQ ID NO: 564637 - DNA, 25 bp, Homo sapien
tgtgggtatagtaccagtccttgtc

SEQ ID NO: 564638 - DNA, 25 bp, Homo sapien
gggtatagtaccagtccttgtccag

SEQ ID NO: 564639 - DNA, 25 bp, Homo sapien
tgggtatagtaccagtccttgtcca

SEQ ID NO: 564640 - DNA, 25 bp, Homo sapien
ttcagatcaatatgggatgaatgta

SEQ ID NO: 564641 - DNA, 25 bp, Homo sapien
tcagatcaatatgggatgaatgtat

SEQ ID NO: 564642 - DNA, 25 bp, Homo sapien
gatcaatatgggatgaatgtatttt

SEQ ID NO: 564643 - DNA, 25 bp, Homo sapien
caatatgggatgaatgtattttgga

SEQ ID NO: 564644 - DNA, 25 bp, Homo sapien
tacaaatgcgtaaaagataaccaga

SEQ ID NO: 564645 - DNA, 25 bp, Homo sapien
tagttgtggtattgattcagctgca

SEQ ID NO: 564646 - DNA, 25 bp, Homo sapien
gaacatccttctacaagtgctaaca

SEQ ID NO: 564647 - DNA, 25 bp, Homo sapien
taatgcttatagctgaaagcctccc

SEQ ID NO: 564648 - DNA, 25 bp, Homo sapien
tggcaatgtgttctctgtagacaat

SEQ ID NO: 564649 - DNA, 25 bp, Homo sapien
tgggaatgtgttactgtacaacccc

SEQ ID NO: 564650 - DNA, 25 bp, Homo sapien
ccatgtgtgtactgttgaagaattc

SEQ ID NO: 564651 - DNA, 25 bp, Homo sapien
cctcaaccttgtgaatggcaatgtg

SEQ ID NO: 564652 - DNA, 25 bp, Homo sapien
ggtgctgatgcggtgaggtcgagaa

SEQ ID NO: 564653 - DNA, 25 bp, Homo sapien
gctgatgcggtgaggtcgagaacat

SEQ ID NO: 564654 - DNA, 25 bp, Homo sapien
cgtctcagcgacaggtcttgctggt

SEQ ID NO: 564655 - DNA, 25 bp, Homo sapien
tcagcgacaggtcttgctggtgctg

SEQ ID NO: 564656 - DNA, 25 bp, Homo sapien
ggctttggggatctctgtgtttgag

SEQ ID NO: 564657 - DNA, 25 bp, Homo sapien
ggacgcaggggtcggtgtggctttg

SEQ ID NO: 564658 - DNA, 25 bp, Homo sapien
caggggtcggtgtggctttggggat

SEQ ID NO: 564659 - DNA, 25 bp, Homo sapien
tggggatctctgtgtttgaggccat

SEQ ID NO: 564660 - DNA, 25 bp, Homo sapien
tgtgacaatatacctggtggctctc

SEQ ID NO: 564661 - DNA, 25 bp, Homo sapien
gagtgtagattaaccgagaagaaaa

SEQ ID NO: 564662 - DNA, 25 bp, Homo sapien
tacaagttttctcacggttggccaa

SEQ ID NO: 564663 - DNA, 25 bp, Homo sapien
caaacatctgatgccttcttacaag

SEQ ID NO: 564664 - DNA, 25 bp, Homo sapien
tgagtctgtctcgtttaccatggga

SEQ ID NO: 564665 - DNA, 25 bp, Homo sapien
aaatcgcggagatgaaaggctcacg

SEQ ID NO: 564666 - DNA, 25 bp, Homo sapien
tcacgtaagtcatacagggaatgcc

SEQ ID NO: 564667 - DNA, 25 bp, Homo sapien
tcacgccagctccattactaaaagg

SEQ ID NO: 564668 - DNA, 25 bp, Homo sapien
ctctgacaagctggaagctggcacg

SEQ ID NO: 564669 - DNA, 25 bp, Homo sapien
aatggctccaaacttgcagaacatc

SEQ ID NO: 564670 - DNA, 25 bp, Homo sapien
caaaagccagatgggctgtactgaa

SEQ ID NO: 564671 - DNA, 25 bp, Homo sapien
gctggcacggatcccaaaatccaaa

SEQ ID NO: 564672 - DNA, 25 bp, Homo sapien
cagtctgcgtttgaaaagctgaagg

SEQ ID NO: 564673 - DNA, 25 bp, Homo sapien
agtctgcgtttgaaaagctgaagga

SEQ ID NO: 564674 - DNA, 25 bp, Homo sapien
aggcagcaagcttgctggacattta

SEQ ID NO: 564675 - DNA, 25 bp, Homo sapien
gcagcaagcttgctggacatttatc

SEQ ID NO: 564676 - DNA, 25 bp, Homo sapien
ggctgggcagcactaacatttttat

SEQ ID NO: 564677 - DNA, 25 bp, Homo sapien
tgtccctgcctgaagcccaaataga

SEQ ID NO: 564678 - DNA, 25 bp, Homo sapien
cgaccgcgaagtgcagttaatccta

SEQ ID NO: 564679 - DNA, 25 bp, Homo sapien
caaatagattaaggcaacgaccgcg

SEQ ID NO: 564680 - DNA, 25 bp, Homo sapien
cagtcacgctgggatctcgaatagt

SEQ ID NO: 564681 - DNA, 25 bp, Homo sapien
cagctgactctgtctggaggaacca

SEQ ID NO: 564682 - DNA, 25 bp, Homo sapien
gtgtcatactgaagctctcgggagc

SEQ ID NO: 564683 - DNA, 25 bp, Homo sapien
taggtgaacgcactctaaaacgtcg

SEQ ID NO: 564684 - DNA, 25 bp, Homo sapien
cttcgtcctcgaaaacaggagaggg

SEQ ID NO: 564685 - DNA, 25 bp, Homo sapien
gtggccatgtccttcgtcctcgaaa

SEQ ID NO: 564686 - DNA, 25 bp, Homo sapien
cgcgtgccggccagcctagattgtg

SEQ ID NO: 564687 - DNA, 25 bp, Homo sapien
catgtccttcgtcctcgaaaacagg

SEQ ID NO: 564688 - DNA, 25 bp, Homo sapien
tagtagcttttagcgcctgggagcg

SEQ ID NO: 564689 - DNA, 25 bp, Homo sapien
tcaggtatcgccatcggacaccttc

SEQ ID NO: 564690 - DNA, 25 bp, Homo sapien
ttggaaagccgagcgaggagtctcc

SEQ ID NO: 564691 - DNA, 25 bp, Homo sapien
gacttgacacccgagccgatagtag

SEQ ID NO: 564692 - DNA, 25 bp, Homo sapien
ggctctaaaactatcgatttggaaa

SEQ ID NO: 564693 - DNA, 25 bp, Homo sapien
tggaaatcgcagttctgcataaaac

SEQ ID NO: 564694 - DNA, 25 bp, Homo sapien
cgaggaattccaatagataggctct

SEQ ID NO: 564695 - DNA, 25 bp, Homo sapien
cccagcagtacttccacacggagtc

SEQ ID NO: 564696 - DNA, 25 bp, Homo sapien
gcgaagccactcccagctccgcgca

SEQ ID NO: 564697 - DNA, 25 bp, Homo sapien
ggcgaagccactcccagctccgcgc

SEQ ID NO: 564698 - DNA, 25 bp, Homo sapien
caagaagggactgacgggacgcagg

SEQ ID NO: 564699 - DNA, 25 bp, Homo sapien
agaagggactgacgggacgcaggct

SEQ ID NO: 564700 - DNA, 25 bp, Homo sapien
gaagggactgacgggacgcaggctg

SEQ ID NO: 564701 - DNA, 25 bp, Homo sapien
aagaagggactgacgggacgcaggc

SEQ ID NO: 564702 - DNA, 25 bp, Homo sapien
ggcgggtgcgggctgggacacaaag

SEQ ID NO: 564703 - DNA, 25 bp, Homo sapien
agacccggagcggagacgaccggcg

SEQ ID NO: 564704 - DNA, 25 bp, Homo sapien
actcccgtgcggctccagggtgccg

SEQ ID NO: 564705 - DNA, 25 bp, Homo sapien
gggccaggtgcgctcgctctccggg

SEQ ID NO: 564706 - DNA, 25 bp, Homo sapien
gggcagcggcccgagcgcgcgggcg

SEQ ID NO: 564707 - DNA, 25 bp, Homo sapien
gcgcgggcgccgcgtcggcgcggtt

SEQ ID NO: 564708 - DNA, 25 bp, Homo sapien
tatagatccagtgcagcgggcagcg

SEQ ID NO: 564709 - DNA, 25 bp, Homo sapien
gggcgccgcgtcggcgcggttccat

SEQ ID NO: 564710 - DNA, 25 bp, Homo sapien
gcaggaaagagggagctcggtcccc

SEQ ID NO: 564711 - DNA, 25 bp, Homo sapien
tcccggagcacggagcggagtaggg

SEQ ID NO: 564712 - DNA, 25 bp, Homo sapien
ggagccttctcagtccgcgcggctc

SEQ ID NO: 564713 - DNA, 25 bp, Homo sapien
acgcgcgcgggcctttgtgtgcggg

SEQ ID NO: 564714 - DNA, 25 bp, Homo sapien
tttccctcgagcagtgcggaaggca

SEQ ID NO: 564715 - DNA, 25 bp, Homo sapien
tctcggcgagggcttctcacttgat

SEQ ID NO: 564716 - DNA, 25 bp, Homo sapien
ctacggctcagtttcagtcagtggg

SEQ ID NO: 564717 - DNA, 25 bp, Homo sapien
tttggtaccaatcgcctacggctca

SEQ ID NO: 564718 - DNA, 25 bp, Homo sapien
tggaggaccaaactccactcatcat

SEQ ID NO: 564719 - DNA, 25 bp, Homo sapien
accaagtgtggaggaccaaactcca

SEQ ID NO: 564720 - DNA, 25 bp, Homo sapien
tatttgcaaaccaagtgtggaggac

SEQ ID NO: 564721 - DNA, 25 bp, Homo sapien
ctttatttgcaaaccaagtgtggag

SEQ ID NO: 564722 - DNA, 25 bp, Homo sapien
agctgtgcgctctcttgattgcatg

SEQ ID NO: 564723 - DNA, 25 bp, Homo sapien
ggatacaaaggagcagataatggct

SEQ ID NO: 564724 - DNA, 25 bp, Homo sapien
gataatggctagctagctgtgcgct

SEQ ID NO: 564725 - DNA, 25 bp, Homo sapien
gattaagaggtgtgatggatacaaa

SEQ ID NO: 564726 - DNA, 25 bp, Homo sapien
ctagacttccaggttgaggctttta

SEQ ID NO: 564727 - DNA, 25 bp, Homo sapien
tagacttccaggttgaggcttttac

SEQ ID NO: 564728 - DNA, 25 bp, Homo sapien
ctctgattagtaacactagtacttg

SEQ ID NO: 564729 - DNA, 25 bp, Homo sapien
agtaacactagtacttgttcacaag

SEQ ID NO: 564730 - DNA, 25 bp, Homo sapien
ggtcctctgattagtaacactagta

SEQ ID NO: 564731 - DNA, 25 bp, Homo sapien
gattagtaacactagtacttgttca

SEQ ID NO: 564732 - DNA, 25 bp, Homo sapien
tgaatacagaacttaggaaccatga

SEQ ID NO: 564733 - DNA, 25 bp, Homo sapien
gaaaatgactcgaccatcttagcct

SEQ ID NO: 564734 - DNA, 25 bp, Homo sapien
gcctggcagaggaaagtagttacca

SEQ ID NO: 564735 - DNA, 25 bp, Homo sapien
actggagtctccaaaagcaagcaga

SEQ ID NO: 564736 - DNA, 25 bp, Homo sapien
cacaatggggaatgctggtttgatt

SEQ ID NO: 564737 - DNA, 25 bp, Homo sapien
acaatggggaatgctggtttgattt

SEQ ID NO: 564738 - DNA, 25 bp, Homo sapien
acacaatggggaatgctggtttgat

SEQ ID NO: 564739 - DNA, 25 bp, Homo sapien
tcaggaacatcaagagcaacagtat

SEQ ID NO: 564740 - DNA, 25 bp, Homo sapien
caagagcaacagtatcacaaggaca

SEQ ID NO: 564741 - DNA, 25 bp, Homo sapien
ctgtatcaggaacatcaagagcaac

SEQ ID NO: 564742 - DNA, 25 bp, Homo sapien
ggaacatcaagagcaacagtatcac

SEQ ID NO: 564743 - DNA, 25 bp, Homo sapien
gggaattgcagagcatagcccctat

SEQ ID NO: 564744 - DNA, 25 bp, Homo sapien
gtaaaagccttatcagaccatccat

SEQ ID NO: 564745 - DNA, 25 bp, Homo sapien
ggtttaacaatacaccacataggtc

SEQ ID NO: 564746 - DNA, 25 bp, Homo sapien
gggaatttcccaatgcaatcaccaa

SEQ ID NO: 564747 - DNA, 25 bp, Homo sapien
tgagaaggacagttttggcctggac

SEQ ID NO: 564748 - DNA, 25 bp, Homo sapien
caacaattctcaactgttcttcggc

SEQ ID NO: 564749 - DNA, 25 bp, Homo sapien
tgacgttgtcgttcttgttctagtt

SEQ ID NO: 564750 - DNA, 25 bp, Homo sapien
ctttttgttgacgttgtcgttcttg

SEQ ID NO: 564751 - DNA, 25 bp, Homo sapien
aaaggtaacaggactccggtatgca

SEQ ID NO: 564752 - DNA, 25 bp, Homo sapien
aaaacattcgctgcatcctttgagc

SEQ ID NO: 564753 - DNA, 25 bp, Homo sapien
gacagcaatgtgacgtagactaaaa

SEQ ID NO: 564754 - DNA, 25 bp, Homo sapien
tgttggaacaaatcaaccgcagtca

SEQ ID NO: 564755 - DNA, 25 bp, Homo sapien
caatcaggaaaaaacctctcgctct

SEQ ID NO: 564756 - DNA, 25 bp, Homo sapien
gctactttggtgattcaaggcccca

SEQ ID NO: 564757 - DNA, 25 bp, Homo sapien
gactggccttcagtggcttcgtgtt

SEQ ID NO: 564758 - DNA, 25 bp, Homo sapien
cttaaatgcttagggatacctggca

SEQ ID NO: 564759 - DNA, 25 bp, Homo sapien
acatcacctttcctatgtgcatgga

SEQ ID NO: 564760 - DNA, 25 bp, Homo sapien
ttcttggtgtgtggacacttcactc

SEQ ID NO: 564761 - DNA, 25 bp, Homo sapien
atcaaaagtgttggcagggacacac

SEQ ID NO: 564762 - DNA, 25 bp, Homo sapien
gaacaccttccttcatcgtgtcatg

SEQ ID NO: 564763 - DNA, 25 bp, Homo sapien
tcctcacgttttgcacgttcttcct

SEQ ID NO: 564764 - DNA, 25 bp, Homo sapien
ctcctcacgttttgcacgttcttcc

SEQ ID NO: 564765 - DNA, 25 bp, Homo sapien
caatttttcggttattctcttccag

SEQ ID NO: 564766 - DNA, 25 bp, Homo sapien
tcttccagtattcgctctagctcct

SEQ ID NO: 564767 - DNA, 25 bp, Homo sapien
taaatttaaatcatccctcccagtc

SEQ ID NO: 564768 - DNA, 25 bp, Homo sapien
ttttgatatgacttacagggtagct

SEQ ID NO: 564769 - DNA, 25 bp, Homo sapien
gacaaatgataaactgtgcagtcac

SEQ ID NO: 564770 - DNA, 25 bp, Homo sapien
ccctaatgatagtttcctggcaatt

SEQ ID NO: 564771 - DNA, 25 bp, Homo sapien
tcctcggctgccatacgcgccagct

SEQ ID NO: 564772 - DNA, 25 bp, Homo sapien
tcggctgccatacgcgccagcttcc

SEQ ID NO: 564773 - DNA, 25 bp, Homo sapien
agagtgtgctcctcggctgccatac

SEQ ID NO: 564774 - DNA, 25 bp, Homo sapien
gagtgtgctcctcggctgccatacg

SEQ ID NO: 564775 - DNA, 25 bp, Homo sapien
tactgttagcttggcaatacctgca

SEQ ID NO: 564776 - DNA, 25 bp, Homo sapien
ggagtaatcagtgcaaacaagccat

SEQ ID NO: 564777 - DNA, 25 bp, Homo sapien
tatgcaaactatggtgacagacact

SEQ ID NO: 564778 - DNA, 25 bp, Homo sapien
catacttcatggaactacgggcttc

SEQ ID NO: 564779 - DNA, 25 bp, Homo sapien
ggacaacctgttccttcataactct

SEQ ID NO: 564780 - DNA, 25 bp, Homo sapien
aaatcatgtgtttagcttgactcca

SEQ ID NO: 564781 - DNA, 25 bp, Homo sapien
caaatcatgtgtttagcttgactcc

SEQ ID NO: 564782 - DNA, 25 bp, Homo sapien
acaaatcatgtgtttagcttgactc

SEQ ID NO: 564783 - DNA, 25 bp, Homo sapien
gagggccttatgatcagaatgctag

SEQ ID NO: 564784 - DNA, 25 bp, Homo sapien
ggcaaaagcctctcacagtctaggt

SEQ ID NO: 564785 - DNA, 25 bp, Homo sapien
tgctatcactcaatgttaggccctg

SEQ ID NO: 564786 - DNA, 25 bp, Homo sapien
taggccctgctctttttaatctgac

SEQ ID NO: 564787 - DNA, 25 bp, Homo sapien
cagtcagcacttctgaataggctaa

SEQ ID NO: 564788 - DNA, 25 bp, Homo sapien
tagccagttccattaaatcaaaaag

SEQ ID NO: 564789 - DNA, 25 bp, Homo sapien
gcagcaatgttaagtttagacgaga

SEQ ID NO: 564790 - DNA, 25 bp, Homo sapien
taaaaaattaactttcgcagcaatg

SEQ ID NO: 564791 - DNA, 25 bp, Homo sapien
cacccttcggagaacttctcgttca

SEQ ID NO: 564792 - DNA, 25 bp, Homo sapien
tcgagttcttcgagcaactgctttt

SEQ ID NO: 564793 - DNA, 25 bp, Homo sapien
tttttgtgcggcaagctcagcttgt

SEQ ID NO: 564794 - DNA, 25 bp, Homo sapien
cagcttgtctctgtcgctcgagttc

SEQ ID NO: 564795 - DNA, 25 bp, Homo sapien
cgtgctgtttcttcctcgatgagtt

SEQ ID NO: 564796 - DNA, 25 bp, Homo sapien
tctactcttcgtgctgtttcttcct

SEQ ID NO: 564797 - DNA, 25 bp, Homo sapien
gctaccaattcttctactcttcgtg

SEQ ID NO: 564798 - DNA, 25 bp, Homo sapien
ccaattcttctactcttcgtgctgt

SEQ ID NO: 564799 - DNA, 25 bp, Homo sapien
agggcccatgtaacaggcagtacag

SEQ ID NO: 564800 - DNA, 25 bp, Homo sapien
ccagagggcccatgtaacaggcagt

SEQ ID NO: 564801 - DNA, 25 bp, Homo sapien
cagagggcccatgtaacaggcagta

SEQ ID NO: 564802 - DNA, 25 bp, Homo sapien
aaccagagggcccatgtaacaggca

SEQ ID NO: 564803 - DNA, 25 bp, Homo sapien
accgtgcgcccgaagatgtcgatgc

SEQ ID NO: 564804 - DNA, 25 bp, Homo sapien
ttctcgtccaggctgctgcgcttgc

SEQ ID NO: 564805 - DNA, 25 bp, Homo sapien
agatttggaacgcttccgcacgcgc

SEQ ID NO: 564806 - DNA, 25 bp, Homo sapien
accggctgcgcttcttgttgtgctt

SEQ ID NO: 564807 - DNA, 25 bp, Homo sapien
cgggagacgctctaaccgctcgcct

SEQ ID NO: 564808 - DNA, 25 bp, Homo sapien
ttccgggagacgctctaaccgctcg

SEQ ID NO: 564809 - DNA, 25 bp, Homo sapien
cttccgggagacgctctaaccgctc

SEQ ID NO: 564810 - DNA, 25 bp, Homo sapien
gagacgctctaaccgctcgcctcag

SEQ ID NO: 564811 - DNA, 25 bp, Homo sapien
aaggtgtcggccaacggactttatg

SEQ ID NO: 564812 - DNA, 25 bp, Homo sapien
tttatgccttttcccggcgtctaca

SEQ ID NO: 564813 - DNA, 25 bp, Homo sapien
tccaacgagaaacccgtagcgccag

SEQ ID NO: 564814 - DNA, 25 bp, Homo sapien
gcgtctacagctgccacgaaggccg

SEQ ID NO: 564815 - DNA, 25 bp, Homo sapien
gcgcgaaacgtgccgaagcgtgggc

SEQ ID NO: 564816 - DNA, 25 bp, Homo sapien
gcgaaacgtgccgaagcgtgggccc

SEQ ID NO: 564817 - DNA, 25 bp, Homo sapien
tgcgcgaaacgtgccgaagcgtggg

SEQ ID NO: 564818 - DNA, 25 bp, Homo sapien
ctgcgcgaaacgtgccgaagcgtgg

SEQ ID NO: 564819 - DNA, 25 bp, Homo sapien
tttcctccctggtaagatgccaacg

SEQ ID NO: 564820 - DNA, 25 bp, Homo sapien
gacgcaatagatggagactctcctt

SEQ ID NO: 564821 - DNA, 25 bp, Homo sapien
tccgccagtcttggcggaagcctga

SEQ ID NO: 564822 - DNA, 25 bp, Homo sapien
cgagcgcttcggagcggactcgttt

SEQ ID NO: 564823 - DNA, 25 bp, Homo sapien
gtgcaggtggagtccttgggcacca

SEQ ID NO: 564824 - DNA, 25 bp, Homo sapien
agtgcaggtggagtccttgggcacc

SEQ ID NO: 564825 - DNA, 25 bp, Homo sapien
tgcaggtggagtccttgggcaccat

SEQ ID NO: 564826 - DNA, 25 bp, Homo sapien
actggacggtgactggagctgattc

SEQ ID NO: 564827 - DNA, 25 bp, Homo sapien
tggacggtgactggagctgattcct

SEQ ID NO: 564828 - DNA, 25 bp, Homo sapien
aacttgctcggactggacggtgact

SEQ ID NO: 564829 - DNA, 25 bp, Homo sapien
tcccagcaacttgctcggactggac

SEQ ID NO: 564830 - DNA, 25 bp, Homo sapien
tataagaaatagaaacctgctccta

SEQ ID NO: 564831 - DNA, 25 bp, Homo sapien
ataagaaatagaaacctgctcctag

SEQ ID NO: 564832 - DNA, 25 bp, Homo sapien
tcacagaggaactcactcaagtgct

SEQ ID NO: 564833 - DNA, 25 bp, Homo sapien
cagaggaactcactcaagtgctcac

SEQ ID NO: 564834 - DNA, 25 bp, Homo sapien
gaccctgtgccatgagcctagacta

SEQ ID NO: 564835 - DNA, 25 bp, Homo sapien
tccaggttagggtattgagatgaca

SEQ ID NO: 564836 - DNA, 25 bp, Homo sapien
caaccaacagttttcgtgagaacag

SEQ ID NO: 564837 - DNA, 25 bp, Homo sapien
tcagttgcttcatgggaatgagctc

SEQ ID NO: 564838 - DNA, 25 bp, Homo sapien
aatctgaagatgagggctgacgaag

SEQ ID NO: 564839 - DNA, 25 bp, Homo sapien
aacttgttgccgatgctcggctggg

SEQ ID NO: 564840 - DNA, 25 bp, Homo sapien
tcagctaccaataatcacagcagta

SEQ ID NO: 564841 - DNA, 25 bp, Homo sapien
ttctgaaacttgttgccgatgctcg

SEQ ID NO: 564842 - DNA, 25 bp, Homo sapien
gattcccacagtagttgcaagggtt

SEQ ID NO: 564843 - DNA, 25 bp, Homo sapien
ctgattcccacagtagttgcaaggg

SEQ ID NO: 564844 - DNA, 25 bp, Homo sapien
ttcccacagtagttgcaagggtttc

SEQ ID NO: 564845 - DNA, 25 bp, Homo sapien
ccacagtagttgcaagggtttccat

SEQ ID NO: 564846 - DNA, 25 bp, Homo sapien
agacagatgtggcctagagaatagc

SEQ ID NO: 564847 - DNA, 25 bp, Homo sapien
gacagatgtggcctagagaatagcc

SEQ ID NO: 564848 - DNA, 25 bp, Homo sapien
actgtgtcaccatcgtactgttttg

SEQ ID NO: 564849 - DNA, 25 bp, Homo sapien
ttctacagggaccacgaagcttcag

SEQ ID NO: 564850 - DNA, 25 bp, Homo sapien
tgtgtctgcttgaagcgatgctccg

SEQ ID NO: 564851 - DNA, 25 bp, Homo sapien
catgtcgagtggtctgcagtggact

SEQ ID NO: 564852 - DNA, 25 bp, Homo sapien
tttccgtgcgcagtgcctgaggtgt

SEQ ID NO: 564853 - DNA, 25 bp, Homo sapien
ccctttgcttgcactggatggcgca

SEQ ID NO: 564854 - DNA, 25 bp, Homo sapien
tccagaaggttgctgttcattacag

SEQ ID NO: 564855 - DNA, 25 bp, Homo sapien
tcattacagctcgagtgtgctgggt

SEQ ID NO: 564856 - DNA, 25 bp, Homo sapien
tcatgtgtagggtctggtacaaaca

SEQ ID NO: 564857 - DNA, 25 bp, Homo sapien
atgtgtagggtctggtacaaacaaa

SEQ ID NO: 564858 - DNA, 25 bp, Homo sapien
catgtgtagggtctggtacaaacaa

SEQ ID NO: 564859 - DNA, 25 bp, Homo sapien
tgggagcatggcttcatgaccagga

SEQ ID NO: 564860 - DNA, 25 bp, Homo sapien
atgaggtccagcgaagataaaggca

SEQ ID NO: 564861 - DNA, 25 bp, Homo sapien
agatggactgggagcatggcttcat

SEQ ID NO: 564862 - DNA, 25 bp, Homo sapien
tgcatgaggtccagcgaagataaag

SEQ ID NO: 564863 - DNA, 25 bp, Homo sapien
tgtggttctagcagttctacaggta

SEQ ID NO: 564864 - DNA, 25 bp, Homo sapien
tctagcagttctacaggtaaaggct

SEQ ID NO: 564865 - DNA, 25 bp, Homo sapien
ctgggatgttgtggttctagcagtt

SEQ ID NO: 564866 - DNA, 25 bp, Homo sapien
gggaatttgtattcggctctgggct

SEQ ID NO: 564867 - DNA, 25 bp, Homo sapien
ctgatagcctgagcaaccccactga

SEQ ID NO: 564868 - DNA, 25 bp, Homo sapien
tagcctgagcaaccccactgactag

SEQ ID NO: 564869 - DNA, 25 bp, Homo sapien
tgggctgatagcctgagcaacccca

SEQ ID NO: 564870 - DNA, 25 bp, Homo sapien
atggttgggctgatagcctgagcaa

SEQ ID NO: 564871 - DNA, 25 bp, Homo sapien
tctttagtcatggattttagctgta

SEQ ID NO: 564872 - DNA, 25 bp, Homo sapien
tgtgaaccccttattcattatctgg

SEQ ID NO: 564873 - DNA, 25 bp, Homo sapien
tccctgcgatgagaaatgtgaaccc

SEQ ID NO: 564874 - DNA, 25 bp, Homo sapien
cattatctggagacaagcattatta

SEQ ID NO: 564875 - DNA, 25 bp, Homo sapien
ttggttgcactcttatcagttttgc

SEQ ID NO: 564876 - DNA, 25 bp, Homo sapien
gcagttggttgcactcttatcagtt

SEQ ID NO: 564877 - DNA, 25 bp, Homo sapien
gttggttgcactcttatcagttttg

SEQ ID NO: 564878 - DNA, 25 bp, Homo sapien
cagttggttgcactcttatcagttt

SEQ ID NO: 564879 - DNA, 25 bp, Homo sapien
caaatctttggcctcgggttttgag

SEQ ID NO: 564880 - DNA, 25 bp, Homo sapien
ctttggcctcgggttttgagaggtg

SEQ ID NO: 564881 - DNA, 25 bp, Homo sapien
ataatccaaatctttggcctcgggt

SEQ ID NO: 564882 - DNA, 25 bp, Homo sapien
tggcctcgggttttgagaggtgtct

SEQ ID NO: 564883 - DNA, 25 bp, Homo sapien
tatgaggcgatcataatcgcaaagc

SEQ ID NO: 564884 - DNA, 25 bp, Homo sapien
gatgccgtatatgaggcgatcataa

SEQ ID NO: 564885 - DNA, 25 bp, Homo sapien
caggatgcaaaaggatgccgtatat

SEQ ID NO: 564886 - DNA, 25 bp, Homo sapien
aatcgcaaagctgactttgactgtc

SEQ ID NO: 564887 - DNA, 25 bp, Homo sapien
accaacactttgtgtggtcctgcag

SEQ ID NO: 564888 - DNA, 25 bp, Homo sapien
cagtcaattctgtgaagaccggcag

SEQ ID NO: 564889 - DNA, 25 bp, Homo sapien
catattctcagagcaagtcttgtca

SEQ ID NO: 564890 - DNA, 25 bp, Homo sapien
gaccggcagtgtcttatttactgac

SEQ ID NO: 564891 - DNA, 25 bp, Homo sapien
caacatgggactgtactgattcact

SEQ ID NO: 564892 - DNA, 25 bp, Homo sapien
catgggactgtactgattcactttc

SEQ ID NO: 564893 - DNA, 25 bp, Homo sapien
acatgggactgtactgattcacttt

SEQ ID NO: 564894 - DNA, 25 bp, Homo sapien
aacatgggactgtactgattcactt

SEQ ID NO: 564895 - DNA, 25 bp, Homo sapien
tgctgggtgcaaactcaagagtcca

SEQ ID NO: 564896 - DNA, 25 bp, Homo sapien
gataagatgtccagcacactaagta

SEQ ID NO: 564897 - DNA, 25 bp, Homo sapien
tagggacagccgacacattgcttaa

SEQ ID NO: 564898 - DNA, 25 bp, Homo sapien
cattgcttaaggttgcaggccggaa

SEQ ID NO: 564899 - DNA, 25 bp, Homo sapien
tctcacaccagtgactacgatgtgt

SEQ ID NO: 564900 - DNA, 25 bp, Homo sapien
cacaccagtgactacgatgtgtgac

SEQ ID NO: 564901 - DNA, 25 bp, Homo sapien
caccagtgactacgatgtgtgactg

SEQ ID NO: 564902 - DNA, 25 bp, Homo sapien
cagtgactacgatgtgtgactgtgg

SEQ ID NO: 564903 - DNA, 25 bp, Homo sapien
ctcttgtttactggccgtggacatt

SEQ ID NO: 564904 - DNA, 25 bp, Homo sapien
gacgccggctacagaggtcacgttt

SEQ ID NO: 564905 - DNA, 25 bp, Homo sapien
ggtgtaatctctgttgcacatggag

SEQ ID NO: 564906 - DNA, 25 bp, Homo sapien
ggacatttctgttgcgtagttcttt

SEQ ID NO: 564907 - DNA, 25 bp, Homo sapien
ttaaataatgccgaagtgaaccact

SEQ ID NO: 564908 - DNA, 25 bp, Homo sapien
agggagaggcttcattacactggaa

SEQ ID NO: 564909 - DNA, 25 bp, Homo sapien
aagggagaggcttcattacactgga

SEQ ID NO: 564910 - DNA, 25 bp, Homo sapien
tgccgaagtgaaccactgatggaac

SEQ ID NO: 564911 - DNA, 25 bp, Homo sapien
tagtgacagcaatactttgaaccaa

SEQ ID NO: 564912 - DNA, 25 bp, Homo sapien
agcatagggcattaggttggcctca

SEQ ID NO: 564913 - DNA, 25 bp, Homo sapien
gcaaatttagagatcatcttccagg

SEQ ID NO: 564914 - DNA, 25 bp, Homo sapien
tcttatcacctgctatatacagagg

SEQ ID NO: 564915 - DNA, 25 bp, Homo sapien
tacagaggagatgcgtttggctctc

SEQ ID NO: 564916 - DNA, 25 bp, Homo sapien
cagcgtcacaaagaaggcaactaag

SEQ ID NO: 564917 - DNA, 25 bp, Homo sapien
tccgagggatgcctaggtagaaccg

SEQ ID NO: 564918 - DNA, 25 bp, Homo sapien
tgtgaaagagcccaaactggtgatg

SEQ ID NO: 564919 - DNA, 25 bp, Homo sapien
tgatgggtagatacaagatgccgcc

SEQ ID NO: 564920 - DNA, 25 bp, Homo sapien
cagagccaaggagaacattgactca

SEQ ID NO: 564921 - DNA, 25 bp, Homo sapien
cattgactcattcgtcgtgtgcaga

SEQ ID NO: 564922 - DNA, 25 bp, Homo sapien
tgtgcagacctttgcggaagatgcc

SEQ ID NO: 564923 - DNA, 25 bp, Homo sapien
ttcctgatcatactctgtgcactcc

SEQ ID NO: 564924 - DNA, 25 bp, Homo sapien
tgacctcatcacagaaaggcgattg

SEQ ID NO: 564925 - DNA, 25 bp, Homo sapien
tcatgccaggcctaaatgacctcat

SEQ ID NO: 564926 - DNA, 25 bp, Homo sapien
gtcttggctcctactacatggcaca

SEQ ID NO: 564927 - DNA, 25 bp, Homo sapien
cttttatctgccctacatattgcta

SEQ ID NO: 564928 - DNA, 25 bp, Homo sapien
aaagggtggaggtatctggatccca

SEQ ID NO: 564929 - DNA, 25 bp, Homo sapien
gctgaaatgaaagggtggaggtatc

SEQ ID NO: 564930 - DNA, 25 bp, Homo sapien
tgctaaaatcgcttttgaaaaatag

SEQ ID NO: 564931 - DNA, 25 bp, Homo sapien
tagaagtatgcgttacatcagcagt

SEQ ID NO: 564932 - DNA, 25 bp, Homo sapien
gaataaacatggtagcctgggtcag

SEQ ID NO: 564933 - DNA, 25 bp, Homo sapien
aaggtcagctccacccgtatgctgc

SEQ ID NO: 564934 - DNA, 25 bp, Homo sapien
gacgagattcgttagccttcccatg

SEQ ID NO: 564935 - DNA, 25 bp, Homo sapien
ccatggaatgatccccatccagggc

SEQ ID NO: 564936 - DNA, 25 bp, Homo sapien
aatctaggggtgctctcctccccag

SEQ ID NO: 564937 - DNA, 25 bp, Homo sapien
tccgcctgccgacccatggaatgat

SEQ ID NO: 564938 - DNA, 25 bp, Homo sapien
gacaccctcagtttctaatctaggg

SEQ ID NO: 564939 - DNA, 25 bp, Homo sapien
tgatacttccgaccgcagttcatgc

SEQ ID NO: 564940 - DNA, 25 bp, Homo sapien
tgaacatgcgaggaaggtttgctcc

SEQ ID NO: 564941 - DNA, 25 bp, Homo sapien
ccagtgaaacgtgaaacaggttcca

SEQ ID NO: 564942 - DNA, 25 bp, Homo sapien
gaaactttccggtggtgagatcact

SEQ ID NO: 564943 - DNA, 25 bp, Homo sapien
tgagagatcccgtgggataggctga

SEQ ID NO: 564944 - DNA, 25 bp, Homo sapien
ttagctgagagatcccgtgggatag

SEQ ID NO: 564945 - DNA, 25 bp, Homo sapien
gctgagggtccactgtgcaccatca

SEQ ID NO: 564946 - DNA, 25 bp, Homo sapien
tgctccatcacttagctgagagatc

SEQ ID NO: 564947 - DNA, 25 bp, Homo sapien
tatgaaccgccgtgctcatatccct

SEQ ID NO: 564948 - DNA, 25 bp, Homo sapien
aagtgtgataccctctggcaccagg

SEQ ID NO: 564949 - DNA, 25 bp, Homo sapien
tggacacacaggatatatgaaccgc

SEQ ID NO: 564950 - DNA, 25 bp, Homo sapien
tccctcggggcttgttttgagacca

SEQ ID NO: 564951 - DNA, 25 bp, Homo sapien
cccctgaactgaacctcttcctgga

SEQ ID NO: 564952 - DNA, 25 bp, Homo sapien
tgaactgaacctcttcctggacctg

SEQ ID NO: 564953 - DNA, 25 bp, Homo sapien
caccccctgaactgaacctcttcct

SEQ ID NO: 564954 - DNA, 25 bp, Homo sapien
tcctggacctggaaatctttcccat

SEQ ID NO: 564955 - DNA, 25 bp, Homo sapien
cggtgtcaacagatgaggaggtttg

SEQ ID NO: 564956 - DNA, 25 bp, Homo sapien
acttctggtgatctgacggtgtcaa

SEQ ID NO: 564957 - DNA, 25 bp, Homo sapien
gacggtgtcaacagatgaggaggtt

SEQ ID NO: 564958 - DNA, 25 bp, Homo sapien
cacttctggtgatctgacggtgtca

SEQ ID NO: 564959 - DNA, 25 bp, Homo sapien
ttgccagaaagttttgcctttgtca

SEQ ID NO: 564960 - DNA, 25 bp, Homo sapien
tcctgcctttgttctaagccccatc

SEQ ID NO: 564961 - DNA, 25 bp, Homo sapien
cgtgcattgagtctttgtctgaact

SEQ ID NO: 564962 - DNA, 25 bp, Homo sapien
gtctgaactgttcggggcttcctaa

SEQ ID NO: 564963 - DNA, 25 bp, Homo sapien
gaacctgttgtagaaagcctgtgct

SEQ ID NO: 564964 - DNA, 25 bp, Homo sapien
aacctgttgtagaaagcctgtgctg

SEQ ID NO: 564965 - DNA, 25 bp, Homo sapien
ggtcatccccagttaaattcctgca

SEQ ID NO: 564966 - DNA, 25 bp, Homo sapien
gagcaccgtcggagaagctctgtct

SEQ ID NO: 564967 - DNA, 25 bp, Homo sapien
gatgaccctactcttccggtttctg

SEQ ID NO: 564968 - DNA, 25 bp, Homo sapien
cagcagctcctactcgaatattgca

SEQ ID NO: 564969 - DNA, 25 bp, Homo sapien
gcacatcagcgtctcttggtgtctc

SEQ ID NO: 564970 - DNA, 25 bp, Homo sapien
tccatttgttatagcttcagaaccc

SEQ ID NO: 564971 - DNA, 25 bp, Homo sapien
gttctcccctgcacatcagcgtctc

SEQ ID NO: 564972 - DNA, 25 bp, Homo sapien
gacacattccatttgttatagcttc

SEQ ID NO: 564973 - DNA, 25 bp, Homo sapien
gcactgacttgcaggctacagattg

SEQ ID NO: 564974 - DNA, 25 bp, Homo sapien
gagcatccagatgaagcccagcttt

SEQ ID NO: 564975 - DNA, 25 bp, Homo sapien
caggtaggtcctaaagcagtcacat

SEQ ID NO: 564976 - DNA, 25 bp, Homo sapien
gatgacgagtctacaatgcaaggaa

SEQ ID NO: 564977 - DNA, 25 bp, Homo sapien
acctgagaggccgaaggacagaaac

SEQ ID NO: 564978 - DNA, 25 bp, Homo sapien
gaagtagagctacgagacctgagag

SEQ ID NO: 564979 - DNA, 25 bp, Homo sapien
agcaccatttcacggcgcacaggtt

SEQ ID NO: 564980 - DNA, 25 bp, Homo sapien
gcacaggttctatctccagcctaaa

SEQ ID NO: 564981 - DNA, 25 bp, Homo sapien
tgaatattagaggaaggcctggctt

SEQ ID NO: 564982 - DNA, 25 bp, Homo sapien
ggctttgtaagagtccagtccgata

SEQ ID NO: 564983 - DNA, 25 bp, Homo sapien
gacacagaaacacgtgcacacacgg

SEQ ID NO: 564984 - DNA, 25 bp, Homo sapien
tgtggacacaactatgacagcatca

SEQ ID NO: 564985 - DNA, 25 bp, Homo sapien
ctccttgccgtaaaactgtgcctgc

SEQ ID NO: 564986 - DNA, 25 bp, Homo sapien
ctgcagcaaggcctgagcacaacca

SEQ ID NO: 564987 - DNA, 25 bp, Homo sapien
cctgcagcaaggcctgagcacaacc

SEQ ID NO: 564988 - DNA, 25 bp, Homo sapien
tagaagctgcttcttaaagctctga

SEQ ID NO: 564989 - DNA, 25 bp, Homo sapien
tgtgcagagcgagactgccccgatt

SEQ ID NO: 564990 - DNA, 25 bp, Homo sapien
cagcaggcagctattgctctgggag

SEQ ID NO: 564991 - DNA, 25 bp, Homo sapien
catttgcagaagtgtaagtatgtgc

SEQ ID NO: 564992 - DNA, 25 bp, Homo sapien
ggagttctttggtcctcgacttgca

SEQ ID NO: 564993 - DNA, 25 bp, Homo sapien
aacctgcgccctggctacgtggagg

SEQ ID NO: 564994 - DNA, 25 bp, Homo sapien
catgagacctggaaagatctccaca

SEQ ID NO: 564995 - DNA, 25 bp, Homo sapien
acttgcaggaacctgcgccctggct

SEQ ID NO: 564996 - DNA, 25 bp, Homo sapien
cagtagtatctaagattgcattccc

SEQ ID NO: 564997 - DNA, 25 bp, Homo sapien
gtatctaagattgcattccccaaaa

SEQ ID NO: 564998 - DNA, 25 bp, Homo sapien
gatgacacagtagtatctaagattg

SEQ ID NO: 564999 - DNA, 25 bp, Homo sapien
gggacagaggatgacacagtagtat

SEQ ID NO: 565000 - DNA, 25 bp, Homo sapien
ttcctgtgtcatagctaactagttg

SEQ ID NO: 565001 - DNA, 25 bp, Homo sapien
aacatggtggaaaattcatctgaaa

SEQ ID NO: 565002 - DNA, 25 bp, Homo sapien
tgtccctggcatccaacatggtgga

SEQ ID NO: 565003 - DNA, 25 bp, Homo sapien
cttgggtaatgatgaatctctgagg

SEQ ID NO: 565004 - DNA, 25 bp, Homo sapien
gcttgccttggcggctgtactgagg

SEQ ID NO: 565005 - DNA, 25 bp, Homo sapien
ctgccctgccacattgctgccctcc

SEQ ID NO: 565006 - DNA, 25 bp, Homo sapien
ccttggcggctgtactgagggagat

SEQ ID NO: 565007 - DNA, 25 bp, Homo sapien
ggcggctgtactgagggagatgtat

SEQ ID NO: 565008 - DNA, 25 bp, Homo sapien
acagcagaaagagcatagggagcgc

SEQ ID NO: 565009 - DNA, 25 bp, Homo sapien
gagcgcgcgggcagacctcaggctt

SEQ ID NO: 565010 - DNA, 25 bp, Homo sapien
gcgggcagacctcaggcttgggaag

SEQ ID NO: 565011 - DNA, 25 bp, Homo sapien
aggatgaaagggtccagacagcaga

SEQ ID NO: 565012 - DNA, 25 bp, Homo sapien
tcacacagcttgtgaccatcaaaga

SEQ ID NO: 565013 - DNA, 25 bp, Homo sapien
taaatttatgaggaggggtcatcac

SEQ ID NO: 565014 - DNA, 25 bp, Homo sapien
cacagcttgtgaccatcaaagatgg

SEQ ID NO: 565015 - DNA, 25 bp, Homo sapien
ccatcaaagatggtcttctaagttt

SEQ ID NO: 565016 - DNA, 25 bp, Homo sapien
atttgttggctcgtgggttggttgg

SEQ ID NO: 565017 - DNA, 25 bp, Homo sapien
ctcgtgggttggttgggtgcttcac

SEQ ID NO: 565018 - DNA, 25 bp, Homo sapien
cgtgggttggttgggtgcttcacct

SEQ ID NO: 565019 - DNA, 25 bp, Homo sapien
cacatttgttggctcgtgggttggt

SEQ ID NO: 565020 - DNA, 25 bp, Homo sapien
tcttcccattacaagctaaccaatt

SEQ ID NO: 565021 - DNA, 25 bp, Homo sapien
ttacaagctaaccaattaaaagtga

SEQ ID NO: 565022 - DNA, 25 bp, Homo sapien
caactgtgaaaaggttccagctcct

SEQ ID NO: 565023 - DNA, 25 bp, Homo sapien
gtgaaaaggttccagctcctaaaga

SEQ ID NO: 565024 - DNA, 25 bp, Homo sapien
ggagattcactcatccgtgaatctg

SEQ ID NO: 565025 - DNA, 25 bp, Homo sapien
ttttctttaggaggaggagattcac

SEQ ID NO: 565026 - DNA, 25 bp, Homo sapien
gtttctaggtagtgaaaaatctgtg

SEQ ID NO: 565027 - DNA, 25 bp, Homo sapien
gctagaagggctggaatgttttctt

SEQ ID NO: 565028 - DNA, 25 bp, Homo sapien
taaaagacaattatcttcggcattt

SEQ ID NO: 565029 - DNA, 25 bp, Homo sapien
tttaaaagacaattatcttcggcat

SEQ ID NO: 565030 - DNA, 25 bp, Homo sapien
ttaaaagacaattatcttcggcatt

SEQ ID NO: 565031 - DNA, 25 bp, Homo sapien
ctttaaaagacaattatcttcggca

SEQ ID NO: 565032 - DNA, 25 bp, Homo sapien
gaagaatgtcggatccatgatggca

SEQ ID NO: 565033 - DNA, 25 bp, Homo sapien
aaaggaagaatgtcggatccatgat

SEQ ID NO: 565034 - DNA, 25 bp, Homo sapien
atgatggcagccctgactgatgcag

SEQ ID NO: 565035 - DNA, 25 bp, Homo sapien
tgatggcagccctgactgatgcaga

SEQ ID NO: 565036 - DNA, 25 bp, Homo sapien
catctcttccactgctttgctcaat

SEQ ID NO: 565037 - DNA, 25 bp, Homo sapien
atctcttccactgctttgctcaata

SEQ ID NO: 565038 - DNA, 25 bp, Homo sapien
tctcttccactgctttgctcaatac

SEQ ID NO: 565039 - DNA, 25 bp, Homo sapien
taagagtacgaagattctaggatac

SEQ ID NO: 565040 - DNA, 25 bp, Homo sapien
gggaactgcagtaagagtacgaaga

SEQ ID NO: 565041 - DNA, 25 bp, Homo sapien
ggcatgaaagggaataaggacaaca

SEQ ID NO: 565042 - DNA, 25 bp, Homo sapien
tggtctgctggttaagataaaccca

SEQ ID NO: 565043 - DNA, 25 bp, Homo sapien
attccccgcaaagcgccccatggcc

SEQ ID NO: 565044 - DNA, 25 bp, Homo sapien
caggacgaagttctcgtcaacaaac

SEQ ID NO: 565045 - DNA, 25 bp, Homo sapien
ttagcagtgcaggtaaaaaactggg

SEQ ID NO: 565046 - DNA, 25 bp, Homo sapien
tgccgaaccactcggtcttagcagt

SEQ ID NO: 565047 - DNA, 25 bp, Homo sapien
ggcagtatgaggcgcccagtggtgg

SEQ ID NO: 565048 - DNA, 25 bp, Homo sapien
cagtatgaggcgcccagtggtggca

SEQ ID NO: 565049 - DNA, 25 bp, Homo sapien
ctggcagtatgaggcgcccagtggt

SEQ ID NO: 565050 - DNA, 25 bp, Homo sapien
gtatgaggcgcccagtggtggcagt

SEQ ID NO: 565051 - DNA, 25 bp, Homo sapien
gattaacactttagaacacaacctc

SEQ ID NO: 565052 - DNA, 25 bp, Homo sapien
tttaagctcttagccaccatttgca

SEQ ID NO: 565053 - DNA, 25 bp, Homo sapien
tgtgagagctttgtcgacatgagcc

SEQ ID NO: 565054 - DNA, 25 bp, Homo sapien
caacctctatgtttgcttgtagcag

SEQ ID NO: 565055 - DNA, 25 bp, Homo sapien
tccgacttcacaacaggttaggaag

SEQ ID NO: 565056 - DNA, 25 bp, Homo sapien
ggcccattgtcccatggctgaaggt

SEQ ID NO: 565057 - DNA, 25 bp, Homo sapien
tgaaggtcctgagacgcagtgagcc

SEQ ID NO: 565058 - DNA, 25 bp, Homo sapien
gatggaacctttaaatccgacttca

SEQ ID NO: 565059 - DNA, 25 bp, Homo sapien
tgtctgcagtgacctacgcacatct

SEQ ID NO: 565060 - DNA, 25 bp, Homo sapien
tgctgtcatactaatagcacttggg

SEQ ID NO: 565061 - DNA, 25 bp, Homo sapien
taggtccttgtaaataccacaatgg

SEQ ID NO: 565062 - DNA, 25 bp, Homo sapien
tggaatgtgcgtctctttgtcagaa

SEQ ID NO: 565063 - DNA, 25 bp, Homo sapien
tatattgtcccattgttgccggccg

SEQ ID NO: 565064 - DNA, 25 bp, Homo sapien
tgccggccgtttgcgctcagttaga

SEQ ID NO: 565065 - DNA, 25 bp, Homo sapien
tccgtggccaatgctatttttcctg

SEQ ID NO: 565066 - DNA, 25 bp, Homo sapien
gttagatttcccacacagcggacag

SEQ ID NO: 565067 - DNA, 25 bp, Homo sapien
ccctttccaggagcgatgcaaactt

SEQ ID NO: 565068 - DNA, 25 bp, Homo sapien
tatctcaggctgtgataagatcccc

SEQ ID NO: 565069 - DNA, 25 bp, Homo sapien
tcccaatttgttgcgaaggttctca

SEQ ID NO: 565070 - DNA, 25 bp, Homo sapien
tttccacctggagacatagctagcc

SEQ ID NO: 565071 - DNA, 25 bp, Homo sapien
aatgcctttccctcggagcctccgc

SEQ ID NO: 565072 - DNA, 25 bp, Homo sapien
cagccacgcttccatttatctggaa

SEQ ID NO: 565073 - DNA, 25 bp, Homo sapien
tggaatgcctttccctcggagcctc

SEQ ID NO: 565074 - DNA, 25 bp, Homo sapien
tgcagccacgcttccatttatctgg

SEQ ID NO: 565075 - DNA, 25 bp, Homo sapien
tcactgtgcctcctgagcttgtcat

SEQ ID NO: 565076 - DNA, 25 bp, Homo sapien
aggaagtgacatcactgtgcctcct

SEQ ID NO: 565077 - DNA, 25 bp, Homo sapien
acatcactgtgcctcctgagcttgt

SEQ ID NO: 565078 - DNA, 25 bp, Homo sapien
gtgacatcactgtgcctcctgagct

SEQ ID NO: 565079 - DNA, 25 bp, Homo sapien
gtagattgccatcgacaccttatga

SEQ ID NO: 565080 - DNA, 25 bp, Homo sapien
tgaagaaggcttccataactggagg

SEQ ID NO: 565081 - DNA, 25 bp, Homo sapien
cataggtgaccgtgtgggagactcc

SEQ ID NO: 565082 - DNA, 25 bp, Homo sapien
cactgaggcccctaagttgcagata

SEQ ID NO: 565083 - DNA, 25 bp, Homo sapien
gcacctcgctgaggagattgctctg

SEQ ID NO: 565084 - DNA, 25 bp, Homo sapien
ctggcagaacctacatcatggctct

SEQ ID NO: 565085 - DNA, 25 bp, Homo sapien
cctggcacctcgctgaggagattgc

SEQ ID NO: 565086 - DNA, 25 bp, Homo sapien
ggcagaacctacatcatggctctgt

SEQ ID NO: 565087 - DNA, 25 bp, Homo sapien
cattttgctggcacaatctgccact

SEQ ID NO: 565088 - DNA, 25 bp, Homo sapien
aaagccttgtcaaagtccagacttt

SEQ ID NO: 565089 - DNA, 25 bp, Homo sapien
tggccaccatgttacagaggacaga

SEQ ID NO: 565090 - DNA, 25 bp, Homo sapien
caactaagaaatctggtggccacca

SEQ ID NO: 565091 - DNA, 25 bp, Homo sapien
cttcaccagatgcccaagttgtcat

SEQ ID NO: 565092 - DNA, 25 bp, Homo sapien
gctcttcaccagatgcccaagttgt

SEQ ID NO: 565093 - DNA, 25 bp, Homo sapien
atggcagctggctcttcaccagatg

SEQ ID NO: 565094 - DNA, 25 bp, Homo sapien
tggcagctggctcttcaccagatgc

SEQ ID NO: 565095 - DNA, 25 bp, Homo sapien
acttgacctcggaccaagtcctgtg

SEQ ID NO: 565096 - DNA, 25 bp, Homo sapien
ttacacttgacctcggaccaagtcc

SEQ ID NO: 565097 - DNA, 25 bp, Homo sapien
cacttgacctcggaccaagtcctgt

SEQ ID NO: 565098 - DNA, 25 bp, Homo sapien
tacacttgacctcggaccaagtcct

SEQ ID NO: 565099 - DNA, 25 bp, Homo sapien
gccagtcggcctctgctgcatagat

SEQ ID NO: 565100 - DNA, 25 bp, Homo sapien
tcacgcgtggacagtgatggaatgt

SEQ ID NO: 565101 - DNA, 25 bp, Homo sapien
tgcatagataggacgggaaaggaac

SEQ ID NO: 565102 - DNA, 25 bp, Homo sapien
tgtgcagaagcaacactgtggtgat

SEQ ID NO: 565103 - DNA, 25 bp, Homo sapien
tttccctggtgttgcatcgtttgca

SEQ ID NO: 565104 - DNA, 25 bp, Homo sapien
ggtgttgcatcgtttgcagcaagta

SEQ ID NO: 565105 - DNA, 25 bp, Homo sapien
tgttgcatcgtttgcagcaagtaag

SEQ ID NO: 565106 - DNA, 25 bp, Homo sapien
ccctggtgttgcatcgtttgcagca

SEQ ID NO: 565107 - DNA, 25 bp, Homo sapien
ctggattccaggtatgaatactcat

SEQ ID NO: 565108 - DNA, 25 bp, Homo sapien
caccagataaaaggccctggctttt

SEQ ID NO: 565109 - DNA, 25 bp, Homo sapien
ggaccagttccgtgaaatcattgac

SEQ ID NO: 565110 - DNA, 25 bp, Homo sapien
cttggtgtgatataggcgtagcctc

SEQ ID NO: 565111 - DNA, 25 bp, Homo sapien
tgacaagataccagcggaccagttc

SEQ ID NO: 565112 - DNA, 25 bp, Homo sapien
tctggcatctactgttcattcccat

SEQ ID NO: 565113 - DNA, 25 bp, Homo sapien
ttcatctggcatctactgttcattc

SEQ ID NO: 565114 - DNA, 25 bp, Homo sapien
tctttcatctggcatctactgttca

SEQ ID NO: 565115 - DNA, 25 bp, Homo sapien
tatctttcatctggcatctactgtt

SEQ ID NO: 565116 - DNA, 25 bp, Homo sapien
ttttctgcgatccattccctcagtg

SEQ ID NO: 565117 - DNA, 25 bp, Homo sapien
tgtgttcccggctccggatcaggcc

SEQ ID NO: 565118 - DNA, 25 bp, Homo sapien
actctgtattgttctgctcctcccg

SEQ ID NO: 565119 - DNA, 25 bp, Homo sapien
ccacccacggagacaatttatacga

SEQ ID NO: 565120 - DNA, 25 bp, Homo sapien
agatttgaccgacatgaattgtaag

SEQ ID NO: 565121 - DNA, 25 bp, Homo sapien
ttgaccgacatgaattgtaagaagc

SEQ ID NO: 565122 - DNA, 25 bp, Homo sapien
gatactaagatttgaccgacatgaa

SEQ ID NO: 565123 - DNA, 25 bp, Homo sapien
gacatgaattgtaagaagcagcacc

SEQ ID NO: 565124 - DNA, 25 bp, Homo sapien
gacaacaccagacagtcaagtttct

SEQ ID NO: 565125 - DNA, 25 bp, Homo sapien
caagctccgaagtggttgcctttct

SEQ ID NO: 565126 - DNA, 25 bp, Homo sapien
ttgccatgtttcaagctgagctgag

SEQ ID NO: 565127 - DNA, 25 bp, Homo sapien
taaaatcaaattctcctaattgcca

SEQ ID NO: 565128 - DNA, 25 bp, Homo sapien
ggaaatactgtcctggctccacaca

SEQ ID NO: 565129 - DNA, 25 bp, Homo sapien
gggctgggttctctcctcatggaaa

SEQ ID NO: 565130 - DNA, 25 bp, Homo sapien
tgggctgccttctgtccagacaccc

SEQ ID NO: 565131 - DNA, 25 bp, Homo sapien
ccttctgtccagacacccttcttgc

SEQ ID NO: 565132 - DNA, 25 bp, Homo sapien
gtggagagggggttgatgagactcc

SEQ ID NO: 565133 - DNA, 25 bp, Homo sapien
aaagtggagagggggttgatgagac

SEQ ID NO: 565134 - DNA, 25 bp, Homo sapien
aagtggagagggggttgatgagact

SEQ ID NO: 565135 - DNA, 25 bp, Homo sapien
agtggagagggggttgatgagactc

SEQ ID NO: 565136 - DNA, 25 bp, Homo sapien
tgttgtaggccaaaagataccacag

SEQ ID NO: 565137 - DNA, 25 bp, Homo sapien
ttagctgaggccacacactcggtgg

SEQ ID NO: 565138 - DNA, 25 bp, Homo sapien
catttaccaggagctaggtgctaca

SEQ ID NO: 565139 - DNA, 25 bp, Homo sapien
tagaagcaggttgaggaacttagct

SEQ ID NO: 565140 - DNA, 25 bp, Homo sapien
ggatgtcccggagtgcaggccattt

SEQ ID NO: 565141 - DNA, 25 bp, Homo sapien
tttggaaaggactccaggacatctg

SEQ ID NO: 565142 - DNA, 25 bp, Homo sapien
tgtcccggagtgcaggccatttgga

SEQ ID NO: 565143 - DNA, 25 bp, Homo sapien
ccctgaagcaatggacacagggact

SEQ ID NO: 565144 - DNA, 25 bp, Homo sapien
tttagtctcacatcatctccaggag

SEQ ID NO: 565145 - DNA, 25 bp, Homo sapien
aagtgcaagttgtaggcctttaatt

SEQ ID NO: 565146 - DNA, 25 bp, Homo sapien
tacaatatcaacataagacggtgcc

SEQ ID NO: 565147 - DNA, 25 bp, Homo sapien
tgttgcagctcataattggtttttc

SEQ ID NO: 565148 - DNA, 25 bp, Homo sapien
tactggaaatcagctggcagaacac

SEQ ID NO: 565149 - DNA, 25 bp, Homo sapien
agaaggtaggtgacgatgcggccat

SEQ ID NO: 565150 - DNA, 25 bp, Homo sapien
gtgtgcaagagaagggatactccct

SEQ ID NO: 565151 - DNA, 25 bp, Homo sapien
cgatgcggccatggctggtgtgcaa

SEQ ID NO: 565152 - DNA, 25 bp, Homo sapien
cgttcatgggttctctgttttcaga

SEQ ID NO: 565153 - DNA, 25 bp, Homo sapien
aagcaagggaacaggattattgtcc

SEQ ID NO: 565154 - DNA, 25 bp, Homo sapien
tgtccttccctccactcaagtttat

SEQ ID NO: 565155 - DNA, 25 bp, Homo sapien
agtttattgtcttatcgttcatggg

SEQ ID NO: 565156 - DNA, 25 bp, Homo sapien
tagctactaatatactccggaatgt

SEQ ID NO: 565157 - DNA, 25 bp, Homo sapien
gtccttcctacttttaatatgccac

SEQ ID NO: 565158 - DNA, 25 bp, Homo sapien
atacatgagtttatacagtccttcc

SEQ ID NO: 565159 - DNA, 25 bp, Homo sapien
aattaagtgcaaacatgagaatgct

SEQ ID NO: 565160 - DNA, 25 bp, Homo sapien
caatataacgtatcaccaaatgtaa

SEQ ID NO: 565161 - DNA, 25 bp, Homo sapien
aactgaaatttctctattgcagata

SEQ ID NO: 565162 - DNA, 25 bp, Homo sapien
tgccatttagcttagcagtaccaac

SEQ ID NO: 565163 - DNA, 25 bp, Homo sapien
acagggaaatctatgccatacattt

SEQ ID NO: 565164 - DNA, 25 bp, Homo sapien
caatgaagactgcagtgtttctccc

SEQ ID NO: 565165 - DNA, 25 bp, Homo sapien
ggcattatctccaaacaaacgctaa

SEQ ID NO: 565166 - DNA, 25 bp, Homo sapien
caagaatggaaacgcctatggcacg

SEQ ID NO: 565167 - DNA, 25 bp, Homo sapien
cagtgtgtacctcttatgtaaagca

SEQ ID NO: 565168 - DNA, 25 bp, Homo sapien
ttttttgtatttgcgcagaccattt

SEQ ID NO: 565169 - DNA, 25 bp, Homo sapien
tatttgcgcagaccattttaagatt

SEQ ID NO: 565170 - DNA, 25 bp, Homo sapien
tcagtctcaacaaaacactattaaa

SEQ ID NO: 565171 - DNA, 25 bp, Homo sapien
tttcagtctcaacaaaacactatta

SEQ ID NO: 565172 - DNA, 25 bp, Homo sapien
gcatactgtacgcatgtcgcagggt

SEQ ID NO: 565173 - DNA, 25 bp, Homo sapien
tggttacacagacagaagcaagcgg

SEQ ID NO: 565174 - DNA, 25 bp, Homo sapien
tacactcagcaggtgaaatgttccc

SEQ ID NO: 565175 - DNA, 25 bp, Homo sapien
aaagaagtccagatatgtgtccgca

SEQ ID NO: 565176 - DNA, 25 bp, Homo sapien
gctgctgtggtgacactcgtccttc

SEQ ID NO: 565177 - DNA, 25 bp, Homo sapien
cctctaatagaagctgacaggacat

SEQ ID NO: 565178 - DNA, 25 bp, Homo sapien
cagttgccatttttcacggcgggcc

SEQ ID NO: 565179 - DNA, 25 bp, Homo sapien
cgagggtaaaagcacccagtttctg

SEQ ID NO: 565180 - DNA, 25 bp, Homo sapien
tccaaagctcagtccggctgtgttc

SEQ ID NO: 565181 - DNA, 25 bp, Homo sapien
acactgtgagcgatgtcctgtgaca

SEQ ID NO: 565182 - DNA, 25 bp, Homo sapien
ttccagcgtgttgatgcctccaaag

SEQ ID NO: 565183 - DNA, 25 bp, Homo sapien
tctcctgacgtcacagcattctggt

SEQ ID NO: 565184 - DNA, 25 bp, Homo sapien
atatttttatgcaagctatataagt

SEQ ID NO: 565185 - DNA, 25 bp, Homo sapien
tatttttatgcaagctatataagtc

SEQ ID NO: 565186 - DNA, 25 bp, Homo sapien
tttcttcttaggcattcaaaggtaa

SEQ ID NO: 565187 - DNA, 25 bp, Homo sapien
aggcattcaaaggtaaacttcacct

SEQ ID NO: 565188 - DNA, 25 bp, Homo sapien
tcttcttaggcattcaaaggtaaac

SEQ ID NO: 565189 - DNA, 25 bp, Homo sapien
cttaggcattcaaaggtaaacttca

SEQ ID NO: 565190 - DNA, 25 bp, Homo sapien
tcaggccaataaatgaacccttctt

SEQ ID NO: 565191 - DNA, 25 bp, Homo sapien
actggtttgctgatctacaactaca

SEQ ID NO: 565192 - DNA, 25 bp, Homo sapien
aacttgctcagaaactggtttgctg

SEQ ID NO: 565193 - DNA, 25 bp, Homo sapien
atgttaggtaaataagaagctcttc

SEQ ID NO: 565194 - DNA, 25 bp, Homo sapien
gacattacagtaccaacctcacagt

SEQ ID NO: 565195 - DNA, 25 bp, Homo sapien
gaaagcctacctacagaaatgacct

SEQ ID NO: 565196 - DNA, 25 bp, Homo sapien
tccttgcacaaacaagtacaattgc

SEQ ID NO: 565197 - DNA, 25 bp, Homo sapien
tcaagtcaaggcatctctcaagggc

SEQ ID NO: 565198 - DNA, 25 bp, Homo sapien
tggagaggtgtgattcatccctgct

SEQ ID NO: 565199 - DNA, 25 bp, Homo sapien
gaaaggagtgctccacctcggtgga

SEQ ID NO: 565200 - DNA, 25 bp, Homo sapien
aattaaggtattgtatggccatgag

SEQ ID NO: 565201 - DNA, 25 bp, Homo sapien
ctggagctaatttaggcaaacaaaa

SEQ ID NO: 565202 - DNA, 25 bp, Homo sapien
agcagggaagactggaattgtggat

SEQ ID NO: 565203 - DNA, 25 bp, Homo sapien
cacacccctgggggaacaagtccag

SEQ ID NO: 565204 - DNA, 25 bp, Homo sapien
gaattgtggatttgctgggtcccag

SEQ ID NO: 565205 - DNA, 25 bp, Homo sapien
catccatatccgccatacagcaggg

SEQ ID NO: 565206 - DNA, 25 bp, Homo sapien
gaaagatagtgtggctattccttaa

SEQ ID NO: 565207 - DNA, 25 bp, Homo sapien
gtgcacacgttggtctactctcctt

SEQ ID NO: 565208 - DNA, 25 bp, Homo sapien
cgttggtctactctccttgaaagaa

SEQ ID NO: 565209 - DNA, 25 bp, Homo sapien
acagctggcagtgcacacgttggtc

SEQ ID NO: 565210 - DNA, 25 bp, Homo sapien
tctgaagcatgcagaattcgccttc

SEQ ID NO: 565211 - DNA, 25 bp, Homo sapien
gccttcatacaagagttggaatttg

SEQ ID NO: 565212 - DNA, 25 bp, Homo sapien
ggaatttgttctttgcttgaacaaa

SEQ ID NO: 565213 - DNA, 25 bp, Homo sapien
tgagctccctcgatgcctttgtaat

SEQ ID NO: 565214 - DNA, 25 bp, Homo sapien
cactgttaaaggtaagcaatcaagg

SEQ ID NO: 565215 - DNA, 25 bp, Homo sapien
tcttcagcttggttcactgttaaag

SEQ ID NO: 565216 - DNA, 25 bp, Homo sapien
aaggtaagcaatcaaggatttctcc

SEQ ID NO: 565217 - DNA, 25 bp, Homo sapien
gcttggttcactgttaaaggtaagc

SEQ ID NO: 565218 - DNA, 25 bp, Homo sapien
gagaggcctccgtagatgacttcat

SEQ ID NO: 565219 - DNA, 25 bp, Homo sapien
gcaatataaatggacacctcgtctg

SEQ ID NO: 565220 - DNA, 25 bp, Homo sapien
cgtctgaacctccaaacagtattgc

SEQ ID NO: 565221 - DNA, 25 bp, Homo sapien
aactgtgtgacttcaaaatactggg

SEQ ID NO: 565222 - DNA, 25 bp, Homo sapien
tgtcttatttgacctcttgccagcc

SEQ ID NO: 565223 - DNA, 25 bp, Homo sapien
cagcttccggaaatgccactgggac

SEQ ID NO: 565224 - DNA, 25 bp, Homo sapien
cagccctgatcatggttgattgaac

SEQ ID NO: 565225 - DNA, 25 bp, Homo sapien
cctggtgtccctcttagtcctctgc

SEQ ID NO: 565226 - DNA, 25 bp, Homo sapien
gtcaatcctgcaaatgacagcaatt

SEQ ID NO: 565227 - DNA, 25 bp, Homo sapien
agcaatttcctcctttgcagtcgcc

SEQ ID NO: 565228 - DNA, 25 bp, Homo sapien
caatttcctcctttgcagtcgccat

SEQ ID NO: 565229 - DNA, 25 bp, Homo sapien
aatcctgcaaatgacagcaatttcc

SEQ ID NO: 565230 - DNA, 25 bp, Homo sapien
cctgaatggagtgtgcatggttcct

SEQ ID NO: 565231 - DNA, 25 bp, Homo sapien
gattctactgagatctggccccaca

SEQ ID NO: 565232 - DNA, 25 bp, Homo sapien
caactcatcttgtcatctctgctgg

SEQ ID NO: 565233 - DNA, 25 bp, Homo sapien
gctggcttcgcaggtacccaagcgt

SEQ ID NO: 565234 - DNA, 25 bp, Homo sapien
ggtatctgcccacttgtaagccttg

SEQ ID NO: 565235 - DNA, 25 bp, Homo sapien
ggaatggtcatttctatagccccta

SEQ ID NO: 565236 - DNA, 25 bp, Homo sapien
caggctcactgatgcttgtagagaa

SEQ ID NO: 565237 - DNA, 25 bp, Homo sapien
caaagggatagtgaatgtttccgac

SEQ ID NO: 565238 - DNA, 25 bp, Homo sapien
tgatgcagcactttggagagcttca

SEQ ID NO: 565239 - DNA, 25 bp, Homo sapien
cagcactttggagagcttcagagct

SEQ ID NO: 565240 - DNA, 25 bp, Homo sapien
ctttggaggactgtagggactgtga

SEQ ID NO: 565241 - DNA, 25 bp, Homo sapien
tgcagcactttggagagcttcagag

SEQ ID NO: 565242 - DNA, 25 bp, Homo sapien
tctgctcttactccacactgtgtac

SEQ ID NO: 565243 - DNA, 25 bp, Homo sapien
cttccctctgctcttactccacact

SEQ ID NO: 565244 - DNA, 25 bp, Homo sapien
tccctctgctcttactccacactgt

SEQ ID NO: 565245 - DNA, 25 bp, Homo sapien
cctctgctcttactccacactgtgt

SEQ ID NO: 565246 - DNA, 25 bp, Homo sapien
ctcagttccctcgatgaatgctgtt

SEQ ID NO: 565247 - DNA, 25 bp, Homo sapien
agttccctcgatgaatgctgttggc

SEQ ID NO: 565248 - DNA, 25 bp, Homo sapien
gcccatgcaccttccaacctccagt

SEQ ID NO: 565249 - DNA, 25 bp, Homo sapien
cctcgatgaatgctgttggctgcgt

SEQ ID NO: 565250 - DNA, 25 bp, Homo sapien
acagaccttgttatgtttccccaag

SEQ ID NO: 565251 - DNA, 25 bp, Homo sapien
tgcaagtcttcaccaatgagaatgt

SEQ ID NO: 565252 - DNA, 25 bp, Homo sapien
aaacctaggaagaacgttctgagct

SEQ ID NO: 565253 - DNA, 25 bp, Homo sapien
ttccccaagtccataccaataggtc

SEQ ID NO: 565254 - DNA, 25 bp, Homo sapien
gagatggtgtctcgctcttgctctt

SEQ ID NO: 565255 - DNA, 25 bp, Homo sapien
agatggtgtctcgctcttgctcttg

SEQ ID NO: 565256 - DNA, 25 bp, Homo sapien
atggtgtctcgctcttgctcttgtt

SEQ ID NO: 565257 - DNA, 25 bp, Homo sapien
gatggtgtctcgctcttgctcttgt

SEQ ID NO: 565258 - DNA, 25 bp, Homo sapien
atctttcacgcatgttgatcagact

SEQ ID NO: 565259 - DNA, 25 bp, Homo sapien
aaatatctttcacgcatgttgatca

SEQ ID NO: 565260 - DNA, 25 bp, Homo sapien
tatctttcacgcatgttgatcagac

SEQ ID NO: 565261 - DNA, 25 bp, Homo sapien
atatctttcacgcatgttgatcaga

SEQ ID NO: 565262 - DNA, 25 bp, Homo sapien
agctacagccggagcaaagcccttt

SEQ ID NO: 565263 - DNA, 25 bp, Homo sapien
gaatacagacccagtctctacgcat

SEQ ID NO: 565264 - DNA, 25 bp, Homo sapien
ctttccagtactggaggcggccctg

SEQ ID NO: 565265 - DNA, 25 bp, Homo sapien
cggccctgggtcagtggaatacaga

SEQ ID NO: 565266 - DNA, 25 bp, Homo sapien
tggatttagagagaatgccgttccc

SEQ ID NO: 565267 - DNA, 25 bp, Homo sapien
ggatgaggacacctaaagacctctg

SEQ ID NO: 565268 - DNA, 25 bp, Homo sapien
aataccacggtcaggatgaagtgcg

SEQ ID NO: 565269 - DNA, 25 bp, Homo sapien
gcacacaagctctagacgaagtctt

SEQ ID NO: 565270 - DNA, 25 bp, Homo sapien
ttcctccgtggtattaatgggatct

SEQ ID NO: 565271 - DNA, 25 bp, Homo sapien
cttcctccgtggtattaatgggatc

SEQ ID NO: 565272 - DNA, 25 bp, Homo sapien
gaggacaggtctaaactctctgctt

SEQ ID NO: 565273 - DNA, 25 bp, Homo sapien
atttcaagaggacaggtctaaactc

SEQ ID NO: 565274 - DNA, 25 bp, Homo sapien
tgtgtagcacccttgcctttgtatt

SEQ ID NO: 565275 - DNA, 25 bp, Homo sapien
ccttgggcatcttattctgaaattt

SEQ ID NO: 565276 - DNA, 25 bp, Homo sapien
gcaaagatgccaatacctggacact

SEQ ID NO: 565277 - DNA, 25 bp, Homo sapien
tgtaagatgcaaagatgccaatacc

SEQ ID NO: 565278 - DNA, 25 bp, Homo sapien
cctcatgttaaacctctcttccatt

SEQ ID NO: 565279 - DNA, 25 bp, Homo sapien
agatgcaaagatgccaatacctgga

SEQ ID NO: 565280 - DNA, 25 bp, Homo sapien
tgttgacatcaaagggtcctcagtt

SEQ ID NO: 565281 - DNA, 25 bp, Homo sapien
tgaaataaaagtgacgtctgcccct

SEQ ID NO: 565282 - DNA, 25 bp, Homo sapien
tcagttcctagtatgtccccttgga

SEQ ID NO: 565283 - DNA, 25 bp, Homo sapien
gaatgcccaactcatggctcctggc

SEQ ID NO: 565284 - DNA, 25 bp, Homo sapien
gcatggatttgagaccttcaagcca

SEQ ID NO: 565285 - DNA, 25 bp, Homo sapien
gggcactgcctatctttgttctcag

SEQ ID NO: 565286 - DNA, 25 bp, Homo sapien
agggcatggatttgagaccttcaag

SEQ ID NO: 565287 - DNA, 25 bp, Homo sapien
tgggcactgcctatctttgttctca

SEQ ID NO: 565288 - DNA, 25 bp, Homo sapien
tcaggggtcattgcgaggctctcca

SEQ ID NO: 565289 - DNA, 25 bp, Homo sapien
gataattcaggggtcattgcgaggc

SEQ ID NO: 565290 - DNA, 25 bp, Homo sapien
attcaggggtcattgcgaggctctc

SEQ ID NO: 565291 - DNA, 25 bp, Homo sapien
taattcaggggtcattgcgaggctc

SEQ ID NO: 565292 - DNA, 25 bp, Homo sapien
gctggaggacaaagtcttgtcctca

SEQ ID NO: 565293 - DNA, 25 bp, Homo sapien
aatcagtcatgcgtttcccatttga

SEQ ID NO: 565294 - DNA, 25 bp, Homo sapien
tcctgatgtcttgtttccggctgaa

SEQ ID NO: 565295 - DNA, 25 bp, Homo sapien
tcctgcttggatgtatgaatcagtc

SEQ ID NO: 565296 - DNA, 25 bp, Homo sapien
tgttgctccacgtggaagcaggaca

SEQ ID NO: 565297 - DNA, 25 bp, Homo sapien
gttgctccacgtggaagcaggacac

SEQ ID NO: 565298 - DNA, 25 bp, Homo sapien
gaagcaggacacacacaaggcctgc

SEQ ID NO: 565299 - DNA, 25 bp, Homo sapien
caggacacacacaaggcctgcagct

SEQ ID NO: 565300 - DNA, 25 bp, Homo sapien
cctcgtgggcctctaagcaggctgc

SEQ ID NO: 565301 - DNA, 25 bp, Homo sapien
cgggagcctcgtgggcctctaagca

SEQ ID NO: 565302 - DNA, 25 bp, Homo sapien
gacacttgctggaagggctacacgg

SEQ ID NO: 565303 - DNA, 25 bp, Homo sapien
tacacgggcagaagcgtactgatgc

SEQ ID NO: 565304 - DNA, 25 bp, Homo sapien
aacatttcatttgacatcatggcta

SEQ ID NO: 565305 - DNA, 25 bp, Homo sapien
acatttcatttgacatcatggctac

SEQ ID NO: 565306 - DNA, 25 bp, Homo sapien
caggttctcttgataaccagctcaa

SEQ ID NO: 565307 - DNA, 25 bp, Homo sapien
gattttgaataccagatgttgagac

SEQ ID NO: 565308 - DNA, 25 bp, Homo sapien
tagcaccaggttctcttgataacca

SEQ ID NO: 565309 - DNA, 25 bp, Homo sapien
agctcaaaattctctggagatcgaa

SEQ ID NO: 565310 - DNA, 25 bp, Homo sapien
taggacccggtgctgatcaaaaatg

SEQ ID NO: 565311 - DNA, 25 bp, Homo sapien
caaaaatgagggttggtgtgttcat

SEQ ID NO: 565312 - DNA, 25 bp, Homo sapien
ccggtgctgatcaaaaatgagggtt

SEQ ID NO: 565313 - DNA, 25 bp, Homo sapien
cttctccttaggacccggtgctgat

SEQ ID NO: 565314 - DNA, 25 bp, Homo sapien
ctctaaaatgtgttctttcttttga

SEQ ID NO: 565315 - DNA, 25 bp, Homo sapien
atgtgttctttcttttgaggaaaga

SEQ ID NO: 565316 - DNA, 25 bp, Homo sapien
taaaatgtgttctttcttttgagga

SEQ ID NO: 565317 - DNA, 25 bp, Homo sapien
aatgtgttctttcttttgaggaaag

SEQ ID NO: 565318 - DNA, 25 bp, Homo sapien
ttctcagggaatgttgctaatgaca

SEQ ID NO: 565319 - DNA, 25 bp, Homo sapien
aggagtcctgctgctcagctgtaag

SEQ ID NO: 565320 - DNA, 25 bp, Homo sapien
cccacacccttctcagggaatgttg

SEQ ID NO: 565321 - DNA, 25 bp, Homo sapien
agtcctgctgctcagctgtaagcca

SEQ ID NO: 565322 - DNA, 25 bp, Homo sapien
ttctcaggcaggatgcaacagggag

SEQ ID NO: 565323 - DNA, 25 bp, Homo sapien
cagtggctttggcacatattaagga

SEQ ID NO: 565324 - DNA, 25 bp, Homo sapien
cactgcttagctctgggacttcaag

SEQ ID NO: 565325 - DNA, 25 bp, Homo sapien
tccatctacagaaagtgggtggcaa

SEQ ID NO: 565326 - DNA, 25 bp, Homo sapien
aagctgcaaggactattcctgaagt

SEQ ID NO: 565327 - DNA, 25 bp, Homo sapien
tgaagttgccattccagagtccatg

SEQ ID NO: 565328 - DNA, 25 bp, Homo sapien
gagtccatgcataagagcctacttc

SEQ ID NO: 565329 - DNA, 25 bp, Homo sapien
tgcaaggactattcctgaagttgcc

SEQ ID NO: 565330 - DNA, 25 bp, Homo sapien
aaaatgttcattctccggcctgatg

SEQ ID NO: 565331 - DNA, 25 bp, Homo sapien
catggtcataggttagagcaagcac

SEQ ID NO: 565332 - DNA, 25 bp, Homo sapien
ggagcttccgtgtttggagcagaaa

SEQ ID NO: 565333 - DNA, 25 bp, Homo sapien
tctacatacgaggaaggctgaattc

SEQ ID NO: 565334 - DNA, 25 bp, Homo sapien
gtgtccactgcgtgacagtcactca

SEQ ID NO: 565335 - DNA, 25 bp, Homo sapien
aaatcaggtctgctatatggcagcc

SEQ ID NO: 565336 - DNA, 25 bp, Homo sapien
aaaaattgaggcaccatgtctgagc

SEQ ID NO: 565337 - DNA, 25 bp, Homo sapien
aaataaagcaccctgtgtatgcagg

SEQ ID NO: 565338 - DNA, 25 bp, Homo sapien
aaggtgtcaagaacatacagtctgg

SEQ ID NO: 565339 - DNA, 25 bp, Homo sapien
gaatgccattcctcactgaaataga

SEQ ID NO: 565340 - DNA, 25 bp, Homo sapien
ccaatagtgagcaacctgaaaacaa

SEQ ID NO: 565341 - DNA, 25 bp, Homo sapien
catatagaaatggtagtgatttgcc

SEQ ID NO: 565342 - DNA, 25 bp, Homo sapien
ccatgaatgctcattgctcaactga

SEQ ID NO: 565343 - DNA, 25 bp, Homo sapien
atgaatgctcattgctcaactgatt

SEQ ID NO: 565344 - DNA, 25 bp, Homo sapien
taagttgggttgatgcagccatgaa

SEQ ID NO: 565345 - DNA, 25 bp, Homo sapien
agccatgaatgctcattgctcaact

SEQ ID NO: 565346 - DNA, 25 bp, Homo sapien
tgggctttcagaaggccacaccctg

SEQ ID NO: 565347 - DNA, 25 bp, Homo sapien
tgtgtctccttgtcttccctgttgg

SEQ ID NO: 565348 - DNA, 25 bp, Homo sapien
cttgtcttccctgttggtgtgtccc

SEQ ID NO: 565349 - DNA, 25 bp, Homo sapien
tttcccctgggctttcagaaggcca

SEQ ID NO: 565350 - DNA, 25 bp, Homo sapien
agagctcacctgaaagtcctgacca

SEQ ID NO: 565351 - DNA, 25 bp, Homo sapien
tgcataacacataggaatcccggga

SEQ ID NO: 565352 - DNA, 25 bp, Homo sapien
tctgagtccagtcaccataagatgc

SEQ ID NO: 565353 - DNA, 25 bp, Homo sapien
ggatacccacaggtttctgcataac

SEQ ID NO: 565354 - DNA, 25 bp, Homo sapien
caagtagccacggaacctgcatcat

SEQ ID NO: 565355 - DNA, 25 bp, Homo sapien
gtccagctaattccgtggcagcagc

SEQ ID NO: 565356 - DNA, 25 bp, Homo sapien
attacattcttccaagtagccacgg

SEQ ID NO: 565357 - DNA, 25 bp, Homo sapien
caaagaacaggatctacactgtgtc

SEQ ID NO: 565358 - DNA, 25 bp, Homo sapien
ctgtggccggaactggtttaaaatg

SEQ ID NO: 565359 - DNA, 25 bp, Homo sapien
ctggtcgttggagaggagtcctcat

SEQ ID NO: 565360 - DNA, 25 bp, Homo sapien
tgggtgaatccccagcgtctgtggc

SEQ ID NO: 565361 - DNA, 25 bp, Homo sapien
ggctgcaatgtgcaaggcttcttgg

SEQ ID NO: 565362 - DNA, 25 bp, Homo sapien
gaaactctccatttggcccatgtta

SEQ ID NO: 565363 - DNA, 25 bp, Homo sapien
tacctagatttatgtggcccatgac

SEQ ID NO: 565364 - DNA, 25 bp, Homo sapien
tagggaccagtaggaatcagctaaa

SEQ ID NO: 565365 - DNA, 25 bp, Homo sapien
ttaagaagtcattgctagggaccag

SEQ ID NO: 565366 - DNA, 25 bp, Homo sapien
taaaggacactttactcagagaggg

SEQ ID NO: 565367 - DNA, 25 bp, Homo sapien
tttagagccgctttgacaggagacc

SEQ ID NO: 565368 - DNA, 25 bp, Homo sapien
gacatggtaaccactgtcgccggca

SEQ ID NO: 565369 - DNA, 25 bp, Homo sapien
caggcaggtattcctcatgtgcagg

SEQ ID NO: 565370 - DNA, 25 bp, Homo sapien
tccaggtaggacaacaactgccttc

SEQ ID NO: 565371 - DNA, 25 bp, Homo sapien
aactgccttcgtccttgtggtctac

SEQ ID NO: 565372 - DNA, 25 bp, Homo sapien
tggaagatccactcaaatgcaggtc

SEQ ID NO: 565373 - DNA, 25 bp, Homo sapien
ggtctggagcaaatgagtcaaggca

SEQ ID NO: 565374 - DNA, 25 bp, Homo sapien
gtctagattcttcagcgccagggtc

SEQ ID NO: 565375 - DNA, 25 bp, Homo sapien
ttcccttgtgtaccacaggcttttc

SEQ ID NO: 565376 - DNA, 25 bp, Homo sapien
cagggtcctggaaagtaacaaccat

SEQ ID NO: 565377 - DNA, 25 bp, Homo sapien
ctttttcatgagtgtaggtctagat

SEQ ID NO: 565378 - DNA, 25 bp, Homo sapien
cttcctgtgccttgtatgtgttttt

SEQ ID NO: 565379 - DNA, 25 bp, Homo sapien
gcttcctgtgccttgtatgtgtttt

SEQ ID NO: 565380 - DNA, 25 bp, Homo sapien
ttcctgtgccttgtatgtgtttttc

SEQ ID NO: 565381 - DNA, 25 bp, Homo sapien
tcctgtgccttgtatgtgtttttcc

SEQ ID NO: 565382 - DNA, 25 bp, Homo sapien
cttctttcagggtccctaatttcat

SEQ ID NO: 565383 - DNA, 25 bp, Homo sapien
tctaagaagttattaggcaaatatt

SEQ ID NO: 565384 - DNA, 25 bp, Homo sapien
tttcagggtccctaatttcatacca

SEQ ID NO: 565385 - DNA, 25 bp, Homo sapien
atattctctaagaagttattaggca

SEQ ID NO: 565386 - DNA, 25 bp, Homo sapien
gtcagtccattaaaccagatgagag

SEQ ID NO: 565387 - DNA, 25 bp, Homo sapien
ccttaaagtcagtccattaaaccag

SEQ ID NO: 565388 - DNA, 25 bp, Homo sapien
agatgcccttaaagtcagtccatta

SEQ ID NO: 565389 - DNA, 25 bp, Homo sapien
tgcccttaaagtcagtccattaaac

SEQ ID NO: 565390 - DNA, 25 bp, Homo sapien
ctccctgcccagacactctagtttt

SEQ ID NO: 565391 - DNA, 25 bp, Homo sapien
ccctgcccagacactctagtttttc

SEQ ID NO: 565392 - DNA, 25 bp, Homo sapien
cctgcccagacactctagtttttca

SEQ ID NO: 565393 - DNA, 25 bp, Homo sapien
tccctgcccagacactctagttttt

SEQ ID NO: 565394 - DNA, 25 bp, Homo sapien
cagtgcaaagccctcaagagagcta

SEQ ID NO: 565395 - DNA, 25 bp, Homo sapien
gccctcaagagagctatcagggtct

SEQ ID NO: 565396 - DNA, 25 bp, Homo sapien
gtgcaaagccctcaagagagctatc

SEQ ID NO: 565397 - DNA, 25 bp, Homo sapien
caaagccctcaagagagctatcagg

SEQ ID NO: 565398 - DNA, 25 bp, Homo sapien
tgactttcgtcctttggaattagaa

SEQ ID NO: 565399 - DNA, 25 bp, Homo sapien
taacatttgttgctggcacataacc

SEQ ID NO: 565400 - DNA, 25 bp, Homo sapien
gactttcaaggaagatattatgctc

SEQ ID NO: 565401 - DNA, 25 bp, Homo sapien
gaggaggagctaatgtcttttgtct

SEQ ID NO: 565402 - DNA, 25 bp, Homo sapien
tctccaggacctgggtcgatatgta

SEQ ID NO: 565403 - DNA, 25 bp, Homo sapien
ctaagctgattggacactatgggct

SEQ ID NO: 565404 - DNA, 25 bp, Homo sapien
ggacactatgggctttttctccagg

SEQ ID NO: 565405 - DNA, 25 bp, Homo sapien
gattggacactatgggctttttctc

SEQ ID NO: 565406 - DNA, 25 bp, Homo sapien
tgtattaaaccatggcccaaatctc

SEQ ID NO: 565407 - DNA, 25 bp, Homo sapien
gggacagagatgctagacgccctct

SEQ ID NO: 565408 - DNA, 25 bp, Homo sapien
tacagagcaggtctggatatcaggg

SEQ ID NO: 565409 - DNA, 25 bp, Homo sapien
tcatagaaagagttgccggcaggtg

SEQ ID NO: 565410 - DNA, 25 bp, Homo sapien
aaacttgctgttgctagtaaacgaa

SEQ ID NO: 565411 - DNA, 25 bp, Homo sapien
caaagctattgctgagacggtgttt

SEQ ID NO: 565412 - DNA, 25 bp, Homo sapien
cttgctgttgctagtaaacgaaatc

SEQ ID NO: 565413 - DNA, 25 bp, Homo sapien
ttgctgagacggtgtttagcttgat

SEQ ID NO: 565414 - DNA, 25 bp, Homo sapien
aaatatggtcgtgctgatcaccagg

SEQ ID NO: 565415 - DNA, 25 bp, Homo sapien
ggtcgtgctgatcaccaggtttatc

SEQ ID NO: 565416 - DNA, 25 bp, Homo sapien
atctctacaaatatggtcgtgctga

SEQ ID NO: 565417 - DNA, 25 bp, Homo sapien
gctgatcaccaggtttatctgccat

SEQ ID NO: 565418 - DNA, 25 bp, Homo sapien
cattacgtttcccacaccctaggag

SEQ ID NO: 565419 - DNA, 25 bp, Homo sapien
tgtcagcatcttcacaaccctgtac

SEQ ID NO: 565420 - DNA, 25 bp, Homo sapien
tggagtagaaattaccctggtgtac

SEQ ID NO: 565421 - DNA, 25 bp, Homo sapien
tctgtcagcctcatttgtggattgg

SEQ ID NO: 565422 - DNA, 25 bp, Homo sapien
ctcagtgtatcttcacagtaaatgt

SEQ ID NO: 565423 - DNA, 25 bp, Homo sapien
tccttcactcagtgtatcttcacag

SEQ ID NO: 565424 - DNA, 25 bp, Homo sapien
cttcactcagtgtatcttcacagta

SEQ ID NO: 565425 - DNA, 25 bp, Homo sapien
cactcagtgtatcttcacagtaaat

SEQ ID NO: 565426 - DNA, 25 bp, Homo sapien
tgcatctttaaactgcgatgtgata

SEQ ID NO: 565427 - DNA, 25 bp, Homo sapien
tactggctctaatataaagaaatgc

SEQ ID NO: 565428 - DNA, 25 bp, Homo sapien
gcgatgtgatactggctctaatata

SEQ ID NO: 565429 - DNA, 25 bp, Homo sapien
ctttaaactgcgatgtgatactggc

SEQ ID NO: 565430 - DNA, 25 bp, Homo sapien
attaacatcagcgaagcgttcaggg

SEQ ID NO: 565431 - DNA, 25 bp, Homo sapien
cgttcaggggatatctttgggaaca

SEQ ID NO: 565432 - DNA, 25 bp, Homo sapien
cttggctcctttgtgataaattaac

SEQ ID NO: 565433 - DNA, 25 bp, Homo sapien
caggggatatctttgggaacatgaa

SEQ ID NO: 565434 - DNA, 25 bp, Homo sapien
tttgtgacaggactttcatccctgc

SEQ ID NO: 565435 - DNA, 25 bp, Homo sapien
tagacatttctttgattaagaatgt

SEQ ID NO: 565436 - DNA, 25 bp, Homo sapien
catttctttgattaagaatgtgaag

SEQ ID NO: 565437 - DNA, 25 bp, Homo sapien
tttctttgattaagaatgtgaagag

SEQ ID NO: 565438 - DNA, 25 bp, Homo sapien
gacatttctttgattaagaatgtga

SEQ ID NO: 565439 - DNA, 25 bp, Homo sapien
attttttcctgaaatcactgctgtg

SEQ ID NO: 565440 - DNA, 25 bp, Homo sapien
ttttcctgaaatcactgctgtgtcc

SEQ ID NO: 565441 - DNA, 25 bp, Homo sapien
ctgctgtgtcctttctcacttctac

SEQ ID NO: 565442 - DNA, 25 bp, Homo sapien
acctgattttttcctgaaatcactg

SEQ ID NO: 565443 - DNA, 25 bp, Homo sapien
tcgtactgcgtctgaagtacatgtg

SEQ ID NO: 565444 - DNA, 25 bp, Homo sapien
catgtgcagaatcaagtttatgcac

SEQ ID NO: 565445 - DNA, 25 bp, Homo sapien
tctctctctctggtcgtactgcgtc

SEQ ID NO: 565446 - DNA, 25 bp, Homo sapien
ttatgcacttcttgtgacgtctctt

SEQ ID NO: 565447 - DNA, 25 bp, Homo sapien
gcctggcaaagtccacatcgtcttt

SEQ ID NO: 565448 - DNA, 25 bp, Homo sapien
caaatgcagataatcctgtgagctc

SEQ ID NO: 565449 - DNA, 25 bp, Homo sapien
gagagccttagtcccacatctgcaa

SEQ ID NO: 565450 - DNA, 25 bp, Homo sapien
tacatgccatggagctatccagccc

SEQ ID NO: 565451 - DNA, 25 bp, Homo sapien
ctgtatgggtaagtgggtgacatga

SEQ ID NO: 565452 - DNA, 25 bp, Homo sapien
ggtgacatgacagcaagctcctgac

SEQ ID NO: 565453 - DNA, 25 bp, Homo sapien
ggttcctgatgtatggcagacgcac

SEQ ID NO: 565454 - DNA, 25 bp, Homo sapien
tcctgacactacgtagggttcctga

SEQ ID NO: 565455 - DNA, 25 bp, Homo sapien
cggagccgaactcgaggctgtgcca

SEQ ID NO: 565456 - DNA, 25 bp, Homo sapien
tgtgccacaagatgcagctgatgga

SEQ ID NO: 565457 - DNA, 25 bp, Homo sapien
cgaactcgaggctgtgccacaagat

SEQ ID NO: 565458 - DNA, 25 bp, Homo sapien
agctgagcccggagccgaactcgag

SEQ ID NO: 565459 - DNA, 25 bp, Homo sapien
tctgtcccgttccacagtcaaaggc

SEQ ID NO: 565460 - DNA, 25 bp, Homo sapien
gagaaattcagagtatagaactatg

SEQ ID NO: 565461 - DNA, 25 bp, Homo sapien
cttctgtcccgttccacagtcaaag

SEQ ID NO: 565462 - DNA, 25 bp, Homo sapien
tcagagtatagaactatgtctttcc

SEQ ID NO: 565463 - DNA, 25 bp, Homo sapien
agtttgtgaggcctgagtcagagaa

SEQ ID NO: 565464 - DNA, 25 bp, Homo sapien
agagagtttgtgaggcctgagtcag

SEQ ID NO: 565465 - DNA, 25 bp, Homo sapien
tactcctttagtgagagagtttgtg

SEQ ID NO: 565466 - DNA, 25 bp, Homo sapien
aaaatactcctttagtgagagagtt

SEQ ID NO: 565467 - DNA, 25 bp, Homo sapien
attcacatttgctacccgcagtttt

SEQ ID NO: 565468 - DNA, 25 bp, Homo sapien
tgcaagtttctcgacctctccagcc

SEQ ID NO: 565469 - DNA, 25 bp, Homo sapien
tacccgcagttttatgttgtgtctg

SEQ ID NO: 565470 - DNA, 25 bp, Homo sapien
ttgctacccgcagttttatgttgtg

SEQ ID NO: 565471 - DNA, 25 bp, Homo sapien
cattaaaactcgagaacttgaggcc

SEQ ID NO: 565472 - DNA, 25 bp, Homo sapien
gaagaaattctaccacctgcaagct

SEQ ID NO: 565473 - DNA, 25 bp, Homo sapien
tgtttcaactgaagagaacctgacc

SEQ ID NO: 565474 - DNA, 25 bp, Homo sapien
cagatgtgggactgatagtcattcc

SEQ ID NO: 565475 - DNA, 25 bp, Homo sapien
aaaatactaagagcaaccgtggttg

SEQ ID NO: 565476 - DNA, 25 bp, Homo sapien
catcaacatgtctgtcgaggtcctg

SEQ ID NO: 565477 - DNA, 25 bp, Homo sapien
cgaggtcctggattgaacataggca

SEQ ID NO: 565478 - DNA, 25 bp, Homo sapien
tggctaatgcccagatcacgggtaa

SEQ ID NO: 565479 - DNA, 25 bp, Homo sapien
ttggtggcaataggacagggcttct

SEQ ID NO: 565480 - DNA, 25 bp, Homo sapien
tttattcttggaggctggacgctga

SEQ ID NO: 565481 - DNA, 25 bp, Homo sapien
ggcccactggctctaaatcagctga

SEQ ID NO: 565482 - DNA, 25 bp, Homo sapien
caaactgctatggtcaaagcctcca

SEQ ID NO: 565483 - DNA, 25 bp, Homo sapien
gtccatcggctggataccctttcag

SEQ ID NO: 565484 - DNA, 25 bp, Homo sapien
acactaagcagccaacgtgatccaa

SEQ ID NO: 565485 - DNA, 25 bp, Homo sapien
acccagtgctgtctaggtccatcgg

SEQ ID NO: 565486 - DNA, 25 bp, Homo sapien
gccaacgtgatccaacaagaagcag

SEQ ID NO: 565487 - DNA, 25 bp, Homo sapien
cacggtaacaccagattcacgttgt

SEQ ID NO: 565488 - DNA, 25 bp, Homo sapien
gggttcgcacggtaacaccagattc

SEQ ID NO: 565489 - DNA, 25 bp, Homo sapien
cacgttgtggttccgtttcagacat

SEQ ID NO: 565490 - DNA, 25 bp, Homo sapien
attcacgttgtggttccgtttcaga

SEQ ID NO: 565491 - DNA, 25 bp, Homo sapien
cctaaagagagctgtgtgaacagag

SEQ ID NO: 565492 - DNA, 25 bp, Homo sapien
ggcatgatccactttttaaggctgg

SEQ ID NO: 565493 - DNA, 25 bp, Homo sapien
tccaatttcatagagtaccattagg

SEQ ID NO: 565494 - DNA, 25 bp, Homo sapien
tgaacagagtggatttgacatttgc

SEQ ID NO: 565495 - DNA, 25 bp, Homo sapien
ttcctaacagtgaaaggatctttac

SEQ ID NO: 565496 - DNA, 25 bp, Homo sapien
ggactctgtgaaattcggtagaatc

SEQ ID NO: 565497 - DNA, 25 bp, Homo sapien
tcggtagaatcagccagacaaattg

SEQ ID NO: 565498 - DNA, 25 bp, Homo sapien
tgaaattcggtagaatcagccagac

SEQ ID NO: 565499 - DNA, 25 bp, Homo sapien
cagccagacaaattggaaaggccat

SEQ ID NO: 565500 - DNA, 25 bp, Homo sapien
ctgtatgttgtaaagaccaccccgt

SEQ ID NO: 565501 - DNA, 25 bp, Homo sapien
ttcatcccggatctcttcaagttcc

SEQ ID NO: 565502 - DNA, 25 bp, Homo sapien
gctgcttcatcccggatctcttcaa

SEQ ID NO: 565503 - DNA, 25 bp, Homo sapien
gcttcatcccggatctcttcaagtt

SEQ ID NO: 565504 - DNA, 25 bp, Homo sapien
tgcttcatcccggatctcttcaagt

SEQ ID NO: 565505 - DNA, 25 bp, Homo sapien
cctgtgggctctaagattcacgtac

SEQ ID NO: 565506 - DNA, 25 bp, Homo sapien
tgtctaagggactaccagatctcca

SEQ ID NO: 565507 - DNA, 25 bp, Homo sapien
cattctgtgtcagttacctgtgggc

SEQ ID NO: 565508 - DNA, 25 bp, Homo sapien
tatgctagcaaacttatatagagcc

SEQ ID NO: 565509 - DNA, 25 bp, Homo sapien
tagggcatatttggcatcacgtcag

SEQ ID NO: 565510 - DNA, 25 bp, Homo sapien
gaaagccgaatccttaagcatcaag

SEQ ID NO: 565511 - DNA, 25 bp, Homo sapien
taaacctcggtaaatggcaacgcca

SEQ ID NO: 565512 - DNA, 25 bp, Homo sapien
ggcattctgcataggtacaaaactg

SEQ ID NO: 565513 - DNA, 25 bp, Homo sapien
tgcagttttcccagggtaccttgaa

SEQ ID NO: 565514 - DNA, 25 bp, Homo sapien
taaagggagctttaacaagcagcca

SEQ ID NO: 565515 - DNA, 25 bp, Homo sapien
caggcactgtaagtattgtacctaa

SEQ ID NO: 565516 - DNA, 25 bp, Homo sapien
tagaagccacatctatactcaaggt

SEQ ID NO: 565517 - DNA, 25 bp, Homo sapien
tcaagaggagccaatgttgccaagc

SEQ ID NO: 565518 - DNA, 25 bp, Homo sapien
tcttcccacgatttgccatttgact

SEQ ID NO: 565519 - DNA, 25 bp, Homo sapien
accacccagtggacaagaacaagca

SEQ ID NO: 565520 - DNA, 25 bp, Homo sapien
tgtgatgacaccaggctaacaggtt

SEQ ID NO: 565521 - DNA, 25 bp, Homo sapien
tccccaaggctggtccaatcttgtg

SEQ ID NO: 565522 - DNA, 25 bp, Homo sapien
gaccggagcgggctgtccatttccc

SEQ ID NO: 565523 - DNA, 25 bp, Homo sapien
taacgccgacatctggatcctgctc

SEQ ID NO: 565524 - DNA, 25 bp, Homo sapien
caatcttgtgacacttaacgccgac

SEQ ID NO: 565525 - DNA, 25 bp, Homo sapien
ctaggggaggccatcctctcaaggg

SEQ ID NO: 565526 - DNA, 25 bp, Homo sapien
aggggaggccatcctctcaagggag

SEQ ID NO: 565527 - DNA, 25 bp, Homo sapien
taggggaggccatcctctcaaggga

SEQ ID NO: 565528 - DNA, 25 bp, Homo sapien
tgagagagttcccatgccatatctg

SEQ ID NO: 565529 - DNA, 25 bp, Homo sapien
ccagaattaaccgagcattaggtct

SEQ ID NO: 565530 - DNA, 25 bp, Homo sapien
caagagacagacttagggtcacttt

SEQ ID NO: 565531 - DNA, 25 bp, Homo sapien
taaagatgcgcttccaaactccaga

SEQ ID NO: 565532 - DNA, 25 bp, Homo sapien
gcgattttgtcctctgtcgctggac

SEQ ID NO: 565533 - DNA, 25 bp, Homo sapien
ggtcacttgcgattttgtcctctgt

SEQ ID NO: 565534 - DNA, 25 bp, Homo sapien
tgtcctctgtcgctggactcccagt

SEQ ID NO: 565535 - DNA, 25 bp, Homo sapien
ctggaagggtcacttgcgattttgt

SEQ ID NO: 565536 - DNA, 25 bp, Homo sapien
ctgctgaggggacccacatcaaccc

SEQ ID NO: 565537 - DNA, 25 bp, Homo sapien
tgctgaggggacccacatcaaccca

SEQ ID NO: 565538 - DNA, 25 bp, Homo sapien
gaggggacccacatcaacccaatac

SEQ ID NO: 565539 - DNA, 25 bp, Homo sapien
gggacccacatcaacccaatactga

SEQ ID NO: 565540 - DNA, 25 bp, Homo sapien
ctggcaataggccaaccctggagcc

SEQ ID NO: 565541 - DNA, 25 bp, Homo sapien
aagtactcaaatgtccttgctccac

SEQ ID NO: 565542 - DNA, 25 bp, Homo sapien
actctggcaataggccaaccctgga

SEQ ID NO: 565543 - DNA, 25 bp, Homo sapien
aggaaaagtactcaaatgtccttgc

SEQ ID NO: 565544 - DNA, 25 bp, Homo sapien
gatcgatggatctctaaatgtgcta

SEQ ID NO: 565545 - DNA, 25 bp, Homo sapien
gaatgatgagtcttactgaattggt

SEQ ID NO: 565546 - DNA, 25 bp, Homo sapien
tgtttccacaatactaccaaaggta

SEQ ID NO: 565547 - DNA, 25 bp, Homo sapien
ggaattcaagcacagaatgctagta

SEQ ID NO: 565548 - DNA, 25 bp, Homo sapien
taacaaggctgacacaattaagcac

SEQ ID NO: 565549 - DNA, 25 bp, Homo sapien
tccagagagttgacagacagtgatc

SEQ ID NO: 565550 - DNA, 25 bp, Homo sapien
accgtaaggttatagtcactgtgac

SEQ ID NO: 565551 - DNA, 25 bp, Homo sapien
gagaaaaactagtgctccagagagt

SEQ ID NO: 565552 - DNA, 25 bp, Homo sapien
ctctgatctcagctaatctgccctt

SEQ ID NO: 565553 - DNA, 25 bp, Homo sapien
tatttgctagtcatctttgagattg

SEQ ID NO: 565554 - DNA, 25 bp, Homo sapien
gggtgcaactgcacaaccttagctc

SEQ ID NO: 565555 - DNA, 25 bp, Homo sapien
tgaactctgatctcagctaatctgc

SEQ ID NO: 565556 - DNA, 25 bp, Homo sapien
tgtcttctagagtccagtgctgttc

SEQ ID NO: 565557 - DNA, 25 bp, Homo sapien
ctttagtaaacctgcagcataggga

SEQ ID NO: 565558 - DNA, 25 bp, Homo sapien
tagtgtacatttgtgcgagttcccc

SEQ ID NO: 565559 - DNA, 25 bp, Homo sapien
tatagaatgccaggaaacatgtcca

SEQ ID NO: 565560 - DNA, 25 bp, Homo sapien
catgcgtgtcagcacggtctgagga

SEQ ID NO: 565561 - DNA, 25 bp, Homo sapien
ctggttaacaggcaaggtgtgctct

SEQ ID NO: 565562 - DNA, 25 bp, Homo sapien
tgctctgcagtgagaacgtggataa

SEQ ID NO: 565563 - DNA, 25 bp, Homo sapien
gagctgagctgactttctggttaac

SEQ ID NO: 565564 - DNA, 25 bp, Homo sapien
acctgtcaggtttggtgctaattcc

SEQ ID NO: 565565 - DNA, 25 bp, Homo sapien
cattccacctagtccaagagacaga

SEQ ID NO: 565566 - DNA, 25 bp, Homo sapien
aatgcatctggttctctcgggtcca

SEQ ID NO: 565567 - DNA, 25 bp, Homo sapien
tgtgttctccccttaccttactgtg

SEQ ID NO: 565568 - DNA, 25 bp, Homo sapien
ccttggcagccattataacatgtct

SEQ ID NO: 565569 - DNA, 25 bp, Homo sapien
cagtagtagttgagtcggacttgct

SEQ ID NO: 565570 - DNA, 25 bp, Homo sapien
ccacagtagcaacagatgatgacag

SEQ ID NO: 565571 - DNA, 25 bp, Homo sapien
tcaaagcatgaagtaccacagtagc

SEQ ID NO: 565572 - DNA, 25 bp, Homo sapien
gacttagcagctgcgtgagaaatgc

SEQ ID NO: 565573 - DNA, 25 bp, Homo sapien
gattgactgaaacgcagaactgttc

SEQ ID NO: 565574 - DNA, 25 bp, Homo sapien
gaaaacacaggattaggtcaccaga

SEQ ID NO: 565575 - DNA, 25 bp, Homo sapien
cagatgggctaagtgtcaaacagga

SEQ ID NO: 565576 - DNA, 25 bp, Homo sapien
tttagcagaccttgtgagtttctgg

SEQ ID NO: 565577 - DNA, 25 bp, Homo sapien
tggcctaaatagtctttggccttta

SEQ ID NO: 565578 - DNA, 25 bp, Homo sapien
taaatagtctttggcctttagcaga

SEQ ID NO: 565579 - DNA, 25 bp, Homo sapien
gcctttagcagaccttgtgagtttc

SEQ ID NO: 565580 - DNA, 25 bp, Homo sapien
tttactaaatagactcagacttgag

SEQ ID NO: 565581 - DNA, 25 bp, Homo sapien
cagacttgagagtgtccagatatcc

SEQ ID NO: 565582 - DNA, 25 bp, Homo sapien
ggctatcaactggattgcatgtcat

SEQ ID NO: 565583 - DNA, 25 bp, Homo sapien
taatatatattagtgtcagaggcgt

SEQ ID NO: 565584 - DNA, 25 bp, Homo sapien
acaacagtatgcgtttttaggcttt

SEQ ID NO: 565585 - DNA, 25 bp, Homo sapien
ttaacaacagtatgcgtttttaggc

SEQ ID NO: 565586 - DNA, 25 bp, Homo sapien
aacagtatgcgtttttaggctttga

SEQ ID NO: 565587 - DNA, 25 bp, Homo sapien
tatgcgtttttaggctttgatttcc

SEQ ID NO: 565588 - DNA, 25 bp, Homo sapien
ggcttgccaagcactcgttctgtag

SEQ ID NO: 565589 - DNA, 25 bp, Homo sapien
taagctgagatctctacacagttgg

SEQ ID NO: 565590 - DNA, 25 bp, Homo sapien
ttcatgcttggaaccctgaacttgg

SEQ ID NO: 565591 - DNA, 25 bp, Homo sapien
cattctagctgacaaaagtgcgttg

SEQ ID NO: 565592 - DNA, 25 bp, Homo sapien
acttggaatctaccggcacatggcc

SEQ ID NO: 565593 - DNA, 25 bp, Homo sapien
tatccccaggttagatgtgcatctg

SEQ ID NO: 565594 - DNA, 25 bp, Homo sapien
tagtggcaaccggaaagcgtttgtg

SEQ ID NO: 565595 - DNA, 25 bp, Homo sapien
caaacctgttgttacgtgggtcacg

SEQ ID NO: 565596 - DNA, 25 bp, Homo sapien
caaaaaacattagtttaggctatat

SEQ ID NO: 565597 - DNA, 25 bp, Homo sapien
atttgaagcacatgaaacacagact

SEQ ID NO: 565598 - DNA, 25 bp, Homo sapien
tagtttaggctatatgatgatcctt

SEQ ID NO: 565599 - DNA, 25 bp, Homo sapien
tccttttgcagtaagtcataaaaag

SEQ ID NO: 565600 - DNA, 25 bp, Homo sapien
caacttttgccttcctacaggcatg

SEQ ID NO: 565601 - DNA, 25 bp, Homo sapien
cagtcttgagctcttggattcaaga

SEQ ID NO: 565602 - DNA, 25 bp, Homo sapien
tgcaacttttgccttcctacaggca

SEQ ID NO: 565603 - DNA, 25 bp, Homo sapien
cttttgccttcctacaggcatgcat

SEQ ID NO: 565604 - DNA, 25 bp, Homo sapien
tcatgcagggtagatacttactgaa

SEQ ID NO: 565605 - DNA, 25 bp, Homo sapien
aatttatattctgacatcgggatgg

SEQ ID NO: 565606 - DNA, 25 bp, Homo sapien
gacactgaatggacactggagatgc

SEQ ID NO: 565607 - DNA, 25 bp, Homo sapien
tagcaaagtgcataaagaagaccag

SEQ ID NO: 565608 - DNA, 25 bp, Homo sapien
tctaggatccaaaaagaactcttat

SEQ ID NO: 565609 - DNA, 25 bp, Homo sapien
tcttgaagagcaattcaacatcacc

SEQ ID NO: 565610 - DNA, 25 bp, Homo sapien
tttatctaggatccaaaaagaactc

SEQ ID NO: 565611 - DNA, 25 bp, Homo sapien
aatggccaataaattcttgaagagc

SEQ ID NO: 565612 - DNA, 25 bp, Homo sapien
tagaaaaagcacttcacagagagca

SEQ ID NO: 565613 - DNA, 25 bp, Homo sapien
gagcattcgctcaataactgctgga

SEQ ID NO: 565614 - DNA, 25 bp, Homo sapien
tcttgtctcaatccataattaggcc

SEQ ID NO: 565615 - DNA, 25 bp, Homo sapien
taaagaacggatgcataatctgtca

SEQ ID NO: 565616 - DNA, 25 bp, Homo sapien
gagccacattactgaagcctggaga

SEQ ID NO: 565617 - DNA, 25 bp, Homo sapien
tgtgtaggtgccagaacataggtgc

SEQ ID NO: 565618 - DNA, 25 bp, Homo sapien
gtgtagttcctaccagagttcaaag

SEQ ID NO: 565619 - DNA, 25 bp, Homo sapien
catttgagatccctgaaaagtggtc

SEQ ID NO: 565620 - DNA, 25 bp, Homo sapien
gcaaaagtagacaagcaaaggtcag

SEQ ID NO: 565621 - DNA, 25 bp, Homo sapien
aaaatagcctatcatgaacatgccc

SEQ ID NO: 565622 - DNA, 25 bp, Homo sapien
tatgaaataccagagagatcaccca

SEQ ID NO: 565623 - DNA, 25 bp, Homo sapien
catattatagctagccaaatgagca

SEQ ID NO: 565624 - DNA, 25 bp, Homo sapien
ggatatagtgtcttcagggttaaaa

SEQ ID NO: 565625 - DNA, 25 bp, Homo sapien
gatatagtgtcttcagggttaaaaa

SEQ ID NO: 565626 - DNA, 25 bp, Homo sapien
tcctgtcctgagaatgaggaagtga

SEQ ID NO: 565627 - DNA, 25 bp, Homo sapien
agccatcagtctaccagccactcct

SEQ ID NO: 565628 - DNA, 25 bp, Homo sapien
ctaataaaagagccatcagtctacc

SEQ ID NO: 565629 - DNA, 25 bp, Homo sapien
gtcctgtcctgagaatgaggaagtg

SEQ ID NO: 565630 - DNA, 25 bp, Homo sapien
cagagatagttactctgggctttta

SEQ ID NO: 565631 - DNA, 25 bp, Homo sapien
taggttcttcccagagatagttact

SEQ ID NO: 565632 - DNA, 25 bp, Homo sapien
ttagtaggtctaggttcttcccaga

SEQ ID NO: 565633 - DNA, 25 bp, Homo sapien
gcttttattgcccatacaaaagaga

SEQ ID NO: 565634 - DNA, 25 bp, Homo sapien
gttttactggtgatactctaactca

SEQ ID NO: 565635 - DNA, 25 bp, Homo sapien
tccctccagcttaggcataattttg

SEQ ID NO: 565636 - DNA, 25 bp, Homo sapien
gaaaagccgaatcatggccattagg

SEQ ID NO: 565637 - DNA, 25 bp, Homo sapien
taatagactttacatgcacacatac

SEQ ID NO: 565638 - DNA, 25 bp, Homo sapien
taccggacatggtaaccttatagta

SEQ ID NO: 565639 - DNA, 25 bp, Homo sapien
ctaggcagcagaatgatatagtgac

SEQ ID NO: 565640 - DNA, 25 bp, Homo sapien
tttgctaacagcttctaatttggaa

SEQ ID NO: 565641 - DNA, 25 bp, Homo sapien
caatgtcgtctgaattttttaccgg

SEQ ID NO: 565642 - DNA, 25 bp, Homo sapien
tcccccatgtagcttggactcagtg

SEQ ID NO: 565643 - DNA, 25 bp, Homo sapien
tagcttggactcagtgcatgccacc

SEQ ID NO: 565644 - DNA, 25 bp, Homo sapien
ctgacccatgccctttaatcttgtt

SEQ ID NO: 565645 - DNA, 25 bp, Homo sapien
gacccatgccctttaatcttgttct

SEQ ID NO: 565646 - DNA, 25 bp, Homo sapien
cctttaataagcatcgtgtttatat

SEQ ID NO: 565647 - DNA, 25 bp, Homo sapien
ctttcctttaataagcatcgtgttt

SEQ ID NO: 565648 - DNA, 25 bp, Homo sapien
taataagcatcgtgtttatatataa

SEQ ID NO: 565649 - DNA, 25 bp, Homo sapien
tcctttaataagcatcgtgtttata

SEQ ID NO: 565650 - DNA, 25 bp, Homo sapien
taatcggtcagaggtaggaaacagg

SEQ ID NO: 565651 - DNA, 25 bp, Homo sapien
cggttttcctggcttatttgcagca

SEQ ID NO: 565652 - DNA, 25 bp, Homo sapien
tagaaaaagtataggttcagggcca

SEQ ID NO: 565653 - DNA, 25 bp, Homo sapien
gagatagcattccactgataagaga

SEQ ID NO: 565654 - DNA, 25 bp, Homo sapien
tttgcaggatctttaagcatctgag

SEQ ID NO: 565655 - DNA, 25 bp, Homo sapien
aaagaagtcatgttaaccatctctc

SEQ ID NO: 565656 - DNA, 25 bp, Homo sapien
tcatgcattccagtacaatacaact

SEQ ID NO: 565657 - DNA, 25 bp, Homo sapien
gcatctgagatagcttctataaatt

SEQ ID NO: 565658 - DNA, 25 bp, Homo sapien
gttgcctgacacaaccttaaacagt

SEQ ID NO: 565659 - DNA, 25 bp, Homo sapien
gatgactgatattacaaccttggct

SEQ ID NO: 565660 - DNA, 25 bp, Homo sapien
atagaaattcgttccctgcccttgg

SEQ ID NO: 565661 - DNA, 25 bp, Homo sapien
tagcacattccctaactctgagacc

SEQ ID NO: 565662 - DNA, 25 bp, Homo sapien
tgttgtgtaagaaattacccttgga

SEQ ID NO: 565663 - DNA, 25 bp, Homo sapien
tctgcttgtatatgggattgggaaa

SEQ ID NO: 565664 - DNA, 25 bp, Homo sapien
taaggcttatagagatactgtcatt

SEQ ID NO: 565665 - DNA, 25 bp, Homo sapien
ttattttcccagcagaacgcaagtg

SEQ ID NO: 565666 - DNA, 25 bp, Homo sapien
catagtcctggtaagcctcgacgca

SEQ ID NO: 565667 - DNA, 25 bp, Homo sapien
tcttcaggacaggatttcaccgagt

SEQ ID NO: 565668 - DNA, 25 bp, Homo sapien
ttgggactggacaaccccgagaaca

SEQ ID NO: 565669 - DNA, 25 bp, Homo sapien
taaaaatccgacaagttccagagcg

SEQ ID NO: 565670 - DNA, 25 bp, Homo sapien
aggcggagaggagtctgtgtgcctg

SEQ ID NO: 565671 - DNA, 25 bp, Homo sapien
gtgggggacgaggaggcggagagga

SEQ ID NO: 565672 - DNA, 25 bp, Homo sapien
tgggcggcgggcgaggactccccca

SEQ ID NO: 565673 - DNA, 25 bp, Homo sapien
gtctgtgtgcctgggcggcgggcga

SEQ ID NO: 565674 - DNA, 25 bp, Homo sapien
gagatgccagagacagtcgccattt

SEQ ID NO: 565675 - DNA, 25 bp, Homo sapien
tgagccctctcggaatcgatgaacg

SEQ ID NO: 565676 - DNA, 25 bp, Homo sapien
tttttaagccgtcgtcatactgccg

SEQ ID NO: 565677 - DNA, 25 bp, Homo sapien
ggtgctgccaaccagatttttaagc

SEQ ID NO: 565678 - DNA, 25 bp, Homo sapien
gactccaccgtgagggcgcctgtgc

SEQ ID NO: 565679 - DNA, 25 bp, Homo sapien
gcgcctgtgccggtgtcaccacaat

SEQ ID NO: 565680 - DNA, 25 bp, Homo sapien
cgactccaccgtgagggcgcctgtg

SEQ ID NO: 565681 - DNA, 25 bp, Homo sapien
gtgccggtgtcaccacaatatgcat

SEQ ID NO: 565682 - DNA, 25 bp, Homo sapien
ccgtttcttctctctcctctctctc

SEQ ID NO: 565683 - DNA, 25 bp, Homo sapien
cctcctcccgtttcttctctctcct

SEQ ID NO: 565684 - DNA, 25 bp, Homo sapien
tgacttgcttcctaatcatcagccg

SEQ ID NO: 565685 - DNA, 25 bp, Homo sapien
cataaatattaccaggctttgaagg

SEQ ID NO: 565686 - DNA, 25 bp, Homo sapien
ggccggcggcgaggctgggtgcagg

SEQ ID NO: 565687 - DNA, 25 bp, Homo sapien
gtgacagggtggctggcgcggctcc

SEQ ID NO: 565688 - DNA, 25 bp, Homo sapien
tcacccaggcattgtcagcgcgcgg

SEQ ID NO: 565689 - DNA, 25 bp, Homo sapien
gctgcccactgacggcgcccggagc

SEQ ID NO: 565690 - DNA, 25 bp, Homo sapien
acccaggcattgtcagcgcgcgggt

SEQ ID NO: 565691 - DNA, 25 bp, Homo sapien
caggcattgtcagcgcgcgggtccc

SEQ ID NO: 565692 - DNA, 25 bp, Homo sapien
gggctccgactgctgacgccgcctc

SEQ ID NO: 565693 - DNA, 25 bp, Homo sapien
cgccggggctccgactgctgacgcc

SEQ ID NO: 565694 - DNA, 25 bp, Homo sapien
ccggggctccgactgctgacgccgc

SEQ ID NO: 565695 - DNA, 25 bp, Homo sapien
gacgccgcctcccgcggagctccgg

SEQ ID NO: 565696 - DNA, 25 bp, Homo sapien
ggtctctactggtgcgagggtctgg

SEQ ID NO: 565697 - DNA, 25 bp, Homo sapien
gggtccgcggaggaagctcgaattg

SEQ ID NO: 565698 - DNA, 25 bp, Homo sapien
caactaaggaccgagccacttcgga

SEQ ID NO: 565699 - DNA, 25 bp, Homo sapien
tctctgaatgcgtctcggatcccgg

SEQ ID NO: 565700 - DNA, 25 bp, Homo sapien
tcccagtgcgtgcagttattccgtc

SEQ ID NO: 565701 - DNA, 25 bp, Homo sapien
tgtgacacgggagaatggcgcgcac

SEQ ID NO: 565702 - DNA, 25 bp, Homo sapien
tgtgtgacacgggagaatggcgcgc

SEQ ID NO: 565703 - DNA, 25 bp, Homo sapien
acacgggagaatggcgcgcacgcct

SEQ ID NO: 565704 - DNA, 25 bp, Homo sapien
gagaatggcgcgcacgcctgtgcac

SEQ ID NO: 565705 - DNA, 25 bp, Homo sapien
gtgacagccacccatttgtctatgt

SEQ ID NO: 565706 - DNA, 25 bp, Homo sapien
ggtgacagccacccatttgtctatg

SEQ ID NO: 565707 - DNA, 25 bp, Homo sapien
ctgcatcgaccgtgtagctgcctgg

SEQ ID NO: 565708 - DNA, 25 bp, Homo sapien
tgcatcgaccgtgtagctgcctggg

SEQ ID NO: 565709 - DNA, 25 bp, Homo sapien
ccgcgtctccgagggctcctcctcg

SEQ ID NO: 565710 - DNA, 25 bp, Homo sapien
gtccgcgtctccgagggctcctcct

SEQ ID NO: 565711 - DNA, 25 bp, Homo sapien
cgtctccgagggctcctcctcggac

SEQ ID NO: 565712 - DNA, 25 bp, Homo sapien
cgtccgcgtctccgagggctcctcc

SEQ ID NO: 565713 - DNA, 25 bp, Homo sapien
cgagctgggtgcctgcgagtcgccg

SEQ ID NO: 565714 - DNA, 25 bp, Homo sapien
gagtcgccgccgcagtctgagcctc

SEQ ID NO: 565715 - DNA, 25 bp, Homo sapien
tggaccctctggagcggcttcgacc

SEQ ID NO: 565716 - DNA, 25 bp, Homo sapien
ccccttagcgttggctctcggagtt

SEQ ID NO: 565717 - DNA, 25 bp, Homo sapien
gaagggaaaggagacagacactctg

SEQ ID NO: 565718 - DNA, 25 bp, Homo sapien
agacactctgggaaaatctggggtc

SEQ ID NO: 565719 - DNA, 25 bp, Homo sapien
acactctgggaaaatctggggtcac

SEQ ID NO: 565720 - DNA, 25 bp, Homo sapien
ctgagaagggaaaggagacagacac

SEQ ID NO: 565721 - DNA, 25 bp, Homo sapien
gcggtttgcggtgtcgccctctctg

SEQ ID NO: 565722 - DNA, 25 bp, Homo sapien
tcgattccggctcctacgctggatg

SEQ ID NO: 565723 - DNA, 25 bp, Homo sapien
tcggtctcctttgatctgaagatcc

SEQ ID NO: 565724 - DNA, 25 bp, Homo sapien
ccctctctgcggtgctttccaagga

SEQ ID NO: 565725 - DNA, 25 bp, Homo sapien
tccaaggcagccataaagaaacttt

SEQ ID NO: 565726 - DNA, 25 bp, Homo sapien
aagaccatgaaatcggacggccaat

SEQ ID NO: 565727 - DNA, 25 bp, Homo sapien
caagggtattctgaaacagtgtgga

SEQ ID NO: 565728 - DNA, 25 bp, Homo sapien
ggacggccaatggagccaaaaccaa

SEQ ID NO: 565729 - DNA, 25 bp, Homo sapien
agaggcatattgtaacgccaactca

SEQ ID NO: 565730 - DNA, 25 bp, Homo sapien
tgtttttaggctctggttacaccag

SEQ ID NO: 565731 - DNA, 25 bp, Homo sapien
tacaccaggagttcagaactgtgcg

SEQ ID NO: 565732 - DNA, 25 bp, Homo sapien
tctgtttctggcagcgtagttcctg

SEQ ID NO: 565733 - DNA, 25 bp, Homo sapien
tccctgctccctttcgagtggctgc

SEQ ID NO: 565734 - DNA, 25 bp, Homo sapien
cccgggaagggagtgtgatctaatc

SEQ ID NO: 565735 - DNA, 25 bp, Homo sapien
ggatattgtacatccctgaggaggt

SEQ ID NO: 565736 - DNA, 25 bp, Homo sapien
caggaaggtccaatagagcagtgca

SEQ ID NO: 565737 - DNA, 25 bp, Homo sapien
ctaaggaaagggtgacttcacagtc

SEQ ID NO: 565738 - DNA, 25 bp, Homo sapien
taaggtaaatagtagggtgcaggtc

SEQ ID NO: 565739 - DNA, 25 bp, Homo sapien
ggtgaagccagagcccaaaaattct

SEQ ID NO: 565740 - DNA, 25 bp, Homo sapien
aattcttggatatccttataaggta

SEQ ID NO: 565741 - DNA, 25 bp, Homo sapien
catcactgctggtacttgaccccga

SEQ ID NO: 565742 - DNA, 25 bp, Homo sapien
ggatgagatatgtggcctgatctcc

SEQ ID NO: 565743 - DNA, 25 bp, Homo sapien
ttgagcacaccacccacgaatatgg

SEQ ID NO: 565744 - DNA, 25 bp, Homo sapien
gaagagtgtgactggtttctgcagc

SEQ ID NO: 565745 - DNA, 25 bp, Homo sapien
cagtcaggcttgttgccatgaggat

SEQ ID NO: 565746 - DNA, 25 bp, Homo sapien
tccagggtctggagtgtggaagctg

SEQ ID NO: 565747 - DNA, 25 bp, Homo sapien
ccatgaggataccaggggaaaccct

SEQ ID NO: 565748 - DNA, 25 bp, Homo sapien
catctttttgcctggaaacctggaa

SEQ ID NO: 565749 - DNA, 25 bp, Homo sapien
ggcacagaagaggcacctccttgca

SEQ ID NO: 565750 - DNA, 25 bp, Homo sapien
gcacagaagaggcacctccttgcag

SEQ ID NO: 565751 - DNA, 25 bp, Homo sapien
agaggcacctccttgcagggtagcc

SEQ ID NO: 565752 - DNA, 25 bp, Homo sapien
ggcacctccttgcagggtagcccag

SEQ ID NO: 565753 - DNA, 25 bp, Homo sapien
taaatattcctccaattggcttttg

SEQ ID NO: 565754 - DNA, 25 bp, Homo sapien
cacctttggaacatcaaaagagttt

SEQ ID NO: 565755 - DNA, 25 bp, Homo sapien
cagggtttcagtgtgggttatagtc

SEQ ID NO: 565756 - DNA, 25 bp, Homo sapien
ttggcttttggctcatcatgctctg

SEQ ID NO: 565757 - DNA, 25 bp, Homo sapien
cagcagctaaaccatcattagccga

SEQ ID NO: 565758 - DNA, 25 bp, Homo sapien
tgatagccttcatgcaattctacag

SEQ ID NO: 565759 - DNA, 25 bp, Homo sapien
gctttcacaagtgtgtttaatatag

SEQ ID NO: 565760 - DNA, 25 bp, Homo sapien
cattagccgatgatgccagcttgct

SEQ ID NO: 565761 - DNA, 25 bp, Homo sapien
cccccaatgttttctctgagtgctt

SEQ ID NO: 565762 - DNA, 25 bp, Homo sapien
agcttttgtgacttcagcatcttcc

SEQ ID NO: 565763 - DNA, 25 bp, Homo sapien
ccagatataacccagatgcaatttg

SEQ ID NO: 565764 - DNA, 25 bp, Homo sapien
gggcgccctaactccttggagtgaa

SEQ ID NO: 565765 - DNA, 25 bp, Homo sapien
cccaatgtgagcaacgcacagaggc

SEQ ID NO: 565766 - DNA, 25 bp, Homo sapien
ccaatgtgagcaacgcacagaggca

SEQ ID NO: 565767 - DNA, 25 bp, Homo sapien
tcccaatgtgagcaacgcacagagg

SEQ ID NO: 565768 - DNA, 25 bp, Homo sapien
tctgagcaggcaaaacataattaaa

SEQ ID NO: 565769 - DNA, 25 bp, Homo sapien
cattcttgcactctgattgtttcat

SEQ ID NO: 565770 - DNA, 25 bp, Homo sapien
ttgcactctgattgtttcatgtagg

SEQ ID NO: 565771 - DNA, 25 bp, Homo sapien
tttaaagtatgttctaatctgatcg

SEQ ID NO: 565772 - DNA, 25 bp, Homo sapien
atctgatcgttaggcagtttgtctc

SEQ ID NO: 565773 - DNA, 25 bp, Homo sapien
tggcagggggtgcaatactgaggcc

SEQ ID NO: 565774 - DNA, 25 bp, Homo sapien
tcctgagttatgcatggacattttg

SEQ ID NO: 565775 - DNA, 25 bp, Homo sapien
gttatgcatggacattttgagggag

SEQ ID NO: 565776 - DNA, 25 bp, Homo sapien
gtgcaatactgaggcccaggaccat

SEQ ID NO: 565777 - DNA, 25 bp, Homo sapien
ctttcagtcgtttctacttcaggcc

SEQ ID NO: 565778 - DNA, 25 bp, Homo sapien
tactttcagtcgtttctacttcagg

SEQ ID NO: 565779 - DNA, 25 bp, Homo sapien
ttcagtcgtttctacttcaggcctt

SEQ ID NO: 565780 - DNA, 25 bp, Homo sapien
ctttctactttcagtcgtttctact

SEQ ID NO: 565781 - DNA, 25 bp, Homo sapien
ccgactgcccgttatgttgttctgt

SEQ ID NO: 565782 - DNA, 25 bp, Homo sapien
gtaagacccaggttgccgactgccc

SEQ ID NO: 565783 - DNA, 25 bp, Homo sapien
gccagactctgctcacatttatttg

SEQ ID NO: 565784 - DNA, 25 bp, Homo sapien
atttgattcaaagtacagtgtagat

SEQ ID NO: 565785 - DNA, 25 bp, Homo sapien
gagcttttaaagatctcttggtgct

SEQ ID NO: 565786 - DNA, 25 bp, Homo sapien
agaaatgagcttttaaagatctctt

SEQ ID NO: 565787 - DNA, 25 bp, Homo sapien
taaagatctcttggtgctttcttgg

SEQ ID NO: 565788 - DNA, 25 bp, Homo sapien
aatgagcttttaaagatctcttggt

SEQ ID NO: 565789 - DNA, 25 bp, Homo sapien
cagggatatcagatgagctcagagg

SEQ ID NO: 565790 - DNA, 25 bp, Homo sapien
gctcagaggactctcaagaattctc

SEQ ID NO: 565791 - DNA, 25 bp, Homo sapien
tctcttaacagcgtttctgctattc

SEQ ID NO: 565792 - DNA, 25 bp, Homo sapien
ggcttgccagggatatcagatgagc

SEQ ID NO: 565793 - DNA, 25 bp, Homo sapien
ccttcatcttcaggaaacgtgcttt

SEQ ID NO: 565794 - DNA, 25 bp, Homo sapien
cttcatcttcaggaaacgtgctttt

SEQ ID NO: 565795 - DNA, 25 bp, Homo sapien
atccacaaatcgtttcttggtggca

SEQ ID NO: 565796 - DNA, 25 bp, Homo sapien
ttttcatccacaaatcgtttcttgg

SEQ ID NO: 565797 - DNA, 25 bp, Homo sapien
tcagccaagcttttcatccacaaat

SEQ ID NO: 565798 - DNA, 25 bp, Homo sapien
gccaagcttttcatccacaaatcgt

SEQ ID NO: 565799 - DNA, 25 bp, Homo sapien
ctgattgaggagacagcggtgtctt

SEQ ID NO: 565800 - DNA, 25 bp, Homo sapien
cggtgtcttcagacatgtggaatga

SEQ ID NO: 565801 - DNA, 25 bp, Homo sapien
gctgtactgataaaggatttggctt

SEQ ID NO: 565802 - DNA, 25 bp, Homo sapien
gagacagcggtgtcttcagacatgt

SEQ ID NO: 565803 - DNA, 25 bp, Homo sapien
ggcaatgaacagttgcaaattaata

SEQ ID NO: 565804 - DNA, 25 bp, Homo sapien
actgaattctgcattgcatgagtgt

SEQ ID NO: 565805 - DNA, 25 bp, Homo sapien
gaaaacgtctttattggcaatgaac

SEQ ID NO: 565806 - DNA, 25 bp, Homo sapien
catgagtgtatggtacaatcactgc

SEQ ID NO: 565807 - DNA, 25 bp, Homo sapien
ttctctaatgaggtccaggtctgtc

SEQ ID NO: 565808 - DNA, 25 bp, Homo sapien
cttttgttctctaatgaggtccagg

SEQ ID NO: 565809 - DNA, 25 bp, Homo sapien
cacatcccacagtctgctactgaca

SEQ ID NO: 565810 - DNA, 25 bp, Homo sapien
atcccacagtctgctactgacatca

SEQ ID NO: 565811 - DNA, 25 bp, Homo sapien
tgaaaacgggcatagaagactcgga

SEQ ID NO: 565812 - DNA, 25 bp, Homo sapien
tctgtgggaggcttatcacgtgctc

SEQ ID NO: 565813 - DNA, 25 bp, Homo sapien
taaatagcatgcgacccagagctgg

SEQ ID NO: 565814 - DNA, 25 bp, Homo sapien
tcatctccctaaggaaggactggtt

SEQ ID NO: 565815 - DNA, 25 bp, Homo sapien
atagccacacctgcacattcaggtt

SEQ ID NO: 565816 - DNA, 25 bp, Homo sapien
cacacctgcacattcaggtttccag

SEQ ID NO: 565817 - DNA, 25 bp, Homo sapien
gccacacctgcacattcaggtttcc

SEQ ID NO: 565818 - DNA, 25 bp, Homo sapien
ctatagccacacctgcacattcagg

SEQ ID NO: 565819 - DNA, 25 bp, Homo sapien
tgcttagctttcgaggcgaaggaat

SEQ ID NO: 565820 - DNA, 25 bp, Homo sapien
gaaggaatctgccttaggaagcgag

SEQ ID NO: 565821 - DNA, 25 bp, Homo sapien
caacacacatctgaattcttccaac

SEQ ID NO: 565822 - DNA, 25 bp, Homo sapien
taggaagcgagtaatgttcccagaa

SEQ ID NO: 565823 - DNA, 25 bp, Homo sapien
cggccagccttctgtcttttgccat

SEQ ID NO: 565824 - DNA, 25 bp, Homo sapien
ctgaatctttggattcacccaagac

SEQ ID NO: 565825 - DNA, 25 bp, Homo sapien
ggatctgtggaggaacatgtctccc

SEQ ID NO: 565826 - DNA, 25 bp, Homo sapien
tgaaagcttggatgtcagtggagca

SEQ ID NO: 565827 - DNA, 25 bp, Homo sapien
gcctacgtcattagggatttctgaa

SEQ ID NO: 565828 - DNA, 25 bp, Homo sapien
cagtggagcatttagggctgggcta

SEQ ID NO: 565829 - DNA, 25 bp, Homo sapien
ttattccattcccaccagtgtttct

SEQ ID NO: 565830 - DNA, 25 bp, Homo sapien
tattccattcccaccagtgtttctt

SEQ ID NO: 565831 - DNA, 25 bp, Homo sapien
cttttattccattcccaccagtgtt

SEQ ID NO: 565832 - DNA, 25 bp, Homo sapien
tccattcccaccagtgtttcttcat

SEQ ID NO: 565833 - DNA, 25 bp, Homo sapien
tatcgcatggatcaaattccgtaca

SEQ ID NO: 565834 - DNA, 25 bp, Homo sapien
cacctgctgcaatgagtctgccaga

SEQ ID NO: 565835 - DNA, 25 bp, Homo sapien
caatatggtcatgagataggctgta

SEQ ID NO: 565836 - DNA, 25 bp, Homo sapien
aatttagctaaaaccatcgacaggg

SEQ ID NO: 565837 - DNA, 25 bp, Homo sapien
tatcactgggtacgatctctgctgc

SEQ ID NO: 565838 - DNA, 25 bp, Homo sapien
tccatgaaaccgaagctccaaggct

SEQ ID NO: 565839 - DNA, 25 bp, Homo sapien
gatgcgagcttaccagatgccttcc

SEQ ID NO: 565840 - DNA, 25 bp, Homo sapien
catatgaatcataaagcgaggctgc

SEQ ID NO: 565841 - DNA, 25 bp, Homo sapien
gacccaacacgagagagagtatgaa

SEQ ID NO: 565842 - DNA, 25 bp, Homo sapien
tagtgacattatgcaactcagcagc

SEQ ID NO: 565843 - DNA, 25 bp, Homo sapien
tgatcatccgtataagccacttttg

SEQ ID NO: 565844 - DNA, 25 bp, Homo sapien
gaaccttcagtaggagaagcaccaa

SEQ ID NO: 565845 - DNA, 25 bp, Homo sapien
tttctagctgaggaagaattagtct

SEQ ID NO: 565846 - DNA, 25 bp, Homo sapien
ctctctctttctagctgaggaagaa

SEQ ID NO: 565847 - DNA, 25 bp, Homo sapien
ctagctgaggaagaattagtctcat

SEQ ID NO: 565848 - DNA, 25 bp, Homo sapien
tctctctctttctagctgaggaaga

SEQ ID NO: 565849 - DNA, 25 bp, Homo sapien
gtttgtgaagtttgtgaggcagcca

SEQ ID NO: 565850 - DNA, 25 bp, Homo sapien
ctaaaaattccctgaagtgtctgat

SEQ ID NO: 565851 - DNA, 25 bp, Homo sapien
caaaaggaacgtgagatgcaacagt

SEQ ID NO: 565852 - DNA, 25 bp, Homo sapien
tgctggataaaaagagtctgtgaca

SEQ ID NO: 565853 - DNA, 25 bp, Homo sapien
aaagcggtgatgaatcttctcgttt

SEQ ID NO: 565854 - DNA, 25 bp, Homo sapien
caaagcggtgatgaatcttctcgtt

SEQ ID NO: 565855 - DNA, 25 bp, Homo sapien
agcggtgatgaatcttctcgtttaa

SEQ ID NO: 565856 - DNA, 25 bp, Homo sapien
aagcggtgatgaatcttctcgttta

SEQ ID NO: 565857 - DNA, 25 bp, Homo sapien
aaagtttcgctcaacaaatcccagg

SEQ ID NO: 565858 - DNA, 25 bp, Homo sapien
tcgagggataaacgcatgacagacc

SEQ ID NO: 565859 - DNA, 25 bp, Homo sapien
ttgcataactgactgtaacacctgg

SEQ ID NO: 565860 - DNA, 25 bp, Homo sapien
ctcaagggagtaaacagggtacaca

SEQ ID NO: 565861 - DNA, 25 bp, Homo sapien
agctccgttacctctgtgaaccaga

SEQ ID NO: 565862 - DNA, 25 bp, Homo sapien
tggcctcgggcaagctccgttacct

SEQ ID NO: 565863 - DNA, 25 bp, Homo sapien
tctgtgaaccagagaatcccagctg

SEQ ID NO: 565864 - DNA, 25 bp, Homo sapien
gggcaagctccgttacctctgtgaa

SEQ ID NO: 565865 - DNA, 25 bp, Homo sapien
cgggagaaatcgtcccacgacctgg

SEQ ID NO: 565866 - DNA, 25 bp, Homo sapien
taaagcaggcaatacagttccaggg

SEQ ID NO: 565867 - DNA, 25 bp, Homo sapien
caacatgtacgcaggtaaagcaggc

SEQ ID NO: 565868 - DNA, 25 bp, Homo sapien
gaggccaggcttctaatgcggcgca

SEQ ID NO: 565869 - DNA, 25 bp, Homo sapien
tgacgtcaagcctgaagctcagccg

SEQ ID NO: 565870 - DNA, 25 bp, Homo sapien
ctgacgtcaagcctgaagctcagcc

SEQ ID NO: 565871 - DNA, 25 bp, Homo sapien
cgcagccaggctcgcgatgggaggt

SEQ ID NO: 565872 - DNA, 25 bp, Homo sapien
agaagatgccggttccgccagctgc

SEQ ID NO: 565873 - DNA, 25 bp, Homo sapien
cttgcagtcaccgggctcaagcacg

SEQ ID NO: 565874 - DNA, 25 bp, Homo sapien
ctaagccggaagctggcgccagaag

SEQ ID NO: 565875 - DNA, 25 bp, Homo sapien
tcagggtggagagattataaacaac

SEQ ID NO: 565876 - DNA, 25 bp, Homo sapien
gtggtcagtcctctttcgccatgga

SEQ ID NO: 565877 - DNA, 25 bp, Homo sapien
aataaattttgctgcagtgggccct

SEQ ID NO: 565878 - DNA, 25 bp, Homo sapien
gaaataaaccgttgcatgaccagaa

SEQ ID NO: 565879 - DNA, 25 bp, Homo sapien
tgcgaacacttccaaggccttgaga

SEQ ID NO: 565880 - DNA, 25 bp, Homo sapien
caaatggcacaaggttcaggcctca

SEQ ID NO: 565881 - DNA, 25 bp, Homo sapien
tttaaaagggctctccaaatggcac

SEQ ID NO: 565882 - DNA, 25 bp, Homo sapien
tatggaagcgctttaaatcgtggac

SEQ ID NO: 565883 - DNA, 25 bp, Homo sapien
caggcagaacaaattgctccgcaaa

SEQ ID NO: 565884 - DNA, 25 bp, Homo sapien
tatcaggcagaacaaattgctccgc

SEQ ID NO: 565885 - DNA, 25 bp, Homo sapien
cccttaacaaccctatcaggcagaa

SEQ ID NO: 565886 - DNA, 25 bp, Homo sapien
aaccctatcaggcagaacaaattgc

SEQ ID NO: 565887 - DNA, 25 bp, Homo sapien
gagctcatcgggtccggcacctctt

SEQ ID NO: 565888 - DNA, 25 bp, Homo sapien
gagcgatggtggactcccgagctca

SEQ ID NO: 565889 - DNA, 25 bp, Homo sapien
tcctggtgctcggaggagggtggaa

SEQ ID NO: 565890 - DNA, 25 bp, Homo sapien
tgcggcttgcagagcgatggtggac

SEQ ID NO: 565891 - DNA, 25 bp, Homo sapien
gcccacgccgccgaggtatcttttc

SEQ ID NO: 565892 - DNA, 25 bp, Homo sapien
ccacgccgccgaggtatcttttccg

SEQ ID NO: 565893 - DNA, 25 bp, Homo sapien
cacgccgccgaggtatcttttccgt

SEQ ID NO: 565894 - DNA, 25 bp, Homo sapien
cgggcccacgccgccgaggtatctt

SEQ ID NO: 565895 - DNA, 25 bp, Homo sapien
gagaacaggttatgtgggagccggc

SEQ ID NO: 565896 - DNA, 25 bp, Homo sapien
gcatttgccggcgacacccgagcgg

SEQ ID NO: 565897 - DNA, 25 bp, Homo sapien
ttcccactccgggagcggagacgga

SEQ ID NO: 565898 - DNA, 25 bp, Homo sapien
cttctgcgcatgctcggaagagcgg

SEQ ID NO: 565899 - DNA, 25 bp, Homo sapien
cgtggcgccggcagcggcccctggg

SEQ ID NO: 565900 - DNA, 25 bp, Homo sapien
accgtggcgccggcagcggcccctg

SEQ ID NO: 565901 - DNA, 25 bp, Homo sapien
agaccgtggcgccggcagcggcccc

SEQ ID NO: 565902 - DNA, 25 bp, Homo sapien
ctagaccgtggcgccggcagcggcc

SEQ ID NO: 565903 - DNA, 25 bp, Homo sapien
gacgcgggggtacgctgctgcgcgg

SEQ ID NO: 565904 - DNA, 25 bp, Homo sapien
tgaggagcgacggaagcgacgcggg

SEQ ID NO: 565905 - DNA, 25 bp, Homo sapien
gaggatgatgaggagcgacggaagc

SEQ ID NO: 565906 - DNA, 25 bp, Homo sapien
cgcggcgcccggtttcgtgcccgcg

SEQ ID NO: 565907 - DNA, 25 bp, Homo sapien
caaacaagatctacagttggccaat

SEQ ID NO: 565908 - DNA, 25 bp, Homo sapien
aaactctttgaggataacataggca

SEQ ID NO: 565909 - DNA, 25 bp, Homo sapien
tgaatgcacattatccaaacaagat

SEQ ID NO: 565910 - DNA, 25 bp, Homo sapien
tgatatcatgacaaaaacgtaagtg

SEQ ID NO: 565911 - DNA, 25 bp, Homo sapien
cagtctgggcctgacggcagttgca

SEQ ID NO: 565912 - DNA, 25 bp, Homo sapien
ttctcggtgatcacagacaggcttg

SEQ ID NO: 565913 - DNA, 25 bp, Homo sapien
cggcagttgcaggatggcagttctc

SEQ ID NO: 565914 - DNA, 25 bp, Homo sapien
cagaatcctgttcttgccgtcactg

SEQ ID NO: 565915 - DNA, 25 bp, Homo sapien
atgaaagtctctgcccaacacagtg

SEQ ID NO: 565916 - DNA, 25 bp, Homo sapien
tgccgcaacaaacatcggcactggt

SEQ ID NO: 565917 - DNA, 25 bp, Homo sapien
gaattttctctgagggatatagagg

SEQ ID NO: 565918 - DNA, 25 bp, Homo sapien
ttaaaaatggctgcgtgcaggctgg

SEQ ID NO: 565919 - DNA, 25 bp, Homo sapien
tattagttgaactccaagattgaga

SEQ ID NO: 565920 - DNA, 25 bp, Homo sapien
gatagttatatatccactcagagag

SEQ ID NO: 565921 - DNA, 25 bp, Homo sapien
ttcttagcacaacacctgacgtaga

SEQ ID NO: 565922 - DNA, 25 bp, Homo sapien
gcttgggcaactcagaggatagtta

SEQ ID NO: 565923 - DNA, 25 bp, Homo sapien
tgactaacgaatcatgtttttcctg

SEQ ID NO: 565924 - DNA, 25 bp, Homo sapien
agctgccccggaggctttgttattc

SEQ ID NO: 565925 - DNA, 25 bp, Homo sapien
taccattcttcctgttaggatgctt

SEQ ID NO: 565926 - DNA, 25 bp, Homo sapien
cagagtctgccatagtgactaacga

SEQ ID NO: 565927 - DNA, 25 bp, Homo sapien
gggtgcattcggagtggtgtgacca

SEQ ID NO: 565928 - DNA, 25 bp, Homo sapien
ggtcagacaagatagggtgcattcg

SEQ ID NO: 565929 - DNA, 25 bp, Homo sapien
agacaagatagggtgcattcggagt

SEQ ID NO: 565930 - DNA, 25 bp, Homo sapien
gtgcattcggagtggtgtgaccata

SEQ ID NO: 565931 - DNA, 25 bp, Homo sapien
gagtcatagcttcttatcttggagg

SEQ ID NO: 565932 - DNA, 25 bp, Homo sapien
cccatttagggaaagatagaactag

SEQ ID NO: 565933 - DNA, 25 bp, Homo sapien
taatttactatggagcaagtgccca

SEQ ID NO: 565934 - DNA, 25 bp, Homo sapien
tgcattgaaactgctgtgacctact

SEQ ID NO: 565935 - DNA, 25 bp, Homo sapien
tattaatttccccttagatagccca

SEQ ID NO: 565936 - DNA, 25 bp, Homo sapien
tactgctgatctgagctttgttctc

SEQ ID NO: 565937 - DNA, 25 bp, Homo sapien
tgttctcctggtcagactatacccc

SEQ ID NO: 565938 - DNA, 25 bp, Homo sapien
tcttccatatcagatactgctgatc

SEQ ID NO: 565939 - DNA, 25 bp, Homo sapien
aaaacagctctgactatatcccacc

SEQ ID NO: 565940 - DNA, 25 bp, Homo sapien
gaatttagaacaccgctctgctcca

SEQ ID NO: 565941 - DNA, 25 bp, Homo sapien
acccagcagtgcgaatgagaaacaa

SEQ ID NO: 565942 - DNA, 25 bp, Homo sapien
caggtcatagaatgacacccagcag

SEQ ID NO: 565943 - DNA, 25 bp, Homo sapien
cacagttggtgcagtgataaacaaa

SEQ ID NO: 565944 - DNA, 25 bp, Homo sapien
tctatttcaataaccacagttggtg

SEQ ID NO: 565945 - DNA, 25 bp, Homo sapien
tgctccattgccaacacattctatt

SEQ ID NO: 565946 - DNA, 25 bp, Homo sapien
aagaaggctcttgccttcaaaaagt

SEQ ID NO: 565947 - DNA, 25 bp, Homo sapien
tcctatttgttggaacccatggttc

SEQ ID NO: 565948 - DNA, 25 bp, Homo sapien
aacccatggttccagttcagttcca

SEQ ID NO: 565949 - DNA, 25 bp, Homo sapien
tacctgaggactttgacacacttac

SEQ ID NO: 565950 - DNA, 25 bp, Homo sapien
taatgaaagtttacgacatggcagc

SEQ ID NO: 565951 - DNA, 25 bp, Homo sapien
gcagggcttaatctcactcatcaag

SEQ ID NO: 565952 - DNA, 25 bp, Homo sapien
gaatctaattccatggtccctaaca

SEQ ID NO: 565953 - DNA, 25 bp, Homo sapien
tccttgtcgtaacactctttccttc

SEQ ID NO: 565954 - DNA, 25 bp, Homo sapien
ttctcctattgtagcctggatgcag

SEQ ID NO: 565955 - DNA, 25 bp, Homo sapien
gagcaggtcctcctacctgatccat

SEQ ID NO: 565956 - DNA, 25 bp, Homo sapien
tggaaatttgcctcagatctctgtg

SEQ ID NO: 565957 - DNA, 25 bp, Homo sapien
ggaataacttgtgccatgtgcagtt

SEQ ID NO: 565958 - DNA, 25 bp, Homo sapien
gctgagcaggtcctcctacctgatc

SEQ ID NO: 565959 - DNA, 25 bp, Homo sapien
tataatgaagtctgggtagaggtcg

SEQ ID NO: 565960 - DNA, 25 bp, Homo sapien
tcataggtaatcaacggttgagcta

SEQ ID NO: 565961 - DNA, 25 bp, Homo sapien
tagaggtcgccactctcactgtcca

SEQ ID NO: 565962 - DNA, 25 bp, Homo sapien
cactgtccaccctcccgtatgagga

SEQ ID NO: 565963 - DNA, 25 bp, Homo sapien
tctttttcatgcttggatacacagt

SEQ ID NO: 565964 - DNA, 25 bp, Homo sapien
ttttcatgcttggatacacagtcat

SEQ ID NO: 565965 - DNA, 25 bp, Homo sapien
ctttttcatgcttggatacacagtc

SEQ ID NO: 565966 - DNA, 25 bp, Homo sapien
ctctttttcatgcttggatacacag

SEQ ID NO: 565967 - DNA, 25 bp, Homo sapien
ttctttcaggcccacgtgtgcccgt

SEQ ID NO: 565968 - DNA, 25 bp, Homo sapien
tgaaaggtatgaacatccagggccg

SEQ ID NO: 565969 - DNA, 25 bp, Homo sapien
aaggagctcccagaatcacctcaag

SEQ ID NO: 565970 - DNA, 25 bp, Homo sapien
tccagggccgtactgaatatcaggc

SEQ ID NO: 565971 - DNA, 25 bp, Homo sapien
tacctgctgtcttaggtgaattata

SEQ ID NO: 565972 - DNA, 25 bp, Homo sapien
ctgataagtcttttgctagattgtc

SEQ ID NO: 565973 - DNA, 25 bp, Homo sapien
agtcttttgctagattgtctgtacc

SEQ ID NO: 565974 - DNA, 25 bp, Homo sapien
attgtctgtacctgctgtcttaggt

SEQ ID NO: 565975 - DNA, 25 bp, Homo sapien
caaagagccaatccagtcatcaaac

SEQ ID NO: 565976 - DNA, 25 bp, Homo sapien
tggcattctaagtcttttccctcat

SEQ ID NO: 565977 - DNA, 25 bp, Homo sapien
tttctattctctggaccattttatc

SEQ ID NO: 565978 - DNA, 25 bp, Homo sapien
tgatgttggcattctaagtcttttc

SEQ ID NO: 565979 - DNA, 25 bp, Homo sapien
tctgtagccacttgtataatatagg

SEQ ID NO: 565980 - DNA, 25 bp, Homo sapien
tgagtcaatgtgtgagtgtcaccaa

SEQ ID NO: 565981 - DNA, 25 bp, Homo sapien
tgctttatgtaccagcagagacaga

SEQ ID NO: 565982 - DNA, 25 bp, Homo sapien
ggagagaggcgggaagctggcaact

SEQ ID NO: 565983 - DNA, 25 bp, Homo sapien
gagctgagttcacagtttgctgagt

SEQ ID NO: 565984 - DNA, 25 bp, Homo sapien
ggttgctccattgcacctactggtg

SEQ ID NO: 565985 - DNA, 25 bp, Homo sapien
cctgtctcggcaaacgggaccatat

SEQ ID NO: 565986 - DNA, 25 bp, Homo sapien
aattcaacatcaggattcccaggac

SEQ ID NO: 565987 - DNA, 25 bp, Homo sapien
tcatgaaactcaccagagttatctt

SEQ ID NO: 565988 - DNA, 25 bp, Homo sapien
tattttttagcactacgacactgat

SEQ ID NO: 565989 - DNA, 25 bp, Homo sapien
tgttgggaacgagaagtcgaaaata

SEQ ID NO: 565990 - DNA, 25 bp, Homo sapien
tttagcactacgacactgatttttg

SEQ ID NO: 565991 - DNA, 25 bp, Homo sapien
aagtcgaaaatacacagcttctgag

SEQ ID NO: 565992 - DNA, 25 bp, Homo sapien
agcagggagcaaaccacttagctgt

SEQ ID NO: 565993 - DNA, 25 bp, Homo sapien
ggaccgccatctctgactttaccct

SEQ ID NO: 565994 - DNA, 25 bp, Homo sapien
tcgttcatacaggtaagacacagca

SEQ ID NO: 565995 - DNA, 25 bp, Homo sapien
tacccttggatggtcgttcatacag

SEQ ID NO: 565996 - DNA, 25 bp, Homo sapien
ttcctcaatgcatcaggaaggcatt

SEQ ID NO: 565997 - DNA, 25 bp, Homo sapien
gggattcctcaatgcatcaggaagg

SEQ ID NO: 565998 - DNA, 25 bp, Homo sapien
tcaggactgggggattcctcaatgc

SEQ ID NO: 565999 - DNA, 25 bp, Homo sapien
gactgggggattcctcaatgcatca

SEQ ID NO: 566000 - DNA, 25 bp, Homo sapien
gaggaagagttgaagatgcaagata

SEQ ID NO: 566001 - DNA, 25 bp, Homo sapien
gagttgaagatgcaagatacaagtt

SEQ ID NO: 566002 - DNA, 25 bp, Homo sapien
gatagtaccagagtatttgtatttg

SEQ ID NO: 566003 - DNA, 25 bp, Homo sapien
gattcatttgtgatagtaccagagt

SEQ ID NO: 566004 - DNA, 25 bp, Homo sapien
tctggtaaagcaacgtatgacggcg

SEQ ID NO: 566005 - DNA, 25 bp, Homo sapien
cactgaatgcactggaatcgtctga

SEQ ID NO: 566006 - DNA, 25 bp, Homo sapien
ttaatacagcaaatagccctcctgg

SEQ ID NO: 566007 - DNA, 25 bp, Homo sapien
gacagggaacgcgtttacacagcca

SEQ ID NO: 566008 - DNA, 25 bp, Homo sapien
ccagggggacctcggctccaggtca

SEQ ID NO: 566009 - DNA, 25 bp, Homo sapien
agtccccgcgatggcctttgttctg

SEQ ID NO: 566010 - DNA, 25 bp, Homo sapien
cacagtccccgcgatggcctttgtt

SEQ ID NO: 566011 - DNA, 25 bp, Homo sapien
ccgcgatggcctttgttctgttagg

SEQ ID NO: 566012 - DNA, 25 bp, Homo sapien
ctctccgagtctggaggtacgcggg

SEQ ID NO: 566013 - DNA, 25 bp, Homo sapien
cggcggacccttctccggcaggtag

SEQ ID NO: 566014 - DNA, 25 bp, Homo sapien
gcgctgcgcgcggtccaagcgcggg

SEQ ID NO: 566015 - DNA, 25 bp, Homo sapien
gctggtttccgagccgagtcccggc

SEQ ID NO: 566016 - DNA, 25 bp, Homo sapien
gccccgggtcggacttgcggcgctg

SEQ ID NO: 566017 - DNA, 25 bp, Homo sapien
ccccgggtcggacttgcggcgctgg

SEQ ID NO: 566018 - DNA, 25 bp, Homo sapien
tgccccgggtcggacttgcggcgct

SEQ ID NO: 566019 - DNA, 25 bp, Homo sapien
gtgccccgggtcggacttgcggcgc

SEQ ID NO: 566020 - DNA, 25 bp, Homo sapien
cacggtgagggttggacgcgtctgg

SEQ ID NO: 566021 - DNA, 25 bp, Homo sapien
cagagttcccgcacggtgagggttg

SEQ ID NO: 566022 - DNA, 25 bp, Homo sapien
cccgcacggtgagggttggacgcgt

SEQ ID NO: 566023 - DNA, 25 bp, Homo sapien
ttcccgcacggtgagggttggacgc

SEQ ID NO: 566024 - DNA, 25 bp, Homo sapien
taagccgaggctgggagtagaagcc

SEQ ID NO: 566025 - DNA, 25 bp, Homo sapien
atcgcggggacttcccaaccgctag

SEQ ID NO: 566026 - DNA, 25 bp, Homo sapien
caaccgctaggacgcgtaagccgag

SEQ ID NO: 566027 - DNA, 25 bp, Homo sapien
gacgcgtaagccgaggctgggagta

SEQ ID NO: 566028 - DNA, 25 bp, Homo sapien
ggctttctctgcgaatctcatgcgg

SEQ ID NO: 566029 - DNA, 25 bp, Homo sapien
ctgcgaatctcatgcggtctctgga

SEQ ID NO: 566030 - DNA, 25 bp, Homo sapien
gcctcttctgagttagtggctttct

SEQ ID NO: 566031 - DNA, 25 bp, Homo sapien
gggaagcccggagcctcttctgagt

SEQ ID NO: 566032 - DNA, 25 bp, Homo sapien
aagcatttacaacacgcgtttgtca

SEQ ID NO: 566033 - DNA, 25 bp, Homo sapien
agcatttacaacacgcgtttgtcat

SEQ ID NO: 566034 - DNA, 25 bp, Homo sapien
aaagcatttacaacacgcgtttgtc

SEQ ID NO: 566035 - DNA, 25 bp, Homo sapien
tagataaggagacttcacgagggtg

SEQ ID NO: 566036 - DNA, 25 bp, Homo sapien
gacttcacgagggtgttgtacttct

SEQ ID NO: 566037 - DNA, 25 bp, Homo sapien
ttcacgagggtgttgtacttcttaa

SEQ ID NO: 566038 - DNA, 25 bp, Homo sapien
aggagacttcacgagggtgttgtac

SEQ ID NO: 566039 - DNA, 25 bp, Homo sapien
gaaacagacgcatctgcttgatgca

SEQ ID NO: 566040 - DNA, 25 bp, Homo sapien
ggatgaggtctcatgtgcagtggcc

SEQ ID NO: 566041 - DNA, 25 bp, Homo sapien
gtgaaacagacgcatctgcttgatg

SEQ ID NO: 566042 - DNA, 25 bp, Homo sapien
aacagacgcatctgcttgatgcaaa

SEQ ID NO: 566043 - DNA, 25 bp, Homo sapien
tggccggcagtctcccatgacgttt

SEQ ID NO: 566044 - DNA, 25 bp, Homo sapien
tggaccttggtccagtgagcaagaa

SEQ ID NO: 566045 - DNA, 25 bp, Homo sapien
ttgagagttgaagagcatgtggacc

SEQ ID NO: 566046 - DNA, 25 bp, Homo sapien
gtatctgtttccattgccgctgccc

SEQ ID NO: 566047 - DNA, 25 bp, Homo sapien
ttttctcactccagaaactagcatg

SEQ ID NO: 566048 - DNA, 25 bp, Homo sapien
catgagccttgaggagagtatactc

SEQ ID NO: 566049 - DNA, 25 bp, Homo sapien
gagagtatactcttccttgcacact

SEQ ID NO: 566050 - DNA, 25 bp, Homo sapien
cagagcaggtagagttacgtgcacc

SEQ ID NO: 566051 - DNA, 25 bp, Homo sapien
tcctgctgctcagactttctagaca

SEQ ID NO: 566052 - DNA, 25 bp, Homo sapien
acaggtgggtccgtgtgcattccca

SEQ ID NO: 566053 - DNA, 25 bp, Homo sapien
tagacacttctgtggatccttccat

SEQ ID NO: 566054 - DNA, 25 bp, Homo sapien
gggtccgtgtgcattcccaattcct

SEQ ID NO: 566055 - DNA, 25 bp, Homo sapien
tattcaccataacatgagtgctgca

SEQ ID NO: 566056 - DNA, 25 bp, Homo sapien
gcacagtttgaagagcttagttgga

SEQ ID NO: 566057 - DNA, 25 bp, Homo sapien
gttggatcagaagtgcaaagcttca

SEQ ID NO: 566058 - DNA, 25 bp, Homo sapien
tgagtgctgcaaagagcccatttct

SEQ ID NO: 566059 - DNA, 25 bp, Homo sapien
tagtgacttgctggtacatttgcca

SEQ ID NO: 566060 - DNA, 25 bp, Homo sapien
ttctagtgacttgctggtacatttg

SEQ ID NO: 566061 - DNA, 25 bp, Homo sapien
ctagtgacttgctggtacatttgcc

SEQ ID NO: 566062 - DNA, 25 bp, Homo sapien
ctattctagtgacttgctggtacat

SEQ ID NO: 566063 - DNA, 25 bp, Homo sapien
ctttggccatgtggtccagcttccg

SEQ ID NO: 566064 - DNA, 25 bp, Homo sapien
ccagcttccgttatagctggcctgt

SEQ ID NO: 566065 - DNA, 25 bp, Homo sapien
gcagaccctcatgggtataaggccc

SEQ ID NO: 566066 - DNA, 25 bp, Homo sapien
tgcggcactgttctgcgtgagtgca

SEQ ID NO: 566067 - DNA, 25 bp, Homo sapien
tacaatagcatttcacggatacctg

SEQ ID NO: 566068 - DNA, 25 bp, Homo sapien
ggatgcaacacagaaccccaaagtg

SEQ ID NO: 566069 - DNA, 25 bp, Homo sapien
cattatacagaatgccatggtcctc

SEQ ID NO: 566070 - DNA, 25 bp, Homo sapien
cggatacctgagttccagagtgcgt

SEQ ID NO: 566071 - DNA, 25 bp, Homo sapien
tctgaactgaactttggtgcagact

SEQ ID NO: 566072 - DNA, 25 bp, Homo sapien
gtctgaactgaactttggtgcagac

SEQ ID NO: 566073 - DNA, 25 bp, Homo sapien
actttctggcccctgcatgggcaag

SEQ ID NO: 566074 - DNA, 25 bp, Homo sapien
cataatgttgatagggccagctggc

SEQ ID NO: 566075 - DNA, 25 bp, Homo sapien
ataatgttgatagggccagctggct

SEQ ID NO: 566076 - DNA, 25 bp, Homo sapien
ccataatgttgatagggccagctgg

SEQ ID NO: 566077 - DNA, 25 bp, Homo sapien
ccagctggctggcagatcacacaac

SEQ ID NO: 566078 - DNA, 25 bp, Homo sapien
ccatctgctcttcgacacagctgct

SEQ ID NO: 566079 - DNA, 25 bp, Homo sapien
cagctgctgggggtgctactgccat

SEQ ID NO: 566080 - DNA, 25 bp, Homo sapien
tctgctcttcgacacagctgctggg

SEQ ID NO: 566081 - DNA, 25 bp, Homo sapien
acagctgctgggggtgctactgcca

SEQ ID NO: 566082 - DNA, 25 bp, Homo sapien
tgatggtccaaagccatgcgctgcc

SEQ ID NO: 566083 - DNA, 25 bp, Homo sapien
ccttctgaaggcaggacgcatcctc

SEQ ID NO: 566084 - DNA, 25 bp, Homo sapien
atgcgagtgccccaagcgagaagag

SEQ ID NO: 566085 - DNA, 25 bp, Homo sapien
tgttggaagcatgtgcctgttctgt

SEQ ID NO: 566086 - DNA, 25 bp, Homo sapien
cgatgagcatacagtgtagggttct

SEQ ID NO: 566087 - DNA, 25 bp, Homo sapien
tgcaactgtggcgatgagcatacag

SEQ ID NO: 566088 - DNA, 25 bp, Homo sapien
gtagggttctatcaggtacttgaag

SEQ ID NO: 566089 - DNA, 25 bp, Homo sapien
tcacaaaagatttgcaactgtggcg

SEQ ID NO: 566090 - DNA, 25 bp, Homo sapien
ttagccaccgcagtcttttaaacac

SEQ ID NO: 566091 - DNA, 25 bp, Homo sapien
tagccaccgcagtcttttaaacaca

SEQ ID NO: 566092 - DNA, 25 bp, Homo sapien
ctgaggaacaaccagctggtaatat

SEQ ID NO: 566093 - DNA, 25 bp, Homo sapien
gctggtaatattgtcttctgctatg

SEQ ID NO: 566094 - DNA, 25 bp, Homo sapien
tgcattggccactgtcatactgagg

SEQ ID NO: 566095 - DNA, 25 bp, Homo sapien
ttcttttgggaagtactgaagcctg

SEQ ID NO: 566096 - DNA, 25 bp, Homo sapien
aagcagttaccaatatcaagcttgg

SEQ ID NO: 566097 - DNA, 25 bp, Homo sapien
agcagttaccaatatcaagcttggc

SEQ ID NO: 566098 - DNA, 25 bp, Homo sapien
catagtgtaagttcccggaagcagt

SEQ ID NO: 566099 - DNA, 25 bp, Homo sapien
atagtgtaagttcccggaagcagtg

SEQ ID NO: 566100 - DNA, 25 bp, Homo sapien
tcatagtgtaagttcccggaagcag

SEQ ID NO: 566101 - DNA, 25 bp, Homo sapien
ctgcattcgaaaaagatcaccagga

SEQ ID NO: 566102 - DNA, 25 bp, Homo sapien
caggaggtgctccaggggtgagctt

SEQ ID NO: 566103 - DNA, 25 bp, Homo sapien
gaggtgctccaggggtgagcttgtt

SEQ ID NO: 566104 - DNA, 25 bp, Homo sapien
ggaggtgctccaggggtgagcttgt

SEQ ID NO: 566105 - DNA, 25 bp, Homo sapien
ggtgctccaggggtgagcttgtttg

SEQ ID NO: 566106 - DNA, 25 bp, Homo sapien
gaagtcgcacttagagtctgtcggg

SEQ ID NO: 566107 - DNA, 25 bp, Homo sapien
cttagagtctgtcgggctcctatgt

SEQ ID NO: 566108 - DNA, 25 bp, Homo sapien
gctcctatgtcgctcccaagccctg

SEQ ID NO: 566109 - DNA, 25 bp, Homo sapien
ccgtgatgaagtcgcacttagagtc

SEQ ID NO: 566110 - DNA, 25 bp, Homo sapien
gacatcctggaagcactatgcaggg

SEQ ID NO: 566111 - DNA, 25 bp, Homo sapien
gaattcctcaattcccctgatgcgg

SEQ ID NO: 566112 - DNA, 25 bp, Homo sapien
gcccagtgttgctgagcgaatgaca

SEQ ID NO: 566113 - DNA, 25 bp, Homo sapien
cctgatgcggcacttcggtgctgga

SEQ ID NO: 566114 - DNA, 25 bp, Homo sapien
ttccataggcaggttcagctcctct

SEQ ID NO: 566115 - DNA, 25 bp, Homo sapien
ttattttccataggcaggttcagct

SEQ ID NO: 566116 - DNA, 25 bp, Homo sapien
ttttccataggcaggttcagctcct

SEQ ID NO: 566117 - DNA, 25 bp, Homo sapien
cataggcaggttcagctcctctcac

SEQ ID NO: 566118 - DNA, 25 bp, Homo sapien
tggccgacaactcaagcctgtctgc

SEQ ID NO: 566119 - DNA, 25 bp, Homo sapien
cgacaactcaagcctgtctgcaggc

SEQ ID NO: 566120 - DNA, 25 bp, Homo sapien
gccgacaactcaagcctgtctgcag

SEQ ID NO: 566121 - DNA, 25 bp, Homo sapien
ccctggaagtttcctcctcattctt

SEQ ID NO: 566122 - DNA, 25 bp, Homo sapien
tagaaatgggtgcaaagacaaaggg

SEQ ID NO: 566123 - DNA, 25 bp, Homo sapien
ctagaaatgggtgcaaagacaaagg

SEQ ID NO: 566124 - DNA, 25 bp, Homo sapien
agaaatgggtgcaaagacaaagggg

SEQ ID NO: 566125 - DNA, 25 bp, Homo sapien
gcttgaaatcatcgagagaactgtg

SEQ ID NO: 566126 - DNA, 25 bp, Homo sapien
tcgtgtataaaccacgctgccggtg

SEQ ID NO: 566127 - DNA, 25 bp, Homo sapien
tcctcggccgtttagtgatgggtca

SEQ ID NO: 566128 - DNA, 25 bp, Homo sapien
gaactgtggatggtatcaactccat

SEQ ID NO: 566129 - DNA, 25 bp, Homo sapien
attgcagatgagaagctgctagagt

SEQ ID NO: 566130 - DNA, 25 bp, Homo sapien
ggcagtggctgtcctagaacatttg

SEQ ID NO: 566131 - DNA, 25 bp, Homo sapien
caaggcattgtgcattaagactgtg

SEQ ID NO: 566132 - DNA, 25 bp, Homo sapien
gaggagaaaagacttcccagcagga

SEQ ID NO: 566133 - DNA, 25 bp, Homo sapien
ttgaatgaagaaggggctatactcc

SEQ ID NO: 566134 - DNA, 25 bp, Homo sapien
aatgaagaaggggctatactccact

SEQ ID NO: 566135 - DNA, 25 bp, Homo sapien
cttgaatgaagaaggggctatactc

SEQ ID NO: 566136 - DNA, 25 bp, Homo sapien
gaagaaggggctatactccacttca

SEQ ID NO: 566137 - DNA, 25 bp, Homo sapien
cctgggaacgacagttgtgacagaa

SEQ ID NO: 566138 - DNA, 25 bp, Homo sapien
ctgagtaagggctttaagtaatgca

SEQ ID NO: 566139 - DNA, 25 bp, Homo sapien
gctggaacccgtagcaagattcctg

SEQ ID NO: 566140 - DNA, 25 bp, Homo sapien
cagttgtgacagaagagaatgctgg

SEQ ID NO: 566141 - DNA, 25 bp, Homo sapien
tgacgaatacctacccaaggtggaa

SEQ ID NO: 566142 - DNA, 25 bp, Homo sapien
tcgagtgacgaatacctacccaagg

SEQ ID NO: 566143 - DNA, 25 bp, Homo sapien
tccctctgttccactcgagtgacga

SEQ ID NO: 566144 - DNA, 25 bp, Homo sapien
tccactcgagtgacgaatacctacc

SEQ ID NO: 566145 - DNA, 25 bp, Homo sapien
cattagtgatgtagacgtagagcag

SEQ ID NO: 566146 - DNA, 25 bp, Homo sapien
ggaggagttcttgcaatgacttgag

SEQ ID NO: 566147 - DNA, 25 bp, Homo sapien
caggctggcatgaagtgagaagatc

SEQ ID NO: 566148 - DNA, 25 bp, Homo sapien
ctctggagtaatcgatgaggaggcc

SEQ ID NO: 566149 - DNA, 25 bp, Homo sapien
aagagtacagaacacatatgagctt

SEQ ID NO: 566150 - DNA, 25 bp, Homo sapien
tgaagagtacagaacacatatgagc

SEQ ID NO: 566151 - DNA, 25 bp, Homo sapien
agggaatgaagagtacagaacacat

SEQ ID NO: 566152 - DNA, 25 bp, Homo sapien
gaatgaagagtacagaacacatatg

SEQ ID NO: 566153 - DNA, 25 bp, Homo sapien
ctcgttcatctacaaggattctggg

SEQ ID NO: 566154 - DNA, 25 bp, Homo sapien
tctggggaaaagatcgccagtggtt

SEQ ID NO: 566155 - DNA, 25 bp, Homo sapien
gtatggtctcgttcatctacaagga

SEQ ID NO: 566156 - DNA, 25 bp, Homo sapien
aaaataaggagtatggtctcgttca

SEQ ID NO: 566157 - DNA, 25 bp, Homo sapien
cagtttgaaagttcagagacttttc

SEQ ID NO: 566158 - DNA, 25 bp, Homo sapien
ctttattcttgtcactgcagtttga

SEQ ID NO: 566159 - DNA, 25 bp, Homo sapien
ccagtagggcaattcaccatctctc

SEQ ID NO: 566160 - DNA, 25 bp, Homo sapien
cacccagtagggcaattcaccatct

SEQ ID NO: 566161 - DNA, 25 bp, Homo sapien
atgatccagtaatatgctccctggt

SEQ ID NO: 566162 - DNA, 25 bp, Homo sapien
tgatccagtaatatgctccctggtc

SEQ ID NO: 566163 - DNA, 25 bp, Homo sapien
gcctctcaactctttcttacatgtg

SEQ ID NO: 566164 - DNA, 25 bp, Homo sapien
tgcctctcaactctttcttacatgt

SEQ ID NO: 566165 - DNA, 25 bp, Homo sapien
ttctagtagaaatgttgctgtcaca

SEQ ID NO: 566166 - DNA, 25 bp, Homo sapien
tcattgcgttctagtagaaatgttg

SEQ ID NO: 566167 - DNA, 25 bp, Homo sapien
tcagctatagcatgcagaacaagct

SEQ ID NO: 566168 - DNA, 25 bp, Homo sapien
gcgttctagtagaaatgttgctgtc

SEQ ID NO: 566169 - DNA, 25 bp, Homo sapien
caagcagagaatatctaagagattg

SEQ ID NO: 566170 - DNA, 25 bp, Homo sapien
gcagaacaagcagagaatatctaag

SEQ ID NO: 566171 - DNA, 25 bp, Homo sapien
aacaagcagagaatatctaagagat

SEQ ID NO: 566172 - DNA, 25 bp, Homo sapien
agaacaagcagagaatatctaagag

SEQ ID NO: 566173 - DNA, 25 bp, Homo sapien
cagagcatttggataagctcatctg

SEQ ID NO: 566174 - DNA, 25 bp, Homo sapien
acttgcctgctgagcccagcgttgc

SEQ ID NO: 566175 - DNA, 25 bp, Homo sapien
gaacttgcctgctgagcccagcgtt

SEQ ID NO: 566176 - DNA, 25 bp, Homo sapien
gagcatttggataagctcatctgac

SEQ ID NO: 566177 - DNA, 25 bp, Homo sapien
tcttatgccgtcctaagagggacct

SEQ ID NO: 566178 - DNA, 25 bp, Homo sapien
taagagggacctagagtacacaaga

SEQ ID NO: 566179 - DNA, 25 bp, Homo sapien
ccaaaatacagagatgcggcagtgc

SEQ ID NO: 566180 - DNA, 25 bp, Homo sapien
gtacacaagattccgcaaacagatt

SEQ ID NO: 566181 - DNA, 25 bp, Homo sapien
atgatcattgcagctgttataggtc

SEQ ID NO: 566182 - DNA, 25 bp, Homo sapien
cttaattctaggatgatcattgcag

SEQ ID NO: 566183 - DNA, 25 bp, Homo sapien
gatcattgcagctgttataggtcag

SEQ ID NO: 566184 - DNA, 25 bp, Homo sapien
ttttgagtgctcccacttaattcta

SEQ ID NO: 566185 - DNA, 25 bp, Homo sapien
caaaggaacaagctttgaagcaaag

SEQ ID NO: 566186 - DNA, 25 bp, Homo sapien
gaacaaaggaacaagctttgaagca

SEQ ID NO: 566187 - DNA, 25 bp, Homo sapien
ggaacaagctttgaagcaaagttcc

SEQ ID NO: 566188 - DNA, 25 bp, Homo sapien
ggaacaaaggaacaagctttgaagc

SEQ ID NO: 566189 - DNA, 25 bp, Homo sapien
ggattccagattcaaacatgtaagt

SEQ ID NO: 566190 - DNA, 25 bp, Homo sapien
gtttgggttggcaaatatgtgaatg

SEQ ID NO: 566191 - DNA, 25 bp, Homo sapien
tttgtttgggttggcaaatatgtga

SEQ ID NO: 566192 - DNA, 25 bp, Homo sapien
ttttgtttgggttggcaaatatgtg

SEQ ID NO: 566193 - DNA, 25 bp, Homo sapien
gatggaacccgatcaccacagacat

SEQ ID NO: 566194 - DNA, 25 bp, Homo sapien
tacccactgggtagatggacggatg

SEQ ID NO: 566195 - DNA, 25 bp, Homo sapien
tcaagtgcactttacccactgggta

SEQ ID NO: 566196 - DNA, 25 bp, Homo sapien
gtagatggacggatggaacccgatc

SEQ ID NO: 566197 - DNA, 25 bp, Homo sapien
ttctaacccctgcatttgaatttca

SEQ ID NO: 566198 - DNA, 25 bp, Homo sapien
agagcagctaagagcagttaggaag

SEQ ID NO: 566199 - DNA, 25 bp, Homo sapien
ctaagagcagttaggaagggctgtt

SEQ ID NO: 566200 - DNA, 25 bp, Homo sapien
tttgaatttcaaacattggaagcag

SEQ ID NO: 566201 - DNA, 25 bp, Homo sapien
tggcctgaggagctttatcatagcg

SEQ ID NO: 566202 - DNA, 25 bp, Homo sapien
acaaacttgccagtctgcaacaaag

SEQ ID NO: 566203 - DNA, 25 bp, Homo sapien
tttatcatagcgttgcaaagccaca

SEQ ID NO: 566204 - DNA, 25 bp, Homo sapien
aaggcggcatggcagctcagctggg

SEQ ID NO: 566205 - DNA, 25 bp, Homo sapien
taaaatccggtgcttatgtaatcag

SEQ ID NO: 566206 - DNA, 25 bp, Homo sapien
aatgtgcgatttgctgtcatctgtc

SEQ ID NO: 566207 - DNA, 25 bp, Homo sapien
gatggcgaagtcaataagatttgga

SEQ ID NO: 566208 - DNA, 25 bp, Homo sapien
tggagcctatcaggttcaaaccaga

SEQ ID NO: 566209 - DNA, 25 bp, Homo sapien
tggagttgatgacatattgtggata

SEQ ID NO: 566210 - DNA, 25 bp, Homo sapien
ttttggagttgatgacatattgtgg

SEQ ID NO: 566211 - DNA, 25 bp, Homo sapien
gagttgatgacatattgtggatatt

SEQ ID NO: 566212 - DNA, 25 bp, Homo sapien
tttggagttgatgacatattgtgga

SEQ ID NO: 566213 - DNA, 25 bp, Homo sapien
cccatgatgaattccacggtagaga

SEQ ID NO: 566214 - DNA, 25 bp, Homo sapien
tgagctgacaatatctaccccatga

SEQ ID NO: 566215 - DNA, 25 bp, Homo sapien
cacagacactgagaatcaggtggca

SEQ ID NO: 566216 - DNA, 25 bp, Homo sapien
ttccgcactggtcctttgaagcaga

SEQ ID NO: 566217 - DNA, 25 bp, Homo sapien
cttgtgtatctgaacgcatggttaa

SEQ ID NO: 566218 - DNA, 25 bp, Homo sapien
cagtttgtgactcatatattaatac

SEQ ID NO: 566219 - DNA, 25 bp, Homo sapien
catggttaataaaaagttgtactca

SEQ ID NO: 566220 - DNA, 25 bp, Homo sapien
gaatgtcacaagacccgaagacttt

SEQ ID NO: 566221 - DNA, 25 bp, Homo sapien
tcaaaggcagggcaagcaaagtaca

SEQ ID NO: 566222 - DNA, 25 bp, Homo sapien
taacccagggagactcatagccttc

SEQ ID NO: 566223 - DNA, 25 bp, Homo sapien
cactttctgactaaggtaacccagg

SEQ ID NO: 566224 - DNA, 25 bp, Homo sapien
aaattcatgactgatcctcaaaggc

SEQ ID NO: 566225 - DNA, 25 bp, Homo sapien
ctttctcttgcagggtagcatgtgc

SEQ ID NO: 566226 - DNA, 25 bp, Homo sapien
agtcaccatccgcatacatttgccg

SEQ ID NO: 566227 - DNA, 25 bp, Homo sapien
catgacctggattagcttgcctctc

SEQ ID NO: 566228 - DNA, 25 bp, Homo sapien
gtgcatcgaccttaacaagcccaag

SEQ ID NO: 566229 - DNA, 25 bp, Homo sapien
ttcctgggtgatgcgatgccccgct

SEQ ID NO: 566230 - DNA, 25 bp, Homo sapien
cagggttgcgtctgttgtccaggat

SEQ ID NO: 566231 - DNA, 25 bp, Homo sapien
ttttgaggcagggttgcgtctgttg

SEQ ID NO: 566232 - DNA, 25 bp, Homo sapien
ttcggccatcttggacatactctgt

SEQ ID NO: 566233 - DNA, 25 bp, Homo sapien
ctcagaacagctcaggccgctgcag

SEQ ID NO: 566234 - DNA, 25 bp, Homo sapien
tatccttcgctatcaaaacctccat

SEQ ID NO: 566235 - DNA, 25 bp, Homo sapien
gattccacatagaccctctctactg

SEQ ID NO: 566236 - DNA, 25 bp, Homo sapien
tgtgtaccagatgaagccctaccac

SEQ ID NO: 566237 - DNA, 25 bp, Homo sapien
taagaaggttcccatgaagcctccc

SEQ ID NO: 566238 - DNA, 25 bp, Homo sapien
ggtgtaagaaggttcccatgaagcc

SEQ ID NO: 566239 - DNA, 25 bp, Homo sapien
gagacaaggcaaaggtgtaagaagg

SEQ ID NO: 566240 - DNA, 25 bp, Homo sapien
aaggttcccatgaagcctcccttct

SEQ ID NO: 566241 - DNA, 25 bp, Homo sapien
catccctttgcctcgatctgtcaga

SEQ ID NO: 566242 - DNA, 25 bp, Homo sapien
tataccttcaagagctccattatct

SEQ ID NO: 566243 - DNA, 25 bp, Homo sapien
tcgtcgtcccacattattctctttg

SEQ ID NO: 566244 - DNA, 25 bp, Homo sapien
ttaggagtcctaaacagtgctgtgc

SEQ ID NO: 566245 - DNA, 25 bp, Homo sapien
gagtccaggtctcttgaaagtgcat

SEQ ID NO: 566246 - DNA, 25 bp, Homo sapien
cagagtccaggtctcttgaaagtgc

SEQ ID NO: 566247 - DNA, 25 bp, Homo sapien
acatcacaaagcacaatttgtggca

SEQ ID NO: 566248 - DNA, 25 bp, Homo sapien
agagtccaggtctcttgaaagtgca

SEQ ID NO: 566249 - DNA, 25 bp, Homo sapien
ttctcaagtaagtcatgtataaaac

SEQ ID NO: 566250 - DNA, 25 bp, Homo sapien
gtccttctcaagtaagtcatgtata

SEQ ID NO: 566251 - DNA, 25 bp, Homo sapien
tccttctcaagtaagtcatgtataa

SEQ ID NO: 566252 - DNA, 25 bp, Homo sapien
ccttctcaagtaagtcatgtataaa

SEQ ID NO: 566253 - DNA, 25 bp, Homo sapien
tgcacagccctttcttcatagtttc

SEQ ID NO: 566254 - DNA, 25 bp, Homo sapien
ttcttctgctgtctctaatatccat

SEQ ID NO: 566255 - DNA, 25 bp, Homo sapien
ttttccaggtccttccacagtctgc

SEQ ID NO: 566256 - DNA, 25 bp, Homo sapien
cagccctttcttcatagtttcttct

SEQ ID NO: 566257 - DNA, 25 bp, Homo sapien
cccaaagaactcaggttagccatcc

SEQ ID NO: 566258 - DNA, 25 bp, Homo sapien
attcccaaagaactcaggttagcca

SEQ ID NO: 566259 - DNA, 25 bp, Homo sapien
aatgtccacaggcataactcttata

SEQ ID NO: 566260 - DNA, 25 bp, Homo sapien
actgcaaagaatccagtcctctctg

SEQ ID NO: 566261 - DNA, 25 bp, Homo sapien
cattggagattaagtggtcgttcat

SEQ ID NO: 566262 - DNA, 25 bp, Homo sapien
gaggatcgtatcgtattcattcaca

SEQ ID NO: 566263 - DNA, 25 bp, Homo sapien
tcacaatgcttgtgcattgtcggtg

SEQ ID NO: 566264 - DNA, 25 bp, Homo sapien
gcttgtgcattgtcggtgtttaaca

SEQ ID NO: 566265 - DNA, 25 bp, Homo sapien
tcttaactggttggtatccctcatc

SEQ ID NO: 566266 - DNA, 25 bp, Homo sapien
tgcttatgacttgagagggagcctc

SEQ ID NO: 566267 - DNA, 25 bp, Homo sapien
tctctgccccgaaactcttaactgg

SEQ ID NO: 566268 - DNA, 25 bp, Homo sapien
tcagataacctgagagccattgcct

SEQ ID NO: 566269 - DNA, 25 bp, Homo sapien
accaaataccatgtgttaccgctta

SEQ ID NO: 566270 - DNA, 25 bp, Homo sapien
aaccaaataccatgtgttaccgctt

SEQ ID NO: 566271 - DNA, 25 bp, Homo sapien
catttatcaggtcaggaatgaggct

SEQ ID NO: 566272 - DNA, 25 bp, Homo sapien
tatctcaagagtttttgcagcaacc

SEQ ID NO: 566273 - DNA, 25 bp, Homo sapien
tgctttaacccggagaactctgaga

SEQ ID NO: 566274 - DNA, 25 bp, Homo sapien
aaataatgagcatagagggatacgc

SEQ ID NO: 566275 - DNA, 25 bp, Homo sapien
ctgagtcccgtttcagatgctgtct

SEQ ID NO: 566276 - DNA, 25 bp, Homo sapien
agagtcagaaactgagtcccgtttc

SEQ ID NO: 566277 - DNA, 25 bp, Homo sapien
tgccaacggcgttgtgagagtcaga

SEQ ID NO: 566278 - DNA, 25 bp, Homo sapien
ctgggtttctgccaacggcgttgtg

SEQ ID NO: 566279 - DNA, 25 bp, Homo sapien
aaattggacggctcccatccagtcc

SEQ ID NO: 566280 - DNA, 25 bp, Homo sapien
actggcgaccgcatttccaactttg

SEQ ID NO: 566281 - DNA, 25 bp, Homo sapien
cccttggctgctccaaaattggacg

SEQ ID NO: 566282 - DNA, 25 bp, Homo sapien
tttctctgccaatcctccaataggt

SEQ ID NO: 566283 - DNA, 25 bp, Homo sapien
ccccagctcgttcacgtctcagtca

SEQ ID NO: 566284 - DNA, 25 bp, Homo sapien
tgcatgttcaacctggacttcccca

SEQ ID NO: 566285 - DNA, 25 bp, Homo sapien
cccagctcgttcacgtctcagtcag

SEQ ID NO: 566286 - DNA, 25 bp, Homo sapien
gtctctcataagtgcatgttcaacc

SEQ ID NO: 566287 - DNA, 25 bp, Homo sapien
ggctttagaaatgacatgagctgat

SEQ ID NO: 566288 - DNA, 25 bp, Homo sapien
caacaatgggaaaccacgcagtcca

SEQ ID NO: 566289 - DNA, 25 bp, Homo sapien
gaagggcagattagagcaacaatgg

SEQ ID NO: 566290 - DNA, 25 bp, Homo sapien
tcttgctgtaaaaccaccaaaagtg

SEQ ID NO: 566291 - DNA, 25 bp, Homo sapien
catgctgtacactcttcaaagtgct

SEQ ID NO: 566292 - DNA, 25 bp, Homo sapien
tatatcagccatgtttcaacaatgc

SEQ ID NO: 566293 - DNA, 25 bp, Homo sapien
aaacgacattagatgagatcgtcca

SEQ ID NO: 566294 - DNA, 25 bp, Homo sapien
gatcgtccataggaaagtcttcaaa

SEQ ID NO: 566295 - DNA, 25 bp, Homo sapien
ggtcgtaatagatagagcaagggtg

SEQ ID NO: 566296 - DNA, 25 bp, Homo sapien
gtgaaagggtcgtaatagatagagc

SEQ ID NO: 566297 - DNA, 25 bp, Homo sapien
aagggtcgtaatagatagagcaagg

SEQ ID NO: 566298 - DNA, 25 bp, Homo sapien
tcgtaatagatagagcaagggtggg

SEQ ID NO: 566299 - DNA, 25 bp, Homo sapien
tcaaaagtctccaataggttgcagc

SEQ ID NO: 566300 - DNA, 25 bp, Homo sapien
gaaaagaaccaaagtctcacgcata

SEQ ID NO: 566301 - DNA, 25 bp, Homo sapien
ggaagcaagagccaatcccaggtgc

SEQ ID NO: 566302 - DNA, 25 bp, Homo sapien
aaagcctaactttaagacagtcaga

SEQ ID NO: 566303 - DNA, 25 bp, Homo sapien
attcttcacgggatccagcaatctg

SEQ ID NO: 566304 - DNA, 25 bp, Homo sapien
cacgggatccagcaatctgactcct

SEQ ID NO: 566305 - DNA, 25 bp, Homo sapien
gggatccagcaatctgactcctcag

SEQ ID NO: 566306 - DNA, 25 bp, Homo sapien
cagcaatctgactcctcagtatctt

SEQ ID NO: 566307 - DNA, 25 bp, Homo sapien
tgtgcaaaatattactcccaaaact

SEQ ID NO: 566308 - DNA, 25 bp, Homo sapien
gactggcttgtattagtgatccatc

SEQ ID NO: 566309 - DNA, 25 bp, Homo sapien
cccaaaacttggaggcttatataag

SEQ ID NO: 566310 - DNA, 25 bp, Homo sapien
ctgtatgcaaatgcatatggtgaca

SEQ ID NO: 566311 - DNA, 25 bp, Homo sapien
caatcaagctgtcagccaagaccac

SEQ ID NO: 566312 - DNA, 25 bp, Homo sapien
gcaatcaagctgtcagccaagacca

SEQ ID NO: 566313 - DNA, 25 bp, Homo sapien
cttgagacttgagtgaaggctgatc

SEQ ID NO: 566314 - DNA, 25 bp, Homo sapien
tcttgagacttgagtgaaggctgat

SEQ ID NO: 566315 - DNA, 25 bp, Homo sapien
ttgaaaatgacaccccagcactctg

SEQ ID NO: 566316 - DNA, 25 bp, Homo sapien
catccaagtcaactcacatgggcag

SEQ ID NO: 566317 - DNA, 25 bp, Homo sapien
tctgtcacgtttgattgagtcacta

SEQ ID NO: 566318 - DNA, 25 bp, Homo sapien
gcagtcttcacataacccagtcttg

SEQ ID NO: 566319 - DNA, 25 bp, Homo sapien
acccatgggtttactaattccagtg

SEQ ID NO: 566320 - DNA, 25 bp, Homo sapien
taacagatttgatcactttgaccac

SEQ ID NO: 566321 - DNA, 25 bp, Homo sapien
tactgctagaaccttaagacctcga

SEQ ID NO: 566322 - DNA, 25 bp, Homo sapien
caaggttttgcagctattgatggca

SEQ ID NO: 566323 - DNA, 25 bp, Homo sapien
tttttccatctggaatcatcgtctt

SEQ ID NO: 566324 - DNA, 25 bp, Homo sapien
ttccattttttccatctggaatcat

SEQ ID NO: 566325 - DNA, 25 bp, Homo sapien
ttttttccatctggaatcatcgtct

SEQ ID NO: 566326 - DNA, 25 bp, Homo sapien
ccattttttccatctggaatcatcg

SEQ ID NO: 566327 - DNA, 25 bp, Homo sapien
gcaaaactatgaattgagccccatg

SEQ ID NO: 566328 - DNA, 25 bp, Homo sapien
gaaatcacatggcacacggttaaac

SEQ ID NO: 566329 - DNA, 25 bp, Homo sapien
catagccggtggtgtaaaatgatca

SEQ ID NO: 566330 - DNA, 25 bp, Homo sapien
gcacgctgccatgtactggtttgag

SEQ ID NO: 566331 - DNA, 25 bp, Homo sapien
gaggtgttggcatcctccctgagaa

SEQ ID NO: 566332 - DNA, 25 bp, Homo sapien
gaagacctaccgtgttgcagtgtgt

SEQ ID NO: 566333 - DNA, 25 bp, Homo sapien
gaatcgactaccatgcaatcaaggg

SEQ ID NO: 566334 - DNA, 25 bp, Homo sapien
taagctaaagggtctcaggactggc

SEQ ID NO: 566335 - DNA, 25 bp, Homo sapien
gagtatagcacacctccctcatggg

SEQ ID NO: 566336 - DNA, 25 bp, Homo sapien
gagttcctacatagtgggcacaaat

SEQ ID NO: 566337 - DNA, 25 bp, Homo sapien
gggaatgttgccactactgacgata

SEQ ID NO: 566338 - DNA, 25 bp, Homo sapien
ccactgggactttagactagttata

SEQ ID NO: 566339 - DNA, 25 bp, Homo sapien
tttgtagcccctcctttgaatcttc

SEQ ID NO: 566340 - DNA, 25 bp, Homo sapien
ctttgtagcccctcctttgaatctt

SEQ ID NO: 566341 - DNA, 25 bp, Homo sapien
ttctttgtagcccctcctttgaatc

SEQ ID NO: 566342 - DNA, 25 bp, Homo sapien
tctttgtagcccctcctttgaatct

SEQ ID NO: 566343 - DNA, 25 bp, Homo sapien
gatggtgtctgattaatctcccaaa

SEQ ID NO: 566344 - DNA, 25 bp, Homo sapien
tgctgatggtgtctgattaatctcc

SEQ ID NO: 566345 - DNA, 25 bp, Homo sapien
ttcacaaaaacacaggtgctctccc

SEQ ID NO: 566346 - DNA, 25 bp, Homo sapien
ggcataattcttcacaaaaacacag

SEQ ID NO: 566347 - DNA, 25 bp, Homo sapien
actcattctttgttaagtcccacaa

SEQ ID NO: 566348 - DNA, 25 bp, Homo sapien
ctcattctttgttaagtcccacaat

SEQ ID NO: 566349 - DNA, 25 bp, Homo sapien
tactcattctttgttaagtcccaca

SEQ ID NO: 566350 - DNA, 25 bp, Homo sapien
cattctttgttaagtcccacaatta

SEQ ID NO: 566351 - DNA, 25 bp, Homo sapien
ctgagtgattaaccctgtgaatttc

SEQ ID NO: 566352 - DNA, 25 bp, Homo sapien
cttaactgagtgattaaccctgtga

SEQ ID NO: 566353 - DNA, 25 bp, Homo sapien
taactgagtgattaaccctgtgaat

SEQ ID NO: 566354 - DNA, 25 bp, Homo sapien
ccttaactgagtgattaaccctgtg

SEQ ID NO: 566355 - DNA, 25 bp, Homo sapien
tgagccggacagaatcaagcctgcg

SEQ ID NO: 566356 - DNA, 25 bp, Homo sapien
tgcaattattgcagcatgcaccaag

SEQ ID NO: 566357 - DNA, 25 bp, Homo sapien
ggaagatgtctcttgccattacaga

SEQ ID NO: 566358 - DNA, 25 bp, Homo sapien
ttacagaaccacaccgagaaagatc

SEQ ID NO: 566359 - DNA, 25 bp, Homo sapien
cacatcagttgtttagagtcacgtt

SEQ ID NO: 566360 - DNA, 25 bp, Homo sapien
tagagtcacgttgagtcaagcggcc

SEQ ID NO: 566361 - DNA, 25 bp, Homo sapien
agtcaagcggccaccagagtgaaga

SEQ ID NO: 566362 - DNA, 25 bp, Homo sapien
gaagacacgtttcattgtttccagc

SEQ ID NO: 566363 - DNA, 25 bp, Homo sapien
tggatgttcgtcacacaggatgttt

SEQ ID NO: 566364 - DNA, 25 bp, Homo sapien
caaaccggtgttgtttgtgacgtga

SEQ ID NO: 566365 - DNA, 25 bp, Homo sapien
tcagggtttggaatacgactctaaa

SEQ ID NO: 566366 - DNA, 25 bp, Homo sapien
cactatcatgggctcggtaatcacc

SEQ ID NO: 566367 - DNA, 25 bp, Homo sapien
gtactctacacatagagcccaaggg

SEQ ID NO: 566368 - DNA, 25 bp, Homo sapien
aaatgtactctacacatagagccca

SEQ ID NO: 566369 - DNA, 25 bp, Homo sapien
tatgtccacataattcactcttatt

SEQ ID NO: 566370 - DNA, 25 bp, Homo sapien
gcccaagggatctattcttatgtca

SEQ ID NO: 566371 - DNA, 25 bp, Homo sapien
tcttattgcctctgagctccgggac

SEQ ID NO: 566372 - DNA, 25 bp, Homo sapien
ctcagccccatgcacgtcagctgct

SEQ ID NO: 566373 - DNA, 25 bp, Homo sapien
ttattgcctctgagctccgggaccc

SEQ ID NO: 566374 - DNA, 25 bp, Homo sapien
tgctcttattgcctctgagctccgg

SEQ ID NO: 566375 - DNA, 25 bp, Homo sapien
gaaattatggctcgttgtggtgcag

SEQ ID NO: 566376 - DNA, 25 bp, Homo sapien
ctctggagctaatgagcaatcagca

SEQ ID NO: 566377 - DNA, 25 bp, Homo sapien
cagcatagcccagatctccattttg

SEQ ID NO: 566378 - DNA, 25 bp, Homo sapien
tggtgcagttttccactttagggat

SEQ ID NO: 566379 - DNA, 25 bp, Homo sapien
cttgcatccatgtgttgatgttaag

SEQ ID NO: 566380 - DNA, 25 bp, Homo sapien
catccatgtgttgatgttaagctgc

SEQ ID NO: 566381 - DNA, 25 bp, Homo sapien
tatcatatgcggaatgcataaaact

SEQ ID NO: 566382 - DNA, 25 bp, Homo sapien
cacataaccgtatattatcatgtat

SEQ ID NO: 566383 - DNA, 25 bp, Homo sapien
ttctgttcttgttaaaccatgggag

SEQ ID NO: 566384 - DNA, 25 bp, Homo sapien
tcttgttaaaccatgggagctcctc

SEQ ID NO: 566385 - DNA, 25 bp, Homo sapien
tcctcgctggagatctcccaaaagt

SEQ ID NO: 566386 - DNA, 25 bp, Homo sapien
ttggcgggaatcttgtttctgttct

SEQ ID NO: 566387 - DNA, 25 bp, Homo sapien
taattgaggcctgttatgacctgga

SEQ ID NO: 566388 - DNA, 25 bp, Homo sapien
tcctgctgcgaagattggctagtcc

SEQ ID NO: 566389 - DNA, 25 bp, Homo sapien
tctgcgtgtacgtggagggcatacc

SEQ ID NO: 566390 - DNA, 25 bp, Homo sapien
taacacattgctgtaagctgggcgg

SEQ ID NO: 566391 - DNA, 25 bp, Homo sapien
tgtggagattattgcatcagagagc

SEQ ID NO: 566392 - DNA, 25 bp, Homo sapien
gggtgcccagcaagttggaattcat

SEQ ID NO: 566393 - DNA, 25 bp, Homo sapien
gagctaaactagtaaactgaggtgg

SEQ ID NO: 566394 - DNA, 25 bp, Homo sapien
tgttttcccaatgatgactcgaacc

SEQ ID NO: 566395 - DNA, 25 bp, Homo sapien
gataggagggaaactgatatctgaa

SEQ ID NO: 566396 - DNA, 25 bp, Homo sapien
tgccagtacagggtgttcagtcagt

SEQ ID NO: 566397 - DNA, 25 bp, Homo sapien
tctgcagtgagtttaggatgcatta

SEQ ID NO: 566398 - DNA, 25 bp, Homo sapien
gaaatttcagtatataccacagtgc

SEQ ID NO: 566399 - DNA, 25 bp, Homo sapien
gtcaaaccctgattcaacagcattg

SEQ ID NO: 566400 - DNA, 25 bp, Homo sapien
cccgtggcgagtggctgcagccgct

SEQ ID NO: 566401 - DNA, 25 bp, Homo sapien
tgcagttatctgtgcacgagggccg

SEQ ID NO: 566402 - DNA, 25 bp, Homo sapien
aacagcattgcgtctcttccttgat

SEQ ID NO: 566403 - DNA, 25 bp, Homo sapien
gctaagcatagtggggtatctaatc

SEQ ID NO: 566404 - DNA, 25 bp, Homo sapien
ctcgtagtgttctggcgagcagttt

SEQ ID NO: 566405 - DNA, 25 bp, Homo sapien
tcccagtttgggtcttagctattgt

SEQ ID NO: 566406 - DNA, 25 bp, Homo sapien
taactgttgaggtttagggctaagc

SEQ ID NO: 566407 - DNA, 25 bp, Homo sapien
tgtaatgcgatagaacccttgctgg

SEQ ID NO: 566408 - DNA, 25 bp, Homo sapien
gagcccaggattagggtgaccagca

SEQ ID NO: 566409 - DNA, 25 bp, Homo sapien
tgtgcacagtgcctcggacgatagt

SEQ ID NO: 566410 - DNA, 25 bp, Homo sapien
tgagatgcagtaccctccaaaggtg

SEQ ID NO: 566411 - DNA, 25 bp, Homo sapien
aagacagaagcttcagacaccccct

SEQ ID NO: 566412 - DNA, 25 bp, Homo sapien
tcctcggcaatgtgcctgacaagca

SEQ ID NO: 566413 - DNA, 25 bp, Homo sapien
tcagaaataggacacagtcctcggc

SEQ ID NO: 566414 - DNA, 25 bp, Homo sapien
agccagtgcctgttcagagacgcag

SEQ ID NO: 566415 - DNA, 25 bp, Homo sapien
acccattccagcaatttccactggt

SEQ ID NO: 566416 - DNA, 25 bp, Homo sapien
gctgctgtaacttcactgttattat

SEQ ID NO: 566417 - DNA, 25 bp, Homo sapien
cctgactggagatgggactctgtac

SEQ ID NO: 566418 - DNA, 25 bp, Homo sapien
tgaaggccaaccattattgctgctg

SEQ ID NO: 566419 - DNA, 25 bp, Homo sapien
ccaaagttcaaaacactgacgtacg

SEQ ID NO: 566420 - DNA, 25 bp, Homo sapien
gaagatgaaggacagcatcccaggg

SEQ ID NO: 566421 - DNA, 25 bp, Homo sapien
cactgtgcatttcatgggtgcataa

SEQ ID NO: 566422 - DNA, 25 bp, Homo sapien
tcggtctccccaagactacatgttg

SEQ ID NO: 566423 - DNA, 25 bp, Homo sapien
ccctttcgaagctcaaattgtccca

SEQ ID NO: 566424 - DNA, 25 bp, Homo sapien
tctggtatgtcaagatgttccgact

SEQ ID NO: 566425 - DNA, 25 bp, Homo sapien
aaagcaagtacaagtgcctgattct

SEQ ID NO: 566426 - DNA, 25 bp, Homo sapien
aacctatctgttgggtttcagttca

SEQ ID NO: 566427 - DNA, 25 bp, Homo sapien
gacagcatagaatctgaggtgattt

SEQ ID NO: 566428 - DNA, 25 bp, Homo sapien
cattcattttgagaacttagacttt

SEQ ID NO: 566429 - DNA, 25 bp, Homo sapien
ttttattggagaaacattcattttg

SEQ ID NO: 566430 - DNA, 25 bp, Homo sapien
gggacagcatagaatctgaggtgat

SEQ ID NO: 566431 - DNA, 25 bp, Homo sapien
tgctccacataagcaaaacgcaaac

SEQ ID NO: 566432 - DNA, 25 bp, Homo sapien
aacgcaaacatgcacagctgcgcca

SEQ ID NO: 566433 - DNA, 25 bp, Homo sapien
gctgcgccagaaacaacagaactgg

SEQ ID NO: 566434 - DNA, 25 bp, Homo sapien
aaacatgcacagctgcgccagaaac

SEQ ID NO: 566435 - DNA, 25 bp, Homo sapien
catggactccagcatgcatggctgc

SEQ ID NO: 566436 - DNA, 25 bp, Homo sapien
aatcctgatgcgcagagagggctag

SEQ ID NO: 566437 - DNA, 25 bp, Homo sapien
gggagccacggcatggacagaaact

SEQ ID NO: 566438 - DNA, 25 bp, Homo sapien
tccaatgtcacatgcgcatggactc

SEQ ID NO: 566439 - DNA, 25 bp, Homo sapien
gttgagggccacagataacccatgc

SEQ ID NO: 566440 - DNA, 25 bp, Homo sapien
tacacagaaacgttccctccattct

SEQ ID NO: 566441 - DNA, 25 bp, Homo sapien
tgcacacatcttgggatgctctgtc

SEQ ID NO: 566442 - DNA, 25 bp, Homo sapien
tggcttcctcctcccaacatttaag

SEQ ID NO: 566443 - DNA, 25 bp, Homo sapien
ctgagtgaagggacatagaagccca

SEQ ID NO: 566444 - DNA, 25 bp, Homo sapien
caatgatagtctggagacacagctc

SEQ ID NO: 566445 - DNA, 25 bp, Homo sapien
tctattgtcggtgggaaacgtaatc

SEQ ID NO: 566446 - DNA, 25 bp, Homo sapien
gaaggtgttcccgatgtcagcgagc

SEQ ID NO: 566447 - DNA, 25 bp, Homo sapien
ctattgttcctttctgaaatttggt

SEQ ID NO: 566448 - DNA, 25 bp, Homo sapien
ttggtagtttaaaatgtacatctac

SEQ ID NO: 566449 - DNA, 25 bp, Homo sapien
attgttcctttctgaaatttggtag

SEQ ID NO: 566450 - DNA, 25 bp, Homo sapien
atttggtagtttaaaatgtacatct

SEQ ID NO: 566451 - DNA, 25 bp, Homo sapien
tcgtcacgatcaataccagtcaaat

SEQ ID NO: 566452 - DNA, 25 bp, Homo sapien
gaccaaaatgagaccagccaagctg

SEQ ID NO: 566453 - DNA, 25 bp, Homo sapien
cagtcaaatcaatcttgcagcaatc

SEQ ID NO: 566454 - DNA, 25 bp, Homo sapien
gcagcaatctgcaccaatcacagga

SEQ ID NO: 566455 - DNA, 25 bp, Homo sapien
tgccagttgctctcaagtttgcctt

SEQ ID NO: 566456 - DNA, 25 bp, Homo sapien
gctctcaagtttgcctttgcccact

SEQ ID NO: 566457 - DNA, 25 bp, Homo sapien
gtagctgctgccagttgctctcaag

SEQ ID NO: 566458 - DNA, 25 bp, Homo sapien
tgctgccagttgctctcaagtttgc

SEQ ID NO: 566459 - DNA, 25 bp, Homo sapien
ttactccatcccaaggtgtccatcc

SEQ ID NO: 566460 - DNA, 25 bp, Homo sapien
aaggtgaccagccattccatcccaa

SEQ ID NO: 566461 - DNA, 25 bp, Homo sapien
tcttccatcccaaggtgaccactta

SEQ ID NO: 566462 - DNA, 25 bp, Homo sapien
caacccaaggtgactatccctttca

SEQ ID NO: 566463 - DNA, 25 bp, Homo sapien
tgagagcatttcgaaagcgcaggtc

SEQ ID NO: 566464 - DNA, 25 bp, Homo sapien
acatttgctgaacgactgggtcaca

SEQ ID NO: 566465 - DNA, 25 bp, Homo sapien
tcccggaggtccaagggatgtcact

SEQ ID NO: 566466 - DNA, 25 bp, Homo sapien
caggcattgcaacgctccgacattt

SEQ ID NO: 566467 - DNA, 25 bp, Homo sapien
ttcccagtgtaagaataacatgagt

SEQ ID NO: 566468 - DNA, 25 bp, Homo sapien
aaattcacagtataacccgctggga

SEQ ID NO: 566469 - DNA, 25 bp, Homo sapien
tgaacaaccaatccatgaattctat

SEQ ID NO: 566470 - DNA, 25 bp, Homo sapien
ccttaaggctcatgatgccatagta

SEQ ID NO: 566471 - DNA, 25 bp, Homo sapien
ccaacattgcacacaagtgaacatg

SEQ ID NO: 566472 - DNA, 25 bp, Homo sapien
ctggctgttcagatgatgagtagct

SEQ ID NO: 566473 - DNA, 25 bp, Homo sapien
gcaaaaccttgtcttctggatactt

SEQ ID NO: 566474 - DNA, 25 bp, Homo sapien
gatactttaccaactttccagccag

SEQ ID NO: 566475 - DNA, 25 bp, Homo sapien
gcatgtaacccagtggaggccatca

SEQ ID NO: 566476 - DNA, 25 bp, Homo sapien
ctttcttcccgctatcctgagactc

SEQ ID NO: 566477 - DNA, 25 bp, Homo sapien
ttcttcccgctatcctgagactcag

SEQ ID NO: 566478 - DNA, 25 bp, Homo sapien
ttcccgctatcctgagactcagcag

SEQ ID NO: 566479 - DNA, 25 bp, Homo sapien
gacggcagatcaataacatgggaac

SEQ ID NO: 566480 - DNA, 25 bp, Homo sapien
catacgtgagtaggtgtcagaggca

SEQ ID NO: 566481 - DNA, 25 bp, Homo sapien
catgggaacgagagaaagatctggc

SEQ ID NO: 566482 - DNA, 25 bp, Homo sapien
gcgagttctgaagtagccactggaa

SEQ ID NO: 566483 - DNA, 25 bp, Homo sapien
tccataacgcttccaggttgccaaa

SEQ ID NO: 566484 - DNA, 25 bp, Homo sapien
ccttgtggtgactgaacagctgttc

SEQ ID NO: 566485 - DNA, 25 bp, Homo sapien
tcgggctccaagctttccataacgc

SEQ ID NO: 566486 - DNA, 25 bp, Homo sapien
tgccattcacaactacaccttgtgg

SEQ ID NO: 566487 - DNA, 25 bp, Homo sapien
cataatcgtgagcaagtgaagggtc

SEQ ID NO: 566488 - DNA, 25 bp, Homo sapien
tatcaccaataacaaagagccagac

SEQ ID NO: 566489 - DNA, 25 bp, Homo sapien
gatctatgactgtatgggtaggccc

SEQ ID NO: 566490 - DNA, 25 bp, Homo sapien
tggaggcaacaaagctaaacaagct

SEQ ID NO: 566491 - DNA, 25 bp, Homo sapien
gtcctctgggggccgttatcccaca

SEQ ID NO: 566492 - DNA, 25 bp, Homo sapien
cctctgggggccgttatcccacagg

SEQ ID NO: 566493 - DNA, 25 bp, Homo sapien
tcctctgggggccgttatcccacag

SEQ ID NO: 566494 - DNA, 25 bp, Homo sapien
ctctgggggccgttatcccacagga

SEQ ID NO: 566495 - DNA, 25 bp, Homo sapien
ggagccttctcgagagcctgcaggt

SEQ ID NO: 566496 - DNA, 25 bp, Homo sapien
ggtctaagaccacagcgataggagg

SEQ ID NO: 566497 - DNA, 25 bp, Homo sapien
cagcagatgtataaaaggagccttc

SEQ ID NO: 566498 - DNA, 25 bp, Homo sapien
ctctgttccagaaggattgggacca

SEQ ID NO: 566499 - DNA, 25 bp, Homo sapien
tgaacactgcttgattggaacaaac

SEQ ID NO: 566500 - DNA, 25 bp, Homo sapien
tgcttgattggaacaaaccaaaata

SEQ ID NO: 566501 - DNA, 25 bp, Homo sapien
aaatatttaatggatcgaatcttcc

SEQ ID NO: 566502 - DNA, 25 bp, Homo sapien
taatggatcgaatcttccagagttc

SEQ ID NO: 566503 - DNA, 25 bp, Homo sapien
cagagcagcatttgttgacctgagc

SEQ ID NO: 566504 - DNA, 25 bp, Homo sapien
gaccttagcggtaagctgttacagc

SEQ ID NO: 566505 - DNA, 25 bp, Homo sapien
tgacaatcagtccagaacggcatcc

SEQ ID NO: 566506 - DNA, 25 bp, Homo sapien
aacaggactaaaccccagctgaggt

SEQ ID NO: 566507 - DNA, 25 bp, Homo sapien
tggacacgtcggcatacagagaatc

SEQ ID NO: 566508 - DNA, 25 bp, Homo sapien
tgcccgtgtgcaaggacagtactcc

SEQ ID NO: 566509 - DNA, 25 bp, Homo sapien
gaatcaatcgtactctcagcagtgg

SEQ ID NO: 566510 - DNA, 25 bp, Homo sapien
cagtgccccgatagaaaccaggtat

SEQ ID NO: 566511 - DNA, 25 bp, Homo sapien
catgactatcattttagggcaaagt

SEQ ID NO: 566512 - DNA, 25 bp, Homo sapien
tgcatcggtatgtcttcttctgtgt

SEQ ID NO: 566513 - DNA, 25 bp, Homo sapien
cacacacattattacatgactatca

SEQ ID NO: 566514 - DNA, 25 bp, Homo sapien
agtggatgcacggacaaatgtttca

SEQ ID NO: 566515 - DNA, 25 bp, Homo sapien
ccggccggaggaagcattcttaatg

SEQ ID NO: 566516 - DNA, 25 bp, Homo sapien
tatttagaatggcatccagcacgtc

SEQ ID NO: 566517 - DNA, 25 bp, Homo sapien
catcaggaagggagcactaagcaga

SEQ ID NO: 566518 - DNA, 25 bp, Homo sapien
taagcagattctggactgcagagct

SEQ ID NO: 566519 - DNA, 25 bp, Homo sapien
atatggctattaaggagggcatcca

SEQ ID NO: 566520 - DNA, 25 bp, Homo sapien
gcatatggctattaaggagggcatc

SEQ ID NO: 566521 - DNA, 25 bp, Homo sapien
catatggctattaaggagggcatcc

SEQ ID NO: 566522 - DNA, 25 bp, Homo sapien
ggtcgacagccctccaatcaagtgt

SEQ ID NO: 566523 - DNA, 25 bp, Homo sapien
tggaattgctagcacgcctacaggg

SEQ ID NO: 566524 - DNA, 25 bp, Homo sapien
ggtaacatctgcgagaactgccaca

SEQ ID NO: 566525 - DNA, 25 bp, Homo sapien
cactgggctcggtgtggacgtaaac

SEQ ID NO: 566526 - DNA, 25 bp, Homo sapien
gtctacttggaccatttcaataagg

SEQ ID NO: 566527 - DNA, 25 bp, Homo sapien
ataaggccgaggaccgcgctccaga

SEQ ID NO: 566528 - DNA, 25 bp, Homo sapien
gcgctccagacacacagcgcagggg

SEQ ID NO: 566529 - DNA, 25 bp, Homo sapien
tgcactggaatccaacaagcagctg

SEQ ID NO: 566530 - DNA, 25 bp, Homo sapien
ccacttccataggtacgggtgcact

SEQ ID NO: 566531 - DNA, 25 bp, Homo sapien
taagccagtaaataccagattttac

SEQ ID NO: 566532 - DNA, 25 bp, Homo sapien
tctcctagcatgctgagggttatat

SEQ ID NO: 566533 - DNA, 25 bp, Homo sapien
gactgtggtcgttttgagtgtaagc

SEQ ID NO: 566534 - DNA, 25 bp, Homo sapien
tgaatgccccatccgggaacaaggg

SEQ ID NO: 566535 - DNA, 25 bp, Homo sapien
attaaaagacactggccacaattta

SEQ ID NO: 566536 - DNA, 25 bp, Homo sapien
caatgatgaatgccccatccgggaa

SEQ ID NO: 566537 - DNA, 25 bp, Homo sapien
ccacaatttaagaaggccaatgaaa

SEQ ID NO: 566538 - DNA, 25 bp, Homo sapien
tgcctcatctaacagagtccacaga

SEQ ID NO: 566539 - DNA, 25 bp, Homo sapien
tgcaagcagcttcgggctgaaacag

SEQ ID NO: 566540 - DNA, 25 bp, Homo sapien
caaacacagtcattgctcagatcca

SEQ ID NO: 566541 - DNA, 25 bp, Homo sapien
tgatactctctgacatgtgacatcc

SEQ ID NO: 566542 - DNA, 25 bp, Homo sapien
cactaacaattagctaaatgtggct

SEQ ID NO: 566543 - DNA, 25 bp, Homo sapien
gctgtatcgctgtaatattcaactc

SEQ ID NO: 566544 - DNA, 25 bp, Homo sapien
tttgtgatttcatgaggccactgac

SEQ ID NO: 566545 - DNA, 25 bp, Homo sapien
taaatggcgggtaaattattgctga

SEQ ID NO: 566546 - DNA, 25 bp, Homo sapien
gcctggcccagtgtgaccatttaaa

SEQ ID NO: 566547 - DNA, 25 bp, Homo sapien
cacagttcaagcagataattcaaga

SEQ ID NO: 566548 - DNA, 25 bp, Homo sapien
tctacttggaataactagcaacaca

SEQ ID NO: 566549 - DNA, 25 bp, Homo sapien
ttttgcttagagaatgatggaccat

SEQ ID NO: 566550 - DNA, 25 bp, Homo sapien
caaataactgcacacagttggctgg

SEQ ID NO: 566551 - DNA, 25 bp, Homo sapien
tcaccagcaggctaagaggacatca

SEQ ID NO: 566552 - DNA, 25 bp, Homo sapien
aagaggacatcagggcacccgtaca

SEQ ID NO: 566553 - DNA, 25 bp, Homo sapien
cacagttggctggagcccatttatt

SEQ ID NO: 566554 - DNA, 25 bp, Homo sapien
cttccccaagctcttacgccctcag

SEQ ID NO: 566555 - DNA, 25 bp, Homo sapien
ctcttacgccctcagcaaaacccat

SEQ ID NO: 566556 - DNA, 25 bp, Homo sapien
cccaagctcttacgccctcagcaaa

SEQ ID NO: 566557 - DNA, 25 bp, Homo sapien
agctcttacgccctcagcaaaaccc

SEQ ID NO: 566558 - DNA, 25 bp, Homo sapien
gccgatggttagcaggtcctagtta

SEQ ID NO: 566559 - DNA, 25 bp, Homo sapien
tgatttgtttgataagccgatggtt

SEQ ID NO: 566560 - DNA, 25 bp, Homo sapien
gtcctagttaaccataatgcacggg

SEQ ID NO: 566561 - DNA, 25 bp, Homo sapien
tccaaattagctgaagagtgaaatt

SEQ ID NO: 566562 - DNA, 25 bp, Homo sapien
ggcaagctgacatctaggaatcggg

SEQ ID NO: 566563 - DNA, 25 bp, Homo sapien
gacttccttctttcgcctacactgg

SEQ ID NO: 566564 - DNA, 25 bp, Homo sapien
ttggagctccccaacccaatgggac

SEQ ID NO: 566565 - DNA, 25 bp, Homo sapien
caatacccttaacgcagcctttggg

SEQ ID NO: 566566 - DNA, 25 bp, Homo sapien
gggtgaaacatctgagtggtcccag

SEQ ID NO: 566567 - DNA, 25 bp, Homo sapien
gtcccagctgtgaatgggaccagta

SEQ ID NO: 566568 - DNA, 25 bp, Homo sapien
tcatctgatgcaccccaggttcacg

SEQ ID NO: 566569 - DNA, 25 bp, Homo sapien
gcaaggatatccactgtcgcagcag

SEQ ID NO: 566570 - DNA, 25 bp, Homo sapien
ccagcgaacctggacagatcaagac

SEQ ID NO: 566571 - DNA, 25 bp, Homo sapien
taagacggcaaactgaaccaaggtg

SEQ ID NO: 566572 - DNA, 25 bp, Homo sapien
taggaacactgataagctaagctgc

SEQ ID NO: 566573 - DNA, 25 bp, Homo sapien
gacccagtgattctaaacagcccag

SEQ ID NO: 566574 - DNA, 25 bp, Homo sapien
ctgagatgacgggatcgggggcggc

SEQ ID NO: 566575 - DNA, 25 bp, Homo sapien
tggccactgagatgacgggatcggg

SEQ ID NO: 566576 - DNA, 25 bp, Homo sapien
ccactgagatgacgggatcgggggc

SEQ ID NO: 566577 - DNA, 25 bp, Homo sapien
tgagatgacgggatcgggggcggct

SEQ ID NO: 566578 - DNA, 25 bp, Homo sapien
atgtgtttgctaaagtgtttctttc

SEQ ID NO: 566579 - DNA, 25 bp, Homo sapien
ttatacccacgtcattagaataatg

SEQ ID NO: 566580 - DNA, 25 bp, Homo sapien
gaaagtgaggttatacccacgtcat

SEQ ID NO: 566581 - DNA, 25 bp, Homo sapien
tgcttttgaaagtgaggttataccc

SEQ ID NO: 566582 - DNA, 25 bp, Homo sapien
caatatgacattagagaactgggct

SEQ ID NO: 566583 - DNA, 25 bp, Homo sapien
caaaccggaggatgtaaaaactgat

SEQ ID NO: 566584 - DNA, 25 bp, Homo sapien
tgaaagacagccagagcaatctaag

SEQ ID NO: 566585 - DNA, 25 bp, Homo sapien
tagagcgctttcctaccagtcttcc

SEQ ID NO: 566586 - DNA, 25 bp, Homo sapien
ctcctggagcatgactggatgagat

SEQ ID NO: 566587 - DNA, 25 bp, Homo sapien
tgttacacttatactttggaggcca

SEQ ID NO: 566588 - DNA, 25 bp, Homo sapien
gagtggcaggcagttatccgtcaat

SEQ ID NO: 566589 - DNA, 25 bp, Homo sapien
ccaagttgtgggattatctgttaca

SEQ ID NO: 566590 - DNA, 25 bp, Homo sapien
cacaaacttcggacaaacagcagcc

SEQ ID NO: 566591 - DNA, 25 bp, Homo sapien
tacgcaggtgggaaatcttaaacaa

SEQ ID NO: 566592 - DNA, 25 bp, Homo sapien
aatgtatcggcttcatcagaaacgc

SEQ ID NO: 566593 - DNA, 25 bp, Homo sapien
ttatggcgcctgctatggcagagcc

SEQ ID NO: 566594 - DNA, 25 bp, Homo sapien
catggatatttgatcagaacgggaa

SEQ ID NO: 566595 - DNA, 25 bp, Homo sapien
caactctgaaaaatgtccgtccctg

SEQ ID NO: 566596 - DNA, 25 bp, Homo sapien
cactgattgtaaatcctggctgcac

SEQ ID NO: 566597 - DNA, 25 bp, Homo sapien
aaagtctcccgaattgagcattcac

SEQ ID NO: 566598 - DNA, 25 bp, Homo sapien
ccggatgaagacagtcgggtgcccc

SEQ ID NO: 566599 - DNA, 25 bp, Homo sapien
gagaacttccactgtgttaagggac

SEQ ID NO: 566600 - DNA, 25 bp, Homo sapien
ccgcggcctctagtgtggccggtct

SEQ ID NO: 566601 - DNA, 25 bp, Homo sapien
gaaggacggacccacgcagccggat

SEQ ID NO: 566602 - DNA, 25 bp, Homo sapien
gccgacgcccacagcgctgatgaga

SEQ ID NO: 566603 - DNA, 25 bp, Homo sapien
ttcaagtggtgggacaagaagtcaa

SEQ ID NO: 566604 - DNA, 25 bp, Homo sapien
agaagtcaatgctggcgtaggtgtt

SEQ ID NO: 566605 - DNA, 25 bp, Homo sapien
gatgagacccccgaggcttcgggtc

SEQ ID NO: 566606 - DNA, 25 bp, Homo sapien
cggcggctgcggctggggtggcagc

SEQ ID NO: 566607 - DNA, 25 bp, Homo sapien
tgcggctggggtggcagcccgggct

SEQ ID NO: 566608 - DNA, 25 bp, Homo sapien
cggctggggtggcagcccgggctcc

SEQ ID NO: 566609 - DNA, 25 bp, Homo sapien
gctgcggctggggtggcagcccggg

SEQ ID NO: 566610 - DNA, 25 bp, Homo sapien
tagtcaccattgtccccggtgtccg

SEQ ID NO: 566611 - DNA, 25 bp, Homo sapien
caaaagccatctcggtgtagtcacc

SEQ ID NO: 566612 - DNA, 25 bp, Homo sapien
tgagaccattctggaagccggcaga

SEQ ID NO: 566613 - DNA, 25 bp, Homo sapien
gagagacattttccacggaggccga

SEQ ID NO: 566614 - DNA, 25 bp, Homo sapien
ggacaggaggccgtccaaggagccc

SEQ ID NO: 566615 - DNA, 25 bp, Homo sapien
acaggaggccgtccaaggagcccac

SEQ ID NO: 566616 - DNA, 25 bp, Homo sapien
gcaacggcggatacggggaggaggc

SEQ ID NO: 566617 - DNA, 25 bp, Homo sapien
gctgcagagacgacgacggggacgc

SEQ ID NO: 566618 - DNA, 25 bp, Homo sapien
agctgaagtcgaggttcatgtagtc

SEQ ID NO: 566619 - DNA, 25 bp, Homo sapien
tgctggcggacaagagcgaggagga

SEQ ID NO: 566620 - DNA, 25 bp, Homo sapien
ccgggctcgccaaagtcgatgttga

SEQ ID NO: 566621 - DNA, 25 bp, Homo sapien
tccggtggcagtgggtactcgtgca

SEQ ID NO: 566622 - DNA, 25 bp, Homo sapien
tgcatgctccatggacagcttggaa

SEQ ID NO: 566623 - DNA, 25 bp, Homo sapien
cgctgtccccgccacaggtgtaggg

SEQ ID NO: 566624 - DNA, 25 bp, Homo sapien
gagctcatgagcacgtactggtcgc

SEQ ID NO: 566625 - DNA, 25 bp, Homo sapien
agctgtagcagcagccgggaacgcc

SEQ ID NO: 566626 - DNA, 25 bp, Homo sapien
ggcggcggccctgggctgcaagatc

SEQ ID NO: 566627 - DNA, 25 bp, Homo sapien
cggccctgggctgcaagatctgctt

SEQ ID NO: 566628 - DNA, 25 bp, Homo sapien
aggccccgcagaaggcacggcggcg

SEQ ID NO: 566629 - DNA, 25 bp, Homo sapien
ccccgcagaaggcacggcggcggcg

SEQ ID NO: 566630 - DNA, 25 bp, Homo sapien
cctgtgggagccgatctcgatgtct

SEQ ID NO: 566631 - DNA, 25 bp, Homo sapien
gatgtctccgtagtcctctgggtag

SEQ ID NO: 566632 - DNA, 25 bp, Homo sapien
cagggtgtattcatccagcgaggca

SEQ ID NO: 566633 - DNA, 25 bp, Homo sapien
tcatgggcatgtagccgtcgtctgc

SEQ ID NO: 566634 - DNA, 25 bp, Homo sapien
actcgtccagggacatgaagccggg

SEQ ID NO: 566635 - DNA, 25 bp, Homo sapien
tctccgcgatggactcgggcgtgtt

SEQ ID NO: 566636 - DNA, 25 bp, Homo sapien
gtgcgccacgggcatggacatggag

SEQ ID NO: 566637 - DNA, 25 bp, Homo sapien
cgggcgtgttgcttcggtggctgca

SEQ ID NO: 566638 - DNA, 25 bp, Homo sapien
tggcggtgcgcacccggcacgagct

SEQ ID NO: 566639 - DNA, 25 bp, Homo sapien
cgccctcgctggcggtgcgcacccg

SEQ ID NO: 566640 - DNA, 25 bp, Homo sapien
ctcgctggcggtgcgcacccggcac

SEQ ID NO: 566641 - DNA, 25 bp, Homo sapien
gctggcggtgcgcacccggcacgag

SEQ ID NO: 566642 - DNA, 25 bp, Homo sapien
ggcggccaggctgtcggtgcgcgag

SEQ ID NO: 566643 - DNA, 25 bp, Homo sapien
gcggccaggctgtcggtgcgcgagc

SEQ ID NO: 566644 - DNA, 25 bp, Homo sapien
ggccaggctgtcggtgcgcgagcgg

SEQ ID NO: 566645 - DNA, 25 bp, Homo sapien
tggcggccaggctgtcggtgcgcga

SEQ ID NO: 566646 - DNA, 25 bp, Homo sapien
ggccggaactcgaagagctccttga

SEQ ID NO: 566647 - DNA, 25 bp, Homo sapien
gacggctgctcgcagttgagcttca

SEQ ID NO: 566648 - DNA, 25 bp, Homo sapien
tgttcatgagctgcagcgtcaccga

SEQ ID NO: 566649 - DNA, 25 bp, Homo sapien
gacgattggctcttactgcgcggcc

SEQ ID NO: 566650 - DNA, 25 bp, Homo sapien
tgccacacctcacggtaggcggccg

SEQ ID NO: 566651 - DNA, 25 bp, Homo sapien
acacctcacggtaggcggccgtggc

SEQ ID NO: 566652 - DNA, 25 bp, Homo sapien
ccacacctcacggtaggcggccgtg

SEQ ID NO: 566653 - DNA, 25 bp, Homo sapien
ctgccacacctcacggtaggcggcc

SEQ ID NO: 566654 - DNA, 25 bp, Homo sapien
cggcggcgccggcagagccgcccag

SEQ ID NO: 566655 - DNA, 25 bp, Homo sapien
gcggcgccggcagagccgcccaggg

SEQ ID NO: 566656 - DNA, 25 bp, Homo sapien
cccggcggcgccggcagagccgccc

SEQ ID NO: 566657 - DNA, 25 bp, Homo sapien
ggcgccggcagagccgcccagggcg

SEQ ID NO: 566658 - DNA, 25 bp, Homo sapien
gggggcgcgtctccggcggccgcgc

SEQ ID NO: 566659 - DNA, 25 bp, Homo sapien
ctgcaggacgcggcgggcgcggcgg

SEQ ID NO: 566660 - DNA, 25 bp, Homo sapien
gggcgcgtctccggcggccgcgcgg

SEQ ID NO: 566661 - DNA, 25 bp, Homo sapien
gcgcggcggcggggggcgcgtctcc

SEQ ID NO: 566662 - DNA, 25 bp, Homo sapien
tgatgttcaggcagcagtcgagagc

SEQ ID NO: 566663 - DNA, 25 bp, Homo sapien
tcaggtacttgtgcttggcgtcggc

SEQ ID NO: 566664 - DNA, 25 bp, Homo sapien
tcgtccttggtgtagagggcgatca

SEQ ID NO: 566665 - DNA, 25 bp, Homo sapien
agtcgagagcgatcacccgtttcgg

SEQ ID NO: 566666 - DNA, 25 bp, Homo sapien
gcaggtagccgcacttgcgcacgct

SEQ ID NO: 566667 - DNA, 25 bp, Homo sapien
cgcacttgcgcacgctgtggttgtt

SEQ ID NO: 566668 - DNA, 25 bp, Homo sapien
ttgtggccatgcttctgcttgcgca

SEQ ID NO: 566669 - DNA, 25 bp, Homo sapien
cgcagcacgaagaagcgcttgtggc

SEQ ID NO: 566670 - DNA, 25 bp, Homo sapien
gggccgagcctaaggcgcgcgcggc

SEQ ID NO: 566671 - DNA, 25 bp, Homo sapien
gggccagcaccgctcggcggcgccg

SEQ ID NO: 566672 - DNA, 25 bp, Homo sapien
gcccgatcacgcgtccctcgggccc

SEQ ID NO: 566673 - DNA, 25 bp, Homo sapien
tgccaacggcgacccgggctcgtcg

SEQ ID NO: 566674 - DNA, 25 bp, Homo sapien
tgaaatcgcgtttgggaggtaatag

SEQ ID NO: 566675 - DNA, 25 bp, Homo sapien
aaagtgcggtttccatagcgccggg

SEQ ID NO: 566676 - DNA, 25 bp, Homo sapien
cattcacttgtcagcttgtcgggaa

SEQ ID NO: 566677 - DNA, 25 bp, Homo sapien
accgcgctccagatcgagagcggcg

SEQ ID NO: 566678 - DNA, 25 bp, Homo sapien
ccctccgaggcaggagcgccccttt

SEQ ID NO: 566679 - DNA, 25 bp, Homo sapien
ttccttcctcggaagcgtcctctca

SEQ ID NO: 566680 - DNA, 25 bp, Homo sapien
gtcctctcaccacaccgcttcaaga

SEQ ID NO: 566681 - DNA, 25 bp, Homo sapien
tttccccctccgaggcaggagcgcc

SEQ ID NO: 566682 - DNA, 25 bp, Homo sapien
ccttggagaactgcttcgaattcat

SEQ ID NO: 566683 - DNA, 25 bp, Homo sapien
cggtgcgggcggtgactgccaagtt

SEQ ID NO: 566684 - DNA, 25 bp, Homo sapien
gttggagatgcccttggagaactgc

SEQ ID NO: 566685 - DNA, 25 bp, Homo sapien
tgccaagttggagatgcccttggag

SEQ ID NO: 566686 - DNA, 25 bp, Homo sapien
tatcccttgctacctaaacacttgc

SEQ ID NO: 566687 - DNA, 25 bp, Homo sapien
gattcttgccatacttggtcacttg

SEQ ID NO: 566688 - DNA, 25 bp, Homo sapien
gaagcctaccttccaagagctaatg

SEQ ID NO: 566689 - DNA, 25 bp, Homo sapien
tggttccagaagagtacaatttgtc

SEQ ID NO: 566690 - DNA, 25 bp, Homo sapien
gaatctattacaaggtggtgcccac

SEQ ID NO: 566691 - DNA, 25 bp, Homo sapien
gaagcaaatgcacctgtctgagata

SEQ ID NO: 566692 - DNA, 25 bp, Homo sapien
cgtaatgactggcaaggaccttgga

SEQ ID NO: 566693 - DNA, 25 bp, Homo sapien
gactgtgaaaacatcgccagaaggg

SEQ ID NO: 566694 - DNA, 25 bp, Homo sapien
cctgcttgggttgggtcgctggccc

SEQ ID NO: 566695 - DNA, 25 bp, Homo sapien
gtcgctggccccattaaccttcagc

SEQ ID NO: 566696 - DNA, 25 bp, Homo sapien
gaatgtgtccttgtaggagaactga

SEQ ID NO: 566697 - DNA, 25 bp, Homo sapien
taggagaactgaggtcataaacgtt

SEQ ID NO: 566698 - DNA, 25 bp, Homo sapien
ttgtagttgttggattccctccacc

SEQ ID NO: 566699 - DNA, 25 bp, Homo sapien
aactgtcctcttgaatcacaggcag

SEQ ID NO: 566700 - DNA, 25 bp, Homo sapien
cctggagtcctggattgaaactgtc

SEQ ID NO: 566701 - DNA, 25 bp, Homo sapien
tcacaggcaggaccaatcaaatccg

SEQ ID NO: 566702 - DNA, 25 bp, Homo sapien
aaaacagctcctggatttattcatt

SEQ ID NO: 566703 - DNA, 25 bp, Homo sapien
acagctcctggatttattcattttt

SEQ ID NO: 566704 - DNA, 25 bp, Homo sapien
aaacagctcctggatttattcattt

SEQ ID NO: 566705 - DNA, 25 bp, Homo sapien
aaaaaacagctcctggatttattca

SEQ ID NO: 566706 - DNA, 25 bp, Homo sapien
acctgctgccactctcacagcagtg

SEQ ID NO: 566707 - DNA, 25 bp, Homo sapien
caggtcgtagccctgcacacctgct

SEQ ID NO: 566708 - DNA, 25 bp, Homo sapien
tgccactctcacagcagtgctggcc

SEQ ID NO: 566709 - DNA, 25 bp, Homo sapien
aggtcgtagccctgcacacctgctg

SEQ ID NO: 566710 - DNA, 25 bp, Homo sapien
tggttactacaaagatgaatgacag

SEQ ID NO: 566711 - DNA, 25 bp, Homo sapien
ggaactgggatgtaatcaccctgct

SEQ ID NO: 566712 - DNA, 25 bp, Homo sapien
gcctcgcagtccttgctgctgagca

SEQ ID NO: 566713 - DNA, 25 bp, Homo sapien
gacagttgttccctccgtgttcaca

SEQ ID NO: 566714 - DNA, 25 bp, Homo sapien
tgaaatttcccatccccgataaatc

SEQ ID NO: 566715 - DNA, 25 bp, Homo sapien
tttcaaggaccagctgaaatttccc

SEQ ID NO: 566716 - DNA, 25 bp, Homo sapien
agctgaaatttcccatccccgataa

SEQ ID NO: 566717 - DNA, 25 bp, Homo sapien
ctttcaaggaccagctgaaatttcc

SEQ ID NO: 566718 - DNA, 25 bp, Homo sapien
agggttcttctcagttctaaattca

SEQ ID NO: 566719 - DNA, 25 bp, Homo sapien
agactcgttaggttcacaccaaggg

SEQ ID NO: 566720 - DNA, 25 bp, Homo sapien
gctacatcttttccgtagagtgggt

SEQ ID NO: 566721 - DNA, 25 bp, Homo sapien
cagctcaaatgctacatcttttccg

SEQ ID NO: 566722 - DNA, 25 bp, Homo sapien
gctccacattttaccccaggcaggt

SEQ ID NO: 566723 - DNA, 25 bp, Homo sapien
gcaggtccttcgagtccctgtggct

SEQ ID NO: 566724 - DNA, 25 bp, Homo sapien
ggagttgttctttcttaaagctgct

SEQ ID NO: 566725 - DNA, 25 bp, Homo sapien
tgaggctgtatcatgcgcattggag

SEQ ID NO: 566726 - DNA, 25 bp, Homo sapien
gacactccatgactgtccagctggg

SEQ ID NO: 566727 - DNA, 25 bp, Homo sapien
gtgacttcaacccagcatgacgctg

SEQ ID NO: 566728 - DNA, 25 bp, Homo sapien
taagcattgattcctcgtgtaacac

SEQ ID NO: 566729 - DNA, 25 bp, Homo sapien
gacgctgggcacatgctagatgctt

SEQ ID NO: 566730 - DNA, 25 bp, Homo sapien
gaccaagggtatccaacgtggccac

SEQ ID NO: 566731 - DNA, 25 bp, Homo sapien
ttgccttgaccaagggtatccaacg

SEQ ID NO: 566732 - DNA, 25 bp, Homo sapien
agggtatccaacgtggccacaaaat

SEQ ID NO: 566733 - DNA, 25 bp, Homo sapien
ccttgaccaagggtatccaacgtgg

SEQ ID NO: 566734 - DNA, 25 bp, Homo sapien
gggctcagcgggctgtagctgatct

SEQ ID NO: 566735 - DNA, 25 bp, Homo sapien
aggagggctcagcgggctgtagctg

SEQ ID NO: 566736 - DNA, 25 bp, Homo sapien
agggctcagcgggctgtagctgatc

SEQ ID NO: 566737 - DNA, 25 bp, Homo sapien
gagggctcagcgggctgtagctgat

SEQ ID NO: 566738 - DNA, 25 bp, Homo sapien
tgaccctggcaggacgaatggctct

SEQ ID NO: 566739 - DNA, 25 bp, Homo sapien
gaagtgtcgcatcaaaccctgtgca

SEQ ID NO: 566740 - DNA, 25 bp, Homo sapien
tccagcagtggtggcctaattaagc

SEQ ID NO: 566741 - DNA, 25 bp, Homo sapien
tagcatcgctgagaactccgcaagg

SEQ ID NO: 566742 - DNA, 25 bp, Homo sapien
tgactggtgttttgccatgcatgcc

SEQ ID NO: 566743 - DNA, 25 bp, Homo sapien
tatggcgcctacttctcacttagca

SEQ ID NO: 566744 - DNA, 25 bp, Homo sapien
gaaataaccttctctggcctgatgt

SEQ ID NO: 566745 - DNA, 25 bp, Homo sapien
tatctgttcaatgcagaaaccttgg

SEQ ID NO: 566746 - DNA, 25 bp, Homo sapien
tgccatgactggtgcacgacctgag

SEQ ID NO: 566747 - DNA, 25 bp, Homo sapien
tgtttgggagctaagccaaggctgc

SEQ ID NO: 566748 - DNA, 25 bp, Homo sapien
tcctttagagaatgtcaaccctggg

SEQ ID NO: 566749 - DNA, 25 bp, Homo sapien
tcagtggccctccagctgttgagtg

SEQ ID NO: 566750 - DNA, 25 bp, Homo sapien
tatggcaatgcatattaaaagcctg

SEQ ID NO: 566751 - DNA, 25 bp, Homo sapien
tgtctgaagactgcaccctttttgg

SEQ ID NO: 566752 - DNA, 25 bp, Homo sapien
taacgtcagaaaagttgagacaaag

SEQ ID NO: 566753 - DNA, 25 bp, Homo sapien
ttgcctactgttggaaacccctgca

SEQ ID NO: 566754 - DNA, 25 bp, Homo sapien
tagccaacttgtgtactcacctctg

SEQ ID NO: 566755 - DNA, 25 bp, Homo sapien
tctcctattacagtcagagcttgtg

SEQ ID NO: 566756 - DNA, 25 bp, Homo sapien
tcccctgggctgacttgcttctggc

SEQ ID NO: 566757 - DNA, 25 bp, Homo sapien
gatgctgaatctacaaggatgttcc

SEQ ID NO: 566758 - DNA, 25 bp, Homo sapien
taccattcggtctataacaggaggc

SEQ ID NO: 566759 - DNA, 25 bp, Homo sapien
catggttctggagttcaaggtgcta

SEQ ID NO: 566760 - DNA, 25 bp, Homo sapien
cacttaagaggtcccacttctggag

SEQ ID NO: 566761 - DNA, 25 bp, Homo sapien
cagcactactggattggagctccat

SEQ ID NO: 566762 - DNA, 25 bp, Homo sapien
aaagcccagtctatccacgtaggtg

SEQ ID NO: 566763 - DNA, 25 bp, Homo sapien
tatggttaacaggagagcaccctgg

SEQ ID NO: 566764 - DNA, 25 bp, Homo sapien
gaacaagtttgggagaggactcaca

SEQ ID NO: 566765 - DNA, 25 bp, Homo sapien
tcacatgagcacgaacagggagagg

SEQ ID NO: 566766 - DNA, 25 bp, Homo sapien
catgcatggacgtcactctgttccc

SEQ ID NO: 566767 - DNA, 25 bp, Homo sapien
agctgctccgtgtgcccagccccag

SEQ ID NO: 566768 - DNA, 25 bp, Homo sapien
accttcctgccggtgacacgctggg

SEQ ID NO: 566769 - DNA, 25 bp, Homo sapien
acctcaccttcctgccggtgacacg

SEQ ID NO: 566770 - DNA, 25 bp, Homo sapien
ctcactatatggcacaggtgagagt

SEQ ID NO: 566771 - DNA, 25 bp, Homo sapien
tatatggcacaggtgagagttcagt

SEQ ID NO: 566772 - DNA, 25 bp, Homo sapien
cactatatggcacaggtgagagttc

SEQ ID NO: 566773 - DNA, 25 bp, Homo sapien
gtctcactatatggcacaggtgaga

SEQ ID NO: 566774 - DNA, 25 bp, Homo sapien
caaatttattagcagcttgtgcagt

SEQ ID NO: 566775 - DNA, 25 bp, Homo sapien
gcgtctgtggcaatactagcaacaa

SEQ ID NO: 566776 - DNA, 25 bp, Homo sapien
gcttacaaatttattagcagcttgt

SEQ ID NO: 566777 - DNA, 25 bp, Homo sapien
tgtgcagtaagtttcttttaatgcg

SEQ ID NO: 566778 - DNA, 25 bp, Homo sapien
acataaaaggccttagtagtcttag

SEQ ID NO: 566779 - DNA, 25 bp, Homo sapien
tacataaaaggccttagtagtctta

SEQ ID NO: 566780 - DNA, 25 bp, Homo sapien
cataaaaggccttagtagtcttaga

SEQ ID NO: 566781 - DNA, 25 bp, Homo sapien
gaaatggcccgaatgtgcttacgtg

SEQ ID NO: 566782 - DNA, 25 bp, Homo sapien
tagacaccatattcatgaacctggg

SEQ ID NO: 566783 - DNA, 25 bp, Homo sapien
gaggaatactaatgaaatgacggcc

SEQ ID NO: 566784 - DNA, 25 bp, Homo sapien
tcatgagaaaccacggaaatggccc

SEQ ID NO: 566785 - DNA, 25 bp, Homo sapien
ttgatctgcctaattgctgacatct

SEQ ID NO: 566786 - DNA, 25 bp, Homo sapien
aactaaaccttgatctgcctaattg

SEQ ID NO: 566787 - DNA, 25 bp, Homo sapien
gaagttaaactaaaccttgatctgc

SEQ ID NO: 566788 - DNA, 25 bp, Homo sapien
taaaccttgatctgcctaattgctg

SEQ ID NO: 566789 - DNA, 25 bp, Homo sapien
tatttgtacagaccaagggacctaa

SEQ ID NO: 566790 - DNA, 25 bp, Homo sapien
aaacagtatggaaggcacccacacc

SEQ ID NO: 566791 - DNA, 25 bp, Homo sapien
gctgcaaagtaccacacatagcaga

SEQ ID NO: 566792 - DNA, 25 bp, Homo sapien
ggttggaagatatggctactgagtc

SEQ ID NO: 566793 - DNA, 25 bp, Homo sapien
tatgccactattgaaagcttatcgc

SEQ ID NO: 566794 - DNA, 25 bp, Homo sapien
tcaaaagtgccatttggtatgccac

SEQ ID NO: 566795 - DNA, 25 bp, Homo sapien
gaagcagggtgtgttagttacgcaa

SEQ ID NO: 566796 - DNA, 25 bp, Homo sapien
tccttcagcaagtagaggtcaatga

SEQ ID NO: 566797 - DNA, 25 bp, Homo sapien
agaagtagcaccatgttgtgacatt

SEQ ID NO: 566798 - DNA, 25 bp, Homo sapien
aaaagaagaagaagtagcaccatgt

SEQ ID NO: 566799 - DNA, 25 bp, Homo sapien
catgttgtgacattagctgagtcag

SEQ ID NO: 566800 - DNA, 25 bp, Homo sapien
gcaccatgttgtgacattagctgag

SEQ ID NO: 566801 - DNA, 25 bp, Homo sapien
cctgccttcaaggtggacggcgtag

SEQ ID NO: 566802 - DNA, 25 bp, Homo sapien
ttggcagcggctgacgtgcgtgcgc

SEQ ID NO: 566803 - DNA, 25 bp, Homo sapien
cttcaaggtggacggcgtaggcttc

SEQ ID NO: 566804 - DNA, 25 bp, Homo sapien
agcggctgacgtgcgtgcgcagctc

SEQ ID NO: 566805 - DNA, 25 bp, Homo sapien
catctcacagcacgtcagaaacatg

SEQ ID NO: 566806 - DNA, 25 bp, Homo sapien
ggccatcatctcacagcacgtcaga

SEQ ID NO: 566807 - DNA, 25 bp, Homo sapien
cgacacagagacagaccattggcca

SEQ ID NO: 566808 - DNA, 25 bp, Homo sapien
cagagacagaccattggccatcatc

SEQ ID NO: 566809 - DNA, 25 bp, Homo sapien
aaggctccaataaaccaccagttag

SEQ ID NO: 566810 - DNA, 25 bp, Homo sapien
tggttaaactctatctgcagcatgg

SEQ ID NO: 566811 - DNA, 25 bp, Homo sapien
taggcacgcggcactttttggatga

SEQ ID NO: 566812 - DNA, 25 bp, Homo sapien
tggatgagtaacgaattagagaagc

SEQ ID NO: 566813 - DNA, 25 bp, Homo sapien
agagccttctgcaccagcgctggtg

SEQ ID NO: 566814 - DNA, 25 bp, Homo sapien
tggcgagccaaaagctgtaagcgtt

SEQ ID NO: 566815 - DNA, 25 bp, Homo sapien
tgacactcgatgaatggcgcacttc

SEQ ID NO: 566816 - DNA, 25 bp, Homo sapien
tgcgtagtaattgcaggtcccacgg

SEQ ID NO: 566817 - DNA, 25 bp, Homo sapien
ctaacatgggtcatgagacaatagc

SEQ ID NO: 566818 - DNA, 25 bp, Homo sapien
tattagatttgaaacactccaaccc

SEQ ID NO: 566819 - DNA, 25 bp, Homo sapien
cattagagtttaaagaagagctcac

SEQ ID NO: 566820 - DNA, 25 bp, Homo sapien
tgtggaatcagactttacaaatgca

SEQ ID NO: 566821 - DNA, 25 bp, Homo sapien
catcacaaaagagtagccgatccac

SEQ ID NO: 566822 - DNA, 25 bp, Homo sapien
atcaccatggcaggcgcctcacaca

SEQ ID NO: 566823 - DNA, 25 bp, Homo sapien
agtagccgatccacagcgaggacca

SEQ ID NO: 566824 - DNA, 25 bp, Homo sapien
ctgaatggtctggctgtgcacggcc

SEQ ID NO: 566825 - DNA, 25 bp, Homo sapien
tgccattgacatgggcatgggctca

SEQ ID NO: 566826 - DNA, 25 bp, Homo sapien
tcatttcgtgatgcaaagttgcaca

SEQ ID NO: 566827 - DNA, 25 bp, Homo sapien
cattgtgctgaacttgcgcaggcag

SEQ ID NO: 566828 - DNA, 25 bp, Homo sapien
ggacagccagtacgagtagtcattt

SEQ ID NO: 566829 - DNA, 25 bp, Homo sapien
ggaagaagacaatgtgagatgtttc

SEQ ID NO: 566830 - DNA, 25 bp, Homo sapien
tagacaaggaagaagacaatgtgag

SEQ ID NO: 566831 - DNA, 25 bp, Homo sapien
caaggaagaagacaatgtgagatgt

SEQ ID NO: 566832 - DNA, 25 bp, Homo sapien
ctagacaaggaagaagacaatgtga

SEQ ID NO: 566833 - DNA, 25 bp, Homo sapien
ccctcatggcgcagtgtttcactcg

SEQ ID NO: 566834 - DNA, 25 bp, Homo sapien
gaaggcactcaacacacctacactg

SEQ ID NO: 566835 - DNA, 25 bp, Homo sapien
aaagattttcgaagattcagtctcc

SEQ ID NO: 566836 - DNA, 25 bp, Homo sapien
ttgccattagtaatacagcagctgt

SEQ ID NO: 566837 - DNA, 25 bp, Homo sapien
cctggtcacaaggaagccgtgatca

SEQ ID NO: 566838 - DNA, 25 bp, Homo sapien
gagcaaagagtacccgtggtaaaga

SEQ ID NO: 566839 - DNA, 25 bp, Homo sapien
tattgtttgactatgcctggtcaca

SEQ ID NO: 566840 - DNA, 25 bp, Homo sapien
cgttcattgccttgcacgtagagca

SEQ ID NO: 566841 - DNA, 25 bp, Homo sapien
ctggaggtccaggtatacccaccaa

SEQ ID NO: 566842 - DNA, 25 bp, Homo sapien
caccgtcaaacccaggaatacctgg

SEQ ID NO: 566843 - DNA, 25 bp, Homo sapien
tggccaggggcaccgtcaaacccag

SEQ ID NO: 566844 - DNA, 25 bp, Homo sapien
ggtatacccaccaatcctgtaacac

SEQ ID NO: 566845 - DNA, 25 bp, Homo sapien
gcctttcgggcctggcagtccctga

SEQ ID NO: 566846 - DNA, 25 bp, Homo sapien
gatgtcgtaaggacctggggggcca

SEQ ID NO: 566847 - DNA, 25 bp, Homo sapien
tggcagtccctgaagccctttcagc

SEQ ID NO: 566848 - DNA, 25 bp, Homo sapien
cccgggctcccctttgatgatgtcg

SEQ ID NO: 566849 - DNA, 25 bp, Homo sapien
tcccgggacgccttgatcgccttga

SEQ ID NO: 566850 - DNA, 25 bp, Homo sapien
ttagctcccgggacgccttgatcgc

SEQ ID NO: 566851 - DNA, 25 bp, Homo sapien
gctcccgggacgccttgatcgcctt

SEQ ID NO: 566852 - DNA, 25 bp, Homo sapien
ctttagctcccgggacgccttgatc

SEQ ID NO: 566853 - DNA, 25 bp, Homo sapien
cccatatcacccttagagcctgtga

SEQ ID NO: 566854 - DNA, 25 bp, Homo sapien
atcacccttagagcctgtgattcct

SEQ ID NO: 566855 - DNA, 25 bp, Homo sapien
catatcacccttagagcctgtgatt

SEQ ID NO: 566856 - DNA, 25 bp, Homo sapien
ggccccatatcacccttagagcctg

SEQ ID NO: 566857 - DNA, 25 bp, Homo sapien
gagcaggcaaatgtcctgcccttgc

SEQ ID NO: 566858 - DNA, 25 bp, Homo sapien
gtttccctcccatgtatctcctctg

SEQ ID NO: 566859 - DNA, 25 bp, Homo sapien
tgcctcaatcgggaagctggaaagt

SEQ ID NO: 566860 - DNA, 25 bp, Homo sapien
catccacaggggaagcgcctgagga

SEQ ID NO: 566861 - DNA, 25 bp, Homo sapien
tacataagtatgtatacagagacag

SEQ ID NO: 566862 - DNA, 25 bp, Homo sapien
agacactgactggcaccaggaatgg

SEQ ID NO: 566863 - DNA, 25 bp, Homo sapien
ggcaccaggaatggggtgtatttct

SEQ ID NO: 566864 - DNA, 25 bp, Homo sapien
tatacataagtatgtatacagagac

SEQ ID NO: 566865 - DNA, 25 bp, Homo sapien
ggccctgggacaccgggtgctcctg

SEQ ID NO: 566866 - DNA, 25 bp, Homo sapien
acctttaactccatcaatcccagga

SEQ ID NO: 566867 - DNA, 25 bp, Homo sapien
gccctgggacaccgggtgctcctgg

SEQ ID NO: 566868 - DNA, 25 bp, Homo sapien
ccctgaggtccgcggtctcctttgg

SEQ ID NO: 566869 - DNA, 25 bp, Homo sapien
tggccctgaggtccgcggtctcctt

SEQ ID NO: 566870 - DNA, 25 bp, Homo sapien
gctggccctgaggtccgcggtctcc

SEQ ID NO: 566871 - DNA, 25 bp, Homo sapien
ctgaggtccgcggtctcctttgggc

SEQ ID NO: 566872 - DNA, 25 bp, Homo sapien
aaacagtttgaggtgatgggaaacg

SEQ ID NO: 566873 - DNA, 25 bp, Homo sapien
acagtttgaggtgatgggaaacgca

SEQ ID NO: 566874 - DNA, 25 bp, Homo sapien
agtttgaggtgatgggaaacgcagc

SEQ ID NO: 566875 - DNA, 25 bp, Homo sapien
gtttgaggtgatgggaaacgcagca

SEQ ID NO: 566876 - DNA, 25 bp, Homo sapien
tgggatgaggcgtgcctcatcctgt

SEQ ID NO: 566877 - DNA, 25 bp, Homo sapien
gcctcatcctgtaggtaccgctcag

SEQ ID NO: 566878 - DNA, 25 bp, Homo sapien
tgtaggtaccgctcagagggagctt

SEQ ID NO: 566879 - DNA, 25 bp, Homo sapien
tgaggcgtgcctcatcctgtaggta

SEQ ID NO: 566880 - DNA, 25 bp, Homo sapien
cctgggaatcctcttcctggtagac

SEQ ID NO: 566881 - DNA, 25 bp, Homo sapien
accctgggaatcctcttcctggtag

SEQ ID NO: 566882 - DNA, 25 bp, Homo sapien
ccctgggaatcctcttcctggtaga

SEQ ID NO: 566883 - DNA, 25 bp, Homo sapien
caagttatggccaagttaaagccca

SEQ ID NO: 566884 - DNA, 25 bp, Homo sapien
tgttttgtcatagcaaccacaaggg

SEQ ID NO: 566885 - DNA, 25 bp, Homo sapien
gggtaacctgcttcaaatggtgtgt

SEQ ID NO: 566886 - DNA, 25 bp, Homo sapien
gatgacaaacgtcagcaaagggctt

SEQ ID NO: 566887 - DNA, 25 bp, Homo sapien
tgctgaccccgggattccatcactg

SEQ ID NO: 566888 - DNA, 25 bp, Homo sapien
accccgggattccatcactgcctgg

SEQ ID NO: 566889 - DNA, 25 bp, Homo sapien
ctcctgctgaccccgggattccatc

SEQ ID NO: 566890 - DNA, 25 bp, Homo sapien
cgggattccatcactgcctggctcc

SEQ ID NO: 566891 - DNA, 25 bp, Homo sapien
ctatgtgcccgggctgtgtcccaaa

SEQ ID NO: 566892 - DNA, 25 bp, Homo sapien
cgggctgtgtcccaaagagggccct

SEQ ID NO: 566893 - DNA, 25 bp, Homo sapien
tatgtgcccgggctgtgtcccaaag

SEQ ID NO: 566894 - DNA, 25 bp, Homo sapien
ctgtgtcccaaagagggccctctac

SEQ ID NO: 566895 - DNA, 25 bp, Homo sapien
atccaatcctgggaggcctttgtca

SEQ ID NO: 566896 - DNA, 25 bp, Homo sapien
ccagggatgccatccaatcctggga

SEQ ID NO: 566897 - DNA, 25 bp, Homo sapien
ctgcttctcctttgacaccagggat

SEQ ID NO: 566898 - DNA, 25 bp, Homo sapien
tgcttctcctttgacaccagggatg

SEQ ID NO: 566899 - DNA, 25 bp, Homo sapien
tcctgggaaacccgctatcccttga

SEQ ID NO: 566900 - DNA, 25 bp, Homo sapien
gcattcctgggatcccaatgcttcc

SEQ ID NO: 566901 - DNA, 25 bp, Homo sapien
gggaaacccgctatcccttgatctc

SEQ ID NO: 566902 - DNA, 25 bp, Homo sapien
ctggatagccaacactcccgggaga

SEQ ID NO: 566903 - DNA, 25 bp, Homo sapien
ccctgggatgcctatgccaggtggg

SEQ ID NO: 566904 - DNA, 25 bp, Homo sapien
tgggatgcctatgccaggtgggcct

SEQ ID NO: 566905 - DNA, 25 bp, Homo sapien
aagccaggtgaaccttgtgggccag

SEQ ID NO: 566906 - DNA, 25 bp, Homo sapien
caggtaagccaggtgaaccttgtgg

SEQ ID NO: 566907 - DNA, 25 bp, Homo sapien
tggattctgtccgtctcagctgaag

SEQ ID NO: 566908 - DNA, 25 bp, Homo sapien
tctcagctgaagaggatctcattct

SEQ ID NO: 566909 - DNA, 25 bp, Homo sapien
tgcctggattctgtccgtctcagct

SEQ ID NO: 566910 - DNA, 25 bp, Homo sapien
tctgtccgtctcagctgaagaggat

SEQ ID NO: 566911 - DNA, 25 bp, Homo sapien
aaagaatcctcttctaaatccagtt

SEQ ID NO: 566912 - DNA, 25 bp, Homo sapien
aagaatcctcttctaaatccagttt

SEQ ID NO: 566913 - DNA, 25 bp, Homo sapien
agcacctggggttccacttatacct

SEQ ID NO: 566914 - DNA, 25 bp, Homo sapien
tggcaagcccattccaccaacagat

SEQ ID NO: 566915 - DNA, 25 bp, Homo sapien
cacttatacctggatcacctttagg

SEQ ID NO: 566916 - DNA, 25 bp, Homo sapien
caacagatccttttggtcccggaag

SEQ ID NO: 566917 - DNA, 25 bp, Homo sapien
aagaaagcagtctgacaggttgaca

SEQ ID NO: 566918 - DNA, 25 bp, Homo sapien
gatcccttctcaccaattggtccaa

SEQ ID NO: 566919 - DNA, 25 bp, Homo sapien
ggatcccttctcaccaattggtcca

SEQ ID NO: 566920 - DNA, 25 bp, Homo sapien
ctcgggatcccttctcaccaattgg

SEQ ID NO: 566921 - DNA, 25 bp, Homo sapien
cgggatcccttctcaccaattggtc

SEQ ID NO: 566922 - DNA, 25 bp, Homo sapien
attgtggttccgagcttggccatga

SEQ ID NO: 566923 - DNA, 25 bp, Homo sapien
caggaaaggcacattgtggttccga

SEQ ID NO: 566924 - DNA, 25 bp, Homo sapien
cattgtggttccgagcttggccatg

SEQ ID NO: 566925 - DNA, 25 bp, Homo sapien
ttgtggttccgagcttggccatgag

SEQ ID NO: 566926 - DNA, 25 bp, Homo sapien
ctttctggcccttcatgctgcccat

SEQ ID NO: 566927 - DNA, 25 bp, Homo sapien
ttctggcccttcatgctgcccatgt

SEQ ID NO: 566928 - DNA, 25 bp, Homo sapien
gtctcctttctggcccttcatgctg

SEQ ID NO: 566929 - DNA, 25 bp, Homo sapien
tcctttctggcccttcatgctgccc

SEQ ID NO: 566930 - DNA, 25 bp, Homo sapien
gcttgccagggagaccgacatcccc

SEQ ID NO: 566931 - DNA, 25 bp, Homo sapien
ggtcctgaggagcccggaaagccat

SEQ ID NO: 566932 - DNA, 25 bp, Homo sapien
gtcctgaggagcccggaaagccatg

SEQ ID NO: 566933 - DNA, 25 bp, Homo sapien
caggcttgccagggagaccgacatc

SEQ ID NO: 566934 - DNA, 25 bp, Homo sapien
gggtccccatgacgcccatttctcc

SEQ ID NO: 566935 - DNA, 25 bp, Homo sapien
tttcacccggtaatccaggagcacc

SEQ ID NO: 566936 - DNA, 25 bp, Homo sapien
tttttcacccggtaatccaggagca

SEQ ID NO: 566937 - DNA, 25 bp, Homo sapien
actggtcctggtgagcccggctgcc

SEQ ID NO: 566938 - DNA, 25 bp, Homo sapien
cagggagccccgactgtcccgttat

SEQ ID NO: 566939 - DNA, 25 bp, Homo sapien
actgtcccgttatgccagggagtcc

SEQ ID NO: 566940 - DNA, 25 bp, Homo sapien
tagggcccggcatgtccagtccagg

SEQ ID NO: 566941 - DNA, 25 bp, Homo sapien
gcccggcatgtccagtccagggaat

SEQ ID NO: 566942 - DNA, 25 bp, Homo sapien
ggagcctggcaatccaggaggtccc

SEQ ID NO: 566943 - DNA, 25 bp, Homo sapien
ggggtccgatcgctccatgttctcc

SEQ ID NO: 566944 - DNA, 25 bp, Homo sapien
gaatgccgggaagacctggcaaacc

SEQ ID NO: 566945 - DNA, 25 bp, Homo sapien
tccaggaacgcctggtaccccaatg

SEQ ID NO: 566946 - DNA, 25 bp, Homo sapien
tggcaaacctttgagtcccggtaga

SEQ ID NO: 566947 - DNA, 25 bp, Homo sapien
gccccatgtctccaggtaagccgtc

SEQ ID NO: 566948 - DNA, 25 bp, Homo sapien
caggtaagccattaaatcccgggcg

SEQ ID NO: 566949 - DNA, 25 bp, Homo sapien
cattaaatcccgggcgacctggagt

SEQ ID NO: 566950 - DNA, 25 bp, Homo sapien
ctggagtccccggtggccccatgtc

SEQ ID NO: 566951 - DNA, 25 bp, Homo sapien
tgaaagcctccctgaacagcggtca

SEQ ID NO: 566952 - DNA, 25 bp, Homo sapien
tggtgttttgatgtctaccacctcc

SEQ ID NO: 566953 - DNA, 25 bp, Homo sapien
tcagcactgcttgggctcttctgaa

SEQ ID NO: 566954 - DNA, 25 bp, Homo sapien
cacagaagtcacaggtggaccaaag

SEQ ID NO: 566955 - DNA, 25 bp, Homo sapien
gaaatccaatgcctggctggcccac

SEQ ID NO: 566956 - DNA, 25 bp, Homo sapien
ctggctggcccacagcgcccttctc

SEQ ID NO: 566957 - DNA, 25 bp, Homo sapien
gggggccctggaaatccaatgcctg

SEQ ID NO: 566958 - DNA, 25 bp, Homo sapien
ggccctggaaatccaatgcctggct

SEQ ID NO: 566959 - DNA, 25 bp, Homo sapien
ctggggaccccggcagtccttctgc

SEQ ID NO: 566960 - DNA, 25 bp, Homo sapien
ggggaccccggcagtccttctgctc

SEQ ID NO: 566961 - DNA, 25 bp, Homo sapien
tggggaccccggcagtccttctgct

SEQ ID NO: 566962 - DNA, 25 bp, Homo sapien
gcatcacgagtttctcaggcctcac

SEQ ID NO: 566963 - DNA, 25 bp, Homo sapien
aacttcatgctgcatcacgagtttc

SEQ ID NO: 566964 - DNA, 25 bp, Homo sapien
catgctgcatcacgagtttctcagg

SEQ ID NO: 566965 - DNA, 25 bp, Homo sapien
gctgcatcacgagtttctcaggcct

SEQ ID NO: 566966 - DNA, 25 bp, Homo sapien
gtcctttgtcaccaatgggaccagc

SEQ ID NO: 566967 - DNA, 25 bp, Homo sapien
tcctttgtcaccaatgggaccagca

SEQ ID NO: 566968 - DNA, 25 bp, Homo sapien
tgtcctttgtcaccaatgggaccag

SEQ ID NO: 566969 - DNA, 25 bp, Homo sapien
gggccacgctctcctttcaatccta

SEQ ID NO: 566970 - DNA, 25 bp, Homo sapien
gggccggtgtcaccacgactgcctg

SEQ ID NO: 566971 - DNA, 25 bp, Homo sapien
gtcaccacgactgcctgggaatcca

SEQ ID NO: 566972 - DNA, 25 bp, Homo sapien
acgctctcctttcaatcctacagaa

SEQ ID NO: 566973 - DNA, 25 bp, Homo sapien
tatcagccctggtgtaccttgaggg

SEQ ID NO: 566974 - DNA, 25 bp, Homo sapien
aggaagacccggatggccatctctt

SEQ ID NO: 566975 - DNA, 25 bp, Homo sapien
tgtcatgccgggctgtcctggaaag

SEQ ID NO: 566976 - DNA, 25 bp, Homo sapien
tttgtcacctttgagccgcaagtcg

SEQ ID NO: 566977 - DNA, 25 bp, Homo sapien
aagccttgtgatccacagaagaacc

SEQ ID NO: 566978 - DNA, 25 bp, Homo sapien
gaacaaagccttgtgatccacagaa

SEQ ID NO: 566979 - DNA, 25 bp, Homo sapien
caaagccttgtgatccacagaagaa

SEQ ID NO: 566980 - DNA, 25 bp, Homo sapien
ccttgtgatccacagaagaacccat

SEQ ID NO: 566981 - DNA, 25 bp, Homo sapien
aagtatggagagagtcggcagcaac

SEQ ID NO: 566982 - DNA, 25 bp, Homo sapien
caggcttccagaagtatggagagag

SEQ ID NO: 566983 - DNA, 25 bp, Homo sapien
acgatgcactgactcctggcccaat

SEQ ID NO: 566984 - DNA, 25 bp, Homo sapien
agagagtcggcagcaactctctgca

SEQ ID NO: 566985 - DNA, 25 bp, Homo sapien
aaattatttctatgagccacctgcc

SEQ ID NO: 566986 - DNA, 25 bp, Homo sapien
taaaattagcctcctctatgcggcc

SEQ ID NO: 566987 - DNA, 25 bp, Homo sapien
tactcaggaaaggtggaacacaccc

SEQ ID NO: 566988 - DNA, 25 bp, Homo sapien
ggaacacacccagtctatttgctct

SEQ ID NO: 566989 - DNA, 25 bp, Homo sapien
cccaggagatgaagcggtgcataga

SEQ ID NO: 566990 - DNA, 25 bp, Homo sapien
tctttgatccccactacagtcaggg

SEQ ID NO: 566991 - DNA, 25 bp, Homo sapien
ggaaaccagtccatgctcgcaaagc

SEQ ID NO: 566992 - DNA, 25 bp, Homo sapien
ctgagtttcagccagagttgaggca

SEQ ID NO: 566993 - DNA, 25 bp, Homo sapien
ttcggctctgcactgtggctgtgtg

SEQ ID NO: 566994 - DNA, 25 bp, Homo sapien
agaaagacggcacttcggctctgca

SEQ ID NO: 566995 - DNA, 25 bp, Homo sapien
cagcactggtaacacagaaagacgg

SEQ ID NO: 566996 - DNA, 25 bp, Homo sapien
taacacagaaagacggcacttcggc

SEQ ID NO: 566997 - DNA, 25 bp, Homo sapien
tgccaggcaaacctctgtcgccctt

SEQ ID NO: 566998 - DNA, 25 bp, Homo sapien
ccaggcaaacctctgtcgcccttgg

SEQ ID NO: 566999 - DNA, 25 bp, Homo sapien
tctgccaggcaaacctctgtcgccc

SEQ ID NO: 567000 - DNA, 25 bp, Homo sapien
aggcaaacctctgtcgcccttggcc

SEQ ID NO: 567001 - DNA, 25 bp, Homo sapien
ccccgatatccgtctatatcacaga

SEQ ID NO: 567002 - DNA, 25 bp, Homo sapien
cccgatatccgtctatatcacagat

SEQ ID NO: 567003 - DNA, 25 bp, Homo sapien
aggcccccgatatccgtctatatca

SEQ ID NO: 567004 - DNA, 25 bp, Homo sapien
cgggaggcccccgatatccgtctat

SEQ ID NO: 567005 - DNA, 25 bp, Homo sapien
catgtgaccagaagtctccgcagtg

SEQ ID NO: 567006 - DNA, 25 bp, Homo sapien
acatgtgaccagaagtctccgcagt

SEQ ID NO: 567007 - DNA, 25 bp, Homo sapien
atgtgaccagaagtctccgcagtgc

SEQ ID NO: 567008 - DNA, 25 bp, Homo sapien
tgtgaccagaagtctccgcagtgca

SEQ ID NO: 567009 - DNA, 25 bp, Homo sapien
aatttcgcctataaatcctggctgc

SEQ ID NO: 567010 - DNA, 25 bp, Homo sapien
tggaggtccgggctgacattccaca

SEQ ID NO: 567011 - DNA, 25 bp, Homo sapien
ccctggtcacctggaggtccgggct

SEQ ID NO: 567012 - DNA, 25 bp, Homo sapien
ctccaatttcgcctataaatcctgg

SEQ ID NO: 567013 - DNA, 25 bp, Homo sapien
ggtgtctgcttgcaccccacattaa

SEQ ID NO: 567014 - DNA, 25 bp, Homo sapien
cccttagaggaatatggatgattag

SEQ ID NO: 567015 - DNA, 25 bp, Homo sapien
gcctttctattacactctggctgtg

SEQ ID NO: 567016 - DNA, 25 bp, Homo sapien
cattctctgaagattcccttagagg

SEQ ID NO: 567017 - DNA, 25 bp, Homo sapien
gtcctggcagagatgtaccaggaaa

SEQ ID NO: 567018 - DNA, 25 bp, Homo sapien
gcagagatgtaccaggaaatcctcg

SEQ ID NO: 567019 - DNA, 25 bp, Homo sapien
cctggcagagatgtaccaggaaatc

SEQ ID NO: 567020 - DNA, 25 bp, Homo sapien
tggcagagatgtaccaggaaatcct

SEQ ID NO: 567021 - DNA, 25 bp, Homo sapien
tctggagtgactggagaatgacttc

SEQ ID NO: 567022 - DNA, 25 bp, Homo sapien
agcgcagtctgccaggaaacacagg

SEQ ID NO: 567023 - DNA, 25 bp, Homo sapien
cacacgtgcatctgcgcatatggac

SEQ ID NO: 567024 - DNA, 25 bp, Homo sapien
gcatatggacagagacaacagcgag

SEQ ID NO: 567025 - DNA, 25 bp, Homo sapien
ctggaggtccgggttggcctggtag

SEQ ID NO: 567026 - DNA, 25 bp, Homo sapien
ggagacctggtcacagacagtcctg

SEQ ID NO: 567027 - DNA, 25 bp, Homo sapien
cgtagaaaacagagcgggagaccac

SEQ ID NO: 567028 - DNA, 25 bp, Homo sapien
aagctacagcgaagggctcctgaag

SEQ ID NO: 567029 - DNA, 25 bp, Homo sapien
tccatggccaaagggaacgtagaaa

SEQ ID NO: 567030 - DNA, 25 bp, Homo sapien
ttctcccaaaggtcctgtgcctata

SEQ ID NO: 567031 - DNA, 25 bp, Homo sapien
tctcccaaaggtcctgtgcctataa

SEQ ID NO: 567032 - DNA, 25 bp, Homo sapien
tttctcccaaaggtcctgtgcctat

SEQ ID NO: 567033 - DNA, 25 bp, Homo sapien
tgggccaggaggacctgcttcaccc

SEQ ID NO: 567034 - DNA, 25 bp, Homo sapien
ggaggacctgcttcacccttttctc

SEQ ID NO: 567035 - DNA, 25 bp, Homo sapien
gccaggaggacctgcttcacccttt

SEQ ID NO: 567036 - DNA, 25 bp, Homo sapien
ggtgggccaggaggacctgcttcac

SEQ ID NO: 567037 - DNA, 25 bp, Homo sapien
aagaataaacagacttctgggttga

SEQ ID NO: 567038 - DNA, 25 bp, Homo sapien
tttcccttgagtacagagtccttta

SEQ ID NO: 567039 - DNA, 25 bp, Homo sapien
ggctcacaatagtgccagcgtttac

SEQ ID NO: 567040 - DNA, 25 bp, Homo sapien
gataaaggctcacaatagtgccagc

SEQ ID NO: 567041 - DNA, 25 bp, Homo sapien
ctgcgggccctggcggcctatgagt

SEQ ID NO: 567042 - DNA, 25 bp, Homo sapien
ccctggcggcctatgagtcctgggt

SEQ ID NO: 567043 - DNA, 25 bp, Homo sapien
tatgagtcctgggtacccgggttca

SEQ ID NO: 567044 - DNA, 25 bp, Homo sapien
cgggccctggcggcctatgagtcct

SEQ ID NO: 567045 - DNA, 25 bp, Homo sapien
cagtgagcctgcttgtaaaaaccac

SEQ ID NO: 567046 - DNA, 25 bp, Homo sapien
cagtaaccgtcagaggccagtggta

SEQ ID NO: 567047 - DNA, 25 bp, Homo sapien
agagagaagcagtaaccgtcagagg

SEQ ID NO: 567048 - DNA, 25 bp, Homo sapien
tggtaggaacagtgagcctgcttgt

SEQ ID NO: 567049 - DNA, 25 bp, Homo sapien
tgtcaccatcttttccgggtttgcc

SEQ ID NO: 567050 - DNA, 25 bp, Homo sapien
ttgtcaccatcttttccgggtttgc

SEQ ID NO: 567051 - DNA, 25 bp, Homo sapien
acctttctctccgacccctggcatc

SEQ ID NO: 567052 - DNA, 25 bp, Homo sapien
cacctttctctccgacccctggcat

SEQ ID NO: 567053 - DNA, 25 bp, Homo sapien
ttcacctttctctccgacccctggc

SEQ ID NO: 567054 - DNA, 25 bp, Homo sapien
tcacctttctctccgacccctggca

SEQ ID NO: 567055 - DNA, 25 bp, Homo sapien
tgaaatccaggttcacctttttggc

SEQ ID NO: 567056 - DNA, 25 bp, Homo sapien
ctgaaatccaggttcacctttttgg

SEQ ID NO: 567057 - DNA, 25 bp, Homo sapien
tggactgaacagtctataaatctgt

SEQ ID NO: 567058 - DNA, 25 bp, Homo sapien
tatggactgaacagtctataaatct

SEQ ID NO: 567059 - DNA, 25 bp, Homo sapien
ggctcgtattttatggactgaacag

SEQ ID NO: 567060 - DNA, 25 bp, Homo sapien
ctctcaaaggggctcgtattttatg

SEQ ID NO: 567061 - DNA, 25 bp, Homo sapien
tcagtattcactgatgaagcccact

SEQ ID NO: 567062 - DNA, 25 bp, Homo sapien
aaatcagtattcactgatgaagccc

SEQ ID NO: 567063 - DNA, 25 bp, Homo sapien
cagtattcactgatgaagcccactc

SEQ ID NO: 567064 - DNA, 25 bp, Homo sapien
aatcagtattcactgatgaagccca

SEQ ID NO: 567065 - DNA, 25 bp, Homo sapien
tctcccttggtggcgaagtctcctt

SEQ ID NO: 567066 - DNA, 25 bp, Homo sapien
ttctcccttggtggcgaagtctcct

SEQ ID NO: 567067 - DNA, 25 bp, Homo sapien
ctcccttggtggcgaagtctccttt

SEQ ID NO: 567068 - DNA, 25 bp, Homo sapien
cacctggagggccgggagggcctgg

SEQ ID NO: 567069 - DNA, 25 bp, Homo sapien
tcacctggagggccgggagggcctg

SEQ ID NO: 567070 - DNA, 25 bp, Homo sapien
tccggtaaatcctggaggcccaaca

SEQ ID NO: 567071 - DNA, 25 bp, Homo sapien
tggtccggtaaatcctggaggccca

SEQ ID NO: 567072 - DNA, 25 bp, Homo sapien
gtaaatcctggaggcccaacaggac

SEQ ID NO: 567073 - DNA, 25 bp, Homo sapien
tggtggtccggtaaatcctggaggc

SEQ ID NO: 567074 - DNA, 25 bp, Homo sapien
aaatcctctttcacctttcaacagc

SEQ ID NO: 567075 - DNA, 25 bp, Homo sapien
catcccgggcacatggccaagtatc

SEQ ID NO: 567076 - DNA, 25 bp, Homo sapien
aatcctctttcacctttcaacagca

SEQ ID NO: 567077 - DNA, 25 bp, Homo sapien
cagcatcccgggcacatggccaagt

SEQ ID NO: 567078 - DNA, 25 bp, Homo sapien
tgttctgaatcacaggagcgagcac

SEQ ID NO: 567079 - DNA, 25 bp, Homo sapien
tgagacctgtaagcctccctttgac

SEQ ID NO: 567080 - DNA, 25 bp, Homo sapien
atcacaggagcgagcacagggactc

SEQ ID NO: 567081 - DNA, 25 bp, Homo sapien
gacaaggctgatcccaacatccaga

SEQ ID NO: 567082 - DNA, 25 bp, Homo sapien
taatgaatccaataaagcaaaataa

SEQ ID NO: 567083 - DNA, 25 bp, Homo sapien
gtaatgaatccaataaagcaaaata

SEQ ID NO: 567084 - DNA, 25 bp, Homo sapien
tgtaatgaatccaataaagcaaaat

SEQ ID NO: 567085 - DNA, 25 bp, Homo sapien
cttcatccctggtaagcctggtggt

SEQ ID NO: 567086 - DNA, 25 bp, Homo sapien
tcatccctggtaagcctggtggtcc

SEQ ID NO: 567087 - DNA, 25 bp, Homo sapien
ttcatccctggtaagcctggtggtc

SEQ ID NO: 567088 - DNA, 25 bp, Homo sapien
tgtttttctcaaaatatcattagca

SEQ ID NO: 567089 - DNA, 25 bp, Homo sapien
tttgtttttctcaaaatatcattag

SEQ ID NO: 567090 - DNA, 25 bp, Homo sapien
agttttgtttttctcaaaatatcat

SEQ ID NO: 567091 - DNA, 25 bp, Homo sapien
tagttttgtttttctcaaaatatca

SEQ ID NO: 567092 - DNA, 25 bp, Homo sapien
agaagttctgccctaaataacctct

SEQ ID NO: 567093 - DNA, 25 bp, Homo sapien
gagagaagtcataactaaaagaaag

SEQ ID NO: 567094 - DNA, 25 bp, Homo sapien
ttctgccctaaataacctctactca

SEQ ID NO: 567095 - DNA, 25 bp, Homo sapien
aaagagagaagtcataactaaaaga

SEQ ID NO: 567096 - DNA, 25 bp, Homo sapien
gatttccagcgaaaccaggcaagcc

SEQ ID NO: 567097 - DNA, 25 bp, Homo sapien
atttccagcgaaaccaggcaagcca

SEQ ID NO: 567098 - DNA, 25 bp, Homo sapien
ggatttccagcgaaaccaggcaagc

SEQ ID NO: 567099 - DNA, 25 bp, Homo sapien
gggatttccagcgaaaccaggcaag

SEQ ID NO: 567100 - DNA, 25 bp, Homo sapien
atcagccctgacatcgcatgcatca

SEQ ID NO: 567101 - DNA, 25 bp, Homo sapien
actgtgtgtggcagacacatcagcc

SEQ ID NO: 567102 - DNA, 25 bp, Homo sapien
gacagcagagcatcattcatacgca

SEQ ID NO: 567103 - DNA, 25 bp, Homo sapien
tcattcatacgcactgtgtgtggca

SEQ ID NO: 567104 - DNA, 25 bp, Homo sapien
tagtatcattaatagggacaaaggc

SEQ ID NO: 567105 - DNA, 25 bp, Homo sapien
ggtaataactttcgtgcttaaatgc

SEQ ID NO: 567106 - DNA, 25 bp, Homo sapien
tcacaagctgtgctactgggtacca

SEQ ID NO: 567107 - DNA, 25 bp, Homo sapien
tctttctggtacactaaatatggga

SEQ ID NO: 567108 - DNA, 25 bp, Homo sapien
ctttgtgccattgcatcctggaata

SEQ ID NO: 567109 - DNA, 25 bp, Homo sapien
gcgggccgtcttggccaggaattcc

SEQ ID NO: 567110 - DNA, 25 bp, Homo sapien
gcctggcgggccgtcttggccagga

SEQ ID NO: 567111 - DNA, 25 bp, Homo sapien
catcctggaatacctggggggcctg

SEQ ID NO: 567112 - DNA, 25 bp, Homo sapien
gtttccagggtagccagatgctccc

SEQ ID NO: 567113 - DNA, 25 bp, Homo sapien
agtcctgggtttccagggtagccag

SEQ ID NO: 567114 - DNA, 25 bp, Homo sapien
cctgggtttccagggtagccagatg

SEQ ID NO: 567115 - DNA, 25 bp, Homo sapien
tgggtttccagggtagccagatgct

SEQ ID NO: 567116 - DNA, 25 bp, Homo sapien
catcgattgtgagtagcaactgtac

SEQ ID NO: 567117 - DNA, 25 bp, Homo sapien
tggaagcgggcctgtcccacgcatg

SEQ ID NO: 567118 - DNA, 25 bp, Homo sapien
aaaggtgcccggctctggaagcggg

SEQ ID NO: 567119 - DNA, 25 bp, Homo sapien
cacgcatggaatcatcgattgtgag

SEQ ID NO: 567120 - DNA, 25 bp, Homo sapien
ccaggtagtcctggttctccagtat

SEQ ID NO: 567121 - DNA, 25 bp, Homo sapien
gtagtcctggttctccagtatcacc

SEQ ID NO: 567122 - DNA, 25 bp, Homo sapien
tttgttccaggtagtcctggttctc

SEQ ID NO: 567123 - DNA, 25 bp, Homo sapien
aggtagtcctggttctccagtatca

SEQ ID NO: 567124 - DNA, 25 bp, Homo sapien
gaacagaatagaaatgccattgtca

SEQ ID NO: 567125 - DNA, 25 bp, Homo sapien
aatgccattgtcattgatcaccgct

SEQ ID NO: 567126 - DNA, 25 bp, Homo sapien
tgatcaccgctatctcaagaatgcg

SEQ ID NO: 567127 - DNA, 25 bp, Homo sapien
gaatgcgggcaatcttacatccacc

SEQ ID NO: 567128 - DNA, 25 bp, Homo sapien
ggcccctcaggtccttgcattccag

SEQ ID NO: 567129 - DNA, 25 bp, Homo sapien
ttgcattccaggaaacccaatgaca

SEQ ID NO: 567130 - DNA, 25 bp, Homo sapien
caggaaacccaatgacaccttgtaa

SEQ ID NO: 567131 - DNA, 25 bp, Homo sapien
caatgacaccttgtaaccccgggag

SEQ ID NO: 567132 - DNA, 25 bp, Homo sapien
tggcacttaactggtgaattaactg

SEQ ID NO: 567133 - DNA, 25 bp, Homo sapien
ccagtcctggcacttaactggtgaa

SEQ ID NO: 567134 - DNA, 25 bp, Homo sapien
ctggtgaattaactgcctgctccat

SEQ ID NO: 567135 - DNA, 25 bp, Homo sapien
cttaactggtgaattaactgcctgc

SEQ ID NO: 567136 - DNA, 25 bp, Homo sapien
ggtttgacagggaaggctggctcct

SEQ ID NO: 567137 - DNA, 25 bp, Homo sapien
agcatccagggagtcggccagaagc

SEQ ID NO: 567138 - DNA, 25 bp, Homo sapien
cacgagggccctgatcccaaggttt

SEQ ID NO: 567139 - DNA, 25 bp, Homo sapien
gaagcacagacgtgactccacgagg

SEQ ID NO: 567140 - DNA, 25 bp, Homo sapien
gtgtactgggtatggcagcctccat

SEQ ID NO: 567141 - DNA, 25 bp, Homo sapien
gagtgtactgggtatggcagcctcc

SEQ ID NO: 567142 - DNA, 25 bp, Homo sapien
gtaccgggtttggtactgagcactg

SEQ ID NO: 567143 - DNA, 25 bp, Homo sapien
agcactgagtgtactgggtatggca

SEQ ID NO: 567144 - DNA, 25 bp, Homo sapien
ttggttctccacagggagaatcagc

SEQ ID NO: 567145 - DNA, 25 bp, Homo sapien
gttctccacagggagaatcagcacg

SEQ ID NO: 567146 - DNA, 25 bp, Homo sapien
tctccacagggagaatcagcacgtt

SEQ ID NO: 567147 - DNA, 25 bp, Homo sapien
ccttggttctccacagggagaatca

SEQ ID NO: 567148 - DNA, 25 bp, Homo sapien
tcttgtgggtgacttctgccggctg

SEQ ID NO: 567149 - DNA, 25 bp, Homo sapien
aagaaaaagccctatgcctctgccc

SEQ ID NO: 567150 - DNA, 25 bp, Homo sapien
ttggctctcactccacggtaactgc

SEQ ID NO: 567151 - DNA, 25 bp, Homo sapien
gagggctccattcaggccacgtggt

SEQ ID NO: 567152 - DNA, 25 bp, Homo sapien
ctgagcttttggggcctgcgaatga

SEQ ID NO: 567153 - DNA, 25 bp, Homo sapien
tttggggcctgcgaatgaccgttcg

SEQ ID NO: 567154 - DNA, 25 bp, Homo sapien
ggcctgcgaatgaccgttcggtttg

SEQ ID NO: 567155 - DNA, 25 bp, Homo sapien
agcttttggggcctgcgaatgaccg

SEQ ID NO: 567156 - DNA, 25 bp, Homo sapien
tattaacccatttagccagccaacg

SEQ ID NO: 567157 - DNA, 25 bp, Homo sapien
gagcgcttctgtcacggatggaaca

SEQ ID NO: 567158 - DNA, 25 bp, Homo sapien
tgttggcaacaaaaactcgcagcgg

SEQ ID NO: 567159 - DNA, 25 bp, Homo sapien
taatagctagaccaagcaaggctgg

SEQ ID NO: 567160 - DNA, 25 bp, Homo sapien
cacgtcctgggtaatcgcggagaca

SEQ ID NO: 567161 - DNA, 25 bp, Homo sapien
gtggagcggactctacaccaggatt

SEQ ID NO: 567162 - DNA, 25 bp, Homo sapien
ggcacaagtcgatgatcctgagtca

SEQ ID NO: 567163 - DNA, 25 bp, Homo sapien
tgcatctctcaaagtgcccagcaaa

SEQ ID NO: 567164 - DNA, 25 bp, Homo sapien
tgtcccttcactccatggcagtcac

SEQ ID NO: 567165 - DNA, 25 bp, Homo sapien
tcccttcactccatggcagtcacat

SEQ ID NO: 567166 - DNA, 25 bp, Homo sapien
ccttcactccatggcagtcacattt

SEQ ID NO: 567167 - DNA, 25 bp, Homo sapien
tcactccatggcagtcacatttgcc

SEQ ID NO: 567168 - DNA, 25 bp, Homo sapien
ttaagagtacgcagcaagcgcgggc

SEQ ID NO: 567169 - DNA, 25 bp, Homo sapien
gattgcgagcgggacattcccaacc

SEQ ID NO: 567170 - DNA, 25 bp, Homo sapien
gcactggtacgttgctccaactgag

SEQ ID NO: 567171 - DNA, 25 bp, Homo sapien
ctgaggcaagttggacaaaacccca

SEQ ID NO: 567172 - DNA, 25 bp, Homo sapien
catatggatgacgaatggctctgca

SEQ ID NO: 567173 - DNA, 25 bp, Homo sapien
gagcactctgatgcctgtcgtgcca

SEQ ID NO: 567174 - DNA, 25 bp, Homo sapien
ggcactgccagtccaaaaccaggaa

SEQ ID NO: 567175 - DNA, 25 bp, Homo sapien
gatgcctgtcgtgccaggctcagga

SEQ ID NO: 567176 - DNA, 25 bp, Homo sapien
aactgatccaggctcaccacgatga

SEQ ID NO: 567177 - DNA, 25 bp, Homo sapien
ggcccacctcttggcgcacggagaa

SEQ ID NO: 567178 - DNA, 25 bp, Homo sapien
ccacttggaaaagtgccagctgtat

SEQ ID NO: 567179 - DNA, 25 bp, Homo sapien
gaaaagtgccagctgtattgacagc

SEQ ID NO: 567180 - DNA, 25 bp, Homo sapien
ctgtgacctgatttagggagatgcc

SEQ ID NO: 567181 - DNA, 25 bp, Homo sapien
ttgaaatacttggtctgcatcagcc

SEQ ID NO: 567182 - DNA, 25 bp, Homo sapien
gggagatgccagaatgaaaccagat

SEQ ID NO: 567183 - DNA, 25 bp, Homo sapien
ggactagagcgttcttctccacgca

SEQ ID NO: 567184 - DNA, 25 bp, Homo sapien
gaagctgctgtgaaggctgcgacct

SEQ ID NO: 567185 - DNA, 25 bp, Homo sapien
actgtgaagctgctgtgaaggctgc

SEQ ID NO: 567186 - DNA, 25 bp, Homo sapien
gtgaagctgctgtgaaggctgcgac

SEQ ID NO: 567187 - DNA, 25 bp, Homo sapien
aagactgtgaagctgctgtgaaggc

SEQ ID NO: 567188 - DNA, 25 bp, Homo sapien
tcagagaaataacaggaaagttcat

SEQ ID NO: 567189 - DNA, 25 bp, Homo sapien
ttcagagaaataacaggaaagttca

SEQ ID NO: 567190 - DNA, 25 bp, Homo sapien
cttcagagaaataacaggaaagttc

SEQ ID NO: 567191 - DNA, 25 bp, Homo sapien
gctttaggtcctgtgaactccagtg

SEQ ID NO: 567192 - DNA, 25 bp, Homo sapien
gagagcgtccacgttgcacctgctt

SEQ ID NO: 567193 - DNA, 25 bp, Homo sapien
agtgagtcccttctgcagtgctggc

SEQ ID NO: 567194 - DNA, 25 bp, Homo sapien
tgcgtgtttgctccatctgtgccga

SEQ ID NO: 567195 - DNA, 25 bp, Homo sapien
gttgtgatcaatgatctgtcaatat

SEQ ID NO: 567196 - DNA, 25 bp, Homo sapien
tcaatgatctgtcaatatcactgca

SEQ ID NO: 567197 - DNA, 25 bp, Homo sapien
caatgatctgtcaatatcactgcat

SEQ ID NO: 567198 - DNA, 25 bp, Homo sapien
atcaatgatctgtcaatatcactgc

SEQ ID NO: 567199 - DNA, 25 bp, Homo sapien
acagaactcatcttccatgtcggga

SEQ ID NO: 567200 - DNA, 25 bp, Homo sapien
cacgggagcgccattagtaatttca

SEQ ID NO: 567201 - DNA, 25 bp, Homo sapien
cacgtggcagggactagacttgtca

SEQ ID NO: 567202 - DNA, 25 bp, Homo sapien
aatggccttcactaattgtgcagag

SEQ ID NO: 567203 - DNA, 25 bp, Homo sapien
aagagacacacttactgagcataga

SEQ ID NO: 567204 - DNA, 25 bp, Homo sapien
gatgctcagatactgtgccatccct

SEQ ID NO: 567205 - DNA, 25 bp, Homo sapien
tagattctacatggcgatgctcaga

SEQ ID NO: 567206 - DNA, 25 bp, Homo sapien
gacaaccaattagtcaatcaagaga

SEQ ID NO: 567207 - DNA, 25 bp, Homo sapien
tccaatctggaggtggttatttttg

SEQ ID NO: 567208 - DNA, 25 bp, Homo sapien
tatatttccaatctggaggtggtta

SEQ ID NO: 567209 - DNA, 25 bp, Homo sapien
ctccctcaacatgtagggagggaca

SEQ ID NO: 567210 - DNA, 25 bp, Homo sapien
gagagcgaaggagaaagcacaattt

SEQ ID NO: 567211 - DNA, 25 bp, Homo sapien
cactcgggtcctgtggaactagagg

SEQ ID NO: 567212 - DNA, 25 bp, Homo sapien
caagtggtatttcccatggctagct

SEQ ID NO: 567213 - DNA, 25 bp, Homo sapien
tgtgcagagatggtagcacgaccac

SEQ ID NO: 567214 - DNA, 25 bp, Homo sapien
tccaggtttgagtaggcgctgagct

SEQ ID NO: 567215 - DNA, 25 bp, Homo sapien
cccaaagtcaaacagctagttgctg

SEQ ID NO: 567216 - DNA, 25 bp, Homo sapien
acaaattggcttctcgcctaggaca

SEQ ID NO: 567217 - DNA, 25 bp, Homo sapien
cacatgtccgaatgcaaagtataag

SEQ ID NO: 567218 - DNA, 25 bp, Homo sapien
tcactttaactcaggcacatgtccg

SEQ ID NO: 567219 - DNA, 25 bp, Homo sapien
gctcgccgcagaggatggcaaaact

SEQ ID NO: 567220 - DNA, 25 bp, Homo sapien
ttggcggtcgttaagaattcctcac

SEQ ID NO: 567221 - DNA, 25 bp, Homo sapien
atgttcagagtcctgcgtcccagcg

SEQ ID NO: 567222 - DNA, 25 bp, Homo sapien
tatctctagaaaccggatttggcgg

SEQ ID NO: 567223 - DNA, 25 bp, Homo sapien
tagtaccttcaaaaatgccccatgt

SEQ ID NO: 567224 - DNA, 25 bp, Homo sapien
tccaatacaggaatagtgtgcctcc

SEQ ID NO: 567225 - DNA, 25 bp, Homo sapien
ttgaattacagctggaacacactgg

SEQ ID NO: 567226 - DNA, 25 bp, Homo sapien
catagtattctcctctgaacgtgca

SEQ ID NO: 567227 - DNA, 25 bp, Homo sapien
gaccataacttagggaattgagggc

SEQ ID NO: 567228 - DNA, 25 bp, Homo sapien
ccaaagccgtatgtcgaggagtagc

SEQ ID NO: 567229 - DNA, 25 bp, Homo sapien
ttgacagatccgtaccacaaaggga

SEQ ID NO: 567230 - DNA, 25 bp, Homo sapien
aaccccagtgagatagtaggtggcc

SEQ ID NO: 567231 - DNA, 25 bp, Homo sapien
accttccggcctgtgggactgcatg

SEQ ID NO: 567232 - DNA, 25 bp, Homo sapien
tgggactgcatggctgtgacactga

SEQ ID NO: 567233 - DNA, 25 bp, Homo sapien
cactgagcaacagctgaagtcttta

SEQ ID NO: 567234 - DNA, 25 bp, Homo sapien
gagcaacagctgaagtctttattct

SEQ ID NO: 567235 - DNA, 25 bp, Homo sapien
tcggtccaccaatgcgcgatcgtag

SEQ ID NO: 567236 - DNA, 25 bp, Homo sapien
aaaggaggctcggtccaccaatgcg

SEQ ID NO: 567237 - DNA, 25 bp, Homo sapien
ttaactctccagtacccataccata

SEQ ID NO: 567238 - DNA, 25 bp, Homo sapien
ccataccataacaaaggaggctcgg

SEQ ID NO: 567239 - DNA, 25 bp, Homo sapien
gtggagcagaagggcggcgggcagc

SEQ ID NO: 567240 - DNA, 25 bp, Homo sapien
gcagcggcccggctgtgctcctcgt

SEQ ID NO: 567241 - DNA, 25 bp, Homo sapien
cagcagcagccagacgctgagccgg

SEQ ID NO: 567242 - DNA, 25 bp, Homo sapien
cggctgtgctcctcgtggagcagaa

SEQ ID NO: 567243 - DNA, 25 bp, Homo sapien
gcggacagctagctctcggaaggcc

SEQ ID NO: 567244 - DNA, 25 bp, Homo sapien
ggtggcgcgcccgaggcggcgaggg

SEQ ID NO: 567245 - DNA, 25 bp, Homo sapien
tcggaaggccggacttccagcgcta

SEQ ID NO: 567246 - DNA, 25 bp, Homo sapien
cgctacgcaccgtcccgggtgcggc

SEQ ID NO: 567247 - DNA, 25 bp, Homo sapien
tgccctacggcggtaagcgactttc

SEQ ID NO: 567248 - DNA, 25 bp, Homo sapien
cccagagcgtcttggcggtaagtcc

SEQ ID NO: 567249 - DNA, 25 bp, Homo sapien
aagcgtcggcctttcacgggaactg

SEQ ID NO: 567250 - DNA, 25 bp, Homo sapien
gcctctaggctaagtgggactgacc

SEQ ID NO: 567251 - DNA, 25 bp, Homo sapien
actccaggccaaagttttcttccag

SEQ ID NO: 567252 - DNA, 25 bp, Homo sapien
actcggagactttgaccagagcact

SEQ ID NO: 567253 - DNA, 25 bp, Homo sapien
ctcttcgtcccagccccgacttaag

SEQ ID NO: 567254 - DNA, 25 bp, Homo sapien
cccagccccgacttaagatcagaac

SEQ ID NO: 567255 - DNA, 25 bp, Homo sapien
gaggcttgaaagcactcactgtagc

SEQ ID NO: 567256 - DNA, 25 bp, Homo sapien
gagcattgtcacctatctccagagg

SEQ ID NO: 567257 - DNA, 25 bp, Homo sapien
tggtcacctgaggacctctggccgg

SEQ ID NO: 567258 - DNA, 25 bp, Homo sapien
gatcaaatatgcagccggctgggtg

SEQ ID NO: 567259 - DNA, 25 bp, Homo sapien
cctcctctgctcgtggataaacaag

SEQ ID NO: 567260 - DNA, 25 bp, Homo sapien
cagctgcggtggcaagtcctttccg

SEQ ID NO: 567261 - DNA, 25 bp, Homo sapien
ccagagctttctgtaaggatcggga

SEQ ID NO: 567262 - DNA, 25 bp, Homo sapien
tgaagcgctattgctcaaaacatgg

SEQ ID NO: 567263 - DNA, 25 bp, Homo sapien
caaatccggtgcatgtggcttaact

SEQ ID NO: 567264 - DNA, 25 bp, Homo sapien
ggtgagaccctgaacattcactgat

SEQ ID NO: 567265 - DNA, 25 bp, Homo sapien
taaaacatttttaagatagagcatc

SEQ ID NO: 567266 - DNA, 25 bp, Homo sapien
ttattcctggagatattcttctgtg

SEQ ID NO: 567267 - DNA, 25 bp, Homo sapien
ctttgggtcaatttgcagagctttg

SEQ ID NO: 567268 - DNA, 25 bp, Homo sapien
ttttggacacgaagcagaaatcaca

SEQ ID NO: 567269 - DNA, 25 bp, Homo sapien
tactatggattccagttccaaatgg

SEQ ID NO: 567270 - DNA, 25 bp, Homo sapien
catgtgaccagtgaatgagctttgg

SEQ ID NO: 567271 - DNA, 25 bp, Homo sapien
agagatgagtttcagcctgttggct

SEQ ID NO: 567272 - DNA, 25 bp, Homo sapien
agatgagtttcagcctgttggctag

SEQ ID NO: 567273 - DNA, 25 bp, Homo sapien
gaacgcctggtctcaagctatctga

SEQ ID NO: 567274 - DNA, 25 bp, Homo sapien
gtctcaagctatctgaccacctcgg

SEQ ID NO: 567275 - DNA, 25 bp, Homo sapien
cagttatgggtagaccgtggttaca

SEQ ID NO: 567276 - DNA, 25 bp, Homo sapien
ggccatggctacagcatatggatag

SEQ ID NO: 567277 - DNA, 25 bp, Homo sapien
tacagcatgtggataggccatggct

SEQ ID NO: 567278 - DNA, 25 bp, Homo sapien
actagattgtcgttgcagttgcgga

SEQ ID NO: 567279 - DNA, 25 bp, Homo sapien
tacctgcagtccaaacacgtgtgcc

SEQ ID NO: 567280 - DNA, 25 bp, Homo sapien
aaagcttccccgtggactgcatgac

SEQ ID NO: 567281 - DNA, 25 bp, Homo sapien
taactgcgttgagggtgtgttttcc

SEQ ID NO: 567282 - DNA, 25 bp, Homo sapien
ttgacagtgccacctttagagggaa

SEQ ID NO: 567283 - DNA, 25 bp, Homo sapien
aaggcttaataacagcccctccagg

SEQ ID NO: 567284 - DNA, 25 bp, Homo sapien
ggctcggtgctccagacactacttg

SEQ ID NO: 567285 - DNA, 25 bp, Homo sapien
tgtactctgtcatgctccaaactgc

SEQ ID NO: 567286 - DNA, 25 bp, Homo sapien
ggtgacttctcttggccagtaggtg

SEQ ID NO: 567287 - DNA, 25 bp, Homo sapien
ctgatgtctttggttgggtttataa

SEQ ID NO: 567288 - DNA, 25 bp, Homo sapien
ttataaaggcaagacacttctccca

SEQ ID NO: 567289 - DNA, 25 bp, Homo sapien
gcagctgacactcagacccatcctt

SEQ ID NO: 567290 - DNA, 25 bp, Homo sapien
aacccatgcaggacgtcctcacaga

SEQ ID NO: 567291 - DNA, 25 bp, Homo sapien
gagtagccagacttggtcatttgtg

SEQ ID NO: 567292 - DNA, 25 bp, Homo sapien
gccagacttggtcatttgtgaggag

SEQ ID NO: 567293 - DNA, 25 bp, Homo sapien
atttgtgaggagtccggcagccggg

SEQ ID NO: 567294 - DNA, 25 bp, Homo sapien
ccaataggagtagccagacttggtc

SEQ ID NO: 567295 - DNA, 25 bp, Homo sapien
gaagtactggctctgaactgaacta

SEQ ID NO: 567296 - DNA, 25 bp, Homo sapien
tgtggaccacgcagaaagcgatctg

SEQ ID NO: 567297 - DNA, 25 bp, Homo sapien
taccacttgcaaatcgatgtagcag

SEQ ID NO: 567298 - DNA, 25 bp, Homo sapien
gagtaaatcgaaactggaggccaga

SEQ ID NO: 567299 - DNA, 25 bp, Homo sapien
gtactgattaagaaggagtccagga

SEQ ID NO: 567300 - DNA, 25 bp, Homo sapien
actgattaagaaggagtccaggaag

SEQ ID NO: 567301 - DNA, 25 bp, Homo sapien
tactgattaagaaggagtccaggaa

SEQ ID NO: 567302 - DNA, 25 bp, Homo sapien
aagggcataaaacttacaccatgag

SEQ ID NO: 567303 - DNA, 25 bp, Homo sapien
catcacccgacgttttcctagaagg

SEQ ID NO: 567304 - DNA, 25 bp, Homo sapien
tcttctccatcacccgacgttttcc

SEQ ID NO: 567305 - DNA, 25 bp, Homo sapien
tccactcccagacccgtcttctcca

SEQ ID NO: 567306 - DNA, 25 bp, Homo sapien
ctgatggcttccttcatcgatgcag

SEQ ID NO: 567307 - DNA, 25 bp, Homo sapien
taattcccaaatgtaaaccagatag

SEQ ID NO: 567308 - DNA, 25 bp, Homo sapien
taaagtgtcgttcataaccagcgga

SEQ ID NO: 567309 - DNA, 25 bp, Homo sapien
gctgcccctacggacactgatggct

SEQ ID NO: 567310 - DNA, 25 bp, Homo sapien
caaatgcgcaggaagcgtatcggga

SEQ ID NO: 567311 - DNA, 25 bp, Homo sapien
taatgaaccgcgtgcatctttggtg

SEQ ID NO: 567312 - DNA, 25 bp, Homo sapien
gctgctgccgctacacctttgtgaa

SEQ ID NO: 567313 - DNA, 25 bp, Homo sapien
gcagcacggctgcactcagttgttg

SEQ ID NO: 567314 - DNA, 25 bp, Homo sapien
gccacccacacgcctttcctctctg

SEQ ID NO: 567315 - DNA, 25 bp, Homo sapien
cgcctttggaaggccacccacacgc

SEQ ID NO: 567316 - DNA, 25 bp, Homo sapien
tgcagggctgttagctgcttactac

SEQ ID NO: 567317 - DNA, 25 bp, Homo sapien
gagcccgcctttggaaggccaccca

SEQ ID NO: 567318 - DNA, 25 bp, Homo sapien
gcctgacagccaaagctctctgcat

SEQ ID NO: 567319 - DNA, 25 bp, Homo sapien
ggcctgacagccaaagctctctgca

SEQ ID NO: 567320 - DNA, 25 bp, Homo sapien
ccattcgcggcctgacagccaaagc

SEQ ID NO: 567321 - DNA, 25 bp, Homo sapien
ttcgcggcctgacagccaaagctct

SEQ ID NO: 567322 - DNA, 25 bp, Homo sapien
cactggttgaaatagctgctctgcc

SEQ ID NO: 567323 - DNA, 25 bp, Homo sapien
gaactacagaaagcacagtctcctg

SEQ ID NO: 567324 - DNA, 25 bp, Homo sapien
cccttccctagcaaaaggtgtgtga

SEQ ID NO: 567325 - DNA, 25 bp, Homo sapien
tgacggtccacgctcgggtttcttc

SEQ ID NO: 567326 - DNA, 25 bp, Homo sapien
gcatctgtggttgtctctctaggct

SEQ ID NO: 567327 - DNA, 25 bp, Homo sapien
tgcctcacaactgggtgggatgccg

SEQ ID NO: 567328 - DNA, 25 bp, Homo sapien
gggaccctgggcatccttgatgctg

SEQ ID NO: 567329 - DNA, 25 bp, Homo sapien
cctgaaggctatcgccacaaaatag

SEQ ID NO: 567330 - DNA, 25 bp, Homo sapien
gcctcctgtccccttggcggtggca

SEQ ID NO: 567331 - DNA, 25 bp, Homo sapien
atgaaaatgagcctgcatgtctctc

SEQ ID NO: 567332 - DNA, 25 bp, Homo sapien
tgtttggacatgaaaatgagcctgc

SEQ ID NO: 567333 - DNA, 25 bp, Homo sapien
aatgagcctgcatgtctctcccagc

SEQ ID NO: 567334 - DNA, 25 bp, Homo sapien
ggaggcgcatggagccagtggtgct

SEQ ID NO: 567335 - DNA, 25 bp, Homo sapien
ggtgctgtctgagcactcggccccc

SEQ ID NO: 567336 - DNA, 25 bp, Homo sapien
ctgagagggaggcgcatggagccag

SEQ ID NO: 567337 - DNA, 25 bp, Homo sapien
gagggaggcgcatggagccagtggt

SEQ ID NO: 567338 - DNA, 25 bp, Homo sapien
tagcagcagtgagcctgatgctgag

SEQ ID NO: 567339 - DNA, 25 bp, Homo sapien
cctagcagcagtgagcctgatgctg

SEQ ID NO: 567340 - DNA, 25 bp, Homo sapien
agcagcagtgagcctgatgctgagt

SEQ ID NO: 567341 - DNA, 25 bp, Homo sapien
ctagcagcagtgagcctgatgctga

SEQ ID NO: 567342 - DNA, 25 bp, Homo sapien
agtgcattcagcaccccgctgtgga

SEQ ID NO: 567343 - DNA, 25 bp, Homo sapien
agcaccccgctgtggatgggcatga

SEQ ID NO: 567344 - DNA, 25 bp, Homo sapien
cgttttggcgtatgtaggatgtgca

SEQ ID NO: 567345 - DNA, 25 bp, Homo sapien
cacgtcttggccgttttggcgtatg

SEQ ID NO: 567346 - DNA, 25 bp, Homo sapien
ctgagagcaggcaccgcaggacctg

SEQ ID NO: 567347 - DNA, 25 bp, Homo sapien
agcaggcaccgcaggacctggagga

SEQ ID NO: 567348 - DNA, 25 bp, Homo sapien
agagcaggcaccgcaggacctggag

SEQ ID NO: 567349 - DNA, 25 bp, Homo sapien
tgagagcaggcaccgcaggacctgg

SEQ ID NO: 567350 - DNA, 25 bp, Homo sapien
tctcagatgccctcacagtacaaag

SEQ ID NO: 567351 - DNA, 25 bp, Homo sapien
ttggtgctcccggacccaaaggagc

SEQ ID NO: 567352 - DNA, 25 bp, Homo sapien
cagaaagtgctccttgggtggcgct

SEQ ID NO: 567353 - DNA, 25 bp, Homo sapien
tgtgagatgaaaaagcttgccagcc

SEQ ID NO: 567354 - DNA, 25 bp, Homo sapien
ggctgaggtcacaaactgccacaga

SEQ ID NO: 567355 - DNA, 25 bp, Homo sapien
cttctgagacagtgcgggaggatct

SEQ ID NO: 567356 - DNA, 25 bp, Homo sapien
gaaagccgacatcaaggtgtctgca

SEQ ID NO: 567357 - DNA, 25 bp, Homo sapien
agactgggcagcttagacatcagaa

SEQ ID NO: 567358 - DNA, 25 bp, Homo sapien
gtggacaactttccacccgagatga

SEQ ID NO: 567359 - DNA, 25 bp, Homo sapien
ccaggccgcacacatcttcaatagt

SEQ ID NO: 567360 - DNA, 25 bp, Homo sapien
tggagtcccacttgtcacctagaac

SEQ ID NO: 567361 - DNA, 25 bp, Homo sapien
cattggaaccctcttgttgctagaa

SEQ ID NO: 567362 - DNA, 25 bp, Homo sapien
tatcaggtgatttggacagttgccc

SEQ ID NO: 567363 - DNA, 25 bp, Homo sapien
ggagcctgttccaccatcaaatgtg

SEQ ID NO: 567364 - DNA, 25 bp, Homo sapien
tgtgagcccttacgtcatgaacagg

SEQ ID NO: 567365 - DNA, 25 bp, Homo sapien
taattgtgattggagtgcccagcca

SEQ ID NO: 567366 - DNA, 25 bp, Homo sapien
caagcgtcaggctcacgaagagagg

SEQ ID NO: 567367 - DNA, 25 bp, Homo sapien
tactacaggaggaggtgagaaccga

SEQ ID NO: 567368 - DNA, 25 bp, Homo sapien
tcttcctcgctgcaggttgacgtgg

SEQ ID NO: 567369 - DNA, 25 bp, Homo sapien
tgttaataatcggagagcagctgcg

SEQ ID NO: 567370 - DNA, 25 bp, Homo sapien
ttgcccagggaacactttggagcct

SEQ ID NO: 567371 - DNA, 25 bp, Homo sapien
tggagctaaggagttggagccccga

SEQ ID NO: 567372 - DNA, 25 bp, Homo sapien
aagattgagccaaaggttgggagca

SEQ ID NO: 567373 - DNA, 25 bp, Homo sapien
tgggagcagtgaatgctggagctaa

SEQ ID NO: 567374 - DNA, 25 bp, Homo sapien
ctccagcccatgaacgttgctggag

SEQ ID NO: 567375 - DNA, 25 bp, Homo sapien
cctccagcccatgaacgttgctgga

SEQ ID NO: 567376 - DNA, 25 bp, Homo sapien
gccctccagcccatgaacgttgctg

SEQ ID NO: 567377 - DNA, 25 bp, Homo sapien
ccctccagcccatgaacgttgctgg

SEQ ID NO: 567378 - DNA, 25 bp, Homo sapien
gagacacattggtcggtccttccat

SEQ ID NO: 567379 - DNA, 25 bp, Homo sapien
tggagacacattggtcggtccttcc

SEQ ID NO: 567380 - DNA, 25 bp, Homo sapien
gttgctggagacacattggtcggtc

SEQ ID NO: 567381 - DNA, 25 bp, Homo sapien
tgctggagacacattggtcggtcct

SEQ ID NO: 567382 - DNA, 25 bp, Homo sapien
tgactttctgcggtcctgtgtcgca

SEQ ID NO: 567383 - DNA, 25 bp, Homo sapien
ccggtgctggcgacattggtctgac

SEQ ID NO: 567384 - DNA, 25 bp, Homo sapien
gtgtcgcatctccatgccaggtgca

SEQ ID NO: 567385 - DNA, 25 bp, Homo sapien
tctgcctttgtcttgatgggcctgt

SEQ ID NO: 567386 - DNA, 25 bp, Homo sapien
tgctaccacctagatgacccttgag

SEQ ID NO: 567387 - DNA, 25 bp, Homo sapien
tgtgattccacacatacgaggcccc

SEQ ID NO: 567388 - DNA, 25 bp, Homo sapien
agaaggaactcttatcacctgctac

SEQ ID NO: 567389 - DNA, 25 bp, Homo sapien
caaaaggtcggattctgtgattcca

SEQ ID NO: 567390 - DNA, 25 bp, Homo sapien
caaaatgctattccatgaagacgcc

SEQ ID NO: 567391 - DNA, 25 bp, Homo sapien
cagagctgttccaaaatgccagtgg

SEQ ID NO: 567392 - DNA, 25 bp, Homo sapien
aacttggcccagtatgtgtgagaac

SEQ ID NO: 567393 - DNA, 25 bp, Homo sapien
gccactccctggtgatccaacttgg

SEQ ID NO: 567394 - DNA, 25 bp, Homo sapien
atcgccatcgcggtccacagtcagg

SEQ ID NO: 567395 - DNA, 25 bp, Homo sapien
ccgctgttctgtgtgtgaggccccg

SEQ ID NO: 567396 - DNA, 25 bp, Homo sapien
gccatcgcggtccacagtcaggatg

SEQ ID NO: 567397 - DNA, 25 bp, Homo sapien
tgtgtgaggccccggccatcgccat

SEQ ID NO: 567398 - DNA, 25 bp, Homo sapien
gccagcctcagaatcaactatttaa

SEQ ID NO: 567399 - DNA, 25 bp, Homo sapien
tatacaccaactctgggatccagga

SEQ ID NO: 567400 - DNA, 25 bp, Homo sapien
cctgccgtgcgcttccataaaggct

SEQ ID NO: 567401 - DNA, 25 bp, Homo sapien
tttttccctgcaaactgaactgaga

SEQ ID NO: 567402 - DNA, 25 bp, Homo sapien
cactgataatcacactgcggtaggt

SEQ ID NO: 567403 - DNA, 25 bp, Homo sapien
gctttctacgccaatgttatgccag

SEQ ID NO: 567404 - DNA, 25 bp, Homo sapien
gagatttaacccctccactgctggg

SEQ ID NO: 567405 - DNA, 25 bp, Homo sapien
tgagctgtactcttctgactgcccc

SEQ ID NO: 567406 - DNA, 25 bp, Homo sapien
gaagactcacaagccctggagagca

SEQ ID NO: 567407 - DNA, 25 bp, Homo sapien
caagaagagcacgttggcaaggacg

SEQ ID NO: 567408 - DNA, 25 bp, Homo sapien
gacgctgctggaatgcgcatgaaga

SEQ ID NO: 567409 - DNA, 25 bp, Homo sapien
agacagtgactttcagcacccctgg

SEQ ID NO: 567410 - DNA, 25 bp, Homo sapien
ccagaagcctcaaagggtggggtca

SEQ ID NO: 567411 - DNA, 25 bp, Homo sapien
ttccacatactcgagagtccctgca

SEQ ID NO: 567412 - DNA, 25 bp, Homo sapien
gcctcaaagggtggggtcatttcca

SEQ ID NO: 567413 - DNA, 25 bp, Homo sapien
ggtcatttccacatactcgagagtc

SEQ ID NO: 567414 - DNA, 25 bp, Homo sapien
cagatccgatacctgagggctgggc

SEQ ID NO: 567415 - DNA, 25 bp, Homo sapien
agagcttcataaccacgcaaggacg

SEQ ID NO: 567416 - DNA, 25 bp, Homo sapien
gaggaaacacatggcagcaactgga

SEQ ID NO: 567417 - DNA, 25 bp, Homo sapien
gaacgtggcattgaaagtccgaggc

SEQ ID NO: 567418 - DNA, 25 bp, Homo sapien
aacccgtgtgctggtggtatccgtg

SEQ ID NO: 567419 - DNA, 25 bp, Homo sapien
ggtcattgctcaggagggactcagc

SEQ ID NO: 567420 - DNA, 25 bp, Homo sapien
tgaggctcgaaagatccagctctgt

SEQ ID NO: 567421 - DNA, 25 bp, Homo sapien
gaagggaagatacgacctggactcc

SEQ ID NO: 567422 - DNA, 25 bp, Homo sapien
agctgagttgcccaaccgagggatt

SEQ ID NO: 567423 - DNA, 25 bp, Homo sapien
aatctgcgccaacagctgagttgcc

SEQ ID NO: 567424 - DNA, 25 bp, Homo sapien
agtggggaaatctgcgccaacagct

SEQ ID NO: 567425 - DNA, 25 bp, Homo sapien
ttgcccaaccgagggatttcaagct

SEQ ID NO: 567426 - DNA, 25 bp, Homo sapien
tataaagcatcaagatacaagtacc

SEQ ID NO: 567427 - DNA, 25 bp, Homo sapien
cgtcgagagtcaggattataaagca

SEQ ID NO: 567428 - DNA, 25 bp, Homo sapien
tacaagtaccaagtgggaggaccaa

SEQ ID NO: 567429 - DNA, 25 bp, Homo sapien
tacatgtagccaacattgctgcaat

SEQ ID NO: 567430 - DNA, 25 bp, Homo sapien
acaacccagggtgctgaaacggtca

SEQ ID NO: 567431 - DNA, 25 bp, Homo sapien
ctgaaacggtcagaggtgcaggtgc

SEQ ID NO: 567432 - DNA, 25 bp, Homo sapien
gacgtggtaacaacccagggtgctg

SEQ ID NO: 567433 - DNA, 25 bp, Homo sapien
caagaaatgtcagagttgtaggacg

SEQ ID NO: 567434 - DNA, 25 bp, Homo sapien
gggtctcgactctgcagattgggct

SEQ ID NO: 567435 - DNA, 25 bp, Homo sapien
gttccttgctcctttcagatcacag

SEQ ID NO: 567436 - DNA, 25 bp, Homo sapien
tgaggagaccacacacgttgacctc

SEQ ID NO: 567437 - DNA, 25 bp, Homo sapien
tctgctgcgggtgtcattctggaaa

SEQ ID NO: 567438 - DNA, 25 bp, Homo sapien
tatgactggatatatccactgtgtg

SEQ ID NO: 567439 - DNA, 25 bp, Homo sapien
atccactgtgtgtgacggcctctca

SEQ ID NO: 567440 - DNA, 25 bp, Homo sapien
cttggcgctggtctcaaagcacatt

SEQ ID NO: 567441 - DNA, 25 bp, Homo sapien
gaggtccacattgtagccggtcttg

SEQ ID NO: 567442 - DNA, 25 bp, Homo sapien
ctcagcggccggcacatcctgctca

SEQ ID NO: 567443 - DNA, 25 bp, Homo sapien
tttataaagggccaccgcatcctcc

SEQ ID NO: 567444 - DNA, 25 bp, Homo sapien
acggtccccagcgtccatattggga

SEQ ID NO: 567445 - DNA, 25 bp, Homo sapien
gggagacacggtccccagcgtccat

SEQ ID NO: 567446 - DNA, 25 bp, Homo sapien
catattgggactgcactcttccttc

SEQ ID NO: 567447 - DNA, 25 bp, Homo sapien
cagcgtccatattgggactgcactc

SEQ ID NO: 567448 - DNA, 25 bp, Homo sapien
gagcccaggccgtggaactgctccc

SEQ ID NO: 567449 - DNA, 25 bp, Homo sapien
ataggtgaggatgatggcggccgcc

SEQ ID NO: 567450 - DNA, 25 bp, Homo sapien
ctctgccggtgattcacatcatagg

SEQ ID NO: 567451 - DNA, 25 bp, Homo sapien
ccccggcagtacatggagcccaggc

SEQ ID NO: 567452 - DNA, 25 bp, Homo sapien
tagaagctgactcgggaatgcagac

SEQ ID NO: 567453 - DNA, 25 bp, Homo sapien
tgcaagggaacgtcccacagggatg

SEQ ID NO: 567454 - DNA, 25 bp, Homo sapien
cagactccggaagcaaagtgtgccc

SEQ ID NO: 567455 - DNA, 25 bp, Homo sapien
tgttcaggaagaacgggcctcaggc

SEQ ID NO: 567456 - DNA, 25 bp, Homo sapien
aatgatttgtccagccaaagaagcc

SEQ ID NO: 567457 - DNA, 25 bp, Homo sapien
tttacacaacaagaagttgtccagt

SEQ ID NO: 567458 - DNA, 25 bp, Homo sapien
cagttcattgtccttcttcagatat

SEQ ID NO: 567459 - DNA, 25 bp, Homo sapien
caattgtccgcaccttgaagaggaa

SEQ ID NO: 567460 - DNA, 25 bp, Homo sapien
caagagcaaaatgcctgaatccact

SEQ ID NO: 567461 - DNA, 25 bp, Homo sapien
tcacgttcttactctgagaccaagc

SEQ ID NO: 567462 - DNA, 25 bp, Homo sapien
aggcaagagccccacaatggtcacc

SEQ ID NO: 567463 - DNA, 25 bp, Homo sapien
gagaccgtgaaagaaccatcctgtg

SEQ ID NO: 567464 - DNA, 25 bp, Homo sapien
gatgtcctccgggttcacaaacaac

SEQ ID NO: 567465 - DNA, 25 bp, Homo sapien
gaactgaaccttcgtagcctttgat

SEQ ID NO: 567466 - DNA, 25 bp, Homo sapien
gcacatcagtggaagcttaggttga

SEQ ID NO: 567467 - DNA, 25 bp, Homo sapien
caggcatcagtgagactatgtggta

SEQ ID NO: 567468 - DNA, 25 bp, Homo sapien
tggagggtgacatctaggaagacac

SEQ ID NO: 567469 - DNA, 25 bp, Homo sapien
caggtaaagcgcctcaccgagggaa

SEQ ID NO: 567470 - DNA, 25 bp, Homo sapien
gaagacacatggagaaccagagagg

SEQ ID NO: 567471 - DNA, 25 bp, Homo sapien
gagggaaagtgacgcaccacacacc

SEQ ID NO: 567472 - DNA, 25 bp, Homo sapien
ccatgcctcaaccacagacaaccaa

SEQ ID NO: 567473 - DNA, 25 bp, Homo sapien
ttttgacatgatgcccatgcctcaa

SEQ ID NO: 567474 - DNA, 25 bp, Homo sapien
ttcgaacgaccctcttgccttagct

SEQ ID NO: 567475 - DNA, 25 bp, Homo sapien
tcctgggttcgaacgaccctcttgc

SEQ ID NO: 567476 - DNA, 25 bp, Homo sapien
gacttctagttgagacagacagagg

SEQ ID NO: 567477 - DNA, 25 bp, Homo sapien
tgcaaggctcatgccaaagctcaga

SEQ ID NO: 567478 - DNA, 25 bp, Homo sapien
gcaaacgtgaatcagcctgtgcctt

SEQ ID NO: 567479 - DNA, 25 bp, Homo sapien
gacagaggaactgtttcctcgcagc

SEQ ID NO: 567480 - DNA, 25 bp, Homo sapien
gaagtggcgcaagtctgggctcccc

SEQ ID NO: 567481 - DNA, 25 bp, Homo sapien
cggcacagggaagtggcgcaagtct

SEQ ID NO: 567482 - DNA, 25 bp, Homo sapien
agggaagtggcgcaagtctgggctc

SEQ ID NO: 567483 - DNA, 25 bp, Homo sapien
gcacagggaagtggcgcaagtctgg

SEQ ID NO: 567484 - DNA, 25 bp, Homo sapien
ctgcctcggttatgacaattacaac

SEQ ID NO: 567485 - DNA, 25 bp, Homo sapien
ttctgcctcggttatgacaattaca

SEQ ID NO: 567486 - DNA, 25 bp, Homo sapien
cattctgcctcggttatgacaatta

SEQ ID NO: 567487 - DNA, 25 bp, Homo sapien
tctgcctcggttatgacaattacaa

SEQ ID NO: 567488 - DNA, 25 bp, Homo sapien
ttcaagtacccggtcaggccacagg

SEQ ID NO: 567489 - DNA, 25 bp, Homo sapien
ccttcaagtacccggtcaggccaca

SEQ ID NO: 567490 - DNA, 25 bp, Homo sapien
tcccttcaagtacccggtcaggcca

SEQ ID NO: 567491 - DNA, 25 bp, Homo sapien
tcaagtacccggtcaggccacaggc

SEQ ID NO: 567492 - DNA, 25 bp, Homo sapien
tatcatgttcctacgggtacgtgaa

SEQ ID NO: 567493 - DNA, 25 bp, Homo sapien
cagccacagaggagcgtctctggtt

SEQ ID NO: 567494 - DNA, 25 bp, Homo sapien
tctcaaaggatatcatgttcctacg

SEQ ID NO: 567495 - DNA, 25 bp, Homo sapien
aagcagccacagaggagcgtctctg

SEQ ID NO: 567496 - DNA, 25 bp, Homo sapien
catataccgctgcagcagcgacgtc

SEQ ID NO: 567497 - DNA, 25 bp, Homo sapien
agcacgatcttgctgtcgggcttcc

SEQ ID NO: 567498 - DNA, 25 bp, Homo sapien
gtgctgaccgtgtccgggaagcgcc

SEQ ID NO: 567499 - DNA, 25 bp, Homo sapien
taggagcgccactgcttcaggtaga

SEQ ID NO: 567500 - DNA, 25 bp, Homo sapien
tcgccgggacccggattctcgtgaa

SEQ ID NO: 567501 - DNA, 25 bp, Homo sapien
tctcgtgaacgctccgggaccttcg

SEQ ID NO: 567502 - DNA, 25 bp, Homo sapien
cggattctcgtgaacgctccgggac

SEQ ID NO: 567503 - DNA, 25 bp, Homo sapien
gctggaggagcggaccccggactcg

SEQ ID NO: 567504 - DNA, 25 bp, Homo sapien
ctgggtgcagagcacggagcccacg

SEQ ID NO: 567505 - DNA, 25 bp, Homo sapien
tgcagagcacggagcccacgtcggg

SEQ ID NO: 567506 - DNA, 25 bp, Homo sapien
tcaagagaggaagcgcgtgtgcgcg

SEQ ID NO: 567507 - DNA, 25 bp, Homo sapien
ctcaagagaggaagcgcgtgtgcgc

SEQ ID NO: 567508 - DNA, 25 bp, Homo sapien
ctggacctcgccgtttcgcaagcat

SEQ ID NO: 567509 - DNA, 25 bp, Homo sapien
ccagccgaggctcgggactgctgca

SEQ ID NO: 567510 - DNA, 25 bp, Homo sapien
atccgagttctccagccgaggctcg

SEQ ID NO: 567511 - DNA, 25 bp, Homo sapien
gccgtttcgcaagcatccgagttct

SEQ ID NO: 567512 - DNA, 25 bp, Homo sapien
cattcgttcatggaggtcgcctgca

SEQ ID NO: 567513 - DNA, 25 bp, Homo sapien
cctgcactaggaactgggacttgat

SEQ ID NO: 567514 - DNA, 25 bp, Homo sapien
gggtctgagagaggatcctgcacta

SEQ ID NO: 567515 - DNA, 25 bp, Homo sapien
tatctccggtcgagtgctagaggct

SEQ ID NO: 567516 - DNA, 25 bp, Homo sapien
gcggattaccaaggtgtgcctataa

SEQ ID NO: 567517 - DNA, 25 bp, Homo sapien
ttgcagttagcaggccgttaggaaa

SEQ ID NO: 567518 - DNA, 25 bp, Homo sapien
aggacggttcctagggcttagcaag

SEQ ID NO: 567519 - DNA, 25 bp, Homo sapien
gaatagttccttattccgtctgcaa

SEQ ID NO: 567520 - DNA, 25 bp, Homo sapien
gtctgcatcagggtgctgatggcaa

SEQ ID NO: 567521 - DNA, 25 bp, Homo sapien
gaccccctgcccgtgttctgtgagt

SEQ ID NO: 567522 - DNA, 25 bp, Homo sapien
gggtgtccctccgttgcagggtcta

SEQ ID NO: 567523 - DNA, 25 bp, Homo sapien
atggcaaagcctccgggtgtccctc

SEQ ID NO: 567524 - DNA, 25 bp, Homo sapien
gagctgcagtgggagtgaagttgca

SEQ ID NO: 567525 - DNA, 25 bp, Homo sapien
agagaagcgtcccagccatggtcaa

SEQ ID NO: 567526 - DNA, 25 bp, Homo sapien
catggtcaagcagatcaataactgc

SEQ ID NO: 567527 - DNA, 25 bp, Homo sapien
ctgaggagagaagcgtcccagccat

SEQ ID NO: 567528 - DNA, 25 bp, Homo sapien
gatggtaactcagcctttttgtcag

SEQ ID NO: 567529 - DNA, 25 bp, Homo sapien
attttactgttacggcctaaggctg

SEQ ID NO: 567530 - DNA, 25 bp, Homo sapien
tgttttcctccgttctgtactctag

SEQ ID NO: 567531 - DNA, 25 bp, Homo sapien
catttataatagtcctgtatgttaa

SEQ ID NO: 567532 - DNA, 25 bp, Homo sapien
tgacagcacctataggaaacagaag

SEQ ID NO: 567533 - DNA, 25 bp, Homo sapien
gccctccaaaccagagcagataaga

SEQ ID NO: 567534 - DNA, 25 bp, Homo sapien
taagagaactccaatcaggaacctg

SEQ ID NO: 567535 - DNA, 25 bp, Homo sapien
tttcctgccatgaagtaaagctcag

SEQ ID NO: 567536 - DNA, 25 bp, Homo sapien
tgtcaatcatctagaaccgggtgtg

SEQ ID NO: 567537 - DNA, 25 bp, Homo sapien
tccaatggctgtgtttccggcgacg

SEQ ID NO: 567538 - DNA, 25 bp, Homo sapien
tgcgactgggcaagtacagaccctg

SEQ ID NO: 567539 - DNA, 25 bp, Homo sapien
tcccggtctgggaaagatgctcgcc

SEQ ID NO: 567540 - DNA, 25 bp, Homo sapien
tcgtctgaggcggttccgagctgca

SEQ ID NO: 567541 - DNA, 25 bp, Homo sapien
gagaattcccatacacaggcatacg

SEQ ID NO: 567542 - DNA, 25 bp, Homo sapien
catacgtgacgttatgaggccggtg

SEQ ID NO: 567543 - DNA, 25 bp, Homo sapien
gcctcgctcggtgttgccctgtatg

SEQ ID NO: 567544 - DNA, 25 bp, Homo sapien
gccctggacctgtctccgagtacat

SEQ ID NO: 567545 - DNA, 25 bp, Homo sapien
actgtgtgccctagccctggacctg

SEQ ID NO: 567546 - DNA, 25 bp, Homo sapien
taagcagcttgtgccgcctggcttt

SEQ ID NO: 567547 - DNA, 25 bp, Homo sapien
tacatagacgtttcctgtgtgcctc

SEQ ID NO: 567548 - DNA, 25 bp, Homo sapien
cctccgacatgatcgccgaggtggg

SEQ ID NO: 567549 - DNA, 25 bp, Homo sapien
aggcagtgcaaccaccaagccttcc

SEQ ID NO: 567550 - DNA, 25 bp, Homo sapien
gggccgccttcagcaagctctttga

SEQ ID NO: 567551 - DNA, 25 bp, Homo sapien
cctctcctggtggccgcgtttggcg

SEQ ID NO: 567552 - DNA, 25 bp, Homo sapien
tctccggtgtccgtgtctacacagg

SEQ ID NO: 567553 - DNA, 25 bp, Homo sapien
tcacgtatgcttaggaagcagcaca

SEQ ID NO: 567554 - DNA, 25 bp, Homo sapien
gaaagacagtatcgtggtcacgtat

SEQ ID NO: 567555 - DNA, 25 bp, Homo sapien
agcagcacagccgtgtccttaggga

SEQ ID NO: 567556 - DNA, 25 bp, Homo sapien
gatggttttcctggagcggcctgac

SEQ ID NO: 567557 - DNA, 25 bp, Homo sapien
tcagccaacactcttcatggcagtg

SEQ ID NO: 567558 - DNA, 25 bp, Homo sapien
tcgacctcgggttagcttctgttgt

SEQ ID NO: 567559 - DNA, 25 bp, Homo sapien
tgacgttgacgtgttctctggtccc

SEQ ID NO: 567560 - DNA, 25 bp, Homo sapien
tcagtagcatctttccacagcaagg

SEQ ID NO: 567561 - DNA, 25 bp, Homo sapien
gactcttgagtgataccctgtgatg

SEQ ID NO: 567562 - DNA, 25 bp, Homo sapien
catggtacggtttcgtgcctgacgc

SEQ ID NO: 567563 - DNA, 25 bp, Homo sapien
tgtgatgcagacatgccccagatgg

SEQ ID NO: 567564 - DNA, 25 bp, Homo sapien
tctgtgtgagattggcctcctcgcc

SEQ ID NO: 567565 - DNA, 25 bp, Homo sapien
cctctcccgtggtggctgcaataaa

SEQ ID NO: 567566 - DNA, 25 bp, Homo sapien
cttgaaggataagcccaaggcagcc

SEQ ID NO: 567567 - DNA, 25 bp, Homo sapien
gaatatctaagcctgtctgtgtgag

SEQ ID NO: 567568 - DNA, 25 bp, Homo sapien
gtgggcggcccgtaatgccccagta

SEQ ID NO: 567569 - DNA, 25 bp, Homo sapien
ccgtaatgccccagtactgagcagc

SEQ ID NO: 567570 - DNA, 25 bp, Homo sapien
ctgtcgagatgcctcattgtaagga

SEQ ID NO: 567571 - DNA, 25 bp, Homo sapien
ctgagcagccctgtcgagatgcctc

SEQ ID NO: 567572 - DNA, 25 bp, Homo sapien
agcaagcccgtatccccagtcacgg

SEQ ID NO: 567573 - DNA, 25 bp, Homo sapien
ctcagggtcacggttaaatgatgag

SEQ ID NO: 567574 - DNA, 25 bp, Homo sapien
agggtcacggttaaatgatgagcaa

SEQ ID NO: 567575 - DNA, 25 bp, Homo sapien
gcaagcccgtatccccagtcacggg

SEQ ID NO: 567576 - DNA, 25 bp, Homo sapien
tttaatgctgacctagcagccccga

SEQ ID NO: 567577 - DNA, 25 bp, Homo sapien
tactttaatgctgacctagcagccc

SEQ ID NO: 567578 - DNA, 25 bp, Homo sapien
ttactttaatgctgacctagcagcc

SEQ ID NO: 567579 - DNA, 25 bp, Homo sapien
gccttactttaatgctgacctagca

SEQ ID NO: 567580 - DNA, 25 bp, Homo sapien
tgagaagcatgggtgcgtcttgtcg

SEQ ID NO: 567581 - DNA, 25 bp, Homo sapien
cgtcttgtcgtgagcaggttcatgg

SEQ ID NO: 567582 - DNA, 25 bp, Homo sapien
gtgcgtcttgtcgtgagcaggttca

SEQ ID NO: 567583 - DNA, 25 bp, Homo sapien
gcatgggtgcgtcttgtcgtgagca

SEQ ID NO: 567584 - DNA, 25 bp, Homo sapien
tccagcagttcccacgtggatgttg

SEQ ID NO: 567585 - DNA, 25 bp, Homo sapien
tcagcccgctgatttttggtctttt

SEQ ID NO: 567586 - DNA, 25 bp, Homo sapien
ttcccacgtggatgttgtactgctt

SEQ ID NO: 567587 - DNA, 25 bp, Homo sapien
cagcccgctgatttttggtcttttg

SEQ ID NO: 567588 - DNA, 25 bp, Homo sapien
gtccctgaccttggtgcggcactca

SEQ ID NO: 567589 - DNA, 25 bp, Homo sapien
gctcctggggtgatgtccctgacct

SEQ ID NO: 567590 - DNA, 25 bp, Homo sapien
gtgatgtccctgaccttggtgcggc

SEQ ID NO: 567591 - DNA, 25 bp, Homo sapien
gatgtccctgaccttggtgcggcac

SEQ ID NO: 567592 - DNA, 25 bp, Homo sapien
gcagggtgtcgcatgcttccagcag

SEQ ID NO: 567593 - DNA, 25 bp, Homo sapien
cttgatgttgatgccgtgggcagtc

SEQ ID NO: 567594 - DNA, 25 bp, Homo sapien
caggccccggcgcagggtgtcgcat

SEQ ID NO: 567595 - DNA, 25 bp, Homo sapien
cggcgcagggtgtcgcatgcttcca

SEQ ID NO: 567596 - DNA, 25 bp, Homo sapien
tgccggaaccgcaccagctcgtcca

SEQ ID NO: 567597 - DNA, 25 bp, Homo sapien
tcgggcatggccagcgcaaactgcc

SEQ ID NO: 567598 - DNA, 25 bp, Homo sapien
tggccagcgcaaactgccggacctt

SEQ ID NO: 567599 - DNA, 25 bp, Homo sapien
tgccggaccttctgccggaaccgca

SEQ ID NO: 567600 - DNA, 25 bp, Homo sapien
aagccagcagggcgcggttacgtcc

SEQ ID NO: 567601 - DNA, 25 bp, Homo sapien
gggcaaggctccactcaactctgag

SEQ ID NO: 567602 - DNA, 25 bp, Homo sapien
gactgtggattgtggatgccccctc

SEQ ID NO: 567603 - DNA, 25 bp, Homo sapien
gtacagcccgcgagcgctgggctct

SEQ ID NO: 567604 - DNA, 25 bp, Homo sapien
tcctcactcgggagttggaagaaag

SEQ ID NO: 567605 - DNA, 25 bp, Homo sapien
gccctgaacacaaacgctccctggc

SEQ ID NO: 567606 - DNA, 25 bp, Homo sapien
gagtgatcctcactcgggagttgga

SEQ ID NO: 567607 - DNA, 25 bp, Homo sapien
ccaagcaaggctgagtgatcctcac

SEQ ID NO: 567608 - DNA, 25 bp, Homo sapien
caattgtggccgaggtatcaggagc

SEQ ID NO: 567609 - DNA, 25 bp, Homo sapien
ggcaaatggtctgagattcacagcc

SEQ ID NO: 567610 - DNA, 25 bp, Homo sapien
gatttgcgcagaaggcctcgcgctg

SEQ ID NO: 567611 - DNA, 25 bp, Homo sapien
gactgagcgcttgcacacgtgtgtt

SEQ ID NO: 567612 - DNA, 25 bp, Homo sapien
taagtctaccaggtgatcaacaggt

SEQ ID NO: 567613 - DNA, 25 bp, Homo sapien
cagcgagacatgtttggcccagagc

SEQ ID NO: 567614 - DNA, 25 bp, Homo sapien
aataaacgagtttcaggtgagcctg

SEQ ID NO: 567615 - DNA, 25 bp, Homo sapien
tgtgattggcaacagacgccggact

SEQ ID NO: 567616 - DNA, 25 bp, Homo sapien
cattctgagagtctttgaacataaa

SEQ ID NO: 567617 - DNA, 25 bp, Homo sapien
gctggcgacattctgttgctgagat

SEQ ID NO: 567618 - DNA, 25 bp, Homo sapien
ggttctgcgcacgagagtttgccaa

SEQ ID NO: 567619 - DNA, 25 bp, Homo sapien
tgaacataaacgtgtgtgcagagct

SEQ ID NO: 567620 - DNA, 25 bp, Homo sapien
aggttattgtcccaacatggagaaa

SEQ ID NO: 567621 - DNA, 25 bp, Homo sapien
gcatcataatgctctattccaagtt

SEQ ID NO: 567622 - DNA, 25 bp, Homo sapien
ggttattgtcccaacatggagaaaa

SEQ ID NO: 567623 - DNA, 25 bp, Homo sapien
acattagtgtggcatcataatgctc

SEQ ID NO: 567624 - DNA, 25 bp, Homo sapien
aactgttcaaagtaagagatgatgg

SEQ ID NO: 567625 - DNA, 25 bp, Homo sapien
gatttgccagagaaattccaacagt

SEQ ID NO: 567626 - DNA, 25 bp, Homo sapien
gccagagaaattccaacagtttcaa

SEQ ID NO: 567627 - DNA, 25 bp, Homo sapien
gatgatggcaccaaacacagcagga

SEQ ID NO: 567628 - DNA, 25 bp, Homo sapien
gagatcatgtcgcagaagctcctta

SEQ ID NO: 567629 - DNA, 25 bp, Homo sapien
taagagatcatgtcgcagaagctcc

SEQ ID NO: 567630 - DNA, 25 bp, Homo sapien
gatcatgtcgcagaagctccttaaa

SEQ ID NO: 567631 - DNA, 25 bp, Homo sapien
ctgtaagagatcatgtcgcagaagc

SEQ ID NO: 567632 - DNA, 25 bp, Homo sapien
gcagtgggcaaacggaattcaatgt

SEQ ID NO: 567633 - DNA, 25 bp, Homo sapien
caaacggaattcaatgtcaaaagac

SEQ ID NO: 567634 - DNA, 25 bp, Homo sapien
tgggcaaacggaattcaatgtcaaa

SEQ ID NO: 567635 - DNA, 25 bp, Homo sapien
gatggcagtgggcaaacggaattca

SEQ ID NO: 567636 - DNA, 25 bp, Homo sapien
tgcagtatttggaccgaaggcaccc

SEQ ID NO: 567637 - DNA, 25 bp, Homo sapien
ggaaatcctggtacgtggctcacat

SEQ ID NO: 567638 - DNA, 25 bp, Homo sapien
tagctcatcaggcttcgcgggtgaa

SEQ ID NO: 567639 - DNA, 25 bp, Homo sapien
gcttcccgggtcatcaaaggtcacg

SEQ ID NO: 567640 - DNA, 25 bp, Homo sapien
ccgcaaggccacctgttcgttgagc

SEQ ID NO: 567641 - DNA, 25 bp, Homo sapien
tggcagcaggaccgcaaggccacct

SEQ ID NO: 567642 - DNA, 25 bp, Homo sapien
atgcccctggcagcaggaccgcaag

SEQ ID NO: 567643 - DNA, 25 bp, Homo sapien
caaggccacctgttcgttgagctac

SEQ ID NO: 567644 - DNA, 25 bp, Homo sapien
ggatggcatcaaccaccctgggtgt

SEQ ID NO: 567645 - DNA, 25 bp, Homo sapien
tcagggacgccctgagctgtccatt

SEQ ID NO: 567646 - DNA, 25 bp, Homo sapien
ccctgggtgtgtcaaaatcatctgc

SEQ ID NO: 567647 - DNA, 25 bp, Homo sapien
cacggccctcttggtgctggagagc

SEQ ID NO: 567648 - DNA, 25 bp, Homo sapien
tagattttggctcctcacagtcagg

SEQ ID NO: 567649 - DNA, 25 bp, Homo sapien
ggctgaccactcacaaagagaggct

SEQ ID NO: 567650 - DNA, 25 bp, Homo sapien
ttaaaatacaagacacacgtgggca

SEQ ID NO: 567651 - DNA, 25 bp, Homo sapien
ggaagactctgcatgccgggatgaa

SEQ ID NO: 567652 - DNA, 25 bp, Homo sapien
cccacagcatcgcttccctgacgga

SEQ ID NO: 567653 - DNA, 25 bp, Homo sapien
ctcccacagcatcgcttccctgacg

SEQ ID NO: 567654 - DNA, 25 bp, Homo sapien
tctcccacagcatcgcttccctgac

SEQ ID NO: 567655 - DNA, 25 bp, Homo sapien
ccacagcatcgcttccctgacggag

SEQ ID NO: 567656 - DNA, 25 bp, Homo sapien
tgccccttcatgtaggcacgtgcgt

SEQ ID NO: 567657 - DNA, 25 bp, Homo sapien
gcatggcgctgtcactgtagtcgat

SEQ ID NO: 567658 - DNA, 25 bp, Homo sapien
ctgagcttggagcatggcgctgtca

SEQ ID NO: 567659 - DNA, 25 bp, Homo sapien
aggcacgtgcgtcctccaggaaaga

SEQ ID NO: 567660 - DNA, 25 bp, Homo sapien
gccctccagtgaccgcgagtcccta

SEQ ID NO: 567661 - DNA, 25 bp, Homo sapien
acggagagcgggacatgtggctctc

SEQ ID NO: 567662 - DNA, 25 bp, Homo sapien
cgcgagtccctaggcccactggaca

SEQ ID NO: 567663 - DNA, 25 bp, Homo sapien
atgtggctctcacgccctccagtga

SEQ ID NO: 567664 - DNA, 25 bp, Homo sapien
gcttccagccaagaggtgcatttcc

SEQ ID NO: 567665 - DNA, 25 bp, Homo sapien
atggaggtgcggatgaatggctagc

SEQ ID NO: 567666 - DNA, 25 bp, Homo sapien
tgcatttccactgactggatggagg

SEQ ID NO: 567667 - DNA, 25 bp, Homo sapien
gagacatgctcccagtgcttccagc

SEQ ID NO: 567668 - DNA, 25 bp, Homo sapien
cagaggcacctctagggaaggccct

SEQ ID NO: 567669 - DNA, 25 bp, Homo sapien
gaggcacctctagggaaggccctcc

SEQ ID NO: 567670 - DNA, 25 bp, Homo sapien
aggccctcccgagggaaagtgcctg

SEQ ID NO: 567671 - DNA, 25 bp, Homo sapien
gtcagaggcacctctagggaaggcc

SEQ ID NO: 567672 - DNA, 25 bp, Homo sapien
ttaaagataatattcggggactgat

SEQ ID NO: 567673 - DNA, 25 bp, Homo sapien
tttgaatagcttgatagaaaagaga

SEQ ID NO: 567674 - DNA, 25 bp, Homo sapien
gactgatagagttgatgcatgggag

SEQ ID NO: 567675 - DNA, 25 bp, Homo sapien
gaaacccacaaagcgatctgacaaa

SEQ ID NO: 567676 - DNA, 25 bp, Homo sapien
tagaaatccctcactggcagatcgg

SEQ ID NO: 567677 - DNA, 25 bp, Homo sapien
cagcacagactgcaagggatgccac

SEQ ID NO: 567678 - DNA, 25 bp, Homo sapien
tctccaaagtgtcagcgcagcacag

SEQ ID NO: 567679 - DNA, 25 bp, Homo sapien
gctgctttcatcacgcgtaagtgca

SEQ ID NO: 567680 - DNA, 25 bp, Homo sapien
tgggaggaaccgtcatcacccatcc

SEQ ID NO: 567681 - DNA, 25 bp, Homo sapien
ccaggccagtgctagacaactcctg

SEQ ID NO: 567682 - DNA, 25 bp, Homo sapien
cccatccaggagaccttgctctgct

SEQ ID NO: 567683 - DNA, 25 bp, Homo sapien
tcacccatccaggagaccttgctct

SEQ ID NO: 567684 - DNA, 25 bp, Homo sapien
ggtgctgcgggttcacgacttgtcc

SEQ ID NO: 567685 - DNA, 25 bp, Homo sapien
gcagggtcacgtttgagggctccca

SEQ ID NO: 567686 - DNA, 25 bp, Homo sapien
gactcgagcttgacgaggaagccca

SEQ ID NO: 567687 - DNA, 25 bp, Homo sapien
cgacttgtccagacccagagagaag

SEQ ID NO: 567688 - DNA, 25 bp, Homo sapien
ctgagcggtagctgctccgcaggca

SEQ ID NO: 567689 - DNA, 25 bp, Homo sapien
ggcagaagaaccggaagacatcggg

SEQ ID NO: 567690 - DNA, 25 bp, Homo sapien
gacatcgggggaaaaggtcttcaga

SEQ ID NO: 567691 - DNA, 25 bp, Homo sapien
cagaagaaccggaagacatcggggg

SEQ ID NO: 567692 - DNA, 25 bp, Homo sapien
gagacaggcagtcacgaggctttgc

SEQ ID NO: 567693 - DNA, 25 bp, Homo sapien
tttacgcttcgcactgttcagagaa

SEQ ID NO: 567694 - DNA, 25 bp, Homo sapien
cataagttatctctacctatcaaga

SEQ ID NO: 567695 - DNA, 25 bp, Homo sapien
tgttactttctacaattacataagt

SEQ ID NO: 567696 - DNA, 25 bp, Homo sapien
agaattgcgtttccgtctccctcgg

SEQ ID NO: 567697 - DNA, 25 bp, Homo sapien
tgcctgtccactgcgcaggaagctg

SEQ ID NO: 567698 - DNA, 25 bp, Homo sapien
tgtccactgcgcaggaagctgtcgc

SEQ ID NO: 567699 - DNA, 25 bp, Homo sapien
cgctgaccttgctggagtgagaatt

SEQ ID NO: 567700 - DNA, 25 bp, Homo sapien
agcaaattgtaaggctgggtccaca

SEQ ID NO: 567701 - DNA, 25 bp, Homo sapien
aagcaaattgtaaggctgggtccac

SEQ ID NO: 567702 - DNA, 25 bp, Homo sapien
ttgacaccctccctcacccgaggtg

SEQ ID NO: 567703 - DNA, 25 bp, Homo sapien
ggttccaattaacgcacacagccat

SEQ ID NO: 567704 - DNA, 25 bp, Homo sapien
tgtggttccaattaacgcacacagc

SEQ ID NO: 567705 - DNA, 25 bp, Homo sapien
gctgtggttccaattaacgcacaca

SEQ ID NO: 567706 - DNA, 25 bp, Homo sapien
tgatggcccatggatgtggcgtttc

SEQ ID NO: 567707 - DNA, 25 bp, Homo sapien
gatagtggtcgtttcacaactgcga

SEQ ID NO: 567708 - DNA, 25 bp, Homo sapien
gaacctcttgtgttaatgaaaggag

SEQ ID NO: 567709 - DNA, 25 bp, Homo sapien
tgaaaggagatcattacatgccgcg

SEQ ID NO: 567710 - DNA, 25 bp, Homo sapien
tgtttggcctagcatggttcacagg

SEQ ID NO: 567711 - DNA, 25 bp, Homo sapien
ggttcacaggcagacctcagacata

SEQ ID NO: 567712 - DNA, 25 bp, Homo sapien
cagacatactgaagggttggttcca

SEQ ID NO: 567713 - DNA, 25 bp, Homo sapien
taaagcccctgaagggtaccacagc

SEQ ID NO: 567714 - DNA, 25 bp, Homo sapien
tatgtctccatcaaagctcctggat

SEQ ID NO: 567715 - DNA, 25 bp, Homo sapien
gcagaatgttctgttagcagcataa

SEQ ID NO: 567716 - DNA, 25 bp, Homo sapien
ttgatcaatgggctgcagaatgttc

SEQ ID NO: 567717 - DNA, 25 bp, Homo sapien
aatattactctcattgtatgtctcc

SEQ ID NO: 567718 - DNA, 25 bp, Homo sapien
aatctgtaaagacacagcatctgcg

SEQ ID NO: 567719 - DNA, 25 bp, Homo sapien
tcggacctctctctgcgtcatgcaa

SEQ ID NO: 567720 - DNA, 25 bp, Homo sapien
cacagcatctgcgaagtgcggtcaa

SEQ ID NO: 567721 - DNA, 25 bp, Homo sapien
gttggcaaaattgtgccaacagatt

SEQ ID NO: 567722 - DNA, 25 bp, Homo sapien
agttcaaactatgtcagccagagcc

SEQ ID NO: 567723 - DNA, 25 bp, Homo sapien
tcaggttggttaaggatccagccag

SEQ ID NO: 567724 - DNA, 25 bp, Homo sapien
gtgcctgttttccattcacacgaaa

SEQ ID NO: 567725 - DNA, 25 bp, Homo sapien
cagagccctccgtgggtgtgcctgt

SEQ ID NO: 567726 - DNA, 25 bp, Homo sapien
cgcgattaggcggagagccacttaa

SEQ ID NO: 567727 - DNA, 25 bp, Homo sapien
gattccgtggttctcaaatgacaca

SEQ ID NO: 567728 - DNA, 25 bp, Homo sapien
gatgggttccacaagctatcggcac

SEQ ID NO: 567729 - DNA, 25 bp, Homo sapien
caagaaagggactgcggaaacctgc

SEQ ID NO: 567730 - DNA, 25 bp, Homo sapien
ttctttgcctttggcgtgcaaatgc

SEQ ID NO: 567731 - DNA, 25 bp, Homo sapien
tctttgcctttggcgtgcaaatgcc

SEQ ID NO: 567732 - DNA, 25 bp, Homo sapien
cacttggcggtgaagcttgttgacc

SEQ ID NO: 567733 - DNA, 25 bp, Homo sapien
taacacgcccgctttcagtttggct

SEQ ID NO: 567734 - DNA, 25 bp, Homo sapien
tgaccgttgtccaaaaacagagtgg

SEQ ID NO: 567735 - DNA, 25 bp, Homo sapien
gctgacggccgtctacaaatgggaa

SEQ ID NO: 567736 - DNA, 25 bp, Homo sapien
tgagccctgaacgaagtcaacgagg

SEQ ID NO: 567737 - DNA, 25 bp, Homo sapien
ttcatctgggacaagggacacgact

SEQ ID NO: 567738 - DNA, 25 bp, Homo sapien
gaagaaacccaagtgaaccctgctg

SEQ ID NO: 567739 - DNA, 25 bp, Homo sapien
catggtcaaaagtggagtgcaggcc

SEQ ID NO: 567740 - DNA, 25 bp, Homo sapien
gatgaaagacttcgcactgtgcaat

SEQ ID NO: 567741 - DNA, 25 bp, Homo sapien
aatttccccactgctcgcactgatg

SEQ ID NO: 567742 - DNA, 25 bp, Homo sapien
agctaaatctatcccacctgaatgg

SEQ ID NO: 567743 - DNA, 25 bp, Homo sapien
gcaatttcgttttcatgatgtggaa

SEQ ID NO: 567744 - DNA, 25 bp, Homo sapien
tttgcaagtgtaactaacagtcacc

SEQ ID NO: 567745 - DNA, 25 bp, Homo sapien
gtgccatgcctccataaaaaccgcg

SEQ ID NO: 567746 - DNA, 25 bp, Homo sapien
gcaacacaggttgccatttctccta

SEQ ID NO: 567747 - DNA, 25 bp, Homo sapien
ctgcagaagcatggcgacgcagcag

SEQ ID NO: 567748 - DNA, 25 bp, Homo sapien
actggatccctatccttacacaaaa

SEQ ID NO: 567749 - DNA, 25 bp, Homo sapien
ggatccctatccttacacaaaatta

SEQ ID NO: 567750 - DNA, 25 bp, Homo sapien
tggatccctatccttacacaaaatt

SEQ ID NO: 567751 - DNA, 25 bp, Homo sapien
atccctatccttacacaaaattaat

SEQ ID NO: 567752 - DNA, 25 bp, Homo sapien
ggtttggccgccttccacagggcga

SEQ ID NO: 567753 - DNA, 25 bp, Homo sapien
ctagcgatggcagagcactcgatgt

SEQ ID NO: 567754 - DNA, 25 bp, Homo sapien
cagaacacctcctggggtttggccg

SEQ ID NO: 567755 - DNA, 25 bp, Homo sapien
agagcactcgatgtgccagcccggc

SEQ ID NO: 567756 - DNA, 25 bp, Homo sapien
ctggcatgacgcttgtcagagtccg

SEQ ID NO: 567757 - DNA, 25 bp, Homo sapien
gcagatgacaaacggtacatcagtg

SEQ ID NO: 567758 - DNA, 25 bp, Homo sapien
tgacaaacggtacatcagtgggaag

SEQ ID NO: 567759 - DNA, 25 bp, Homo sapien
gatgacaaacggtacatcagtggga

SEQ ID NO: 567760 - DNA, 25 bp, Homo sapien
ctgcagatgacaaacggtacatcag

SEQ ID NO: 567761 - DNA, 25 bp, Homo sapien
taaatgtacggtaacacagaagaac

SEQ ID NO: 567762 - DNA, 25 bp, Homo sapien
gaagaacgcgaaaatatgatgtacg

SEQ ID NO: 567763 - DNA, 25 bp, Homo sapien
tatgatgtacgtgtatgaggttttc

SEQ ID NO: 567764 - DNA, 25 bp, Homo sapien
cgtgtatgaggttttcatgtgcgct

SEQ ID NO: 567765 - DNA, 25 bp, Homo sapien
gacttcagatcgaagtagacattgc

SEQ ID NO: 567766 - DNA, 25 bp, Homo sapien
ctggctctccgactggaccagggac

SEQ ID NO: 567767 - DNA, 25 bp, Homo sapien
cctctagacttcagatcgaagtaga

SEQ ID NO: 567768 - DNA, 25 bp, Homo sapien
gccgaccaatttgccatacttgtct

SEQ ID NO: 567769 - DNA, 25 bp, Homo sapien
tcaggtacaccgtgggtgggagaac

SEQ ID NO: 567770 - DNA, 25 bp, Homo sapien
tatctgaggaatattttcggttacc

SEQ ID NO: 567771 - DNA, 25 bp, Homo sapien
gttcccacgagcaatgattccttca

SEQ ID NO: 567772 - DNA, 25 bp, Homo sapien
ttttgccgttgaataagcgttccca

SEQ ID NO: 567773 - DNA, 25 bp, Homo sapien
tcctcataaagactggcgagggaag

SEQ ID NO: 567774 - DNA, 25 bp, Homo sapien
tgaagtcttcctcataaagactggc

SEQ ID NO: 567775 - DNA, 25 bp, Homo sapien
ctcataaagactggcgagggaagcg

SEQ ID NO: 567776 - DNA, 25 bp, Homo sapien
gtcttcctcataaagactggcgagg

SEQ ID NO: 567777 - DNA, 25 bp, Homo sapien
cgtgccaggccggaagtatttttat

SEQ ID NO: 567778 - DNA, 25 bp, Homo sapien
aacttacaaagcctccccagtatga

SEQ ID NO: 567779 - DNA, 25 bp, Homo sapien
aaatctctgacctgccttgaatgcg

SEQ ID NO: 567780 - DNA, 25 bp, Homo sapien
cccagtatgaggctatcaaatttgc

SEQ ID NO: 567781 - DNA, 25 bp, Homo sapien
aatgttttcatatttggtggccggg

SEQ ID NO: 567782 - DNA, 25 bp, Homo sapien
tgttttcatatttggtggccgggcg

SEQ ID NO: 567783 - DNA, 25 bp, Homo sapien
ttttcatatttggtggccgggcgca

SEQ ID NO: 567784 - DNA, 25 bp, Homo sapien
tttcatatttggtggccgggcgcag

SEQ ID NO: 567785 - DNA, 25 bp, Homo sapien
caccgtgtccggctggaaactcata

SEQ ID NO: 567786 - DNA, 25 bp, Homo sapien
aagttagctatctctccaggacagg

SEQ ID NO: 567787 - DNA, 25 bp, Homo sapien
caaatagacgaggtagaaaggcgct

SEQ ID NO: 567788 - DNA, 25 bp, Homo sapien
cagtgtcccggcacacaaaaagaga

SEQ ID NO: 567789 - DNA, 25 bp, Homo sapien
ctgatcttgaagattcatgagaggc

SEQ ID NO: 567790 - DNA, 25 bp, Homo sapien
aggacatggggactgacacaattct

SEQ ID NO: 567791 - DNA, 25 bp, Homo sapien
ggcacgaagctaccaagtgctttca

SEQ ID NO: 567792 - DNA, 25 bp, Homo sapien
gacggcaggtgaaagccccgaacca

SEQ ID NO: 567793 - DNA, 25 bp, Homo sapien
ctcacaccattcctttgactcatgc

SEQ ID NO: 567794 - DNA, 25 bp, Homo sapien
ctcagtgaaaatgttcctcaaggac

SEQ ID NO: 567795 - DNA, 25 bp, Homo sapien
gtgaaaatgttcctcaaggacctca

SEQ ID NO: 567796 - DNA, 25 bp, Homo sapien
aaggacctcacaccattcctttgac

SEQ ID NO: 567797 - DNA, 25 bp, Homo sapien
agtgattaggccgtgagggccccac

SEQ ID NO: 567798 - DNA, 25 bp, Homo sapien
taaaagggctttccggccaggtgca

SEQ ID NO: 567799 - DNA, 25 bp, Homo sapien
tatttgcccttgtaacagtattaag

SEQ ID NO: 567800 - DNA, 25 bp, Homo sapien
ctcttggatgggcttcatgccttct

SEQ ID NO: 567801 - DNA, 25 bp, Homo sapien
cagcgcactgcatcaatgtccggtt

SEQ ID NO: 567802 - DNA, 25 bp, Homo sapien
caatgtccggttcctgactgggagg

SEQ ID NO: 567803 - DNA, 25 bp, Homo sapien
gcactgcatcaatgtccggttcctg

SEQ ID NO: 567804 - DNA, 25 bp, Homo sapien
ggcctcgagagccagtgaccttgct

SEQ ID NO: 567805 - DNA, 25 bp, Homo sapien
gatggcccaacgcagccaacaatgg

SEQ ID NO: 567806 - DNA, 25 bp, Homo sapien
catgaaaggcatcattagcacaaat

SEQ ID NO: 567807 - DNA, 25 bp, Homo sapien
ccaacaatggccacgaggaaaccca

SEQ ID NO: 567808 - DNA, 25 bp, Homo sapien
aatatgaatacgtccaatcagtggg

SEQ ID NO: 567809 - DNA, 25 bp, Homo sapien
ctacatctgtaatacccatcaccat

SEQ ID NO: 567810 - DNA, 25 bp, Homo sapien
tcttttgatgattttatcatctaca

SEQ ID NO: 567811 - DNA, 25 bp, Homo sapien
tctacatctgtaatacccatcacca

SEQ ID NO: 567812 - DNA, 25 bp, Homo sapien
tcatctacatctgtaatacccatca

SEQ ID NO: 567813 - DNA, 25 bp, Homo sapien
ctgcatccaaaaaccttggttagga

SEQ ID NO: 567814 - DNA, 25 bp, Homo sapien
gctgcatccaaaaaccttggttagg

SEQ ID NO: 567815 - DNA, 25 bp, Homo sapien
tgctgcatccaaaaaccttggttag

SEQ ID NO: 567816 - DNA, 25 bp, Homo sapien
tgcatccaaaaaccttggttaggat

SEQ ID NO: 567817 - DNA, 25 bp, Homo sapien
caaggtgcgcatgatcatatacagt

SEQ ID NO: 567818 - DNA, 25 bp, Homo sapien
gcgcatgatcatatacagttggtcc

SEQ ID NO: 567819 - DNA, 25 bp, Homo sapien
caagcatggccaaggtgcgcatgat

SEQ ID NO: 567820 - DNA, 25 bp, Homo sapien
catggccaaggtgcgcatgatcata

SEQ ID NO: 567821 - DNA, 25 bp, Homo sapien
agttaaaatccatcgtgtggaacat

SEQ ID NO: 567822 - DNA, 25 bp, Homo sapien
aagttaaaatccatcgtgtggaaca

SEQ ID NO: 567823 - DNA, 25 bp, Homo sapien
cgtgggaagtctccgccacgatcgg

SEQ ID NO: 567824 - DNA, 25 bp, Homo sapien
agcccagatcccgttcagccgtggg

SEQ ID NO: 567825 - DNA, 25 bp, Homo sapien
cccgttcagccgtgggaagtctccg

SEQ ID NO: 567826 - DNA, 25 bp, Homo sapien
agcttctagaacggcgccctccatg

SEQ ID NO: 567827 - DNA, 25 bp, Homo sapien
tcctcccggtgaggctgttgtacac

SEQ ID NO: 567828 - DNA, 25 bp, Homo sapien
gtacacctgcacacccgtctcccgg

SEQ ID NO: 567829 - DNA, 25 bp, Homo sapien
cggcttcggcgtgcgccacgattag

SEQ ID NO: 567830 - DNA, 25 bp, Homo sapien
tgcgccacgattaggggttccttcc

SEQ ID NO: 567831 - DNA, 25 bp, Homo sapien
cctgggccgcgcgtagtcctcaaca

SEQ ID NO: 567832 - DNA, 25 bp, Homo sapien
ggcctgggccgcgcgtagtcctcaa

SEQ ID NO: 567833 - DNA, 25 bp, Homo sapien
aggcctgggccgcgcgtagtcctca

SEQ ID NO: 567834 - DNA, 25 bp, Homo sapien
ctgggccgcgcgtagtcctcaacat

SEQ ID NO: 567835 - DNA, 25 bp, Homo sapien
gccgggtacgctgccggtcgctcaa

SEQ ID NO: 567836 - DNA, 25 bp, Homo sapien
ccagcgcctacgactgggcggagac

SEQ ID NO: 567837 - DNA, 25 bp, Homo sapien
tgccggtcgctcaagagcagcacgg

SEQ ID NO: 567838 - DNA, 25 bp, Homo sapien
agacgggagccacgccgggtacgct

SEQ ID NO: 567839 - DNA, 25 bp, Homo sapien
ctggagctgtgtccgccgcgcggga

SEQ ID NO: 567840 - DNA, 25 bp, Homo sapien
cttattagcccaggtcctgcgaggc

SEQ ID NO: 567841 - DNA, 25 bp, Homo sapien
aggcgtccgtgtgcgcgcggtacca

SEQ ID NO: 567842 - DNA, 25 bp, Homo sapien
gtgccgatctcctctccttattagc

SEQ ID NO: 567843 - DNA, 25 bp, Homo sapien
aatagcttgacaaacgtgcctctat

SEQ ID NO: 567844 - DNA, 25 bp, Homo sapien
acgtgcctctattgggccaggcgca

SEQ ID NO: 567845 - DNA, 25 bp, Homo sapien
gcttgacaaacgtgcctctattggg

SEQ ID NO: 567846 - DNA, 25 bp, Homo sapien
gacaaacgtgcctctattgggccag

SEQ ID NO: 567847 - DNA, 25 bp, Homo sapien
gaaagagacaagattcttcaacgta

SEQ ID NO: 567848 - DNA, 25 bp, Homo sapien
catttttgcaacacgccacaggaaa

SEQ ID NO: 567849 - DNA, 25 bp, Homo sapien
taacatccatttttgcaacacgcca

SEQ ID NO: 567850 - DNA, 25 bp, Homo sapien
caacgtatcttcaaaattaagcacc

SEQ ID NO: 567851 - DNA, 25 bp, Homo sapien
tttgcaacaggataaacccggtgga

SEQ ID NO: 567852 - DNA, 25 bp, Homo sapien
catagcacaaaatacccggcagggc

SEQ ID NO: 567853 - DNA, 25 bp, Homo sapien
taaaagctgaaatccgaccctgtcc

SEQ ID NO: 567854 - DNA, 25 bp, Homo sapien
taagaaaaatggagaaccgcgctgg

SEQ ID NO: 567855 - DNA, 25 bp, Homo sapien
gccgaccgggtgtctgcatactgtg

SEQ ID NO: 567856 - DNA, 25 bp, Homo sapien
gagataaggcctagggaaggcgccc

SEQ ID NO: 567857 - DNA, 25 bp, Homo sapien
agcggcctccgagaacggtgtccat

SEQ ID NO: 567858 - DNA, 25 bp, Homo sapien
agctgaatggcctcaggacgccggc

SEQ ID NO: 567859 - DNA, 25 bp, Homo sapien
atgggtaggtctcccgcgcactctg

SEQ ID NO: 567860 - DNA, 25 bp, Homo sapien
tcaaaggacaccgagagggtgccag

SEQ ID NO: 567861 - DNA, 25 bp, Homo sapien
actctgcggccgcagctcaaaggac

SEQ ID NO: 567862 - DNA, 25 bp, Homo sapien
tccaaactgagtaccgggagacgac

SEQ ID NO: 567863 - DNA, 25 bp, Homo sapien
gtaagagtccggggggcattactca

SEQ ID NO: 567864 - DNA, 25 bp, Homo sapien
taagagtccggggggcattactcac

SEQ ID NO: 567865 - DNA, 25 bp, Homo sapien
tctagtagtaagagtccggggggca

SEQ ID NO: 567866 - DNA, 25 bp, Homo sapien
ctagtagtaagagtccggggggcat

SEQ ID NO: 567867 - DNA, 25 bp, Homo sapien
tcctagtaaagtttgcgcctcgccc

SEQ ID NO: 567868 - DNA, 25 bp, Homo sapien
tagttgctgtgtaccatggtctcgg

SEQ ID NO: 567869 - DNA, 25 bp, Homo sapien
gcgaccctcgcctctggaaaaagtg

SEQ ID NO: 567870 - DNA, 25 bp, Homo sapien
tcctggtcgggttttcagcgaagca

SEQ ID NO: 567871 - DNA, 25 bp, Homo sapien
gggtgaaccatgttgagtcctgcca

SEQ ID NO: 567872 - DNA, 25 bp, Homo sapien
ggctcggcagatgtagccgccgggc

SEQ ID NO: 567873 - DNA, 25 bp, Homo sapien
ccgggagagcgagggctttgcattt

SEQ ID NO: 567874 - DNA, 25 bp, Homo sapien
gccgggccgaagcaggagccggcgg

SEQ ID NO: 567875 - DNA, 25 bp, Homo sapien
aaagaatctgtattcagaccctggg

SEQ ID NO: 567876 - DNA, 25 bp, Homo sapien
tacaccagcaatttagacaaagcct

SEQ ID NO: 567877 - DNA, 25 bp, Homo sapien
tcttaagtggtctagtcaaggaacc

SEQ ID NO: 567878 - DNA, 25 bp, Homo sapien
ggccatgtcgccaaaaatacagcct

SEQ ID NO: 567879 - DNA, 25 bp, Homo sapien
tgcgctgagtgatacgtggttccct

SEQ ID NO: 567880 - DNA, 25 bp, Homo sapien
cacaaagaagtagtgagtgatgact

SEQ ID NO: 567881 - DNA, 25 bp, Homo sapien
tggttccctttaacttcgcacatgg

SEQ ID NO: 567882 - DNA, 25 bp, Homo sapien
cagtctctgtgaagctacctaccac

SEQ ID NO: 567883 - DNA, 25 bp, Homo sapien
gagccacgggtatttgcactaccaa

SEQ ID NO: 567884 - DNA, 25 bp, Homo sapien
caggagccacgggtatttgcactac

SEQ ID NO: 567885 - DNA, 25 bp, Homo sapien
tgggcttctttgcctgaatgaaggg

SEQ ID NO: 567886 - DNA, 25 bp, Homo sapien
gggtatttgcactaccaagttctca

SEQ ID NO: 567887 - DNA, 25 bp, Homo sapien
tgcatgtggctccatacttcaggaa

SEQ ID NO: 567888 - DNA, 25 bp, Homo sapien
tgtggctccatacttcaggaatgat

SEQ ID NO: 567889 - DNA, 25 bp, Homo sapien
gcatgtggctccatacttcaggaat

SEQ ID NO: 567890 - DNA, 25 bp, Homo sapien
catgtggctccatacttcaggaatg

SEQ ID NO: 567891 - DNA, 25 bp, Homo sapien
tctctgaaagcagcactgatcaacc

SEQ ID NO: 567892 - DNA, 25 bp, Homo sapien
cccttttgatcaaaatctttctctg

SEQ ID NO: 567893 - DNA, 25 bp, Homo sapien
tctgaaagcagcactgatcaaccat

SEQ ID NO: 567894 - DNA, 25 bp, Homo sapien
tttgatcaaaatctttctctgaaag

SEQ ID NO: 567895 - DNA, 25 bp, Homo sapien
gaaggagctccttgtctttcaccgc

SEQ ID NO: 567896 - DNA, 25 bp, Homo sapien
ggttcaggtgcctttctaacacaag

SEQ ID NO: 567897 - DNA, 25 bp, Homo sapien
cggcaaactctacgggccctgtgac

SEQ ID NO: 567898 - DNA, 25 bp, Homo sapien
tacaagtaacaaagtgtggccaccc

SEQ ID NO: 567899 - DNA, 25 bp, Homo sapien
tcatggctcggccatgaggcctgac

SEQ ID NO: 567900 - DNA, 25 bp, Homo sapien
tcaggctgcgagtctccgtcagatc

SEQ ID NO: 567901 - DNA, 25 bp, Homo sapien
gatccactcggaatggttttctgaa

SEQ ID NO: 567902 - DNA, 25 bp, Homo sapien
gctgtgactagtcaggctgcgagtc

SEQ ID NO: 567903 - DNA, 25 bp, Homo sapien
gacgctggccgccagtcgctgtgac

SEQ ID NO: 567904 - DNA, 25 bp, Homo sapien
gaagattgtatgaaggctgtggtgg

SEQ ID NO: 567905 - DNA, 25 bp, Homo sapien
cattggtgtcttttccggaaggcca

SEQ ID NO: 567906 - DNA, 25 bp, Homo sapien
gccaggtctcgaacctgaagattgt

SEQ ID NO: 567907 - DNA, 25 bp, Homo sapien
tcattggtgtcttttccggaaggcc

SEQ ID NO: 567908 - DNA, 25 bp, Homo sapien
gaagcactggcccttcccactggtt

SEQ ID NO: 567909 - DNA, 25 bp, Homo sapien
attcacagggaaaaggtcccagaag

SEQ ID NO: 567910 - DNA, 25 bp, Homo sapien
gaaaaggtcccagaagcactggccc

SEQ ID NO: 567911 - DNA, 25 bp, Homo sapien
gggaaaaggtcccagaagcactggc

SEQ ID NO: 567912 - DNA, 25 bp, Homo sapien
gagcaggctggcacttcagttgcac

SEQ ID NO: 567913 - DNA, 25 bp, Homo sapien
agcaggctggcacttcagttgcacc

SEQ ID NO: 567914 - DNA, 25 bp, Homo sapien
gctggcacttcagttgcacccaggt

SEQ ID NO: 567915 - DNA, 25 bp, Homo sapien
caggctggcacttcagttgcaccca

SEQ ID NO: 567916 - DNA, 25 bp, Homo sapien
gatcattgtccttcacgcgtgtcag

SEQ ID NO: 567917 - DNA, 25 bp, Homo sapien
ttcacgcgtgtcaggaagctctctt

SEQ ID NO: 567918 - DNA, 25 bp, Homo sapien
ccttcacgcgtgtcaggaagctctc

SEQ ID NO: 567919 - DNA, 25 bp, Homo sapien
ttctgatcattgtccttcacgcgtg

SEQ ID NO: 567920 - DNA, 25 bp, Homo sapien
aggaatcttgcccttaacttgttgg

SEQ ID NO: 567921 - DNA, 25 bp, Homo sapien
tggtttacaacaaagccaacggcat

SEQ ID NO: 567922 - DNA, 25 bp, Homo sapien
caacggcatgctggggaacactgta

SEQ ID NO: 567923 - DNA, 25 bp, Homo sapien
atcagttctcttggcaggaatcttg

SEQ ID NO: 567924 - DNA, 25 bp, Homo sapien
ccattcccttgatgtctacaatgtc

SEQ ID NO: 567925 - DNA, 25 bp, Homo sapien
ttcccattcccttgatgtctacaat

SEQ ID NO: 567926 - DNA, 25 bp, Homo sapien
cttgttgggcttcctttttgaacag

SEQ ID NO: 567927 - DNA, 25 bp, Homo sapien
attcccttgatgtctacaatgtcac

SEQ ID NO: 567928 - DNA, 25 bp, Homo sapien
taaaaggtctaaagtgactctcctc

SEQ ID NO: 567929 - DNA, 25 bp, Homo sapien
aaaggtctaaagtgactctcctctc

SEQ ID NO: 567930 - DNA, 25 bp, Homo sapien
aggtctaaagtgactctcctctctc

SEQ ID NO: 567931 - DNA, 25 bp, Homo sapien
ctaaaaggtctaaagtgactctcct

SEQ ID NO: 567932 - DNA, 25 bp, Homo sapien
gggattgagcacacggagcctttct

SEQ ID NO: 567933 - DNA, 25 bp, Homo sapien
cacacggagcctttcttgtgctgat

SEQ ID NO: 567934 - DNA, 25 bp, Homo sapien
cttgtgctgatgaccggtcagactt

SEQ ID NO: 567935 - DNA, 25 bp, Homo sapien
ctgatgaccggtcagacttcagcat

SEQ ID NO: 567936 - DNA, 25 bp, Homo sapien
cagcattgttctgcaagccgggttt

SEQ ID NO: 567937 - DNA, 25 bp, Homo sapien
taaagcctgggcttcatagtgagag

SEQ ID NO: 567938 - DNA, 25 bp, Homo sapien
ggttttgttggtgcacacgctccat

SEQ ID NO: 567939 - DNA, 25 bp, Homo sapien
tcatgggtccaaaatacagtccctg

SEQ ID NO: 567940 - DNA, 25 bp, Homo sapien
tattaaacatatcctattgatgatc

SEQ ID NO: 567941 - DNA, 25 bp, Homo sapien
aagttgccaatggtctcacagctgg

SEQ ID NO: 567942 - DNA, 25 bp, Homo sapien
taataatctcaacaatccaatgaaa

SEQ ID NO: 567943 - DNA, 25 bp, Homo sapien
gttgccaatggtctcacagctggaa

SEQ ID NO: 567944 - DNA, 25 bp, Homo sapien
ttgaagcccaggtcggttgaagcca

SEQ ID NO: 567945 - DNA, 25 bp, Homo sapien
ttaagactgagagacgaaaccaagg

SEQ ID NO: 567946 - DNA, 25 bp, Homo sapien
caagaaactggtaagcgtgctcatc

SEQ ID NO: 567947 - DNA, 25 bp, Homo sapien
gactgagagtaacctgctaacacgg

SEQ ID NO: 567948 - DNA, 25 bp, Homo sapien
acatgacgagacctcctctgggcag

SEQ ID NO: 567949 - DNA, 25 bp, Homo sapien
tttgacacatgacgagacctcctct

SEQ ID NO: 567950 - DNA, 25 bp, Homo sapien
ggccttcggcgaagcccagggaagc

SEQ ID NO: 567951 - DNA, 25 bp, Homo sapien
ctcgccctggtcctttgacacatga

SEQ ID NO: 567952 - DNA, 25 bp, Homo sapien
gagggcggtttcagacagatccact

SEQ ID NO: 567953 - DNA, 25 bp, Homo sapien
agtctccattccttaagcgcccaga

SEQ ID NO: 567954 - DNA, 25 bp, Homo sapien
tcttctcggtgtttagctcgggcag

SEQ ID NO: 567955 - DNA, 25 bp, Homo sapien
tctgcttcgggcttgtctcaattac

SEQ ID NO: 567956 - DNA, 25 bp, Homo sapien
cccacaaccacatgccccaaagtcc

SEQ ID NO: 567957 - DNA, 25 bp, Homo sapien
gcttcccacaaccacatgccccaaa

SEQ ID NO: 567958 - DNA, 25 bp, Homo sapien
gagagtccctgccagtggcctggct

SEQ ID NO: 567959 - DNA, 25 bp, Homo sapien
cttggcaggtcccatgagagtccct

SEQ ID NO: 567960 - DNA, 25 bp, Homo sapien
gactgttaccgtggggatgactttc

SEQ ID NO: 567961 - DNA, 25 bp, Homo sapien
gctgactgttaccgtggggatgact

SEQ ID NO: 567962 - DNA, 25 bp, Homo sapien
ctgctgccggctgactgttaccgtg

SEQ ID NO: 567963 - DNA, 25 bp, Homo sapien
tgctgccggctgactgttaccgtgg

SEQ ID NO: 567964 - DNA, 25 bp, Homo sapien
tgaagagccaggaatacctcggcca

SEQ ID NO: 567965 - DNA, 25 bp, Homo sapien
ggggcatttgtccatgggtctgtga

SEQ ID NO: 567966 - DNA, 25 bp, Homo sapien
ggcatttgtccatgggtctgtgaag

SEQ ID NO: 567967 - DNA, 25 bp, Homo sapien
gaagagccaggaatacctcggccat

SEQ ID NO: 567968 - DNA, 25 bp, Homo sapien
tcctccaatcggagaatacttttct

SEQ ID NO: 567969 - DNA, 25 bp, Homo sapien
cggagaatacttttctcctcaccac

SEQ ID NO: 567970 - DNA, 25 bp, Homo sapien
agcctgtggagtcccctcatccttc

SEQ ID NO: 567971 - DNA, 25 bp, Homo sapien
tctttctgtaccgtgagtgctcctc

SEQ ID NO: 567972 - DNA, 25 bp, Homo sapien
cagacacagcgagggaaccacccag

SEQ ID NO: 567973 - DNA, 25 bp, Homo sapien
caggagctttctgctgtgtgaaccc

SEQ ID NO: 567974 - DNA, 25 bp, Homo sapien
gacacagcgagggaaccacccagag

SEQ ID NO: 567975 - DNA, 25 bp, Homo sapien
cctctagactgtgcaggagctttct

SEQ ID NO: 567976 - DNA, 25 bp, Homo sapien
cgatgaccacggtggacaccagcag

SEQ ID NO: 567977 - DNA, 25 bp, Homo sapien
gcgatgaccacggtggacaccagca

SEQ ID NO: 567978 - DNA, 25 bp, Homo sapien
gaaccaagtatgagaagagcacaaa

SEQ ID NO: 567979 - DNA, 25 bp, Homo sapien
tcattcctgtgggagtgtgttcttc

SEQ ID NO: 567980 - DNA, 25 bp, Homo sapien
tggagaacttgaagccctccttctt

SEQ ID NO: 567981 - DNA, 25 bp, Homo sapien
ctcctctgccatatactggagaact

SEQ ID NO: 567982 - DNA, 25 bp, Homo sapien
aaatccactttactctggcttcgca

SEQ ID NO: 567983 - DNA, 25 bp, Homo sapien
tctattatctcctgggcgtcagaag

SEQ ID NO: 567984 - DNA, 25 bp, Homo sapien
tctcctgggcgtcagaagtattttt

SEQ ID NO: 567985 - DNA, 25 bp, Homo sapien
actctggcttcgcacatcagtctca

SEQ ID NO: 567986 - DNA, 25 bp, Homo sapien
gcactggcactggggtccttcaggt

SEQ ID NO: 567987 - DNA, 25 bp, Homo sapien
cactggcactggggtccttcaggtc

SEQ ID NO: 567988 - DNA, 25 bp, Homo sapien
gctgagatgcccaccgtgcactggc

SEQ ID NO: 567989 - DNA, 25 bp, Homo sapien
gggaggcgggaaatgcagccgctgc

SEQ ID NO: 567990 - DNA, 25 bp, Homo sapien
gccggggcccagcaaccttgcgaga

SEQ ID NO: 567991 - DNA, 25 bp, Homo sapien
ccggggcccagcaaccttgcgagag

SEQ ID NO: 567992 - DNA, 25 bp, Homo sapien
cggggcccagcaaccttgcgagagg

SEQ ID NO: 567993 - DNA, 25 bp, Homo sapien
agccggggcccagcaaccttgcgag

SEQ ID NO: 567994 - DNA, 25 bp, Homo sapien
ctggaaactccagtccagaatccca

SEQ ID NO: 567995 - DNA, 25 bp, Homo sapien
aaactccagtccagaatcccactcc

SEQ ID NO: 567996 - DNA, 25 bp, Homo sapien
tggaaactccagtccagaatcccac

SEQ ID NO: 567997 - DNA, 25 bp, Homo sapien
ggaaactccagtccagaatcccact

SEQ ID NO: 567998 - DNA, 25 bp, Homo sapien
cgccttctggagtaggacggtgcct

SEQ ID NO: 567999 - DNA, 25 bp, Homo sapien
cctggtcagaagttgcgctgacaga

SEQ ID NO: 568000 - DNA, 25 bp, Homo sapien
tgtctacactctgcagcactacttc

SEQ ID NO: 568001 - DNA, 25 bp, Homo sapien
gctgccaataactaggtcctggtca

SEQ ID NO: 568002 - DNA, 25 bp, Homo sapien
catcttcataatacaagatatgttt

SEQ ID NO: 568003 - DNA, 25 bp, Homo sapien
gatatgtttatgttgacattggctt

SEQ ID NO: 568004 - DNA, 25 bp, Homo sapien
aagtggaccacacgcaatttgaagg

SEQ ID NO: 568005 - DNA, 25 bp, Homo sapien
gtggtgggtccatcaagctcatctt

SEQ ID NO: 568006 - DNA, 25 bp, Homo sapien
tggtgcatccttaagatagtgaatc

SEQ ID NO: 568007 - DNA, 25 bp, Homo sapien
ccatctaggctcgtgagtggttagt

SEQ ID NO: 568008 - DNA, 25 bp, Homo sapien
tggaataaacctgacgtgctcacgg

SEQ ID NO: 568009 - DNA, 25 bp, Homo sapien
tagtgaatcagttcgcccgagatct

SEQ ID NO: 568010 - DNA, 25 bp, Homo sapien
ttaactgggttagccctgacctgcc

SEQ ID NO: 568011 - DNA, 25 bp, Homo sapien
ggaatataggaatccatgctcatgg

SEQ ID NO: 568012 - DNA, 25 bp, Homo sapien
gttcccggcacgcactgctgttgtt

SEQ ID NO: 568013 - DNA, 25 bp, Homo sapien
caaatcacttggtgtagggagcctg

SEQ ID NO: 568014 - DNA, 25 bp, Homo sapien
cagaccccgctttagagaggtggaa

SEQ ID NO: 568015 - DNA, 25 bp, Homo sapien
tatcccactgatgcttggagacgcc

SEQ ID NO: 568016 - DNA, 25 bp, Homo sapien
cacgactggagtttgagtggcagca

SEQ ID NO: 568017 - DNA, 25 bp, Homo sapien
caaacaccttgtgagggcatcagct

SEQ ID NO: 568018 - DNA, 25 bp, Homo sapien
ctctgcttcatggcagaagatccca

SEQ ID NO: 568019 - DNA, 25 bp, Homo sapien
aggaggcacttgtggcagcgagtgc

SEQ ID NO: 568020 - DNA, 25 bp, Homo sapien
gaggcacttgtggcagcgagtgccc

SEQ ID NO: 568021 - DNA, 25 bp, Homo sapien
caggaggcacttgtggcagcgagtg

SEQ ID NO: 568022 - DNA, 25 bp, Homo sapien
gagattctgggtaccgctgtgcaca

SEQ ID NO: 568023 - DNA, 25 bp, Homo sapien
taaaaacccctcagtaggctgggca

SEQ ID NO: 568024 - DNA, 25 bp, Homo sapien
cagacaggtgggaagctttgcctcc

SEQ ID NO: 568025 - DNA, 25 bp, Homo sapien
tgtccacacgcattagtccacagga

SEQ ID NO: 568026 - DNA, 25 bp, Homo sapien
tcatgtcttacatgagatgggcaca

SEQ ID NO: 568027 - DNA, 25 bp, Homo sapien
catgtcttacatgagatgggcacac

SEQ ID NO: 568028 - DNA, 25 bp, Homo sapien
tcatgctttgtgtcacgtgaaccac

SEQ ID NO: 568029 - DNA, 25 bp, Homo sapien
ggacaagcccactctagcggtgcac

SEQ ID NO: 568030 - DNA, 25 bp, Homo sapien
cccactctagcggtgcacagctggg

SEQ ID NO: 568031 - DNA, 25 bp, Homo sapien
tctcgcccagtgatgtcctcatgct

SEQ ID NO: 568032 - DNA, 25 bp, Homo sapien
ccagggcagctaccagacgtgcgca

SEQ ID NO: 568033 - DNA, 25 bp, Homo sapien
ccttcaactcggtccgtctccatga

SEQ ID NO: 568034 - DNA, 25 bp, Homo sapien
gtctccatgacgtgttcctctgctt

SEQ ID NO: 568035 - DNA, 25 bp, Homo sapien
gcgcaagtaagtctcatgaaacaaa

SEQ ID NO: 568036 - DNA, 25 bp, Homo sapien
gcgtggtacctctctgcccgccctt

SEQ ID NO: 568037 - DNA, 25 bp, Homo sapien
ccccatcagcactaatggcgtggta

SEQ ID NO: 568038 - DNA, 25 bp, Homo sapien
acatgcctcgtaaggacagcagtgc

SEQ ID NO: 568039 - DNA, 25 bp, Homo sapien
aaaggaaacatgcctcgtaaggaca

SEQ ID NO: 568040 - DNA, 25 bp, Homo sapien
ttcttcccgaacctcctcttggctg

SEQ ID NO: 568041 - DNA, 25 bp, Homo sapien
gaacctcctcttggctgaggcctca

SEQ ID NO: 568042 - DNA, 25 bp, Homo sapien
ttcccgaacctcctcttggctgagg

SEQ ID NO: 568043 - DNA, 25 bp, Homo sapien
cgaacctcctcttggctgaggcctc

SEQ ID NO: 568044 - DNA, 25 bp, Homo sapien
gactgagtcgttgctccatgggcca

SEQ ID NO: 568045 - DNA, 25 bp, Homo sapien
caggttccggtcagttttgctccca

SEQ ID NO: 568046 - DNA, 25 bp, Homo sapien
tctccggaaggtcagcgtcaaatgc

SEQ ID NO: 568047 - DNA, 25 bp, Homo sapien
tcatgtaaagcacagctctcgggcc

SEQ ID NO: 568048 - DNA, 25 bp, Homo sapien
gaaaacagaaacatcgaagttgttc

SEQ ID NO: 568049 - DNA, 25 bp, Homo sapien
tcttgtaattaaattcactggtgag

SEQ ID NO: 568050 - DNA, 25 bp, Homo sapien
tcactgatgcatctgagttgcaatt

SEQ ID NO: 568051 - DNA, 25 bp, Homo sapien
gagagcacagtagccttcataaatg

SEQ ID NO: 568052 - DNA, 25 bp, Homo sapien
gttagtaacactcttagaacactgg

SEQ ID NO: 568053 - DNA, 25 bp, Homo sapien
cactagttgcctagacaaaagctaa

SEQ ID NO: 568054 - DNA, 25 bp, Homo sapien
agaacactggtttgttcatttgaca

SEQ ID NO: 568055 - DNA, 25 bp, Homo sapien
tatttgcagagtataaccactagtt

SEQ ID NO: 568056 - DNA, 25 bp, Homo sapien
tcttcatcattaaggagggaccact

SEQ ID NO: 568057 - DNA, 25 bp, Homo sapien
gtttccgagagccaggtcagcgtct

SEQ ID NO: 568058 - DNA, 25 bp, Homo sapien
tacatgggtattctgagctggctac

SEQ ID NO: 568059 - DNA, 25 bp, Homo sapien
cgttcaagttgctgctacatgggta

SEQ ID NO: 568060 - DNA, 25 bp, Homo sapien
gcaggtgcatggtgcccagcacggc

SEQ ID NO: 568061 - DNA, 25 bp, Homo sapien
aggtgcatggtgcccagcacggcac

SEQ ID NO: 568062 - DNA, 25 bp, Homo sapien
caggtgcatggtgcccagcacggca

SEQ ID NO: 568063 - DNA, 25 bp, Homo sapien
tggctactcggaaacggctgtcctg

SEQ ID NO: 568064 - DNA, 25 bp, Homo sapien
tgcagagaaccgcacaactcagggt

SEQ ID NO: 568065 - DNA, 25 bp, Homo sapien
tggactcccgttcaggtgcagagaa

SEQ ID NO: 568066 - DNA, 25 bp, Homo sapien
caaacccgtggtagtgtccatagta

SEQ ID NO: 568067 - DNA, 25 bp, Homo sapien
ccatcccactgagcggggtcgtgga

SEQ ID NO: 568068 - DNA, 25 bp, Homo sapien
ccatttgtcaatgtattcgatacgg

SEQ ID NO: 568069 - DNA, 25 bp, Homo sapien
attcgatacggagctactgtttttc

SEQ ID NO: 568070 - DNA, 25 bp, Homo sapien
caatgtattcgatacggagctactg

SEQ ID NO: 568071 - DNA, 25 bp, Homo sapien
taagcataacaacagtgggcacctc

SEQ ID NO: 568072 - DNA, 25 bp, Homo sapien
tatacagacatctatcaggagggag

SEQ ID NO: 568073 - DNA, 25 bp, Homo sapien
attaaaatgaccatggcagccaggg

SEQ ID NO: 568074 - DNA, 25 bp, Homo sapien
cagtggcagaatacagagagaccgg

SEQ ID NO: 568075 - DNA, 25 bp, Homo sapien
aaacacagggtgtatggactcggca

SEQ ID NO: 568076 - DNA, 25 bp, Homo sapien
gaaaccagagcaaccaagtcctggg

SEQ ID NO: 568077 - DNA, 25 bp, Homo sapien
tttagctaaggtcaaatagcccctg

SEQ ID NO: 568078 - DNA, 25 bp, Homo sapien
ggaataaaaggtggccacttctgcc

SEQ ID NO: 568079 - DNA, 25 bp, Homo sapien
gcattgctgacacagtatatatttc

SEQ ID NO: 568080 - DNA, 25 bp, Homo sapien
gctgtttggtgtcttcaaccattgg

SEQ ID NO: 568081 - DNA, 25 bp, Homo sapien
gacagggggtctgcattgctgacac

SEQ ID NO: 568082 - DNA, 25 bp, Homo sapien
cattggattgttgttgcagctaaca

SEQ ID NO: 568083 - DNA, 25 bp, Homo sapien
tgttacaacagcaaactccctatca

SEQ ID NO: 568084 - DNA, 25 bp, Homo sapien
tacaacagcaaactccctatcaacg

SEQ ID NO: 568085 - DNA, 25 bp, Homo sapien
ctgttacaacagcaaactccctatc

SEQ ID NO: 568086 - DNA, 25 bp, Homo sapien
caacagcaaactccctatcaacgtg

SEQ ID NO: 568087 - DNA, 25 bp, Homo sapien
tgtcgccattcgtgagtggcacggc

SEQ ID NO: 568088 - DNA, 25 bp, Homo sapien
ttgtcagcatcgtcttctgtgtcgc

SEQ ID NO: 568089 - DNA, 25 bp, Homo sapien
tcgtgagtggcacggcagaatccaa

SEQ ID NO: 568090 - DNA, 25 bp, Homo sapien
cttctgtgtcgccattcgtgagtgg

SEQ ID NO: 568091 - DNA, 25 bp, Homo sapien
cagaaaacaaagactatttcagatt

SEQ ID NO: 568092 - DNA, 25 bp, Homo sapien
gcacagaaaacaaagactatttcag

SEQ ID NO: 568093 - DNA, 25 bp, Homo sapien
ctgcacagaaaacaaagactatttc

SEQ ID NO: 568094 - DNA, 25 bp, Homo sapien
gaaaacaaagactatttcagattcc

SEQ ID NO: 568095 - DNA, 25 bp, Homo sapien
tagcacacaactgaaaaacttttcc

SEQ ID NO: 568096 - DNA, 25 bp, Homo sapien
gtaacaagataagtgttcagacaca

SEQ ID NO: 568097 - DNA, 25 bp, Homo sapien
tgagcactgaacactttaaacaatc

SEQ ID NO: 568098 - DNA, 25 bp, Homo sapien
aaaaatcgacaggtcactaatgagc

SEQ ID NO: 568099 - DNA, 25 bp, Homo sapien
gagactcaagactagtctgtcagca

SEQ ID NO: 568100 - DNA, 25 bp, Homo sapien
taatgtaaaggctaagagactcaag

SEQ ID NO: 568101 - DNA, 25 bp, Homo sapien
gaagacatgaagtggttatataacc

SEQ ID NO: 568102 - DNA, 25 bp, Homo sapien
acaccaaaatacagaaagcgttaga

SEQ ID NO: 568103 - DNA, 25 bp, Homo sapien
taagatacaagttacgcagccaaga

SEQ ID NO: 568104 - DNA, 25 bp, Homo sapien
aagatattatccctggcacctgtaa

SEQ ID NO: 568105 - DNA, 25 bp, Homo sapien
tacagggatctccttaagaggtgac

SEQ ID NO: 568106 - DNA, 25 bp, Homo sapien
tctaggaaaacagaacgcactaagt

SEQ ID NO: 568107 - DNA, 25 bp, Homo sapien
gaagtgccggctccaaccatatttt

SEQ ID NO: 568108 - DNA, 25 bp, Homo sapien
tgacgagtgtggcaaatctaaggac

SEQ ID NO: 568109 - DNA, 25 bp, Homo sapien
tgtgtacctgcaacagtggctcaac

SEQ ID NO: 568110 - DNA, 25 bp, Homo sapien
agtgcaggtgagctaaagatgccca

SEQ ID NO: 568111 - DNA, 25 bp, Homo sapien
aattcgtgcatgagggcatgaggcc

SEQ ID NO: 568112 - DNA, 25 bp, Homo sapien
gaggccactctacaatactaaccag

SEQ ID NO: 568113 - DNA, 25 bp, Homo sapien
aaaagtggatgctcttaaaaaggcg

SEQ ID NO: 568114 - DNA, 25 bp, Homo sapien
tacagggacagacatgtacaattcg

SEQ ID NO: 568115 - DNA, 25 bp, Homo sapien
cacatagacatttacacttgggcca

SEQ ID NO: 568116 - DNA, 25 bp, Homo sapien
tgaaggtctcatctcgaaggtgcgc

SEQ ID NO: 568117 - DNA, 25 bp, Homo sapien
taaacatgggtgctcaaaaagttcc

SEQ ID NO: 568118 - DNA, 25 bp, Homo sapien
tgttaagtcccatcttcgcagtggc

SEQ ID NO: 568119 - DNA, 25 bp, Homo sapien
caaagtcttctgagtcttccaagca

SEQ ID NO: 568120 - DNA, 25 bp, Homo sapien
agttctagctttctttactccaaag

SEQ ID NO: 568121 - DNA, 25 bp, Homo sapien
cttccaagcatctctttcgatttgt

SEQ ID NO: 568122 - DNA, 25 bp, Homo sapien
gcatctctttcgatttgttcccaca

SEQ ID NO: 568123 - DNA, 25 bp, Homo sapien
gattaggaaatacattctgatgacc

SEQ ID NO: 568124 - DNA, 25 bp, Homo sapien
tatgattaggaaatacattctgatg

SEQ ID NO: 568125 - DNA, 25 bp, Homo sapien
attaggaaatacattctgatgaccc

SEQ ID NO: 568126 - DNA, 25 bp, Homo sapien
tgattaggaaatacattctgatgac

SEQ ID NO: 568127 - DNA, 25 bp, Homo sapien
ttatagaaatggttcagatgacaat

SEQ ID NO: 568128 - DNA, 25 bp, Homo sapien
tatagaaatggttcagatgacaatt

SEQ ID NO: 568129 - DNA, 25 bp, Homo sapien
agagaaactgggcacactcttggaa

SEQ ID NO: 568130 - DNA, 25 bp, Homo sapien
tcttggaaaccctgggtttgtgcaa

SEQ ID NO: 568131 - DNA, 25 bp, Homo sapien
gaaactgggcacactcttggaaacc

SEQ ID NO: 568132 - DNA, 25 bp, Homo sapien
tgggcacactcttggaaaccctggg

SEQ ID NO: 568133 - DNA, 25 bp, Homo sapien
tgctcctgctgaactgactagctat

SEQ ID NO: 568134 - DNA, 25 bp, Homo sapien
taaatttacgctaacttcagacttg

SEQ ID NO: 568135 - DNA, 25 bp, Homo sapien
tgaattacaccccatccgcgtgcta

SEQ ID NO: 568136 - DNA, 25 bp, Homo sapien
gtactgagattgtccatggcattca

SEQ ID NO: 568137 - DNA, 25 bp, Homo sapien
ggtctgagacctctacagtagctaa

SEQ ID NO: 568138 - DNA, 25 bp, Homo sapien
gatgtcctgacattaaaaagtagcc

SEQ ID NO: 568139 - DNA, 25 bp, Homo sapien
aaagtagcctatcatcagattccag

SEQ ID NO: 568140 - DNA, 25 bp, Homo sapien
cagattcaagtaggaagtgatggca

SEQ ID NO: 568141 - DNA, 25 bp, Homo sapien
caaaagtaactccatgttgaagttc

SEQ ID NO: 568142 - DNA, 25 bp, Homo sapien
tgaattaaaactgagggatcaaaag

SEQ ID NO: 568143 - DNA, 25 bp, Homo sapien
tagacactgaattaaaactgaggga

SEQ ID NO: 568144 - DNA, 25 bp, Homo sapien
aactgagggatcaaaagtaactcca

SEQ ID NO: 568145 - DNA, 25 bp, Homo sapien
ctggaagacaagaatgtacactgct

SEQ ID NO: 568146 - DNA, 25 bp, Homo sapien
gctgcaggttgataaacaaacggga

SEQ ID NO: 568147 - DNA, 25 bp, Homo sapien
caggttgataaacaaacgggagaag

SEQ ID NO: 568148 - DNA, 25 bp, Homo sapien
agacatcctgttagctgcaggttga

SEQ ID NO: 568149 - DNA, 25 bp, Homo sapien
caaacgggagaagtacttaacagca

SEQ ID NO: 568150 - DNA, 25 bp, Homo sapien
ccttgtgctgtgtcactcaaacaac

SEQ ID NO: 568151 - DNA, 25 bp, Homo sapien
agctacactacatccacagcaaaag

SEQ ID NO: 568152 - DNA, 25 bp, Homo sapien
tgttcagcaagctacactacatcca

SEQ ID NO: 568153 - DNA, 25 bp, Homo sapien
tgctgtgtcactcaaacaaccactc

SEQ ID NO: 568154 - DNA, 25 bp, Homo sapien
aagcataagataaatgcattacacc

SEQ ID NO: 568155 - DNA, 25 bp, Homo sapien
tatttataaggactgacaatagcct

SEQ ID NO: 568156 - DNA, 25 bp, Homo sapien
gccttgtattcgttatttgcagaca

SEQ ID NO: 568157 - DNA, 25 bp, Homo sapien
tgtgcatggacactagctaagcgtc

SEQ ID NO: 568158 - DNA, 25 bp, Homo sapien
aaagattactctttagtggaccaga

SEQ ID NO: 568159 - DNA, 25 bp, Homo sapien
tagataagcatagacttgctctcca

SEQ ID NO: 568160 - DNA, 25 bp, Homo sapien
gaagctaccacttagtattaggaca

SEQ ID NO: 568161 - DNA, 25 bp, Homo sapien
aataaagcccacagtaaagattact

SEQ ID NO: 568162 - DNA, 25 bp, Homo sapien
gacaggtatcggaatctaggacaca

SEQ ID NO: 568163 - DNA, 25 bp, Homo sapien
caaaagacggattctggcccaatca

SEQ ID NO: 568164 - DNA, 25 bp, Homo sapien
tgtactcgtacgtaaggaccaagga

SEQ ID NO: 568165 - DNA, 25 bp, Homo sapien
cataggtagcactggtaagctctcc

SEQ ID NO: 568166 - DNA, 25 bp, Homo sapien
cctcaaggcaattgagcatggctct

SEQ ID NO: 568167 - DNA, 25 bp, Homo sapien
ggcaggtgcagatgtctccatatat

SEQ ID NO: 568168 - DNA, 25 bp, Homo sapien
cctaaagcaccgagattagaggcat

SEQ ID NO: 568169 - DNA, 25 bp, Homo sapien
cattcttgggccataggttatacaa

SEQ ID NO: 568170 - DNA, 25 bp, Homo sapien
tcagtaggagttgagcacgtaaatg

SEQ ID NO: 568171 - DNA, 25 bp, Homo sapien
cttacaataaaccaggcaatgtgct

SEQ ID NO: 568172 - DNA, 25 bp, Homo sapien
tctgagagcgcacttagctgtaaaa

SEQ ID NO: 568173 - DNA, 25 bp, Homo sapien
ggttacatgttctaagtgccttaca

SEQ ID NO: 568174 - DNA, 25 bp, Homo sapien
ggtattacaagcgcccaccaccaca

SEQ ID NO: 568175 - DNA, 25 bp, Homo sapien
attacaggcgagagccactgcgtcc

SEQ ID NO: 568176 - DNA, 25 bp, Homo sapien
accaccacacccagctaattttttg

SEQ ID NO: 568177 - DNA, 25 bp, Homo sapien
acaggcgagagccactgcgtccagc

SEQ ID NO: 568178 - DNA, 25 bp, Homo sapien
caattttgaaaaaccacggatcagg

SEQ ID NO: 568179 - DNA, 25 bp, Homo sapien
tatcagtagtaaagttcatccggac

SEQ ID NO: 568180 - DNA, 25 bp, Homo sapien
ctgtggaaactacgatgactgtgct

SEQ ID NO: 568181 - DNA, 25 bp, Homo sapien
gtttgatgcacctggatacatgggc

SEQ ID NO: 568182 - DNA, 25 bp, Homo sapien
cagtatgcctcgtgtgcagaaagga

SEQ ID NO: 568183 - DNA, 25 bp, Homo sapien
ttttcggagaagcacctgtggcagt

SEQ ID NO: 568184 - DNA, 25 bp, Homo sapien
gccacaactgtaaggttttcggaga

SEQ ID NO: 568185 - DNA, 25 bp, Homo sapien
gaaaggaagcgatactgaacattca

SEQ ID NO: 568186 - DNA, 25 bp, Homo sapien
ctatatggaatgctccccctttcta

SEQ ID NO: 568187 - DNA, 25 bp, Homo sapien
ggaatgctccccctttctaggatta

SEQ ID NO: 568188 - DNA, 25 bp, Homo sapien
atatggaatgctccccctttctagg

SEQ ID NO: 568189 - DNA, 25 bp, Homo sapien
atggaatgctccccctttctaggat

SEQ ID NO: 568190 - DNA, 25 bp, Homo sapien
aaaaatcaagtcaattcgaattacg

SEQ ID NO: 568191 - DNA, 25 bp, Homo sapien
aaatcaagtcaattcgaattacgta

SEQ ID NO: 568192 - DNA, 25 bp, Homo sapien
gaaaaaatcaagtcaattcgaatta

SEQ ID NO: 568193 - DNA, 25 bp, Homo sapien
aatcaagtcaattcgaattacgtag

SEQ ID NO: 568194 - DNA, 25 bp, Homo sapien
tctagacagggctctatggtaaaca

SEQ ID NO: 568195 - DNA, 25 bp, Homo sapien
caattagataaaaggaggctgcaca

SEQ ID NO: 568196 - DNA, 25 bp, Homo sapien
caaccggaaaatagccaagaccaga

SEQ ID NO: 568197 - DNA, 25 bp, Homo sapien
taaaacggacctacaaatctgcctg

SEQ ID NO: 568198 - DNA, 25 bp, Homo sapien
tataagcaagattaaggatggtgac

SEQ ID NO: 568199 - DNA, 25 bp, Homo sapien
gctgaaaactccatacacagagatt

SEQ ID NO: 568200 - DNA, 25 bp, Homo sapien
taataatgaccaacatataagccag

SEQ ID NO: 568201 - DNA, 25 bp, Homo sapien
cacagagatttaggtcctttaaagt

SEQ ID NO: 568202 - DNA, 25 bp, Homo sapien
gaaatgcgttatcttacagatgcaa

SEQ ID NO: 568203 - DNA, 25 bp, Homo sapien
tagaaaatttaatacgatgcacagc

SEQ ID NO: 568204 - DNA, 25 bp, Homo sapien
taatacgatgcacagcagctgaaat

SEQ ID NO: 568205 - DNA, 25 bp, Homo sapien
cagcagctgaaatgcgttatcttac

SEQ ID NO: 568206 - DNA, 25 bp, Homo sapien
taccatatgagcagcgttacaggga

SEQ ID NO: 568207 - DNA, 25 bp, Homo sapien
gattacttgtgctctatctccaggc

SEQ ID NO: 568208 - DNA, 25 bp, Homo sapien
aaaaatatgaaagctcagtccaggg

SEQ ID NO: 568209 - DNA, 25 bp, Homo sapien
gactttgggcactttatgtagcaga

SEQ ID NO: 568210 - DNA, 25 bp, Homo sapien
catttaagggtgaaaaccgcatcca

SEQ ID NO: 568211 - DNA, 25 bp, Homo sapien
tgattgacagcctccggtacctaca

SEQ ID NO: 568212 - DNA, 25 bp, Homo sapien
tatacatgaagtcgcgagagtccct

SEQ ID NO: 568213 - DNA, 25 bp, Homo sapien
ggatcacagcccaaactaatggcga

SEQ ID NO: 568214 - DNA, 25 bp, Homo sapien
aataaatgtataatgccatggctaa

SEQ ID NO: 568215 - DNA, 25 bp, Homo sapien
ggctaatgatttgcatataagatct

SEQ ID NO: 568216 - DNA, 25 bp, Homo sapien
gctaatgatttgcatataagatctc

SEQ ID NO: 568217 - DNA, 25 bp, Homo sapien
taatgccaccagtaccagaagctta

SEQ ID NO: 568218 - DNA, 25 bp, Homo sapien
tctcgacaagaatattgaggctgct

SEQ ID NO: 568219 - DNA, 25 bp, Homo sapien
gctaactgatgtaagctgggctaaa

SEQ ID NO: 568220 - DNA, 25 bp, Homo sapien
catctgctaagacgtggaaatcaaa

SEQ ID NO: 568221 - DNA, 25 bp, Homo sapien
cattcgccacaagggcactgatgca

SEQ ID NO: 568222 - DNA, 25 bp, Homo sapien
cccagagcgagctgccttgtgaatg

SEQ ID NO: 568223 - DNA, 25 bp, Homo sapien
gaatgggagtttcaccctcacaatc

SEQ ID NO: 568224 - DNA, 25 bp, Homo sapien
tgatgcattctaggctcccagagcg

SEQ ID NO: 568225 - DNA, 25 bp, Homo sapien
tgtgaacatcagcagtcaacccagg

SEQ ID NO: 568226 - DNA, 25 bp, Homo sapien
catgaatgaaacaacctgaaagacc

SEQ ID NO: 568227 - DNA, 25 bp, Homo sapien
gaaagaccatcttcataggctatca

SEQ ID NO: 568228 - DNA, 25 bp, Homo sapien
taggctatcagctaagcaagagagg

SEQ ID NO: 568229 - DNA, 25 bp, Homo sapien
ggtggagacgttgagtgtggctccc

SEQ ID NO: 568230 - DNA, 25 bp, Homo sapien
gtcccccaaaggctgcaatgtgggc

SEQ ID NO: 568231 - DNA, 25 bp, Homo sapien
tcccgctctcaccaactgcactaag

SEQ ID NO: 568232 - DNA, 25 bp, Homo sapien
gtgggctggcgtctgcgcgtaccgt

SEQ ID NO: 568233 - DNA, 25 bp, Homo sapien
ggcacaggcgccgtcgatcccgctt

SEQ ID NO: 568234 - DNA, 25 bp, Homo sapien
gcacaggcgccgtcgatcccgcttc

SEQ ID NO: 568235 - DNA, 25 bp, Homo sapien
agcgctgccgcacaggcgccctagg

SEQ ID NO: 568236 - DNA, 25 bp, Homo sapien
ggccgcgagcgctgccgcacaggcg

SEQ ID NO: 568237 - DNA, 25 bp, Homo sapien
agtgcacgggcgtccagccatagaa

SEQ ID NO: 568238 - DNA, 25 bp, Homo sapien
gcgggaaacggagcgagagcagctc

SEQ ID NO: 568239 - DNA, 25 bp, Homo sapien
ccatagaaggagtcctcagaggcca

SEQ ID NO: 568240 - DNA, 25 bp, Homo sapien
ttgccgaaatgcgcggcccagtgca

SEQ ID NO: 568241 - DNA, 25 bp, Homo sapien
aaggaacgagactagcgccgcggtc

SEQ ID NO: 568242 - DNA, 25 bp, Homo sapien
ggtcgcgtcccacaggctgccgagc

SEQ ID NO: 568243 - DNA, 25 bp, Homo sapien
gtcccacaggctgccgagcggagcg

SEQ ID NO: 568244 - DNA, 25 bp, Homo sapien
gccgccgccgcagcacaaaggaacg

SEQ ID NO: 568245 - DNA, 25 bp, Homo sapien
tcagtgtccatacgtgtgacagaca

SEQ ID NO: 568246 - DNA, 25 bp, Homo sapien
gcatctcttgagtgtcgttattaca

SEQ ID NO: 568247 - DNA, 25 bp, Homo sapien
gttattacaccaggagcagtgcgcc

SEQ ID NO: 568248 - DNA, 25 bp, Homo sapien
tccatacgtgtgacagacattgatg

SEQ ID NO: 568249 - DNA, 25 bp, Homo sapien
tgctgcggctccagcattctgacct

SEQ ID NO: 568250 - DNA, 25 bp, Homo sapien
gctccagcattctgacctctggccg

SEQ ID NO: 568251 - DNA, 25 bp, Homo sapien
tctggccgggggcagttcatcccaa

SEQ ID NO: 568252 - DNA, 25 bp, Homo sapien
ggccgggggcagttcatcccaactg

SEQ ID NO: 568253 - DNA, 25 bp, Homo sapien
cactgactgcaggttcggtgtgctg

SEQ ID NO: 568254 - DNA, 25 bp, Homo sapien
cggtgtgctggcaaggacgtgtcac

SEQ ID NO: 568255 - DNA, 25 bp, Homo sapien
cctgtgacttttatccacactgact

SEQ ID NO: 568256 - DNA, 25 bp, Homo sapien
tccaaagtgcggcagcactcagcct

SEQ ID NO: 568257 - DNA, 25 bp, Homo sapien
tcatcttggaggaatggtatggcct

SEQ ID NO: 568258 - DNA, 25 bp, Homo sapien
ccagcccgagtcgtcttccacagcg

SEQ ID NO: 568259 - DNA, 25 bp, Homo sapien
aaatgtcatcttggaggaatggtat

SEQ ID NO: 568260 - DNA, 25 bp, Homo sapien
ggaggaatggtatggcctgaacccc

SEQ ID NO: 568261 - DNA, 25 bp, Homo sapien
cccagaggcaatctcccttgctcag

SEQ ID NO: 568262 - DNA, 25 bp, Homo sapien
ccagaggcaatctcccttgctcagc

SEQ ID NO: 568263 - DNA, 25 bp, Homo sapien
tgttccataattcggcgtctgcccc

SEQ ID NO: 568264 - DNA, 25 bp, Homo sapien
tagtcctagcctggcgtggcgtccg

SEQ ID NO: 568265 - DNA, 25 bp, Homo sapien
tgcaggctctgccggcggccctagt

SEQ ID NO: 568266 - DNA, 25 bp, Homo sapien
ggctctcagtacactttcatgcagc

SEQ ID NO: 568267 - DNA, 25 bp, Homo sapien
gggcttctgttgccgacggccacac

SEQ ID NO: 568268 - DNA, 25 bp, Homo sapien
gttgccgacggccacacctagaggt

SEQ ID NO: 568269 - DNA, 25 bp, Homo sapien
ttctgttgccgacggccacacctag

SEQ ID NO: 568270 - DNA, 25 bp, Homo sapien
ttgccgacggccacacctagaggtg

SEQ ID NO: 568271 - DNA, 25 bp, Homo sapien
gaagagtgtcaatgaccttttccag

SEQ ID NO: 568272 - DNA, 25 bp, Homo sapien
gtgtcaatgaccttttccagagctg

SEQ ID NO: 568273 - DNA, 25 bp, Homo sapien
agagtgtcaatgaccttttccagag

SEQ ID NO: 568274 - DNA, 25 bp, Homo sapien
gagtgtcaatgaccttttccagagc

SEQ ID NO: 568275 - DNA, 25 bp, Homo sapien
tgctgtgtgccacttttcctttatc

SEQ ID NO: 568276 - DNA, 25 bp, Homo sapien
tgattgatgtcattaagaagccaaa

SEQ ID NO: 568277 - DNA, 25 bp, Homo sapien
ttcaccggcaagtgaagtgaagtca

SEQ ID NO: 568278 - DNA, 25 bp, Homo sapien
gagaccattcttggaacgtccatta

SEQ ID NO: 568279 - DNA, 25 bp, Homo sapien
gtcataatcctctttaatatggact

SEQ ID NO: 568280 - DNA, 25 bp, Homo sapien
ttctgagaagtgctgttgtcataat

SEQ ID NO: 568281 - DNA, 25 bp, Homo sapien
gaaggaaaatctgcctgtattccca

SEQ ID NO: 568282 - DNA, 25 bp, Homo sapien
ctgtattcccagaagagggtagctt

SEQ ID NO: 568283 - DNA, 25 bp, Homo sapien
aaaatctcctggaccagaatttcat

SEQ ID NO: 568284 - DNA, 25 bp, Homo sapien
cagatgatgcagacgctgagggtcc

SEQ ID NO: 568285 - DNA, 25 bp, Homo sapien
cacgcactttttaggtgtaatggtc

SEQ ID NO: 568286 - DNA, 25 bp, Homo sapien
gatgtcagcagtaaagctatgggcc

SEQ ID NO: 568287 - DNA, 25 bp, Homo sapien
gcacaggaatcggtggcatcaggtt

SEQ ID NO: 568288 - DNA, 25 bp, Homo sapien
aatactgtggtcatatcgtcatcca

SEQ ID NO: 568289 - DNA, 25 bp, Homo sapien
atactgtggtcatatcgtcatccat

SEQ ID NO: 568290 - DNA, 25 bp, Homo sapien
caaatactgtggtcatatcgtcatc

SEQ ID NO: 568291 - DNA, 25 bp, Homo sapien
aaatactgtggtcatatcgtcatcc

SEQ ID NO: 568292 - DNA, 25 bp, Homo sapien
tgactaacttgacggcagtccagaa

SEQ ID NO: 568293 - DNA, 25 bp, Homo sapien
taacttgacggcagtccagaacttg

SEQ ID NO: 568294 - DNA, 25 bp, Homo sapien
aacttgactaacttgacggcagtcc

SEQ ID NO: 568295 - DNA, 25 bp, Homo sapien
ttaaaacttgactaacttgacggca

SEQ ID NO: 568296 - DNA, 25 bp, Homo sapien
catggtgaaagtcaagagagccaaa

SEQ ID NO: 568297 - DNA, 25 bp, Homo sapien
tgctctaagcatccacgatggcgcc

SEQ ID NO: 568298 - DNA, 25 bp, Homo sapien
tggtgtcttgcaaaggctgctctaa

SEQ ID NO: 568299 - DNA, 25 bp, Homo sapien
gagggagcacccttttgaccaatca

SEQ ID NO: 568300 - DNA, 25 bp, Homo sapien
ctgagggagaaggaccttataaaag

SEQ ID NO: 568301 - DNA, 25 bp, Homo sapien
tcttcggtgatgtctgggccatgtg

SEQ ID NO: 568302 - DNA, 25 bp, Homo sapien
tagccttcttcggtgatgtctgggc

SEQ ID NO: 568303 - DNA, 25 bp, Homo sapien
ggccatgtgttggtgttgtgcacac

SEQ ID NO: 568304 - DNA, 25 bp, Homo sapien
ccacgtagccttcttcggtgatgtc

SEQ ID NO: 568305 - DNA, 25 bp, Homo sapien
gaaagggtgcccattcctaatgcag

SEQ ID NO: 568306 - DNA, 25 bp, Homo sapien
actggccgtgtgcactccatggtcc

SEQ ID NO: 568307 - DNA, 25 bp, Homo sapien
tggactcccgccgtagtgagcgttt

SEQ ID NO: 568308 - DNA, 25 bp, Homo sapien
cgtagtgagcgtttactaaggacct

SEQ ID NO: 568309 - DNA, 25 bp, Homo sapien
ttactgacgaccagctctgacgaga

SEQ ID NO: 568310 - DNA, 25 bp, Homo sapien
gaaattcccattgacgtcctgcagg

SEQ ID NO: 568311 - DNA, 25 bp, Homo sapien
gttgcactgctagacacgaaattcc

SEQ ID NO: 568312 - DNA, 25 bp, Homo sapien
gagcattacaaagccagggagccca

SEQ ID NO: 568313 - DNA, 25 bp, Homo sapien
tccacgcgcacggtggtgacatctg

SEQ ID NO: 568314 - DNA, 25 bp, Homo sapien
ggaggaaactctccgcgatgcaagc

SEQ ID NO: 568315 - DNA, 25 bp, Homo sapien
cggacgtcctaggtatcccaggtgg

SEQ ID NO: 568316 - DNA, 25 bp, Homo sapien
gggtaagggcacactctccgggaca

SEQ ID NO: 568317 - DNA, 25 bp, Homo sapien
gactccacgaagaagcctcaccgtg

SEQ ID NO: 568318 - DNA, 25 bp, Homo sapien
cgatgacatcgagctggagaaggac

SEQ ID NO: 568319 - DNA, 25 bp, Homo sapien
gggagcacaccatgaatgccgatga

SEQ ID NO: 568320 - DNA, 25 bp, Homo sapien
ccagtgggcttcctgacgtgcatac

SEQ ID NO: 568321 - DNA, 25 bp, Homo sapien
gcccccagaacagttcttctgtgga

SEQ ID NO: 568322 - DNA, 25 bp, Homo sapien
acatcgccacgatgggcctcgagca

SEQ ID NO: 568323 - DNA, 25 bp, Homo sapien
gtgcctttgtcccacatcgccacga

SEQ ID NO: 568324 - DNA, 25 bp, Homo sapien
gcctttgtcccacatcgccacgatg

SEQ ID NO: 568325 - DNA, 25 bp, Homo sapien
tttgtcccacatcgccacgatgggc

SEQ ID NO: 568326 - DNA, 25 bp, Homo sapien
cgtgggcaaagcatccgtggactca

SEQ ID NO: 568327 - DNA, 25 bp, Homo sapien
ccctgtcttcgtgggcaaagcatcc

SEQ ID NO: 568328 - DNA, 25 bp, Homo sapien
ttacagggcagaactccctgtcttc

SEQ ID NO: 568329 - DNA, 25 bp, Homo sapien
cagggcagaactccctgtcttcgtg

SEQ ID NO: 568330 - DNA, 25 bp, Homo sapien
tgtgccatcgaattgcagcagtgtg

SEQ ID NO: 568331 - DNA, 25 bp, Homo sapien
catttgggacggcactgatagacat

SEQ ID NO: 568332 - DNA, 25 bp, Homo sapien
cagaaggacactaagctcgtggcat

SEQ ID NO: 568333 - DNA, 25 bp, Homo sapien
cactcgtgccatcgttggaccaaga

SEQ ID NO: 568334 - DNA, 25 bp, Homo sapien
catgacattccctgcgttcgcccat

SEQ ID NO: 568335 - DNA, 25 bp, Homo sapien
ctctttcgagtccttgttctgctta

SEQ ID NO: 568336 - DNA, 25 bp, Homo sapien
tcctttcttctcgatgttctctcct

SEQ ID NO: 568337 - DNA, 25 bp, Homo sapien
ttctctttcgagtccttgttctgct

SEQ ID NO: 568338 - DNA, 25 bp, Homo sapien
aataaagtgggtctgctctgcgtgg

SEQ ID NO: 568339 - DNA, 25 bp, Homo sapien
tctccgagctgagttagggacccct

SEQ ID NO: 568340 - DNA, 25 bp, Homo sapien
ctggataaaatgatgcgtgttgacg

SEQ ID NO: 568341 - DNA, 25 bp, Homo sapien
gcgtgttgacggaatcctggcactt

SEQ ID NO: 568342 - DNA, 25 bp, Homo sapien
gggcacagtctgcgtcctcggcagg

SEQ ID NO: 568343 - DNA, 25 bp, Homo sapien
acagtctgcgtcctcggcagggggc

SEQ ID NO: 568344 - DNA, 25 bp, Homo sapien
aggggcacagtctgcgtcctcggca

SEQ ID NO: 568345 - DNA, 25 bp, Homo sapien
ggcacagtctgcgtcctcggcaggg

SEQ ID NO: 568346 - DNA, 25 bp, Homo sapien
gtggtgtggttctgactaccggcca

SEQ ID NO: 568347 - DNA, 25 bp, Homo sapien
tggtggtgtggttctgactaccggc

SEQ ID NO: 568348 - DNA, 25 bp, Homo sapien
tggtgtggttctgactaccggccat

SEQ ID NO: 568349 - DNA, 25 bp, Homo sapien
ggtggtgtggttctgactaccggcc

SEQ ID NO: 568350 - DNA, 25 bp, Homo sapien
ggcaattttaagcacagctctatgg

SEQ ID NO: 568351 - DNA, 25 bp, Homo sapien
ttggcaattttaagcacagctctat

SEQ ID NO: 568352 - DNA, 25 bp, Homo sapien
tggcaattttaagcacagctctatg

SEQ ID NO: 568353 - DNA, 25 bp, Homo sapien
attggcaattttaagcacagctcta

SEQ ID NO: 568354 - DNA, 25 bp, Homo sapien
cgtaggctgccgcatcttggttgat

SEQ ID NO: 568355 - DNA, 25 bp, Homo sapien
gcggcccctaccacttctgcagagg

SEQ ID NO: 568356 - DNA, 25 bp, Homo sapien
aggctcgtaggctgccgcatcttgg

SEQ ID NO: 568357 - DNA, 25 bp, Homo sapien
cgcatcttggttgatacagcggccc

SEQ ID NO: 568358 - DNA, 25 bp, Homo sapien
ctcgttggtaggactttgcaggctg

SEQ ID NO: 568359 - DNA, 25 bp, Homo sapien
ggttcagcagaagtgtacaagcatc

SEQ ID NO: 568360 - DNA, 25 bp, Homo sapien
ggtggtccatctctcctcgttggta

SEQ ID NO: 568361 - DNA, 25 bp, Homo sapien
tttagagcaggcagcggtggtcacc

SEQ ID NO: 568362 - DNA, 25 bp, Homo sapien
tttatccattctgtcagcttgtcca

SEQ ID NO: 568363 - DNA, 25 bp, Homo sapien
taacagtagcatcacggaattgacg

SEQ ID NO: 568364 - DNA, 25 bp, Homo sapien
ggaattgacgagtaagccctcccaa

SEQ ID NO: 568365 - DNA, 25 bp, Homo sapien
aatgccgcggtaattgtgatatgtg

SEQ ID NO: 568366 - DNA, 25 bp, Homo sapien
cgatatccgtttcaggaggacccgg

SEQ ID NO: 568367 - DNA, 25 bp, Homo sapien
tgtagttccctgatgaggacggagc

SEQ ID NO: 568368 - DNA, 25 bp, Homo sapien
ggttctcctgagacgtccctgcagg

SEQ ID NO: 568369 - DNA, 25 bp, Homo sapien
ggatgcccctactctctttctggag

SEQ ID NO: 568370 - DNA, 25 bp, Homo sapien
gctagctggtcaattagagcatcca

SEQ ID NO: 568371 - DNA, 25 bp, Homo sapien
tagcacagttgtgaccggacagact

SEQ ID NO: 568372 - DNA, 25 bp, Homo sapien
gctgatcaattagcacagtcgtgac

SEQ ID NO: 568373 - DNA, 25 bp, Homo sapien
cagactgttagctgatcaactggag

SEQ ID NO: 568374 - DNA, 25 bp, Homo sapien
tgattgcaagagaaatccaccggca

SEQ ID NO: 568375 - DNA, 25 bp, Homo sapien
gaagacactgggtacaagccttgat

SEQ ID NO: 568376 - DNA, 25 bp, Homo sapien
tgcttgttaaactgcccgcgggtca

SEQ ID NO: 568377 - DNA, 25 bp, Homo sapien
tcatcagttgttcgaggaagctcgc

SEQ ID NO: 568378 - DNA, 25 bp, Homo sapien
gggcgcacggagaagcgggccgggc

SEQ ID NO: 568379 - DNA, 25 bp, Homo sapien
cgcaggttcccgagccgctcctgag

SEQ ID NO: 568380 - DNA, 25 bp, Homo sapien
aggcgcctgacagcgggccggggcg

SEQ ID NO: 568381 - DNA, 25 bp, Homo sapien
ttcccgagccgctcctgagaaggcg

SEQ ID NO: 568382 - DNA, 25 bp, Homo sapien
cagcgatgaattccgccgagcaaac

SEQ ID NO: 568383 - DNA, 25 bp, Homo sapien
ccgcagcgatgaattccgccgagca

SEQ ID NO: 568384 - DNA, 25 bp, Homo sapien
cgggccgcagcgatgaattccgccg

SEQ ID NO: 568385 - DNA, 25 bp, Homo sapien
tcccgggccgcagcgatgaattccg

SEQ ID NO: 568386 - DNA, 25 bp, Homo sapien
tttctgcaggcgtcgctgaaggatg

SEQ ID NO: 568387 - DNA, 25 bp, Homo sapien
tgggggtgctggagtcgcccaaaaa

SEQ ID NO: 568388 - DNA, 25 bp, Homo sapien
gttacgtggctcatcactctggggg

SEQ ID NO: 568389 - DNA, 25 bp, Homo sapien
agggctttctgcaggcgtcgctgaa

SEQ ID NO: 568390 - DNA, 25 bp, Homo sapien
gcaggagagtttctaaaaacgatgt

SEQ ID NO: 568391 - DNA, 25 bp, Homo sapien
ccctgacccgaatctctggaagtga

SEQ ID NO: 568392 - DNA, 25 bp, Homo sapien
gtttgttttcatcgcccacaagccg

SEQ ID NO: 568393 - DNA, 25 bp, Homo sapien
aggctggagcgtgtgaaccctgacc

SEQ ID NO: 568394 - DNA, 25 bp, Homo sapien
tggacagaccaccattgtctgggtt

SEQ ID NO: 568395 - DNA, 25 bp, Homo sapien
tctggtcagcgccagatctgggcgc

SEQ ID NO: 568396 - DNA, 25 bp, Homo sapien
tcttgcaactttcgggggctggcag

SEQ ID NO: 568397 - DNA, 25 bp, Homo sapien
cctgctgaacgtggcttccagggcc

SEQ ID NO: 568398 - DNA, 25 bp, Homo sapien
ttccccagagaataagcctcggacc

SEQ ID NO: 568399 - DNA, 25 bp, Homo sapien
tctggcctctttggttcacttttcc

SEQ ID NO: 568400 - DNA, 25 bp, Homo sapien
ttggttcacttttccccagagaata

SEQ ID NO: 568401 - DNA, 25 bp, Homo sapien
ttcacttttccccagagaataagcc

SEQ ID NO: 568402 - DNA, 25 bp, Homo sapien
aaagtgcgaacgtgagaaggccaag

SEQ ID NO: 568403 - DNA, 25 bp, Homo sapien
gagatgaataaccaggtggtgctga

SEQ ID NO: 568404 - DNA, 25 bp, Homo sapien
agggtggagatgaataaccaggtgg

SEQ ID NO: 568405 - DNA, 25 bp, Homo sapien
ttaaagtgcgaacgtgagaaggcca

SEQ ID NO: 568406 - DNA, 25 bp, Homo sapien
gagatgtgcttaactgtggatgtcc

SEQ ID NO: 568407 - DNA, 25 bp, Homo sapien
ataatatgaaagtcccaactggccc

SEQ ID NO: 568408 - DNA, 25 bp, Homo sapien
cagccccaactgctatttatagaga

SEQ ID NO: 568409 - DNA, 25 bp, Homo sapien
gaggcttttatagcccacaagtgtc

SEQ ID NO: 568410 - DNA, 25 bp, Homo sapien
cactagcacatttccgtcagaggcc

SEQ ID NO: 568411 - DNA, 25 bp, Homo sapien
tagcacatttccgtcagaggccaca

SEQ ID NO: 568412 - DNA, 25 bp, Homo sapien
gcacatttccgtcagaggccacagc

SEQ ID NO: 568413 - DNA, 25 bp, Homo sapien
actagcacatttccgtcagaggcca

SEQ ID NO: 568414 - DNA, 25 bp, Homo sapien
ttagagtttgtgagaaccaagcctc

SEQ ID NO: 568415 - DNA, 25 bp, Homo sapien
cataatctggccagttccatactca

SEQ ID NO: 568416 - DNA, 25 bp, Homo sapien
gatgcatgagtcagttgaagcactg

SEQ ID NO: 568417 - DNA, 25 bp, Homo sapien
gaactggaggtttggtacacttgta

SEQ ID NO: 568418 - DNA, 25 bp, Homo sapien
ggagcagcttacttatctggtattt

SEQ ID NO: 568419 - DNA, 25 bp, Homo sapien
gccagagtgccgtggaagagcataa

SEQ ID NO: 568420 - DNA, 25 bp, Homo sapien
gagacttccaagttagctccactga

SEQ ID NO: 568421 - DNA, 25 bp, Homo sapien
aaacgacttgcttagtatgctgaag

SEQ ID NO: 568422 - DNA, 25 bp, Homo sapien
ggagatctgccctatgaagacccca

SEQ ID NO: 568423 - DNA, 25 bp, Homo sapien
tctgcatgacatggtggagatctgc

SEQ ID NO: 568424 - DNA, 25 bp, Homo sapien
gcatgacatggtggagatctgccct

SEQ ID NO: 568425 - DNA, 25 bp, Homo sapien
acatggtggagatctgccctatgaa

SEQ ID NO: 568426 - DNA, 25 bp, Homo sapien
tgcacatgggacaacattcaaaggg

SEQ ID NO: 568427 - DNA, 25 bp, Homo sapien
agtggcatatgcttgcagagacagc

SEQ ID NO: 568428 - DNA, 25 bp, Homo sapien
cgtagggaactcttgttaagtggca

SEQ ID NO: 568429 - DNA, 25 bp, Homo sapien
tagatattatccacggtgttcccca

SEQ ID NO: 568430 - DNA, 25 bp, Homo sapien
caggcacaggatggttttaagggaa

SEQ ID NO: 568431 - DNA, 25 bp, Homo sapien
catatttgttatacagccaggcact

SEQ ID NO: 568432 - DNA, 25 bp, Homo sapien
gacatgaagctggttgggccgtccc

SEQ ID NO: 568433 - DNA, 25 bp, Homo sapien
tagccttagaaggtgccaagccatg

SEQ ID NO: 568434 - DNA, 25 bp, Homo sapien
gcttgccccatgaaaatcaaaagag

SEQ ID NO: 568435 - DNA, 25 bp, Homo sapien
tactcacataacacggaatactgtg

SEQ ID NO: 568436 - DNA, 25 bp, Homo sapien
taggatccacgaagactctggccag

SEQ ID NO: 568437 - DNA, 25 bp, Homo sapien
agtcttactgtaatggagctgcagg

SEQ ID NO: 568438 - DNA, 25 bp, Homo sapien
taaagttccctcgtgtagtgtgcct

SEQ ID NO: 568439 - DNA, 25 bp, Homo sapien
gaggccacgttcaagtacagggtca

SEQ ID NO: 568440 - DNA, 25 bp, Homo sapien
cacagccttcttgcgcttagggaca

SEQ ID NO: 568441 - DNA, 25 bp, Homo sapien
tcttgccgtgggtaaggtccaaaca

SEQ ID NO: 568442 - DNA, 25 bp, Homo sapien
tcagacttcggcacaagcaggttct

SEQ ID NO: 568443 - DNA, 25 bp, Homo sapien
ggtttggcctgagcagttagaagaa

SEQ ID NO: 568444 - DNA, 25 bp, Homo sapien
cctcagtgaagatcaggtctggact

SEQ ID NO: 568445 - DNA, 25 bp, Homo sapien
gacatgctccatcaggatatctgtg

SEQ ID NO: 568446 - DNA, 25 bp, Homo sapien
tcttcacggtgtcgagcgtgctggt

SEQ ID NO: 568447 - DNA, 25 bp, Homo sapien
agggtgagaacaccgccgttctgga

SEQ ID NO: 568448 - DNA, 25 bp, Homo sapien
caagagtggccttaattcacaagaa

SEQ ID NO: 568449 - DNA, 25 bp, Homo sapien
gcagcagtctcgttgatcttcacgg

SEQ ID NO: 568450 - DNA, 25 bp, Homo sapien
ctgttcgccggagggttcaggactt

SEQ ID NO: 568451 - DNA, 25 bp, Homo sapien
ggtgctgagttactgccccgtgtgt

SEQ ID NO: 568452 - DNA, 25 bp, Homo sapien
ctgtacctaatggagcccccgtgtt

SEQ ID NO: 568453 - DNA, 25 bp, Homo sapien
agcttccttccacggggtgctgagt

SEQ ID NO: 568454 - DNA, 25 bp, Homo sapien
tggtaaaagcttgtctgcatgtgtt

SEQ ID NO: 568455 - DNA, 25 bp, Homo sapien
ctccagtgtgactccatccgccttt

SEQ ID NO: 568456 - DNA, 25 bp, Homo sapien
ccagtgtgactccatccgcctttaa

SEQ ID NO: 568457 - DNA, 25 bp, Homo sapien
agtgtgactccatccgcctttaaat

SEQ ID NO: 568458 - DNA, 25 bp, Homo sapien
agccggagaggatgagaaggtcttc

SEQ ID NO: 568459 - DNA, 25 bp, Homo sapien
aggagccggagaggatgagaaggtc

SEQ ID NO: 568460 - DNA, 25 bp, Homo sapien
ccggagaggatgagaaggtcttccc

SEQ ID NO: 568461 - DNA, 25 bp, Homo sapien
ctgaggagccggagaggatgagaag

SEQ ID NO: 568462 - DNA, 25 bp, Homo sapien
caatggtgtcatgcccaggggtggg

SEQ ID NO: 568463 - DNA, 25 bp, Homo sapien
gcatggctgggcctcttaacaatgg

SEQ ID NO: 568464 - DNA, 25 bp, Homo sapien
aggaacttcagctttgatggagttg

SEQ ID NO: 568465 - DNA, 25 bp, Homo sapien
gcctggggtctgacgaataccagga

SEQ ID NO: 568466 - DNA, 25 bp, Homo sapien
cagcgtggccgctctcagctctgcc

SEQ ID NO: 568467 - DNA, 25 bp, Homo sapien
tcagcgtggccgctctcagctctgc

SEQ ID NO: 568468 - DNA, 25 bp, Homo sapien
ctcagcgtggccgctctcagctctg

SEQ ID NO: 568469 - DNA, 25 bp, Homo sapien
cctggtgcttccttgctcgaaatca

SEQ ID NO: 568470 - DNA, 25 bp, Homo sapien
gactttagaggttagctgattcagc

SEQ ID NO: 568471 - DNA, 25 bp, Homo sapien
cttgagttttacaactggaagtgac

SEQ ID NO: 568472 - DNA, 25 bp, Homo sapien
tgaggaacgggacacccacagctgt

SEQ ID NO: 568473 - DNA, 25 bp, Homo sapien
tgcatcttgcgctctgatggagcac

SEQ ID NO: 568474 - DNA, 25 bp, Homo sapien
cagctgccgtgattttaggctgaac

SEQ ID NO: 568475 - DNA, 25 bp, Homo sapien
aatatagccttttctaggacaccct

SEQ ID NO: 568476 - DNA, 25 bp, Homo sapien
taggctgaacgtggtagtatagagt

SEQ ID NO: 568477 - DNA, 25 bp, Homo sapien
caggccttccctgtggctgggtgga

SEQ ID NO: 568478 - DNA, 25 bp, Homo sapien
caagaagtgtgggtggtctcaggcc

SEQ ID NO: 568479 - DNA, 25 bp, Homo sapien
agaagccagtgtgggcagatggaat

SEQ ID NO: 568480 - DNA, 25 bp, Homo sapien
agccagtgtgggcagatggaatcac

SEQ ID NO: 568481 - DNA, 25 bp, Homo sapien
tagagctctgaacgttctgtgcagt

SEQ ID NO: 568482 - DNA, 25 bp, Homo sapien
gctgggctcgcttaccatcagtggt

SEQ ID NO: 568483 - DNA, 25 bp, Homo sapien
tcctagggttgtcaggctgtgcgct

SEQ ID NO: 568484 - DNA, 25 bp, Homo sapien
ggcacgagcaggcttctcctagggt

SEQ ID NO: 568485 - DNA, 25 bp, Homo sapien
atttttgacataaagcaacacgcag

SEQ ID NO: 568486 - DNA, 25 bp, Homo sapien
gctgaattttggatgtcgttattaa

SEQ ID NO: 568487 - DNA, 25 bp, Homo sapien
tttgacataaagcaacacgcagctg

SEQ ID NO: 568488 - DNA, 25 bp, Homo sapien
agctgaattttggatgtcgttatta

SEQ ID NO: 568489 - DNA, 25 bp, Homo sapien
tggaggaacagtgtttgatgtgagt

SEQ ID NO: 568490 - DNA, 25 bp, Homo sapien
ctgtggaggaacagtgtttgatgtg

SEQ ID NO: 568491 - DNA, 25 bp, Homo sapien
gaacagtgtttgatgtgagtataat

SEQ ID NO: 568492 - DNA, 25 bp, Homo sapien
gaggaacagtgtttgatgtgagtat

SEQ ID NO: 568493 - DNA, 25 bp, Homo sapien
actgagaaacacagcagtgggaaaa

SEQ ID NO: 568494 - DNA, 25 bp, Homo sapien
tgagcactgttgtggaaactgagaa

SEQ ID NO: 568495 - DNA, 25 bp, Homo sapien
cagaagttatgaagcacatctgagg

SEQ ID NO: 568496 - DNA, 25 bp, Homo sapien
gaaaaccaagagtgtcttcccagaa

SEQ ID NO: 568497 - DNA, 25 bp, Homo sapien
tctgagtgcgtgagtaacagccaac

SEQ ID NO: 568498 - DNA, 25 bp, Homo sapien
cacacagacattgactctgtgaact

SEQ ID NO: 568499 - DNA, 25 bp, Homo sapien
ctgtgaactctgagtgcgtgagtaa

SEQ ID NO: 568500 - DNA, 25 bp, Homo sapien
aactctgagtgcgtgagtaacagcc

SEQ ID NO: 568501 - DNA, 25 bp, Homo sapien
ccagcacagaaggtcggaagaggac

SEQ ID NO: 568502 - DNA, 25 bp, Homo sapien
gatgattaactctggactttgctgg

SEQ ID NO: 568503 - DNA, 25 bp, Homo sapien
actttgctgggttggtgacacgtca

SEQ ID NO: 568504 - DNA, 25 bp, Homo sapien
tggttgaagccagcggtgatgatta

SEQ ID NO: 568505 - DNA, 25 bp, Homo sapien
tcctgattggaagcaagggcacgtt

SEQ ID NO: 568506 - DNA, 25 bp, Homo sapien
cagcagtgccctcttgttgaaaacg

SEQ ID NO: 568507 - DNA, 25 bp, Homo sapien
cttgggcgtttgtggaaattacgct

SEQ ID NO: 568508 - DNA, 25 bp, Homo sapien
tgaaaacgaaccacagggtgttctg

SEQ ID NO: 568509 - DNA, 25 bp, Homo sapien
tagaaccattggtagacaggcccac

SEQ ID NO: 568510 - DNA, 25 bp, Homo sapien
tcttcggcaggtgtttcttcagcac

SEQ ID NO: 568511 - DNA, 25 bp, Homo sapien
tgcatggtgccaggttttgtttggc

SEQ ID NO: 568512 - DNA, 25 bp, Homo sapien
caccccatagagctgatgacgggca

SEQ ID NO: 568513 - DNA, 25 bp, Homo sapien
tgctgtatctggactaagatgatac

SEQ ID NO: 568514 - DNA, 25 bp, Homo sapien
ttgtcaggtaggcactagtggaatg

SEQ ID NO: 568515 - DNA, 25 bp, Homo sapien
gatgatacagatgaaggttgtcagg

SEQ ID NO: 568516 - DNA, 25 bp, Homo sapien
ttccttgctgtatctggactaagat

SEQ ID NO: 568517 - DNA, 25 bp, Homo sapien
ccagctgcagacagtcagtggtgga

SEQ ID NO: 568518 - DNA, 25 bp, Homo sapien
tgtccagctgcagacagtcagtggt

SEQ ID NO: 568519 - DNA, 25 bp, Homo sapien
tccagctgcagacagtcagtggtgg

SEQ ID NO: 568520 - DNA, 25 bp, Homo sapien
cttgtccagctgcagacagtcagtg

SEQ ID NO: 568521 - DNA, 25 bp, Homo sapien
tcagcactgtgggtcgtaaaagctg

SEQ ID NO: 568522 - DNA, 25 bp, Homo sapien
ctgtggcgtccaggctgtgaggtct

SEQ ID NO: 568523 - DNA, 25 bp, Homo sapien
cactgtgggtcgtaaaagctgcctt

SEQ ID NO: 568524 - DNA, 25 bp, Homo sapien
ttgaaaactgcctgcgtcctctggg

SEQ ID NO: 568525 - DNA, 25 bp, Homo sapien
tactagatgcgcagaaaatacgtgt

SEQ ID NO: 568526 - DNA, 25 bp, Homo sapien
cagagtttacagtcaacagtaggca

SEQ ID NO: 568527 - DNA, 25 bp, Homo sapien
cagtaggcaaacagagtaacgaccc

SEQ ID NO: 568528 - DNA, 25 bp, Homo sapien
gctctgtaacagactcgggtgaaaa

SEQ ID NO: 568529 - DNA, 25 bp, Homo sapien
cgggctaaggcgctgagttccgttt

SEQ ID NO: 568530 - DNA, 25 bp, Homo sapien
tcactaacgtgaaggctggcctcag

SEQ ID NO: 568531 - DNA, 25 bp, Homo sapien
tcaagttgtttgagaggatatgggt

SEQ ID NO: 568532 - DNA, 25 bp, Homo sapien
aggattcgggctaaggcgctgagtt

SEQ ID NO: 568533 - DNA, 25 bp, Homo sapien
gtatgtgtgactctagctgtcatca

SEQ ID NO: 568534 - DNA, 25 bp, Homo sapien
aagatgtagatggtatgtgtgactc

SEQ ID NO: 568535 - DNA, 25 bp, Homo sapien
tgtagatggtatgtgtgactctagc

SEQ ID NO: 568536 - DNA, 25 bp, Homo sapien
gatggtatgtgtgactctagctgtc

SEQ ID NO: 568537 - DNA, 25 bp, Homo sapien
ccagagactgcatggaggtggaacc

SEQ ID NO: 568538 - DNA, 25 bp, Homo sapien
caggtcttaatgtacgtgtagcatt

SEQ ID NO: 568539 - DNA, 25 bp, Homo sapien
atgtacgtgtagcattttcctgaag

SEQ ID NO: 568540 - DNA, 25 bp, Homo sapien
tcaggtcttaatgtacgtgtagcat

SEQ ID NO: 568541 - DNA, 25 bp, Homo sapien
tcttaatgtacgtgtagcattttcc

SEQ ID NO: 568542 - DNA, 25 bp, Homo sapien
ctcctgcctttgtacttggattctt

SEQ ID NO: 568543 - DNA, 25 bp, Homo sapien
ggattctttcttggtcctcttgcca

SEQ ID NO: 568544 - DNA, 25 bp, Homo sapien
cctgcctttgtacttggattctttc

SEQ ID NO: 568545 - DNA, 25 bp, Homo sapien
cttggtcctcttgccagcttttcca

SEQ ID NO: 568546 - DNA, 25 bp, Homo sapien
cacctggggtagactaatctgctca

SEQ ID NO: 568547 - DNA, 25 bp, Homo sapien
gacggtctttaagctgccacacctg

SEQ ID NO: 568548 - DNA, 25 bp, Homo sapien
gccacacctggggtagactaatctg

SEQ ID NO: 568549 - DNA, 25 bp, Homo sapien
gtgtgtgacggtctttaagctgcca

SEQ ID NO: 568550 - DNA, 25 bp, Homo sapien
tctgtctagtagatgcacttggcag

SEQ ID NO: 568551 - DNA, 25 bp, Homo sapien
gacgttcaagatccctaagcagaca

SEQ ID NO: 568552 - DNA, 25 bp, Homo sapien
ccatcaactttctgaggactggcca

SEQ ID NO: 568553 - DNA, 25 bp, Homo sapien
tgtgttggcgcagcaaggacgttca

SEQ ID NO: 568554 - DNA, 25 bp, Homo sapien
ttatcccagggacgtgtgtgtacac

SEQ ID NO: 568555 - DNA, 25 bp, Homo sapien
taggctattaggatcagctctgtcg

SEQ ID NO: 568556 - DNA, 25 bp, Homo sapien
gaatgaatgacgatgacacaggcgt

SEQ ID NO: 568557 - DNA, 25 bp, Homo sapien
taatacggaaaaactgggcagagct

SEQ ID NO: 568558 - DNA, 25 bp, Homo sapien
cccatgcagggactagaatgtgatc

SEQ ID NO: 568559 - DNA, 25 bp, Homo sapien
gaaggtcgcgcacttcctcagaatg

SEQ ID NO: 568560 - DNA, 25 bp, Homo sapien
gaaaagatgaccttacagtggcttc

SEQ ID NO: 568561 - DNA, 25 bp, Homo sapien
aaattgtggcattagctgccgtccc

SEQ ID NO: 568562 - DNA, 25 bp, Homo sapien
tggccgtgaagtgggagctctcctt

SEQ ID NO: 568563 - DNA, 25 bp, Homo sapien
acggctgtgttctggtaatcgtgca

SEQ ID NO: 568564 - DNA, 25 bp, Homo sapien
ttgtgatctaagtgccagaaccatg

SEQ ID NO: 568565 - DNA, 25 bp, Homo sapien
gagactctggccttatctgtaggga

SEQ ID NO: 568566 - DNA, 25 bp, Homo sapien
taacataggcataagcagggaacgt

SEQ ID NO: 568567 - DNA, 25 bp, Homo sapien
taaagcaatatacaccttaggttcc

SEQ ID NO: 568568 - DNA, 25 bp, Homo sapien
catgctgcaggctgatactgatggg

SEQ ID NO: 568569 - DNA, 25 bp, Homo sapien
cagtgctcaccgaaagtaaaatccc

SEQ ID NO: 568570 - DNA, 25 bp, Homo sapien
gcgtctgggaccttgaatgcctgcc

SEQ ID NO: 568571 - DNA, 25 bp, Homo sapien
caggaaaaatgcgtctgagagcaac

SEQ ID NO: 568572 - DNA, 25 bp, Homo sapien
tgtgcttgtccacatgcgctgggcg

SEQ ID NO: 568573 - DNA, 25 bp, Homo sapien
cacgatttgcccgagggttactcct

SEQ ID NO: 568574 - DNA, 25 bp, Homo sapien
tggaagccgttgactccgaaacatg

SEQ ID NO: 568575 - DNA, 25 bp, Homo sapien
catggaagccgttgactccgaaaca

SEQ ID NO: 568576 - DNA, 25 bp, Homo sapien
tggaagccgttgactctgaaacatg

SEQ ID NO: 568577 - DNA, 25 bp, Homo sapien
tcatggaagccgttgactccgaaac

SEQ ID NO: 568578 - DNA, 25 bp, Homo sapien
aaacgacgaatgaacctttgtgctg

SEQ ID NO: 568579 - DNA, 25 bp, Homo sapien
cagtgacagggtattatgagctctt

SEQ ID NO: 568580 - DNA, 25 bp, Homo sapien
tgagctctttgtgcacataattcca

SEQ ID NO: 568581 - DNA, 25 bp, Homo sapien
tgtgcaagttgtagtattcagtgac

SEQ ID NO: 568582 - DNA, 25 bp, Homo sapien
atcataacccgtgtttagtgagcat

SEQ ID NO: 568583 - DNA, 25 bp, Homo sapien
tcataacccgtgtttagtgagcatc

SEQ ID NO: 568584 - DNA, 25 bp, Homo sapien
taacccgtgtttagtgagcacctgt

SEQ ID NO: 568585 - DNA, 25 bp, Homo sapien
ataacccgtgtttagtgagcacctg

SEQ ID NO: 568586 - DNA, 25 bp, Homo sapien
tcataacccgtgtttagtgagcacc

SEQ ID NO: 568587 - DNA, 25 bp, Homo sapien
cataacccgtgtttagtgagcacct

SEQ ID NO: 568588 - DNA, 25 bp, Homo sapien
tctcttcgtgggttagttccagcct

SEQ ID NO: 568589 - DNA, 25 bp, Homo sapien
ggtgctttcccggttggcaacacac

SEQ ID NO: 568590 - DNA, 25 bp, Homo sapien
gtaatgcagcctcactacgaactct

SEQ ID NO: 568591 - DNA, 25 bp, Homo sapien
tgagggcagtctcatacgcactgtt

SEQ ID NO: 568592 - DNA, 25 bp, Homo sapien
cttgtctttgctttgccaaagccat

SEQ ID NO: 568593 - DNA, 25 bp, Homo sapien
gaaggttatgttggatgcactgatg

SEQ ID NO: 568594 - DNA, 25 bp, Homo sapien
tctgcttaatgactgagagcactgg

SEQ ID NO: 568595 - DNA, 25 bp, Homo sapien
gctgtgtctccttactggagtatga

SEQ ID NO: 568596 - DNA, 25 bp, Homo sapien
aagaaagtctgtgagggtctctgac

SEQ ID NO: 568597 - DNA, 25 bp, Homo sapien
ggtgtggtctgtagagatggttggg

SEQ ID NO: 568598 - DNA, 25 bp, Homo sapien
gatgttccaggggtgtggcaatggg

SEQ ID NO: 568599 - DNA, 25 bp, Homo sapien
cctgtttcagggttgtgatggcggg

SEQ ID NO: 568600 - DNA, 25 bp, Homo sapien
tatagagatgttggggcctgttcca

SEQ ID NO: 568601 - DNA, 25 bp, Homo sapien
cctggctgactccagtctccagagg

SEQ ID NO: 568602 - DNA, 25 bp, Homo sapien
ccagagggtgagtgattggaggcct

SEQ ID NO: 568603 - DNA, 25 bp, Homo sapien
cctctctcggcagtgcagagctgct

SEQ ID NO: 568604 - DNA, 25 bp, Homo sapien
tcctggctgactccagtctccagag

SEQ ID NO: 568605 - DNA, 25 bp, Homo sapien
tgtgctttaggcactgtcgacatga

SEQ ID NO: 568606 - DNA, 25 bp, Homo sapien
gcactgtcgacatgagggtgcacat

SEQ ID NO: 568607 - DNA, 25 bp, Homo sapien
gaagagatcgtgctctgtgctttag

SEQ ID NO: 568608 - DNA, 25 bp, Homo sapien
gtcagaactgaagagatcgtgctct

SEQ ID NO: 568609 - DNA, 25 bp, Homo sapien
ctgaaacggccaaatgtcttctgat

SEQ ID NO: 568610 - DNA, 25 bp, Homo sapien
acttgtcttcctgaaacggccaaat

SEQ ID NO: 568611 - DNA, 25 bp, Homo sapien
ccctgagtccttcatagccagccaa

SEQ ID NO: 568612 - DNA, 25 bp, Homo sapien
gtcttcctgaaacggccaaatgtct

SEQ ID NO: 568613 - DNA, 25 bp, Homo sapien
ggatctgttcctccaagtaacaaaa

SEQ ID NO: 568614 - DNA, 25 bp, Homo sapien
aaatgtgttcttgtaacgtgcacca

SEQ ID NO: 568615 - DNA, 25 bp, Homo sapien
gcaccatggcgtcccatttttcctg

SEQ ID NO: 568616 - DNA, 25 bp, Homo sapien
tgggctggatctgttcctccaagta

SEQ ID NO: 568617 - DNA, 25 bp, Homo sapien
atccctgcgaaggctgccgcggctg

SEQ ID NO: 568618 - DNA, 25 bp, Homo sapien
tcatccctgcgaaggctgccgcggc

SEQ ID NO: 568619 - DNA, 25 bp, Homo sapien
aggctgccgcggctgcacggtgctc

SEQ ID NO: 568620 - DNA, 25 bp, Homo sapien
gctgccgcggctgcacggtgctcac

SEQ ID NO: 568621 - DNA, 25 bp, Homo sapien
gctcagctgggaccaggtaaagtgt

SEQ ID NO: 568622 - DNA, 25 bp, Homo sapien
tgagcaggcggcgtcgcgggctcag

SEQ ID NO: 568623 - DNA, 25 bp, Homo sapien
aggagcaggctcgtttctccgggac

SEQ ID NO: 568624 - DNA, 25 bp, Homo sapien
ctggcaccagcaggcgacgggacgc

SEQ ID NO: 568625 - DNA, 25 bp, Homo sapien
cctcatggccatgtctggggtcctt

SEQ ID NO: 568626 - DNA, 25 bp, Homo sapien
tggctcccaggtggatctgacggcc

SEQ ID NO: 568627 - DNA, 25 bp, Homo sapien
ccttgtggtcatgtctgctggtcac

SEQ ID NO: 568628 - DNA, 25 bp, Homo sapien
atctgacggccgctgtgcctctcgg

SEQ ID NO: 568629 - DNA, 25 bp, Homo sapien
aggcggaacgatggcttcttctggt

SEQ ID NO: 568630 - DNA, 25 bp, Homo sapien
ccgggcatagtgtggcctggaggcg

SEQ ID NO: 568631 - DNA, 25 bp, Homo sapien
cctggaggcggaacgatggcttctt

SEQ ID NO: 568632 - DNA, 25 bp, Homo sapien
gccggcgccgggcatagtgtggcct

SEQ ID NO: 568633 - DNA, 25 bp, Homo sapien
ccaggctcccatcttgtgccctggg

SEQ ID NO: 568634 - DNA, 25 bp, Homo sapien
tggggccacctgctgtcatgaccat

SEQ ID NO: 568635 - DNA, 25 bp, Homo sapien
tgccctggggccacctgctgtcatg

SEQ ID NO: 568636 - DNA, 25 bp, Homo sapien
caggctcccatcttgtgccctgggg

SEQ ID NO: 568637 - DNA, 25 bp, Homo sapien
ttcaggccaaccagcttcagtgcca

SEQ ID NO: 568638 - DNA, 25 bp, Homo sapien
gctgggtggattcaggccaaccagc

SEQ ID NO: 568639 - DNA, 25 bp, Homo sapien
ggattcaggccaaccagcttcagtg

SEQ ID NO: 568640 - DNA, 25 bp, Homo sapien
ttctagggcatctgcacaggagctg

SEQ ID NO: 568641 - DNA, 25 bp, Homo sapien
gataccagattttgacacgccactg

SEQ ID NO: 568642 - DNA, 25 bp, Homo sapien
gacgttcagtgacaccacgagagaa

SEQ ID NO: 568643 - DNA, 25 bp, Homo sapien
tgtagcctcggatttccatccagcg

SEQ ID NO: 568644 - DNA, 25 bp, Homo sapien
tttggatcttccagccgaggctctg

SEQ ID NO: 568645 - DNA, 25 bp, Homo sapien
ggtgtccggcttttagcaatctcac

SEQ ID NO: 568646 - DNA, 25 bp, Homo sapien
ctggggacagctctcgagggcacca

SEQ ID NO: 568647 - DNA, 25 bp, Homo sapien
cctttaagggctgatgctcccaggg

SEQ ID NO: 568648 - DNA, 25 bp, Homo sapien
gctccccggtgtccggcttttagca

SEQ ID NO: 568649 - DNA, 25 bp, Homo sapien
caatacgtcggaaggcaaggtggct

SEQ ID NO: 568650 - DNA, 25 bp, Homo sapien
caaggtggctagagcgcttggcctc

SEQ ID NO: 568651 - DNA, 25 bp, Homo sapien
gcttggcctcgtgggcaggaggagg

SEQ ID NO: 568652 - DNA, 25 bp, Homo sapien
ctgggtcaatacgtcggaaggcaag

SEQ ID NO: 568653 - DNA, 25 bp, Homo sapien
aagtgtttcttgcattcgggacctg

SEQ ID NO: 568654 - DNA, 25 bp, Homo sapien
agctcttccactcgcagccctgcta

SEQ ID NO: 568655 - DNA, 25 bp, Homo sapien
gcagccctgctaatccaggcctcat

SEQ ID NO: 568656 - DNA, 25 bp, Homo sapien
ctgcacagggtcctgtttctaccag

SEQ ID NO: 568657 - DNA, 25 bp, Homo sapien
gagcaaagggctgagcatctctcgc

SEQ ID NO: 568658 - DNA, 25 bp, Homo sapien
tcttcaagccccgtgggaggacaga

SEQ ID NO: 568659 - DNA, 25 bp, Homo sapien
tgaattggagatcactgaggcagca

SEQ ID NO: 568660 - DNA, 25 bp, Homo sapien
tattcttggagggaagacatcacca

SEQ ID NO: 568661 - DNA, 25 bp, Homo sapien
ggccctccgaggtgtttctgacgcg

SEQ ID NO: 568662 - DNA, 25 bp, Homo sapien
tggaggccatcttcatccaggaagc

SEQ ID NO: 568663 - DNA, 25 bp, Homo sapien
ttctgacgcgtagcaaaggctgtta

SEQ ID NO: 568664 - DNA, 25 bp, Homo sapien
tgagttacagaaacgacccagcacg

SEQ ID NO: 568665 - DNA, 25 bp, Homo sapien
ttcctctcaagaggggaatacagga

SEQ ID NO: 568666 - DNA, 25 bp, Homo sapien
atgcaagaaacggtgaaataatttg

SEQ ID NO: 568667 - DNA, 25 bp, Homo sapien
caagaggggaatacaggatgcaaaa

SEQ ID NO: 568668 - DNA, 25 bp, Homo sapien
caagaaacggtgaaataatttgatt

SEQ ID NO: 568669 - DNA, 25 bp, Homo sapien
caatgtgggcaaagcctcccttgca

SEQ ID NO: 568670 - DNA, 25 bp, Homo sapien
tggaggccttctttcaatggtgacc

SEQ ID NO: 568671 - DNA, 25 bp, Homo sapien
ccttgcagaacctccagcgagtgtg

SEQ ID NO: 568672 - DNA, 25 bp, Homo sapien
caggaagcttttgccatatggtgag

SEQ ID NO: 568673 - DNA, 25 bp, Homo sapien
ggggcaaacgccagtggaagaccca

SEQ ID NO: 568674 - DNA, 25 bp, Homo sapien
tcccggggcaaacgccagtggaaga

SEQ ID NO: 568675 - DNA, 25 bp, Homo sapien
gcatcccggggcaaacgccagtgga

SEQ ID NO: 568676 - DNA, 25 bp, Homo sapien
gggcaaacgccagtggaagacccag

SEQ ID NO: 568677 - DNA, 25 bp, Homo sapien
agacaactggaaggacaacgtggaa

SEQ ID NO: 568678 - DNA, 25 bp, Homo sapien
tagacaactggaaggacaacgtgga

SEQ ID NO: 568679 - DNA, 25 bp, Homo sapien
tgtagacaactggaaggacaacgtg

SEQ ID NO: 568680 - DNA, 25 bp, Homo sapien
ggctgtagacaactggaaggacaac

SEQ ID NO: 568681 - DNA, 25 bp, Homo sapien
ggagatgcgttccagcgaccacctt

SEQ ID NO: 568682 - DNA, 25 bp, Homo sapien
agatgcgttccagcgaccaccttga

SEQ ID NO: 568683 - DNA, 25 bp, Homo sapien
tgcgttccagcgaccaccttgaagt

SEQ ID NO: 568684 - DNA, 25 bp, Homo sapien
gaaggagatgcgttccagcgaccac

SEQ ID NO: 568685 - DNA, 25 bp, Homo sapien
cctgcacagtcactggatgggcagc

SEQ ID NO: 568686 - DNA, 25 bp, Homo sapien
ctgcacagtcactggatgggcagcg

SEQ ID NO: 568687 - DNA, 25 bp, Homo sapien
ccctgcacagtcactggatgggcag

SEQ ID NO: 568688 - DNA, 25 bp, Homo sapien
gatgtggggctggtaggagacctcc

SEQ ID NO: 568689 - DNA, 25 bp, Homo sapien
tgcaactttgatgtggggctggtag

SEQ ID NO: 568690 - DNA, 25 bp, Homo sapien
caactttgatgtggggctggtagga

SEQ ID NO: 568691 - DNA, 25 bp, Homo sapien
tttgatgtggggctggtaggagacc

SEQ ID NO: 568692 - DNA, 25 bp, Homo sapien
ccagtggctatcaggtggcattcac

SEQ ID NO: 568693 - DNA, 25 bp, Homo sapien
ctggcccagtggctatcaggtggca

SEQ ID NO: 568694 - DNA, 25 bp, Homo sapien
cccagtggctatcaggtggcattca

SEQ ID NO: 568695 - DNA, 25 bp, Homo sapien
ggcccagtggctatcaggtggcatt

SEQ ID NO: 568696 - DNA, 25 bp, Homo sapien
cagagcgtgagaaggcacggatgct

SEQ ID NO: 568697 - DNA, 25 bp, Homo sapien
agcgtgagaaggcacggatgctgct

SEQ ID NO: 568698 - DNA, 25 bp, Homo sapien
cgtgagaaggcacggatgctgctgg

SEQ ID NO: 568699 - DNA, 25 bp, Homo sapien
tttgcagagcgtgagaaggcacgga

SEQ ID NO: 568700 - DNA, 25 bp, Homo sapien
ctatggacaggaattccaggagcat

SEQ ID NO: 568701 - DNA, 25 bp, Homo sapien
ggaagctggcgtgccggttctcttc

SEQ ID NO: 568702 - DNA, 25 bp, Homo sapien
gaggaagctggcgtgccggttctct

SEQ ID NO: 568703 - DNA, 25 bp, Homo sapien
tgctgaggaagctggcgtgccggtt

SEQ ID NO: 568704 - DNA, 25 bp, Homo sapien
ctggcgtgccggttctcttcatttc

SEQ ID NO: 568705 - DNA, 25 bp, Homo sapien
tgagccacacgtgcccagtttggag

SEQ ID NO: 568706 - DNA, 25 bp, Homo sapien
ttctgaggtccggtgctcccatcag

SEQ ID NO: 568707 - DNA, 25 bp, Homo sapien
gggtgagccacacgtgcccagtttg

SEQ ID NO: 568708 - DNA, 25 bp, Homo sapien
cgcggtagcacatgaggctcaggga

SEQ ID NO: 568709 - DNA, 25 bp, Homo sapien
catcacttttagaggatttgcacaa

SEQ ID NO: 568710 - DNA, 25 bp, Homo sapien
gcttgtcgtcagaagtgaagacgat

SEQ ID NO: 568711 - DNA, 25 bp, Homo sapien
aatgatgtaataacatgtcagcagg

SEQ ID NO: 568712 - DNA, 25 bp, Homo sapien
gcagttggtgcttgtcgtcagaagt

SEQ ID NO: 568713 - DNA, 25 bp, Homo sapien
gtctctgcttccatagttgttactt

SEQ ID NO: 568714 - DNA, 25 bp, Homo sapien
gctggctggagagctattcacggcc

SEQ ID NO: 568715 - DNA, 25 bp, Homo sapien
ctggagagctattcacggccgcagg

SEQ ID NO: 568716 - DNA, 25 bp, Homo sapien
aggcatccaactgttcccaagcagg

SEQ ID NO: 568717 - DNA, 25 bp, Homo sapien
cttgttactaggctgcgggctattt

SEQ ID NO: 568718 - DNA, 25 bp, Homo sapien
tggagcatgtgtattgccagtaggc

SEQ ID NO: 568719 - DNA, 25 bp, Homo sapien
ctgataagtgataggtaagcatgtt

SEQ ID NO: 568720 - DNA, 25 bp, Homo sapien
tatttacatggtcagctgataagtg

SEQ ID NO: 568721 - DNA, 25 bp, Homo sapien
tcgagggtccctacatctgggagac

SEQ ID NO: 568722 - DNA, 25 bp, Homo sapien
accacacgcttttctttgagccgca

SEQ ID NO: 568723 - DNA, 25 bp, Homo sapien
tgagccgcatttgttcttctcgagg

SEQ ID NO: 568724 - DNA, 25 bp, Homo sapien
tctgggagacgtcagaagtcggact

SEQ ID NO: 568725 - DNA, 25 bp, Homo sapien
tatctttgggtgtggctctcctggc

SEQ ID NO: 568726 - DNA, 25 bp, Homo sapien
ttatctttgggtgtggctctcctgg

SEQ ID NO: 568727 - DNA, 25 bp, Homo sapien
tctttgggtgtggctctcctggcac

SEQ ID NO: 568728 - DNA, 25 bp, Homo sapien
atctttgggtgtggctctcctggca

SEQ ID NO: 568729 - DNA, 25 bp, Homo sapien
cttctttgcctttgcggcgaagagg

SEQ ID NO: 568730 - DNA, 25 bp, Homo sapien
gcatacacccatgaagccttctgtg

SEQ ID NO: 568731 - DNA, 25 bp, Homo sapien
ttctttgcctttgcggcgaagagga

SEQ ID NO: 568732 - DNA, 25 bp, Homo sapien
ttgcaaagtccacgcatacacccat

SEQ ID NO: 568733 - DNA, 25 bp, Homo sapien
gataatcagaccgaaaatatggtgg

SEQ ID NO: 568734 - DNA, 25 bp, Homo sapien
caatctattgtccatcatcatctga

SEQ ID NO: 568735 - DNA, 25 bp, Homo sapien
aagagcctgtatctccttgagtgac

SEQ ID NO: 568736 - DNA, 25 bp, Homo sapien
gagtgactcttatcaatctattgtc

SEQ ID NO: 568737 - DNA, 25 bp, Homo sapien
cagcatacgttgtgctgtgaaaatt

SEQ ID NO: 568738 - DNA, 25 bp, Homo sapien
ggtgacagcatacgttgtgctgtga

SEQ ID NO: 568739 - DNA, 25 bp, Homo sapien
tgtgaaaattaaggaagacgcaggc

SEQ ID NO: 568740 - DNA, 25 bp, Homo sapien
gacgcaggcaatggcctctgaagtg

SEQ ID NO: 568741 - DNA, 25 bp, Homo sapien
aggctgccacgctctcctcctggcc

SEQ ID NO: 568742 - DNA, 25 bp, Homo sapien
ggctgccacgctctcctcctggccc

SEQ ID NO: 568743 - DNA, 25 bp, Homo sapien
gaggctgccacgctctcctcctggc

SEQ ID NO: 568744 - DNA, 25 bp, Homo sapien
cagaggctgccacgctctcctcctg

SEQ ID NO: 568745 - DNA, 25 bp, Homo sapien
aggcctttctggctcccggtcttat

SEQ ID NO: 568746 - DNA, 25 bp, Homo sapien
gctgtacagccgactcccgtagtct

SEQ ID NO: 568747 - DNA, 25 bp, Homo sapien
ggtcttataggagcccccaagcagg

SEQ ID NO: 568748 - DNA, 25 bp, Homo sapien
gtacagccgactcccgtagtctcag

SEQ ID NO: 568749 - DNA, 25 bp, Homo sapien
cggctgtccctcgaaagcgtctccc

SEQ ID NO: 568750 - DNA, 25 bp, Homo sapien
tggcccggctgtccctcgaaagcgt

SEQ ID NO: 568751 - DNA, 25 bp, Homo sapien
gctgtccctcgaaagcgtctcccat

SEQ ID NO: 568752 - DNA, 25 bp, Homo sapien
gctggcccggctgtccctcgaaagc

SEQ ID NO: 568753 - DNA, 25 bp, Homo sapien
gttcgctggactcgccagccactcc

SEQ ID NO: 568754 - DNA, 25 bp, Homo sapien
gcctcgtgtcctccacccgttcgct

SEQ ID NO: 568755 - DNA, 25 bp, Homo sapien
gtcctccacccgttcgctggactcg

SEQ ID NO: 568756 - DNA, 25 bp, Homo sapien
acccgttcgctggactcgccagcca

SEQ ID NO: 568757 - DNA, 25 bp, Homo sapien
gggaggcgggtgcctccgccctgcc

SEQ ID NO: 568758 - DNA, 25 bp, Homo sapien
aggcgggtgcctccgccctgccctc

SEQ ID NO: 568759 - DNA, 25 bp, Homo sapien
agggaggcgggtgcctccgccctgc

SEQ ID NO: 568760 - DNA, 25 bp, Homo sapien
agtttcttgcattgaatcggctggg

SEQ ID NO: 568761 - DNA, 25 bp, Homo sapien
ttgcagggccattggatcgtggccc

SEQ ID NO: 568762 - DNA, 25 bp, Homo sapien
ttccaggagttggtggtcgacacgc

SEQ ID NO: 568763 - DNA, 25 bp, Homo sapien
tggcccagacgagggcctcctctgg

SEQ ID NO: 568764 - DNA, 25 bp, Homo sapien
cctccacgccctccatgtagtggat

SEQ ID NO: 568765 - DNA, 25 bp, Homo sapien
gaattatcctggaactgtgtctgac

SEQ ID NO: 568766 - DNA, 25 bp, Homo sapien
gatgggtacagtctgcccatacaca

SEQ ID NO: 568767 - DNA, 25 bp, Homo sapien
gatcagcccgttggcgcggttttcc

SEQ ID NO: 568768 - DNA, 25 bp, Homo sapien
gttgccaccctgcttccctctgccc

SEQ ID NO: 568769 - DNA, 25 bp, Homo sapien
tccctctgcccagggactgggccat

SEQ ID NO: 568770 - DNA, 25 bp, Homo sapien
ttgccaccctgcttccctctgccca

SEQ ID NO: 568771 - DNA, 25 bp, Homo sapien
gcttccctctgcccagggactgggc

SEQ ID NO: 568772 - DNA, 25 bp, Homo sapien
cttcagcacacacgcgtacagccat

SEQ ID NO: 568773 - DNA, 25 bp, Homo sapien
gcccttgcgaatatattttcctccc

SEQ ID NO: 568774 - DNA, 25 bp, Homo sapien
tttgctgtgaaaagcccttgcgaat

SEQ ID NO: 568775 - DNA, 25 bp, Homo sapien
ttctctcttcagcacacacgcgtac

SEQ ID NO: 568776 - DNA, 25 bp, Homo sapien
attaaaatctggtgacatgataaca

SEQ ID NO: 568777 - DNA, 25 bp, Homo sapien
aattaaaatctggtgacatgataac

SEQ ID NO: 568778 - DNA, 25 bp, Homo sapien
taattaaaatctggtgacatgataa

SEQ ID NO: 568779 - DNA, 25 bp, Homo sapien
ttaattaaaatctggtgacatgata

SEQ ID NO: 568780 - DNA, 25 bp, Homo sapien
ggaacgctatagctgcctcatctgc

SEQ ID NO: 568781 - DNA, 25 bp, Homo sapien
tatgatttagcgaaaacagtttttg

SEQ ID NO: 568782 - DNA, 25 bp, Homo sapien
cattttgatatgatttagcgaaaac

SEQ ID NO: 568783 - DNA, 25 bp, Homo sapien
aacagtttttgcatcaggaacgcta

SEQ ID NO: 568784 - DNA, 25 bp, Homo sapien
tgtcttggctgcgtgctaccaggcc

SEQ ID NO: 568785 - DNA, 25 bp, Homo sapien
gtgtgggagattcccgcagcccttc

SEQ ID NO: 568786 - DNA, 25 bp, Homo sapien
caagacctggttccaggctggattc

SEQ ID NO: 568787 - DNA, 25 bp, Homo sapien
ctggattccaaagggtgtgggagat

SEQ ID NO: 568788 - DNA, 25 bp, Homo sapien
tggggtttgctgagcatggatgtgt

SEQ ID NO: 568789 - DNA, 25 bp, Homo sapien
tgctggggtttgctgagcatggatg

SEQ ID NO: 568790 - DNA, 25 bp, Homo sapien
ggatgtgtccttggggctgctgcta

SEQ ID NO: 568791 - DNA, 25 bp, Homo sapien
ggtttgctgagcatggatgtgtcct

SEQ ID NO: 568792 - DNA, 25 bp, Homo sapien
tttcttcggcgcaggagaaggcgac

SEQ ID NO: 568793 - DNA, 25 bp, Homo sapien
gcagcaacgcaaagctccaagtgtg

SEQ ID NO: 568794 - DNA, 25 bp, Homo sapien
gatagaggaatgaccgcctcctggg

SEQ ID NO: 568795 - DNA, 25 bp, Homo sapien
ccaagtgtgaacaaaagcgaacttt

SEQ ID NO: 568796 - DNA, 25 bp, Homo sapien
gagggaccctgcgccttctgttctg

SEQ ID NO: 568797 - DNA, 25 bp, Homo sapien
aggagggaccctgcgccttctgttc

SEQ ID NO: 568798 - DNA, 25 bp, Homo sapien
gggaccctgcgccttctgttctgag

SEQ ID NO: 568799 - DNA, 25 bp, Homo sapien
ggaccctgcgccttctgttctgagc

SEQ ID NO: 568800 - DNA, 25 bp, Homo sapien
ttagctccgcaatgcgttggagact

SEQ ID NO: 568801 - DNA, 25 bp, Homo sapien
tccggcttccttgcacacgtcaggg

SEQ ID NO: 568802 - DNA, 25 bp, Homo sapien
caccggaatcgcctgggcgcctgtg

SEQ ID NO: 568803 - DNA, 25 bp, Homo sapien
gggaggactccacggagcctcgctc

SEQ ID NO: 568804 - DNA, 25 bp, Homo sapien
tgttcccggagagatgtatttcgag

SEQ ID NO: 568805 - DNA, 25 bp, Homo sapien
tattgttcccggagagatgtatttc

SEQ ID NO: 568806 - DNA, 25 bp, Homo sapien
tcatatattgttcccggagagatgt

SEQ ID NO: 568807 - DNA, 25 bp, Homo sapien
cggagagatgtatttcgagaagaaa

SEQ ID NO: 568808 - DNA, 25 bp, Homo sapien
cacgcagtgggtgtggacgtcaaac

SEQ ID NO: 568809 - DNA, 25 bp, Homo sapien
tgttaaagccgaaatgtaatggggc

SEQ ID NO: 568810 - DNA, 25 bp, Homo sapien
gtgtggacgtcaaactcgctgccgg

SEQ ID NO: 568811 - DNA, 25 bp, Homo sapien
acgtcaaactcgctgccggccaggg

SEQ ID NO: 568812 - DNA, 25 bp, Homo sapien
actgcgggaattcggcgtgcatcgc

SEQ ID NO: 568813 - DNA, 25 bp, Homo sapien
tgcatctgttcgcagcaaggcagtc

SEQ ID NO: 568814 - DNA, 25 bp, Homo sapien
gggaggcgcgtatttcccacgccat

SEQ ID NO: 568815 - DNA, 25 bp, Homo sapien
tctcgttcaggcaacactgcgggaa

SEQ ID NO: 568816 - DNA, 25 bp, Homo sapien
tagcgtgatgttgaaactcatccac

SEQ ID NO: 568817 - DNA, 25 bp, Homo sapien
ttctgtagcgtgatgttgaaactca

SEQ ID NO: 568818 - DNA, 25 bp, Homo sapien
catccaccgaatgttcctgtcctgg

SEQ ID NO: 568819 - DNA, 25 bp, Homo sapien
cctttctgtagcgtgatgttgaaac

SEQ ID NO: 568820 - DNA, 25 bp, Homo sapien
cttggcatttcccacaatgctgggc

SEQ ID NO: 568821 - DNA, 25 bp, Homo sapien
ggcatttcccacaatgctgggcacg

SEQ ID NO: 568822 - DNA, 25 bp, Homo sapien
atttcccacaatgctgggcacgtgc

SEQ ID NO: 568823 - DNA, 25 bp, Homo sapien
tcccacaatgctgggcacgtgctcc

SEQ ID NO: 568824 - DNA, 25 bp, Homo sapien
agaagccattgtcagctcggagctg

SEQ ID NO: 568825 - DNA, 25 bp, Homo sapien
gctttgctgccatagttgtttctat

SEQ ID NO: 568826 - DNA, 25 bp, Homo sapien
aagccattgtcagctcggagctgtg

SEQ ID NO: 568827 - DNA, 25 bp, Homo sapien
ttagaagccattgtcagctcggagc

SEQ ID NO: 568828 - DNA, 25 bp, Homo sapien
gcgggatggccccagagcattcaaa

SEQ ID NO: 568829 - DNA, 25 bp, Homo sapien
caccataaatgggggcgggatggcc

SEQ ID NO: 568830 - DNA, 25 bp, Homo sapien
atggccccagagcattcaaagtccc

SEQ ID NO: 568831 - DNA, 25 bp, Homo sapien
tcagattctcaaaaaggttaacggc

SEQ ID NO: 568832 - DNA, 25 bp, Homo sapien
gaaaagctgtgagtcaccccaacag

SEQ ID NO: 568833 - DNA, 25 bp, Homo sapien
ctggtaaggtttacaggaaaagctg

SEQ ID NO: 568834 - DNA, 25 bp, Homo sapien
aaagctgtgagtcaccccaacagat

SEQ ID NO: 568835 - DNA, 25 bp, Homo sapien
aggaaaagctgtgagtcaccccaac

SEQ ID NO: 568836 - DNA, 25 bp, Homo sapien
ccctatggtggatctctaaaagttt

SEQ ID NO: 568837 - DNA, 25 bp, Homo sapien
ttccctggatgctgatcatcgcaga

SEQ ID NO: 568838 - DNA, 25 bp, Homo sapien
taagtgttttgtaggccgctccctc

SEQ ID NO: 568839 - DNA, 25 bp, Homo sapien
ggtccaggtacctccttacagccag

SEQ ID NO: 568840 - DNA, 25 bp, Homo sapien
ccacgctgtcctcggagtatctttc

SEQ ID NO: 568841 - DNA, 25 bp, Homo sapien
cggagtatctttcaacacattggac

SEQ ID NO: 568842 - DNA, 25 bp, Homo sapien
ctttcaacacattggaccttgtcac

SEQ ID NO: 568843 - DNA, 25 bp, Homo sapien
gtcctcggagtatctttcaacacat

SEQ ID NO: 568844 - DNA, 25 bp, Homo sapien
attactgaaagcaattacccgtgta

SEQ ID NO: 568845 - DNA, 25 bp, Homo sapien
tgtatcaacagtcaagcggctcggc

SEQ ID NO: 568846 - DNA, 25 bp, Homo sapien
gcaattacccgtgtatcaacagtca

SEQ ID NO: 568847 - DNA, 25 bp, Homo sapien
cagtgccggcagaagcgcgttcggc

SEQ ID NO: 568848 - DNA, 25 bp, Homo sapien
tggctctcacccgtggtggtcggtc

SEQ ID NO: 568849 - DNA, 25 bp, Homo sapien
tttgacaaaggcaaggatgtcagtc

SEQ ID NO: 568850 - DNA, 25 bp, Homo sapien
aaggatgtcagtcaggtggctctca

SEQ ID NO: 568851 - DNA, 25 bp, Homo sapien
tcagtcaggtggctctcacccgtgg

SEQ ID NO: 568852 - DNA, 25 bp, Homo sapien
ctggaaataatgtctgaaattccat

SEQ ID NO: 568853 - DNA, 25 bp, Homo sapien
ccctggaaataatgtctgaaattcc

SEQ ID NO: 568854 - DNA, 25 bp, Homo sapien
agttgtccctggaaataatgtctga

SEQ ID NO: 568855 - DNA, 25 bp, Homo sapien
ttggaagttgtccctggaaataatg

SEQ ID NO: 568856 - DNA, 25 bp, Homo sapien
ctaccgtttgtgtgcgtctggcctg

SEQ ID NO: 568857 - DNA, 25 bp, Homo sapien
gcctggggcttccggactctgcaag

SEQ ID NO: 568858 - DNA, 25 bp, Homo sapien
tggggcttccggactctgcaagcag

SEQ ID NO: 568859 - DNA, 25 bp, Homo sapien
taccgtttgtgtgcgtctggcctgg

SEQ ID NO: 568860 - DNA, 25 bp, Homo sapien
tcaatacgtgagatgcgttcttggt

SEQ ID NO: 568861 - DNA, 25 bp, Homo sapien
tggtgccgtcatgttgatgatgttt

SEQ ID NO: 568862 - DNA, 25 bp, Homo sapien
tacgtgagatgcgttcttggtgccg

SEQ ID NO: 568863 - DNA, 25 bp, Homo sapien
gttcttggtgccgtcatgttgatga

SEQ ID NO: 568864 - DNA, 25 bp, Homo sapien
ggtgctgtgctgttttctgggaagg

SEQ ID NO: 568865 - DNA, 25 bp, Homo sapien
gaaggttggctccatcacgagccat

SEQ ID NO: 568866 - DNA, 25 bp, Homo sapien
gcatgagctgttgcgcccacctaca

SEQ ID NO: 568867 - DNA, 25 bp, Homo sapien
ccttctttacacagtcggctggtgc

SEQ ID NO: 568868 - DNA, 25 bp, Homo sapien
cttatcacgttgaacacctgtgcgc

SEQ ID NO: 568869 - DNA, 25 bp, Homo sapien
tgtgtgtttcacagagcttaaactt

SEQ ID NO: 568870 - DNA, 25 bp, Homo sapien
acacctgtgcgcacaagttcctctg

SEQ ID NO: 568871 - DNA, 25 bp, Homo sapien
ttcctctgctgagatcgccatggga

SEQ ID NO: 568872 - DNA, 25 bp, Homo sapien
cagatcctatgtagatggcagacca

SEQ ID NO: 568873 - DNA, 25 bp, Homo sapien
taaaacgatcagaggtaaagctccg

SEQ ID NO: 568874 - DNA, 25 bp, Homo sapien
gaatttgcgggacaccattcagccc

SEQ ID NO: 568875 - DNA, 25 bp, Homo sapien
tgggtgcagcgaacacagcttcatg

SEQ ID NO: 568876 - DNA, 25 bp, Homo sapien
gtgtggaggacgatggcagcgaggg

SEQ ID NO: 568877 - DNA, 25 bp, Homo sapien
gaggacgatggcagcgaggggccat

SEQ ID NO: 568878 - DNA, 25 bp, Homo sapien
cgatggcagcgaggggccatctcta

SEQ ID NO: 568879 - DNA, 25 bp, Homo sapien
gcgtgtggaggacgatggcagcgag

SEQ ID NO: 568880 - DNA, 25 bp, Homo sapien
ggtgtgtgctcatacgcgcttgaca

SEQ ID NO: 568881 - DNA, 25 bp, Homo sapien
catcggcattctctttccatcggga

SEQ ID NO: 568882 - DNA, 25 bp, Homo sapien
catcgggagtcttgtgcattgggca

SEQ ID NO: 568883 - DNA, 25 bp, Homo sapien
catttttgctacctcctcccgagtg

SEQ ID NO: 568884 - DNA, 25 bp, Homo sapien
taccatttatgccaggtcatgtaac

SEQ ID NO: 568885 - DNA, 25 bp, Homo sapien
aatattagatcaactcgccctctca

SEQ ID NO: 568886 - DNA, 25 bp, Homo sapien
aacagccaatgattgaggtttttcc

SEQ ID NO: 568887 - DNA, 25 bp, Homo sapien
tgtatagtctttacttctacctacc

SEQ ID NO: 568888 - DNA, 25 bp, Homo sapien
cccttcctggagcatcctgggatgg

SEQ ID NO: 568889 - DNA, 25 bp, Homo sapien
tcctgggatggctgagccactccat

SEQ ID NO: 568890 - DNA, 25 bp, Homo sapien
ccccttcctggagcatcctgggatg

SEQ ID NO: 568891 - DNA, 25 bp, Homo sapien
gcatcctgggatggctgagccactc

SEQ ID NO: 568892 - DNA, 25 bp, Homo sapien
tcagtgagtggatccttaccctgcc

SEQ ID NO: 568893 - DNA, 25 bp, Homo sapien
tgattccagctcatcgagtttctgg

SEQ ID NO: 568894 - DNA, 25 bp, Homo sapien
tctggcgggtgccaggcacattgct

SEQ ID NO: 568895 - DNA, 25 bp, Homo sapien
ctcatcgagtttctggcgggtgcca

SEQ ID NO: 568896 - DNA, 25 bp, Homo sapien
taaactctgagttcagctcctgcgt

SEQ ID NO: 568897 - DNA, 25 bp, Homo sapien
tcagctcctgcgtggtaccagccat

SEQ ID NO: 568898 - DNA, 25 bp, Homo sapien
cagctcagggtgaataaactctgag

SEQ ID NO: 568899 - DNA, 25 bp, Homo sapien
tcagggtgaataaactctgagttca

SEQ ID NO: 568900 - DNA, 25 bp, Homo sapien
caaacctgggatcccgaggtctagg

SEQ ID NO: 568901 - DNA, 25 bp, Homo sapien
gatgaatacagagcaggtccacatg

SEQ ID NO: 568902 - DNA, 25 bp, Homo sapien
tgttcagaacatgctttggtggtcc

SEQ ID NO: 568903 - DNA, 25 bp, Homo sapien
gaaggtgttccatgagtccacgtgg

SEQ ID NO: 568904 - DNA, 25 bp, Homo sapien
ttatacagtatgatcaagagttgtg

SEQ ID NO: 568905 - DNA, 25 bp, Homo sapien
aatttaatttctgttatccagtgtc

SEQ ID NO: 568906 - DNA, 25 bp, Homo sapien
aatttctgttatccagtgtctatcg

SEQ ID NO: 568907 - DNA, 25 bp, Homo sapien
tatacagtatgatcaagagttgtga

SEQ ID NO: 568908 - DNA, 25 bp, Homo sapien
cagcgtccggcacataatcaccggg

SEQ ID NO: 568909 - DNA, 25 bp, Homo sapien
gagtccagccgcagttactgtggct

SEQ ID NO: 568910 - DNA, 25 bp, Homo sapien
gtgcgttcatgggtgcgagggccct

SEQ ID NO: 568911 - DNA, 25 bp, Homo sapien
cataatcaccgggatctgtgcgttc

SEQ ID NO: 568912 - DNA, 25 bp, Homo sapien
cagaaggtggagaccgcatgcgaac

SEQ ID NO: 568913 - DNA, 25 bp, Homo sapien
aggatcccaggcagcacaaggctag

SEQ ID NO: 568914 - DNA, 25 bp, Homo sapien
gctgtgcgttcatgcagagcgtcat

SEQ ID NO: 568915 - DNA, 25 bp, Homo sapien
tagagaccctgcaagcagccatggc

SEQ ID NO: 568916 - DNA, 25 bp, Homo sapien
gctcagtgatgttctgctgtatttc

SEQ ID NO: 568917 - DNA, 25 bp, Homo sapien
tctcataaaaacacccgtggtagcg

SEQ ID NO: 568918 - DNA, 25 bp, Homo sapien
tatttccgtgttgggccgttctctg

SEQ ID NO: 568919 - DNA, 25 bp, Homo sapien
tggtagcgctacgatgctcagtgat

SEQ ID NO: 568920 - DNA, 25 bp, Homo sapien
taagtaagagtgtcccggctgtgag

SEQ ID NO: 568921 - DNA, 25 bp, Homo sapien
ggaggttgcccgcaatgtgcctgct

SEQ ID NO: 568922 - DNA, 25 bp, Homo sapien
accaggacttaagaaggtcagggag

SEQ ID NO: 568923 - DNA, 25 bp, Homo sapien
tttgacattgccaccaggacttaag

SEQ ID NO: 568924 - DNA, 25 bp, Homo sapien
tacctggactctcattaaacagatg

SEQ ID NO: 568925 - DNA, 25 bp, Homo sapien
gaagatttgggacccctgtctgcat

SEQ ID NO: 568926 - DNA, 25 bp, Homo sapien
gaagcaatcagaaagcctggccagc

SEQ ID NO: 568927 - DNA, 25 bp, Homo sapien
aaacagatgatgtgatgaagcaatc

SEQ ID NO: 568928 - DNA, 25 bp, Homo sapien
ctgcctccacttttacagatctgtg

SEQ ID NO: 568929 - DNA, 25 bp, Homo sapien
tctttttctaatccaggtgtgcaca

SEQ ID NO: 568930 - DNA, 25 bp, Homo sapien
tgcacacgtgcgtgagccctgtgtt

SEQ ID NO: 568931 - DNA, 25 bp, Homo sapien
cattcggcacggtggtggtgagaca

SEQ ID NO: 568932 - DNA, 25 bp, Homo sapien
caaagcgctgtgtgcactgcttttc

SEQ ID NO: 568933 - DNA, 25 bp, Homo sapien
ttttctgtgcgggtgcctctctctc

SEQ ID NO: 568934 - DNA, 25 bp, Homo sapien
gcttttctgtgcgggtgcctctctc

SEQ ID NO: 568935 - DNA, 25 bp, Homo sapien
tgcttttctgtgcgggtgcctctct

SEQ ID NO: 568936 - DNA, 25 bp, Homo sapien
ggagccccttagctcccaagtgtgc

SEQ ID NO: 568937 - DNA, 25 bp, Homo sapien
gagccccttagctcccaagtgtgca

SEQ ID NO: 568938 - DNA, 25 bp, Homo sapien
gcagatctctggagaaacgttgagg

SEQ ID NO: 568939 - DNA, 25 bp, Homo sapien
tctctggagaaacgttgaggagctg

SEQ ID NO: 568940 - DNA, 25 bp, Homo sapien
tgaacgtggtggcaggtgggttcct

SEQ ID NO: 568941 - DNA, 25 bp, Homo sapien
ctggagaaacgttgaggagctgaac

SEQ ID NO: 568942 - DNA, 25 bp, Homo sapien
cctgggagagaggtacagagccagg

SEQ ID NO: 568943 - DNA, 25 bp, Homo sapien
agggttccaggaccaggctgggcat

SEQ ID NO: 568944 - DNA, 25 bp, Homo sapien
agagaggtacagagccagggctgcc

SEQ ID NO: 568945 - DNA, 25 bp, Homo sapien
gctgccagggttccaggaccaggct

SEQ ID NO: 568946 - DNA, 25 bp, Homo sapien
tgtgtataggtgatttcactccaac

SEQ ID NO: 568947 - DNA, 25 bp, Homo sapien
agtaggcttgtggttctcacagtgg

SEQ ID NO: 568948 - DNA, 25 bp, Homo sapien
ccaggaacatgaaatcgaggtctct

SEQ ID NO: 568949 - DNA, 25 bp, Homo sapien
cagtgggtcccatgtgtataggtga

SEQ ID NO: 568950 - DNA, 25 bp, Homo sapien
ctggtacgctggctactggtatgtg

SEQ ID NO: 568951 - DNA, 25 bp, Homo sapien
gtggcacttgacaattcctttccct

SEQ ID NO: 568952 - DNA, 25 bp, Homo sapien
gctactggtatgtggcacttgacaa

SEQ ID NO: 568953 - DNA, 25 bp, Homo sapien
taccccacagaacctcgtttgattg

SEQ ID NO: 568954 - DNA, 25 bp, Homo sapien
ccccacagaacctcgtttgattggc

SEQ ID NO: 568955 - DNA, 25 bp, Homo sapien
cacagaacctcgtttgattggccat

SEQ ID NO: 568956 - DNA, 25 bp, Homo sapien
agataccccacagaacctcgtttga

SEQ ID NO: 568957 - DNA, 25 bp, Homo sapien
agggaccctgggatttcctccacag

SEQ ID NO: 568958 - DNA, 25 bp, Homo sapien
cgtctaatacgagccagcggaagtc

SEQ ID NO: 568959 - DNA, 25 bp, Homo sapien
tccacagataagacgcagctgcttc

SEQ ID NO: 568960 - DNA, 25 bp, Homo sapien
aagtccccacagtgaagacgctcat

SEQ ID NO: 568961 - DNA, 25 bp, Homo sapien
aataactgaggacccatcgggagcc

SEQ ID NO: 568962 - DNA, 25 bp, Homo sapien
tgtctatctggtgcgacacccagca

SEQ ID NO: 568963 - DNA, 25 bp, Homo sapien
gggcgttttctgaaagcacctgctg

SEQ ID NO: 568964 - DNA, 25 bp, Homo sapien
cagaccttgctgtatgaggagcgcc

SEQ ID NO: 568965 - DNA, 25 bp, Homo sapien
agggtctgccagtatcttctgtctc

SEQ ID NO: 568966 - DNA, 25 bp, Homo sapien
gccagggtctgccagtatcttctgt

SEQ ID NO: 568967 - DNA, 25 bp, Homo sapien
aggcgcaggccagggtctgccagta

SEQ ID NO: 568968 - DNA, 25 bp, Homo sapien
caggcgcaggccagggtctgccagt

SEQ ID NO: 568969 - DNA, 25 bp, Homo sapien
acagagcttcacagatgggacataa

SEQ ID NO: 568970 - DNA, 25 bp, Homo sapien
tgctccgtgccacatgcatatgctg

SEQ ID NO: 568971 - DNA, 25 bp, Homo sapien
catatgctgccattagactccagct

SEQ ID NO: 568972 - DNA, 25 bp, Homo sapien
gcaagaatacttgtaaagcccaact

SEQ ID NO: 568973 - DNA, 25 bp, Homo sapien
ccaaaggagaagagggcctcctgcc

SEQ ID NO: 568974 - DNA, 25 bp, Homo sapien
cacagggacccccaaaggagaagag

SEQ ID NO: 568975 - DNA, 25 bp, Homo sapien
ctggtgcccacacggctgccagtgg

SEQ ID NO: 568976 - DNA, 25 bp, Homo sapien
ggacgtcacagactcttctctacca

SEQ ID NO: 568977 - DNA, 25 bp, Homo sapien
tggaagtcagcttcaccccattctt

SEQ ID NO: 568978 - DNA, 25 bp, Homo sapien
caaggtgattggaagtcagcttcac

SEQ ID NO: 568979 - DNA, 25 bp, Homo sapien
aaaacccaaggtgattggaagtcag

SEQ ID NO: 568980 - DNA, 25 bp, Homo sapien
gtgattggaagtcagcttcacccca

SEQ ID NO: 568981 - DNA, 25 bp, Homo sapien
tggggggcagctgcgtgttttctct

SEQ ID NO: 568982 - DNA, 25 bp, Homo sapien
ggggggcagctgcgtgttttctctc

SEQ ID NO: 568983 - DNA, 25 bp, Homo sapien
ctggggggcagctgcgtgttttctc

SEQ ID NO: 568984 - DNA, 25 bp, Homo sapien
caggatttcctacagtgttcaagct

SEQ ID NO: 568985 - DNA, 25 bp, Homo sapien
aagcacaatcaggatttcctacagt

SEQ ID NO: 568986 - DNA, 25 bp, Homo sapien
aatcaggatttcctacagtgttcaa

SEQ ID NO: 568987 - DNA, 25 bp, Homo sapien
cagaaaaagcacaatcaggatttcc

SEQ ID NO: 568988 - DNA, 25 bp, Homo sapien
tagctcatctgatgggccgtccata

SEQ ID NO: 568989 - DNA, 25 bp, Homo sapien
cctgcgggtcagtgattctagctca

SEQ ID NO: 568990 - DNA, 25 bp, Homo sapien
gaagtgggacctctttcacgacgaa

SEQ ID NO: 568991 - DNA, 25 bp, Homo sapien
ttcctgagaactgcgaagcatcgtg

SEQ ID NO: 568992 - DNA, 25 bp, Homo sapien
gaaaatcagcttggtgttccactgg

SEQ ID NO: 568993 - DNA, 25 bp, Homo sapien
tactgcaacaccttagcatggagca

SEQ ID NO: 568994 - DNA, 25 bp, Homo sapien
ttcccatcaagagcctgtagaagag

SEQ ID NO: 568995 - DNA, 25 bp, Homo sapien
ctgtgatcgctaaaagagtttcggg

SEQ ID NO: 568996 - DNA, 25 bp, Homo sapien
ccctggagagcgtggacaggaatat

SEQ ID NO: 568997 - DNA, 25 bp, Homo sapien
gaatatctctattaccgaaagcgca

SEQ ID NO: 568998 - DNA, 25 bp, Homo sapien
aaagcgcacacatgggctgccggtc

SEQ ID NO: 568999 - DNA, 25 bp, Homo sapien
actgaattttggcaagggtgtgccc

SEQ ID NO: 569000 - DNA, 25 bp, Homo sapien
tcctccttctcgtgtggcattcctg

SEQ ID NO: 569001 - DNA, 25 bp, Homo sapien
tcatcagaccgcaatgaatcctcct

SEQ ID NO: 569002 - DNA, 25 bp, Homo sapien
cccagtacagggaagctgttcatca

SEQ ID NO: 569003 - DNA, 25 bp, Homo sapien
gagtcctccttgatgcaaggcatgt

SEQ ID NO: 569004 - DNA, 25 bp, Homo sapien
ctgggtggttttagctccaggtctt

SEQ ID NO: 569005 - DNA, 25 bp, Homo sapien
cccagcggggctgttgggagctcag

SEQ ID NO: 569006 - DNA, 25 bp, Homo sapien
ccttctgtcccagcggggctgttgg

SEQ ID NO: 569007 - DNA, 25 bp, Homo sapien
gtcccagcggggctgttgggagctc

SEQ ID NO: 569008 - DNA, 25 bp, Homo sapien
aagcatcaaaggtgattaaactctg

SEQ ID NO: 569009 - DNA, 25 bp, Homo sapien
aagatcggtgacagagatgaatgcc

SEQ ID NO: 569010 - DNA, 25 bp, Homo sapien
gatgaatgccggtaaatatctttct

SEQ ID NO: 569011 - DNA, 25 bp, Homo sapien
taatcgtacagtgactaattgctca

SEQ ID NO: 569012 - DNA, 25 bp, Homo sapien
ttaaagtcccttcacaacagcggca

SEQ ID NO: 569013 - DNA, 25 bp, Homo sapien
ttttcaatgcgctaacgaggcacgt

SEQ ID NO: 569014 - DNA, 25 bp, Homo sapien
cacgttattcttagccgcgtccggg

SEQ ID NO: 569015 - DNA, 25 bp, Homo sapien
gggatcacattcctgcgcagttgcg

SEQ ID NO: 569016 - DNA, 25 bp, Homo sapien
tttgagagccgtttgggattgagac

SEQ ID NO: 569017 - DNA, 25 bp, Homo sapien
taagccacagcgagtggttagaagt

SEQ ID NO: 569018 - DNA, 25 bp, Homo sapien
gttctgggccggagccgttcactga

SEQ ID NO: 569019 - DNA, 25 bp, Homo sapien
tgggccggagccgttcactgagaca

SEQ ID NO: 569020 - DNA, 25 bp, Homo sapien
cggccgtcaggtagttcacggacac

SEQ ID NO: 569021 - DNA, 25 bp, Homo sapien
ttcacggacaccacgagtctggagg

SEQ ID NO: 569022 - DNA, 25 bp, Homo sapien
tgcaaatgcccagagagcggctgga

SEQ ID NO: 569023 - DNA, 25 bp, Homo sapien
tccctggcgtctcggtgcaaatgcc

SEQ ID NO: 569024 - DNA, 25 bp, Homo sapien
ttccgggcaaggctggctcatgggc

SEQ ID NO: 569025 - DNA, 25 bp, Homo sapien
taagggactgagtagcacccactgg

SEQ ID NO: 569026 - DNA, 25 bp, Homo sapien
agccatgggcgcaggagaaccatct

SEQ ID NO: 569027 - DNA, 25 bp, Homo sapien
gagtcatcaccccgggttccgggca

SEQ ID NO: 569028 - DNA, 25 bp, Homo sapien
gagtgatttgggacggcagctctga

SEQ ID NO: 569029 - DNA, 25 bp, Homo sapien
ctggagtgatttgggacggcagctc

SEQ ID NO: 569030 - DNA, 25 bp, Homo sapien
tctggagtgatttgggacggcagct

SEQ ID NO: 569031 - DNA, 25 bp, Homo sapien
ggagtgatttgggacggcagctctg

SEQ ID NO: 569032 - DNA, 25 bp, Homo sapien
tctgagcttgttaccgtggagggct

SEQ ID NO: 569033 - DNA, 25 bp, Homo sapien
cagttgacgtttttaaacgagcaca

SEQ ID NO: 569034 - DNA, 25 bp, Homo sapien
tgcaaaagctgtccccgaataggct

SEQ ID NO: 569035 - DNA, 25 bp, Homo sapien
tctgctcttcagagtgtgacgggct

SEQ ID NO: 569036 - DNA, 25 bp, Homo sapien
caccgaggccacgctgaggacccag

SEQ ID NO: 569037 - DNA, 25 bp, Homo sapien
gctgaggacccagcagcggagacgc

SEQ ID NO: 569038 - DNA, 25 bp, Homo sapien
tgaggacccagcagcggagacgcat

SEQ ID NO: 569039 - DNA, 25 bp, Homo sapien
ccgaggccacgctgaggacccagca

SEQ ID NO: 569040 - DNA, 25 bp, Homo sapien
acggctctgtttacttgtcctggac

SEQ ID NO: 569041 - DNA, 25 bp, Homo sapien
ctcagggtcgtcatttcttcccaaa

SEQ ID NO: 569042 - DNA, 25 bp, Homo sapien
tgtaagccatcatcaattccgatcg

SEQ ID NO: 569043 - DNA, 25 bp, Homo sapien
caaactccctttggactgctttcct

SEQ ID NO: 569044 - DNA, 25 bp, Homo sapien
ctcaggactccaggatcgtccagca

SEQ ID NO: 569045 - DNA, 25 bp, Homo sapien
agcacccttatggtagcaacttgtc

SEQ ID NO: 569046 - DNA, 25 bp, Homo sapien
ctgctgggccggagggttcccttca

SEQ ID NO: 569047 - DNA, 25 bp, Homo sapien
cactggtggatctgattctatgtca

SEQ ID NO: 569048 - DNA, 25 bp, Homo sapien
gagaacccccacatgacatcagggt

SEQ ID NO: 569049 - DNA, 25 bp, Homo sapien
ggtcacttcacacagaagcaactgg

SEQ ID NO: 569050 - DNA, 25 bp, Homo sapien
ttcaacccggtcacttcacacagaa

SEQ ID NO: 569051 - DNA, 25 bp, Homo sapien
cacatgacatcagggtgattacagg

SEQ ID NO: 569052 - DNA, 25 bp, Homo sapien
gtgactgtatcataagccttattag

SEQ ID NO: 569053 - DNA, 25 bp, Homo sapien
tattgggtgactgtatcataagcct

SEQ ID NO: 569054 - DNA, 25 bp, Homo sapien
ggcagaaatatgattagggtattgg

SEQ ID NO: 569055 - DNA, 25 bp, Homo sapien
tatgattagggtattgggtgactgt

SEQ ID NO: 569056 - DNA, 25 bp, Homo sapien
gaacacagtgtatccgccggattat

SEQ ID NO: 569057 - DNA, 25 bp, Homo sapien
tatccgccggattatgctctggaaa

SEQ ID NO: 569058 - DNA, 25 bp, Homo sapien
gtgtatccgccggattatgctctgg

SEQ ID NO: 569059 - DNA, 25 bp, Homo sapien
atccgccggattatgctctggaaac

SEQ ID NO: 569060 - DNA, 25 bp, Homo sapien
taaagattcacataagacgaccacg

SEQ ID NO: 569061 - DNA, 25 bp, Homo sapien
taactgatgccgtgatacccgtgga

SEQ ID NO: 569062 - DNA, 25 bp, Homo sapien
cctgttgcggagattgggatgcact

SEQ ID NO: 569063 - DNA, 25 bp, Homo sapien
ggaagccccgagaagtaattatgaa

SEQ ID NO: 569064 - DNA, 25 bp, Homo sapien
cgctgatagaggttgttctctctcc

SEQ ID NO: 569065 - DNA, 25 bp, Homo sapien
ctggaaaaagtaggaacgctgatag

SEQ ID NO: 569066 - DNA, 25 bp, Homo sapien
aagtaggaacgctgatagaggttgt

SEQ ID NO: 569067 - DNA, 25 bp, Homo sapien
gaacgctgatagaggttgttctctc

SEQ ID NO: 569068 - DNA, 25 bp, Homo sapien
tttagaattcaatttatgccttggc

SEQ ID NO: 569069 - DNA, 25 bp, Homo sapien
aatttatgccttggcagtttgcgct

SEQ ID NO: 569070 - DNA, 25 bp, Homo sapien
gaattcaatttatgccttggcagtt

SEQ ID NO: 569071 - DNA, 25 bp, Homo sapien
taatctttagaattcaatttatgcc

SEQ ID NO: 569072 - DNA, 25 bp, Homo sapien
ctggtcccggcgctttgcctccctg

SEQ ID NO: 569073 - DNA, 25 bp, Homo sapien
tagtggccagcgaggtatggctgga

SEQ ID NO: 569074 - DNA, 25 bp, Homo sapien
cagaactggccgtgcctagtggcca

SEQ ID NO: 569075 - DNA, 25 bp, Homo sapien
gaggtcctgtgtggaatacgtcccc

SEQ ID NO: 569076 - DNA, 25 bp, Homo sapien
cagagctcgtggctctcggtcagat

SEQ ID NO: 569077 - DNA, 25 bp, Homo sapien
ggagtgttcacggatcagagctcgt

SEQ ID NO: 569078 - DNA, 25 bp, Homo sapien
ctgcgttccccggagtgttcacgga

SEQ ID NO: 569079 - DNA, 25 bp, Homo sapien
cgtggctctcggtcagatctagagt

SEQ ID NO: 569080 - DNA, 25 bp, Homo sapien
cggtggtcatggaagtacctactgg

SEQ ID NO: 569081 - DNA, 25 bp, Homo sapien
cgctgcaagggtcacggaagtacct

SEQ ID NO: 569082 - DNA, 25 bp, Homo sapien
taacgctgcggtggtcatggaagta

SEQ ID NO: 569083 - DNA, 25 bp, Homo sapien
gctgcggtggtcatggaagtaccta

SEQ ID NO: 569084 - DNA, 25 bp, Homo sapien
acggaagcgcccactgggagtaacg

SEQ ID NO: 569085 - DNA, 25 bp, Homo sapien
cacggaagcgcccactgggagtaac

SEQ ID NO: 569086 - DNA, 25 bp, Homo sapien
ctgggagtaacgctgcggcggtcac

SEQ ID NO: 569087 - DNA, 25 bp, Homo sapien
tcacggaagcgcccactgggagtaa

SEQ ID NO: 569088 - DNA, 25 bp, Homo sapien
tggctggagccatggggaatggaac

SEQ ID NO: 569089 - DNA, 25 bp, Homo sapien
ggctggagccatggggaatggaaca

SEQ ID NO: 569090 - DNA, 25 bp, Homo sapien
gtgtggctggagccatggggaatgg

SEQ ID NO: 569091 - DNA, 25 bp, Homo sapien
ctgagggtgtggctggagccatggg

SEQ ID NO: 569092 - DNA, 25 bp, Homo sapien
gaaagatgtaagatgcgaataatga

SEQ ID NO: 569093 - DNA, 25 bp, Homo sapien
ttctttacggcagcgccggcttggg

SEQ ID NO: 569094 - DNA, 25 bp, Homo sapien
taatgaaatccatagcgcgagagtt

SEQ ID NO: 569095 - DNA, 25 bp, Homo sapien
ccatagcgcgagagttctttacggc

SEQ ID NO: 569096 - DNA, 25 bp, Homo sapien
tcagccgttcagctgggtgttccac

SEQ ID NO: 569097 - DNA, 25 bp, Homo sapien
aaacccgctcctcaacacaggactg

SEQ ID NO: 569098 - DNA, 25 bp, Homo sapien
gctttgacatctccataggtaagag

SEQ ID NO: 569099 - DNA, 25 bp, Homo sapien
gagtgtccgacggtgcagcctctcc

SEQ ID NO: 569100 - DNA, 25 bp, Homo sapien
ggagatggcgcccacttagcctctg

SEQ ID NO: 569101 - DNA, 25 bp, Homo sapien
tccctgctggtggaatgtccttctc

SEQ ID NO: 569102 - DNA, 25 bp, Homo sapien
tggaacctgcagacggtcagaatga

SEQ ID NO: 569103 - DNA, 25 bp, Homo sapien
aaggaggcctagttcctggaacctg

SEQ ID NO: 569104 - DNA, 25 bp, Homo sapien
gtcagaatgacccatgtaccctcag

SEQ ID NO: 569105 - DNA, 25 bp, Homo sapien
tcttgaatcctagggtgtacatcat

SEQ ID NO: 569106 - DNA, 25 bp, Homo sapien
cgcgcaggccgtgtgtgcacgtgtt

SEQ ID NO: 569107 - DNA, 25 bp, Homo sapien
tgttcttgaatcctagggtgtacat

SEQ ID NO: 569108 - DNA, 25 bp, Homo sapien
cgtgttcttgaatcctagggtgtac

SEQ ID NO: 569109 - DNA, 25 bp, Homo sapien
taaatcgttctcagcacgagaaaca

SEQ ID NO: 569110 - DNA, 25 bp, Homo sapien
acacaaaggccgcaggatcccgcga

SEQ ID NO: 569111 - DNA, 25 bp, Homo sapien
cacgcgcgggcgtaaatcgttctca

SEQ ID NO: 569112 - DNA, 25 bp, Homo sapien
ggtcatttttttgatgccgccgccc

SEQ ID NO: 569113 - DNA, 25 bp, Homo sapien
ggggccgcgcttggggcctgccgct

SEQ ID NO: 569114 - DNA, 25 bp, Homo sapien
gttcggtggacaagggggcagcgcc

SEQ ID NO: 569115 - DNA, 25 bp, Homo sapien
ggggcctgccgctgcacgccagcct

SEQ ID NO: 569116 - DNA, 25 bp, Homo sapien
cgcccacagcaagccggaaagaggg

SEQ ID NO: 569117 - DNA, 25 bp, Homo sapien
tccgagatctgcgtcgcgctgggca

SEQ ID NO: 569118 - DNA, 25 bp, Homo sapien
ggcgcccgcggctacggggctggcg

SEQ ID NO: 569119 - DNA, 25 bp, Homo sapien
acgctggccacccggtccggaatga

SEQ ID NO: 569120 - DNA, 25 bp, Homo sapien
tggccacccggtccggaatgagtcg

SEQ ID NO: 569121 - DNA, 25 bp, Homo sapien
tcatggaaacggatggagccctgtg

SEQ ID NO: 569122 - DNA, 25 bp, Homo sapien
gagccttcagatggcctagtgctag

SEQ ID NO: 569123 - DNA, 25 bp, Homo sapien
tagtgctaggatcttgttatcaatg

SEQ ID NO: 569124 - DNA, 25 bp, Homo sapien
agagagccttcagatggcctagtgc

SEQ ID NO: 569125 - DNA, 25 bp, Homo sapien
gcgtctttaagagccacccgacaga

SEQ ID NO: 569126 - DNA, 25 bp, Homo sapien
taattgccaatttcctgatgcagcc

SEQ ID NO: 569127 - DNA, 25 bp, Homo sapien
cactgtgagctcgagagtatgggca

SEQ ID NO: 569128 - DNA, 25 bp, Homo sapien
tttgagtggcactcggacctggcga

SEQ ID NO: 569129 - DNA, 25 bp, Homo sapien
ttaaatcgttagctctgctgtaggg

SEQ ID NO: 569130 - DNA, 25 bp, Homo sapien
aaacctggtggctacagacgcagct

SEQ ID NO: 569131 - DNA, 25 bp, Homo sapien
tgctttcacccagagagctcggagg

SEQ ID NO: 569132 - DNA, 25 bp, Homo sapien
gcagcttgaatattgacgtctctcc

SEQ ID NO: 569133 - DNA, 25 bp, Homo sapien
tactggaacggcctccaaactagga

SEQ ID NO: 569134 - DNA, 25 bp, Homo sapien
tcgattgtgaatgtgcggctctcca

SEQ ID NO: 569135 - DNA, 25 bp, Homo sapien
cgcccgaaagaaagcctgggtcgct

SEQ ID NO: 569136 - DNA, 25 bp, Homo sapien
cgcagatgatggactcagagcgccc

SEQ ID NO: 569137 - DNA, 25 bp, Homo sapien
aggccctcgaacaaggcctctggct

SEQ ID NO: 569138 - DNA, 25 bp, Homo sapien
agagagcggagagccccggtgtctc

SEQ ID NO: 569139 - DNA, 25 bp, Homo sapien
agcagacggcgatcgaggcgcgcgc

SEQ ID NO: 569140 - DNA, 25 bp, Homo sapien
agaggcggcagagagcggagagccc

SEQ ID NO: 569141 - DNA, 25 bp, Homo sapien
cgttcttaggcaaccagctcgtggg

SEQ ID NO: 569142 - DNA, 25 bp, Homo sapien
cattcggtttatgtggccccgcgca

SEQ ID NO: 569143 - DNA, 25 bp, Homo sapien
ttcctttgcatgacgcagaccggcg

SEQ ID NO: 569144 - DNA, 25 bp, Homo sapien
tgagcgctatgctacttgagactgc

SEQ ID NO: 569145 - DNA, 25 bp, Homo sapien
gcggccgcggccatgatgcaggagg

SEQ ID NO: 569146 - DNA, 25 bp, Homo sapien
cggcggccgcggccatgatgcagga

SEQ ID NO: 569147 - DNA, 25 bp, Homo sapien
gcgtgaacggcacggtgcccctgac

SEQ ID NO: 569148 - DNA, 25 bp, Homo sapien
tgacgcacatctagcgccttcggga

SEQ ID NO: 569149 - DNA, 25 bp, Homo sapien
gagccggctgcactcgctgccgcag

SEQ ID NO: 569150 - DNA, 25 bp, Homo sapien
actcgctgccgcagcactaccaggg

SEQ ID NO: 569151 - DNA, 25 bp, Homo sapien
taaaagtatcttctgctccggctgt

SEQ ID NO: 569152 - DNA, 25 bp, Homo sapien
tagagctgagtgttaatacgggccg

SEQ ID NO: 569153 - DNA, 25 bp, Homo sapien
tatttatcacctacggaggaagcgg

SEQ ID NO: 569154 - DNA, 25 bp, Homo sapien
taaatgtagtaaggcaggtccaagc

SEQ ID NO: 569155 - DNA, 25 bp, Homo sapien
cacttgaagcccagatggaaatacg

SEQ ID NO: 569156 - DNA, 25 bp, Homo sapien
taaccgatgtgaacgcaaaatgcct

SEQ ID NO: 569157 - DNA, 25 bp, Homo sapien
gactgtccgtccaaaagtgagccta

SEQ ID NO: 569158 - DNA, 25 bp, Homo sapien
tgaaccaaaacgtactgcagccgag

SEQ ID NO: 569159 - DNA, 25 bp, Homo sapien
tcatctctggaatctaaatgcacca

SEQ ID NO: 569160 - DNA, 25 bp, Homo sapien
catcagcggcaacttagaattacaa

SEQ ID NO: 569161 - DNA, 25 bp, Homo sapien
agtcgtgttgcatgtgttactcaca

SEQ ID NO: 569162 - DNA, 25 bp, Homo sapien
tctgcatatctatagagtcgtgttg

SEQ ID NO: 569163 - DNA, 25 bp, Homo sapien
acacgcggaagccatcatcacgggc

SEQ ID NO: 569164 - DNA, 25 bp, Homo sapien
cgggctcgggcttgtgatttgtaaa

SEQ ID NO: 569165 - DNA, 25 bp, Homo sapien
tatctggtctcctccaatgtattcc

SEQ ID NO: 569166 - DNA, 25 bp, Homo sapien
tccaatgtattccacacgcggaagc

SEQ ID NO: 569167 - DNA, 25 bp, Homo sapien
gggtgtcagagaagtcctcccttcc

SEQ ID NO: 569168 - DNA, 25 bp, Homo sapien
tttcctcgagctttggaagtttcac

SEQ ID NO: 569169 - DNA, 25 bp, Homo sapien
gcttcacaaagctgattacaagctt

SEQ ID NO: 569170 - DNA, 25 bp, Homo sapien
tcagccggcccgttttcctcgagct

SEQ ID NO: 569171 - DNA, 25 bp, Homo sapien
tcactcagccgtgcactcaatggct

SEQ ID NO: 569172 - DNA, 25 bp, Homo sapien
cagaaagcctgccttgggaaccggg

SEQ ID NO: 569173 - DNA, 25 bp, Homo sapien
gcgctgggctgtgcgtttgcacaaa

SEQ ID NO: 569174 - DNA, 25 bp, Homo sapien
gggtcattatccgccctattcagcg

SEQ ID NO: 569175 - DNA, 25 bp, Homo sapien
caggccgcagaaagcctgccttggg

SEQ ID NO: 569176 - DNA, 25 bp, Homo sapien
gctggtgattggaggtttaacgtcc

SEQ ID NO: 569177 - DNA, 25 bp, Homo sapien
ttaacgtccggaattcaggcgcttc

SEQ ID NO: 569178 - DNA, 25 bp, Homo sapien
gatttgccggccaaggggcctcagt

SEQ ID NO: 569179 - DNA, 25 bp, Homo sapien
cggccaaggggcctcagttgcaact

SEQ ID NO: 569180 - DNA, 25 bp, Homo sapien
ggccgccacgctaatgtcatcattg

SEQ ID NO: 569181 - DNA, 25 bp, Homo sapien
gaagtgacccgtggacaatgctgct

SEQ ID NO: 569182 - DNA, 25 bp, Homo sapien
cgcagactttctgggctcggaccct

SEQ ID NO: 569183 - DNA, 25 bp, Homo sapien
tcattagcagccttctcggcgaagg

SEQ ID NO: 569184 - DNA, 25 bp, Homo sapien
taaggcgactgtgtgatgtctgcac

SEQ ID NO: 569185 - DNA, 25 bp, Homo sapien
gttactttcaaatctcgggtcagca

SEQ ID NO: 569186 - DNA, 25 bp, Homo sapien
tacatctgggaaaacgcttctactc

SEQ ID NO: 569187 - DNA, 25 bp, Homo sapien
tctgcacagttcgaaagcccgcttt

SEQ ID NO: 569188 - DNA, 25 bp, Homo sapien
cgcagccttgctatagtgtttgtct

SEQ ID NO: 569189 - DNA, 25 bp, Homo sapien
ggtcagcgagaattgaacgtggccc

SEQ ID NO: 569190 - DNA, 25 bp, Homo sapien
catccgtgcaaagaggggtcagcga

SEQ ID NO: 569191 - DNA, 25 bp, Homo sapien
agcatttccgtcctgtagccagcgc

SEQ ID NO: 569192 - DNA, 25 bp, Homo sapien
aagacgatgaaggaacatgggtcag

SEQ ID NO: 569193 - DNA, 25 bp, Homo sapien
agcaatcctgaacgtcctgtgctca

SEQ ID NO: 569194 - DNA, 25 bp, Homo sapien
gatgatcaaatacgcggacaaccca

SEQ ID NO: 569195 - DNA, 25 bp, Homo sapien
aatacgcggacaacccagtggaggg

SEQ ID NO: 569196 - DNA, 25 bp, Homo sapien
ggcccacagggatggaggagactgc

SEQ ID NO: 569197 - DNA, 25 bp, Homo sapien
ggggtcttctagccccaggcccaca

SEQ ID NO: 569198 - DNA, 25 bp, Homo sapien
gcccacagggatggaggagactgca

SEQ ID NO: 569199 - DNA, 25 bp, Homo sapien
tcttctagccccaggcccacaggga

SEQ ID NO: 569200 - DNA, 25 bp, Homo sapien
ggatgattctaaaaggaggcggctc

SEQ ID NO: 569201 - DNA, 25 bp, Homo sapien
cagggagcctgcaagcttctcgggc

SEQ ID NO: 569202 - DNA, 25 bp, Homo sapien
tctgaggacggccacttaggtcttg

SEQ ID NO: 569203 - DNA, 25 bp, Homo sapien
ctggcgtgttttccagcccccggat

SEQ ID NO: 569204 - DNA, 25 bp, Homo sapien
tgcactcagacacggagccgtcctt

SEQ ID NO: 569205 - DNA, 25 bp, Homo sapien
cagacgcttttgcactcagacacgg

SEQ ID NO: 569206 - DNA, 25 bp, Homo sapien
tgaggggatacctctcatcccacgg

SEQ ID NO: 569207 - DNA, 25 bp, Homo sapien
tggcatggggtattcacaaggtaaa

SEQ ID NO: 569208 - DNA, 25 bp, Homo sapien
agctgtgacgctgagagtgtctctg

SEQ ID NO: 569209 - DNA, 25 bp, Homo sapien
ttctcctgggaagtgtcctccagtg

SEQ ID NO: 569210 - DNA, 25 bp, Homo sapien
tccctgagatgcacttcgggaagct

SEQ ID NO: 569211 - DNA, 25 bp, Homo sapien
gtgtgttgtgttgacagaggactga

SEQ ID NO: 569212 - DNA, 25 bp, Homo sapien
gagctggcgccatccaggaagtctt

SEQ ID NO: 569213 - DNA, 25 bp, Homo sapien
actgcacagagctggcgccatccag

SEQ ID NO: 569214 - DNA, 25 bp, Homo sapien
cagcagagggtcagacattcatctt

SEQ ID NO: 569215 - DNA, 25 bp, Homo sapien
gaagtcttttccctcgagagccaca

SEQ ID NO: 569216 - DNA, 25 bp, Homo sapien
gagcggtcggacctctgtcccatga

SEQ ID NO: 569217 - DNA, 25 bp, Homo sapien
ttcatcggctgacctgttacagggc

SEQ ID NO: 569218 - DNA, 25 bp, Homo sapien
gcccggatgacctctgcgttctgga

SEQ ID NO: 569219 - DNA, 25 bp, Homo sapien
ttacagggcttctgtctggatgcag

SEQ ID NO: 569220 - DNA, 25 bp, Homo sapien
acccagtctcgcagcctccaagcca

SEQ ID NO: 569221 - DNA, 25 bp, Homo sapien
cacccagtctcgcagcctccaagcc

SEQ ID NO: 569222 - DNA, 25 bp, Homo sapien
ctaaagttggcaggcgaagatgagt

SEQ ID NO: 569223 - DNA, 25 bp, Homo sapien
gcaggcgaagatgagtgactccagc

SEQ ID NO: 569224 - DNA, 25 bp, Homo sapien
agcagggaggtgttccccactggca

SEQ ID NO: 569225 - DNA, 25 bp, Homo sapien
agggcaggaccagcgagccagccac

SEQ ID NO: 569226 - DNA, 25 bp, Homo sapien
gagaagattgagtcctgaagcaaca

SEQ ID NO: 569227 - DNA, 25 bp, Homo sapien
tatgcagttggccaagttgcctcca

SEQ ID NO: 569228 - DNA, 25 bp, Homo sapien
caatccgttcccgagtttcatggcc

SEQ ID NO: 569229 - DNA, 25 bp, Homo sapien
cgaaacctcagttgtgccattagaa

SEQ ID NO: 569230 - DNA, 25 bp, Homo sapien
tcctgagatgcagaccgggtctcct

SEQ ID NO: 569231 - DNA, 25 bp, Homo sapien
tttatgctagtaactgccggagagg

SEQ ID NO: 569232 - DNA, 25 bp, Homo sapien
gaaaagcatgttagccttagtccac

SEQ ID NO: 569233 - DNA, 25 bp, Homo sapien
aatgcagggatgaatgagcccaccc

SEQ ID NO: 569234 - DNA, 25 bp, Homo sapien
ctgcatcctgggcagctgcattggc

SEQ ID NO: 569235 - DNA, 25 bp, Homo sapien
ctgtggtgcaactgcacgtgttggt

SEQ ID NO: 569236 - DNA, 25 bp, Homo sapien
cagctgcattggctgtggtgcaact

SEQ ID NO: 569237 - DNA, 25 bp, Homo sapien
ctacttcacgtgcacacaacagctg

SEQ ID NO: 569238 - DNA, 25 bp, Homo sapien
gggacagaatcctaacagcaatccg

SEQ ID NO: 569239 - DNA, 25 bp, Homo sapien
tgtcacagtaaaggtgagcttcacc

SEQ ID NO: 569240 - DNA, 25 bp, Homo sapien
tccaccacttggttcagtgtttgaa

SEQ ID NO: 569241 - DNA, 25 bp, Homo sapien
ccatgagtcggcgtcgggacagaat

SEQ ID NO: 569242 - DNA, 25 bp, Homo sapien
caatacttatgagaagcgccttggg

SEQ ID NO: 569243 - DNA, 25 bp, Homo sapien
ttgggttcttgagcacggaggtcca

SEQ ID NO: 569244 - DNA, 25 bp, Homo sapien
ccccagcgcggcagtagtaagaggt

SEQ ID NO: 569245 - DNA, 25 bp, Homo sapien
cacaagtattggacattattatgac

SEQ ID NO: 569246 - DNA, 25 bp, Homo sapien
gtcccctttgttccgtccactctga

SEQ ID NO: 569247 - DNA, 25 bp, Homo sapien
tcatgaattactggtgctgacagcc

SEQ ID NO: 569248 - DNA, 25 bp, Homo sapien
ggtgcgctcatgaattactggtgct

SEQ ID NO: 569249 - DNA, 25 bp, Homo sapien
ggagatgaaaggtgcgctcatgaat

SEQ ID NO: 569250 - DNA, 25 bp, Homo sapien
ttcccaagagttttatgcaacaaac

SEQ ID NO: 569251 - DNA, 25 bp, Homo sapien
cccaagagttttatgcaacaaactt

SEQ ID NO: 569252 - DNA, 25 bp, Homo sapien
tcccaagagttttatgcaacaaact

SEQ ID NO: 569253 - DNA, 25 bp, Homo sapien
gtcctcggccgtgcacacgccatca

SEQ ID NO: 569254 - DNA, 25 bp, Homo sapien
actgaaaggctcagaaacggcgagg

SEQ ID NO: 569255 - DNA, 25 bp, Homo sapien
atcaacacgcaagccgctgctgaga

SEQ ID NO: 569256 - DNA, 25 bp, Homo sapien
tgtgcttggaactgaaaggctcaga

SEQ ID NO: 569257 - DNA, 25 bp, Homo sapien
gacgacgacgactgatccatgagta

SEQ ID NO: 569258 - DNA, 25 bp, Homo sapien
gcgatgacgccaacagatccatgag

SEQ ID NO: 569259 - DNA, 25 bp, Homo sapien
tgacttaacatcagccacggcgatg

SEQ ID NO: 569260 - DNA, 25 bp, Homo sapien
acttacatcagccacgacggtgacg

SEQ ID NO: 569261 - DNA, 25 bp, Homo sapien
tctgctcgtaggagggtttgcttga

SEQ ID NO: 569262 - DNA, 25 bp, Homo sapien
gagcaacagatgaaaggtcgtgtcc

SEQ ID NO: 569263 - DNA, 25 bp, Homo sapien
tacttgtgagtgaagggagcaacag

SEQ ID NO: 569264 - DNA, 25 bp, Homo sapien
gccactgatcggtgaatgtgtgtct

SEQ ID NO: 569265 - DNA, 25 bp, Homo sapien
acaggacaggtccttcaggcacaca

SEQ ID NO: 569266 - DNA, 25 bp, Homo sapien
cagcgtctcaagatctttcttcagg

SEQ ID NO: 569267 - DNA, 25 bp, Homo sapien
tttgaatgtgattgggtcccttgga

SEQ ID NO: 569268 - DNA, 25 bp, Homo sapien
agctctggaaccaacagcgtctcaa

SEQ ID NO: 569269 - DNA, 25 bp, Homo sapien
agagtgtaggctctgatgataaaga

SEQ ID NO: 569270 - DNA, 25 bp, Homo sapien
tggagaattcatcgggccagttcct

SEQ ID NO: 569271 - DNA, 25 bp, Homo sapien
ggcactggggcgtggagaattcatc

SEQ ID NO: 569272 - DNA, 25 bp, Homo sapien
gcgtggagaattcatcgggccagtt

SEQ ID NO: 569273 - DNA, 25 bp, Homo sapien
cgcccagggccagtccacagcccac

SEQ ID NO: 569274 - DNA, 25 bp, Homo sapien
tggaacaccggctttcatctccagg

SEQ ID NO: 569275 - DNA, 25 bp, Homo sapien
ctggaacaccggctttcatctccag

SEQ ID NO: 569276 - DNA, 25 bp, Homo sapien
cctggaacaccggctttcatctcca

SEQ ID NO: 569277 - DNA, 25 bp, Homo sapien
ctgcgagggaaattgggagcttcct

SEQ ID NO: 569278 - DNA, 25 bp, Homo sapien
gtgatgcgcgatcccagcgcttcct

SEQ ID NO: 569279 - DNA, 25 bp, Homo sapien
gaacatctgtgatgcgcgatcccag

SEQ ID NO: 569280 - DNA, 25 bp, Homo sapien
tctgtgatgcgcgatcccagcgctt

SEQ ID NO: 569281 - DNA, 25 bp, Homo sapien
tcagggtgctggtaactggagactt

SEQ ID NO: 569282 - DNA, 25 bp, Homo sapien
ttaatcaaagggtgcatgttcaggg

SEQ ID NO: 569283 - DNA, 25 bp, Homo sapien
attagggtgccccacagccatgtgc

SEQ ID NO: 569284 - DNA, 25 bp, Homo sapien
gagacttttgcaatccccgccttgc

SEQ ID NO: 569285 - DNA, 25 bp, Homo sapien
tcagccaatcggctgcctcatcaag

SEQ ID NO: 569286 - DNA, 25 bp, Homo sapien
tgacattttccctgcgagttacatg

SEQ ID NO: 569287 - DNA, 25 bp, Homo sapien
tacatgaacaatacaggcattccca

SEQ ID NO: 569288 - DNA, 25 bp, Homo sapien
ggcattcccattcatgatgtatgta

SEQ ID NO: 569289 - DNA, 25 bp, Homo sapien
agggatattgcttccctgtgtcagg

SEQ ID NO: 569290 - DNA, 25 bp, Homo sapien
tgcagatcctcttgatcctcctgtg

SEQ ID NO: 569291 - DNA, 25 bp, Homo sapien
aatcttgtcttaagctggtctgtgc

SEQ ID NO: 569292 - DNA, 25 bp, Homo sapien
gattccttatctcaccccgtgcaga

SEQ ID NO: 569293 - DNA, 25 bp, Homo sapien
tgggccatttcacacccgctatctc

SEQ ID NO: 569294 - DNA, 25 bp, Homo sapien
accacccgccacagggactcgtgac

SEQ ID NO: 569295 - DNA, 25 bp, Homo sapien
cacccgctatctctctgaggtggag

SEQ ID NO: 569296 - DNA, 25 bp, Homo sapien
gcagggacctcggttctgggccatt

SEQ ID NO: 569297 - DNA, 25 bp, Homo sapien
tggcatagcagaagctgagaccttt

SEQ ID NO: 569298 - DNA, 25 bp, Homo sapien
aagtcacttccttcaccccgattga

SEQ ID NO: 569299 - DNA, 25 bp, Homo sapien
gctgagacctttactgcaagaacag

SEQ ID NO: 569300 - DNA, 25 bp, Homo sapien
accccgattgactggcatagcagaa

SEQ ID NO: 569301 - DNA, 25 bp, Homo sapien
tcctgtcttgcgctggtgcaatcat

SEQ ID NO: 569302 - DNA, 25 bp, Homo sapien
gcgctggtgcaatcatgcattcgta

SEQ ID NO: 569303 - DNA, 25 bp, Homo sapien
tgcaatcatgcattcgtagcttggg

SEQ ID NO: 569304 - DNA, 25 bp, Homo sapien
tgaagagccgtggagagtccaagct

SEQ ID NO: 569305 - DNA, 25 bp, Homo sapien
tccctgggcatcttcgtgacaaggt

SEQ ID NO: 569306 - DNA, 25 bp, Homo sapien
cagagaggcctagatgggtagttcc

SEQ ID NO: 569307 - DNA, 25 bp, Homo sapien
gcttggtgtccttcagtcacaatgt

SEQ ID NO: 569308 - DNA, 25 bp, Homo sapien
tgcttgccatgttgacctctccgtg

SEQ ID NO: 569309 - DNA, 25 bp, Homo sapien
cgtttgagaacagtagttgcctctt

SEQ ID NO: 569310 - DNA, 25 bp, Homo sapien
tgagaacagtagttgcctcttattg

SEQ ID NO: 569311 - DNA, 25 bp, Homo sapien
gtttgagaacagtagttgcctctta

SEQ ID NO: 569312 - DNA, 25 bp, Homo sapien
tttgagaacagtagttgcctcttat

SEQ ID NO: 569313 - DNA, 25 bp, Homo sapien
gctttaagtcatctggatagcccag

SEQ ID NO: 569314 - DNA, 25 bp, Homo sapien
aaaataatcttggattgctaactcc

SEQ ID NO: 569315 - DNA, 25 bp, Homo sapien
catgggaacttcagcgaggctttaa

SEQ ID NO: 569316 - DNA, 25 bp, Homo sapien
ggttgtttaaactcttctcatggga

SEQ ID NO: 569317 - DNA, 25 bp, Homo sapien
tccatgcacggaagtctcttgggca

SEQ ID NO: 569318 - DNA, 25 bp, Homo sapien
gccaggtcccatgtcccgatggaga

SEQ ID NO: 569319 - DNA, 25 bp, Homo sapien
tcttgggcaccaaaggtctagaacc

SEQ ID NO: 569320 - DNA, 25 bp, Homo sapien
gaattaactcgtacagccaggtccc

SEQ ID NO: 569321 - DNA, 25 bp, Homo sapien
caggcattgcttgtgtcatggcagc

SEQ ID NO: 569322 - DNA, 25 bp, Homo sapien
ggaagtcacacaaagctgatcgggt

SEQ ID NO: 569323 - DNA, 25 bp, Homo sapien
caggctggttctggtaggcacgaaa

SEQ ID NO: 569324 - DNA, 25 bp, Homo sapien
aatgaatagcaagcacacgcgtgcc

SEQ ID NO: 569325 - DNA, 25 bp, Homo sapien
tcttttgccccatacacagattatc

SEQ ID NO: 569326 - DNA, 25 bp, Homo sapien
cttcctctacaaattgtgatctttg

SEQ ID NO: 569327 - DNA, 25 bp, Homo sapien
ttacggaacttctgtgcccctcctg

SEQ ID NO: 569328 - DNA, 25 bp, Homo sapien
gacttagtcaagttccccacataca

SEQ ID NO: 569329 - DNA, 25 bp, Homo sapien
tccaagcgtgtagcagtggcaatgc

SEQ ID NO: 569330 - DNA, 25 bp, Homo sapien
gaagcagaaggcattcaacgcggct

SEQ ID NO: 569331 - DNA, 25 bp, Homo sapien
tcaagctggcataggaaagaagcag

SEQ ID NO: 569332 - DNA, 25 bp, Homo sapien
cctgagttagagtacttcatttgta

SEQ ID NO: 569333 - DNA, 25 bp, Homo sapien
aaaccttcacgcacaggtgcgatgg

SEQ ID NO: 569334 - DNA, 25 bp, Homo sapien
aaaaccttcacgcacaggtgcgatg

SEQ ID NO: 569335 - DNA, 25 bp, Homo sapien
agaaaaccttcacgcacaggtgcga

SEQ ID NO: 569336 - DNA, 25 bp, Homo sapien
ttagaaaaccttcacgcacaggtgc

SEQ ID NO: 569337 - DNA, 25 bp, Homo sapien
ctgtggccatgagcgggtgtccagc

SEQ ID NO: 569338 - DNA, 25 bp, Homo sapien
tgtgtccgtgaggagtccgagaggc

SEQ ID NO: 569339 - DNA, 25 bp, Homo sapien
ggacatcgatccgtttcaaacacac

SEQ ID NO: 569340 - DNA, 25 bp, Homo sapien
cctgtgaggtgtgttcgcgggcttt

SEQ ID NO: 569341 - DNA, 25 bp, Homo sapien
ggatagttcgggctcccaaaaggca

SEQ ID NO: 569342 - DNA, 25 bp, Homo sapien
gaagctcgtaggttttagcacccca

SEQ ID NO: 569343 - DNA, 25 bp, Homo sapien
tactgctggcgtgcagaagtgtcct

SEQ ID NO: 569344 - DNA, 25 bp, Homo sapien
cattgctggcttgaagcgggctcac

SEQ ID NO: 569345 - DNA, 25 bp, Homo sapien
cgaacgtgcatggttgtgcatggct

SEQ ID NO: 569346 - DNA, 25 bp, Homo sapien
gtctaaacggttgtaaatgtctgca

SEQ ID NO: 569347 - DNA, 25 bp, Homo sapien
gactgtgaacggttgcgaacgtgca

SEQ ID NO: 569348 - DNA, 25 bp, Homo sapien
tgcatggctatgcacagctgggagt

SEQ ID NO: 569349 - DNA, 25 bp, Homo sapien
tcaaggctctgttcttcaagggacc

SEQ ID NO: 569350 - DNA, 25 bp, Homo sapien
cagaggaagtcaccagaacaggcaa

SEQ ID NO: 569351 - DNA, 25 bp, Homo sapien
tgttaccttaagaccccagtgagcc

SEQ ID NO: 569352 - DNA, 25 bp, Homo sapien
caaatacgcctctttccatgggagc

SEQ ID NO: 569353 - DNA, 25 bp, Homo sapien
gacttcgattctgctaacaggagcc

SEQ ID NO: 569354 - DNA, 25 bp, Homo sapien
tgcaagataggtccagtctcgagcc

SEQ ID NO: 569355 - DNA, 25 bp, Homo sapien
aacaggagccttgtttttgcaagat

SEQ ID NO: 569356 - DNA, 25 bp, Homo sapien
aagtgcaaatccaacgagcttgagc

SEQ ID NO: 569357 - DNA, 25 bp, Homo sapien
gacacccaggcgtgggatgcagact

SEQ ID NO: 569358 - DNA, 25 bp, Homo sapien
ccaggagggcgcagaaactgaaaca

SEQ ID NO: 569359 - DNA, 25 bp, Homo sapien
gcacgggaagcgctttttctctcca

SEQ ID NO: 569360 - DNA, 25 bp, Homo sapien
atgggactccggacacgcggtctac

SEQ ID NO: 569361 - DNA, 25 bp, Homo sapien
tttacacgctgctttagctgatgca

SEQ ID NO: 569362 - DNA, 25 bp, Homo sapien
gactccgacatgtgaaacacgacgt

SEQ ID NO: 569363 - DNA, 25 bp, Homo sapien
catagaaagcttaagaagcctcagc

SEQ ID NO: 569364 - DNA, 25 bp, Homo sapien
gatgcattcgcggtatttgggttgc

SEQ ID NO: 569365 - DNA, 25 bp, Homo sapien
gaagctaagaaaccgaagactctcg

SEQ ID NO: 569366 - DNA, 25 bp, Homo sapien
tgtaatgctcgttgaagtccagcct

SEQ ID NO: 569367 - DNA, 25 bp, Homo sapien
aagactctcgtcagagctggtcgtc

SEQ ID NO: 569368 - DNA, 25 bp, Homo sapien
tcgtcagtaacaccaaaaactgctg

SEQ ID NO: 569369 - DNA, 25 bp, Homo sapien
tcaatattcgcaactgtgagcacat

SEQ ID NO: 569370 - DNA, 25 bp, Homo sapien
aaatgggtcaatattcgcaactgtg

SEQ ID NO: 569371 - DNA, 25 bp, Homo sapien
tggtagaaatgggtcaatattcgca

SEQ ID NO: 569372 - DNA, 25 bp, Homo sapien
ttcgcaactgtgagcacatttttgg

SEQ ID NO: 569373 - DNA, 25 bp, Homo sapien
tgtcagtaaaatcacgatggaaaac

SEQ ID NO: 569374 - DNA, 25 bp, Homo sapien
aacagattacagagtagggctgaaa

SEQ ID NO: 569375 - DNA, 25 bp, Homo sapien
caaatgtcagtaaaatcacgatgga

SEQ ID NO: 569376 - DNA, 25 bp, Homo sapien
cagagtagggctgaaaacaggtatg

SEQ ID NO: 569377 - DNA, 25 bp, Homo sapien
taccttcacttcataaaacatatca

SEQ ID NO: 569378 - DNA, 25 bp, Homo sapien
tcttctttggatggtatcaatactc

SEQ ID NO: 569379 - DNA, 25 bp, Homo sapien
tcaatactctaatctgggcaataat

SEQ ID NO: 569380 - DNA, 25 bp, Homo sapien
aataataattattgtcctccttcct

SEQ ID NO: 569381 - DNA, 25 bp, Homo sapien
gagcaacaaaagctaaactacccaa

SEQ ID NO: 569382 - DNA, 25 bp, Homo sapien
tgggagagccttacgggagcactta

SEQ ID NO: 569383 - DNA, 25 bp, Homo sapien
ttgttttggcatcaggttactatct

SEQ ID NO: 569384 - DNA, 25 bp, Homo sapien
cagggagggttctattcttggaata

SEQ ID NO: 569385 - DNA, 25 bp, Homo sapien
tacaactgtcagtgatttctcggga

SEQ ID NO: 569386 - DNA, 25 bp, Homo sapien
ccctctttacaactgtcagtgattt

SEQ ID NO: 569387 - DNA, 25 bp, Homo sapien
caactgtcagtgatttctcgggact

SEQ ID NO: 569388 - DNA, 25 bp, Homo sapien
tctttacaactgtcagtgatttctc

SEQ ID NO: 569389 - DNA, 25 bp, Homo sapien
caaacgcagtataggcacatctcaa

SEQ ID NO: 569390 - DNA, 25 bp, Homo sapien
tcaaacgcagtataggcacatctca

SEQ ID NO: 569391 - DNA, 25 bp, Homo sapien
aaacgcagtataggcacatctcaac

SEQ ID NO: 569392 - DNA, 25 bp, Homo sapien
cagagcagctctgtatattgcatct

SEQ ID NO: 569393 - DNA, 25 bp, Homo sapien
tatattgcatcttgagcattctgaa

SEQ ID NO: 569394 - DNA, 25 bp, Homo sapien
acacagctctaagttgatttaaaag

SEQ ID NO: 569395 - DNA, 25 bp, Homo sapien
ttgatcaaacacagctctaagttga

SEQ ID NO: 569396 - DNA, 25 bp, Homo sapien
aacacctcgtgtgcagcaatgatgt

SEQ ID NO: 569397 - DNA, 25 bp, Homo sapien
gatggtgtctaagaacacctcgtgt

SEQ ID NO: 569398 - DNA, 25 bp, Homo sapien
gaacacctcgtgtgcagcaatgatg

SEQ ID NO: 569399 - DNA, 25 bp, Homo sapien
gagatgatggtgtctaagaacacct

SEQ ID NO: 569400 - DNA, 25 bp, Homo sapien
tgacactggtgcagcaccccggaga

SEQ ID NO: 569401 - DNA, 25 bp, Homo sapien
ctgatgaatgaaatggaccatctca

SEQ ID NO: 569402 - DNA, 25 bp, Homo sapien
gccaaaatgtgacactggtgcagca

SEQ ID NO: 569403 - DNA, 25 bp, Homo sapien
gatgaatgaaatggaccatctcaga

SEQ ID NO: 569404 - DNA, 25 bp, Homo sapien
ggaggtcagcgacgagctcagactc

SEQ ID NO: 569405 - DNA, 25 bp, Homo sapien
gaaagaggagcctcgagggaggtca

SEQ ID NO: 569406 - DNA, 25 bp, Homo sapien
ctcgagggaggtcagcgacgagctc

SEQ ID NO: 569407 - DNA, 25 bp, Homo sapien
ggtcagcgacgagctcagactctcc

SEQ ID NO: 569408 - DNA, 25 bp, Homo sapien
gcttcgccctccagaggaagttaaa

SEQ ID NO: 569409 - DNA, 25 bp, Homo sapien
gcattgcacatgtgtcccttccgta

SEQ ID NO: 569410 - DNA, 25 bp, Homo sapien
tagtggctcatacattctcgagtaa

SEQ ID NO: 569411 - DNA, 25 bp, Homo sapien
cccttccgtatgtcagtgaggatgt

SEQ ID NO: 569412 - DNA, 25 bp, Homo sapien
ttaggagaggtgtgtttttgccatg

SEQ ID NO: 569413 - DNA, 25 bp, Homo sapien
gagtagccataattacaggtgtgtg

SEQ ID NO: 569414 - DNA, 25 bp, Homo sapien
ttgccatgttagccaggctggtctc

SEQ ID NO: 569415 - DNA, 25 bp, Homo sapien
tgtgtgccaccatgcccagctaatt

SEQ ID NO: 569416 - DNA, 25 bp, Homo sapien
tccgtcaacatgataatcgaggctg

SEQ ID NO: 569417 - DNA, 25 bp, Homo sapien
gttgcaattggtccgtcaacatgat

SEQ ID NO: 569418 - DNA, 25 bp, Homo sapien
catgataatcgaggctgaagacatc

SEQ ID NO: 569419 - DNA, 25 bp, Homo sapien
tgaagacatcccatccagtgtcacc

SEQ ID NO: 569420 - DNA, 25 bp, Homo sapien
caaagtcgtagctggacggacaagt

SEQ ID NO: 569421 - DNA, 25 bp, Homo sapien
tctgacagcggtttctagaattcca

SEQ ID NO: 569422 - DNA, 25 bp, Homo sapien
caagttatgctgatacaaagtcgta

SEQ ID NO: 569423 - DNA, 25 bp, Homo sapien
gatctcaggactgtcaaactgtgcg

SEQ ID NO: 569424 - DNA, 25 bp, Homo sapien
attgagaacatccaacaggtatttg

SEQ ID NO: 569425 - DNA, 25 bp, Homo sapien
aaataagcagcatcaatcttcccct

SEQ ID NO: 569426 - DNA, 25 bp, Homo sapien
ttaagtgccttataaagtctccttg

SEQ ID NO: 569427 - DNA, 25 bp, Homo sapien
taccgcctcattgcctgcatgtggt

SEQ ID NO: 569428 - DNA, 25 bp, Homo sapien
catgacaaacttggtgcaagaaatt

SEQ ID NO: 569429 - DNA, 25 bp, Homo sapien
catctttgtagtgggagtctgatca

SEQ ID NO: 569430 - DNA, 25 bp, Homo sapien
gctatcatctttgtagtgggagtct

SEQ ID NO: 569431 - DNA, 25 bp, Homo sapien
gggagtctgatcatgacaaacttgg

SEQ ID NO: 569432 - DNA, 25 bp, Homo sapien
tcaaagtatacttgtcgtgccacag

SEQ ID NO: 569433 - DNA, 25 bp, Homo sapien
gaaggaatcatcgatttcctcaaag

SEQ ID NO: 569434 - DNA, 25 bp, Homo sapien
tgccacagtcgatctgttttaactg

SEQ ID NO: 569435 - DNA, 25 bp, Homo sapien
tagactgatccatcgtcataaacga

SEQ ID NO: 569436 - DNA, 25 bp, Homo sapien
gcagaccttgctgtacatgtaccca

SEQ ID NO: 569437 - DNA, 25 bp, Homo sapien
tacatcactgccgttagaaaggaaa

SEQ ID NO: 569438 - DNA, 25 bp, Homo sapien
acagctgtgtagactgacgctccca

SEQ ID NO: 569439 - DNA, 25 bp, Homo sapien
caggtggcactgtagaagtgacccc

SEQ ID NO: 569440 - DNA, 25 bp, Homo sapien
gcgctcggcgacgccatggtgaaca

SEQ ID NO: 569441 - DNA, 25 bp, Homo sapien
gctcggcgacgccatggtgaacagg

SEQ ID NO: 569442 - DNA, 25 bp, Homo sapien
ttgcgctcggcgacgccatggtgaa

SEQ ID NO: 569443 - DNA, 25 bp, Homo sapien
ctcggcgacgccatggtgaacagga

SEQ ID NO: 569444 - DNA, 25 bp, Homo sapien
aaaccttgactaattatcctggcca

SEQ ID NO: 569445 - DNA, 25 bp, Homo sapien
atgccctttattagttatgttcctt

SEQ ID NO: 569446 - DNA, 25 bp, Homo sapien
tatcctggccataactttctcaaca

SEQ ID NO: 569447 - DNA, 25 bp, Homo sapien
caacaatgctaaaaggaagtggtaa

SEQ ID NO: 569448 - DNA, 25 bp, Homo sapien
tcttgagctcaaacccacagagata

SEQ ID NO: 569449 - DNA, 25 bp, Homo sapien
caaacaaatcagacaaagcccacag

SEQ ID NO: 569450 - DNA, 25 bp, Homo sapien
gacttcagaacctaagctcttgagc

SEQ ID NO: 569451 - DNA, 25 bp, Homo sapien
gaaaaaacagatgtccgagaactac

SEQ ID NO: 569452 - DNA, 25 bp, Homo sapien
cacaccatcgggaaagtgctacaag

SEQ ID NO: 569453 - DNA, 25 bp, Homo sapien
catgagaaacggcaggagaacacag

SEQ ID NO: 569454 - DNA, 25 bp, Homo sapien
tacaagacaggctaagcaactcgcc

SEQ ID NO: 569455 - DNA, 25 bp, Homo sapien
gaaaacatcatctccatcaacagga

SEQ ID NO: 569456 - DNA, 25 bp, Homo sapien
caagtctcagaaccgaacaccgatc

SEQ ID NO: 569457 - DNA, 25 bp, Homo sapien
gtctcagaaccgaacaccgatcctt

SEQ ID NO: 569458 - DNA, 25 bp, Homo sapien
agtctcagaaccgaacaccgatcct

SEQ ID NO: 569459 - DNA, 25 bp, Homo sapien
ctcagaaccgaacaccgatccttac

SEQ ID NO: 569460 - DNA, 25 bp, Homo sapien
ccgcatgtacgggtctcctgttttt

SEQ ID NO: 569461 - DNA, 25 bp, Homo sapien
aagctccccatcatatatccagcgg

SEQ ID NO: 569462 - DNA, 25 bp, Homo sapien
tcctgtttttgtgtaggcgtggaca

SEQ ID NO: 569463 - DNA, 25 bp, Homo sapien
tatccagcggtacaggaagctcaaa

SEQ ID NO: 569464 - DNA, 25 bp, Homo sapien
caaccctggctttacacaagtgtgt

SEQ ID NO: 569465 - DNA, 25 bp, Homo sapien
gagtcactcttctctttaggactgc

SEQ ID NO: 569466 - DNA, 25 bp, Homo sapien
aaattgccggctacacaatctaaag

SEQ ID NO: 569467 - DNA, 25 bp, Homo sapien
taataccactttggacctagaagca

SEQ ID NO: 569468 - DNA, 25 bp, Homo sapien
actggcaagtggttacgtcccctct

SEQ ID NO: 569469 - DNA, 25 bp, Homo sapien
tataacagtccctacagcaccaagg

SEQ ID NO: 569470 - DNA, 25 bp, Homo sapien
tatcgaatcaacacggccattaagg

SEQ ID NO: 569471 - DNA, 25 bp, Homo sapien
gacacaaaagcaagcctggatggcg

SEQ ID NO: 569472 - DNA, 25 bp, Homo sapien
aacaaagcgagtgccagacgcgcgt

SEQ ID NO: 569473 - DNA, 25 bp, Homo sapien
tgccagacgcgcgtgggaaagacgc

SEQ ID NO: 569474 - DNA, 25 bp, Homo sapien
tgaaacaaagcgagtgccagacgcg

SEQ ID NO: 569475 - DNA, 25 bp, Homo sapien
gagttctgaaacaaagcgagtgcca

SEQ ID NO: 569476 - DNA, 25 bp, Homo sapien
ccaggaggcgccgaagtgttaaact

SEQ ID NO: 569477 - DNA, 25 bp, Homo sapien
gggccgcaagggtcttcagtcgtat

SEQ ID NO: 569478 - DNA, 25 bp, Homo sapien
tggcagtggtccactagggccgcaa

SEQ ID NO: 569479 - DNA, 25 bp, Homo sapien
gatcataggtccaaaccaggaggcg

SEQ ID NO: 569480 - DNA, 25 bp, Homo sapien
gagagcaatcgatagtattctctga

SEQ ID NO: 569481 - DNA, 25 bp, Homo sapien
cagagagcaatcgatagtattctct

SEQ ID NO: 569482 - DNA, 25 bp, Homo sapien
gagcaatcgatagtattctctgagt

SEQ ID NO: 569483 - DNA, 25 bp, Homo sapien
gcaatcgatagtattctctgagttc

SEQ ID NO: 569484 - DNA, 25 bp, Homo sapien
cacacactcagagggaaaaggcctg

SEQ ID NO: 569485 - DNA, 25 bp, Homo sapien
catttggtatgtctagagccaggac

SEQ ID NO: 569486 - DNA, 25 bp, Homo sapien
aattgtgggcactggtaatactgac

SEQ ID NO: 569487 - DNA, 25 bp, Homo sapien
caaccaaaagagtggaagtgcaggc

SEQ ID NO: 569488 - DNA, 25 bp, Homo sapien
tgtctctcaaagacctacttagatt

SEQ ID NO: 569489 - DNA, 25 bp, Homo sapien
ccgaatgagcggtccaggctcctct

SEQ ID NO: 569490 - DNA, 25 bp, Homo sapien
tgcccgacgagtccgaatgagcggt

SEQ ID NO: 569491 - DNA, 25 bp, Homo sapien
atgcaaccatcccaactcagaaagc

SEQ ID NO: 569492 - DNA, 25 bp, Homo sapien
tcctgcatcaatgccgaaggtgcca

SEQ ID NO: 569493 - DNA, 25 bp, Homo sapien
gaatcctgcatcaatgccgaaggtg

SEQ ID NO: 569494 - DNA, 25 bp, Homo sapien
gcatcaatgccgaaggtgccaaggg

SEQ ID NO: 569495 - DNA, 25 bp, Homo sapien
ctggaatcctgcatcaatgccgaag

SEQ ID NO: 569496 - DNA, 25 bp, Homo sapien
gccatctatgccctgaaagacgtac

SEQ ID NO: 569497 - DNA, 25 bp, Homo sapien
acaaaatgtcccttaccagagctgc

SEQ ID NO: 569498 - DNA, 25 bp, Homo sapien
tgccatctatgccctgaaagacgta

SEQ ID NO: 569499 - DNA, 25 bp, Homo sapien
taaagtccatgcgagtcgtgacccc

SEQ ID NO: 569500 - DNA, 25 bp, Homo sapien
ccccaactgctgtcgaaggcaatct

SEQ ID NO: 569501 - DNA, 25 bp, Homo sapien
caccttttgaggtagtggcttgtga

SEQ ID NO: 569502 - DNA, 25 bp, Homo sapien
tcatgttgcgagacacagcactggg

SEQ ID NO: 569503 - DNA, 25 bp, Homo sapien
tgggaggagagattgtggcgcaggc

SEQ ID NO: 569504 - DNA, 25 bp, Homo sapien
caggcgcggggccactgagggcaca

SEQ ID NO: 569505 - DNA, 25 bp, Homo sapien
gaggagagattgtggcgcaggcgcg

SEQ ID NO: 569506 - DNA, 25 bp, Homo sapien
gcaggcgcggggccactgagggcac

SEQ ID NO: 569507 - DNA, 25 bp, Homo sapien
gctgctgatgccactgctgcccacg

SEQ ID NO: 569508 - DNA, 25 bp, Homo sapien
aggccaatgctgctgatgccactgc

SEQ ID NO: 569509 - DNA, 25 bp, Homo sapien
atgctgctgatgccactgctgccca

SEQ ID NO: 569510 - DNA, 25 bp, Homo sapien
caatgctgctgatgccactgctgcc

SEQ ID NO: 569511 - DNA, 25 bp, Homo sapien
ggcctgagcaaataacgtagcatag

SEQ ID NO: 569512 - DNA, 25 bp, Homo sapien
gcactccgatcttggtagctcaggg

SEQ ID NO: 569513 - DNA, 25 bp, Homo sapien
gctgactgggcactccgatcttggt

SEQ ID NO: 569514 - DNA, 25 bp, Homo sapien
tgggcatctcttggtaaggcctgag

SEQ ID NO: 569515 - DNA, 25 bp, Homo sapien
gaggtagagtattgaccatttattt

SEQ ID NO: 569516 - DNA, 25 bp, Homo sapien
tgcttggctgcctgcgtgggtcctc

SEQ ID NO: 569517 - DNA, 25 bp, Homo sapien
agcaagaggtagagtattgaccatt

SEQ ID NO: 569518 - DNA, 25 bp, Homo sapien
gcttggctgcctgcgtgggtcctca

SEQ ID NO: 569519 - DNA, 25 bp, Homo sapien
cctggagcttaagccagctccagct

SEQ ID NO: 569520 - DNA, 25 bp, Homo sapien
gaagccaaccgggagacacacagcg

SEQ ID NO: 569521 - DNA, 25 bp, Homo sapien
gccaaccgggagacacacagcgaga

SEQ ID NO: 569522 - DNA, 25 bp, Homo sapien
aaccgggagacacacagcgagaggc

SEQ ID NO: 569523 - DNA, 25 bp, Homo sapien
atcctcaacaatgagtgcaatgacc

SEQ ID NO: 569524 - DNA, 25 bp, Homo sapien
tatcctcaacaatgagtgcaatgac

SEQ ID NO: 569525 - DNA, 25 bp, Homo sapien
catatcctcaacaatgagtgcaatg

SEQ ID NO: 569526 - DNA, 25 bp, Homo sapien
atatcctcaacaatgagtgcaatga

SEQ ID NO: 569527 - DNA, 25 bp, Homo sapien
tctgcttctcttcgttgtcgaataa

SEQ ID NO: 569528 - DNA, 25 bp, Homo sapien
catctgcttctcttcgttgtcgaat

SEQ ID NO: 569529 - DNA, 25 bp, Homo sapien
ttctgtggagttctgaaaataatgc

SEQ ID NO: 569530 - DNA, 25 bp, Homo sapien
tctgaaaataatgcagcatctgctt

SEQ ID NO: 569531 - DNA, 25 bp, Homo sapien
acccgcacagcatactggaactgct

SEQ ID NO: 569532 - DNA, 25 bp, Homo sapien
aagttgctgccaatcacccgcacag

SEQ ID NO: 569533 - DNA, 25 bp, Homo sapien
catctctttcaacagttggggcgaa

SEQ ID NO: 569534 - DNA, 25 bp, Homo sapien
tttcagctactaaaaattcatctct

SEQ ID NO: 569535 - DNA, 25 bp, Homo sapien
tgtgtgcgggtggagccatggcatc

SEQ ID NO: 569536 - DNA, 25 bp, Homo sapien
caatgcatggctctagttgaaaagc

SEQ ID NO: 569537 - DNA, 25 bp, Homo sapien
tcccacaggcaatcaacgttatcag

SEQ ID NO: 569538 - DNA, 25 bp, Homo sapien
atcacaggcgattccaatgcatggc

SEQ ID NO: 569539 - DNA, 25 bp, Homo sapien
caggttcttgtgaaatcacaggcga

SEQ ID NO: 569540 - DNA, 25 bp, Homo sapien
tatatcaaatccaaccttcaaccct

SEQ ID NO: 569541 - DNA, 25 bp, Homo sapien
cccagaatagttttatatcaaatcc

SEQ ID NO: 569542 - DNA, 25 bp, Homo sapien
ttgcttattagtaacaatattcgcc

SEQ ID NO: 569543 - DNA, 25 bp, Homo sapien
aatattcgccatgtgaactttccca

SEQ ID NO: 569544 - DNA, 25 bp, Homo sapien
agaacgttcggcgacttctggtccg

SEQ ID NO: 569545 - DNA, 25 bp, Homo sapien
tctgcagcagaacgttcggcgactt

SEQ ID NO: 569546 - DNA, 25 bp, Homo sapien
ccaggatcctgcagcacaggttctg

SEQ ID NO: 569547 - DNA, 25 bp, Homo sapien
caggatcctgcagcacaggttctgc

SEQ ID NO: 569548 - DNA, 25 bp, Homo sapien
cggccaccagggcgccattttaacg

SEQ ID NO: 569549 - DNA, 25 bp, Homo sapien
ctgctcctgacaggctaaggcgcgg

SEQ ID NO: 569550 - DNA, 25 bp, Homo sapien
gccaccagggcgccattttaacgga

SEQ ID NO: 569551 - DNA, 25 bp, Homo sapien
gcgccccgcaagctccctgctcctg

SEQ ID NO: 569552 - DNA, 25 bp, Homo sapien
cataaagtttgaccttgccttccga

SEQ ID NO: 569553 - DNA, 25 bp, Homo sapien
ggttaggtggctctactactgacga

SEQ ID NO: 569554 - DNA, 25 bp, Homo sapien
cacagaaagagcttgaggccgaaga

SEQ ID NO: 569555 - DNA, 25 bp, Homo sapien
aaatcattttacttcctcgcgcctg

SEQ ID NO: 569556 - DNA, 25 bp, Homo sapien
gaagaattccatataacggtcctaa

SEQ ID NO: 569557 - DNA, 25 bp, Homo sapien
agatatgaagaattccatataacgg

SEQ ID NO: 569558 - DNA, 25 bp, Homo sapien
gaattccatataacggtcctaaatg

SEQ ID NO: 569559 - DNA, 25 bp, Homo sapien
catataacggtcctaaatgtgctag

SEQ ID NO: 569560 - DNA, 25 bp, Homo sapien
caaatttagtcctccctgggatcct

SEQ ID NO: 569561 - DNA, 25 bp, Homo sapien
caaattggtgctcttaactctccta

SEQ ID NO: 569562 - DNA, 25 bp, Homo sapien
gggccaaagctaacatacacagagt

SEQ ID NO: 569563 - DNA, 25 bp, Homo sapien
ggtttcattccagatctttagagtc

SEQ ID NO: 569564 - DNA, 25 bp, Homo sapien
gcctgactgaaaaaggcggttttca

SEQ ID NO: 569565 - DNA, 25 bp, Homo sapien
tgagtctatttgatcgtggtccaca

SEQ ID NO: 569566 - DNA, 25 bp, Homo sapien
cagaatgcggaggagctcgttccac

SEQ ID NO: 569567 - DNA, 25 bp, Homo sapien
tcccagttctacaaatgagtctatt

SEQ ID NO: 569568 - DNA, 25 bp, Homo sapien
gggcctggacacagcgacgtcatcc

SEQ ID NO: 569569 - DNA, 25 bp, Homo sapien
gcctggacacagcgacgtcatccca

SEQ ID NO: 569570 - DNA, 25 bp, Homo sapien
ctggacacagcgacgtcatcccaag

SEQ ID NO: 569571 - DNA, 25 bp, Homo sapien
gggggcctggacacagcgacgtcat

SEQ ID NO: 569572 - DNA, 25 bp, Homo sapien
ctgcccccaggtggcgctcttggga

SEQ ID NO: 569573 - DNA, 25 bp, Homo sapien
agttccggacctgcacggccgtgca

SEQ ID NO: 569574 - DNA, 25 bp, Homo sapien
cagtcggcagttccggacctgcacg

SEQ ID NO: 569575 - DNA, 25 bp, Homo sapien
tctgcccccaggtggcgctcttggg

SEQ ID NO: 569576 - DNA, 25 bp, Homo sapien
accccaataccaaaagcaggctaat

SEQ ID NO: 569577 - DNA, 25 bp, Homo sapien
gcaggctaatactgtcatcacaaga

SEQ ID NO: 569578 - DNA, 25 bp, Homo sapien
ctgtatgaggtcagtattaccccaa

SEQ ID NO: 569579 - DNA, 25 bp, Homo sapien
gaagaccacttctaaggaacacctc

SEQ ID NO: 569580 - DNA, 25 bp, Homo sapien
tcatctgcgttgtctgcagctgtca

SEQ ID NO: 569581 - DNA, 25 bp, Homo sapien
cacgctgagcgaacttggctgtgtg

SEQ ID NO: 569582 - DNA, 25 bp, Homo sapien
aaacccacgtcatctgcgttgtctg

SEQ ID NO: 569583 - DNA, 25 bp, Homo sapien
cagcgtcttggaatgtgcacccaca

SEQ ID NO: 569584 - DNA, 25 bp, Homo sapien
gaaccgccaggtgtggttctgcatg

SEQ ID NO: 569585 - DNA, 25 bp, Homo sapien
accctgtacatccttggcctgcagg

SEQ ID NO: 569586 - DNA, 25 bp, Homo sapien
ggcgtgctgcttacgtgaacacgga

SEQ ID NO: 569587 - DNA, 25 bp, Homo sapien
ggcctgcaggaacttggtgaacctg

SEQ ID NO: 569588 - DNA, 25 bp, Homo sapien
tactttgcccgttccacaccaaatg

SEQ ID NO: 569589 - DNA, 25 bp, Homo sapien
gggtgcgtgagggagagccgctcac

SEQ ID NO: 569590 - DNA, 25 bp, Homo sapien
attccttgtagtcgaagaccatact

SEQ ID NO: 569591 - DNA, 25 bp, Homo sapien
tcccgtatcaggtgccgaagaaggg

SEQ ID NO: 569592 - DNA, 25 bp, Homo sapien
aaagaagttcattaagagccttgcg

SEQ ID NO: 569593 - DNA, 25 bp, Homo sapien
tcagagcccaaacaggtgacaaaga

SEQ ID NO: 569594 - DNA, 25 bp, Homo sapien
gtgatgtactcactgcgaccgcagg

SEQ ID NO: 569595 - DNA, 25 bp, Homo sapien
gagccttgcgaaactgagagcacat

SEQ ID NO: 569596 - DNA, 25 bp, Homo sapien
aggcggcagatcactcgcggtcagg

SEQ ID NO: 569597 - DNA, 25 bp, Homo sapien
ctcggctcagcatcagagggagact

SEQ ID NO: 569598 - DNA, 25 bp, Homo sapien
ggtggcagttgggcagagacactcc

SEQ ID NO: 569599 - DNA, 25 bp, Homo sapien
ggcagtacagtccagcctcggctca

SEQ ID NO: 569600 - DNA, 25 bp, Homo sapien
ttccctgaagatggacccggcaggt

SEQ ID NO: 569601 - DNA, 25 bp, Homo sapien
gtgatgaatcccgtgatgagccgcc

SEQ ID NO: 569602 - DNA, 25 bp, Homo sapien
tctgaaagatacacgtgcctgggcc

SEQ ID NO: 569603 - DNA, 25 bp, Homo sapien
gaggcgaggctctgcgttgctcaat

SEQ ID NO: 569604 - DNA, 25 bp, Homo sapien
gagcctcggcccatctggctctcct

SEQ ID NO: 569605 - DNA, 25 bp, Homo sapien
ttccactggatggagagccgccgca

SEQ ID NO: 569606 - DNA, 25 bp, Homo sapien
ccaagcccgtttgtcctcggtccat

SEQ ID NO: 569607 - DNA, 25 bp, Homo sapien
gtgccagcgtctcaggtgggaccaa

SEQ ID NO: 569608 - DNA, 25 bp, Homo sapien
acctctctccgtttttcccagactg

SEQ ID NO: 569609 - DNA, 25 bp, Homo sapien
ggtgggcgatgccctcctcccctcc

SEQ ID NO: 569610 - DNA, 25 bp, Homo sapien
ctctccgtttttcccagactgatgc

SEQ ID NO: 569611 - DNA, 25 bp, Homo sapien
ctctctccgtttttcccagactgat

SEQ ID NO: 569612 - DNA, 25 bp, Homo sapien
tgtggggccagtcagtagtgactcc

SEQ ID NO: 569613 - DNA, 25 bp, Homo sapien
ttgagattggcacttatgccattca

SEQ ID NO: 569614 - DNA, 25 bp, Homo sapien
gattggcacttatgccattcaaatt

SEQ ID NO: 569615 - DNA, 25 bp, Homo sapien
agtcagtagtgactcctcttgggtg

SEQ ID NO: 569616 - DNA, 25 bp, Homo sapien
gacttagctggcacgtcactgtgaa

SEQ ID NO: 569617 - DNA, 25 bp, Homo sapien
gctacttgcgtgacagactgggcag

SEQ ID NO: 569618 - DNA, 25 bp, Homo sapien
ttggtgatgtgcactgacctcgggc

SEQ ID NO: 569619 - DNA, 25 bp, Homo sapien
gggcctaagccaatcatctcaggga

SEQ ID NO: 569620 - DNA, 25 bp, Homo sapien
tagaccactgaatgatgagaagcca

SEQ ID NO: 569621 - DNA, 25 bp, Homo sapien
gcaccaattccgcagggtcctgaga

SEQ ID NO: 569622 - DNA, 25 bp, Homo sapien
aatcccagccaacaacaggtggagc

SEQ ID NO: 569623 - DNA, 25 bp, Homo sapien
tacaggctgtatagcgtccacattg

SEQ ID NO: 569624 - DNA, 25 bp, Homo sapien
gaagttctgttcgtagagcctagag

SEQ ID NO: 569625 - DNA, 25 bp, Homo sapien
gaaagggcacccaggaagaatcgta

SEQ ID NO: 569626 - DNA, 25 bp, Homo sapien
ggtagaagcttagtcaaaatccggc

SEQ ID NO: 569627 - DNA, 25 bp, Homo sapien
tatttagggaccagcaacaatggca

SEQ ID NO: 569628 - DNA, 25 bp, Homo sapien
tcaattaagtcaaggctgaccgtgg

SEQ ID NO: 569629 - DNA, 25 bp, Homo sapien
tagttctcagtccagttcaaagcca

SEQ ID NO: 569630 - DNA, 25 bp, Homo sapien
aaaacaggcattctccgggattgaa

SEQ ID NO: 569631 - DNA, 25 bp, Homo sapien
tttagccgacaacaaatgggagccg

SEQ ID NO: 569632 - DNA, 25 bp, Homo sapien
cgagcagcagccttgccgccagtgg

SEQ ID NO: 569633 - DNA, 25 bp, Homo sapien
gccttgccgccagtggagcagctgc

SEQ ID NO: 569634 - DNA, 25 bp, Homo sapien
gagcccaaccgagcgggcggaccga

SEQ ID NO: 569635 - DNA, 25 bp, Homo sapien
ttgcgccggtgacgtgcgcgcccgg

SEQ ID NO: 569636 - DNA, 25 bp, Homo sapien
agttgaaggacatcagctggctgcg

SEQ ID NO: 569637 - DNA, 25 bp, Homo sapien
taacaaagacaggttgctgcgggca

SEQ ID NO: 569638 - DNA, 25 bp, Homo sapien
tgctgcgggcaagaagggttttaac

SEQ ID NO: 569639 - DNA, 25 bp, Homo sapien
tggtggtccgttgtgaactctgcac

SEQ ID NO: 569640 - DNA, 25 bp, Homo sapien
ctgagttggaaggagcacatttcac

SEQ ID NO: 569641 - DNA, 25 bp, Homo sapien
ggagcacatttcacagatgatgtca

SEQ ID NO: 569642 - DNA, 25 bp, Homo sapien
gagcacatttcacagatgatgtcat

SEQ ID NO: 569643 - DNA, 25 bp, Homo sapien
gaaggagcacatttcacagatgatg

SEQ ID NO: 569644 - DNA, 25 bp, Homo sapien
tgttcactagcatccccgctacccc

SEQ ID NO: 569645 - DNA, 25 bp, Homo sapien
gcatccccgctacccctgaatccat

SEQ ID NO: 569646 - DNA, 25 bp, Homo sapien
gctgcttcaggacttgtccctgtgt

SEQ ID NO: 569647 - DNA, 25 bp, Homo sapien
tgcttcaggacttgtccctgtgtca

SEQ ID NO: 569648 - DNA, 25 bp, Homo sapien
gagcagctgctgtatgcgctgaaga

SEQ ID NO: 569649 - DNA, 25 bp, Homo sapien
gcagctgctgtatgcgctgaagatt

SEQ ID NO: 569650 - DNA, 25 bp, Homo sapien
agttgatgttcatcccgcacgcact

SEQ ID NO: 569651 - DNA, 25 bp, Homo sapien
tgttcatcccgcacgcactgagcag

SEQ ID NO: 569652 - DNA, 25 bp, Homo sapien
ggccgcgtgcggctcttccgacttt

SEQ ID NO: 569653 - DNA, 25 bp, Homo sapien
tgcggctcttccgacttttcatcat

SEQ ID NO: 569654 - DNA, 25 bp, Homo sapien
cgtgcggctcttccgacttttcatc

SEQ ID NO: 569655 - DNA, 25 bp, Homo sapien
cgcgtgcggctcttccgacttttca

SEQ ID NO: 569656 - DNA, 25 bp, Homo sapien
ccgagagcttttcccggcagattcc

SEQ ID NO: 569657 - DNA, 25 bp, Homo sapien
taaaggcagttgtacttccgagagc

SEQ ID NO: 569658 - DNA, 25 bp, Homo sapien
tgccatgtcctctctaatgctccag

SEQ ID NO: 569659 - DNA, 25 bp, Homo sapien
atgtcctctctaatgctccagccgg

SEQ ID NO: 569660 - DNA, 25 bp, Homo sapien
ctcatagccgcacttgggggggatc

SEQ ID NO: 569661 - DNA, 25 bp, Homo sapien
ttccagcaggccttgtcagcggtag

SEQ ID NO: 569662 - DNA, 25 bp, Homo sapien
caaaaggtaagcatggttctgccca

SEQ ID NO: 569663 - DNA, 25 bp, Homo sapien
tgtcagcggtaggaccatgaatacc

SEQ ID NO: 569664 - DNA, 25 bp, Homo sapien
gctaagttgggctcagcactaagga

SEQ ID NO: 569665 - DNA, 25 bp, Homo sapien
ttctcagtgtaaagttaagcagcgc

SEQ ID NO: 569666 - DNA, 25 bp, Homo sapien
tttcagcagtcgctaagttgggctc

SEQ ID NO: 569667 - DNA, 25 bp, Homo sapien
gcagcgcaccaaacctttcagcagt

SEQ ID NO: 569668 - DNA, 25 bp, Homo sapien
ataagtcccatggtccgtgtgctcc

SEQ ID NO: 569669 - DNA, 25 bp, Homo sapien
tttccgaggtgcatccataagtccc

SEQ ID NO: 569670 - DNA, 25 bp, Homo sapien
ctgacttttccgaggtgcatccata

SEQ ID NO: 569671 - DNA, 25 bp, Homo sapien
gcatccataagtcccatggtccgtg

SEQ ID NO: 569672 - DNA, 25 bp, Homo sapien
ggcgctcgccatcagggtcccgggt

SEQ ID NO: 569673 - DNA, 25 bp, Homo sapien
ctcgccatcagggtcccgggtcgtt

SEQ ID NO: 569674 - DNA, 25 bp, Homo sapien
tcgccatcagggtcccgggtcgttg

SEQ ID NO: 569675 - DNA, 25 bp, Homo sapien
cgctcgccatcagggtcccgggtcg

SEQ ID NO: 569676 - DNA, 25 bp, Homo sapien
cttctctggggaagattcagactgg

SEQ ID NO: 569677 - DNA, 25 bp, Homo sapien
ctatggagaggcgaagtcgttagcc

SEQ ID NO: 569678 - DNA, 25 bp, Homo sapien
agaggcgaagtcgttagcctgctgt

SEQ ID NO: 569679 - DNA, 25 bp, Homo sapien
tggggaagattcagactggcagaca

SEQ ID NO: 569680 - DNA, 25 bp, Homo sapien
acattgtcgtgcagcggaactccag

SEQ ID NO: 569681 - DNA, 25 bp, Homo sapien
gagatgaacgctgcacttgtggaca

SEQ ID NO: 569682 - DNA, 25 bp, Homo sapien
tcacctgtgatggactcttgggcgt

SEQ ID NO: 569683 - DNA, 25 bp, Homo sapien
cgtgtcttttggatgcgcgcccaga

SEQ ID NO: 569684 - DNA, 25 bp, Homo sapien
gccctactgtagctttttagcaaat

SEQ ID NO: 569685 - DNA, 25 bp, Homo sapien
gtttcaaagaaacagagagtgcatt

SEQ ID NO: 569686 - DNA, 25 bp, Homo sapien
ggcaaaatagtgtttttggcagtgt

SEQ ID NO: 569687 - DNA, 25 bp, Homo sapien
tatgtgcacattcaatagccctact

SEQ ID NO: 569688 - DNA, 25 bp, Homo sapien
tactgaacctagatattaatcagag

SEQ ID NO: 569689 - DNA, 25 bp, Homo sapien
taaaagtctttcactattgaatgac

SEQ ID NO: 569690 - DNA, 25 bp, Homo sapien
aaatattcccagcattggtcaaagg

SEQ ID NO: 569691 - DNA, 25 bp, Homo sapien
aaagctgggaacgttgattcctagg

SEQ ID NO: 569692 - DNA, 25 bp, Homo sapien
tagaggtggagctactgtgtcgaaa

SEQ ID NO: 569693 - DNA, 25 bp, Homo sapien
gcgcgtcttcgtgtccttccatgga

SEQ ID NO: 569694 - DNA, 25 bp, Homo sapien
cagcaagatgaacaccggtgtaagc

SEQ ID NO: 569695 - DNA, 25 bp, Homo sapien
gtggagctactgtgtcgaaaggcat

SEQ ID NO: 569696 - DNA, 25 bp, Homo sapien
caatgacatatacggtggcttacag

SEQ ID NO: 569697 - DNA, 25 bp, Homo sapien
tgtcagtgtagcatcgggactttcc

SEQ ID NO: 569698 - DNA, 25 bp, Homo sapien
gagggactggctgtgtattcaatca

SEQ ID NO: 569699 - DNA, 25 bp, Homo sapien
aagtcagtgacatcaggcccagggt

SEQ ID NO: 569700 - DNA, 25 bp, Homo sapien
tgcatatgcctccagataacgctcg

SEQ ID NO: 569701 - DNA, 25 bp, Homo sapien
tcccgccgaggaaactgagtactgg

SEQ ID NO: 569702 - DNA, 25 bp, Homo sapien
gaaattcgttttctcgcagaaggca

SEQ ID NO: 569703 - DNA, 25 bp, Homo sapien
ccttcatcctgagccgcagttggag

SEQ ID NO: 569704 - DNA, 25 bp, Homo sapien
gcttggaaagtggtgcttagagcca

SEQ ID NO: 569705 - DNA, 25 bp, Homo sapien
aggcagaactttctcaggccacctt

SEQ ID NO: 569706 - DNA, 25 bp, Homo sapien
ccactcacaggtggacccatcgcct

SEQ ID NO: 569707 - DNA, 25 bp, Homo sapien
tgggaagctgttcccccacgttctg

SEQ ID NO: 569708 - DNA, 25 bp, Homo sapien
tcagaggtttgctgcagaaacattc

SEQ ID NO: 569709 - DNA, 25 bp, Homo sapien
cagaggtttgctgcagaaacattcg

SEQ ID NO: 569710 - DNA, 25 bp, Homo sapien
aggtttgctgcagaaacattcgtgc

SEQ ID NO: 569711 - DNA, 25 bp, Homo sapien
gaggtttgctgcagaaacattcgtg

SEQ ID NO: 569712 - DNA, 25 bp, Homo sapien
ggcagagtccggagacttctgaccg

SEQ ID NO: 569713 - DNA, 25 bp, Homo sapien
cgcaacacacttggcagagtccgga

SEQ ID NO: 569714 - DNA, 25 bp, Homo sapien
gccacccgcaacacacttggcagag

SEQ ID NO: 569715 - DNA, 25 bp, Homo sapien
gagtccggagacttctgaccgtcat

SEQ ID NO: 569716 - DNA, 25 bp, Homo sapien
tgggcctgttttccgattcctggtg

SEQ ID NO: 569717 - DNA, 25 bp, Homo sapien
gaggcttgagcgtctctcctgtagg

SEQ ID NO: 569718 - DNA, 25 bp, Homo sapien
ggctgcactgtgacgttagtaactg

SEQ ID NO: 569719 - DNA, 25 bp, Homo sapien
ataaacgcagcgacccctcggtgtt

SEQ ID NO: 569720 - DNA, 25 bp, Homo sapien
tgtaaatgtgcagccctgtggcgga

SEQ ID NO: 569721 - DNA, 25 bp, Homo sapien
tcaacactgttgatagcagctgtgg

SEQ ID NO: 569722 - DNA, 25 bp, Homo sapien
tgggtaactggtccttcctcaacac

SEQ ID NO: 569723 - DNA, 25 bp, Homo sapien
tttgtaaatgtgcagccctgtggcg

SEQ ID NO: 569724 - DNA, 25 bp, Homo sapien
gcttccggtatctccagttgcagaa

SEQ ID NO: 569725 - DNA, 25 bp, Homo sapien
cgtaagtcatctgttctaaactgga

SEQ ID NO: 569726 - DNA, 25 bp, Homo sapien
gcctcccaggtttcgtaagtcatct

SEQ ID NO: 569727 - DNA, 25 bp, Homo sapien
gccaggtgtcttacatcaaagcttc

SEQ ID NO: 569728 - DNA, 25 bp, Homo sapien
aaatgtgcgatgtgctgcacccact

SEQ ID NO: 569729 - DNA, 25 bp, Homo sapien
ttgcggctcatttcaaggtaaagca

SEQ ID NO: 569730 - DNA, 25 bp, Homo sapien
cgtgtaccagatcacagttgcggct

SEQ ID NO: 569731 - DNA, 25 bp, Homo sapien
gcacccactcacaaaagacgtgtac

SEQ ID NO: 569732 - DNA, 25 bp, Homo sapien
gagccgcagagttgcaagaccctgg

SEQ ID NO: 569733 - DNA, 25 bp, Homo sapien
cagcgtgtgcctcggatgtggcgtc

SEQ ID NO: 569734 - DNA, 25 bp, Homo sapien
gacagcgagtgggttgcccgcaggg

SEQ ID NO: 569735 - DNA, 25 bp, Homo sapien
tgtggcgtctgagggacagcgagtg

SEQ ID NO: 569736 - DNA, 25 bp, Homo sapien
gcaggctcggagtccgtggctgctg

SEQ ID NO: 569737 - DNA, 25 bp, Homo sapien
tggctgtcgtttgtttccacgggga

SEQ ID NO: 569738 - DNA, 25 bp, Homo sapien
tgtcgtttgtttccacggggattca

SEQ ID NO: 569739 - DNA, 25 bp, Homo sapien
tcaagaccggtgaggttcagaagtt

SEQ ID NO: 569740 - DNA, 25 bp, Homo sapien
tatgcacagtatgtctggccctgga

SEQ ID NO: 569741 - DNA, 25 bp, Homo sapien
gaagttacacgattgaggctcctga

SEQ ID NO: 569742 - DNA, 25 bp, Homo sapien
tgtacagagaaccagaatcctaggg

SEQ ID NO: 569743 - DNA, 25 bp, Homo sapien
tgtgctttccaggtaatgcggaaca

SEQ ID NO: 569744 - DNA, 25 bp, Homo sapien
ctgccattaaacatggggtaaactg

SEQ ID NO: 569745 - DNA, 25 bp, Homo sapien
tgctttccaggtaatgcggaacaca

SEQ ID NO: 569746 - DNA, 25 bp, Homo sapien
tccaggtaatgcggaacacacgtgc

SEQ ID NO: 569747 - DNA, 25 bp, Homo sapien
aaattagtgtgaaaactggcctaga

SEQ ID NO: 569748 - DNA, 25 bp, Homo sapien
tcagtgcggcaaaaactctgagccc

SEQ ID NO: 569749 - DNA, 25 bp, Homo sapien
tgtccgctctagtcctcgtgttgta

SEQ ID NO: 569750 - DNA, 25 bp, Homo sapien
cataacctactcgatgcggcaaaac

SEQ ID NO: 569751 - DNA, 25 bp, Homo sapien
gaacccgagagcgtttcttggcacc

SEQ ID NO: 569752 - DNA, 25 bp, Homo sapien
gaaacagaacattgcatccgtgaag

SEQ ID NO: 569753 - DNA, 25 bp, Homo sapien
ctttagaagtatacaagtgtgcccc

SEQ ID NO: 569754 - DNA, 25 bp, Homo sapien
gcagcatcagagaatacggcttacg

SEQ ID NO: 569755 - DNA, 25 bp, Homo sapien
tcctgtacagcctcatggagcagca

SEQ ID NO: 569756 - DNA, 25 bp, Homo sapien
cattgacgtgctcaagagagacccg

SEQ ID NO: 569757 - DNA, 25 bp, Homo sapien
tacagactttgtacgacaccgcgta

SEQ ID NO: 569758 - DNA, 25 bp, Homo sapien
gcagagagagtaactaggcagcact

SEQ ID NO: 569759 - DNA, 25 bp, Homo sapien
tgccttcctgggatccgaggatttc

SEQ ID NO: 569760 - DNA, 25 bp, Homo sapien
ctggcgtgtccgcagtcagctgcac

SEQ ID NO: 569761 - DNA, 25 bp, Homo sapien
cttggtccttacgtagcaatttggg

SEQ ID NO: 569762 - DNA, 25 bp, Homo sapien
tatgtcctggaaggtaccttgagcc

SEQ ID NO: 569763 - DNA, 25 bp, Homo sapien
ctcccaacggggttacagttcagag

SEQ ID NO: 569764 - DNA, 25 bp, Homo sapien
caggatactcccaacggggttacag

SEQ ID NO: 569765 - DNA, 25 bp, Homo sapien
tgcttcacagggcacccttgagttc

SEQ ID NO: 569766 - DNA, 25 bp, Homo sapien
tcacagggcacccttgagttcatgt

SEQ ID NO: 569767 - DNA, 25 bp, Homo sapien
ggcacccttgagttcatgtcttgct

SEQ ID NO: 569768 - DNA, 25 bp, Homo sapien
gccatctaactctttcagagttctg

SEQ ID NO: 569769 - DNA, 25 bp, Homo sapien
aagccacagctgttcctagaggcat

SEQ ID NO: 569770 - DNA, 25 bp, Homo sapien
catgtgcttgtaggctgctgccaag

SEQ ID NO: 569771 - DNA, 25 bp, Homo sapien
ggccacatgtgcttgtaggctgctg

SEQ ID NO: 569772 - DNA, 25 bp, Homo sapien
ttgctggccacatgtgcttgtaggc

SEQ ID NO: 569773 - DNA, 25 bp, Homo sapien
tttgtctcccgaacggtgtgaggtg

SEQ ID NO: 569774 - DNA, 25 bp, Homo sapien
tggctttgtctcccgaacggtgtga

SEQ ID NO: 569775 - DNA, 25 bp, Homo sapien
tgagtggtgtgaggtgtggctttgt

SEQ ID NO: 569776 - DNA, 25 bp, Homo sapien
tcctgagcggtgtgaggtgtggctt

SEQ ID NO: 569777 - DNA, 25 bp, Homo sapien
gtggtgtgaggtgtggctttgtctc

SEQ ID NO: 569778 - DNA, 25 bp, Homo sapien
gagcggtgtgaggtgtggctttgtc

SEQ ID NO: 569779 - DNA, 25 bp, Homo sapien
tttgtcttcctgagccgtgttttgc

SEQ ID NO: 569780 - DNA, 25 bp, Homo sapien
ttgtcttcctgagccgtgttttgca

SEQ ID NO: 569781 - DNA, 25 bp, Homo sapien
ggctttgtcttcctgagccgtgttt

SEQ ID NO: 569782 - DNA, 25 bp, Homo sapien
ctttgtcttcctgagccgtgttttg

SEQ ID NO: 569783 - DNA, 25 bp, Homo sapien
gcataaatgtaacacctgtagcggg

SEQ ID NO: 569784 - DNA, 25 bp, Homo sapien
ctctgcctgtgtggagatagtcacc

SEQ ID NO: 569785 - DNA, 25 bp, Homo sapien
aatgacgttgcagggtcttcatgca

SEQ ID NO: 569786 - DNA, 25 bp, Homo sapien
aatggtgtgtgcgtttttacagccc

SEQ ID NO: 569787 - DNA, 25 bp, Homo sapien
gatgttgtgtctataagcagccttg

SEQ ID NO: 569788 - DNA, 25 bp, Homo sapien
tctagattatctaagcaggagacct

SEQ ID NO: 569789 - DNA, 25 bp, Homo sapien
ggtgaccatccgctcggcttgctga

SEQ ID NO: 569790 - DNA, 25 bp, Homo sapien
taacagcttgatatgcaggtccttg

SEQ ID NO: 569791 - DNA, 25 bp, Homo sapien
cagaacacttcgcagcgtgcttctg

SEQ ID NO: 569792 - DNA, 25 bp, Homo sapien
ccctgcagggataccaggtgtgcca

SEQ ID NO: 569793 - DNA, 25 bp, Homo sapien
cttctgtgcgggatggaggtggcaa

SEQ ID NO: 569794 - DNA, 25 bp, Homo sapien
ggtgcagggccctggtgctgactgc

SEQ ID NO: 569795 - DNA, 25 bp, Homo sapien
agccatcttccgtacagctgtctct

SEQ ID NO: 569796 - DNA, 25 bp, Homo sapien
accctgaagccatcttccgtacagc

SEQ ID NO: 569797 - DNA, 25 bp, Homo sapien
tgaagccatcttccgtacagctgtc

SEQ ID NO: 569798 - DNA, 25 bp, Homo sapien
ataatgctgtgattttgcgggtcat

SEQ ID NO: 569799 - DNA, 25 bp, Homo sapien
tgtgagggccaccatcgtgaacgtg

SEQ ID NO: 569800 - DNA, 25 bp, Homo sapien
tggcgtcctaaagtgaacctctccg

SEQ ID NO: 569801 - DNA, 25 bp, Homo sapien
cgagctttcagccaacggtaggata

SEQ ID NO: 569802 - DNA, 25 bp, Homo sapien
tatggccaccgagaagcttttggac

SEQ ID NO: 569803 - DNA, 25 bp, Homo sapien
tgggtaaaggcaccatccccgtgaa

SEQ ID NO: 569804 - DNA, 25 bp, Homo sapien
cgcgtgtttgttttgttcgcttgga

SEQ ID NO: 569805 - DNA, 25 bp, Homo sapien
aaccgagctcggcaggtgccggaac

SEQ ID NO: 569806 - DNA, 25 bp, Homo sapien
tgttcgcttggaacctgtgtgcgga

SEQ ID NO: 569807 - DNA, 25 bp, Homo sapien
ggggacaggagcttccctgacattt

SEQ ID NO: 569808 - DNA, 25 bp, Homo sapien
cggggacaggagcttccctgacatt

SEQ ID NO: 569809 - DNA, 25 bp, Homo sapien
tcggggacaggagcttccctgacat

SEQ ID NO: 569810 - DNA, 25 bp, Homo sapien
ctcggggacaggagcttccctgaca

SEQ ID NO: 569811 - DNA, 25 bp, Homo sapien
ttcaccacgtgagagctgttgttcg

SEQ ID NO: 569812 - DNA, 25 bp, Homo sapien
agagctgttgttcgaagcagctgga

SEQ ID NO: 569813 - DNA, 25 bp, Homo sapien
gggttaactctggtgtccttcacca

SEQ ID NO: 569814 - DNA, 25 bp, Homo sapien
tctggtgtccttcaccacgtgagag

SEQ ID NO: 569815 - DNA, 25 bp, Homo sapien
tttcccttttggaggtttcagatca

SEQ ID NO: 569816 - DNA, 25 bp, Homo sapien
gtttcagatcacgatcagccagctc

SEQ ID NO: 569817 - DNA, 25 bp, Homo sapien
agatcacgatcagccagctcatgtt

SEQ ID NO: 569818 - DNA, 25 bp, Homo sapien
cccttttggaggtttcagatcacga

SEQ ID NO: 569819 - DNA, 25 bp, Homo sapien
tgagggcaggcgtggatttgatggc

SEQ ID NO: 569820 - DNA, 25 bp, Homo sapien
ttgatggccgggtgctggcctggca

SEQ ID NO: 569821 - DNA, 25 bp, Homo sapien
gcttccagcaccaatggggtggcca

SEQ ID NO: 569822 - DNA, 25 bp, Homo sapien
gctggacaggacgtgcaggcttcca

SEQ ID NO: 569823 - DNA, 25 bp, Homo sapien
gcgtttcggtatagtcaccccagtc

SEQ ID NO: 569824 - DNA, 25 bp, Homo sapien
tatgtgcttagttctgcgggattaa

SEQ ID NO: 569825 - DNA, 25 bp, Homo sapien
tcttgcacttggaaacgcaggctgt

SEQ ID NO: 569826 - DNA, 25 bp, Homo sapien
gcgggattaagaatttgatttccat

SEQ ID NO: 569827 - DNA, 25 bp, Homo sapien
cttgggtgggttgagaagcctctgc

SEQ ID NO: 569828 - DNA, 25 bp, Homo sapien
agggtccaccgtgcaccagccgtgg

SEQ ID NO: 569829 - DNA, 25 bp, Homo sapien
ggcccacgctctggctttgttcctg

SEQ ID NO: 569830 - DNA, 25 bp, Homo sapien
cctgctgaccccacaagcttgggtg

SEQ ID NO: 569831 - DNA, 25 bp, Homo sapien
cttggtggagaatcctcggtgtttg

SEQ ID NO: 569832 - DNA, 25 bp, Homo sapien
cttggtggagaatcctcggtgtttc

SEQ ID NO: 569833 - DNA, 25 bp, Homo sapien
tttccagcatgggtcagtcgcggct

SEQ ID NO: 569834 - DNA, 25 bp, Homo sapien
catggatcgtagtcatggcttggtg

SEQ ID NO: 569835 - DNA, 25 bp, Homo sapien
gagagactcctcaggtgaacggaag

SEQ ID NO: 569836 - DNA, 25 bp, Homo sapien
aaaccaggagtaactgttctgagct

SEQ ID NO: 569837 - DNA, 25 bp, Homo sapien
tgaaaccaggagtaactgttctgag

SEQ ID NO: 569838 - DNA, 25 bp, Homo sapien
tgaacggaaggtgtctgaagacagc

SEQ ID NO: 569839 - DNA, 25 bp, Homo sapien
gcttgcacagaaataggctgacctg

SEQ ID NO: 569840 - DNA, 25 bp, Homo sapien
aaaggaggcacacgttcatagaaag

SEQ ID NO: 569841 - DNA, 25 bp, Homo sapien
tgaacaaaggtgatcatcacagccg

SEQ ID NO: 569842 - DNA, 25 bp, Homo sapien
tccaagcctgctggtaggaatgcca

SEQ ID NO: 569843 - DNA, 25 bp, Homo sapien
tctgaggttatacaggaattcaccc

SEQ ID NO: 569844 - DNA, 25 bp, Homo sapien
tgtatggtgtcaagtatgggtccaa

SEQ ID NO: 569845 - DNA, 25 bp, Homo sapien
gggatcctaacatcgttcatcaaaa

SEQ ID NO: 569846 - DNA, 25 bp, Homo sapien
tgaaaaggtcttcctattctgaggt

SEQ ID NO: 569847 - DNA, 25 bp, Homo sapien
tcacaggaacgtcacgagaacgtca

SEQ ID NO: 569848 - DNA, 25 bp, Homo sapien
cacgagaacgtcattttgggaagcc

SEQ ID NO: 569849 - DNA, 25 bp, Homo sapien
gaacgtcacgagaacgtcattttgg

SEQ ID NO: 569850 - DNA, 25 bp, Homo sapien
cagcttggtggaagctccgtgttgg

SEQ ID NO: 569851 - DNA, 25 bp, Homo sapien
ccgtatgcagttgttacatttctgg

SEQ ID NO: 569852 - DNA, 25 bp, Homo sapien
ctccgtatgcagttgttacatttct

SEQ ID NO: 569853 - DNA, 25 bp, Homo sapien
tttctccgtatgcagttgttacatt

SEQ ID NO: 569854 - DNA, 25 bp, Homo sapien
gtatgcagttgttacatttctggaa

SEQ ID NO: 569855 - DNA, 25 bp, Homo sapien
caacgctgcggtttgttcaacttcg

SEQ ID NO: 569856 - DNA, 25 bp, Homo sapien
tccataaatggccactgggtctccc

SEQ ID NO: 569857 - DNA, 25 bp, Homo sapien
tcaacttcgtggctgcaggacgctg

SEQ ID NO: 569858 - DNA, 25 bp, Homo sapien
gacgctgtcagcagtttggtcttct

SEQ ID NO: 569859 - DNA, 25 bp, Homo sapien
cttataggccaggaaatgggataaa

SEQ ID NO: 569860 - DNA, 25 bp, Homo sapien
aggccaggaaatgggataaagccat

SEQ ID NO: 569861 - DNA, 25 bp, Homo sapien
taggccaggaaatgggataaagcca

SEQ ID NO: 569862 - DNA, 25 bp, Homo sapien
tataggccaggaaatgggataaagc

SEQ ID NO: 569863 - DNA, 25 bp, Homo sapien
cagatgatgacgcctgcatcacgga

SEQ ID NO: 569864 - DNA, 25 bp, Homo sapien
aaagcagatgatgacgcctgcatca

SEQ ID NO: 569865 - DNA, 25 bp, Homo sapien
agcagatgatgacgcctgcatcacg

SEQ ID NO: 569866 - DNA, 25 bp, Homo sapien
gaaagcagatgatgacgcctgcatc

SEQ ID NO: 569867 - DNA, 25 bp, Homo sapien
ctggccattcacttgtgcatccacc

SEQ ID NO: 569868 - DNA, 25 bp, Homo sapien
gactgtcaccatatgcagcatgccc

SEQ ID NO: 569869 - DNA, 25 bp, Homo sapien
ttgccacaggaatgtgactgtcacc

SEQ ID NO: 569870 - DNA, 25 bp, Homo sapien
accctggcggcagatgcatggaagc

SEQ ID NO: 569871 - DNA, 25 bp, Homo sapien
tcctggagggaccacaccgccggga

SEQ ID NO: 569872 - DNA, 25 bp, Homo sapien
tccacagacttcaggcggaccggaa

SEQ ID NO: 569873 - DNA, 25 bp, Homo sapien
agcgcggccccgagaactgagaact

SEQ ID NO: 569874 - DNA, 25 bp, Homo sapien
aaggcgggagcgctcgcagttccct

SEQ ID NO: 569875 - DNA, 25 bp, Homo sapien
tgaaccctcaagtaaacgatatgct

SEQ ID NO: 569876 - DNA, 25 bp, Homo sapien
tgggccaccaatgcaagaagttata

SEQ ID NO: 569877 - DNA, 25 bp, Homo sapien
gagtatacgaggactccctgtactt

SEQ ID NO: 569878 - DNA, 25 bp, Homo sapien
aactgcataacaggaagcatgaacc

SEQ ID NO: 569879 - DNA, 25 bp, Homo sapien
tctagagcttttgataactcatgct

SEQ ID NO: 569880 - DNA, 25 bp, Homo sapien
ttgccaccctgccaaagtattctga

SEQ ID NO: 569881 - DNA, 25 bp, Homo sapien
gactaaaactatccaagatcctcca

SEQ ID NO: 569882 - DNA, 25 bp, Homo sapien
gagctgctgcgtgttcagaccggaa

SEQ ID NO: 569883 - DNA, 25 bp, Homo sapien
gggtgctttttgcactctttatgga

SEQ ID NO: 569884 - DNA, 25 bp, Homo sapien
tgctttttgcactctttatggagct

SEQ ID NO: 569885 - DNA, 25 bp, Homo sapien
ctttatggagcttggcacgttgctg

SEQ ID NO: 569886 - DNA, 25 bp, Homo sapien
cacgttgctgtgtaaatagcaggtg

SEQ ID NO: 569887 - DNA, 25 bp, Homo sapien
tgttccttctcgagaacacagtgtg

SEQ ID NO: 569888 - DNA, 25 bp, Homo sapien
tccttctcgagaacacagtgtgctt

SEQ ID NO: 569889 - DNA, 25 bp, Homo sapien
ctctggcacggcctcggtgtttagg

SEQ ID NO: 569890 - DNA, 25 bp, Homo sapien
aagctgttccttctcgagaacacag

SEQ ID NO: 569891 - DNA, 25 bp, Homo sapien
tatttggagtgcacacaggctcacg

SEQ ID NO: 569892 - DNA, 25 bp, Homo sapien
gggagaactcctggcagcatacaga

SEQ ID NO: 569893 - DNA, 25 bp, Homo sapien
aacgcaccggtgctggaaaccgaat

SEQ ID NO: 569894 - DNA, 25 bp, Homo sapien
gaattattggtagcaacccacgtgc

SEQ ID NO: 569895 - DNA, 25 bp, Homo sapien
cagtgaccaggcatcaaaacacaca

SEQ ID NO: 569896 - DNA, 25 bp, Homo sapien
aggttctaccgtgagtgactgcagg

SEQ ID NO: 569897 - DNA, 25 bp, Homo sapien
cctgggatgaccctggatctcctgg

SEQ ID NO: 569898 - DNA, 25 bp, Homo sapien
ccccaatggctctctgtggtacgtg

SEQ ID NO: 569899 - DNA, 25 bp, Homo sapien
tgctatgcctccacgttgcacctgt

SEQ ID NO: 569900 - DNA, 25 bp, Homo sapien
gtgagcacacggcagagccctgaag

SEQ ID NO: 569901 - DNA, 25 bp, Homo sapien
aagacttctgaagatgcgggctgct

SEQ ID NO: 569902 - DNA, 25 bp, Homo sapien
gctaagctttctgcatataccaagt

SEQ ID NO: 569903 - DNA, 25 bp, Homo sapien
taagtgtcctgggtctacctgtcgg

SEQ ID NO: 569904 - DNA, 25 bp, Homo sapien
aagtgcagtccttcagtcgtccgtg

SEQ ID NO: 569905 - DNA, 25 bp, Homo sapien
tggaggctgtcacatacccaggtgc

SEQ ID NO: 569906 - DNA, 25 bp, Homo sapien
catcccttgggacacacggcttggg

SEQ ID NO: 569907 - DNA, 25 bp, Homo sapien
gccttgctccgtgcctgaaagctca

SEQ ID NO: 569908 - DNA, 25 bp, Homo sapien
tccagatctgtctggcctataaggc

SEQ ID NO: 569909 - DNA, 25 bp, Homo sapien
gggagtactgcgtcaccttcatctt

SEQ ID NO: 569910 - DNA, 25 bp, Homo sapien
tataaggcctgtaggcactataagg

SEQ ID NO: 569911 - DNA, 25 bp, Homo sapien
tgccggaatggtacacggatgctct

SEQ ID NO: 569912 - DNA, 25 bp, Homo sapien
catgtgccactggacaccgggatgt

SEQ ID NO: 569913 - DNA, 25 bp, Homo sapien
tgctggaatggtgcacgcatgctct

SEQ ID NO: 569914 - DNA, 25 bp, Homo sapien
tgttgccggatgctcttttggacgc

SEQ ID NO: 569915 - DNA, 25 bp, Homo sapien
tggcgcatgtgcacatgttattggc

SEQ ID NO: 569916 - DNA, 25 bp, Homo sapien
ctggcgcatgtgcacatgttattgg

SEQ ID NO: 569917 - DNA, 25 bp, Homo sapien
cctcagccatatgatgcttgaattc

SEQ ID NO: 569918 - DNA, 25 bp, Homo sapien
cattcgtggaaatgtgtacttcttc

SEQ ID NO: 569919 - DNA, 25 bp, Homo sapien
ttgaattcccaaaccattcgtggaa

SEQ ID NO: 569920 - DNA, 25 bp, Homo sapien
tgtagttcaaacctcagccatatga

SEQ ID NO: 569921 - DNA, 25 bp, Homo sapien
ggactacaggcctgaaatactgttt

SEQ ID NO: 569922 - DNA, 25 bp, Homo sapien
actacaggcctgaaatactgtttct

SEQ ID NO: 569923 - DNA, 25 bp, Homo sapien
tacaggcctgaaatactgtttcttt

SEQ ID NO: 569924 - DNA, 25 bp, Homo sapien
gactacaggcctgaaatactgtttc

SEQ ID NO: 569925 - DNA, 25 bp, Homo sapien
ccaaaccacaaaaggatagctgcgg

SEQ ID NO: 569926 - DNA, 25 bp, Homo sapien
atggccctgcatagacacgagctgg

SEQ ID NO: 569927 - DNA, 25 bp, Homo sapien
tcagagagtttcttgcatatggccc

SEQ ID NO: 569928 - DNA, 25 bp, Homo sapien
tgcacagtgtggcttggtgccaacc

SEQ ID NO: 569929 - DNA, 25 bp, Homo sapien
acggacccacgcatggacccagcga

SEQ ID NO: 569930 - DNA, 25 bp, Homo sapien
acccagcgacccacggacctgctta

SEQ ID NO: 569931 - DNA, 25 bp, Homo sapien
acgcatggacccagcgacccacgga

SEQ ID NO: 569932 - DNA, 25 bp, Homo sapien
gccacggacccacgcatggacccag

SEQ ID NO: 569933 - DNA, 25 bp, Homo sapien
cgcggcgcgggtggcatgcggccac

SEQ ID NO: 569934 - DNA, 25 bp, Homo sapien
gctcggtccactcgcggcttcgcgg

SEQ ID NO: 569935 - DNA, 25 bp, Homo sapien
cagctgcactcgctcggtccactcg

SEQ ID NO: 569936 - DNA, 25 bp, Homo sapien
cgcgggtggcatgcggccacacgga

SEQ ID NO: 569937 - DNA, 25 bp, Homo sapien
cccaggtgacctcgttggtgagccc

SEQ ID NO: 569938 - DNA, 25 bp, Homo sapien
tctaggtgaccttggcggtgacacg

SEQ ID NO: 569939 - DNA, 25 bp, Homo sapien
cctgtgtgatacactaggtgaccta

SEQ ID NO: 569940 - DNA, 25 bp, Homo sapien
gtgacacaggtgacacttccaggtg

SEQ ID NO: 569941 - DNA, 25 bp, Homo sapien
aaaccggacacacaggcctcctggg

SEQ ID NO: 569942 - DNA, 25 bp, Homo sapien
ggggtcgcccagtcggacagtgcgg

SEQ ID NO: 569943 - DNA, 25 bp, Homo sapien
gttggggtcgcccagtcggacagtg

SEQ ID NO: 569944 - DNA, 25 bp, Homo sapien
tgggcagcgggaaacctggagacaa

SEQ ID NO: 569945 - DNA, 25 bp, Homo sapien
tgaatacaaagcctgtctgcgtctg

SEQ ID NO: 569946 - DNA, 25 bp, Homo sapien
gatttcctggttattcaaagaggcc

SEQ ID NO: 569947 - DNA, 25 bp, Homo sapien
tgtgcacatccaatctgcgcagctg

SEQ ID NO: 569948 - DNA, 25 bp, Homo sapien
cattgaatgatgaacgtctgtgcac

SEQ ID NO: 569949 - DNA, 25 bp, Homo sapien
ttgggacgggctcaacacctcttgg

SEQ ID NO: 569950 - DNA, 25 bp, Homo sapien
cacaggcgtggaacttcccactttg

SEQ ID NO: 569951 - DNA, 25 bp, Homo sapien
tcccactttgtttcaggacagccag

SEQ ID NO: 569952 - DNA, 25 bp, Homo sapien
ggaaaagcatctccggccacgcaaa

SEQ ID NO: 569953 - DNA, 25 bp, Homo sapien
ttcgatggccgagaagggagcatcc

SEQ ID NO: 569954 - DNA, 25 bp, Homo sapien
tgcctccgctttgtagcagcctttg

SEQ ID NO: 569955 - DNA, 25 bp, Homo sapien
cgaaggctgtggctctagcatcagg

SEQ ID NO: 569956 - DNA, 25 bp, Homo sapien
tggtccctgcgtgaagaaccagagc

SEQ ID NO: 569957 - DNA, 25 bp, Homo sapien
gagacgcgatgagagtgtcatccgc

SEQ ID NO: 569958 - DNA, 25 bp, Homo sapien
cagtgaacttgtccctgtaactctc

SEQ ID NO: 569959 - DNA, 25 bp, Homo sapien
gagaatgcaggagctacagtgaact

SEQ ID NO: 569960 - DNA, 25 bp, Homo sapien
tgagttctgcggtgctctggtcccc

SEQ ID NO: 569961 - DNA, 25 bp, Homo sapien
cagtgatggaggctttctccaagat

SEQ ID NO: 569962 - DNA, 25 bp, Homo sapien
cacaggatgtggtggcgtaggaaga

SEQ ID NO: 569963 - DNA, 25 bp, Homo sapien
aagatgttggccgtgccgtggagag

SEQ ID NO: 569964 - DNA, 25 bp, Homo sapien
cgtgccgtggagaggactggacgct

SEQ ID NO: 569965 - DNA, 25 bp, Homo sapien
tctgtgatcgtgtctgtggttggaa

SEQ ID NO: 569966 - DNA, 25 bp, Homo sapien
gcccgtgctgcataagggacttggc

SEQ ID NO: 569967 - DNA, 25 bp, Homo sapien
cataagggacttggcgtgatgtctg

SEQ ID NO: 569968 - DNA, 25 bp, Homo sapien
ttggaagtgacgtctgggctggagc

SEQ ID NO: 569969 - DNA, 25 bp, Homo sapien
gggcttaagtcaagctctgtaaatg

SEQ ID NO: 569970 - DNA, 25 bp, Homo sapien
tcaagctctgtaaatgcggcacccg

SEQ ID NO: 569971 - DNA, 25 bp, Homo sapien
tcctcccttctatccggcaggtggc

SEQ ID NO: 569972 - DNA, 25 bp, Homo sapien
aatgcggcacccgacgtctgaggcc

SEQ ID NO: 569973 - DNA, 25 bp, Homo sapien
tattctgagtggtgctcctggctgc

SEQ ID NO: 569974 - DNA, 25 bp, Homo sapien
tcctggctgctgtccgtggctgagg

SEQ ID NO: 569975 - DNA, 25 bp, Homo sapien
tgagtccctcgcaggtggtgtgctc

SEQ ID NO: 569976 - DNA, 25 bp, Homo sapien
tcggagcagtcgaggcggcctctgg

SEQ ID NO: 569977 - DNA, 25 bp, Homo sapien
agcccggtttatgcagagcttccca

SEQ ID NO: 569978 - DNA, 25 bp, Homo sapien
agggagctgtgagccccggccactc

SEQ ID NO: 569979 - DNA, 25 bp, Homo sapien
gagcttcccacggtcagccgtgcag

SEQ ID NO: 569980 - DNA, 25 bp, Homo sapien
tcttcccgtcccgtggtcagtgagc

SEQ ID NO: 569981 - DNA, 25 bp, Homo sapien
gggccgcggccggatgccatgtggc

SEQ ID NO: 569982 - DNA, 25 bp, Homo sapien
gggtctgatcctgcctgtgaagaca

SEQ ID NO: 569983 - DNA, 25 bp, Homo sapien
gccgcggccggatgccatgtggcgc

SEQ ID NO: 569984 - DNA, 25 bp, Homo sapien
tctgatcctgcctgtgaagacacag

SEQ ID NO: 569985 - DNA, 25 bp, Homo sapien
cagcacgggccgcagggtctctgca

SEQ ID NO: 569986 - DNA, 25 bp, Homo sapien
cagcgctttcccgaaacgctgttgt

SEQ ID NO: 569987 - DNA, 25 bp, Homo sapien
tccttcacccggctgcagggccgca

SEQ ID NO: 569988 - DNA, 25 bp, Homo sapien
ccgcagacagcacgggccgcagggt

SEQ ID NO: 569989 - DNA, 25 bp, Homo sapien
tgcccaaaacggtctggcagactaa

SEQ ID NO: 569990 - DNA, 25 bp, Homo sapien
tgcaacgttttcacttccatggtag

SEQ ID NO: 569991 - DNA, 25 bp, Homo sapien
tcggcctgcgctgcatgcaacgttt

SEQ ID NO: 569992 - DNA, 25 bp, Homo sapien
aaaaccaagtcggagaggcccagca

SEQ ID NO: 569993 - DNA, 25 bp, Homo sapien
gatgacagctcaggatgcaactgaa

SEQ ID NO: 569994 - DNA, 25 bp, Homo sapien
taaagacagaccctcaagatgacag

SEQ ID NO: 569995 - DNA, 25 bp, Homo sapien
cagggcttggcctatgtgggattca

SEQ ID NO: 569996 - DNA, 25 bp, Homo sapien
taagttaccggaagtcatgtctggc

SEQ ID NO: 569997 - DNA, 25 bp, Homo sapien
cagctatggagggcgtacagggcag

SEQ ID NO: 569998 - DNA, 25 bp, Homo sapien
tcagctatggagggcgtacagggca

SEQ ID NO: 569999 - DNA, 25 bp, Homo sapien
gctatggagggcgtacagggcagca

SEQ ID NO: 570000 - DNA, 25 bp, Homo sapien
tatggagggcgtacagggcagcagg

SEQ ID NO: 570001 - DNA, 25 bp, Homo sapien
gacagggtctgtggagccttttctg

SEQ ID NO: 570002 - DNA, 25 bp, Homo sapien
aagtgggtgccaaagagttcatgag

SEQ ID NO: 570003 - DNA, 25 bp, Homo sapien
tcacagagatcccaggagggcgcca

SEQ ID NO: 570004 - DNA, 25 bp, Homo sapien
tctttgggggcagcgaacgcaccag

SEQ ID NO: 570005 - DNA, 25 bp, Homo sapien
gcccctgtgacattagtggaccccg

SEQ ID NO: 570006 - DNA, 25 bp, Homo sapien
cccgtgacattagtggaccccgtgg

SEQ ID NO: 570007 - DNA, 25 bp, Homo sapien
ctgtgacattagtggaccccgtggc

SEQ ID NO: 570008 - DNA, 25 bp, Homo sapien
tgacattagtggaccccgtggcgtg

SEQ ID NO: 570009 - DNA, 25 bp, Homo sapien
ggtgtgaggcagacgcgcacttaac

SEQ ID NO: 570010 - DNA, 25 bp, Homo sapien
cacttaacggcgtgagaagccagat

SEQ ID NO: 570011 - DNA, 25 bp, Homo sapien
taaacgtagagtgagtggaagcccc

SEQ ID NO: 570012 - DNA, 25 bp, Homo sapien
cagaagctccatggctagaatggga

SEQ ID NO: 570013 - DNA, 25 bp, Homo sapien
tatacaacgcgcaagtgtggtctct

SEQ ID NO: 570014 - DNA, 25 bp, Homo sapien
gagtgaatccttaacgtggaccagc

SEQ ID NO: 570015 - DNA, 25 bp, Homo sapien
gacggaggctgtcgttatacaacgc

SEQ ID NO: 570016 - DNA, 25 bp, Homo sapien
cgtagccatgccaccacgagtgaat

SEQ ID NO: 570017 - DNA, 25 bp, Homo sapien
ctgcaggacgctggcatcggattca

SEQ ID NO: 570018 - DNA, 25 bp, Homo sapien
tcctgcgcatcgcagtaagtgccac

SEQ ID NO: 570019 - DNA, 25 bp, Homo sapien
gacaaatggacctccgtgaaggcgt

SEQ ID NO: 570020 - DNA, 25 bp, Homo sapien
tgatagaccggcgacgggacaaatg

SEQ ID NO: 570021 - DNA, 25 bp, Homo sapien
gaacatgaccgtggcactcactgaa

SEQ ID NO: 570022 - DNA, 25 bp, Homo sapien
ccggctcggtctgctaggtgttgaa

SEQ ID NO: 570023 - DNA, 25 bp, Homo sapien
ggtctcaaaccctgaaacgtgccag

SEQ ID NO: 570024 - DNA, 25 bp, Homo sapien
tcagctctttatgaacccgggaaga

SEQ ID NO: 570025 - DNA, 25 bp, Homo sapien
aagccctttcggtgtctagtctgca

SEQ ID NO: 570026 - DNA, 25 bp, Homo sapien
gaaaacgtgtccgtgggtgacatca

SEQ ID NO: 570027 - DNA, 25 bp, Homo sapien
agtgctgccgaccatagctcagaga

SEQ ID NO: 570028 - DNA, 25 bp, Homo sapien
catggaaacggatggcactccctga

SEQ ID NO: 570029 - DNA, 25 bp, Homo sapien
tgggtgttccggaggcgagggtgtc

SEQ ID NO: 570030 - DNA, 25 bp, Homo sapien
gaggcgagggtatcccagaagtgtg

SEQ ID NO: 570031 - DNA, 25 bp, Homo sapien
tcccgggagtgtgggtgttccagag

SEQ ID NO: 570032 - DNA, 25 bp, Homo sapien
tgggtgtcccggaggcgagggtgtc

SEQ ID NO: 570033 - DNA, 25 bp, Homo sapien
gggacagaagttacatacagacacc

SEQ ID NO: 570034 - DNA, 25 bp, Homo sapien
tacagacaccaatcaataagcataa

SEQ ID NO: 570035 - DNA, 25 bp, Homo sapien
aagttgtacactggttcgttccaga

SEQ ID NO: 570036 - DNA, 25 bp, Homo sapien
tgtccaaggtagttgggtcacagct

SEQ ID NO: 570037 - DNA, 25 bp, Homo sapien
gacagtagaatctcctcctgaggca

SEQ ID NO: 570038 - DNA, 25 bp, Homo sapien
cagtagaatctcctcctgaggcagg

SEQ ID NO: 570039 - DNA, 25 bp, Homo sapien
tagaatctcctcctgaggcaggaca

SEQ ID NO: 570040 - DNA, 25 bp, Homo sapien
agtagaatctcctcctgaggcagga

SEQ ID NO: 570041 - DNA, 25 bp, Homo sapien
ttccagtgttcatccgcagggagca

SEQ ID NO: 570042 - DNA, 25 bp, Homo sapien
agacctgctcatacgaagaggcccg

SEQ ID NO: 570043 - DNA, 25 bp, Homo sapien
tggtttacaagagagtgatccgcct

SEQ ID NO: 570044 - DNA, 25 bp, Homo sapien
cgaaagagagtgcatggaagagacc

SEQ ID NO: 570045 - DNA, 25 bp, Homo sapien
agtatgttccaagtatcgcatgaag

SEQ ID NO: 570046 - DNA, 25 bp, Homo sapien
tctgattcaagtcaaactaggtgta

SEQ ID NO: 570047 - DNA, 25 bp, Homo sapien
caatttcacataaactagaaatact

SEQ ID NO: 570048 - DNA, 25 bp, Homo sapien
gcatgaagcatacatatgcgaaaaa

SEQ ID NO: 570049 - DNA, 25 bp, Homo sapien
gagacctatgacttcgacatcgccg

SEQ ID NO: 570050 - DNA, 25 bp, Homo sapien
gaagtacgggatctacaccaaggtc

SEQ ID NO: 570051 - DNA, 25 bp, Homo sapien
gatcgacaggtccatgaaaaccagg

SEQ ID NO: 570052 - DNA, 25 bp, Homo sapien
tcaaggacacctacttcgtgacagg

SEQ ID NO: 570053 - DNA, 25 bp, Homo sapien
aaaatgaatgtcacccagagcggac

SEQ ID NO: 570054 - DNA, 25 bp, Homo sapien
tacatgcacattcctgaaatacgga

SEQ ID NO: 570055 - DNA, 25 bp, Homo sapien
gaaatacggacatgtgggaaacact

SEQ ID NO: 570056 - DNA, 25 bp, Homo sapien
cacggagtctttgttctacatgcac

SEQ ID NO: 570057 - DNA, 25 bp, Homo sapien
gttgctgccgcaaatgcagaccagt

SEQ ID NO: 570058 - DNA, 25 bp, Homo sapien
gtaacagagcgctctccgcgtgctt

SEQ ID NO: 570059 - DNA, 25 bp, Homo sapien
tgacctctgagaagcgtgcaccgga

SEQ ID NO: 570060 - DNA, 25 bp, Homo sapien
aggacctcccgtggcaggtaacaga

SEQ ID NO: 570061 - DNA, 25 bp, Homo sapien
aaaatcagctaatgaacatggcagg

SEQ ID NO: 570062 - DNA, 25 bp, Homo sapien
tgaaaggtccttggcaaaaagcaac

SEQ ID NO: 570063 - DNA, 25 bp, Homo sapien
gcagagcatcgttgaagagcagaga

SEQ ID NO: 570064 - DNA, 25 bp, Homo sapien
tctccaacctgtagatgaaatggcc

SEQ ID NO: 570065 - DNA, 25 bp, Homo sapien
tctcgcgtgtacgtgtggcagtcca

SEQ ID NO: 570066 - DNA, 25 bp, Homo sapien
gcagctacgtaggtcaagaggatcc

SEQ ID NO: 570067 - DNA, 25 bp, Homo sapien
caggcgcttgccttcgtgcattcat

SEQ ID NO: 570068 - DNA, 25 bp, Homo sapien
cagtccacggctggaatccgggtgt

SEQ ID NO: 570069 - DNA, 25 bp, Homo sapien
cttaggagagcagggcataaaagag

SEQ ID NO: 570070 - DNA, 25 bp, Homo sapien
ctactgggatctgcgctcccagaat

SEQ ID NO: 570071 - DNA, 25 bp, Homo sapien
gcttccctggctctactgggatctg

SEQ ID NO: 570072 - DNA, 25 bp, Homo sapien
tggctctactgggatctgcgctccc

SEQ ID NO: 570073 - DNA, 25 bp, Homo sapien
tgtaggagcgagctaaggagtgctg

SEQ ID NO: 570074 - DNA, 25 bp, Homo sapien
agcgagctaaggagtgctgctgaag

SEQ ID NO: 570075 - DNA, 25 bp, Homo sapien
taggagcgagctaaggagtgctgct

SEQ ID NO: 570076 - DNA, 25 bp, Homo sapien
agatgtaggagcgagctaaggagtg

SEQ ID NO: 570077 - DNA, 25 bp, Homo sapien
gaggagcatccatacaggcaagcta

SEQ ID NO: 570078 - DNA, 25 bp, Homo sapien
tacaggcaagctataaaatctggaa

SEQ ID NO: 570079 - DNA, 25 bp, Homo sapien
aaattgaggagcatccatacaggca

SEQ ID NO: 570080 - DNA, 25 bp, Homo sapien
tccatacaggcaagctataaaatct

SEQ ID NO: 570081 - DNA, 25 bp, Homo sapien
cagaatacgctttttacacaaagaa

SEQ ID NO: 570082 - DNA, 25 bp, Homo sapien
ttcagaatacgctttttacacaaag

SEQ ID NO: 570083 - DNA, 25 bp, Homo sapien
aattcagaatacgctttttacacaa

SEQ ID NO: 570084 - DNA, 25 bp, Homo sapien
tcagaatacgctttttacacaaaga

SEQ ID NO: 570085 - DNA, 25 bp, Homo sapien
gtgagccgagcagccttcacgcaaa

SEQ ID NO: 570086 - DNA, 25 bp, Homo sapien
cacacttaggaaaagtgagccgagc

SEQ ID NO: 570087 - DNA, 25 bp, Homo sapien
tccttcaaagaagtctcacaaagac

SEQ ID NO: 570088 - DNA, 25 bp, Homo sapien
cttcaggaaccacacttaggaaaag

SEQ ID NO: 570089 - DNA, 25 bp, Homo sapien
aaaaggaattccaggttttcatcag

SEQ ID NO: 570090 - DNA, 25 bp, Homo sapien
aaaggaattccaggttttcatcagg

SEQ ID NO: 570091 - DNA, 25 bp, Homo sapien
taactcgggtgtgctgaaaatctca

SEQ ID NO: 570092 - DNA, 25 bp, Homo sapien
gcgcctccaagagttccggcttcag

SEQ ID NO: 570093 - DNA, 25 bp, Homo sapien
cagggagccttgttgcagtaccgga

SEQ ID NO: 570094 - DNA, 25 bp, Homo sapien
tacaaatgaaggagattaactcggg

SEQ ID NO: 570095 - DNA, 25 bp, Homo sapien
caccagcttctgatgctgatgcgat

SEQ ID NO: 570096 - DNA, 25 bp, Homo sapien
tgctgaccaccagcttctgatgctg

SEQ ID NO: 570097 - DNA, 25 bp, Homo sapien
gcgatatgtagcctttgacgtgtcc

SEQ ID NO: 570098 - DNA, 25 bp, Homo sapien
tctgatgctgatgcgatatgtagcc

SEQ ID NO: 570099 - DNA, 25 bp, Homo sapien
tgtaatgaacacgtacagacgctct

SEQ ID NO: 570100 - DNA, 25 bp, Homo sapien
caagagcggcacagttcagttcagc

SEQ ID NO: 570101 - DNA, 25 bp, Homo sapien
tatccacggtgggtttcatatccat

SEQ ID NO: 570102 - DNA, 25 bp, Homo sapien
tctgagtcatgtcaaagatgctggg

SEQ ID NO: 570103 - DNA, 25 bp, Homo sapien
ctgaacttcgtcaatgtccacgtcc

SEQ ID NO: 570104 - DNA, 25 bp, Homo sapien
gttagccagaatacactgaacttcg

SEQ ID NO: 570105 - DNA, 25 bp, Homo sapien
catgtatatcaagttagccagaata

SEQ ID NO: 570106 - DNA, 25 bp, Homo sapien
cagaatacactgaacttcgtcaatg

SEQ ID NO: 570107 - DNA, 25 bp, Homo sapien
gacaggatgcaatactccacagcca

SEQ ID NO: 570108 - DNA, 25 bp, Homo sapien
aagggcactgtggttaccgacagga

SEQ ID NO: 570109 - DNA, 25 bp, Homo sapien
caagaaaaggcacctcttaataagc

SEQ ID NO: 570110 - DNA, 25 bp, Homo sapien
aaaggcacctcttaataagccggtg

SEQ ID NO: 570111 - DNA, 25 bp, Homo sapien
tctgatgaaatgtggtaccgcggct

SEQ ID NO: 570112 - DNA, 25 bp, Homo sapien
tctcacagactcagcgaaatagggt

SEQ ID NO: 570113 - DNA, 25 bp, Homo sapien
tttacacaactgagatcctgctggg

SEQ ID NO: 570114 - DNA, 25 bp, Homo sapien
cctactgtttgtgacgtgctaccca

SEQ ID NO: 570115 - DNA, 25 bp, Homo sapien
tcttaaagaggttcctgtaggtgat

SEQ ID NO: 570116 - DNA, 25 bp, Homo sapien
taaagaggttcctgtaggtgatgat

SEQ ID NO: 570117 - DNA, 25 bp, Homo sapien
cttaaagaggttcctgtaggtgatg

SEQ ID NO: 570118 - DNA, 25 bp, Homo sapien
ttcttaaagaggttcctgtaggtga

SEQ ID NO: 570119 - DNA, 25 bp, Homo sapien
gatgaggaagattccgcagcgaatg

SEQ ID NO: 570120 - DNA, 25 bp, Homo sapien
tgaagaaggcctcgtgcttcgccag

SEQ ID NO: 570121 - DNA, 25 bp, Homo sapien
cagcgaatgaagaaggcctcgtgct

SEQ ID NO: 570122 - DNA, 25 bp, Homo sapien
gaagattccgcagcgaatgaagaag

SEQ ID NO: 570123 - DNA, 25 bp, Homo sapien
gtcaactctcatcaggcttgcattt

SEQ ID NO: 570124 - DNA, 25 bp, Homo sapien
acagagcgtgcacgtcaactctcat

SEQ ID NO: 570125 - DNA, 25 bp, Homo sapien
agaaggagggtgagtttctcacaga

SEQ ID NO: 570126 - DNA, 25 bp, Homo sapien
cgtgcacgtcaactctcatcaggct

SEQ ID NO: 570127 - DNA, 25 bp, Homo sapien
ctcacagctctggttacttccgcaa

SEQ ID NO: 570128 - DNA, 25 bp, Homo sapien
aggagctccacagtgggcatgtgac

SEQ ID NO: 570129 - DNA, 25 bp, Homo sapien
ggttacttccgcaaactgcatcagg

SEQ ID NO: 570130 - DNA, 25 bp, Homo sapien
tttttcaggagctccacagtgggca

SEQ ID NO: 570131 - DNA, 25 bp, Homo sapien
cattccatgacacgtgaccttgatc

SEQ ID NO: 570132 - DNA, 25 bp, Homo sapien
tagtacactaggaaaacaacacagg

SEQ ID NO: 570133 - DNA, 25 bp, Homo sapien
tgagatgtaggcatacggaagtagc

SEQ ID NO: 570134 - DNA, 25 bp, Homo sapien
cagaacacctgggtacaacacactt

SEQ ID NO: 570135 - DNA, 25 bp, Homo sapien
agcaaatagatcagaatcatccttt

SEQ ID NO: 570136 - DNA, 25 bp, Homo sapien
tagaacggtgacaatgctcaaaggc

SEQ ID NO: 570137 - DNA, 25 bp, Homo sapien
acaatgctcaaaggcaaatgacagg

SEQ ID NO: 570138 - DNA, 25 bp, Homo sapien
ttttgttcttctgactagaacggtg

SEQ ID NO: 570139 - DNA, 25 bp, Homo sapien
gagagtctgcaatatcccaccagct

SEQ ID NO: 570140 - DNA, 25 bp, Homo sapien
gcacatgctaacaaggaactctcag

SEQ ID NO: 570141 - DNA, 25 bp, Homo sapien
cagaggccctcccttatgcagaatg

SEQ ID NO: 570142 - DNA, 25 bp, Homo sapien
aaaacatccagtcttgcacagtgag

SEQ ID NO: 570143 - DNA, 25 bp, Homo sapien
cagaagatctatggccagcgctggc

SEQ ID NO: 570144 - DNA, 25 bp, Homo sapien
gaaatggtcagtccatacaagccca

SEQ ID NO: 570145 - DNA, 25 bp, Homo sapien
catgtacttgggactgtgtgctcca

SEQ ID NO: 570146 - DNA, 25 bp, Homo sapien
caaaatctctgcgagctacaaggca

SEQ ID NO: 570147 - DNA, 25 bp, Homo sapien
tttgtatgttactctctgtgcagtg

SEQ ID NO: 570148 - DNA, 25 bp, Homo sapien
tagccttgcgtccaacgtagtattt

SEQ ID NO: 570149 - DNA, 25 bp, Homo sapien
aatcgctgtcaaacatagccttgcg

SEQ ID NO: 570150 - DNA, 25 bp, Homo sapien
tgcagtgctgtaatcgtctttcagg

SEQ ID NO: 570151 - DNA, 25 bp, Homo sapien
ggtttacataaatggagtttgttga

SEQ ID NO: 570152 - DNA, 25 bp, Homo sapien
gtttacataaatggagtttgttgat

SEQ ID NO: 570153 - DNA, 25 bp, Homo sapien
gcaggagcctgtgcttatgcagcac

SEQ ID NO: 570154 - DNA, 25 bp, Homo sapien
gggtgctctacaggagtggaaggca

SEQ ID NO: 570155 - DNA, 25 bp, Homo sapien
cctgtgcttatgcagcaccggcagg

SEQ ID NO: 570156 - DNA, 25 bp, Homo sapien
gagcctgtgcttatgcagcaccggc

SEQ ID NO: 570157 - DNA, 25 bp, Homo sapien
tatgaccacagaagacaaaacgctc

SEQ ID NO: 570158 - DNA, 25 bp, Homo sapien
ccatagttaattatgaccacagaag

SEQ ID NO: 570159 - DNA, 25 bp, Homo sapien
ttccatagttaattatgaccacaga

SEQ ID NO: 570160 - DNA, 25 bp, Homo sapien
ccacagaagacaaaacgctctggag

SEQ ID NO: 570161 - DNA, 25 bp, Homo sapien
cttagagtcctctataccagcacgg

SEQ ID NO: 570162 - DNA, 25 bp, Homo sapien
cttcttagagtcctctataccagca

SEQ ID NO: 570163 - DNA, 25 bp, Homo sapien
tcttagagtcctctataccagcacg

SEQ ID NO: 570164 - DNA, 25 bp, Homo sapien
agattttaaacagctggttcaccag

SEQ ID NO: 570165 - DNA, 25 bp, Homo sapien
ggtaagtcccaaagctcaagtcata

SEQ ID NO: 570166 - DNA, 25 bp, Homo sapien
caaatccagacagctgaaagggcct

SEQ ID NO: 570167 - DNA, 25 bp, Homo sapien
aggatgagtcccaccaaggcagaca

SEQ ID NO: 570168 - DNA, 25 bp, Homo sapien
catgaagtcaccgaacaggcaggaa

SEQ ID NO: 570169 - DNA, 25 bp, Homo sapien
tacgaaagttctgaagcgaggctgg

SEQ ID NO: 570170 - DNA, 25 bp, Homo sapien
aacgctagtgatggagaaggcccac

SEQ ID NO: 570171 - DNA, 25 bp, Homo sapien
tgatccaccgtgaagtccagcagtg

SEQ ID NO: 570172 - DNA, 25 bp, Homo sapien
catttaggaaacacggattgagctc

SEQ ID NO: 570173 - DNA, 25 bp, Homo sapien
tgccacagcggctgacaatcaccat

SEQ ID NO: 570174 - DNA, 25 bp, Homo sapien
acatcttgtaggcttggctgaacag

SEQ ID NO: 570175 - DNA, 25 bp, Homo sapien
gcaggatgctaagtggaagtccacc

SEQ ID NO: 570176 - DNA, 25 bp, Homo sapien
tacaacctcatttgcatgctccgtg

SEQ ID NO: 570177 - DNA, 25 bp, Homo sapien
cacttactttcggtttcatggatgg

SEQ ID NO: 570178 - DNA, 25 bp, Homo sapien
gacaatgacgggaagacgccgtaaa

SEQ ID NO: 570179 - DNA, 25 bp, Homo sapien
agaagttcaccgtccatttccagaa

SEQ ID NO: 570180 - DNA, 25 bp, Homo sapien
tcatggatgggatccacaacaccca

SEQ ID NO: 570181 - DNA, 25 bp, Homo sapien
ctggtggtcggtcctcaagtcctta

SEQ ID NO: 570182 - DNA, 25 bp, Homo sapien
tgtgggattatagcatgtgtagaaa

SEQ ID NO: 570183 - DNA, 25 bp, Homo sapien
taacaatggttgtgggattatagca

SEQ ID NO: 570184 - DNA, 25 bp, Homo sapien
gccagaaagggtgaacgctgcaatg

SEQ ID NO: 570185 - DNA, 25 bp, Homo sapien
cagctcatcagtaactctgctgctt

SEQ ID NO: 570186 - DNA, 25 bp, Homo sapien
ccggaaacagctcatcagtaactct

SEQ ID NO: 570187 - DNA, 25 bp, Homo sapien
ggcacagacccggaaacagctcatc

SEQ ID NO: 570188 - DNA, 25 bp, Homo sapien
tccaacatgtccccaactttgcttt

SEQ ID NO: 570189 - DNA, 25 bp, Homo sapien
gaaggtcaagcgctactgcatacat

SEQ ID NO: 570190 - DNA, 25 bp, Homo sapien
tcaagcgctactgcatacatgacag

SEQ ID NO: 570191 - DNA, 25 bp, Homo sapien
agcgctactgcatacatgacaggca

SEQ ID NO: 570192 - DNA, 25 bp, Homo sapien
ctcgaaggtcaagcgctactgcata

SEQ ID NO: 570193 - DNA, 25 bp, Homo sapien
ttttcttctttgtgggcctggaatg

SEQ ID NO: 570194 - DNA, 25 bp, Homo sapien
cagttttcttctttgtgggcctgga

SEQ ID NO: 570195 - DNA, 25 bp, Homo sapien
ggtctcaagtcccaagtaatccact

SEQ ID NO: 570196 - DNA, 25 bp, Homo sapien
cagaaatgagcaactggcccagtgt

SEQ ID NO: 570197 - DNA, 25 bp, Homo sapien
gagctgaaacgagcttctgttccaa

SEQ ID NO: 570198 - DNA, 25 bp, Homo sapien
tctaactgcagaaatgagcaactgg

SEQ ID NO: 570199 - DNA, 25 bp, Homo sapien
gtctggcacttgtatgcctctatga

SEQ ID NO: 570200 - DNA, 25 bp, Homo sapien
cttgtatgcctctatgaagtcatga

SEQ ID NO: 570201 - DNA, 25 bp, Homo sapien
gcacttgtatgcctctatgaagtca

SEQ ID NO: 570202 - DNA, 25 bp, Homo sapien
tatgcctctatgaagtcatgattcc

SEQ ID NO: 570203 - DNA, 25 bp, Homo sapien
tgttgacacttctcctctggagagg

SEQ ID NO: 570204 - DNA, 25 bp, Homo sapien
aagacttgttgacacttctcctctg

SEQ ID NO: 570205 - DNA, 25 bp, Homo sapien
tccaagacttgttgacacttctcct

SEQ ID NO: 570206 - DNA, 25 bp, Homo sapien
gggttccaagacttgttgacacttc

SEQ ID NO: 570207 - DNA, 25 bp, Homo sapien
aagtcgtgggtttgcaacatgagga

SEQ ID NO: 570208 - DNA, 25 bp, Homo sapien
tcgtgggtttgcaacatgaggatgt

SEQ ID NO: 570209 - DNA, 25 bp, Homo sapien
tgaagtcgtgggtttgcaacatgag

SEQ ID NO: 570210 - DNA, 25 bp, Homo sapien
ttgaagtcgtgggtttgcaacatga

SEQ ID NO: 570211 - DNA, 25 bp, Homo sapien
ctctgctgtcgatggcttcgtacac

SEQ ID NO: 570212 - DNA, 25 bp, Homo sapien
aacaatacactgaatgccacacagg

SEQ ID NO: 570213 - DNA, 25 bp, Homo sapien
aatattctgttcgaatagaacctac

SEQ ID NO: 570214 - DNA, 25 bp, Homo sapien
gaacctacaacaatacactgaatgc

SEQ ID NO: 570215 - DNA, 25 bp, Homo sapien
aatgtaacagatggtcactactctc

SEQ ID NO: 570216 - DNA, 25 bp, Homo sapien
aaaataagtcagtggtttatcatgt

SEQ ID NO: 570217 - DNA, 25 bp, Homo sapien
tggcgcaatcgtaaacaataatttc

SEQ ID NO: 570218 - DNA, 25 bp, Homo sapien
agtggcgcaatcgtaaacaataatt

SEQ ID NO: 570219 - DNA, 25 bp, Homo sapien
aagtcagtggtttatcatgtagctc

SEQ ID NO: 570220 - DNA, 25 bp, Homo sapien
gcagggcgtcctggctggggagcat

SEQ ID NO: 570221 - DNA, 25 bp, Homo sapien
cagcagggcgtcctggctggggagc

SEQ ID NO: 570222 - DNA, 25 bp, Homo sapien
tgcagcagggcgtcctggctgggga

SEQ ID NO: 570223 - DNA, 25 bp, Homo sapien
ctgcagcagggcgtcctggctgggg

SEQ ID NO: 570224 - DNA, 25 bp, Homo sapien
ctgttgaacaacatctgtcagacgc

SEQ ID NO: 570225 - DNA, 25 bp, Homo sapien
gttgaacaacatctgtcagacgcat

SEQ ID NO: 570226 - DNA, 25 bp, Homo sapien
tgttgaacaacatctgtcagacgca

SEQ ID NO: 570227 - DNA, 25 bp, Homo sapien
agtgaagggcgttaaacgacagcga

SEQ ID NO: 570228 - DNA, 25 bp, Homo sapien
gtaccgagcgatatgaagtgtgcat

SEQ ID NO: 570229 - DNA, 25 bp, Homo sapien
ccacacgtgccagcaagtgagggca

SEQ ID NO: 570230 - DNA, 25 bp, Homo sapien
tggagtccccgaattcatcccgcat

SEQ ID NO: 570231 - DNA, 25 bp, Homo sapien
cgaacggaagaagggtggcgaggcg

SEQ ID NO: 570232 - DNA, 25 bp, Homo sapien
ccggccgccgctgttcggctcgcgc

SEQ ID NO: 570233 - DNA, 25 bp, Homo sapien
acacacggaacacgccgagggccaa

SEQ ID NO: 570234 - DNA, 25 bp, Homo sapien
acgactccgcgatccacggacaccg

SEQ ID NO: 570235 - DNA, 25 bp, Homo sapien
caggtactggttaatggtaatgtgc

SEQ ID NO: 570236 - DNA, 25 bp, Homo sapien
tactggttaatggtaatgtgcgcca

SEQ ID NO: 570237 - DNA, 25 bp, Homo sapien
ggtactggttaatggtaatgtgcgc

SEQ ID NO: 570238 - DNA, 25 bp, Homo sapien
actggttaatggtaatgtgcgccat

SEQ ID NO: 570239 - DNA, 25 bp, Homo sapien
cttgtgaaaaccaggccgcggagga

SEQ ID NO: 570240 - DNA, 25 bp, Homo sapien
gctctgattgtgtgttcgggcccgc

SEQ ID NO: 570241 - DNA, 25 bp, Homo sapien
gctcccgagctctcataaggtgcct

SEQ ID NO: 570242 - DNA, 25 bp, Homo sapien
tcccgagcctgcaggagttagggca

SEQ ID NO: 570243 - DNA, 25 bp, Homo sapien
caactacacgcaggacacgtggcgg

SEQ ID NO: 570244 - DNA, 25 bp, Homo sapien
ggtacaacctcgaggagctctacca

SEQ ID NO: 570245 - DNA, 25 bp, Homo sapien
ggctgcccgacaactacacgcagga

SEQ ID NO: 570246 - DNA, 25 bp, Homo sapien
tggcggaagctgcacgaggcggtgc

SEQ ID NO: 570247 - DNA, 25 bp, Homo sapien
gagccccagaggcaacaagtggttt

SEQ ID NO: 570248 - DNA, 25 bp, Homo sapien
taaagttatcccattacggaagaga

SEQ ID NO: 570249 - DNA, 25 bp, Homo sapien
cacttgccacagtaataagagggtc

SEQ ID NO: 570250 - DNA, 25 bp, Homo sapien
tgtgtttctaggagccacgtgactc

SEQ ID NO: 570251 - DNA, 25 bp, Homo sapien
tgttcttggaccgcacctatgtgct

SEQ ID NO: 570252 - DNA, 25 bp, Homo sapien
ttcttggaccgcacctatgtgctgc

SEQ ID NO: 570253 - DNA, 25 bp, Homo sapien
tcttggaccgcacctatgtgctgca

SEQ ID NO: 570254 - DNA, 25 bp, Homo sapien
tcctgttcttggaccgcacctatgt

SEQ ID NO: 570255 - DNA, 25 bp, Homo sapien
taacgtgaacgtaggagtccaggtg

SEQ ID NO: 570256 - DNA, 25 bp, Homo sapien
caaaagctgtgtccggtctcaccgt

SEQ ID NO: 570257 - DNA, 25 bp, Homo sapien
gaaactcggagaaagactgcctgct

SEQ ID NO: 570258 - DNA, 25 bp, Homo sapien
ttccagcgctgcagttgaaactcgg

SEQ ID NO: 570259 - DNA, 25 bp, Homo sapien
tctgacagaatccagcacaaaaaca

SEQ ID NO: 570260 - DNA, 25 bp, Homo sapien
actggactcagtaaggtgcggaaag

SEQ ID NO: 570261 - DNA, 25 bp, Homo sapien
gacccagtagggaatgataaaatgt

SEQ ID NO: 570262 - DNA, 25 bp, Homo sapien
cagaacaggacttggtaggactcag

SEQ ID NO: 570263 - DNA, 25 bp, Homo sapien
tcagatgaactaccgactaggtggt

SEQ ID NO: 570264 - DNA, 25 bp, Homo sapien
ctgaaacatgggtgcagtgagcctg

SEQ ID NO: 570265 - DNA, 25 bp, Homo sapien
cagtacctggccataggaaggtggc

SEQ ID NO: 570266 - DNA, 25 bp, Homo sapien
catgtgttctagtgctgacggcgcg

SEQ ID NO: 570267 - DNA, 25 bp, Homo sapien
tggaacatggagctcattgtgcaat

SEQ ID NO: 570268 - DNA, 25 bp, Homo sapien
cagatgagatctcaaatgataatac

SEQ ID NO: 570269 - DNA, 25 bp, Homo sapien
ggcaaagagagctgaaatacgacga

SEQ ID NO: 570270 - DNA, 25 bp, Homo sapien
gaaatacgacgatactagattgact

SEQ ID NO: 570271 - DNA, 25 bp, Homo sapien
aaccatatcattggcctaagagaga

SEQ ID NO: 570272 - DNA, 25 bp, Homo sapien
tgtatcaaattcatataggtcagtt

SEQ ID NO: 570273 - DNA, 25 bp, Homo sapien
ggtgtctcacgtggcaaaagcatga

SEQ ID NO: 570274 - DNA, 25 bp, Homo sapien
taacgtgtaatgctgtattaggcca

SEQ ID NO: 570275 - DNA, 25 bp, Homo sapien
tagggagagccttgcacgtaagtgc

SEQ ID NO: 570276 - DNA, 25 bp, Homo sapien
tcacttacgtggacatggcatgcaa

SEQ ID NO: 570277 - DNA, 25 bp, Homo sapien
cacgagaataaaactacaggccagg

SEQ ID NO: 570278 - DNA, 25 bp, Homo sapien
cagtcacctactcttagtgcaggaa

SEQ ID NO: 570279 - DNA, 25 bp, Homo sapien
tacagtcatgcgcagggacgatcct

SEQ ID NO: 570280 - DNA, 25 bp, Homo sapien
gaagacagctcgctcagatgatcag

SEQ ID NO: 570281 - DNA, 25 bp, Homo sapien
tcaaagctggcgaatggatgacgca

SEQ ID NO: 570282 - DNA, 25 bp, Homo sapien
caatgaagaagaccctagatgctgc

SEQ ID NO: 570283 - DNA, 25 bp, Homo sapien
ccagcttgggcgttagggccattat

SEQ ID NO: 570284 - DNA, 25 bp, Homo sapien
tccaccctgggccagccaggtgttc

SEQ ID NO: 570285 - DNA, 25 bp, Homo sapien
ttccagcttgggcgttagggccatt

SEQ ID NO: 570286 - DNA, 25 bp, Homo sapien
agcttgggcgttagggccattatga

SEQ ID NO: 570287 - DNA, 25 bp, Homo sapien
aagccacgagctacgaggagttgcc

SEQ ID NO: 570288 - DNA, 25 bp, Homo sapien
tgtacccatcgtgtgagaggcctca

SEQ ID NO: 570289 - DNA, 25 bp, Homo sapien
tccttaggcagcagatgcagggtgc

SEQ ID NO: 570290 - DNA, 25 bp, Homo sapien
tattccagcctgatccagacagaag

SEQ ID NO: 570291 - DNA, 25 bp, Homo sapien
gcggcgcagctcacgtgacaagcgc

SEQ ID NO: 570292 - DNA, 25 bp, Homo sapien
tgccggcgtcgcagtggccgggcct

SEQ ID NO: 570293 - DNA, 25 bp, Homo sapien
tgccggccgcggtgtcttcttcgtg

SEQ ID NO: 570294 - DNA, 25 bp, Homo sapien
gcagctcacgtgacaagcgctgccg

SEQ ID NO: 570295 - DNA, 25 bp, Homo sapien
catttactatgcacaacagagtaac

SEQ ID NO: 570296 - DNA, 25 bp, Homo sapien
aatgacggtgttaattttgctaact

SEQ ID NO: 570297 - DNA, 25 bp, Homo sapien
cagagtaactatcgaaatgacggtg

SEQ ID NO: 570298 - DNA, 25 bp, Homo sapien
ccaatgtgaagttcatcttgcagca

SEQ ID NO: 570299 - DNA, 25 bp, Homo sapien
gggaccagctcacgtaatgcattgc

SEQ ID NO: 570300 - DNA, 25 bp, Homo sapien
tacaacagtagagagggaacatcct

SEQ ID NO: 570301 - DNA, 25 bp, Homo sapien
cactcgtggtgaggctgacatgctc

SEQ ID NO: 570302 - DNA, 25 bp, Homo sapien
cttacaaagggaaagcctctggccg

SEQ ID NO: 570303 - DNA, 25 bp, Homo sapien
tccagtcagctgagaaactgatcac

SEQ ID NO: 570304 - DNA, 25 bp, Homo sapien
tttccagtcagctgagaaactgatc

SEQ ID NO: 570305 - DNA, 25 bp, Homo sapien
ccagtcagctgagaaactgatcaca

SEQ ID NO: 570306 - DNA, 25 bp, Homo sapien
taatttccagtcagctgagaaactg

SEQ ID NO: 570307 - DNA, 25 bp, Homo sapien
tcagtgtagagacgagcaacgcagg

SEQ ID NO: 570308 - DNA, 25 bp, Homo sapien
agctggtagaatgacctgattttaa

SEQ ID NO: 570309 - DNA, 25 bp, Homo sapien
catagctaatcatcaaaagctggta

SEQ ID NO: 570310 - DNA, 25 bp, Homo sapien
gaatgacctgattttaaactgctct

SEQ ID NO: 570311 - DNA, 25 bp, Homo sapien
gtggccatggataagcttccaggtt

SEQ ID NO: 570312 - DNA, 25 bp, Homo sapien
tctcgcggagcttggcgacggtggc

SEQ ID NO: 570313 - DNA, 25 bp, Homo sapien
gacggtggccatggataagcttcca

SEQ ID NO: 570314 - DNA, 25 bp, Homo sapien
gcgacggtggccatggataagcttc

SEQ ID NO: 570315 - DNA, 25 bp, Homo sapien
ctacgttagctctcccagactggca

SEQ ID NO: 570316 - DNA, 25 bp, Homo sapien
tctggggtgacccacagattgtcac

SEQ ID NO: 570317 - DNA, 25 bp, Homo sapien
gacaggcctcgtgtgaggtgaggga

SEQ ID NO: 570318 - DNA, 25 bp, Homo sapien
aggcagacaggcctcgtgtgaggtg

SEQ ID NO: 570319 - DNA, 25 bp, Homo sapien
atagacaggaaagccctcggaggcc

SEQ ID NO: 570320 - DNA, 25 bp, Homo sapien
tgaaataccgcccacgtttgccatg

SEQ ID NO: 570321 - DNA, 25 bp, Homo sapien
tcttaggaaactactgactcccagg

SEQ ID NO: 570322 - DNA, 25 bp, Homo sapien
catcaggacctgagtctatacggcc

SEQ ID NO: 570323 - DNA, 25 bp, Homo sapien
gtcctgtgcaccctccgggtggtca

SEQ ID NO: 570324 - DNA, 25 bp, Homo sapien
gcaccctccgggtggtcagagcagc

SEQ ID NO: 570325 - DNA, 25 bp, Homo sapien
aggggactgagccacgtgcagcccc

SEQ ID NO: 570326 - DNA, 25 bp, Homo sapien
tggtgcccgtcctgtgcaccctccg

SEQ ID NO: 570327 - DNA, 25 bp, Homo sapien
caaatgtctggaacgctggtggctt

SEQ ID NO: 570328 - DNA, 25 bp, Homo sapien
taaacgtgtgacactccatcacgaa

SEQ ID NO: 570329 - DNA, 25 bp, Homo sapien
ctgcttaattaaggtcagggccacc

SEQ ID NO: 570330 - DNA, 25 bp, Homo sapien
aaacagtcccagatccgaagcactg

SEQ ID NO: 570331 - DNA, 25 bp, Homo sapien
agcacaccgagacgctccatcaggg

SEQ ID NO: 570332 - DNA, 25 bp, Homo sapien
gaggacctcctggtcggtcttcagg

SEQ ID NO: 570333 - DNA, 25 bp, Homo sapien
acgggcaagatgtccacaaacaggc

SEQ ID NO: 570334 - DNA, 25 bp, Homo sapien
tgaaccagcgggacaccagcagcgt

SEQ ID NO: 570335 - DNA, 25 bp, Homo sapien
tgcctctgtgagtgaccacagctgc

SEQ ID NO: 570336 - DNA, 25 bp, Homo sapien
gcggctgctaccaggatggccttgc

SEQ ID NO: 570337 - DNA, 25 bp, Homo sapien
gctcaggggcggctgctaccaggat

SEQ ID NO: 570338 - DNA, 25 bp, Homo sapien
ccttgcctctgtgagtgaccacagc

SEQ ID NO: 570339 - DNA, 25 bp, Homo sapien
tccttatccatccatctgcggtcag

SEQ ID NO: 570340 - DNA, 25 bp, Homo sapien
aaggctgaacagcactctgctgagt

SEQ ID NO: 570341 - DNA, 25 bp, Homo sapien
tctgcggtcagacacctgggttgat

SEQ ID NO: 570342 - DNA, 25 bp, Homo sapien
ccgtggcgaacgctggaggacagat

SEQ ID NO: 570343 - DNA, 25 bp, Homo sapien
taattaaaaaacaaacaaacatgca

SEQ ID NO: 570344 - DNA, 25 bp, Homo sapien
caaacaaacatgcaaagggttcctc

SEQ ID NO: 570345 - DNA, 25 bp, Homo sapien
acaaacaaacatgcaaagggttcct

SEQ ID NO: 570346 - DNA, 25 bp, Homo sapien
aacaaacatgcaaagggttcctcac

SEQ ID NO: 570347 - DNA, 25 bp, Homo sapien
gcctgcagacaccatcgctgggaga

SEQ ID NO: 570348 - DNA, 25 bp, Homo sapien
gagcactaggaaaggccaacttgga

SEQ ID NO: 570349 - DNA, 25 bp, Homo sapien
tgtaagattcagtcccaagtcctcc

SEQ ID NO: 570350 - DNA, 25 bp, Homo sapien
tgaaagcaaagtgccctcggtgtgc

SEQ ID NO: 570351 - DNA, 25 bp, Homo sapien
aagccctgaggacagcggacacatg

SEQ ID NO: 570352 - DNA, 25 bp, Homo sapien
tctgcactgggaacacgagacccca

SEQ ID NO: 570353 - DNA, 25 bp, Homo sapien
cccacctgatgtcctgaagccctga

SEQ ID NO: 570354 - DNA, 25 bp, Homo sapien
gacacatgaactgccctagaacggt

SEQ ID NO: 570355 - DNA, 25 bp, Homo sapien
caaccatccctccagacagcagatg

SEQ ID NO: 570356 - DNA, 25 bp, Homo sapien
catccctccagacagcagatgcgtg

SEQ ID NO: 570357 - DNA, 25 bp, Homo sapien
cctccagacagcagatgcgtgaggg

SEQ ID NO: 570358 - DNA, 25 bp, Homo sapien
tccctccagacagcagatgcgtgag

SEQ ID NO: 570359 - DNA, 25 bp, Homo sapien
tgcgcaaccctctcacggaataagc

SEQ ID NO: 570360 - DNA, 25 bp, Homo sapien
ctcacacttaaggtgcaaggcctga

SEQ ID NO: 570361 - DNA, 25 bp, Homo sapien
cctggtgactcagcgcaatctgatc

SEQ ID NO: 570362 - DNA, 25 bp, Homo sapien
tgtacagcgtgctttctgcgcaacc

SEQ ID NO: 570363 - DNA, 25 bp, Homo sapien
gacattttcaatacccagacggact

SEQ ID NO: 570364 - DNA, 25 bp, Homo sapien
cccacggcagggagctttcgttttg

SEQ ID NO: 570365 - DNA, 25 bp, Homo sapien
gagctcagccatgggttcacaggtc

SEQ ID NO: 570366 - DNA, 25 bp, Homo sapien
tcacaggtctgctggccattccggt

SEQ ID NO: 570367 - DNA, 25 bp, Homo sapien
tatgattaagccatccttggatttc

SEQ ID NO: 570368 - DNA, 25 bp, Homo sapien
taaattaatagatccacagactggt

SEQ ID NO: 570369 - DNA, 25 bp, Homo sapien
ggttgatttctatctggcttcgcaa

SEQ ID NO: 570370 - DNA, 25 bp, Homo sapien
tacatacttctattcatcagtgaga

SEQ ID NO: 570371 - DNA, 25 bp, Homo sapien
ctccaaacactggggactggcccgg

SEQ ID NO: 570372 - DNA, 25 bp, Homo sapien
gctccaaacactggggactggcccg

SEQ ID NO: 570373 - DNA, 25 bp, Homo sapien
ccaaacactggggactggcccggct

SEQ ID NO: 570374 - DNA, 25 bp, Homo sapien
caaacactggggactggcccggctg

SEQ ID NO: 570375 - DNA, 25 bp, Homo sapien
cttccaacaagagcatctaacagcc

SEQ ID NO: 570376 - DNA, 25 bp, Homo sapien
ctggtagtattcttccaacaagagc

SEQ ID NO: 570377 - DNA, 25 bp, Homo sapien
ttccaacaagagcatctaacagcca

SEQ ID NO: 570378 - DNA, 25 bp, Homo sapien
gaagacatctgtggccgagagcaga

SEQ ID NO: 570379 - DNA, 25 bp, Homo sapien
ggaagctctgggaagaaccgactgc

SEQ ID NO: 570380 - DNA, 25 bp, Homo sapien
gcttcgagctgatgacggaaatgct

SEQ ID NO: 570381 - DNA, 25 bp, Homo sapien
acttttgtggccgagagtggacccg

SEQ ID NO: 570382 - DNA, 25 bp, Homo sapien
cagcttcacccgacacggcactgcc

SEQ ID NO: 570383 - DNA, 25 bp, Homo sapien
actccagaaggccacgttcttgctc

SEQ ID NO: 570384 - DNA, 25 bp, Homo sapien
cacccgacacggcactgccagccag

SEQ ID NO: 570385 - DNA, 25 bp, Homo sapien
ctcaactccagaaggccacgttctt

SEQ ID NO: 570386 - DNA, 25 bp, Homo sapien
ccagcagcacattgtacagggtcct

SEQ ID NO: 570387 - DNA, 25 bp, Homo sapien
agcagcacattgtacagggtcctct

SEQ ID NO: 570388 - DNA, 25 bp, Homo sapien
tccctggttatggtgcccatatgcc

SEQ ID NO: 570389 - DNA, 25 bp, Homo sapien
tggtcttccggaacttcacgttgtc

SEQ ID NO: 570390 - DNA, 25 bp, Homo sapien
tgtcctgatggcgtcctccagcctg

SEQ ID NO: 570391 - DNA, 25 bp, Homo sapien
gtcctgatggcgtcctccagcctgg

SEQ ID NO: 570392 - DNA, 25 bp, Homo sapien
agaagctggtggtagtagccgggat

SEQ ID NO: 570393 - DNA, 25 bp, Homo sapien
ggtagtagccgggattctggtccat

SEQ ID NO: 570394 - DNA, 25 bp, Homo sapien
gacccctttccggacatagcgcttc

SEQ ID NO: 570395 - DNA, 25 bp, Homo sapien
gcaccatccagacgcgggcacggtg

SEQ ID NO: 570396 - DNA, 25 bp, Homo sapien
atccagacgcgggcacggtgctcca

SEQ ID NO: 570397 - DNA, 25 bp, Homo sapien
actcagcaccatccagacgcgggca

SEQ ID NO: 570398 - DNA, 25 bp, Homo sapien
gccgagaggacggacagcgtgtgag

SEQ ID NO: 570399 - DNA, 25 bp, Homo sapien
aaggccgagaggacggacagcgtgt

SEQ ID NO: 570400 - DNA, 25 bp, Homo sapien
cgagaggacggacagcgtgtgagct

SEQ ID NO: 570401 - DNA, 25 bp, Homo sapien
aggccgagaggacggacagcgtgtg

SEQ ID NO: 570402 - DNA, 25 bp, Homo sapien
gatggatctccaacgcattaggtga

SEQ ID NO: 570403 - DNA, 25 bp, Homo sapien
caatcccatgcggtgtttagtcaag

SEQ ID NO: 570404 - DNA, 25 bp, Homo sapien
cctagctgcgtgtttgtccaaattc

SEQ ID NO: 570405 - DNA, 25 bp, Homo sapien
tacatccgtaaatgaagtacctcag

SEQ ID NO: 570406 - DNA, 25 bp, Homo sapien
gaagctgtcttcctaagggctcctg

SEQ ID NO: 570407 - DNA, 25 bp, Homo sapien
agactgacactttcccaagggcagg

SEQ ID NO: 570408 - DNA, 25 bp, Homo sapien
tgcagacgtctattctcgagatgga

SEQ ID NO: 570409 - DNA, 25 bp, Homo sapien
cagttggagcaacacccggaagctt

SEQ ID NO: 570410 - DNA, 25 bp, Homo sapien
tgcagcagccgggaccatttgatcg

SEQ ID NO: 570411 - DNA, 25 bp, Homo sapien
tggagaaaaacttctcgtaggcggc

SEQ ID NO: 570412 - DNA, 25 bp, Homo sapien
atcgccctgcgggtgagcgtgacca

SEQ ID NO: 570413 - DNA, 25 bp, Homo sapien
taggcggcgtcgtcgaagtcctcag

SEQ ID NO: 570414 - DNA, 25 bp, Homo sapien
gggacccgcgagcgctcggcgggct

SEQ ID NO: 570415 - DNA, 25 bp, Homo sapien
ggacccgcgagcgctcggcgggctg

SEQ ID NO: 570416 - DNA, 25 bp, Homo sapien
tggggacccgcgagcgctcggcggg

SEQ ID NO: 570417 - DNA, 25 bp, Homo sapien
ctggggacccgcgagcgctcggcgg

SEQ ID NO: 570418 - DNA, 25 bp, Homo sapien
agcgaggccagcgggtcccaagttc

SEQ ID NO: 570419 - DNA, 25 bp, Homo sapien
cgaggccagcgggtcccaagttcgc

SEQ ID NO: 570420 - DNA, 25 bp, Homo sapien
tcgcctcccggctccggggcgctta

SEQ ID NO: 570421 - DNA, 25 bp, Homo sapien
cgagcgaggccagcgggtcccaagt

SEQ ID NO: 570422 - DNA, 25 bp, Homo sapien
gggcagctctggttccgaacggctt

SEQ ID NO: 570423 - DNA, 25 bp, Homo sapien
cttcttctcggtccgcatccaatga

SEQ ID NO: 570424 - DNA, 25 bp, Homo sapien
atttcagctgcttttcgtgtccggg

SEQ ID NO: 570425 - DNA, 25 bp, Homo sapien
tcggtccgcatccaatgacattgtc

SEQ ID NO: 570426 - DNA, 25 bp, Homo sapien
ctgccaccaagtgtatttttgggcc

SEQ ID NO: 570427 - DNA, 25 bp, Homo sapien
cagctcccgagcctgagtgtgatgg

SEQ ID NO: 570428 - DNA, 25 bp, Homo sapien
tgtgatggcgggactgccaccaagt

SEQ ID NO: 570429 - DNA, 25 bp, Homo sapien
agcgtggcaggcagcacggaccagg

SEQ ID NO: 570430 - DNA, 25 bp, Homo sapien
acagcatgtgccaaaccccacggag

SEQ ID NO: 570431 - DNA, 25 bp, Homo sapien
gaggctgaagccagtcaattgacca

SEQ ID NO: 570432 - DNA, 25 bp, Homo sapien
tgacgtgggcatcttcgtggagcca

SEQ ID NO: 570433 - DNA, 25 bp, Homo sapien
cgagcagtgatgaaccatgacgtgg

SEQ ID NO: 570434 - DNA, 25 bp, Homo sapien
tgtaggggttctgtccgagaaggcc

SEQ ID NO: 570435 - DNA, 25 bp, Homo sapien
tctcttgtaggggttctgtccgaga

SEQ ID NO: 570436 - DNA, 25 bp, Homo sapien
tcttgtaggggttctgtccgagaag

SEQ ID NO: 570437 - DNA, 25 bp, Homo sapien
ggcctctcttgtaggggttctgtcc

SEQ ID NO: 570438 - DNA, 25 bp, Homo sapien
cctgtgtgaggacggggcagacctg

SEQ ID NO: 570439 - DNA, 25 bp, Homo sapien
gcttcagtcgctcctgtgtgaggac

SEQ ID NO: 570440 - DNA, 25 bp, Homo sapien
ttcagtcgctcctgtgtgaggacgg

SEQ ID NO: 570441 - DNA, 25 bp, Homo sapien
ctcctgtgtgaggacggggcagacc

SEQ ID NO: 570442 - DNA, 25 bp, Homo sapien
cttccaggtcctgatgccaaggctg

SEQ ID NO: 570443 - DNA, 25 bp, Homo sapien
aggaggtcaccgtccccgctccgca

SEQ ID NO: 570444 - DNA, 25 bp, Homo sapien
tgcagcctctccggcttccaggtcc

SEQ ID NO: 570445 - DNA, 25 bp, Homo sapien
gaggtccccgcacgtacgcctgtgt

SEQ ID NO: 570446 - DNA, 25 bp, Homo sapien
gacagccccgtgtgctccagtatgt

SEQ ID NO: 570447 - DNA, 25 bp, Homo sapien
cacgcagtatgtggtccgatacggc

SEQ ID NO: 570448 - DNA, 25 bp, Homo sapien
tatgtggtccgatacagcacgtctg

SEQ ID NO: 570449 - DNA, 25 bp, Homo sapien
gatacggcacgtccaccgtggatgt

SEQ ID NO: 570450 - DNA, 25 bp, Homo sapien
caccgtgcccggccactttctttct

SEQ ID NO: 570451 - DNA, 25 bp, Homo sapien
cattcttctgctgtagttatttcac

SEQ ID NO: 570452 - DNA, 25 bp, Homo sapien
aaaatgcccgtggaggtggttagcg

SEQ ID NO: 570453 - DNA, 25 bp, Homo sapien
gtggaggtggttagcgccccattct

SEQ ID NO: 570454 - DNA, 25 bp, Homo sapien
tggttagcgccccattcttctgctg

SEQ ID NO: 570455 - DNA, 25 bp, Homo sapien
tcagcttagtgtgaacgtacggacc

SEQ ID NO: 570456 - DNA, 25 bp, Homo sapien
tatcttctaacctgcgctgtctcag

SEQ ID NO: 570457 - DNA, 25 bp, Homo sapien
cgtacggaccgttctcaaatcctgg

SEQ ID NO: 570458 - DNA, 25 bp, Homo sapien
gaagtgtgaatacttccccgcgcta

SEQ ID NO: 570459 - DNA, 25 bp, Homo sapien
tttgagctgagggcagtgtcatgct

SEQ ID NO: 570460 - DNA, 25 bp, Homo sapien
tcctggccgctcacagactctgcgc

SEQ ID NO: 570461 - DNA, 25 bp, Homo sapien
tctggcacatggagaggacgggcca

SEQ ID NO: 570462 - DNA, 25 bp, Homo sapien
cgggccagtcgagcaggtggcctcc

SEQ ID NO: 570463 - DNA, 25 bp, Homo sapien
cacttccggagctgtcatctggagg

SEQ ID NO: 570464 - DNA, 25 bp, Homo sapien
tttaaaaatagcagcgcaagtccca

SEQ ID NO: 570465 - DNA, 25 bp, Homo sapien
gggttcaggcacgacacttccggag

SEQ ID NO: 570466 - DNA, 25 bp, Homo sapien
caatgccttctccagtgtactctct

SEQ ID NO: 570467 - DNA, 25 bp, Homo sapien
tgtcatcatgttcttgccactcatt

SEQ ID NO: 570468 - DNA, 25 bp, Homo sapien
taaagagtgagggccgtgccgctgt

SEQ ID NO: 570469 - DNA, 25 bp, Homo sapien
catcatgttcttgccactcattgcc

SEQ ID NO: 570470 - DNA, 25 bp, Homo sapien
tgttcttgccactcattgcctccaa

SEQ ID NO: 570471 - DNA, 25 bp, Homo sapien
tgtggccaagtacacgccatgctca

SEQ ID NO: 570472 - DNA, 25 bp, Homo sapien
tgggagcacggacccctgatttata

SEQ ID NO: 570473 - DNA, 25 bp, Homo sapien
agcactcgcatgtcccagcaggtga

SEQ ID NO: 570474 - DNA, 25 bp, Homo sapien
gactctggaggtccgtgtgcttcgt

SEQ ID NO: 570475 - DNA, 25 bp, Homo sapien
aaggaaacctgtgcgctccccggag

SEQ ID NO: 570476 - DNA, 25 bp, Homo sapien
ccactggcgtctgccgggatggacc

SEQ ID NO: 570477 - DNA, 25 bp, Homo sapien
cagagccaaagccactggcgtctgc

SEQ ID NO: 570478 - DNA, 25 bp, Homo sapien
tggatctgaagttaattgttcgact

SEQ ID NO: 570479 - DNA, 25 bp, Homo sapien
ggaacatccgagtcagaaaacaggt

SEQ ID NO: 570480 - DNA, 25 bp, Homo sapien
cctttgcgaacgcttagggctgttt

SEQ ID NO: 570481 - DNA, 25 bp, Homo sapien
gaaaacaggtgctcgcagcaggcac

SEQ ID NO: 570482 - DNA, 25 bp, Homo sapien
gcaggcaccaaagcgcctttgcgaa

SEQ ID NO: 570483 - DNA, 25 bp, Homo sapien
tcacgggtccgggtttcagaggcca

SEQ ID NO: 570484 - DNA, 25 bp, Homo sapien
tggcctcacgggtccgggtttcaga

SEQ ID NO: 570485 - DNA, 25 bp, Homo sapien
tagggcgacaggctgcatcggttca

SEQ ID NO: 570486 - DNA, 25 bp, Homo sapien
tcggttcacgctgaaaatccagctg

SEQ ID NO: 570487 - DNA, 25 bp, Homo sapien
ccttcttgtgcctctagacagcatt

SEQ ID NO: 570488 - DNA, 25 bp, Homo sapien
gatggatcgcgacacggaggtgcat

SEQ ID NO: 570489 - DNA, 25 bp, Homo sapien
aatagtccagagtagcaacaaaaac

SEQ ID NO: 570490 - DNA, 25 bp, Homo sapien
caaaaaccatctcgaggcaatgtga

SEQ ID NO: 570491 - DNA, 25 bp, Homo sapien
gagtcgtgggccgtctcgggccagg

SEQ ID NO: 570492 - DNA, 25 bp, Homo sapien
cgtgggccgtctcgggccagggcag

SEQ ID NO: 570493 - DNA, 25 bp, Homo sapien
agggccggagtcgtgggccgtctcg

SEQ ID NO: 570494 - DNA, 25 bp, Homo sapien
tgaacagggccggagtcgtgggccg

SEQ ID NO: 570495 - DNA, 25 bp, Homo sapien
tcttcctccggatgagctggtttcg

SEQ ID NO: 570496 - DNA, 25 bp, Homo sapien
ctcagaacttaacgtgggcatttcc

SEQ ID NO: 570497 - DNA, 25 bp, Homo sapien
ccactgcgggaggtgtgagctccac

SEQ ID NO: 570498 - DNA, 25 bp, Homo sapien
aagacacaaagaatcccgagggcct

SEQ ID NO: 570499 - DNA, 25 bp, Homo sapien
tgtagctcaatcctcccaaggtcag

SEQ ID NO: 570500 - DNA, 25 bp, Homo sapien
atgtagctcaatcctcccaaggtca

SEQ ID NO: 570501 - DNA, 25 bp, Homo sapien
gaagtccctcaatgggcggatgtca

SEQ ID NO: 570502 - DNA, 25 bp, Homo sapien
gctgggcgagccacggtgtgtactc

SEQ ID NO: 570503 - DNA, 25 bp, Homo sapien
gctccaagacgcatttggaggcagg

SEQ ID NO: 570504 - DNA, 25 bp, Homo sapien
attatggaaacaggcgtctctgtag

SEQ ID NO: 570505 - DNA, 25 bp, Homo sapien
ccctgacgctcattggtctgaagga

SEQ ID NO: 570506 - DNA, 25 bp, Homo sapien
tttgggagctcagacgtgtcgctgg

SEQ ID NO: 570507 - DNA, 25 bp, Homo sapien
cattggtctgaaggacaaatcgaag

SEQ ID NO: 570508 - DNA, 25 bp, Homo sapien
gaaggacaaatcgaaggccctctgg

SEQ ID NO: 570509 - DNA, 25 bp, Homo sapien
ctcccgcgacgctcgggctccgatg

SEQ ID NO: 570510 - DNA, 25 bp, Homo sapien
tcgggctccgatgcctccatcctgt

SEQ ID NO: 570511 - DNA, 25 bp, Homo sapien
gacgctcgggctccgatgcctccat

SEQ ID NO: 570512 - DNA, 25 bp, Homo sapien
gcgacgctcgggctccgatgcctcc

SEQ ID NO: 570513 - DNA, 25 bp, Homo sapien
tgctcttgcccctgagggggcggct

SEQ ID NO: 570514 - DNA, 25 bp, Homo sapien
ccccaggggagaggtggcaatgctc

SEQ ID NO: 570515 - DNA, 25 bp, Homo sapien
ttgggctcagttgggctctttccca

SEQ ID NO: 570516 - DNA, 25 bp, Homo sapien
tcaggcttgggctcagttgggctct

SEQ ID NO: 570517 - DNA, 25 bp, Homo sapien
tttctgggcctgttcccgagcccgc

SEQ ID NO: 570518 - DNA, 25 bp, Homo sapien
ttgtcaaggcctgttcccgaccctg

SEQ ID NO: 570519 - DNA, 25 bp, Homo sapien
ggtctgctcccgaccctgttcctga

SEQ ID NO: 570520 - DNA, 25 bp, Homo sapien
tatgccactaatgggctgctcccag

SEQ ID NO: 570521 - DNA, 25 bp, Homo sapien
ggttcagcacaaccttcgagcccga

SEQ ID NO: 570522 - DNA, 25 bp, Homo sapien
gcctgttcttgagcgtgtccctgaa

SEQ ID NO: 570523 - DNA, 25 bp, Homo sapien
ccggagctttgcctgtgtgtcacca

SEQ ID NO: 570524 - DNA, 25 bp, Homo sapien
ttcttgagcgtgtccctgagcctgt

SEQ ID NO: 570525 - DNA, 25 bp, Homo sapien
tgaggacagtgggttctcgcgaaca

SEQ ID NO: 570526 - DNA, 25 bp, Homo sapien
tttgaaatgtataatcgggccgcct

SEQ ID NO: 570527 - DNA, 25 bp, Homo sapien
tgagaagactctattagcagcggcc

SEQ ID NO: 570528 - DNA, 25 bp, Homo sapien
cagtcatggtgatttcagggccctc

SEQ ID NO: 570529 - DNA, 25 bp, Homo sapien
cccagtggggatgatgcaggcacaa

SEQ ID NO: 570530 - DNA, 25 bp, Homo sapien
cggctgatccggtgccccaagggct

SEQ ID NO: 570531 - DNA, 25 bp, Homo sapien
tgtcacgggcttcgagggccttggc

SEQ ID NO: 570532 - DNA, 25 bp, Homo sapien
cctccgagtggctgattttggtgca

SEQ ID NO: 570533 - DNA, 25 bp, Homo sapien
tgcccatgatcttcggcaagaggcc

SEQ ID NO: 570534 - DNA, 25 bp, Homo sapien
tcctcggcggccaagaatatcttca

SEQ ID NO: 570535 - DNA, 25 bp, Homo sapien
ccacagacgacggtggcgatgctga

SEQ ID NO: 570536 - DNA, 25 bp, Homo sapien
tggtcctcttgaggtagcgctcccg

SEQ ID NO: 570537 - DNA, 25 bp, Homo sapien
ccacagacatgacgtcactgcaggt

SEQ ID NO: 570538 - DNA, 25 bp, Homo sapien
tcagggtttgggcgtccacagacat

SEQ ID NO: 570539 - DNA, 25 bp, Homo sapien
cttcagggtttgggcgtccacagac

SEQ ID NO: 570540 - DNA, 25 bp, Homo sapien
cgtccacagacatgacgtcactgca

SEQ ID NO: 570541 - DNA, 25 bp, Homo sapien
caggtactacgaccgtgttacttat

SEQ ID NO: 570542 - DNA, 25 bp, Homo sapien
taagcgggcaaaacaggtactacga

SEQ ID NO: 570543 - DNA, 25 bp, Homo sapien
tgatttgcggatggagaccgagtcc

SEQ ID NO: 570544 - DNA, 25 bp, Homo sapien
agtccaccctgtttgaatgcagccg

SEQ ID NO: 570545 - DNA, 25 bp, Homo sapien
actgctgttttattcacaccagatg

SEQ ID NO: 570546 - DNA, 25 bp, Homo sapien
caactgctgttttattcacaccaga

SEQ ID NO: 570547 - DNA, 25 bp, Homo sapien
gtcaactgctgttttattcacacca

SEQ ID NO: 570548 - DNA, 25 bp, Homo sapien
ctgctgttttattcacaccagatgc

SEQ ID NO: 570549 - DNA, 25 bp, Homo sapien
catggaggtccaagtgcggcaaatc

SEQ ID NO: 570550 - DNA, 25 bp, Homo sapien
gaataaaatacagcgcctgtccagg

SEQ ID NO: 570551 - DNA, 25 bp, Homo sapien
taaacagcattagctctgcgacaga

SEQ ID NO: 570552 - DNA, 25 bp, Homo sapien
cagagagttagatgtggccagtcag

SEQ ID NO: 570553 - DNA, 25 bp, Homo sapien
gtacagcaacccgaacaggcagcct

SEQ ID NO: 570554 - DNA, 25 bp, Homo sapien
cctggtacaagcctttgggaacgag

SEQ ID NO: 570555 - DNA, 25 bp, Homo sapien
aggcagcctgcaatggtgcccgtgg

SEQ ID NO: 570556 - DNA, 25 bp, Homo sapien
ttctcctctgtggacaggcggtaga

SEQ ID NO: 570557 - DNA, 25 bp, Homo sapien
gagccagcacggatggagcaggatg

SEQ ID NO: 570558 - DNA, 25 bp, Homo sapien
atgcgagcccaggacctaactccag

SEQ ID NO: 570559 - DNA, 25 bp, Homo sapien
cacagtctgcgactttgcacagagg

SEQ ID NO: 570560 - DNA, 25 bp, Homo sapien
agggcggcacagagccagcacggat

SEQ ID NO: 570561 - DNA, 25 bp, Homo sapien
ctgctgcaaggagggcgtcataggc

SEQ ID NO: 570562 - DNA, 25 bp, Homo sapien
gtcataggctatcatgggggcatcg

SEQ ID NO: 570563 - DNA, 25 bp, Homo sapien
gggggcatcgtggcctcgtcttccc

SEQ ID NO: 570564 - DNA, 25 bp, Homo sapien
tccatgaaacatggcccggtgacac

SEQ ID NO: 570565 - DNA, 25 bp, Homo sapien
catcataattgtcggggaagatggc

SEQ ID NO: 570566 - DNA, 25 bp, Homo sapien
tctcttctgcatcataattgtcggg

SEQ ID NO: 570567 - DNA, 25 bp, Homo sapien
ctgcatcataattgtcggggaagat

SEQ ID NO: 570568 - DNA, 25 bp, Homo sapien
tctgcatcataattgtcggggaaga

SEQ ID NO: 570569 - DNA, 25 bp, Homo sapien
gggctttccttgtgcggcgaacgac

SEQ ID NO: 570570 - DNA, 25 bp, Homo sapien
aacgacacaaacagggccgtgcaca

SEQ ID NO: 570571 - DNA, 25 bp, Homo sapien
cagtactcttctgccagaggcaccg

SEQ ID NO: 570572 - DNA, 25 bp, Homo sapien
tgccgtgtgccggatggtcttcctg

SEQ ID NO: 570573 - DNA, 25 bp, Homo sapien
cttggtggccgctccaaaccctgag

SEQ ID NO: 570574 - DNA, 25 bp, Homo sapien
taccgcaggccgatgcacatggcct

SEQ ID NO: 570575 - DNA, 25 bp, Homo sapien
acgctgacctcgatgagggtctcca

SEQ ID NO: 570576 - DNA, 25 bp, Homo sapien
tggttgtgggtcatccggccgcact

SEQ ID NO: 570577 - DNA, 25 bp, Homo sapien
cctgtggcgcgggtctctgtttgca

SEQ ID NO: 570578 - DNA, 25 bp, Homo sapien
tgtaacactctatcccgctgcgtgg

SEQ ID NO: 570579 - DNA, 25 bp, Homo sapien
cgcgtgggtccgtgtcactatcaca

SEQ ID NO: 570580 - DNA, 25 bp, Homo sapien
gggtccgtgtctctatcatgctccg

SEQ ID NO: 570581 - DNA, 25 bp, Homo sapien
cttcaatggtagctgggtctggccg

SEQ ID NO: 570582 - DNA, 25 bp, Homo sapien
tagttattgggctttagctgagcac

SEQ ID NO: 570583 - DNA, 25 bp, Homo sapien
tgtgccaggcgagaaggtagttatt

SEQ ID NO: 570584 - DNA, 25 bp, Homo sapien
ctttttcattgaacggtgtgtgcca

SEQ ID NO: 570585 - DNA, 25 bp, Homo sapien
ctcccggtacagatcatccaggcac

SEQ ID NO: 570586 - DNA, 25 bp, Homo sapien
gtacagatcatccaggcaccagtag

SEQ ID NO: 570587 - DNA, 25 bp, Homo sapien
ggtacagatcatccaggcaccagta

SEQ ID NO: 570588 - DNA, 25 bp, Homo sapien
ccggtacagatcatccaggcaccag

SEQ ID NO: 570589 - DNA, 25 bp, Homo sapien
gacacggctacttcctggttcagag

SEQ ID NO: 570590 - DNA, 25 bp, Homo sapien
tcttgtagagcgctagacacggcta

SEQ ID NO: 570591 - DNA, 25 bp, Homo sapien
cgctggcaacatgggcttgtcgttt

SEQ ID NO: 570592 - DNA, 25 bp, Homo sapien
ccaagtgacttggtgataatgcgct

SEQ ID NO: 570593 - DNA, 25 bp, Homo sapien
ggaggcagcccggttcagagaggct

SEQ ID NO: 570594 - DNA, 25 bp, Homo sapien
ctggaaggagtgagccccgttcaga

SEQ ID NO: 570595 - DNA, 25 bp, Homo sapien
ggagtgagccccgttcagagagaca

SEQ ID NO: 570596 - DNA, 25 bp, Homo sapien
gtgagccccgttcagagagacacac

SEQ ID NO: 570597 - DNA, 25 bp, Homo sapien
tgtagccaagagcatcgccgacgct

SEQ ID NO: 570598 - DNA, 25 bp, Homo sapien
tggtgttgtcactcacgggccattc

SEQ ID NO: 570599 - DNA, 25 bp, Homo sapien
ccagcaacatcgcagccttaaattt

SEQ ID NO: 570600 - DNA, 25 bp, Homo sapien
cattctcctggcgagagtacgaggt

SEQ ID NO: 570601 - DNA, 25 bp, Homo sapien
ggaggcagctcctcttccccaacag

SEQ ID NO: 570602 - DNA, 25 bp, Homo sapien
aggaggcagctcctcttccccaaca

SEQ ID NO: 570603 - DNA, 25 bp, Homo sapien
cccaggaggcagctcctcttcccca

SEQ ID NO: 570604 - DNA, 25 bp, Homo sapien
caggaggcagctcctcttccccaac

SEQ ID NO: 570605 - DNA, 25 bp, Homo sapien
tgtgtcactgtcaggagcgtcctct

SEQ ID NO: 570606 - DNA, 25 bp, Homo sapien
catgcggtgtttaacggctcccaaa

SEQ ID NO: 570607 - DNA, 25 bp, Homo sapien
cattcagagcgttgacagagcaggg

SEQ ID NO: 570608 - DNA, 25 bp, Homo sapien
gaaagtcgtcagcaaaccgcaggct

SEQ ID NO: 570609 - DNA, 25 bp, Homo sapien
ggcaacgcaatgacagaaggtacct

SEQ ID NO: 570610 - DNA, 25 bp, Homo sapien
gaatcggcaggtagcacatgatcct

SEQ ID NO: 570611 - DNA, 25 bp, Homo sapien
tacaatgtcactgagaggagctggc

SEQ ID NO: 570612 - DNA, 25 bp, Homo sapien
tgttgattccggaacgctggcaggt

SEQ ID NO: 570613 - DNA, 25 bp, Homo sapien
tgatatctattgacaatcccttaga

SEQ ID NO: 570614 - DNA, 25 bp, Homo sapien
ggaaaagcctttgtccaatgattaa

SEQ ID NO: 570615 - DNA, 25 bp, Homo sapien
atgaagcctggaagatacgctcacg

SEQ ID NO: 570616 - DNA, 25 bp, Homo sapien
caaaaaagtactgtggatctccata

SEQ ID NO: 570617 - DNA, 25 bp, Homo sapien
tggaatcagcgacaatgcacccagg

SEQ ID NO: 570618 - DNA, 25 bp, Homo sapien
taaactctgctggaatcgtgccacg

SEQ ID NO: 570619 - DNA, 25 bp, Homo sapien
tctaaaggtagacaggcccagtttc

SEQ ID NO: 570620 - DNA, 25 bp, Homo sapien
tgacgtgtataaaaacgcagcgccc

SEQ ID NO: 570621 - DNA, 25 bp, Homo sapien
tttccacctgtgactactggccgtg

SEQ ID NO: 570622 - DNA, 25 bp, Homo sapien
tcatctataagaacgggccaagctc

SEQ ID NO: 570623 - DNA, 25 bp, Homo sapien
aaaaggctgcgttttccacctgtga

SEQ ID NO: 570624 - DNA, 25 bp, Homo sapien
tggccgtgcatattctacaaaatca

SEQ ID NO: 570625 - DNA, 25 bp, Homo sapien
tccaggtgtcccttggaattgatct

SEQ ID NO: 570626 - DNA, 25 bp, Homo sapien
tatcatccgcaatcatgtttccaaa

SEQ ID NO: 570627 - DNA, 25 bp, Homo sapien
atcgtagttagacatatcatccgca

SEQ ID NO: 570628 - DNA, 25 bp, Homo sapien
ggtgtcccttggaattgatcttttg

SEQ ID NO: 570629 - DNA, 25 bp, Homo sapien
gataacactaatttccaatacgcaa

SEQ ID NO: 570630 - DNA, 25 bp, Homo sapien
ttccaatacgcaacagccatttcta

SEQ ID NO: 570631 - DNA, 25 bp, Homo sapien
cactaatttccaatacgcaacagcc

SEQ ID NO: 570632 - DNA, 25 bp, Homo sapien
accttccagataacactaatttcca

SEQ ID NO: 570633 - DNA, 25 bp, Homo sapien
atgtggcaatctcacccaagagtca

SEQ ID NO: 570634 - DNA, 25 bp, Homo sapien
catgaggcttaatctctacggaagt

SEQ ID NO: 570635 - DNA, 25 bp, Homo sapien
gctcctgagaactgtacgtagtcta

SEQ ID NO: 570636 - DNA, 25 bp, Homo sapien
tctactgcacaaaaaacgaccactt

SEQ ID NO: 570637 - DNA, 25 bp, Homo sapien
taaagtgtcaagtcaaatcggcagc

SEQ ID NO: 570638 - DNA, 25 bp, Homo sapien
cagggaaagcgttctcactgatgca

SEQ ID NO: 570639 - DNA, 25 bp, Homo sapien
gtatcaatcaaagccaacgccctct

SEQ ID NO: 570640 - DNA, 25 bp, Homo sapien
tatgaatgccgagtttcagggctgt

SEQ ID NO: 570641 - DNA, 25 bp, Homo sapien
atacataaagtgacctcctttaatc

SEQ ID NO: 570642 - DNA, 25 bp, Homo sapien
tacataaagtgacctcctttaatca

SEQ ID NO: 570643 - DNA, 25 bp, Homo sapien
aatacataaagtgacctcctttaat

SEQ ID NO: 570644 - DNA, 25 bp, Homo sapien
gtctacatccttatcacttaggaag

SEQ ID NO: 570645 - DNA, 25 bp, Homo sapien
cagtaaaatgctaagaagatgatta

SEQ ID NO: 570646 - DNA, 25 bp, Homo sapien
gatgattagtcttgtcctgcttata

SEQ ID NO: 570647 - DNA, 25 bp, Homo sapien
cacttaggaagaacattaattgaaa

SEQ ID NO: 570648 - DNA, 25 bp, Homo sapien
taatgatgtaaagctttcacattga

SEQ ID NO: 570649 - DNA, 25 bp, Homo sapien
aagctttcacattgagaaatggagg

SEQ ID NO: 570650 - DNA, 25 bp, Homo sapien
ttcacattgagaaatggaggtgaac

SEQ ID NO: 570651 - DNA, 25 bp, Homo sapien
ttaatgatgtaaagctttcacattg

SEQ ID NO: 570652 - DNA, 25 bp, Homo sapien
tcttgggtacatccatcaggatggc

SEQ ID NO: 570653 - DNA, 25 bp, Homo sapien
ggatggccactattcagaaaacagc

SEQ ID NO: 570654 - DNA, 25 bp, Homo sapien
gatgctcagcttcgttgctgacagg

SEQ ID NO: 570655 - DNA, 25 bp, Homo sapien
acagcaattgttgtcaggatgtgca

SEQ ID NO: 570656 - DNA, 25 bp, Homo sapien
gcgaaggtgaaggtaaactgataaa

SEQ ID NO: 570657 - DNA, 25 bp, Homo sapien
tctgccctgggttcttagcgaaggt

SEQ ID NO: 570658 - DNA, 25 bp, Homo sapien
ggcagaagagcctttagcttctcca

SEQ ID NO: 570659 - DNA, 25 bp, Homo sapien
tcttagcgaaggtgaaggtaaactg

SEQ ID NO: 570660 - DNA, 25 bp, Homo sapien
cattaaacggatcttgcattcctgg

SEQ ID NO: 570661 - DNA, 25 bp, Homo sapien
gcattcctggatataaccaactctg

SEQ ID NO: 570662 - DNA, 25 bp, Homo sapien
tatcatcctgggcttatcgtcttgg

SEQ ID NO: 570663 - DNA, 25 bp, Homo sapien
cattaggagtttggtaggatgtgcc

SEQ ID NO: 570664 - DNA, 25 bp, Homo sapien
tgcttctggcacctattatctcgtc

SEQ ID NO: 570665 - DNA, 25 bp, Homo sapien
tacttagaggtatgcaatatccaca

SEQ ID NO: 570666 - DNA, 25 bp, Homo sapien
tattcctagtttaactgtactgtgg

SEQ ID NO: 570667 - DNA, 25 bp, Homo sapien
cacatacgttgtcaaatttactggc

SEQ ID NO: 570668 - DNA, 25 bp, Homo sapien
agagaacacgaacatagtcccccac

SEQ ID NO: 570669 - DNA, 25 bp, Homo sapien
caggagagaacacgaacatagtccc

SEQ ID NO: 570670 - DNA, 25 bp, Homo sapien
ccaggagagaacacgaacatagtcc

SEQ ID NO: 570671 - DNA, 25 bp, Homo sapien
gaacacgaacatagtcccccactac

SEQ ID NO: 570672 - DNA, 25 bp, Homo sapien
gaatatgtattcttaagcatcgaag

SEQ ID NO: 570673 - DNA, 25 bp, Homo sapien
tattcttaagcatcgaaggcaacat

SEQ ID NO: 570674 - DNA, 25 bp, Homo sapien
tatgtattcttaagcatcgaaggca

SEQ ID NO: 570675 - DNA, 25 bp, Homo sapien
tcttaagcatcgaaggcaacattct

SEQ ID NO: 570676 - DNA, 25 bp, Homo sapien
tttaagctaagaatagttgacttac

SEQ ID NO: 570677 - DNA, 25 bp, Homo sapien
aattagtatgtacaggttgctgaaa

SEQ ID NO: 570678 - DNA, 25 bp, Homo sapien
tgaaattagtatgtacaggttgctg

SEQ ID NO: 570679 - DNA, 25 bp, Homo sapien
atttaagctaagaatagttgactta

SEQ ID NO: 570680 - DNA, 25 bp, Homo sapien
ctgtcatgccatctagaaattcctt

SEQ ID NO: 570681 - DNA, 25 bp, Homo sapien
tctgctaaattcacactgagttgct

SEQ ID NO: 570682 - DNA, 25 bp, Homo sapien
gctgccctgaacttccacgctatga

SEQ ID NO: 570683 - DNA, 25 bp, Homo sapien
tgaatcccatcgactccaattttgt

SEQ ID NO: 570684 - DNA, 25 bp, Homo sapien
attctgcagctgagcgccgagcgct

SEQ ID NO: 570685 - DNA, 25 bp, Homo sapien
agaagcaacggcagcccggagacct

SEQ ID NO: 570686 - DNA, 25 bp, Homo sapien
catccgtccggctttgctgcagtct

SEQ ID NO: 570687 - DNA, 25 bp, Homo sapien
cacagaagcaagtggattctgcagc

SEQ ID NO: 570688 - DNA, 25 bp, Homo sapien
ctttgtacctgccgtacagccgctc

SEQ ID NO: 570689 - DNA, 25 bp, Homo sapien
ttgtacctgccgtacagccgctcca

SEQ ID NO: 570690 - DNA, 25 bp, Homo sapien
tttgtacctgccgtacagccgctcc

SEQ ID NO: 570691 - DNA, 25 bp, Homo sapien
tccctgtggagcgagtctgggtttt

SEQ ID NO: 570692 - DNA, 25 bp, Homo sapien
taagcagtagatagcagttctctcg

SEQ ID NO: 570693 - DNA, 25 bp, Homo sapien
agttctctcgccagcctgagtgcac

SEQ ID NO: 570694 - DNA, 25 bp, Homo sapien
tctgggttttggaagaagctgtccg

SEQ ID NO: 570695 - DNA, 25 bp, Homo sapien
ccttctgagacgatttaagcttatg

SEQ ID NO: 570696 - DNA, 25 bp, Homo sapien
taacgcctgcactttaactgggcag

SEQ ID NO: 570697 - DNA, 25 bp, Homo sapien
aactgggcagaattagagacaaagc

SEQ ID NO: 570698 - DNA, 25 bp, Homo sapien
aaagccaatgaagccgctccaggtt

SEQ ID NO: 570699 - DNA, 25 bp, Homo sapien
caggtttgtcccagctttagcctaa

SEQ ID NO: 570700 - DNA, 25 bp, Homo sapien
ctgtaacaaacaggcagtctaagct

SEQ ID NO: 570701 - DNA, 25 bp, Homo sapien
tctgatctctatccagttcactctg

SEQ ID NO: 570702 - DNA, 25 bp, Homo sapien
tctgcatgaagtgtgactatcattt

SEQ ID NO: 570703 - DNA, 25 bp, Homo sapien
caggcagtctaagcttcaaaaatta

SEQ ID NO: 570704 - DNA, 25 bp, Homo sapien
taccagaggacgattctgcagaggc

SEQ ID NO: 570705 - DNA, 25 bp, Homo sapien
gggctgcaaggcctgtgatatcaca

SEQ ID NO: 570706 - DNA, 25 bp, Homo sapien
tgatatcacaggaatgaacgcgaga

SEQ ID NO: 570707 - DNA, 25 bp, Homo sapien
catactctcccgtgtgcatctggga

SEQ ID NO: 570708 - DNA, 25 bp, Homo sapien
gaatctgaggagtcacaggtccgcc

SEQ ID NO: 570709 - DNA, 25 bp, Homo sapien
ggaaaacatatatggccctcacacg

SEQ ID NO: 570710 - DNA, 25 bp, Homo sapien
aaaacagacagctagcctgtgggct

SEQ ID NO: 570711 - DNA, 25 bp, Homo sapien
gtagtttgccgaccccgatctagat

SEQ ID NO: 570712 - DNA, 25 bp, Homo sapien
cgcccttattatggaagtggtcatc

SEQ ID NO: 570713 - DNA, 25 bp, Homo sapien
aggataaagacagaagtgcagcccc

SEQ ID NO: 570714 - DNA, 25 bp, Homo sapien
caggaacagccatgacgcccttatt

SEQ ID NO: 570715 - DNA, 25 bp, Homo sapien
ttaggataaagacagaagtgcagcc

SEQ ID NO: 570716 - DNA, 25 bp, Homo sapien
cagaatgggcacatctatatagaga

SEQ ID NO: 570717 - DNA, 25 bp, Homo sapien
acagtgtacgactccagccacagtg

SEQ ID NO: 570718 - DNA, 25 bp, Homo sapien
ctaatgggtacagttatcgttcggg

SEQ ID NO: 570719 - DNA, 25 bp, Homo sapien
tgcgattccagccacacagtgtacg

SEQ ID NO: 570720 - DNA, 25 bp, Homo sapien
gcgttcctccctcggatccacgcgg

SEQ ID NO: 570721 - DNA, 25 bp, Homo sapien
tcggcctcccacatccagcgcgccg

SEQ ID NO: 570722 - DNA, 25 bp, Homo sapien
ggatccacgcggaacgccccgcgca

SEQ ID NO: 570723 - DNA, 25 bp, Homo sapien
gacgccaccgctccggctcgcgggc

SEQ ID NO: 570724 - DNA, 25 bp, Homo sapien
ccaggccgcggaacggtgatgctcg

SEQ ID NO: 570725 - DNA, 25 bp, Homo sapien
aacggtgatgctcgggccggacggg

SEQ ID NO: 570726 - DNA, 25 bp, Homo sapien
ggatgcaaggaagccctccggcgct

SEQ ID NO: 570727 - DNA, 25 bp, Homo sapien
gctccgaggcgggagacagcgtccc

SEQ ID NO: 570728 - DNA, 25 bp, Homo sapien
cagagacccgtggattgctgtgccc

SEQ ID NO: 570729 - DNA, 25 bp, Homo sapien
tgtgtctgacatgcaagctcagtgg

SEQ ID NO: 570730 - DNA, 25 bp, Homo sapien
tctcagggcttctccgccagaagaa

SEQ ID NO: 570731 - DNA, 25 bp, Homo sapien
tggcgcagcgtgtgatcaaactgca

SEQ ID NO: 570732 - DNA, 25 bp, Homo sapien
cacatgttaaatagtcacgcgctgc

SEQ ID NO: 570733 - DNA, 25 bp, Homo sapien
taaaaggctcacacacccaattagg

SEQ ID NO: 570734 - DNA, 25 bp, Homo sapien
ggttgcagcccttgtaacgtcacag

SEQ ID NO: 570735 - DNA, 25 bp, Homo sapien
tcagtgatgggccacctgtacagca

SEQ ID NO: 570736 - DNA, 25 bp, Homo sapien
gatggcactcgctgtcttcgctgtg

SEQ ID NO: 570737 - DNA, 25 bp, Homo sapien
tattagccataaacagtccaaaggt

SEQ ID NO: 570738 - DNA, 25 bp, Homo sapien
tgagctatgtccataccacggaacg

SEQ ID NO: 570739 - DNA, 25 bp, Homo sapien
cgctgtgtctgtatcggcacctgag

SEQ ID NO: 570740 - DNA, 25 bp, Homo sapien
ccgggacactgcgttttaccgatca

SEQ ID NO: 570741 - DNA, 25 bp, Homo sapien
ctaaaatgagacaaatacggatgtc

SEQ ID NO: 570742 - DNA, 25 bp, Homo sapien
tatgaagttgtaatcctggccgtga

SEQ ID NO: 570743 - DNA, 25 bp, Homo sapien
taccgatcaccttgaatgtggtgcc

SEQ ID NO: 570744 - DNA, 25 bp, Homo sapien
cgggtctggacagggtcgtgggtct

SEQ ID NO: 570745 - DNA, 25 bp, Homo sapien
ggcttgcgccccctgagcacacgca

SEQ ID NO: 570746 - DNA, 25 bp, Homo sapien
gcttgcgccccctgagcacacgcag

SEQ ID NO: 570747 - DNA, 25 bp, Homo sapien
cacgggtctggacggggtcgcaggt

SEQ ID NO: 570748 - DNA, 25 bp, Homo sapien
cgcaggtctggacggggtcgcaggt

SEQ ID NO: 570749 - DNA, 25 bp, Homo sapien
gtcgcaggtctggacggggtcgcac

SEQ ID NO: 570750 - DNA, 25 bp, Homo sapien
ggtcacgggtctggacggggtcgca

SEQ ID NO: 570751 - DNA, 25 bp, Homo sapien
tcgcacagctttggaccgggtcgcg

SEQ ID NO: 570752 - DNA, 25 bp, Homo sapien
gcacagctttggaccgggtcgcggg

SEQ ID NO: 570753 - DNA, 25 bp, Homo sapien
gtcgcacagctttggaccgggtcgc

SEQ ID NO: 570754 - DNA, 25 bp, Homo sapien
cacagctttggaccgggtcgcgggt

SEQ ID NO: 570755 - DNA, 25 bp, Homo sapien
ccggggctgactagcatgacggttt

SEQ ID NO: 570756 - DNA, 25 bp, Homo sapien
actagcatgacggtttgcaagggag

SEQ ID NO: 570757 - DNA, 25 bp, Homo sapien
ggctgactagcatgacggtttgcaa

SEQ ID NO: 570758 - DNA, 25 bp, Homo sapien
ccttgtgagtcggtcctggacgccg

SEQ ID NO: 570759 - DNA, 25 bp, Homo sapien
ctgctcaacaggacagtgacattca

SEQ ID NO: 570760 - DNA, 25 bp, Homo sapien
gctgctcaacaggacagtgacattc

SEQ ID NO: 570761 - DNA, 25 bp, Homo sapien
aaagccctgtaatagggctgcccac

SEQ ID NO: 570762 - DNA, 25 bp, Homo sapien
ggctgctcaacaggacagtgacatt

SEQ ID NO: 570763 - DNA, 25 bp, Homo sapien
cactgaaagctgacttgagaggctg

SEQ ID NO: 570764 - DNA, 25 bp, Homo sapien
cacacactgaaagctgacttgagag

SEQ ID NO: 570765 - DNA, 25 bp, Homo sapien
ctttcacacactgaaagctgacttg

SEQ ID NO: 570766 - DNA, 25 bp, Homo sapien
attgatggacagctttgagttggtg

SEQ ID NO: 570767 - DNA, 25 bp, Homo sapien
tctatttgtgtgaaccagctcgcag

SEQ ID NO: 570768 - DNA, 25 bp, Homo sapien
agaaacgggtgctaacttgtaagca

SEQ ID NO: 570769 - DNA, 25 bp, Homo sapien
aaagtgagcgtttctggtagtcttc

SEQ ID NO: 570770 - DNA, 25 bp, Homo sapien
gtttaagccaagtgaccagagcttt

SEQ ID NO: 570771 - DNA, 25 bp, Homo sapien
ttaattccacttgggtggaccaaga

SEQ ID NO: 570772 - DNA, 25 bp, Homo sapien
cttcctacagaggaagttaattcca

SEQ ID NO: 570773 - DNA, 25 bp, Homo sapien
gtggaccaagagctaaggacttgtt

SEQ ID NO: 570774 - DNA, 25 bp, Homo sapien
tccacttgggtggaccaagagctaa

SEQ ID NO: 570775 - DNA, 25 bp, Homo sapien
gaccctgaatgctccatccagtgtg

SEQ ID NO: 570776 - DNA, 25 bp, Homo sapien
aaggtggtccggctctgcaggaccc

SEQ ID NO: 570777 - DNA, 25 bp, Homo sapien
tgggcacctgagacgcagcatttgt

SEQ ID NO: 570778 - DNA, 25 bp, Homo sapien
tttgtcaggaactgcataggcacag

SEQ ID NO: 570779 - DNA, 25 bp, Homo sapien
tcttaagtttggagacaccctggga

SEQ ID NO: 570780 - DNA, 25 bp, Homo sapien
gaacaggagtcagctgccatacggc

SEQ ID NO: 570781 - DNA, 25 bp, Homo sapien
tatgatcaagattatgggctgctcc

SEQ ID NO: 570782 - DNA, 25 bp, Homo sapien
gagcgctggcatagcatggatcact

SEQ ID NO: 570783 - DNA, 25 bp, Homo sapien
tgaactgtcctcgaaacatctcagg

SEQ ID NO: 570784 - DNA, 25 bp, Homo sapien
tctggttcctgaacagggtggctct

SEQ ID NO: 570785 - DNA, 25 bp, Homo sapien
tcccgttgcaggtaccggtggtgct

SEQ ID NO: 570786 - DNA, 25 bp, Homo sapien
gctctgacccgcagatctgtgggct

SEQ ID NO: 570787 - DNA, 25 bp, Homo sapien
ggtcccgttcgcctctccaagctcc

SEQ ID NO: 570788 - DNA, 25 bp, Homo sapien
aaacattacagggatgcttttgctg

SEQ ID NO: 570789 - DNA, 25 bp, Homo sapien
aagacttcgggatgtagcccgtgtg

SEQ ID NO: 570790 - DNA, 25 bp, Homo sapien
ttgtccagtgtcatgaaagtttgta

SEQ ID NO: 570791 - DNA, 25 bp, Homo sapien
ctgccattggtaaagatgcagggca

SEQ ID NO: 570792 - DNA, 25 bp, Homo sapien
tgccattggtaaagatgcagggcat

SEQ ID NO: 570793 - DNA, 25 bp, Homo sapien
ttgtacctttttcccgactggctga

SEQ ID NO: 570794 - DNA, 25 bp, Homo sapien
gcctggaaaagcatccgccctttgt

SEQ ID NO: 570795 - DNA, 25 bp, Homo sapien
gattctggttgttcgggtactggcc

SEQ ID NO: 570796 - DNA, 25 bp, Homo sapien
tctctgtatctttgtgtgtagccca

SEQ ID NO: 570797 - DNA, 25 bp, Homo sapien
gggccttatctggaacgatgcagca

SEQ ID NO: 570798 - DNA, 25 bp, Homo sapien
tgtcatcccggtagcccgagttgag

SEQ ID NO: 570799 - DNA, 25 bp, Homo sapien
ttagggcatcctttgactccgggag

SEQ ID NO: 570800 - DNA, 25 bp, Homo sapien
ctccgggagtcgtttttaagctgag

SEQ ID NO: 570801 - DNA, 25 bp, Homo sapien
cctgcccggcgccattgtcagggtg

SEQ ID NO: 570802 - DNA, 25 bp, Homo sapien
ttgtgggtgggcgtcaaaccccgca

SEQ ID NO: 570803 - DNA, 25 bp, Homo sapien
gttgccgctccgttctgaccccagg

SEQ ID NO: 570804 - DNA, 25 bp, Homo sapien
tctggataccccctgtctggccggg

SEQ ID NO: 570805 - DNA, 25 bp, Homo sapien
tttgtggaacgtttcagacacacac

SEQ ID NO: 570806 - DNA, 25 bp, Homo sapien
gaatgttcatccttcgaaaccctca

SEQ ID NO: 570807 - DNA, 25 bp, Homo sapien
ttgtgctggtgcctcgtccctgtca

SEQ ID NO: 570808 - DNA, 25 bp, Homo sapien
tcacgtactccaccctgttgatggg

SEQ ID NO: 570809 - DNA, 25 bp, Homo sapien
caggaccgtgagagagaatccttgc

SEQ ID NO: 570810 - DNA, 25 bp, Homo sapien
ggaccgtgagagagaatccttgcac

SEQ ID NO: 570811 - DNA, 25 bp, Homo sapien
ccaggaccgtgagagagaatccttg

SEQ ID NO: 570812 - DNA, 25 bp, Homo sapien
aggaccgtgagagagaatccttgca

SEQ ID NO: 570813 - DNA, 25 bp, Homo sapien
aagagaacccttgtgcttagggctt

SEQ ID NO: 570814 - DNA, 25 bp, Homo sapien
atagagaactcaggactgcaagaga

SEQ ID NO: 570815 - DNA, 25 bp, Homo sapien
tagaactccaggaccgtgatagaga

SEQ ID NO: 570816 - DNA, 25 bp, Homo sapien
gagagacaaccctcacacgtagaac

SEQ ID NO: 570817 - DNA, 25 bp, Homo sapien
gatggtgagagagaatccttgcatg

SEQ ID NO: 570818 - DNA, 25 bp, Homo sapien
tctccagatgcgaggttcttttctg

SEQ ID NO: 570819 - DNA, 25 bp, Homo sapien
atcttctccagatgcgaggttcttt

SEQ ID NO: 570820 - DNA, 25 bp, Homo sapien
gagcgtgtttgtgagatgagccttc

SEQ ID NO: 570821 - DNA, 25 bp, Homo sapien
gagccttcacgctgtcctggatctt

SEQ ID NO: 570822 - DNA, 25 bp, Homo sapien
ggaggtgttggcctccgtagctgag

SEQ ID NO: 570823 - DNA, 25 bp, Homo sapien
agcagcgtctgtcacctcctagtgc

SEQ ID NO: 570824 - DNA, 25 bp, Homo sapien
aggtgttggcctccgtagctgagaa

SEQ ID NO: 570825 - DNA, 25 bp, Homo sapien
tgggcctggcggtcacccagcgtct

SEQ ID NO: 570826 - DNA, 25 bp, Homo sapien
ttgtgggcccctgcgtagggcagct

SEQ ID NO: 570827 - DNA, 25 bp, Homo sapien
tagggcagctcgctggtggcttcct

SEQ ID NO: 570828 - DNA, 25 bp, Homo sapien
cagagtcggtctcttgaggccaccc

SEQ ID NO: 570829 - DNA, 25 bp, Homo sapien
tgctggtgggatcccgctccttgtg

SEQ ID NO: 570830 - DNA, 25 bp, Homo sapien
gttgtgtttgttcccaggtgtgctc

SEQ ID NO: 570831 - DNA, 25 bp, Homo sapien
tccaggaggactcgtgggagctcga

SEQ ID NO: 570832 - DNA, 25 bp, Homo sapien
ctagggccaccggaggtcgtccctg

SEQ ID NO: 570833 - DNA, 25 bp, Homo sapien
caccggaggtcgtccctgagctctg

SEQ ID NO: 570834 - DNA, 25 bp, Homo sapien
ctgtagccctgtagcggacagagga

SEQ ID NO: 570835 - DNA, 25 bp, Homo sapien
gctggctatttgtggtgggcaaccc

SEQ ID NO: 570836 - DNA, 25 bp, Homo sapien
cccaacagccaaaagggaggagcag

SEQ ID NO: 570837 - DNA, 25 bp, Homo sapien
gcagagagagttctccgcaggagtt

SEQ ID NO: 570838 - DNA, 25 bp, Homo sapien
tctccgcacgagtcaaaggaggagc

SEQ ID NO: 570839 - DNA, 25 bp, Homo sapien
agcggatggagttctccgcacgagt

SEQ ID NO: 570840 - DNA, 25 bp, Homo sapien
ggaggagcggagagagttctgtgca

SEQ ID NO: 570841 - DNA, 25 bp, Homo sapien
ggagttctccgcacgagtcaaagga

SEQ ID NO: 570842 - DNA, 25 bp, Homo sapien
ggaggcgttgagggcccgggcagcg

SEQ ID NO: 570843 - DNA, 25 bp, Homo sapien
gaggcgttgagggcccgggcagcgc

SEQ ID NO: 570844 - DNA, 25 bp, Homo sapien
tcagaagttgccccttatttccatc

SEQ ID NO: 570845 - DNA, 25 bp, Homo sapien
gtgatgagtgtccaaggcggcgcgg

SEQ ID NO: 570846 - DNA, 25 bp, Homo sapien
atgagtgtccaaggcggcgcggtga

SEQ ID NO: 570847 - DNA, 25 bp, Homo sapien
tcctgtgggaaagcagcgcagtggt

SEQ ID NO: 570848 - DNA, 25 bp, Homo sapien
gggatcctgtgggaaagcagcgcag

SEQ ID NO: 570849 - DNA, 25 bp, Homo sapien
ggtggttgagtgtccgcaggggagc

SEQ ID NO: 570850 - DNA, 25 bp, Homo sapien
ggcggtgcggtggttgagtgtccgc

SEQ ID NO: 570851 - DNA, 25 bp, Homo sapien
tgggaaggcggtgcggtggttgagt

SEQ ID NO: 570852 - DNA, 25 bp, Homo sapien
ctgtgggaaggcggtgcggtggttg

SEQ ID NO: 570853 - DNA, 25 bp, Homo sapien
tgctggtttatagaacatttgtgtg

SEQ ID NO: 570854 - DNA, 25 bp, Homo sapien
ccagtgctggtttatagaacatttg

SEQ ID NO: 570855 - DNA, 25 bp, Homo sapien
ctccagtgctggtttatagaacatt

SEQ ID NO: 570856 - DNA, 25 bp, Homo sapien
gcctccagtgctggtttatagaaca

SEQ ID NO: 570857 - DNA, 25 bp, Homo sapien
cggctgagacagcgcagggcgtcat

SEQ ID NO: 570858 - DNA, 25 bp, Homo sapien
cctgacagagccgtgcaggcggcag

SEQ ID NO: 570859 - DNA, 25 bp, Homo sapien
tgacagagccgtgcaggcggcagcg

SEQ ID NO: 570860 - DNA, 25 bp, Homo sapien
cccctgacagagccgtgcaggcggc

SEQ ID NO: 570861 - DNA, 25 bp, Homo sapien
caccaagtcgacggggcagagtgag

SEQ ID NO: 570862 - DNA, 25 bp, Homo sapien
gcagagtgagaaacatccaggccac

SEQ ID NO: 570863 - DNA, 25 bp, Homo sapien
ccaagtcgacggggcagagtgagaa

SEQ ID NO: 570864 - DNA, 25 bp, Homo sapien
accaagtcgacggggcagagtgaga

SEQ ID NO: 570865 - DNA, 25 bp, Homo sapien
ctgtgagcagcggtggaacatttac

SEQ ID NO: 570866 - DNA, 25 bp, Homo sapien
cagacacgagcgtcacagtggctgg

SEQ ID NO: 570867 - DNA, 25 bp, Homo sapien
cagttggtgttctcgcagggcctgt

SEQ ID NO: 570868 - DNA, 25 bp, Homo sapien
tgttggtgcatatgaggagtgtttt

SEQ ID NO: 570869 - DNA, 25 bp, Homo sapien
ggtagtgccctcatggtgaccagga

SEQ ID NO: 570870 - DNA, 25 bp, Homo sapien
tggcctggatggtagtgccctcatg

SEQ ID NO: 570871 - DNA, 25 bp, Homo sapien
gaccaggacatctagcgtctcacac

SEQ ID NO: 570872 - DNA, 25 bp, Homo sapien
gtgaccaggacatctagcgtctcac

SEQ ID NO: 570873 - DNA, 25 bp, Homo sapien
tggtcctcgggcttacgggcagccc

SEQ ID NO: 570874 - DNA, 25 bp, Homo sapien
acttgccgtggtcctcgggcttacg

SEQ ID NO: 570875 - DNA, 25 bp, Homo sapien
tgaacttgccgtggtcctcgggctt

SEQ ID NO: 570876 - DNA, 25 bp, Homo sapien
gggcttacgggcagccctggctttc

SEQ ID NO: 570877 - DNA, 25 bp, Homo sapien
ccatggtgtgtcccctgactgttac

SEQ ID NO: 570878 - DNA, 25 bp, Homo sapien
cccatggtgtgtcccctgactgtta

SEQ ID NO: 570879 - DNA, 25 bp, Homo sapien
caccagggggttgtggcgtctcctt

SEQ ID NO: 570880 - DNA, 25 bp, Homo sapien
tgggtggcaccagggggttgtggcg

SEQ ID NO: 570881 - DNA, 25 bp, Homo sapien
tggcaccagggggttgtggcgtctc

SEQ ID NO: 570882 - DNA, 25 bp, Homo sapien
gggttgtggcgtctccttgttccca

SEQ ID NO: 570883 - DNA, 25 bp, Homo sapien
gaagggtgcattcgggtgcctttac

SEQ ID NO: 570884 - DNA, 25 bp, Homo sapien
gtgcctttaccctcagcgaaggcag

SEQ ID NO: 570885 - DNA, 25 bp, Homo sapien
ctacggaagggtgcattcgggtgcc

SEQ ID NO: 570886 - DNA, 25 bp, Homo sapien
tttaccctcagcgaaggcagcaacc

SEQ ID NO: 570887 - DNA, 25 bp, Homo sapien
taattcctggtggacggtgctgttt

SEQ ID NO: 570888 - DNA, 25 bp, Homo sapien
tgtgtggattctgtaagtcatggct

SEQ ID NO: 570889 - DNA, 25 bp, Homo sapien
gattctgtaagtcatggctaattcc

SEQ ID NO: 570890 - DNA, 25 bp, Homo sapien
tcatggctaattcctggtggacggt

SEQ ID NO: 570891 - DNA, 25 bp, Homo sapien
tgaccgtcgcctgtgaactaactgt

SEQ ID NO: 570892 - DNA, 25 bp, Homo sapien
ttagtgttgcttacgtaattcctca

SEQ ID NO: 570893 - DNA, 25 bp, Homo sapien
ccgacacacgcactggtctttgtag

SEQ ID NO: 570894 - DNA, 25 bp, Homo sapien
ttacgtaattcctcactcgtgaccg

SEQ ID NO: 570895 - DNA, 25 bp, Homo sapien
ctgcagagccgctcacctgcagagc

SEQ ID NO: 570896 - DNA, 25 bp, Homo sapien
gcagagccgctcacctgcagagctg

SEQ ID NO: 570897 - DNA, 25 bp, Homo sapien
gagccgctcacctgcagagctgctc

SEQ ID NO: 570898 - DNA, 25 bp, Homo sapien
gccgctcacctgcagagctgctcac

SEQ ID NO: 570899 - DNA, 25 bp, Homo sapien
gtgcttggccagataagcaaacaaa

SEQ ID NO: 570900 - DNA, 25 bp, Homo sapien
tgcttggccagataagcaaacaaaa

SEQ ID NO: 570901 - DNA, 25 bp, Homo sapien
aaagactgtctggagccgtgtagag

SEQ ID NO: 570902 - DNA, 25 bp, Homo sapien
ttttctaacgactgctggcgtggaa

SEQ ID NO: 570903 - DNA, 25 bp, Homo sapien
ccggcaggtcctctactgtgggatg

SEQ ID NO: 570904 - DNA, 25 bp, Homo sapien
gctttagagtcgaaagactgtgtct

SEQ ID NO: 570905 - DNA, 25 bp, Homo sapien
agggagaccccttatgacctgtggg

SEQ ID NO: 570906 - DNA, 25 bp, Homo sapien
gtcatttactttctctgaagcgcag

SEQ ID NO: 570907 - DNA, 25 bp, Homo sapien
gattccagccgtgagcacagtagga

SEQ ID NO: 570908 - DNA, 25 bp, Homo sapien
tctctgaagcgcagcttggattcca

SEQ ID NO: 570909 - DNA, 25 bp, Homo sapien
cagacgagctggttgcggagttcag

SEQ ID NO: 570910 - DNA, 25 bp, Homo sapien
gttgcggagttcagtgctgccgaca

SEQ ID NO: 570911 - DNA, 25 bp, Homo sapien
acgaagtggcagacgagctggttgc

SEQ ID NO: 570912 - DNA, 25 bp, Homo sapien
gagttcagtgctgccgacaaccaca

SEQ ID NO: 570913 - DNA, 25 bp, Homo sapien
tgtttcccgtaggattaggacgtgc

SEQ ID NO: 570914 - DNA, 25 bp, Homo sapien
tgctggcggatagcaagactctgtg

SEQ ID NO: 570915 - DNA, 25 bp, Homo sapien
tggtgagcccctgatgccgcttatt

SEQ ID NO: 570916 - DNA, 25 bp, Homo sapien
cagtggtacggtgtccaagcaaaca

SEQ ID NO: 570917 - DNA, 25 bp, Homo sapien
atttctcccatatcaggaaacacga

SEQ ID NO: 570918 - DNA, 25 bp, Homo sapien
tttctcccatatcaggaaacacgat

SEQ ID NO: 570919 - DNA, 25 bp, Homo sapien
caggtccttcagatgtgggcgcttc

SEQ ID NO: 570920 - DNA, 25 bp, Homo sapien
ggaagaactgatactcgcgagcagg

SEQ ID NO: 570921 - DNA, 25 bp, Homo sapien
tagagagttgctgccttgcgttccc

SEQ ID NO: 570922 - DNA, 25 bp, Homo sapien
tggagttcgcacactgacaacaccg

SEQ ID NO: 570923 - DNA, 25 bp, Homo sapien
tccgccatgaccttgcacacgatgg

SEQ ID NO: 570924 - DNA, 25 bp, Homo sapien
cgatggcgacctcagcgttcctggg

SEQ ID NO: 570925 - DNA, 25 bp, Homo sapien
cactttcccttcatacgggtcgtgg

SEQ ID NO: 570926 - DNA, 25 bp, Homo sapien
tgttgaaggtcacgtgctccgccat

SEQ ID NO: 570927 - DNA, 25 bp, Homo sapien
ttcccgtaataagggaagtagtgca

SEQ ID NO: 570928 - DNA, 25 bp, Homo sapien
ttgggagggtagtacttgacctgca

SEQ ID NO: 570929 - DNA, 25 bp, Homo sapien
acttgacctgcagcggctggccgag

SEQ ID NO: 570930 - DNA, 25 bp, Homo sapien
agtagtgcagactgaaggtgccgtt

SEQ ID NO: 570931 - DNA, 25 bp, Homo sapien
tttactgggccgacggctgacattc

SEQ ID NO: 570932 - DNA, 25 bp, Homo sapien
tgaaccagcacgaccctgacaagct

SEQ ID NO: 570933 - DNA, 25 bp, Homo sapien
tgatggttcggtgtttacgtctggt

SEQ ID NO: 570934 - DNA, 25 bp, Homo sapien
ccgccatggtggagctcgctgtggt

SEQ ID NO: 570935 - DNA, 25 bp, Homo sapien
tctgggggccgagccgttgctgggg

SEQ ID NO: 570936 - DNA, 25 bp, Homo sapien
ctctgggggccgagccgttgctggg

SEQ ID NO: 570937 - DNA, 25 bp, Homo sapien
ccaaaccaaggtacagggtggtgag

SEQ ID NO: 570938 - DNA, 25 bp, Homo sapien
caggtgcgtgccaaaccaaggtaca

SEQ ID NO: 570939 - DNA, 25 bp, Homo sapien
tgcgtgccaaaccaaggtacagggt

SEQ ID NO: 570940 - DNA, 25 bp, Homo sapien
cgtgccaaaccaaggtacagggtgg

SEQ ID NO: 570941 - DNA, 25 bp, Homo sapien
aggccctgactgcactgttgtagtg

SEQ ID NO: 570942 - DNA, 25 bp, Homo sapien
tagtggcgtgtgaaggagaccctca

SEQ ID NO: 570943 - DNA, 25 bp, Homo sapien
ctgcactgttgtagtggcgtgtgaa

SEQ ID NO: 570944 - DNA, 25 bp, Homo sapien
ccctgactgcactgttgtagtggcg

SEQ ID NO: 570945 - DNA, 25 bp, Homo sapien
gcagttctgcagcatatctgccgtg

SEQ ID NO: 570946 - DNA, 25 bp, Homo sapien
cgaagttgggatccgccaggcctga

SEQ ID NO: 570947 - DNA, 25 bp, Homo sapien
tactgctcggaggtgcagttgatgc

SEQ ID NO: 570948 - DNA, 25 bp, Homo sapien
ttcaaagccgaagttgggatccgcc

SEQ ID NO: 570949 - DNA, 25 bp, Homo sapien
agacgttgtagacaatttccaggcc

SEQ ID NO: 570950 - DNA, 25 bp, Homo sapien
tgctaggaaggcgtggagagtctgt

SEQ ID NO: 570951 - DNA, 25 bp, Homo sapien
tatcagagacgttgtagacaatttc

SEQ ID NO: 570952 - DNA, 25 bp, Homo sapien
caggttctgttatcagagacgttgt

SEQ ID NO: 570953 - DNA, 25 bp, Homo sapien
ggtgtgtacgggtccactgtctgca

SEQ ID NO: 570954 - DNA, 25 bp, Homo sapien
ccagtcatcaccacgtagaaggcca

SEQ ID NO: 570955 - DNA, 25 bp, Homo sapien
tgtctgcatcagcacatagaggcac

SEQ ID NO: 570956 - DNA, 25 bp, Homo sapien
cacagggcgaagagcccagtcatca

SEQ ID NO: 570957 - DNA, 25 bp, Homo sapien
agttcagccgcatcccgacgcccag

SEQ ID NO: 570958 - DNA, 25 bp, Homo sapien
tgggggcgcacaggtgcttcctcca

SEQ ID NO: 570959 - DNA, 25 bp, Homo sapien
agccctgatgtagacgcagacgctt

SEQ ID NO: 570960 - DNA, 25 bp, Homo sapien
tcccggaacgggtgtggcagccctg

SEQ ID NO: 570961 - DNA, 25 bp, Homo sapien
tggggccagtctgtggacgccctcc

SEQ ID NO: 570962 - DNA, 25 bp, Homo sapien
aatgctgttctcagacatacggctg

SEQ ID NO: 570963 - DNA, 25 bp, Homo sapien
tccaccggcgttctgcagctggggc

SEQ ID NO: 570964 - DNA, 25 bp, Homo sapien
ttctcagacatacggctgacatttg

SEQ ID NO: 570965 - DNA, 25 bp, Homo sapien
tcagagcggccccctccatgcaccc

SEQ ID NO: 570966 - DNA, 25 bp, Homo sapien
aggctgcgtcctcagagcggccccc

SEQ ID NO: 570967 - DNA, 25 bp, Homo sapien
agagcggccccctccatgcacccag

SEQ ID NO: 570968 - DNA, 25 bp, Homo sapien
gaggctgcgtcctcagagcggcccc

SEQ ID NO: 570969 - DNA, 25 bp, Homo sapien
agcatctgccccgtgtccgggttcc

SEQ ID NO: 570970 - DNA, 25 bp, Homo sapien
atgcgctggccacacgtcttcttct

SEQ ID NO: 570971 - DNA, 25 bp, Homo sapien
ttccagcagtaacgctggaactcct

SEQ ID NO: 570972 - DNA, 25 bp, Homo sapien
ccgtgtccgggttccagcagtaacg

SEQ ID NO: 570973 - DNA, 25 bp, Homo sapien
cacctctgggctttatagtttcctc

SEQ ID NO: 570974 - DNA, 25 bp, Homo sapien
cagatgcccacctctgggctttata

SEQ ID NO: 570975 - DNA, 25 bp, Homo sapien
ctgcaccctctacgcccagactgag

SEQ ID NO: 570976 - DNA, 25 bp, Homo sapien
cctctacgcccagactgaggccaga

SEQ ID NO: 570977 - DNA, 25 bp, Homo sapien
cagggccgtttatcagcgccggcca

SEQ ID NO: 570978 - DNA, 25 bp, Homo sapien
gctgggtgcagcccggctgttgccc

SEQ ID NO: 570979 - DNA, 25 bp, Homo sapien
ggctgggtgcagcccggctgttgcc

SEQ ID NO: 570980 - DNA, 25 bp, Homo sapien
ggccgtttatcagcgccggccatcg

SEQ ID NO: 570981 - DNA, 25 bp, Homo sapien
gaaggagttaacgtgatccgcccaa

SEQ ID NO: 570982 - DNA, 25 bp, Homo sapien
tttattccagcaaggtctccgggcg

SEQ ID NO: 570983 - DNA, 25 bp, Homo sapien
tctccgggcgattcatgtgtgtagc

SEQ ID NO: 570984 - DNA, 25 bp, Homo sapien
gaacgatgggatatcactcacctca

SEQ ID NO: 570985 - DNA, 25 bp, Homo sapien
ggctgatgactcaattgactcctga

SEQ ID NO: 570986 - DNA, 25 bp, Homo sapien
ctgggctgatgactcaattgactcc

SEQ ID NO: 570987 - DNA, 25 bp, Homo sapien
gagtttctccggctcttcattgagg

SEQ ID NO: 570988 - DNA, 25 bp, Homo sapien
gactcaattgactcctgagtttctc

SEQ ID NO: 570989 - DNA, 25 bp, Homo sapien
tatctcgtaattttctcacttttgg

SEQ ID NO: 570990 - DNA, 25 bp, Homo sapien
ttatctcgtaattttctcacttttg

SEQ ID NO: 570991 - DNA, 25 bp, Homo sapien
gcttgcgagttacttccgagaaaca

SEQ ID NO: 570992 - DNA, 25 bp, Homo sapien
ccgagaaacagcagaatgtcacacc

SEQ ID NO: 570993 - DNA, 25 bp, Homo sapien
ccccatgctgcttgcgagttacttc

SEQ ID NO: 570994 - DNA, 25 bp, Homo sapien
gagttacttccgagaaacagcagaa

SEQ ID NO: 570995 - DNA, 25 bp, Homo sapien
cacaggtatggcagatgaactcacg

SEQ ID NO: 570996 - DNA, 25 bp, Homo sapien
gacagtgtcgtaggcctgggatcct

SEQ ID NO: 570997 - DNA, 25 bp, Homo sapien
tgcacgtggcataaaagcaccagag

SEQ ID NO: 570998 - DNA, 25 bp, Homo sapien
tgaactcacgggatgctccgggact

SEQ ID NO: 570999 - DNA, 25 bp, Homo sapien
aatgcgcccccctccacgatgggag

SEQ ID NO: 571000 - DNA, 25 bp, Homo sapien
gccggatctgcagtagtgctgaatg

SEQ ID NO: 571001 - DNA, 25 bp, Homo sapien
gcccccctccacgatgggagcttct

SEQ ID NO: 571002 - DNA, 25 bp, Homo sapien
ctccacgatgggagcttcttggcct

SEQ ID NO: 571003 - DNA, 25 bp, Homo sapien
ttccaagcatcgatgtggccttcag

SEQ ID NO: 571004 - DNA, 25 bp, Homo sapien
cttccaagcatcgatgtggccttca

SEQ ID NO: 571005 - DNA, 25 bp, Homo sapien
tccaagcatcgatgtggccttcagc

SEQ ID NO: 571006 - DNA, 25 bp, Homo sapien
cagaggaaacggagatgcttggaaa

SEQ ID NO: 571007 - DNA, 25 bp, Homo sapien
gctggaccagaggacacgagaaaga

SEQ ID NO: 571008 - DNA, 25 bp, Homo sapien
ttgtgtatctggaattatctgaggc

SEQ ID NO: 571009 - DNA, 25 bp, Homo sapien
aatatggcttgttgggagagcgctt

SEQ ID NO: 571010 - DNA, 25 bp, Homo sapien
gatatcccgcgtgttcgagctgagc

SEQ ID NO: 571011 - DNA, 25 bp, Homo sapien
tgagattgcccttgcactgacagca

SEQ ID NO: 571012 - DNA, 25 bp, Homo sapien
gtcccctaaagtgcatgaagccaga

SEQ ID NO: 571013 - DNA, 25 bp, Homo sapien
caactgaaggacgattgagggccct

SEQ ID NO: 571014 - DNA, 25 bp, Homo sapien
ggtcctgctttattccacagttcaa

SEQ ID NO: 571015 - DNA, 25 bp, Homo sapien
ccacagttcaagtgtattgtgtaaa

SEQ ID NO: 571016 - DNA, 25 bp, Homo sapien
taataaggtgagataattaaatagt

SEQ ID NO: 571017 - DNA, 25 bp, Homo sapien
caagtgtattgtgtaaagatcgata

SEQ ID NO: 571018 - DNA, 25 bp, Homo sapien
tgcaggacagtgcacattgcagctg

SEQ ID NO: 571019 - DNA, 25 bp, Homo sapien
ctgcagcaggaacgggatgcactgg

SEQ ID NO: 571020 - DNA, 25 bp, Homo sapien
gaagcagcactgaatacacgggaaa

SEQ ID NO: 571021 - DNA, 25 bp, Homo sapien
gggaaagacacggtcacatgcacag

SEQ ID NO: 571022 - DNA, 25 bp, Homo sapien
gggcacacaggagcgatgcagtggg

SEQ ID NO: 571023 - DNA, 25 bp, Homo sapien
gcaaggaagcggagcaccactctgt

SEQ ID NO: 571024 - DNA, 25 bp, Homo sapien
gcagccatgtaagtatctgccagat

SEQ ID NO: 571025 - DNA, 25 bp, Homo sapien
agtatctgccagattaaattccaca

SEQ ID NO: 571026 - DNA, 25 bp, Homo sapien
ctaccatccagcagccatgtaagta

SEQ ID NO: 571027 - DNA, 25 bp, Homo sapien
tccagcagccatgtaagtatctgcc

SEQ ID NO: 571028 - DNA, 25 bp, Homo sapien
ccagagcagcggctgggaattcgga

SEQ ID NO: 571029 - DNA, 25 bp, Homo sapien
ggacatgaacccgtttgcctctttg

SEQ ID NO: 571030 - DNA, 25 bp, Homo sapien
cagcggctgggaattcggagggtgt

SEQ ID NO: 571031 - DNA, 25 bp, Homo sapien
tctttggagtttccaggtgctgggc

SEQ ID NO: 571032 - DNA, 25 bp, Homo sapien
aggcagggggatccgggcgggcagc

SEQ ID NO: 571033 - DNA, 25 bp, Homo sapien
ctgaggcagggggatccgggcgggc

SEQ ID NO: 571034 - DNA, 25 bp, Homo sapien
ggggatccgggcgggcagcacaggg

SEQ ID NO: 571035 - DNA, 25 bp, Homo sapien
gggatccgggcgggcagcacagggc

SEQ ID NO: 571036 - DNA, 25 bp, Homo sapien
ctgcgggggcgtcgagcttcacagt

SEQ ID NO: 571037 - DNA, 25 bp, Homo sapien
cttcacagtggacaaatcctgccag

SEQ ID NO: 571038 - DNA, 25 bp, Homo sapien
tcgagcttcacagtggacaaatcct

SEQ ID NO: 571039 - DNA, 25 bp, Homo sapien
gggcgtcgagcttcacagtggacaa

SEQ ID NO: 571040 - DNA, 25 bp, Homo sapien
caccatcttgggtgacaactgctca

SEQ ID NO: 571041 - DNA, 25 bp, Homo sapien
gccaccatcttgggtgacaactgct

SEQ ID NO: 571042 - DNA, 25 bp, Homo sapien
gccatgagagtccagctcaggaaaa

SEQ ID NO: 571043 - DNA, 25 bp, Homo sapien
cagccatgagagtccagctcaggaa

SEQ ID NO: 571044 - DNA, 25 bp, Homo sapien
atcagtcagcttgagccgggctgca

SEQ ID NO: 571045 - DNA, 25 bp, Homo sapien
cacttgggatcagtcagcttgagcc

SEQ ID NO: 571046 - DNA, 25 bp, Homo sapien
gcttgagcctcacttgggatcagtc

SEQ ID NO: 571047 - DNA, 25 bp, Homo sapien
gcctcacttgggatcagtcagcttg

SEQ ID NO: 571048 - DNA, 25 bp, Homo sapien
gggtccggtccgtgtgcagcatttc

SEQ ID NO: 571049 - DNA, 25 bp, Homo sapien
gctgaggtctcagtgatgattgata

SEQ ID NO: 571050 - DNA, 25 bp, Homo sapien
gggccctctcattctgctgaggtct

SEQ ID NO: 571051 - DNA, 25 bp, Homo sapien
gcatggccgtggcaggacgactggg

SEQ ID NO: 571052 - DNA, 25 bp, Homo sapien
ttgaaatgacttcctaccactggat

SEQ ID NO: 571053 - DNA, 25 bp, Homo sapien
aagcagcaggatgatcctgagctgc

SEQ ID NO: 571054 - DNA, 25 bp, Homo sapien
tgttcacaagctgcttgaaatgact

SEQ ID NO: 571055 - DNA, 25 bp, Homo sapien
gaagcagcaggatgatcctgagctg

SEQ ID NO: 571056 - DNA, 25 bp, Homo sapien
gaagtttctagattccacatgcact

SEQ ID NO: 571057 - DNA, 25 bp, Homo sapien
gtgaagtttctagattccacatgca

SEQ ID NO: 571058 - DNA, 25 bp, Homo sapien
ctgtgaagtttctagattccacatg

SEQ ID NO: 571059 - DNA, 25 bp, Homo sapien
gtttctagattccacatgcacttgc

SEQ ID NO: 571060 - DNA, 25 bp, Homo sapien
cgtgacatagccttgcaatgttggc

SEQ ID NO: 571061 - DNA, 25 bp, Homo sapien
tcactgtagctgttccagtccgtga

SEQ ID NO: 571062 - DNA, 25 bp, Homo sapien
caatgttggcgtggacgtggaagcg

SEQ ID NO: 571063 - DNA, 25 bp, Homo sapien
ggaacagtcggcactggcatcaagg

SEQ ID NO: 571064 - DNA, 25 bp, Homo sapien
cccgatggccccaggtcctttcagc

SEQ ID NO: 571065 - DNA, 25 bp, Homo sapien
gatggccccaggtcctttcagcccc

SEQ ID NO: 571066 - DNA, 25 bp, Homo sapien
cagcccctccgtgtttatttcctag

SEQ ID NO: 571067 - DNA, 25 bp, Homo sapien
tcagcccctccgtgtttatttccta

SEQ ID NO: 571068 - DNA, 25 bp, Homo sapien
tttccatccacagaagaggggaccg

SEQ ID NO: 571069 - DNA, 25 bp, Homo sapien
tcctcacagcgcaactcagctgctg

SEQ ID NO: 571070 - DNA, 25 bp, Homo sapien
cgatggataaacagccgcctggcat

SEQ ID NO: 571071 - DNA, 25 bp, Homo sapien
cagggtggctccgttgatgctgtca

SEQ ID NO: 571072 - DNA, 25 bp, Homo sapien
tcagtggatgtagcaataattggct

SEQ ID NO: 571073 - DNA, 25 bp, Homo sapien
gacaggtagccatagaaaccagcac

SEQ ID NO: 571074 - DNA, 25 bp, Homo sapien
cactagcgctgtgtccgttggcaag

SEQ ID NO: 571075 - DNA, 25 bp, Homo sapien
acacggcgctggaaacaccaccgga

SEQ ID NO: 571076 - DNA, 25 bp, Homo sapien
gatgggcatcgtggaaaagcccctg

SEQ ID NO: 571077 - DNA, 25 bp, Homo sapien
atgcaggagaagctcgaacgcacgc

SEQ ID NO: 571078 - DNA, 25 bp, Homo sapien
cagacgtggacaaggtgtcccagag

SEQ ID NO: 571079 - DNA, 25 bp, Homo sapien
cccagagcatcctggtcatgatgca

SEQ ID NO: 571080 - DNA, 25 bp, Homo sapien
atgggagacaccaggacggcggctg

SEQ ID NO: 571081 - DNA, 25 bp, Homo sapien
ggcggctgctctggtcgggagtggg

SEQ ID NO: 571082 - DNA, 25 bp, Homo sapien
aagggtgtgcaggagcgttccgacg

SEQ ID NO: 571083 - DNA, 25 bp, Homo sapien
gagcgttccgacgagaggctgtgtc

SEQ ID NO: 571084 - DNA, 25 bp, Homo sapien
gacagctgaacgtcgcacgctgttg

SEQ ID NO: 571085 - DNA, 25 bp, Homo sapien
aatccctcattcaggtgcgatggaa

SEQ ID NO: 571086 - DNA, 25 bp, Homo sapien
gcccaaggctggtccggctgctggg

SEQ ID NO: 571087 - DNA, 25 bp, Homo sapien
cttgggttctccgagtttatgcctc

SEQ ID NO: 571088 - DNA, 25 bp, Homo sapien
cagctataaactttaggtaaaatat

SEQ ID NO: 571089 - DNA, 25 bp, Homo sapien
caacttttggtaatggcagaatagc

SEQ ID NO: 571090 - DNA, 25 bp, Homo sapien
agtagagaacaggacccaacttttg

SEQ ID NO: 571091 - DNA, 25 bp, Homo sapien
cactgaaccaacctttccacaggta

SEQ ID NO: 571092 - DNA, 25 bp, Homo sapien
gatttgttaaatcactgtccactgg

SEQ ID NO: 571093 - DNA, 25 bp, Homo sapien
tgttaaatcactgtccactggtgat

SEQ ID NO: 571094 - DNA, 25 bp, Homo sapien
ttatggaggctatcatgtaggcatg

SEQ ID NO: 571095 - DNA, 25 bp, Homo sapien
catgatttgttaaatcactgtccac

SEQ ID NO: 571096 - DNA, 25 bp, Homo sapien
tacgctatggcacaaaaacgaattc

SEQ ID NO: 571097 - DNA, 25 bp, Homo sapien
cagggactctgcatagggaactcgg

SEQ ID NO: 571098 - DNA, 25 bp, Homo sapien
gattgcttgcttacaccgcaccagg

SEQ ID NO: 571099 - DNA, 25 bp, Homo sapien
cacccgctggaacctgtggattgct

SEQ ID NO: 571100 - DNA, 25 bp, Homo sapien
cgtgcccctcagccggcattcccgg

SEQ ID NO: 571101 - DNA, 25 bp, Homo sapien
gcgtgcccctcagccggcattcccg

SEQ ID NO: 571102 - DNA, 25 bp, Homo sapien
ctccgagcctggtctgggctgtcca

SEQ ID NO: 571103 - DNA, 25 bp, Homo sapien
tcactctcctatgccagagcctggc

SEQ ID NO: 571104 - DNA, 25 bp, Homo sapien
gggctgtccaactgggcataagcgt

SEQ ID NO: 571105 - DNA, 25 bp, Homo sapien
cctcaagggagacgctggcgtgaat

SEQ ID NO: 571106 - DNA, 25 bp, Homo sapien
acacagccggtgctggagcctcgcg

SEQ ID NO: 571107 - DNA, 25 bp, Homo sapien
gggacaaccgcatctgtcccagttc

SEQ ID NO: 571108 - DNA, 25 bp, Homo sapien
tcccagttcccgtgagggcaagacg

SEQ ID NO: 571109 - DNA, 25 bp, Homo sapien
gggagggagaacctggccagaggcc

SEQ ID NO: 571110 - DNA, 25 bp, Homo sapien
cttccttccactcttgcaggaaaat

SEQ ID NO: 571111 - DNA, 25 bp, Homo sapien
aacgtttcttccttccactcttgca

SEQ ID NO: 571112 - DNA, 25 bp, Homo sapien
tttcttccttccactcttgcaggaa

SEQ ID NO: 571113 - DNA, 25 bp, Homo sapien
tcaacgtttcttccttccactcttg

SEQ ID NO: 571114 - DNA, 25 bp, Homo sapien
aagcatcacaaaccacctcgaaaag

SEQ ID NO: 571115 - DNA, 25 bp, Homo sapien
caagcatcacaaaccacctcgaaaa

SEQ ID NO: 571116 - DNA, 25 bp, Homo sapien
gcatcacaaaccacctcgaaaagca

SEQ ID NO: 571117 - DNA, 25 bp, Homo sapien
tcacaaaccacctcgaaaagcaaca

SEQ ID NO: 571118 - DNA, 25 bp, Homo sapien
acgcagggcccctgagtgacgtggg

SEQ ID NO: 571119 - DNA, 25 bp, Homo sapien
ggccactgagcggacgcacgcaggg

SEQ ID NO: 571120 - DNA, 25 bp, Homo sapien
cgcacgcagggcccctgagtgacgt

SEQ ID NO: 571121 - DNA, 25 bp, Homo sapien
acccggccactgagcggacgcacgc

SEQ ID NO: 571122 - DNA, 25 bp, Homo sapien
ggactcgagtgacgtgagcacgcac

SEQ ID NO: 571123 - DNA, 25 bp, Homo sapien
agtgacgtgagcacgcacgtaggac

SEQ ID NO: 571124 - DNA, 25 bp, Homo sapien
ttgctgagggatgcacgcagggccg

SEQ ID NO: 571125 - DNA, 25 bp, Homo sapien
gggcgtacgcgggactcgagtgacg

SEQ ID NO: 571126 - DNA, 25 bp, Homo sapien
cgccgagggacttggagggcgccga

SEQ ID NO: 571127 - DNA, 25 bp, Homo sapien
tgaggtaacgcaggcgggggacgct

SEQ ID NO: 571128 - DNA, 25 bp, Homo sapien
gctgagggacgtgggagtgttgagg

SEQ ID NO: 571129 - DNA, 25 bp, Homo sapien
cgccgagggacgtgggggcgctgag

SEQ ID NO: 571130 - DNA, 25 bp, Homo sapien
cagggagatggccaggcctgcggca

SEQ ID NO: 571131 - DNA, 25 bp, Homo sapien
agggagatggccaggcctgcggcac

SEQ ID NO: 571132 - DNA, 25 bp, Homo sapien
tgcagggagatggccaggcctgcgg

SEQ ID NO: 571133 - DNA, 25 bp, Homo sapien
cggtgcagggagatggccaggcctg

SEQ ID NO: 571134 - DNA, 25 bp, Homo sapien
agatgatgatgccgggatccgcgcc

SEQ ID NO: 571135 - DNA, 25 bp, Homo sapien
ttgtgttcccgccaaaactggccgc

SEQ ID NO: 571136 - DNA, 25 bp, Homo sapien
aaaactggccgcgaatcgcagatga

SEQ ID NO: 571137 - DNA, 25 bp, Homo sapien
gcagagccccctccggtgttgtgtt

SEQ ID NO: 571138 - DNA, 25 bp, Homo sapien
tgtggggaggatgccggcagctcag

SEQ ID NO: 571139 - DNA, 25 bp, Homo sapien
aactccctggcgatggcatcctgga

SEQ ID NO: 571140 - DNA, 25 bp, Homo sapien
tgtgaactccctggcgatggcatcc

SEQ ID NO: 571141 - DNA, 25 bp, Homo sapien
gcgatggcatcctggagacacccac

SEQ ID NO: 571142 - DNA, 25 bp, Homo sapien
ccctggcgatggcatcctggagaca

SEQ ID NO: 571143 - DNA, 25 bp, Homo sapien
ttgcctcagacatggccagcaaggg

SEQ ID NO: 571144 - DNA, 25 bp, Homo sapien
ggttgcttgcctcagacatggccag

SEQ ID NO: 571145 - DNA, 25 bp, Homo sapien
ccgtggttgcttgcctcagacatgg

SEQ ID NO: 571146 - DNA, 25 bp, Homo sapien
gggaccgtggttgcttgcctcagac

SEQ ID NO: 571147 - DNA, 25 bp, Homo sapien
catttttgccagcactcataatcca

SEQ ID NO: 571148 - DNA, 25 bp, Homo sapien
gcagatccgactgaagactccagca

SEQ ID NO: 571149 - DNA, 25 bp, Homo sapien
tgcgggactccatttgttccggggc

SEQ ID NO: 571150 - DNA, 25 bp, Homo sapien
taatccaggttcagtttctgccagc

SEQ ID NO: 571151 - DNA, 25 bp, Homo sapien
gaaggacacaatatccctcaggctc

SEQ ID NO: 571152 - DNA, 25 bp, Homo sapien
gacacaatatccctcaggctctggg

SEQ ID NO: 571153 - DNA, 25 bp, Homo sapien
tccaggaagggcccttccctagaga

SEQ ID NO: 571154 - DNA, 25 bp, Homo sapien
acagaaggacacaatatccctcagg

SEQ ID NO: 571155 - DNA, 25 bp, Homo sapien
gtcttgatccccacacagactccag

SEQ ID NO: 571156 - DNA, 25 bp, Homo sapien
ccgtcttgatccccacacagactcc

SEQ ID NO: 571157 - DNA, 25 bp, Homo sapien
tcttgatccccacacagactccagg

SEQ ID NO: 571158 - DNA, 25 bp, Homo sapien
cttgatccccacacagactccaggt

SEQ ID NO: 571159 - DNA, 25 bp, Homo sapien
caggtggtcctggtacggcccctct

SEQ ID NO: 571160 - DNA, 25 bp, Homo sapien
ccctctgtcctccgctctgggtctt

SEQ ID NO: 571161 - DNA, 25 bp, Homo sapien
gtggtcctggtacggcccctctgtc

SEQ ID NO: 571162 - DNA, 25 bp, Homo sapien
tctgtcctccgctctgggtcttgtc

SEQ ID NO: 571163 - DNA, 25 bp, Homo sapien
tcagggctcgaaaccctcagagtcc

SEQ ID NO: 571164 - DNA, 25 bp, Homo sapien
ggccgatgcctgagtgtgaaacaca

SEQ ID NO: 571165 - DNA, 25 bp, Homo sapien
gcagagcactttccggggcctgatg

SEQ ID NO: 571166 - DNA, 25 bp, Homo sapien
ccatccagcccaaaacaggacacct

SEQ ID NO: 571167 - DNA, 25 bp, Homo sapien
tgcagattgtcccagatgaacaggc

SEQ ID NO: 571168 - DNA, 25 bp, Homo sapien
cccctgtggaggtgaactgtctact

SEQ ID NO: 571169 - DNA, 25 bp, Homo sapien
tataaaacatccattgccctgggtc

SEQ ID NO: 571170 - DNA, 25 bp, Homo sapien
gcttaaattaacatgctcggccagg

SEQ ID NO: 571171 - DNA, 25 bp, Homo sapien
tccttttaccccatcgctagtgaag

SEQ ID NO: 571172 - DNA, 25 bp, Homo sapien
tgaaccaggtattgcgtcctccttt

SEQ ID NO: 571173 - DNA, 25 bp, Homo sapien
agttgaaccaggtattgcgtcctcc

SEQ ID NO: 571174 - DNA, 25 bp, Homo sapien
ctagtgaagacaaccaccgcctggg

SEQ ID NO: 571175 - DNA, 25 bp, Homo sapien
gtcattaactcctgtgctcgctggg

SEQ ID NO: 571176 - DNA, 25 bp, Homo sapien
tgaacatggtctgccaggtgcgtca

SEQ ID NO: 571177 - DNA, 25 bp, Homo sapien
tgaaagatgaatcgtgcacgggtcc

SEQ ID NO: 571178 - DNA, 25 bp, Homo sapien
tactggcacccatgtgagggctgag

SEQ ID NO: 571179 - DNA, 25 bp, Homo sapien
ttccctgcgtccacgctcacatgct

SEQ ID NO: 571180 - DNA, 25 bp, Homo sapien
cctgcgtccacgctcacatgctgaa

SEQ ID NO: 571181 - DNA, 25 bp, Homo sapien
tccttccctgcgtccacgctcacat

SEQ ID NO: 571182 - DNA, 25 bp, Homo sapien
gcgtccacgctcacatgctgaatgt

SEQ ID NO: 571183 - DNA, 25 bp, Homo sapien
gcaccacgtcggtgctgtgaggcat

SEQ ID NO: 571184 - DNA, 25 bp, Homo sapien
gcttggttacccaccgggtcaggca

SEQ ID NO: 571185 - DNA, 25 bp, Homo sapien
tctgtgagaagagcttggttaccca

SEQ ID NO: 571186 - DNA, 25 bp, Homo sapien
ctggaagccactcgagctcctctgt

SEQ ID NO: 571187 - DNA, 25 bp, Homo sapien
caaactgactttaggctgcgtgagg

SEQ ID NO: 571188 - DNA, 25 bp, Homo sapien
aggcagagaccttgctgggacccaa

SEQ ID NO: 571189 - DNA, 25 bp, Homo sapien
cgtgaggtgcttccagttcagtgca

SEQ ID NO: 571190 - DNA, 25 bp, Homo sapien
catcaccgcatggaggttttggcca

SEQ ID NO: 571191 - DNA, 25 bp, Homo sapien
catacccagcatggagaggccgctg

SEQ ID NO: 571192 - DNA, 25 bp, Homo sapien
aacacatccaagcaggcctcaggag

SEQ ID NO: 571193 - DNA, 25 bp, Homo sapien
catgaagccagaggcgcgttgcaga

SEQ ID NO: 571194 - DNA, 25 bp, Homo sapien
catgcagagccagcgcatgaagcca

SEQ ID NO: 571195 - DNA, 25 bp, Homo sapien
tattccgtgttagtggaacctcagg

SEQ ID NO: 571196 - DNA, 25 bp, Homo sapien
agcaagaaagtgaaacccagagacc

SEQ ID NO: 571197 - DNA, 25 bp, Homo sapien
ttaatttgaagaacgggaatgccag

SEQ ID NO: 571198 - DNA, 25 bp, Homo sapien
ggaatgccagacgttatctcagcca

SEQ ID NO: 571199 - DNA, 25 bp, Homo sapien
tatttgcagcaaagaaggccgtcct

SEQ ID NO: 571200 - DNA, 25 bp, Homo sapien
tcccagtcagcagaaggagtcagag

SEQ ID NO: 571201 - DNA, 25 bp, Homo sapien
tgtccttcaacgcagtcatgggcca

SEQ ID NO: 571202 - DNA, 25 bp, Homo sapien
tgatgttcgcgtgcctcaaaagatg

SEQ ID NO: 571203 - DNA, 25 bp, Homo sapien
gcattccaggcaaagtcaagaccgg

SEQ ID NO: 571204 - DNA, 25 bp, Homo sapien
cagccctttgcatcacatgggcagg

SEQ ID NO: 571205 - DNA, 25 bp, Homo sapien
tccaggcaaagtcaagaccgggttc

SEQ ID NO: 571206 - DNA, 25 bp, Homo sapien
gaggtctttccgaaaggcattccag

SEQ ID NO: 571207 - DNA, 25 bp, Homo sapien
tctaaccaaacatcgtagcggcagc

SEQ ID NO: 571208 - DNA, 25 bp, Homo sapien
aaccaaacatcgtagcggcagcgca

SEQ ID NO: 571209 - DNA, 25 bp, Homo sapien
aatctctaaccaaacatcgtagcgg

SEQ ID NO: 571210 - DNA, 25 bp, Homo sapien
ccaaacatcgtagcggcagcgcaca

SEQ ID NO: 571211 - DNA, 25 bp, Homo sapien
ggccctgctatgaccacatcgacgt

SEQ ID NO: 571212 - DNA, 25 bp, Homo sapien
gaaagcgtttatagtgacctgctga

SEQ ID NO: 571213 - DNA, 25 bp, Homo sapien
ggagaagcggatacgcccctcattt

SEQ ID NO: 571214 - DNA, 25 bp, Homo sapien
ttagaaacacttcgagacgcgagct

SEQ ID NO: 571215 - DNA, 25 bp, Homo sapien
ctgtgaggcatacggaggaaacgct

SEQ ID NO: 571216 - DNA, 25 bp, Homo sapien
gcgaagcgtcgcagaaagaagccag

SEQ ID NO: 571217 - DNA, 25 bp, Homo sapien
aaacgcgggtgtacggagcaaactg

SEQ ID NO: 571218 - DNA, 25 bp, Homo sapien
gaaacgctgtgaggcatacggcgaa

SEQ ID NO: 571219 - DNA, 25 bp, Homo sapien
gctgggggttctgtgtgcctactcc

SEQ ID NO: 571220 - DNA, 25 bp, Homo sapien
cagaatgttccgagtctgcctggaa

SEQ ID NO: 571221 - DNA, 25 bp, Homo sapien
tgttccgagtctgcctggaagcccc

SEQ ID NO: 571222 - DNA, 25 bp, Homo sapien
agggaaggcagaatgttccgagtct

SEQ ID NO: 571223 - DNA, 25 bp, Homo sapien
tctgaccgtccttcagtgtagacct

SEQ ID NO: 571224 - DNA, 25 bp, Homo sapien
tcagtgtagacctgtggtgtcagtg

SEQ ID NO: 571225 - DNA, 25 bp, Homo sapien
ccttcagtgtagacctgtggtgtca

SEQ ID NO: 571226 - DNA, 25 bp, Homo sapien
gggagatttcacctctgaccgtcct

SEQ ID NO: 571227 - DNA, 25 bp, Homo sapien
cagatgtcaacgaatgcagccagga

SEQ ID NO: 571228 - DNA, 25 bp, Homo sapien
actgttcctgccacagcggcttcga

SEQ ID NO: 571229 - DNA, 25 bp, Homo sapien
agatctgccacaacaagccgggtag

SEQ ID NO: 571230 - DNA, 25 bp, Homo sapien
gcctgtgcttgttcccagatgtcaa

SEQ ID NO: 571231 - DNA, 25 bp, Homo sapien
cttgcgtgtggtttgagcaatcgcg

SEQ ID NO: 571232 - DNA, 25 bp, Homo sapien
tgtgagcaggtctgcgtgaactccc

SEQ ID NO: 571233 - DNA, 25 bp, Homo sapien
tacacctgccactgtgacgggcgtg

SEQ ID NO: 571234 - DNA, 25 bp, Homo sapien
tgagcaatcgcggtgtgatcccacg

SEQ ID NO: 571235 - DNA, 25 bp, Homo sapien
cggtaggaatgcagtacccacatgt

SEQ ID NO: 571236 - DNA, 25 bp, Homo sapien
ctgtcacaccggtaggaatgcagta

SEQ ID NO: 571237 - DNA, 25 bp, Homo sapien
tgggcagggcggctcttgtctttcc

SEQ ID NO: 571238 - DNA, 25 bp, Homo sapien
gcagggcggctcttgtctttcctct

SEQ ID NO: 571239 - DNA, 25 bp, Homo sapien
tctccctgagattgggaccctcttg

SEQ ID NO: 571240 - DNA, 25 bp, Homo sapien
tctccctgagattgggaccttcttg

SEQ ID NO: 571241 - DNA, 25 bp, Homo sapien
tgaccacattgatgcatcgagggcc

SEQ ID NO: 571242 - DNA, 25 bp, Homo sapien
gccctcctggcccagatgatgagca

SEQ ID NO: 571243 - DNA, 25 bp, Homo sapien
gaagctctcggtaacatggtggaca

SEQ ID NO: 571244 - DNA, 25 bp, Homo sapien
tgacccggtgagacagctacaatgg

SEQ ID NO: 571245 - DNA, 25 bp, Homo sapien
tttgcagaaagtccggagacagcac

SEQ ID NO: 571246 - DNA, 25 bp, Homo sapien
gtaaaaacagccgtgaagctgcctg

SEQ ID NO: 571247 - DNA, 25 bp, Homo sapien
gacgtcgggactgaatcaacctggg

SEQ ID NO: 571248 - DNA, 25 bp, Homo sapien
ggtagactatcactccacgaagaaa

SEQ ID NO: 571249 - DNA, 25 bp, Homo sapien
agtagaagtcgtggctcacatccgc

SEQ ID NO: 571250 - DNA, 25 bp, Homo sapien
tttcattgcagtgcggacccctctg

SEQ ID NO: 571251 - DNA, 25 bp, Homo sapien
tctgtaaatgcggagaacgccctgc

SEQ ID NO: 571252 - DNA, 25 bp, Homo sapien
cttggcacacaaatgcaggctgctg

SEQ ID NO: 571253 - DNA, 25 bp, Homo sapien
gaaagctttgtaacaccgcgtggcc

SEQ ID NO: 571254 - DNA, 25 bp, Homo sapien
tctgactcctctggtagtggcggca

SEQ ID NO: 571255 - DNA, 25 bp, Homo sapien
ttgacgctcccgtgggacgcggcca

SEQ ID NO: 571256 - DNA, 25 bp, Homo sapien
gggacgaccaagactcatggcttga

SEQ ID NO: 571257 - DNA, 25 bp, Homo sapien
aaatgcagtcgggaccctgcctgcc

SEQ ID NO: 571258 - DNA, 25 bp, Homo sapien
ctcctggaaggatgtcggagccgca

SEQ ID NO: 571259 - DNA, 25 bp, Homo sapien
cctggtggtccctgagggtccctgg

SEQ ID NO: 571260 - DNA, 25 bp, Homo sapien
ctccaggccctggtggtccctgagg

SEQ ID NO: 571261 - DNA, 25 bp, Homo sapien
ccctggtggtccctgagggtccctg

SEQ ID NO: 571262 - DNA, 25 bp, Homo sapien
caggccctggtggtccctgagggtc

SEQ ID NO: 571263 - DNA, 25 bp, Homo sapien
acacgccgggcaagggcctcttgtt

SEQ ID NO: 571264 - DNA, 25 bp, Homo sapien
tgaccggtgccagttatgggctcct

SEQ ID NO: 571265 - DNA, 25 bp, Homo sapien
acttgctctggacacgccgggcaag

SEQ ID NO: 571266 - DNA, 25 bp, Homo sapien
atgaccctgcgccatcgtgggcatg

SEQ ID NO: 571267 - DNA, 25 bp, Homo sapien
cccagggctcggatctggccatcag

SEQ ID NO: 571268 - DNA, 25 bp, Homo sapien
gcccagggctcggatctggccatca

SEQ ID NO: 571269 - DNA, 25 bp, Homo sapien
ccagggctcggatctggccatcagc

SEQ ID NO: 571270 - DNA, 25 bp, Homo sapien
gctaagcaggccaactcgtctgacc

SEQ ID NO: 571271 - DNA, 25 bp, Homo sapien
gatgctgacggctcgctaagcaggc

SEQ ID NO: 571272 - DNA, 25 bp, Homo sapien
tgacggctcgctaagcaggccaact

SEQ ID NO: 571273 - DNA, 25 bp, Homo sapien
cgtggatgctgacggctcgctaagc

SEQ ID NO: 571274 - DNA, 25 bp, Homo sapien
gcaaatgtacagccgggctaatccc

SEQ ID NO: 571275 - DNA, 25 bp, Homo sapien
caaatgtacagccgggctaatccca

SEQ ID NO: 571276 - DNA, 25 bp, Homo sapien
agcaaatgtacagccgggctaatcc

SEQ ID NO: 571277 - DNA, 25 bp, Homo sapien
tgccccagggtcaaggactccacga

SEQ ID NO: 571278 - DNA, 25 bp, Homo sapien
tcaaggactccacgaggggagaggg

SEQ ID NO: 571279 - DNA, 25 bp, Homo sapien
cccagggtcaaggactccacgaggg

SEQ ID NO: 571280 - DNA, 25 bp, Homo sapien
ctgccccagggtcaaggactccacg

SEQ ID NO: 571281 - DNA, 25 bp, Homo sapien
tactgaattccatcagttaaaaggt

SEQ ID NO: 571282 - DNA, 25 bp, Homo sapien
ttactgaattccatcagttaaaagg

SEQ ID NO: 571283 - DNA, 25 bp, Homo sapien
agaatcacggtgggaggcaaaaggc

SEQ ID NO: 571284 - DNA, 25 bp, Homo sapien
aattgcacatggttggggaggcctc

SEQ ID NO: 571285 - DNA, 25 bp, Homo sapien
ctcagaatcacggtgggaggcaaaa

SEQ ID NO: 571286 - DNA, 25 bp, Homo sapien
ggcctcagaatcacggtgggaggca

SEQ ID NO: 571287 - DNA, 25 bp, Homo sapien
gaaccttgagtcaaattgttcacat

SEQ ID NO: 571288 - DNA, 25 bp, Homo sapien
caggccaggcattggccggagccct

SEQ ID NO: 571289 - DNA, 25 bp, Homo sapien
tgcaggccaggcattggccggagcc

SEQ ID NO: 571290 - DNA, 25 bp, Homo sapien
cagccaccacgaaccttgagtcaaa

SEQ ID NO: 571291 - DNA, 25 bp, Homo sapien
agaccacggcaccatcggcgcccat

SEQ ID NO: 571292 - DNA, 25 bp, Homo sapien
ggcacagcccgagctccagggtgcc

SEQ ID NO: 571293 - DNA, 25 bp, Homo sapien
aggaaccgcccacacaagaccacgg

SEQ ID NO: 571294 - DNA, 25 bp, Homo sapien
tgttcgcacccctaggacaccaaga

SEQ ID NO: 571295 - DNA, 25 bp, Homo sapien
aatgacaagcagtggcgggttcaca

SEQ ID NO: 571296 - DNA, 25 bp, Homo sapien
tgtgtgagaccctccatcggacaga

SEQ ID NO: 571297 - DNA, 25 bp, Homo sapien
caccgttcatgtgtggatgtgcgct

SEQ ID NO: 571298 - DNA, 25 bp, Homo sapien
tgtgtctgcacgagtgtggctcccc

SEQ ID NO: 571299 - DNA, 25 bp, Homo sapien
tccgtgaagtaagctggagacctca

SEQ ID NO: 571300 - DNA, 25 bp, Homo sapien
cccacacgggagaagagcggtactt

SEQ ID NO: 571301 - DNA, 25 bp, Homo sapien
cggtacttgtttatcgtaggcacgg

SEQ ID NO: 571302 - DNA, 25 bp, Homo sapien
ccaggtgggcactgttccgtgaagt

SEQ ID NO: 571303 - DNA, 25 bp, Homo sapien
acttggtgtcttgtggcacgtctgg

SEQ ID NO: 571304 - DNA, 25 bp, Homo sapien
ggtggcgcatcctgaactcctgtca

SEQ ID NO: 571305 - DNA, 25 bp, Homo sapien
ttcaagagacttcggctactttggg

SEQ ID NO: 571306 - DNA, 25 bp, Homo sapien
cctgaggatctgacttcaggagttc

SEQ ID NO: 571307 - DNA, 25 bp, Homo sapien
cgtgactcacccggggcctgtgact

SEQ ID NO: 571308 - DNA, 25 bp, Homo sapien
tgactcacccggggcctgtgactca

SEQ ID NO: 571309 - DNA, 25 bp, Homo sapien
tgacccacccgggacccgtgactca

SEQ ID NO: 571310 - DNA, 25 bp, Homo sapien
acccgtgactcacccggggcctgtg

SEQ ID NO: 571311 - DNA, 25 bp, Homo sapien
tgtgacccactcaggacctgtgacc

SEQ ID NO: 571312 - DNA, 25 bp, Homo sapien
ctgtgacccactcaggacctgtgac

SEQ ID NO: 571313 - DNA, 25 bp, Homo sapien
gacccactcaggacctgtgacccac

SEQ ID NO: 571314 - DNA, 25 bp, Homo sapien
tgacccactcaggacctgtgaccca

SEQ ID NO: 571315 - DNA, 25 bp, Homo sapien
cagcgccatttgatgtgagcagagc

SEQ ID NO: 571316 - DNA, 25 bp, Homo sapien
gctaattaattaagggatgtgaaaa

SEQ ID NO: 571317 - DNA, 25 bp, Homo sapien
ccagaacaattgctctcagaggagg

SEQ ID NO: 571318 - DNA, 25 bp, Homo sapien
agaagcgggatttctagaggctgcc

SEQ ID NO: 571319 - DNA, 25 bp, Homo sapien
cagaggagggcgcaactgggaagcg

SEQ ID NO: 571320 - DNA, 25 bp, Homo sapien
tcagggtgcgtaggggggtggcttc

SEQ ID NO: 571321 - DNA, 25 bp, Homo sapien
ctcagacgaagccagggcagaggag

SEQ ID NO: 571322 - DNA, 25 bp, Homo sapien
tgcgtagcacggtggagcctggccg

SEQ ID NO: 571323 - DNA, 25 bp, Homo sapien
cagggccacccgcagactcagggcc

SEQ ID NO: 571324 - DNA, 25 bp, Homo sapien
ccagggccacccgcagactcagggc

SEQ ID NO: 571325 - DNA, 25 bp, Homo sapien
ggcacccatgcgattccaagtctgt

SEQ ID NO: 571326 - DNA, 25 bp, Homo sapien
gcatgggccaccgaggctatgctct

SEQ ID NO: 571327 - DNA, 25 bp, Homo sapien
gggctgatggaaccacgtgttgtct

SEQ ID NO: 571328 - DNA, 25 bp, Homo sapien
tggcaaacttcccacgggagaccag

SEQ ID NO: 571329 - DNA, 25 bp, Homo sapien
aatggaaaagatgtttccaggccag

SEQ ID NO: 571330 - DNA, 25 bp, Homo sapien
agaaatggaaaagatgtttccaggc

SEQ ID NO: 571331 - DNA, 25 bp, Homo sapien
tggaaaagatgtttccaggccagac

SEQ ID NO: 571332 - DNA, 25 bp, Homo sapien
gaaatggaaaagatgtttccaggcc

SEQ ID NO: 571333 - DNA, 25 bp, Homo sapien
gccccagctttatattcgaagtgag

SEQ ID NO: 571334 - DNA, 25 bp, Homo sapien
gtgcagggatccctccacgaggaga

SEQ ID NO: 571335 - DNA, 25 bp, Homo sapien
aggagatgttgtcaggccctggtca

SEQ ID NO: 571336 - DNA, 25 bp, Homo sapien
tcaggccctggtcatctccactgag

SEQ ID NO: 571337 - DNA, 25 bp, Homo sapien
tgagaaggtcgtggctctcgggccc

SEQ ID NO: 571338 - DNA, 25 bp, Homo sapien
catctccatgagtgctggttcctgc

SEQ ID NO: 571339 - DNA, 25 bp, Homo sapien
aagcaggccctgaacgcgagggacc

SEQ ID NO: 571340 - DNA, 25 bp, Homo sapien
tctcgggccccgctcaaacctgagc

SEQ ID NO: 571341 - DNA, 25 bp, Homo sapien
acacgggacacgtccggagagtttg

SEQ ID NO: 571342 - DNA, 25 bp, Homo sapien
gttctcaactgtgtccccgggggca

SEQ ID NO: 571343 - DNA, 25 bp, Homo sapien
agtttgggttgtcacaccggcggct

SEQ ID NO: 571344 - DNA, 25 bp, Homo sapien
ccaggcaggagacacgggacacgtc

SEQ ID NO: 571345 - DNA, 25 bp, Homo sapien
cagcacctagggtgccccagcacag

SEQ ID NO: 571346 - DNA, 25 bp, Homo sapien
agcaccctcagcacctagggtgccc

SEQ ID NO: 571347 - DNA, 25 bp, Homo sapien
acagcggttggccagccctgaatgc

SEQ ID NO: 571348 - DNA, 25 bp, Homo sapien
cagcacagcggttggccagccctga

SEQ ID NO: 571349 - DNA, 25 bp, Homo sapien
ggcagagggtaggacgagcaggtcg

SEQ ID NO: 571350 - DNA, 25 bp, Homo sapien
tgtagagggtctgtggtgggacggc

SEQ ID NO: 571351 - DNA, 25 bp, Homo sapien
gacggctgggccataggccagctgg

SEQ ID NO: 571352 - DNA, 25 bp, Homo sapien
tcaggcggaagcctgcgtaggccag

SEQ ID NO: 571353 - DNA, 25 bp, Homo sapien
ggcagctggtccttggtccacatgt

SEQ ID NO: 571354 - DNA, 25 bp, Homo sapien
gcagctggtccttggtccacatgtg

SEQ ID NO: 571355 - DNA, 25 bp, Homo sapien
cctgagctttgggttcgaggaagac

SEQ ID NO: 571356 - DNA, 25 bp, Homo sapien
ggctggccctggaggtatcacctgt

SEQ ID NO: 571357 - DNA, 25 bp, Homo sapien
tggcgcctgcaccagacaagcgttt

SEQ ID NO: 571358 - DNA, 25 bp, Homo sapien
tatcacgggctttaatgaacacacg

SEQ ID NO: 571359 - DNA, 25 bp, Homo sapien
tcctggcagccgctgacgccgatga

SEQ ID NO: 571360 - DNA, 25 bp, Homo sapien
caggcccaggacgttcagaactgca

SEQ ID NO: 571361 - DNA, 25 bp, Homo sapien
cgatgaactcatagtaggcgggcga

SEQ ID NO: 571362 - DNA, 25 bp, Homo sapien
ccagagcaggcggtacaggtgcagc

SEQ ID NO: 571363 - DNA, 25 bp, Homo sapien
gtgttgcttctcaccttcagctggc

SEQ ID NO: 571364 - DNA, 25 bp, Homo sapien
cagctggcacttgccgtccagggag

SEQ ID NO: 571365 - DNA, 25 bp, Homo sapien
gcacttgccgtccagggagtgacag

SEQ ID NO: 571366 - DNA, 25 bp, Homo sapien
ctcccgcaggcatagaggtcacagc

SEQ ID NO: 571367 - DNA, 25 bp, Homo sapien
tagttaaagccaggaatccacacag

SEQ ID NO: 571368 - DNA, 25 bp, Homo sapien
gagaggctgcgtttagttaaagcca

SEQ ID NO: 571369 - DNA, 25 bp, Homo sapien
gcgtttagttaaagccaggaatcca

SEQ ID NO: 571370 - DNA, 25 bp, Homo sapien
gctgcgtttagttaaagccaggaat

SEQ ID NO: 571371 - DNA, 25 bp, Homo sapien
ccaggaactattagaatcaaaatat

SEQ ID NO: 571372 - DNA, 25 bp, Homo sapien
ttcagaccacgcctatgtgcaggga

SEQ ID NO: 571373 - DNA, 25 bp, Homo sapien
acatgaatctcagtgctcctgctca

SEQ ID NO: 571374 - DNA, 25 bp, Homo sapien
tacagcacatcgaaatgtcaaggtc

SEQ ID NO: 571375 - DNA, 25 bp, Homo sapien
ggtagacatcgtacaagtaccccac

SEQ ID NO: 571376 - DNA, 25 bp, Homo sapien
catcttcccgtggtgaggggcctcg

SEQ ID NO: 571377 - DNA, 25 bp, Homo sapien
ctctgtctggtagacatcgtacaag

SEQ ID NO: 571378 - DNA, 25 bp, Homo sapien
tctggtagacatcgtacaagtaccc

SEQ ID NO: 571379 - DNA, 25 bp, Homo sapien
ttgcctagatgcatgccccgcgtgg

SEQ ID NO: 571380 - DNA, 25 bp, Homo sapien
cgcgtggccctccagaatggacagg

SEQ ID NO: 571381 - DNA, 25 bp, Homo sapien
acaggcgcccgaggtccggaacctg

SEQ ID NO: 571382 - DNA, 25 bp, Homo sapien
cccgactgcggtcagagactggacc

SEQ ID NO: 571383 - DNA, 25 bp, Homo sapien
tgtgcacacaatgacaatgtactca

SEQ ID NO: 571384 - DNA, 25 bp, Homo sapien
cccggaaagcgactgtgcacacaat

SEQ ID NO: 571385 - DNA, 25 bp, Homo sapien
tacttttttcacgtcgactctttca

SEQ ID NO: 571386 - DNA, 25 bp, Homo sapien
cgtcgactctttcagccccggaaag

SEQ ID NO: 571387 - DNA, 25 bp, Homo sapien
tgtgctgcaaatacgccgtccacga

SEQ ID NO: 571388 - DNA, 25 bp, Homo sapien
aaactgataaacacgatcgctgcca

SEQ ID NO: 571389 - DNA, 25 bp, Homo sapien
caaaactgataaacacgatcgctgc

SEQ ID NO: 571390 - DNA, 25 bp, Homo sapien
acgccgtccacgatggcgcagcaga

SEQ ID NO: 571391 - DNA, 25 bp, Homo sapien
cttctgcacggaagggcgttgccat

SEQ ID NO: 571392 - DNA, 25 bp, Homo sapien
gccttctgcacggaagggcgttgcc

SEQ ID NO: 571393 - DNA, 25 bp, Homo sapien
gcgccttctgcacggaagggcgttg

SEQ ID NO: 571394 - DNA, 25 bp, Homo sapien
ccaggcgccttctgcacggaagggc

SEQ ID NO: 571395 - DNA, 25 bp, Homo sapien
cagagcagagccgaccgagcagagt

SEQ ID NO: 571396 - DNA, 25 bp, Homo sapien
gagcgtgggtgctcgtccagactca

SEQ ID NO: 571397 - DNA, 25 bp, Homo sapien
ctcgtccagactcagagcagagccg

SEQ ID NO: 571398 - DNA, 25 bp, Homo sapien
acacttgcaaagacgcccggcagag

SEQ ID NO: 571399 - DNA, 25 bp, Homo sapien
ctgtggcctcttcccccgatgtcag

SEQ ID NO: 571400 - DNA, 25 bp, Homo sapien
gtggaactgctgtggcctcttcccc

SEQ ID NO: 571401 - DNA, 25 bp, Homo sapien
actgctgtggcctcttcccccgatg

SEQ ID NO: 571402 - DNA, 25 bp, Homo sapien
tgctgtggcctcttcccccgatgtc

SEQ ID NO: 571403 - DNA, 25 bp, Homo sapien
cacagaagtcagtgcgtccttgggt

SEQ ID NO: 571404 - DNA, 25 bp, Homo sapien
agaccggcacggtccctgcgtgagt

SEQ ID NO: 571405 - DNA, 25 bp, Homo sapien
cgtgagtcacagagagatggttctc

SEQ ID NO: 571406 - DNA, 25 bp, Homo sapien
gtccacagaagtcagtgcgtccttg

SEQ ID NO: 571407 - DNA, 25 bp, Homo sapien
attgcagggagagcggcgtcacatc

SEQ ID NO: 571408 - DNA, 25 bp, Homo sapien
gaggaagatgaaagccggcctccag

SEQ ID NO: 571409 - DNA, 25 bp, Homo sapien
cttctcgtgggtgccggcctggatc

SEQ ID NO: 571410 - DNA, 25 bp, Homo sapien
gggctgcgtgcctcgctctagcatt

SEQ ID NO: 571411 - DNA, 25 bp, Homo sapien
gatggctgtgtacgccataaatcca

SEQ ID NO: 571412 - DNA, 25 bp, Homo sapien
tctgttatcacccacacgatgacgg

SEQ ID NO: 571413 - DNA, 25 bp, Homo sapien
cagcactaggatggccacgtgtggc

SEQ ID NO: 571414 - DNA, 25 bp, Homo sapien
cctgcgagaggcacctgatgcagcc

SEQ ID NO: 571415 - DNA, 25 bp, Homo sapien
gtccccaaaacagtgcatcaacaaa

SEQ ID NO: 571416 - DNA, 25 bp, Homo sapien
acaaaacagacttccagctgaacct

SEQ ID NO: 571417 - DNA, 25 bp, Homo sapien
cgaacatcatggacaggcagtgtct

SEQ ID NO: 571418 - DNA, 25 bp, Homo sapien
gctgttgccgcgcatacagccacga

SEQ ID NO: 571419 - DNA, 25 bp, Homo sapien
caagttgatgccaataattcctaag

SEQ ID NO: 571420 - DNA, 25 bp, Homo sapien
ttctattctccaccaagttgatgcc

SEQ ID NO: 571421 - DNA, 25 bp, Homo sapien
catttgccttctattctccaccaag

SEQ ID NO: 571422 - DNA, 25 bp, Homo sapien
ccaagttgatgccaataattcctaa

SEQ ID NO: 571423 - DNA, 25 bp, Homo sapien
ctgctggcgttgggcaggcatctct

SEQ ID NO: 571424 - DNA, 25 bp, Homo sapien
tctgctggcgttgggcaggcatctc

SEQ ID NO: 571425 - DNA, 25 bp, Homo sapien
aagaacctcaaccactgagcagcag

SEQ ID NO: 571426 - DNA, 25 bp, Homo sapien
ctcaagaacctcaaccactgagcag

SEQ ID NO: 571427 - DNA, 25 bp, Homo sapien
tgtcgggaaatagacatgggactgt

SEQ ID NO: 571428 - DNA, 25 bp, Homo sapien
ctctgggcagaaaatgatactggga

SEQ ID NO: 571429 - DNA, 25 bp, Homo sapien
ctgtcttagaacagaggccaccggc

SEQ ID NO: 571430 - DNA, 25 bp, Homo sapien
actgtgctgtcttagaacagaggcc

SEQ ID NO: 571431 - DNA, 25 bp, Homo sapien
cgaggcctaagacggctcttgctcc

SEQ ID NO: 571432 - DNA, 25 bp, Homo sapien
atggacctgccaacgaccgtgccga

SEQ ID NO: 571433 - DNA, 25 bp, Homo sapien
cagagcagccaacatggacctgcca

SEQ ID NO: 571434 - DNA, 25 bp, Homo sapien
ccgggccggtcgcacttcccagtga

SEQ ID NO: 571435 - DNA, 25 bp, Homo sapien
gacatttcctgttgccgggctctgg

SEQ ID NO: 571436 - DNA, 25 bp, Homo sapien
tgatccaagccattccaacagaggt

SEQ ID NO: 571437 - DNA, 25 bp, Homo sapien
gagtaatgagattgaagaagccgca

SEQ ID NO: 571438 - DNA, 25 bp, Homo sapien
taatacgatctttgacccacggctt

SEQ ID NO: 571439 - DNA, 25 bp, Homo sapien
cggtcacattctccgtcctggtggt

SEQ ID NO: 571440 - DNA, 25 bp, Homo sapien
cagccagcccgacggtgactatgag

SEQ ID NO: 571441 - DNA, 25 bp, Homo sapien
caaaccagagcgacgtcttcttcct

SEQ ID NO: 571442 - DNA, 25 bp, Homo sapien
gtagtagcccccaacggtcacattc

SEQ ID NO: 571443 - DNA, 25 bp, Homo sapien
tccattcgccaatgtaataaaccat

SEQ ID NO: 571444 - DNA, 25 bp, Homo sapien
gggaccagatcactccattcgccaa

SEQ ID NO: 571445 - DNA, 25 bp, Homo sapien
gatcactccattcgccaatgtaata

SEQ ID NO: 571446 - DNA, 25 bp, Homo sapien
ttccaccttggaggggaccagatca

SEQ ID NO: 571447 - DNA, 25 bp, Homo sapien
gaagtcgaggtgagaaacggcaaac

SEQ ID NO: 571448 - DNA, 25 bp, Homo sapien
ctcccgtgggtgaaactccgttctg

SEQ ID NO: 571449 - DNA, 25 bp, Homo sapien
catttgatcatgaccagaggctcca

SEQ ID NO: 571450 - DNA, 25 bp, Homo sapien
cgtttgcccgagagacaggagcgat

SEQ ID NO: 571451 - DNA, 25 bp, Homo sapien
ctttaagatggcgtagcggctattc

SEQ ID NO: 571452 - DNA, 25 bp, Homo sapien
gtgaactttaagatggcgtagcggc

SEQ ID NO: 571453 - DNA, 25 bp, Homo sapien
atggcgtagcggctattcttaacca

SEQ ID NO: 571454 - DNA, 25 bp, Homo sapien
cgtagcggctattcttaaccagcat

SEQ ID NO: 571455 - DNA, 25 bp, Homo sapien
cagcaggcccaggggcccgggcacc

SEQ ID NO: 571456 - DNA, 25 bp, Homo sapien
ccaggggcccgggcaccggcggctg

SEQ ID NO: 571457 - DNA, 25 bp, Homo sapien
tgcggggtccagcaggcccaggggc

SEQ ID NO: 571458 - DNA, 25 bp, Homo sapien
ggggcccgggcaccggcggctgcat

SEQ ID NO: 571459 - DNA, 25 bp, Homo sapien
catgactgcacgtatgtggatgggt

SEQ ID NO: 571460 - DNA, 25 bp, Homo sapien
ggatgggtgcacatgactgtgtacc

SEQ ID NO: 571461 - DNA, 25 bp, Homo sapien
aatcttggtggtgggcgctcccctg

SEQ ID NO: 571462 - DNA, 25 bp, Homo sapien
cagaaaggctaaggacgcctgctta

SEQ ID NO: 571463 - DNA, 25 bp, Homo sapien
tcccagactcctgcttcgctgaagt

SEQ ID NO: 571464 - DNA, 25 bp, Homo sapien
tcagaggcctcactggccgccttga

SEQ ID NO: 571465 - DNA, 25 bp, Homo sapien
ttcgctgaagttcagaggcctcact

SEQ ID NO: 571466 - DNA, 25 bp, Homo sapien
gctccttgtgaggcttcctagggcg

SEQ ID NO: 571467 - DNA, 25 bp, Homo sapien
acccctaatgcccacatgtgcaatt

SEQ ID NO: 571468 - DNA, 25 bp, Homo sapien
cagtgggtaccactggaaaaccaag

SEQ ID NO: 571469 - DNA, 25 bp, Homo sapien
taatgcccacatgtgcaattcccag

SEQ ID NO: 571470 - DNA, 25 bp, Homo sapien
cacatgtgcaattcccagtgggtac

SEQ ID NO: 571471 - DNA, 25 bp, Homo sapien
tcaacagcaaaacgatgtgggcttc

SEQ ID NO: 571472 - DNA, 25 bp, Homo sapien
tgtcacagtcgactagacgggccgt

SEQ ID NO: 571473 - DNA, 25 bp, Homo sapien
tcccaatgtgatgaagccgaaagcc

SEQ ID NO: 571474 - DNA, 25 bp, Homo sapien
tcaaatgacgacacgttccacaggg

SEQ ID NO: 571475 - DNA, 25 bp, Homo sapien
gtagttctggaagctcttgtctccg

SEQ ID NO: 571476 - DNA, 25 bp, Homo sapien
tgagtggaggtctcggactgctgcc

SEQ ID NO: 571477 - DNA, 25 bp, Homo sapien
gaatgagtggaggtctcggactgct

SEQ ID NO: 571478 - DNA, 25 bp, Homo sapien
cggactgctgccggatgtagttctg

SEQ ID NO: 571479 - DNA, 25 bp, Homo sapien
tttagcgtcttgtaggtctcctggg

SEQ ID NO: 571480 - DNA, 25 bp, Homo sapien
gaacttgtccctcttatactgggcg

SEQ ID NO: 571481 - DNA, 25 bp, Homo sapien
gctccgggccgtcatacacagattt

SEQ ID NO: 571482 - DNA, 25 bp, Homo sapien
tgacgaacgtcgaatactcctcctg

SEQ ID NO: 571483 - DNA, 25 bp, Homo sapien
cagaaccaggaggagagacacctgc

SEQ ID NO: 571484 - DNA, 25 bp, Homo sapien
agcccgcccagccagaaccaggagg

SEQ ID NO: 571485 - DNA, 25 bp, Homo sapien
agacacctgcagctggacgctgggc

SEQ ID NO: 571486 - DNA, 25 bp, Homo sapien
gacacctgcagctggacgctgggct

SEQ ID NO: 571487 - DNA, 25 bp, Homo sapien
tgtcggttcctgctatgagagggct

SEQ ID NO: 571488 - DNA, 25 bp, Homo sapien
tggcctctgctgtgtcggttcctgc

SEQ ID NO: 571489 - DNA, 25 bp, Homo sapien
gatgccagacccactgtcttggcca

SEQ ID NO: 571490 - DNA, 25 bp, Homo sapien
tcacagtatccagggacctcagacc

SEQ ID NO: 571491 - DNA, 25 bp, Homo sapien
cgtggccaagctcacagatgggcag

SEQ ID NO: 571492 - DNA, 25 bp, Homo sapien
agctgcacggacacccagggcatgt

SEQ ID NO: 571493 - DNA, 25 bp, Homo sapien
tcacacatgtattgctgggaacatg

SEQ ID NO: 571494 - DNA, 25 bp, Homo sapien
tgtgttagtgtaggcctggaaccca

SEQ ID NO: 571495 - DNA, 25 bp, Homo sapien
cttctccagcttgctcatgtacaag

SEQ ID NO: 571496 - DNA, 25 bp, Homo sapien
gagtagatacgctccgtctcacggt

SEQ ID NO: 571497 - DNA, 25 bp, Homo sapien
tgctcatgtacaagttgaagaggga

SEQ ID NO: 571498 - DNA, 25 bp, Homo sapien
tgaagagggagtagatacgctccgt

SEQ ID NO: 571499 - DNA, 25 bp, Homo sapien
tgaacactccagacctcatgtggtt

SEQ ID NO: 571500 - DNA, 25 bp, Homo sapien
taccattggcctatttggacacgtg

SEQ ID NO: 571501 - DNA, 25 bp, Homo sapien
gaagactaggtgctaaaatccccag

SEQ ID NO: 571502 - DNA, 25 bp, Homo sapien
ggctgcaaaccggaactaactagca

SEQ ID NO: 571503 - DNA, 25 bp, Homo sapien
agcagcccggagccgagtcggatgg

SEQ ID NO: 571504 - DNA, 25 bp, Homo sapien
ggagccgagtcggatggcgccctac

SEQ ID NO: 571505 - DNA, 25 bp, Homo sapien
ccggagccgagtcggatggcgccct

SEQ ID NO: 571506 - DNA, 25 bp, Homo sapien
gcccggagccgagtcggatggcgcc

SEQ ID NO: 571507 - DNA, 25 bp, Homo sapien
tcactttggtgagaatgtcgatcca

SEQ ID NO: 571508 - DNA, 25 bp, Homo sapien
agcgcacgctctggctggatgacct

SEQ ID NO: 571509 - DNA, 25 bp, Homo sapien
ttggcctggatgtacagcgcacgct

SEQ ID NO: 571510 - DNA, 25 bp, Homo sapien
tccttggcctccacgcagttgttgg

SEQ ID NO: 571511 - DNA, 25 bp, Homo sapien
gcacctggtgaacaacccgagtaac

SEQ ID NO: 571512 - DNA, 25 bp, Homo sapien
ccgagtaacacgaagactctgagaa

SEQ ID NO: 571513 - DNA, 25 bp, Homo sapien
tgaacaacccgagtaacacgaagac

SEQ ID NO: 571514 - DNA, 25 bp, Homo sapien
cctggtgaacaacccgagtaacacg

SEQ ID NO: 571515 - DNA, 25 bp, Homo sapien
ggatgttctcgatgggaatgctgta

SEQ ID NO: 571516 - DNA, 25 bp, Homo sapien
atgttctcgatgggaatgctgtaga

SEQ ID NO: 571517 - DNA, 25 bp, Homo sapien
tgttctcgatgggaatgctgtagag

SEQ ID NO: 571518 - DNA, 25 bp, Homo sapien
gatgttctcgatgggaatgctgtag

SEQ ID NO: 571519 - DNA, 25 bp, Homo sapien
cagctctgcgtttactggttctctg

SEQ ID NO: 571520 - DNA, 25 bp, Homo sapien
atgacgaggcgaccagaggaggaag

SEQ ID NO: 571521 - DNA, 25 bp, Homo sapien
cagaaaagcaccttactgatgtggt

SEQ ID NO: 571522 - DNA, 25 bp, Homo sapien
cggagcggcaccctggccatgacga

SEQ ID NO: 571523 - DNA, 25 bp, Homo sapien
gcttccgtccttgggccctcttgat

SEQ ID NO: 571524 - DNA, 25 bp, Homo sapien
gttggtcaagcgaaaccatctcttc

SEQ ID NO: 571525 - DNA, 25 bp, Homo sapien
gcttttgtggtaggtaaattcatgg

SEQ ID NO: 571526 - DNA, 25 bp, Homo sapien
ttaaaattcttcatcccaaagcgct

SEQ ID NO: 571527 - DNA, 25 bp, Homo sapien
ggagggcagcggacgcccacacaac

SEQ ID NO: 571528 - DNA, 25 bp, Homo sapien
gcggacgcccacacaacacggagga

SEQ ID NO: 571529 - DNA, 25 bp, Homo sapien
atgcgatgctcccacggcggacctg

SEQ ID NO: 571530 - DNA, 25 bp, Homo sapien
ctggaaatgccaatgcgatgctccc

SEQ ID NO: 571531 - DNA, 25 bp, Homo sapien
cagacgcccatactcagaggacctg

SEQ ID NO: 571532 - DNA, 25 bp, Homo sapien
gacgcccatactcagaggacctgca

SEQ ID NO: 571533 - DNA, 25 bp, Homo sapien
cagcagacgcccatactcagaggac

SEQ ID NO: 571534 - DNA, 25 bp, Homo sapien
cgcgggctcggggtcagagcgggca

SEQ ID NO: 571535 - DNA, 25 bp, Homo sapien
gaggctcggccttcattgccgggca

SEQ ID NO: 571536 - DNA, 25 bp, Homo sapien
ctctgaggctcggccttcattgccg

SEQ ID NO: 571537 - DNA, 25 bp, Homo sapien
ctgaggctcggccttcattgccggg

SEQ ID NO: 571538 - DNA, 25 bp, Homo sapien
aggctcggccttcattgccgggcag

SEQ ID NO: 571539 - DNA, 25 bp, Homo sapien
cagaaccggcggccgagctggagga

SEQ ID NO: 571540 - DNA, 25 bp, Homo sapien
agaagaaagtggccagacagagtga

SEQ ID NO: 571541 - DNA, 25 bp, Homo sapien
ggtggaagctgaggacgagaagcca

SEQ ID NO: 571542 - DNA, 25 bp, Homo sapien
aaagtggccagacagagtgactgga

SEQ ID NO: 571543 - DNA, 25 bp, Homo sapien
gacaagcgcactcagaaatcggaaa

SEQ ID NO: 571544 - DNA, 25 bp, Homo sapien
ctcgacaagcgcactcagaaatcgg

SEQ ID NO: 571545 - DNA, 25 bp, Homo sapien
gcgcactcagaaatcggaaagaggg

SEQ ID NO: 571546 - DNA, 25 bp, Homo sapien
gctgtggacgcacaccggagggtgt

SEQ ID NO: 571547 - DNA, 25 bp, Homo sapien
ccagtggatgccgaacgccgttcat

SEQ ID NO: 571548 - DNA, 25 bp, Homo sapien
acagcgcagttcacaaccagtggat

SEQ ID NO: 571549 - DNA, 25 bp, Homo sapien
ttcacaaccagtggatgccgaacgc

SEQ ID NO: 571550 - DNA, 25 bp, Homo sapien
ggagccgccaggacagcgcagttca

SEQ ID NO: 571551 - DNA, 25 bp, Homo sapien
aagacacctgcatgcgtacgtttac

SEQ ID NO: 571552 - DNA, 25 bp, Homo sapien
cacgtgtccaccaacggacgactgg

SEQ ID NO: 571553 - DNA, 25 bp, Homo sapien
gctgaaccactcacaacagcaaaga

SEQ ID NO: 571554 - DNA, 25 bp, Homo sapien
caaagacacggaatccacgtgtcca

SEQ ID NO: 571555 - DNA, 25 bp, Homo sapien
cgatgggctgctcaacactcttggg

SEQ ID NO: 571556 - DNA, 25 bp, Homo sapien
ccgaggacgaaatcagatccaagaa

SEQ ID NO: 571557 - DNA, 25 bp, Homo sapien
tctcttctccccgaggacgaaatca

SEQ ID NO: 571558 - DNA, 25 bp, Homo sapien
cttctttaagcacgatgggctgctc

SEQ ID NO: 571559 - DNA, 25 bp, Homo sapien
cccacgcactgcgttcctgactgtg

SEQ ID NO: 571560 - DNA, 25 bp, Homo sapien
tggatgttccccacgcactgcgttc

SEQ ID NO: 571561 - DNA, 25 bp, Homo sapien
gtctggatgttccccacgcactgcg

SEQ ID NO: 571562 - DNA, 25 bp, Homo sapien
ctggatgttccccacgcaccgcgtt

SEQ ID NO: 571563 - DNA, 25 bp, Homo sapien
ggtcggagggtgagtcgatacttac

SEQ ID NO: 571564 - DNA, 25 bp, Homo sapien
gggcggtcggagggtgagtcgatac

SEQ ID NO: 571565 - DNA, 25 bp, Homo sapien
gcggtcggagggtgagtcgatactt

SEQ ID NO: 571566 - DNA, 25 bp, Homo sapien
cggtcggagggtgagtcgatactta

SEQ ID NO: 571567 - DNA, 25 bp, Homo sapien
gccatgtaggactccttaaaactcg

SEQ ID NO: 571568 - DNA, 25 bp, Homo sapien
ttgaagaattcataaaatgtagcca

SEQ ID NO: 571569 - DNA, 25 bp, Homo sapien
tcttcaccgcatcagcatatttctg

SEQ ID NO: 571570 - DNA, 25 bp, Homo sapien
cgcatcagcatatttctgctcattg

SEQ ID NO: 571571 - DNA, 25 bp, Homo sapien
cctgggaacctggagtcataggcca

SEQ ID NO: 571572 - DNA, 25 bp, Homo sapien
ccaggctcatgaagaggtacgttgg

SEQ ID NO: 571573 - DNA, 25 bp, Homo sapien
agtgcccgtgaggtctccaagcacc

SEQ ID NO: 571574 - DNA, 25 bp, Homo sapien
ttggcatcagtgactccgtcctggc

SEQ ID NO: 571575 - DNA, 25 bp, Homo sapien
gaacggtcttggagatcaatgtcag

SEQ ID NO: 571576 - DNA, 25 bp, Homo sapien
cttggacaggctgccgagggtctga

SEQ ID NO: 571577 - DNA, 25 bp, Homo sapien
aatgtcagcgtcctggacgtctggg

SEQ ID NO: 571578 - DNA, 25 bp, Homo sapien
agggtctgaacggtcttggagatca

SEQ ID NO: 571579 - DNA, 25 bp, Homo sapien
agagaatggcgggcgcaaagaacct

SEQ ID NO: 571580 - DNA, 25 bp, Homo sapien
tgtggtgcggcgtgagctggaagag

SEQ ID NO: 571581 - DNA, 25 bp, Homo sapien
tggcgggcgcaaagaacctcaggaa

SEQ ID NO: 571582 - DNA, 25 bp, Homo sapien
ctgcagtgtacctgacgtccgggtc

SEQ ID NO: 571583 - DNA, 25 bp, Homo sapien
caatggcctcgtggggacaccatgc

SEQ ID NO: 571584 - DNA, 25 bp, Homo sapien
cctgagggtccgcagggaagtccag

SEQ ID NO: 571585 - DNA, 25 bp, Homo sapien
gtgaccgttttcctcgggcacaatg

SEQ ID NO: 571586 - DNA, 25 bp, Homo sapien
tcctcgggcacaatggcctcgtggg

SEQ ID NO: 571587 - DNA, 25 bp, Homo sapien
tctccatctctctccgtctgtctct

SEQ ID NO: 571588 - DNA, 25 bp, Homo sapien
ctctctctctccgtctcgatctctc

SEQ ID NO: 571589 - DNA, 25 bp, Homo sapien
tctctctccgtctcgatctctctct

SEQ ID NO: 571590 - DNA, 25 bp, Homo sapien
tctccgtctcgatctctctctccat

SEQ ID NO: 571591 - DNA, 25 bp, Homo sapien
aagatgtcacacatgacggtcgggc

SEQ ID NO: 571592 - DNA, 25 bp, Homo sapien
atgacggtcgggcagctcaccccag

SEQ ID NO: 571593 - DNA, 25 bp, Homo sapien
tggcgtggaagacgcggtccacata

SEQ ID NO: 571594 - DNA, 25 bp, Homo sapien
ggtccacatactgccgtaggttctc

SEQ ID NO: 571595 - DNA, 25 bp, Homo sapien
ttctccgtctttcaacttcacaggg

SEQ ID NO: 571596 - DNA, 25 bp, Homo sapien
cacagggtcgatttcacagggtttg

SEQ ID NO: 571597 - DNA, 25 bp, Homo sapien
tctccgtctttcaacttcacagggt

SEQ ID NO: 571598 - DNA, 25 bp, Homo sapien
caacttcacagggtcgatttcacag

SEQ ID NO: 571599 - DNA, 25 bp, Homo sapien
cgccagcttcatggtctcgtcgatg

SEQ ID NO: 571600 - DNA, 25 bp, Homo sapien
tcgtcgatgcacttggacgccagtg

SEQ ID NO: 571601 - DNA, 25 bp, Homo sapien
ctcgatggcgggcttcagggtgaca

SEQ ID NO: 571602 - DNA, 25 bp, Homo sapien
gcaggtaatgcatccccgccagctt

SEQ ID NO: 571603 - DNA, 25 bp, Homo sapien
ctgggaaatggcgatggggacagcg

SEQ ID NO: 571604 - DNA, 25 bp, Homo sapien
tgggaaatggcgatggggacagcgt

SEQ ID NO: 571605 - DNA, 25 bp, Homo sapien
gggaaatggcgatggggacagcgtt

SEQ ID NO: 571606 - DNA, 25 bp, Homo sapien
tcagtgcacgcccatcagtcggctt

SEQ ID NO: 571607 - DNA, 25 bp, Homo sapien
tggaaccgtcctgtgtcaacactgc

SEQ ID NO: 571608 - DNA, 25 bp, Homo sapien
cattttacaaggagcacaaccaggc

SEQ ID NO: 571609 - DNA, 25 bp, Homo sapien
tgtgcagagagttgggcaccagacc

SEQ ID NO: 571610 - DNA, 25 bp, Homo sapien
tgtgggccgcagacgctgacacggg

SEQ ID NO: 571611 - DNA, 25 bp, Homo sapien
gcaccaccctgccatagtgtaggaa

SEQ ID NO: 571612 - DNA, 25 bp, Homo sapien
aaacctcgcccaggatgtgggccgc

SEQ ID NO: 571613 - DNA, 25 bp, Homo sapien
tggcactgatgaatggcaccaccct

SEQ ID NO: 571614 - DNA, 25 bp, Homo sapien
gggtctcacttccagccacaataga

SEQ ID NO: 571615 - DNA, 25 bp, Homo sapien
tcacttccagccacaatagatacgg

SEQ ID NO: 571616 - DNA, 25 bp, Homo sapien
cagccacaatagatacggctctttg

SEQ ID NO: 571617 - DNA, 25 bp, Homo sapien
ttccagccacaatagatacggctct

SEQ ID NO: 571618 - DNA, 25 bp, Homo sapien
ccacaggccacggcgtggacaagca

SEQ ID NO: 571619 - DNA, 25 bp, Homo sapien
cacaggccacggcgtggacaagcac

SEQ ID NO: 571620 - DNA, 25 bp, Homo sapien
gtgtataccacgttcagccgcaggg

SEQ ID NO: 571621 - DNA, 25 bp, Homo sapien
gcaggtcccgcagagggctgtaata

SEQ ID NO: 571622 - DNA, 25 bp, Homo sapien
tagtcagaagaaaacacgtggtctt

SEQ ID NO: 571623 - DNA, 25 bp, Homo sapien
cacatccgcagacttcaacagcagg

SEQ ID NO: 571624 - DNA, 25 bp, Homo sapien
aaacaatggcctgttccttccacca

SEQ ID NO: 571625 - DNA, 25 bp, Homo sapien
tgaaacaatggcctgttccttccac

SEQ ID NO: 571626 - DNA, 25 bp, Homo sapien
gaaacaatggcctgttccttccacc

SEQ ID NO: 571627 - DNA, 25 bp, Homo sapien
gggcagaaactcatcaagccagagc

SEQ ID NO: 571628 - DNA, 25 bp, Homo sapien
gaaactcatcaagccagagctcgtc

SEQ ID NO: 571629 - DNA, 25 bp, Homo sapien
tgtggggcagaaactcatcaagcca

SEQ ID NO: 571630 - DNA, 25 bp, Homo sapien
ctcatcaagccagagctcgtcagag

SEQ ID NO: 571631 - DNA, 25 bp, Homo sapien
acgcctcgtaggagctggactgccg

SEQ ID NO: 571632 - DNA, 25 bp, Homo sapien
tgccgcaggactttcaacgggatcc

SEQ ID NO: 571633 - DNA, 25 bp, Homo sapien
caggttactggcattccagaggtca

SEQ ID NO: 571634 - DNA, 25 bp, Homo sapien
atctccaaacttcaggttactggca

SEQ ID NO: 571635 - DNA, 25 bp, Homo sapien
aaaaacagcatcaggacagctctag

SEQ ID NO: 571636 - DNA, 25 bp, Homo sapien
tgaaaaacagcatcaggacagctct

SEQ ID NO: 571637 - DNA, 25 bp, Homo sapien
ctgaaaaacagcatcaggacagctc

SEQ ID NO: 571638 - DNA, 25 bp, Homo sapien
gaaaaacagcatcaggacagctcta

SEQ ID NO: 571639 - DNA, 25 bp, Homo sapien
cggcaggcctaaccacactgtgggc

SEQ ID NO: 571640 - DNA, 25 bp, Homo sapien
gctaaaactcggcaggcctaaccac

SEQ ID NO: 571641 - DNA, 25 bp, Homo sapien
taaaactcggcaggcctaaccacac

SEQ ID NO: 571642 - DNA, 25 bp, Homo sapien
aactcggcaggcctaaccacactgt

SEQ ID NO: 571643 - DNA, 25 bp, Homo sapien
tgctgtagctacagggccgggtcac

SEQ ID NO: 571644 - DNA, 25 bp, Homo sapien
agtcaaagtgggacttcttgctgta

SEQ ID NO: 571645 - DNA, 25 bp, Homo sapien
gatttcgagcttgtccacgtcttcc

SEQ ID NO: 571646 - DNA, 25 bp, Homo sapien
ctgatttcgagcttgtccacgtctt

SEQ ID NO: 571647 - DNA, 25 bp, Homo sapien
ggcgccaggcgggattcgggattca

SEQ ID NO: 571648 - DNA, 25 bp, Homo sapien
gcgggattcgggattcaggcctggc

SEQ ID NO: 571649 - DNA, 25 bp, Homo sapien
ccaggcgggattcgggattcaggcc

SEQ ID NO: 571650 - DNA, 25 bp, Homo sapien
caggaaggcgccaggcgggattcgg

SEQ ID NO: 571651 - DNA, 25 bp, Homo sapien
cgctgcttcccatagaaacggaaca

SEQ ID NO: 571652 - DNA, 25 bp, Homo sapien
cagtaggtggctgtctgaccacagc

SEQ ID NO: 571653 - DNA, 25 bp, Homo sapien
agaaaatggtacagacgctgcttcc

SEQ ID NO: 571654 - DNA, 25 bp, Homo sapien
gctcccagtaggtggctgtctgacc

SEQ ID NO: 571655 - DNA, 25 bp, Homo sapien
gacgcagaccatggttttcagactg

SEQ ID NO: 571656 - DNA, 25 bp, Homo sapien
caagcgtgatgagcacccgtgtgtg

SEQ ID NO: 571657 - DNA, 25 bp, Homo sapien
taccccactgtgtgtatgacagctc

SEQ ID NO: 571658 - DNA, 25 bp, Homo sapien
ctaaattgctcctgtaggctgagac

SEQ ID NO: 571659 - DNA, 25 bp, Homo sapien
gaacatctgcctaaaggccctgcac

SEQ ID NO: 571660 - DNA, 25 bp, Homo sapien
gattttggtgcttcatgttctgaga

SEQ ID NO: 571661 - DNA, 25 bp, Homo sapien
gcctgtgcaccggaatgtttgtgga

SEQ ID NO: 571662 - DNA, 25 bp, Homo sapien
acgagatgcagccatcccaaacggg

SEQ ID NO: 571663 - DNA, 25 bp, Homo sapien
aaacacttcatcgaactggggattg

SEQ ID NO: 571664 - DNA, 25 bp, Homo sapien
aacacttcatcgaactggggattgt

SEQ ID NO: 571665 - DNA, 25 bp, Homo sapien
ataaaacacttcatcgaactgggga

SEQ ID NO: 571666 - DNA, 25 bp, Homo sapien
taaaacacttcatcgaactggggat

SEQ ID NO: 571667 - DNA, 25 bp, Homo sapien
cccattcacgatggggaggccctgg

SEQ ID NO: 571668 - DNA, 25 bp, Homo sapien
gtggcgtaggggtcacattgcccat

SEQ ID NO: 571669 - DNA, 25 bp, Homo sapien
gcccattcacgatggggaggccctg

SEQ ID NO: 571670 - DNA, 25 bp, Homo sapien
taggggtcacattgcccattcacga

SEQ ID NO: 571671 - DNA, 25 bp, Homo sapien
gtgtctgtgatgacctcgctcagcc

SEQ ID NO: 571672 - DNA, 25 bp, Homo sapien
gtgatgacctcgctcagccgcagct

SEQ ID NO: 571673 - DNA, 25 bp, Homo sapien
tgtggcagacgaccccagtgtctgt

SEQ ID NO: 571674 - DNA, 25 bp, Homo sapien
ttgtggcagacgaccccagtgtctg

SEQ ID NO: 571675 - DNA, 25 bp, Homo sapien
tgtctgcctgtgtttgcatgaaact

SEQ ID NO: 571676 - DNA, 25 bp, Homo sapien
tgcgtgtccgtctgtgtgcacacgg

SEQ ID NO: 571677 - DNA, 25 bp, Homo sapien
tgtgggcgtgcgattgtgtgtgcgt

SEQ ID NO: 571678 - DNA, 25 bp, Homo sapien
ctatgtgtctgtgtgggcgtgcgat

SEQ ID NO: 571679 - DNA, 25 bp, Homo sapien
tgtgtgccgctgtccctgtatttgc

SEQ ID NO: 571680 - DNA, 25 bp, Homo sapien
tgtgccgctgtccctgtatttgctc

SEQ ID NO: 571681 - DNA, 25 bp, Homo sapien
gtgtgtgccgctgtccctgtatttg

SEQ ID NO: 571682 - DNA, 25 bp, Homo sapien
ctgtgtgtgccgctgtccctgtatt

SEQ ID NO: 571683 - DNA, 25 bp, Homo sapien
cctgaacccggctctattctgaatt

SEQ ID NO: 571684 - DNA, 25 bp, Homo sapien
ggtcaaactgacatacggcctccat

SEQ ID NO: 571685 - DNA, 25 bp, Homo sapien
aaacgctctatatccgacccatggg

SEQ ID NO: 571686 - DNA, 25 bp, Homo sapien
ttctgaaacccttgcctgtgaaccc

SEQ ID NO: 571687 - DNA, 25 bp, Homo sapien
gtgtggccttcccgccctgtggctg

SEQ ID NO: 571688 - DNA, 25 bp, Homo sapien
gccacaaggatgttgggccgggaag

SEQ ID NO: 571689 - DNA, 25 bp, Homo sapien
tgttgggccgggaaggtgggcatga

SEQ ID NO: 571690 - DNA, 25 bp, Homo sapien
ggtgggcatgaaccccacgccagca

SEQ ID NO: 571691 - DNA, 25 bp, Homo sapien
gccttggatgcaggactgttccacg

SEQ ID NO: 571692 - DNA, 25 bp, Homo sapien
gacaggatgcagaggccatgaggaa

SEQ ID NO: 571693 - DNA, 25 bp, Homo sapien
aggactgttccacgccggccgcaga

SEQ ID NO: 571694 - DNA, 25 bp, Homo sapien
ccgcagagaggagacgaagtccgcg

SEQ ID NO: 571695 - DNA, 25 bp, Homo sapien
ccactggcatctgacgctggcgtct

SEQ ID NO: 571696 - DNA, 25 bp, Homo sapien
tggcgtctcccccgctggccctgca

SEQ ID NO: 571697 - DNA, 25 bp, Homo sapien
gctgtcacaggcggtgccctcgctg

SEQ ID NO: 571698 - DNA, 25 bp, Homo sapien
cgcggatgcctcgctgtcacaggcg

SEQ ID NO: 571699 - DNA, 25 bp, Homo sapien
ctcgctgtccggacacaggactgtt

SEQ ID NO: 571700 - DNA, 25 bp, Homo sapien
tgtgacactcgctgtccggacacag

SEQ ID NO: 571701 - DNA, 25 bp, Homo sapien
gcttctgtgacactcgctgtccgga

SEQ ID NO: 571702 - DNA, 25 bp, Homo sapien
tgacactcgctgtccggacacagga

SEQ ID NO: 571703 - DNA, 25 bp, Homo sapien
atcacagagcggagggactcatgga

SEQ ID NO: 571704 - DNA, 25 bp, Homo sapien
ggaatcacagagcggagggactcat

SEQ ID NO: 571705 - DNA, 25 bp, Homo sapien
ctgggaatcacagagcggagggact

SEQ ID NO: 571706 - DNA, 25 bp, Homo sapien
agcggagggactcatggagccacat

SEQ ID NO: 571707 - DNA, 25 bp, Homo sapien
cgacggcgggtatcccagaatagaa

SEQ ID NO: 571708 - DNA, 25 bp, Homo sapien
ctttctgccgggacgccaaggtccg

SEQ ID NO: 571709 - DNA, 25 bp, Homo sapien
tcagaggccgttgtgacggagaccc

SEQ ID NO: 571710 - DNA, 25 bp, Homo sapien
ttgaatccgaggcaaacgacgaggc

SEQ ID NO: 571711 - DNA, 25 bp, Homo sapien
tctgcagtaatcacagcgtccttca

SEQ ID NO: 571712 - DNA, 25 bp, Homo sapien
acagcacgtgtgggttccccagcca

SEQ ID NO: 571713 - DNA, 25 bp, Homo sapien
agtaatcacagcgtccttcactttc

SEQ ID NO: 571714 - DNA, 25 bp, Homo sapien
tgcagtaatcacagcgtccttcact

SEQ ID NO: 571715 - DNA, 25 bp, Homo sapien
ccacagctgggctcatggtcaactt

SEQ ID NO: 571716 - DNA, 25 bp, Homo sapien
caacttcatgaatgaaccctttgct

SEQ ID NO: 571717 - DNA, 25 bp, Homo sapien
agctgggctcatggtcaacttcatg

SEQ ID NO: 571718 - DNA, 25 bp, Homo sapien
catgaatgaaccctttgctggccat

SEQ ID NO: 571719 - DNA, 25 bp, Homo sapien
cctacactcagacgctcactgcggt

SEQ ID NO: 571720 - DNA, 25 bp, Homo sapien
tcagacacttactgtggtcccagct

SEQ ID NO: 571721 - DNA, 25 bp, Homo sapien
gctccctctgttacaggcaagcctg

SEQ ID NO: 571722 - DNA, 25 bp, Homo sapien
ccaggaagccgtccggtgtcccagg

SEQ ID NO: 571723 - DNA, 25 bp, Homo sapien
acttccgagtcagcgtccacgtgct

SEQ ID NO: 571724 - DNA, 25 bp, Homo sapien
ttccgagtcagcgtccacgtgctgc

SEQ ID NO: 571725 - DNA, 25 bp, Homo sapien
ccgagtcagcgtccacgtgctgcag

SEQ ID NO: 571726 - DNA, 25 bp, Homo sapien
tgcacttccgagtcagcgtccacgt

SEQ ID NO: 571727 - DNA, 25 bp, Homo sapien
agaagacttcaccacgggcacaggc

SEQ ID NO: 571728 - DNA, 25 bp, Homo sapien
tgcaacacaagcagagaagacttca

SEQ ID NO: 571729 - DNA, 25 bp, Homo sapien
ctgcaacacaagcagagaagacttc

SEQ ID NO: 571730 - DNA, 25 bp, Homo sapien
aagcagagaagacttcaccacgggc

SEQ ID NO: 571731 - DNA, 25 bp, Homo sapien
tacccggacgtagatacagcacaca

SEQ ID NO: 571732 - DNA, 25 bp, Homo sapien
tgagggcaggcgagagccaaatcaa

SEQ ID NO: 571733 - DNA, 25 bp, Homo sapien
ctctaatggcgcagaccacgagggt

SEQ ID NO: 571734 - DNA, 25 bp, Homo sapien
tcatgggttcctaagatcagcctgg

SEQ ID NO: 571735 - DNA, 25 bp, Homo sapien
tataaacggagctggtgacgaggcc

SEQ ID NO: 571736 - DNA, 25 bp, Homo sapien
ttcttctgagaacacccttggaggc

SEQ ID NO: 571737 - DNA, 25 bp, Homo sapien
cattagcctccgctgaataatctgg

SEQ ID NO: 571738 - DNA, 25 bp, Homo sapien
ccctgtggattctcgagtataaacg

SEQ ID NO: 571739 - DNA, 25 bp, Homo sapien
agccgcatttcagggccagggtgtc

SEQ ID NO: 571740 - DNA, 25 bp, Homo sapien
tgcactcagacaccttctgcagccg

SEQ ID NO: 571741 - DNA, 25 bp, Homo sapien
cttctgcagccgcatttcagggcca

SEQ ID NO: 571742 - DNA, 25 bp, Homo sapien
gggtcaggtgcccgctgcactcaga

SEQ ID NO: 571743 - DNA, 25 bp, Homo sapien
agtaacctgaagtccactctgccca

SEQ ID NO: 571744 - DNA, 25 bp, Homo sapien
aaggagctccccgagtaacctgaag

SEQ ID NO: 571745 - DNA, 25 bp, Homo sapien
tgctgcgtgaggtctgctcctgacg

SEQ ID NO: 571746 - DNA, 25 bp, Homo sapien
gcgtcacggcgggaattagcctgat

SEQ ID NO: 571747 - DNA, 25 bp, Homo sapien
gccgccttcctgtgataccaggcag

SEQ ID NO: 571748 - DNA, 25 bp, Homo sapien
aggatgccgccttcctgtgatacca

SEQ ID NO: 571749 - DNA, 25 bp, Homo sapien
ttcctgtgataccaggcagggctgc

SEQ ID NO: 571750 - DNA, 25 bp, Homo sapien
catgagctttctccaagagcagccc

SEQ ID NO: 571751 - DNA, 25 bp, Homo sapien
gaaagctccgaggaatttcacagta

SEQ ID NO: 571752 - DNA, 25 bp, Homo sapien
tgatggaatccctccggaaaacgtc

SEQ ID NO: 571753 - DNA, 25 bp, Homo sapien
tcacagtaaaagtcttctccgtaaa

SEQ ID NO: 571754 - DNA, 25 bp, Homo sapien
tagaaggacaggtgacgaaagctcc

SEQ ID NO: 571755 - DNA, 25 bp, Homo sapien
ctccacagagaccacggccactgcc

SEQ ID NO: 571756 - DNA, 25 bp, Homo sapien
gagaccacggccactgccagaatga

SEQ ID NO: 571757 - DNA, 25 bp, Homo sapien
ggccactgccagaatgacttccatg

SEQ ID NO: 571758 - DNA, 25 bp, Homo sapien
actgccagaatgacttccatgctac

SEQ ID NO: 571759 - DNA, 25 bp, Homo sapien
ggtctaggtgcagcctcagggccat

SEQ ID NO: 571760 - DNA, 25 bp, Homo sapien
aggtctaggtgcagcctcagggcca

SEQ ID NO: 571761 - DNA, 25 bp, Homo sapien
ctcaggtctaggtgcagcctcaggg

SEQ ID NO: 571762 - DNA, 25 bp, Homo sapien
gtgctcaggtctaggtgcagcctca

SEQ ID NO: 571763 - DNA, 25 bp, Homo sapien
tgatgtttcgaaggtacctggtttg

SEQ ID NO: 571764 - DNA, 25 bp, Homo sapien
ggctccctttatgcattaaacataa

SEQ ID NO: 571765 - DNA, 25 bp, Homo sapien
cgtgatgtttcgaaggtacctggtt

SEQ ID NO: 571766 - DNA, 25 bp, Homo sapien
tggctccctttatgcattaaacata

SEQ ID NO: 571767 - DNA, 25 bp, Homo sapien
cccccgctgctgactgtacttagag

SEQ ID NO: 571768 - DNA, 25 bp, Homo sapien
gactgtacttagagtcctcgctcct

SEQ ID NO: 571769 - DNA, 25 bp, Homo sapien
ttaaaccaggagatacggcacaggc

SEQ ID NO: 571770 - DNA, 25 bp, Homo sapien
gcacaggcataagcccaaacctggg

SEQ ID NO: 571771 - DNA, 25 bp, Homo sapien
tccatgtcattagcccttgagaaaa

SEQ ID NO: 571772 - DNA, 25 bp, Homo sapien
ttgaacacacatatcaccaaagaca

SEQ ID NO: 571773 - DNA, 25 bp, Homo sapien
cattctcgcgttggtcgttgacgca

SEQ ID NO: 571774 - DNA, 25 bp, Homo sapien
gtcgttgacgcagcgagccatcctc

SEQ ID NO: 571775 - DNA, 25 bp, Homo sapien
tttaaacacattctcgcgttggtcg

SEQ ID NO: 571776 - DNA, 25 bp, Homo sapien
tggtcgttgacgcagcgagccatcc

SEQ ID NO: 571777 - DNA, 25 bp, Homo sapien
tactcacaggacaagcgttaacaat

SEQ ID NO: 571778 - DNA, 25 bp, Homo sapien
tgtacgtcctagagcaactttcagg

SEQ ID NO: 571779 - DNA, 25 bp, Homo sapien
ggcctcaggtgacgagctactcaca

SEQ ID NO: 571780 - DNA, 25 bp, Homo sapien
ttaatattcacgacaaggcctcagg

SEQ ID NO: 571781 - DNA, 25 bp, Homo sapien
agctctgggccttgcggcaaatgcg

SEQ ID NO: 571782 - DNA, 25 bp, Homo sapien
tgcgtaaccaaaaggcgtaaatcaa

SEQ ID NO: 571783 - DNA, 25 bp, Homo sapien
gccttgcggcaaatgcgtaaccaaa

SEQ ID NO: 571784 - DNA, 25 bp, Homo sapien
cgtaaatcaagcttcgttcaccatg

SEQ ID NO: 571785 - DNA, 25 bp, Homo sapien
agaaccaccggcaccgatagccaag

SEQ ID NO: 571786 - DNA, 25 bp, Homo sapien
ccagcagccggcttgtcaggaagct

SEQ ID NO: 571787 - DNA, 25 bp, Homo sapien
ctgccagagaatggaacggacgccc

SEQ ID NO: 571788 - DNA, 25 bp, Homo sapien
gcctcggggttcacctggcgcgtca

SEQ ID NO: 571789 - DNA, 25 bp, Homo sapien
tgggagggtcccgtgaggcttctgg

SEQ ID NO: 571790 - DNA, 25 bp, Homo sapien
gcagggctgagagtgcggcgtccct

SEQ ID NO: 571791 - DNA, 25 bp, Homo sapien
ctctgtaactctgcttggcagtggg

SEQ ID NO: 571792 - DNA, 25 bp, Homo sapien
tcagttgctctgccaaaggctctgc

SEQ ID NO: 571793 - DNA, 25 bp, Homo sapien
gccagccttatcaacggagctctga

SEQ ID NO: 571794 - DNA, 25 bp, Homo sapien
tacaggccttgcactcattttaatg

SEQ ID NO: 571795 - DNA, 25 bp, Homo sapien
tgtgaccaagcttcattcccacgag

SEQ ID NO: 571796 - DNA, 25 bp, Homo sapien
tgtttcctgcgggtcacctcaagtc

SEQ ID NO: 571797 - DNA, 25 bp, Homo sapien
gggtggtgagttcccaggtcacttc

SEQ ID NO: 571798 - DNA, 25 bp, Homo sapien
catcagtcagctcctagaatggcag

SEQ ID NO: 571799 - DNA, 25 bp, Homo sapien
caggtgtgcgttttcctcactgtcc

SEQ ID NO: 571800 - DNA, 25 bp, Homo sapien
cattcattttagcacggaggccaga

SEQ ID NO: 571801 - DNA, 25 bp, Homo sapien
cccgagatgccatgagccccatgga

SEQ ID NO: 571802 - DNA, 25 bp, Homo sapien
gagatgccatgagccccatggagac

SEQ ID NO: 571803 - DNA, 25 bp, Homo sapien
ctgcaaacggagcaccagagtgaca

SEQ ID NO: 571804 - DNA, 25 bp, Homo sapien
aaacggagcaccagagtgacatccc

SEQ ID NO: 571805 - DNA, 25 bp, Homo sapien
tccagcaggaagagcggattcctcg

SEQ ID NO: 571806 - DNA, 25 bp, Homo sapien
gtcaccaccatccacgcgtccagca

SEQ ID NO: 571807 - DNA, 25 bp, Homo sapien
tgaggctcaccactcacgttgtctg

SEQ ID NO: 571808 - DNA, 25 bp, Homo sapien
gattcctcgggcgtgaggctcacca

SEQ ID NO: 571809 - DNA, 25 bp, Homo sapien
tcaaagagacagtaacaagggtagg

SEQ ID NO: 571810 - DNA, 25 bp, Homo sapien
cttgtgcaaaggtcaagtggccaca

SEQ ID NO: 571811 - DNA, 25 bp, Homo sapien
cccaggtgtgcagcaatagacatca

SEQ ID NO: 571812 - DNA, 25 bp, Homo sapien
caaagaaaatcagacccaccgggat

SEQ ID NO: 571813 - DNA, 25 bp, Homo sapien
aattggctgtggcaattgttgcaca

SEQ ID NO: 571814 - DNA, 25 bp, Homo sapien
actgacacgaaatgcccaagagagg

SEQ ID NO: 571815 - DNA, 25 bp, Homo sapien
tgcaggccggaaactggaggattac

SEQ ID NO: 571816 - DNA, 25 bp, Homo sapien
tgtacggtgcttgaattatacctca

SEQ ID NO: 571817 - DNA, 25 bp, Homo sapien
atcttgctcggccccgggtaagagg

SEQ ID NO: 571818 - DNA, 25 bp, Homo sapien
gtagcaatccctcatcttgctcggc

SEQ ID NO: 571819 - DNA, 25 bp, Homo sapien
tcaccgtgcagtagcaatccctcat

SEQ ID NO: 571820 - DNA, 25 bp, Homo sapien
ccaggttcaccgtgcagtagcaatc

SEQ ID NO: 571821 - DNA, 25 bp, Homo sapien
aagtcaaaatgtggatgtgcacccc

SEQ ID NO: 571822 - DNA, 25 bp, Homo sapien
tgtgcaccccatgtgtactgccgaa

SEQ ID NO: 571823 - DNA, 25 bp, Homo sapien
ctgccgaaaggcgagggacatgcac

SEQ ID NO: 571824 - DNA, 25 bp, Homo sapien
tctaatgcaagtcccgcaagcaggg

SEQ ID NO: 571825 - DNA, 25 bp, Homo sapien
aagccccagggtctggacaacgcct

SEQ ID NO: 571826 - DNA, 25 bp, Homo sapien
gcagagataaactcagtttgaagct

SEQ ID NO: 571827 - DNA, 25 bp, Homo sapien
cagcaactccaaagggcagagataa

SEQ ID NO: 571828 - DNA, 25 bp, Homo sapien
aatattaacctgaggcactgtgaga

SEQ ID NO: 571829 - DNA, 25 bp, Homo sapien
gctgagtctggagtatcgactccct

SEQ ID NO: 571830 - DNA, 25 bp, Homo sapien
gagtctggagtatcgactcccttcg

SEQ ID NO: 571831 - DNA, 25 bp, Homo sapien
ggagtatcgactcccttcgtcctcg

SEQ ID NO: 571832 - DNA, 25 bp, Homo sapien
gagtctggagtatcgactcccttcc

SEQ ID NO: 571833 - DNA, 25 bp, Homo sapien
gggcgcccgcccgacaccaccacaa

SEQ ID NO: 571834 - DNA, 25 bp, Homo sapien
agtgccagcaggaacgagcctgcct

SEQ ID NO: 571835 - DNA, 25 bp, Homo sapien
aggctgacatggggctgacggctcc

SEQ ID NO: 571836 - DNA, 25 bp, Homo sapien
gctgacatggggctgacggctcccg

SEQ ID NO: 571837 - DNA, 25 bp, Homo sapien
gccacataaggaaggttctcagtct

SEQ ID NO: 571838 - DNA, 25 bp, Homo sapien
cacataaggaaggttctcagtcttc

SEQ ID NO: 571839 - DNA, 25 bp, Homo sapien
ggccacataaggaaggttctcagtc

SEQ ID NO: 571840 - DNA, 25 bp, Homo sapien
cataaggaaggttctcagtcttccc

SEQ ID NO: 571841 - DNA, 25 bp, Homo sapien
tgtttgaatgatccatcagggcctg

SEQ ID NO: 571842 - DNA, 25 bp, Homo sapien
tcactgcttgagtttggaagtatcc

SEQ ID NO: 571843 - DNA, 25 bp, Homo sapien
tatggccccaccttggtaggttgta

SEQ ID NO: 571844 - DNA, 25 bp, Homo sapien
tatcaggtaacactaacctcactgc

SEQ ID NO: 571845 - DNA, 25 bp, Homo sapien
ctattacttcaatctgttaactttc

SEQ ID NO: 571846 - DNA, 25 bp, Homo sapien
cagttctgctactaatgctctctct

SEQ ID NO: 571847 - DNA, 25 bp, Homo sapien
ttctgctctaagatttccatttgat

SEQ ID NO: 571848 - DNA, 25 bp, Homo sapien
tgattcctccttctatttgatcagt

SEQ ID NO: 571849 - DNA, 25 bp, Homo sapien
tctcatagcgctcagtactggggac

SEQ ID NO: 571850 - DNA, 25 bp, Homo sapien
ttctcatagcgctcagtactgggga

SEQ ID NO: 571851 - DNA, 25 bp, Homo sapien
cttctcatagcgctcagtactgggg

SEQ ID NO: 571852 - DNA, 25 bp, Homo sapien
ctcatagcgctcagtactggggacc

SEQ ID NO: 571853 - DNA, 25 bp, Homo sapien
ttgcccgggatgcagacgctgagac

SEQ ID NO: 571854 - DNA, 25 bp, Homo sapien
cagggccacacagttgcccgggatg

SEQ ID NO: 571855 - DNA, 25 bp, Homo sapien
acacagttgcccgggatgcagacgc

SEQ ID NO: 571856 - DNA, 25 bp, Homo sapien
agggccacacagttgcccgggatgc

SEQ ID NO: 571857 - DNA, 25 bp, Homo sapien
ccgaatggtaaatggaggagctcgc

SEQ ID NO: 571858 - DNA, 25 bp, Homo sapien
cgcgccgatgtggatgcctctgtgc

SEQ ID NO: 571859 - DNA, 25 bp, Homo sapien
cgccgatgtggatgcctctgtgcca

SEQ ID NO: 571860 - DNA, 25 bp, Homo sapien
caaactctgcgcaataggaagacgc

SEQ ID NO: 571861 - DNA, 25 bp, Homo sapien
gctctgccctgggtgaggctctaga

SEQ ID NO: 571862 - DNA, 25 bp, Homo sapien
catgcccagtcctctcaggaagttc

SEQ ID NO: 571863 - DNA, 25 bp, Homo sapien
caggctgccaggatcagaggaagca

SEQ ID NO: 571864 - DNA, 25 bp, Homo sapien
attcctgtggaagcgactgtgtcta

SEQ ID NO: 571865 - DNA, 25 bp, Homo sapien
gaggacactctggaccctgtgtctg

SEQ ID NO: 571866 - DNA, 25 bp, Homo sapien
caggagttcttctgatacctcgagg

SEQ ID NO: 571867 - DNA, 25 bp, Homo sapien
agggtgtggcgacgacacagccctc

SEQ ID NO: 571868 - DNA, 25 bp, Homo sapien
gcacagcctaactcaggagcaggga

SEQ ID NO: 571869 - DNA, 25 bp, Homo sapien
catctctcagctcaaagggtttcca

SEQ ID NO: 571870 - DNA, 25 bp, Homo sapien
tgtttccacggatgaggcttctctg

SEQ ID NO: 571871 - DNA, 25 bp, Homo sapien
tctcagatttcagccggacgggaac

SEQ ID NO: 571872 - DNA, 25 bp, Homo sapien
aaaaagcaacactcgccgttcagag

SEQ ID NO: 571873 - DNA, 25 bp, Homo sapien
tgcggcctgacggagccgctccttc

SEQ ID NO: 571874 - DNA, 25 bp, Homo sapien
tattttctttctcggccttggcgtc

SEQ ID NO: 571875 - DNA, 25 bp, Homo sapien
tggacgcccgctgcggcctgacgga

SEQ ID NO: 571876 - DNA, 25 bp, Homo sapien
ccacagccgacactgttcttgcaat

SEQ ID NO: 571877 - DNA, 25 bp, Homo sapien
tgtgccaccggatctcacgagaact

SEQ ID NO: 571878 - DNA, 25 bp, Homo sapien
gttcatataaatccaccctcaagat

SEQ ID NO: 571879 - DNA, 25 bp, Homo sapien
tgctgcaagccgtacaggaagtatg

SEQ ID NO: 571880 - DNA, 25 bp, Homo sapien
gggatagcgctgagctgttcatata

SEQ ID NO: 571881 - DNA, 25 bp, Homo sapien
aggcagccagccctgcaggtgacct

SEQ ID NO: 571882 - DNA, 25 bp, Homo sapien
caggcagccagccctgcaggtgacc

SEQ ID NO: 571883 - DNA, 25 bp, Homo sapien
tcaggcagccagccctgcaggtgac

SEQ ID NO: 571884 - DNA, 25 bp, Homo sapien
gcccccgtgactgaggaagcccagt

SEQ ID NO: 571885 - DNA, 25 bp, Homo sapien
tgcccccgtgactgaggaagcccag

SEQ ID NO: 571886 - DNA, 25 bp, Homo sapien
gacagacgtccctcggcgcagggac

SEQ ID NO: 571887 - DNA, 25 bp, Homo sapien
gcgcgcgcactcctgcaaacacgcg

SEQ ID NO: 571888 - DNA, 25 bp, Homo sapien
aaacacgcggggcacacgctcgggc

SEQ ID NO: 571889 - DNA, 25 bp, Homo sapien
gcgcacacgcggacagacgtccctc

SEQ ID NO: 571890 - DNA, 25 bp, Homo sapien
cggggccgctccgggcgcagaggag

SEQ ID NO: 571891 - DNA, 25 bp, Homo sapien
ccgctccgggcgcagaggaggcgca

SEQ ID NO: 571892 - DNA, 25 bp, Homo sapien
ctcctccgccgctaccagggaccgg

SEQ ID NO: 571893 - DNA, 25 bp, Homo sapien
agaggaggcgcagggagccgcgtta

SEQ ID NO: 571894 - DNA, 25 bp, Homo sapien
gcgcctggagggcgtctccgccggg

SEQ ID NO: 571895 - DNA, 25 bp, Homo sapien
gccgcggagccggaccagccgttct

SEQ ID NO: 571896 - DNA, 25 bp, Homo sapien
ggagccgactcgacccagcccgagg

SEQ ID NO: 571897 - DNA, 25 bp, Homo sapien
accagccgttctccggggagcgcgc

SEQ ID NO: 571898 - DNA, 25 bp, Homo sapien
tcttgatcttcacgctctggaagac

SEQ ID NO: 571899 - DNA, 25 bp, Homo sapien
cgagcctcgccccaagcgcgcgccg

SEQ ID NO: 571900 - DNA, 25 bp, Homo sapien
cgcccgccgagcctcgccccaagcg

SEQ ID NO: 571901 - DNA, 25 bp, Homo sapien
gcgcgccgagcccgggcagctcagg

SEQ ID NO: 571902 - DNA, 25 bp, Homo sapien
ccgagcgcggccgagggtccgcccg

SEQ ID NO: 571903 - DNA, 25 bp, Homo sapien
ttaaccgtgtagaaggcagagctcc

SEQ ID NO: 571904 - DNA, 25 bp, Homo sapien
tgctgttccaagctctggaccctga

SEQ ID NO: 571905 - DNA, 25 bp, Homo sapien
tgctcggcctcggaaggtgctgttc

SEQ ID NO: 571906 - DNA, 25 bp, Homo sapien
ttgttccaggttcgggtgctcggcc

SEQ ID NO: 571907 - DNA, 25 bp, Homo sapien
ggcccagacgtcagcagggctggag

SEQ ID NO: 571908 - DNA, 25 bp, Homo sapien
gctgaggtgcacagtcaccctcacc

SEQ ID NO: 571909 - DNA, 25 bp, Homo sapien
tgctggcggctgaggtgcacagtca

SEQ ID NO: 571910 - DNA, 25 bp, Homo sapien
tcccggcaaatgagcactcctctcc

SEQ ID NO: 571911 - DNA, 25 bp, Homo sapien
tgttctcagacacagcggtgagtgt

SEQ ID NO: 571912 - DNA, 25 bp, Homo sapien
tcaggtttagatccactgccgaaat

SEQ ID NO: 571913 - DNA, 25 bp, Homo sapien
tttaccaggaccagacaaccttggc

SEQ ID NO: 571914 - DNA, 25 bp, Homo sapien
tcttctctgttcaggtggaggcatt

SEQ ID NO: 571915 - DNA, 25 bp, Homo sapien
atctcagtgttactggggctgaagg

SEQ ID NO: 571916 - DNA, 25 bp, Homo sapien
aatctcagtgttactggggctgaag

SEQ ID NO: 571917 - DNA, 25 bp, Homo sapien
caatctcagtgttactggggctgaa

SEQ ID NO: 571918 - DNA, 25 bp, Homo sapien
tctcagtgttactggggctgaaggc

SEQ ID NO: 571919 - DNA, 25 bp, Homo sapien
gggtgatagcccctcagtctgccag

SEQ ID NO: 571920 - DNA, 25 bp, Homo sapien
caagtgatgctttactgttggtccc

SEQ ID NO: 571921 - DNA, 25 bp, Homo sapien
taaccgccagagatcctgttaagca

SEQ ID NO: 571922 - DNA, 25 bp, Homo sapien
gacctgggactttcagcgttgaagc

SEQ ID NO: 571923 - DNA, 25 bp, Homo sapien
ggactttgtttcaatccaactgggc

SEQ ID NO: 571924 - DNA, 25 bp, Homo sapien
atctgccagcacctctattcctgtt

SEQ ID NO: 571925 - DNA, 25 bp, Homo sapien
gctacacgtttctccttggactttg

SEQ ID NO: 571926 - DNA, 25 bp, Homo sapien
ttctctttggggctacacgtttctc

SEQ ID NO: 571927 - DNA, 25 bp, Homo sapien
cccagcttgtgagaacgctcacgtt

SEQ ID NO: 571928 - DNA, 25 bp, Homo sapien
agaacgctcacgttggccctccgtg

SEQ ID NO: 571929 - DNA, 25 bp, Homo sapien
cgcaattgttccactgcctcgtcat

SEQ ID NO: 571930 - DNA, 25 bp, Homo sapien
ctcgtcattcgtccccagcttgtga

SEQ ID NO: 571931 - DNA, 25 bp, Homo sapien
cggcggccacagcggcggggggcgg

SEQ ID NO: 571932 - DNA, 25 bp, Homo sapien
tccccgcggcggccacagcggcggg

SEQ ID NO: 571933 - DNA, 25 bp, Homo sapien
ccgcggcggccacagcggcgggggg

SEQ ID NO: 571934 - DNA, 25 bp, Homo sapien
gcggcggccacagcggcggggggcg

SEQ ID NO: 571935 - DNA, 25 bp, Homo sapien
tgctgtgtaaatattgtgcctgagg

SEQ ID NO: 571936 - DNA, 25 bp, Homo sapien
cccttgacctcggtgtgaggcggct

SEQ ID NO: 571937 - DNA, 25 bp, Homo sapien
gtgtaaatattgtgcctgagggcca

SEQ ID NO: 571938 - DNA, 25 bp, Homo sapien
tgaggcggctgcgactgggtctctg

SEQ ID NO: 571939 - DNA, 25 bp, Homo sapien
aatttcctccactgggagcatgagc

SEQ ID NO: 571940 - DNA, 25 bp, Homo sapien
taaaaatttcctccactgggagcat

SEQ ID NO: 571941 - DNA, 25 bp, Homo sapien
tcctccactgggagcatgagcataa

SEQ ID NO: 571942 - DNA, 25 bp, Homo sapien
cctccactgggagcatgagcataaa

SEQ ID NO: 571943 - DNA, 25 bp, Homo sapien
tgcaagcacatttgccctccaaagg

SEQ ID NO: 571944 - DNA, 25 bp, Homo sapien
tgtttgtaaaccactcttctgcaga

SEQ ID NO: 571945 - DNA, 25 bp, Homo sapien
gaatgagaacgaagttgctgcttgg

SEQ ID NO: 571946 - DNA, 25 bp, Homo sapien
tctggaaatcaatgtttgcaagcac

SEQ ID NO: 571947 - DNA, 25 bp, Homo sapien
tggtcagtgggttgcaggtaaccat

SEQ ID NO: 571948 - DNA, 25 bp, Homo sapien
aagtccaagagcagacgtgagtcga

SEQ ID NO: 571949 - DNA, 25 bp, Homo sapien
aaccataggccagccgagggtggca

SEQ ID NO: 571950 - DNA, 25 bp, Homo sapien
tccaagagcagacgtgagtcgagtg

SEQ ID NO: 571951 - DNA, 25 bp, Homo sapien
cgtgggtggacagcatgggtggcag

SEQ ID NO: 571952 - DNA, 25 bp, Homo sapien
tgggtgacagccgtgggtggacagc

SEQ ID NO: 571953 - DNA, 25 bp, Homo sapien
cgtgggtggcagctaggactccttc

SEQ ID NO: 571954 - DNA, 25 bp, Homo sapien
gcagccgtgggtggcagctaggact

SEQ ID NO: 571955 - DNA, 25 bp, Homo sapien
tgtgagtggacagctaggactcctt

SEQ ID NO: 571956 - DNA, 25 bp, Homo sapien
tctgactccgagtcccagctgagga

SEQ ID NO: 571957 - DNA, 25 bp, Homo sapien
gaggaaccagccaatagcatggaca

SEQ ID NO: 571958 - DNA, 25 bp, Homo sapien
tgactgtcaggtatttgtcgagcac

SEQ ID NO: 571959 - DNA, 25 bp, Homo sapien
atccaccaaccgatggcagcagcaa

SEQ ID NO: 571960 - DNA, 25 bp, Homo sapien
tggagaagaagatcccactcttcac

SEQ ID NO: 571961 - DNA, 25 bp, Homo sapien
cccagtggagaagaagatcccactc

SEQ ID NO: 571962 - DNA, 25 bp, Homo sapien
agtggagaagaagatcccactcttc

SEQ ID NO: 571963 - DNA, 25 bp, Homo sapien
ccagtggagaagaagatcccactct

SEQ ID NO: 571964 - DNA, 25 bp, Homo sapien
gcgtgttgtttgagaatcccagact

SEQ ID NO: 571965 - DNA, 25 bp, Homo sapien
tggacgccatgacaactgtcacatg

SEQ ID NO: 571966 - DNA, 25 bp, Homo sapien
tcacatgaccctgcaaacacagcgt

SEQ ID NO: 571967 - DNA, 25 bp, Homo sapien
attattcttcgcgtgttgtttgaga

SEQ ID NO: 571968 - DNA, 25 bp, Homo sapien
ctcagtggaggcgtcagagaacgat

SEQ ID NO: 571969 - DNA, 25 bp, Homo sapien
tggaggcgtcagagaacgatgttcc

SEQ ID NO: 571970 - DNA, 25 bp, Homo sapien
cagagaacgatgttccatgtatcat

SEQ ID NO: 571971 - DNA, 25 bp, Homo sapien
cgtcagagaacgatgttccatgtat

SEQ ID NO: 571972 - DNA, 25 bp, Homo sapien
ctgacccctcagccaggctggccat

SEQ ID NO: 571973 - DNA, 25 bp, Homo sapien
ggaatccctggtgccacgaaagacc

SEQ ID NO: 571974 - DNA, 25 bp, Homo sapien
ccctggtgccacgaaagaccccaga

SEQ ID NO: 571975 - DNA, 25 bp, Homo sapien
ctggtgccacgaaagaccccagagc

SEQ ID NO: 571976 - DNA, 25 bp, Homo sapien
ggtgccacgaaagaccccagagcag

SEQ ID NO: 571977 - DNA, 25 bp, Homo sapien
tgtttccaatactgcgcccaggtaa

SEQ ID NO: 571978 - DNA, 25 bp, Homo sapien
agcgcccagccgctggtagacaccc

SEQ ID NO: 571979 - DNA, 25 bp, Homo sapien
ccgcgccccgctgacgttccgccat

SEQ ID NO: 571980 - DNA, 25 bp, Homo sapien
gcccaggtaacgctgcctcctcatg

SEQ ID NO: 571981 - DNA, 25 bp, Homo sapien
cgttccaatccatgggcaaagcagc

SEQ ID NO: 571982 - DNA, 25 bp, Homo sapien
cgtgacagtgggtccccgtgcgtac

SEQ ID NO: 571983 - DNA, 25 bp, Homo sapien
cacccaatgcgttccaatccatggg

SEQ ID NO: 571984 - DNA, 25 bp, Homo sapien
tccctgtgtgttcggtccccgctta

SEQ ID NO: 571985 - DNA, 25 bp, Homo sapien
gcgtaacagggcgtcccctcgcgta

SEQ ID NO: 571986 - DNA, 25 bp, Homo sapien
acagtgggtccctgtgtgttcggtc

SEQ ID NO: 571987 - DNA, 25 bp, Homo sapien
cagtgggtccctgtgtgttcggtcc

SEQ ID NO: 571988 - DNA, 25 bp, Homo sapien
tgcaaatggcaagggaccagggtca

SEQ ID NO: 571989 - DNA, 25 bp, Homo sapien
tggccttctctggtcagctggatgt

SEQ ID NO: 571990 - DNA, 25 bp, Homo sapien
tctctggtcagctggatgtgtatgg

SEQ ID NO: 571991 - DNA, 25 bp, Homo sapien
caaatggcaagggaccagggtcact

SEQ ID NO: 571992 - DNA, 25 bp, Homo sapien
tgtatgggatcagggaggagttctt

SEQ ID NO: 571993 - DNA, 25 bp, Homo sapien
gtatgggatcagggaggagttcttg

SEQ ID NO: 571994 - DNA, 25 bp, Homo sapien
tatgggatcagggaggagttcttgc

SEQ ID NO: 571995 - DNA, 25 bp, Homo sapien
ctgtatgggatcagggaggagttct

SEQ ID NO: 571996 - DNA, 25 bp, Homo sapien
atggcagcagtgtccccgcatccac

SEQ ID NO: 571997 - DNA, 25 bp, Homo sapien
tgtcacatggagaggaaggtcctga

SEQ ID NO: 571998 - DNA, 25 bp, Homo sapien
tcacatggagaggaaggtcctgatg

SEQ ID NO: 571999 - DNA, 25 bp, Homo sapien
aatgtcacatggagaggaaggtcct

SEQ ID NO: 572000 - DNA, 25 bp, Homo sapien
ctaaatgtcacatggagaggaaggt

SEQ ID NO: 572001 - DNA, 25 bp, Homo sapien
tgctcgttctggctccaccgttgtg

SEQ ID NO: 572002 - DNA, 25 bp, Homo sapien
cagtgtggcgctcattctgtgctcg

SEQ ID NO: 572003 - DNA, 25 bp, Homo sapien
ttaccacgggcaccacagttgtcat

SEQ ID NO: 572004 - DNA, 25 bp, Homo sapien
ctttaccacgggcaccacagttgtc

SEQ ID NO: 572005 - DNA, 25 bp, Homo sapien
tgctgaccacgctcaggaagcaccg

SEQ ID NO: 572006 - DNA, 25 bp, Homo sapien
tgctctgctgaccacgctcaggaag

SEQ ID NO: 572007 - DNA, 25 bp, Homo sapien
agcaccgggagacttccccgctgtg

SEQ ID NO: 572008 - DNA, 25 bp, Homo sapien
accacgctcaggaagcaccgggaga

SEQ ID NO: 572009 - DNA, 25 bp, Homo sapien
gctctgtgattgttcctttaacaaa

SEQ ID NO: 572010 - DNA, 25 bp, Homo sapien
cttaaaagctctgtgattgttcctt

SEQ ID NO: 572011 - DNA, 25 bp, Homo sapien
aaaagctctgtgattgttcctttaa

SEQ ID NO: 572012 - DNA, 25 bp, Homo sapien
aagctctgtgattgttcctttaaca

SEQ ID NO: 572013 - DNA, 25 bp, Homo sapien
tgtccttggtttgcaagcctcgaat

SEQ ID NO: 572014 - DNA, 25 bp, Homo sapien
cctccttttcgaggtggcagtttag

SEQ ID NO: 572015 - DNA, 25 bp, Homo sapien
tccacgtctgtgctaaacttgatgg

SEQ ID NO: 572016 - DNA, 25 bp, Homo sapien
gaaaaaatggcctctccatagcgat

SEQ ID NO: 572017 - DNA, 25 bp, Homo sapien
tggttgatgctttctgttgccccgt

SEQ ID NO: 572018 - DNA, 25 bp, Homo sapien
gatgctttctgttgccccgtttcgt

SEQ ID NO: 572019 - DNA, 25 bp, Homo sapien
tacttctccacctggttgatgcttt

SEQ ID NO: 572020 - DNA, 25 bp, Homo sapien
ttacttctccacctggttgatgctt

SEQ ID NO: 572021 - DNA, 25 bp, Homo sapien
cattagtgtttaatgtggtgacagc

SEQ ID NO: 572022 - DNA, 25 bp, Homo sapien
gtaatctcagtgactcaagagcctg

SEQ ID NO: 572023 - DNA, 25 bp, Homo sapien
cttgtttactaaatggatgttaatg

SEQ ID NO: 572024 - DNA, 25 bp, Homo sapien
caagaataaatactagctgggcaca

SEQ ID NO: 572025 - DNA, 25 bp, Homo sapien
aatactgtatctcccaaaatcttga

SEQ ID NO: 572026 - DNA, 25 bp, Homo sapien
gaactcttgatattaatgccgtaaa

SEQ ID NO: 572027 - DNA, 25 bp, Homo sapien
tgaaatcttgaactcttgatattaa

SEQ ID NO: 572028 - DNA, 25 bp, Homo sapien
gcagtttaccccattgcattttagt

SEQ ID NO: 572029 - DNA, 25 bp, Homo sapien
tacccctgatatgggacactgactg

SEQ ID NO: 572030 - DNA, 25 bp, Homo sapien
ggagaacattcaccagtctagactg

SEQ ID NO: 572031 - DNA, 25 bp, Homo sapien
gattaggttctggttgcagtgtccc

SEQ ID NO: 572032 - DNA, 25 bp, Homo sapien
cactgactgtcacctaagagggtgg

SEQ ID NO: 572033 - DNA, 25 bp, Homo sapien
aaaagtgctacgtattggtagttat

SEQ ID NO: 572034 - DNA, 25 bp, Homo sapien
aaattatatgccatatacatttctg

SEQ ID NO: 572035 - DNA, 25 bp, Homo sapien
gctacgtattggtagttatgcatat

SEQ ID NO: 572036 - DNA, 25 bp, Homo sapien
agtgctacgtattggtagttatgca

SEQ ID NO: 572037 - DNA, 25 bp, Homo sapien
tcagcctgtaacctgacagaaattt

SEQ ID NO: 572038 - DNA, 25 bp, Homo sapien
gcgaagtctgtattcctgaggttct

SEQ ID NO: 572039 - DNA, 25 bp, Homo sapien
gaatatgacactgcagtagctctgg

SEQ ID NO: 572040 - DNA, 25 bp, Homo sapien
tctcctcagggattgcttctgttac

SEQ ID NO: 572041 - DNA, 25 bp, Homo sapien
aagtcagtggtcacagacggatgcc

SEQ ID NO: 572042 - DNA, 25 bp, Homo sapien
gccagagcacagaatcgagtttaaa

SEQ ID NO: 572043 - DNA, 25 bp, Homo sapien
caacttgtggataagcccagccaga

SEQ ID NO: 572044 - DNA, 25 bp, Homo sapien
gtttagtcccagacacacctggtag

SEQ ID NO: 572045 - DNA, 25 bp, Homo sapien
tctttgtagtggtttttatcaacgc

SEQ ID NO: 572046 - DNA, 25 bp, Homo sapien
tgctgtgtgcccatcgcagtgcagc

SEQ ID NO: 572047 - DNA, 25 bp, Homo sapien
catgggtccctgttgtctgggaacc

SEQ ID NO: 572048 - DNA, 25 bp, Homo sapien
agcgctgagcacttcgcatgggtcc

SEQ ID NO: 572049 - DNA, 25 bp, Homo sapien
cacagcggcagtgataaagagcaca

SEQ ID NO: 572050 - DNA, 25 bp, Homo sapien
ccaaccggcggtttactgcagttgc

SEQ ID NO: 572051 - DNA, 25 bp, Homo sapien
tgaatcataggtcacacagcggcag

SEQ ID NO: 572052 - DNA, 25 bp, Homo sapien
ttgctgatcatttgtgttgaatcat

SEQ ID NO: 572053 - DNA, 25 bp, Homo sapien
tgtggatgacggcaggaggcacaga

SEQ ID NO: 572054 - DNA, 25 bp, Homo sapien
cacgagcctgaacggctttccagaa

SEQ ID NO: 572055 - DNA, 25 bp, Homo sapien
cttggaagagtaacatgccctctta

SEQ ID NO: 572056 - DNA, 25 bp, Homo sapien
agctcgcttccgagcgcgagagtgt

SEQ ID NO: 572057 - DNA, 25 bp, Homo sapien
gagtgtggcggaaacaggaggatct

SEQ ID NO: 572058 - DNA, 25 bp, Homo sapien
gaaacaggaggatctgcaaggcaga

SEQ ID NO: 572059 - DNA, 25 bp, Homo sapien
ggatgaatgaagactcagacatcac

SEQ ID NO: 572060 - DNA, 25 bp, Homo sapien
taccaggtaatggtcgatggccaat

SEQ ID NO: 572061 - DNA, 25 bp, Homo sapien
tagagctttgaccatcgaatcccgc

SEQ ID NO: 572062 - DNA, 25 bp, Homo sapien
catcttggtgctggacagtaagtac

SEQ ID NO: 572063 - DNA, 25 bp, Homo sapien
cgttgtgtggtcatgaacagcgtga

SEQ ID NO: 572064 - DNA, 25 bp, Homo sapien
ttcgggaggccgctgcgctgcaggg

SEQ ID NO: 572065 - DNA, 25 bp, Homo sapien
cctgcatccagtcgccattcgggag

SEQ ID NO: 572066 - DNA, 25 bp, Homo sapien
tgaggagcgagagcgagcgggggag

SEQ ID NO: 572067 - DNA, 25 bp, Homo sapien
cgcgcggtccatcgcccactggacg

SEQ ID NO: 572068 - DNA, 25 bp, Homo sapien
tttgccctttggttggtatgcgcct

SEQ ID NO: 572069 - DNA, 25 bp, Homo sapien
ggtcttttccaacggcctctacatc

SEQ ID NO: 572070 - DNA, 25 bp, Homo sapien
gttggtatgcgccttcacatcattc

SEQ ID NO: 572071 - DNA, 25 bp, Homo sapien
ggaatgtcccatgcatagaggtctt

SEQ ID NO: 572072 - DNA, 25 bp, Homo sapien
cctcagatatctggaagcctgttct

SEQ ID NO: 572073 - DNA, 25 bp, Homo sapien
gatactgagcctagaaaacctgccc

SEQ ID NO: 572074 - DNA, 25 bp, Homo sapien
agcctgttctctctatcgatactga

SEQ ID NO: 572075 - DNA, 25 bp, Homo sapien
gcttctccagaagcacgcaaacgtg

SEQ ID NO: 572076 - DNA, 25 bp, Homo sapien
taagaccaggttgataagtaggaac

SEQ ID NO: 572077 - DNA, 25 bp, Homo sapien
acatgtatggtgtaccgtgtttcac

SEQ ID NO: 572078 - DNA, 25 bp, Homo sapien
tactcctgggccttacatgtcgcct

SEQ ID NO: 572079 - DNA, 25 bp, Homo sapien
caagagcaagttgtactcaaagcat

SEQ ID NO: 572080 - DNA, 25 bp, Homo sapien
agggagatccgcagaccctcttggc

SEQ ID NO: 572081 - DNA, 25 bp, Homo sapien
gaggatctgcaaataccaacagttt

SEQ ID NO: 572082 - DNA, 25 bp, Homo sapien
tcaggtttgcagtcttaggagatcg

SEQ ID NO: 572083 - DNA, 25 bp, Homo sapien
tatacacacaatttgctaagcaggg

SEQ ID NO: 572084 - DNA, 25 bp, Homo sapien
gaggaggacgtgtgaaggttgaaaa

SEQ ID NO: 572085 - DNA, 25 bp, Homo sapien
tgtgaaggttgaaaaccaggtaata

SEQ ID NO: 572086 - DNA, 25 bp, Homo sapien
aggacgtgtgaaggttgaaaaccag

SEQ ID NO: 572087 - DNA, 25 bp, Homo sapien
ccctgaggaggacgtgtgaaggttg

SEQ ID NO: 572088 - DNA, 25 bp, Homo sapien
cctcccactttcatggagataaccg

SEQ ID NO: 572089 - DNA, 25 bp, Homo sapien
ttattccttaatctgttctccagcc

SEQ ID NO: 572090 - DNA, 25 bp, Homo sapien
ctcccactttcatggagataaccga

SEQ ID NO: 572091 - DNA, 25 bp, Homo sapien
tattccttaatctgttctccagcca

SEQ ID NO: 572092 - DNA, 25 bp, Homo sapien
cagacccagcaaaaggcaaggcaac

SEQ ID NO: 572093 - DNA, 25 bp, Homo sapien
tttcctggcaccagacccagcaaaa

SEQ ID NO: 572094 - DNA, 25 bp, Homo sapien
ggcaaggcaacaggaagcagcccat

SEQ ID NO: 572095 - DNA, 25 bp, Homo sapien
aaggcaaggcaacaggaagcagccc

SEQ ID NO: 572096 - DNA, 25 bp, Homo sapien
aagctacagtaaagtggcaacctaa

SEQ ID NO: 572097 - DNA, 25 bp, Homo sapien
ggaagctacagtaaagtggcaacct

SEQ ID NO: 572098 - DNA, 25 bp, Homo sapien
attaggaagctacagtaaagtggca

SEQ ID NO: 572099 - DNA, 25 bp, Homo sapien
aggagcagcattgccgagagccagg

SEQ ID NO: 572100 - DNA, 25 bp, Homo sapien
cagtgcgctcaaagtatttggccac

SEQ ID NO: 572101 - DNA, 25 bp, Homo sapien
gcagtgcgctcaaagtatttggcca

SEQ ID NO: 572102 - DNA, 25 bp, Homo sapien
gcaaacccatgccagggtgtgtaat

SEQ ID NO: 572103 - DNA, 25 bp, Homo sapien
agcacgtgtcgtgcaaacccatgcc

SEQ ID NO: 572104 - DNA, 25 bp, Homo sapien
ccagggtgtgtaattcactgtagcc

SEQ ID NO: 572105 - DNA, 25 bp, Homo sapien
tgctggcttccagcacgtgtcgtgc

SEQ ID NO: 572106 - DNA, 25 bp, Homo sapien
ctctgtccctcgaggtggtgctgtc

SEQ ID NO: 572107 - DNA, 25 bp, Homo sapien
tgtgctgagcggatacaagtgcggc

SEQ ID NO: 572108 - DNA, 25 bp, Homo sapien
gcggcgagcttgcacagccttacaa

SEQ ID NO: 572109 - DNA, 25 bp, Homo sapien
tagagcccctctcatgctggtgaca

SEQ ID NO: 572110 - DNA, 25 bp, Homo sapien
aatggttgcccgaattcacccagac

SEQ ID NO: 572111 - DNA, 25 bp, Homo sapien
tccacggtccaaatggttgcccgaa

SEQ ID NO: 572112 - DNA, 25 bp, Homo sapien
ggtcctcagccgcacgcaggcagtt

SEQ ID NO: 572113 - DNA, 25 bp, Homo sapien
gcacgcaggcagttttctccacggt

SEQ ID NO: 572114 - DNA, 25 bp, Homo sapien
tgctcatcagcataaccatcctcca

SEQ ID NO: 572115 - DNA, 25 bp, Homo sapien
ggtccgccagccagaaaatggcctc

SEQ ID NO: 572116 - DNA, 25 bp, Homo sapien
tcatgaaggatgtgtcaaggaagag

SEQ ID NO: 572117 - DNA, 25 bp, Homo sapien
gaagagcgtgttggagttctgactc

SEQ ID NO: 572118 - DNA, 25 bp, Homo sapien
ttgactgagctgctctgtctgctcc

SEQ ID NO: 572119 - DNA, 25 bp, Homo sapien
gacccctccaggatgggtccagagg

SEQ ID NO: 572120 - DNA, 25 bp, Homo sapien
tctgctaatgaagtagcaactcgag

SEQ ID NO: 572121 - DNA, 25 bp, Homo sapien
ggtccagaggccttctgctaatgaa

SEQ ID NO: 572122 - DNA, 25 bp, Homo sapien
cctcttggcgtcagcgaaggctctg

SEQ ID NO: 572123 - DNA, 25 bp, Homo sapien
ctcttggcgtcagcgaaggctctgc

SEQ ID NO: 572124 - DNA, 25 bp, Homo sapien
gcctcttggcgtcagcgaaggctct

SEQ ID NO: 572125 - DNA, 25 bp, Homo sapien
cccagcggtcggctcgcctccctct

SEQ ID NO: 572126 - DNA, 25 bp, Homo sapien
cagcccagcggtcggctcgcctccc

SEQ ID NO: 572127 - DNA, 25 bp, Homo sapien
agcagcccagcggtcggctcgcctc

SEQ ID NO: 572128 - DNA, 25 bp, Homo sapien
cagcggtcggctcgcctccctctcc

SEQ ID NO: 572129 - DNA, 25 bp, Homo sapien
ccgccgccgcctgcgccctgcctgc

SEQ ID NO: 572130 - DNA, 25 bp, Homo sapien
gcccgccgccgcctgcgccctgcct

SEQ ID NO: 572131 - DNA, 25 bp, Homo sapien
gccgccgcctgcgccctgcctgcgc

SEQ ID NO: 572132 - DNA, 25 bp, Homo sapien
cccgccgccgcctgcgccctgcctg

SEQ ID NO: 572133 - DNA, 25 bp, Homo sapien
tcgatacgctctcgctgggtgtgga

SEQ ID NO: 572134 - DNA, 25 bp, Homo sapien
tcgtcgatacgctctcgctgggtgt

SEQ ID NO: 572135 - DNA, 25 bp, Homo sapien
atacgctctcgctgggtgtggatga

SEQ ID NO: 572136 - DNA, 25 bp, Homo sapien
cagctcgtcgatacgctctcgctgg

SEQ ID NO: 572137 - DNA, 25 bp, Homo sapien
ggcggcaggagcggtggccggagcg

SEQ ID NO: 572138 - DNA, 25 bp, Homo sapien
ggcagcggggccgatgacgggggga

SEQ ID NO: 572139 - DNA, 25 bp, Homo sapien
gagcggtggccggagcggccggcag

SEQ ID NO: 572140 - DNA, 25 bp, Homo sapien
cagcggggccgatgacggggggacg

SEQ ID NO: 572141 - DNA, 25 bp, Homo sapien
atcgggcgcgggatgcggcgcggct

SEQ ID NO: 572142 - DNA, 25 bp, Homo sapien
ccttgtcagtcacggccccttgtgt

SEQ ID NO: 572143 - DNA, 25 bp, Homo sapien
agcgcagcaactcgggggacgctcc

SEQ ID NO: 572144 - DNA, 25 bp, Homo sapien
tccgtggtgctgacgcggcggccga

SEQ ID NO: 572145 - DNA, 25 bp, Homo sapien
gaagggtgtccaatcaggtcagaga

SEQ ID NO: 572146 - DNA, 25 bp, Homo sapien
cagggagatttaaacaggcatggca

SEQ ID NO: 572147 - DNA, 25 bp, Homo sapien
gattccgagcaggaccaactgagtg

SEQ ID NO: 572148 - DNA, 25 bp, Homo sapien
ggacccaaggcaagatttcagtgat

SEQ ID NO: 572149 - DNA, 25 bp, Homo sapien
cattagcaatggtgattccgtcctg

SEQ ID NO: 572150 - DNA, 25 bp, Homo sapien
gaaacatgtcattagcaatggtgat

SEQ ID NO: 572151 - DNA, 25 bp, Homo sapien
catgtcattagcaatggtgattccg

SEQ ID NO: 572152 - DNA, 25 bp, Homo sapien
tagcaatggtgattccgtcctgagc

SEQ ID NO: 572153 - DNA, 25 bp, Homo sapien
ctccctctccatggagatctctgtc

SEQ ID NO: 572154 - DNA, 25 bp, Homo sapien
atggagatctctgtctgcctgctgg

SEQ ID NO: 572155 - DNA, 25 bp, Homo sapien
cctctccatggagatctctgtctgc

SEQ ID NO: 572156 - DNA, 25 bp, Homo sapien
gctggctccatcttgtcctgcatca

SEQ ID NO: 572157 - DNA, 25 bp, Homo sapien
tccaagaccaccacctttgtgtctc

SEQ ID NO: 572158 - DNA, 25 bp, Homo sapien
ccaagaccaccacctttgtgtctcc

SEQ ID NO: 572159 - DNA, 25 bp, Homo sapien
gagtgagacaatcagggtttcccag

SEQ ID NO: 572160 - DNA, 25 bp, Homo sapien
gtgacctttgaaactcgggctgcgc

SEQ ID NO: 572161 - DNA, 25 bp, Homo sapien
tgagcatgggccatacgatgccacc

SEQ ID NO: 572162 - DNA, 25 bp, Homo sapien
gcaaatctttgcaagtggtcacact

SEQ ID NO: 572163 - DNA, 25 bp, Homo sapien
tatctgtagaaatactgcaatgtat

SEQ ID NO: 572164 - DNA, 25 bp, Homo sapien
gaaatactgcaatgtattgagcact

SEQ ID NO: 572165 - DNA, 25 bp, Homo sapien
aaacagtactaaataaatgatatgt

SEQ ID NO: 572166 - DNA, 25 bp, Homo sapien
cagctgatctgccatcttggtttct

SEQ ID NO: 572167 - DNA, 25 bp, Homo sapien
agaaaacccacaaccacacatcagg

SEQ ID NO: 572168 - DNA, 25 bp, Homo sapien
acttggagaaattgattcagcctca

SEQ ID NO: 572169 - DNA, 25 bp, Homo sapien
gacaagtcagtgtaccttctcctag

SEQ ID NO: 572170 - DNA, 25 bp, Homo sapien
ctcctagatgagactgtaattttcc

SEQ ID NO: 572171 - DNA, 25 bp, Homo sapien
caagcaggaaattcccacccgcttt

SEQ ID NO: 572172 - DNA, 25 bp, Homo sapien
aagcaggaaattcccacccgctttg

SEQ ID NO: 572173 - DNA, 25 bp, Homo sapien
actgtcggagatgccagatgatgcc

SEQ ID NO: 572174 - DNA, 25 bp, Homo sapien
gatgccagatgatgccggttcggaa

SEQ ID NO: 572175 - DNA, 25 bp, Homo sapien
catcaagactgtcggagatgccaga

SEQ ID NO: 572176 - DNA, 25 bp, Homo sapien
catgcgttaagtcgcatcaagactg

SEQ ID NO: 572177 - DNA, 25 bp, Homo sapien
tctacctgtctctggaaatcccttt

SEQ ID NO: 572178 - DNA, 25 bp, Homo sapien
ggcaagaaggaggaccaagaacgtc

SEQ ID NO: 572179 - DNA, 25 bp, Homo sapien
ggcttctaggtcagagtccagctgc

SEQ ID NO: 572180 - DNA, 25 bp, Homo sapien
tgctgacctcagtactcaggagttc

SEQ ID NO: 572181 - DNA, 25 bp, Homo sapien
gagccagctggagcgtcctttctgt

SEQ ID NO: 572182 - DNA, 25 bp, Homo sapien
cagctggagcgtcctttctgtggct

SEQ ID NO: 572183 - DNA, 25 bp, Homo sapien
ctgagccagctggagcgtcctttct

SEQ ID NO: 572184 - DNA, 25 bp, Homo sapien
gccagctggagcgtcctttctgtgg

SEQ ID NO: 572185 - DNA, 25 bp, Homo sapien
gaagtccgtgcagaatttacctcgt

SEQ ID NO: 572186 - DNA, 25 bp, Homo sapien
ccggctggagatttctggggtctta

SEQ ID NO: 572187 - DNA, 25 bp, Homo sapien
ggtcttagatgtggaagtccgtgca

SEQ ID NO: 572188 - DNA, 25 bp, Homo sapien
gcagaatttacctcgttctgcccca

SEQ ID NO: 572189 - DNA, 25 bp, Homo sapien
gccgcagcgccgaagccccttccga

SEQ ID NO: 572190 - DNA, 25 bp, Homo sapien
ccgaaggccgcggccccgatgctcc

SEQ ID NO: 572191 - DNA, 25 bp, Homo sapien
cgcggccccgatgctccccgggctg

SEQ ID NO: 572192 - DNA, 25 bp, Homo sapien
cgcagcgccgaagccccttccgagc

SEQ ID NO: 572193 - DNA, 25 bp, Homo sapien
cggagaagcacttgccgaatcgtat

SEQ ID NO: 572194 - DNA, 25 bp, Homo sapien
gctggagttttcagacggagaagca

SEQ ID NO: 572195 - DNA, 25 bp, Homo sapien
cgaatcgtatttctgctgcaactga

SEQ ID NO: 572196 - DNA, 25 bp, Homo sapien
cagatgctaacaccctgatggctcc

SEQ ID NO: 572197 - DNA, 25 bp, Homo sapien
gatgagtgggccacgggccaaattc

SEQ ID NO: 572198 - DNA, 25 bp, Homo sapien
ttcatcttgtggctgcatgtgggtg

SEQ ID NO: 572199 - DNA, 25 bp, Homo sapien
ggggacctgtaaaccattcatcttg

SEQ ID NO: 572200 - DNA, 25 bp, Homo sapien
catatgggccacgcagggatgtgat

SEQ ID NO: 572201 - DNA, 25 bp, Homo sapien
gtcctgaccaatagcaacactgcat

SEQ ID NO: 572202 - DNA, 25 bp, Homo sapien
gaatggcgaaggcaagtcctgacca

SEQ ID NO: 572203 - DNA, 25 bp, Homo sapien
tgtttctccaggaatggcgaaggca

SEQ ID NO: 572204 - DNA, 25 bp, Homo sapien
gctgtgggcacgcagtgtttctcca

SEQ ID NO: 572205 - DNA, 25 bp, Homo sapien
aggcatctcccaagcgagatgggag

SEQ ID NO: 572206 - DNA, 25 bp, Homo sapien
ggaggctgtgttccttggccatcaa

SEQ ID NO: 572207 - DNA, 25 bp, Homo sapien
gtaggaggctgtgttccttggccat

SEQ ID NO: 572208 - DNA, 25 bp, Homo sapien
cgagatgggagtcaatggtctgcac

SEQ ID NO: 572209 - DNA, 25 bp, Homo sapien
ctagtcgtgctgtgaggctgggctg

SEQ ID NO: 572210 - DNA, 25 bp, Homo sapien
tagtcgtgctgtgaggctgggctgg

SEQ ID NO: 572211 - DNA, 25 bp, Homo sapien
caggatgtcccatcagaatctgtcc

SEQ ID NO: 572212 - DNA, 25 bp, Homo sapien
aggatgtcccatcagaatctgtcca

SEQ ID NO: 572213 - DNA, 25 bp, Homo sapien
ggatgtcccatcagaatctgtccac

SEQ ID NO: 572214 - DNA, 25 bp, Homo sapien
tcggcggctgggcagcagaactggt

SEQ ID NO: 572215 - DNA, 25 bp, Homo sapien
gaactggtgcagcacggtctcattc

SEQ ID NO: 572216 - DNA, 25 bp, Homo sapien
caggtcggagcaggcgtcggcggct

SEQ ID NO: 572217 - DNA, 25 bp, Homo sapien
gggaggccaggtcggagcaggcgtc

SEQ ID NO: 572218 - DNA, 25 bp, Homo sapien
ttgtggctatgctctggaggtggga

SEQ ID NO: 572219 - DNA, 25 bp, Homo sapien
tggctatgctctggaggtgggacag

SEQ ID NO: 572220 - DNA, 25 bp, Homo sapien
tgggaagttgtggctatgctctgga

SEQ ID NO: 572221 - DNA, 25 bp, Homo sapien
aagttgtggctatgctctggaggtg

SEQ ID NO: 572222 - DNA, 25 bp, Homo sapien
gagacaaatgggctctatgctggga

SEQ ID NO: 572223 - DNA, 25 bp, Homo sapien
cttcctcatcttggccccattatca

SEQ ID NO: 572224 - DNA, 25 bp, Homo sapien
acccttgagacaaatgggctctatg

SEQ ID NO: 572225 - DNA, 25 bp, Homo sapien
agctggccagctaccgggtcattgt

SEQ ID NO: 572226 - DNA, 25 bp, Homo sapien
ggatggtgccttcaaagcaaagaag

SEQ ID NO: 572227 - DNA, 25 bp, Homo sapien
ctctcggcctgccagggagacggat

SEQ ID NO: 572228 - DNA, 25 bp, Homo sapien
ggagacggatggtgccttcaaagca

SEQ ID NO: 572229 - DNA, 25 bp, Homo sapien
gcaggggtggcgtggaatacaaaca

SEQ ID NO: 572230 - DNA, 25 bp, Homo sapien
gggaccaggtctccggggcgagtgc

SEQ ID NO: 572231 - DNA, 25 bp, Homo sapien
accaggtctccggggcgagtgcctt

SEQ ID NO: 572232 - DNA, 25 bp, Homo sapien
gagggtactccacaggagaggcagc

SEQ ID NO: 572233 - DNA, 25 bp, Homo sapien
tgggagagggtactccacaggagag

SEQ ID NO: 572234 - DNA, 25 bp, Homo sapien
ctggctggccctggccgtgaaaaat

SEQ ID NO: 572235 - DNA, 25 bp, Homo sapien
ggctggccctggccgtgaaaaatct

SEQ ID NO: 572236 - DNA, 25 bp, Homo sapien
ctggccctggccgtgaaaaatcttc

SEQ ID NO: 572237 - DNA, 25 bp, Homo sapien
ggccctggccgtgaaaaatcttcat

SEQ ID NO: 572238 - DNA, 25 bp, Homo sapien
accggcctgggtgcaggagccatca

SEQ ID NO: 572239 - DNA, 25 bp, Homo sapien
caccggcctgggtgcaggagccatc

SEQ ID NO: 572240 - DNA, 25 bp, Homo sapien
cccaccggcctgggtgcaggagcca

SEQ ID NO: 572241 - DNA, 25 bp, Homo sapien
gcccccaccggcctgggtgcaggag

SEQ ID NO: 572242 - DNA, 25 bp, Homo sapien
gggcacagcgccgtcgccagggcag

SEQ ID NO: 572243 - DNA, 25 bp, Homo sapien
tcctgggcttgagccttcggggcat

SEQ ID NO: 572244 - DNA, 25 bp, Homo sapien
agagttcgtaatcggaggcggcagg

SEQ ID NO: 572245 - DNA, 25 bp, Homo sapien
tattctttaggtcaagggagagttc

SEQ ID NO: 572246 - DNA, 25 bp, Homo sapien
ggtgaccgccgtacttatgttctag

SEQ ID NO: 572247 - DNA, 25 bp, Homo sapien
tcttgctgagctggtattggcggaa

SEQ ID NO: 572248 - DNA, 25 bp, Homo sapien
tagccctccatgagcgctttctcgg

SEQ ID NO: 572249 - DNA, 25 bp, Homo sapien
aggcggctctccagaagcgagttgc

SEQ ID NO: 572250 - DNA, 25 bp, Homo sapien
tgctgagcgcgtcgtcgatggactt

SEQ ID NO: 572251 - DNA, 25 bp, Homo sapien
acctgctcggtgaaggagtcctcca

SEQ ID NO: 572252 - DNA, 25 bp, Homo sapien
cctccagctcggtgagggtgcctgc

SEQ ID NO: 572253 - DNA, 25 bp, Homo sapien
tggacttggccagggattgcacctg

SEQ ID NO: 572254 - DNA, 25 bp, Homo sapien
gtctccgcggcgtcatccccgggcc

SEQ ID NO: 572255 - DNA, 25 bp, Homo sapien
ggtctccgcggcgtcatccccgggc

SEQ ID NO: 572256 - DNA, 25 bp, Homo sapien
tctccgcggcgtcatccccgggccc

SEQ ID NO: 572257 - DNA, 25 bp, Homo sapien
ctccgcggcgtcatccccgggcccg

SEQ ID NO: 572258 - DNA, 25 bp, Homo sapien
ccgtggaggaggagacggatatgtt

SEQ ID NO: 572259 - DNA, 25 bp, Homo sapien
gttggcgatctgcaccgtgacgtcc

SEQ ID NO: 572260 - DNA, 25 bp, Homo sapien
gttctggttggcgatctgcaccgtg

SEQ ID NO: 572261 - DNA, 25 bp, Homo sapien
gtgacgtcccggaaagccatcatga

SEQ ID NO: 572262 - DNA, 25 bp, Homo sapien
agaggtctcgccctgctcggccttg

SEQ ID NO: 572263 - DNA, 25 bp, Homo sapien
tctgagcgcccaggcagttggccac

SEQ ID NO: 572264 - DNA, 25 bp, Homo sapien
gggcctcccgcccagaggtctcgcc

SEQ ID NO: 572265 - DNA, 25 bp, Homo sapien
ctgcgggggcctggaccgtctgagc

SEQ ID NO: 572266 - DNA, 25 bp, Homo sapien
gccgcagcctctgcgcatgagtcct

SEQ ID NO: 572267 - DNA, 25 bp, Homo sapien
ctctgcgcatgagtcctcggctgac

SEQ ID NO: 572268 - DNA, 25 bp, Homo sapien
gcagcctctgcgcatgagtcctcgg

SEQ ID NO: 572269 - DNA, 25 bp, Homo sapien
gcctctgcgcatgagtcctcggctg

SEQ ID NO: 572270 - DNA, 25 bp, Homo sapien
ctgttttgggggctgtggccccatc

SEQ ID NO: 572271 - DNA, 25 bp, Homo sapien
gggggctgtggccccatccgccgcc

SEQ ID NO: 572272 - DNA, 25 bp, Homo sapien
gggctgtggccccatccgccgcccc

SEQ ID NO: 572273 - DNA, 25 bp, Homo sapien
gctgtggccccatccgccgccccac

SEQ ID NO: 572274 - DNA, 25 bp, Homo sapien
ctccccacctccgccgtctcctcct

SEQ ID NO: 572275 - DNA, 25 bp, Homo sapien
tccccacctccgccgtctcctcctc

SEQ ID NO: 572276 - DNA, 25 bp, Homo sapien
ctccgccgtctcctcctcctcctct

SEQ ID NO: 572277 - DNA, 25 bp, Homo sapien
ggaggccgacgcctccgagcctgac

SEQ ID NO: 572278 - DNA, 25 bp, Homo sapien
cagctgctccaagtcgcctgcctcg

SEQ ID NO: 572279 - DNA, 25 bp, Homo sapien
acgcctccgagcctgacttggcgga

SEQ ID NO: 572280 - DNA, 25 bp, Homo sapien
tgacttggcggacttggtggacgtg

SEQ ID NO: 572281 - DNA, 25 bp, Homo sapien
ctcgcagtggtagcgcggcaggctc

SEQ ID NO: 572282 - DNA, 25 bp, Homo sapien
gtggtagcgcggcaggctcaggatc

SEQ ID NO: 572283 - DNA, 25 bp, Homo sapien
ggttctcgcagtggtagcgcggcag

SEQ ID NO: 572284 - DNA, 25 bp, Homo sapien
tgggttctcgcagtggtagcgcggc

SEQ ID NO: 572285 - DNA, 25 bp, Homo sapien
gcagggtgtcggtggagagcgtggg

SEQ ID NO: 572286 - DNA, 25 bp, Homo sapien
gaggccgatgcggtagagccgcttg

SEQ ID NO: 572287 - DNA, 25 bp, Homo sapien
ttgaggccgatgcggtagagccgct

SEQ ID NO: 572288 - DNA, 25 bp, Homo sapien
gagccgcttgcgcagggtgtcggtg

SEQ ID NO: 572289 - DNA, 25 bp, Homo sapien
gggtgtccgggatgaagccgcgtga

SEQ ID NO: 572290 - DNA, 25 bp, Homo sapien
caggaactggatgcccttgtcgggg

SEQ ID NO: 572291 - DNA, 25 bp, Homo sapien
gctgaggccctttcgctggaggagg

SEQ ID NO: 572292 - DNA, 25 bp, Homo sapien
atgaagccgcgtgagatcaggaact

SEQ ID NO: 572293 - DNA, 25 bp, Homo sapien
tatcattagacagccatccgtcggc

SEQ ID NO: 572294 - DNA, 25 bp, Homo sapien
taagaaaaggccgtggagctgttac

SEQ ID NO: 572295 - DNA, 25 bp, Homo sapien
taacatgctcaacaaaggtcaaggc

SEQ ID NO: 572296 - DNA, 25 bp, Homo sapien
tattagtgcacggattgctgggccc

SEQ ID NO: 572297 - DNA, 25 bp, Homo sapien
tgtttatttggtagatggagtacca

SEQ ID NO: 572298 - DNA, 25 bp, Homo sapien
tcatcagctcggagaccactggctg

SEQ ID NO: 572299 - DNA, 25 bp, Homo sapien
tggtagatggagtaccaacacaggg

SEQ ID NO: 572300 - DNA, 25 bp, Homo sapien
gggcctgaagcacacgcgtattctg

SEQ ID NO: 572301 - DNA, 25 bp, Homo sapien
ggagagcctcttggtgcatgcgtgg

SEQ ID NO: 572302 - DNA, 25 bp, Homo sapien
ctcttggtgcatgcgtgggcagtca

SEQ ID NO: 572303 - DNA, 25 bp, Homo sapien
tcagcacgggggctctgtggtcacc

SEQ ID NO: 572304 - DNA, 25 bp, Homo sapien
gagaagcccgtggacacagttacac

SEQ ID NO: 572305 - DNA, 25 bp, Homo sapien
ggctgccgcagaggcagcgggagca

SEQ ID NO: 572306 - DNA, 25 bp, Homo sapien
ctgccgcagaggcagcgggagcagc

SEQ ID NO: 572307 - DNA, 25 bp, Homo sapien
cgggagcagctggtgagggtggcat

SEQ ID NO: 572308 - DNA, 25 bp, Homo sapien
gcactgtgggggcaggctgccgcag

SEQ ID NO: 572309 - DNA, 25 bp, Homo sapien
tgccaaaggccctatgcggccacat

SEQ ID NO: 572310 - DNA, 25 bp, Homo sapien
tgcagccctacgtgagtgccaaagg

SEQ ID NO: 572311 - DNA, 25 bp, Homo sapien
ccaagaggctgtggtccgatgagta

SEQ ID NO: 572312 - DNA, 25 bp, Homo sapien
ggccacatccgtgtgttcctgtagc

SEQ ID NO: 572313 - DNA, 25 bp, Homo sapien
cccagggccatgtgcagcaaggcag

SEQ ID NO: 572314 - DNA, 25 bp, Homo sapien
ctcctttggggtgccctgtccccag

SEQ ID NO: 572315 - DNA, 25 bp, Homo sapien
agggccatgtgcagcaaggcaggag

SEQ ID NO: 572316 - DNA, 25 bp, Homo sapien
tccccagggccatgtgcagcaaggc

SEQ ID NO: 572317 - DNA, 25 bp, Homo sapien
gccacagtagccctttcggaaccca

SEQ ID NO: 572318 - DNA, 25 bp, Homo sapien
ctgccacagtagccctttcggaacc

SEQ ID NO: 572319 - DNA, 25 bp, Homo sapien
tgccacagtagccctttcggaaccc

SEQ ID NO: 572320 - DNA, 25 bp, Homo sapien
ccctgcacacggatgtgtgcctgga

SEQ ID NO: 572321 - DNA, 25 bp, Homo sapien
tgtgcctggaacttgcgcagggcct

SEQ ID NO: 572322 - DNA, 25 bp, Homo sapien
cctgcacacggatgtgtgcctggaa

SEQ ID NO: 572323 - DNA, 25 bp, Homo sapien
cctggaacttgcgcagggcctcgtc

SEQ ID NO: 572324 - DNA, 25 bp, Homo sapien
caggcttgatgttggggctgtacat

SEQ ID NO: 572325 - DNA, 25 bp, Homo sapien
tgtcggggttgtggaactgctgaac

SEQ ID NO: 572326 - DNA, 25 bp, Homo sapien
tcatcttccggtcaggcttgatgtt

SEQ ID NO: 572327 - DNA, 25 bp, Homo sapien
cacttcggggttgcacatgcagtag

SEQ ID NO: 572328 - DNA, 25 bp, Homo sapien
ctaacaacgtggagtgggcaggggt

SEQ ID NO: 572329 - DNA, 25 bp, Homo sapien
tggagtgggcaggggtggtggtggg

SEQ ID NO: 572330 - DNA, 25 bp, Homo sapien
tggggttgggagggagggtgtcaga

SEQ ID NO: 572331 - DNA, 25 bp, Homo sapien
ggttgggagggagggtgtcagagcc

SEQ ID NO: 572332 - DNA, 25 bp, Homo sapien
cgtacgtgacgtggtcctcattgga

SEQ ID NO: 572333 - DNA, 25 bp, Homo sapien
ttcatgcccacaatggacttctcca

SEQ ID NO: 572334 - DNA, 25 bp, Homo sapien
tctcatagatgcctaccaccagctc

SEQ ID NO: 572335 - DNA, 25 bp, Homo sapien
acttgagctccttctgctgtatcct

SEQ ID NO: 572336 - DNA, 25 bp, Homo sapien
cctccctctgatgcgctgcctgctt

SEQ ID NO: 572337 - DNA, 25 bp, Homo sapien
aacacctccctctgatgcgctgcct

SEQ ID NO: 572338 - DNA, 25 bp, Homo sapien
tgcagcacaccaggcggcggtgggg

SEQ ID NO: 572339 - DNA, 25 bp, Homo sapien
tcacctcgaagagccggctgcagca

SEQ ID NO: 572340 - DNA, 25 bp, Homo sapien
ttgcaaaaggtgtacgtggaggagc

SEQ ID NO: 572341 - DNA, 25 bp, Homo sapien
caaaaggtgtacgtggaggagctct

SEQ ID NO: 572342 - DNA, 25 bp, Homo sapien
tcttcttcgggcaaagtttgagaat

SEQ ID NO: 572343 - DNA, 25 bp, Homo sapien
tcttcttcttcgggcaaagtttgag

SEQ ID NO: 572344 - DNA, 25 bp, Homo sapien
tggaaagcagaccccaggcccccag

SEQ ID NO: 572345 - DNA, 25 bp, Homo sapien
gaaagcagaccccaggcccccagtg

SEQ ID NO: 572346 - DNA, 25 bp, Homo sapien
aagcagaccccaggcccccagtggg

SEQ ID NO: 572347 - DNA, 25 bp, Homo sapien
ctggaaagcagaccccaggccccca

SEQ ID NO: 572348 - DNA, 25 bp, Homo sapien
agcccagggcacagaaatgcagcac

SEQ ID NO: 572349 - DNA, 25 bp, Homo sapien
ttctgcatctcgtccgagcccaggg

SEQ ID NO: 572350 - DNA, 25 bp, Homo sapien
tcacctcagcaatggactccttcag

SEQ ID NO: 572351 - DNA, 25 bp, Homo sapien
cttcaggtcctccacgaacttctgc

SEQ ID NO: 572352 - DNA, 25 bp, Homo sapien
ctgcctcgggagcccgtgtccttac

SEQ ID NO: 572353 - DNA, 25 bp, Homo sapien
agctgcctcgggagcccgtgtcctt

SEQ ID NO: 572354 - DNA, 25 bp, Homo sapien
cagctgcctcgggagcccgtgtcct

SEQ ID NO: 572355 - DNA, 25 bp, Homo sapien
gctgcctcgggagcccgtgtcctta

SEQ ID NO: 572356 - DNA, 25 bp, Homo sapien
tctccagtgaagactaagggccaag

SEQ ID NO: 572357 - DNA, 25 bp, Homo sapien
gattctgacgctatctgctcctctg

SEQ ID NO: 572358 - DNA, 25 bp, Homo sapien
ttagacaatgagagacgtgaagcca

SEQ ID NO: 572359 - DNA, 25 bp, Homo sapien
ggagccatctgggacagttagacaa

SEQ ID NO: 572360 - DNA, 25 bp, Homo sapien
tggaagctacaagcctgcagtgcta

SEQ ID NO: 572361 - DNA, 25 bp, Homo sapien
ttttattaaagctactctcctgggc

SEQ ID NO: 572362 - DNA, 25 bp, Homo sapien
tcctgggccattggatgcaaacctt

SEQ ID NO: 572363 - DNA, 25 bp, Homo sapien
gctgagcctccgcaaggtgttcaaa

SEQ ID NO: 572364 - DNA, 25 bp, Homo sapien
tgtcggcgatccttgctttgactgt

SEQ ID NO: 572365 - DNA, 25 bp, Homo sapien
ctgtcggcgatccttgctttgactg

SEQ ID NO: 572366 - DNA, 25 bp, Homo sapien
cattagagaagggactgtacagaga

SEQ ID NO: 572367 - DNA, 25 bp, Homo sapien
cagatccttctggtcaccctgccct

SEQ ID NO: 572368 - DNA, 25 bp, Homo sapien
gggcttctcttgacctcgcctcgtc

SEQ ID NO: 572369 - DNA, 25 bp, Homo sapien
ccctcttacactgcctggttggaga

SEQ ID NO: 572370 - DNA, 25 bp, Homo sapien
tttgaatgcaaagagcacagggctc

SEQ ID NO: 572371 - DNA, 25 bp, Homo sapien
ctttgaatgcaaagagcacagggct

SEQ ID NO: 572372 - DNA, 25 bp, Homo sapien
tgaatgcaaagagcacagggctcat

SEQ ID NO: 572373 - DNA, 25 bp, Homo sapien
ttgaatgcaaagagcacagggctca

SEQ ID NO: 572374 - DNA, 25 bp, Homo sapien
ccaccgtgctctccgccggcctctc

SEQ ID NO: 572375 - DNA, 25 bp, Homo sapien
tccaccgtgctctccgccggcctct

SEQ ID NO: 572376 - DNA, 25 bp, Homo sapien
ctccaccgtgctctccgccggcctc

SEQ ID NO: 572377 - DNA, 25 bp, Homo sapien
accgtgctctccgccggcctctccc

SEQ ID NO: 572378 - DNA, 25 bp, Homo sapien
ttgaaattggtaaaatggtgagtcg

SEQ ID NO: 572379 - DNA, 25 bp, Homo sapien
tggtaaaatggtgagtcgggctggg

SEQ ID NO: 572380 - DNA, 25 bp, Homo sapien
tgaaattggtaaaatggtgagtcgg

SEQ ID NO: 572381 - DNA, 25 bp, Homo sapien
aattggtaaaatggtgagtcgggct

SEQ ID NO: 572382 - DNA, 25 bp, Homo sapien
cgtggcttaattaggcgctggaaca

SEQ ID NO: 572383 - DNA, 25 bp, Homo sapien
gtgagctccgtctccactgtgttag

SEQ ID NO: 572384 - DNA, 25 bp, Homo sapien
gggagaaagagctcgtggcttaatt

SEQ ID NO: 572385 - DNA, 25 bp, Homo sapien
actgtgttagtctgggagctcggcc

SEQ ID NO: 572386 - DNA, 25 bp, Homo sapien
ccaagctgggtcctggttaacttgc

SEQ ID NO: 572387 - DNA, 25 bp, Homo sapien
caagctgggtcctggttaacttgcc

SEQ ID NO: 572388 - DNA, 25 bp, Homo sapien
aagctgggtcctggttaacttgcct

SEQ ID NO: 572389 - DNA, 25 bp, Homo sapien
cccaagctgggtcctggttaacttg

SEQ ID NO: 572390 - DNA, 25 bp, Homo sapien
ccagacagccgagggcagagtcagc

SEQ ID NO: 572391 - DNA, 25 bp, Homo sapien
cgttcgagaacagcccagacagccg

SEQ ID NO: 572392 - DNA, 25 bp, Homo sapien
tcgagaacagcccagacagccgagg

SEQ ID NO: 572393 - DNA, 25 bp, Homo sapien
aacagcccagacagccgagggcaga

SEQ ID NO: 572394 - DNA, 25 bp, Homo sapien
tcctcccagactccccacggccatg

SEQ ID NO: 572395 - DNA, 25 bp, Homo sapien
tgtcctcccagactccccacggcca

SEQ ID NO: 572396 - DNA, 25 bp, Homo sapien
tcccagactccccacggccatgacc

SEQ ID NO: 572397 - DNA, 25 bp, Homo sapien
ctgtcctcccagactccccacggcc

SEQ ID NO: 572398 - DNA, 25 bp, Homo sapien
cggcccccagcccggagttgtgctg

SEQ ID NO: 572399 - DNA, 25 bp, Homo sapien
cccccagcccggagttgtgctggga

SEQ ID NO: 572400 - DNA, 25 bp, Homo sapien
ctgggacgtttgaagcctgttgtga

SEQ ID NO: 572401 - DNA, 25 bp, Homo sapien
gtgctgggacgtttgaagcctgttg

SEQ ID NO: 572402 - DNA, 25 bp, Homo sapien
tgtctcggggggctaggctgcaggt

SEQ ID NO: 572403 - DNA, 25 bp, Homo sapien
gctgtctcggggggctaggctgcag

SEQ ID NO: 572404 - DNA, 25 bp, Homo sapien
ctgtctcggggggctaggctgcagg

SEQ ID NO: 572405 - DNA, 25 bp, Homo sapien
gtccaggacaatgaccttgacaatt

SEQ ID NO: 572406 - DNA, 25 bp, Homo sapien
gtgtggagccgcaggagtcagagga

SEQ ID NO: 572407 - DNA, 25 bp, Homo sapien
tcagaggacgacgaggtgtagcagg

SEQ ID NO: 572408 - DNA, 25 bp, Homo sapien
ttgagccactggagtagcggtgccc

SEQ ID NO: 572409 - DNA, 25 bp, Homo sapien
gccctgctggactgacctatagaaa

SEQ ID NO: 572410 - DNA, 25 bp, Homo sapien
tccacagcggaaggaatggcctggt

SEQ ID NO: 572411 - DNA, 25 bp, Homo sapien
caagttacagaaactgggccgacga

SEQ ID NO: 572412 - DNA, 25 bp, Homo sapien
gacacatcctgatagggcctgactg

SEQ ID NO: 572413 - DNA, 25 bp, Homo sapien
tgtgagcaggggacggggttctgcc

SEQ ID NO: 572414 - DNA, 25 bp, Homo sapien
ccttggtaagcttgaagagctgtgt

SEQ ID NO: 572415 - DNA, 25 bp, Homo sapien
ctgtgtgagcaggggacggggttct

SEQ ID NO: 572416 - DNA, 25 bp, Homo sapien
gttctgcctgtccttggtaagcttg

SEQ ID NO: 572417 - DNA, 25 bp, Homo sapien
tactgtccccgcaaccttaggagag

SEQ ID NO: 572418 - DNA, 25 bp, Homo sapien
tagtgggtacaaagagactcctggc

SEQ ID NO: 572419 - DNA, 25 bp, Homo sapien
cagacagatggtcatcagggaagcc

SEQ ID NO: 572420 - DNA, 25 bp, Homo sapien
atggatcaaatcaggagagggaccc

SEQ ID NO: 572421 - DNA, 25 bp, Homo sapien
gtccagtctcccgtggggcctggtc

SEQ ID NO: 572422 - DNA, 25 bp, Homo sapien
ctcatccacccataagtagaatctt

SEQ ID NO: 572423 - DNA, 25 bp, Homo sapien
ggccatctcatccacccataagtag

SEQ ID NO: 572424 - DNA, 25 bp, Homo sapien
ttgttctacttcctacttccggctc

SEQ ID NO: 572425 - DNA, 25 bp, Homo sapien
gagaggccctccaagtatctttacc

SEQ ID NO: 572426 - DNA, 25 bp, Homo sapien
aatggtgtgatttcatgcatcaggg

SEQ ID NO: 572427 - DNA, 25 bp, Homo sapien
caaaggaaccactctttaatggtgt

SEQ ID NO: 572428 - DNA, 25 bp, Homo sapien
aagactggctctgcctagaactaca

SEQ ID NO: 572429 - DNA, 25 bp, Homo sapien
ggccatcccgggtccgcttagttca

SEQ ID NO: 572430 - DNA, 25 bp, Homo sapien
cgggtccgcttagttcaccgggctg

SEQ ID NO: 572431 - DNA, 25 bp, Homo sapien
gtccgcttagttcaccgggctgacc

SEQ ID NO: 572432 - DNA, 25 bp, Homo sapien
cggctcggccatcccgggtccgctt

SEQ ID NO: 572433 - DNA, 25 bp, Homo sapien
tggaacacacagacggcttatgcgg

SEQ ID NO: 572434 - DNA, 25 bp, Homo sapien
tgtgcctccgccagaacacagtttc

SEQ ID NO: 572435 - DNA, 25 bp, Homo sapien
tcgtgtaaatgtcccgctcagctgg

SEQ ID NO: 572436 - DNA, 25 bp, Homo sapien
cagctgggtcctatgcgtaggtcca

SEQ ID NO: 572437 - DNA, 25 bp, Homo sapien
tgtgcctgcctaacactcaggactg

SEQ ID NO: 572438 - DNA, 25 bp, Homo sapien
tctgtgtagggttcagatcagaaca

SEQ ID NO: 572439 - DNA, 25 bp, Homo sapien
tcaggagggagattaagaacaggat

SEQ ID NO: 572440 - DNA, 25 bp, Homo sapien
gatcagaacattcccacctgtgcct

SEQ ID NO: 572441 - DNA, 25 bp, Homo sapien
agacaatttgctgacctgggttcca

SEQ ID NO: 572442 - DNA, 25 bp, Homo sapien
taacaaaatggagattccacgaggg

SEQ ID NO: 572443 - DNA, 25 bp, Homo sapien
cagcctacacttggtcattcatgag

SEQ ID NO: 572444 - DNA, 25 bp, Homo sapien
gatccaccgtcttcatgggcacaat

SEQ ID NO: 572445 - DNA, 25 bp, Homo sapien
ttttaaaagccagtctaacaatctc

SEQ ID NO: 572446 - DNA, 25 bp, Homo sapien
tatttgggacgtttagaccatttgc

SEQ ID NO: 572447 - DNA, 25 bp, Homo sapien
tagttgagtcttgtcaggttttaaa

SEQ ID NO: 572448 - DNA, 25 bp, Homo sapien
gtaattaggtttaactctatcatcc

SEQ ID NO: 572449 - DNA, 25 bp, Homo sapien
gctggaagatatctcaggagcattc

SEQ ID NO: 572450 - DNA, 25 bp, Homo sapien
cacttaatcctgagaacatttgtac

SEQ ID NO: 572451 - DNA, 25 bp, Homo sapien
tcgcacgtattggtgttgattccat

SEQ ID NO: 572452 - DNA, 25 bp, Homo sapien
tgatgtcttcagtaatgatcgcacg

SEQ ID NO: 572453 - DNA, 25 bp, Homo sapien
ggccattaatctgagtatctctaga

SEQ ID NO: 572454 - DNA, 25 bp, Homo sapien
tgtgcagcccttaccacatcataca

SEQ ID NO: 572455 - DNA, 25 bp, Homo sapien
tactcccagctctaggtggccatta

SEQ ID NO: 572456 - DNA, 25 bp, Homo sapien
gaaacttcatgtctatttagtcact

SEQ ID NO: 572457 - DNA, 25 bp, Homo sapien
cagctaggctggaggctcatggttt

SEQ ID NO: 572458 - DNA, 25 bp, Homo sapien
agcatctctcaacagtctcagctcg

SEQ ID NO: 572459 - DNA, 25 bp, Homo sapien
tcagctcgctcattcttaagatgtc

SEQ ID NO: 572460 - DNA, 25 bp, Homo sapien
catgttctctcttgcaatggcctgt

SEQ ID NO: 572461 - DNA, 25 bp, Homo sapien
tgttgagaccagtaggccacctggg

SEQ ID NO: 572462 - DNA, 25 bp, Homo sapien
cattttgacaaacctagcctagacg

SEQ ID NO: 572463 - DNA, 25 bp, Homo sapien
gggctagcaagtcggcatctctatt

SEQ ID NO: 572464 - DNA, 25 bp, Homo sapien
gacgttcagtcatctatgggcccct

SEQ ID NO: 572465 - DNA, 25 bp, Homo sapien
caaaagaatggaatcaaatactata

SEQ ID NO: 572466 - DNA, 25 bp, Homo sapien
caaccattaattggaacatggtgaa

SEQ ID NO: 572467 - DNA, 25 bp, Homo sapien
aagtagggaacagtacaaaagaatg

SEQ ID NO: 572468 - DNA, 25 bp, Homo sapien
aaagctcaaccattaattggaacat

SEQ ID NO: 572469 - DNA, 25 bp, Homo sapien
tatgaatgtcccaagtggtatctcc

SEQ ID NO: 572470 - DNA, 25 bp, Homo sapien
ttgagctgttgaagtcccacatata

SEQ ID NO: 572471 - DNA, 25 bp, Homo sapien
gaatatcagccagtacttacagtag

SEQ ID NO: 572472 - DNA, 25 bp, Homo sapien
tggatcatatccagtcaccactatg

SEQ ID NO: 572473 - DNA, 25 bp, Homo sapien
tatctcctctaaactgcaactgaag

SEQ ID NO: 572474 - DNA, 25 bp, Homo sapien
aatacacaaatctgcggttttggaa

SEQ ID NO: 572475 - DNA, 25 bp, Homo sapien
aacagaagggagaaattaatggcaa

SEQ ID NO: 572476 - DNA, 25 bp, Homo sapien
ttgaccacaggtttagaccaaggct

SEQ ID NO: 572477 - DNA, 25 bp, Homo sapien
ggtctcactctagtctgtgctggct

SEQ ID NO: 572478 - DNA, 25 bp, Homo sapien
tgtagtacaaggagttagcactccc

SEQ ID NO: 572479 - DNA, 25 bp, Homo sapien
tttgaaactatggtgctgtgtcctc

SEQ ID NO: 572480 - DNA, 25 bp, Homo sapien
gggtggacctagcaacagcttatag

SEQ ID NO: 572481 - DNA, 25 bp, Homo sapien
taacaccatggcttcatcagaggat

SEQ ID NO: 572482 - DNA, 25 bp, Homo sapien
ggtgatttctaactacggcccacag

SEQ ID NO: 572483 - DNA, 25 bp, Homo sapien
ttcacaagtattccagacaccaggc

SEQ ID NO: 572484 - DNA, 25 bp, Homo sapien
gagaagaacctactacaaggcaagg

SEQ ID NO: 572485 - DNA, 25 bp, Homo sapien
gagaccatgactggaaagtgcctcc

SEQ ID NO: 572486 - DNA, 25 bp, Homo sapien
gccgacagttgtatcaaggtgcaga

SEQ ID NO: 572487 - DNA, 25 bp, Homo sapien
cagagggccagcaatgatcggattt

SEQ ID NO: 572488 - DNA, 25 bp, Homo sapien
gattctgatgccagtggtctacaca

SEQ ID NO: 572489 - DNA, 25 bp, Homo sapien
aattcatcaaactcattcaccatcc

SEQ ID NO: 572490 - DNA, 25 bp, Homo sapien
tcaattcatcaaactcattcaccat

SEQ ID NO: 572491 - DNA, 25 bp, Homo sapien
tcatcaaactcattcaccatccagt

SEQ ID NO: 572492 - DNA, 25 bp, Homo sapien
ttcatcaaactcattcaccatccag

SEQ ID NO: 572493 - DNA, 25 bp, Homo sapien
tgggcagaactttggcgggcaagga

SEQ ID NO: 572494 - DNA, 25 bp, Homo sapien
gcagctgcggaaggattccgtttcc

SEQ ID NO: 572495 - DNA, 25 bp, Homo sapien
cggagggatttgacagcacggtaac

SEQ ID NO: 572496 - DNA, 25 bp, Homo sapien
aggccagacacacaggcgtcgtgca

SEQ ID NO: 572497 - DNA, 25 bp, Homo sapien
ctgccctctggggcattacacattc

SEQ ID NO: 572498 - DNA, 25 bp, Homo sapien
tctgccctctggggcattacacatt

SEQ ID NO: 572499 - DNA, 25 bp, Homo sapien
aacctctgccctctggggcattaca

SEQ ID NO: 572500 - DNA, 25 bp, Homo sapien
cctctgccctctggggcattacaca

SEQ ID NO: 572501 - DNA, 25 bp, Homo sapien
tcattaatggaaaccaggaacactg

SEQ ID NO: 572502 - DNA, 25 bp, Homo sapien
gtcctgcaggtagctagacgatact

SEQ ID NO: 572503 - DNA, 25 bp, Homo sapien
tagctagacgatactggctggtaat

SEQ ID NO: 572504 - DNA, 25 bp, Homo sapien
taatggaaaccaggaacactgaaga

SEQ ID NO: 572505 - DNA, 25 bp, Homo sapien
caatgggaagggccttcacacagag

SEQ ID NO: 572506 - DNA, 25 bp, Homo sapien
tgggaagggccttcacacagaggcc

SEQ ID NO: 572507 - DNA, 25 bp, Homo sapien
aatgggaagggccttcacacagagg

SEQ ID NO: 572508 - DNA, 25 bp, Homo sapien
ggaagggccttcacacagaggcccg

SEQ ID NO: 572509 - DNA, 25 bp, Homo sapien
tccctgaatccgtgcaatcgcgaag

SEQ ID NO: 572510 - DNA, 25 bp, Homo sapien
caaaagtcaaaccaaggagcggcgc

SEQ ID NO: 572511 - DNA, 25 bp, Homo sapien
tccgagtcagggaacgcaactgaaa

SEQ ID NO: 572512 - DNA, 25 bp, Homo sapien
ttacatggccctttggaatgcgcac

SEQ ID NO: 572513 - DNA, 25 bp, Homo sapien
tccagcctaggtgacagagtgagac

SEQ ID NO: 572514 - DNA, 25 bp, Homo sapien
actgagctgagattgccccactgct

SEQ ID NO: 572515 - DNA, 25 bp, Homo sapien
cctaggtgacagagtgagaccttac

SEQ ID NO: 572516 - DNA, 25 bp, Homo sapien
ctgagctgagattgccccactgctc

SEQ ID NO: 572517 - DNA, 25 bp, Homo sapien
tagttactccttcacttgtattctt

SEQ ID NO: 572518 - DNA, 25 bp, Homo sapien
tccaatagttactccttcacttgta

SEQ ID NO: 572519 - DNA, 25 bp, Homo sapien
ttcttaattagatagtgccaactac

SEQ ID NO: 572520 - DNA, 25 bp, Homo sapien
tagatagtgccaactacctatttat

SEQ ID NO: 572521 - DNA, 25 bp, Homo sapien
tacgaaaagttgtctacactcacct

SEQ ID NO: 572522 - DNA, 25 bp, Homo sapien
cactgttgcacatgtctacgaaaag

SEQ ID NO: 572523 - DNA, 25 bp, Homo sapien
caggcctcgggcttctactatgaca

SEQ ID NO: 572524 - DNA, 25 bp, Homo sapien
aaccaagctcttattggtcagcaga

SEQ ID NO: 572525 - DNA, 25 bp, Homo sapien
caaaatacgtctccaaattgggtca

SEQ ID NO: 572526 - DNA, 25 bp, Homo sapien
ctccttccaaaatacgtctccaaat

SEQ ID NO: 572527 - DNA, 25 bp, Homo sapien
cgtctccaaattgggtcaatgtgcc

SEQ ID NO: 572528 - DNA, 25 bp, Homo sapien
ggtcaatgtgcctcttgtccaaata

SEQ ID NO: 572529 - DNA, 25 bp, Homo sapien
ttctgcagacaggggtgtgtgttgg

SEQ ID NO: 572530 - DNA, 25 bp, Homo sapien
gcagacaggggtgtgtgttggggta

SEQ ID NO: 572531 - DNA, 25 bp, Homo sapien
cagacaggggtgtgtgttggggtaa

SEQ ID NO: 572532 - DNA, 25 bp, Homo sapien
ctgcagacaggggtgtgtgttgggg

SEQ ID NO: 572533 - DNA, 25 bp, Homo sapien
tcctcttggtgggaccactgacggc

SEQ ID NO: 572534 - DNA, 25 bp, Homo sapien
ggttgactccagtgaatctgccatt

SEQ ID NO: 572535 - DNA, 25 bp, Homo sapien
cactgacggcaacaccacgtttgga

SEQ ID NO: 572536 - DNA, 25 bp, Homo sapien
gcaacaccacgtttggagacaactg

SEQ ID NO: 572537 - DNA, 25 bp, Homo sapien
taatattccaggagctccttagaag

SEQ ID NO: 572538 - DNA, 25 bp, Homo sapien
tcttttgataatattccaggagctc

SEQ ID NO: 572539 - DNA, 25 bp, Homo sapien
atattccaggagctccttagaagga

SEQ ID NO: 572540 - DNA, 25 bp, Homo sapien
tgataatattccaggagctccttag

SEQ ID NO: 572541 - DNA, 25 bp, Homo sapien
gaggcagacctgcatatcacttaga

SEQ ID NO: 572542 - DNA, 25 bp, Homo sapien
agtagaggcgtaaaacatgttcccg

SEQ ID NO: 572543 - DNA, 25 bp, Homo sapien
ctcagtcggtcattttctgagtaga

SEQ ID NO: 572544 - DNA, 25 bp, Homo sapien
gacctgcatatcacttagagctttc

SEQ ID NO: 572545 - DNA, 25 bp, Homo sapien
gtgctgctatgtgtgtatttaccct

SEQ ID NO: 572546 - DNA, 25 bp, Homo sapien
taatggaacatggagggtgctgcta

SEQ ID NO: 572547 - DNA, 25 bp, Homo sapien
actgtaatggaacatggagggtgct

SEQ ID NO: 572548 - DNA, 25 bp, Homo sapien
tgtgtatttaccctctcactcccag

SEQ ID NO: 572549 - DNA, 25 bp, Homo sapien
tgtaatggaacatggagtgtgctgc

SEQ ID NO: 572550 - DNA, 25 bp, Homo sapien
taatggaacatggagtgtgctgcta

SEQ ID NO: 572551 - DNA, 25 bp, Homo sapien
taatggaacatggagggtgctgcta

SEQ ID NO: 572552 - DNA, 25 bp, Homo sapien
cacacagaagcgcactgtaatggaa

SEQ ID NO: 572553 - DNA, 25 bp, Homo sapien
taccctctcactcccagcacacaca

SEQ ID NO: 572554 - DNA, 25 bp, Homo sapien
acacacacagaagtgcactgtaatg

SEQ ID NO: 572555 - DNA, 25 bp, Homo sapien
cacacacacacagaagtgcactgta

SEQ ID NO: 572556 - DNA, 25 bp, Homo sapien
ttaccctctcactcccagcacacac

SEQ ID NO: 572557 - DNA, 25 bp, Homo sapien
gaacatggagtgtgctgctatgtgt

SEQ ID NO: 572558 - DNA, 25 bp, Homo sapien
gaagcgcactgtaatggaacatgga

SEQ ID NO: 572559 - DNA, 25 bp, Homo sapien
cactgtaatggaacatggagtgtgc

SEQ ID NO: 572560 - DNA, 25 bp, Homo sapien
acacacacagaagcgcactgtaatg

SEQ ID NO: 572561 - DNA, 25 bp, Homo sapien
aaattcatggagacgaaaagtagca

SEQ ID NO: 572562 - DNA, 25 bp, Homo sapien
gtgaggcacctaaaatcgtcaaatt

SEQ ID NO: 572563 - DNA, 25 bp, Homo sapien
aaagtagcatagtgtgttccaggaa

SEQ ID NO: 572564 - DNA, 25 bp, Homo sapien
gcacctaaaatcgtcaaattcatgg

SEQ ID NO: 572565 - DNA, 25 bp, Homo sapien
catcatttggcggatcctatggtgt

SEQ ID NO: 572566 - DNA, 25 bp, Homo sapien
tggaaggcgagctttcggtgtggcc

SEQ ID NO: 572567 - DNA, 25 bp, Homo sapien
ctttcggtgtggcccagagttgaaa

SEQ ID NO: 572568 - DNA, 25 bp, Homo sapien
tgctgcttgggacatcatttggcgg

SEQ ID NO: 572569 - DNA, 25 bp, Homo sapien
ggaggctccttacaaaaataggtca

SEQ ID NO: 572570 - DNA, 25 bp, Homo sapien
catctgttcccacaagagccaagag

SEQ ID NO: 572571 - DNA, 25 bp, Homo sapien
gcatctgttcccacaagagccaaga

SEQ ID NO: 572572 - DNA, 25 bp, Homo sapien
atctgttcccacaagagccaagaga

SEQ ID NO: 572573 - DNA, 25 bp, Homo sapien
acagcctggatagtcttttggagaa

SEQ ID NO: 572574 - DNA, 25 bp, Homo sapien
ctttgaaagctgaagattcactctg

SEQ ID NO: 572575 - DNA, 25 bp, Homo sapien
cattcacctacagcctggatagtct

SEQ ID NO: 572576 - DNA, 25 bp, Homo sapien
gctgaagattcactctgctcacatt

SEQ ID NO: 572577 - DNA, 25 bp, Homo sapien
tgtaagggtaatgaaggggttctca

SEQ ID NO: 572578 - DNA, 25 bp, Homo sapien
tctctcgatggtcttcttttgctta

SEQ ID NO: 572579 - DNA, 25 bp, Homo sapien
ctctcgatggtcttcttttgcttat

SEQ ID NO: 572580 - DNA, 25 bp, Homo sapien
ctctctcgatggtcttcttttgctt

SEQ ID NO: 572581 - DNA, 25 bp, Homo sapien
gttctcgagaaagtttggtctgctc

SEQ ID NO: 572582 - DNA, 25 bp, Homo sapien
tcgagaaagtttggtctgctctccc

SEQ ID NO: 572583 - DNA, 25 bp, Homo sapien
aaagtttggtctgctctcccagctg

SEQ ID NO: 572584 - DNA, 25 bp, Homo sapien
agaaagtttggtctgctctcccagc

SEQ ID NO: 572585 - DNA, 25 bp, Homo sapien
ggtgaatccgtctgtcctcgatgag

SEQ ID NO: 572586 - DNA, 25 bp, Homo sapien
tcctcaaggtgaatccgtctgtcct

SEQ ID NO: 572587 - DNA, 25 bp, Homo sapien
cttgtatttcctcaaggtgaatccg

SEQ ID NO: 572588 - DNA, 25 bp, Homo sapien
aatccgtctgtcctcgatgagccct

SEQ ID NO: 572589 - DNA, 25 bp, Homo sapien
cactcagaaaaatacaatacccgtt

SEQ ID NO: 572590 - DNA, 25 bp, Homo sapien
tatgacccgctgttgttcaagtaca

SEQ ID NO: 572591 - DNA, 25 bp, Homo sapien
agacagtcttttcaaggctcccttt

SEQ ID NO: 572592 - DNA, 25 bp, Homo sapien
ggctccctttagttctatgacccgc

SEQ ID NO: 572593 - DNA, 25 bp, Homo sapien
aaggagcacgtgaaatactcatcag

SEQ ID NO: 572594 - DNA, 25 bp, Homo sapien
gcctaagaacacttcttagccacca

SEQ ID NO: 572595 - DNA, 25 bp, Homo sapien
tcagctcttcaacagcacgcctgga

SEQ ID NO: 572596 - DNA, 25 bp, Homo sapien
cagcacgcctggaaaagcgaggtac

SEQ ID NO: 572597 - DNA, 25 bp, Homo sapien
ggctcatacactcctctcgccccag

SEQ ID NO: 572598 - DNA, 25 bp, Homo sapien
taaaaatcaacttcctgtatgaagt

SEQ ID NO: 572599 - DNA, 25 bp, Homo sapien
cctgggctcatacactcctctcgcc

SEQ ID NO: 572600 - DNA, 25 bp, Homo sapien
atcaacttcctgtatgaagtcattt

SEQ ID NO: 572601 - DNA, 25 bp, Homo sapien
aaaatctttggtgctctcatagagc

SEQ ID NO: 572602 - DNA, 25 bp, Homo sapien
gcagaaaatctttggtgctctcata

SEQ ID NO: 572603 - DNA, 25 bp, Homo sapien
tctcatagagcagttcttgggtgtg

SEQ ID NO: 572604 - DNA, 25 bp, Homo sapien
tggttttcagatctgagttgcagaa

SEQ ID NO: 572605 - DNA, 25 bp, Homo sapien
cctatattgcttaatctttgacatc

SEQ ID NO: 572606 - DNA, 25 bp, Homo sapien
gcataacgggcaacacttttccaat

SEQ ID NO: 572607 - DNA, 25 bp, Homo sapien
ttcttacactgcaccctatattgct

SEQ ID NO: 572608 - DNA, 25 bp, Homo sapien
tgactctcatgcataacgggcaaca

SEQ ID NO: 572609 - DNA, 25 bp, Homo sapien
tactacaacgatcagctgctctttg

SEQ ID NO: 572610 - DNA, 25 bp, Homo sapien
tttgaaacctagttcttgaggcagc

SEQ ID NO: 572611 - DNA, 25 bp, Homo sapien
cttcgttacgacataaggacattac

SEQ ID NO: 572612 - DNA, 25 bp, Homo sapien
gcttcctggactgaatggatcttac

SEQ ID NO: 572613 - DNA, 25 bp, Homo sapien
tagatataagagagtgtccctgtgc

SEQ ID NO: 572614 - DNA, 25 bp, Homo sapien
tggacttccagcaactacatataat

SEQ ID NO: 572615 - DNA, 25 bp, Homo sapien
tactccagggcctataaacttgctc

SEQ ID NO: 572616 - DNA, 25 bp, Homo sapien
ggtctgtatggcaagcttagtccca

SEQ ID NO: 572617 - DNA, 25 bp, Homo sapien
tgagttaaggaaccagatgacaagg

SEQ ID NO: 572618 - DNA, 25 bp, Homo sapien
cagaagctgtcccaaggaagacatt

SEQ ID NO: 572619 - DNA, 25 bp, Homo sapien
ctcagataacggagctcagaagctg

SEQ ID NO: 572620 - DNA, 25 bp, Homo sapien
ggatttccagaggtacaaaatgagt

SEQ ID NO: 572621 - DNA, 25 bp, Homo sapien
tcctcacgaattcgggcaagttctt

SEQ ID NO: 572622 - DNA, 25 bp, Homo sapien
tcttcctcacgaattcgggcaagtt

SEQ ID NO: 572623 - DNA, 25 bp, Homo sapien
tccctcttcctcacgaattcgggca

SEQ ID NO: 572624 - DNA, 25 bp, Homo sapien
cctcttcctcacgaattcgggcaag

SEQ ID NO: 572625 - DNA, 25 bp, Homo sapien
catttgctccaagtctttcagtttc

SEQ ID NO: 572626 - DNA, 25 bp, Homo sapien
tgtcttaaagccttctacttccagg

SEQ ID NO: 572627 - DNA, 25 bp, Homo sapien
cgctccaatgcctcatagcgttttg

SEQ ID NO: 572628 - DNA, 25 bp, Homo sapien
tacttccaggatacgtcgacgctcc

SEQ ID NO: 572629 - DNA, 25 bp, Homo sapien
cctcttctctccctcgtggcaattc

SEQ ID NO: 572630 - DNA, 25 bp, Homo sapien
tctccctcgtggcaattcaggacca

SEQ ID NO: 572631 - DNA, 25 bp, Homo sapien
ttctctccctcgtggcaattcagga

SEQ ID NO: 572632 - DNA, 25 bp, Homo sapien
tcttctctccctcgtggcaattcag

SEQ ID NO: 572633 - DNA, 25 bp, Homo sapien
cttcccatgcaataaaggaggcttg

SEQ ID NO: 572634 - DNA, 25 bp, Homo sapien
cagaatgaaagcaggcgtctcctct

SEQ ID NO: 572635 - DNA, 25 bp, Homo sapien
taagagaggccaggataagcgacac

SEQ ID NO: 572636 - DNA, 25 bp, Homo sapien
gaatgaaagcgcaacactactggta

SEQ ID NO: 572637 - DNA, 25 bp, Homo sapien
caaacactttcgacttaagattctt

SEQ ID NO: 572638 - DNA, 25 bp, Homo sapien
ggtttgcccgggcattaactgttgc

SEQ ID NO: 572639 - DNA, 25 bp, Homo sapien
gtcacggacctcacacagaagggca

SEQ ID NO: 572640 - DNA, 25 bp, Homo sapien
tctccttgtatcttatgtgcccgtc

SEQ ID NO: 572641 - DNA, 25 bp, Homo sapien
cagagtctaagttcattctccagac

SEQ ID NO: 572642 - DNA, 25 bp, Homo sapien
ttaacagagtctaagttcattctcc

SEQ ID NO: 572643 - DNA, 25 bp, Homo sapien
aacagagtctaagttcattctccag

SEQ ID NO: 572644 - DNA, 25 bp, Homo sapien
acagagtctaagttcattctccaga

SEQ ID NO: 572645 - DNA, 25 bp, Homo sapien
ggcccctactcctcgcaagtgttaa

SEQ ID NO: 572646 - DNA, 25 bp, Homo sapien
gctctgctcaggacggaaggtgaaa

SEQ ID NO: 572647 - DNA, 25 bp, Homo sapien
tagtggtccccgattcttcaagctg

SEQ ID NO: 572648 - DNA, 25 bp, Homo sapien
caggtttacattttctggcagcaga

SEQ ID NO: 572649 - DNA, 25 bp, Homo sapien
ggagcaggcaagtgcaccaggtgca

SEQ ID NO: 572650 - DNA, 25 bp, Homo sapien
agcagaagcagaatcagtgaccagg

SEQ ID NO: 572651 - DNA, 25 bp, Homo sapien
agcaggcaagtgcaccaggtgcaga

SEQ ID NO: 572652 - DNA, 25 bp, Homo sapien
caagcagaagcagaatcagtgacca

SEQ ID NO: 572653 - DNA, 25 bp, Homo sapien
tgccaacacctcaggagaggatgtg

SEQ ID NO: 572654 - DNA, 25 bp, Homo sapien
aatgccaacacctcaggagaggatg

SEQ ID NO: 572655 - DNA, 25 bp, Homo sapien
gtcttgtgaagagagcccgagtcag

SEQ ID NO: 572656 - DNA, 25 bp, Homo sapien
aagagagcccgagtcagaactcctg

SEQ ID NO: 572657 - DNA, 25 bp, Homo sapien
cgagagagaggcagacgccgtcttt

SEQ ID NO: 572658 - DNA, 25 bp, Homo sapien
actgtggcgtctccgcagagcgtct

SEQ ID NO: 572659 - DNA, 25 bp, Homo sapien
tctcagccgtgttatctaaggaccg

SEQ ID NO: 572660 - DNA, 25 bp, Homo sapien
cagagccgctggtttcaggtttctc

SEQ ID NO: 572661 - DNA, 25 bp, Homo sapien
ccctttttgactcctggtgatgtca

SEQ ID NO: 572662 - DNA, 25 bp, Homo sapien
tagctgagctccagaactaagtatg

SEQ ID NO: 572663 - DNA, 25 bp, Homo sapien
ctaagtatgtggattgaggtatcat

SEQ ID NO: 572664 - DNA, 25 bp, Homo sapien
cacagcaggggaagatctgaatttt

SEQ ID NO: 572665 - DNA, 25 bp, Homo sapien
cgcaggagcagcgggggccgcgcgg

SEQ ID NO: 572666 - DNA, 25 bp, Homo sapien
caccgggcgcaggagcagcgggggc

SEQ ID NO: 572667 - DNA, 25 bp, Homo sapien
ggcgcaggagcagcgggggccgcgc

SEQ ID NO: 572668 - DNA, 25 bp, Homo sapien
ttcaccgggcgcaggagcagcgggg

SEQ ID NO: 572669 - DNA, 25 bp, Homo sapien
gccccacagacaccacggcgagcgc

SEQ ID NO: 572670 - DNA, 25 bp, Homo sapien
tgggccgacgccaccagttccagat

SEQ ID NO: 572671 - DNA, 25 bp, Homo sapien
cgacgccaccagttccagatacaga

SEQ ID NO: 572672 - DNA, 25 bp, Homo sapien
cgccaccagttccagatacagagtc

SEQ ID NO: 572673 - DNA, 25 bp, Homo sapien
ggctcgggaattctgcgctcggccc

SEQ ID NO: 572674 - DNA, 25 bp, Homo sapien
gcggggagcctctctccgggtcgct

SEQ ID NO: 572675 - DNA, 25 bp, Homo sapien
tctccgaggggagacgcgaggagcc

SEQ ID NO: 572676 - DNA, 25 bp, Homo sapien
cgggaaccgcaagcccggagcggct

SEQ ID NO: 572677 - DNA, 25 bp, Homo sapien
tagctcgcgcgtggaccccacggac

SEQ ID NO: 572678 - DNA, 25 bp, Homo sapien
cctagctcgcgcgtggaccccacgg

SEQ ID NO: 572679 - DNA, 25 bp, Homo sapien
ccgaatccctagctcgcgcgtggac

SEQ ID NO: 572680 - DNA, 25 bp, Homo sapien
gaatccctagctcgcgcgtggaccc

SEQ ID NO: 572681 - DNA, 25 bp, Homo sapien
cagaaggggcggcccgaacaggaga

SEQ ID NO: 572682 - DNA, 25 bp, Homo sapien
tttgctcagggttcagaaaagtggc

SEQ ID NO: 572683 - DNA, 25 bp, Homo sapien
ttgctcagggttcagaaaagtggca

SEQ ID NO: 572684 - DNA, 25 bp, Homo sapien
agatttgctcagggttcagaaaagt

SEQ ID NO: 572685 - DNA, 25 bp, Homo sapien
cccggtccactgtgctgtccatcat

SEQ ID NO: 572686 - DNA, 25 bp, Homo sapien
gctgcccggtccactgtgctgtcca

SEQ ID NO: 572687 - DNA, 25 bp, Homo sapien
tgctgcccggtccactgtgctgtcc

SEQ ID NO: 572688 - DNA, 25 bp, Homo sapien
ggtccactgtgctgtccatcatctc

SEQ ID NO: 572689 - DNA, 25 bp, Homo sapien
caggatcttttacggcccctgtcac

SEQ ID NO: 572690 - DNA, 25 bp, Homo sapien
attacaggatcttttacggcccctg

SEQ ID NO: 572691 - DNA, 25 bp, Homo sapien
gtacgttgaaaaccacctcgcacag

SEQ ID NO: 572692 - DNA, 25 bp, Homo sapien
tttactttgttaggcccatccacag

SEQ ID NO: 572693 - DNA, 25 bp, Homo sapien
tctttggccacaagagaaggcacag

SEQ ID NO: 572694 - DNA, 25 bp, Homo sapien
tgggaggccacgtgccagaactttg

SEQ ID NO: 572695 - DNA, 25 bp, Homo sapien
tagagaagctgacacgacgacaggt

SEQ ID NO: 572696 - DNA, 25 bp, Homo sapien
actctgtccgagtttccccaaagcg

SEQ ID NO: 572697 - DNA, 25 bp, Homo sapien
gtgaaaacctgcctaattggagaat

SEQ ID NO: 572698 - DNA, 25 bp, Homo sapien
ccaggatagccgtaccacttattaa

SEQ ID NO: 572699 - DNA, 25 bp, Homo sapien
aataacaatttgttcccagggctgc

SEQ ID NO: 572700 - DNA, 25 bp, Homo sapien
tgcttttcagccagtacacaccagg

SEQ ID NO: 572701 - DNA, 25 bp, Homo sapien
ggaagcactttcagaagaccttgtg

SEQ ID NO: 572702 - DNA, 25 bp, Homo sapien
aagccagcacggaagcactttcaga

SEQ ID NO: 572703 - DNA, 25 bp, Homo sapien
tccagaagccagcacggaagcactt

SEQ ID NO: 572704 - DNA, 25 bp, Homo sapien
cggaagcactttcagaagaccttgt

SEQ ID NO: 572705 - DNA, 25 bp, Homo sapien
gctttcgcagggttaatgtggtcca

SEQ ID NO: 572706 - DNA, 25 bp, Homo sapien
tagtgatgctgtggtgcctaaaggc

SEQ ID NO: 572707 - DNA, 25 bp, Homo sapien
gcttcctagtaaccaacacgacgag

SEQ ID NO: 572708 - DNA, 25 bp, Homo sapien
tatgtatcctgcagtcttgaggccc

SEQ ID NO: 572709 - DNA, 25 bp, Homo sapien
tcgtccatttgtgggccctcttcct

SEQ ID NO: 572710 - DNA, 25 bp, Homo sapien
ctctctctattctcgtccatttgtg

SEQ ID NO: 572711 - DNA, 25 bp, Homo sapien
tattctcgtccatttgtgggccctc

SEQ ID NO: 572712 - DNA, 25 bp, Homo sapien
ctgggtcgtgtggccacaaagcaga

SEQ ID NO: 572713 - DNA, 25 bp, Homo sapien
gtcagaactattgggagagctgcca

SEQ ID NO: 572714 - DNA, 25 bp, Homo sapien
taggcaactgcttgtacggagacca

SEQ ID NO: 572715 - DNA, 25 bp, Homo sapien
ggagagctgccacctctcggttcag

SEQ ID NO: 572716 - DNA, 25 bp, Homo sapien
gaccttggaggcgaaagcagtcaga

SEQ ID NO: 572717 - DNA, 25 bp, Homo sapien
cttacggatgtatgtgatccacaaa

SEQ ID NO: 572718 - DNA, 25 bp, Homo sapien
tgcccaggtccagtatctagaaatt

SEQ ID NO: 572719 - DNA, 25 bp, Homo sapien
tctccacaaagagggggaaatgccc

SEQ ID NO: 572720 - DNA, 25 bp, Homo sapien
cctcttcatcagattcttacggatg

SEQ ID NO: 572721 - DNA, 25 bp, Homo sapien
ccttccctcagcgtctgatggtctt

SEQ ID NO: 572722 - DNA, 25 bp, Homo sapien
cttccctcagcgtctgatggtcttt

SEQ ID NO: 572723 - DNA, 25 bp, Homo sapien
tccctcagcgtctgatggtctttgt

SEQ ID NO: 572724 - DNA, 25 bp, Homo sapien
ttccctcagcgtctgatggtctttg

SEQ ID NO: 572725 - DNA, 25 bp, Homo sapien
ttcctccatgtctgcacccatggtg

SEQ ID NO: 572726 - DNA, 25 bp, Homo sapien
cactggagaaaccacgagaatcaag

SEQ ID NO: 572727 - DNA, 25 bp, Homo sapien
agaaaccacgagaatcaagagtgac

SEQ ID NO: 572728 - DNA, 25 bp, Homo sapien
cagctgggcactggagaaaccacga

SEQ ID NO: 572729 - DNA, 25 bp, Homo sapien
taagatgccgtatcaatgttttctg

SEQ ID NO: 572730 - DNA, 25 bp, Homo sapien
gatgccgtatcaatgttttctggtc

SEQ ID NO: 572731 - DNA, 25 bp, Homo sapien
gccgtatcaatgttttctggtctac

SEQ ID NO: 572732 - DNA, 25 bp, Homo sapien
atctaagatgccgtatcaatgtttt

SEQ ID NO: 572733 - DNA, 25 bp, Homo sapien
tgcacataactgggctactatttat

SEQ ID NO: 572734 - DNA, 25 bp, Homo sapien
tggaaacaatagaaagtgtccgttg

SEQ ID NO: 572735 - DNA, 25 bp, Homo sapien
gctactatttattgtgggggacagg

SEQ ID NO: 572736 - DNA, 25 bp, Homo sapien
gagatcacatgtgccacgtgcacat

SEQ ID NO: 572737 - DNA, 25 bp, Homo sapien
atttgttcgcgaattccacagctct

SEQ ID NO: 572738 - DNA, 25 bp, Homo sapien
catttgttcgcgaattccacagctc

SEQ ID NO: 572739 - DNA, 25 bp, Homo sapien
gagtcactgcgcacacgctcacaat

SEQ ID NO: 572740 - DNA, 25 bp, Homo sapien
cacacagcaaagaggcgtgagcagt

SEQ ID NO: 572741 - DNA, 25 bp, Homo sapien
aatgctttatgcaagagcctgcgga

SEQ ID NO: 572742 - DNA, 25 bp, Homo sapien
cgtgagcagtgagcctgaggttcat

SEQ ID NO: 572743 - DNA, 25 bp, Homo sapien
gagcatgtgttactttaacactttt

SEQ ID NO: 572744 - DNA, 25 bp, Homo sapien
tttaagcaatgagcatgtgttactt

SEQ ID NO: 572745 - DNA, 25 bp, Homo sapien
ttctttttaagcaatgagcatgtgt

SEQ ID NO: 572746 - DNA, 25 bp, Homo sapien
aatgagcatgtgttactttaacact

SEQ ID NO: 572747 - DNA, 25 bp, Homo sapien
taaacagctcaccagagtctgactt

SEQ ID NO: 572748 - DNA, 25 bp, Homo sapien
ggcatgaggcgggtaaacagctcac

SEQ ID NO: 572749 - DNA, 25 bp, Homo sapien
caccagagtctgacttgctcttgaa

SEQ ID NO: 572750 - DNA, 25 bp, Homo sapien
tgacttgctcttgaaagggcccgtt

SEQ ID NO: 572751 - DNA, 25 bp, Homo sapien
agccagcgcgtcgatccaggtctaa

SEQ ID NO: 572752 - DNA, 25 bp, Homo sapien
ttttccctgagccagcgcgtcgatc

SEQ ID NO: 572753 - DNA, 25 bp, Homo sapien
agcgcgtcgatccaggtctaactcc

SEQ ID NO: 572754 - DNA, 25 bp, Homo sapien
ctgagccagcgcgtcgatccaggtc

SEQ ID NO: 572755 - DNA, 25 bp, Homo sapien
agacatcggccgttatgatggccaa

SEQ ID NO: 572756 - DNA, 25 bp, Homo sapien
ttttacatcccatacagctctatgt

SEQ ID NO: 572757 - DNA, 25 bp, Homo sapien
cagcaatgcaatgagacatcggccg

SEQ ID NO: 572758 - DNA, 25 bp, Homo sapien
gttatgatggccaattaaactactg

SEQ ID NO: 572759 - DNA, 25 bp, Homo sapien
acagagctacaggaaaaccctgact

SEQ ID NO: 572760 - DNA, 25 bp, Homo sapien
caacagagctacaggaaaaccctga

SEQ ID NO: 572761 - DNA, 25 bp, Homo sapien
aaagcaacagagctacaggaaaacc

SEQ ID NO: 572762 - DNA, 25 bp, Homo sapien
agcaacagagctacaggaaaaccct

SEQ ID NO: 572763 - DNA, 25 bp, Homo sapien
ccgcaggaacctcaggcagaatgtt

SEQ ID NO: 572764 - DNA, 25 bp, Homo sapien
tcagggctaactggatgctgatgac

SEQ ID NO: 572765 - DNA, 25 bp, Homo sapien
tccgggattggaaaactggtcttca

SEQ ID NO: 572766 - DNA, 25 bp, Homo sapien
aatgttctgcacacgttttccggga

SEQ ID NO: 572767 - DNA, 25 bp, Homo sapien
ggatccctcaggtcagtactgactt

SEQ ID NO: 572768 - DNA, 25 bp, Homo sapien
ccgctaggcttgtcttttcctatct

SEQ ID NO: 572769 - DNA, 25 bp, Homo sapien
ctagcgaagggccacagaggtgctt

SEQ ID NO: 572770 - DNA, 25 bp, Homo sapien
tttctgaacccgctaggcttgtctt

SEQ ID NO: 572771 - DNA, 25 bp, Homo sapien
ttaccgaaggtacacggcaggatgt

SEQ ID NO: 572772 - DNA, 25 bp, Homo sapien
taccgaaggtacacggcaggatgta

SEQ ID NO: 572773 - DNA, 25 bp, Homo sapien
gatgtattgcttttgctcctaagta

SEQ ID NO: 572774 - DNA, 25 bp, Homo sapien
gcaggatgtattgcttttgctccta

SEQ ID NO: 572775 - DNA, 25 bp, Homo sapien
accatcagccggagctttgccaaca

SEQ ID NO: 572776 - DNA, 25 bp, Homo sapien
caccatcagccggagctttgccaac

SEQ ID NO: 572777 - DNA, 25 bp, Homo sapien
aattcaccatcagccggagctttgc

SEQ ID NO: 572778 - DNA, 25 bp, Homo sapien
tcaccatcagccggagctttgccaa

SEQ ID NO: 572779 - DNA, 25 bp, Homo sapien
ctgggaaggcaaaaagccaaaccat

SEQ ID NO: 572780 - DNA, 25 bp, Homo sapien
gatggtagaactggaggtgtggatc

SEQ ID NO: 572781 - DNA, 25 bp, Homo sapien
gtggatccacagctggaatgttcct

SEQ ID NO: 572782 - DNA, 25 bp, Homo sapien
gtagaactggaggtgtggatccaca

SEQ ID NO: 572783 - DNA, 25 bp, Homo sapien
gatccacagctggaatgttcctgct

SEQ ID NO: 572784 - DNA, 25 bp, Homo sapien
gagtggttccggcacgggcaaactg

SEQ ID NO: 572785 - DNA, 25 bp, Homo sapien
gtggttccggcacgggcaaactgaa

SEQ ID NO: 572786 - DNA, 25 bp, Homo sapien
cgcaggcccggagtggttccggcac

SEQ ID NO: 572787 - DNA, 25 bp, Homo sapien
actggtgatggaggtcgcaggcccg

SEQ ID NO: 572788 - DNA, 25 bp, Homo sapien
gctgttactgctcaccccttggtca

SEQ ID NO: 572789 - DNA, 25 bp, Homo sapien
ttactgctcaccccttggtcaatgt

SEQ ID NO: 572790 - DNA, 25 bp, Homo sapien
ctgctgttactgctcaccccttggt

SEQ ID NO: 572791 - DNA, 25 bp, Homo sapien
tgttactgctcaccccttggtcaat

SEQ ID NO: 572792 - DNA, 25 bp, Homo sapien
ggggacaggcttgttccacttcaag

SEQ ID NO: 572793 - DNA, 25 bp, Homo sapien
aggggacaggcttgttccacttcaa

SEQ ID NO: 572794 - DNA, 25 bp, Homo sapien
tattttttagctctctcaaagggca

SEQ ID NO: 572795 - DNA, 25 bp, Homo sapien
tctcaaagggcaggtacaatagaaa

SEQ ID NO: 572796 - DNA, 25 bp, Homo sapien
agggcaggtacaatagaaagtccct

SEQ ID NO: 572797 - DNA, 25 bp, Homo sapien
ttttttagctctctcaaagggcagg

SEQ ID NO: 572798 - DNA, 25 bp, Homo sapien
gggacaaggtctgctctggccatgc

SEQ ID NO: 572799 - DNA, 25 bp, Homo sapien
gcggagacgccagtggtgagtgagc

SEQ ID NO: 572800 - DNA, 25 bp, Homo sapien
cggagacgccagtggtgagtgagcg

SEQ ID NO: 572801 - DNA, 25 bp, Homo sapien
acacatgcaggttggcacggccccg

SEQ ID NO: 572802 - DNA, 25 bp, Homo sapien
aaacacatgcaggttggcacggccc

SEQ ID NO: 572803 - DNA, 25 bp, Homo sapien
tcaaacacatgcaggttggcacggc

SEQ ID NO: 572804 - DNA, 25 bp, Homo sapien
caaacacatgcaggttggcacggcc

SEQ ID NO: 572805 - DNA, 25 bp, Homo sapien
gggtacagtgggaaatgcaggttcc

SEQ ID NO: 572806 - DNA, 25 bp, Homo sapien
tgggggtacagtgggaaatgcaggt

SEQ ID NO: 572807 - DNA, 25 bp, Homo sapien
tgagctgctggatagagctgccaca

SEQ ID NO: 572808 - DNA, 25 bp, Homo sapien
aatgcaggttcctcctgagctgctg

SEQ ID NO: 572809 - DNA, 25 bp, Homo sapien
acagcaagcttcctcagggttgtgc

SEQ ID NO: 572810 - DNA, 25 bp, Homo sapien
tgcggaggccatagttggtccattt

SEQ ID NO: 572811 - DNA, 25 bp, Homo sapien
caagcttcctcagggttgtgcgaat

SEQ ID NO: 572812 - DNA, 25 bp, Homo sapien
caggtagccaaagatgcggaggcca

SEQ ID NO: 572813 - DNA, 25 bp, Homo sapien
cctggtcatcgaggctcagccagaa

SEQ ID NO: 572814 - DNA, 25 bp, Homo sapien
ccagaactccgcgttgtcatctgca

SEQ ID NO: 572815 - DNA, 25 bp, Homo sapien
gagacctggtcatcgaggctcagcc

SEQ ID NO: 572816 - DNA, 25 bp, Homo sapien
agaactccgcgttgtcatctgcagc

SEQ ID NO: 572817 - DNA, 25 bp, Homo sapien
tcaccggcttggaaatttggctccg

SEQ ID NO: 572818 - DNA, 25 bp, Homo sapien
ctcaccggcttggaaatttggctcc

SEQ ID NO: 572819 - DNA, 25 bp, Homo sapien
cggcttggaaatttggctccgaaat

SEQ ID NO: 572820 - DNA, 25 bp, Homo sapien
caccggcttggaaatttggctccga

SEQ ID NO: 572821 - DNA, 25 bp, Homo sapien
tgcaacttccacgtggtcggtgccc

SEQ ID NO: 572822 - DNA, 25 bp, Homo sapien
acgtggtcggtgccctcctcattct

SEQ ID NO: 572823 - DNA, 25 bp, Homo sapien
gcaacttccacgtggtcggtgccct

SEQ ID NO: 572824 - DNA, 25 bp, Homo sapien
ggtcggtgccctcctcattctgctt

SEQ ID NO: 572825 - DNA, 25 bp, Homo sapien
cttggctccagggtcgttccgtcgc

SEQ ID NO: 572826 - DNA, 25 bp, Homo sapien
tggctccagggtcgttccgtcgcca

SEQ ID NO: 572827 - DNA, 25 bp, Homo sapien
acttggctccagggtcgttccgtcg

SEQ ID NO: 572828 - DNA, 25 bp, Homo sapien
ttggctccagggtcgttccgtcgcc

SEQ ID NO: 572829 - DNA, 25 bp, Homo sapien
ggaaagaaagcaggaggctgtgtgg

SEQ ID NO: 572830 - DNA, 25 bp, Homo sapien
gggaggaaagaaagcaggaggctgt

SEQ ID NO: 572831 - DNA, 25 bp, Homo sapien
tgggcgcagggaggaaagaaagcag

SEQ ID NO: 572832 - DNA, 25 bp, Homo sapien
ctgggcgcagggaggaaagaaagca

SEQ ID NO: 572833 - DNA, 25 bp, Homo sapien
aagcatgtcagcgggcggctgctca

SEQ ID NO: 572834 - DNA, 25 bp, Homo sapien
cgaagcatgtcagcgggcggctgct

SEQ ID NO: 572835 - DNA, 25 bp, Homo sapien
gaagcatgtcagcgggcggctgctc

SEQ ID NO: 572836 - DNA, 25 bp, Homo sapien
ccgaagcatgtcagcgggcggctgc

SEQ ID NO: 572837 - DNA, 25 bp, Homo sapien
tatgcatgttctatgttacaaggac

SEQ ID NO: 572838 - DNA, 25 bp, Homo sapien
gtgattgggatacttggcaggtctc

SEQ ID NO: 572839 - DNA, 25 bp, Homo sapien
cgataaaaagttctacggtgattgg

SEQ ID NO: 572840 - DNA, 25 bp, Homo sapien
gtgtccccagaaaggacgccaagcg

SEQ ID NO: 572841 - DNA, 25 bp, Homo sapien
tctgtattcgcaagcggcagctgtg

SEQ ID NO: 572842 - DNA, 25 bp, Homo sapien
cagctgtgttctgccgacgtctgtg

SEQ ID NO: 572843 - DNA, 25 bp, Homo sapien
cagggccctttctgtattcgcaagc

SEQ ID NO: 572844 - DNA, 25 bp, Homo sapien
cgaaactggggctgaagtcctctgc

SEQ ID NO: 572845 - DNA, 25 bp, Homo sapien
aaaccggagtccctggtagcgctgc

SEQ ID NO: 572846 - DNA, 25 bp, Homo sapien
atagctgggtttgtagggacagtca

SEQ ID NO: 572847 - DNA, 25 bp, Homo sapien
ggaagcccatccaccagatagctgg

SEQ ID NO: 572848 - DNA, 25 bp, Homo sapien
ggacagtcaggcaggacgtggcgga

SEQ ID NO: 572849 - DNA, 25 bp, Homo sapien
aggagagtggccacgctgcctgtct

SEQ ID NO: 572850 - DNA, 25 bp, Homo sapien
tctggcttccgcatgggttctgggt

SEQ ID NO: 572851 - DNA, 25 bp, Homo sapien
gacctggtgatgcctcctgacctct

SEQ ID NO: 572852 - DNA, 25 bp, Homo sapien
ctctagatctggatgcacaggagag

SEQ ID NO: 572853 - DNA, 25 bp, Homo sapien
ctggctgggatcacatagggctgct

SEQ ID NO: 572854 - DNA, 25 bp, Homo sapien
ccgaatgaaacgtggtgatgcagat

SEQ ID NO: 572855 - DNA, 25 bp, Homo sapien
gggttgctctgagcgccgaatgaaa

SEQ ID NO: 572856 - DNA, 25 bp, Homo sapien
tgttatgctagtgatcccaggccct

SEQ ID NO: 572857 - DNA, 25 bp, Homo sapien
tccatgtggctcaggcgggtatagt

SEQ ID NO: 572858 - DNA, 25 bp, Homo sapien
tcattggggtaaacaaaagacagat

SEQ ID NO: 572859 - DNA, 25 bp, Homo sapien
ccatgtggctcaggcgggtatagtc

SEQ ID NO: 572860 - DNA, 25 bp, Homo sapien
gcgggtatagtcattggggtaaaca

SEQ ID NO: 572861 - DNA, 25 bp, Homo sapien
accttcctgccccactcagtgtctc

SEQ ID NO: 572862 - DNA, 25 bp, Homo sapien
ccttcctgccccactcagtgtctct

SEQ ID NO: 572863 - DNA, 25 bp, Homo sapien
gtcaccttcctgccccactcagtgt

SEQ ID NO: 572864 - DNA, 25 bp, Homo sapien
tcctgccccactcagtgtctctcac

SEQ ID NO: 572865 - DNA, 25 bp, Homo sapien
ctcaggctggtcaatcttgatgtac

SEQ ID NO: 572866 - DNA, 25 bp, Homo sapien
cttctcaggctggtcaatcttgatg

SEQ ID NO: 572867 - DNA, 25 bp, Homo sapien
caggctggtcaatcttgatgtactc

SEQ ID NO: 572868 - DNA, 25 bp, Homo sapien
ttctcaggctggtcaatcttgatgt

SEQ ID NO: 572869 - DNA, 25 bp, Homo sapien
taaacggcatcacatgcccggcagg

SEQ ID NO: 572870 - DNA, 25 bp, Homo sapien
tcacgtgatttggatcttgagctcc

SEQ ID NO: 572871 - DNA, 25 bp, Homo sapien
gatcatacgtgtgacgcaccatggg

SEQ ID NO: 572872 - DNA, 25 bp, Homo sapien
tggaaacagaccatggtcgcccctc

SEQ ID NO: 572873 - DNA, 25 bp, Homo sapien
ggactcttctagaaggttttcctca

SEQ ID NO: 572874 - DNA, 25 bp, Homo sapien
gactcttctagaaggttttcctcaa

SEQ ID NO: 572875 - DNA, 25 bp, Homo sapien
acgctgtggagttccgcttggagaa

SEQ ID NO: 572876 - DNA, 25 bp, Homo sapien
ccaggaggccacttgtcggaatgag

SEQ ID NO: 572877 - DNA, 25 bp, Homo sapien
aatgaggtgaatcttggctgggctc

SEQ ID NO: 572878 - DNA, 25 bp, Homo sapien
gagccaggagtttccgcaggcttcg

SEQ ID NO: 572879 - DNA, 25 bp, Homo sapien
tgctctgcgatgtacgactccacct

SEQ ID NO: 572880 - DNA, 25 bp, Homo sapien
tgcgatgtacgactccacctggttc

SEQ ID NO: 572881 - DNA, 25 bp, Homo sapien
tgtacgactccacctggttcagcca

SEQ ID NO: 572882 - DNA, 25 bp, Homo sapien
ccgtctctgctctgcgatgtacgac

SEQ ID NO: 572883 - DNA, 25 bp, Homo sapien
ggggcctgaggccgcatcctgtcac

SEQ ID NO: 572884 - DNA, 25 bp, Homo sapien
ccaggggcctgaggccgcatcctgt

SEQ ID NO: 572885 - DNA, 25 bp, Homo sapien
cctccacttgtccttcctggcctgc

SEQ ID NO: 572886 - DNA, 25 bp, Homo sapien
ccacttgtccttcctggcctgcggc

SEQ ID NO: 572887 - DNA, 25 bp, Homo sapien
caaacacaggtacgtactcgaacac

SEQ ID NO: 572888 - DNA, 25 bp, Homo sapien
ggtcaaacacaggtacgtactcgaa

SEQ ID NO: 572889 - DNA, 25 bp, Homo sapien
cacaggtacgtactcgaacacctca

SEQ ID NO: 572890 - DNA, 25 bp, Homo sapien
cgggtcaaacacaggtacgtactcg

SEQ ID NO: 572891 - DNA, 25 bp, Homo sapien
ttcaagaagactcgcgtgacctcca

SEQ ID NO: 572892 - DNA, 25 bp, Homo sapien
gaagtcgagattccgggcactgaag

SEQ ID NO: 572893 - DNA, 25 bp, Homo sapien
cagctcagatcgatccagtcagtcc

SEQ ID NO: 572894 - DNA, 25 bp, Homo sapien
gaagcagcaggttgccagatgtgtt

SEQ ID NO: 572895 - DNA, 25 bp, Homo sapien
aatggtgattttaatgttatataaa

SEQ ID NO: 572896 - DNA, 25 bp, Homo sapien
ctgaaaggtacaccttaaaatggtg

SEQ ID NO: 572897 - DNA, 25 bp, Homo sapien
cactgaaaggtacaccttaaaatgg

SEQ ID NO: 572898 - DNA, 25 bp, Homo sapien
tgaaaggtacaccttaaaatggtga

SEQ ID NO: 572899 - DNA, 25 bp, Homo sapien
gcaaaaagcccgatataaaggccac

SEQ ID NO: 572900 - DNA, 25 bp, Homo sapien
tacaacacgaatgaaacttgtgcta

SEQ ID NO: 572901 - DNA, 25 bp, Homo sapien
acttgtgctaagtgaatattctgca

SEQ ID NO: 572902 - DNA, 25 bp, Homo sapien
taaaggccacacattacatggttcc

SEQ ID NO: 572903 - DNA, 25 bp, Homo sapien
gccactggctggctatagggcctca

SEQ ID NO: 572904 - DNA, 25 bp, Homo sapien
gggcctcaggcaagattcgcaatct

SEQ ID NO: 572905 - DNA, 25 bp, Homo sapien
tttccacactgggagggtagcacgg

SEQ ID NO: 572906 - DNA, 25 bp, Homo sapien
aaagctagttgttgggagaccctgg

SEQ ID NO: 572907 - DNA, 25 bp, Homo sapien
tgtctcctacggttgtgtgggtccc

SEQ ID NO: 572908 - DNA, 25 bp, Homo sapien
tgttccaacagttcaagctccagga

SEQ ID NO: 572909 - DNA, 25 bp, Homo sapien
tgggcccgggtattcaggacctgtc

SEQ ID NO: 572910 - DNA, 25 bp, Homo sapien
tagctggtcctgacgcttttccacg

SEQ ID NO: 572911 - DNA, 25 bp, Homo sapien
ggtgacctggaacaggttttccatg

SEQ ID NO: 572912 - DNA, 25 bp, Homo sapien
ttgaagtgtgggtcaccggtgacct

SEQ ID NO: 572913 - DNA, 25 bp, Homo sapien
ccatgtcctcactgctatagtcagt

SEQ ID NO: 572914 - DNA, 25 bp, Homo sapien
tgaattgctgtacccagcgtgcctg

SEQ ID NO: 572915 - DNA, 25 bp, Homo sapien
tccacttagcttcacgtactggtag

SEQ ID NO: 572916 - DNA, 25 bp, Homo sapien
gcctgaagtccagctgagcgttcaa

SEQ ID NO: 572917 - DNA, 25 bp, Homo sapien
cttcacgaggtctatgccagcctga

SEQ ID NO: 572918 - DNA, 25 bp, Homo sapien
cagctgagcgttcaaagtttccact

SEQ ID NO: 572919 - DNA, 25 bp, Homo sapien
gcttccgaatggcatcgatgactcc

SEQ ID NO: 572920 - DNA, 25 bp, Homo sapien
ggaggtcacagaggaagatgatgct

SEQ ID NO: 572921 - DNA, 25 bp, Homo sapien
tgcagcctcatcaccatgggggcaa

SEQ ID NO: 572922 - DNA, 25 bp, Homo sapien
cacagtgcttccgaatggcatcgat

SEQ ID NO: 572923 - DNA, 25 bp, Homo sapien
aagcagcccgaacccattcacctcc

SEQ ID NO: 572924 - DNA, 25 bp, Homo sapien
caggtcagacttgtagatgccaagc

SEQ ID NO: 572925 - DNA, 25 bp, Homo sapien
gaactccttggtgttcatgccccca

SEQ ID NO: 572926 - DNA, 25 bp, Homo sapien
ccagcggtctcggaactccttggtg

SEQ ID NO: 572927 - DNA, 25 bp, Homo sapien
agggagagacgctccacgtccaggc

SEQ ID NO: 572928 - DNA, 25 bp, Homo sapien
acggctccacatgcctcgcttggaa

SEQ ID NO: 572929 - DNA, 25 bp, Homo sapien
tacagcgtcttcatctggcgacggc

SEQ ID NO: 572930 - DNA, 25 bp, Homo sapien
cacgtccaggcccgcttggagtatc

SEQ ID NO: 572931 - DNA, 25 bp, Homo sapien
catccggaggaagttaatgccctaa

SEQ ID NO: 572932 - DNA, 25 bp, Homo sapien
tctggtctgacgtgagccatccgga

SEQ ID NO: 572933 - DNA, 25 bp, Homo sapien
catgtgccaaactcgtgctctcggg

SEQ ID NO: 572934 - DNA, 25 bp, Homo sapien
cagtgccgtggtttggaccgtcaca

SEQ ID NO: 572935 - DNA, 25 bp, Homo sapien
tcttcctgagtaaaccgcagtgcag

SEQ ID NO: 572936 - DNA, 25 bp, Homo sapien
tctgctgaacagaaaatgcctagtc

SEQ ID NO: 572937 - DNA, 25 bp, Homo sapien
cagtttagaagcagccactcgttgg

SEQ ID NO: 572938 - DNA, 25 bp, Homo sapien
tttgcctgggccaaatataacgagg

SEQ ID NO: 572939 - DNA, 25 bp, Homo sapien
tgccattagtggttgactctgcccc

SEQ ID NO: 572940 - DNA, 25 bp, Homo sapien
ctctctgaatgcagcctgggaccca

SEQ ID NO: 572941 - DNA, 25 bp, Homo sapien
cactgctgtgttaatggctctctgc

SEQ ID NO: 572942 - DNA, 25 bp, Homo sapien
gggcacataaaacagggttcctggc

SEQ ID NO: 572943 - DNA, 25 bp, Homo sapien
ttagttcggcccatccagacttgcg

SEQ ID NO: 572944 - DNA, 25 bp, Homo sapien
ccatttcagcttcggttgattctcg

SEQ ID NO: 572945 - DNA, 25 bp, Homo sapien
tgacgcacgcgtttggtgggtttta

SEQ ID NO: 572946 - DNA, 25 bp, Homo sapien
ttctcgaactctggcttgacgcacg

SEQ ID NO: 572947 - DNA, 25 bp, Homo sapien
ggaggccgccagcccacccggacca

SEQ ID NO: 572948 - DNA, 25 bp, Homo sapien
cgcttgtggcgggtggaggccgcca

SEQ ID NO: 572949 - DNA, 25 bp, Homo sapien
gagacctgaggaagataccgagagc

SEQ ID NO: 572950 - DNA, 25 bp, Homo sapien
tctcagcctgggaaaatgggaaccg

SEQ ID NO: 572951 - DNA, 25 bp, Homo sapien
tatgagtcttgggtcagtgtcctgc

SEQ ID NO: 572952 - DNA, 25 bp, Homo sapien
tccaggtgtcattggttggccagat

SEQ ID NO: 572953 - DNA, 25 bp, Homo sapien
gcgcgtggctctccgctccagccca

SEQ ID NO: 572954 - DNA, 25 bp, Homo sapien
gcagggctcccgcgcgtggctctcc

SEQ ID NO: 572955 - DNA, 25 bp, Homo sapien
cctctcttggggcagtcccattttt

SEQ ID NO: 572956 - DNA, 25 bp, Homo sapien
ctctcttggggcagtcccattttta

SEQ ID NO: 572957 - DNA, 25 bp, Homo sapien
cagtcctgccagttctgtttcctca

SEQ ID NO: 572958 - DNA, 25 bp, Homo sapien
agtcctgccagttctgtttcctcac

SEQ ID NO: 572959 - DNA, 25 bp, Homo sapien
ccagtcctgccagttctgtttcctc

SEQ ID NO: 572960 - DNA, 25 bp, Homo sapien
gcaggtgcccctttcacacaagagc

SEQ ID NO: 572961 - DNA, 25 bp, Homo sapien
cacaagagccacgttcctggaaagt

SEQ ID NO: 572962 - DNA, 25 bp, Homo sapien
tgcatctgtgcaggttcccgcaggt

SEQ ID NO: 572963 - DNA, 25 bp, Homo sapien
tgttcatcaactgagtcctattggg

SEQ ID NO: 572964 - DNA, 25 bp, Homo sapien
ctgatcagctgtaagcatcagccac

SEQ ID NO: 572965 - DNA, 25 bp, Homo sapien
tctgatcagctgtaagcatcagcca

SEQ ID NO: 572966 - DNA, 25 bp, Homo sapien
gagaacctagggactgtcataccat

SEQ ID NO: 572967 - DNA, 25 bp, Homo sapien
ttcacacagaccacatgatggtgag

SEQ ID NO: 572968 - DNA, 25 bp, Homo sapien
actgccctgatggttggttcacaca

SEQ ID NO: 572969 - DNA, 25 bp, Homo sapien
gaaaagaggcaccactctcgctgaa

SEQ ID NO: 572970 - DNA, 25 bp, Homo sapien
agatgggcaagctcgggcagccctc

SEQ ID NO: 572971 - DNA, 25 bp, Homo sapien
gggcaagctcgggcagccctctcca

SEQ ID NO: 572972 - DNA, 25 bp, Homo sapien
tagccctgtctggtaagatgggcaa

SEQ ID NO: 572973 - DNA, 25 bp, Homo sapien
ctaaatgaggatgcaaacccagttc

SEQ ID NO: 572974 - DNA, 25 bp, Homo sapien
caaacccagttcatgcatttattcc

SEQ ID NO: 572975 - DNA, 25 bp, Homo sapien
aggatgcaaacccagttcatgcatt

SEQ ID NO: 572976 - DNA, 25 bp, Homo sapien
gagcattcacaatgctctgccagtt

SEQ ID NO: 572977 - DNA, 25 bp, Homo sapien
tgggctgagtaacccaacaggctcc

SEQ ID NO: 572978 - DNA, 25 bp, Homo sapien
ggctcctggagtagagctgaacctg

SEQ ID NO: 572979 - DNA, 25 bp, Homo sapien
tcttgggatattgcgctttctgtct

SEQ ID NO: 572980 - DNA, 25 bp, Homo sapien
tcctatgtcaacacctgggctgagt

SEQ ID NO: 572981 - DNA, 25 bp, Homo sapien
agaaggctgtgctcgctgacccttt

SEQ ID NO: 572982 - DNA, 25 bp, Homo sapien
tcattttccgttgagacttcctgtt

SEQ ID NO: 572983 - DNA, 25 bp, Homo sapien
accaggctgacctcattttccgttg

SEQ ID NO: 572984 - DNA, 25 bp, Homo sapien
ggctgtgctcgctgacccttttcct

SEQ ID NO: 572985 - DNA, 25 bp, Homo sapien
cttggagaacaagtgacttcagact

SEQ ID NO: 572986 - DNA, 25 bp, Homo sapien
gcttggagaacaagtgacttcagac

SEQ ID NO: 572987 - DNA, 25 bp, Homo sapien
tgttggatggacttgagtgtcaggg

SEQ ID NO: 572988 - DNA, 25 bp, Homo sapien
cacctggtgttggatggacttgagt

SEQ ID NO: 572989 - DNA, 25 bp, Homo sapien
gttggatggacttgagtgtcagggc

SEQ ID NO: 572990 - DNA, 25 bp, Homo sapien
tggtgttggatggacttgagtgtca

SEQ ID NO: 572991 - DNA, 25 bp, Homo sapien
cagccgcactttggcattgtccagc

SEQ ID NO: 572992 - DNA, 25 bp, Homo sapien
tttaaccacatactgcagccgcact

SEQ ID NO: 572993 - DNA, 25 bp, Homo sapien
ctctccacgggacttttaaccacat

SEQ ID NO: 572994 - DNA, 25 bp, Homo sapien
tactgcagccgcactttggcattgt

SEQ ID NO: 572995 - DNA, 25 bp, Homo sapien
caagtgtgtttgccttttgctaccc

SEQ ID NO: 572996 - DNA, 25 bp, Homo sapien
caagggctcccggtaaccaagtgtg

SEQ ID NO: 572997 - DNA, 25 bp, Homo sapien
ctcaagggctcccggtaaccaagtg

SEQ ID NO: 572998 - DNA, 25 bp, Homo sapien
gaggccttggctctaaaccatctga

SEQ ID NO: 572999 - DNA, 25 bp, Homo sapien
gggacccatggagaatacacgagac

SEQ ID NO: 573000 - DNA, 25 bp, Homo sapien
agagctctgagaggccattggaggc

SEQ ID NO: 573001 - DNA, 25 bp, Homo sapien
acgagaccagtttttctgcacctga

SEQ ID NO: 573002 - DNA, 25 bp, Homo sapien
cctctcttccgggagactatctgca

SEQ ID NO: 573003 - DNA, 25 bp, Homo sapien
ctctcttccgggagactatctgcag

SEQ ID NO: 573004 - DNA, 25 bp, Homo sapien
tctcttccgggagactatctgcagc

SEQ ID NO: 573005 - DNA, 25 bp, Homo sapien
tacctttgcaatattccacctgagt

SEQ ID NO: 573006 - DNA, 25 bp, Homo sapien
ctgcccagagaagctagccttgagc

SEQ ID NO: 573007 - DNA, 25 bp, Homo sapien
ccttgagctgatgtctacctttgca

SEQ ID NO: 573008 - DNA, 25 bp, Homo sapien
gtgcatgctgtcttttgctgatctg

SEQ ID NO: 573009 - DNA, 25 bp, Homo sapien
cactaacagacagggcaggctgccg

SEQ ID NO: 573010 - DNA, 25 bp, Homo sapien
acagggcaggctgccggggcaggaa

SEQ ID NO: 573011 - DNA, 25 bp, Homo sapien
agggcaggctgccggggcaggaacc

SEQ ID NO: 573012 - DNA, 25 bp, Homo sapien
agcactaacagacagggcaggctgc

SEQ ID NO: 573013 - DNA, 25 bp, Homo sapien
tcagtattcagggatgccttgatga

SEQ ID NO: 573014 - DNA, 25 bp, Homo sapien
tcaatgcctttgtaggtagcaggca

SEQ ID NO: 573015 - DNA, 25 bp, Homo sapien
agggccctgtggcacttagtgcatc

SEQ ID NO: 573016 - DNA, 25 bp, Homo sapien
gcactggtaggaggcagtcagtatt

SEQ ID NO: 573017 - DNA, 25 bp, Homo sapien
tgggtctgtgcgcagggccggaagc

SEQ ID NO: 573018 - DNA, 25 bp, Homo sapien
gtctgtgcgcagggccggaagcctg

SEQ ID NO: 573019 - DNA, 25 bp, Homo sapien
ttgggtctgtgcgcagggccggaag

SEQ ID NO: 573020 - DNA, 25 bp, Homo sapien
ggtctgtgcgcagggccggaagcct

SEQ ID NO: 573021 - DNA, 25 bp, Homo sapien
cctagaacgtcaggcttgaagctga

SEQ ID NO: 573022 - DNA, 25 bp, Homo sapien
tcaggcttgaagctgaccccttctt

SEQ ID NO: 573023 - DNA, 25 bp, Homo sapien
gaacgtcaggcttgaagctgacccc

SEQ ID NO: 573024 - DNA, 25 bp, Homo sapien
tcccccctagaacgtcaggcttgaa

SEQ ID NO: 573025 - DNA, 25 bp, Homo sapien
aaaagtttgcaaatgcacccttgat

SEQ ID NO: 573026 - DNA, 25 bp, Homo sapien
tgcaaatgcacccttgatcctagca

SEQ ID NO: 573027 - DNA, 25 bp, Homo sapien
aagtttgcaaatgcacccttgatcc

SEQ ID NO: 573028 - DNA, 25 bp, Homo sapien
tttgcaaatgcacccttgatcctag

SEQ ID NO: 573029 - DNA, 25 bp, Homo sapien
tcagacaccctggggctggttagga

SEQ ID NO: 573030 - DNA, 25 bp, Homo sapien
cagcgtgcctcagacaccctggggc

SEQ ID NO: 573031 - DNA, 25 bp, Homo sapien
gcgtgcctcagacaccctggggctg

SEQ ID NO: 573032 - DNA, 25 bp, Homo sapien
cctcagacaccctggggctggttag

SEQ ID NO: 573033 - DNA, 25 bp, Homo sapien
gacatgttggggtcacaagaaagag

SEQ ID NO: 573034 - DNA, 25 bp, Homo sapien
gacaggaatgttgagtcttgccagc

SEQ ID NO: 573035 - DNA, 25 bp, Homo sapien
tgtgactcatacaagtggttcaagc

SEQ ID NO: 573036 - DNA, 25 bp, Homo sapien
aagtggttcaagctgctcagtccca

SEQ ID NO: 573037 - DNA, 25 bp, Homo sapien
gttcttccatctcaataccttggta

SEQ ID NO: 573038 - DNA, 25 bp, Homo sapien
taccttggtaatcatgtgactgact

SEQ ID NO: 573039 - DNA, 25 bp, Homo sapien
cagttcttccatctcaataccttgg

SEQ ID NO: 573040 - DNA, 25 bp, Homo sapien
caataccttggtaatcatgtgactg

SEQ ID NO: 573041 - DNA, 25 bp, Homo sapien
cattcttccgggactgaagttagga

SEQ ID NO: 573042 - DNA, 25 bp, Homo sapien
tgtaacattggagccacagtggagg

SEQ ID NO: 573043 - DNA, 25 bp, Homo sapien
aaggactctagacacaggcaaggca

SEQ ID NO: 573044 - DNA, 25 bp, Homo sapien
tatgaagatcacttctaaccgcagt

SEQ ID NO: 573045 - DNA, 25 bp, Homo sapien
cggctcagaactagccccgcagctc

SEQ ID NO: 573046 - DNA, 25 bp, Homo sapien
actagccccgcagctccttcacctt

SEQ ID NO: 573047 - DNA, 25 bp, Homo sapien
gctcagaactagccccgcagctcct

SEQ ID NO: 573048 - DNA, 25 bp, Homo sapien
tttcccggctcagaactagccccgc

SEQ ID NO: 573049 - DNA, 25 bp, Homo sapien
tctccagccctaaaatgacgacacg

SEQ ID NO: 573050 - DNA, 25 bp, Homo sapien
cagttccagggacaaagccgtgttc

SEQ ID NO: 573051 - DNA, 25 bp, Homo sapien
ttcgttgcaaagcagccgctcggtg

SEQ ID NO: 573052 - DNA, 25 bp, Homo sapien
cctccctagtttgtgagccgcgtcg

SEQ ID NO: 573053 - DNA, 25 bp, Homo sapien
tggtactcaatggtgttcctgggaa

SEQ ID NO: 573054 - DNA, 25 bp, Homo sapien
cagactctagttcagtggtactcaa

SEQ ID NO: 573055 - DNA, 25 bp, Homo sapien
cacttccgctaatgctgaggcagca

SEQ ID NO: 573056 - DNA, 25 bp, Homo sapien
caatgaagaccatggttcctgcgct

SEQ ID NO: 573057 - DNA, 25 bp, Homo sapien
gcattttaccaagatccgctgcgat

SEQ ID NO: 573058 - DNA, 25 bp, Homo sapien
tataacgtctaacggtgaaacagcc

SEQ ID NO: 573059 - DNA, 25 bp, Homo sapien
tgttaccagtaaggaatccaaggcc

SEQ ID NO: 573060 - DNA, 25 bp, Homo sapien
tctcaaatacttgggaccttcagga

SEQ ID NO: 573061 - DNA, 25 bp, Homo sapien
taaatggaggctagtggcgccacag

SEQ ID NO: 573062 - DNA, 25 bp, Homo sapien
cagagtattcggtggtgtgccatca

SEQ ID NO: 573063 - DNA, 25 bp, Homo sapien
ctaagggaaattggtcgtggagcca

SEQ ID NO: 573064 - DNA, 25 bp, Homo sapien
cgtggagccatcaaagagggcaaat

SEQ ID NO: 573065 - DNA, 25 bp, Homo sapien
tccttgttgtgaactgccttcacta

SEQ ID NO: 573066 - DNA, 25 bp, Homo sapien
gtgaactgccttcactagggttggg

SEQ ID NO: 573067 - DNA, 25 bp, Homo sapien
ttgttgtgaactgccttcactaggg

SEQ ID NO: 573068 - DNA, 25 bp, Homo sapien
aactgccttcactagggttgggaag

SEQ ID NO: 573069 - DNA, 25 bp, Homo sapien
tgtctgcccggatacacattttcag

SEQ ID NO: 573070 - DNA, 25 bp, Homo sapien
cagtcctaatctgtacacagcctca

SEQ ID NO: 573071 - DNA, 25 bp, Homo sapien
ttttcagtcctaatctgtacacagc

SEQ ID NO: 573072 - DNA, 25 bp, Homo sapien
cctcgggtgtggagtccagagacca

SEQ ID NO: 573073 - DNA, 25 bp, Homo sapien
tcccaggtagtcctgtagcacctgc

SEQ ID NO: 573074 - DNA, 25 bp, Homo sapien
ctcccaggtagtcctgtagcacctg

SEQ ID NO: 573075 - DNA, 25 bp, Homo sapien
tctcccaggtagtcctgtagcacct

SEQ ID NO: 573076 - DNA, 25 bp, Homo sapien
ttctcccaggtagtcctgtagcacc

SEQ ID NO: 573077 - DNA, 25 bp, Homo sapien
caaaaggtcacctatcagtgtgcca

SEQ ID NO: 573078 - DNA, 25 bp, Homo sapien
gagaaaacatcgaccttcaagtaag

SEQ ID NO: 573079 - DNA, 25 bp, Homo sapien
gccactggtgaaaatgatgctgtca

SEQ ID NO: 573080 - DNA, 25 bp, Homo sapien
gatgaatggcaggtctgtcccgcca

SEQ ID NO: 573081 - DNA, 25 bp, Homo sapien
cttttttgtcccacagcccaccata

SEQ ID NO: 573082 - DNA, 25 bp, Homo sapien
tgtcccacagcccaccataagggtt

SEQ ID NO: 573083 - DNA, 25 bp, Homo sapien
ttttgtcccacagcccaccataagg

SEQ ID NO: 573084 - DNA, 25 bp, Homo sapien
agctcgcccccacgctttgattttt

SEQ ID NO: 573085 - DNA, 25 bp, Homo sapien
tacgtagcgcagtggccgtgttaag

SEQ ID NO: 573086 - DNA, 25 bp, Homo sapien
ctaggcttttacgtagcgcagtggc

SEQ ID NO: 573087 - DNA, 25 bp, Homo sapien
tggccgtgttaaggactgatgagca

SEQ ID NO: 573088 - DNA, 25 bp, Homo sapien
cgcagtggccgtgttaaggactgat

SEQ ID NO: 573089 - DNA, 25 bp, Homo sapien
ctgtttcttctttcccttcgatgtg

SEQ ID NO: 573090 - DNA, 25 bp, Homo sapien
tttcttctttcccttcgatgtgctt

SEQ ID NO: 573091 - DNA, 25 bp, Homo sapien
tgtttcttctttcccttcgatgtgc

SEQ ID NO: 573092 - DNA, 25 bp, Homo sapien
tcttctttcccttcgatgtgcttca

SEQ ID NO: 573093 - DNA, 25 bp, Homo sapien
tatgcatgaccaacctctcttagat

SEQ ID NO: 573094 - DNA, 25 bp, Homo sapien
gccaagacattgttacatcatgacc

SEQ ID NO: 573095 - DNA, 25 bp, Homo sapien
gagatcaggatatttttctggcaac

SEQ ID NO: 573096 - DNA, 25 bp, Homo sapien
tttgcttccattttcggccaagaca

SEQ ID NO: 573097 - DNA, 25 bp, Homo sapien
tctcattggtgttgcgggtgagttc

SEQ ID NO: 573098 - DNA, 25 bp, Homo sapien
tctttggtggaggtctagactttga

SEQ ID NO: 573099 - DNA, 25 bp, Homo sapien
tctgaaggcagtggttggtactagc

SEQ ID NO: 573100 - DNA, 25 bp, Homo sapien
gactttgagcggtttctctttgact

SEQ ID NO: 573101 - DNA, 25 bp, Homo sapien
gatatagctggcgtaagtcagcagg

SEQ ID NO: 573102 - DNA, 25 bp, Homo sapien
ttaggtcgatatagctggcgtaagt

SEQ ID NO: 573103 - DNA, 25 bp, Homo sapien
gtcgatatagctggcgtaagtcagc

SEQ ID NO: 573104 - DNA, 25 bp, Homo sapien
aggtcgatatagctggcgtaagtca

SEQ ID NO: 573105 - DNA, 25 bp, Homo sapien
ctaccatataaggcaaggagaaagg

SEQ ID NO: 573106 - DNA, 25 bp, Homo sapien
aggagaaaggaagtgactcacatag

SEQ ID NO: 573107 - DNA, 25 bp, Homo sapien
gagaaaggaagtgactcacatagcc

SEQ ID NO: 573108 - DNA, 25 bp, Homo sapien
caaggagaaaggaagtgactcacat

SEQ ID NO: 573109 - DNA, 25 bp, Homo sapien
tcaggttctcagtgtagccatccat

SEQ ID NO: 573110 - DNA, 25 bp, Homo sapien
ggttctcagtgtagccatccatcaa

SEQ ID NO: 573111 - DNA, 25 bp, Homo sapien
tcagtgtagccatccatcaacaggc

SEQ ID NO: 573112 - DNA, 25 bp, Homo sapien
ctcagtgtagccatccatcaacagg

SEQ ID NO: 573113 - DNA, 25 bp, Homo sapien
ccgggaaactctccgcgctaaatgg

SEQ ID NO: 573114 - DNA, 25 bp, Homo sapien
gaggagaggagacctagaggactgg

SEQ ID NO: 573115 - DNA, 25 bp, Homo sapien
tcgcccatcgcccagaggcgaaggg

SEQ ID NO: 573116 - DNA, 25 bp, Homo sapien
accaggcgccttctgtcaccgaaga

SEQ ID NO: 573117 - DNA, 25 bp, Homo sapien
aggagggctcgaaggcgggcgattc

SEQ ID NO: 573118 - DNA, 25 bp, Homo sapien
gggttagcgccgcacggtccgcatc

SEQ ID NO: 573119 - DNA, 25 bp, Homo sapien
caccgaggctgctgcggctcacgag

SEQ ID NO: 573120 - DNA, 25 bp, Homo sapien
cgggcgattcgggagctgagccacg

SEQ ID NO: 573121 - DNA, 25 bp, Homo sapien
gattcgtgaacgaaaagggcgtgaa

SEQ ID NO: 573122 - DNA, 25 bp, Homo sapien
tggagagaggcgagcgggctcggat

SEQ ID NO: 573123 - DNA, 25 bp, Homo sapien
cccgcgcagaggtctgcagggaacc

SEQ ID NO: 573124 - DNA, 25 bp, Homo sapien
agcgggctcggattcgtgaacgaaa

SEQ ID NO: 573125 - DNA, 25 bp, Homo sapien
cggaggaatcggagctggagccatt

SEQ ID NO: 573126 - DNA, 25 bp, Homo sapien
tccttgtccatagtgtggcggcggc

SEQ ID NO: 573127 - DNA, 25 bp, Homo sapien
tcctgccggtcacagcgtcggcggc

SEQ ID NO: 573128 - DNA, 25 bp, Homo sapien
aacagggaaccgggagtgctgctct

SEQ ID NO: 573129 - DNA, 25 bp, Homo sapien
tcaaacttgagaaagcggccatcgt

SEQ ID NO: 573130 - DNA, 25 bp, Homo sapien
actgggcggtctttgctggtactgc

SEQ ID NO: 573131 - DNA, 25 bp, Homo sapien
tcgttagacattcccacggccttgg

SEQ ID NO: 573132 - DNA, 25 bp, Homo sapien
taaaggagcctctgccgatttcgat

SEQ ID NO: 573133 - DNA, 25 bp, Homo sapien
gatgatgacattacgactctcaaag

SEQ ID NO: 573134 - DNA, 25 bp, Homo sapien
tatactattcgctgtatagtgaatg

SEQ ID NO: 573135 - DNA, 25 bp, Homo sapien
cacaattttgcatgggctcctatac

SEQ ID NO: 573136 - DNA, 25 bp, Homo sapien
gacattacgactctcaaagcactta

SEQ ID NO: 573137 - DNA, 25 bp, Homo sapien
gcatgcataatgtggctgacttcct

SEQ ID NO: 573138 - DNA, 25 bp, Homo sapien
cattcaaagggttacgtgttaacat

SEQ ID NO: 573139 - DNA, 25 bp, Homo sapien
tgatatggccttagttatttggaac

SEQ ID NO: 573140 - DNA, 25 bp, Homo sapien
caggctggtctatattcttggcaag

SEQ ID NO: 573141 - DNA, 25 bp, Homo sapien
aaatgaacagttttcgtttgacgag

SEQ ID NO: 573142 - DNA, 25 bp, Homo sapien
accacgctgcagtgcgatggtgcga

SEQ ID NO: 573143 - DNA, 25 bp, Homo sapien
atgaacagttttcgtttgacgaggt

SEQ ID NO: 573144 - DNA, 25 bp, Homo sapien
caaaatgaacagttttcgtttgacg

SEQ ID NO: 573145 - DNA, 25 bp, Homo sapien
cttatcgccttatcacccaaatagt

SEQ ID NO: 573146 - DNA, 25 bp, Homo sapien
tctcatccactcattaaacccactg

SEQ ID NO: 573147 - DNA, 25 bp, Homo sapien
tgagtaactatgacatattgttaac

SEQ ID NO: 573148 - DNA, 25 bp, Homo sapien
gttacctaaccttatcgccttatca

SEQ ID NO: 573149 - DNA, 25 bp, Homo sapien
gagtggtccttctcagttacgtcgt

SEQ ID NO: 573150 - DNA, 25 bp, Homo sapien
gagtagcagattccatgtgtgacct

SEQ ID NO: 573151 - DNA, 25 bp, Homo sapien
gacctgaattcaaagggagtagcag

SEQ ID NO: 573152 - DNA, 25 bp, Homo sapien
gttacgtcgttgaagcaaacagacc

SEQ ID NO: 573153 - DNA, 25 bp, Homo sapien
gacctcaacagatgcctctgtcttg

SEQ ID NO: 573154 - DNA, 25 bp, Homo sapien
aaggcttttgagagtgggttcacac

SEQ ID NO: 573155 - DNA, 25 bp, Homo sapien
catgtgagcacgtggcaagaaagac

SEQ ID NO: 573156 - DNA, 25 bp, Homo sapien
taggcctacagaactgcgaggaaat

SEQ ID NO: 573157 - DNA, 25 bp, Homo sapien
ggaagccaacttaggttatcttgag

SEQ ID NO: 573158 - DNA, 25 bp, Homo sapien
tgggaagtagttccttttaaatgca

SEQ ID NO: 573159 - DNA, 25 bp, Homo sapien
tatctttggtatgctctagagtaga

SEQ ID NO: 573160 - DNA, 25 bp, Homo sapien
cccctatagcttagtcaatatacga

SEQ ID NO: 573161 - DNA, 25 bp, Homo sapien
aaatgggcatgtcaatgacaagcgg

SEQ ID NO: 573162 - DNA, 25 bp, Homo sapien
tgacaagcggtgtaggtgaaagact

SEQ ID NO: 573163 - DNA, 25 bp, Homo sapien
catgtcaatgacaagcggtgtaggt

SEQ ID NO: 573164 - DNA, 25 bp, Homo sapien
caatgacaagcggtgtaggtgaaag

SEQ ID NO: 573165 - DNA, 25 bp, Homo sapien
caaagctctagatgatgcaggcatg

SEQ ID NO: 573166 - DNA, 25 bp, Homo sapien
gatgatgcaggcatgttatgtaggc

SEQ ID NO: 573167 - DNA, 25 bp, Homo sapien
caggcatgttatgtaggcgttagca

SEQ ID NO: 573168 - DNA, 25 bp, Homo sapien
gctctagatgatgcaggcatgttat

SEQ ID NO: 573169 - DNA, 25 bp, Homo sapien
gaaatctgacagaactagagaagac

SEQ ID NO: 573170 - DNA, 25 bp, Homo sapien
cataagaactcaaccactgggaggg

SEQ ID NO: 573171 - DNA, 25 bp, Homo sapien
tatagctaatgccagtattgtgcct

SEQ ID NO: 573172 - DNA, 25 bp, Homo sapien
tagaagttaagtgaggaggatatcc

SEQ ID NO: 573173 - DNA, 25 bp, Homo sapien
taattcatagacttaggaaccgcag

SEQ ID NO: 573174 - DNA, 25 bp, Homo sapien
gattagatctctgattttggaaaca

SEQ ID NO: 573175 - DNA, 25 bp, Homo sapien
gccgacatcgctcactacaatttta

SEQ ID NO: 573176 - DNA, 25 bp, Homo sapien
gaaccgcagagtaatatatccaatg

SEQ ID NO: 573177 - DNA, 25 bp, Homo sapien
ttgggttatatgaaacatattcatg

SEQ ID NO: 573178 - DNA, 25 bp, Homo sapien
agccataatcgtgcaccactcactg

SEQ ID NO: 573179 - DNA, 25 bp, Homo sapien
atatattgggttatatgaaacatat

SEQ ID NO: 573180 - DNA, 25 bp, Homo sapien
gagccataatcgtgcaccactcact

SEQ ID NO: 573181 - DNA, 25 bp, Homo sapien
tggttaaacctacaatcagctgact

SEQ ID NO: 573182 - DNA, 25 bp, Homo sapien
ggccagctcaaccagaagacagatt

SEQ ID NO: 573183 - DNA, 25 bp, Homo sapien
tgtgctagagttcccaacccaatgg

SEQ ID NO: 573184 - DNA, 25 bp, Homo sapien
gatggtctttacaacagagcagcct

SEQ ID NO: 573185 - DNA, 25 bp, Homo sapien
ggcaagacagagtaaacactaaaca

SEQ ID NO: 573186 - DNA, 25 bp, Homo sapien
gcaacagtacccatagacaaccaag

SEQ ID NO: 573187 - DNA, 25 bp, Homo sapien
tgagcccttaatctcacagagcacg

SEQ ID NO: 573188 - DNA, 25 bp, Homo sapien
tgattagcagtttcttgtgagccct

SEQ ID NO: 573189 - DNA, 25 bp, Homo sapien
aatggatttccatcttagggtggca

SEQ ID NO: 573190 - DNA, 25 bp, Homo sapien
tggatttccatcttagggtggcagg

SEQ ID NO: 573191 - DNA, 25 bp, Homo sapien
aaatggatttccatcttagggtggc

SEQ ID NO: 573192 - DNA, 25 bp, Homo sapien
aaaatggatttccatcttagggtgg

SEQ ID NO: 573193 - DNA, 25 bp, Homo sapien
cagatagtgattttaagagagtgag

SEQ ID NO: 573194 - DNA, 25 bp, Homo sapien
cccaggttggccctgaattcttggt

SEQ ID NO: 573195 - DNA, 25 bp, Homo sapien
aagctgcttatcaatccagggaaaa

SEQ ID NO: 573196 - DNA, 25 bp, Homo sapien
gaattagcatacttttagaagctgc

SEQ ID NO: 573197 - DNA, 25 bp, Homo sapien
gaaggccatccttagagtacaacta

SEQ ID NO: 573198 - DNA, 25 bp, Homo sapien
tccctgagtcataagaatatgcaca

SEQ ID NO: 573199 - DNA, 25 bp, Homo sapien
agtagctgggagtagacagggtttc

SEQ ID NO: 573200 - DNA, 25 bp, Homo sapien
gagtagctgggagtagacagggttt

SEQ ID NO: 573201 - DNA, 25 bp, Homo sapien
acttacatgaggtacatctagcata

SEQ ID NO: 573202 - DNA, 25 bp, Homo sapien
ggtacatctagcatatgcaaattca

SEQ ID NO: 573203 - DNA, 25 bp, Homo sapien
caaaaggataaataatgtctgagtc

SEQ ID NO: 573204 - DNA, 25 bp, Homo sapien
catggtacaactcaaatgaaccttg

SEQ ID NO: 573205 - DNA, 25 bp, Homo sapien
agaagaattattgctcccggccggg

SEQ ID NO: 573206 - DNA, 25 bp, Homo sapien
taataatagaagaattattgctccc

SEQ ID NO: 573207 - DNA, 25 bp, Homo sapien
taatagaagaattattgctcccggc

SEQ ID NO: 573208 - DNA, 25 bp, Homo sapien
atagaagaattattgctcccggccg

SEQ ID NO: 573209 - DNA, 25 bp, Homo sapien
agatcaaaactaacataagacacag

SEQ ID NO: 573210 - DNA, 25 bp, Homo sapien
taagacacagatcagaaggaacacc

SEQ ID NO: 573211 - DNA, 25 bp, Homo sapien
ctcagaagatccacgtttgttatta

SEQ ID NO: 573212 - DNA, 25 bp, Homo sapien
gaaaaatgttgtgagacgaactgac

SEQ ID NO: 573213 - DNA, 25 bp, Homo sapien
gttttctgatctaccttcctgttca

SEQ ID NO: 573214 - DNA, 25 bp, Homo sapien
taattgaactttaaggttctcactc

SEQ ID NO: 573215 - DNA, 25 bp, Homo sapien
gtatctctctaaacactgtctcctc

SEQ ID NO: 573216 - DNA, 25 bp, Homo sapien
tgtcgccaaaagtacccaataagga

SEQ ID NO: 573217 - DNA, 25 bp, Homo sapien
gcttcttctttaaatctctgcctct

SEQ ID NO: 573218 - DNA, 25 bp, Homo sapien
tgttccagacgtcataagttcagtc

SEQ ID NO: 573219 - DNA, 25 bp, Homo sapien
aaatctaacaatattgggatgctga

SEQ ID NO: 573220 - DNA, 25 bp, Homo sapien
gttttaagtgttccagacgtcataa

SEQ ID NO: 573221 - DNA, 25 bp, Homo sapien
ataagttcagtcaccaaaacaatgc

SEQ ID NO: 573222 - DNA, 25 bp, Homo sapien
caagtgactatatccaggtgctgta

SEQ ID NO: 573223 - DNA, 25 bp, Homo sapien
cttaggcatgccagacaaactgttg

SEQ ID NO: 573224 - DNA, 25 bp, Homo sapien
gtaacactgtattccaatgatctgg

SEQ ID NO: 573225 - DNA, 25 bp, Homo sapien
aaccaagtaagtatccaaaccagtg

SEQ ID NO: 573226 - DNA, 25 bp, Homo sapien
tatgttcttcggtttgggattcctg

SEQ ID NO: 573227 - DNA, 25 bp, Homo sapien
gatatccttaattgttgcagtgcta

SEQ ID NO: 573228 - DNA, 25 bp, Homo sapien
tccgttcctgatcaattatcatgta

SEQ ID NO: 573229 - DNA, 25 bp, Homo sapien
caaggaactgtgaaaatgtccccgg

SEQ ID NO: 573230 - DNA, 25 bp, Homo sapien
cactcttggcaaaagaagcccgctt

SEQ ID NO: 573231 - DNA, 25 bp, Homo sapien
ttaaggatctgacggcaccagcttc

SEQ ID NO: 573232 - DNA, 25 bp, Homo sapien
aatcttgactgagccagtagggccg

SEQ ID NO: 573233 - DNA, 25 bp, Homo sapien
ttcagggttgccagaccgaggtctc

SEQ ID NO: 573234 - DNA, 25 bp, Homo sapien
gctccaaggtacacctgaaacatac

SEQ ID NO: 573235 - DNA, 25 bp, Homo sapien
caggctccaaggtacacctgaaaca

SEQ ID NO: 573236 - DNA, 25 bp, Homo sapien
tcaggctccaaggtacacctgaaac

SEQ ID NO: 573237 - DNA, 25 bp, Homo sapien
ggctccaaggtacacctgaaacata

SEQ ID NO: 573238 - DNA, 25 bp, Homo sapien
cctatatctcataagtacaatggat

SEQ ID NO: 573239 - DNA, 25 bp, Homo sapien
tatatcacttaaaactctgacagag

SEQ ID NO: 573240 - DNA, 25 bp, Homo sapien
gtaatgttaccaatagtctctaaga

SEQ ID NO: 573241 - DNA, 25 bp, Homo sapien
tatttcttgtaacgtaatgttacca

SEQ ID NO: 573242 - DNA, 25 bp, Homo sapien
cacctgcagtacacaaataagccta

SEQ ID NO: 573243 - DNA, 25 bp, Homo sapien
aagatcttccactgcaaggccttta

SEQ ID NO: 573244 - DNA, 25 bp, Homo sapien
tgtgtgcccactaatgtatggtagc

SEQ ID NO: 573245 - DNA, 25 bp, Homo sapien
gaaagacactatgcaaggaacaaag

SEQ ID NO: 573246 - DNA, 25 bp, Homo sapien
gaaggccttgcagtgaaaaacccga

SEQ ID NO: 573247 - DNA, 25 bp, Homo sapien
cggggtgagaagcagaggggttgac

SEQ ID NO: 573248 - DNA, 25 bp, Homo sapien
taaattaaaagaacgattcagactc

SEQ ID NO: 573249 - DNA, 25 bp, Homo sapien
aacgattcagactcaatgcgagcag

SEQ ID NO: 573250 - DNA, 25 bp, Homo sapien
taaaagaacgattcagactcaatgc

SEQ ID NO: 573251 - DNA, 25 bp, Homo sapien
ttcagactcaatgcgagcagaagct

SEQ ID NO: 573252 - DNA, 25 bp, Homo sapien
cgcgacggtagatctgtgcagcatt

SEQ ID NO: 573253 - DNA, 25 bp, Homo sapien
atatttctcctcatacatctcaggg

SEQ ID NO: 573254 - DNA, 25 bp, Homo sapien
tcccaaaagcataaacgtcaacgga

SEQ ID NO: 573255 - DNA, 25 bp, Homo sapien
ggcactccgagtaaggatattcaga

SEQ ID NO: 573256 - DNA, 25 bp, Homo sapien
caacaatcagttaggggaagactta

SEQ ID NO: 573257 - DNA, 25 bp, Homo sapien
tactctgctgcaatatcatatgtgc

SEQ ID NO: 573258 - DNA, 25 bp, Homo sapien
tctggaaaacaacaacgtacactct

SEQ ID NO: 573259 - DNA, 25 bp, Homo sapien
catatgtgcagtatcatatagcctc

SEQ ID NO: 573260 - DNA, 25 bp, Homo sapien
tacactcttgggtgaatgcgagtaa

SEQ ID NO: 573261 - DNA, 25 bp, Homo sapien
gaggactactttagcaatctaagct

SEQ ID NO: 573262 - DNA, 25 bp, Homo sapien
tgaggcacaactttttgacttggta

SEQ ID NO: 573263 - DNA, 25 bp, Homo sapien
tgacttggtatatccccaataccta

SEQ ID NO: 573264 - DNA, 25 bp, Homo sapien
tacctagtatagtgcttggtcacag

SEQ ID NO: 573265 - DNA, 25 bp, Homo sapien
gaaaagtgattgctacagggtgcag

SEQ ID NO: 573266 - DNA, 25 bp, Homo sapien
ctattggaaaataggctggcagttc

SEQ ID NO: 573267 - DNA, 25 bp, Homo sapien
cagccaatggtaggaacagtccaaa

SEQ ID NO: 573268 - DNA, 25 bp, Homo sapien
ggacgaaccttgagaacactataca

SEQ ID NO: 573269 - DNA, 25 bp, Homo sapien
gggatagcctttctacctattattg

SEQ ID NO: 573270 - DNA, 25 bp, Homo sapien
aaaatacagacctagccccataatg

SEQ ID NO: 573271 - DNA, 25 bp, Homo sapien
tctacttgctgctattcaacttcat

SEQ ID NO: 573272 - DNA, 25 bp, Homo sapien
tataggtacatcagtttctacttgc

SEQ ID NO: 573273 - DNA, 25 bp, Homo sapien
aaggtgtggtataaagacccttcag

SEQ ID NO: 573274 - DNA, 25 bp, Homo sapien
gattctgttggtctgaggactgcac

SEQ ID NO: 573275 - DNA, 25 bp, Homo sapien
cagattttaacaggcctggaatggg

SEQ ID NO: 573276 - DNA, 25 bp, Homo sapien
tggtctgaggactgcactttgcatg

SEQ ID NO: 573277 - DNA, 25 bp, Homo sapien
tatacacaatagacctgggatgaaa

SEQ ID NO: 573278 - DNA, 25 bp, Homo sapien
gaagccctaggatcgatctcttcca

SEQ ID NO: 573279 - DNA, 25 bp, Homo sapien
tcttccaatggataaccacgcatgt

SEQ ID NO: 573280 - DNA, 25 bp, Homo sapien
ggtgtgtttgtatcaggaagcccta

SEQ ID NO: 573281 - DNA, 25 bp, Homo sapien
tattctagatggacaaaactgcatg

SEQ ID NO: 573282 - DNA, 25 bp, Homo sapien
catttatacaatccttttgagggca

SEQ ID NO: 573283 - DNA, 25 bp, Homo sapien
tacatcagcccacagcataaggaag

SEQ ID NO: 573284 - DNA, 25 bp, Homo sapien
caggaatttgctctactcagccaac

SEQ ID NO: 573285 - DNA, 25 bp, Homo sapien
taaaaaactgagcacagttggccct

SEQ ID NO: 573286 - DNA, 25 bp, Homo sapien
tggagaattctactcgcagggctaa

SEQ ID NO: 573287 - DNA, 25 bp, Homo sapien
tattattccgaagacccaatttgga

SEQ ID NO: 573288 - DNA, 25 bp, Homo sapien
gcagggctaacttttcacagcaagg

SEQ ID NO: 573289 - DNA, 25 bp, Homo sapien
gtcgtatgcatccttcaataatttc

SEQ ID NO: 573290 - DNA, 25 bp, Homo sapien
atctttgttttgtcgtatgcatcct

SEQ ID NO: 573291 - DNA, 25 bp, Homo sapien
cacttcaggaattgctactttgtca

SEQ ID NO: 573292 - DNA, 25 bp, Homo sapien
tcacttcaggaattgctactttgtc

SEQ ID NO: 573293 - DNA, 25 bp, Homo sapien
tcttaatatcttcaatacgtagcca

SEQ ID NO: 573294 - DNA, 25 bp, Homo sapien
tcctcttggaagaaggcatggttca

SEQ ID NO: 573295 - DNA, 25 bp, Homo sapien
gaaggcatggttcaaaaggtctttg

SEQ ID NO: 573296 - DNA, 25 bp, Homo sapien
tctgctaattctacccgtactcctg

SEQ ID NO: 573297 - DNA, 25 bp, Homo sapien
agtaagctatgattatcaggccact

SEQ ID NO: 573298 - DNA, 25 bp, Homo sapien
ggcacgtccctatggtcccagcttc

SEQ ID NO: 573299 - DNA, 25 bp, Homo sapien
agcttctcggcaggctaaggcagaa

SEQ ID NO: 573300 - DNA, 25 bp, Homo sapien
cagtaagctatgattatcaggccac

SEQ ID NO: 573301 - DNA, 25 bp, Homo sapien
ggaagcactggattgttctacctgc

SEQ ID NO: 573302 - DNA, 25 bp, Homo sapien
cacagatatactgggttgctggtac

SEQ ID NO: 573303 - DNA, 25 bp, Homo sapien
aagcagtaggtatgccggtgctagc

SEQ ID NO: 573304 - DNA, 25 bp, Homo sapien
tagccatggtcttgtgatcaccttc

SEQ ID NO: 573305 - DNA, 25 bp, Homo sapien
aagccagtgcaaaataacaagaagc

SEQ ID NO: 573306 - DNA, 25 bp, Homo sapien
caaaaagccagtgcaaaataacaag

SEQ ID NO: 573307 - DNA, 25 bp, Homo sapien
aaaccaattaggagaatcattagcc

SEQ ID NO: 573308 - DNA, 25 bp, Homo sapien
atcattagcctatctgtccacttcc

SEQ ID NO: 573309 - DNA, 25 bp, Homo sapien
tccctgaccactgtcaaccgtccca

SEQ ID NO: 573310 - DNA, 25 bp, Homo sapien
ttggctgctcactcgagattctgtg

SEQ ID NO: 573311 - DNA, 25 bp, Homo sapien
gctcactcgagattctgtgaagaca

SEQ ID NO: 573312 - DNA, 25 bp, Homo sapien
tgaccactgtcaaccgtcccatcag

SEQ ID NO: 573313 - DNA, 25 bp, Homo sapien
cacacttgagggtggatatacccca

SEQ ID NO: 573314 - DNA, 25 bp, Homo sapien
cagtagaaggtatatgccctgggac

SEQ ID NO: 573315 - DNA, 25 bp, Homo sapien
gactgtgcttggacagtagaaggta

SEQ ID NO: 573316 - DNA, 25 bp, Homo sapien
ctgggactgtgcctgtagaatgtgc

SEQ ID NO: 573317 - DNA, 25 bp, Homo sapien
ttctataatggtttgaaggtcttac

SEQ ID NO: 573318 - DNA, 25 bp, Homo sapien
tgcagcattctataatggtttgaag

SEQ ID NO: 573319 - DNA, 25 bp, Homo sapien
agcattctataatggtttgaaggtc

SEQ ID NO: 573320 - DNA, 25 bp, Homo sapien
atgcagcattctataatggtttgaa

SEQ ID NO: 573321 - DNA, 25 bp, Homo sapien
acaaaccgacatgctacggccacga

SEQ ID NO: 573322 - DNA, 25 bp, Homo sapien
ggaacacaaaccgacatgctacggc

SEQ ID NO: 573323 - DNA, 25 bp, Homo sapien
aaccgacatgctacggccacgacga

SEQ ID NO: 573324 - DNA, 25 bp, Homo sapien
aaagatgggaacacaaaccgacatg

SEQ ID NO: 573325 - DNA, 25 bp, Homo sapien
ctcggggcagtccggaggagggaag

SEQ ID NO: 573326 - DNA, 25 bp, Homo sapien
gcgtcggtgcttgcgctgagaggca

SEQ ID NO: 573327 - DNA, 25 bp, Homo sapien
gcagagtgcataggcaggacactct

SEQ ID NO: 573328 - DNA, 25 bp, Homo sapien
cgctgagaggcagagtgcataggca

SEQ ID NO: 573329 - DNA, 25 bp, Homo sapien
ggaaggcaggctggagcgtcggtgc

SEQ ID NO: 573330 - DNA, 25 bp, Homo sapien
tcatttgtcagaagtttacagttac

SEQ ID NO: 573331 - DNA, 25 bp, Homo sapien
tatctctcccaagctagatgattaa

SEQ ID NO: 573332 - DNA, 25 bp, Homo sapien
tgtgatatgttagaggccttcagtt

SEQ ID NO: 573333 - DNA, 25 bp, Homo sapien
gtatgccttctaaccagaaatcaga

SEQ ID NO: 573334 - DNA, 25 bp, Homo sapien
caaggcataaaagcccgactagttc

SEQ ID NO: 573335 - DNA, 25 bp, Homo sapien
aacatgaataagacaagtaattcat

SEQ ID NO: 573336 - DNA, 25 bp, Homo sapien
tgaataagacaagtaattcatacat

SEQ ID NO: 573337 - DNA, 25 bp, Homo sapien
ctgtatcaacatgaataagacaagt

SEQ ID NO: 573338 - DNA, 25 bp, Homo sapien
catgaataagacaagtaattcatac

SEQ ID NO: 573339 - DNA, 25 bp, Homo sapien
tgagacgtcagagccaaaaggtgca

SEQ ID NO: 573340 - DNA, 25 bp, Homo sapien
cacagcaggcgcagaatgaggaaca

SEQ ID NO: 573341 - DNA, 25 bp, Homo sapien
gataggctctaccacagaaacggtc

SEQ ID NO: 573342 - DNA, 25 bp, Homo sapien
cgatttcggtaaacacgctgaggta

SEQ ID NO: 573343 - DNA, 25 bp, Homo sapien
gatgtctactgttccttagcttgca

SEQ ID NO: 573344 - DNA, 25 bp, Homo sapien
gaaaataacgtgcatagaagtcgtg

SEQ ID NO: 573345 - DNA, 25 bp, Homo sapien
aatgcatatatgtagttcacaaccc

SEQ ID NO: 573346 - DNA, 25 bp, Homo sapien
tcctaaataatgctgggtcaaccat

SEQ ID NO: 573347 - DNA, 25 bp, Homo sapien
tagagaaggcctaaagtaagtgtat

SEQ ID NO: 573348 - DNA, 25 bp, Homo sapien
taaagtaagtgtatagaggtcaggc

SEQ ID NO: 573349 - DNA, 25 bp, Homo sapien
atgaatatttaatctcctcagagtt

SEQ ID NO: 573350 - DNA, 25 bp, Homo sapien
gaacacaacaaattagagaaggcct

SEQ ID NO: 573351 - DNA, 25 bp, Homo sapien
ctgaggatgttgtatgggttgggaa

SEQ ID NO: 573352 - DNA, 25 bp, Homo sapien
ccctgttaagctacttgaggatggc

SEQ ID NO: 573353 - DNA, 25 bp, Homo sapien
tgggaagatgaaacccctgttaagc

SEQ ID NO: 573354 - DNA, 25 bp, Homo sapien
ctacttgaggatggctgaccctggc

SEQ ID NO: 573355 - DNA, 25 bp, Homo sapien
tgaacacaagacatggtatgcctct

SEQ ID NO: 573356 - DNA, 25 bp, Homo sapien
ttaaaatagtgttctggccactgct

SEQ ID NO: 573357 - DNA, 25 bp, Homo sapien
aacttagcaggccatttatataaca

SEQ ID NO: 573358 - DNA, 25 bp, Homo sapien
aaatgttgcaatgcattgttctcac

SEQ ID NO: 573359 - DNA, 25 bp, Homo sapien
ttctcctggagaggtagctacctaa

SEQ ID NO: 573360 - DNA, 25 bp, Homo sapien
gacagcttctgaggtacatttgcag

SEQ ID NO: 573361 - DNA, 25 bp, Homo sapien
gctcagttcattggtgttcgtctac

SEQ ID NO: 573362 - DNA, 25 bp, Homo sapien
tacacttcctatatatatcgagggc

SEQ ID NO: 573363 - DNA, 25 bp, Homo sapien
cttataatcaaagtccatttcaaat

SEQ ID NO: 573364 - DNA, 25 bp, Homo sapien
ctaacttataatcaaagtccatttc

SEQ ID NO: 573365 - DNA, 25 bp, Homo sapien
taacttataatcaaagtccatttca

SEQ ID NO: 573366 - DNA, 25 bp, Homo sapien
ataatcaaagtccatttcaaatgcc

SEQ ID NO: 573367 - DNA, 25 bp, Homo sapien
tatggtaatcatatgctcccagccc

SEQ ID NO: 573368 - DNA, 25 bp, Homo sapien
tatgagagtacgataaaggtctgaa

SEQ ID NO: 573369 - DNA, 25 bp, Homo sapien
tctaactacatgagctgaagtcttt

SEQ ID NO: 573370 - DNA, 25 bp, Homo sapien
gtttaaaatcacatacagtcctcag

SEQ ID NO: 573371 - DNA, 25 bp, Homo sapien
tcagctctctctttggcacctatat

SEQ ID NO: 573372 - DNA, 25 bp, Homo sapien
taacatatccagacagttcctttcc

SEQ ID NO: 573373 - DNA, 25 bp, Homo sapien
tggcacctatatcagatagatccaa

SEQ ID NO: 573374 - DNA, 25 bp, Homo sapien
tcaccccaacaataggtctttacaa

SEQ ID NO: 573375 - DNA, 25 bp, Homo sapien
acagcatgtttctaaggaagcatgt

SEQ ID NO: 573376 - DNA, 25 bp, Homo sapien
agtaatcaagacatgcacaaaccca

SEQ ID NO: 573377 - DNA, 25 bp, Homo sapien
tgtttacctaaagccttcagtgtct

SEQ ID NO: 573378 - DNA, 25 bp, Homo sapien
tctgatgttctttgtgatggtgcca

SEQ ID NO: 573379 - DNA, 25 bp, Homo sapien
tgaatactgcactgtctgttgagga

SEQ ID NO: 573380 - DNA, 25 bp, Homo sapien
ttgaggcaagacttgtggagcttga

SEQ ID NO: 573381 - DNA, 25 bp, Homo sapien
tttccagctgatacttgaggcaaga

SEQ ID NO: 573382 - DNA, 25 bp, Homo sapien
ccagctgatacttgaggcaagactt

SEQ ID NO: 573383 - DNA, 25 bp, Homo sapien
ggcaagacttgtggagcttgaggct

SEQ ID NO: 573384 - DNA, 25 bp, Homo sapien
ccagagtggactggaacaaccgagg

SEQ ID NO: 573385 - DNA, 25 bp, Homo sapien
acaaccgagggttgtgtcgcaactg

SEQ ID NO: 573386 - DNA, 25 bp, Homo sapien
gatagttggtactggctgggaaact

SEQ ID NO: 573387 - DNA, 25 bp, Homo sapien
tctgaggttcgccttggatagttgg

SEQ ID NO: 573388 - DNA, 25 bp, Homo sapien
gagttgatatgggaatctgagagac

SEQ ID NO: 573389 - DNA, 25 bp, Homo sapien
tctgagccgtagacacatgaggagt

SEQ ID NO: 573390 - DNA, 25 bp, Homo sapien
catgaggagttgatatgggaatctg

SEQ ID NO: 573391 - DNA, 25 bp, Homo sapien
gaagggatgagaaacctgtctgagc

SEQ ID NO: 573392 - DNA, 25 bp, Homo sapien
atacccccgggatcgcagctgttgt

SEQ ID NO: 573393 - DNA, 25 bp, Homo sapien
gatgaagccaacgtgagcagaggct

SEQ ID NO: 573394 - DNA, 25 bp, Homo sapien
gactaggaaccacagttgatacccc

SEQ ID NO: 573395 - DNA, 25 bp, Homo sapien
ctgtgggtgaacctgacttggcagc

SEQ ID NO: 573396 - DNA, 25 bp, Homo sapien
tcccatggactgaactgctggttgt

SEQ ID NO: 573397 - DNA, 25 bp, Homo sapien
ccatggactgaactgctggttgtag

SEQ ID NO: 573398 - DNA, 25 bp, Homo sapien
cccatggactgaactgctggttgta

SEQ ID NO: 573399 - DNA, 25 bp, Homo sapien
tgccctcttttgctaactaacacaa

SEQ ID NO: 573400 - DNA, 25 bp, Homo sapien
gccctcttttgctaactaacacaat

SEQ ID NO: 573401 - DNA, 25 bp, Homo sapien
cctcttttgctaactaacacaatac

SEQ ID NO: 573402 - DNA, 25 bp, Homo sapien
gtgccctcttttgctaactaacaca

SEQ ID NO: 573403 - DNA, 25 bp, Homo sapien
ggataggactgtagaatggatgcaa

SEQ ID NO: 573404 - DNA, 25 bp, Homo sapien
gccagtacttctgtcggcatgggag

SEQ ID NO: 573405 - DNA, 25 bp, Homo sapien
gaagagggagcaatatttgaatctc

SEQ ID NO: 573406 - DNA, 25 bp, Homo sapien
tactgtggtggcagtcgaggtggga

SEQ ID NO: 573407 - DNA, 25 bp, Homo sapien
gattccacataaggctgcaccactg

SEQ ID NO: 573408 - DNA, 25 bp, Homo sapien
taggaactaaaagatttgattccac

SEQ ID NO: 573409 - DNA, 25 bp, Homo sapien
ttgattccacataaggctgcaccac

SEQ ID NO: 573410 - DNA, 25 bp, Homo sapien
cacccataggaactaaaagatttga

SEQ ID NO: 573411 - DNA, 25 bp, Homo sapien
tagtgggggcttgtgctaaactccc

SEQ ID NO: 573412 - DNA, 25 bp, Homo sapien
agtgggggcttgtgctaaactccct

SEQ ID NO: 573413 - DNA, 25 bp, Homo sapien
tgggggcttgtgctaaactccctcc

SEQ ID NO: 573414 - DNA, 25 bp, Homo sapien
tgtagtgggggcttgtgctaaactc

SEQ ID NO: 573415 - DNA, 25 bp, Homo sapien
ataaacatgcagtaattctatttac

SEQ ID NO: 573416 - DNA, 25 bp, Homo sapien
gccatgcagccagcatcttaccaag

SEQ ID NO: 573417 - DNA, 25 bp, Homo sapien
gcagtgtgaacctacaacttgccat

SEQ ID NO: 573418 - DNA, 25 bp, Homo sapien
cagacagagcatagtacaaagatga

SEQ ID NO: 573419 - DNA, 25 bp, Homo sapien
tcttaccaagagtgtgcaatagcgc

SEQ ID NO: 573420 - DNA, 25 bp, Homo sapien
ctagagataatggtcttaaaattcc

SEQ ID NO: 573421 - DNA, 25 bp, Homo sapien
aaagataactcaaatctcggtagta

SEQ ID NO: 573422 - DNA, 25 bp, Homo sapien
cccactacgtcctagaagcactaaa

SEQ ID NO: 573423 - DNA, 25 bp, Homo sapien
ggaagttgctaaagctagtctctgg

SEQ ID NO: 573424 - DNA, 25 bp, Homo sapien
gggtctgtgctactgcaactggctc

SEQ ID NO: 573425 - DNA, 25 bp, Homo sapien
agaggaagccaaagtggtcggctgg

SEQ ID NO: 573426 - DNA, 25 bp, Homo sapien
ggtagcttgggtctgtgctactgca

SEQ ID NO: 573427 - DNA, 25 bp, Homo sapien
caaagtggtcggctgggtagcttgg

SEQ ID NO: 573428 - DNA, 25 bp, Homo sapien
gttttttcatgtcgagagcgactcc

SEQ ID NO: 573429 - DNA, 25 bp, Homo sapien
tgtcgagagcgactccttacagatt

SEQ ID NO: 573430 - DNA, 25 bp, Homo sapien
cagattttcggtaatgccgttttgt

SEQ ID NO: 573431 - DNA, 25 bp, Homo sapien
attttgggcgtgaagttttttcatg

SEQ ID NO: 573432 - DNA, 25 bp, Homo sapien
gggttgtcaccatctaggtcaaatt

SEQ ID NO: 573433 - DNA, 25 bp, Homo sapien
gagtctctaattgacattctactac

SEQ ID NO: 573434 - DNA, 25 bp, Homo sapien
cataattgttgctatctcctcgggg

SEQ ID NO: 573435 - DNA, 25 bp, Homo sapien
tactactcggtctcctttatttgaa

SEQ ID NO: 573436 - DNA, 25 bp, Homo sapien
ctctctattgctagaataaagtcat

SEQ ID NO: 573437 - DNA, 25 bp, Homo sapien
gaaaagccatagtcatcctttcctt

SEQ ID NO: 573438 - DNA, 25 bp, Homo sapien
aataatttctcgcacttgatccaca

SEQ ID NO: 573439 - DNA, 25 bp, Homo sapien
tgtagactctccaatccctgatcac

SEQ ID NO: 573440 - DNA, 25 bp, Homo sapien
catggaagacgcaggaattggttgt

SEQ ID NO: 573441 - DNA, 25 bp, Homo sapien
tatttgctgtggcatggaagacgca

SEQ ID NO: 573442 - DNA, 25 bp, Homo sapien
ctgtggcatggaagacgcaggaatt

SEQ ID NO: 573443 - DNA, 25 bp, Homo sapien
caggaattggttgtttgaactctcc

SEQ ID NO: 573444 - DNA, 25 bp, Homo sapien
tttctggcacaggactcactataaa

SEQ ID NO: 573445 - DNA, 25 bp, Homo sapien
tggcacaggactcactataaaccgc

SEQ ID NO: 573446 - DNA, 25 bp, Homo sapien
aaacttttgattctcgtaatcggct

SEQ ID NO: 573447 - DNA, 25 bp, Homo sapien
tcgtaatcggctttctggcacagga

SEQ ID NO: 573448 - DNA, 25 bp, Homo sapien
ggtatggccgtgcttcttggctttt

SEQ ID NO: 573449 - DNA, 25 bp, Homo sapien
catagacaacagtactaagtgcaga

SEQ ID NO: 573450 - DNA, 25 bp, Homo sapien
tcaaaagattgtctgctagcctaag

SEQ ID NO: 573451 - DNA, 25 bp, Homo sapien
tacagactatatcttggtatggccg

SEQ ID NO: 573452 - DNA, 25 bp, Homo sapien
tgtggttgggactccagcaatgcta

SEQ ID NO: 573453 - DNA, 25 bp, Homo sapien
tcatttgggcacgtctaagttcaga

SEQ ID NO: 573454 - DNA, 25 bp, Homo sapien
gagacaagttcattccagggctctg

SEQ ID NO: 573455 - DNA, 25 bp, Homo sapien
ggaggtactactggaaatgttggtc

SEQ ID NO: 573456 - DNA, 25 bp, Homo sapien
tggtggcaactccagcaatcccctc

SEQ ID NO: 573457 - DNA, 25 bp, Homo sapien
ggtggcaactccagcaatcccctct

SEQ ID NO: 573458 - DNA, 25 bp, Homo sapien
gctgtactagaaacaacgatctcag

SEQ ID NO: 573459 - DNA, 25 bp, Homo sapien
gggagaccacctgaagttaccacac

SEQ ID NO: 573460 - DNA, 25 bp, Homo sapien
gaaagtactggtgattcagacacag

SEQ ID NO: 573461 - DNA, 25 bp, Homo sapien
tgatacttgaaactacgctggaaag

SEQ ID NO: 573462 - DNA, 25 bp, Homo sapien
gatgtcttatctagtgagtgtgcgc

SEQ ID NO: 573463 - DNA, 25 bp, Homo sapien
ggaatgaccaaaggatgcagcccac

SEQ ID NO: 573464 - DNA, 25 bp, Homo sapien
gagtgtgcgctaactaccacggttt

SEQ ID NO: 573465 - DNA, 25 bp, Homo sapien
tactgctgctaagctgaatgcacag

SEQ ID NO: 573466 - DNA, 25 bp, Homo sapien
caggcacattggcaacaggctgtac

SEQ ID NO: 573467 - DNA, 25 bp, Homo sapien
gctgtaccaagggtgggatactagg

SEQ ID NO: 573468 - DNA, 25 bp, Homo sapien
aataaaggtgtagaagtaggtcctg

SEQ ID NO: 573469 - DNA, 25 bp, Homo sapien
ccaagggtgggatactaggtacttg

SEQ ID NO: 573470 - DNA, 25 bp, Homo sapien
tgttcactgaacagagaccgcagct

SEQ ID NO: 573471 - DNA, 25 bp, Homo sapien
caggagctttgggttgtgtatcaga

SEQ ID NO: 573472 - DNA, 25 bp, Homo sapien
caggagtttgcttggtgcaacagca

SEQ ID NO: 573473 - DNA, 25 bp, Homo sapien
gacagtgctctctatgactagtgag

SEQ ID NO: 573474 - DNA, 25 bp, Homo sapien
ggtttcactcctgatgtagtagtgc

SEQ ID NO: 573475 - DNA, 25 bp, Homo sapien
ttccaggtttcactcctgatgtagt

SEQ ID NO: 573476 - DNA, 25 bp, Homo sapien
gagccttagttagaggtggcttgga

SEQ ID NO: 573477 - DNA, 25 bp, Homo sapien
tcactcctgatgtagtagtgctgac

SEQ ID NO: 573478 - DNA, 25 bp, Homo sapien
ctgctggaagttcagtacccactgg

SEQ ID NO: 573479 - DNA, 25 bp, Homo sapien
ggaagttcagtacccactggcagca

SEQ ID NO: 573480 - DNA, 25 bp, Homo sapien
gctggaagttcagtacccactggca

SEQ ID NO: 573481 - DNA, 25 bp, Homo sapien
tggaagttcagtacccactggcagc

SEQ ID NO: 573482 - DNA, 25 bp, Homo sapien
ggcagctgctcgctgggtagagtac

SEQ ID NO: 573483 - DNA, 25 bp, Homo sapien
aggtcctggaaaaggtggcagctgc

SEQ ID NO: 573484 - DNA, 25 bp, Homo sapien
tagagaaggtcctggaaaaggtggc

SEQ ID NO: 573485 - DNA, 25 bp, Homo sapien
ggaaaaggtggcagctgctcgctgg

SEQ ID NO: 573486 - DNA, 25 bp, Homo sapien
tttgtcaaagaaagtagggcacagg

SEQ ID NO: 573487 - DNA, 25 bp, Homo sapien
aagaaatttgtcaagtcttgaggca

SEQ ID NO: 573488 - DNA, 25 bp, Homo sapien
agaaatttgtcaagtcttgaggcac

SEQ ID NO: 573489 - DNA, 25 bp, Homo sapien
agcaagctttgtcaaagaaagtagg

SEQ ID NO: 573490 - DNA, 25 bp, Homo sapien
taggcactagctatttacccttacc

SEQ ID NO: 573491 - DNA, 25 bp, Homo sapien
gaggtctgggtattccatcctgtta

SEQ ID NO: 573492 - DNA, 25 bp, Homo sapien
taggcctttccctctatctaggcac

SEQ ID NO: 573493 - DNA, 25 bp, Homo sapien
tgcacagtctttgcttaggcctttc

SEQ ID NO: 573494 - DNA, 25 bp, Homo sapien
ttctcaattgagcatcaagatcctc

SEQ ID NO: 573495 - DNA, 25 bp, Homo sapien
tctctggactaagtgttcttctcaa

SEQ ID NO: 573496 - DNA, 25 bp, Homo sapien
actgtgatcatctctggactaagtg

SEQ ID NO: 573497 - DNA, 25 bp, Homo sapien
gactaagtgttcttctcaattgagc

SEQ ID NO: 573498 - DNA, 25 bp, Homo sapien
cttctgtgattgctgttggagccgc

SEQ ID NO: 573499 - DNA, 25 bp, Homo sapien
ttataaactgatccccccagaggct

SEQ ID NO: 573500 - DNA, 25 bp, Homo sapien
ctattataaactgatccccccagag

SEQ ID NO: 573501 - DNA, 25 bp, Homo sapien
tcactattataaactgatcccccca

SEQ ID NO: 573502 - DNA, 25 bp, Homo sapien
tattataaactgatccccccagagg

SEQ ID NO: 573503 - DNA, 25 bp, Homo sapien
ctaggacagggccttctttgacttg

SEQ ID NO: 573504 - DNA, 25 bp, Homo sapien
acagggccttctttgacttgagaaa

SEQ ID NO: 573505 - DNA, 25 bp, Homo sapien
aggacagggccttctttgacttgag

SEQ ID NO: 573506 - DNA, 25 bp, Homo sapien
ggacagggccttctttgacttgaga

SEQ ID NO: 573507 - DNA, 25 bp, Homo sapien
tcgtcccatcttaaaaacaccagct

SEQ ID NO: 573508 - DNA, 25 bp, Homo sapien
gtcccatcttaaaaacaccagctcc

SEQ ID NO: 573509 - DNA, 25 bp, Homo sapien
tgaaatcgtcccatcttaaaaacac

SEQ ID NO: 573510 - DNA, 25 bp, Homo sapien
aatcgtcccatcttaaaaacaccag

SEQ ID NO: 573511 - DNA, 25 bp, Homo sapien
cattgtcgctactcatgtaagagga

SEQ ID NO: 573512 - DNA, 25 bp, Homo sapien
tactacttgatagcactgaggactc

SEQ ID NO: 573513 - DNA, 25 bp, Homo sapien
tgatacagagaaacgacccactttg

SEQ ID NO: 573514 - DNA, 25 bp, Homo sapien
tccgggtcagaagacggcccattta

SEQ ID NO: 573515 - DNA, 25 bp, Homo sapien
gaatttgctactctgacccaatctg

SEQ ID NO: 573516 - DNA, 25 bp, Homo sapien
ctagccaacaacaaatggttgataa

SEQ ID NO: 573517 - DNA, 25 bp, Homo sapien
tttgaggccacgcacacaatagctg

SEQ ID NO: 573518 - DNA, 25 bp, Homo sapien
aacatttcctgacttttgaggccac

SEQ ID NO: 573519 - DNA, 25 bp, Homo sapien
tgctggcctgcattacccaagccat

SEQ ID NO: 573520 - DNA, 25 bp, Homo sapien
tacccaagccatgttccaacaagct

SEQ ID NO: 573521 - DNA, 25 bp, Homo sapien
ctgcattacccaagccatgttccaa

SEQ ID NO: 573522 - DNA, 25 bp, Homo sapien
cttgctggcctgcattacccaagcc

SEQ ID NO: 573523 - DNA, 25 bp, Homo sapien
tattcctaaacctgctttcaagtat

SEQ ID NO: 573524 - DNA, 25 bp, Homo sapien
aaacctgctttcaagtatgtagtag

SEQ ID NO: 573525 - DNA, 25 bp, Homo sapien
tttccccaaatgtactaccacgaga

SEQ ID NO: 573526 - DNA, 25 bp, Homo sapien
cacgagattctagtttgtcaactca

SEQ ID NO: 573527 - DNA, 25 bp, Homo sapien
catgcttctggcgactctgcaggtc

SEQ ID NO: 573528 - DNA, 25 bp, Homo sapien
gcccagtttggtatacaaagattca

SEQ ID NO: 573529 - DNA, 25 bp, Homo sapien
caatttcatgcttctggcgactctg

SEQ ID NO: 573530 - DNA, 25 bp, Homo sapien
cttgcccagtttggtatacaaagat

SEQ ID NO: 573531 - DNA, 25 bp, Homo sapien
tgggggaataataacagcagggggc

SEQ ID NO: 573532 - DNA, 25 bp, Homo sapien
ggggaataataacagcagggggcac

SEQ ID NO: 573533 - DNA, 25 bp, Homo sapien
gggggaataataacagcagggggca

SEQ ID NO: 573534 - DNA, 25 bp, Homo sapien
ctgggggaataataacagcaggggg

SEQ ID NO: 573535 - DNA, 25 bp, Homo sapien
ccccaaggaactgcttcgactagat

SEQ ID NO: 573536 - DNA, 25 bp, Homo sapien
gcttcgactagatttgctgcctttg

SEQ ID NO: 573537 - DNA, 25 bp, Homo sapien
gactagatttgctgcctttgctttt

SEQ ID NO: 573538 - DNA, 25 bp, Homo sapien
aactgcttcgactagatttgctgcc

SEQ ID NO: 573539 - DNA, 25 bp, Homo sapien
ttgattaggatcatagctgggcata

SEQ ID NO: 573540 - DNA, 25 bp, Homo sapien
tgatggaggtcactacagagcaatg

SEQ ID NO: 573541 - DNA, 25 bp, Homo sapien
ggttcccagttgaattcaagtccac

SEQ ID NO: 573542 - DNA, 25 bp, Homo sapien
gcttagactttcctataaacgtgca

SEQ ID NO: 573543 - DNA, 25 bp, Homo sapien
tgcccggactctgggatgttgccag

SEQ ID NO: 573544 - DNA, 25 bp, Homo sapien
gctgtaacagctgattctgcccgga

SEQ ID NO: 573545 - DNA, 25 bp, Homo sapien
aagactgaagctgcactctgaccag

SEQ ID NO: 573546 - DNA, 25 bp, Homo sapien
ccatcactggtgaaggctgaataga

SEQ ID NO: 573547 - DNA, 25 bp, Homo sapien
ggcttttgtcccaggtatggcaaca

SEQ ID NO: 573548 - DNA, 25 bp, Homo sapien
gtttgccctccttaccaatcaagtg

SEQ ID NO: 573549 - DNA, 25 bp, Homo sapien
tgtgttctggtcagctagtctccca

SEQ ID NO: 573550 - DNA, 25 bp, Homo sapien
aattctacccatctgcaaaatgcgg

SEQ ID NO: 573551 - DNA, 25 bp, Homo sapien
gatgcacagttaaacttcgcacagc

SEQ ID NO: 573552 - DNA, 25 bp, Homo sapien
cacctgttcagatgcacagttaaac

SEQ ID NO: 573553 - DNA, 25 bp, Homo sapien
gaatgtcacctgttcagatgcacag

SEQ ID NO: 573554 - DNA, 25 bp, Homo sapien
gtttgaatgtcacctgttcagatgc

SEQ ID NO: 573555 - DNA, 25 bp, Homo sapien
tacacacaaagagccaagcagggcg

SEQ ID NO: 573556 - DNA, 25 bp, Homo sapien
acacaaagagccaagcagggcgtac

SEQ ID NO: 573557 - DNA, 25 bp, Homo sapien
ttacacacaaagagccaagcagggc

SEQ ID NO: 573558 - DNA, 25 bp, Homo sapien
cacacaaagagccaagcagggcgta

SEQ ID NO: 573559 - DNA, 25 bp, Homo sapien
tgcgtgaaacatcagatccaagcag

SEQ ID NO: 573560 - DNA, 25 bp, Homo sapien
cacagatccatgaagaagcacttct

SEQ ID NO: 573561 - DNA, 25 bp, Homo sapien
gacagcactgactacgactgtggag

SEQ ID NO: 573562 - DNA, 25 bp, Homo sapien
gcccaaacttctgagggtaacagta

SEQ ID NO: 573563 - DNA, 25 bp, Homo sapien
caggatctaagagcatcattggtca

SEQ ID NO: 573564 - DNA, 25 bp, Homo sapien
gaaaccatgagtgcttttcaagcgc

SEQ ID NO: 573565 - DNA, 25 bp, Homo sapien
tcttttcaactggtagctgcttagg

SEQ ID NO: 573566 - DNA, 25 bp, Homo sapien
cttagcttgatttgtacgatggccc

SEQ ID NO: 573567 - DNA, 25 bp, Homo sapien
taaggtgccctactctttcaagtac

SEQ ID NO: 573568 - DNA, 25 bp, Homo sapien
taaatatagcagtaagccaagccgt

SEQ ID NO: 573569 - DNA, 25 bp, Homo sapien
gtacgtggaaaacaagcaacctctg

SEQ ID NO: 573570 - DNA, 25 bp, Homo sapien
tacatctcaagctagtaaggtgccc

SEQ ID NO: 573571 - DNA, 25 bp, Homo sapien
ttaacaggctttgcaatcaaggacc

SEQ ID NO: 573572 - DNA, 25 bp, Homo sapien
tatctgatgggctgtgttacgtggc

SEQ ID NO: 573573 - DNA, 25 bp, Homo sapien
ggatcgctctcccataggaactagg

SEQ ID NO: 573574 - DNA, 25 bp, Homo sapien
tgagggcaccgactaggagatgatt

SEQ ID NO: 573575 - DNA, 25 bp, Homo sapien
cagagctcatgctgggagacacacc

SEQ ID NO: 573576 - DNA, 25 bp, Homo sapien
tacaagaagctcaggaggcgtgacc

SEQ ID NO: 573577 - DNA, 25 bp, Homo sapien
tccctacagtacaggaaacgcgagg

SEQ ID NO: 573578 - DNA, 25 bp, Homo sapien
gctatggcaagacacggaactactg

SEQ ID NO: 573579 - DNA, 25 bp, Homo sapien
agcttgggactagacgtatgcactt

SEQ ID NO: 573580 - DNA, 25 bp, Homo sapien
ctccatatgttgcttagtcatgaac

SEQ ID NO: 573581 - DNA, 25 bp, Homo sapien
ccattctttaaatagagagaggtaa

SEQ ID NO: 573582 - DNA, 25 bp, Homo sapien
tagacgtatgcacttccacacccag

SEQ ID NO: 573583 - DNA, 25 bp, Homo sapien
aaaacttcacgggatgatgaatggc

SEQ ID NO: 573584 - DNA, 25 bp, Homo sapien
gaagcctaggttacaatttcaggaa

SEQ ID NO: 573585 - DNA, 25 bp, Homo sapien
tgaatggcaagccacagaatgagaa

SEQ ID NO: 573586 - DNA, 25 bp, Homo sapien
ttataagcaacagaatacgagcatt

SEQ ID NO: 573587 - DNA, 25 bp, Homo sapien
agcttgggcggcttggctgttcact

SEQ ID NO: 573588 - DNA, 25 bp, Homo sapien
tgttgccccaacagtgtttgtgctg

SEQ ID NO: 573589 - DNA, 25 bp, Homo sapien
tggctgttcactgttgccccaacag

SEQ ID NO: 573590 - DNA, 25 bp, Homo sapien
ggaggctgagcttgggcggcttggc

SEQ ID NO: 573591 - DNA, 25 bp, Homo sapien
agagattcatggcatctcgggccca

SEQ ID NO: 573592 - DNA, 25 bp, Homo sapien
cgtaattcatgtgccctttgcttcc

SEQ ID NO: 573593 - DNA, 25 bp, Homo sapien
aattgtctaccaacttgtgcaagtc

SEQ ID NO: 573594 - DNA, 25 bp, Homo sapien
gcatctcgggcccaattgtctacca

SEQ ID NO: 573595 - DNA, 25 bp, Homo sapien
tgactcagatgtgtgttacggattc

SEQ ID NO: 573596 - DNA, 25 bp, Homo sapien
taaaattgaagaaggtcgtggcgta

SEQ ID NO: 573597 - DNA, 25 bp, Homo sapien
tggcgtaagacgttaagcagcagct

SEQ ID NO: 573598 - DNA, 25 bp, Homo sapien
agttgtttctatcaccttgactcag

SEQ ID NO: 573599 - DNA, 25 bp, Homo sapien
gtcccactccattgagcgccaaatg

SEQ ID NO: 573600 - DNA, 25 bp, Homo sapien
gtgcagagaacttccttgccattcc

SEQ ID NO: 573601 - DNA, 25 bp, Homo sapien
caggttcgaggtcatggagatgcac

SEQ ID NO: 573602 - DNA, 25 bp, Homo sapien
cacatagacttggtgaagtgaccta

SEQ ID NO: 573603 - DNA, 25 bp, Homo sapien
ggatttctgcaaattgctgatgttg

SEQ ID NO: 573604 - DNA, 25 bp, Homo sapien
aagtggtccgcaggttggagcctgg

SEQ ID NO: 573605 - DNA, 25 bp, Homo sapien
ctaagtggtccgcaggttggagcct

SEQ ID NO: 573606 - DNA, 25 bp, Homo sapien
taagtggtccgcaggttggagcctg

SEQ ID NO: 573607 - DNA, 25 bp, Homo sapien
caggaaagcatggtctgaagctgcc

SEQ ID NO: 573608 - DNA, 25 bp, Homo sapien
cagggcatgtaccaaaagcaagagc

SEQ ID NO: 573609 - DNA, 25 bp, Homo sapien
gagactctccattctgagggctcaa

SEQ ID NO: 573610 - DNA, 25 bp, Homo sapien
tatcataagaaagagttgcacccca

SEQ ID NO: 573611 - DNA, 25 bp, Homo sapien
tactgttgtccaacaacattttata

SEQ ID NO: 573612 - DNA, 25 bp, Homo sapien
ctactgttgtccaacaacattttat

SEQ ID NO: 573613 - DNA, 25 bp, Homo sapien
aaaactactgttgtccaacaacatt

SEQ ID NO: 573614 - DNA, 25 bp, Homo sapien
aactactgttgtccaacaacatttt

SEQ ID NO: 573615 - DNA, 25 bp, Homo sapien
tagccagttaggacagtatttccgg

SEQ ID NO: 573616 - DNA, 25 bp, Homo sapien
tgtagtaccccaagctgagaaatgc

SEQ ID NO: 573617 - DNA, 25 bp, Homo sapien
cccattacaaggaggcatagcactg

SEQ ID NO: 573618 - DNA, 25 bp, Homo sapien
tgattcccagaatatgccattgacg

SEQ ID NO: 573619 - DNA, 25 bp, Homo sapien
tactctctccacaagaaatacaagc

SEQ ID NO: 573620 - DNA, 25 bp, Homo sapien
aaccttcagctctcatttgcatatt

SEQ ID NO: 573621 - DNA, 25 bp, Homo sapien
ctcagctactcagccccttgttggt

SEQ ID NO: 573622 - DNA, 25 bp, Homo sapien
tttgcatatttagggccgtagacca

SEQ ID NO: 573623 - DNA, 25 bp, Homo sapien
gcttgttatttcatacacaggagga

SEQ ID NO: 573624 - DNA, 25 bp, Homo sapien
gtagcactagttcattcctctaggc

SEQ ID NO: 573625 - DNA, 25 bp, Homo sapien
ctctaggcttgttatttcatacaca

SEQ ID NO: 573626 - DNA, 25 bp, Homo sapien
ccactgctcctctggtataaagtat

SEQ ID NO: 573627 - DNA, 25 bp, Homo sapien
tgtacattgttaaataatgtaagga

SEQ ID NO: 573628 - DNA, 25 bp, Homo sapien
gtgtacattgttaaataatgtaagg

SEQ ID NO: 573629 - DNA, 25 bp, Homo sapien
agtgtacattgttaaataatgtaag

SEQ ID NO: 573630 - DNA, 25 bp, Homo sapien
gtacattgttaaataatgtaaggaa

SEQ ID NO: 573631 - DNA, 25 bp, Homo sapien
actgaagcacaaagcgcaatcttac

SEQ ID NO: 573632 - DNA, 25 bp, Homo sapien
gcgcaacacccagagttagtgcaaa

SEQ ID NO: 573633 - DNA, 25 bp, Homo sapien
caatcttacaagaagcgcaacaccc

SEQ ID NO: 573634 - DNA, 25 bp, Homo sapien
caattaacggctgctgagaaacccc

SEQ ID NO: 573635 - DNA, 25 bp, Homo sapien
gctgtggctaatcttgaagcagtga

SEQ ID NO: 573636 - DNA, 25 bp, Homo sapien
cctttcgaagttaaggagacagcaa

SEQ ID NO: 573637 - DNA, 25 bp, Homo sapien
tggctcagacccatttgggaagctg

SEQ ID NO: 573638 - DNA, 25 bp, Homo sapien
gaagtctgaaagtactagccggcag

SEQ ID NO: 573639 - DNA, 25 bp, Homo sapien
tgtaacccaccttgaccataaattg

SEQ ID NO: 573640 - DNA, 25 bp, Homo sapien
ccatttcaggtgtgagatgtaaccc

SEQ ID NO: 573641 - DNA, 25 bp, Homo sapien
tgcgacttgtcacacgaggtcacgt

SEQ ID NO: 573642 - DNA, 25 bp, Homo sapien
tagggtcgctgcataaactgttgta

SEQ ID NO: 573643 - DNA, 25 bp, Homo sapien
gatggtgacccagaacaggactcca

SEQ ID NO: 573644 - DNA, 25 bp, Homo sapien
tggtcaagccctcgtctagagcaga

SEQ ID NO: 573645 - DNA, 25 bp, Homo sapien
gctgatgacgcacttttccttgacc

SEQ ID NO: 573646 - DNA, 25 bp, Homo sapien
agacctctgacacattagccttgaa

SEQ ID NO: 573647 - DNA, 25 bp, Homo sapien
tcaatgtagacatgaaatctgcact

SEQ ID NO: 573648 - DNA, 25 bp, Homo sapien
gacaggctgttactcaggagttcct

SEQ ID NO: 573649 - DNA, 25 bp, Homo sapien
gatttctgtaggaatccgtgtggaa

SEQ ID NO: 573650 - DNA, 25 bp, Homo sapien
cgtttgaagggttcttcgtgatgcc

SEQ ID NO: 573651 - DNA, 25 bp, Homo sapien
tgctgctatgaacgagggtgtgtaa

SEQ ID NO: 573652 - DNA, 25 bp, Homo sapien
ttcacttagctagcattaatgcctt

SEQ ID NO: 573653 - DNA, 25 bp, Homo sapien
gaatttgtctactctggatacctca

SEQ ID NO: 573654 - DNA, 25 bp, Homo sapien
cctgtaatcccggtggtcagcctgc

SEQ ID NO: 573655 - DNA, 25 bp, Homo sapien
gtacctggagccagctaattaactt

SEQ ID NO: 573656 - DNA, 25 bp, Homo sapien
tgtacctggagccagctaattaact

SEQ ID NO: 573657 - DNA, 25 bp, Homo sapien
agagacagaatttctcagggctggt

SEQ ID NO: 573658 - DNA, 25 bp, Homo sapien
ctggttaaggaagtgaagtggcttt

SEQ ID NO: 573659 - DNA, 25 bp, Homo sapien
cagggtcatgctgcctatatagtag

SEQ ID NO: 573660 - DNA, 25 bp, Homo sapien
ccagctatcttgttagctcctggaa

SEQ ID NO: 573661 - DNA, 25 bp, Homo sapien
gcatttcagtgattgtggcttctat

SEQ ID NO: 573662 - DNA, 25 bp, Homo sapien
cagcgggccccgcccagacctattt

SEQ ID NO: 573663 - DNA, 25 bp, Homo sapien
taggactacgggaacattccaccag

SEQ ID NO: 573664 - DNA, 25 bp, Homo sapien
gactacgggaacattccaccaggcc

SEQ ID NO: 573665 - DNA, 25 bp, Homo sapien
tacgggaacattccaccaggcccag

SEQ ID NO: 573666 - DNA, 25 bp, Homo sapien
gactaacgttttgctgcttgtagag

SEQ ID NO: 573667 - DNA, 25 bp, Homo sapien
ccatgcccgactaacgttttgctgc

SEQ ID NO: 573668 - DNA, 25 bp, Homo sapien
tgcccgactaacgttttgctgcttg

SEQ ID NO: 573669 - DNA, 25 bp, Homo sapien
cccgactaacgttttgctgcttgta

SEQ ID NO: 573670 - DNA, 25 bp, Homo sapien
agaagggcctctgaatcgccacacg

SEQ ID NO: 573671 - DNA, 25 bp, Homo sapien
gtagaagggcctctgaatcgccaca

SEQ ID NO: 573672 - DNA, 25 bp, Homo sapien
ttgtagaagggcctctgaatcgcca

SEQ ID NO: 573673 - DNA, 25 bp, Homo sapien
aagggcctctgaatcgccacacgca

SEQ ID NO: 573674 - DNA, 25 bp, Homo sapien
tagtaagaattaggcagccaggcac

SEQ ID NO: 573675 - DNA, 25 bp, Homo sapien
tacaggagtccttggctaaaaagat

SEQ ID NO: 573676 - DNA, 25 bp, Homo sapien
tagatcagtacctttcacatgggag

SEQ ID NO: 573677 - DNA, 25 bp, Homo sapien
gaatataagctccaagccgggaact

SEQ ID NO: 573678 - DNA, 25 bp, Homo sapien
cttcagttccctcggacctcccctg

SEQ ID NO: 573679 - DNA, 25 bp, Homo sapien
ccaggggtctgagttggccactctt

SEQ ID NO: 573680 - DNA, 25 bp, Homo sapien
cctgttgtttgccacaccaccaatc

SEQ ID NO: 573681 - DNA, 25 bp, Homo sapien
gtctgagttggccactcttcagttc

SEQ ID NO: 573682 - DNA, 25 bp, Homo sapien
ggaaaattgccctaagagagcatgc

SEQ ID NO: 573683 - DNA, 25 bp, Homo sapien
tcccagatactagcaagacattgca

SEQ ID NO: 573684 - DNA, 25 bp, Homo sapien
taacttcagtatggcacatgtgccc

SEQ ID NO: 573685 - DNA, 25 bp, Homo sapien
tagcaaatctgcgagtcctgagcca

SEQ ID NO: 573686 - DNA, 25 bp, Homo sapien
taacaaattgcagtcgctcctcagc

SEQ ID NO: 573687 - DNA, 25 bp, Homo sapien
gattttctcgtgcagactcgcagcc

SEQ ID NO: 573688 - DNA, 25 bp, Homo sapien
aattagtgtccacgttccgaccctg

SEQ ID NO: 573689 - DNA, 25 bp, Homo sapien
catgcagagggtagctacagccatt

SEQ ID NO: 573690 - DNA, 25 bp, Homo sapien
ctgctgctgccgcccaggcaccgcc

SEQ ID NO: 573691 - DNA, 25 bp, Homo sapien
tgctgccgcccaggcaccgccgccg

SEQ ID NO: 573692 - DNA, 25 bp, Homo sapien
cgtcctcagggctgccgctactgct

SEQ ID NO: 573693 - DNA, 25 bp, Homo sapien
gctgctgccgcccaggcaccgccgc

SEQ ID NO: 573694 - DNA, 25 bp, Homo sapien
ctgggtaggaaaggcgaaagcctca

SEQ ID NO: 573695 - DNA, 25 bp, Homo sapien
taggaaaggcgaaagcctcagcact

SEQ ID NO: 573696 - DNA, 25 bp, Homo sapien
gaaagcctcagcactagcgacaggg

SEQ ID NO: 573697 - DNA, 25 bp, Homo sapien
gaagctctgggtcccgcgcgacttc

SEQ ID NO: 573698 - DNA, 25 bp, Homo sapien
caacctcatggctccccaatttctc

SEQ ID NO: 573699 - DNA, 25 bp, Homo sapien
cgtccgcggcttcactagtcctaag

SEQ ID NO: 573700 - DNA, 25 bp, Homo sapien
ctaacccaaagatccaccctgaccg

SEQ ID NO: 573701 - DNA, 25 bp, Homo sapien
atttctccgtctccccactacctcg

SEQ ID NO: 573702 - DNA, 25 bp, Homo sapien
tttgggttacaagaaagcacttctc

SEQ ID NO: 573703 - DNA, 25 bp, Homo sapien
tcctacaaggacaagaatcacagct

SEQ ID NO: 573704 - DNA, 25 bp, Homo sapien
tttgctggaagacaataatctgctc

SEQ ID NO: 573705 - DNA, 25 bp, Homo sapien
cacttagaaaaagcaacgatctgca

SEQ ID NO: 573706 - DNA, 25 bp, Homo sapien
ccaagtagcgctttgagatgactgc

SEQ ID NO: 573707 - DNA, 25 bp, Homo sapien
ctctccagcaagcagccaacaagga

SEQ ID NO: 573708 - DNA, 25 bp, Homo sapien
ccctgaatcataggtgccaactgca

SEQ ID NO: 573709 - DNA, 25 bp, Homo sapien
tcaggcctgccaattgccgcatgag

SEQ ID NO: 573710 - DNA, 25 bp, Homo sapien
tatctaccttcagtaactttttctg

SEQ ID NO: 573711 - DNA, 25 bp, Homo sapien
caggcccaaagcataagaataaaca

SEQ ID NO: 573712 - DNA, 25 bp, Homo sapien
tagccaataattatctaccttcagt

SEQ ID NO: 573713 - DNA, 25 bp, Homo sapien
ttcagaatggattcagaaacttggc

SEQ ID NO: 573714 - DNA, 25 bp, Homo sapien
tcttaaaagacactggggcttctgt

SEQ ID NO: 573715 - DNA, 25 bp, Homo sapien
catgtcgtgaggatactcaaacttc

SEQ ID NO: 573716 - DNA, 25 bp, Homo sapien
gtcttcgtcactctctcaaatcact

SEQ ID NO: 573717 - DNA, 25 bp, Homo sapien
cttctgtcttcgtcactctctcaaa

SEQ ID NO: 573718 - DNA, 25 bp, Homo sapien
tccccagctgtccaatcttgaagaa

SEQ ID NO: 573719 - DNA, 25 bp, Homo sapien
aatgggaaccttgtgaggtgtctct

SEQ ID NO: 573720 - DNA, 25 bp, Homo sapien
ctatggctacaagttggtttaaggt

SEQ ID NO: 573721 - DNA, 25 bp, Homo sapien
ccagctgtccaatcttgaagaagta

SEQ ID NO: 573722 - DNA, 25 bp, Homo sapien
gtactgttggttcgacggtgaccca

SEQ ID NO: 573723 - DNA, 25 bp, Homo sapien
acgtggaagcctgggtgaacgccca

SEQ ID NO: 573724 - DNA, 25 bp, Homo sapien
catggtcacttagatacatagggcc

SEQ ID NO: 573725 - DNA, 25 bp, Homo sapien
caacagagcgggcacttccatacat

SEQ ID NO: 573726 - DNA, 25 bp, Homo sapien
ggctactacccatagcagtcatccg

SEQ ID NO: 573727 - DNA, 25 bp, Homo sapien
gatgctctccaaatgctatggtgtc

SEQ ID NO: 573728 - DNA, 25 bp, Homo sapien
cagtcatccgaacaccgtaaggcag

SEQ ID NO: 573729 - DNA, 25 bp, Homo sapien
tatggtgtcactagcaaccccactg

SEQ ID NO: 573730 - DNA, 25 bp, Homo sapien
gtgaggtacagtggatgccatactc

SEQ ID NO: 573731 - DNA, 25 bp, Homo sapien
agtgaggtacagtggatgccatact

SEQ ID NO: 573732 - DNA, 25 bp, Homo sapien
gagtgaggtacagtggatgccatac

SEQ ID NO: 573733 - DNA, 25 bp, Homo sapien
ggagtgaggtacagtggatgccata

SEQ ID NO: 573734 - DNA, 25 bp, Homo sapien
gatccatgattgtgttatctctcgc

SEQ ID NO: 573735 - DNA, 25 bp, Homo sapien
ccaaatggtgattttggaagcttca

SEQ ID NO: 573736 - DNA, 25 bp, Homo sapien
cattgaagaactcaatttgctctcc

SEQ ID NO: 573737 - DNA, 25 bp, Homo sapien
ccagaaggtcttgatgctattcatt

SEQ ID NO: 573738 - DNA, 25 bp, Homo sapien
gaactgaagtattcagaagattcaa

SEQ ID NO: 573739 - DNA, 25 bp, Homo sapien
gactgtttcactggaactgaagtat

SEQ ID NO: 573740 - DNA, 25 bp, Homo sapien
aaggcggtgttcaccattcttcagc

SEQ ID NO: 573741 - DNA, 25 bp, Homo sapien
attcttcagcacatatgggtttttt

SEQ ID NO: 573742 - DNA, 25 bp, Homo sapien
tgcttcctgcctaatcaaaacaaga

SEQ ID NO: 573743 - DNA, 25 bp, Homo sapien
cacaatgacatttggctttgtagcc

SEQ ID NO: 573744 - DNA, 25 bp, Homo sapien
gagcctttggatcctatgatacacc

SEQ ID NO: 573745 - DNA, 25 bp, Homo sapien
catttacacctgctgatgttgactg

SEQ ID NO: 573746 - DNA, 25 bp, Homo sapien
cctaatctatcttgcaatgctgaca

SEQ ID NO: 573747 - DNA, 25 bp, Homo sapien
ccagcctctaggtgataattttcaa

SEQ ID NO: 573748 - DNA, 25 bp, Homo sapien
taagacgctctcaacatagccagag

SEQ ID NO: 573749 - DNA, 25 bp, Homo sapien
gcaacataagtaccatgggtgcccc

SEQ ID NO: 573750 - DNA, 25 bp, Homo sapien
taggtgatgaacgtgcatctctgcc

SEQ ID NO: 573751 - DNA, 25 bp, Homo sapien
ggtcttcctcggtagccttggcaga

SEQ ID NO: 573752 - DNA, 25 bp, Homo sapien
tgctacacaaggttcgccagtcctg

SEQ ID NO: 573753 - DNA, 25 bp, Homo sapien
gaagaaacagctctttggcctgccg

SEQ ID NO: 573754 - DNA, 25 bp, Homo sapien
aatcaggagcattctcaaaccttcg

SEQ ID NO: 573755 - DNA, 25 bp, Homo sapien
ggagcattctcaaaccttcgatgca

SEQ ID NO: 573756 - DNA, 25 bp, Homo sapien
caggagcattctcaaaccttcgatg

SEQ ID NO: 573757 - DNA, 25 bp, Homo sapien
gcagaatcaggagcattctcaaacc

SEQ ID NO: 573758 - DNA, 25 bp, Homo sapien
tcttccaggtctcgaagcccacgct

SEQ ID NO: 573759 - DNA, 25 bp, Homo sapien
gcaccattcgatttcagcatctgaa

SEQ ID NO: 573760 - DNA, 25 bp, Homo sapien
aatttagaatggctccgatacactt

SEQ ID NO: 573761 - DNA, 25 bp, Homo sapien
ctttcctcagtactcaaagcaccat

SEQ ID NO: 573762 - DNA, 25 bp, Homo sapien
ctcccattgagcctctttcgaactt

SEQ ID NO: 573763 - DNA, 25 bp, Homo sapien
tgagcctctttcgaacttagttcct

SEQ ID NO: 573764 - DNA, 25 bp, Homo sapien
cccattgagcctctttcgaacttag

SEQ ID NO: 573765 - DNA, 25 bp, Homo sapien
cattgagcctctttcgaacttagtt

SEQ ID NO: 573766 - DNA, 25 bp, Homo sapien
cgaactgtgtgataggtcatattca

SEQ ID NO: 573767 - DNA, 25 bp, Homo sapien
gaaactaaatgcagcacgaactgtg

SEQ ID NO: 573768 - DNA, 25 bp, Homo sapien
tctttcacagatctgagtcacaaaa

SEQ ID NO: 573769 - DNA, 25 bp, Homo sapien
ttattcaaccaatagggaaatgtcc

SEQ ID NO: 573770 - DNA, 25 bp, Homo sapien
gctttgtctgcagggcgagtagttc

SEQ ID NO: 573771 - DNA, 25 bp, Homo sapien
ggcgagtagttctgtgtcctttctg

SEQ ID NO: 573772 - DNA, 25 bp, Homo sapien
caatgtgctgtttactatctgagaa

SEQ ID NO: 573773 - DNA, 25 bp, Homo sapien
ttagcagtcaaggactccttcaaca

SEQ ID NO: 573774 - DNA, 25 bp, Homo sapien
cagtgactgatcacgctgctgaaga

SEQ ID NO: 573775 - DNA, 25 bp, Homo sapien
caaaaacagcacaggtaacgcttat

SEQ ID NO: 573776 - DNA, 25 bp, Homo sapien
gcttatgaaaaggtgccaagaaacc

SEQ ID NO: 573777 - DNA, 25 bp, Homo sapien
gatggttacattttagcacagtgac

SEQ ID NO: 573778 - DNA, 25 bp, Homo sapien
tttgcaggtaacattatctagatga

SEQ ID NO: 573779 - DNA, 25 bp, Homo sapien
caggtaacattatctagatgatttc

SEQ ID NO: 573780 - DNA, 25 bp, Homo sapien
aggtaacattatctagatgatttca

SEQ ID NO: 573781 - DNA, 25 bp, Homo sapien
tgcaggtaacattatctagatgatt

SEQ ID NO: 573782 - DNA, 25 bp, Homo sapien
caaacttggaagtgcggctgacctc

SEQ ID NO: 573783 - DNA, 25 bp, Homo sapien
ggttctctggtttgtacacctgcca

SEQ ID NO: 573784 - DNA, 25 bp, Homo sapien
tattgcatgcactcaagctactgaa

SEQ ID NO: 573785 - DNA, 25 bp, Homo sapien
gaaaccaatcacaagcccatctggg

SEQ ID NO: 573786 - DNA, 25 bp, Homo sapien
tttaagcaatgctaataaatagaca

SEQ ID NO: 573787 - DNA, 25 bp, Homo sapien
ttgtcaagtgccaccagagtaattt

SEQ ID NO: 573788 - DNA, 25 bp, Homo sapien
gaaaaggtgactcttgtcaagtgcc

SEQ ID NO: 573789 - DNA, 25 bp, Homo sapien
tttactgggctctaacactggcaag

SEQ ID NO: 573790 - DNA, 25 bp, Homo sapien
tatgatcaagaacgcaagtttgcgg

SEQ ID NO: 573791 - DNA, 25 bp, Homo sapien
gcgggtttgaatcgatcgggcacta

SEQ ID NO: 573792 - DNA, 25 bp, Homo sapien
gcaagcagagggtgcacgtcaaaca

SEQ ID NO: 573793 - DNA, 25 bp, Homo sapien
caagagtcatggtcgtctatgcaca

SEQ ID NO: 573794 - DNA, 25 bp, Homo sapien
atagagatagagatagatagagata

SEQ ID NO: 573795 - DNA, 25 bp, Homo sapien
gagatagagatagatagagatagag

SEQ ID NO: 573796 - DNA, 25 bp, Homo sapien
tagagatagagatagatagagatag

SEQ ID NO: 573797 - DNA, 25 bp, Homo sapien
agatagagatagatagagatagaga

SEQ ID NO: 573798 - DNA, 25 bp, Homo sapien
tagagatagagatagagatagagat

SEQ ID NO: 573799 - DNA, 25 bp, Homo sapien
agagatagagacacagatagagata

SEQ ID NO: 573800 - DNA, 25 bp, Homo sapien
agatagagacacagatagagataga

SEQ ID NO: 573801 - DNA, 25 bp, Homo sapien
agagatagagatagagatagagata

SEQ ID NO: 573802 - DNA, 25 bp, Homo sapien
tgaatatcataccagtgtcaccctg

SEQ ID NO: 573803 - DNA, 25 bp, Homo sapien
catgatcatctgtaccgctgctaga

SEQ ID NO: 573804 - DNA, 25 bp, Homo sapien
tctgccccaggtatagagaggatgc

SEQ ID NO: 573805 - DNA, 25 bp, Homo sapien
aaagccagtctaccttcacaagcag

SEQ ID NO: 573806 - DNA, 25 bp, Homo sapien
catattgccattaatactggtagga

SEQ ID NO: 573807 - DNA, 25 bp, Homo sapien
caaactcaaacctgcatgatgagag

SEQ ID NO: 573808 - DNA, 25 bp, Homo sapien
tattatccagcgttcctaagggtct

SEQ ID NO: 573809 - DNA, 25 bp, Homo sapien
gcttttacctgtgggaatctacacg

SEQ ID NO: 573810 - DNA, 25 bp, Homo sapien
ccttagctaaggtcaagggatactc

SEQ ID NO: 573811 - DNA, 25 bp, Homo sapien
catagggatcctgggtagtaaactc

SEQ ID NO: 573812 - DNA, 25 bp, Homo sapien
gattttacgctaccatattctcact

SEQ ID NO: 573813 - DNA, 25 bp, Homo sapien
actgaaaagtctgatgttggcctaa

SEQ ID NO: 573814 - DNA, 25 bp, Homo sapien
ccttctcttccaaacgcaatcggag

SEQ ID NO: 573815 - DNA, 25 bp, Homo sapien
tcttccaaacgcaatcggagagcat

SEQ ID NO: 573816 - DNA, 25 bp, Homo sapien
tccaaacgcaatcggagagcatcca

SEQ ID NO: 573817 - DNA, 25 bp, Homo sapien
ttctcttccaaacgcaatcggagag

SEQ ID NO: 573818 - DNA, 25 bp, Homo sapien
agccatatcctgaatttgttttgtc

SEQ ID NO: 573819 - DNA, 25 bp, Homo sapien
cagccatatcctgaatttgttttgt

SEQ ID NO: 573820 - DNA, 25 bp, Homo sapien
ttaaccttccgctccttcacatcca

SEQ ID NO: 573821 - DNA, 25 bp, Homo sapien
tctgaagaacattaaccttccgctc

SEQ ID NO: 573822 - DNA, 25 bp, Homo sapien
accttccgctccttcacatccaaca

SEQ ID NO: 573823 - DNA, 25 bp, Homo sapien
agaacattaaccttccgctccttca

SEQ ID NO: 573824 - DNA, 25 bp, Homo sapien
ctgtgaaggatgaagaggaaggaca

SEQ ID NO: 573825 - DNA, 25 bp, Homo sapien
tatacaagatttgcatgatatgtgt

SEQ ID NO: 573826 - DNA, 25 bp, Homo sapien
tacaagatttgcatgatatgtgtgt

SEQ ID NO: 573827 - DNA, 25 bp, Homo sapien
aaatatacaagatttgcatgatatg

SEQ ID NO: 573828 - DNA, 25 bp, Homo sapien
tgtactatctggtaagttttaagac

SEQ ID NO: 573829 - DNA, 25 bp, Homo sapien
caaagcagtactaggccaaacttgg

SEQ ID NO: 573830 - DNA, 25 bp, Homo sapien
tacacagaatgggaaggatctaagc

SEQ ID NO: 573831 - DNA, 25 bp, Homo sapien
aataacaggcataaaggtaattgtc

SEQ ID NO: 573832 - DNA, 25 bp, Homo sapien
actactagtcagttgtttggtggaa

SEQ ID NO: 573833 - DNA, 25 bp, Homo sapien
tattgcctgggatatgtcattacgt

SEQ ID NO: 573834 - DNA, 25 bp, Homo sapien
ttgatcatatcaagtacacatactg

SEQ ID NO: 573835 - DNA, 25 bp, Homo sapien
ggaatcttaagatgttgactcatca

SEQ ID NO: 573836 - DNA, 25 bp, Homo sapien
ctgtctgttgctctgaccaggtact

SEQ ID NO: 573837 - DNA, 25 bp, Homo sapien
ggcctccaaccgatatttctgtctg

SEQ ID NO: 573838 - DNA, 25 bp, Homo sapien
caggtactgggccatcaccaatgcc

SEQ ID NO: 573839 - DNA, 25 bp, Homo sapien
tacatggcctccaaccgatatttct

SEQ ID NO: 573840 - DNA, 25 bp, Homo sapien
tcttcatgtaatcaagccttggaga

SEQ ID NO: 573841 - DNA, 25 bp, Homo sapien
ttaactgtagctaggagtcacctca

SEQ ID NO: 573842 - DNA, 25 bp, Homo sapien
tgctcttctgatgtacggttcccag

SEQ ID NO: 573843 - DNA, 25 bp, Homo sapien
aatggaaagatgaccttttacagac

SEQ ID NO: 573844 - DNA, 25 bp, Homo sapien
gagatgaagtactgcaacattgccc

SEQ ID NO: 573845 - DNA, 25 bp, Homo sapien
tagagatgaagtactgcaacattgc

SEQ ID NO: 573846 - DNA, 25 bp, Homo sapien
gatgaagtactgcaacattgcccag

SEQ ID NO: 573847 - DNA, 25 bp, Homo sapien
tgtagagatgaagtactgcaacatt

SEQ ID NO: 573848 - DNA, 25 bp, Homo sapien
cagctgagccccactgaaggctccc

SEQ ID NO: 573849 - DNA, 25 bp, Homo sapien
agctgagccccactgaaggctccca

SEQ ID NO: 573850 - DNA, 25 bp, Homo sapien
ggtaacagctgagccccactgaagg

SEQ ID NO: 573851 - DNA, 25 bp, Homo sapien
gatgggtaacagctgagccccactg

SEQ ID NO: 573852 - DNA, 25 bp, Homo sapien
gtctctaagctgctcttgaagattt

SEQ ID NO: 573853 - DNA, 25 bp, Homo sapien
tctaagctgctcttgaagattttca

SEQ ID NO: 573854 - DNA, 25 bp, Homo sapien
taagctgctcttgaagattttcaat

SEQ ID NO: 573855 - DNA, 25 bp, Homo sapien
cttttccttgtctctaagctgctct

SEQ ID NO: 573856 - DNA, 25 bp, Homo sapien
ttggtggtgtcagcctgcaaggatt

SEQ ID NO: 573857 - DNA, 25 bp, Homo sapien
cagtgtcagtgttggtggtgtcagc

SEQ ID NO: 573858 - DNA, 25 bp, Homo sapien
gcctgcaaggatttgacccgttctt

SEQ ID NO: 573859 - DNA, 25 bp, Homo sapien
tcctccaaagttgtcaaggcagtgt

SEQ ID NO: 573860 - DNA, 25 bp, Homo sapien
gtccctctgctcctttaagcgttca

SEQ ID NO: 573861 - DNA, 25 bp, Homo sapien
tttgtagttatcaatttcctcttgc

SEQ ID NO: 573862 - DNA, 25 bp, Homo sapien
cctttaagcgttcaattgtccgctc

SEQ ID NO: 573863 - DNA, 25 bp, Homo sapien
ttgcttctctcgctcatctctgtcc

SEQ ID NO: 573864 - DNA, 25 bp, Homo sapien
ctagtgtcttaagccgtgagtcctt

SEQ ID NO: 573865 - DNA, 25 bp, Homo sapien
agtgtcttaagccgtgagtcctttt

SEQ ID NO: 573866 - DNA, 25 bp, Homo sapien
ctctagtgtcttaagccgtgagtcc

SEQ ID NO: 573867 - DNA, 25 bp, Homo sapien
aagaagcatgctctttcagatccaa

SEQ ID NO: 573868 - DNA, 25 bp, Homo sapien
gggacaacaaaggcgaagagattga

SEQ ID NO: 573869 - DNA, 25 bp, Homo sapien
tacacataaagagaggggacaacaa

SEQ ID NO: 573870 - DNA, 25 bp, Homo sapien
caacaaaggcgaagagattgaagat

SEQ ID NO: 573871 - DNA, 25 bp, Homo sapien
gaagtaactgagaaaattcttagta

SEQ ID NO: 573872 - DNA, 25 bp, Homo sapien
actggctctggcttccaatgctgcc

SEQ ID NO: 573873 - DNA, 25 bp, Homo sapien
tggctctggcttccaatgctgcctc

SEQ ID NO: 573874 - DNA, 25 bp, Homo sapien
ctctggactggctctggcttccaat

SEQ ID NO: 573875 - DNA, 25 bp, Homo sapien
tggactggctctggcttccaatgct

SEQ ID NO: 573876 - DNA, 25 bp, Homo sapien
agagtcgatcaacttctgcctgggc

SEQ ID NO: 573877 - DNA, 25 bp, Homo sapien
ccttcaagatttctaagagtcgatc

SEQ ID NO: 573878 - DNA, 25 bp, Homo sapien
ccaagtgctgtattcggtcactcat

SEQ ID NO: 573879 - DNA, 25 bp, Homo sapien
tctccaagtgctgtattcggtcact

SEQ ID NO: 573880 - DNA, 25 bp, Homo sapien
cagtaatagcaagaattcgagaacc

SEQ ID NO: 573881 - DNA, 25 bp, Homo sapien
caacaaagaacgtacaactgaccta

SEQ ID NO: 573882 - DNA, 25 bp, Homo sapien
tatgttacagcccatagcttcccaa

SEQ ID NO: 573883 - DNA, 25 bp, Homo sapien
ctgaaaaagtatgtccccaaaagca

SEQ ID NO: 573884 - DNA, 25 bp, Homo sapien
gcagtactgttgcagatttcaagcc

SEQ ID NO: 573885 - DNA, 25 bp, Homo sapien
aattataatgcaatagggccagagg

SEQ ID NO: 573886 - DNA, 25 bp, Homo sapien
gagaggcatgtattcacgtaagcac

SEQ ID NO: 573887 - DNA, 25 bp, Homo sapien
gagcaggtaatcagcccgtgttatt

SEQ ID NO: 573888 - DNA, 25 bp, Homo sapien
acgaggtttcgccacttgcctaagc

SEQ ID NO: 573889 - DNA, 25 bp, Homo sapien
ttccattaagagaatccaagttatc

SEQ ID NO: 573890 - DNA, 25 bp, Homo sapien
attccattaagagaatccaagttat

SEQ ID NO: 573891 - DNA, 25 bp, Homo sapien
ttcctctgttcttaggaaatttcat

SEQ ID NO: 573892 - DNA, 25 bp, Homo sapien
gttaacagcatgtattcctctgttc

SEQ ID NO: 573893 - DNA, 25 bp, Homo sapien
ggttaacagcatgtattcctctgtt

SEQ ID NO: 573894 - DNA, 25 bp, Homo sapien
ctctgttcttaggaaatttcatctt

SEQ ID NO: 573895 - DNA, 25 bp, Homo sapien
gaaacccactgctctacagagttgt

SEQ ID NO: 573896 - DNA, 25 bp, Homo sapien
cctgggagatctctgataccaaata

SEQ ID NO: 573897 - DNA, 25 bp, Homo sapien
tctgtctgactgtaactacgatact

SEQ ID NO: 573898 - DNA, 25 bp, Homo sapien
tacatagtacataaatcagaaggca

SEQ ID NO: 573899 - DNA, 25 bp, Homo sapien
cattgtaagacagtcacccaggtga

SEQ ID NO: 573900 - DNA, 25 bp, Homo sapien
gcaacagtatggattaggcccacca

SEQ ID NO: 573901 - DNA, 25 bp, Homo sapien
tggcacactgcaagaggttactaac

SEQ ID NO: 573902 - DNA, 25 bp, Homo sapien
gcttagcgtaagatttggcacactg

SEQ ID NO: 573903 - DNA, 25 bp, Homo sapien
tctttgccgagcataagagcataca

SEQ ID NO: 573904 - DNA, 25 bp, Homo sapien
tttgccgagcataagagcatacatg

SEQ ID NO: 573905 - DNA, 25 bp, Homo sapien
ccgagcataagagcatacatgcact

SEQ ID NO: 573906 - DNA, 25 bp, Homo sapien
cctgtctttgccgagcataagagca

SEQ ID NO: 573907 - DNA, 25 bp, Homo sapien
ttcttgtttatatgcctcaggcctc

SEQ ID NO: 573908 - DNA, 25 bp, Homo sapien
gacatatagtggttgctagccccat

SEQ ID NO: 573909 - DNA, 25 bp, Homo sapien
ggcctcacaggatcaaccagggatt

SEQ ID NO: 573910 - DNA, 25 bp, Homo sapien
ccatgactctggaaaagtaacgtac

SEQ ID NO: 573911 - DNA, 25 bp, Homo sapien
cacatgatgataatgctttggtcaa

SEQ ID NO: 573912 - DNA, 25 bp, Homo sapien
cagtctataccttacagcctggctg

SEQ ID NO: 573913 - DNA, 25 bp, Homo sapien
tagactgcatcttgtatgcagatgc

SEQ ID NO: 573914 - DNA, 25 bp, Homo sapien
catctatgtttgtgttagtatacgc

SEQ ID NO: 573915 - DNA, 25 bp, Homo sapien
ctcacttactcacctaggctaaact

SEQ ID NO: 573916 - DNA, 25 bp, Homo sapien
gctcaaatgatcgtcctatgtcagc

SEQ ID NO: 573917 - DNA, 25 bp, Homo sapien
cacttactcacctaggctaaactgc

SEQ ID NO: 573918 - DNA, 25 bp, Homo sapien
ctcaaatgatcgtcctatgtcagcc

SEQ ID NO: 573919 - DNA, 25 bp, Homo sapien
gctgggattacacactgtacctgga

SEQ ID NO: 573920 - DNA, 25 bp, Homo sapien
taaagcagtagtcaaaaacctccca

SEQ ID NO: 573921 - DNA, 25 bp, Homo sapien
gacatattaatagctgaacagacca

SEQ ID NO: 573922 - DNA, 25 bp, Homo sapien
tactgatgaaactagacgcaaaact

SEQ ID NO: 573923 - DNA, 25 bp, Homo sapien
caggaacatgattcccctatatggg

SEQ ID NO: 573924 - DNA, 25 bp, Homo sapien
tatcaacctttcacctaatggctcc

SEQ ID NO: 573925 - DNA, 25 bp, Homo sapien
taactagtgcatcaaggcagtgaca

SEQ ID NO: 573926 - DNA, 25 bp, Homo sapien
taaagaggctaagattaactagtgc

SEQ ID NO: 573927 - DNA, 25 bp, Homo sapien
tgtgcttattgtcagatccttcaaa

SEQ ID NO: 573928 - DNA, 25 bp, Homo sapien
tacccttatacatgcttcctgatgc

SEQ ID NO: 573929 - DNA, 25 bp, Homo sapien
tgcatctccaaaaaagagcatgttt

SEQ ID NO: 573930 - DNA, 25 bp, Homo sapien
aaaaaacgcccatacattgtgctta

SEQ ID NO: 573931 - DNA, 25 bp, Homo sapien
tccttgtgcttcagatttgctacct

SEQ ID NO: 573932 - DNA, 25 bp, Homo sapien
ttgagattgtcctcccgtcgtcgcg

SEQ ID NO: 573933 - DNA, 25 bp, Homo sapien
gctgctgagagctgtcgttgagatt

SEQ ID NO: 573934 - DNA, 25 bp, Homo sapien
gtcgtcgcgcctcctctaacatttg

SEQ ID NO: 573935 - DNA, 25 bp, Homo sapien
tttcagattctccttgtgttctaac

SEQ ID NO: 573936 - DNA, 25 bp, Homo sapien
cgatcctttcagattctccttgtgt

SEQ ID NO: 573937 - DNA, 25 bp, Homo sapien
acccgatcctttcagattctccttg

SEQ ID NO: 573938 - DNA, 25 bp, Homo sapien
cctttcagattctccttgtgttcta

SEQ ID NO: 573939 - DNA, 25 bp, Homo sapien
aagtagtactactgctctctggcaa

SEQ ID NO: 573940 - DNA, 25 bp, Homo sapien
aaagtgaaaatgaaccctgcaggtc

SEQ ID NO: 573941 - DNA, 25 bp, Homo sapien
acattaagtataaggccaggtgtgc

SEQ ID NO: 573942 - DNA, 25 bp, Homo sapien
taacatcacaagtggcagtcgctga

SEQ ID NO: 573943 - DNA, 25 bp, Homo sapien
catggtgaatttaagcactctccca

SEQ ID NO: 573944 - DNA, 25 bp, Homo sapien
aaaaaatcactttgaggcctggtgc

SEQ ID NO: 573945 - DNA, 25 bp, Homo sapien
taaatctacgacatgggatagctgg

SEQ ID NO: 573946 - DNA, 25 bp, Homo sapien
gatagctgggtcaaaagatctgcac

SEQ ID NO: 573947 - DNA, 25 bp, Homo sapien
cgtaatttcagcaactatccacagg

SEQ ID NO: 573948 - DNA, 25 bp, Homo sapien
aacagatgctgatttatatgcacac

SEQ ID NO: 573949 - DNA, 25 bp, Homo sapien
aagagaattttcatgcgtaatttca

SEQ ID NO: 573950 - DNA, 25 bp, Homo sapien
tgtaaaaacagatgctgatttatat

SEQ ID NO: 573951 - DNA, 25 bp, Homo sapien
tattggcccccactgaataaagacc

SEQ ID NO: 573952 - DNA, 25 bp, Homo sapien
ctgcttctagtcttaaagtagacaa

SEQ ID NO: 573953 - DNA, 25 bp, Homo sapien
gaaatactcagagtctattggcccc

SEQ ID NO: 573954 - DNA, 25 bp, Homo sapien
ctgagaacgaaatactcagagtcta

SEQ ID NO: 573955 - DNA, 25 bp, Homo sapien
atggctggcaaggtggtgcagctag

SEQ ID NO: 573956 - DNA, 25 bp, Homo sapien
cagctagtggcaagaggcctctgtt

SEQ ID NO: 573957 - DNA, 25 bp, Homo sapien
tggtgcagctagtggcaagaggcct

SEQ ID NO: 573958 - DNA, 25 bp, Homo sapien
caaggtggtgcagctagtggcaaga

SEQ ID NO: 573959 - DNA, 25 bp, Homo sapien
accatttcccgctctgcagttatct

SEQ ID NO: 573960 - DNA, 25 bp, Homo sapien
gattcctcttgtgctagcaccattt

SEQ ID NO: 573961 - DNA, 25 bp, Homo sapien
tgtcatccttcttacggagactgtc

SEQ ID NO: 573962 - DNA, 25 bp, Homo sapien
tcccgctctgcagttatctgtacac

SEQ ID NO: 573963 - DNA, 25 bp, Homo sapien
ggttaaccagcagcattgcttggaa

SEQ ID NO: 573964 - DNA, 25 bp, Homo sapien
ttaaccagcagcattgcttggaact

SEQ ID NO: 573965 - DNA, 25 bp, Homo sapien
ttggttaaccagcagcattgcttgg

SEQ ID NO: 573966 - DNA, 25 bp, Homo sapien
aaccagcagcattgcttggaactgt

SEQ ID NO: 573967 - DNA, 25 bp, Homo sapien
ctaaactatactggttgtgtgttac

SEQ ID NO: 573968 - DNA, 25 bp, Homo sapien
cacaacttggtttcctagacgcttc

SEQ ID NO: 573969 - DNA, 25 bp, Homo sapien
actgtagctactaaccacaacttgg

SEQ ID NO: 573970 - DNA, 25 bp, Homo sapien
tctgctccctctacatggaacatgt

SEQ ID NO: 573971 - DNA, 25 bp, Homo sapien
tctaccatggtagttgtcaaacaga

SEQ ID NO: 573972 - DNA, 25 bp, Homo sapien
gataaaggttcagaccgggcacagt

SEQ ID NO: 573973 - DNA, 25 bp, Homo sapien
tactttgtgctagatggcttgcaca

SEQ ID NO: 573974 - DNA, 25 bp, Homo sapien
tcatctattcaaaaaccgttaagga

SEQ ID NO: 573975 - DNA, 25 bp, Homo sapien
ctgtggtcataacccttaagaattc

SEQ ID NO: 573976 - DNA, 25 bp, Homo sapien
gcctgaacaacatatcgagaactca

SEQ ID NO: 573977 - DNA, 25 bp, Homo sapien
aattgtgcacgcatacagtgccagc

SEQ ID NO: 573978 - DNA, 25 bp, Homo sapien
gttggccaaccagaaatccaatggc

SEQ ID NO: 573979 - DNA, 25 bp, Homo sapien
gctatgtggaaaggtagcttgagcc

SEQ ID NO: 573980 - DNA, 25 bp, Homo sapien
ggtgctgaatcaaccagacagggtc

SEQ ID NO: 573981 - DNA, 25 bp, Homo sapien
gattatgggcacctagcactgcgcc

SEQ ID NO: 573982 - DNA, 25 bp, Homo sapien
gaacctgtattgatctaagacagac

SEQ ID NO: 573983 - DNA, 25 bp, Homo sapien
ccttgagtcacagtattaacacttg

SEQ ID NO: 573984 - DNA, 25 bp, Homo sapien
tatagtacaaggtagcttcaaactt

SEQ ID NO: 573985 - DNA, 25 bp, Homo sapien
aacattactccatcttttagggcta

SEQ ID NO: 573986 - DNA, 25 bp, Homo sapien
gagaaatgtccgttttaaccatgaa

SEQ ID NO: 573987 - DNA, 25 bp, Homo sapien
tagggctatccgtattctaaaagaa

SEQ ID NO: 573988 - DNA, 25 bp, Homo sapien
aaaaatcagcgggaagccatctggc

SEQ ID NO: 573989 - DNA, 25 bp, Homo sapien
ggattagaatccacgtcacttgact

SEQ ID NO: 573990 - DNA, 25 bp, Homo sapien
tactttcagccgtatcttggatgac

SEQ ID NO: 573991 - DNA, 25 bp, Homo sapien
tccaagagtgcttcctgctacagaa

SEQ ID NO: 573992 - DNA, 25 bp, Homo sapien
aacagaccatgtagggattcagccc

SEQ ID NO: 573993 - DNA, 25 bp, Homo sapien
ccaaactgccacctagaaataaata

SEQ ID NO: 573994 - DNA, 25 bp, Homo sapien
aacagactcaaacactttccttaag

SEQ ID NO: 573995 - DNA, 25 bp, Homo sapien
gcattttattcggaaaacagcaaac

SEQ ID NO: 573996 - DNA, 25 bp, Homo sapien
tacctttttgccaagatataaatgc

SEQ ID NO: 573997 - DNA, 25 bp, Homo sapien
tataaaacccaatgttcaataatta

SEQ ID NO: 573998 - DNA, 25 bp, Homo sapien
cacttgactatcttgggctgccttg

SEQ ID NO: 573999 - DNA, 25 bp, Homo sapien
tgttcatcccctgacctgagaattt

SEQ ID NO: 574000 - DNA, 25 bp, Homo sapien
caggattgagacaggcctaagcttt

SEQ ID NO: 574001 - DNA, 25 bp, Homo sapien
ccaaattgtgtctgtaagattgaaa

SEQ ID NO: 574002 - DNA, 25 bp, Homo sapien
tatgttgttgagtgattgttccctc

SEQ ID NO: 574003 - DNA, 25 bp, Homo sapien
aaagttaccaatataaatctctggg

SEQ ID NO: 574004 - DNA, 25 bp, Homo sapien
tgcccgaagattagtcaagtgagtt

SEQ ID NO: 574005 - DNA, 25 bp, Homo sapien
ttctctctgcccgaagattagtcaa

SEQ ID NO: 574006 - DNA, 25 bp, Homo sapien
cgaagattagtcaagtgagtttcct

SEQ ID NO: 574007 - DNA, 25 bp, Homo sapien
tctctgcccgaagattagtcaagtg

SEQ ID NO: 574008 - DNA, 25 bp, Homo sapien
gatcaggatttgttccacctttgac

SEQ ID NO: 574009 - DNA, 25 bp, Homo sapien
aatatttctatttgatcaggatttg

SEQ ID NO: 574010 - DNA, 25 bp, Homo sapien
caggatttgttccacctttgaccaa

SEQ ID NO: 574011 - DNA, 25 bp, Homo sapien
ttgatcaggatttgttccacctttg

SEQ ID NO: 574012 - DNA, 25 bp, Homo sapien
aaggacagaatctcgtagccttgca

SEQ ID NO: 574013 - DNA, 25 bp, Homo sapien
aaaggacagaatctcgtagccttgc

SEQ ID NO: 574014 - DNA, 25 bp, Homo sapien
aaagaaatgtctatagggtgggccg

SEQ ID NO: 574015 - DNA, 25 bp, Homo sapien
ggttgatcctatacctccaacagag

SEQ ID NO: 574016 - DNA, 25 bp, Homo sapien
gggactttcggagcctttatctgaa

SEQ ID NO: 574017 - DNA, 25 bp, Homo sapien
taatttcatccctacacaggtaagc

SEQ ID NO: 574018 - DNA, 25 bp, Homo sapien
agtgaacacgtagcctagtcctcag

SEQ ID NO: 574019 - DNA, 25 bp, Homo sapien
tcacgggtaagcaaactggcccaaa

SEQ ID NO: 574020 - DNA, 25 bp, Homo sapien
tctccaggtacgaacacaaaagcac

SEQ ID NO: 574021 - DNA, 25 bp, Homo sapien
taacctttggtatgctgatctgctg

SEQ ID NO: 574022 - DNA, 25 bp, Homo sapien
tcactgtttctgataaggactcagc

SEQ ID NO: 574023 - DNA, 25 bp, Homo sapien
cagcaactggactatggtatttcta

SEQ ID NO: 574024 - DNA, 25 bp, Homo sapien
aagactatccaataggctgggcacg

SEQ ID NO: 574025 - DNA, 25 bp, Homo sapien
tagtaccctgaaagaagttccattg

SEQ ID NO: 574026 - DNA, 25 bp, Homo sapien
tattttctacttcacgaacgtaaga

SEQ ID NO: 574027 - DNA, 25 bp, Homo sapien
ttctacctcctaatattttgggata

SEQ ID NO: 574028 - DNA, 25 bp, Homo sapien
gcccagccaacagttcatattttct

SEQ ID NO: 574029 - DNA, 25 bp, Homo sapien
caaacagaactcagtgtaaactcaa

SEQ ID NO: 574030 - DNA, 25 bp, Homo sapien
tgcccgcgcccatggtattgcctag

SEQ ID NO: 574031 - DNA, 25 bp, Homo sapien
gttgcaacagcttttggcgtctttg

SEQ ID NO: 574032 - DNA, 25 bp, Homo sapien
gcaacagcttttggcgtctttgtca

SEQ ID NO: 574033 - DNA, 25 bp, Homo sapien
cttgcccgcgcccatggtattgcct

SEQ ID NO: 574034 - DNA, 25 bp, Homo sapien
gtaaacttgtgtcacgaagtcttgt

SEQ ID NO: 574035 - DNA, 25 bp, Homo sapien
gaagtcttgttgtacagactatttc

SEQ ID NO: 574036 - DNA, 25 bp, Homo sapien
cgctcaggtattaggtctagtactc

SEQ ID NO: 574037 - DNA, 25 bp, Homo sapien
attccatggtgtatgggcactacat

SEQ ID NO: 574038 - DNA, 25 bp, Homo sapien
ctcaccataacctctgcccccgggt

SEQ ID NO: 574039 - DNA, 25 bp, Homo sapien
accacgcctggccgatagaattatt

SEQ ID NO: 574040 - DNA, 25 bp, Homo sapien
acgcctggccgatagaattattttt

SEQ ID NO: 574041 - DNA, 25 bp, Homo sapien
cctggccgatagaattatttttatt

SEQ ID NO: 574042 - DNA, 25 bp, Homo sapien
caaaaaactgtctgggcctgtctaa

SEQ ID NO: 574043 - DNA, 25 bp, Homo sapien
ctgattaggcctcttctacaattgg

SEQ ID NO: 574044 - DNA, 25 bp, Homo sapien
taactcactgaaacatgtatagatg

SEQ ID NO: 574045 - DNA, 25 bp, Homo sapien
catctcccgatgtcttaaattgaag

SEQ ID NO: 574046 - DNA, 25 bp, Homo sapien
agcccgtcagcacttcccaggatgc

SEQ ID NO: 574047 - DNA, 25 bp, Homo sapien
gagcccgtcagcacttcccaggatg

SEQ ID NO: 574048 - DNA, 25 bp, Homo sapien
tgtttggcagcccactgattctcct

SEQ ID NO: 574049 - DNA, 25 bp, Homo sapien
gaaatttgcctgtgaagtaactgct

SEQ ID NO: 574050 - DNA, 25 bp, Homo sapien
ctctgggattcataggaaatttgcc

SEQ ID NO: 574051 - DNA, 25 bp, Homo sapien
gaacctcacctatgaacacatgact

SEQ ID NO: 574052 - DNA, 25 bp, Homo sapien
tgttgtttaaccagttggcacgtcc

SEQ ID NO: 574053 - DNA, 25 bp, Homo sapien
gattttgcactggatagtcactgcc

SEQ ID NO: 574054 - DNA, 25 bp, Homo sapien
ggtgggcacgctacaaagttctggc

SEQ ID NO: 574055 - DNA, 25 bp, Homo sapien
gaaattatgctgtccaacccctgca

SEQ ID NO: 574056 - DNA, 25 bp, Homo sapien
tatgaaccaatgactattaacgagg

SEQ ID NO: 574057 - DNA, 25 bp, Homo sapien
tccagagtgggcctcaaatcataaa

SEQ ID NO: 574058 - DNA, 25 bp, Homo sapien
cagacaacgtgaagaagttcccaca

SEQ ID NO: 574059 - DNA, 25 bp, Homo sapien
cagttctagtaggatgtacatcagc

SEQ ID NO: 574060 - DNA, 25 bp, Homo sapien
tgatactgctaacacgtagaaccgt

SEQ ID NO: 574061 - DNA, 25 bp, Homo sapien
gaacagaggctgtcttattccagat

SEQ ID NO: 574062 - DNA, 25 bp, Homo sapien
ggtcacatgggcgtggcgtacaaca

SEQ ID NO: 574063 - DNA, 25 bp, Homo sapien
gaaccttcaacgtcaggcttcggag

SEQ ID NO: 574064 - DNA, 25 bp, Homo sapien
tgatcaaaaggcaccgtcagggttt

SEQ ID NO: 574065 - DNA, 25 bp, Homo sapien
cagggtttcacagcacaagccttca

SEQ ID NO: 574066 - DNA, 25 bp, Homo sapien
tagagagctcaggttccaacaacag

SEQ ID NO: 574067 - DNA, 25 bp, Homo sapien
gacggaatctactgcatactcaaag

SEQ ID NO: 574068 - DNA, 25 bp, Homo sapien
cgaaaaccatcatctcttaaataaa

SEQ ID NO: 574069 - DNA, 25 bp, Homo sapien
cactggaatacctgactgatagagt

SEQ ID NO: 574070 - DNA, 25 bp, Homo sapien
aataaacaaatgtcacaacacgctg

SEQ ID NO: 574071 - DNA, 25 bp, Homo sapien
aacacgctgtttcctatacactgga

SEQ ID NO: 574072 - DNA, 25 bp, Homo sapien
cctacattccggtgacccgtgtatt

SEQ ID NO: 574073 - DNA, 25 bp, Homo sapien
ctacattccggtgacccgtgtattt

SEQ ID NO: 574074 - DNA, 25 bp, Homo sapien
acctacattccggtgacccgtgtat

SEQ ID NO: 574075 - DNA, 25 bp, Homo sapien
tgctccacaggccaaactttacctc

SEQ ID NO: 574076 - DNA, 25 bp, Homo sapien
cgatcagagcaagaggaataaagac

SEQ ID NO: 574077 - DNA, 25 bp, Homo sapien
ctgtgaccagttggagctgacgatc

SEQ ID NO: 574078 - DNA, 25 bp, Homo sapien
ggaataaagacaagacgctttctct

SEQ ID NO: 574079 - DNA, 25 bp, Homo sapien
actggtgcccacctcgtagagtgaa

SEQ ID NO: 574080 - DNA, 25 bp, Homo sapien
cgtagagtgaattcagtttcccaaa

SEQ ID NO: 574081 - DNA, 25 bp, Homo sapien
tcatgtccaccctcaattcagctaa

SEQ ID NO: 574082 - DNA, 25 bp, Homo sapien
tctgaagctggttgacggaattaac

SEQ ID NO: 574083 - DNA, 25 bp, Homo sapien
gaccgagtattttatctcacttaga

SEQ ID NO: 574084 - DNA, 25 bp, Homo sapien
ccagccaggaccgagtattttatct

SEQ ID NO: 574085 - DNA, 25 bp, Homo sapien
ttttatctcacttagagcacctcta

SEQ ID NO: 574086 - DNA, 25 bp, Homo sapien
tctcacttagagcacctctatttta

SEQ ID NO: 574087 - DNA, 25 bp, Homo sapien
tccacactgtgctaccgagggggct

SEQ ID NO: 574088 - DNA, 25 bp, Homo sapien
gggcttgctcgcctttctttagcct

SEQ ID NO: 574089 - DNA, 25 bp, Homo sapien
tagcctgtgctgcattccacgtctg

SEQ ID NO: 574090 - DNA, 25 bp, Homo sapien
agcatgtccataccagctgtccaca

SEQ ID NO: 574091 - DNA, 25 bp, Homo sapien
tatacttgtacttatatttgaaatg

SEQ ID NO: 574092 - DNA, 25 bp, Homo sapien
tgggactacataccaagtagctggc

SEQ ID NO: 574093 - DNA, 25 bp, Homo sapien
tagcaaaagttatctagctgcttcc

SEQ ID NO: 574094 - DNA, 25 bp, Homo sapien
tcaccatacctagcttattctattc

SEQ ID NO: 574095 - DNA, 25 bp, Homo sapien
tgctgctcatctcatgtttctctat

SEQ ID NO: 574096 - DNA, 25 bp, Homo sapien
tgctcatctcatgtttctctatctc

SEQ ID NO: 574097 - DNA, 25 bp, Homo sapien
gctgctcatctcatgtttctctatc

SEQ ID NO: 574098 - DNA, 25 bp, Homo sapien
ttgctgctcatctcatgtttctcta

SEQ ID NO: 574099 - DNA, 25 bp, Homo sapien
tagtttggatgatattaacaggcat

SEQ ID NO: 574100 - DNA, 25 bp, Homo sapien
atagtttggatgatattaacaggca

SEQ ID NO: 574101 - DNA, 25 bp, Homo sapien
aactgctaatttctctccattcagc

SEQ ID NO: 574102 - DNA, 25 bp, Homo sapien
taactgctaatttctctccattcag

SEQ ID NO: 574103 - DNA, 25 bp, Homo sapien
ttaactgctaatttctctccattca

SEQ ID NO: 574104 - DNA, 25 bp, Homo sapien
ctgctaatttctctccattcagcat

SEQ ID NO: 574105 - DNA, 25 bp, Homo sapien
tacaaaggcgatcagacttgaggcc

SEQ ID NO: 574106 - DNA, 25 bp, Homo sapien
catatttagtagcaggcaagcagca

SEQ ID NO: 574107 - DNA, 25 bp, Homo sapien
tcgggaagctcaaagactgaccaag

SEQ ID NO: 574108 - DNA, 25 bp, Homo sapien
gacagctagtgtggtacagttcacc

SEQ ID NO: 574109 - DNA, 25 bp, Homo sapien
ccagatgatctgaggcattactgac

SEQ ID NO: 574110 - DNA, 25 bp, Homo sapien
tgtggctttactggcaatgatctgc

SEQ ID NO: 574111 - DNA, 25 bp, Homo sapien
cagattccttgtggtttagctaata

SEQ ID NO: 574112 - DNA, 25 bp, Homo sapien
caaactgcagactttaataacgtgg

SEQ ID NO: 574113 - DNA, 25 bp, Homo sapien
ttctcccgcttcagggcagccactt

SEQ ID NO: 574114 - DNA, 25 bp, Homo sapien
gctccaagagagctatattggcgtc

SEQ ID NO: 574115 - DNA, 25 bp, Homo sapien
tcttcttagaggacgaaagctccaa

SEQ ID NO: 574116 - DNA, 25 bp, Homo sapien
gctgcttaagctgctgtaccagacg

SEQ ID NO: 574117 - DNA, 25 bp, Homo sapien
tatcattatggtaataaaaaggagg

SEQ ID NO: 574118 - DNA, 25 bp, Homo sapien
tatttcagttatggctccttactag

SEQ ID NO: 574119 - DNA, 25 bp, Homo sapien
tctctgacaaggagagtaatttctg

SEQ ID NO: 574120 - DNA, 25 bp, Homo sapien
ttactagacgacacaaaagtaagag

SEQ ID NO: 574121 - DNA, 25 bp, Homo sapien
cagaattcagtagagcagttactcc

SEQ ID NO: 574122 - DNA, 25 bp, Homo sapien
tcactgacatgtatacttagacatg

SEQ ID NO: 574123 - DNA, 25 bp, Homo sapien
gttactcctgcaggaataggcaggg

SEQ ID NO: 574124 - DNA, 25 bp, Homo sapien
gatggtacctgaaaacggagtgtga

SEQ ID NO: 574125 - DNA, 25 bp, Homo sapien
caccatgcctggcaatgctttttat

SEQ ID NO: 574126 - DNA, 25 bp, Homo sapien
ccaccatgcctggcaatgcttttta

SEQ ID NO: 574127 - DNA, 25 bp, Homo sapien
aagacacgaagatgatcaaagttta

SEQ ID NO: 574128 - DNA, 25 bp, Homo sapien
caaagtttagtgttcctaggtctag

SEQ ID NO: 574129 - DNA, 25 bp, Homo sapien
tgaagaaacttggtgtgaagtctgt

SEQ ID NO: 574130 - DNA, 25 bp, Homo sapien
ccatttccaaaaagacacgaagatg

SEQ ID NO: 574131 - DNA, 25 bp, Homo sapien
cttctggtctccaaaatggtgagca

SEQ ID NO: 574132 - DNA, 25 bp, Homo sapien
tatacagaaagtgagcgaaacatct

SEQ ID NO: 574133 - DNA, 25 bp, Homo sapien
cagtgtgaagatgcagtgaagcagc

SEQ ID NO: 574134 - DNA, 25 bp, Homo sapien
gcagcattatctacgaagccgagag

SEQ ID NO: 574135 - DNA, 25 bp, Homo sapien
gtagaatatgtccaccaattctact

SEQ ID NO: 574136 - DNA, 25 bp, Homo sapien
tggtagaatatgtccaccaattcta

SEQ ID NO: 574137 - DNA, 25 bp, Homo sapien
ggtagaatatgtccaccaattctac

SEQ ID NO: 574138 - DNA, 25 bp, Homo sapien
gagggcttgtgatttgtttgattgg

SEQ ID NO: 574139 - DNA, 25 bp, Homo sapien
aggatttgaagtggtcatcctcgta

SEQ ID NO: 574140 - DNA, 25 bp, Homo sapien
ggtcatcctcgtagttgtcggccat

SEQ ID NO: 574141 - DNA, 25 bp, Homo sapien
tttgtttgattggaatgggaggatt

SEQ ID NO: 574142 - DNA, 25 bp, Homo sapien
acagcaatttgaataccattgctgc

SEQ ID NO: 574143 - DNA, 25 bp, Homo sapien
tgcttctgctaagataacgccatag

SEQ ID NO: 574144 - DNA, 25 bp, Homo sapien
ttgaataccattgctgctttcatct

SEQ ID NO: 574145 - DNA, 25 bp, Homo sapien
gctttcatctgcactatttctcctg

SEQ ID NO: 574146 - DNA, 25 bp, Homo sapien
ctatgcccatataccctcctcctca

SEQ ID NO: 574147 - DNA, 25 bp, Homo sapien
atgcccatataccctcctcctcatc

SEQ ID NO: 574148 - DNA, 25 bp, Homo sapien
tatgcccatataccctcctcctcat

SEQ ID NO: 574149 - DNA, 25 bp, Homo sapien
atggctgaactaagcctctgattgg

SEQ ID NO: 574150 - DNA, 25 bp, Homo sapien
aaaatggctgaactaagcctctgat

SEQ ID NO: 574151 - DNA, 25 bp, Homo sapien
cgttctgaacaaaatggctgaacta

SEQ ID NO: 574152 - DNA, 25 bp, Homo sapien
caaaatggctgaactaagcctctga

SEQ ID NO: 574153 - DNA, 25 bp, Homo sapien
tagtttgagggtaatgccaaagccc

SEQ ID NO: 574154 - DNA, 25 bp, Homo sapien
atagtttgagggtaatgccaaagcc

SEQ ID NO: 574155 - DNA, 25 bp, Homo sapien
cccaggggatgtgtccgaggtgctg

SEQ ID NO: 574156 - DNA, 25 bp, Homo sapien
gaatctagacagtgtcctggcaact

SEQ ID NO: 574157 - DNA, 25 bp, Homo sapien
ggagaatctagacagtgtcctggca

SEQ ID NO: 574158 - DNA, 25 bp, Homo sapien
tctagacagtgtcctggcaactgtt

SEQ ID NO: 574159 - DNA, 25 bp, Homo sapien
tagacagtgtcctggcaactgttga

SEQ ID NO: 574160 - DNA, 25 bp, Homo sapien
tgccacggctggactatactttcca

SEQ ID NO: 574161 - DNA, 25 bp, Homo sapien
ctcaagggcatcagatcaaagggag

SEQ ID NO: 574162 - DNA, 25 bp, Homo sapien
gggagatactgccacggctggacta

SEQ ID NO: 574163 - DNA, 25 bp, Homo sapien
ggactatactttccagccaattgtc

SEQ ID NO: 574164 - DNA, 25 bp, Homo sapien
tttctataggccaagaggagagtga

SEQ ID NO: 574165 - DNA, 25 bp, Homo sapien
accgagtctggccctcacatggatt

SEQ ID NO: 574166 - DNA, 25 bp, Homo sapien
ccttgcttcagtccgtgtgtcttag

SEQ ID NO: 574167 - DNA, 25 bp, Homo sapien
cagtccttgcttcagtccgtgtgtc

SEQ ID NO: 574168 - DNA, 25 bp, Homo sapien
tgttgtatccaatgccaacgtgcca

SEQ ID NO: 574169 - DNA, 25 bp, Homo sapien
gcccatgagtccgaggctacggtaa

SEQ ID NO: 574170 - DNA, 25 bp, Homo sapien
tcaaatctggcttctactgtgtacc

SEQ ID NO: 574171 - DNA, 25 bp, Homo sapien
taaaaagaccacactcttggaggct

SEQ ID NO: 574172 - DNA, 25 bp, Homo sapien
tgtgcgcagcccgttccctagctta

SEQ ID NO: 574173 - DNA, 25 bp, Homo sapien
ccactgtgcgcagcccgttccctag

SEQ ID NO: 574174 - DNA, 25 bp, Homo sapien
tttctaaaattgcttactcatcaag

SEQ ID NO: 574175 - DNA, 25 bp, Homo sapien
ctaaaattgcttactcatcaagagt

SEQ ID NO: 574176 - DNA, 25 bp, Homo sapien
caaccactatgactgcggatgctga

SEQ ID NO: 574177 - DNA, 25 bp, Homo sapien
gcacacgcgcatgtttgtgggtata

SEQ ID NO: 574178 - DNA, 25 bp, Homo sapien
tctgtgcgccaatgacgaaaccgtc

SEQ ID NO: 574179 - DNA, 25 bp, Homo sapien
tcccattcttttggtgcacacgcgc

SEQ ID NO: 574180 - DNA, 25 bp, Homo sapien
gaattgggagctcaataatcttcaa

SEQ ID NO: 574181 - DNA, 25 bp, Homo sapien
ggcaattttcatgaacaggacacct

SEQ ID NO: 574182 - DNA, 25 bp, Homo sapien
gcaaggcctggtattactttccaca

SEQ ID NO: 574183 - DNA, 25 bp, Homo sapien
cctctggcctaactaatgaattggg

SEQ ID NO: 574184 - DNA, 25 bp, Homo sapien
gccaaaacgctggcagatctcagtg

SEQ ID NO: 574185 - DNA, 25 bp, Homo sapien
gcactgcgaagcaccgccaaaacgc

SEQ ID NO: 574186 - DNA, 25 bp, Homo sapien
ctgcgaagcaccgccaaaacgctgg

SEQ ID NO: 574187 - DNA, 25 bp, Homo sapien
cgccaaaacgctggcagatctcagt

SEQ ID NO: 574188 - DNA, 25 bp, Homo sapien
aaatgactgatgactcctgccccag

SEQ ID NO: 574189 - DNA, 25 bp, Homo sapien
tatattcacaccagacggacagctc

SEQ ID NO: 574190 - DNA, 25 bp, Homo sapien
ggacagctctgtatcgaggcaggaa

SEQ ID NO: 574191 - DNA, 25 bp, Homo sapien
agctctcgtgacaatagtctggcca

SEQ ID NO: 574192 - DNA, 25 bp, Homo sapien
ggcagagggttgtcaggtgtccaat

SEQ ID NO: 574193 - DNA, 25 bp, Homo sapien
caagttctaagaggggctggatgat

SEQ ID NO: 574194 - DNA, 25 bp, Homo sapien
ggttgtcaggtgtccaatgtacaac

SEQ ID NO: 574195 - DNA, 25 bp, Homo sapien
tggagtgagtccacggaggatcagg

SEQ ID NO: 574196 - DNA, 25 bp, Homo sapien
agccgcctggtcatcgtccaagtta

SEQ ID NO: 574197 - DNA, 25 bp, Homo sapien
tggtcatcgtccaagttataggaag

SEQ ID NO: 574198 - DNA, 25 bp, Homo sapien
cctggtcatcgtccaagttatagga

SEQ ID NO: 574199 - DNA, 25 bp, Homo sapien
cgcctggtcatcgtccaagttatag

SEQ ID NO: 574200 - DNA, 25 bp, Homo sapien
ttcaaagtttgagtgagaggctcac

SEQ ID NO: 574201 - DNA, 25 bp, Homo sapien
tggaattccccaaggtagctcccac

SEQ ID NO: 574202 - DNA, 25 bp, Homo sapien
tcaactacacggcaactggattccc

SEQ ID NO: 574203 - DNA, 25 bp, Homo sapien
tgaacctacacagcaacgggattcc

SEQ ID NO: 574204 - DNA, 25 bp, Homo sapien
agcacctcgctgaatttaatactgt

SEQ ID NO: 574205 - DNA, 25 bp, Homo sapien
taagtacagctctaaggctcaccag

SEQ ID NO: 574206 - DNA, 25 bp, Homo sapien
cgtgtattattaggcaacatccaca

SEQ ID NO: 574207 - DNA, 25 bp, Homo sapien
aatacaatttaccttcacacacgag

SEQ ID NO: 574208 - DNA, 25 bp, Homo sapien
tcctctgtagatgacccaggtctct

SEQ ID NO: 574209 - DNA, 25 bp, Homo sapien
acccaggtctctcgtttcgcaggga

SEQ ID NO: 574210 - DNA, 25 bp, Homo sapien
cctctgtagatgacccaggtctctc

SEQ ID NO: 574211 - DNA, 25 bp, Homo sapien
gacccaggtctctcgtttcgcaggg

SEQ ID NO: 574212 - DNA, 25 bp, Homo sapien
ctcatgagaagccacccactatcat

SEQ ID NO: 574213 - DNA, 25 bp, Homo sapien
aacgaagagactacaggccccaggc

SEQ ID NO: 574214 - DNA, 25 bp, Homo sapien
tggtgggtaacaacctccatgattc

SEQ ID NO: 574215 - DNA, 25 bp, Homo sapien
tccaaagtctcatataaggcgaggc

SEQ ID NO: 574216 - DNA, 25 bp, Homo sapien
gtctctttggcattcacaaggactc

SEQ ID NO: 574217 - DNA, 25 bp, Homo sapien
ctctttggcattcacaaggactcat

SEQ ID NO: 574218 - DNA, 25 bp, Homo sapien
tctctttggcattcacaaggactca

SEQ ID NO: 574219 - DNA, 25 bp, Homo sapien
gctttaggtttgcagcattggtgca

SEQ ID NO: 574220 - DNA, 25 bp, Homo sapien
catttccacagtttctagtcccact

SEQ ID NO: 574221 - DNA, 25 bp, Homo sapien
actggctttaggtttgcagcattgg

SEQ ID NO: 574222 - DNA, 25 bp, Homo sapien
agtttctagtcccactggctttagg

SEQ ID NO: 574223 - DNA, 25 bp, Homo sapien
gcatacctgcccagttcatggcaca

SEQ ID NO: 574224 - DNA, 25 bp, Homo sapien
agggacatggcaagttgtgtctgac

SEQ ID NO: 574225 - DNA, 25 bp, Homo sapien
gggttccacgactgccagagctcta

SEQ ID NO: 574226 - DNA, 25 bp, Homo sapien
gactgccagagctctagggtcccgt

SEQ ID NO: 574227 - DNA, 25 bp, Homo sapien
ctgtggataagttgggaaagatgta

SEQ ID NO: 574228 - DNA, 25 bp, Homo sapien
tgggaaagatgtattttagtgtctg

SEQ ID NO: 574229 - DNA, 25 bp, Homo sapien
tgtattttagtgtctgaaacttccc

SEQ ID NO: 574230 - DNA, 25 bp, Homo sapien
aaagatgtattttagtgtctgaaac

SEQ ID NO: 574231 - DNA, 25 bp, Homo sapien
tttccatggctttgggatgcaacgg

SEQ ID NO: 574232 - DNA, 25 bp, Homo sapien
ccatggctttgggatgcaacggatt

SEQ ID NO: 574233 - DNA, 25 bp, Homo sapien
cacatgaaaaaaggcagtttttcca

SEQ ID NO: 574234 - DNA, 25 bp, Homo sapien
aggcagtttttccatggctttggga

SEQ ID NO: 574235 - DNA, 25 bp, Homo sapien
gggacaatggtctgctatctgctga

SEQ ID NO: 574236 - DNA, 25 bp, Homo sapien
tcttccagggcgttgaccacttgct

SEQ ID NO: 574237 - DNA, 25 bp, Homo sapien
cacttgctctaggatgtcgggacaa

SEQ ID NO: 574238 - DNA, 25 bp, Homo sapien
ctgctgaagaatggcgttggcaaac

SEQ ID NO: 574239 - DNA, 25 bp, Homo sapien
tcagaccttgggagaacgagtgctc

SEQ ID NO: 574240 - DNA, 25 bp, Homo sapien
tctacatggtttacgggcactgcaa

SEQ ID NO: 574241 - DNA, 25 bp, Homo sapien
tcttcttgttaactggccgaggaac

SEQ ID NO: 574242 - DNA, 25 bp, Homo sapien
gaaggttccaggcaatgcacgaggc

SEQ ID NO: 574243 - DNA, 25 bp, Homo sapien
cgtgccagaccacttgtttaggcat

SEQ ID NO: 574244 - DNA, 25 bp, Homo sapien
ccgtgccagaccacttgtttaggca

SEQ ID NO: 574245 - DNA, 25 bp, Homo sapien
cccgtgccagaccacttgtttaggc

SEQ ID NO: 574246 - DNA, 25 bp, Homo sapien
gcgctgcacctgatgagaaagtcca

SEQ ID NO: 574247 - DNA, 25 bp, Homo sapien
gagtggcaggcgctgcacctgatga

SEQ ID NO: 574248 - DNA, 25 bp, Homo sapien
tggcaggcgctgcacctgatgagaa

SEQ ID NO: 574249 - DNA, 25 bp, Homo sapien
caggcgctgcacctgatgagaaagt

SEQ ID NO: 574250 - DNA, 25 bp, Homo sapien
aatgctgagatgaagaggagagtga

SEQ ID NO: 574251 - DNA, 25 bp, Homo sapien
gagaatgctgagatgaagaggagag

SEQ ID NO: 574252 - DNA, 25 bp, Homo sapien
tgctgagatgaagaggagagtgaca

SEQ ID NO: 574253 - DNA, 25 bp, Homo sapien
tgagatgaagaggagagtgacacac

SEQ ID NO: 574254 - DNA, 25 bp, Homo sapien
agtgtcacagagggcttccttccat

SEQ ID NO: 574255 - DNA, 25 bp, Homo sapien
cacagagaccagacagatgatatcg

SEQ ID NO: 574256 - DNA, 25 bp, Homo sapien
cagacagatgatatcggtcccggaa

SEQ ID NO: 574257 - DNA, 25 bp, Homo sapien
tatcggtcccggaaatgcttcttct

SEQ ID NO: 574258 - DNA, 25 bp, Homo sapien
tattactgaactcctagccagcctc

SEQ ID NO: 574259 - DNA, 25 bp, Homo sapien
tttattactgaactcctagccagcc

SEQ ID NO: 574260 - DNA, 25 bp, Homo sapien
attactgaactcctagccagcctcc

SEQ ID NO: 574261 - DNA, 25 bp, Homo sapien
cgtttattactgaactcctagccag

SEQ ID NO: 574262 - DNA, 25 bp, Homo sapien
cactctgaaagctacaaactgcatc

SEQ ID NO: 574263 - DNA, 25 bp, Homo sapien
gaaaattaagggcaacctgcactga

SEQ ID NO: 574264 - DNA, 25 bp, Homo sapien
cagtagcagttgtatgcccatatga

SEQ ID NO: 574265 - DNA, 25 bp, Homo sapien
tgctaaagggcaactagacttgccg

SEQ ID NO: 574266 - DNA, 25 bp, Homo sapien
ttcttgacactgaaggcggccttgg

SEQ ID NO: 574267 - DNA, 25 bp, Homo sapien
caagtaacatggtcaacaggagggc

SEQ ID NO: 574268 - DNA, 25 bp, Homo sapien
caaatgccagtggatgggcggctca

SEQ ID NO: 574269 - DNA, 25 bp, Homo sapien
cacagggtccgctgggcttgagaaa

SEQ ID NO: 574270 - DNA, 25 bp, Homo sapien
caccatggaggctgctactgttacc

SEQ ID NO: 574271 - DNA, 25 bp, Homo sapien
tagatggatgcaatactggcgtggt

SEQ ID NO: 574272 - DNA, 25 bp, Homo sapien
ggtcaagcccaggttaccatgcagt

SEQ ID NO: 574273 - DNA, 25 bp, Homo sapien
tctcttctgacgcatcagggagcag

SEQ ID NO: 574274 - DNA, 25 bp, Homo sapien
ctcgggctgcctgccattggagttg

SEQ ID NO: 574275 - DNA, 25 bp, Homo sapien
ccctcgggctgcctgccattggagt

SEQ ID NO: 574276 - DNA, 25 bp, Homo sapien
ggccctcgggctgcctgccattgga

SEQ ID NO: 574277 - DNA, 25 bp, Homo sapien
cgggctgcctgccattggagttggc

SEQ ID NO: 574278 - DNA, 25 bp, Homo sapien
cctggatgcggtaaaaacaatgtcc

SEQ ID NO: 574279 - DNA, 25 bp, Homo sapien
tgcctggatgcggtaaaaacaatgt

SEQ ID NO: 574280 - DNA, 25 bp, Homo sapien
gcctggatgcggtaaaaacaatgtc

SEQ ID NO: 574281 - DNA, 25 bp, Homo sapien
tgccctgctcgtctagggtcactgc

SEQ ID NO: 574282 - DNA, 25 bp, Homo sapien
tgtcctggggtttactgctgacctc

SEQ ID NO: 574283 - DNA, 25 bp, Homo sapien
caccgtcgcacggaagtccttgttc

SEQ ID NO: 574284 - DNA, 25 bp, Homo sapien
actgctgacctcaaggcccgggcct

SEQ ID NO: 574285 - DNA, 25 bp, Homo sapien
ggacaagcgtcctgtctcctactgc

SEQ ID NO: 574286 - DNA, 25 bp, Homo sapien
aggccccactttgccctgaaatgga

SEQ ID NO: 574287 - DNA, 25 bp, Homo sapien
gagctgattccttgccattccgcag

SEQ ID NO: 574288 - DNA, 25 bp, Homo sapien
atgttcaaggcccacaatccaggcc

SEQ ID NO: 574289 - DNA, 25 bp, Homo sapien
gacacatctccaatgacgtgggcta

SEQ ID NO: 574290 - DNA, 25 bp, Homo sapien
aaggtcctggaagacgaagccctgg

SEQ ID NO: 574291 - DNA, 25 bp, Homo sapien
ggctaatattttcaggcccgacaca

SEQ ID NO: 574292 - DNA, 25 bp, Homo sapien
tgccagctgcagaaaagaaggtcct

SEQ ID NO: 574293 - DNA, 25 bp, Homo sapien
aggccgtggtcggatcctcacacag

SEQ ID NO: 574294 - DNA, 25 bp, Homo sapien
ctaaggctgcggcagaccctgctgt

SEQ ID NO: 574295 - DNA, 25 bp, Homo sapien
tgcactggagatgcagtcaggcccg

SEQ ID NO: 574296 - DNA, 25 bp, Homo sapien
gaggacctgtgtggagatttcagca

SEQ ID NO: 574297 - DNA, 25 bp, Homo sapien
tgcactcagaggagcggaggaatct

SEQ ID NO: 574298 - DNA, 25 bp, Homo sapien
ccctttaggcgtgaaggaggctcca

SEQ ID NO: 574299 - DNA, 25 bp, Homo sapien
caggaacagcttagaggtcttgcca

SEQ ID NO: 574300 - DNA, 25 bp, Homo sapien
gcctcagagggaaacaacaatgttg

SEQ ID NO: 574301 - DNA, 25 bp, Homo sapien
cacagaccttcctcggttgcagaga

SEQ ID NO: 574302 - DNA, 25 bp, Homo sapien
tcaggccgaggaaatcagagacgcc

SEQ ID NO: 574303 - DNA, 25 bp, Homo sapien
tgtggccagtcccaagctgtgctga

SEQ ID NO: 574304 - DNA, 25 bp, Homo sapien
agaatcgcaaaagcccctcgtggtg

SEQ ID NO: 574305 - DNA, 25 bp, Homo sapien
ggtgaagaccacagcacctcaggca

SEQ ID NO: 574306 - DNA, 25 bp, Homo sapien
cctccgtccacacgggtgcgagtgg

SEQ ID NO: 574307 - DNA, 25 bp, Homo sapien
cgaggagtcgtctgtgtgaaggcgc

SEQ ID NO: 574308 - DNA, 25 bp, Homo sapien
gctggcccgggcttgtttggtcact

SEQ ID NO: 574309 - DNA, 25 bp, Homo sapien
tgctgtgaatgaggctgctatggac

SEQ ID NO: 574310 - DNA, 25 bp, Homo sapien
gtctatgccgtaattcacaagtccg

SEQ ID NO: 574311 - DNA, 25 bp, Homo sapien
cacaagtccgttcatctgtagctgg

SEQ ID NO: 574312 - DNA, 25 bp, Homo sapien
tgtggcgtgtgtcggaacttcaacc

SEQ ID NO: 574313 - DNA, 25 bp, Homo sapien
cgctcgtctaagtgggatcatacaa

SEQ ID NO: 574314 - DNA, 25 bp, Homo sapien
tgctgtggcactaaactcattcacg

SEQ ID NO: 574315 - DNA, 25 bp, Homo sapien
cacgatgttgtggaaacatgaccac

SEQ ID NO: 574316 - DNA, 25 bp, Homo sapien
aacacggaagttatcactgtagcca

SEQ ID NO: 574317 - DNA, 25 bp, Homo sapien
tcctgagccggttagaccttgaggg

SEQ ID NO: 574318 - DNA, 25 bp, Homo sapien
tctggtgaaggactcggccatgtgt

SEQ ID NO: 574319 - DNA, 25 bp, Homo sapien
tgaggcttgagagagacacgccaga

SEQ ID NO: 574320 - DNA, 25 bp, Homo sapien
gatcgtaaccttggagaccacagtg

SEQ ID NO: 574321 - DNA, 25 bp, Homo sapien
taaaacagccgctaataatgagagc

SEQ ID NO: 574322 - DNA, 25 bp, Homo sapien
taatgagagctcattctcgctctgc

SEQ ID NO: 574323 - DNA, 25 bp, Homo sapien
ttgctttagacacagtcactgctgg

SEQ ID NO: 574324 - DNA, 25 bp, Homo sapien
tcactgcagtcatctacgtggatga

SEQ ID NO: 574325 - DNA, 25 bp, Homo sapien
ggccgcggctcggagtgcagggccc

SEQ ID NO: 574326 - DNA, 25 bp, Homo sapien
gaagtttcggcccaagttggctgcg

SEQ ID NO: 574327 - DNA, 25 bp, Homo sapien
cggccgatccggagggaggccctgg

SEQ ID NO: 574328 - DNA, 25 bp, Homo sapien
gggaggccgccgtcgatctcgccgg

SEQ ID NO: 574329 - DNA, 25 bp, Homo sapien
gcccgctcctctcagcgcgcgggcc

SEQ ID NO: 574330 - DNA, 25 bp, Homo sapien
ctccgactcttcatccgcggccggg

SEQ ID NO: 574331 - DNA, 25 bp, Homo sapien
cgcctccgactcttcatccgcggcc

SEQ ID NO: 574332 - DNA, 25 bp, Homo sapien
tcctctcagcgcgcgggccgctcgg

SEQ ID NO: 574333 - DNA, 25 bp, Homo sapien
gtcccgccgcgtgtcaggcccgcgg

SEQ ID NO: 574334 - DNA, 25 bp, Homo sapien
cccgccgcgtgtcaggcccgcgggc

SEQ ID NO: 574335 - DNA, 25 bp, Homo sapien
catgtcccgccgcgtgtcaggcccg

SEQ ID NO: 574336 - DNA, 25 bp, Homo sapien
atgtcccgccgcgtgtcaggcccgc

SEQ ID NO: 574337 - DNA, 25 bp, Homo sapien
gcagacctctcaacaggtcttcggt

SEQ ID NO: 574338 - DNA, 25 bp, Homo sapien
tggagctgcagacctctcaacaggt

SEQ ID NO: 574339 - DNA, 25 bp, Homo sapien
aacaggtcttcggtaaaagcagctg

SEQ ID NO: 574340 - DNA, 25 bp, Homo sapien
tctcaacaggtcttcggtaaaagca

SEQ ID NO: 574341 - DNA, 25 bp, Homo sapien
acaagtttctataatttcaaagtct

SEQ ID NO: 574342 - DNA, 25 bp, Homo sapien
agtttctataatttcaaagtctctc

SEQ ID NO: 574343 - DNA, 25 bp, Homo sapien
cagacaagtttctataatttcaaag

SEQ ID NO: 574344 - DNA, 25 bp, Homo sapien
gtttctataatttcaaagtctctct

SEQ ID NO: 574345 - DNA, 25 bp, Homo sapien
aacactgtacataagagattagatt

SEQ ID NO: 574346 - DNA, 25 bp, Homo sapien
gattagatttactcttcatgataaa

SEQ ID NO: 574347 - DNA, 25 bp, Homo sapien
aaaacactgtacataagagattaga

SEQ ID NO: 574348 - DNA, 25 bp, Homo sapien
taagagattagatttactcttcatg

SEQ ID NO: 574349 - DNA, 25 bp, Homo sapien
gcctcaggatgaaacaaacctttga

SEQ ID NO: 574350 - DNA, 25 bp, Homo sapien
tgtgttcacaagatcagcatcaagc

SEQ ID NO: 574351 - DNA, 25 bp, Homo sapien
gacagagacattatcaggtacttaa

SEQ ID NO: 574352 - DNA, 25 bp, Homo sapien
tgctgaagaccttagctaaagaaac

SEQ ID NO: 574353 - DNA, 25 bp, Homo sapien
ctaacttccggttcctctgaaaatg

SEQ ID NO: 574354 - DNA, 25 bp, Homo sapien
aggcagcccagaggactaactgtgc

SEQ ID NO: 574355 - DNA, 25 bp, Homo sapien
taactgggtgttacaggttcaactg

SEQ ID NO: 574356 - DNA, 25 bp, Homo sapien
tctgaagacagtgcgaaaacagaga

SEQ ID NO: 574357 - DNA, 25 bp, Homo sapien
aatggtgctaaaagaagtgcagggc

SEQ ID NO: 574358 - DNA, 25 bp, Homo sapien
tatgtactattctaggccctgaggg

SEQ ID NO: 574359 - DNA, 25 bp, Homo sapien
tctggctgacctagcacggctacag

SEQ ID NO: 574360 - DNA, 25 bp, Homo sapien
catttcaatgaccgtccatccaggc

SEQ ID NO: 574361 - DNA, 25 bp, Homo sapien
cagagtgcggcagtctctttcaaaa

SEQ ID NO: 574362 - DNA, 25 bp, Homo sapien
tacatctggatgacctgcctagcag

SEQ ID NO: 574363 - DNA, 25 bp, Homo sapien
tcagttaggcgctgataaagccgcg

SEQ ID NO: 574364 - DNA, 25 bp, Homo sapien
caatttgcaagcttcttcgacagga

SEQ ID NO: 574365 - DNA, 25 bp, Homo sapien
gataaccttatgctcagagatcctc

SEQ ID NO: 574366 - DNA, 25 bp, Homo sapien
ttgtgcagggttcagagttctaggc

SEQ ID NO: 574367 - DNA, 25 bp, Homo sapien
ttacagcccctcacattaatcagag

SEQ ID NO: 574368 - DNA, 25 bp, Homo sapien
tgctttcaatttcccgcctggtaat

SEQ ID NO: 574369 - DNA, 25 bp, Homo sapien
agaaccaagtggtgccgggagcggt

SEQ ID NO: 574370 - DNA, 25 bp, Homo sapien
gcattaaacaaacttcgaggatgag

SEQ ID NO: 574371 - DNA, 25 bp, Homo sapien
ttcgaggatgagctatgctcaacag

SEQ ID NO: 574372 - DNA, 25 bp, Homo sapien
tggctctgctctttggcaatagtct

SEQ ID NO: 574373 - DNA, 25 bp, Homo sapien
tttacgtaatccacactccagaagg

SEQ ID NO: 574374 - DNA, 25 bp, Homo sapien
tcattcaagggcaaaaaggcttgac

SEQ ID NO: 574375 - DNA, 25 bp, Homo sapien
tcatggatctgagacactggaactg

SEQ ID NO: 574376 - DNA, 25 bp, Homo sapien
tactaatgctggaagtacatgctca

SEQ ID NO: 574377 - DNA, 25 bp, Homo sapien
ggtttccagtaaggtgaccctcata

SEQ ID NO: 574378 - DNA, 25 bp, Homo sapien
tatgaaaagttgatccccgccatac

SEQ ID NO: 574379 - DNA, 25 bp, Homo sapien
tgccatagggcagtacttcaaaggg

SEQ ID NO: 574380 - DNA, 25 bp, Homo sapien
cctcatagaagtgaacggtagctgt

SEQ ID NO: 574381 - DNA, 25 bp, Homo sapien
agagacctttatcaattaattgtac

SEQ ID NO: 574382 - DNA, 25 bp, Homo sapien
ggaaatatgaagtatgtttttgaaa

SEQ ID NO: 574383 - DNA, 25 bp, Homo sapien
aggaaatatgaagtatgtttttgaa

SEQ ID NO: 574384 - DNA, 25 bp, Homo sapien
gacctttatcaattaattgtactgt

SEQ ID NO: 574385 - DNA, 25 bp, Homo sapien
catatatatgtctggctacctcgtt

SEQ ID NO: 574386 - DNA, 25 bp, Homo sapien
caaaaaggtcacacagtgcggcttc

SEQ ID NO: 574387 - DNA, 25 bp, Homo sapien
tgggagcaatgagagttgaaccgtt

SEQ ID NO: 574388 - DNA, 25 bp, Homo sapien
gaaacatgtttgtgcctagactgga

SEQ ID NO: 574389 - DNA, 25 bp, Homo sapien
gaaggcagtggcatcatgtgacata

SEQ ID NO: 574390 - DNA, 25 bp, Homo sapien
gacataaaggtgtggttttacctca

SEQ ID NO: 574391 - DNA, 25 bp, Homo sapien
catcatgtgacataaaggtgtggtt

SEQ ID NO: 574392 - DNA, 25 bp, Homo sapien
aggtgtggttttacctcagaaccat

SEQ ID NO: 574393 - DNA, 25 bp, Homo sapien
ctgcttcaaaaattagcagtttcca

SEQ ID NO: 574394 - DNA, 25 bp, Homo sapien
tctcttgagatcttactgaagctgt

SEQ ID NO: 574395 - DNA, 25 bp, Homo sapien
gagatcttactgaagctgtcaacct

SEQ ID NO: 574396 - DNA, 25 bp, Homo sapien
gcttcaaaaattagcagtttccatt

SEQ ID NO: 574397 - DNA, 25 bp, Homo sapien
tcaggctccagtggaatctctctgg

SEQ ID NO: 574398 - DNA, 25 bp, Homo sapien
ctaggctacattgggggccaccgtt

SEQ ID NO: 574399 - DNA, 25 bp, Homo sapien
tgtcacccgtccatcaggctccagt

SEQ ID NO: 574400 - DNA, 25 bp, Homo sapien
gtttccgagccaaagacaggcctgg

SEQ ID NO: 574401 - DNA, 25 bp, Homo sapien
tggttttatggaggggaggcgacca

SEQ ID NO: 574402 - DNA, 25 bp, Homo sapien
ggctggaaccacgagagatggagca

SEQ ID NO: 574403 - DNA, 25 bp, Homo sapien
ttatggaggggaggcgaccaggtcc

SEQ ID NO: 574404 - DNA, 25 bp, Homo sapien
ctggaaccacgagagatggagcaga

SEQ ID NO: 574405 - DNA, 25 bp, Homo sapien
gggcggcgggtgcttcgggtcatca

SEQ ID NO: 574406 - DNA, 25 bp, Homo sapien
ccttctcgaagcctcggctggggcg

SEQ ID NO: 574407 - DNA, 25 bp, Homo sapien
ggctcactgcgccactctcgcgcgt

SEQ ID NO: 574408 - DNA, 25 bp, Homo sapien
catcagcccgggaagtatttttgtc

SEQ ID NO: 574409 - DNA, 25 bp, Homo sapien
cagaaatggagagtcagtgtggaaa

SEQ ID NO: 574410 - DNA, 25 bp, Homo sapien
gagaaaacagaaatggagagtcagt

SEQ ID NO: 574411 - DNA, 25 bp, Homo sapien
aaatggagagtcagtgtggaaactc

SEQ ID NO: 574412 - DNA, 25 bp, Homo sapien
aacagaaatggagagtcagtgtgga

SEQ ID NO: 574413 - DNA, 25 bp, Homo sapien
tccccagtgccctgggactgacagt

SEQ ID NO: 574414 - DNA, 25 bp, Homo sapien
ctgggactgacagtttccagagtag

SEQ ID NO: 574415 - DNA, 25 bp, Homo sapien
tgggactgacagtttccagagtagg

SEQ ID NO: 574416 - DNA, 25 bp, Homo sapien
agtgccctgggactgacagtttcca

SEQ ID NO: 574417 - DNA, 25 bp, Homo sapien
ggacagcagagcagccgtgaacagc

SEQ ID NO: 574418 - DNA, 25 bp, Homo sapien
caggagttggcgtctgtcagaagct

SEQ ID NO: 574419 - DNA, 25 bp, Homo sapien
gttggcgtctgtcagaagctgagcc

SEQ ID NO: 574420 - DNA, 25 bp, Homo sapien
tggacagcagagcagccgtgaacag

SEQ ID NO: 574421 - DNA, 25 bp, Homo sapien
tgtccgctgtgctgcaattccaccg

SEQ ID NO: 574422 - DNA, 25 bp, Homo sapien
tctgcaccgggttcaaagctaatga

SEQ ID NO: 574423 - DNA, 25 bp, Homo sapien
tcccaaagacagatgcgttgtccgc

SEQ ID NO: 574424 - DNA, 25 bp, Homo sapien
tgctcctggtacaattggcacagct

SEQ ID NO: 574425 - DNA, 25 bp, Homo sapien
gcggtaagcgggtgcgctctcctct

SEQ ID NO: 574426 - DNA, 25 bp, Homo sapien
tagctctaacgcttggaaacgtctc

SEQ ID NO: 574427 - DNA, 25 bp, Homo sapien
gaaacgtctctttataatgggctga

SEQ ID NO: 574428 - DNA, 25 bp, Homo sapien
tgctgttttacttccgccgctgggc

SEQ ID NO: 574429 - DNA, 25 bp, Homo sapien
tgggtgaaggcggtctctcggctgc

SEQ ID NO: 574430 - DNA, 25 bp, Homo sapien
caggcccggctgatggcgttgacca

SEQ ID NO: 574431 - DNA, 25 bp, Homo sapien
ttgcaggttcatgagcacccggccc

SEQ ID NO: 574432 - DNA, 25 bp, Homo sapien
aaactccttggcgaagcggtagccg

SEQ ID NO: 574433 - DNA, 25 bp, Homo sapien
ctaggtctgcagtgctggggaggcc

SEQ ID NO: 574434 - DNA, 25 bp, Homo sapien
ctggggaggccggggaggcccagct

SEQ ID NO: 574435 - DNA, 25 bp, Homo sapien
aggtctgcagtgctggggaggccgg

SEQ ID NO: 574436 - DNA, 25 bp, Homo sapien
tgctggggaggccggggaggcccag

SEQ ID NO: 574437 - DNA, 25 bp, Homo sapien
cgtgctctcgttgcgcaggcagtag

SEQ ID NO: 574438 - DNA, 25 bp, Homo sapien
gctacgtctgccatcttatacacag

SEQ ID NO: 574439 - DNA, 25 bp, Homo sapien
cccgagacgccgtggcatttgcagg

SEQ ID NO: 574440 - DNA, 25 bp, Homo sapien
ttcttacacctgacgaagcagcacc

SEQ ID NO: 574441 - DNA, 25 bp, Homo sapien
taatgtcagagagaaaccgtacacc

SEQ ID NO: 574442 - DNA, 25 bp, Homo sapien
agtataacgtccacgcagcctggtc

SEQ ID NO: 574443 - DNA, 25 bp, Homo sapien
gaaggagccgttcctgtaaactgca

SEQ ID NO: 574444 - DNA, 25 bp, Homo sapien
gcagcccaggcgcaaacattcagtt

SEQ ID NO: 574445 - DNA, 25 bp, Homo sapien
agaagcagctgggtgtaggcggcca

SEQ ID NO: 574446 - DNA, 25 bp, Homo sapien
tcctttcagagtccgctccctgtcc

SEQ ID NO: 574447 - DNA, 25 bp, Homo sapien
aggggggacgcttcccagctccacg

SEQ ID NO: 574448 - DNA, 25 bp, Homo sapien
gtgagaaggggggacgcttcccagc

SEQ ID NO: 574449 - DNA, 25 bp, Homo sapien
agcacagtacgcttctggtctgagc

SEQ ID NO: 574450 - DNA, 25 bp, Homo sapien
cttccagaaagagagtcagattaga

SEQ ID NO: 574451 - DNA, 25 bp, Homo sapien
caggagcacagtacgcttctggtct

SEQ ID NO: 574452 - DNA, 25 bp, Homo sapien
agagtcagattagagtgtgacagga

SEQ ID NO: 574453 - DNA, 25 bp, Homo sapien
ggtgagtaaagccttttcgaatgag

SEQ ID NO: 574454 - DNA, 25 bp, Homo sapien
cactgtgcttcaactggaatatatt

SEQ ID NO: 574455 - DNA, 25 bp, Homo sapien
gactgtcgaaccttcagagcctggc

SEQ ID NO: 574456 - DNA, 25 bp, Homo sapien
cagtggttgagtcagactgtcgaac

SEQ ID NO: 574457 - DNA, 25 bp, Homo sapien
tggaatatattcctctcagtggttg

SEQ ID NO: 574458 - DNA, 25 bp, Homo sapien
ccccacgaccgcacgtcgccgtgac

SEQ ID NO: 574459 - DNA, 25 bp, Homo sapien
gcccccacgaccgcacgtcgccgtg

SEQ ID NO: 574460 - DNA, 25 bp, Homo sapien
cccacgaccgcacgtcgccgtgacg

SEQ ID NO: 574461 - DNA, 25 bp, Homo sapien
ccgcccccacgaccgcacgtcgccg

SEQ ID NO: 574462 - DNA, 25 bp, Homo sapien
tctcgccgccgcgacagcgaccgcc

SEQ ID NO: 574463 - DNA, 25 bp, Homo sapien
gccgcgatgccgcttctggaatcgc

SEQ ID NO: 574464 - DNA, 25 bp, Homo sapien
tgccgcttctggaatcgcgctctcg

SEQ ID NO: 574465 - DNA, 25 bp, Homo sapien
gcgatgccgcttctggaatcgcgct

SEQ ID NO: 574466 - DNA, 25 bp, Homo sapien
cgcgtgtctcggacttcttgggagc

SEQ ID NO: 574467 - DNA, 25 bp, Homo sapien
ggccaagcccggtgtagccgccgcc

SEQ ID NO: 574468 - DNA, 25 bp, Homo sapien
tcttgggagccaccgctgaggggag

SEQ ID NO: 574469 - DNA, 25 bp, Homo sapien
gccaagcccggtgtagccgccgccg

SEQ ID NO: 574470 - DNA, 25 bp, Homo sapien
taaaaaataactctcggccaagtgc

SEQ ID NO: 574471 - DNA, 25 bp, Homo sapien
gaaaactggaaactagcgcatgaga

SEQ ID NO: 574472 - DNA, 25 bp, Homo sapien
gcaaggattaccgacgttagccacc

SEQ ID NO: 574473 - DNA, 25 bp, Homo sapien
ggaactttctgtgctatcggctcaa

SEQ ID NO: 574474 - DNA, 25 bp, Homo sapien
gattcacttaaaaaccacctcacaa

SEQ ID NO: 574475 - DNA, 25 bp, Homo sapien
cagcgtgggagccacgggaaaactt

SEQ ID NO: 574476 - DNA, 25 bp, Homo sapien
ttctcctttgctctttaatgattca

SEQ ID NO: 574477 - DNA, 25 bp, Homo sapien
ttttgaatagcagcgtgggagccac

SEQ ID NO: 574478 - DNA, 25 bp, Homo sapien
taggctatgatccaaaatgaacttc

SEQ ID NO: 574479 - DNA, 25 bp, Homo sapien
aatatttgtagagaggactgcgtag

SEQ ID NO: 574480 - DNA, 25 bp, Homo sapien
gagtgagtccaaatacaggttctac

SEQ ID NO: 574481 - DNA, 25 bp, Homo sapien
gaatctgggccttacttgtggtcac

SEQ ID NO: 574482 - DNA, 25 bp, Homo sapien
cactaaggttgcttaagtgatacct

SEQ ID NO: 574483 - DNA, 25 bp, Homo sapien
tgttaaacttaattgacacttctgg

SEQ ID NO: 574484 - DNA, 25 bp, Homo sapien
cagttcatacctcaaaaggcagtta

SEQ ID NO: 574485 - DNA, 25 bp, Homo sapien
gcttagaagcactaaggttgcttaa

SEQ ID NO: 574486 - DNA, 25 bp, Homo sapien
gactctcaaataccgtcacaccagg

SEQ ID NO: 574487 - DNA, 25 bp, Homo sapien
tgaggacaagcaaggatcactgtga

SEQ ID NO: 574488 - DNA, 25 bp, Homo sapien
cactagcatagttactggcacaaca

SEQ ID NO: 574489 - DNA, 25 bp, Homo sapien
tggcacaacagtggataaaatcctt

SEQ ID NO: 574490 - DNA, 25 bp, Homo sapien
tgagttcagaagttgccctggtgca

SEQ ID NO: 574491 - DNA, 25 bp, Homo sapien
ctggtgcataggaagagaatacccc

SEQ ID NO: 574492 - DNA, 25 bp, Homo sapien
tgagggcagccatggaagacttctg

SEQ ID NO: 574493 - DNA, 25 bp, Homo sapien
tgttcctgtgtgcacgggcatctgc

SEQ ID NO: 574494 - DNA, 25 bp, Homo sapien
gctttgtcacagtataatgcccttc

SEQ ID NO: 574495 - DNA, 25 bp, Homo sapien
tgagcccaactgatgctaaagattt

SEQ ID NO: 574496 - DNA, 25 bp, Homo sapien
taaaaagttatgatttgctctccct

SEQ ID NO: 574497 - DNA, 25 bp, Homo sapien
tctcttagtagaggtgctaatgagc

SEQ ID NO: 574498 - DNA, 25 bp, Homo sapien
agtttgctaaccctgccctaaggca

SEQ ID NO: 574499 - DNA, 25 bp, Homo sapien
gactagaagcatatgcacctacctg

SEQ ID NO: 574500 - DNA, 25 bp, Homo sapien
tcaactcagctagtgcagcacaaaa

SEQ ID NO: 574501 - DNA, 25 bp, Homo sapien
ttcgtgggccacaaaaggtctctcc

SEQ ID NO: 574502 - DNA, 25 bp, Homo sapien
tataggttcacttgctacagtggac

SEQ ID NO: 574503 - DNA, 25 bp, Homo sapien
caaacaggttatgtgtcccaaaggc

SEQ ID NO: 574504 - DNA, 25 bp, Homo sapien
ggcaaactatgaattccccattggt

SEQ ID NO: 574505 - DNA, 25 bp, Homo sapien
cagggctttttcattccaaacaggt

SEQ ID NO: 574506 - DNA, 25 bp, Homo sapien
ccaagagctatagtttgcaaatccc

SEQ ID NO: 574507 - DNA, 25 bp, Homo sapien
tccggccctcgagactcataaaatt

SEQ ID NO: 574508 - DNA, 25 bp, Homo sapien
tcataaaatttcttacacaaggaaa

SEQ ID NO: 574509 - DNA, 25 bp, Homo sapien
cctctaggactgctatattctccct

SEQ ID NO: 574510 - DNA, 25 bp, Homo sapien
tattaccagaaagtataaggcacca

SEQ ID NO: 574511 - DNA, 25 bp, Homo sapien
ttttcaagtaggtcagatgtggtgg

SEQ ID NO: 574512 - DNA, 25 bp, Homo sapien
gaggtcccctcatatctatccaaag

SEQ ID NO: 574513 - DNA, 25 bp, Homo sapien
ggagtggactaaatggctagcatta

SEQ ID NO: 574514 - DNA, 25 bp, Homo sapien
agcctttcttacaaatagatctgtc

SEQ ID NO: 574515 - DNA, 25 bp, Homo sapien
tggaccttcaggatagtgagttgat

SEQ ID NO: 574516 - DNA, 25 bp, Homo sapien
aatggaccttcaggatagtgagttg

SEQ ID NO: 574517 - DNA, 25 bp, Homo sapien
gatacccaagcctttcttacaaata

SEQ ID NO: 574518 - DNA, 25 bp, Homo sapien
tgcctctaaaatgggctccaaatct

SEQ ID NO: 574519 - DNA, 25 bp, Homo sapien
agtcctgctgcaccccaatcggttt

SEQ ID NO: 574520 - DNA, 25 bp, Homo sapien
tatgatgggaagatagaacagatgc

SEQ ID NO: 574521 - DNA, 25 bp, Homo sapien
acctcttcgtgtaccatccagttgg

SEQ ID NO: 574522 - DNA, 25 bp, Homo sapien
aaaagactggcgaccaaacagagca

SEQ ID NO: 574523 - DNA, 25 bp, Homo sapien
aaagactggcgaccaaacagagcag

SEQ ID NO: 574524 - DNA, 25 bp, Homo sapien
aagactggcgaccaaacagagcagt

SEQ ID NO: 574525 - DNA, 25 bp, Homo sapien
attttgctttccctgcctaacgcag

SEQ ID NO: 574526 - DNA, 25 bp, Homo sapien
gattacatgcagaggttcattaaga

SEQ ID NO: 574527 - DNA, 25 bp, Homo sapien
gagtgtctccccatcatattcctaa

SEQ ID NO: 574528 - DNA, 25 bp, Homo sapien
gaagtaaagaagattacatgcagag

SEQ ID NO: 574529 - DNA, 25 bp, Homo sapien
tgtgcatgcgtgcactacaggtatg

SEQ ID NO: 574530 - DNA, 25 bp, Homo sapien
tgtacaccactgtgcgcacgtgtgt

SEQ ID NO: 574531 - DNA, 25 bp, Homo sapien
cacccggccctgggacattttagat

SEQ ID NO: 574532 - DNA, 25 bp, Homo sapien
gatatactatctatgtactgtggcc

SEQ ID NO: 574533 - DNA, 25 bp, Homo sapien
catagcatgatgggcttgtaagaga

SEQ ID NO: 574534 - DNA, 25 bp, Homo sapien
gacatgcccataaagccctcatctt

SEQ ID NO: 574535 - DNA, 25 bp, Homo sapien
aggggacatgcccataaagccctca

SEQ ID NO: 574536 - DNA, 25 bp, Homo sapien
tagcatgatgggcttgtaagagagg

SEQ ID NO: 574537 - DNA, 25 bp, Homo sapien
tcctattcccacatggacctggtta

SEQ ID NO: 574538 - DNA, 25 bp, Homo sapien
cctattcccacatggacctggttat

SEQ ID NO: 574539 - DNA, 25 bp, Homo sapien
atcctattcccacatggacctggtt

SEQ ID NO: 574540 - DNA, 25 bp, Homo sapien
cccctaacaactgtgtcttatcaca

SEQ ID NO: 574541 - DNA, 25 bp, Homo sapien
gtgattttagttgtcaatttaccaa

SEQ ID NO: 574542 - DNA, 25 bp, Homo sapien
tcaatttaccaacactgacccctaa

SEQ ID NO: 574543 - DNA, 25 bp, Homo sapien
cactgacccctaacaactgtgtctt

SEQ ID NO: 574544 - DNA, 25 bp, Homo sapien
gccggtgtccatgcaagaggaagtc

SEQ ID NO: 574545 - DNA, 25 bp, Homo sapien
acatcatgagggatcactcgccacc

SEQ ID NO: 574546 - DNA, 25 bp, Homo sapien
atgctcttaaaacaggcccggaaag

SEQ ID NO: 574547 - DNA, 25 bp, Homo sapien
cggaaagaaggcataggaggccggt

SEQ ID NO: 574548 - DNA, 25 bp, Homo sapien
tctgtgcttaccctcaaatacatga

SEQ ID NO: 574549 - DNA, 25 bp, Homo sapien
ctgtgcttaccctcaaatacatgaa

SEQ ID NO: 574550 - DNA, 25 bp, Homo sapien
taatgcactttgatataccaacgtt

SEQ ID NO: 574551 - DNA, 25 bp, Homo sapien
tcctaaatgcctaacgaagacaaac

SEQ ID NO: 574552 - DNA, 25 bp, Homo sapien
cagtcacctaatccaaacttacaag

SEQ ID NO: 574553 - DNA, 25 bp, Homo sapien
ggcaattctcagaaacagtcaccta

SEQ ID NO: 574554 - DNA, 25 bp, Homo sapien
agagccgagagaccccctctgagtg

SEQ ID NO: 574555 - DNA, 25 bp, Homo sapien
ttctcttgcagaggggccacaaagg

SEQ ID NO: 574556 - DNA, 25 bp, Homo sapien
acaaaggagatatttgggcgaaaca

SEQ ID NO: 574557 - DNA, 25 bp, Homo sapien
tctgagtggcagtagactgtgtgga

SEQ ID NO: 574558 - DNA, 25 bp, Homo sapien
gaagagcaataccagagtaatccag

SEQ ID NO: 574559 - DNA, 25 bp, Homo sapien
cacagatgacaatcaagtagatgaa

SEQ ID NO: 574560 - DNA, 25 bp, Homo sapien
gatgaagcaaggttgtggattacag

SEQ ID NO: 574561 - DNA, 25 bp, Homo sapien
caaaacttcccataatcagaagagc

SEQ ID NO: 574562 - DNA, 25 bp, Homo sapien
gtaggagacaagaacatctctgcta

SEQ ID NO: 574563 - DNA, 25 bp, Homo sapien
cccggatgatccagggtttagattt

SEQ ID NO: 574564 - DNA, 25 bp, Homo sapien
ggaaaaacactccttgttcattctc

SEQ ID NO: 574565 - DNA, 25 bp, Homo sapien
gacactgagtaggagacaagaacat

SEQ ID NO: 574566 - DNA, 25 bp, Homo sapien
tctgccctatggtggcggccttaag

SEQ ID NO: 574567 - DNA, 25 bp, Homo sapien
gatccgggcagcatacagggcagct

SEQ ID NO: 574568 - DNA, 25 bp, Homo sapien
catttgccagggaaaaagcgttcgg

SEQ ID NO: 574569 - DNA, 25 bp, Homo sapien
ccctccgagatgacatagtgcaagg

SEQ ID NO: 574570 - DNA, 25 bp, Homo sapien
aggtttgagacaccatggaagtgaa

SEQ ID NO: 574571 - DNA, 25 bp, Homo sapien
tcatgaaacgaaactcctggaggtt

SEQ ID NO: 574572 - DNA, 25 bp, Homo sapien
tggaggtttgagacaccatggaagt

SEQ ID NO: 574573 - DNA, 25 bp, Homo sapien
agcccccgccgatcatgaaacgaaa

SEQ ID NO: 574574 - DNA, 25 bp, Homo sapien
ccgcaggccctggtttagggtcata

SEQ ID NO: 574575 - DNA, 25 bp, Homo sapien
tcctctggtactggcatcagtagcc

SEQ ID NO: 574576 - DNA, 25 bp, Homo sapien
tagggtcatagtccctggagactgg

SEQ ID NO: 574577 - DNA, 25 bp, Homo sapien
ttctcagtcatgtaccacgcagagc

SEQ ID NO: 574578 - DNA, 25 bp, Homo sapien
gaatgaagctgtagaggtcccaacc

SEQ ID NO: 574579 - DNA, 25 bp, Homo sapien
cttattcaaggagagccgaggtgtc

SEQ ID NO: 574580 - DNA, 25 bp, Homo sapien
tatcccaaagtgcatgaccgaagag

SEQ ID NO: 574581 - DNA, 25 bp, Homo sapien
cattagggtccaaggtatgtcagcc

SEQ ID NO: 574582 - DNA, 25 bp, Homo sapien
gtgctttgtggctttagcataattt

SEQ ID NO: 574583 - DNA, 25 bp, Homo sapien
tgctttgtggctttagcataattta

SEQ ID NO: 574584 - DNA, 25 bp, Homo sapien
gctttgtggctttagcataatttat

SEQ ID NO: 574585 - DNA, 25 bp, Homo sapien
ctttctggaaccccaaccttctatg

SEQ ID NO: 574586 - DNA, 25 bp, Homo sapien
tggaaccccaaccttctatgatccc

SEQ ID NO: 574587 - DNA, 25 bp, Homo sapien
gaaccccaaccttctatgatcccca

SEQ ID NO: 574588 - DNA, 25 bp, Homo sapien
tctggaaccccaaccttctatgatc

SEQ ID NO: 574589 - DNA, 25 bp, Homo sapien
acagcaagtagggaaatcccacatc

SEQ ID NO: 574590 - DNA, 25 bp, Homo sapien
agcaagtagggaaatcccacatcaa

SEQ ID NO: 574591 - DNA, 25 bp, Homo sapien
cagcaagtagggaaatcccacatca

SEQ ID NO: 574592 - DNA, 25 bp, Homo sapien
caccccgggttctgtgcagcgttga

SEQ ID NO: 574593 - DNA, 25 bp, Homo sapien
cacttgtcgcaaaggctcggtgcga

SEQ ID NO: 574594 - DNA, 25 bp, Homo sapien
aagcgagggcttcagagtagacact

SEQ ID NO: 574595 - DNA, 25 bp, Homo sapien
gggcaagtgacttcgcctcctctag

SEQ ID NO: 574596 - DNA, 25 bp, Homo sapien
cccagggccctaccttgaccatctc

SEQ ID NO: 574597 - DNA, 25 bp, Homo sapien
ccagggccctaccttgaccatctcc

SEQ ID NO: 574598 - DNA, 25 bp, Homo sapien
cagggccctaccttgaccatctcca

SEQ ID NO: 574599 - DNA, 25 bp, Homo sapien
tttctgccagagtgacaaatcctag

SEQ ID NO: 574600 - DNA, 25 bp, Homo sapien
agcggctctgctcacattccattgg

SEQ ID NO: 574601 - DNA, 25 bp, Homo sapien
tgccgcaagggctactgggaaatgt

SEQ ID NO: 574602 - DNA, 25 bp, Homo sapien
ccataattaaagtcaggctgcctaa

SEQ ID NO: 574603 - DNA, 25 bp, Homo sapien
gacaagattgcaaccctcgatgtgg

SEQ ID NO: 574604 - DNA, 25 bp, Homo sapien
gaagcctgttgagctacagatgcaa

SEQ ID NO: 574605 - DNA, 25 bp, Homo sapien
gggaaaccacaagggcctcatctgc

SEQ ID NO: 574606 - DNA, 25 bp, Homo sapien
aggccagggctcattcttataagag

SEQ ID NO: 574607 - DNA, 25 bp, Homo sapien
agggcagctcacagcaaagttcaca

SEQ ID NO: 574608 - DNA, 25 bp, Homo sapien
tcaaagttccttcatcagaccgagc

SEQ ID NO: 574609 - DNA, 25 bp, Homo sapien
tgcatctggtcacacgttggcagca

SEQ ID NO: 574610 - DNA, 25 bp, Homo sapien
ggcaaaaagagtggcttacaagcag

SEQ ID NO: 574611 - DNA, 25 bp, Homo sapien
cagagcacagctaaacctccaggat

SEQ ID NO: 574612 - DNA, 25 bp, Homo sapien
cgcctttactcccaatactgtgtct

SEQ ID NO: 574613 - DNA, 25 bp, Homo sapien
agaattcggcttccccgtcaagtgg

SEQ ID NO: 574614 - DNA, 25 bp, Homo sapien
tggattgcctccgaagtcttcaagg

SEQ ID NO: 574615 - DNA, 25 bp, Homo sapien
ctgggggagaagactcggttccctg

SEQ ID NO: 574616 - DNA, 25 bp, Homo sapien
ctgaacgagcagagcagggatcctg

SEQ ID NO: 574617 - DNA, 25 bp, Homo sapien
gatcctgggggagaagactcggttc

SEQ ID NO: 574618 - DNA, 25 bp, Homo sapien
gcagggatcctgggggagaagactc

SEQ ID NO: 574619 - DNA, 25 bp, Homo sapien
ccttcgtgtcaactgagtgaggaat

SEQ ID NO: 574620 - DNA, 25 bp, Homo sapien
aggccccagtgccttcgtgtcaact

SEQ ID NO: 574621 - DNA, 25 bp, Homo sapien
ctctgttgctcagtgactagctagc

SEQ ID NO: 574622 - DNA, 25 bp, Homo sapien
actagctagctagtgagttcactca

SEQ ID NO: 574623 - DNA, 25 bp, Homo sapien
tgggcagccagacagagaggctcct

SEQ ID NO: 574624 - DNA, 25 bp, Homo sapien
cagccagacagagaggctcctcaca

SEQ ID NO: 574625 - DNA, 25 bp, Homo sapien
agccagacagagaggctcctcacat

SEQ ID NO: 574626 - DNA, 25 bp, Homo sapien
ggcagccagacagagaggctcctca

SEQ ID NO: 574627 - DNA, 25 bp, Homo sapien
agtctccactcagcgggagcagcgg

SEQ ID NO: 574628 - DNA, 25 bp, Homo sapien
aaacgccttcaatcaggtggctctc

SEQ ID NO: 574629 - DNA, 25 bp, Homo sapien
ggattcctatagaaatccagacacc

SEQ ID NO: 574630 - DNA, 25 bp, Homo sapien
tctttactctgactgcaaacgcctt

SEQ ID NO: 574631 - DNA, 25 bp, Homo sapien
acagacctggtgtccgcacccttcc

SEQ ID NO: 574632 - DNA, 25 bp, Homo sapien
cagggcaaacggccaccgaggagac

SEQ ID NO: 574633 - DNA, 25 bp, Homo sapien
tcagcagggcaaacggccaccgagg

SEQ ID NO: 574634 - DNA, 25 bp, Homo sapien
ctcagcagggcaaacggccaccgag

SEQ ID NO: 574635 - DNA, 25 bp, Homo sapien
gcagggcaaacggccaccgaggaga

SEQ ID NO: 574636 - DNA, 25 bp, Homo sapien
gctaggaagagacagggacacaagg

SEQ ID NO: 574637 - DNA, 25 bp, Homo sapien
ctgctaggaagagacagggacacaa

SEQ ID NO: 574638 - DNA, 25 bp, Homo sapien
ctaggaagagacagggacacaagga

SEQ ID NO: 574639 - DNA, 25 bp, Homo sapien
tgctaggaagagacagggacacaag

SEQ ID NO: 574640 - DNA, 25 bp, Homo sapien
cagccgggctataataagactcatc

SEQ ID NO: 574641 - DNA, 25 bp, Homo sapien
gactcatcagctcaggggttcatgc

SEQ ID NO: 574642 - DNA, 25 bp, Homo sapien
cacgcagaggtgaatagcagcactc

SEQ ID NO: 574643 - DNA, 25 bp, Homo sapien
gtgaatagcagcactctgtcttccg

SEQ ID NO: 574644 - DNA, 25 bp, Homo sapien
cagctgcagccgcgtagggtgtgag

SEQ ID NO: 574645 - DNA, 25 bp, Homo sapien
agctgcagccgcgtagggtgtgagc

SEQ ID NO: 574646 - DNA, 25 bp, Homo sapien
ctgcagccgcgtagggtgtgagccg

SEQ ID NO: 574647 - DNA, 25 bp, Homo sapien
gcagccgcgtagggtgtgagccgct

SEQ ID NO: 574648 - DNA, 25 bp, Homo sapien
gttcctctagccccgccacagctca

SEQ ID NO: 574649 - DNA, 25 bp, Homo sapien
tcccggttcctctagccccgccaca

SEQ ID NO: 574650 - DNA, 25 bp, Homo sapien
ccggttcctctagccccgccacagc

SEQ ID NO: 574651 - DNA, 25 bp, Homo sapien
cggttcctctagccccgccacagct

SEQ ID NO: 574652 - DNA, 25 bp, Homo sapien
catctctccgaggtgagcagagtga

SEQ ID NO: 574653 - DNA, 25 bp, Homo sapien
tcatctctccgaggtgagcagagtg

SEQ ID NO: 574654 - DNA, 25 bp, Homo sapien
gagagggcccgggtgtctctttaca

SEQ ID NO: 574655 - DNA, 25 bp, Homo sapien
aggaagccttcaagcccctgggatg

SEQ ID NO: 574656 - DNA, 25 bp, Homo sapien
tctttacactcctcatgccctctcc

SEQ ID NO: 574657 - DNA, 25 bp, Homo sapien
tctcagttatgattccctgggtggg

SEQ ID NO: 574658 - DNA, 25 bp, Homo sapien
aggcccacggctctccgggccctgt

SEQ ID NO: 574659 - DNA, 25 bp, Homo sapien
gtgaggcccacggctctccgggccc

SEQ ID NO: 574660 - DNA, 25 bp, Homo sapien
gcccacggctctccgggccctgtcg

SEQ ID NO: 574661 - DNA, 25 bp, Homo sapien
tgaggcccacggctctccgggccct

SEQ ID NO: 574662 - DNA, 25 bp, Homo sapien
gagacttgcctccactgcagggcga

SEQ ID NO: 574663 - DNA, 25 bp, Homo sapien
aggagacttgcctccactgcagggc

SEQ ID NO: 574664 - DNA, 25 bp, Homo sapien
gcagggcgagcctgcccctctgccc

SEQ ID NO: 574665 - DNA, 25 bp, Homo sapien
ccactgcagggcgagcctgcccctc

SEQ ID NO: 574666 - DNA, 25 bp, Homo sapien
tcagtcagattcgtcaggtccccga

SEQ ID NO: 574667 - DNA, 25 bp, Homo sapien
gggttcaaatgtcagccggtccaga

SEQ ID NO: 574668 - DNA, 25 bp, Homo sapien
gccaggccgttgatggacaggtcca

SEQ ID NO: 574669 - DNA, 25 bp, Homo sapien
catacagggcgatccagcaggtgat

SEQ ID NO: 574670 - DNA, 25 bp, Homo sapien
ctcggtaggagaaccactccatcca

SEQ ID NO: 574671 - DNA, 25 bp, Homo sapien
tctgtgagcccaggataccgttctc

SEQ ID NO: 574672 - DNA, 25 bp, Homo sapien
tgccgaaaagatgcgggctgcagcc

SEQ ID NO: 574673 - DNA, 25 bp, Homo sapien
tgtcattagagagctgagcgtccct

SEQ ID NO: 574674 - DNA, 25 bp, Homo sapien
cccacagagtaaggcagtgctaaca

SEQ ID NO: 574675 - DNA, 25 bp, Homo sapien
tggcccaggaatatccagcccagct

SEQ ID NO: 574676 - DNA, 25 bp, Homo sapien
agctcccggtggtacttggccatga

SEQ ID NO: 574677 - DNA, 25 bp, Homo sapien
ggctggcgctttttgagctcccggt

SEQ ID NO: 574678 - DNA, 25 bp, Homo sapien
cagctgggagcagtagttgaacatc

SEQ ID NO: 574679 - DNA, 25 bp, Homo sapien
gagtgaattagcgaatccaggagca

SEQ ID NO: 574680 - DNA, 25 bp, Homo sapien
gaccagcaaggtaggaagagtcacc

SEQ ID NO: 574681 - DNA, 25 bp, Homo sapien
taccaacagttgtagagctggacca

SEQ ID NO: 574682 - DNA, 25 bp, Homo sapien
tttcagggagcctcgaaagtgcagg

SEQ ID NO: 574683 - DNA, 25 bp, Homo sapien
ccaggagccggatggctttaggaag

SEQ ID NO: 574684 - DNA, 25 bp, Homo sapien
caggagccggatggctttaggaaga

SEQ ID NO: 574685 - DNA, 25 bp, Homo sapien
gttgaagaccttgagccggacgcct

SEQ ID NO: 574686 - DNA, 25 bp, Homo sapien
attcacaaagccgtgcgtcactgcc

SEQ ID NO: 574687 - DNA, 25 bp, Homo sapien
catgttaaagtttgcagctcggtgc

SEQ ID NO: 574688 - DNA, 25 bp, Homo sapien
cggtgcttgacaggctattcacaaa

SEQ ID NO: 574689 - DNA, 25 bp, Homo sapien
gagctgcctgaaaaccggccttgtg

SEQ ID NO: 574690 - DNA, 25 bp, Homo sapien
tcctatgaggaacccagaagacact

SEQ ID NO: 574691 - DNA, 25 bp, Homo sapien
tcgagaaacttcagagtaccccagg

SEQ ID NO: 574692 - DNA, 25 bp, Homo sapien
ttctcgtggtgtacaaaatgcttcc

SEQ ID NO: 574693 - DNA, 25 bp, Homo sapien
aagcggctggtatgcaggcgtacca

SEQ ID NO: 574694 - DNA, 25 bp, Homo sapien
tgacctccgtgttggcagacaggtg

SEQ ID NO: 574695 - DNA, 25 bp, Homo sapien
agttgagttgagcttcatgcaccaa

SEQ ID NO: 574696 - DNA, 25 bp, Homo sapien
caggctgaacaaaggctcgaagcat

SEQ ID NO: 574697 - DNA, 25 bp, Homo sapien
taaaccttatcgtaggtcataaagc

SEQ ID NO: 574698 - DNA, 25 bp, Homo sapien
aagtgcacgtgaaacattccccaag

SEQ ID NO: 574699 - DNA, 25 bp, Homo sapien
tttcagttgcaaccaaagttggact

SEQ ID NO: 574700 - DNA, 25 bp, Homo sapien
cagaatggacgttcttctcaagtgc

SEQ ID NO: 574701 - DNA, 25 bp, Homo sapien
ttgcaggatgaagtaggaacaacag

SEQ ID NO: 574702 - DNA, 25 bp, Homo sapien
tcaggaaggaggttcagtgtatacg

SEQ ID NO: 574703 - DNA, 25 bp, Homo sapien
aagacccactgtagaataaatgcta

SEQ ID NO: 574704 - DNA, 25 bp, Homo sapien
tcaaagggaaagctggaattgcagg

SEQ ID NO: 574705 - DNA, 25 bp, Homo sapien
gaagggtttaccacaggtgctgtca

SEQ ID NO: 574706 - DNA, 25 bp, Homo sapien
ggcatcaaaggtacacagaagggtt

SEQ ID NO: 574707 - DNA, 25 bp, Homo sapien
tgcaaaagccttttcaatcccgggc

SEQ ID NO: 574708 - DNA, 25 bp, Homo sapien
gatactgattgcctttgcacccaga

SEQ ID NO: 574709 - DNA, 25 bp, Homo sapien
tcaaaggctcgagcgcgtagaaaaa

SEQ ID NO: 574710 - DNA, 25 bp, Homo sapien
gctcaaaggctcgagcgcgtagaaa

SEQ ID NO: 574711 - DNA, 25 bp, Homo sapien
acacacagctcaaaggctcgagcgc

SEQ ID NO: 574712 - DNA, 25 bp, Homo sapien
acagctcaaaggctcgagcgcgtag

SEQ ID NO: 574713 - DNA, 25 bp, Homo sapien
gggtgttagcgcattcagaaatcaa

SEQ ID NO: 574714 - DNA, 25 bp, Homo sapien
tagtgacgcgtactttgactagcaa

SEQ ID NO: 574715 - DNA, 25 bp, Homo sapien
tgtctgcaaaacgtcaccacagtga

SEQ ID NO: 574716 - DNA, 25 bp, Homo sapien
tgactagcaatacagtttggtgccc

SEQ ID NO: 574717 - DNA, 25 bp, Homo sapien
ttcctcaataatgtgacacagagct

SEQ ID NO: 574718 - DNA, 25 bp, Homo sapien
acagagatttgtcttctgcagtttc

SEQ ID NO: 574719 - DNA, 25 bp, Homo sapien
cattgtcctttccatggtacactga

SEQ ID NO: 574720 - DNA, 25 bp, Homo sapien
accgtgcccgacctctacttcctct

SEQ ID NO: 574721 - DNA, 25 bp, Homo sapien
gaccagggcccaacttcagaatcct

SEQ ID NO: 574722 - DNA, 25 bp, Homo sapien
aatcactttgagactgaccagggcc

SEQ ID NO: 574723 - DNA, 25 bp, Homo sapien
accatactagctgagagagatctga

SEQ ID NO: 574724 - DNA, 25 bp, Homo sapien
ggttgagaactttcgccctaggctc

SEQ ID NO: 574725 - DNA, 25 bp, Homo sapien
tcagcctatgctatccgcgtggtgg

SEQ ID NO: 574726 - DNA, 25 bp, Homo sapien
gctctcaaggttgcttatcatacat

SEQ ID NO: 574727 - DNA, 25 bp, Homo sapien
tacatgtcagcctatgctatccgcg

SEQ ID NO: 574728 - DNA, 25 bp, Homo sapien
caaggttgcttatcatacatgtcag

SEQ ID NO: 574729 - DNA, 25 bp, Homo sapien
cttcccaaattagttgagttgtgct

SEQ ID NO: 574730 - DNA, 25 bp, Homo sapien
tattaagacagagggcctgaatgag

SEQ ID NO: 574731 - DNA, 25 bp, Homo sapien
tcagctgatggaggaagcgctcgtc

SEQ ID NO: 574732 - DNA, 25 bp, Homo sapien
tgagctccgtcccatcattggctgc

SEQ ID NO: 574733 - DNA, 25 bp, Homo sapien
cattttgctccctcattagataata

SEQ ID NO: 574734 - DNA, 25 bp, Homo sapien
acattttgctccctcattagataat

SEQ ID NO: 574735 - DNA, 25 bp, Homo sapien
ctttagctggttcagtttatttgca

SEQ ID NO: 574736 - DNA, 25 bp, Homo sapien
gggaccacttctttagctggttcag

SEQ ID NO: 574737 - DNA, 25 bp, Homo sapien
tcccctttaacagcagccatgagaa

SEQ ID NO: 574738 - DNA, 25 bp, Homo sapien
gagccaaagatgtaactcagagagt

SEQ ID NO: 574739 - DNA, 25 bp, Homo sapien
cagagagtcacccagtttggtttct

SEQ ID NO: 574740 - DNA, 25 bp, Homo sapien
tttcccctttaacagcagccatgag

SEQ ID NO: 574741 - DNA, 25 bp, Homo sapien
gtcagctccaactctgtttttccct

SEQ ID NO: 574742 - DNA, 25 bp, Homo sapien
agtcagctccaactctgtttttccc

SEQ ID NO: 574743 - DNA, 25 bp, Homo sapien
cagtcagctccaactctgtttttcc

SEQ ID NO: 574744 - DNA, 25 bp, Homo sapien
tcagtcagctccaactctgtttttc

SEQ ID NO: 574745 - DNA, 25 bp, Homo sapien
tacccagccccagattccatttcta

SEQ ID NO: 574746 - DNA, 25 bp, Homo sapien
cagccccagattccatttctaatcc

SEQ ID NO: 574747 - DNA, 25 bp, Homo sapien
ctgtacccagccccagattccattt

SEQ ID NO: 574748 - DNA, 25 bp, Homo sapien
cccagccccagattccatttctaat

SEQ ID NO: 574749 - DNA, 25 bp, Homo sapien
tcactctccatattcatggtgcaat

SEQ ID NO: 574750 - DNA, 25 bp, Homo sapien
cactctccatattcatggtgcaatg

SEQ ID NO: 574751 - DNA, 25 bp, Homo sapien
gggtgacactggacaacttattcaa

SEQ ID NO: 574752 - DNA, 25 bp, Homo sapien
ggtatctggcacataagtagtcctc

SEQ ID NO: 574753 - DNA, 25 bp, Homo sapien
gatgatctaatacaagcaaagcgct

SEQ ID NO: 574754 - DNA, 25 bp, Homo sapien
gcaaagcgcttcacatggtatctgg

SEQ ID NO: 574755 - DNA, 25 bp, Homo sapien
gccgtaagtagtccactttctccca

SEQ ID NO: 574756 - DNA, 25 bp, Homo sapien
cattccacggcatcctctattttta

SEQ ID NO: 574757 - DNA, 25 bp, Homo sapien
tgtctcctctgctgccgtaagtagt

SEQ ID NO: 574758 - DNA, 25 bp, Homo sapien
tattcttgttatatgcatgcagcct

SEQ ID NO: 574759 - DNA, 25 bp, Homo sapien
tgccaggcagttggctttcttctgg

SEQ ID NO: 574760 - DNA, 25 bp, Homo sapien
gccaggcagttggctttcttctggt

SEQ ID NO: 574761 - DNA, 25 bp, Homo sapien
cagccagcaactgtttccatccatc

SEQ ID NO: 574762 - DNA, 25 bp, Homo sapien
agctcccccatgaaactttccgaca

SEQ ID NO: 574763 - DNA, 25 bp, Homo sapien
tactcatacttcttccagccagcaa

SEQ ID NO: 574764 - DNA, 25 bp, Homo sapien
tgaataggccaataagaatgccagc

SEQ ID NO: 574765 - DNA, 25 bp, Homo sapien
tgagtgccacgagttttggtttctc

SEQ ID NO: 574766 - DNA, 25 bp, Homo sapien
tttggtttctccgtactgagaccac

SEQ ID NO: 574767 - DNA, 25 bp, Homo sapien
agagtgaacaagctcttgagtgcca

SEQ ID NO: 574768 - DNA, 25 bp, Homo sapien
gaacaagctcttgagtgccacgagt

SEQ ID NO: 574769 - DNA, 25 bp, Homo sapien
gcccacagggctctgttgaggttgg

SEQ ID NO: 574770 - DNA, 25 bp, Homo sapien
ggtgggaaggtgtctgcacagaaga

SEQ ID NO: 574771 - DNA, 25 bp, Homo sapien
cacagaagaggttcgcacaggagat

SEQ ID NO: 574772 - DNA, 25 bp, Homo sapien
cacagggctctgttgaggttgggtg

SEQ ID NO: 574773 - DNA, 25 bp, Homo sapien
gcactcagatgagtccgcgcactta

SEQ ID NO: 574774 - DNA, 25 bp, Homo sapien
cactcagatgagtccgcgcacttac

SEQ ID NO: 574775 - DNA, 25 bp, Homo sapien
gtggcactcagatgagtccgcgcac

SEQ ID NO: 574776 - DNA, 25 bp, Homo sapien
ctagtggcactcagatgagtccgcg

SEQ ID NO: 574777 - DNA, 25 bp, Homo sapien
ccactctgtgttggtcgtagagagc

SEQ ID NO: 574778 - DNA, 25 bp, Homo sapien
taattgcctgtatataagggtgggc

SEQ ID NO: 574779 - DNA, 25 bp, Homo sapien
ccaggtaaagttgattagcaagcca

SEQ ID NO: 574780 - DNA, 25 bp, Homo sapien
tccaagctgcctggttgaagtgtca

SEQ ID NO: 574781 - DNA, 25 bp, Homo sapien
gaaacgtttactcacttgcccatgt

SEQ ID NO: 574782 - DNA, 25 bp, Homo sapien
tacgctcttaaccaccgcatagatg

SEQ ID NO: 574783 - DNA, 25 bp, Homo sapien
gatttgaaccctagcagtcttcaga

SEQ ID NO: 574784 - DNA, 25 bp, Homo sapien
ttgcccatgtttcacagccagttga

SEQ ID NO: 574785 - DNA, 25 bp, Homo sapien
tgaattacaatgtccagggtcaccc

SEQ ID NO: 574786 - DNA, 25 bp, Homo sapien
caggtactgtgataggccctttaca

SEQ ID NO: 574787 - DNA, 25 bp, Homo sapien
cccagctgagtaaatgtggagcctg

SEQ ID NO: 574788 - DNA, 25 bp, Homo sapien
tcacgtgcaggatttatagcccagc

SEQ ID NO: 574789 - DNA, 25 bp, Homo sapien
tccggcggctacaccatttgaaaaa

SEQ ID NO: 574790 - DNA, 25 bp, Homo sapien
tgcctcctcgagtgaaactgtaacg

SEQ ID NO: 574791 - DNA, 25 bp, Homo sapien
gtaacgcatcctcagtacatccggg

SEQ ID NO: 574792 - DNA, 25 bp, Homo sapien
tttcgcgcaagattcgaggaagccg

SEQ ID NO: 574793 - DNA, 25 bp, Homo sapien
tcctctggaatgtacatcctcgtat

SEQ ID NO: 574794 - DNA, 25 bp, Homo sapien
tggttttcctctggaatgtacatcc

SEQ ID NO: 574795 - DNA, 25 bp, Homo sapien
tacatcctcgtattctcattgacca

SEQ ID NO: 574796 - DNA, 25 bp, Homo sapien
ggaatgtacatcctcgtattctcat

SEQ ID NO: 574797 - DNA, 25 bp, Homo sapien
gacacattcataggtgcactgattc

SEQ ID NO: 574798 - DNA, 25 bp, Homo sapien
tgtgattaatacactcaggagggtc

SEQ ID NO: 574799 - DNA, 25 bp, Homo sapien
cacagatgcctagggattgactcac

SEQ ID NO: 574800 - DNA, 25 bp, Homo sapien
ttaccctgggaggtctctactgatg

SEQ ID NO: 574801 - DNA, 25 bp, Homo sapien
tgtaaaagagacagatatctgggct

SEQ ID NO: 574802 - DNA, 25 bp, Homo sapien
aacattctgcagctattcaattaaa

SEQ ID NO: 574803 - DNA, 25 bp, Homo sapien
aatgtaaaagagacagatatctggg

SEQ ID NO: 574804 - DNA, 25 bp, Homo sapien
taaaagagacagatatctgggctga

SEQ ID NO: 574805 - DNA, 25 bp, Homo sapien
gagaatggcttccaggtacctggct

SEQ ID NO: 574806 - DNA, 25 bp, Homo sapien
caccaagttgatcacagaaagagaa

SEQ ID NO: 574807 - DNA, 25 bp, Homo sapien
gcttggccaacttggtggcaccaag

SEQ ID NO: 574808 - DNA, 25 bp, Homo sapien
gaattagctgtggagtgagaagaaa

SEQ ID NO: 574809 - DNA, 25 bp, Homo sapien
tattatgaggtattaaggaggtaga

SEQ ID NO: 574810 - DNA, 25 bp, Homo sapien
ctagaaggagtcaggccaggagtac

SEQ ID NO: 574811 - DNA, 25 bp, Homo sapien
taggcaagacggatcagagtccgag

SEQ ID NO: 574812 - DNA, 25 bp, Homo sapien
gaatctagttagaaggttcttacag

SEQ ID NO: 574813 - DNA, 25 bp, Homo sapien
ccggattctcccgcagcctcaactg

SEQ ID NO: 574814 - DNA, 25 bp, Homo sapien
gctgcccggattctcccgcagcctc

SEQ ID NO: 574815 - DNA, 25 bp, Homo sapien
tgcccggattctcccgcagcctcaa

SEQ ID NO: 574816 - DNA, 25 bp, Homo sapien
gtgctgcccggattctcccgcagcc

SEQ ID NO: 574817 - DNA, 25 bp, Homo sapien
cctgactcgggccgagggcacttac

SEQ ID NO: 574818 - DNA, 25 bp, Homo sapien
cactggatggcctgactcgggccga

SEQ ID NO: 574819 - DNA, 25 bp, Homo sapien
gactggcgaaacactggatggcctg

SEQ ID NO: 574820 - DNA, 25 bp, Homo sapien
gggtccttgaaggactggcgaaaca

SEQ ID NO: 574821 - DNA, 25 bp, Homo sapien
tctctccagataattcagaacacag

SEQ ID NO: 574822 - DNA, 25 bp, Homo sapien
tgaaagtactacctgaatatgaaga

SEQ ID NO: 574823 - DNA, 25 bp, Homo sapien
caatggtgaagactacaagggatta

SEQ ID NO: 574824 - DNA, 25 bp, Homo sapien
cagaacacagaattccagagatcct

SEQ ID NO: 574825 - DNA, 25 bp, Homo sapien
cggcccccatccaattttatgtttg

SEQ ID NO: 574826 - DNA, 25 bp, Homo sapien
attccttgaacctccttcaaggaat

SEQ ID NO: 574827 - DNA, 25 bp, Homo sapien
tcacaccatttccagcagcattctg

SEQ ID NO: 574828 - DNA, 25 bp, Homo sapien
ttctgtcactctgccggtcctcctc

SEQ ID NO: 574829 - DNA, 25 bp, Homo sapien
agcattctgtcactctgccggtcct

SEQ ID NO: 574830 - DNA, 25 bp, Homo sapien
cagcagcattctgtcactctgccgg

SEQ ID NO: 574831 - DNA, 25 bp, Homo sapien
agcacggtctggccagcctcgtgtc

SEQ ID NO: 574832 - DNA, 25 bp, Homo sapien
ctcccctgaagacagcatctgcgtc

SEQ ID NO: 574833 - DNA, 25 bp, Homo sapien
ctgaagacagcatctgcgtcctcct

SEQ ID NO: 574834 - DNA, 25 bp, Homo sapien
gaccccagcacggtctggccagcct

SEQ ID NO: 574835 - DNA, 25 bp, Homo sapien
aatccccccatctcatacgggctgc

SEQ ID NO: 574836 - DNA, 25 bp, Homo sapien
ctgcattgcccttaatccccccatc

SEQ ID NO: 574837 - DNA, 25 bp, Homo sapien
ccctgcattgcccttaatcccccca

SEQ ID NO: 574838 - DNA, 25 bp, Homo sapien
ccccatctcatacgggctgccagtt

SEQ ID NO: 574839 - DNA, 25 bp, Homo sapien
ggggcgtgggctcccatagttggaa

SEQ ID NO: 574840 - DNA, 25 bp, Homo sapien
ggcggggcgtgggctcccatagttg

SEQ ID NO: 574841 - DNA, 25 bp, Homo sapien
gggcgtgggctcccatagttggaac

SEQ ID NO: 574842 - DNA, 25 bp, Homo sapien
cggggcgtgggctcccatagttgga

SEQ ID NO: 574843 - DNA, 25 bp, Homo sapien
atggccgcctgccacgacagggcag

SEQ ID NO: 574844 - DNA, 25 bp, Homo sapien
agatggtcgcattgccagcgctgcc

SEQ ID NO: 574845 - DNA, 25 bp, Homo sapien
catcagcttagcctgccgggctgcg

SEQ ID NO: 574846 - DNA, 25 bp, Homo sapien
ttgctgccgcttccgctgcgtggag

SEQ ID NO: 574847 - DNA, 25 bp, Homo sapien
cgtgcaggtcccaggagcatgccca

SEQ ID NO: 574848 - DNA, 25 bp, Homo sapien
caggagcatgcccagcccggtgaac

SEQ ID NO: 574849 - DNA, 25 bp, Homo sapien
cagcgtgcaggtcccaggagcatgc

SEQ ID NO: 574850 - DNA, 25 bp, Homo sapien
ccagcgtgcaggtcccaggagcatg

SEQ ID NO: 574851 - DNA, 25 bp, Homo sapien
cccagggagcctcggagggctggac

SEQ ID NO: 574852 - DNA, 25 bp, Homo sapien
gcccagggagcctcggagggctgga

SEQ ID NO: 574853 - DNA, 25 bp, Homo sapien
gctcgtggcccagggagcctcggag

SEQ ID NO: 574854 - DNA, 25 bp, Homo sapien
acagctcgtggcccagggagcctcg

SEQ ID NO: 574855 - DNA, 25 bp, Homo sapien
actacgctcttccatctcctgagcc

SEQ ID NO: 574856 - DNA, 25 bp, Homo sapien
gctcttccatctcctgagccccttc

SEQ ID NO: 574857 - DNA, 25 bp, Homo sapien
cttccatctcctgagccccttcacc

SEQ ID NO: 574858 - DNA, 25 bp, Homo sapien
cactacgctcttccatctcctgagc

SEQ ID NO: 574859 - DNA, 25 bp, Homo sapien
ggaagttaatgccacagaaagtaca

SEQ ID NO: 574860 - DNA, 25 bp, Homo sapien
gagtcaaggaagttaatgccacaga

SEQ ID NO: 574861 - DNA, 25 bp, Homo sapien
caaggaagttaatgccacagaaagt

SEQ ID NO: 574862 - DNA, 25 bp, Homo sapien
agggagtcaaggaagttaatgccac

SEQ ID NO: 574863 - DNA, 25 bp, Homo sapien
gcaaaaatagtcagtaaaataatta

SEQ ID NO: 574864 - DNA, 25 bp, Homo sapien
ctaaggccacacaattggcaaaaat

SEQ ID NO: 574865 - DNA, 25 bp, Homo sapien
cacacaattggcaaaaatagtcagt

SEQ ID NO: 574866 - DNA, 25 bp, Homo sapien
aattggcaaaaatagtcagtaaaat

SEQ ID NO: 574867 - DNA, 25 bp, Homo sapien
caggttggaattggtggcgttggaa

SEQ ID NO: 574868 - DNA, 25 bp, Homo sapien
ggttggaattggtggcgttggaatc

SEQ ID NO: 574869 - DNA, 25 bp, Homo sapien
ttggaattggtggcgttggaatcat

SEQ ID NO: 574870 - DNA, 25 bp, Homo sapien
ggaattggtggcgttggaatcatct

SEQ ID NO: 574871 - DNA, 25 bp, Homo sapien
gtcacgcttcggatggcctcacgga

SEQ ID NO: 574872 - DNA, 25 bp, Homo sapien
tgtggccatctcaggacctaagaaa

SEQ ID NO: 574873 - DNA, 25 bp, Homo sapien
gattctatgtggaacgaaggctcct

SEQ ID NO: 574874 - DNA, 25 bp, Homo sapien
tttcttgccccttaagagatgaggt

SEQ ID NO: 574875 - DNA, 25 bp, Homo sapien
actcctctgccgttaaagccttcga

SEQ ID NO: 574876 - DNA, 25 bp, Homo sapien
taagtccaacagtttgcatgggcca

SEQ ID NO: 574877 - DNA, 25 bp, Homo sapien
tatgtcaacctatgtgaaacttgcc

SEQ ID NO: 574878 - DNA, 25 bp, Homo sapien
gagccatcttcctcatgctgcaaga

SEQ ID NO: 574879 - DNA, 25 bp, Homo sapien
tattcttgaacccaatggagtggga

SEQ ID NO: 574880 - DNA, 25 bp, Homo sapien
gaacctgtgggtagacagagctgat

SEQ ID NO: 574881 - DNA, 25 bp, Homo sapien
ctgcttggatcctaaagggaacctg

SEQ ID NO: 574882 - DNA, 25 bp, Homo sapien
gacgtgtgtcgtctttctgcttgga

SEQ ID NO: 574883 - DNA, 25 bp, Homo sapien
tgctatattataaacgatgtgctgc

SEQ ID NO: 574884 - DNA, 25 bp, Homo sapien
ggtggcattgccaataacagcacta

SEQ ID NO: 574885 - DNA, 25 bp, Homo sapien
caggtaatagctcttggtagacagg

SEQ ID NO: 574886 - DNA, 25 bp, Homo sapien
tgtgctgcatagaggtggcattgcc

SEQ ID NO: 574887 - DNA, 25 bp, Homo sapien
tcaggatctatttactctaactttg

SEQ ID NO: 574888 - DNA, 25 bp, Homo sapien
actctaactttgcacataactgtaa

SEQ ID NO: 574889 - DNA, 25 bp, Homo sapien
aactttgcacataactgtaatggac

SEQ ID NO: 574890 - DNA, 25 bp, Homo sapien
ggatctatttactctaactttgcac

SEQ ID NO: 574891 - DNA, 25 bp, Homo sapien
taggaatcctgtaccacttgtagag

SEQ ID NO: 574892 - DNA, 25 bp, Homo sapien
gaatcctggctatggtaagggtgcc

SEQ ID NO: 574893 - DNA, 25 bp, Homo sapien
taattgccacagacagaccaacagt

SEQ ID NO: 574894 - DNA, 25 bp, Homo sapien
tcagggaagctgtgactgtcatgct

SEQ ID NO: 574895 - DNA, 25 bp, Homo sapien
tgactgtaagtcatccaccggctgc

SEQ ID NO: 574896 - DNA, 25 bp, Homo sapien
tagtcaaggcactaaaaacgccagg

SEQ ID NO: 574897 - DNA, 25 bp, Homo sapien
taagctattgaaatggcctctgccc

SEQ ID NO: 574898 - DNA, 25 bp, Homo sapien
tctagggaagggcaccatcgatgtt

SEQ ID NO: 574899 - DNA, 25 bp, Homo sapien
ggaaagggtcttttagtctgcatga

SEQ ID NO: 574900 - DNA, 25 bp, Homo sapien
gccttctgaatggttgctccagcac

SEQ ID NO: 574901 - DNA, 25 bp, Homo sapien
acggcaacacgcctgcagagggaga

SEQ ID NO: 574902 - DNA, 25 bp, Homo sapien
ggccaacttatccaagtgctatctg

SEQ ID NO: 574903 - DNA, 25 bp, Homo sapien
tgtgctccaaatagacaaggcaggc

SEQ ID NO: 574904 - DNA, 25 bp, Homo sapien
tccaaggacgggtgaaagctgcact

SEQ ID NO: 574905 - DNA, 25 bp, Homo sapien
ttaatgatctatgcctgtgtgctcc

SEQ ID NO: 574906 - DNA, 25 bp, Homo sapien
ttgaggtggcacttggtgagaccct

SEQ ID NO: 574907 - DNA, 25 bp, Homo sapien
tcctcagagcggtttaggttcagcg

SEQ ID NO: 574908 - DNA, 25 bp, Homo sapien
tagacaggagcagttaggcccaaaa

SEQ ID NO: 574909 - DNA, 25 bp, Homo sapien
cagttaagtgccaagctctggtgga

SEQ ID NO: 574910 - DNA, 25 bp, Homo sapien
ggttctaagtgccagaggtcaggat

SEQ ID NO: 574911 - DNA, 25 bp, Homo sapien
aacggcaaagccactactgatggta

SEQ ID NO: 574912 - DNA, 25 bp, Homo sapien
gcatggatgtcaatctggaaacggc

SEQ ID NO: 574913 - DNA, 25 bp, Homo sapien
ttccatcagggaaggcatatccgtg

SEQ ID NO: 574914 - DNA, 25 bp, Homo sapien
tgaagacgttcaagaaggcaatggc

SEQ ID NO: 574915 - DNA, 25 bp, Homo sapien
ctcccttggtgtgtctcatcttcat

SEQ ID NO: 574916 - DNA, 25 bp, Homo sapien
ttcgcttcctccaaagcaggagggc

SEQ ID NO: 574917 - DNA, 25 bp, Homo sapien
tttctggttccattctcccactgac

SEQ ID NO: 574918 - DNA, 25 bp, Homo sapien
ttccattctcccactgactcatcct

SEQ ID NO: 574919 - DNA, 25 bp, Homo sapien
ccactgactcatcctgctgggacat

SEQ ID NO: 574920 - DNA, 25 bp, Homo sapien
tggttccattctcccactgactcat

SEQ ID NO: 574921 - DNA, 25 bp, Homo sapien
ggtcccctggcctacaataactaga

SEQ ID NO: 574922 - DNA, 25 bp, Homo sapien
tacttaccctcgctaagctccagtg

SEQ ID NO: 574923 - DNA, 25 bp, Homo sapien
cccactggtcggagttctacattaa

SEQ ID NO: 574924 - DNA, 25 bp, Homo sapien
aacgatatcgtggatgtgggtcccc

SEQ ID NO: 574925 - DNA, 25 bp, Homo sapien
gatgctcaggcgcacatcccagtca

SEQ ID NO: 574926 - DNA, 25 bp, Homo sapien
cagggatgctcaggcgcacatccca

SEQ ID NO: 574927 - DNA, 25 bp, Homo sapien
atcccagtcaccttgcagtacacag

SEQ ID NO: 574928 - DNA, 25 bp, Homo sapien
gcagtacacagtccctagcacactt

SEQ ID NO: 574929 - DNA, 25 bp, Homo sapien
catcgtggaccacttcctctttccc

SEQ ID NO: 574930 - DNA, 25 bp, Homo sapien
tcatcgtggaccacttcctctttcc

SEQ ID NO: 574931 - DNA, 25 bp, Homo sapien
taaccacctgttcctatttcctgac

SEQ ID NO: 574932 - DNA, 25 bp, Homo sapien
ggaagataccacttaccagtccatg

SEQ ID NO: 574933 - DNA, 25 bp, Homo sapien
ttctcacagaagcaaagctagggct

SEQ ID NO: 574934 - DNA, 25 bp, Homo sapien
gggtacctgctgataagaagttcct

SEQ ID NO: 574935 - DNA, 25 bp, Homo sapien
tagtgaaaagcctcctaggcaggct

SEQ ID NO: 574936 - DNA, 25 bp, Homo sapien
tgaccataagaaggctaaaccctgc

SEQ ID NO: 574937 - DNA, 25 bp, Homo sapien
tctgaagagcccaggagcagttttt

SEQ ID NO: 574938 - DNA, 25 bp, Homo sapien
tttcaggaggtcgtgtggctgcaca

SEQ ID NO: 574939 - DNA, 25 bp, Homo sapien
caaaaggcaggtggctaacaggttc

SEQ ID NO: 574940 - DNA, 25 bp, Homo sapien
catgacaataagctgttgccaggta

SEQ ID NO: 574941 - DNA, 25 bp, Homo sapien
atgacaataagctgttgccaggtag

SEQ ID NO: 574942 - DNA, 25 bp, Homo sapien
caaacagggtactggaagctgaagc

SEQ ID NO: 574943 - DNA, 25 bp, Homo sapien
gccctccaaacagggtactggaagc

SEQ ID NO: 574944 - DNA, 25 bp, Homo sapien
ctctttgcaaagagccctccaaaca

SEQ ID NO: 574945 - DNA, 25 bp, Homo sapien
tctttgcaaagagccctccaaacag

SEQ ID NO: 574946 - DNA, 25 bp, Homo sapien
ctgagctctaggctggacgtaggac

SEQ ID NO: 574947 - DNA, 25 bp, Homo sapien
gtaggacttctttccacgctcttgg

SEQ ID NO: 574948 - DNA, 25 bp, Homo sapien
cagctgaaagatgcgctgagctcta

SEQ ID NO: 574949 - DNA, 25 bp, Homo sapien
ggcagctgaaagatgcgctgagctc

SEQ ID NO: 574950 - DNA, 25 bp, Homo sapien
tcttcctgaggggtcgcactgagag

SEQ ID NO: 574951 - DNA, 25 bp, Homo sapien
actgagagttcctcgccggcagagg

SEQ ID NO: 574952 - DNA, 25 bp, Homo sapien
ctgaggggtcgcactgagagttcct

SEQ ID NO: 574953 - DNA, 25 bp, Homo sapien
cactgagagttcctcgccggcagag

SEQ ID NO: 574954 - DNA, 25 bp, Homo sapien
agtcaacaccgcattcctgggctag

SEQ ID NO: 574955 - DNA, 25 bp, Homo sapien
tgacgtcccacaacgcatgctaggg

SEQ ID NO: 574956 - DNA, 25 bp, Homo sapien
tagtgataaatacaggctcaggccc

SEQ ID NO: 574957 - DNA, 25 bp, Homo sapien
tggctaactacagactcaggagggc

SEQ ID NO: 574958 - DNA, 25 bp, Homo sapien
caggcggactatttacacacttcaa

SEQ ID NO: 574959 - DNA, 25 bp, Homo sapien
tttgtgtatcgtatcagagctgctg

SEQ ID NO: 574960 - DNA, 25 bp, Homo sapien
gctgctgatgtgaagaagcctttga

SEQ ID NO: 574961 - DNA, 25 bp, Homo sapien
tgactgtggccagattgcagaggcc

SEQ ID NO: 574962 - DNA, 25 bp, Homo sapien
gatattccttttgcgggagagggcc

SEQ ID NO: 574963 - DNA, 25 bp, Homo sapien
caacactttcaagctaactcgaatg

SEQ ID NO: 574964 - DNA, 25 bp, Homo sapien
ttcccctgcccatgtaacacaaggg

SEQ ID NO: 574965 - DNA, 25 bp, Homo sapien
tcccttccgggaacatgagctagaa

SEQ ID NO: 574966 - DNA, 25 bp, Homo sapien
gcttagacgggcttcgaaggacttc

SEQ ID NO: 574967 - DNA, 25 bp, Homo sapien
ccacagggccagatcagtcccaata

SEQ ID NO: 574968 - DNA, 25 bp, Homo sapien
caataacttggtgaacccttctttg

SEQ ID NO: 574969 - DNA, 25 bp, Homo sapien
taaatgtacttaccctgccagaagg

SEQ ID NO: 574970 - DNA, 25 bp, Homo sapien
tctcaaagtgtagatgggacgtatc

SEQ ID NO: 574971 - DNA, 25 bp, Homo sapien
gggagggtacccaagctctacgcat

SEQ ID NO: 574972 - DNA, 25 bp, Homo sapien
tcaactgccatccaagtgaagagag

SEQ ID NO: 574973 - DNA, 25 bp, Homo sapien
ttaaaagaccttcgggatgaatctc

SEQ ID NO: 574974 - DNA, 25 bp, Homo sapien
gaaacaggaggtgtgattgtaaact

SEQ ID NO: 574975 - DNA, 25 bp, Homo sapien
agttgtgtgcaagtggcaagaaaca

SEQ ID NO: 574976 - DNA, 25 bp, Homo sapien
gtggcaagaaacaggaggtgtgatt

SEQ ID NO: 574977 - DNA, 25 bp, Homo sapien
caagaaacaggaggtgtgattgtaa

SEQ ID NO: 574978 - DNA, 25 bp, Homo sapien
gaaacgcgccatctgctttacgtcc

SEQ ID NO: 574979 - DNA, 25 bp, Homo sapien
tgcaatgctgacctgccgatgtcct

SEQ ID NO: 574980 - DNA, 25 bp, Homo sapien
tacaactgatcattaggctggaatc

SEQ ID NO: 574981 - DNA, 25 bp, Homo sapien
tatcaactcaagaaccctgtacgct

SEQ ID NO: 574982 - DNA, 25 bp, Homo sapien
ttggccgccattacaaacaactgtg

SEQ ID NO: 574983 - DNA, 25 bp, Homo sapien
tctgagtgctggatgttaacaccca

SEQ ID NO: 574984 - DNA, 25 bp, Homo sapien
tggagaccgctgtgctagagaagac

SEQ ID NO: 574985 - DNA, 25 bp, Homo sapien
tgatagtcacaacttccgggcctgg

SEQ ID NO: 574986 - DNA, 25 bp, Homo sapien
aagggcagcattgatacagcagaag

SEQ ID NO: 574987 - DNA, 25 bp, Homo sapien
tgcaagatgaagataacaccgtcct

SEQ ID NO: 574988 - DNA, 25 bp, Homo sapien
gttaccccactgaggagccttatgg

SEQ ID NO: 574989 - DNA, 25 bp, Homo sapien
aaaaggccttggttaggaatcatgc

SEQ ID NO: 574990 - DNA, 25 bp, Homo sapien
tgagagccacagtactcagcccata

SEQ ID NO: 574991 - DNA, 25 bp, Homo sapien
ccaagaaagcgggacttagctcaca

SEQ ID NO: 574992 - DNA, 25 bp, Homo sapien
cagattgtgtcagccaagtcaggcc

SEQ ID NO: 574993 - DNA, 25 bp, Homo sapien
ctgatggtttgggactgctggaccc

SEQ ID NO: 574994 - DNA, 25 bp, Homo sapien
ctttaggagcaagaatgttgaggca

SEQ ID NO: 574995 - DNA, 25 bp, Homo sapien
tgagaccaaaaaggctcagaacttc

SEQ ID NO: 574996 - DNA, 25 bp, Homo sapien
cctggccacaatcggttttttaatg

SEQ ID NO: 574997 - DNA, 25 bp, Homo sapien
gaatagccctgcaaggtatatataa

SEQ ID NO: 574998 - DNA, 25 bp, Homo sapien
cagtgacaacatccttccatgacta

SEQ ID NO: 574999 - DNA, 25 bp, Homo sapien
tggcagtgacaacatccttccatga

SEQ ID NO: 575000 - DNA, 25 bp, Homo sapien
tccatgactatggtttctccctcat

SEQ ID NO: 575001 - DNA, 25 bp, Homo sapien
catccttccatgactatggtttctc

SEQ ID NO: 575002 - DNA, 25 bp, Homo sapien
ggtgatggtgaggagtcggggtcca

SEQ ID NO: 575003 - DNA, 25 bp, Homo sapien
acagacaggcagagacacatagtca

SEQ ID NO: 575004 - DNA, 25 bp, Homo sapien
cagacaggcagagacacatagtcat

SEQ ID NO: 575005 - DNA, 25 bp, Homo sapien
ggagtcggggtccacagacaggcag

SEQ ID NO: 575006 - DNA, 25 bp, Homo sapien
cagacaatctgtgcgggcacgagcc

SEQ ID NO: 575007 - DNA, 25 bp, Homo sapien
gcgggcacgagccttccgggaagac

SEQ ID NO: 575008 - DNA, 25 bp, Homo sapien
atctgtgcgggcacgagccttccgg

SEQ ID NO: 575009 - DNA, 25 bp, Homo sapien
acaatctgtgcgggcacgagccttc

SEQ ID NO: 575010 - DNA, 25 bp, Homo sapien
cggatgttgcctggctgagactcag

SEQ ID NO: 575011 - DNA, 25 bp, Homo sapien
tcagctccttcggatgttgcctggc

SEQ ID NO: 575012 - DNA, 25 bp, Homo sapien
tgaaggactcaagccgcactgaact

SEQ ID NO: 575013 - DNA, 25 bp, Homo sapien
tcctggagatctttgcagcagccct

SEQ ID NO: 575014 - DNA, 25 bp, Homo sapien
tatctaatatctgctaacatccttg

SEQ ID NO: 575015 - DNA, 25 bp, Homo sapien
cagctcccggatcttggaaaaaggc

SEQ ID NO: 575016 - DNA, 25 bp, Homo sapien
tggaaaaaggcatagccaaggccct

SEQ ID NO: 575017 - DNA, 25 bp, Homo sapien
ttttcagtggacaaggaagccaggg

SEQ ID NO: 575018 - DNA, 25 bp, Homo sapien
caagaccacatcaagaccacgcagg

SEQ ID NO: 575019 - DNA, 25 bp, Homo sapien
ggccagggatgagaattactaactt

SEQ ID NO: 575020 - DNA, 25 bp, Homo sapien
tggagtagactgtaggatcctggca

SEQ ID NO: 575021 - DNA, 25 bp, Homo sapien
gatgattcttatgtgtggccaggga

SEQ ID NO: 575022 - DNA, 25 bp, Homo sapien
ccgatggcacatggtctgctttacc

SEQ ID NO: 575023 - DNA, 25 bp, Homo sapien
cataatcgtgatttccaaagtgtgg

SEQ ID NO: 575024 - DNA, 25 bp, Homo sapien
cagaaattctgattcctgttcataa

SEQ ID NO: 575025 - DNA, 25 bp, Homo sapien
caaattctcaagctccatcctggag

SEQ ID NO: 575026 - DNA, 25 bp, Homo sapien
cagaaatcgttttcagccagagcta

SEQ ID NO: 575027 - DNA, 25 bp, Homo sapien
tgcacattcatgctcaaggaggagg

SEQ ID NO: 575028 - DNA, 25 bp, Homo sapien
gcttctccaaaggacaaggaagagg

SEQ ID NO: 575029 - DNA, 25 bp, Homo sapien
tcttcaactctaactcagtgcctag

SEQ ID NO: 575030 - DNA, 25 bp, Homo sapien
ttgggcagggctcggttccctttga

SEQ ID NO: 575031 - DNA, 25 bp, Homo sapien
catgcatattagtgctaccttttgg

SEQ ID NO: 575032 - DNA, 25 bp, Homo sapien
tacactgcaggatccattgactggg

SEQ ID NO: 575033 - DNA, 25 bp, Homo sapien
tcccgcagcagggtgattaatctgt

SEQ ID NO: 575034 - DNA, 25 bp, Homo sapien
tagctgttgtagatacaagcatggg

SEQ ID NO: 575035 - DNA, 25 bp, Homo sapien
taattagtcaaaggcatccgatttc

SEQ ID NO: 575036 - DNA, 25 bp, Homo sapien
aaaggcatccgatttcaatgaagcc

SEQ ID NO: 575037 - DNA, 25 bp, Homo sapien
tgggatgcatttggtgcataattag

SEQ ID NO: 575038 - DNA, 25 bp, Homo sapien
gcatttggtgcataattagtcaaag

SEQ ID NO: 575039 - DNA, 25 bp, Homo sapien
tctggaggtggctagtttccctcct

SEQ ID NO: 575040 - DNA, 25 bp, Homo sapien
gactattgggcatagtgcctcaaaa

SEQ ID NO: 575041 - DNA, 25 bp, Homo sapien
gccacatccactcaaagacacacaa

SEQ ID NO: 575042 - DNA, 25 bp, Homo sapien
aaggaaattcaggatgactattggg

SEQ ID NO: 575043 - DNA, 25 bp, Homo sapien
ctcttccccgtagatttccacagga

SEQ ID NO: 575044 - DNA, 25 bp, Homo sapien
gaaaatgggcttctgatggttctaa

SEQ ID NO: 575045 - DNA, 25 bp, Homo sapien
catttaatagactctgcagctcttc

SEQ ID NO: 575046 - DNA, 25 bp, Homo sapien
tcttctctatctcttccccgtagat

SEQ ID NO: 575047 - DNA, 25 bp, Homo sapien
ggtgtgtacccatcggcagcttgga

SEQ ID NO: 575048 - DNA, 25 bp, Homo sapien
cattgaatcttcagagcgagggcag

SEQ ID NO: 575049 - DNA, 25 bp, Homo sapien
catctgtgaagcaaggcaggcgctg

SEQ ID NO: 575050 - DNA, 25 bp, Homo sapien
gatacactgatcacgtaacgcctgg

SEQ ID NO: 575051 - DNA, 25 bp, Homo sapien
gaggttaccattccacgctggtagg

SEQ ID NO: 575052 - DNA, 25 bp, Homo sapien
tttagagcagtccagacagcatccc

SEQ ID NO: 575053 - DNA, 25 bp, Homo sapien
tcagacaatacatttgaggaagcca

SEQ ID NO: 575054 - DNA, 25 bp, Homo sapien
tagagcagccccgagtgtatgtctc

SEQ ID NO: 575055 - DNA, 25 bp, Homo sapien
tccaggcaacaaccctacgacatat

SEQ ID NO: 575056 - DNA, 25 bp, Homo sapien
cagcaagttctagtgccctgcacac

SEQ ID NO: 575057 - DNA, 25 bp, Homo sapien
cagacacgctagtaggtgctttacc

SEQ ID NO: 575058 - DNA, 25 bp, Homo sapien
tattacaaaggagctaggactcagc

SEQ ID NO: 575059 - DNA, 25 bp, Homo sapien
tgcagcctggagttttaggttcccc

SEQ ID NO: 575060 - DNA, 25 bp, Homo sapien
ggtgaagattccttgtgctcctgca

SEQ ID NO: 575061 - DNA, 25 bp, Homo sapien
gaacagagtgactatcacgtcccca

SEQ ID NO: 575062 - DNA, 25 bp, Homo sapien
gacctgtcttttggatctgcaaggc

SEQ ID NO: 575063 - DNA, 25 bp, Homo sapien
gagtaccttcaatatgcctgttggg

SEQ ID NO: 575064 - DNA, 25 bp, Homo sapien
tatgagttgggctcttttagattcc

SEQ ID NO: 575065 - DNA, 25 bp, Homo sapien
tggcaacacatgttctactctctgc

SEQ ID NO: 575066 - DNA, 25 bp, Homo sapien
tctgccagctaacactcaggttgtt

SEQ ID NO: 575067 - DNA, 25 bp, Homo sapien
taagaaacctcggaaactcatgcag

SEQ ID NO: 575068 - DNA, 25 bp, Homo sapien
agttccccggctgactaggatccag

SEQ ID NO: 575069 - DNA, 25 bp, Homo sapien
gactgctccctgctgaaaatgctag

SEQ ID NO: 575070 - DNA, 25 bp, Homo sapien
tactagggtgttaccagactgctcc

SEQ ID NO: 575071 - DNA, 25 bp, Homo sapien
tgtaataatactacttatctgatgg

SEQ ID NO: 575072 - DNA, 25 bp, Homo sapien
gtaataatactacttatctgatggg

SEQ ID NO: 575073 - DNA, 25 bp, Homo sapien
aagggaatagaatgtaggccctgga

SEQ ID NO: 575074 - DNA, 25 bp, Homo sapien
gaactgaagggaatagaatgtaggc

SEQ ID NO: 575075 - DNA, 25 bp, Homo sapien
tgaagggaatagaatgtaggccctg

SEQ ID NO: 575076 - DNA, 25 bp, Homo sapien
gaatagaatgtaggccctggagtca

SEQ ID NO: 575077 - DNA, 25 bp, Homo sapien
tccaaatgagtcgacaatgccaagc

SEQ ID NO: 575078 - DNA, 25 bp, Homo sapien
tgttggtgatacacatcaagaagtc

SEQ ID NO: 575079 - DNA, 25 bp, Homo sapien
tctcatgcccagagaactggtgccc

SEQ ID NO: 575080 - DNA, 25 bp, Homo sapien
tgtgagtcgaaagcccttgcaggtt

SEQ ID NO: 575081 - DNA, 25 bp, Homo sapien
tctgctgaacgtaggggctgtcttc

SEQ ID NO: 575082 - DNA, 25 bp, Homo sapien
gaagaagagatgctacacggatgac

SEQ ID NO: 575083 - DNA, 25 bp, Homo sapien
ggatgaccaggattagactctagaa

SEQ ID NO: 575084 - DNA, 25 bp, Homo sapien
aaggcactttatgctgttgcagaca

SEQ ID NO: 575085 - DNA, 25 bp, Homo sapien
ggattccgggcagagaggaaagcct

SEQ ID NO: 575086 - DNA, 25 bp, Homo sapien
tggattccgggcagagaggaaagcc

SEQ ID NO: 575087 - DNA, 25 bp, Homo sapien
tgcaggccttagagaatacagggct

SEQ ID NO: 575088 - DNA, 25 bp, Homo sapien
tgtaaacagttaattgcaggcttgc

SEQ ID NO: 575089 - DNA, 25 bp, Homo sapien
tgtcagaagtatgcagcccagaacc

SEQ ID NO: 575090 - DNA, 25 bp, Homo sapien
gaaagtgaaaatcaagggtccctgc

SEQ ID NO: 575091 - DNA, 25 bp, Homo sapien
cagcagtcagccggtagtgtccgca

SEQ ID NO: 575092 - DNA, 25 bp, Homo sapien
agcagtcagccggtagtgtccgcat

SEQ ID NO: 575093 - DNA, 25 bp, Homo sapien
ctccgagtgcaagcgcgggacccag

SEQ ID NO: 575094 - DNA, 25 bp, Homo sapien
cagctccgagtgcaagcgcgggacc

SEQ ID NO: 575095 - DNA, 25 bp, Homo sapien
ggcagctccgagtgcaagcgcggga

SEQ ID NO: 575096 - DNA, 25 bp, Homo sapien
agctccgagtgcaagcgcgggaccc

SEQ ID NO: 575097 - DNA, 25 bp, Homo sapien
cagtgatttcacctcagcaggtcca

SEQ ID NO: 575098 - DNA, 25 bp, Homo sapien
tcagcaggtccagtcatgccgattt

SEQ ID NO: 575099 - DNA, 25 bp, Homo sapien
cagcaggtccagtcatgccgatttt

SEQ ID NO: 575100 - DNA, 25 bp, Homo sapien
caggtccagtcatgccgatttttcc

SEQ ID NO: 575101 - DNA, 25 bp, Homo sapien
gtctgaagagtgataattcactaat

SEQ ID NO: 575102 - DNA, 25 bp, Homo sapien
taattcactaatgttcacttttggg

SEQ ID NO: 575103 - DNA, 25 bp, Homo sapien
cactaatgttcacttttggggttct

SEQ ID NO: 575104 - DNA, 25 bp, Homo sapien
ctgaagagtgataattcactaatgt

SEQ ID NO: 575105 - DNA, 25 bp, Homo sapien
caagccccatggcattgacctacgt

SEQ ID NO: 575106 - DNA, 25 bp, Homo sapien
catggcattgacctacgtaggcaaa

SEQ ID NO: 575107 - DNA, 25 bp, Homo sapien
cattgacctacgtaggcaaattcct

SEQ ID NO: 575108 - DNA, 25 bp, Homo sapien
gccccatggcattgacctacgtagg

SEQ ID NO: 575109 - DNA, 25 bp, Homo sapien
taggacagagtcaaacacggctctt

SEQ ID NO: 575110 - DNA, 25 bp, Homo sapien
gactcactggtggttgaaatctcag

SEQ ID NO: 575111 - DNA, 25 bp, Homo sapien
taggaatcatgtacctgggccccaa

SEQ ID NO: 575112 - DNA, 25 bp, Homo sapien
taagccctcatctcatggtgaacag

SEQ ID NO: 575113 - DNA, 25 bp, Homo sapien
atctcatggggttcttagacatcag

SEQ ID NO: 575114 - DNA, 25 bp, Homo sapien
ggttcttagacatcagatagtttaa

SEQ ID NO: 575115 - DNA, 25 bp, Homo sapien
tctcatggggttcttagacatcaga

SEQ ID NO: 575116 - DNA, 25 bp, Homo sapien
atggggttcttagacatcagatagt

SEQ ID NO: 575117 - DNA, 25 bp, Homo sapien
gggtagctccactctctagtaccta

SEQ ID NO: 575118 - DNA, 25 bp, Homo sapien
tggttcaatcctaaaccctggccca

SEQ ID NO: 575119 - DNA, 25 bp, Homo sapien
tgtgggctcaagagggatgtcactt

SEQ ID NO: 575120 - DNA, 25 bp, Homo sapien
gagagaggattactcaccttgagaa

SEQ ID NO: 575121 - DNA, 25 bp, Homo sapien
accaccgtcccagtgctgctctcgt

SEQ ID NO: 575122 - DNA, 25 bp, Homo sapien
accgtcccagtgctgctctcgtctg

SEQ ID NO: 575123 - DNA, 25 bp, Homo sapien
gtcccagtgctgctctcgtctggga

SEQ ID NO: 575124 - DNA, 25 bp, Homo sapien
ctaccaccgtcccagtgctgctctc

SEQ ID NO: 575125 - DNA, 25 bp, Homo sapien
gggcagtggaagatctagcgggatg

SEQ ID NO: 575126 - DNA, 25 bp, Homo sapien
ccgggcagtggaagatctagcggga

SEQ ID NO: 575127 - DNA, 25 bp, Homo sapien
ctcccgggcagtggaagatctagcg

SEQ ID NO: 575128 - DNA, 25 bp, Homo sapien
agctcccgggcagtggaagatctag

SEQ ID NO: 575129 - DNA, 25 bp, Homo sapien
atgccccagcgtccattccaagtga

SEQ ID NO: 575130 - DNA, 25 bp, Homo sapien
tgtaattttgggcactttacctaca

SEQ ID NO: 575131 - DNA, 25 bp, Homo sapien
aattggtttcaattcaccattggtc

SEQ ID NO: 575132 - DNA, 25 bp, Homo sapien
ggttaaataactctcgcacagtccc

SEQ ID NO: 575133 - DNA, 25 bp, Homo sapien
cacacctgttcagtgaagttcagaa

SEQ ID NO: 575134 - DNA, 25 bp, Homo sapien
ttgtattttatagcaccagctgctt

SEQ ID NO: 575135 - DNA, 25 bp, Homo sapien
cttttttggtgacatctttgtcaag

SEQ ID NO: 575136 - DNA, 25 bp, Homo sapien
cattctcttatgctattatgtttcc

SEQ ID NO: 575137 - DNA, 25 bp, Homo sapien
tcttagcataccactatgaatagca

SEQ ID NO: 575138 - DNA, 25 bp, Homo sapien
gcttccaggacatcatcactaaatg

SEQ ID NO: 575139 - DNA, 25 bp, Homo sapien
tgctgttagtttgagatacattctt

SEQ ID NO: 575140 - DNA, 25 bp, Homo sapien
tcatattagctgtcattctattcct

SEQ ID NO: 575141 - DNA, 25 bp, Homo sapien
tgtatttaaaatggatattgagttt

SEQ ID NO: 575142 - DNA, 25 bp, Homo sapien
tgttgcagctgggtgcatgtggtgt

SEQ ID NO: 575143 - DNA, 25 bp, Homo sapien
tagccgctgtaaggctaggctggtc

SEQ ID NO: 575144 - DNA, 25 bp, Homo sapien
ctgtgatagccgctgtaaggctagg

SEQ ID NO: 575145 - DNA, 25 bp, Homo sapien
tgtgagtaggtcaggggtgcagcgc

SEQ ID NO: 575146 - DNA, 25 bp, Homo sapien
agctgacttgaccatcacgtgggtg

SEQ ID NO: 575147 - DNA, 25 bp, Homo sapien
ttaagctgacttgaccatcacgtgg

SEQ ID NO: 575148 - DNA, 25 bp, Homo sapien
taagctgacttgaccatcacgtggg

SEQ ID NO: 575149 - DNA, 25 bp, Homo sapien
ctgacttgaccatcacgtgggtggg

SEQ ID NO: 575150 - DNA, 25 bp, Homo sapien
ctatatttgaatcctaataccattg

SEQ ID NO: 575151 - DNA, 25 bp, Homo sapien
aataccattgtccaggtactgcttt

SEQ ID NO: 575152 - DNA, 25 bp, Homo sapien
aatcctaataccattgtccaggtac

SEQ ID NO: 575153 - DNA, 25 bp, Homo sapien
atatttgaatcctaataccattgtc

SEQ ID NO: 575154 - DNA, 25 bp, Homo sapien
gacctctcctatcagcaagaacagg

SEQ ID NO: 575155 - DNA, 25 bp, Homo sapien
gcaccggtgatcaacacatctcgga

SEQ ID NO: 575156 - DNA, 25 bp, Homo sapien
tggcatgcttgccaagtgcaccggt

SEQ ID NO: 575157 - DNA, 25 bp, Homo sapien
tagctctgtctacgctggtcattga

SEQ ID NO: 575158 - DNA, 25 bp, Homo sapien
gattagtattattgcaacattgggc

SEQ ID NO: 575159 - DNA, 25 bp, Homo sapien
gttatgactggtgccctggaaatgt

SEQ ID NO: 575160 - DNA, 25 bp, Homo sapien
taggcttcttacttgatgttatgac

SEQ ID NO: 575161 - DNA, 25 bp, Homo sapien
tgtcacggaggatggcaataggctt

SEQ ID NO: 575162 - DNA, 25 bp, Homo sapien
gagtgatggagcctggtagtcttac

SEQ ID NO: 575163 - DNA, 25 bp, Homo sapien
acccaacacatacacgggcggagca

SEQ ID NO: 575164 - DNA, 25 bp, Homo sapien
caggtactgggcctctcatgctgca

SEQ ID NO: 575165 - DNA, 25 bp, Homo sapien
gacatcatgatggtgagatttgcgc

SEQ ID NO: 575166 - DNA, 25 bp, Homo sapien
cagcaaagcctgaaacctgggctcc

SEQ ID NO: 575167 - DNA, 25 bp, Homo sapien
agcaaagcctgaaacctgggctcct

SEQ ID NO: 575168 - DNA, 25 bp, Homo sapien
ctcagcaaagcctgaaacctgggct

SEQ ID NO: 575169 - DNA, 25 bp, Homo sapien
tcagcaaagcctgaaacctgggctc

SEQ ID NO: 575170 - DNA, 25 bp, Homo sapien
taactgaatgagaacgttctgctac

SEQ ID NO: 575171 - DNA, 25 bp, Homo sapien
tttaactgaatgagaacgttctgct

SEQ ID NO: 575172 - DNA, 25 bp, Homo sapien
ttttaactgaatgagaacgttctgc

SEQ ID NO: 575173 - DNA, 25 bp, Homo sapien
tttttaactgaatgagaacgttctg

SEQ ID NO: 575174 - DNA, 25 bp, Homo sapien
cacaatggaattgggagagggaggc

SEQ ID NO: 575175 - DNA, 25 bp, Homo sapien
actctcagcatagcccaagcactca

SEQ ID NO: 575176 - DNA, 25 bp, Homo sapien
cagactttgccacttcacaatggaa

SEQ ID NO: 575177 - DNA, 25 bp, Homo sapien
tctgcactgtcgatgctctgggccc

SEQ ID NO: 575178 - DNA, 25 bp, Homo sapien
agggcaccagcaatgcgaagaacgt

SEQ ID NO: 575179 - DNA, 25 bp, Homo sapien
caccagcaatgcgaagaacgtcacc

SEQ ID NO: 575180 - DNA, 25 bp, Homo sapien
ctttcttgtaagtaagtgactttca

SEQ ID NO: 575181 - DNA, 25 bp, Homo sapien
cagcaatgcgaagaacgtcaccctc

SEQ ID NO: 575182 - DNA, 25 bp, Homo sapien
ggttgctgtggaaggggactgtcgc

SEQ ID NO: 575183 - DNA, 25 bp, Homo sapien
ctcctctggcatgggttgctgtgga

SEQ ID NO: 575184 - DNA, 25 bp, Homo sapien
tcctctggcatgggttgctgtggaa

SEQ ID NO: 575185 - DNA, 25 bp, Homo sapien
gttgctgtggaaggggactgtcgct

SEQ ID NO: 575186 - DNA, 25 bp, Homo sapien
gtcaaacgcgtggaacaggaacctc

SEQ ID NO: 575187 - DNA, 25 bp, Homo sapien
tcaaacgcgtggaacaggaacctca

SEQ ID NO: 575188 - DNA, 25 bp, Homo sapien
caaacgcgtggaacaggaacctcat

SEQ ID NO: 575189 - DNA, 25 bp, Homo sapien
atggtgcagagtcatcagcacacac

SEQ ID NO: 575190 - DNA, 25 bp, Homo sapien
atatggtgcagagtcatcagcacac

SEQ ID NO: 575191 - DNA, 25 bp, Homo sapien
tatggtgcagagtcatcagcacaca

SEQ ID NO: 575192 - DNA, 25 bp, Homo sapien
catatggtgcagagtcatcagcaca

SEQ ID NO: 575193 - DNA, 25 bp, Homo sapien
aatgccatcaaggtcgatgtcccag

SEQ ID NO: 575194 - DNA, 25 bp, Homo sapien
gccatcaaggtcgatgtcccagcca

SEQ ID NO: 575195 - DNA, 25 bp, Homo sapien
tgaatgccatcaaggtcgatgtccc

SEQ ID NO: 575196 - DNA, 25 bp, Homo sapien
atcaaggtcgatgtcccagccacgg

SEQ ID NO: 575197 - DNA, 25 bp, Homo sapien
ccacaaatacttcctgagagttgca

SEQ ID NO: 575198 - DNA, 25 bp, Homo sapien
gcattgccctctcagcgcatcgatg

SEQ ID NO: 575199 - DNA, 25 bp, Homo sapien
catgtattcatccagcacgccacaa

SEQ ID NO: 575200 - DNA, 25 bp, Homo sapien
gcactttgctccacttgccgcattg

SEQ ID NO: 575201 - DNA, 25 bp, Homo sapien
tgctgaacactgtgtggctacatcc

SEQ ID NO: 575202 - DNA, 25 bp, Homo sapien
ctgtgctgaacactgtgtggctaca

SEQ ID NO: 575203 - DNA, 25 bp, Homo sapien
gctgaacactgtgtggctacatcca

SEQ ID NO: 575204 - DNA, 25 bp, Homo sapien
tgtgctgaacactgtgtggctacat

SEQ ID NO: 575205 - DNA, 25 bp, Homo sapien
caggttctgcataagatttgaaaag

SEQ ID NO: 575206 - DNA, 25 bp, Homo sapien
ccaaagcggtagctaacttccaaag

SEQ ID NO: 575207 - DNA, 25 bp, Homo sapien
cttggaactttgaataccacttcca

SEQ ID NO: 575208 - DNA, 25 bp, Homo sapien
taacttccaaagtccctccaagatg

SEQ ID NO: 575209 - DNA, 25 bp, Homo sapien
ctgattgtttaagggtctgagatag

SEQ ID NO: 575210 - DNA, 25 bp, Homo sapien
gcctgattgtttaagggtctgagat

SEQ ID NO: 575211 - DNA, 25 bp, Homo sapien
cctgattgtttaagggtctgagata

SEQ ID NO: 575212 - DNA, 25 bp, Homo sapien
gattgtttaagggtctgagatagaa

SEQ ID NO: 575213 - DNA, 25 bp, Homo sapien
ggagaaacgcagttcactggtacca

SEQ ID NO: 575214 - DNA, 25 bp, Homo sapien
agttcactggtaccacttatcccca

SEQ ID NO: 575215 - DNA, 25 bp, Homo sapien
actggtaccacttatccccagagac

SEQ ID NO: 575216 - DNA, 25 bp, Homo sapien
gggtactggagaaacgcagttcact

SEQ ID NO: 575217 - DNA, 25 bp, Homo sapien
gctggctatggatggacttcccaaa

SEQ ID NO: 575218 - DNA, 25 bp, Homo sapien
ttaggacatggcatggcattccgga

SEQ ID NO: 575219 - DNA, 25 bp, Homo sapien
gaatcttcaagctgaatctcgaagg

SEQ ID NO: 575220 - DNA, 25 bp, Homo sapien
tctcgaaggatgaagagttgtccag

SEQ ID NO: 575221 - DNA, 25 bp, Homo sapien
tccacattgcattcgggcataggcc

SEQ ID NO: 575222 - DNA, 25 bp, Homo sapien
ccatccacattgcattcgggcatag

SEQ ID NO: 575223 - DNA, 25 bp, Homo sapien
attgcattcgggcataggccctcca

SEQ ID NO: 575224 - DNA, 25 bp, Homo sapien
cattcgggcataggccctccagagt

SEQ ID NO: 575225 - DNA, 25 bp, Homo sapien
tgtccaaagacgtcgaacatttcag

SEQ ID NO: 575226 - DNA, 25 bp, Homo sapien
aaagacgtcgaacatttcagcagag

SEQ ID NO: 575227 - DNA, 25 bp, Homo sapien
agacgtcgaacatttcagcagagaa

SEQ ID NO: 575228 - DNA, 25 bp, Homo sapien
cttctgtccaaagacgtcgaacatt

SEQ ID NO: 575229 - DNA, 25 bp, Homo sapien
tgagaaagagatattccactcgttc

SEQ ID NO: 575230 - DNA, 25 bp, Homo sapien
gagtccataggcgattacttttaaa

SEQ ID NO: 575231 - DNA, 25 bp, Homo sapien
tataaaatctagtaggttccagccg

SEQ ID NO: 575232 - DNA, 25 bp, Homo sapien
cgcttccaccgtaaaaattatgaga

SEQ ID NO: 575233 - DNA, 25 bp, Homo sapien
cttggattcaacctgcgaggcggga

SEQ ID NO: 575234 - DNA, 25 bp, Homo sapien
tgaagcccagcatagttaggaccaa

SEQ ID NO: 575235 - DNA, 25 bp, Homo sapien
catctgcgagcctaaatctttgtgg

SEQ ID NO: 575236 - DNA, 25 bp, Homo sapien
gagtgcacactagggtggaaccacg

SEQ ID NO: 575237 - DNA, 25 bp, Homo sapien
ctgtcatcttcgcctttcatagttc

SEQ ID NO: 575238 - DNA, 25 bp, Homo sapien
tgtcatcttcgcctttcatagttcc

SEQ ID NO: 575239 - DNA, 25 bp, Homo sapien
gtcatcttcgcctttcatagttccc

SEQ ID NO: 575240 - DNA, 25 bp, Homo sapien
catcttcgcctttcatagttccctg

SEQ ID NO: 575241 - DNA, 25 bp, Homo sapien
ttcacatcaaatccggcccctttcc

SEQ ID NO: 575242 - DNA, 25 bp, Homo sapien
tttccctccgagagcgtttgcccca

SEQ ID NO: 575243 - DNA, 25 bp, Homo sapien
acgcggaaggccctcagcgccttca

SEQ ID NO: 575244 - DNA, 25 bp, Homo sapien
ttgggactccggacaccagccgcag

SEQ ID NO: 575245 - DNA, 25 bp, Homo sapien
ggcttagtctttggtgtaatacgca

SEQ ID NO: 575246 - DNA, 25 bp, Homo sapien
ctatggttcatctggctgtataacg

SEQ ID NO: 575247 - DNA, 25 bp, Homo sapien
gtaatacgcatgctccacagcacgg

SEQ ID NO: 575248 - DNA, 25 bp, Homo sapien
tataacgttgattcctccatatggc

SEQ ID NO: 575249 - DNA, 25 bp, Homo sapien
gtcgcagcagggtcgggactctgag

SEQ ID NO: 575250 - DNA, 25 bp, Homo sapien
gcaacagagaagtcgcagcagggtc

SEQ ID NO: 575251 - DNA, 25 bp, Homo sapien
tggcagggcaacagagaagtcgcag

SEQ ID NO: 575252 - DNA, 25 bp, Homo sapien
cagggtcgggactctgagtgggcct

SEQ ID NO: 575253 - DNA, 25 bp, Homo sapien
ctttgtagattgagaaaccgaggca

SEQ ID NO: 575254 - DNA, 25 bp, Homo sapien
tagattgagaaaccgaggcaaagca

SEQ ID NO: 575255 - DNA, 25 bp, Homo sapien
tctttgtagattgagaaaccgaggc

SEQ ID NO: 575256 - DNA, 25 bp, Homo sapien
tgtagattgagaaaccgaggcaaag

SEQ ID NO: 575257 - DNA, 25 bp, Homo sapien
gctgcacaggtagaatctcctcctt

SEQ ID NO: 575258 - DNA, 25 bp, Homo sapien
ggctgcacaggtagaatctcctcct

SEQ ID NO: 575259 - DNA, 25 bp, Homo sapien
cttatccatggcacccccatcactc

SEQ ID NO: 575260 - DNA, 25 bp, Homo sapien
ctccttatccatggcacccccatca

SEQ ID NO: 575261 - DNA, 25 bp, Homo sapien
aaagagatggtacaggttaatcagt

SEQ ID NO: 575262 - DNA, 25 bp, Homo sapien
tcagatagcagctggtttagggttg

SEQ ID NO: 575263 - DNA, 25 bp, Homo sapien
gatagcagctggtttagggttgaca

SEQ ID NO: 575264 - DNA, 25 bp, Homo sapien
aagagatggtacaggttaatcagtg

SEQ ID NO: 575265 - DNA, 25 bp, Homo sapien
taactgtcaaattgtgtaatacccc

SEQ ID NO: 575266 - DNA, 25 bp, Homo sapien
gaactgccagccctgttgtttagat

SEQ ID NO: 575267 - DNA, 25 bp, Homo sapien
gctcatgtggactcaagacggccct

SEQ ID NO: 575268 - DNA, 25 bp, Homo sapien
agagccacacgccaaggactgatgg

SEQ ID NO: 575269 - DNA, 25 bp, Homo sapien
tatgccctcctggttgtagcaggtc

SEQ ID NO: 575270 - DNA, 25 bp, Homo sapien
ctatgccctcctggttgtagcaggt

SEQ ID NO: 575271 - DNA, 25 bp, Homo sapien
ctgctatgccctcctggttgtagca

SEQ ID NO: 575272 - DNA, 25 bp, Homo sapien
gctatgccctcctggttgtagcagg

SEQ ID NO: 575273 - DNA, 25 bp, Homo sapien
ggaataggggctctggggcatctgc

SEQ ID NO: 575274 - DNA, 25 bp, Homo sapien
acagacctctgattgcacagcaggg

SEQ ID NO: 575275 - DNA, 25 bp, Homo sapien
ggccgccatctttggctcgatggct

SEQ ID NO: 575276 - DNA, 25 bp, Homo sapien
ccattttgttagtgagggcctcacc

SEQ ID NO: 575277 - DNA, 25 bp, Homo sapien
gctgaattctaccatttcgctctcc

SEQ ID NO: 575278 - DNA, 25 bp, Homo sapien
gctttctcgttaggatgatggaaat

SEQ ID NO: 575279 - DNA, 25 bp, Homo sapien
tctcgttaggatgatggaaattgcc

SEQ ID NO: 575280 - DNA, 25 bp, Homo sapien
actgctttctcgttaggatgatgga

SEQ ID NO: 575281 - DNA, 25 bp, Homo sapien
ttggactgctttctcgttaggatga

SEQ ID NO: 575282 - DNA, 25 bp, Homo sapien
tatttggtcttctactccacggctg

SEQ ID NO: 575283 - DNA, 25 bp, Homo sapien
tgtctgggttctcgcgtattttccc

SEQ ID NO: 575284 - DNA, 25 bp, Homo sapien
ttctcgcgtattttccctccttgtc

SEQ ID NO: 575285 - DNA, 25 bp, Homo sapien
aagcctgcaagtatttggtcttcta

SEQ ID NO: 575286 - DNA, 25 bp, Homo sapien
aaggctgccaaagggaattctgagt

SEQ ID NO: 575287 - DNA, 25 bp, Homo sapien
catctgacagcattccctgcactct

SEQ ID NO: 575288 - DNA, 25 bp, Homo sapien
attgggaccactcatctgacagcat

SEQ ID NO: 575289 - DNA, 25 bp, Homo sapien
ctgccaaagggaattctgagtgtcc

SEQ ID NO: 575290 - DNA, 25 bp, Homo sapien
tgccagggacgcaagtcactttaca

SEQ ID NO: 575291 - DNA, 25 bp, Homo sapien
tattagaggatacattgccagggac

SEQ ID NO: 575292 - DNA, 25 bp, Homo sapien
aatttcacgtgctgggaatagctcc

SEQ ID NO: 575293 - DNA, 25 bp, Homo sapien
tacagcctgtgagtacacgctactg

SEQ ID NO: 575294 - DNA, 25 bp, Homo sapien
ttagtaattgatttctattgcccat

SEQ ID NO: 575295 - DNA, 25 bp, Homo sapien
cttagtaattgatttctattgccca

SEQ ID NO: 575296 - DNA, 25 bp, Homo sapien
tgatgggatgggcaaagcaaccatg

SEQ ID NO: 575297 - DNA, 25 bp, Homo sapien
caggtccccagatgtgaattaagca

SEQ ID NO: 575298 - DNA, 25 bp, Homo sapien
ggctttccatttaggctgctgttaa

SEQ ID NO: 575299 - DNA, 25 bp, Homo sapien
cagcgcaagacatgtttaaatcagg

SEQ ID NO: 575300 - DNA, 25 bp, Homo sapien
tggtgatgccgtgcttgggaccatc

SEQ ID NO: 575301 - DNA, 25 bp, Homo sapien
gaagggtcatcttctgctggaacat

SEQ ID NO: 575302 - DNA, 25 bp, Homo sapien
cactggaacaccgtgagcatggcga

SEQ ID NO: 575303 - DNA, 25 bp, Homo sapien
gcttgcacaccgtgccgttctggca

SEQ ID NO: 575304 - DNA, 25 bp, Homo sapien
aaataggcatcacatgaccagcagc

SEQ ID NO: 575305 - DNA, 25 bp, Homo sapien
gaatacataattctgccttctagct

SEQ ID NO: 575306 - DNA, 25 bp, Homo sapien
aagatcaggacttcttctcttctgc

SEQ ID NO: 575307 - DNA, 25 bp, Homo sapien
gagttgaacggaacccttgtgccag

SEQ ID NO: 575308 - DNA, 25 bp, Homo sapien
cacggtgctttacactgtcactggg

SEQ ID NO: 575309 - DNA, 25 bp, Homo sapien
tgaaagccacggtgctttacactgt

SEQ ID NO: 575310 - DNA, 25 bp, Homo sapien
taaatctgtgaaagccacggtgctt

SEQ ID NO: 575311 - DNA, 25 bp, Homo sapien
tctgtgaaagccacggtgctttaca

SEQ ID NO: 575312 - DNA, 25 bp, Homo sapien
gctgaatcgtttcagcaaatgtcga

SEQ ID NO: 575313 - DNA, 25 bp, Homo sapien
ctttcctgtaaggttcttggcacag

SEQ ID NO: 575314 - DNA, 25 bp, Homo sapien
ctgtaaggttcttggcacaggcact

SEQ ID NO: 575315 - DNA, 25 bp, Homo sapien
gtggatccaaaaaggctgaatcgtt

SEQ ID NO: 575316 - DNA, 25 bp, Homo sapien
gccattaagccgtgttcctcaggtc

SEQ ID NO: 575317 - DNA, 25 bp, Homo sapien
gataggtcttctagagccattaagc

SEQ ID NO: 575318 - DNA, 25 bp, Homo sapien
tcctaaggaaagtcagctcattgtc

SEQ ID NO: 575319 - DNA, 25 bp, Homo sapien
tcaaagacctttcggcaaccagcat

SEQ ID NO: 575320 - DNA, 25 bp, Homo sapien
ccaaaggagcttgccccgtgtgcgt

SEQ ID NO: 575321 - DNA, 25 bp, Homo sapien
tctgttctgttcgaccccaaaggag

SEQ ID NO: 575322 - DNA, 25 bp, Homo sapien
tgacctactccaaacaactggtctg

SEQ ID NO: 575323 - DNA, 25 bp, Homo sapien
tgcagaaccccatggtactgaccta

SEQ ID NO: 575324 - DNA, 25 bp, Homo sapien
aactcatagcccatagcgtcctgca

SEQ ID NO: 575325 - DNA, 25 bp, Homo sapien
tacacccagggtaactcatagccca

SEQ ID NO: 575326 - DNA, 25 bp, Homo sapien
cagatttagaacgaaaaaggatcca

SEQ ID NO: 575327 - DNA, 25 bp, Homo sapien
ggatccaaagatgaccagactgaca

SEQ ID NO: 575328 - DNA, 25 bp, Homo sapien
cacaccgagaaccaagttaagtaca

SEQ ID NO: 575329 - DNA, 25 bp, Homo sapien
gaccctatgatgattagtgtaacaa

SEQ ID NO: 575330 - DNA, 25 bp, Homo sapien
ccgctaagcacaccgagaaccaagt

SEQ ID NO: 575331 - DNA, 25 bp, Homo sapien
aaaatgaccctatgatgattagtgt

SEQ ID NO: 575332 - DNA, 25 bp, Homo sapien
gcttctgagtctactgtcatgtggg

SEQ ID NO: 575333 - DNA, 25 bp, Homo sapien
tctgcttctgagtctactgtcatgt

SEQ ID NO: 575334 - DNA, 25 bp, Homo sapien
taagagggcaaagggctctgcttct

SEQ ID NO: 575335 - DNA, 25 bp, Homo sapien
cataagagggcaaagggctctgctt

SEQ ID NO: 575336 - DNA, 25 bp, Homo sapien
tctcaggatcgatgtcttcggcctg

SEQ ID NO: 575337 - DNA, 25 bp, Homo sapien
tccaggtagcctttgagatcctctt

SEQ ID NO: 575338 - DNA, 25 bp, Homo sapien
gtcttcggcctgagtgatccaatcc

SEQ ID NO: 575339 - DNA, 25 bp, Homo sapien
ggtagcctttgagatcctcttctag

SEQ ID NO: 575340 - DNA, 25 bp, Homo sapien
gaacccagcccaaacacagaagaag

SEQ ID NO: 575341 - DNA, 25 bp, Homo sapien
aaacacagaagaagacggctgctca

SEQ ID NO: 575342 - DNA, 25 bp, Homo sapien
agaacccagcccaaacacagaagaa

SEQ ID NO: 575343 - DNA, 25 bp, Homo sapien
tgccatcagtgagataactgctgct

SEQ ID NO: 575344 - DNA, 25 bp, Homo sapien
gctatgatttcccacatgtgaccga

SEQ ID NO: 575345 - DNA, 25 bp, Homo sapien
catgaggttttctagatcgacagct

SEQ ID NO: 575346 - DNA, 25 bp, Homo sapien
gcttctaagaaagggtggcggtcaa

SEQ ID NO: 575347 - DNA, 25 bp, Homo sapien
ccgtgaacatctttggctatcttcg

SEQ ID NO: 575348 - DNA, 25 bp, Homo sapien
gaacatctttggctatcttcgtcct

SEQ ID NO: 575349 - DNA, 25 bp, Homo sapien
tggctatcttcgtcctttcttcctg

SEQ ID NO: 575350 - DNA, 25 bp, Homo sapien
gctcccgtgaacatctttggctatc

SEQ ID NO: 575351 - DNA, 25 bp, Homo sapien
gaactgcaagctttagagagccagg

SEQ ID NO: 575352 - DNA, 25 bp, Homo sapien
gatgactgcaaaagtggctcccgag

SEQ ID NO: 575353 - DNA, 25 bp, Homo sapien
tattagatttaacgtcggagctgga

SEQ ID NO: 575354 - DNA, 25 bp, Homo sapien
cacgtggctctgctagctggtgatg

SEQ ID NO: 575355 - DNA, 25 bp, Homo sapien
ctacaggagcccgccaccgctcctg

SEQ ID NO: 575356 - DNA, 25 bp, Homo sapien
caggagcccgccaccgctcctggct

SEQ ID NO: 575357 - DNA, 25 bp, Homo sapien
agccaccacgcccggccctgatttt

SEQ ID NO: 575358 - DNA, 25 bp, Homo sapien
gagccaccacgcccggccctgattt

SEQ ID NO: 575359 - DNA, 25 bp, Homo sapien
gaagcacacggccattggtcaatga

SEQ ID NO: 575360 - DNA, 25 bp, Homo sapien
cctatgaagcacacggccattggtc

SEQ ID NO: 575361 - DNA, 25 bp, Homo sapien
ctctgaagcacacggccattggtca

SEQ ID NO: 575362 - DNA, 25 bp, Homo sapien
ctatgaagcacacggccattggtca

SEQ ID NO: 575363 - DNA, 25 bp, Homo sapien
ggtccaccaaccctgactgacatgg

SEQ ID NO: 575364 - DNA, 25 bp, Homo sapien
tgtaattccccttaggacagagacg

SEQ ID NO: 575365 - DNA, 25 bp, Homo sapien
ccactgtgttgaggccaatgattcc

SEQ ID NO: 575366 - DNA, 25 bp, Homo sapien
catgcatgtggctctaggaggttcc

SEQ ID NO: 575367 - DNA, 25 bp, Homo sapien
cagagacagtgttgaaacctgctca

SEQ ID NO: 575368 - DNA, 25 bp, Homo sapien
gagacagtgttgaaacctgctcata

SEQ ID NO: 575369 - DNA, 25 bp, Homo sapien
acagtgttgaaacctgctcatatct

SEQ ID NO: 575370 - DNA, 25 bp, Homo sapien
gacagtgttgaaacctgctcatatc

SEQ ID NO: 575371 - DNA, 25 bp, Homo sapien
aagatgtcacagttagccgtgttcc

SEQ ID NO: 575372 - DNA, 25 bp, Homo sapien
cctaaagatgtcacagttagccgtg

SEQ ID NO: 575373 - DNA, 25 bp, Homo sapien
tcagcttctcagatgtgttcctcat

SEQ ID NO: 575374 - DNA, 25 bp, Homo sapien
ccatcagcttctcagatgtgttcct

SEQ ID NO: 575375 - DNA, 25 bp, Homo sapien
taacaactacctggatggtgaagtt

SEQ ID NO: 575376 - DNA, 25 bp, Homo sapien
gtaacaactacctggatggtgaagt

SEQ ID NO: 575377 - DNA, 25 bp, Homo sapien
atgctgcaggctcagtggcccagga

SEQ ID NO: 575378 - DNA, 25 bp, Homo sapien
tgctgcaggctcagtggcccaggaa

SEQ ID NO: 575379 - DNA, 25 bp, Homo sapien
tcatgctgcaggctcagtggcccag

SEQ ID NO: 575380 - DNA, 25 bp, Homo sapien
ctgcaggctcagtggcccaggaaac

SEQ ID NO: 575381 - DNA, 25 bp, Homo sapien
cggctctagctgctttaattgccca

SEQ ID NO: 575382 - DNA, 25 bp, Homo sapien
ccggctctagctgctttaattgccc

SEQ ID NO: 575383 - DNA, 25 bp, Homo sapien
caacgtgctggctccgtaccaacct

SEQ ID NO: 575384 - DNA, 25 bp, Homo sapien
aacgtgctggctccgtaccaacctc

SEQ ID NO: 575385 - DNA, 25 bp, Homo sapien
cgtgctggctccgtaccaacctctg

SEQ ID NO: 575386 - DNA, 25 bp, Homo sapien
tgctggctccgtaccaacctctggt

SEQ ID NO: 575387 - DNA, 25 bp, Homo sapien
ctgcactgatcagcgggccaggctt

SEQ ID NO: 575388 - DNA, 25 bp, Homo sapien
ccattaaacaccaggtggtgctttg

SEQ ID NO: 575389 - DNA, 25 bp, Homo sapien
aatcctccattaaacaccaggtggt

SEQ ID NO: 575390 - DNA, 25 bp, Homo sapien
agtatggctgcactgatcagcgggc

SEQ ID NO: 575391 - DNA, 25 bp, Homo sapien
ctccagaagagtgtgaagacactac

SEQ ID NO: 575392 - DNA, 25 bp, Homo sapien
catttgaggaagtttgtaaataagg

SEQ ID NO: 575393 - DNA, 25 bp, Homo sapien
tctgctgggtctcggctacagctga

SEQ ID NO: 575394 - DNA, 25 bp, Homo sapien
ccactgcacgggagaatgtgaagat

SEQ ID NO: 575395 - DNA, 25 bp, Homo sapien
ggtcagtgtcaagaaccaggaacaa

SEQ ID NO: 575396 - DNA, 25 bp, Homo sapien
ctttcacagacaagatggtcagtgt

SEQ ID NO: 575397 - DNA, 25 bp, Homo sapien
gacaagatggtcagtgtcaagaacc

SEQ ID NO: 575398 - DNA, 25 bp, Homo sapien
gatggtcagtgtcaagaaccaggaa

SEQ ID NO: 575399 - DNA, 25 bp, Homo sapien
tttcttctgatcaagcatgcccgcc

SEQ ID NO: 575400 - DNA, 25 bp, Homo sapien
gggtttctgtggagtgactaaacca

SEQ ID NO: 575401 - DNA, 25 bp, Homo sapien
gagtgactaaaccaagcaaacttcc

SEQ ID NO: 575402 - DNA, 25 bp, Homo sapien
ctgatcaagcatgcccgccggagtg

SEQ ID NO: 575403 - DNA, 25 bp, Homo sapien
tttgtgacacttcgttcccagagcc

SEQ ID NO: 575404 - DNA, 25 bp, Homo sapien
tgggcactggaaataacgacagcac

SEQ ID NO: 575405 - DNA, 25 bp, Homo sapien
cacagtgtgcttactctaggccagc

SEQ ID NO: 575406 - DNA, 25 bp, Homo sapien
gctaggccacgtagaaaaagttctg

SEQ ID NO: 575407 - DNA, 25 bp, Homo sapien
cagttggttacacccaggagcacaa

SEQ ID NO: 575408 - DNA, 25 bp, Homo sapien
agaggccttccctttccggcagttg

SEQ ID NO: 575409 - DNA, 25 bp, Homo sapien
cggcagttggttacacccaggagca

SEQ ID NO: 575410 - DNA, 25 bp, Homo sapien
ttccggcagttggttacacccagga

SEQ ID NO: 575411 - DNA, 25 bp, Homo sapien
tgggaggacatctggtaataagagc

SEQ ID NO: 575412 - DNA, 25 bp, Homo sapien
ggttttgccgccaagaacactgtaa

SEQ ID NO: 575413 - DNA, 25 bp, Homo sapien
gagcacgctggctggctgatctgca

SEQ ID NO: 575414 - DNA, 25 bp, Homo sapien
gaagagcagtagtttgcaacacgcc

SEQ ID NO: 575415 - DNA, 25 bp, Homo sapien
gcagttttctccctcgatgtcacct

SEQ ID NO: 575416 - DNA, 25 bp, Homo sapien
ttgacggactcggtctcactggtgg

SEQ ID NO: 575417 - DNA, 25 bp, Homo sapien
tggccccgcagttttctccctcgat

SEQ ID NO: 575418 - DNA, 25 bp, Homo sapien
cacgttttcggtgttgacggactcg

SEQ ID NO: 575419 - DNA, 25 bp, Homo sapien
gactcagggccctaacctcgctgtc

SEQ ID NO: 575420 - DNA, 25 bp, Homo sapien
aggactcagggccctaacctcgctg

SEQ ID NO: 575421 - DNA, 25 bp, Homo sapien
actcagggccctaacctcgctgtct

SEQ ID NO: 575422 - DNA, 25 bp, Homo sapien
ggactcagggccctaacctcgctgt

SEQ ID NO: 575423 - DNA, 25 bp, Homo sapien
gagctcagaactaaccaaatcaacc

SEQ ID NO: 575424 - DNA, 25 bp, Homo sapien
caggagctcagaactaaccaaatca

SEQ ID NO: 575425 - DNA, 25 bp, Homo sapien
cgtcgcagtgatccttcaggagctc

SEQ ID NO: 575426 - DNA, 25 bp, Homo sapien
tgctcttttcctgacgtcgcagtga

SEQ ID NO: 575427 - DNA, 25 bp, Homo sapien
tacagtcatggcaatgttgcccgcg

SEQ ID NO: 575428 - DNA, 25 bp, Homo sapien
tgttgcccgcgataccacacagact

SEQ ID NO: 575429 - DNA, 25 bp, Homo sapien
aatgttgcccgcgataccacacaga

SEQ ID NO: 575430 - DNA, 25 bp, Homo sapien
catggcaatgttgcccgcgatacca

SEQ ID NO: 575431 - DNA, 25 bp, Homo sapien
tgagcggattcttgaagaagagcga

SEQ ID NO: 575432 - DNA, 25 bp, Homo sapien
ggttgagcggattcttgaagaagag

SEQ ID NO: 575433 - DNA, 25 bp, Homo sapien
ctcaggttgagcggattcttgaaga

SEQ ID NO: 575434 - DNA, 25 bp, Homo sapien
agcggattcttgaagaagagcgagg

SEQ ID NO: 575435 - DNA, 25 bp, Homo sapien
gcgttaatgataggacctctttgcc

SEQ ID NO: 575436 - DNA, 25 bp, Homo sapien
tggcgttaatgataggacctctttg

SEQ ID NO: 575437 - DNA, 25 bp, Homo sapien
cttggcgttaatgataggacctctt

SEQ ID NO: 575438 - DNA, 25 bp, Homo sapien
gttaatgataggacctctttgcctc

SEQ ID NO: 575439 - DNA, 25 bp, Homo sapien
gaggaggcctaaggcgccagcccca

SEQ ID NO: 575440 - DNA, 25 bp, Homo sapien
aggatgctgacggtcacacgcagcc

SEQ ID NO: 575441 - DNA, 25 bp, Homo sapien
aggagaaacccaggatgctgacggt

SEQ ID NO: 575442 - DNA, 25 bp, Homo sapien
tcacacgcagccctgaagacctggg

SEQ ID NO: 575443 - DNA, 25 bp, Homo sapien
ctgaactttgacttggagatccggt

SEQ ID NO: 575444 - DNA, 25 bp, Homo sapien
tgaactttgacttggagatccggtg

SEQ ID NO: 575445 - DNA, 25 bp, Homo sapien
gaactttgacttggagatccggtgg

SEQ ID NO: 575446 - DNA, 25 bp, Homo sapien
gaagcagtcacatctgagggtctga

SEQ ID NO: 575447 - DNA, 25 bp, Homo sapien
cctcagtgtgcaccaggacagggaa

SEQ ID NO: 575448 - DNA, 25 bp, Homo sapien
tgcagaaggtattttccaggcccag

SEQ ID NO: 575449 - DNA, 25 bp, Homo sapien
ggtgctctggaaataacccctggag

SEQ ID NO: 575450 - DNA, 25 bp, Homo sapien
tgtgatgggacaccggtaggccaat

SEQ ID NO: 575451 - DNA, 25 bp, Homo sapien
ggtgctaaagtcagtgggccaacag

SEQ ID NO: 575452 - DNA, 25 bp, Homo sapien
cagtggatgccctaaccagatggac

SEQ ID NO: 575453 - DNA, 25 bp, Homo sapien
tgagcaagcatccagagggctcgcg

SEQ ID NO: 575454 - DNA, 25 bp, Homo sapien
tatggctgtaatccactaaccggcc

SEQ ID NO: 575455 - DNA, 25 bp, Homo sapien
tgctgaatctagattagacggctgc

SEQ ID NO: 575456 - DNA, 25 bp, Homo sapien
gacggctgctgtgtgatacctgctc

SEQ ID NO: 575457 - DNA, 25 bp, Homo sapien
tattccctaagcagacaccatcagt

SEQ ID NO: 575458 - DNA, 25 bp, Homo sapien
cacgaggcattgaagatacagctcc

SEQ ID NO: 575459 - DNA, 25 bp, Homo sapien
gacccacgaggcattgaagatacag

SEQ ID NO: 575460 - DNA, 25 bp, Homo sapien
ctgtagggcttgtacgcagacccac

SEQ ID NO: 575461 - DNA, 25 bp, Homo sapien
gtacgcagacccacgaggcattgaa

SEQ ID NO: 575462 - DNA, 25 bp, Homo sapien
ttctgcagaaccgattccaccggcg

SEQ ID NO: 575463 - DNA, 25 bp, Homo sapien
tggacttctgtgagccagttgggct

SEQ ID NO: 575464 - DNA, 25 bp, Homo sapien
tcaccagccagtagaagacattaga

SEQ ID NO: 575465 - DNA, 25 bp, Homo sapien
tgcggcgcggcacttccttctgcag

SEQ ID NO: 575466 - DNA, 25 bp, Homo sapien
aggagcatctctgccgtgaacaggg

SEQ ID NO: 575467 - DNA, 25 bp, Homo sapien
aggatgccgccacacacgacgaagc

SEQ ID NO: 575468 - DNA, 25 bp, Homo sapien
cacacacgacgaagcagtcaaagcg

SEQ ID NO: 575469 - DNA, 25 bp, Homo sapien
gccggacgcatctgagcacggagat

SEQ ID NO: 575470 - DNA, 25 bp, Homo sapien
aatccaacggatggttttagtgctc

SEQ ID NO: 575471 - DNA, 25 bp, Homo sapien
ctgaactgaagacaccaacctccat

SEQ ID NO: 575472 - DNA, 25 bp, Homo sapien
tagggacactcagaaacacgctctg

SEQ ID NO: 575473 - DNA, 25 bp, Homo sapien
tctgagcaagatgccatcagctcca

SEQ ID NO: 575474 - DNA, 25 bp, Homo sapien
aatggccctcaatgagctcagaggc

SEQ ID NO: 575475 - DNA, 25 bp, Homo sapien
ttaataatggccctcaatgagctca

SEQ ID NO: 575476 - DNA, 25 bp, Homo sapien
taatggccctcaatgagctcagagg

SEQ ID NO: 575477 - DNA, 25 bp, Homo sapien
aataatggccctcaatgagctcaga

SEQ ID NO: 575478 - DNA, 25 bp, Homo sapien
gggaggtcagcactctgccccttgc

SEQ ID NO: 575479 - DNA, 25 bp, Homo sapien
agggaggtcagcactctgccccttg

SEQ ID NO: 575480 - DNA, 25 bp, Homo sapien
caccaggttgctcaaggagttccag

SEQ ID NO: 575481 - DNA, 25 bp, Homo sapien
ccaggttgctcaaggagttccagta

SEQ ID NO: 575482 - DNA, 25 bp, Homo sapien
gatgccaccaggttgctcaaggagt

SEQ ID NO: 575483 - DNA, 25 bp, Homo sapien
agagttcagcaaggatgccaccagg

SEQ ID NO: 575484 - DNA, 25 bp, Homo sapien
aaggagcagggaggcgatggagcgc

SEQ ID NO: 575485 - DNA, 25 bp, Homo sapien
ggagcagggaggcgatggagcgcac

SEQ ID NO: 575486 - DNA, 25 bp, Homo sapien
ggagaaggagcagggaggcgatgga

SEQ ID NO: 575487 - DNA, 25 bp, Homo sapien
ccccaggagggagaagatgatgatg

SEQ ID NO: 575488 - DNA, 25 bp, Homo sapien
tccgggtctgcatctcatcaaagtt

SEQ ID NO: 575489 - DNA, 25 bp, Homo sapien
tcatcaaagttgaactttcctccaa

SEQ ID NO: 575490 - DNA, 25 bp, Homo sapien
ttatcgaatgtgctcctccgggtct

SEQ ID NO: 575491 - DNA, 25 bp, Homo sapien
gggaagttatcgaatgtgctcctcc

SEQ ID NO: 575492 - DNA, 25 bp, Homo sapien
atcaccgaattccagtcctccccgg

SEQ ID NO: 575493 - DNA, 25 bp, Homo sapien
aagtaaatacagactaacatccctg

SEQ ID NO: 575494 - DNA, 25 bp, Homo sapien
tacagactaacatccctggaaaaga

SEQ ID NO: 575495 - DNA, 25 bp, Homo sapien
gatgatgaagtaaatacagactaac

SEQ ID NO: 575496 - DNA, 25 bp, Homo sapien
tggaaaagaggggccgccataagcc

SEQ ID NO: 575497 - DNA, 25 bp, Homo sapien
tctaggctgggtggtgtgagcccga

SEQ ID NO: 575498 - DNA, 25 bp, Homo sapien
gggcgtgcccgtttggcactgtgct

SEQ ID NO: 575499 - DNA, 25 bp, Homo sapien
gccgccatggggttctaggctgggt

SEQ ID NO: 575500 - DNA, 25 bp, Homo sapien
gtgagcccgagcaggaccgcccgga

SEQ ID NO: 575501 - DNA, 25 bp, Homo sapien
gctgtttgaagtctgtgcagctctg

SEQ ID NO: 575502 - DNA, 25 bp, Homo sapien
tgaagtctgtgcagctctgcccgtg

SEQ ID NO: 575503 - DNA, 25 bp, Homo sapien
gtggcttgtgccctggaaacctgcc

SEQ ID NO: 575504 - DNA, 25 bp, Homo sapien
ccgtggcttgtgccctggaaacctg

SEQ ID NO: 575505 - DNA, 25 bp, Homo sapien
gctctcagcatcagccaggttgtcc

SEQ ID NO: 575506 - DNA, 25 bp, Homo sapien
cctcctccttttgggcagatgtgag

SEQ ID NO: 575507 - DNA, 25 bp, Homo sapien
ccttttgggcagatgtgaggctctc

SEQ ID NO: 575508 - DNA, 25 bp, Homo sapien
atgtgaggctctcagcatcagccag

SEQ ID NO: 575509 - DNA, 25 bp, Homo sapien
tcagccgtgatggatttcagctcaa

SEQ ID NO: 575510 - DNA, 25 bp, Homo sapien
gagactctccgtcagccgtgatgga

SEQ ID NO: 575511 - DNA, 25 bp, Homo sapien
cgggtggagactctccgtcagccgt

SEQ ID NO: 575512 - DNA, 25 bp, Homo sapien
tccgtcagccgtgatggatttcagc

SEQ ID NO: 575513 - DNA, 25 bp, Homo sapien
tcctcattttcattgggctggaggt

SEQ ID NO: 575514 - DNA, 25 bp, Homo sapien
tgggctggaggtcatccatgttgat

SEQ ID NO: 575515 - DNA, 25 bp, Homo sapien
tttcattgggctggaggtcatccat

SEQ ID NO: 575516 - DNA, 25 bp, Homo sapien
tggggtaggggctcttatcctcatt

SEQ ID NO: 575517 - DNA, 25 bp, Homo sapien
gctaacttagcctttgggggcagag

SEQ ID NO: 575518 - DNA, 25 bp, Homo sapien
ctggcactaaaggatccaggagctg

SEQ ID NO: 575519 - DNA, 25 bp, Homo sapien
gaagcacaagctaacttagcctttg

SEQ ID NO: 575520 - DNA, 25 bp, Homo sapien
agcacaagctaacttagcctttggg

SEQ ID NO: 575521 - DNA, 25 bp, Homo sapien
ctaaggggtacctgcatgaaccagg

SEQ ID NO: 575522 - DNA, 25 bp, Homo sapien
aaggggtacctgcatgaaccaggca

SEQ ID NO: 575523 - DNA, 25 bp, Homo sapien
aggggtacctgcatgaaccaggcat

SEQ ID NO: 575524 - DNA, 25 bp, Homo sapien
taaggggtacctgcatgaaccaggc

SEQ ID NO: 575525 - DNA, 25 bp, Homo sapien
gctgaagatgaaaaacgcgctggct

SEQ ID NO: 575526 - DNA, 25 bp, Homo sapien
gaaaaacgcgctggcttctggcatg

SEQ ID NO: 575527 - DNA, 25 bp, Homo sapien
ggcgagggccgacaggcatctctgg

SEQ ID NO: 575528 - DNA, 25 bp, Homo sapien
tcagagagtggtcgtgggcgagggc

SEQ ID NO: 575529 - DNA, 25 bp, Homo sapien
tgtgctggaccgggtcctcagcagc

SEQ ID NO: 575530 - DNA, 25 bp, Homo sapien
tgtcattgacaatgcggtggcactg

SEQ ID NO: 575531 - DNA, 25 bp, Homo sapien
tgaagaagaggatcaggttggtgaa

SEQ ID NO: 575532 - DNA, 25 bp, Homo sapien
ttcctgaaggaggtgtgctggaccg

SEQ ID NO: 575533 - DNA, 25 bp, Homo sapien
tatgacacctagaattgggctcctg

SEQ ID NO: 575534 - DNA, 25 bp, Homo sapien
tcctagggtggttttctatcaaagc

SEQ ID NO: 575535 - DNA, 25 bp, Homo sapien
tgaacaatgatgtcagcaacagaag

SEQ ID NO: 575536 - DNA, 25 bp, Homo sapien
gttgtggatctaattatgacaccta

SEQ ID NO: 575537 - DNA, 25 bp, Homo sapien
caatttcaatggtgaaaatggtggt

SEQ ID NO: 575538 - DNA, 25 bp, Homo sapien
cttcagagcaatttcaatggtgaaa

SEQ ID NO: 575539 - DNA, 25 bp, Homo sapien
tcaatggtgaaaatggtggtaaaaa

SEQ ID NO: 575540 - DNA, 25 bp, Homo sapien
gaaaatggtggtaaaaacaatatca

SEQ ID NO: 575541 - DNA, 25 bp, Homo sapien
cataattggattagtggctctgaga

SEQ ID NO: 575542 - DNA, 25 bp, Homo sapien
agagtgaaccccacaccaacaggaa

SEQ ID NO: 575543 - DNA, 25 bp, Homo sapien
ccaacaggaaggagcatgtgtgtta

SEQ ID NO: 575544 - DNA, 25 bp, Homo sapien
tgtgtgttagcgacagacagcggca

SEQ ID NO: 575545 - DNA, 25 bp, Homo sapien
tttctaatgtaaagatactagtgaa

SEQ ID NO: 575546 - DNA, 25 bp, Homo sapien
aaggataatttctaatgtaaagata

SEQ ID NO: 575547 - DNA, 25 bp, Homo sapien
atttctaatgtaaagatactagtga

SEQ ID NO: 575548 - DNA, 25 bp, Homo sapien
cttaaggataatttctaatgtaaag

SEQ ID NO: 575549 - DNA, 25 bp, Homo sapien
tggcagctgggggcacctgagtgtc

SEQ ID NO: 575550 - DNA, 25 bp, Homo sapien
gatggcagctgggggcacctgagtg

SEQ ID NO: 575551 - DNA, 25 bp, Homo sapien
cagggatggcagctgggggcacctg

SEQ ID NO: 575552 - DNA, 25 bp, Homo sapien
agggatggcagctgggggcacctga

SEQ ID NO: 575553 - DNA, 25 bp, Homo sapien
aaagtcatctgtggtgttcagggca

SEQ ID NO: 575554 - DNA, 25 bp, Homo sapien
tcctaattctacaccattacttggg

SEQ ID NO: 575555 - DNA, 25 bp, Homo sapien
tcaggtacccagtgctaattgttcc

SEQ ID NO: 575556 - DNA, 25 bp, Homo sapien
attctacaccattacttgggaaggg

SEQ ID NO: 575557 - DNA, 25 bp, Homo sapien
agttccggcagaaagaacccttgtg

SEQ ID NO: 575558 - DNA, 25 bp, Homo sapien
tccaggatgttgaagtagttccggc

SEQ ID NO: 575559 - DNA, 25 bp, Homo sapien
gaaagaacccttgtgcaagaaagcc

SEQ ID NO: 575560 - DNA, 25 bp, Homo sapien
ttgtgcaagaaagccccataagcag

SEQ ID NO: 575561 - DNA, 25 bp, Homo sapien
ggcctgagtactcgcaggactcgca

SEQ ID NO: 575562 - DNA, 25 bp, Homo sapien
cttcacgacattgattgcactggac

SEQ ID NO: 575563 - DNA, 25 bp, Homo sapien
gactcgcaagatcttcacgacattg

SEQ ID NO: 575564 - DNA, 25 bp, Homo sapien
tactcgcaggactcgcaagatcttc

SEQ ID NO: 575565 - DNA, 25 bp, Homo sapien
gggtggtgacaatcacgatgttccc

SEQ ID NO: 575566 - DNA, 25 bp, Homo sapien
ccggatggcgacaaacacacactga

SEQ ID NO: 575567 - DNA, 25 bp, Homo sapien
ggtggtgacaatcacgatgttcccg

SEQ ID NO: 575568 - DNA, 25 bp, Homo sapien
ctgtctgcttggaactgtctgaaca

SEQ ID NO: 575569 - DNA, 25 bp, Homo sapien
gaactgtctgaacaggtgtacagct

SEQ ID NO: 575570 - DNA, 25 bp, Homo sapien
cttggaactgtctgaacaggtgtac

SEQ ID NO: 575571 - DNA, 25 bp, Homo sapien
tgtctgaacaggtgtacagctttcc

SEQ ID NO: 575572 - DNA, 25 bp, Homo sapien
tggccacccttcgaaggtggagacg

SEQ ID NO: 575573 - DNA, 25 bp, Homo sapien
gtctttgtacgtgatgtagttgccc

SEQ ID NO: 575574 - DNA, 25 bp, Homo sapien
tgatggggtggtcaacctccccgtc

SEQ ID NO: 575575 - DNA, 25 bp, Homo sapien
atcatggctgccagaacattgtcaa

SEQ ID NO: 575576 - DNA, 25 bp, Homo sapien
gagatctctgacatcgtggctcatg

SEQ ID NO: 575577 - DNA, 25 bp, Homo sapien
ggagtggcaatcttgaatcctatgg

SEQ ID NO: 575578 - DNA, 25 bp, Homo sapien
caactcccagatgccataagggtaa

SEQ ID NO: 575579 - DNA, 25 bp, Homo sapien
cataagggtaatgacagagatctct

SEQ ID NO: 575580 - DNA, 25 bp, Homo sapien
atgctactccgatcatcaccaatgg

SEQ ID NO: 575581 - DNA, 25 bp, Homo sapien
acataagcagtttacatacatatgc

SEQ ID NO: 575582 - DNA, 25 bp, Homo sapien
gctgtgtgccccatgaagcttgtta

SEQ ID NO: 575583 - DNA, 25 bp, Homo sapien
caatggcctggttttagacataagc

SEQ ID NO: 575584 - DNA, 25 bp, Homo sapien
ggcccttgtcttccgtgtgggagtc

SEQ ID NO: 575585 - DNA, 25 bp, Homo sapien
ggagtcgatggagcggtacagcagc

SEQ ID NO: 575586 - DNA, 25 bp, Homo sapien
ccttgtcttccgtgtgggagtcgat

SEQ ID NO: 575587 - DNA, 25 bp, Homo sapien
ggtagttgtagatggggcccttgtc

SEQ ID NO: 575588 - DNA, 25 bp, Homo sapien
cgaagcccacgaagatgttcatcat

SEQ ID NO: 575589 - DNA, 25 bp, Homo sapien
gttcatcatgaagaaggcgatgatg

SEQ ID NO: 575590 - DNA, 25 bp, Homo sapien
gaaaggtgacgatgacgaagcccac

SEQ ID NO: 575591 - DNA, 25 bp, Homo sapien
tgatgaagaagatggagatctccac

SEQ ID NO: 575592 - DNA, 25 bp, Homo sapien
cacagttcttgtactcctgctcccc

SEQ ID NO: 575593 - DNA, 25 bp, Homo sapien
gctcacagttcttgtactcctgctc

SEQ ID NO: 575594 - DNA, 25 bp, Homo sapien
tgtccagctcacagttcttgtactc

SEQ ID NO: 575595 - DNA, 25 bp, Homo sapien
agttcttgtactcctgctccccctg

SEQ ID NO: 575596 - DNA, 25 bp, Homo sapien
tgccacagaccctccttgggtactt

SEQ ID NO: 575597 - DNA, 25 bp, Homo sapien
gaccgactgacagctgtgcttctca

SEQ ID NO: 575598 - DNA, 25 bp, Homo sapien
gctaagaatgtgcttcctgaccgac

SEQ ID NO: 575599 - DNA, 25 bp, Homo sapien
tgcctggcatgtgcctcggcaggga

SEQ ID NO: 575600 - DNA, 25 bp, Homo sapien
tgagggcgtattccacgcactgtcg

SEQ ID NO: 575601 - DNA, 25 bp, Homo sapien
taccacactttgtactggtgctggt

SEQ ID NO: 575602 - DNA, 25 bp, Homo sapien
gatgaggacgaacatcaggtactcg

SEQ ID NO: 575603 - DNA, 25 bp, Homo sapien
ggagttgaccacgtaccacactttg

SEQ ID NO: 575604 - DNA, 25 bp, Homo sapien
attttgaacaggcagctctggccgt

SEQ ID NO: 575605 - DNA, 25 bp, Homo sapien
ggcgattttgaacaggcagctctgg

SEQ ID NO: 575606 - DNA, 25 bp, Homo sapien
tgaacaggcagctctggccgtagtg

SEQ ID NO: 575607 - DNA, 25 bp, Homo sapien
tttgaacaggcagctctggccgtag

SEQ ID NO: 575608 - DNA, 25 bp, Homo sapien
tgggtttgaaggcaatgagcttcag

SEQ ID NO: 575609 - DNA, 25 bp, Homo sapien
cttgggtttgaaggcaatgagcttc

SEQ ID NO: 575610 - DNA, 25 bp, Homo sapien
ttgggtttgaaggcaatgagcttca

SEQ ID NO: 575611 - DNA, 25 bp, Homo sapien
ctgaccatcggagcagggatggtcc

SEQ ID NO: 575612 - DNA, 25 bp, Homo sapien
cctcattctgccttcaatacctgca

SEQ ID NO: 575613 - DNA, 25 bp, Homo sapien
tccccgttctgtccacccctgatgc

SEQ ID NO: 575614 - DNA, 25 bp, Homo sapien
tggtccttcaccgatgcctttttcc

SEQ ID NO: 575615 - DNA, 25 bp, Homo sapien
cctggagttggcctggttcagctct

SEQ ID NO: 575616 - DNA, 25 bp, Homo sapien
agcgaggaatctgcagcttgtgcat

SEQ ID NO: 575617 - DNA, 25 bp, Homo sapien
ttcctggagttggcctggttcagct

SEQ ID NO: 575618 - DNA, 25 bp, Homo sapien
aatctgcagcttgtgcatgccagcc

SEQ ID NO: 575619 - DNA, 25 bp, Homo sapien
cagagacgaaacataagcagtgaca

SEQ ID NO: 575620 - DNA, 25 bp, Homo sapien
ggtcatacacaaacaaccatgccag

SEQ ID NO: 575621 - DNA, 25 bp, Homo sapien
gaatacaagttgaccggctgatgga

SEQ ID NO: 575622 - DNA, 25 bp, Homo sapien
ttcagactgtcttcaacatccttgg

SEQ ID NO: 575623 - DNA, 25 bp, Homo sapien
agcagacaaggccaaggcttcactg

SEQ ID NO: 575624 - DNA, 25 bp, Homo sapien
ggcctcgttgatggattcctcagga

SEQ ID NO: 575625 - DNA, 25 bp, Homo sapien
accggagaaaccgctcctctttctg

SEQ ID NO: 575626 - DNA, 25 bp, Homo sapien
gtgcccagggcctcgttgatggatt

SEQ ID NO: 575627 - DNA, 25 bp, Homo sapien
cagctcactcctggcgccacagact

SEQ ID NO: 575628 - DNA, 25 bp, Homo sapien
cactcctggcgccacagactccaac

SEQ ID NO: 575629 - DNA, 25 bp, Homo sapien
gggagcagctcactcctggcgccac

SEQ ID NO: 575630 - DNA, 25 bp, Homo sapien
actcctggcgccacagactccaaca

SEQ ID NO: 575631 - DNA, 25 bp, Homo sapien
gaaagagtggcttttgagtcaccta

SEQ ID NO: 575632 - DNA, 25 bp, Homo sapien
tagggtgcatactaagcaggatggt

SEQ ID NO: 575633 - DNA, 25 bp, Homo sapien
taagcctgcaatagaatcccaggat

SEQ ID NO: 575634 - DNA, 25 bp, Homo sapien
tcaggtgtaggcattgattatcgac

SEQ ID NO: 575635 - DNA, 25 bp, Homo sapien
gaaccacgaggaacagcgaagcttc

SEQ ID NO: 575636 - DNA, 25 bp, Homo sapien
actcaggaccaagcagaaccacgag

SEQ ID NO: 575637 - DNA, 25 bp, Homo sapien
aggcaggaaccaacagtctcgatgt

SEQ ID NO: 575638 - DNA, 25 bp, Homo sapien
tgaacgtgacccaatcacagccact

SEQ ID NO: 575639 - DNA, 25 bp, Homo sapien
aactgaagggggtgtccttgctgga

SEQ ID NO: 575640 - DNA, 25 bp, Homo sapien
ctggatgccggagcttgtgagccag

SEQ ID NO: 575641 - DNA, 25 bp, Homo sapien
acttttgcgaggaggggcaccccag

SEQ ID NO: 575642 - DNA, 25 bp, Homo sapien
gctggagtcacttttgcgaggaggg

SEQ ID NO: 575643 - DNA, 25 bp, Homo sapien
cacggatggcggctccggagccact

SEQ ID NO: 575644 - DNA, 25 bp, Homo sapien
agtcctgctgagcacggcacggatg

SEQ ID NO: 575645 - DNA, 25 bp, Homo sapien
tcctgctgagcacggcacggatggc

SEQ ID NO: 575646 - DNA, 25 bp, Homo sapien
ggcggctccggagccactgtctttg

SEQ ID NO: 575647 - DNA, 25 bp, Homo sapien
tcagttttacctccccgaatcatgg

SEQ ID NO: 575648 - DNA, 25 bp, Homo sapien
cagaatttccctgacctgggtggcc

SEQ ID NO: 575649 - DNA, 25 bp, Homo sapien
caaggatgctccttcactgggcaga

SEQ ID NO: 575650 - DNA, 25 bp, Homo sapien
tgagcacacttgagccagaatttcc

SEQ ID NO: 575651 - DNA, 25 bp, Homo sapien
gctgagaggctaccttcctgtactg

SEQ ID NO: 575652 - DNA, 25 bp, Homo sapien
gcctgtgtcacagaaggtccttcct

SEQ ID NO: 575653 - DNA, 25 bp, Homo sapien
tgatataagttcacacctgccctgt

SEQ ID NO: 575654 - DNA, 25 bp, Homo sapien
taccagaccggtgtgttccagtttc

SEQ ID NO: 575655 - DNA, 25 bp, Homo sapien
tgtctccgccctgcaaagtgttagg

SEQ ID NO: 575656 - DNA, 25 bp, Homo sapien
tcctaggacacatgggtcacggagc

SEQ ID NO: 575657 - DNA, 25 bp, Homo sapien
cctagttgcaggaggaacacacact

SEQ ID NO: 575658 - DNA, 25 bp, Homo sapien
cctgaatgaaatctggctgacgctg

SEQ ID NO: 575659 - DNA, 25 bp, Homo sapien
ctgttgccccttatttctctggtga

SEQ ID NO: 575660 - DNA, 25 bp, Homo sapien
ggcaaaccaaacctctactgtccag

SEQ ID NO: 575661 - DNA, 25 bp, Homo sapien
tctctggtgactgtgtcccaaatgg

SEQ ID NO: 575662 - DNA, 25 bp, Homo sapien
tcctggctctccttgaagtggcaaa

SEQ ID NO: 575663 - DNA, 25 bp, Homo sapien
gggagctgcagaaaccaaccaggtt

SEQ ID NO: 575664 - DNA, 25 bp, Homo sapien
tggagttaaggccttgtgcctcaca

SEQ ID NO: 575665 - DNA, 25 bp, Homo sapien
agcaggctgtgctactccaggcttt

SEQ ID NO: 575666 - DNA, 25 bp, Homo sapien
tggtggcacactacctgggagctgc

SEQ ID NO: 575667 - DNA, 25 bp, Homo sapien
tattcttagcgtgggaggtcaggtc

SEQ ID NO: 575668 - DNA, 25 bp, Homo sapien
cagagggaccgaaagacatgctgtc

SEQ ID NO: 575669 - DNA, 25 bp, Homo sapien
caggatgggtgaagcagagattagc

SEQ ID NO: 575670 - DNA, 25 bp, Homo sapien
aacagaaacgccaccccggagactg

SEQ ID NO: 575671 - DNA, 25 bp, Homo sapien
gcactgggtgccccagtgtttccag

SEQ ID NO: 575672 - DNA, 25 bp, Homo sapien
aggggcagttccaaccctggcaaag

SEQ ID NO: 575673 - DNA, 25 bp, Homo sapien
gcagttccaaccctggcaaagactt

SEQ ID NO: 575674 - DNA, 25 bp, Homo sapien
tgcactgggtgccccagtgtttcca

SEQ ID NO: 575675 - DNA, 25 bp, Homo sapien
tgagaatgacgtcaattatgctgcc

SEQ ID NO: 575676 - DNA, 25 bp, Homo sapien
cattccagggatcactaaagtaacc

SEQ ID NO: 575677 - DNA, 25 bp, Homo sapien
gccaattacgatgaggaagtcaaaa

SEQ ID NO: 575678 - DNA, 25 bp, Homo sapien
gtctcactgagaatgacgtcaatta

SEQ ID NO: 575679 - DNA, 25 bp, Homo sapien
ttagttcaaaggtggcgtggggctg

SEQ ID NO: 575680 - DNA, 25 bp, Homo sapien
agttcaaaggtggcgtggggctgtg

SEQ ID NO: 575681 - DNA, 25 bp, Homo sapien
tgtgtcccctgcaccgccactccct

SEQ ID NO: 575682 - DNA, 25 bp, Homo sapien
tagttcaaaggtggcgtggggctgt

SEQ ID NO: 575683 - DNA, 25 bp, Homo sapien
taacctggttttcgcagggtgcaga

SEQ ID NO: 575684 - DNA, 25 bp, Homo sapien
tggataacctggttttcgcagggtg

SEQ ID NO: 575685 - DNA, 25 bp, Homo sapien
cctggttttcgcagggtgcagaggc

SEQ ID NO: 575686 - DNA, 25 bp, Homo sapien
gataacctggttttcgcagggtgca

SEQ ID NO: 575687 - DNA, 25 bp, Homo sapien
acaatgctacccacaacaatcaagg

SEQ ID NO: 575688 - DNA, 25 bp, Homo sapien
gtttacctcggtgattgctatatca

SEQ ID NO: 575689 - DNA, 25 bp, Homo sapien
ggcgtcaaatgtattccatgcatca

SEQ ID NO: 575690 - DNA, 25 bp, Homo sapien
gattgctatatcaacaatgctaccc

SEQ ID NO: 575691 - DNA, 25 bp, Homo sapien
ggtgggctgggtagttccaaacatc

SEQ ID NO: 575692 - DNA, 25 bp, Homo sapien
tcaatagttcagtgcatcaaaagtc

SEQ ID NO: 575693 - DNA, 25 bp, Homo sapien
gagagatttaaacatgccaggtaac

SEQ ID NO: 575694 - DNA, 25 bp, Homo sapien
cacatgttaaagaccgcaagaaggc

SEQ ID NO: 575695 - DNA, 25 bp, Homo sapien
tctcagagcacgagtaggaagacta

SEQ ID NO: 575696 - DNA, 25 bp, Homo sapien
tgtatgagtgggaacagcaacttgg

SEQ ID NO: 575697 - DNA, 25 bp, Homo sapien
ggaaaggaaacctcctgagggcaga

SEQ ID NO: 575698 - DNA, 25 bp, Homo sapien
cacaccggacaaagacagttctcag

SEQ ID NO: 575699 - DNA, 25 bp, Homo sapien
tgaaggatcccatgggattggaaga

SEQ ID NO: 575700 - DNA, 25 bp, Homo sapien
ttctgaaggatcccatgggattgga

SEQ ID NO: 575701 - DNA, 25 bp, Homo sapien
agaaaatgctggggccgcccatacg

SEQ ID NO: 575702 - DNA, 25 bp, Homo sapien
gggccgcccatacgctgctaatgcc

SEQ ID NO: 575703 - DNA, 25 bp, Homo sapien
cagatgccaactgggcaaagggagt

SEQ ID NO: 575704 - DNA, 25 bp, Homo sapien
tgcagatgcagatgccaactgggca

SEQ ID NO: 575705 - DNA, 25 bp, Homo sapien
ctgccttgtcgctgcttgctccttc

SEQ ID NO: 575706 - DNA, 25 bp, Homo sapien
caaagggagtggtgctgctctgcgc

SEQ ID NO: 575707 - DNA, 25 bp, Homo sapien
gcctgaaggtggggaagacttggga

SEQ ID NO: 575708 - DNA, 25 bp, Homo sapien
cagggcctgaaggtggggaagactt

SEQ ID NO: 575709 - DNA, 25 bp, Homo sapien
agggcctgaaggtggggaagacttg

SEQ ID NO: 575710 - DNA, 25 bp, Homo sapien
tcagggcctgaaggtggggaagact

SEQ ID NO: 575711 - DNA, 25 bp, Homo sapien
ctgccggtgccctgagttagtttgt

SEQ ID NO: 575712 - DNA, 25 bp, Homo sapien
tacttgggccattaatctctgaccc

SEQ ID NO: 575713 - DNA, 25 bp, Homo sapien
ttgttggtagccatcaatacttggg

SEQ ID NO: 575714 - DNA, 25 bp, Homo sapien
ccggtgccctgagttagtttgtagt

SEQ ID NO: 575715 - DNA, 25 bp, Homo sapien
cacagggcatttttgagtagctagg

SEQ ID NO: 575716 - DNA, 25 bp, Homo sapien
tggaagaatctagagactcaaagat

SEQ ID NO: 575717 - DNA, 25 bp, Homo sapien
gagccttaagccatgctgttcacag

SEQ ID NO: 575718 - DNA, 25 bp, Homo sapien
taggacactgttgcctctaccaccg

SEQ ID NO: 575719 - DNA, 25 bp, Homo sapien
ggcttgcctggcctaattgaaccaa

SEQ ID NO: 575720 - DNA, 25 bp, Homo sapien
tggtcaggtctagctatccactggc

SEQ ID NO: 575721 - DNA, 25 bp, Homo sapien
gataattctgacaacgcacccaggt

SEQ ID NO: 575722 - DNA, 25 bp, Homo sapien
tgggtcaatcccagcctgaacagga

SEQ ID NO: 575723 - DNA, 25 bp, Homo sapien
gagtctcccatgaagatgcccggta

SEQ ID NO: 575724 - DNA, 25 bp, Homo sapien
agatgcccggtattctaggtcttgg

SEQ ID NO: 575725 - DNA, 25 bp, Homo sapien
gataagctgtaatgagtctcccatg

SEQ ID NO: 575726 - DNA, 25 bp, Homo sapien
ggcagatagagataagctgtaatga

SEQ ID NO: 575727 - DNA, 25 bp, Homo sapien
agggagagcattgggtatgttcagc

SEQ ID NO: 575728 - DNA, 25 bp, Homo sapien
tagagggagagcattgggtatgttc

SEQ ID NO: 575729 - DNA, 25 bp, Homo sapien
catagagggagagcattgggtatgt

SEQ ID NO: 575730 - DNA, 25 bp, Homo sapien
gagagcattgggtatgttcagctgg

SEQ ID NO: 575731 - DNA, 25 bp, Homo sapien
ttctaggtcagactctcactggcaa

SEQ ID NO: 575732 - DNA, 25 bp, Homo sapien
atttctaggtcagactctcactggc

SEQ ID NO: 575733 - DNA, 25 bp, Homo sapien
tatttctaggtcagactctcactgg

SEQ ID NO: 575734 - DNA, 25 bp, Homo sapien
attatttctaggtcagactctcact

SEQ ID NO: 575735 - DNA, 25 bp, Homo sapien
gattacgggtgctactcagtgctgg

SEQ ID NO: 575736 - DNA, 25 bp, Homo sapien
cccgtcggcaacaggaggtgcagtt

SEQ ID NO: 575737 - DNA, 25 bp, Homo sapien
tgccaaatccggagctagtgcagct

SEQ ID NO: 575738 - DNA, 25 bp, Homo sapien
cagtcctgtgtcctaagtggagccc

SEQ ID NO: 575739 - DNA, 25 bp, Homo sapien
ttgatgaaggtccacagcagcgtcc

SEQ ID NO: 575740 - DNA, 25 bp, Homo sapien
agatgcgggagttttcctctgcgtt

SEQ ID NO: 575741 - DNA, 25 bp, Homo sapien
acgcatgacccggaacaggcggaag

SEQ ID NO: 575742 - DNA, 25 bp, Homo sapien
agcttcaccagacgcatgacccgga

SEQ ID NO: 575743 - DNA, 25 bp, Homo sapien
agcggccgagttctgccacacagag

SEQ ID NO: 575744 - DNA, 25 bp, Homo sapien
gagggctcctccttgtgtcagctgt

SEQ ID NO: 575745 - DNA, 25 bp, Homo sapien
tggaaaccacatgcttcgtctaggc

SEQ ID NO: 575746 - DNA, 25 bp, Homo sapien
tcgtctaggcctctcggtgcggaaa

SEQ ID NO: 575747 - DNA, 25 bp, Homo sapien
gccatagcggtcaccaggttgtcca

SEQ ID NO: 575748 - DNA, 25 bp, Homo sapien
cagatgctgctgaaacgcctacggg

SEQ ID NO: 575749 - DNA, 25 bp, Homo sapien
cattcgaagggcctctctagccgag

SEQ ID NO: 575750 - DNA, 25 bp, Homo sapien
agcggaggaactgatcacatggcca

SEQ ID NO: 575751 - DNA, 25 bp, Homo sapien
acgatcaggagggccacatagggca

SEQ ID NO: 575752 - DNA, 25 bp, Homo sapien
cccgatcaccgcgtagatgaagaac

SEQ ID NO: 575753 - DNA, 25 bp, Homo sapien
ctgcatcccgatcaccgcgtagatg

SEQ ID NO: 575754 - DNA, 25 bp, Homo sapien
tgaagaacagcatcacgatcaggag

SEQ ID NO: 575755 - DNA, 25 bp, Homo sapien
cggttgatctctgtggtatcattca

SEQ ID NO: 575756 - DNA, 25 bp, Homo sapien
tctctgtggtatcattcagggcaat

SEQ ID NO: 575757 - DNA, 25 bp, Homo sapien
tgttccggttgatctctgtggtatc

SEQ ID NO: 575758 - DNA, 25 bp, Homo sapien
tatcattcagggcaattttcccaaa

SEQ ID NO: 575759 - DNA, 25 bp, Homo sapien
gactggcacccacaatgcaactctg

SEQ ID NO: 575760 - DNA, 25 bp, Homo sapien
cacactgcttcatagggaaacctcg

SEQ ID NO: 575761 - DNA, 25 bp, Homo sapien
ctataacagaatgccccgtatgcag

SEQ ID NO: 575762 - DNA, 25 bp, Homo sapien
agagtggcaccagcgacttctgagg

SEQ ID NO: 575763 - DNA, 25 bp, Homo sapien
aagacagcaaagctgctaccacagg

SEQ ID NO: 575764 - DNA, 25 bp, Homo sapien
cagcaaagctgctaccacagggtgt

SEQ ID NO: 575765 - DNA, 25 bp, Homo sapien
gctgggctcggactctggggcacac

SEQ ID NO: 575766 - DNA, 25 bp, Homo sapien
aaagctgctaccacagggtgtttca

SEQ ID NO: 575767 - DNA, 25 bp, Homo sapien
cagagatggacggttcagactgccc

SEQ ID NO: 575768 - DNA, 25 bp, Homo sapien
atggacggttcagactgccctggaa

SEQ ID NO: 575769 - DNA, 25 bp, Homo sapien
agctgcagagatggacggttcagac

SEQ ID NO: 575770 - DNA, 25 bp, Homo sapien
gctgttgagttcccccttggcttac

SEQ ID NO: 575771 - DNA, 25 bp, Homo sapien
tacaatgaggtgctgtgagaagacc

SEQ ID NO: 575772 - DNA, 25 bp, Homo sapien
ccctgagagttgtgtgtgatgaacc

SEQ ID NO: 575773 - DNA, 25 bp, Homo sapien
gaacctgggtctcttggacataaac

SEQ ID NO: 575774 - DNA, 25 bp, Homo sapien
gaagccaacatttctaaagaccagt

SEQ ID NO: 575775 - DNA, 25 bp, Homo sapien
tcccttgtcaggtagtcaaagttgt

SEQ ID NO: 575776 - DNA, 25 bp, Homo sapien
ggaccaaggatggaccagtcccttg

SEQ ID NO: 575777 - DNA, 25 bp, Homo sapien
cagggtcatactctgcccagattct

SEQ ID NO: 575778 - DNA, 25 bp, Homo sapien
catgatgacagctacaaagaggttg

SEQ ID NO: 575779 - DNA, 25 bp, Homo sapien
caccctagggtgtgatacaatccag

SEQ ID NO: 575780 - DNA, 25 bp, Homo sapien
ccctcctgcaggtatggtcagctat

SEQ ID NO: 575781 - DNA, 25 bp, Homo sapien
gatccacccagtgttggccaacctt

SEQ ID NO: 575782 - DNA, 25 bp, Homo sapien
gacttaattgaaggtgccgggcctc

SEQ ID NO: 575783 - DNA, 25 bp, Homo sapien
ttcccaaaacctagtggcggctgaa

SEQ ID NO: 575784 - DNA, 25 bp, Homo sapien
atccgccggaggagggtcaccacat

SEQ ID NO: 575785 - DNA, 25 bp, Homo sapien
cacatccaggtgtttgatacgaccc

SEQ ID NO: 575786 - DNA, 25 bp, Homo sapien
ttgcaagccacgcggtgagggcaca

SEQ ID NO: 575787 - DNA, 25 bp, Homo sapien
ggcaaacagggtggcattgaacatg

SEQ ID NO: 575788 - DNA, 25 bp, Homo sapien
ctgaccagggcaaacagggtggcat

SEQ ID NO: 575789 - DNA, 25 bp, Homo sapien
agggcaaacagggtggcattgaaca

SEQ ID NO: 575790 - DNA, 25 bp, Homo sapien
ggccgtcctgaccagggcaaacagg

SEQ ID NO: 575791 - DNA, 25 bp, Homo sapien
tggtactggacttgggatgagagct

SEQ ID NO: 575792 - DNA, 25 bp, Homo sapien
tggacttgggatgagagctcttcct

SEQ ID NO: 575793 - DNA, 25 bp, Homo sapien
agagctcttccttctacgttccaag

SEQ ID NO: 575794 - DNA, 25 bp, Homo sapien
cttctacgttccaagagagaagctt

SEQ ID NO: 575795 - DNA, 25 bp, Homo sapien
gcagggcggaaaggatcctcagccc

SEQ ID NO: 575796 - DNA, 25 bp, Homo sapien
ctgcagggcggaaaggatcctcagc

SEQ ID NO: 575797 - DNA, 25 bp, Homo sapien
ggaaaggatcctcagccccttggtg

SEQ ID NO: 575798 - DNA, 25 bp, Homo sapien
ggtgggcctctgatgggctgggtcc

SEQ ID NO: 575799 - DNA, 25 bp, Homo sapien
cagcagcttcatgctggtccgcttc

SEQ ID NO: 575800 - DNA, 25 bp, Homo sapien
gcttcatgctggtccgcttccagat

SEQ ID NO: 575801 - DNA, 25 bp, Homo sapien
atcttcttgatgatcgcccgcagct

SEQ ID NO: 575802 - DNA, 25 bp, Homo sapien
tcctcattggcttgttctaggttcc

SEQ ID NO: 575803 - DNA, 25 bp, Homo sapien
gctctttgcgcttcttgaacttccg

SEQ ID NO: 575804 - DNA, 25 bp, Homo sapien
gtagaacttgccaacggtgacctca

SEQ ID NO: 575805 - DNA, 25 bp, Homo sapien
cagagacagcgcgttcctctgggag

SEQ ID NO: 575806 - DNA, 25 bp, Homo sapien
tctgggagggcttgcccacaaggcc

SEQ ID NO: 575807 - DNA, 25 bp, Homo sapien
tggtgaggaccacgctccctttcct

SEQ ID NO: 575808 - DNA, 25 bp, Homo sapien
gcctcgggccaagacctgtccctcc

SEQ ID NO: 575809 - DNA, 25 bp, Homo sapien
acccagccagtcgaccctccggaag

SEQ ID NO: 575810 - DNA, 25 bp, Homo sapien
gaggatggtgaggaccacgctccct

SEQ ID NO: 575811 - DNA, 25 bp, Homo sapien
gatctcaggcccgatgtcatgcagt

SEQ ID NO: 575812 - DNA, 25 bp, Homo sapien
agatctccagagatggcccgtcgga

SEQ ID NO: 575813 - DNA, 25 bp, Homo sapien
tcatcttcagaagcagcggacacag

SEQ ID NO: 575814 - DNA, 25 bp, Homo sapien
tcctcctcagcggtgagatctccag

SEQ ID NO: 575815 - DNA, 25 bp, Homo sapien
gacctggagaacacacgctatgctc

SEQ ID NO: 575816 - DNA, 25 bp, Homo sapien
caagcctgcagattagatgtgcccc

SEQ ID NO: 575817 - DNA, 25 bp, Homo sapien
gcttaatattaccaggtctcctgac

SEQ ID NO: 575818 - DNA, 25 bp, Homo sapien
tcactattgcaactgctgggcagct

SEQ ID NO: 575819 - DNA, 25 bp, Homo sapien
tccggccgtcgctttggtagtagct

SEQ ID NO: 575820 - DNA, 25 bp, Homo sapien
cctccacagtgctgaccgtgctggg

SEQ ID NO: 575821 - DNA, 25 bp, Homo sapien
tgctgcccgccttgttgatgtgcag

SEQ ID NO: 575822 - DNA, 25 bp, Homo sapien
caccagcttctcgtgggatggcgac

SEQ ID NO: 575823 - DNA, 25 bp, Homo sapien
ccatccagcatgtcacagcagtgca

SEQ ID NO: 575824 - DNA, 25 bp, Homo sapien
agcgtggccaggcacgatgcagggt

SEQ ID NO: 575825 - DNA, 25 bp, Homo sapien
caggcacgatgcagggtgtgtcctc

SEQ ID NO: 575826 - DNA, 25 bp, Homo sapien
tctcagccccgccagggaaccctgg

SEQ ID NO: 575827 - DNA, 25 bp, Homo sapien
gagctccagatcctcacacatcgga

SEQ ID NO: 575828 - DNA, 25 bp, Homo sapien
tccagatcctcacacatcggaacgt

SEQ ID NO: 575829 - DNA, 25 bp, Homo sapien
gctccagatcctcacacatcggaac

SEQ ID NO: 575830 - DNA, 25 bp, Homo sapien
atcctcacacatcggaacgtgcctt

SEQ ID NO: 575831 - DNA, 25 bp, Homo sapien
tcacttcataggtctcatcctgaga

SEQ ID NO: 575832 - DNA, 25 bp, Homo sapien
taggtctcatcctgagacgtctcct

SEQ ID NO: 575833 - DNA, 25 bp, Homo sapien
ctccgtgtcatggttcatcttcact

SEQ ID NO: 575834 - DNA, 25 bp, Homo sapien
tcatggttcatcttcacttcatagg

SEQ ID NO: 575835 - DNA, 25 bp, Homo sapien
ctagtgaggcagagcggaggaaacc

SEQ ID NO: 575836 - DNA, 25 bp, Homo sapien
tagtgaggcagagcggaggaaaccc

SEQ ID NO: 575837 - DNA, 25 bp, Homo sapien
ggagattgccggatgtccctcttgt

SEQ ID NO: 575838 - DNA, 25 bp, Homo sapien
agattgccggatgtccctcttgtcc

SEQ ID NO: 575839 - DNA, 25 bp, Homo sapien
ttctctagggagtaaccgccgacca

SEQ ID NO: 575840 - DNA, 25 bp, Homo sapien
tgttctctagggagtaaccgccgac

SEQ ID NO: 575841 - DNA, 25 bp, Homo sapien
agtgttctctagggagtaaccgccg

SEQ ID NO: 575842 - DNA, 25 bp, Homo sapien
gtgttctctagggagtaaccgccga

SEQ ID NO: 575843 - DNA, 25 bp, Homo sapien
gcaaagccagccagagagccaccat

SEQ ID NO: 575844 - DNA, 25 bp, Homo sapien
cagatgcaagggcaggactgtcttc

SEQ ID NO: 575845 - DNA, 25 bp, Homo sapien
gtgacagtggcctgtccaaaagtgt

SEQ ID NO: 575846 - DNA, 25 bp, Homo sapien
tgacagtggcctgtccaaaagtgtg

SEQ ID NO: 575847 - DNA, 25 bp, Homo sapien
aggtgacagtggcctgtccaaaagt

SEQ ID NO: 575848 - DNA, 25 bp, Homo sapien
ggtgacagtggcctgtccaaaagtg

SEQ ID NO: 575849 - DNA, 25 bp, Homo sapien
ggagggggctcaggcctgccactgc

SEQ ID NO: 575850 - DNA, 25 bp, Homo sapien
gaatggcttctctggaggagggggc

SEQ ID NO: 575851 - DNA, 25 bp, Homo sapien
atggcttctctggaggagggggctc

SEQ ID NO: 575852 - DNA, 25 bp, Homo sapien
gggctcaggcctgccactgccaatg

SEQ ID NO: 575853 - DNA, 25 bp, Homo sapien
tgctggcactgccgtggaactgcct

SEQ ID NO: 575854 - DNA, 25 bp, Homo sapien
ctgggcaccatgagggagacgggcc

SEQ ID NO: 575855 - DNA, 25 bp, Homo sapien
gctgctgttgagtttctcactggac

SEQ ID NO: 575856 - DNA, 25 bp, Homo sapien
caggagccgcagtggatggatggga

SEQ ID NO: 575857 - DNA, 25 bp, Homo sapien
cgagcagctgcagtataagggataa

SEQ ID NO: 575858 - DNA, 25 bp, Homo sapien
tctttcgggctcagatattgactgc

SEQ ID NO: 575859 - DNA, 25 bp, Homo sapien
taagttgctcagtggtttctgccgc

SEQ ID NO: 575860 - DNA, 25 bp, Homo sapien
tgcagtcatggctttccgcacacga

SEQ ID NO: 575861 - DNA, 25 bp, Homo sapien
ctatggtcatgtcgcaggcgtcggc

SEQ ID NO: 575862 - DNA, 25 bp, Homo sapien
ttcacaaagggtaagagggcgccat

SEQ ID NO: 575863 - DNA, 25 bp, Homo sapien
ggatcttgagcaaactgccccagtc

SEQ ID NO: 575864 - DNA, 25 bp, Homo sapien
ggctgctgacgtagaccctgctgtc

SEQ ID NO: 575865 - DNA, 25 bp, Homo sapien
tctacaagcagagtcgaaagacacc

SEQ ID NO: 575866 - DNA, 25 bp, Homo sapien
gaagacgctgttccggttaactcca

SEQ ID NO: 575867 - DNA, 25 bp, Homo sapien
cgaggctcgtacagaatatgtgcaa

SEQ ID NO: 575868 - DNA, 25 bp, Homo sapien
cagtgaggcacttctgaaacgaacc

SEQ ID NO: 575869 - DNA, 25 bp, Homo sapien
gctgtcaagaaaagtgtcaaaccac

SEQ ID NO: 575870 - DNA, 25 bp, Homo sapien
caaaagagcgctcagcggaagctca

SEQ ID NO: 575871 - DNA, 25 bp, Homo sapien
caaacccgatgtacattggcaaaag

SEQ ID NO: 575872 - DNA, 25 bp, Homo sapien
gcttctattgaacctccgtggaaaa

SEQ ID NO: 575873 - DNA, 25 bp, Homo sapien
tgtgcaagaccacatcaagtgcatt

SEQ ID NO: 575874 - DNA, 25 bp, Homo sapien
cacatggtgtgggtgcatatacacg

SEQ ID NO: 575875 - DNA, 25 bp, Homo sapien
tgactacactggtgatacctttgct

SEQ ID NO: 575876 - DNA, 25 bp, Homo sapien
tatacacgggcaggacatatgcaca

SEQ ID NO: 575877 - DNA, 25 bp, Homo sapien
caagaatccggaagtgaggatgccc

SEQ ID NO: 575878 - DNA, 25 bp, Homo sapien
tgtgctgacatttgccccagaggca

SEQ ID NO: 575879 - DNA, 25 bp, Homo sapien
tgaggctaaaaaccccgatgaccag

SEQ ID NO: 575880 - DNA, 25 bp, Homo sapien
tcagaaggtcaagctaggatagtcc

SEQ ID NO: 575881 - DNA, 25 bp, Homo sapien
aaatagatccttgagatgtcagcgg

SEQ ID NO: 575882 - DNA, 25 bp, Homo sapien
tcagcggctccaccacactggtcac

SEQ ID NO: 575883 - DNA, 25 bp, Homo sapien
ctgtgggtgggtaagctgaacacat

SEQ ID NO: 575884 - DNA, 25 bp, Homo sapien
atccttgagatgtcagcggctccac

SEQ ID NO: 575885 - DNA, 25 bp, Homo sapien
tcccaccaggtaggctgatgtggct

SEQ ID NO: 575886 - DNA, 25 bp, Homo sapien
agggtggcagacacccccacatccc

SEQ ID NO: 575887 - DNA, 25 bp, Homo sapien
ccacatcccaccaggtaggctgatg

SEQ ID NO: 575888 - DNA, 25 bp, Homo sapien
cagatggaatgagtactcttctcac

SEQ ID NO: 575889 - DNA, 25 bp, Homo sapien
tccccctcaacctcctcaaatcgta

SEQ ID NO: 575890 - DNA, 25 bp, Homo sapien
gggaaaggtgccccattcctgacag

SEQ ID NO: 575891 - DNA, 25 bp, Homo sapien
tcaacctcctcaaatcgtagcctct

SEQ ID NO: 575892 - DNA, 25 bp, Homo sapien
agggaaaggtgccccattcctgaca

SEQ ID NO: 575893 - DNA, 25 bp, Homo sapien
caaagaggtcgtgtaagcatctgcc

SEQ ID NO: 575894 - DNA, 25 bp, Homo sapien
tgactcctctcagcgtgcaacagat

SEQ ID NO: 575895 - DNA, 25 bp, Homo sapien
cacccttgcaggagcaggaaagtcc

SEQ ID NO: 575896 - DNA, 25 bp, Homo sapien
caatgtagagatgtggcagaaaccc

SEQ ID NO: 575897 - DNA, 25 bp, Homo sapien
cgtgttttgccatgggttattctca

SEQ ID NO: 575898 - DNA, 25 bp, Homo sapien
tggcctcactcccacgaggcttggg

SEQ ID NO: 575899 - DNA, 25 bp, Homo sapien
gattagaggagctttatctggagcg

SEQ ID NO: 575900 - DNA, 25 bp, Homo sapien
gagtaatagacctttcagtgcttca

SEQ ID NO: 575901 - DNA, 25 bp, Homo sapien
ggcgaggcctctgacaatgggatta

SEQ ID NO: 575902 - DNA, 25 bp, Homo sapien
taagactgtgaagtcgtggagcctg

SEQ ID NO: 575903 - DNA, 25 bp, Homo sapien
ggttgccccttctagattccctggc

SEQ ID NO: 575904 - DNA, 25 bp, Homo sapien
gtgtctcacacagagatgaccctga

SEQ ID NO: 575905 - DNA, 25 bp, Homo sapien
ctgagtgaagtttgtatttgtgacc

SEQ ID NO: 575906 - DNA, 25 bp, Homo sapien
gctgaatggacttaggtattatcat

SEQ ID NO: 575907 - DNA, 25 bp, Homo sapien
ggacttaggtattatcattggattc

SEQ ID NO: 575908 - DNA, 25 bp, Homo sapien
gggatcccagacagttgagataact

SEQ ID NO: 575909 - DNA, 25 bp, Homo sapien
actacagcaccgatggctgccctgg

SEQ ID NO: 575910 - DNA, 25 bp, Homo sapien
ggtgagcaaagccaataaccactac

SEQ ID NO: 575911 - DNA, 25 bp, Homo sapien
agaatcagatgtccatccacaccct

SEQ ID NO: 575912 - DNA, 25 bp, Homo sapien
gccaataaccactacagcaccgatg

SEQ ID NO: 575913 - DNA, 25 bp, Homo sapien
ctaaacttccaccagagaagatgat

SEQ ID NO: 575914 - DNA, 25 bp, Homo sapien
cctaaacttccaccagagaagatga

SEQ ID NO: 575915 - DNA, 25 bp, Homo sapien
aggctggtgtccgctctgccaaggg

SEQ ID NO: 575916 - DNA, 25 bp, Homo sapien
gcagttgagggtgaatctgaggtga

SEQ ID NO: 575917 - DNA, 25 bp, Homo sapien
ggctggtgtccgctctgccaagggg

SEQ ID NO: 575918 - DNA, 25 bp, Homo sapien
gctggtgtccgctctgccaaggggc

SEQ ID NO: 575919 - DNA, 25 bp, Homo sapien
tgaagaagagggcggtcagacctca

SEQ ID NO: 575920 - DNA, 25 bp, Homo sapien
ctgcctgaagaagagggcggtcaga

SEQ ID NO: 575921 - DNA, 25 bp, Homo sapien
gaagaagagggcggtcagacctcac

SEQ ID NO: 575922 - DNA, 25 bp, Homo sapien
cctgaagaagagggcggtcagacct

SEQ ID NO: 575923 - DNA, 25 bp, Homo sapien
ggaggaagccagggatctggggtga

SEQ ID NO: 575924 - DNA, 25 bp, Homo sapien
ggatctggggtgatctgagggcagc

SEQ ID NO: 575925 - DNA, 25 bp, Homo sapien
cacggggactccgccagggagggtg

SEQ ID NO: 575926 - DNA, 25 bp, Homo sapien
agggatctggggtgatctgagggca

SEQ ID NO: 575927 - DNA, 25 bp, Homo sapien
tgtggacttctctcgcaggtgtcca

SEQ ID NO: 575928 - DNA, 25 bp, Homo sapien
ttgtggacttctctcgcaggtgtcc

SEQ ID NO: 575929 - DNA, 25 bp, Homo sapien
ccgggagctggaacgcgggctatgt

SEQ ID NO: 575930 - DNA, 25 bp, Homo sapien
agccttgagctgtgacgcagaggac

SEQ ID NO: 575931 - DNA, 25 bp, Homo sapien
gctggaacgcgggctatgtttctct

SEQ ID NO: 575932 - DNA, 25 bp, Homo sapien
agctgtgacgcagaggacaaggccc

SEQ ID NO: 575933 - DNA, 25 bp, Homo sapien
tctctgtggagagcaggctgggctc

SEQ ID NO: 575934 - DNA, 25 bp, Homo sapien
atctctgtggagagcaggctgggct

SEQ ID NO: 575935 - DNA, 25 bp, Homo sapien
ctctgtggagagcaggctgggctca

SEQ ID NO: 575936 - DNA, 25 bp, Homo sapien
ctagtgaggcagagcggaggaaacc

SEQ ID NO: 575937 - DNA, 25 bp, Homo sapien
agattgccggatgtccctcttgtcc

SEQ ID NO: 575938 - DNA, 25 bp, Homo sapien
tagtgaggcagagcggaggaaaccc

SEQ ID NO: 575939 - DNA, 25 bp, Homo sapien
ggagattgccggatgtccctcttgt

SEQ ID NO: 575940 - DNA, 25 bp, Homo sapien
gtaaccaccgaccacatccagaaag

SEQ ID NO: 575941 - DNA, 25 bp, Homo sapien
ccacatccagaaagcgagcggtgca

SEQ ID NO: 575942 - DNA, 25 bp, Homo sapien
gtgttctctagggagtaaccaccga

SEQ ID NO: 575943 - DNA, 25 bp, Homo sapien
tccagaaagcgagcggtgcatttac

SEQ ID NO: 575944 - DNA, 25 bp, Homo sapien
tgagctgaacacgtccctccatgaa

SEQ ID NO: 575945 - DNA, 25 bp, Homo sapien
tcactgtaggtgagtgagctgaaca

SEQ ID NO: 575946 - DNA, 25 bp, Homo sapien
taggtgagtgagctgaacacgtccc

SEQ ID NO: 575947 - DNA, 25 bp, Homo sapien
cacactggtcactgtaggtgagtga

SEQ ID NO: 575948 - DNA, 25 bp, Homo sapien
tgtgcatgtgctgttcacatccttt

SEQ ID NO: 575949 - DNA, 25 bp, Homo sapien
gatgttatccattctaacaggcata

SEQ ID NO: 575950 - DNA, 25 bp, Homo sapien
agctcatgtggcttgaatttccatt

SEQ ID NO: 575951 - DNA, 25 bp, Homo sapien
gggctaatggtgctgatcatattta

SEQ ID NO: 575952 - DNA, 25 bp, Homo sapien
tgcctggctctcccgggagtggcac

SEQ ID NO: 575953 - DNA, 25 bp, Homo sapien
ggctgcctggctctcccgggagtgg

SEQ ID NO: 575954 - DNA, 25 bp, Homo sapien
atggctgcctggctctcccgggagt

SEQ ID NO: 575955 - DNA, 25 bp, Homo sapien
ctgcctggctctcccgggagtggca

SEQ ID NO: 575956 - DNA, 25 bp, Homo sapien
aacgtccttaatgaacacaagcatg

SEQ ID NO: 575957 - DNA, 25 bp, Homo sapien
cttgttggctttaacgtccttaatg

SEQ ID NO: 575958 - DNA, 25 bp, Homo sapien
ttaacgtccttaatgaacacaagca

SEQ ID NO: 575959 - DNA, 25 bp, Homo sapien
tggctttaacgtccttaatgaacac

SEQ ID NO: 575960 - DNA, 25 bp, Homo sapien
gttgaattgggccacgtcaatgtta

SEQ ID NO: 575961 - DNA, 25 bp, Homo sapien
ttgggccacgtcaatgttatagagc

SEQ ID NO: 575962 - DNA, 25 bp, Homo sapien
cagggtgttgaattgggccacgtca

SEQ ID NO: 575963 - DNA, 25 bp, Homo sapien
gaatcagggtgttgaattgggccac

SEQ ID NO: 575964 - DNA, 25 bp, Homo sapien
tggtgccggcgcgagcgcactctgg

SEQ ID NO: 575965 - DNA, 25 bp, Homo sapien
acctctgcacgcggcgcgagagctg

SEQ ID NO: 575966 - DNA, 25 bp, Homo sapien
gcgcggcggcactgactgcggaccg

SEQ ID NO: 575967 - DNA, 25 bp, Homo sapien
tgcggaccgcgaggaggcttgagca

SEQ ID NO: 575968 - DNA, 25 bp, Homo sapien
gcgccgactgcgccccgctctcggt

SEQ ID NO: 575969 - DNA, 25 bp, Homo sapien
cctccatgggcagcggcgccgactg

SEQ ID NO: 575970 - DNA, 25 bp, Homo sapien
actgcgccccgctctcggtcgcctt

SEQ ID NO: 575971 - DNA, 25 bp, Homo sapien
tccctccatgggcagcggcgccgac

SEQ ID NO: 575972 - DNA, 25 bp, Homo sapien
ccggccgcgggctccgggcgcggcg

SEQ ID NO: 575973 - DNA, 25 bp, Homo sapien
cgcgggctccgggcgcggcggaagg

SEQ ID NO: 575974 - DNA, 25 bp, Homo sapien
gttccgacgcctccgcaggccccgc

SEQ ID NO: 575975 - DNA, 25 bp, Homo sapien
gctccgggcgcggcggaagggcggc

SEQ ID NO: 575976 - DNA, 25 bp, Homo sapien
caggctatttgtagtcgagcggtca

SEQ ID NO: 575977 - DNA, 25 bp, Homo sapien
caaggcaggttgtcctggcccaggt

SEQ ID NO: 575978 - DNA, 25 bp, Homo sapien
gagcagacgcttgaggtccccaata

SEQ ID NO: 575979 - DNA, 25 bp, Homo sapien
taacaatctcgtagaaaacggcagg

SEQ ID NO: 575980 - DNA, 25 bp, Homo sapien
ccagccagtgtagtggacaaagact

SEQ ID NO: 575981 - DNA, 25 bp, Homo sapien
gccagccagtgtagtggacaaagac

SEQ ID NO: 575982 - DNA, 25 bp, Homo sapien
gactgcctgctgaaccgtaggcata

SEQ ID NO: 575983 - DNA, 25 bp, Homo sapien
tctttggaggactgcctgctgaacc

SEQ ID NO: 575984 - DNA, 25 bp, Homo sapien
gggaatctttggaggactgcctgct

SEQ ID NO: 575985 - DNA, 25 bp, Homo sapien
ttggaggactgcctgctgaaccgta

SEQ ID NO: 575986 - DNA, 25 bp, Homo sapien
tccacgatagcaccctcattgggct

SEQ ID NO: 575987 - DNA, 25 bp, Homo sapien
ttgggcttagcatagccttcaccgc

SEQ ID NO: 575988 - DNA, 25 bp, Homo sapien
tgtattctgcgaatgattccgccat

SEQ ID NO: 575989 - DNA, 25 bp, Homo sapien
gatcttctcccttaaactcaaacaa

SEQ ID NO: 575990 - DNA, 25 bp, Homo sapien
caagaagataggctcggagaacgga

SEQ ID NO: 575991 - DNA, 25 bp, Homo sapien
gaatgagaattgaaagcccagactg

SEQ ID NO: 575992 - DNA, 25 bp, Homo sapien
cagtgtaccagagttgtaagagggc

SEQ ID NO: 575993 - DNA, 25 bp, Homo sapien
tggcatgaaagagaggcagtgtacc

SEQ ID NO: 575994 - DNA, 25 bp, Homo sapien
tctcaaagcggagctcccgctggtc

SEQ ID NO: 575995 - DNA, 25 bp, Homo sapien
gagctcccgctggtcaaagagcttg

SEQ ID NO: 575996 - DNA, 25 bp, Homo sapien
cctcgccaatctcaaagcggagctc

SEQ ID NO: 575997 - DNA, 25 bp, Homo sapien
tccttgtagtacccttccagtgcaa

SEQ ID NO: 575998 - DNA, 25 bp, Homo sapien
aactcttgaggtgtaattcatattt

SEQ ID NO: 575999 - DNA, 25 bp, Homo sapien
gtaattcatatttcagctcagcatt

SEQ ID NO: 576000 - DNA, 25 bp, Homo sapien
tgtaattcatatttcagctcagcat

SEQ ID NO: 576001 - DNA, 25 bp, Homo sapien
cttttcaaaactcttgaggtgtaat

SEQ ID NO: 576002 - DNA, 25 bp, Homo sapien
cgctctttcactatggtgctctgtt

SEQ ID NO: 576003 - DNA, 25 bp, Homo sapien
acagtgccccgctctttcactatgg

SEQ ID NO: 576004 - DNA, 25 bp, Homo sapien
tgccccgctctttcactatggtgct

SEQ ID NO: 576005 - DNA, 25 bp, Homo sapien
cccgctctttcactatggtgctctg

SEQ ID NO: 576006 - DNA, 25 bp, Homo sapien
caagacacgatcttcttatactgta

SEQ ID NO: 576007 - DNA, 25 bp, Homo sapien
tccagccaagacacgatcttcttat

SEQ ID NO: 576008 - DNA, 25 bp, Homo sapien
agacacgatcttcttatactgtagt

SEQ ID NO: 576009 - DNA, 25 bp, Homo sapien
gccaagacacgatcttcttatactg

SEQ ID NO: 576010 - DNA, 25 bp, Homo sapien
agaggccagtcgaagggcctgtgct

SEQ ID NO: 576011 - DNA, 25 bp, Homo sapien
gacacatggccaggttgaggtgaga

SEQ ID NO: 576012 - DNA, 25 bp, Homo sapien
gcttcctcattggaaaaactagact

SEQ ID NO: 576013 - DNA, 25 bp, Homo sapien
gtcgaagggcctgtgctttctgtgc

SEQ ID NO: 576014 - DNA, 25 bp, Homo sapien
acagctttcaatggcagcagagaag

SEQ ID NO: 576015 - DNA, 25 bp, Homo sapien
ttgttacagctttcaatggcagcag

SEQ ID NO: 576016 - DNA, 25 bp, Homo sapien
ctttcaatggcagcagagaaggcct

SEQ ID NO: 576017 - DNA, 25 bp, Homo sapien
cttgttacagctttcaatggcagca

SEQ ID NO: 576018 - DNA, 25 bp, Homo sapien
cttcggatccgctgctggcacacag

SEQ ID NO: 576019 - DNA, 25 bp, Homo sapien
aacatattggcatagagcttcttct

SEQ ID NO: 576020 - DNA, 25 bp, Homo sapien
gctgccttcggatccgctgctggca

SEQ ID NO: 576021 - DNA, 25 bp, Homo sapien
catagagcttcttctcccgggcaag

SEQ ID NO: 576022 - DNA, 25 bp, Homo sapien
tgaggtctctacctactgggttcaa

SEQ ID NO: 576023 - DNA, 25 bp, Homo sapien
acacaaaaagcatctcgcttttctt

SEQ ID NO: 576024 - DNA, 25 bp, Homo sapien
gtggtgccatcctaagtcactgagg

SEQ ID NO: 576025 - DNA, 25 bp, Homo sapien
gtcactgaggtctctacctactggg

SEQ ID NO: 576026 - DNA, 25 bp, Homo sapien
ctgagactggctccctgccgtgttg

SEQ ID NO: 576027 - DNA, 25 bp, Homo sapien
gactggctccctgccgtgttgctct

SEQ ID NO: 576028 - DNA, 25 bp, Homo sapien
gagactggctccctgccgtgttgct

SEQ ID NO: 576029 - DNA, 25 bp, Homo sapien
ggctccctgccgtgttgctcttctg

SEQ ID NO: 576030 - DNA, 25 bp, Homo sapien
gatggacatatgttcatgtgcaatg

SEQ ID NO: 576031 - DNA, 25 bp, Homo sapien
aagccaccatccaaccagatagaaa

SEQ ID NO: 576032 - DNA, 25 bp, Homo sapien
catccctaccacttgcctcttctac

SEQ ID NO: 576033 - DNA, 25 bp, Homo sapien
atggatggacatatgttcatgtgca

SEQ ID NO: 576034 - DNA, 25 bp, Homo sapien
actttattgctcaagcatggaactt

SEQ ID NO: 576035 - DNA, 25 bp, Homo sapien
ctttattgctcaagcatggaacttg

SEQ ID NO: 576036 - DNA, 25 bp, Homo sapien
attgctcaagcatggaacttgaggc

SEQ ID NO: 576037 - DNA, 25 bp, Homo sapien
ttattgctcaagcatggaacttgag

SEQ ID NO: 576038 - DNA, 25 bp, Homo sapien
tgggcgaagccatagacacaaatcc

SEQ ID NO: 576039 - DNA, 25 bp, Homo sapien
caaccacatcgctgttgggaaagga

SEQ ID NO: 576040 - DNA, 25 bp, Homo sapien
gaaggaagctggacgtgaacactct

SEQ ID NO: 576041 - DNA, 25 bp, Homo sapien
catcatgccataggagttaagggtc

SEQ ID NO: 576042 - DNA, 25 bp, Homo sapien
gatgctgtcagtacagtgctaggct

SEQ ID NO: 576043 - DNA, 25 bp, Homo sapien
tgaggtaagcccagtaagaaagcag

SEQ ID NO: 576044 - DNA, 25 bp, Homo sapien
tttgaaataccaagaggacccagac

SEQ ID NO: 576045 - DNA, 25 bp, Homo sapien
tagtgattattgttggctgcaggcg

SEQ ID NO: 576046 - DNA, 25 bp, Homo sapien
aacctcatgggagagtctggattag

SEQ ID NO: 576047 - DNA, 25 bp, Homo sapien
aggaatgctttcgattttgcagatg

SEQ ID NO: 576048 - DNA, 25 bp, Homo sapien
cttgccaaaggaacctcatgggaga

SEQ ID NO: 576049 - DNA, 25 bp, Homo sapien
ccaaaggaacctcatgggagagtct

SEQ ID NO: 576050 - DNA, 25 bp, Homo sapien
ctaagacttatctctagatgttcca

SEQ ID NO: 576051 - DNA, 25 bp, Homo sapien
tccacggttacatgcagttttacat

SEQ ID NO: 576052 - DNA, 25 bp, Homo sapien
tgttacataaactaagacttatctc

SEQ ID NO: 576053 - DNA, 25 bp, Homo sapien
tctctagatgttccacggttacatg

SEQ ID NO: 576054 - DNA, 25 bp, Homo sapien
cttgcaaagcttgttaaaagctcac

SEQ ID NO: 576055 - DNA, 25 bp, Homo sapien
aaagctcacagtactgcttgctact

SEQ ID NO: 576056 - DNA, 25 bp, Homo sapien
gcttgttaaaagctcacagtactgc

SEQ ID NO: 576057 - DNA, 25 bp, Homo sapien
cacagtactgcttgctactaacttt

SEQ ID NO: 576058 - DNA, 25 bp, Homo sapien
tgacaggcccacgggccactccttt

SEQ ID NO: 576059 - DNA, 25 bp, Homo sapien
tgagtgacaggcccacgggccactc

SEQ ID NO: 576060 - DNA, 25 bp, Homo sapien
agtgacaggcccacgggccactcct

SEQ ID NO: 576061 - DNA, 25 bp, Homo sapien
gtgagtgacaggcccacgggccact

SEQ ID NO: 576062 - DNA, 25 bp, Homo sapien
agttacgtcactgcctgaacctcca

SEQ ID NO: 576063 - DNA, 25 bp, Homo sapien
ttggaggcgggcttcccaactctga

SEQ ID NO: 576064 - DNA, 25 bp, Homo sapien
agagcggaaggccacctaaggcagc

SEQ ID NO: 576065 - DNA, 25 bp, Homo sapien
ccttacagaggaggcgggtcttccg

SEQ ID NO: 576066 - DNA, 25 bp, Homo sapien
cgttatcaacgtctccgaggcagat

SEQ ID NO: 576067 - DNA, 25 bp, Homo sapien
gattgcgtgcgggaagaggctcccg

SEQ ID NO: 576068 - DNA, 25 bp, Homo sapien
gctgcacgtagctaactgacctcat

SEQ ID NO: 576069 - DNA, 25 bp, Homo sapien
agcgccacgcgctgcacgtagctaa

SEQ ID NO: 576070 - DNA, 25 bp, Homo sapien
caaccacgaacactgaagctatcaa

SEQ ID NO: 576071 - DNA, 25 bp, Homo sapien
gtctcttgcggtgcgcatgcaccta

SEQ ID NO: 576072 - DNA, 25 bp, Homo sapien
tttttctctctagcgctccaaacta

SEQ ID NO: 576073 - DNA, 25 bp, Homo sapien
agcgcgcatgctcacgctcacgtgg

SEQ ID NO: 576074 - DNA, 25 bp, Homo sapien
tattccctttaatgctccaccggag

SEQ ID NO: 576075 - DNA, 25 bp, Homo sapien
ctatctgaggactggaactctctcg

SEQ ID NO: 576076 - DNA, 25 bp, Homo sapien
gaattcctagaatgtagcagagtcc

SEQ ID NO: 576077 - DNA, 25 bp, Homo sapien
cagagtccttggtgcataatgagca

SEQ ID NO: 576078 - DNA, 25 bp, Homo sapien
aaactgctttatgatctcctcttgg

SEQ ID NO: 576079 - DNA, 25 bp, Homo sapien
caccatttgtatctgggtagctgcc

SEQ ID NO: 576080 - DNA, 25 bp, Homo sapien
tcacgatgttaaccaagtggcttca

SEQ ID NO: 576081 - DNA, 25 bp, Homo sapien
aagggaggtccctgtatggagcctc

SEQ ID NO: 576082 - DNA, 25 bp, Homo sapien
gccaacacaaccatagtttcccagt

SEQ ID NO: 576083 - DNA, 25 bp, Homo sapien
tgaggccaacacaaccatagtttcc

SEQ ID NO: 576084 - DNA, 25 bp, Homo sapien
ttttgaggccaacacaaccatagtt

SEQ ID NO: 576085 - DNA, 25 bp, Homo sapien
caacacaaccatagtttcccagttc

SEQ ID NO: 576086 - DNA, 25 bp, Homo sapien
ctggtgtctcccaccaccagttcat

SEQ ID NO: 576087 - DNA, 25 bp, Homo sapien
cttcccgctggtgtctcccaccacc

SEQ ID NO: 576088 - DNA, 25 bp, Homo sapien
tgtctcccaccaccagttcatttaa

SEQ ID NO: 576089 - DNA, 25 bp, Homo sapien
ggtgtctcccaccaccagttcattt

SEQ ID NO: 576090 - DNA, 25 bp, Homo sapien
tgtcatcatttttatacacagacac

SEQ ID NO: 576091 - DNA, 25 bp, Homo sapien
gaacaggtgagccatggccgactgt

SEQ ID NO: 576092 - DNA, 25 bp, Homo sapien
gagccatggccgactgtcatcattt

SEQ ID NO: 576093 - DNA, 25 bp, Homo sapien
ggtgagccatggccgactgtcatca

SEQ ID NO: 576094 - DNA, 25 bp, Homo sapien
ggctgccctccctgaatcaaattgg

SEQ ID NO: 576095 - DNA, 25 bp, Homo sapien
cataaagtgtcaaggagtactccac

SEQ ID NO: 576096 - DNA, 25 bp, Homo sapien
gaagactttcgccatatgaaccatg

SEQ ID NO: 576097 - DNA, 25 bp, Homo sapien
ctcagggagacgctaagggagacca

SEQ ID NO: 576098 - DNA, 25 bp, Homo sapien
acacgtctccaaccccaacgcaagt

SEQ ID NO: 576099 - DNA, 25 bp, Homo sapien
ttattacacacgtctccaaccccaa

SEQ ID NO: 576100 - DNA, 25 bp, Homo sapien
cgtctccaaccccaacgcaagtcag

SEQ ID NO: 576101 - DNA, 25 bp, Homo sapien
ttcctttattacacacgtctccaac

SEQ ID NO: 576102 - DNA, 25 bp, Homo sapien
tgctgcttgaagactggacgctgct

SEQ ID NO: 576103 - DNA, 25 bp, Homo sapien
gacgctgctcctctccgattagtgt

SEQ ID NO: 576104 - DNA, 25 bp, Homo sapien
agtgtctcgtggtgcccagaagcat

SEQ ID NO: 576105 - DNA, 25 bp, Homo sapien
gatcagcatgaccttggtgttggca

SEQ ID NO: 576106 - DNA, 25 bp, Homo sapien
tggctgcctgcaaaggtaggcatgc

SEQ ID NO: 576107 - DNA, 25 bp, Homo sapien
tgcctgcaaaggtaggcatgcccac

SEQ ID NO: 576108 - DNA, 25 bp, Homo sapien
gctgcctgcaaaggtaggcatgccc

SEQ ID NO: 576109 - DNA, 25 bp, Homo sapien
tcctggctgcctgcaaaggtaggca

SEQ ID NO: 576110 - DNA, 25 bp, Homo sapien
tcccttgggatatgctctagtatcc

SEQ ID NO: 576111 - DNA, 25 bp, Homo sapien
gggatatgctctagtatccactgac

SEQ ID NO: 576112 - DNA, 25 bp, Homo sapien
gatatgctctagtatccactgactc

SEQ ID NO: 576113 - DNA, 25 bp, Homo sapien
ccaatcccttgggatatgctctagt

SEQ ID NO: 576114 - DNA, 25 bp, Homo sapien
tgcctggcttatcatgggagctcag

SEQ ID NO: 576115 - DNA, 25 bp, Homo sapien
caaatgcatacatgaatacggattc

SEQ ID NO: 576116 - DNA, 25 bp, Homo sapien
gggagctcagcacataacaaatgca

SEQ ID NO: 576117 - DNA, 25 bp, Homo sapien
tttattcactatggcaattccagtg

SEQ ID NO: 576118 - DNA, 25 bp, Homo sapien
ggtatcacaggcgagaggcagcaca

SEQ ID NO: 576119 - DNA, 25 bp, Homo sapien
cgtctggccgtgtacttactacctt

SEQ ID NO: 576120 - DNA, 25 bp, Homo sapien
gaggcagcacacctagcctatattg

SEQ ID NO: 576121 - DNA, 25 bp, Homo sapien
tgaaccaccgtggtcggctgcactt

SEQ ID NO: 576122 - DNA, 25 bp, Homo sapien
tgggcatgaaagacaagatgggctc

SEQ ID NO: 576123 - DNA, 25 bp, Homo sapien
ccgatctgcggtgctactcacttca

SEQ ID NO: 576124 - DNA, 25 bp, Homo sapien
gcatcttgcccgtccatttggtcca

SEQ ID NO: 576125 - DNA, 25 bp, Homo sapien
tatctggatggttcccttgcttgcc

SEQ ID NO: 576126 - DNA, 25 bp, Homo sapien
accagctgccctgtcagatgttcag

SEQ ID NO: 576127 - DNA, 25 bp, Homo sapien
aaagctcgcaccacacggtctgtgt

SEQ ID NO: 576128 - DNA, 25 bp, Homo sapien
agatgttcaggaccctcacctagct

SEQ ID NO: 576129 - DNA, 25 bp, Homo sapien
tcacctagctcctcccagcggaaag

SEQ ID NO: 576130 - DNA, 25 bp, Homo sapien
acccagtggccccagagtcactgag

SEQ ID NO: 576131 - DNA, 25 bp, Homo sapien
gagacaccatcagttcaggaagacc

SEQ ID NO: 576132 - DNA, 25 bp, Homo sapien
ccagagtcactgagaggctgtccac

SEQ ID NO: 576133 - DNA, 25 bp, Homo sapien
accatcagttcaggaagacccagtg

SEQ ID NO: 576134 - DNA, 25 bp, Homo sapien
catccgtgggcccttcagaggcagg

SEQ ID NO: 576135 - DNA, 25 bp, Homo sapien
tactaccatccgtgggcccttcaga

SEQ ID NO: 576136 - DNA, 25 bp, Homo sapien
ctttttccaggtacacagtagaatt

SEQ ID NO: 576137 - DNA, 25 bp, Homo sapien
gtagaattgcatacgcacaacctgg

SEQ ID NO: 576138 - DNA, 25 bp, Homo sapien
tgccaattaggtgagtggagacatt

SEQ ID NO: 576139 - DNA, 25 bp, Homo sapien
tggatacggccagatgtctggtgca

SEQ ID NO: 576140 - DNA, 25 bp, Homo sapien
gagacattcttgttgtggatacggc

SEQ ID NO: 576141 - DNA, 25 bp, Homo sapien
tctggtgcagcaccacgtctcgggc

SEQ ID NO: 576142 - DNA, 25 bp, Homo sapien
accagaggaagaatatgtaaagggc

SEQ ID NO: 576143 - DNA, 25 bp, Homo sapien
aatatgtaaagggcagggcaaggtc

SEQ ID NO: 576144 - DNA, 25 bp, Homo sapien
gaccagaggaagaatatgtaaaggg

SEQ ID NO: 576145 - DNA, 25 bp, Homo sapien
gagccactactctcagtgccgtggc

SEQ ID NO: 576146 - DNA, 25 bp, Homo sapien
aaagaggccagagccactactctca

SEQ ID NO: 576147 - DNA, 25 bp, Homo sapien
aggccagagccactactctcagtgc

SEQ ID NO: 576148 - DNA, 25 bp, Homo sapien
cagagccactactctcagtgccgtg

SEQ ID NO: 576149 - DNA, 25 bp, Homo sapien
tggtgatccacctgcactgaccaca

SEQ ID NO: 576150 - DNA, 25 bp, Homo sapien
catttcttccatgagcttcagtgtc

SEQ ID NO: 576151 - DNA, 25 bp, Homo sapien
tgaccacagcagcttgtctgcttct

SEQ ID NO: 576152 - DNA, 25 bp, Homo sapien
ccagtttctccagggcaaagagctg

SEQ ID NO: 576153 - DNA, 25 bp, Homo sapien
tatgtctgtccatcccaggcgcatg

SEQ ID NO: 576154 - DNA, 25 bp, Homo sapien
gcacagaaggcacggatattttcat

SEQ ID NO: 576155 - DNA, 25 bp, Homo sapien
catccacttggaagcggacgacggt

SEQ ID NO: 576156 - DNA, 25 bp, Homo sapien
acgacggtgcggttgtgatcaatga

SEQ ID NO: 576157 - DNA, 25 bp, Homo sapien
tcaccagattggtagactccatccg

SEQ ID NO: 576158 - DNA, 25 bp, Homo sapien
tgaaagtgacatatacgaggcaggg

SEQ ID NO: 576159 - DNA, 25 bp, Homo sapien
gcggccctctttgcaggcgtacagg

SEQ ID NO: 576160 - DNA, 25 bp, Homo sapien
caggctgtggtactccggcttggtc

SEQ ID NO: 576161 - DNA, 25 bp, Homo sapien
ggtctcctgggcactcgggccactg

SEQ ID NO: 576162 - DNA, 25 bp, Homo sapien
actcgggccactggcttttctggga

SEQ ID NO: 576163 - DNA, 25 bp, Homo sapien
cagctcctgcagcatgctgtgggtc

SEQ ID NO: 576164 - DNA, 25 bp, Homo sapien
gcagcatgctgtgggtctcctgggc

SEQ ID NO: 576165 - DNA, 25 bp, Homo sapien
cgtttggtgaagcagggcacgagtc

SEQ ID NO: 576166 - DNA, 25 bp, Homo sapien
tctggatggtagagcgtttggtgaa

SEQ ID NO: 576167 - DNA, 25 bp, Homo sapien
gtggtggctggtctggatggtagag

SEQ ID NO: 576168 - DNA, 25 bp, Homo sapien
agcagggcacgagtcacagggaggt

SEQ ID NO: 576169 - DNA, 25 bp, Homo sapien
ttcagaagaatccttcaccagctat

SEQ ID NO: 576170 - DNA, 25 bp, Homo sapien
tgatttggaacaaggccagggtcct

SEQ ID NO: 576171 - DNA, 25 bp, Homo sapien
aacttggaattgtgccacggaagac

SEQ ID NO: 576172 - DNA, 25 bp, Homo sapien
taaggaaatgggcagagggtcaact

SEQ ID NO: 576173 - DNA, 25 bp, Homo sapien
tatagttcacggtcaccctagggct

SEQ ID NO: 576174 - DNA, 25 bp, Homo sapien
gaacagacggcacataaatgaccca

SEQ ID NO: 576175 - DNA, 25 bp, Homo sapien
tcatctcagggttgctaggaacatg

SEQ ID NO: 576176 - DNA, 25 bp, Homo sapien
aacgtgagaaagcactgacccggct

SEQ ID NO: 576177 - DNA, 25 bp, Homo sapien
taatacctgaagaatacggcaacgt

SEQ ID NO: 576178 - DNA, 25 bp, Homo sapien
ctgaacaagggaactgggaccgttg

SEQ ID NO: 576179 - DNA, 25 bp, Homo sapien
agagaaagacagtggtacagctaac

SEQ ID NO: 576180 - DNA, 25 bp, Homo sapien
ctctcaaatcatggattaggagtaa

SEQ ID NO: 576181 - DNA, 25 bp, Homo sapien
gtggtacagctaacctgaacaaggg

SEQ ID NO: 576182 - DNA, 25 bp, Homo sapien
gccttgtagagaactgctcctgtga

SEQ ID NO: 576183 - DNA, 25 bp, Homo sapien
cactggctttttgtacccaccgagc

SEQ ID NO: 576184 - DNA, 25 bp, Homo sapien
tcactgtgaagagaagaacccgaac

SEQ ID NO: 576185 - DNA, 25 bp, Homo sapien
ttaagacgccagatccctgagagtc

SEQ ID NO: 576186 - DNA, 25 bp, Homo sapien
caaggatttagaccccacgtgaggt

SEQ ID NO: 576187 - DNA, 25 bp, Homo sapien
cccaggtggagcagttggagctaca

SEQ ID NO: 576188 - DNA, 25 bp, Homo sapien
tgcagcacgaggagttcccagagat

SEQ ID NO: 576189 - DNA, 25 bp, Homo sapien
aaccatagtagagagggacacctgc

SEQ ID NO: 576190 - DNA, 25 bp, Homo sapien
gcgcctggccccgataaaagccagt

SEQ ID NO: 576191 - DNA, 25 bp, Homo sapien
tatgagtctcataaaaaccagtttt

SEQ ID NO: 576192 - DNA, 25 bp, Homo sapien
tctaggagggaatcatcaatgggct

SEQ ID NO: 576193 - DNA, 25 bp, Homo sapien
gagttctgcccctattgtatgagtc

SEQ ID NO: 576194 - DNA, 25 bp, Homo sapien
tatttttagactaccacgttggtca

SEQ ID NO: 576195 - DNA, 25 bp, Homo sapien
ggcattcacatccttttatagacca

SEQ ID NO: 576196 - DNA, 25 bp, Homo sapien
tattatacttcctttagactcctga

SEQ ID NO: 576197 - DNA, 25 bp, Homo sapien
ttatagaccataaaactttctgcca

SEQ ID NO: 576198 - DNA, 25 bp, Homo sapien
gctcttctggtcaactgcaaggtga

SEQ ID NO: 576199 - DNA, 25 bp, Homo sapien
agccgcgcagtgtgatccaaagacg

SEQ ID NO: 576200 - DNA, 25 bp, Homo sapien
tggacctaaccaggatcctctacct

SEQ ID NO: 576201 - DNA, 25 bp, Homo sapien
tccaaagacgcctggtggagggaaa

SEQ ID NO: 576202 - DNA, 25 bp, Homo sapien
cagattgattctacacaggaggcaa

SEQ ID NO: 576203 - DNA, 25 bp, Homo sapien
ggttcaggtgactatcacacttcag

SEQ ID NO: 576204 - DNA, 25 bp, Homo sapien
caggtcaaagatgactcccagcatc

SEQ ID NO: 576205 - DNA, 25 bp, Homo sapien
tgttccaaggatccgagagagctgt

SEQ ID NO: 576206 - DNA, 25 bp, Homo sapien
caaaaagcggcctggtatgagcggt

SEQ ID NO: 576207 - DNA, 25 bp, Homo sapien
catgtggactgtggatcaccttcaa

SEQ ID NO: 576208 - DNA, 25 bp, Homo sapien
agctctatcatgaaagcaatgcggg

SEQ ID NO: 576209 - DNA, 25 bp, Homo sapien
tgaagacatggaggcaaaaagcggc

SEQ ID NO: 576210 - DNA, 25 bp, Homo sapien
tcacaagcttgagtggctaaaacaa

SEQ ID NO: 576211 - DNA, 25 bp, Homo sapien
tgcagatgcattatcccgacctcag

SEQ ID NO: 576212 - DNA, 25 bp, Homo sapien
tgctgggtcctaagacttaatgtac

SEQ ID NO: 576213 - DNA, 25 bp, Homo sapien
gctgaaagtacaacaggaaggtgtt

SEQ ID NO: 576214 - DNA, 25 bp, Homo sapien
tcagactaactggaagagagaagct

SEQ ID NO: 576215 - DNA, 25 bp, Homo sapien
caaagtggtgtctacagtcctgcag

SEQ ID NO: 576216 - DNA, 25 bp, Homo sapien
cattttcggagcacaagtggtttcc

SEQ ID NO: 576217 - DNA, 25 bp, Homo sapien
cagtacttgcttgggttacagaaca

SEQ ID NO: 576218 - DNA, 25 bp, Homo sapien
aaaacacgcaatatttggtttcctg

SEQ ID NO: 576219 - DNA, 25 bp, Homo sapien
caccacctgaggttataaatttagt

SEQ ID NO: 576220 - DNA, 25 bp, Homo sapien
tccttcctcgcttttggagtctcca

SEQ ID NO: 576221 - DNA, 25 bp, Homo sapien
ctcagcgtccagtacatagtaggcg

SEQ ID NO: 576222 - DNA, 25 bp, Homo sapien
acctatgtgtaaatgtcatcgcttc

SEQ ID NO: 576223 - DNA, 25 bp, Homo sapien
ctctccatagtgacctatgtgtaaa

SEQ ID NO: 576224 - DNA, 25 bp, Homo sapien
aggtgtctgcatggccctctccata

SEQ ID NO: 576225 - DNA, 25 bp, Homo sapien
aaatgtcatcgcttctaaaagagcc

SEQ ID NO: 576226 - DNA, 25 bp, Homo sapien
tggaagatccacctctttgggatgg

SEQ ID NO: 576227 - DNA, 25 bp, Homo sapien
taatcctagcgtcagaaatataaaa

SEQ ID NO: 576228 - DNA, 25 bp, Homo sapien
agccaaagcacttgacctcttcgtg

SEQ ID NO: 576229 - DNA, 25 bp, Homo sapien
taaaatgttgtccttgcctggcagc

SEQ ID NO: 576230 - DNA, 25 bp, Homo sapien
tttccagcttccctgcgaccctcca

SEQ ID NO: 576231 - DNA, 25 bp, Homo sapien
tccagcttccctgcgaccctccagc

SEQ ID NO: 576232 - DNA, 25 bp, Homo sapien
gcttccctgcgaccctccagccttc

SEQ ID NO: 576233 - DNA, 25 bp, Homo sapien
cagcttccctgcgaccctccagcct

SEQ ID NO: 576234 - DNA, 25 bp, Homo sapien
tgagctgctgacgcaagttcctgag

SEQ ID NO: 576235 - DNA, 25 bp, Homo sapien
tacagggccacccacgttgccagtc

SEQ ID NO: 576236 - DNA, 25 bp, Homo sapien
agtaaggcttctggcgccccctagc

SEQ ID NO: 576237 - DNA, 25 bp, Homo sapien
aagtaaggcttctggcgccccctag

SEQ ID NO: 576238 - DNA, 25 bp, Homo sapien
tcttgttcatcggccagagacacag

SEQ ID NO: 576239 - DNA, 25 bp, Homo sapien
ctctcttgttcatcggccagagaca

SEQ ID NO: 576240 - DNA, 25 bp, Homo sapien
gatttcacctacgtgaggtacctag

SEQ ID NO: 576241 - DNA, 25 bp, Homo sapien
tcctgagtgctccacgggagtgcca

SEQ ID NO: 576242 - DNA, 25 bp, Homo sapien
gaaggacctgcaaagtgtgtagcac

SEQ ID NO: 576243 - DNA, 25 bp, Homo sapien
cattgatggtcacacctgctgggct

SEQ ID NO: 576244 - DNA, 25 bp, Homo sapien
tggagatggttggggagggtgatgg

SEQ ID NO: 576245 - DNA, 25 bp, Homo sapien
agatggttggggagggtgatgggaa

SEQ ID NO: 576246 - DNA, 25 bp, Homo sapien
atggttggggagggtgatgggaagg

SEQ ID NO: 576247 - DNA, 25 bp, Homo sapien
ggtggagatggttggggagggtgat

SEQ ID NO: 576248 - DNA, 25 bp, Homo sapien
acagtcagaatggtgttggccctgg

SEQ ID NO: 576249 - DNA, 25 bp, Homo sapien
gcaacagtcagaatggtgttggccc

SEQ ID NO: 576250 - DNA, 25 bp, Homo sapien
aagggtgtggaggacttatgccaaa

SEQ ID NO: 576251 - DNA, 25 bp, Homo sapien
aagcaacagtcagaatggtgttggc

SEQ ID NO: 576252 - DNA, 25 bp, Homo sapien
tcataacccattgggaatgaggctg

SEQ ID NO: 576253 - DNA, 25 bp, Homo sapien
cacagctgtgcttggttgcagggcc

SEQ ID NO: 576254 - DNA, 25 bp, Homo sapien
gattggtcagggtatagaaagcctc

SEQ ID NO: 576255 - DNA, 25 bp, Homo sapien
caggaaggctaaccaggtctcagca

SEQ ID NO: 576256 - DNA, 25 bp, Homo sapien
ctgggtagagcagggagaacaggga

SEQ ID NO: 576257 - DNA, 25 bp, Homo sapien
agggagaacagggaggggctccagt

SEQ ID NO: 576258 - DNA, 25 bp, Homo sapien
agcagggagaacagggaggggctcc

SEQ ID NO: 576259 - DNA, 25 bp, Homo sapien
ggagaacagggaggggctccagttc

SEQ ID NO: 576260 - DNA, 25 bp, Homo sapien
ccttggaggactctcatcgaaggtg

SEQ ID NO: 576261 - DNA, 25 bp, Homo sapien
gactctcatcgaaggtgggaggact

SEQ ID NO: 576262 - DNA, 25 bp, Homo sapien
tggaggactctcatcgaaggtggga

SEQ ID NO: 576263 - DNA, 25 bp, Homo sapien
ttccttggaggactctcatcgaagg

SEQ ID NO: 576264 - DNA, 25 bp, Homo sapien
taactagcttgtggacagcggcatc

SEQ ID NO: 576265 - DNA, 25 bp, Homo sapien
taccggcacatatccgctggtggga

SEQ ID NO: 576266 - DNA, 25 bp, Homo sapien
tcccaataatttcgccaggagctgg

SEQ ID NO: 576267 - DNA, 25 bp, Homo sapien
tgttcgacccaataccgcaggctta

SEQ ID NO: 576268 - DNA, 25 bp, Homo sapien
tcttaataagacaagctcacgaggg

SEQ ID NO: 576269 - DNA, 25 bp, Homo sapien
ccctgaacattagggcaggaagggc

SEQ ID NO: 576270 - DNA, 25 bp, Homo sapien
caggaagggcccagttacaggtgct

SEQ ID NO: 576271 - DNA, 25 bp, Homo sapien
tggacctgctggttaacttaggcct

SEQ ID NO: 576272 - DNA, 25 bp, Homo sapien
cagttttcccagtgctagtcctgca

SEQ ID NO: 576273 - DNA, 25 bp, Homo sapien
gacaacacaaattgccagttttccc

SEQ ID NO: 576274 - DNA, 25 bp, Homo sapien
gacgatggtgatagggaagaggcaa

SEQ ID NO: 576275 - DNA, 25 bp, Homo sapien
gcagttggagcacttgcacaggcac

SEQ ID NO: 576276 - DNA, 25 bp, Homo sapien
ggtttattggcgtctgattcctaag

SEQ ID NO: 576277 - DNA, 25 bp, Homo sapien
tggcgtctgattcctaaggcaccag

SEQ ID NO: 576278 - DNA, 25 bp, Homo sapien
tctgattcctaaggcaccaggagag

SEQ ID NO: 576279 - DNA, 25 bp, Homo sapien
tctgtggtttattggcgtctgattc

SEQ ID NO: 576280 - DNA, 25 bp, Homo sapien
cagggagactggcattgacgagaac

SEQ ID NO: 576281 - DNA, 25 bp, Homo sapien
agctttgcaaagagccaccctaggc

SEQ ID NO: 576282 - DNA, 25 bp, Homo sapien
tactcaataaaagcgaaggtggaca

SEQ ID NO: 576283 - DNA, 25 bp, Homo sapien
gatgtttctctgataatgtccccaa

SEQ ID NO: 576284 - DNA, 25 bp, Homo sapien
ggatcttgggttcttcactgcaggg

SEQ ID NO: 576285 - DNA, 25 bp, Homo sapien
ccttagatcattatccagagactgc

SEQ ID NO: 576286 - DNA, 25 bp, Homo sapien
cagggtggtccgtgtaaatagtata

SEQ ID NO: 576287 - DNA, 25 bp, Homo sapien
caagtggatctgcttgccagagtcc

SEQ ID NO: 576288 - DNA, 25 bp, Homo sapien
gacccatcaaagtggagagccctcc

SEQ ID NO: 576289 - DNA, 25 bp, Homo sapien
gaaatgccacacttagcgagaccca

SEQ ID NO: 576290 - DNA, 25 bp, Homo sapien
ccggtctcggagaaaacagcatcta

SEQ ID NO: 576291 - DNA, 25 bp, Homo sapien
caacccggtgtgtctcggaaatgct

SEQ ID NO: 576292 - DNA, 25 bp, Homo sapien
gaccgttggttcaccttatctctgt

SEQ ID NO: 576293 - DNA, 25 bp, Homo sapien
ggatcagaacccgtatgtgatattt

SEQ ID NO: 576294 - DNA, 25 bp, Homo sapien
taagacttcaaaacgacacaaagag

SEQ ID NO: 576295 - DNA, 25 bp, Homo sapien
tgcgtcctgtctggtgaccgttggt

SEQ ID NO: 576296 - DNA, 25 bp, Homo sapien
gctattataattatgccactacata

SEQ ID NO: 576297 - DNA, 25 bp, Homo sapien
ttcctctcggatgaatgctattata

SEQ ID NO: 576298 - DNA, 25 bp, Homo sapien
ccgcatcttttacccccagaattga

SEQ ID NO: 576299 - DNA, 25 bp, Homo sapien
gaattgaactaccaacttcaacata

SEQ ID NO: 576300 - DNA, 25 bp, Homo sapien
agtgacaataatgtcactacccgct

SEQ ID NO: 576301 - DNA, 25 bp, Homo sapien
tcactacccgctaccatcagagcag

SEQ ID NO: 576302 - DNA, 25 bp, Homo sapien
ctttagtgacaataatgtcactacc

SEQ ID NO: 576303 - DNA, 25 bp, Homo sapien
aataatgtcactacccgctaccatc

SEQ ID NO: 576304 - DNA, 25 bp, Homo sapien
caaactggcctcagtgtcttgcagt

SEQ ID NO: 576305 - DNA, 25 bp, Homo sapien
gtttatggtatctcttgccacagta

SEQ ID NO: 576306 - DNA, 25 bp, Homo sapien
tcttggttaagaaggtcacccgcac

SEQ ID NO: 576307 - DNA, 25 bp, Homo sapien
cccgcaccctcagattgtatatgta

SEQ ID NO: 576308 - DNA, 25 bp, Homo sapien
aataatatctactgattgatgcggg

SEQ ID NO: 576309 - DNA, 25 bp, Homo sapien
cactctggaagtttcccgggcaaga

SEQ ID NO: 576310 - DNA, 25 bp, Homo sapien
caataataataacgggctggtcagg

SEQ ID NO: 576311 - DNA, 25 bp, Homo sapien
gaatgtagcaagatttccccgctca

SEQ ID NO: 576312 - DNA, 25 bp, Homo sapien
tcaaagaccaacctgcatacacact

SEQ ID NO: 576313 - DNA, 25 bp, Homo sapien
ctgagatgaagactgagattgtact

SEQ ID NO: 576314 - DNA, 25 bp, Homo sapien
cttcttaggccgactgtggctgaga

SEQ ID NO: 576315 - DNA, 25 bp, Homo sapien
tgtactacattgagtcaaagaccaa

SEQ ID NO: 576316 - DNA, 25 bp, Homo sapien
gctcctggcagaccgcacagccttc

SEQ ID NO: 576317 - DNA, 25 bp, Homo sapien
tggcagaccgcacagccttcgagcc

SEQ ID NO: 576318 - DNA, 25 bp, Homo sapien
cctggcagaccgcacagccttcgag

SEQ ID NO: 576319 - DNA, 25 bp, Homo sapien
cagctcctggcagaccgcacagcct

SEQ ID NO: 576320 - DNA, 25 bp, Homo sapien
gattagctcaaacccctcagatatt

SEQ ID NO: 576321 - DNA, 25 bp, Homo sapien
cactccattcaggtcgattagctca

SEQ ID NO: 576322 - DNA, 25 bp, Homo sapien
caaaacttctcggtatggctaaggc

SEQ ID NO: 576323 - DNA, 25 bp, Homo sapien
aaaaggcatcagatctcacaccaag

SEQ ID NO: 576324 - DNA, 25 bp, Homo sapien
ccagatcaactttaataagggcttc

SEQ ID NO: 576325 - DNA, 25 bp, Homo sapien
aggtaaatgagagttgcagctgagc

SEQ ID NO: 576326 - DNA, 25 bp, Homo sapien
aatggtgggacacaaggttgaatgc

SEQ ID NO: 576327 - DNA, 25 bp, Homo sapien
tgaatgcaataggtagagaggtaaa

SEQ ID NO: 576328 - DNA, 25 bp, Homo sapien
cgagacggagtattgtgaattctgg

SEQ ID NO: 576329 - DNA, 25 bp, Homo sapien
gacggagtattgtgaattctgggaa

SEQ ID NO: 576330 - DNA, 25 bp, Homo sapien
cacaaaggcatggagacgagacgga

SEQ ID NO: 576331 - DNA, 25 bp, Homo sapien
gagacgagacggagtattgtgaatt

SEQ ID NO: 576332 - DNA, 25 bp, Homo sapien
atgatgctgttagccttcgggttgg

SEQ ID NO: 576333 - DNA, 25 bp, Homo sapien
cacatgatgctgttagccttcgggt

SEQ ID NO: 576334 - DNA, 25 bp, Homo sapien
tgggggataggctccaattccaacc

SEQ ID NO: 576335 - DNA, 25 bp, Homo sapien
ttgggggataggctccaattccaac

SEQ ID NO: 576336 - DNA, 25 bp, Homo sapien
ccggtgaatgaggaacagttagtaa

SEQ ID NO: 576337 - DNA, 25 bp, Homo sapien
caaccggtgaatgaggaacagttag

SEQ ID NO: 576338 - DNA, 25 bp, Homo sapien
aaccggtgaatgaggaacagttagt

SEQ ID NO: 576339 - DNA, 25 bp, Homo sapien
cggtgaatgaggaacagttagtaac

SEQ ID NO: 576340 - DNA, 25 bp, Homo sapien
atgggaagctgtgtagatgcacagc

SEQ ID NO: 576341 - DNA, 25 bp, Homo sapien
gggccctccagtggttgttggtgga

SEQ ID NO: 576342 - DNA, 25 bp, Homo sapien
ctgtcgagtgtgagtgatgggaagc

SEQ ID NO: 576343 - DNA, 25 bp, Homo sapien
gccctccagtggttgttggtggaac

SEQ ID NO: 576344 - DNA, 25 bp, Homo sapien
atggtgctgtggtcaatgggcttgc

SEQ ID NO: 576345 - DNA, 25 bp, Homo sapien
tggtgctgtggtcaatgggcttgct

SEQ ID NO: 576346 - DNA, 25 bp, Homo sapien
tgatggtgctgtggtcaatgggctt

SEQ ID NO: 576347 - DNA, 25 bp, Homo sapien
ggtgctgtggtcaatgggcttgctg

SEQ ID NO: 576348 - DNA, 25 bp, Homo sapien
caataaacagagtatctagccaagt

SEQ ID NO: 576349 - DNA, 25 bp, Homo sapien
tctggcattctcacccagctaatgg

SEQ ID NO: 576350 - DNA, 25 bp, Homo sapien
cacatgaagttgagggaacaatctc

SEQ ID NO: 576351 - DNA, 25 bp, Homo sapien
tggccacagacagaatacattaact

SEQ ID NO: 576352 - DNA, 25 bp, Homo sapien
ctgctgcctaagcttcccgtgtagc

SEQ ID NO: 576353 - DNA, 25 bp, Homo sapien
cgactccctgatgcaagcgattctg

SEQ ID NO: 576354 - DNA, 25 bp, Homo sapien
cgattctgctgcctaagcttcccgt

SEQ ID NO: 576355 - DNA, 25 bp, Homo sapien
gactccctgatgcaagcgattctgc

SEQ ID NO: 576356 - DNA, 25 bp, Homo sapien
gccagtgtgaagagtgcagcttaga

SEQ ID NO: 576357 - DNA, 25 bp, Homo sapien
taaggtaagctctgaagtgcctgca

SEQ ID NO: 576358 - DNA, 25 bp, Homo sapien
ttttcgacttgagtgtctcgcccgg

SEQ ID NO: 576359 - DNA, 25 bp, Homo sapien
tctgaactggaagattgcggactct

SEQ ID NO: 576360 - DNA, 25 bp, Homo sapien
tccctctctccctgaggtaagcaag

SEQ ID NO: 576361 - DNA, 25 bp, Homo sapien
tctccctgaggtaagcaagcaggtg

SEQ ID NO: 576362 - DNA, 25 bp, Homo sapien
cctgaggtaagcaagcaggtgctgt

SEQ ID NO: 576363 - DNA, 25 bp, Homo sapien
taagcaagcaggtgctgtcgtctcc

SEQ ID NO: 576364 - DNA, 25 bp, Homo sapien
cttttctattgagattactgatggc

SEQ ID NO: 576365 - DNA, 25 bp, Homo sapien
gaaaacatatctcttttctattgag

SEQ ID NO: 576366 - DNA, 25 bp, Homo sapien
ctcttttctattgagattactgatg

SEQ ID NO: 576367 - DNA, 25 bp, Homo sapien
tttctattgagattactgatggcag

SEQ ID NO: 576368 - DNA, 25 bp, Homo sapien
tagaaaacaaatctcggctgggcca

SEQ ID NO: 576369 - DNA, 25 bp, Homo sapien
tacttgtctgagtaaaaggccgaga

SEQ ID NO: 576370 - DNA, 25 bp, Homo sapien
tccatcaggtcgtagaagctgccac

SEQ ID NO: 576371 - DNA, 25 bp, Homo sapien
cactgagcctgacaagagttggtac

SEQ ID NO: 576372 - DNA, 25 bp, Homo sapien
gccacgcacgcaacggctcctcgca

SEQ ID NO: 576373 - DNA, 25 bp, Homo sapien
caaccgccacgcacgcaacggctcc

SEQ ID NO: 576374 - DNA, 25 bp, Homo sapien
cgcacgcaacggctcctcgcacccc

SEQ ID NO: 576375 - DNA, 25 bp, Homo sapien
ccgccacgcacgcaacggctcctcg

SEQ ID NO: 576376 - DNA, 25 bp, Homo sapien
gtcgccgccgccgattggtccgtgt

SEQ ID NO: 576377 - DNA, 25 bp, Homo sapien
ggcaaccgcgttccacactgtcgcc

SEQ ID NO: 576378 - DNA, 25 bp, Homo sapien
tcattggctattgccggggcccaac

SEQ ID NO: 576379 - DNA, 25 bp, Homo sapien
gttctcgtggctcctgtctcattgg

SEQ ID NO: 576380 - DNA, 25 bp, Homo sapien
cttccccgccgtcgctagagtggct

SEQ ID NO: 576381 - DNA, 25 bp, Homo sapien
ccgccgtcgctagagtggctaggct

SEQ ID NO: 576382 - DNA, 25 bp, Homo sapien
tggctaggctggcacgccgccgcgt

SEQ ID NO: 576383 - DNA, 25 bp, Homo sapien
ccaccacgtacacactcttccccgc

SEQ ID NO: 576384 - DNA, 25 bp, Homo sapien
gactgagccggcagcgcgaagcctc

SEQ ID NO: 576385 - DNA, 25 bp, Homo sapien
gggactgagccggcagcgcgaagcc

SEQ ID NO: 576386 - DNA, 25 bp, Homo sapien
cgctgggactgagccggcagcgcga

SEQ ID NO: 576387 - DNA, 25 bp, Homo sapien
gccgctgggactgagccggcagcgc

SEQ ID NO: 576388 - DNA, 25 bp, Homo sapien
ctccgccttctcgcttcgcccctcc

SEQ ID NO: 576389 - DNA, 25 bp, Homo sapien
gaggagacctgccacggccctgtct

SEQ ID NO: 576390 - DNA, 25 bp, Homo sapien
tcaggaggagacctgccacggccct

SEQ ID NO: 576391 - DNA, 25 bp, Homo sapien
tccgccttctcgcttcgcccctccg

SEQ ID NO: 576392 - DNA, 25 bp, Homo sapien
agaattcagctttacccgtccgaag

SEQ ID NO: 576393 - DNA, 25 bp, Homo sapien
aagcagcggcgtcagaacaagctac

SEQ ID NO: 576394 - DNA, 25 bp, Homo sapien
gagggagcccgtcacgaaaactcca

SEQ ID NO: 576395 - DNA, 25 bp, Homo sapien
gaaaactccagaagttcctaagcag

SEQ ID NO: 576396 - DNA, 25 bp, Homo sapien
tgacacgctgagattttggatcctt

SEQ ID NO: 576397 - DNA, 25 bp, Homo sapien
tagcgaacaagaaagtgacacgctg

SEQ ID NO: 576398 - DNA, 25 bp, Homo sapien
gggtgtggcccactggcaaatcagt

SEQ ID NO: 576399 - DNA, 25 bp, Homo sapien
tttttccgaggctctccctctggca

SEQ ID NO: 576400 - DNA, 25 bp, Homo sapien
aatgatttcaaacggcttcccatta

SEQ ID NO: 576401 - DNA, 25 bp, Homo sapien
caatgatttcaaacggcttcccatt

SEQ ID NO: 576402 - DNA, 25 bp, Homo sapien
tcagatgacgccaaagtttctaacc

SEQ ID NO: 576403 - DNA, 25 bp, Homo sapien
tgatttcaaacggcttcccattaac

SEQ ID NO: 576404 - DNA, 25 bp, Homo sapien
cagttggcgtgtagggcttaaatcc

SEQ ID NO: 576405 - DNA, 25 bp, Homo sapien
tgtcttggtaatggaataaaaagcg

SEQ ID NO: 576406 - DNA, 25 bp, Homo sapien
ccaaatctttgtcttggtaatggaa

SEQ ID NO: 576407 - DNA, 25 bp, Homo sapien
gataatagacgtgttccaaggcgcc

SEQ ID NO: 576408 - DNA, 25 bp, Homo sapien
caccacagccgtctccaagtttttt

SEQ ID NO: 576409 - DNA, 25 bp, Homo sapien
gagccaccacagccgtctccaagtt

SEQ ID NO: 576410 - DNA, 25 bp, Homo sapien
tcgtgatctcaggtgacgcgcctgc

SEQ ID NO: 576411 - DNA, 25 bp, Homo sapien
cgaactcgtgatctcaggtgacgcg

SEQ ID NO: 576412 - DNA, 25 bp, Homo sapien
aatgcatagcaacttcaatttgcat

SEQ ID NO: 576413 - DNA, 25 bp, Homo sapien
taatgcatagcaacttcaatttgca

SEQ ID NO: 576414 - DNA, 25 bp, Homo sapien
ttagcctgtcgcatcttcatcattt

SEQ ID NO: 576415 - DNA, 25 bp, Homo sapien
tgataatccagcttagcctgtcgca

SEQ ID NO: 576416 - DNA, 25 bp, Homo sapien
agcttagcctgtcgcatcttcatca

SEQ ID NO: 576417 - DNA, 25 bp, Homo sapien
taatccagcttagcctgtcgcatct

SEQ ID NO: 576418 - DNA, 25 bp, Homo sapien
tgttctaattagtcaaagggcagta

SEQ ID NO: 576419 - DNA, 25 bp, Homo sapien
tcaaatttggatcaagggtgagaag

SEQ ID NO: 576420 - DNA, 25 bp, Homo sapien
tggaaaggaaggtactagcacatag

SEQ ID NO: 576421 - DNA, 25 bp, Homo sapien
tcaggaaacaagcatgacagactat

SEQ ID NO: 576422 - DNA, 25 bp, Homo sapien
gattgggctgcaccataaatggctc

SEQ ID NO: 576423 - DNA, 25 bp, Homo sapien
gagtatgacagttcaccaagggagt

SEQ ID NO: 576424 - DNA, 25 bp, Homo sapien
tggctttgcccgacgtagcctggct

SEQ ID NO: 576425 - DNA, 25 bp, Homo sapien
caagggagtctgctcatcactggcc

SEQ ID NO: 576426 - DNA, 25 bp, Homo sapien
tccacaacagaggagcttactgatg

SEQ ID NO: 576427 - DNA, 25 bp, Homo sapien
ctgatggagcatgaacttcgtctgg

SEQ ID NO: 576428 - DNA, 25 bp, Homo sapien
gcagtatccacggtgttttcagcat

SEQ ID NO: 576429 - DNA, 25 bp, Homo sapien
aacttcgtctggtttcaggacagca

SEQ ID NO: 576430 - DNA, 25 bp, Homo sapien
gtccagccttctattactccttaga

SEQ ID NO: 576431 - DNA, 25 bp, Homo sapien
cctgacatggtctattaggtcccat

SEQ ID NO: 576432 - DNA, 25 bp, Homo sapien
ccatataattagagcccacttccct

SEQ ID NO: 576433 - DNA, 25 bp, Homo sapien
tgcatcctcaataacctgggctcga

SEQ ID NO: 576434 - DNA, 25 bp, Homo sapien
cagaattgggtctttctaaacatgc

SEQ ID NO: 576435 - DNA, 25 bp, Homo sapien
ctgggatattccatcagtctcctca

SEQ ID NO: 576436 - DNA, 25 bp, Homo sapien
gtctcctcatcgaagttcacacttt

SEQ ID NO: 576437 - DNA, 25 bp, Homo sapien
tctaaacatgctgactgggatattc

SEQ ID NO: 576438 - DNA, 25 bp, Homo sapien
gacaaagcctcacaatagctgacct

SEQ ID NO: 576439 - DNA, 25 bp, Homo sapien
tttacccgtgtcttcagtcttctga

SEQ ID NO: 576440 - DNA, 25 bp, Homo sapien
cacttagtggacaaagcaacttagt

SEQ ID NO: 576441 - DNA, 25 bp, Homo sapien
catacatgagcaacaacaggccgag

SEQ ID NO: 576442 - DNA, 25 bp, Homo sapien
cggattatccgacatcttactgtga

SEQ ID NO: 576443 - DNA, 25 bp, Homo sapien
tttccaagtacatatagtaggtggg

SEQ ID NO: 576444 - DNA, 25 bp, Homo sapien
caggtcgtctatgtctcccaggagg

SEQ ID NO: 576445 - DNA, 25 bp, Homo sapien
ttatcagctggttgggcggcagtag

SEQ ID NO: 576446 - DNA, 25 bp, Homo sapien
tggcagtggctaagcaggaagactt

SEQ ID NO: 576447 - DNA, 25 bp, Homo sapien
aaataaagttcatcgctggctcaaa

SEQ ID NO: 576448 - DNA, 25 bp, Homo sapien
gagcttgctgcctattagaccatga

SEQ ID NO: 576449 - DNA, 25 bp, Homo sapien
gaaatcctacctaacaaggtggctg

SEQ ID NO: 576450 - DNA, 25 bp, Homo sapien
ctaagcttgccgacataactttctc

SEQ ID NO: 576451 - DNA, 25 bp, Homo sapien
actggatcaatggagataaggtagt

SEQ ID NO: 576452 - DNA, 25 bp, Homo sapien
gataaggtagttggctgttttgctc

SEQ ID NO: 576453 - DNA, 25 bp, Homo sapien
gcttgccgacataactttctccttc

SEQ ID NO: 576454 - DNA, 25 bp, Homo sapien
tgtaaccaagataaggactgttctg

SEQ ID NO: 576455 - DNA, 25 bp, Homo sapien
aaagaataggacagtgatctaaggt

SEQ ID NO: 576456 - DNA, 25 bp, Homo sapien
tcaatacatgctagttgtaaccaag

SEQ ID NO: 576457 - DNA, 25 bp, Homo sapien
actgttctgcaactataggaataag

SEQ ID NO: 576458 - DNA, 25 bp, Homo sapien
gagtcaggagaaaaagtcaccatga

SEQ ID NO: 576459 - DNA, 25 bp, Homo sapien
ctggagtcaggagaaaaagtcacca

SEQ ID NO: 576460 - DNA, 25 bp, Homo sapien
caggagaaaaagtcaccatgatgat

SEQ ID NO: 576461 - DNA, 25 bp, Homo sapien
tcaggagaaaaagtcaccatgatga

SEQ ID NO: 576462 - DNA, 25 bp, Homo sapien
cctgccgggtgtgggccgctcctac

SEQ ID NO: 576463 - DNA, 25 bp, Homo sapien
taaactgtaaacttggtccccatga

SEQ ID NO: 576464 - DNA, 25 bp, Homo sapien
gccgggtgtgggccgctcctaccaa

SEQ ID NO: 576465 - DNA, 25 bp, Homo sapien
cttcatggggcagatgccacggtca

SEQ ID NO: 576466 - DNA, 25 bp, Homo sapien
cacgcctggccgattattattattt

SEQ ID NO: 576467 - DNA, 25 bp, Homo sapien
ccacgcctggccgattattattatt

SEQ ID NO: 576468 - DNA, 25 bp, Homo sapien
accacgcctggccgattattattat

SEQ ID NO: 576469 - DNA, 25 bp, Homo sapien
ttttgtggctgataggggatctgct

SEQ ID NO: 576470 - DNA, 25 bp, Homo sapien
gggatctgcttatgattcagtgtca

SEQ ID NO: 576471 - DNA, 25 bp, Homo sapien
gataggggatctgcttatgattcag

SEQ ID NO: 576472 - DNA, 25 bp, Homo sapien
gcttatgattcagtgtcattccagg

SEQ ID NO: 576473 - DNA, 25 bp, Homo sapien
cattactttgtactgagaactccaa

SEQ ID NO: 576474 - DNA, 25 bp, Homo sapien
ctgtccaaagggaaaatcattactt

SEQ ID NO: 576475 - DNA, 25 bp, Homo sapien
ttactttgtactgagaactccaact

SEQ ID NO: 576476 - DNA, 25 bp, Homo sapien
gggaaaatcattactttgtactgag

SEQ ID NO: 576477 - DNA, 25 bp, Homo sapien
cccggccacggaagttgaggacata

SEQ ID NO: 576478 - DNA, 25 bp, Homo sapien
tctgccaccttgagagcaaactgtc

SEQ ID NO: 576479 - DNA, 25 bp, Homo sapien
gaagttcttcacagacgcctgagtg

SEQ ID NO: 576480 - DNA, 25 bp, Homo sapien
ggccttgttgtgcagctcaaccaga

SEQ ID NO: 576481 - DNA, 25 bp, Homo sapien
tagaaagaccgatgccaaaggcctg

SEQ ID NO: 576482 - DNA, 25 bp, Homo sapien
taatccagtgtgaacacgtcatctg

SEQ ID NO: 576483 - DNA, 25 bp, Homo sapien
caaaggcctgtactgcacaaagtgg

SEQ ID NO: 576484 - DNA, 25 bp, Homo sapien
tctgccacacgtccaaactgcatga

SEQ ID NO: 576485 - DNA, 25 bp, Homo sapien
aaactattgctctttaagtcctggg

SEQ ID NO: 576486 - DNA, 25 bp, Homo sapien
tatatattcagagatcattccaaaa

SEQ ID NO: 576487 - DNA, 25 bp, Homo sapien
ctgctcctgaaagctctgtggggag

SEQ ID NO: 576488 - DNA, 25 bp, Homo sapien
ttccaaaaggggcaaactattgctc

SEQ ID NO: 576489 - DNA, 25 bp, Homo sapien
tttatatattcaggggtcgttccaa

SEQ ID NO: 576490 - DNA, 25 bp, Homo sapien
ttttatatattcaggggtcgttcca

SEQ ID NO: 576491 - DNA, 25 bp, Homo sapien
atatattcaggggtcgttccaaaag

SEQ ID NO: 576492 - DNA, 25 bp, Homo sapien
ttatatattcaggggtcgttccaaa

SEQ ID NO: 576493 - DNA, 25 bp, Homo sapien
tttatatattcaggggtcgttccaa

SEQ ID NO: 576494 - DNA, 25 bp, Homo sapien
tatatattcaggggtcgttccaaaa

SEQ ID NO: 576495 - DNA, 25 bp, Homo sapien
ttttatatattcaggggtcgttcca

SEQ ID NO: 576496 - DNA, 25 bp, Homo sapien
atatattcaggggtcgttccaaaag

SEQ ID NO: 576497 - DNA, 25 bp, Homo sapien
tagctttggagaccccaatgtgaca

SEQ ID NO: 576498 - DNA, 25 bp, Homo sapien
caatgtgacaagaatctccctgtgc

SEQ ID NO: 576499 - DNA, 25 bp, Homo sapien
gaggaactgcgatgtcagtccctga

SEQ ID NO: 576500 - DNA, 25 bp, Homo sapien
catgaaatcccattctagctttgga

SEQ ID NO: 576501 - DNA, 25 bp, Homo sapien
cacagccactcttgactaagattgg

SEQ ID NO: 576502 - DNA, 25 bp, Homo sapien
tgatcacagccactcttgactaaga

SEQ ID NO: 576503 - DNA, 25 bp, Homo sapien
gccactcttgactaagattggtgcc

SEQ ID NO: 576504 - DNA, 25 bp, Homo sapien
tcttgactaagattggtgccggcca

SEQ ID NO: 576505 - DNA, 25 bp, Homo sapien
gactgagtcacctctagagtttatg

SEQ ID NO: 576506 - DNA, 25 bp, Homo sapien
ttcagccttaattgaaatgaagaca

SEQ ID NO: 576507 - DNA, 25 bp, Homo sapien
gaaggcaattatcacattactgtca

SEQ ID NO: 576508 - DNA, 25 bp, Homo sapien
cacctctagagtttatgctttcagc

SEQ ID NO: 576509 - DNA, 25 bp, Homo sapien
caggtgtgtgtgtcgctcctcacta

SEQ ID NO: 576510 - DNA, 25 bp, Homo sapien
tgagggagccgagaagaaagtccac

SEQ ID NO: 576511 - DNA, 25 bp, Homo sapien
gacaaagtgtttgcacaggatgcct

SEQ ID NO: 576512 - DNA, 25 bp, Homo sapien
ccgtagtcatatagctgtgagaggc

SEQ ID NO: 576513 - DNA, 25 bp, Homo sapien
caacgctggcaaacagttctgtgca

SEQ ID NO: 576514 - DNA, 25 bp, Homo sapien
gatggaaacagtctcgtcctcaccc

SEQ ID NO: 576515 - DNA, 25 bp, Homo sapien
cacttggtgggatacatgcctgaga

SEQ ID NO: 576516 - DNA, 25 bp, Homo sapien
gttctgtgcacaagggatgcagctg

SEQ ID NO: 576517 - DNA, 25 bp, Homo sapien
gaatgtacactctaccctctgtggc

SEQ ID NO: 576518 - DNA, 25 bp, Homo sapien
ttaacattcagaggcaagcgatggg

SEQ ID NO: 576519 - DNA, 25 bp, Homo sapien
tatagtgtgtctaggtagcctccgg

SEQ ID NO: 576520 - DNA, 25 bp, Homo sapien
gatgcccctggctatcatgtgtata

SEQ ID NO: 576521 - DNA, 25 bp, Homo sapien
caatgactcctgctggtcagctgtg

SEQ ID NO: 576522 - DNA, 25 bp, Homo sapien
gaatgttcacttgacatcagctgaa

SEQ ID NO: 576523 - DNA, 25 bp, Homo sapien
gacaagattgccctatatgctcaag

SEQ ID NO: 576524 - DNA, 25 bp, Homo sapien
ccataccttggaaagtattatgcaa

SEQ ID NO: 576525 - DNA, 25 bp, Homo sapien
tgccctccccggctttagctctttc

SEQ ID NO: 576526 - DNA, 25 bp, Homo sapien
aaggacacttgctccggggaaccag

SEQ ID NO: 576527 - DNA, 25 bp, Homo sapien
aggaagcaggaactcgcgggctcca

SEQ ID NO: 576528 - DNA, 25 bp, Homo sapien
gaagcaggaactcgcgggctccatt

SEQ ID NO: 576529 - DNA, 25 bp, Homo sapien
gtttggctgctcgttgcgcgccccg

SEQ ID NO: 576530 - DNA, 25 bp, Homo sapien
tctccgctccgactgtttggctgct

SEQ ID NO: 576531 - DNA, 25 bp, Homo sapien
ctggaatgagatgcgcgccgcggcg

SEQ ID NO: 576532 - DNA, 25 bp, Homo sapien
agagccttcctcttcgccggggtgg

SEQ ID NO: 576533 - DNA, 25 bp, Homo sapien
aggaggacgctggaatgcgcggaat

SEQ ID NO: 576534 - DNA, 25 bp, Homo sapien
ggacgctggaatgcgcggaatgagg

SEQ ID NO: 576535 - DNA, 25 bp, Homo sapien
ccccctggcctcgagtgtgcgagga

SEQ ID NO: 576536 - DNA, 25 bp, Homo sapien
tggcctcgagtgtgcgaggaggacg

SEQ ID NO: 576537 - DNA, 25 bp, Homo sapien
ctgcggggacgacagggcgtcagcg

SEQ ID NO: 576538 - DNA, 25 bp, Homo sapien
acgacagggcgtcagcgcgcagagc

SEQ ID NO: 576539 - DNA, 25 bp, Homo sapien
gacagggcgtcagcgcgcagagccg

SEQ ID NO: 576540 - DNA, 25 bp, Homo sapien
ggacgacagggcgtcagcgcgcaga

SEQ ID NO: 576541 - DNA, 25 bp, Homo sapien
gcgccaactcttccggccgcggcga

SEQ ID NO: 576542 - DNA, 25 bp, Homo sapien
ctaagccagttccaaggagtccgcc

SEQ ID NO: 576543 - DNA, 25 bp, Homo sapien
agttccaaggagtccgccccgagcg

SEQ ID NO: 576544 - DNA, 25 bp, Homo sapien
gccccgagcgccaactcttccggcc

SEQ ID NO: 576545 - DNA, 25 bp, Homo sapien
ggtgcgggaaggtgggatgggtgcg

SEQ ID NO: 576546 - DNA, 25 bp, Homo sapien
agggtgcgggaaggtgggatgggtg

SEQ ID NO: 576547 - DNA, 25 bp, Homo sapien
gggtgcgggaaggtgggatgggtgc

SEQ ID NO: 576548 - DNA, 25 bp, Homo sapien
ccacgtgcctcgctcttcccagtct

SEQ ID NO: 576549 - DNA, 25 bp, Homo sapien
tgccctccggcaaagtcctaccaag

SEQ ID NO: 576550 - DNA, 25 bp, Homo sapien
ctggagccgcttcgcctccagcagc

SEQ ID NO: 576551 - DNA, 25 bp, Homo sapien
tcccagtctcgtcccgggagggagc

SEQ ID NO: 576552 - DNA, 25 bp, Homo sapien
tgccgatgctctcggttctgcctct

SEQ ID NO: 576553 - DNA, 25 bp, Homo sapien
tgggtctcttctgttgccgatgctc

SEQ ID NO: 576554 - DNA, 25 bp, Homo sapien
tgcctctccggtcctttccacaccg

SEQ ID NO: 576555 - DNA, 25 bp, Homo sapien
ttccaggctcgaaaagggcccagca

SEQ ID NO: 576556 - DNA, 25 bp, Homo sapien
gctggggaccaacgtcctccacttc

SEQ ID NO: 576557 - DNA, 25 bp, Homo sapien
aagctggggaccaacgtcctccact

SEQ ID NO: 576558 - DNA, 25 bp, Homo sapien
tggggaccaacgtcctccacttcca

SEQ ID NO: 576559 - DNA, 25 bp, Homo sapien
caaagctggggaccaacgtcctcca

SEQ ID NO: 576560 - DNA, 25 bp, Homo sapien
tgaatttccaactgccactggactg

SEQ ID NO: 576561 - DNA, 25 bp, Homo sapien
tttaaatgtaactcctaggcttaca

SEQ ID NO: 576562 - DNA, 25 bp, Homo sapien
ggcttacatagtatttctattggac

SEQ ID NO: 576563 - DNA, 25 bp, Homo sapien
ctgggaccatgggcaaaagccacca

SEQ ID NO: 576564 - DNA, 25 bp, Homo sapien
gtaactcctaggcttacatagtatt

SEQ ID NO: 576565 - DNA, 25 bp, Homo sapien
tcctgcaggcctgccagttaccgcg

SEQ ID NO: 576566 - DNA, 25 bp, Homo sapien
cattccagaaggcacgatcatccgg

SEQ ID NO: 576567 - DNA, 25 bp, Homo sapien
gatcatccggtttggaaacaaggcc

SEQ ID NO: 576568 - DNA, 25 bp, Homo sapien
gaaggcacgatcatccggtttggaa

SEQ ID NO: 576569 - DNA, 25 bp, Homo sapien
ctgtcagaacccgagggtcagccca

SEQ ID NO: 576570 - DNA, 25 bp, Homo sapien
gtcagaacccgagggtcagcccaaa

SEQ ID NO: 576571 - DNA, 25 bp, Homo sapien
agcccaaaccaggtgtccaagcagc

SEQ ID NO: 576572 - DNA, 25 bp, Homo sapien
ccaggtgtccaagcagcacgggcat

SEQ ID NO: 576573 - DNA, 25 bp, Homo sapien
aaagactcctaatgccagaccctgc

SEQ ID NO: 576574 - DNA, 25 bp, Homo sapien
gggagaaccaaagactcctaatgcc

SEQ ID NO: 576575 - DNA, 25 bp, Homo sapien
cagaccctgccccacgagtggggtt

SEQ ID NO: 576576 - DNA, 25 bp, Homo sapien
gaaccaaagactcctaatgccagac

SEQ ID NO: 576577 - DNA, 25 bp, Homo sapien
ctagggcagcccagcagaacacaca

SEQ ID NO: 576578 - DNA, 25 bp, Homo sapien
aagttgggcctagggcagcccagca

SEQ ID NO: 576579 - DNA, 25 bp, Homo sapien
tagggcagcccagcagaacacacac

SEQ ID NO: 576580 - DNA, 25 bp, Homo sapien
ggcctagggcagcccagcagaacac

SEQ ID NO: 576581 - DNA, 25 bp, Homo sapien
ggagcaacggcaggattgactttct

SEQ ID NO: 576582 - DNA, 25 bp, Homo sapien
gagcaacggcaggattgactttctg

SEQ ID NO: 576583 - DNA, 25 bp, Homo sapien
gcaacggcaggattgactttctggt

SEQ ID NO: 576584 - DNA, 25 bp, Homo sapien
aacggcaggattgactttctggtgc

SEQ ID NO: 576585 - DNA, 25 bp, Homo sapien
accacagccccggtgagcagtggaa

SEQ ID NO: 576586 - DNA, 25 bp, Homo sapien
acagccccggtgagcagtggaagaa

SEQ ID NO: 576587 - DNA, 25 bp, Homo sapien
cacagccccggtgagcagtggaaga

SEQ ID NO: 576588 - DNA, 25 bp, Homo sapien
ccacagccccggtgagcagtggaag

SEQ ID NO: 576589 - DNA, 25 bp, Homo sapien
tccgcttggaggagcgctcgttgga

SEQ ID NO: 576590 - DNA, 25 bp, Homo sapien
ctccgcttggaggagcgctcgttgg

SEQ ID NO: 576591 - DNA, 25 bp, Homo sapien
ggctccgcttggaggagcgctcgtt

SEQ ID NO: 576592 - DNA, 25 bp, Homo sapien
ccgcttggaggagcgctcgttggac

SEQ ID NO: 576593 - DNA, 25 bp, Homo sapien
acgccctctgcgtcattgtcgatgg

SEQ ID NO: 576594 - DNA, 25 bp, Homo sapien
gaaactctgctcaatatccgggctc

SEQ ID NO: 576595 - DNA, 25 bp, Homo sapien
tgattttgcgcctgccacagggcgg

SEQ ID NO: 576596 - DNA, 25 bp, Homo sapien
gatgggcttgtccagtgcctgactg

SEQ ID NO: 576597 - DNA, 25 bp, Homo sapien
gccgcagggaggagcataggagcag

SEQ ID NO: 576598 - DNA, 25 bp, Homo sapien
ggttgtaggccgcagggaggagcat

SEQ ID NO: 576599 - DNA, 25 bp, Homo sapien
gtcagggttgtaggccgcagggagg

SEQ ID NO: 576600 - DNA, 25 bp, Homo sapien
gtaggccgcagggaggagcatagga

SEQ ID NO: 576601 - DNA, 25 bp, Homo sapien
gtaaacgagtagaagcgtccagact

SEQ ID NO: 576602 - DNA, 25 bp, Homo sapien
cctctgtaaacgagtagaagcgtcc

SEQ ID NO: 576603 - DNA, 25 bp, Homo sapien
tccgcctctgtaaacgagtagaagc

SEQ ID NO: 576604 - DNA, 25 bp, Homo sapien
gtgccctccgcctctgtaaacgagt

SEQ ID NO: 576605 - DNA, 25 bp, Homo sapien
tgatgtagcgggcaatcagctcgtt

SEQ ID NO: 576606 - DNA, 25 bp, Homo sapien
tccctgtccggagcttgatgtagcg

SEQ ID NO: 576607 - DNA, 25 bp, Homo sapien
tagcgggcaatcagctcgttccgac

SEQ ID NO: 576608 - DNA, 25 bp, Homo sapien
tggtgcgggtcttccctgtccggag

SEQ ID NO: 576609 - DNA, 25 bp, Homo sapien
cagactggtgctggggtaccacccc

SEQ ID NO: 576610 - DNA, 25 bp, Homo sapien
gcagactggtgctggggtaccaccc

SEQ ID NO: 576611 - DNA, 25 bp, Homo sapien
agcagactggtgctggggtaccacc

SEQ ID NO: 576612 - DNA, 25 bp, Homo sapien
gagcagactggtgctggggtaccac

SEQ ID NO: 576613 - DNA, 25 bp, Homo sapien
gctttgcgacgagccagcacctgga

SEQ ID NO: 576614 - DNA, 25 bp, Homo sapien
tctcgcgagctttgcgacgagccag

SEQ ID NO: 576615 - DNA, 25 bp, Homo sapien
tggcctggatctcgcgagctttgcg

SEQ ID NO: 576616 - DNA, 25 bp, Homo sapien
ctttagcttggcctggatctcgcga

SEQ ID NO: 576617 - DNA, 25 bp, Homo sapien
tagctttgaccagaacggctcctct

SEQ ID NO: 576618 - DNA, 25 bp, Homo sapien
ggtctagacttaatgcctcaaatgt

SEQ ID NO: 576619 - DNA, 25 bp, Homo sapien
tatgacccgctcaggcaaaataggg

SEQ ID NO: 576620 - DNA, 25 bp, Homo sapien
aaaatggccgtgcagtggcacttgc

SEQ ID NO: 576621 - DNA, 25 bp, Homo sapien
tgagaggcgggagcaacagctgagg

SEQ ID NO: 576622 - DNA, 25 bp, Homo sapien
ccttggtgtctgtccagccatccac

SEQ ID NO: 576623 - DNA, 25 bp, Homo sapien
aaggagtttatggctccccttggtg

SEQ ID NO: 576624 - DNA, 25 bp, Homo sapien
aggagtttatggctccccttggtgt

SEQ ID NO: 576625 - DNA, 25 bp, Homo sapien
ttggtgtctgtccagccatccactg

SEQ ID NO: 576626 - DNA, 25 bp, Homo sapien
tagtgggtcattgtcgatgtggaca

SEQ ID NO: 576627 - DNA, 25 bp, Homo sapien
ggaactgttccgagtagtgggtcat

SEQ ID NO: 576628 - DNA, 25 bp, Homo sapien
caggtgagcttggaccagactggca

SEQ ID NO: 576629 - DNA, 25 bp, Homo sapien
tgagactgacaggacttgtaggatc

SEQ ID NO: 576630 - DNA, 25 bp, Homo sapien
gggaccacgggcatgcgttactgta

SEQ ID NO: 576631 - DNA, 25 bp, Homo sapien
ggctaaatggctcgactgagtcaac

SEQ ID NO: 576632 - DNA, 25 bp, Homo sapien
tacccagcagggattatccaaaata

SEQ ID NO: 576633 - DNA, 25 bp, Homo sapien
cacacacgggctggaacagcaagta

SEQ ID NO: 576634 - DNA, 25 bp, Homo sapien
ccatctttcatgtgtcagagtgtaa

SEQ ID NO: 576635 - DNA, 25 bp, Homo sapien
caagaccccagaggatgggttcacc

SEQ ID NO: 576636 - DNA, 25 bp, Homo sapien
tgtctgccctccaaaggttccaaga

SEQ ID NO: 576637 - DNA, 25 bp, Homo sapien
gtgtaaatacccactgtctgccctc

SEQ ID NO: 576638 - DNA, 25 bp, Homo sapien
cacaggtgcctagctcagcacctgt

SEQ ID NO: 576639 - DNA, 25 bp, Homo sapien
tctgcagggccttgtccttagctgc

SEQ ID NO: 576640 - DNA, 25 bp, Homo sapien
gcagggccttgtccttagctgcctg

SEQ ID NO: 576641 - DNA, 25 bp, Homo sapien
gggccttgtccttagctgcctggtc

SEQ ID NO: 576642 - DNA, 25 bp, Homo sapien
gctctgcagggccttgtccttagct

SEQ ID NO: 576643 - DNA, 25 bp, Homo sapien
ggaaggccgtggcggagatgatctg

SEQ ID NO: 576644 - DNA, 25 bp, Homo sapien
agatgatctgtgcagacgacatggc

SEQ ID NO: 576645 - DNA, 25 bp, Homo sapien
aaggccgtggcggagatgatctgtg

SEQ ID NO: 576646 - DNA, 25 bp, Homo sapien
tgtggaaggccgtggcggagatgat

SEQ ID NO: 576647 - DNA, 25 bp, Homo sapien
cggggccccgggcgagggccatgct

SEQ ID NO: 576648 - DNA, 25 bp, Homo sapien
ccctgagactgctgggcggccgggg

SEQ ID NO: 576649 - DNA, 25 bp, Homo sapien
gggccccgggcgagggccatgctac

SEQ ID NO: 576650 - DNA, 25 bp, Homo sapien
tgagactgctgggcggccggggccc

SEQ ID NO: 576651 - DNA, 25 bp, Homo sapien
aataccagccaagccgggatgtgtg

SEQ ID NO: 576652 - DNA, 25 bp, Homo sapien
tgggctggccaatgcttctggctct

SEQ ID NO: 576653 - DNA, 25 bp, Homo sapien
tctgtggagtcattgccgaggaccc

SEQ ID NO: 576654 - DNA, 25 bp, Homo sapien
gccaagaggactcaggtgagagaaa

SEQ ID NO: 576655 - DNA, 25 bp, Homo sapien
ggcctggcaaagctccttgccaaaa

SEQ ID NO: 576656 - DNA, 25 bp, Homo sapien
tggcctggcaaagctccttgccaaa

SEQ ID NO: 576657 - DNA, 25 bp, Homo sapien
ttggcctggcaaagctccttgccaa

SEQ ID NO: 576658 - DNA, 25 bp, Homo sapien
gctggacagcataggtttgctgaga

SEQ ID NO: 576659 - DNA, 25 bp, Homo sapien
ctggacagcataggtttgctgagag

SEQ ID NO: 576660 - DNA, 25 bp, Homo sapien
ccgggggcgcagagggcgatggggc

SEQ ID NO: 576661 - DNA, 25 bp, Homo sapien
ctgccatgggggtgccgggggcgca

SEQ ID NO: 576662 - DNA, 25 bp, Homo sapien
tgccgggggcgcagagggcgatggg

SEQ ID NO: 576663 - DNA, 25 bp, Homo sapien
ggcgcagagggcgatggggcgggcc

SEQ ID NO: 576664 - DNA, 25 bp, Homo sapien
atccagagcttggagctggccacgc

SEQ ID NO: 576665 - DNA, 25 bp, Homo sapien
ctccaacatccagagcttggagctg

SEQ ID NO: 576666 - DNA, 25 bp, Homo sapien
ggcagagaactccaacatccagagc

SEQ ID NO: 576667 - DNA, 25 bp, Homo sapien
ccaggaaggcagagaactccaacat

SEQ ID NO: 576668 - DNA, 25 bp, Homo sapien
ctgtagcttgggctggactggccaa

SEQ ID NO: 576669 - DNA, 25 bp, Homo sapien
ggactggccaatgtgcacgaacagg

SEQ ID NO: 576670 - DNA, 25 bp, Homo sapien
tgtagcttgggctggactggccaat

SEQ ID NO: 576671 - DNA, 25 bp, Homo sapien
gctggactggccaatgtgcacgaac

SEQ ID NO: 576672 - DNA, 25 bp, Homo sapien
tttggcggatgtccacggcttcgag

SEQ ID NO: 576673 - DNA, 25 bp, Homo sapien
gaatttgtcatagatttggcggatg

SEQ ID NO: 576674 - DNA, 25 bp, Homo sapien
agatccttgagtccaccctttttct

SEQ ID NO: 576675 - DNA, 25 bp, Homo sapien
tggagggtccccgttcgaagagatc

SEQ ID NO: 576676 - DNA, 25 bp, Homo sapien
taaacttcggtgtgaatatgcctct

SEQ ID NO: 576677 - DNA, 25 bp, Homo sapien
gggagccggcaagccatctgaacgt

SEQ ID NO: 576678 - DNA, 25 bp, Homo sapien
gtctatataaacttcggtgtgaata

SEQ ID NO: 576679 - DNA, 25 bp, Homo sapien
gcaagccatctgaacgtctatataa

SEQ ID NO: 576680 - DNA, 25 bp, Homo sapien
cagataagaagctgagctgcgtggc

SEQ ID NO: 576681 - DNA, 25 bp, Homo sapien
gggtgacagataagaagctgagctg

SEQ ID NO: 576682 - DNA, 25 bp, Homo sapien
tatcttcaggggtgacagataagaa

SEQ ID NO: 576683 - DNA, 25 bp, Homo sapien
ataagaagctgagctgcgtggctcg

SEQ ID NO: 576684 - DNA, 25 bp, Homo sapien
aggtggcctctgctggacttgcggg

SEQ ID NO: 576685 - DNA, 25 bp, Homo sapien
gacaggtggcctctgctggacttgc

SEQ ID NO: 576686 - DNA, 25 bp, Homo sapien
gagacaggtggcctctgctggactt

SEQ ID NO: 576687 - DNA, 25 bp, Homo sapien
acaggtggcctctgctggacttgcg

SEQ ID NO: 576688 - DNA, 25 bp, Homo sapien
cctgaaatgccgctggcaggaagcc

SEQ ID NO: 576689 - DNA, 25 bp, Homo sapien
gaccctcagattttaaccgcgcatg

SEQ ID NO: 576690 - DNA, 25 bp, Homo sapien
ggcatcaatggtggtgaccctcaga

SEQ ID NO: 576691 - DNA, 25 bp, Homo sapien
tattttctcgaagtcacctgctcct

SEQ ID NO: 576692 - DNA, 25 bp, Homo sapien
gaaggagctgccttcatcctcgatg

SEQ ID NO: 576693 - DNA, 25 bp, Homo sapien
gctgccttcatcctcgatgttggtg

SEQ ID NO: 576694 - DNA, 25 bp, Homo sapien
aaagagcagaccttcgtggagcagg

SEQ ID NO: 576695 - DNA, 25 bp, Homo sapien
gcttgccgaaagagcagaccttcgt

SEQ ID NO: 576696 - DNA, 25 bp, Homo sapien
gagcaggggcttagaatcccattct

SEQ ID NO: 576697 - DNA, 25 bp, Homo sapien
gcaggggcttagaatcccattctga

SEQ ID NO: 576698 - DNA, 25 bp, Homo sapien
ggggcttagaatcccattctgacca

SEQ ID NO: 576699 - DNA, 25 bp, Homo sapien
gcttagaatcccattctgaccacct

SEQ ID NO: 576700 - DNA, 25 bp, Homo sapien
gtccattctcatagcgagcatactc

SEQ ID NO: 576701 - DNA, 25 bp, Homo sapien
cggtggatgcggtaagagtagtgtc

SEQ ID NO: 576702 - DNA, 25 bp, Homo sapien
cattctcatagcgagcatactctgt

SEQ ID NO: 576703 - DNA, 25 bp, Homo sapien
gttgatcatgtactcacagagcggg

SEQ ID NO: 576704 - DNA, 25 bp, Homo sapien
ctcactggctgacacctcaaagaca

SEQ ID NO: 576705 - DNA, 25 bp, Homo sapien
aaagacataggcaatgcacagcaag

SEQ ID NO: 576706 - DNA, 25 bp, Homo sapien
cataggcaatgcacagcaaggtctc

SEQ ID NO: 576707 - DNA, 25 bp, Homo sapien
ctggctgacacctcaaagacatagg

SEQ ID NO: 576708 - DNA, 25 bp, Homo sapien
ccccgtttcctgcacacacgtctct

SEQ ID NO: 576709 - DNA, 25 bp, Homo sapien
tctcagctctcttggcacttcaggg

SEQ ID NO: 576710 - DNA, 25 bp, Homo sapien
gtttcctgcacacacgtctcttccc

SEQ ID NO: 576711 - DNA, 25 bp, Homo sapien
tcttggcacttcagggggctgcccc

SEQ ID NO: 576712 - DNA, 25 bp, Homo sapien
gtcacatcttcagttccagggtccg

SEQ ID NO: 576713 - DNA, 25 bp, Homo sapien
tctgtgtgaaccgtcctgggagtgc

SEQ ID NO: 576714 - DNA, 25 bp, Homo sapien
gagttctgacagtgtccccgtccaa

SEQ ID NO: 576715 - DNA, 25 bp, Homo sapien
tccggcgatgttcctggctgagtcc

SEQ ID NO: 576716 - DNA, 25 bp, Homo sapien
cagtgcccccaacgtggtcacggaa

SEQ ID NO: 576717 - DNA, 25 bp, Homo sapien
atttgaaaccagtgcccccaacgtg

SEQ ID NO: 576718 - DNA, 25 bp, Homo sapien
tttgatttgaaaccagtgcccccaa

SEQ ID NO: 576719 - DNA, 25 bp, Homo sapien
gtgcccccaacgtggtcacggaaga

SEQ ID NO: 576720 - DNA, 25 bp, Homo sapien
ggacactggtgcacccaacctcccg

SEQ ID NO: 576721 - DNA, 25 bp, Homo sapien
aggacactggtgcacccaacctccc

SEQ ID NO: 576722 - DNA, 25 bp, Homo sapien
gacactggtgcacccaacctcccgc

SEQ ID NO: 576723 - DNA, 25 bp, Homo sapien
tatgctaggcactgtagatacgcga

SEQ ID NO: 576724 - DNA, 25 bp, Homo sapien
tagaatgctaggaccgaagccagga

SEQ ID NO: 576725 - DNA, 25 bp, Homo sapien
tattagtacagcttgcaccaggcgc

SEQ ID NO: 576726 - DNA, 25 bp, Homo sapien
gttcagacaggttgacaaatgccca

SEQ ID NO: 576727 - DNA, 25 bp, Homo sapien
tgcatttgtcctgcggccaagaggc

SEQ ID NO: 576728 - DNA, 25 bp, Homo sapien
cacaagggcaggcatgactgtcttc

SEQ ID NO: 576729 - DNA, 25 bp, Homo sapien
cacagatggaagacgggatgagaac

SEQ ID NO: 576730 - DNA, 25 bp, Homo sapien
caatcaagctagaaggacggccaac

SEQ ID NO: 576731 - DNA, 25 bp, Homo sapien
tacgaagaggtcaaacacagggact

SEQ ID NO: 576732 - DNA, 25 bp, Homo sapien
tgggaagagcccgaaacacactatc

SEQ ID NO: 576733 - DNA, 25 bp, Homo sapien
gcatgctctaggcacacacagggta

SEQ ID NO: 576734 - DNA, 25 bp, Homo sapien
tcactgtgcagagccgagtttcgtg

SEQ ID NO: 576735 - DNA, 25 bp, Homo sapien
ttcgctaaaccaagactcaaggtct

SEQ ID NO: 576736 - DNA, 25 bp, Homo sapien
caattcaatcactggcctggcttaa

SEQ ID NO: 576737 - DNA, 25 bp, Homo sapien
ccttctttgagggacattagagctt

SEQ ID NO: 576738 - DNA, 25 bp, Homo sapien
aatgggccacaaagttatctccccg

SEQ ID NO: 576739 - DNA, 25 bp, Homo sapien
aaattgtaagcctgtctgtgatgcc

SEQ ID NO: 576740 - DNA, 25 bp, Homo sapien
gaactcagtctaaagcagaccctcc

SEQ ID NO: 576741 - DNA, 25 bp, Homo sapien
cctacagtctgaaaggaaggtgctg

SEQ ID NO: 576742 - DNA, 25 bp, Homo sapien
caacccacaagcctgaaccaaaaag

SEQ ID NO: 576743 - DNA, 25 bp, Homo sapien
gtggacactgaaactggaattccat

SEQ ID NO: 576744 - DNA, 25 bp, Homo sapien
tgtggacactgaaactggaattcca

SEQ ID NO: 576745 - DNA, 25 bp, Homo sapien
ctgaaactggaattccatatcattt

SEQ ID NO: 576746 - DNA, 25 bp, Homo sapien
gacactgaaactggaattccatatc

SEQ ID NO: 576747 - DNA, 25 bp, Homo sapien
gatatagtcacaagacactcagcag

SEQ ID NO: 576748 - DNA, 25 bp, Homo sapien
tctaagatgggattgctagcgcgcc

SEQ ID NO: 576749 - DNA, 25 bp, Homo sapien
ggtctgaacatctgattactccctg

SEQ ID NO: 576750 - DNA, 25 bp, Homo sapien
tggcaagcacatttccctctcgtgg

SEQ ID NO: 576751 - DNA, 25 bp, Homo sapien
gctttcatgtgtctccagggccagt

SEQ ID NO: 576752 - DNA, 25 bp, Homo sapien
gacagcgtgtggtctaagaagtcac

SEQ ID NO: 576753 - DNA, 25 bp, Homo sapien
tctccgactgtgtcaacttgagcga

SEQ ID NO: 576754 - DNA, 25 bp, Homo sapien
aaatcagaaatctgtgtgtccccgg

SEQ ID NO: 576755 - DNA, 25 bp, Homo sapien
gaaagagcaagtgggccaattataa

SEQ ID NO: 576756 - DNA, 25 bp, Homo sapien
aagtgggccaattataagccgggag

SEQ ID NO: 576757 - DNA, 25 bp, Homo sapien
gagcaagtgggccaattataagccg

SEQ ID NO: 576758 - DNA, 25 bp, Homo sapien
gcaagtgggccaattataagccggg

SEQ ID NO: 576759 - DNA, 25 bp, Homo sapien
gctctgctcgcgctccggcaccgcc

SEQ ID NO: 576760 - DNA, 25 bp, Homo sapien
cgctctgctcgcgctccggcaccgc

SEQ ID NO: 576761 - DNA, 25 bp, Homo sapien
ctctgctcgcgctccggcaccgccg

SEQ ID NO: 576762 - DNA, 25 bp, Homo sapien
tctgctcgcgctccggcaccgccgc

SEQ ID NO: 576763 - DNA, 25 bp, Homo sapien
aacaccttggctgctgacaaacaaa

SEQ ID NO: 576764 - DNA, 25 bp, Homo sapien
tgaacttcctggaaacaccttggct

SEQ ID NO: 576765 - DNA, 25 bp, Homo sapien
aacttcctggaaacaccttggctgc

SEQ ID NO: 576766 - DNA, 25 bp, Homo sapien
gctgacaaacaaaagaaggttccag

SEQ ID NO: 576767 - DNA, 25 bp, Homo sapien
gcaggaagttacaggcctctcccta

SEQ ID NO: 576768 - DNA, 25 bp, Homo sapien
gactacaccattgggttcagggaag

SEQ ID NO: 576769 - DNA, 25 bp, Homo sapien
cggaggcctcgatgcacaagtgcta

SEQ ID NO: 576770 - DNA, 25 bp, Homo sapien
ttataacacacagacgttcagaggc

SEQ ID NO: 576771 - DNA, 25 bp, Homo sapien
gaacagccgcaggtctgcattagaa

SEQ ID NO: 576772 - DNA, 25 bp, Homo sapien
ggtgcctcaaatcccagagctgcaa

SEQ ID NO: 576773 - DNA, 25 bp, Homo sapien
cacctggacggttactgcctgatct

SEQ ID NO: 576774 - DNA, 25 bp, Homo sapien
accatccagtgatacgcggtgcctc

SEQ ID NO: 576775 - DNA, 25 bp, Homo sapien
ttcctcagggagcaataaatataag

SEQ ID NO: 576776 - DNA, 25 bp, Homo sapien
tataaggattatggaagtgacgttc

SEQ ID NO: 576777 - DNA, 25 bp, Homo sapien
aagtcggcggcagaaagctcaggcc

SEQ ID NO: 576778 - DNA, 25 bp, Homo sapien
gacttcactcggaaacagaaggagc

SEQ ID NO: 576779 - DNA, 25 bp, Homo sapien
tgagaacatgagtgcccgtgaccat

SEQ ID NO: 576780 - DNA, 25 bp, Homo sapien
caccaaagcacatggttaacagaaa

SEQ ID NO: 576781 - DNA, 25 bp, Homo sapien
cccaggggcatgtacactccttgag

SEQ ID NO: 576782 - DNA, 25 bp, Homo sapien
tccttgagacagctactaggtaggg

SEQ ID NO: 576783 - DNA, 25 bp, Homo sapien
cacaggatgtggtaagctaaaagcc

SEQ ID NO: 576784 - DNA, 25 bp, Homo sapien
aaagccattattgtgggactccacc

SEQ ID NO: 576785 - DNA, 25 bp, Homo sapien
cataggtgggtatatgcacaggcga

SEQ ID NO: 576786 - DNA, 25 bp, Homo sapien
gtcagaaactcccatgccaagtcag

SEQ ID NO: 576787 - DNA, 25 bp, Homo sapien
tatcacagcacattgtagcatccga

SEQ ID NO: 576788 - DNA, 25 bp, Homo sapien
taaactgagtacacaaggagtatcc

SEQ ID NO: 576789 - DNA, 25 bp, Homo sapien
gatgactcactgtctacgccacaga

SEQ ID NO: 576790 - DNA, 25 bp, Homo sapien
tcctttcaataccttcagcacaggg

SEQ ID NO: 576791 - DNA, 25 bp, Homo sapien
gaatagctcctgaacaatcagtggg

SEQ ID NO: 576792 - DNA, 25 bp, Homo sapien
ttcccgctacccaacagacatgtat

SEQ ID NO: 576793 - DNA, 25 bp, Homo sapien
ggtaacttcgtttttctcactgctg

SEQ ID NO: 576794 - DNA, 25 bp, Homo sapien
aatgtaagcttatgagggcggtaac

SEQ ID NO: 576795 - DNA, 25 bp, Homo sapien
cacttctatgctgcaaggacagggt

SEQ ID NO: 576796 - DNA, 25 bp, Homo sapien
tcctgccagtgtctaaggtgtcatt

SEQ ID NO: 576797 - DNA, 25 bp, Homo sapien
tcatttacgtagtgtctgcagccac

SEQ ID NO: 576798 - DNA, 25 bp, Homo sapien
tgccctacatgaggagtcagcaaac

SEQ ID NO: 576799 - DNA, 25 bp, Homo sapien
caagagcactgggatcctaaaggaa

SEQ ID NO: 576800 - DNA, 25 bp, Homo sapien
gtgtgtaccccgtcaaaggaggcga

SEQ ID NO: 576801 - DNA, 25 bp, Homo sapien
tccgatgcggctacaacgtaagacc

SEQ ID NO: 576802 - DNA, 25 bp, Homo sapien
ggttctgcccttgaaatccgatgcg

SEQ ID NO: 576803 - DNA, 25 bp, Homo sapien
caggcctggaagatatggtctcttc

SEQ ID NO: 576804 - DNA, 25 bp, Homo sapien
ggtttcacttgcgtagccaactgtg

SEQ ID NO: 576805 - DNA, 25 bp, Homo sapien
gagaggcctcctcgtgctgatttcc

SEQ ID NO: 576806 - DNA, 25 bp, Homo sapien
tcctaaaagctcagaacacgatcaa

SEQ ID NO: 576807 - DNA, 25 bp, Homo sapien
gaatggaagaacacggcctacaagg

SEQ ID NO: 576808 - DNA, 25 bp, Homo sapien
cagtgaacaaaagcccgggtgcgtt

SEQ ID NO: 576809 - DNA, 25 bp, Homo sapien
aggcataaatgcgtcctggacagcg

SEQ ID NO: 576810 - DNA, 25 bp, Homo sapien
cacaatggagttgctcagtgaacaa

SEQ ID NO: 576811 - DNA, 25 bp, Homo sapien
tgtagatagccgtcttctccctacg

SEQ ID NO: 576812 - DNA, 25 bp, Homo sapien
tagatagccgtcttctccctacgtc

SEQ ID NO: 576813 - DNA, 25 bp, Homo sapien
aacttgaacagattaaaccattgag

SEQ ID NO: 576814 - DNA, 25 bp, Homo sapien
ggttatacaacttgaacagattaaa

SEQ ID NO: 576815 - DNA, 25 bp, Homo sapien
ctccaggtgtcctttaagatcctat

SEQ ID NO: 576816 - DNA, 25 bp, Homo sapien
tgggacacctgcatacccacaggag

SEQ ID NO: 576817 - DNA, 25 bp, Homo sapien
gaaagggcattttccaagagcactt

SEQ ID NO: 576818 - DNA, 25 bp, Homo sapien
cctcttagaagacaagataggtgta

SEQ ID NO: 576819 - DNA, 25 bp, Homo sapien
gagttgataacctctctgctgttgg

SEQ ID NO: 576820 - DNA, 25 bp, Homo sapien
tcagctctcacaggaactattacag

SEQ ID NO: 576821 - DNA, 25 bp, Homo sapien
tcaaatttcaacctgaggaggccag

SEQ ID NO: 576822 - DNA, 25 bp, Homo sapien
cactcgccagggaggacattaatct

SEQ ID NO: 576823 - DNA, 25 bp, Homo sapien
ccctgccatcccgatcccaagcggg

SEQ ID NO: 576824 - DNA, 25 bp, Homo sapien
tagcccctgccatcccgatcccaag

SEQ ID NO: 576825 - DNA, 25 bp, Homo sapien
tgccatcccgatcccaagcgggaga

SEQ ID NO: 576826 - DNA, 25 bp, Homo sapien
ctcctagcccctgccatcccgatcc

SEQ ID NO: 576827 - DNA, 25 bp, Homo sapien
tcctggcagactgttgccagggggt

SEQ ID NO: 576828 - DNA, 25 bp, Homo sapien
atcctggcagactgttgccaggggg

SEQ ID NO: 576829 - DNA, 25 bp, Homo sapien
tcatcctggcagactgttgccaggg

SEQ ID NO: 576830 - DNA, 25 bp, Homo sapien
catcctggcagactgttgccagggg

SEQ ID NO: 576831 - DNA, 25 bp, Homo sapien
tacgtgcttggtattccctgcaggc

SEQ ID NO: 576832 - DNA, 25 bp, Homo sapien
tacaagagctggtcaacgaactggc

SEQ ID NO: 576833 - DNA, 25 bp, Homo sapien
tacagggtgacgctgattacgaagc

SEQ ID NO: 576834 - DNA, 25 bp, Homo sapien
tgtttaatagactcgcctgccgcgt

SEQ ID NO: 576835 - DNA, 25 bp, Homo sapien
ggtgcattgcacttgtcggtcttaa

SEQ ID NO: 576836 - DNA, 25 bp, Homo sapien
ccaaagatggactccgatggatcga

SEQ ID NO: 576837 - DNA, 25 bp, Homo sapien
ggcttggcaaagtccgagtccttgc

SEQ ID NO: 576838 - DNA, 25 bp, Homo sapien
cacgtacttgctgcctttgggtgca

SEQ ID NO: 576839 - DNA, 25 bp, Homo sapien
catcatgtacttcaagcagcagagg

SEQ ID NO: 576840 - DNA, 25 bp, Homo sapien
tatcaaattgaagaggaacatcatg

SEQ ID NO: 576841 - DNA, 25 bp, Homo sapien
gaacatcatgtacttcaagcagcag

SEQ ID NO: 576842 - DNA, 25 bp, Homo sapien
atatcaaattgaagaggaacatcat

SEQ ID NO: 576843 - DNA, 25 bp, Homo sapien
cagtgcactgggctgccaacatggc

SEQ ID NO: 576844 - DNA, 25 bp, Homo sapien
ccagattcccacagtgcactgggct

SEQ ID NO: 576845 - DNA, 25 bp, Homo sapien
gggctgccaacatggctagaactgt

SEQ ID NO: 576846 - DNA, 25 bp, Homo sapien
ttcccacagtgcactgggctgccaa

SEQ ID NO: 576847 - DNA, 25 bp, Homo sapien
ggacgagccagatgacctcccgatt

SEQ ID NO: 576848 - DNA, 25 bp, Homo sapien
gagaaaactgatccgccctctgcga

SEQ ID NO: 576849 - DNA, 25 bp, Homo sapien
gattccacgacttcctggcacgaga

SEQ ID NO: 576850 - DNA, 25 bp, Homo sapien
aatgctcagcgcaggacgagccaga

SEQ ID NO: 576851 - DNA, 25 bp, Homo sapien
gacttctccatgcaactctgagcag

SEQ ID NO: 576852 - DNA, 25 bp, Homo sapien
cagaaaggccacaggattcgctgat

SEQ ID NO: 576853 - DNA, 25 bp, Homo sapien
tcaaagtcccggcttacggcaggtg

SEQ ID NO: 576854 - DNA, 25 bp, Homo sapien
tattaagcagctaccactcagaact

SEQ ID NO: 576855 - DNA, 25 bp, Homo sapien
gacttaactctgcccgatgggttta

SEQ ID NO: 576856 - DNA, 25 bp, Homo sapien
agcagagacaaagctggctcagaag

SEQ ID NO: 576857 - DNA, 25 bp, Homo sapien
gtttagctcagcttcaaagcttcct

SEQ ID NO: 576858 - DNA, 25 bp, Homo sapien
aactctgcccgatgggtttagctca

SEQ ID NO: 576859 - DNA, 25 bp, Homo sapien
aaagctgcctggctgatgcgaacat

SEQ ID NO: 576860 - DNA, 25 bp, Homo sapien
tggctgatgcgaacatccactctag

SEQ ID NO: 576861 - DNA, 25 bp, Homo sapien
tgcctggctgatgcgaacatccact

SEQ ID NO: 576862 - DNA, 25 bp, Homo sapien
gcgaacatccactctagtgaagaac

SEQ ID NO: 576863 - DNA, 25 bp, Homo sapien
tctgcagtgcgtgtgcacaagagct

SEQ ID NO: 576864 - DNA, 25 bp, Homo sapien
caggtctgcagtgcgtgtgcacaag

SEQ ID NO: 576865 - DNA, 25 bp, Homo sapien
gtgtgcacaagagctcagctgaacc

SEQ ID NO: 576866 - DNA, 25 bp, Homo sapien
cagtgcgtgtgcacaagagctcagc

SEQ ID NO: 576867 - DNA, 25 bp, Homo sapien
gataatggatcaaccgctgggaaca

SEQ ID NO: 576868 - DNA, 25 bp, Homo sapien
tctaacaataggaaggagccgcgac

SEQ ID NO: 576869 - DNA, 25 bp, Homo sapien
aactggaggtccgaagaggcaaatc

SEQ ID NO: 576870 - DNA, 25 bp, Homo sapien
tttgtccaggcagtgagttccagca

SEQ ID NO: 576871 - DNA, 25 bp, Homo sapien
aacatgcagtctcaagggagcatcc

SEQ ID NO: 576872 - DNA, 25 bp, Homo sapien
tcctaaaagcagagaacacgcctcc

SEQ ID NO: 576873 - DNA, 25 bp, Homo sapien
caaccagatccctagctagtctggc

SEQ ID NO: 576874 - DNA, 25 bp, Homo sapien
ctcctggcagtccttttgagagctc

SEQ ID NO: 576875 - DNA, 25 bp, Homo sapien
agtgctagagtagctagccttcctg

SEQ ID NO: 576876 - DNA, 25 bp, Homo sapien
cagctggtgatgtcttaatcactgc

SEQ ID NO: 576877 - DNA, 25 bp, Homo sapien
gagagccagcggggctaagaacaca

SEQ ID NO: 576878 - DNA, 25 bp, Homo sapien
ccccagtgctagagtagctagcctt

SEQ ID NO: 576879 - DNA, 25 bp, Homo sapien
gaaaacagacatccagcaagagtgg

SEQ ID NO: 576880 - DNA, 25 bp, Homo sapien
caaggctgtccaactccgagcttac

SEQ ID NO: 576881 - DNA, 25 bp, Homo sapien
gggccttcacttcacaacaactcag

SEQ ID NO: 576882 - DNA, 25 bp, Homo sapien
gggctccagctatattccagaggat

SEQ ID NO: 576883 - DNA, 25 bp, Homo sapien
tgagtgttgtgctaggacagtccct

SEQ ID NO: 576884 - DNA, 25 bp, Homo sapien
tcggtactgcggctgagcaaacaca

SEQ ID NO: 576885 - DNA, 25 bp, Homo sapien
gacaaactaaggcagtggccaccct

SEQ ID NO: 576886 - DNA, 25 bp, Homo sapien
gcaggaggtgccactcaacagagat

SEQ ID NO: 576887 - DNA, 25 bp, Homo sapien
ctttcccgtgtccagatgcccagga

SEQ ID NO: 576888 - DNA, 25 bp, Homo sapien
tgtagtcccggtctctcgctcaata

SEQ ID NO: 576889 - DNA, 25 bp, Homo sapien
gctctggaacaaacgaggtccctgt

SEQ ID NO: 576890 - DNA, 25 bp, Homo sapien
tgatcgctctcctaacaagctgccg

SEQ ID NO: 576891 - DNA, 25 bp, Homo sapien
tttctgcggcgataagagactccac

SEQ ID NO: 576892 - DNA, 25 bp, Homo sapien
aaaggaatgagacgacaggtggccc

SEQ ID NO: 576893 - DNA, 25 bp, Homo sapien
taggtcctggtgaaagctacttgcc

SEQ ID NO: 576894 - DNA, 25 bp, Homo sapien
gattccgatgcaaagctggcctcaa

SEQ ID NO: 576895 - DNA, 25 bp, Homo sapien
atacctctggcgctccgtcacagga

SEQ ID NO: 576896 - DNA, 25 bp, Homo sapien
gccagccaacctgagatgggtgata

SEQ ID NO: 576897 - DNA, 25 bp, Homo sapien
tctggtgtcatggacactgcaccct

SEQ ID NO: 576898 - DNA, 25 bp, Homo sapien
aaagccaagctctgcatacctctgg

SEQ ID NO: 576899 - DNA, 25 bp, Homo sapien
agattggcgtcaaagccaatctctt

SEQ ID NO: 576900 - DNA, 25 bp, Homo sapien
ggggagattggcgtcaaagccaatc

SEQ ID NO: 576901 - DNA, 25 bp, Homo sapien
gagattggcgtcaaagccaatctct

SEQ ID NO: 576902 - DNA, 25 bp, Homo sapien
gggagattggcgtcaaagccaatct

SEQ ID NO: 576903 - DNA, 25 bp, Homo sapien
gttaacccagctaccaaagtcaaga

SEQ ID NO: 576904 - DNA, 25 bp, Homo sapien
ctgctgtcttgtaggcaatgcgaaa

SEQ ID NO: 576905 - DNA, 25 bp, Homo sapien
caatgcgaaatagtcgtgactttgg

SEQ ID NO: 576906 - DNA, 25 bp, Homo sapien
ttggatggaccctcttgaagtccag

SEQ ID NO: 576907 - DNA, 25 bp, Homo sapien
tcagcccgagactgagcaagctgca

SEQ ID NO: 576908 - DNA, 25 bp, Homo sapien
caaaatgaatctcgccaaggctctc

SEQ ID NO: 576909 - DNA, 25 bp, Homo sapien
cctggagacccctacactgtcaaag

SEQ ID NO: 576910 - DNA, 25 bp, Homo sapien
aaaggacatgtcttagacccacagg

SEQ ID NO: 576911 - DNA, 25 bp, Homo sapien
ggtgcataacttcaagccagatggc

SEQ ID NO: 576912 - DNA, 25 bp, Homo sapien
taggctccagctatggtaggaccca

SEQ ID NO: 576913 - DNA, 25 bp, Homo sapien
tctagtaattcagcctaaggcccca

SEQ ID NO: 576914 - DNA, 25 bp, Homo sapien
taagagagaatgtctacccacggcc

SEQ ID NO: 576915 - DNA, 25 bp, Homo sapien
gctatggccatacagtgagcccaca

SEQ ID NO: 576916 - DNA, 25 bp, Homo sapien
tggcaacgccttcaaatcccacagg

SEQ ID NO: 576917 - DNA, 25 bp, Homo sapien
ttgtggttaaatccgcagagcctag

SEQ ID NO: 576918 - DNA, 25 bp, Homo sapien
ccacaatacgcgcagcaggtaaact

SEQ ID NO: 576919 - DNA, 25 bp, Homo sapien
ggagccgcctctggtggagggagcc

SEQ ID NO: 576920 - DNA, 25 bp, Homo sapien
gcagggagagggtgcggcaggagca

SEQ ID NO: 576921 - DNA, 25 bp, Homo sapien
cagggcaggggagccgcctctggtg

SEQ ID NO: 576922 - DNA, 25 bp, Homo sapien
ctctgaagccagtgcagcgggcagg

SEQ ID NO: 576923 - DNA, 25 bp, Homo sapien
gccaatgacagcgatatgcccaaag

SEQ ID NO: 576924 - DNA, 25 bp, Homo sapien
agagccaatgacagcgatatgccca

SEQ ID NO: 576925 - DNA, 25 bp, Homo sapien
caatgacagcgatatgcccaaagat

SEQ ID NO: 576926 - DNA, 25 bp, Homo sapien
aatgacagcgatatgcccaaagatg

SEQ ID NO: 576927 - DNA, 25 bp, Homo sapien
tggaatgagtaagcggaaaccccac

SEQ ID NO: 576928 - DNA, 25 bp, Homo sapien
agtaagcggaaaccccactgccgca

SEQ ID NO: 576929 - DNA, 25 bp, Homo sapien
gccagaccctggaatgagtaagcgg

SEQ ID NO: 576930 - DNA, 25 bp, Homo sapien
aatttatgatcttcatgctgaagat

SEQ ID NO: 576931 - DNA, 25 bp, Homo sapien
acctgggaacagtgcaggtccccac

SEQ ID NO: 576932 - DNA, 25 bp, Homo sapien
attcgtccatggacctgggaacagt

SEQ ID NO: 576933 - DNA, 25 bp, Homo sapien
catggacctgggaacagtgcaggtc

SEQ ID NO: 576934 - DNA, 25 bp, Homo sapien
gtccatggacctgggaacagtgcag

SEQ ID NO: 576935 - DNA, 25 bp, Homo sapien
ggaagcccgtcaccatgacaatggt

SEQ ID NO: 576936 - DNA, 25 bp, Homo sapien
ccaggttggctgcagacaacgaagg

SEQ ID NO: 576937 - DNA, 25 bp, Homo sapien
tgcctatggcaatgaccaggttggc

SEQ ID NO: 576938 - DNA, 25 bp, Homo sapien
ggtggcaaagttgccttgggacacg

SEQ ID NO: 576939 - DNA, 25 bp, Homo sapien
gcatgggtaggtggtaatgggcagg

SEQ ID NO: 576940 - DNA, 25 bp, Homo sapien
aggcatgggtaggtggtaatgggca

SEQ ID NO: 576941 - DNA, 25 bp, Homo sapien
caggcatgggtaggtggtaatgggc

SEQ ID NO: 576942 - DNA, 25 bp, Homo sapien
catgggtaggtggtaatgggcaggg

SEQ ID NO: 576943 - DNA, 25 bp, Homo sapien
ggatgaccaacaggacgatgaaaaa

SEQ ID NO: 576944 - DNA, 25 bp, Homo sapien
taagatcagctctgctaggaggatg

SEQ ID NO: 576945 - DNA, 25 bp, Homo sapien
gaagaggatgagtaagatcagctct

SEQ ID NO: 576946 - DNA, 25 bp, Homo sapien
tgctaggaggatgaccaacaggacg

SEQ ID NO: 576947 - DNA, 25 bp, Homo sapien
caggcgttcttcagccccacgttgt

SEQ ID NO: 576948 - DNA, 25 bp, Homo sapien
cccacgttgttctcggtgtggtaca

SEQ ID NO: 576949 - DNA, 25 bp, Homo sapien
gttgttctcggtgtggtacagcagc

SEQ ID NO: 576950 - DNA, 25 bp, Homo sapien
gatgatgttccaggcgttcttcagc

SEQ ID NO: 576951 - DNA, 25 bp, Homo sapien
tagtcagtgacaccacagcatcgca

SEQ ID NO: 576952 - DNA, 25 bp, Homo sapien
gcagccctgggagttctccatgcag

SEQ ID NO: 576953 - DNA, 25 bp, Homo sapien
acaaaggcgtggtggcgttgcgccc

SEQ ID NO: 576954 - DNA, 25 bp, Homo sapien
gcagcggtcgggaaccgtgttctcc

SEQ ID NO: 576955 - DNA, 25 bp, Homo sapien
tgatgaggatgcacatccccaccgt

SEQ ID NO: 576956 - DNA, 25 bp, Homo sapien
gatgaggatgcacatccccaccgtg

SEQ ID NO: 576957 - DNA, 25 bp, Homo sapien
ccagcacgtgcttattgtcatcgaa

SEQ ID NO: 576958 - DNA, 25 bp, Homo sapien
tattgtcatcgaaccacatcttcac

SEQ ID NO: 576959 - DNA, 25 bp, Homo sapien
cagtccggtggatgtgctggaagag

SEQ ID NO: 576960 - DNA, 25 bp, Homo sapien
gatgtgctggaagagggtcatggag

SEQ ID NO: 576961 - DNA, 25 bp, Homo sapien
tgctggaagagggtcatggagaagg

SEQ ID NO: 576962 - DNA, 25 bp, Homo sapien
ctggaagagggtcatggagaaggcc

SEQ ID NO: 576963 - DNA, 25 bp, Homo sapien
tgcaggggtcatatctggagagcgc

SEQ ID NO: 576964 - DNA, 25 bp, Homo sapien
gcaggtgacacaaagctcaatcctc

SEQ ID NO: 576965 - DNA, 25 bp, Homo sapien
ggtgacacaaagctcaatcctcttc

SEQ ID NO: 576966 - DNA, 25 bp, Homo sapien
atctggagagcgcaggcaggtgaca

SEQ ID NO: 576967 - DNA, 25 bp, Homo sapien
ccctggcactccacccactgagaag

SEQ ID NO: 576968 - DNA, 25 bp, Homo sapien
cgcatatgcagatgcaggaatccag

SEQ ID NO: 576969 - DNA, 25 bp, Homo sapien
cctgtcgtctttggcaaatacgcat

SEQ ID NO: 576970 - DNA, 25 bp, Homo sapien
cgagccccaggtctccgtgtgcctc

SEQ ID NO: 576971 - DNA, 25 bp, Homo sapien
gaaatctaaccctaaacttatctga

SEQ ID NO: 576972 - DNA, 25 bp, Homo sapien
gaaatcaacacagtaaaaagttaca

SEQ ID NO: 576973 - DNA, 25 bp, Homo sapien
tataaaaagcctgggcgagatgctc

SEQ ID NO: 576974 - DNA, 25 bp, Homo sapien
cgccaggtgccccatggtggccatg

SEQ ID NO: 576975 - DNA, 25 bp, Homo sapien
ttcccacacgttctgagggcgcagg

SEQ ID NO: 576976 - DNA, 25 bp, Homo sapien
cctcctgggtgtcgcacggtggtct

SEQ ID NO: 576977 - DNA, 25 bp, Homo sapien
tgaaaagtctaaggacccctctagc

SEQ ID NO: 576978 - DNA, 25 bp, Homo sapien
tcgattggttagcaaacgccacctc

SEQ ID NO: 576979 - DNA, 25 bp, Homo sapien
tgagcagcatccgaactagagaggt

SEQ ID NO: 576980 - DNA, 25 bp, Homo sapien
gcatccgaactagagaggtatttgt

SEQ ID NO: 576981 - DNA, 25 bp, Homo sapien
gagcagcatccgaactagagaggta

SEQ ID NO: 576982 - DNA, 25 bp, Homo sapien
gcagcatccgaactagagaggtatt

SEQ ID NO: 576983 - DNA, 25 bp, Homo sapien
gtcctcacccctgtgggtcccctgc

SEQ ID NO: 576984 - DNA, 25 bp, Homo sapien
tggcggggaggaccgtgggtcctca

SEQ ID NO: 576985 - DNA, 25 bp, Homo sapien
ccagcacagcaaaacctaaggactg

SEQ ID NO: 576986 - DNA, 25 bp, Homo sapien
cagcaaaacctaaggactgcttccc

SEQ ID NO: 576987 - DNA, 25 bp, Homo sapien
cccagcagggcaacccacagctgag

SEQ ID NO: 576988 - DNA, 25 bp, Homo sapien
cagggcaacccacagctgagcaagg

SEQ ID NO: 576989 - DNA, 25 bp, Homo sapien
ttcccagcagggcaacccacagctg

SEQ ID NO: 576990 - DNA, 25 bp, Homo sapien
agcagggcaacccacagctgagcaa

SEQ ID NO: 576991 - DNA, 25 bp, Homo sapien
aaggaggcgaagatcttgggaccca

SEQ ID NO: 576992 - DNA, 25 bp, Homo sapien
ggacccaggtggacgtgattccctc

SEQ ID NO: 576993 - DNA, 25 bp, Homo sapien
cacagatgatataatcgccacccaa

SEQ ID NO: 576994 - DNA, 25 bp, Homo sapien
cactgctgatgtccgtggccccagg

SEQ ID NO: 576995 - DNA, 25 bp, Homo sapien
cttcccgtggctccggtaacaagag

SEQ ID NO: 576996 - DNA, 25 bp, Homo sapien
acgtgcgtgactccggctgctttct

SEQ ID NO: 576997 - DNA, 25 bp, Homo sapien
tgcccagctctgcacgtgcgtgact

SEQ ID NO: 576998 - DNA, 25 bp, Homo sapien
ggcaaaacagtaagccagaccagct

SEQ ID NO: 576999 - DNA, 25 bp, Homo sapien
gctggctagcgggtgaggtccccgt

SEQ ID NO: 577000 - DNA, 25 bp, Homo sapien
cagacgctggctagcgggtgaggtc

SEQ ID NO: 577001 - DNA, 25 bp, Homo sapien
ctagcgggtgaggtccccgtgctca

SEQ ID NO: 577002 - DNA, 25 bp, Homo sapien
agcagacgctggctagcgggtgagg

SEQ ID NO: 577003 - DNA, 25 bp, Homo sapien
tgtctcagggaagcggtcttcaccc

SEQ ID NO: 577004 - DNA, 25 bp, Homo sapien
caagacaaactgtataggaaaggca

SEQ ID NO: 577005 - DNA, 25 bp, Homo sapien
tcctgataatgccaacggttctgtc

SEQ ID NO: 577006 - DNA, 25 bp, Homo sapien
cagtgggaaaccagggtgacaagac

SEQ ID NO: 577007 - DNA, 25 bp, Homo sapien
gctttgctcaaatgtgggcctcccc

SEQ ID NO: 577008 - DNA, 25 bp, Homo sapien
agggcagctttgctcaaatgtgggc

SEQ ID NO: 577009 - DNA, 25 bp, Homo sapien
agctttgctcaaatgtgggcctccc

SEQ ID NO: 577010 - DNA, 25 bp, Homo sapien
gcagctttgctcaaatgtgggcctc

SEQ ID NO: 577011 - DNA, 25 bp, Homo sapien
gatgtgtctgctccggaatctgcac

SEQ ID NO: 577012 - DNA, 25 bp, Homo sapien
tctgctccggaatctgcactttggg

SEQ ID NO: 577013 - DNA, 25 bp, Homo sapien
tgagtctctccgcccggatgtgtct

SEQ ID NO: 577014 - DNA, 25 bp, Homo sapien
cccggatgtgtctgctccggaatct

SEQ ID NO: 577015 - DNA, 25 bp, Homo sapien
aaaagattttcagggaggttgcaca

SEQ ID NO: 577016 - DNA, 25 bp, Homo sapien
aacaaaacggccaagcgcagagtga

SEQ ID NO: 577017 - DNA, 25 bp, Homo sapien
tagatgaggctctgcaaacagacgg

SEQ ID NO: 577018 - DNA, 25 bp, Homo sapien
ggccacccctgaagtactccagaaa

SEQ ID NO: 577019 - DNA, 25 bp, Homo sapien
gagacttgcaccgtgacacctgctt

SEQ ID NO: 577020 - DNA, 25 bp, Homo sapien
tctagttccaagtcaaaccaggaca

SEQ ID NO: 577021 - DNA, 25 bp, Homo sapien
ctgactctggcaaagggagccgtga

SEQ ID NO: 577022 - DNA, 25 bp, Homo sapien
gaattctaccccagtgagatcacag

SEQ ID NO: 577023 - DNA, 25 bp, Homo sapien
tggactattgactcactgcagtggg

SEQ ID NO: 577024 - DNA, 25 bp, Homo sapien
tgaaaccaacaagcgtgctcaccct

SEQ ID NO: 577025 - DNA, 25 bp, Homo sapien
gatacggcaatgcaagcagaaagtg

SEQ ID NO: 577026 - DNA, 25 bp, Homo sapien
gatgaaggaacgcacagatacggca

SEQ ID NO: 577027 - DNA, 25 bp, Homo sapien
cttctttgaggctgtcccagtcacc

SEQ ID NO: 577028 - DNA, 25 bp, Homo sapien
aaggcggcaacgtcagtggcccagc

SEQ ID NO: 577029 - DNA, 25 bp, Homo sapien
tcctgctcgcggttttaatggcctt

SEQ ID NO: 577030 - DNA, 25 bp, Homo sapien
ccgcgggagacttcgactgcaggaa

SEQ ID NO: 577031 - DNA, 25 bp, Homo sapien
ctgggccttgtcatccgggcaggca

SEQ ID NO: 577032 - DNA, 25 bp, Homo sapien
gaggaacaagtaccactccaggacc

SEQ ID NO: 577033 - DNA, 25 bp, Homo sapien
agctgtgccttggtggctgccggct

SEQ ID NO: 577034 - DNA, 25 bp, Homo sapien
cctgctgcacagcactgtcagtggt

SEQ ID NO: 577035 - DNA, 25 bp, Homo sapien
aaccagcctgttaagaaatctgcgg

SEQ ID NO: 577036 - DNA, 25 bp, Homo sapien
gagccaggctcaaacatgtgtactt

SEQ ID NO: 577037 - DNA, 25 bp, Homo sapien
tcttcacaccgtttaccaggatgcg

SEQ ID NO: 577038 - DNA, 25 bp, Homo sapien
gaaatctgcggtgagcctttcccca

SEQ ID NO: 577039 - DNA, 25 bp, Homo sapien
acctgccttgaaaacatgctccgtg

SEQ ID NO: 577040 - DNA, 25 bp, Homo sapien
tgccttgaaaacatgctccgtgtac

SEQ ID NO: 577041 - DNA, 25 bp, Homo sapien
cctgccttgaaaacatgctccgtgt

SEQ ID NO: 577042 - DNA, 25 bp, Homo sapien
ctgccttgaaaacatgctccgtgta

SEQ ID NO: 577043 - DNA, 25 bp, Homo sapien
cttgtgcacggccaaaggccctgac

SEQ ID NO: 577044 - DNA, 25 bp, Homo sapien
ccatgctatacgaagcgcctgctgc

SEQ ID NO: 577045 - DNA, 25 bp, Homo sapien
ccttgtgcacggccaaaggccctga

SEQ ID NO: 577046 - DNA, 25 bp, Homo sapien
accttgtgcacggccaaaggccctg

SEQ ID NO: 577047 - DNA, 25 bp, Homo sapien
tgagaaagggctcgcagtcatcgtc

SEQ ID NO: 577048 - DNA, 25 bp, Homo sapien
cccaggtgggccgaagtcttgagaa

SEQ ID NO: 577049 - DNA, 25 bp, Homo sapien
tacctcgaagaccagtagccttgag

SEQ ID NO: 577050 - DNA, 25 bp, Homo sapien
tctgcaggtcgtgaaaagggaaacc

SEQ ID NO: 577051 - DNA, 25 bp, Homo sapien
aggcacagcgcacaaggccgtgcat

SEQ ID NO: 577052 - DNA, 25 bp, Homo sapien
tgagctggagcagtacgggcttccc

SEQ ID NO: 577053 - DNA, 25 bp, Homo sapien
gtcccgtgaggatgtgagctggagc

SEQ ID NO: 577054 - DNA, 25 bp, Homo sapien
gctggagcagtacgggcttccctga

SEQ ID NO: 577055 - DNA, 25 bp, Homo sapien
acctgtgtgcacaggtatctgcagg

SEQ ID NO: 577056 - DNA, 25 bp, Homo sapien
caggctgcaccatctctgtccaaag

SEQ ID NO: 577057 - DNA, 25 bp, Homo sapien
acagtcccttctgtccacctgtgtg

SEQ ID NO: 577058 - DNA, 25 bp, Homo sapien
tgcaggctgcaccatctctgtccaa

SEQ ID NO: 577059 - DNA, 25 bp, Homo sapien
tgcagttctctgcaaccgaggctcc

SEQ ID NO: 577060 - DNA, 25 bp, Homo sapien
gcagcactgtcgcagcggagcagtt

SEQ ID NO: 577061 - DNA, 25 bp, Homo sapien
tgatgggctgcctgacacgtcggcc

SEQ ID NO: 577062 - DNA, 25 bp, Homo sapien
ggagcagttcttacagccaatgagc

SEQ ID NO: 577063 - DNA, 25 bp, Homo sapien
aggccatctggacccgaggccgatg

SEQ ID NO: 577064 - DNA, 25 bp, Homo sapien
catctggacccgaggccgatgacca

SEQ ID NO: 577065 - DNA, 25 bp, Homo sapien
gccatctggacccgaggccgatgac

SEQ ID NO: 577066 - DNA, 25 bp, Homo sapien
atctggacccgaggccgatgaccag

SEQ ID NO: 577067 - DNA, 25 bp, Homo sapien
gggaatagcatgtctttgctggtgc

SEQ ID NO: 577068 - DNA, 25 bp, Homo sapien
tcagggacgggaatagcatgtcttt

SEQ ID NO: 577069 - DNA, 25 bp, Homo sapien
gtctttgctggtgctgagacgatga

SEQ ID NO: 577070 - DNA, 25 bp, Homo sapien
gacgggaatagcatgtctttgctgg

SEQ ID NO: 577071 - DNA, 25 bp, Homo sapien
caaggagtcgacaaacagagagagc

SEQ ID NO: 577072 - DNA, 25 bp, Homo sapien
caaagtggctattggacaggctggc

SEQ ID NO: 577073 - DNA, 25 bp, Homo sapien
gaagaatggatgtctctagcctccc

SEQ ID NO: 577074 - DNA, 25 bp, Homo sapien
tgtgcttgcctaaacgcttgacggg

SEQ ID NO: 577075 - DNA, 25 bp, Homo sapien
gagtggcacatcctagacctgacca

SEQ ID NO: 577076 - DNA, 25 bp, Homo sapien
gacctgaccaacgtagctggatgga

SEQ ID NO: 577077 - DNA, 25 bp, Homo sapien
tcaaagagaaatcaggccgagcctg

SEQ ID NO: 577078 - DNA, 25 bp, Homo sapien
ttccagctgtggatatgaagcgcct

SEQ ID NO: 577079 - DNA, 25 bp, Homo sapien
gagcgggtactctcgtcatggtgac

SEQ ID NO: 577080 - DNA, 25 bp, Homo sapien
cctcatctgagcgggtactctcgtc

SEQ ID NO: 577081 - DNA, 25 bp, Homo sapien
tctgagcgggtactctcgtcatggt

SEQ ID NO: 577082 - DNA, 25 bp, Homo sapien
gcgggtactctcgtcatggtgaccg

SEQ ID NO: 577083 - DNA, 25 bp, Homo sapien
tatctgcaagacagggatagcctgg

SEQ ID NO: 577084 - DNA, 25 bp, Homo sapien
catcagaggaaatggacccgtccct

SEQ ID NO: 577085 - DNA, 25 bp, Homo sapien
caatgcacgagaagtgcctggtacc

SEQ ID NO: 577086 - DNA, 25 bp, Homo sapien
taacagtcactaaaaggctcctcag

SEQ ID NO: 577087 - DNA, 25 bp, Homo sapien
gtaagatgccatcaatcataagatg

SEQ ID NO: 577088 - DNA, 25 bp, Homo sapien
tgttgtattctaggatttcactgaa

SEQ ID NO: 577089 - DNA, 25 bp, Homo sapien
tcaccaagaaaaagtactgccaagt

SEQ ID NO: 577090 - DNA, 25 bp, Homo sapien
catggaattgaaaaattatggtgtg

SEQ ID NO: 577091 - DNA, 25 bp, Homo sapien
tatcgttatccttggttacagccac

SEQ ID NO: 577092 - DNA, 25 bp, Homo sapien
gcgctgtgtgctcattagcttctga

SEQ ID NO: 577093 - DNA, 25 bp, Homo sapien
gcctttcagatcttcgtgtctccaa

SEQ ID NO: 577094 - DNA, 25 bp, Homo sapien
tcatcctcgtcaataataatgaggc

SEQ ID NO: 577095 - DNA, 25 bp, Homo sapien
gggtccttaaccacacgcctgagtc

SEQ ID NO: 577096 - DNA, 25 bp, Homo sapien
gccgcccgcagtccctgatggaccg

SEQ ID NO: 577097 - DNA, 25 bp, Homo sapien
cacttgtgccttgggaagagctctg

SEQ ID NO: 577098 - DNA, 25 bp, Homo sapien
gagtcgcggcgcgtgggagcacgcg

SEQ ID NO: 577099 - DNA, 25 bp, Homo sapien
ttgctccagattaggaagaatcttg

SEQ ID NO: 577100 - DNA, 25 bp, Homo sapien
gctccagattaggaagaatcttgat

SEQ ID NO: 577101 - DNA, 25 bp, Homo sapien
cagattaggaagaatcttgattctc

SEQ ID NO: 577102 - DNA, 25 bp, Homo sapien
cccagggaatgcagggccgatggtc

SEQ ID NO: 577103 - DNA, 25 bp, Homo sapien
taggttgtctcaagccacctgtgcc

SEQ ID NO: 577104 - DNA, 25 bp, Homo sapien
gcaggcccgaatggctaggttgtct

SEQ ID NO: 577105 - DNA, 25 bp, Homo sapien
ttggatttctaggatacagactctg

SEQ ID NO: 577106 - DNA, 25 bp, Homo sapien
tctcggtgccgcaggatctcaggtt

SEQ ID NO: 577107 - DNA, 25 bp, Homo sapien
tgcctcctggctttcgaagatccat

SEQ ID NO: 577108 - DNA, 25 bp, Homo sapien
tctgctacgaaaaaccctcgtcttc

SEQ ID NO: 577109 - DNA, 25 bp, Homo sapien
tcaccgacagcgttgctctcctctg

SEQ ID NO: 577110 - DNA, 25 bp, Homo sapien
caccttctccggctttttctgacaa

SEQ ID NO: 577111 - DNA, 25 bp, Homo sapien
tctcatgttgctaaaaggtccctct

SEQ ID NO: 577112 - DNA, 25 bp, Homo sapien
tgctgcagagggaatatcctggtcc

SEQ ID NO: 577113 - DNA, 25 bp, Homo sapien
cgtgtgtaaacatgattcctgggaa

SEQ ID NO: 577114 - DNA, 25 bp, Homo sapien
agacgtctgacgttcccagggatgg

SEQ ID NO: 577115 - DNA, 25 bp, Homo sapien
atgagagaggattagcagtatgtgc

SEQ ID NO: 577116 - DNA, 25 bp, Homo sapien
cagaagacctgtccactagttacag

SEQ ID NO: 577117 - DNA, 25 bp, Homo sapien
tgctgcacgtagcagaaatctccag

SEQ ID NO: 577118 - DNA, 25 bp, Homo sapien
gaagacctgtccactagttacagaa

SEQ ID NO: 577119 - DNA, 25 bp, Homo sapien
ttctctgccatacataactggagta

SEQ ID NO: 577120 - DNA, 25 bp, Homo sapien
ctctgccatacataactggagtaaa

SEQ ID NO: 577121 - DNA, 25 bp, Homo sapien
cttctctgccatacataactggagt

SEQ ID NO: 577122 - DNA, 25 bp, Homo sapien
ctcttctctgccatacataactgga

SEQ ID NO: 577123 - DNA, 25 bp, Homo sapien
gcaaaagccaccgaagacactgctt

SEQ ID NO: 577124 - DNA, 25 bp, Homo sapien
aggcaaaagccaccgaagacactgc

SEQ ID NO: 577125 - DNA, 25 bp, Homo sapien
caaaagccaccgaagacactgcttt

SEQ ID NO: 577126 - DNA, 25 bp, Homo sapien
aaaagccaccgaagacactgctttc

SEQ ID NO: 577127 - DNA, 25 bp, Homo sapien
ttgagttgagaacatcccatatgag

SEQ ID NO: 577128 - DNA, 25 bp, Homo sapien
tcccatatgaggtgggttcctccat

SEQ ID NO: 577129 - DNA, 25 bp, Homo sapien
tgaggctcgtgccaatgctcttgag

SEQ ID NO: 577130 - DNA, 25 bp, Homo sapien
ggctcgtgccaatgctcttgagttg

SEQ ID NO: 577131 - DNA, 25 bp, Homo sapien
ctccaggtcacaacaaataatttca

SEQ ID NO: 577132 - DNA, 25 bp, Homo sapien
tgtccaaggctcttcacgttccttt

SEQ ID NO: 577133 - DNA, 25 bp, Homo sapien
cattgttgtgtccaaggctcttcac

SEQ ID NO: 577134 - DNA, 25 bp, Homo sapien
ctctccaggtcacaacaaataattt

SEQ ID NO: 577135 - DNA, 25 bp, Homo sapien
ctgtattaagaggtttgaaaagcaa

SEQ ID NO: 577136 - DNA, 25 bp, Homo sapien
gtgagtgtcaaaaacgaaggtgacg

SEQ ID NO: 577137 - DNA, 25 bp, Homo sapien
tgtattaagaggtttgaaaagcaag

SEQ ID NO: 577138 - DNA, 25 bp, Homo sapien
agtgtcaaaaacgaaggtgacggag

SEQ ID NO: 577139 - DNA, 25 bp, Homo sapien
gggctgctggtgctgaaaagatgag

SEQ ID NO: 577140 - DNA, 25 bp, Homo sapien
ccagaccccataagagtcctgttct

SEQ ID NO: 577141 - DNA, 25 bp, Homo sapien
gaccccataagagtcctgttcttca

SEQ ID NO: 577142 - DNA, 25 bp, Homo sapien
tgcaggaatcgtagactcagggcaa

SEQ ID NO: 577143 - DNA, 25 bp, Homo sapien
aggaatcgtagactcagggcaagct

SEQ ID NO: 577144 - DNA, 25 bp, Homo sapien
gctctggtcacttcacacaggttgt

SEQ ID NO: 577145 - DNA, 25 bp, Homo sapien
ggctctggtcacttcacacaggttg

SEQ ID NO: 577146 - DNA, 25 bp, Homo sapien
agccacatgggcgacagcagggtcc

SEQ ID NO: 577147 - DNA, 25 bp, Homo sapien
accagccacatgggcgacagcaggg

SEQ ID NO: 577148 - DNA, 25 bp, Homo sapien
ccttgttgatatcatggcgggaagg

SEQ ID NO: 577149 - DNA, 25 bp, Homo sapien
tgcccatgaaagcaggtgtcatgag

SEQ ID NO: 577150 - DNA, 25 bp, Homo sapien
gcccatgaaagcaggtgtcatgaga

SEQ ID NO: 577151 - DNA, 25 bp, Homo sapien
ggggccgaggcggtgcccacagaga

SEQ ID NO: 577152 - DNA, 25 bp, Homo sapien
ggccgaggcggtgcccacagagaga

SEQ ID NO: 577153 - DNA, 25 bp, Homo sapien
cagaacagcatgtggctgagggagc

SEQ ID NO: 577154 - DNA, 25 bp, Homo sapien
aacagcatgtggctgagggagcgca

SEQ ID NO: 577155 - DNA, 25 bp, Homo sapien
tctgccttgaacgttccccagtcca

SEQ ID NO: 577156 - DNA, 25 bp, Homo sapien
tctcctctgccttgaacgttcccca

SEQ ID NO: 577157 - DNA, 25 bp, Homo sapien
tgccttgaacgttccccagtccagg

SEQ ID NO: 577158 - DNA, 25 bp, Homo sapien
tcctctgccttgaacgttccccagt

SEQ ID NO: 577159 - DNA, 25 bp, Homo sapien
cccagacctagcatagcaggagctg

SEQ ID NO: 577160 - DNA, 25 bp, Homo sapien
gaacagacgaggagacagccagcat

SEQ ID NO: 577161 - DNA, 25 bp, Homo sapien
cagaccacagggtgccgcaggagat

SEQ ID NO: 577162 - DNA, 25 bp, Homo sapien
agtcgggccacgtcaggacacagac

SEQ ID NO: 577163 - DNA, 25 bp, Homo sapien
gggaggaggaaggctccagcgtctt

SEQ ID NO: 577164 - DNA, 25 bp, Homo sapien
aggaggaaggctccagcgtcttcca

SEQ ID NO: 577165 - DNA, 25 bp, Homo sapien
aggggaggaggaaggctccagcgtc

SEQ ID NO: 577166 - DNA, 25 bp, Homo sapien
gaggaggaaggctccagcgtcttcc

SEQ ID NO: 577167 - DNA, 25 bp, Homo sapien
tagaagccggtgatgtccatgatct

SEQ ID NO: 577168 - DNA, 25 bp, Homo sapien
cctccaaagtagagcttcctgctgc

SEQ ID NO: 577169 - DNA, 25 bp, Homo sapien
agagcttcctgctgctacaggaata

SEQ ID NO: 577170 - DNA, 25 bp, Homo sapien
cattcctccaaagtagagcttcctg

SEQ ID NO: 577171 - DNA, 25 bp, Homo sapien
tccattcctccaaagtagagcttcc

SEQ ID NO: 577172 - DNA, 25 bp, Homo sapien
aaatcttcaggccagctcatagcct

SEQ ID NO: 577173 - DNA, 25 bp, Homo sapien
caaatcttcaggccagctcatagcc

SEQ ID NO: 577174 - DNA, 25 bp, Homo sapien
ccaaatcttcaggccagctcatagc

SEQ ID NO: 577175 - DNA, 25 bp, Homo sapien
aagtggcgatgtacagctgaagaga

SEQ ID NO: 577176 - DNA, 25 bp, Homo sapien
tgaaatcgcctgagtgtggaagtgg

SEQ ID NO: 577177 - DNA, 25 bp, Homo sapien
gctgaagagataatctgaattcacc

SEQ ID NO: 577178 - DNA, 25 bp, Homo sapien
tggagttgaaagcaggccccggttc

SEQ ID NO: 577179 - DNA, 25 bp, Homo sapien
tgactgatacttaggctctaagcac

SEQ ID NO: 577180 - DNA, 25 bp, Homo sapien
ctgacagtaacctggaagggtctct

SEQ ID NO: 577181 - DNA, 25 bp, Homo sapien
ccccattgctgacagtaacctggaa

SEQ ID NO: 577182 - DNA, 25 bp, Homo sapien
ctgagggattctgactgatacttag

SEQ ID NO: 577183 - DNA, 25 bp, Homo sapien
tttctgcagagcgacgagcaaaact

SEQ ID NO: 577184 - DNA, 25 bp, Homo sapien
cctttctgcagagcgacgagcaaaa

SEQ ID NO: 577185 - DNA, 25 bp, Homo sapien
ctttctgcagagcgacgagcaaaac

SEQ ID NO: 577186 - DNA, 25 bp, Homo sapien
gatgctcacatccaaacccacaaat

SEQ ID NO: 577187 - DNA, 25 bp, Homo sapien
gtcttgctgcatgcatagatgctca

SEQ ID NO: 577188 - DNA, 25 bp, Homo sapien
cactggctattctgatttagcccaa

SEQ ID NO: 577189 - DNA, 25 bp, Homo sapien
aatgtagctgcagacactttgacag

SEQ ID NO: 577190 - DNA, 25 bp, Homo sapien
gagcattatagatgatgccacccat

SEQ ID NO: 577191 - DNA, 25 bp, Homo sapien
ctttccattggagagttcagtctac

SEQ ID NO: 577192 - DNA, 25 bp, Homo sapien
tatgatggataggatgaagactcca

SEQ ID NO: 577193 - DNA, 25 bp, Homo sapien
tcctcaaagtccgattaagtttcca

SEQ ID NO: 577194 - DNA, 25 bp, Homo sapien
gcttctttctgcctagggcctcgca

SEQ ID NO: 577195 - DNA, 25 bp, Homo sapien
cattttacagatcacggaaggatgg

SEQ ID NO: 577196 - DNA, 25 bp, Homo sapien
ggtatcatcaggagagtgaccacag

SEQ ID NO: 577197 - DNA, 25 bp, Homo sapien
gcagccccaggcattagttacatgg

SEQ ID NO: 577198 - DNA, 25 bp, Homo sapien
catacgcagtgatggcgacagacca

SEQ ID NO: 577199 - DNA, 25 bp, Homo sapien
tgtaagtcagcataaccccatagct

SEQ ID NO: 577200 - DNA, 25 bp, Homo sapien
ttaacgggctgctcagacatacgca

SEQ ID NO: 577201 - DNA, 25 bp, Homo sapien
gacagaccatagtccttaaagcagg

SEQ ID NO: 577202 - DNA, 25 bp, Homo sapien
tgtagctggaacaatcagaaggtgc

SEQ ID NO: 577203 - DNA, 25 bp, Homo sapien
ggcaacccgacctgaaaacgcataa

SEQ ID NO: 577204 - DNA, 25 bp, Homo sapien
tcgccctggatcacgcacttgagga

SEQ ID NO: 577205 - DNA, 25 bp, Homo sapien
catagggctgacctctggtgcgtca

SEQ ID NO: 577206 - DNA, 25 bp, Homo sapien
tgtgctgccacaacagaattagctt

SEQ ID NO: 577207 - DNA, 25 bp, Homo sapien
agctttttctactgggtggacgttg

SEQ ID NO: 577208 - DNA, 25 bp, Homo sapien
tgttacctacctttctctaaggatg

SEQ ID NO: 577209 - DNA, 25 bp, Homo sapien
gtctgattaaatcaattcactgcgg

SEQ ID NO: 577210 - DNA, 25 bp, Homo sapien
tcaagaagttgaccaggttcaggga

SEQ ID NO: 577211 - DNA, 25 bp, Homo sapien
tgtcaacattcgctaggccctgtcc

SEQ ID NO: 577212 - DNA, 25 bp, Homo sapien
tgtgttctcatgtagcccgttcaac

SEQ ID NO: 577213 - DNA, 25 bp, Homo sapien
caaggaattgcccaagtggtagagg

SEQ ID NO: 577214 - DNA, 25 bp, Homo sapien
taagctttcaacctacgagtcaagg

SEQ ID NO: 577215 - DNA, 25 bp, Homo sapien
tcatctggtcctcgggcaaagagag

SEQ ID NO: 577216 - DNA, 25 bp, Homo sapien
agaaatgatcctcaccgctctgtgg

SEQ ID NO: 577217 - DNA, 25 bp, Homo sapien
ccatggtccatcagcaagcagagga

SEQ ID NO: 577218 - DNA, 25 bp, Homo sapien
ggcccagagaaagccggcgccgggc

SEQ ID NO: 577219 - DNA, 25 bp, Homo sapien
ttgcaggttctcagacccggtgcgc

SEQ ID NO: 577220 - DNA, 25 bp, Homo sapien
ccggcgccgggcgaggctcttgcag

SEQ ID NO: 577221 - DNA, 25 bp, Homo sapien
caggttctcagacccggtgcgcgtg

SEQ ID NO: 577222 - DNA, 25 bp, Homo sapien
cagtcagccacagcggagtctgttc

SEQ ID NO: 577223 - DNA, 25 bp, Homo sapien
tctccaggctgctcgcaaagtccgg

SEQ ID NO: 577224 - DNA, 25 bp, Homo sapien
ctcagctggagcgtcggccggcaca

SEQ ID NO: 577225 - DNA, 25 bp, Homo sapien
ggctaagctcgagggaagcagcccc

SEQ ID NO: 577226 - DNA, 25 bp, Homo sapien
gcaagggtttggtgataccgagata

SEQ ID NO: 577227 - DNA, 25 bp, Homo sapien
cagcgggaggagtgtttcatgccca

SEQ ID NO: 577228 - DNA, 25 bp, Homo sapien
tttggtgataccgagatagtagagg

SEQ ID NO: 577229 - DNA, 25 bp, Homo sapien
catgcccataagagccggcaagggt

SEQ ID NO: 577230 - DNA, 25 bp, Homo sapien
ggtgctctcggccgcgttctccgcc

SEQ ID NO: 577231 - DNA, 25 bp, Homo sapien
tcggtgctctcggccgcgttctccg

SEQ ID NO: 577232 - DNA, 25 bp, Homo sapien
tgctctcggccgcgttctccgccat

SEQ ID NO: 577233 - DNA, 25 bp, Homo sapien
ctcggtgctctcggccgcgttctcc

SEQ ID NO: 577234 - DNA, 25 bp, Homo sapien
gagctagagcgacctcctcaaaagc

SEQ ID NO: 577235 - DNA, 25 bp, Homo sapien
agtccgcgcaggctcggctgctgca

SEQ ID NO: 577236 - DNA, 25 bp, Homo sapien
ctcaaaagcccttgcgggacgggtg

SEQ ID NO: 577237 - DNA, 25 bp, Homo sapien
gggccgagaacacaatttgcggagc

SEQ ID NO: 577238 - DNA, 25 bp, Homo sapien
tctcgggacgcaaagcccagcaggg

SEQ ID NO: 577239 - DNA, 25 bp, Homo sapien
agcctcgagtctcgggacgcaaagc

SEQ ID NO: 577240 - DNA, 25 bp, Homo sapien
tcgagtctcgggacgcaaagcccag

SEQ ID NO: 577241 - DNA, 25 bp, Homo sapien
tcacagcctcgagtctcgggacgca

SEQ ID NO: 577242 - DNA, 25 bp, Homo sapien
tagtccggttgttgtaatgacagcg

SEQ ID NO: 577243 - DNA, 25 bp, Homo sapien
agcctacggaatagtccggttgttg

SEQ ID NO: 577244 - DNA, 25 bp, Homo sapien
tgatccccttcgtgactacaggtgc

SEQ ID NO: 577245 - DNA, 25 bp, Homo sapien
acgctgatccccttcgtgactacag

SEQ ID NO: 577246 - DNA, 25 bp, Homo sapien
tacacatcattccgaatgtctgctc

SEQ ID NO: 577247 - DNA, 25 bp, Homo sapien
ctacacatcattccgaatgtctgct

SEQ ID NO: 577248 - DNA, 25 bp, Homo sapien
acacatcattccgaatgtctgctct

SEQ ID NO: 577249 - DNA, 25 bp, Homo sapien
gaggaaatcactagagcagtacctg

SEQ ID NO: 577250 - DNA, 25 bp, Homo sapien
gcagtacctggtataattgtgatta

SEQ ID NO: 577251 - DNA, 25 bp, Homo sapien
tacctggtataattgtgattattca

SEQ ID NO: 577252 - DNA, 25 bp, Homo sapien
tagagcagtacctggtataattgtg

SEQ ID NO: 577253 - DNA, 25 bp, Homo sapien
cacaaaacaagctattctgtaggct

SEQ ID NO: 577254 - DNA, 25 bp, Homo sapien
ttctgtaggctagtaaactcatctt

SEQ ID NO: 577255 - DNA, 25 bp, Homo sapien
tattctgtaggctagtaaactcatc

SEQ ID NO: 577256 - DNA, 25 bp, Homo sapien
agaacccacaaaacaagctattctg

SEQ ID NO: 577257 - DNA, 25 bp, Homo sapien
caccggtgggttctggacttgcttc

SEQ ID NO: 577258 - DNA, 25 bp, Homo sapien
gaaacagcaccggtgggttctggac

SEQ ID NO: 577259 - DNA, 25 bp, Homo sapien
gccagaaacagcaccggtgggttct

SEQ ID NO: 577260 - DNA, 25 bp, Homo sapien
tgggttctggacttgcttctctcct

SEQ ID NO: 577261 - DNA, 25 bp, Homo sapien
gtcctcagaggagttttccctgtac

SEQ ID NO: 577262 - DNA, 25 bp, Homo sapien
agtcctcagaggagttttccctgta

SEQ ID NO: 577263 - DNA, 25 bp, Homo sapien
gagtcctcagaggagttttccctgt

SEQ ID NO: 577264 - DNA, 25 bp, Homo sapien
tgagacgcttgacgcgaaggccgcc

SEQ ID NO: 577265 - DNA, 25 bp, Homo sapien
ttgacgcgaaggccgccctcagcag

SEQ ID NO: 577266 - DNA, 25 bp, Homo sapien
cactgagacgcttgacgcgaaggcc

SEQ ID NO: 577267 - DNA, 25 bp, Homo sapien
gcttgacgcgaaggccgccctcagc

SEQ ID NO: 577268 - DNA, 25 bp, Homo sapien
gtctgtcctcagcagccgcctgcct

SEQ ID NO: 577269 - DNA, 25 bp, Homo sapien
tgagtcgtctgtcctcagcagccgc

SEQ ID NO: 577270 - DNA, 25 bp, Homo sapien
tgtcctcagcagccgcctgcctggc

SEQ ID NO: 577271 - DNA, 25 bp, Homo sapien
ctgagtcgtctgtcctcagcagccg

SEQ ID NO: 577272 - DNA, 25 bp, Homo sapien
actggccttacccagggcagcttca

SEQ ID NO: 577273 - DNA, 25 bp, Homo sapien
gactggccttacccagggcagcttc

SEQ ID NO: 577274 - DNA, 25 bp, Homo sapien
aacacagtgttccgcccccagactg

SEQ ID NO: 577275 - DNA, 25 bp, Homo sapien
tggccttacccagggcagcttcagc

SEQ ID NO: 577276 - DNA, 25 bp, Homo sapien
tgctgaacttctacaacagcaaggc

SEQ ID NO: 577277 - DNA, 25 bp, Homo sapien
tgaacttctacaacagcaaggcact

SEQ ID NO: 577278 - DNA, 25 bp, Homo sapien
gctgaacttctacaacagcaaggca

SEQ ID NO: 577279 - DNA, 25 bp, Homo sapien
ctgctgaacttctacaacagcaagg

SEQ ID NO: 577280 - DNA, 25 bp, Homo sapien
ctgtgtgcatgaagctgaccccagt

SEQ ID NO: 577281 - DNA, 25 bp, Homo sapien
tgtgtgcatgaagctgaccccagta

SEQ ID NO: 577282 - DNA, 25 bp, Homo sapien
tgtgcatgaagctgaccccagtatt

SEQ ID NO: 577283 - DNA, 25 bp, Homo sapien
gtgtgcatgaagctgaccccagtat

SEQ ID NO: 577284 - DNA, 25 bp, Homo sapien
tgggcattgtgcatggtcaaggtca

SEQ ID NO: 577285 - DNA, 25 bp, Homo sapien
ggcagtggcctgtgatccctgaaca

SEQ ID NO: 577286 - DNA, 25 bp, Homo sapien
tccgtgcatgaagctgaccccaata

SEQ ID NO: 577287 - DNA, 25 bp, Homo sapien
aaatagacgtgtgggaactgtgccc

SEQ ID NO: 577288 - DNA, 25 bp, Homo sapien
tgtctcctttctagcaagagaaaca

SEQ ID NO: 577289 - DNA, 25 bp, Homo sapien
ttctagcaagagaaacaggggaatc

SEQ ID NO: 577290 - DNA, 25 bp, Homo sapien
tctcctttctagcaagagaaacagg

SEQ ID NO: 577291 - DNA, 25 bp, Homo sapien
ctttctagcaagagaaacaggggaa

SEQ ID NO: 577292 - DNA, 25 bp, Homo sapien
tgcatcctcaggaacgtgaacccat

SEQ ID NO: 577293 - DNA, 25 bp, Homo sapien
tcaggaacgtgaacccatgggcttc

SEQ ID NO: 577294 - DNA, 25 bp, Homo sapien
catcctcaggaacgtgaacccatgg

SEQ ID NO: 577295 - DNA, 25 bp, Homo sapien
tcctcaggaacgtgaacccatgggc

SEQ ID NO: 577296 - DNA, 25 bp, Homo sapien
tggacgcattgcacgggcttagcag

SEQ ID NO: 577297 - DNA, 25 bp, Homo sapien
gttgagtggacacatgatggacgca

SEQ ID NO: 577298 - DNA, 25 bp, Homo sapien
cattgcacgggcttagcagggacga

SEQ ID NO: 577299 - DNA, 25 bp, Homo sapien
gacacatgatggacgcattgcacgg

SEQ ID NO: 577300 - DNA, 25 bp, Homo sapien
ctcgtggatcccaaagtgggcatag

SEQ ID NO: 577301 - DNA, 25 bp, Homo sapien
ctcgaggtcatctcctctgggttca

SEQ ID NO: 577302 - DNA, 25 bp, Homo sapien
gaagtaataatctctcgaggtcatc

SEQ ID NO: 577303 - DNA, 25 bp, Homo sapien
caaagtgggcataggagtcgaagta

SEQ ID NO: 577304 - DNA, 25 bp, Homo sapien
tggcagcgaacatggaaaggatccc

SEQ ID NO: 577305 - DNA, 25 bp, Homo sapien
gaacacgtgcttgttgtggtacatg

SEQ ID NO: 577306 - DNA, 25 bp, Homo sapien
gagttccggtaagtgagagtccgca

SEQ ID NO: 577307 - DNA, 25 bp, Homo sapien
cagtaccactttgtccttgaacacg

SEQ ID NO: 577308 - DNA, 25 bp, Homo sapien
tgagggagtttctgacgcctctggc

SEQ ID NO: 577309 - DNA, 25 bp, Homo sapien
aagtactcgcaaaggggcactgagg

SEQ ID NO: 577310 - DNA, 25 bp, Homo sapien
gggagtttctgacgcctctggccac

SEQ ID NO: 577311 - DNA, 25 bp, Homo sapien
cctcgggcagggaccattcccttga

SEQ ID NO: 577312 - DNA, 25 bp, Homo sapien
caagtggttggccttaatgatcttc

SEQ ID NO: 577313 - DNA, 25 bp, Homo sapien
tcttctctgagtagtcagaaatact

SEQ ID NO: 577314 - DNA, 25 bp, Homo sapien
gagtagtcagaaatactggagcatt

SEQ ID NO: 577315 - DNA, 25 bp, Homo sapien
tctgagtagtcagaaatactggagc

SEQ ID NO: 577316 - DNA, 25 bp, Homo sapien
cttctcctgcggctggtcaggagtg

SEQ ID NO: 577317 - DNA, 25 bp, Homo sapien
ggatgtcgatatctctaccctccat

SEQ ID NO: 577318 - DNA, 25 bp, Homo sapien
tctcctgcggctggtcaggagtgat

SEQ ID NO: 577319 - DNA, 25 bp, Homo sapien
gatgggaaaaaggatgtcgatatct

SEQ ID NO: 577320 - DNA, 25 bp, Homo sapien
taagcccgttatatgcgtggtatca

SEQ ID NO: 577321 - DNA, 25 bp, Homo sapien
tattccatgtgaaggcaatgaggac

SEQ ID NO: 577322 - DNA, 25 bp, Homo sapien
cacaggtccacgaacacgcagattt

SEQ ID NO: 577323 - DNA, 25 bp, Homo sapien
tacaactgacccttaacaacctggc

SEQ ID NO: 577324 - DNA, 25 bp, Homo sapien
ttttaggatatgatgtagctcaccc

SEQ ID NO: 577325 - DNA, 25 bp, Homo sapien
caagcacctcacttcagggccagat

SEQ ID NO: 577326 - DNA, 25 bp, Homo sapien
ctagtttataccaacataattgaaa

SEQ ID NO: 577327 - DNA, 25 bp, Homo sapien
cagatctccaggtttcagccctatt

SEQ ID NO: 577328 - DNA, 25 bp, Homo sapien
tgagcatggactcatagaacagaca

SEQ ID NO: 577329 - DNA, 25 bp, Homo sapien
ttgagcatggactcatagaacagac

SEQ ID NO: 577330 - DNA, 25 bp, Homo sapien
tggcaaagatcaccgtgttgagcat

SEQ ID NO: 577331 - DNA, 25 bp, Homo sapien
ccctggcaaagatcaccgtgttgag

SEQ ID NO: 577332 - DNA, 25 bp, Homo sapien
cagccggccaacgcggggacagcat

SEQ ID NO: 577333 - DNA, 25 bp, Homo sapien
cagccagccggccaacgcggggaca

SEQ ID NO: 577334 - DNA, 25 bp, Homo sapien
agccagccggccaacgcggggacag

SEQ ID NO: 577335 - DNA, 25 bp, Homo sapien
ggacagccagccggccaacgcgggg

SEQ ID NO: 577336 - DNA, 25 bp, Homo sapien
agaggggcttggggcagtgacctcc

SEQ ID NO: 577337 - DNA, 25 bp, Homo sapien
gagagaggggcttggggcagtgacc

SEQ ID NO: 577338 - DNA, 25 bp, Homo sapien
agagaggggcttggggcagtgacct

SEQ ID NO: 577339 - DNA, 25 bp, Homo sapien
aggggcttggggcagtgacctcctg

SEQ ID NO: 577340 - DNA, 25 bp, Homo sapien
gacccacggaagtccactctgatgg

SEQ ID NO: 577341 - DNA, 25 bp, Homo sapien
agagaacggatgtctgttattgcaa

SEQ ID NO: 577342 - DNA, 25 bp, Homo sapien
ctttaactcgacaagagagaacgga

SEQ ID NO: 577343 - DNA, 25 bp, Homo sapien
gatggttacacatgctggacccggg

SEQ ID NO: 577344 - DNA, 25 bp, Homo sapien
gctgcccggtctggaaacataagcc

SEQ ID NO: 577345 - DNA, 25 bp, Homo sapien
gattttgaagtccttgtactgtctg

SEQ ID NO: 577346 - DNA, 25 bp, Homo sapien
gctaccacgtacaaagctgcccggt

SEQ ID NO: 577347 - DNA, 25 bp, Homo sapien
tgtctgtcttcaatcgctaccacgt

SEQ ID NO: 577348 - DNA, 25 bp, Homo sapien
tttaggctctcatgaagaaagtgga

SEQ ID NO: 577349 - DNA, 25 bp, Homo sapien
gcataaaatgggctggaaccagagg

SEQ ID NO: 577350 - DNA, 25 bp, Homo sapien
gaaagtggaatccttgcataaaatg

SEQ ID NO: 577351 - DNA, 25 bp, Homo sapien
cagaggaaactctggatgtcatgag

SEQ ID NO: 577352 - DNA, 25 bp, Homo sapien
cagatcacccaagggattagatttt

SEQ ID NO: 577353 - DNA, 25 bp, Homo sapien
tcagagcacagatcacccaagggat

SEQ ID NO: 577354 - DNA, 25 bp, Homo sapien
tatgggttaatttgggtcttatctc

SEQ ID NO: 577355 - DNA, 25 bp, Homo sapien
tatatgggttaatttgggtcttatc

SEQ ID NO: 577356 - DNA, 25 bp, Homo sapien
tgcctgcactgttttgcaatgcctg

SEQ ID NO: 577357 - DNA, 25 bp, Homo sapien
gcactgttttgcaatgcctggtgtt

SEQ ID NO: 577358 - DNA, 25 bp, Homo sapien
ttgcaatgcctggtgttttagttac

SEQ ID NO: 577359 - DNA, 25 bp, Homo sapien
ttaatgcctgcactgttttgcaatg

SEQ ID NO: 577360 - DNA, 25 bp, Homo sapien
tcaccacttgctttggatccacgat

SEQ ID NO: 577361 - DNA, 25 bp, Homo sapien
tgtcaaagccatagacattctccca

SEQ ID NO: 577362 - DNA, 25 bp, Homo sapien
gatgtccactagaggctccttcatg

SEQ ID NO: 577363 - DNA, 25 bp, Homo sapien
gccacgtcccggatgcaggtcatgt

SEQ ID NO: 577364 - DNA, 25 bp, Homo sapien
ggtccaccccggatgagtgtccaga

SEQ ID NO: 577365 - DNA, 25 bp, Homo sapien
aggtccaccccggatgagtgtccag

SEQ ID NO: 577366 - DNA, 25 bp, Homo sapien
ccaggtccaccccggatgagtgtcc

SEQ ID NO: 577367 - DNA, 25 bp, Homo sapien
caggtccaccccggatgagtgtcca

SEQ ID NO: 577368 - DNA, 25 bp, Homo sapien
ccggcattgcctggactccagggtg

SEQ ID NO: 577369 - DNA, 25 bp, Homo sapien
actccagggtggcacagcggggctc

SEQ ID NO: 577370 - DNA, 25 bp, Homo sapien
ggctgtgcaggagccggcattgcct

SEQ ID NO: 577371 - DNA, 25 bp, Homo sapien
tgcaggagccggcattgcctggact

SEQ ID NO: 577372 - DNA, 25 bp, Homo sapien
ggatatgctcaggtctaaccaactg

SEQ ID NO: 577373 - DNA, 25 bp, Homo sapien
tcaggtctaaccaactgaaaggccc

SEQ ID NO: 577374 - DNA, 25 bp, Homo sapien
gctgctttgcccctggatatgctca

SEQ ID NO: 577375 - DNA, 25 bp, Homo sapien
taaccaactgaaaggcccctgctag

SEQ ID NO: 577376 - DNA, 25 bp, Homo sapien
gtcaccagtgtagcatggccttcca

SEQ ID NO: 577377 - DNA, 25 bp, Homo sapien
tctggctcatatcgcagtctcacca

SEQ ID NO: 577378 - DNA, 25 bp, Homo sapien
ttcttggttccctccgtcaccagtg

SEQ ID NO: 577379 - DNA, 25 bp, Homo sapien
tggccttccaatctcacttctggct

SEQ ID NO: 577380 - DNA, 25 bp, Homo sapien
aagagagaatgccgggaacttatcg

SEQ ID NO: 577381 - DNA, 25 bp, Homo sapien
gaatgccgggaacttatcgcctcca

SEQ ID NO: 577382 - DNA, 25 bp, Homo sapien
gaacttatcgcctccaccaagtctg

SEQ ID NO: 577383 - DNA, 25 bp, Homo sapien
caccaagtctgggtcccggtcagca

SEQ ID NO: 577384 - DNA, 25 bp, Homo sapien
tgtgaacgatagctcttccgtcttc

SEQ ID NO: 577385 - DNA, 25 bp, Homo sapien
gaatgcagatgtgaacgatagctct

SEQ ID NO: 577386 - DNA, 25 bp, Homo sapien
tgcagatgtgaacgatagctcttcc

SEQ ID NO: 577387 - DNA, 25 bp, Homo sapien
cagatgtgaacgatagctcttccgt

SEQ ID NO: 577388 - DNA, 25 bp, Homo sapien
gtggcacttggtaaattcaatatta

SEQ ID NO: 577389 - DNA, 25 bp, Homo sapien
tattaaaataggtgaccagggcgtg

SEQ ID NO: 577390 - DNA, 25 bp, Homo sapien
cattttcttgtggcacttggtaaat

SEQ ID NO: 577391 - DNA, 25 bp, Homo sapien
cgtggacgtagtcgttgcgctgtat

SEQ ID NO: 577392 - DNA, 25 bp, Homo sapien
cacaaatatagggatgcatggttcc

SEQ ID NO: 577393 - DNA, 25 bp, Homo sapien
tgctgtaacaaccacaacattattt

SEQ ID NO: 577394 - DNA, 25 bp, Homo sapien
ccctcatccaacacactctcaactt

SEQ ID NO: 577395 - DNA, 25 bp, Homo sapien
cagcacaaatatagggatgcatggt

SEQ ID NO: 577396 - DNA, 25 bp, Homo sapien
aagtcagcaaggagctcggtgtagc

SEQ ID NO: 577397 - DNA, 25 bp, Homo sapien
tgtagaagccatggcccagagaatg

SEQ ID NO: 577398 - DNA, 25 bp, Homo sapien
caagggctggtgtgtgtagaagcca

SEQ ID NO: 577399 - DNA, 25 bp, Homo sapien
gaggcctcactgagtttagaagtca

SEQ ID NO: 577400 - DNA, 25 bp, Homo sapien
cttccaagtagaagacggtctgctt

SEQ ID NO: 577401 - DNA, 25 bp, Homo sapien
catggatatggtcccgtagatttcc

SEQ ID NO: 577402 - DNA, 25 bp, Homo sapien
atttggcttcatggatatggtcccg

SEQ ID NO: 577403 - DNA, 25 bp, Homo sapien
tagaagacggtctgcttccagtggg

SEQ ID NO: 577404 - DNA, 25 bp, Homo sapien
tagtcattagatacagatgtttcac

SEQ ID NO: 577405 - DNA, 25 bp, Homo sapien
cacagctgtcccttaaaatccaagt

SEQ ID NO: 577406 - DNA, 25 bp, Homo sapien
tagatacagatgtttcacacagctg

SEQ ID NO: 577407 - DNA, 25 bp, Homo sapien
agtctactgtgaaatcgaggtctcg

SEQ ID NO: 577408 - DNA, 25 bp, Homo sapien
tacccacttggttgtatatgcacgc

SEQ ID NO: 577409 - DNA, 25 bp, Homo sapien
tcaaggttcagagccacagtccagt

SEQ ID NO: 577410 - DNA, 25 bp, Homo sapien
gggagttcaccaatcttcaaggcag

SEQ ID NO: 577411 - DNA, 25 bp, Homo sapien
tattctttgggacggcacggcagat

SEQ ID NO: 577412 - DNA, 25 bp, Homo sapien
tctcatgtgtgtttattgagcgccc

SEQ ID NO: 577413 - DNA, 25 bp, Homo sapien
ttctcatgtgtgtttattgagcgcc

SEQ ID NO: 577414 - DNA, 25 bp, Homo sapien
ctcatgtgtgtttattgagcgccca

SEQ ID NO: 577415 - DNA, 25 bp, Homo sapien
gttctcatgtgtgtttattgagcgc

SEQ ID NO: 577416 - DNA, 25 bp, Homo sapien
gctcacacttgtaattcctggccca

SEQ ID NO: 577417 - DNA, 25 bp, Homo sapien
cacacttgtaattcctggcccaggt

SEQ ID NO: 577418 - DNA, 25 bp, Homo sapien
gggaggatcacttgaggccaggagt

SEQ ID NO: 577419 - DNA, 25 bp, Homo sapien
ttttaaaaataggtcaggtgcagtg

SEQ ID NO: 577420 - DNA, 25 bp, Homo sapien
tcttgcatttgaggccaagcgcccg

SEQ ID NO: 577421 - DNA, 25 bp, Homo sapien
gatgctgcaggtcttatgattcacc

SEQ ID NO: 577422 - DNA, 25 bp, Homo sapien
taccactttcccctgcttagctgag

SEQ ID NO: 577423 - DNA, 25 bp, Homo sapien
cacatatgtgtcctccaaataccac

SEQ ID NO: 577424 - DNA, 25 bp, Homo sapien
aaatcaagtattctgtgaggacagg

SEQ ID NO: 577425 - DNA, 25 bp, Homo sapien
tgagctgcagaatgctggctggttt

SEQ ID NO: 577426 - DNA, 25 bp, Homo sapien
cagcaggcacttagtggaagcgtgt

SEQ ID NO: 577427 - DNA, 25 bp, Homo sapien
tcttgtccaaaggtgtgatgctcct

SEQ ID NO: 577428 - DNA, 25 bp, Homo sapien
catcggccttgacaagcttagcagc

SEQ ID NO: 577429 - DNA, 25 bp, Homo sapien
ccttgacaagcttagcagcagtcct

SEQ ID NO: 577430 - DNA, 25 bp, Homo sapien
tgggagggctcctgctcaatcctct

SEQ ID NO: 577431 - DNA, 25 bp, Homo sapien
ggttgttgcctgtttggcatcggcc

SEQ ID NO: 577432 - DNA, 25 bp, Homo sapien
ccatcattatccaaaagcccttcca

SEQ ID NO: 577433 - DNA, 25 bp, Homo sapien
caatgcacataaaagccatggagac

SEQ ID NO: 577434 - DNA, 25 bp, Homo sapien
gcacttcatgcaggcgggctgaaca

SEQ ID NO: 577435 - DNA, 25 bp, Homo sapien
ccctcaggcttccatccaaggcagc

SEQ ID NO: 577436 - DNA, 25 bp, Homo sapien
tttgcctttagaatatactccacca

SEQ ID NO: 577437 - DNA, 25 bp, Homo sapien
ctttgcctttagaatatactccacc

SEQ ID NO: 577438 - DNA, 25 bp, Homo sapien
agagtcaggcagataaaaagtattt

SEQ ID NO: 577439 - DNA, 25 bp, Homo sapien
ttgcctttagaatatactccaccat

SEQ ID NO: 577440 - DNA, 25 bp, Homo sapien
cctgggtggttaaagagatgtcaat

SEQ ID NO: 577441 - DNA, 25 bp, Homo sapien
tttgcctttatcaggcatcgccagc

SEQ ID NO: 577442 - DNA, 25 bp, Homo sapien
tactgctgtttatggaggatccctc

SEQ ID NO: 577443 - DNA, 25 bp, Homo sapien
caggcatcgccagctccgagttaat

SEQ ID NO: 577444 - DNA, 25 bp, Homo sapien
tacaaatctgtatctcccacatcag

SEQ ID NO: 577445 - DNA, 25 bp, Homo sapien
aaatctgtatctcccacatcagctg

SEQ ID NO: 577446 - DNA, 25 bp, Homo sapien
ccctgctagattgtcagtgcattgt

SEQ ID NO: 577447 - DNA, 25 bp, Homo sapien
tctgctgtttgtacgttgtcccctg

SEQ ID NO: 577448 - DNA, 25 bp, Homo sapien
aagaatttcaagagcacttgctgag

SEQ ID NO: 577449 - DNA, 25 bp, Homo sapien
agaatttcaagagcacttgctgaga

SEQ ID NO: 577450 - DNA, 25 bp, Homo sapien
cagcgtctgtggattgggtggaaag

SEQ ID NO: 577451 - DNA, 25 bp, Homo sapien
tgtggtgtagacagcgtctgtggat

SEQ ID NO: 577452 - DNA, 25 bp, Homo sapien
gaaggcagtgattcttgccacaatg

SEQ ID NO: 577453 - DNA, 25 bp, Homo sapien
ggaaggcagtgattcttgccacaat

SEQ ID NO: 577454 - DNA, 25 bp, Homo sapien
caaacacgtgctggacgtcttccat

SEQ ID NO: 577455 - DNA, 25 bp, Homo sapien
tttttccaaacacgtgctggacgtc

SEQ ID NO: 577456 - DNA, 25 bp, Homo sapien
ttttccaaacacgtgctggacgtct

SEQ ID NO: 577457 - DNA, 25 bp, Homo sapien
tccaaacacgtgctggacgtcttcc

SEQ ID NO: 577458 - DNA, 25 bp, Homo sapien
catttctggatcttgtgcgtgcatt

SEQ ID NO: 577459 - DNA, 25 bp, Homo sapien
gtgaactcagaaagggccaatactc

SEQ ID NO: 577460 - DNA, 25 bp, Homo sapien
ggatcttgtgcgtgcatttcccagg

SEQ ID NO: 577461 - DNA, 25 bp, Homo sapien
cccaggtgttgttttgaacagtgaa

SEQ ID NO: 577462 - DNA, 25 bp, Homo sapien
cttcttcctgttatcatatacggcc

SEQ ID NO: 577463 - DNA, 25 bp, Homo sapien
cctgttatcatatacggccaggaaa

SEQ ID NO: 577464 - DNA, 25 bp, Homo sapien
tcttcctgttatcatatacggccag

SEQ ID NO: 577465 - DNA, 25 bp, Homo sapien
tgttatcatatacggccaggaaagg

SEQ ID NO: 577466 - DNA, 25 bp, Homo sapien
tctaagtctgtcattactgatgctg

SEQ ID NO: 577467 - DNA, 25 bp, Homo sapien
cattactgatgctgtggagatgata

SEQ ID NO: 577468 - DNA, 25 bp, Homo sapien
gcagctctgaaaatgggccagatgg

SEQ ID NO: 577469 - DNA, 25 bp, Homo sapien
gatagtcgtgacaaagataagagca

SEQ ID NO: 577470 - DNA, 25 bp, Homo sapien
ggttgagttccatgctaagggtgta

SEQ ID NO: 577471 - DNA, 25 bp, Homo sapien
tgttggtccttcacaacttgttgtg

SEQ ID NO: 577472 - DNA, 25 bp, Homo sapien
aacttgttgagatgtactcctcccc

SEQ ID NO: 577473 - DNA, 25 bp, Homo sapien
acttgttgtgcttgtcttggattga

SEQ ID NO: 577474 - DNA, 25 bp, Homo sapien
cgtggtccacgcacatgtgatccca

SEQ ID NO: 577475 - DNA, 25 bp, Homo sapien
gaggaagcacgtggtccacgcacat

SEQ ID NO: 577476 - DNA, 25 bp, Homo sapien
tccacgcacatgtgatcccatgggt

SEQ ID NO: 577477 - DNA, 25 bp, Homo sapien
tgatccatgtcaggtgagttaaggg

SEQ ID NO: 577478 - DNA, 25 bp, Homo sapien
agcaggctctatggtgggtggagtc

SEQ ID NO: 577479 - DNA, 25 bp, Homo sapien
caagggaggcatttatggggcagca

SEQ ID NO: 577480 - DNA, 25 bp, Homo sapien
tctatggtgggtggagtctgactct

SEQ ID NO: 577481 - DNA, 25 bp, Homo sapien
tggagtctgactctgggtgatgctc

SEQ ID NO: 577482 - DNA, 25 bp, Homo sapien
ccttgtcggtgtgttttggctccca

SEQ ID NO: 577483 - DNA, 25 bp, Homo sapien
tggctttctcggaatgccagcggga

SEQ ID NO: 577484 - DNA, 25 bp, Homo sapien
ccagcttgagggctatagaattttc

SEQ ID NO: 577485 - DNA, 25 bp, Homo sapien
gagacagagcatcccccttgtcggt

SEQ ID NO: 577486 - DNA, 25 bp, Homo sapien
ggtatgggatgtactgcagtggagg

SEQ ID NO: 577487 - DNA, 25 bp, Homo sapien
gggtatgggatgtactgcagtggag

SEQ ID NO: 577488 - DNA, 25 bp, Homo sapien
tggacaatccggtgaggagtgctgc

SEQ ID NO: 577489 - DNA, 25 bp, Homo sapien
gagtaatgtagtggacaatccggtg

SEQ ID NO: 577490 - DNA, 25 bp, Homo sapien
aatgtagtggacaatccggtgagga

SEQ ID NO: 577491 - DNA, 25 bp, Homo sapien
gagcaaggagtaatgtagtggacaa

SEQ ID NO: 577492 - DNA, 25 bp, Homo sapien
agtgactcgcagagggcgtcctgga

SEQ ID NO: 577493 - DNA, 25 bp, Homo sapien
ggaaggacggctgagcaaagccgtg

SEQ ID NO: 577494 - DNA, 25 bp, Homo sapien
gcaaagccgtgaaggtgggttgtac

SEQ ID NO: 577495 - DNA, 25 bp, Homo sapien
cactgaggccgggccttgaatagga

SEQ ID NO: 577496 - DNA, 25 bp, Homo sapien
aactgttgccatgccgagaaacaaa

SEQ ID NO: 577497 - DNA, 25 bp, Homo sapien
tccacaactgttgccatgccgagaa

SEQ ID NO: 577498 - DNA, 25 bp, Homo sapien
actaggagccctggccacgcaggca

SEQ ID NO: 577499 - DNA, 25 bp, Homo sapien
cttgcaggtcagtgctactaggagc

SEQ ID NO: 577500 - DNA, 25 bp, Homo sapien
ggctcggagcggaaagagtcgggcg

SEQ ID NO: 577501 - DNA, 25 bp, Homo sapien
tcccgttcagctccgctgaggggct

SEQ ID NO: 577502 - DNA, 25 bp, Homo sapien
agcggaaagagtcgggcggagcagg

SEQ ID NO: 577503 - DNA, 25 bp, Homo sapien
gcttggcgcgcgcacgtcccggagg

SEQ ID NO: 577504 - DNA, 25 bp, Homo sapien
tcaggccggctaagtcggcagccgc

SEQ ID NO: 577505 - DNA, 25 bp, Homo sapien
ctggcggcctcaggtcgcgcctgca

SEQ ID NO: 577506 - DNA, 25 bp, Homo sapien
ctgaatcggggcaaggggcctaggg

SEQ ID NO: 577507 - DNA, 25 bp, Homo sapien
aagcccgaccagtcaggccggctaa

SEQ ID NO: 577508 - DNA, 25 bp, Homo sapien
cagccggagtgacgccgggctgctg

SEQ ID NO: 577509 - DNA, 25 bp, Homo sapien
cagcgagggccggactgatgcccca

SEQ ID NO: 577510 - DNA, 25 bp, Homo sapien
tcccagaggtaacagccggagtgac

SEQ ID NO: 577511 - DNA, 25 bp, Homo sapien
agcgagggccggactgatgccccac

SEQ ID NO: 577512 - DNA, 25 bp, Homo sapien
gagagtggtacctccttacttctcc

SEQ ID NO: 577513 - DNA, 25 bp, Homo sapien
cttgagagtggtacctccttacttc

SEQ ID NO: 577514 - DNA, 25 bp, Homo sapien
tcacactctttgtcccctctactga

SEQ ID NO: 577515 - DNA, 25 bp, Homo sapien
tctttgtcccctctactgacagcct

SEQ ID NO: 577516 - DNA, 25 bp, Homo sapien
ctgttttggaaggactccagatttg

SEQ ID NO: 577517 - DNA, 25 bp, Homo sapien
cctgttttggaaggactccagattt

SEQ ID NO: 577518 - DNA, 25 bp, Homo sapien
ggatggagagtagaaagtcactgct

SEQ ID NO: 577519 - DNA, 25 bp, Homo sapien
gatggagagtagaaagtcactgctc

SEQ ID NO: 577520 - DNA, 25 bp, Homo sapien
tccatctgaatgacgaagtctattg

SEQ ID NO: 577521 - DNA, 25 bp, Homo sapien
ccatctgaatgacgaagtctattgt

SEQ ID NO: 577522 - DNA, 25 bp, Homo sapien
ctccatctgaatgacgaagtctatt

SEQ ID NO: 577523 - DNA, 25 bp, Homo sapien
catgtggcttctttagtggataccc

SEQ ID NO: 577524 - DNA, 25 bp, Homo sapien
ggtcaagtcaccctgagccatagtt

SEQ ID NO: 577525 - DNA, 25 bp, Homo sapien
cacataaggtggcatcaggtactct

SEQ ID NO: 577526 - DNA, 25 bp, Homo sapien
tggatacccttgaacgtatggtggc

SEQ ID NO: 577527 - DNA, 25 bp, Homo sapien
tttaaacagagatgcatggagggcc

SEQ ID NO: 577528 - DNA, 25 bp, Homo sapien
ctttaaacagagatgcatggagggc

SEQ ID NO: 577529 - DNA, 25 bp, Homo sapien
gtaggcagcatgaaagctggatctg

SEQ ID NO: 577530 - DNA, 25 bp, Homo sapien
ctgcagtaggcagcatgaaagctgg

SEQ ID NO: 577531 - DNA, 25 bp, Homo sapien
ggcagcatgaaagctggatctggct

SEQ ID NO: 577532 - DNA, 25 bp, Homo sapien
tgcagtaggcagcatgaaagctgga

SEQ ID NO: 577533 - DNA, 25 bp, Homo sapien
ctacacataaattagacttttggca

SEQ ID NO: 577534 - DNA, 25 bp, Homo sapien
ttaagagaagtggtccggaattgag

SEQ ID NO: 577535 - DNA, 25 bp, Homo sapien
taagagaagtggtccggaattgaga

SEQ ID NO: 577536 - DNA, 25 bp, Homo sapien
tagacttttggcatcattggtcatg

SEQ ID NO: 577537 - DNA, 25 bp, Homo sapien
tcttacaccatcagtgccacctctc

SEQ ID NO: 577538 - DNA, 25 bp, Homo sapien
gcttcttacaccatcagtgccacct

SEQ ID NO: 577539 - DNA, 25 bp, Homo sapien
tggtgcctgcttcttacaccatcag

SEQ ID NO: 577540 - DNA, 25 bp, Homo sapien
tgcctgcttcttacaccatcagtgc

SEQ ID NO: 577541 - DNA, 25 bp, Homo sapien
gatttgctgtacatgaaggtcccca

SEQ ID NO: 577542 - DNA, 25 bp, Homo sapien
gcaaaatgagatttgctgtacatga

SEQ ID NO: 577543 - DNA, 25 bp, Homo sapien
catgaaggtccccatgtcagtctgg

SEQ ID NO: 577544 - DNA, 25 bp, Homo sapien
ggtccccatgtcagtctggtctgag

SEQ ID NO: 577545 - DNA, 25 bp, Homo sapien
cacagtttgtaagactgggtacgca

SEQ ID NO: 577546 - DNA, 25 bp, Homo sapien
gatgtcattagtggagattaacaat

SEQ ID NO: 577547 - DNA, 25 bp, Homo sapien
caatgtggaagacagaacgtcgttg

SEQ ID NO: 577548 - DNA, 25 bp, Homo sapien
taagactgggtacgcagagatgtca

SEQ ID NO: 577549 - DNA, 25 bp, Homo sapien
gaaaccgaatgatatgcacagacac

SEQ ID NO: 577550 - DNA, 25 bp, Homo sapien
tgagatggtccaagaagatggcatc

SEQ ID NO: 577551 - DNA, 25 bp, Homo sapien
acaggtcttgctccacatgctgaga

SEQ ID NO: 577552 - DNA, 25 bp, Homo sapien
acagacaccagacctcatgtagagg

SEQ ID NO: 577553 - DNA, 25 bp, Homo sapien
cccacatggccaggccgccggctgc

SEQ ID NO: 577554 - DNA, 25 bp, Homo sapien
ggctgctcgacgccccggcctgggg

SEQ ID NO: 577555 - DNA, 25 bp, Homo sapien
ccgaggcagcggtccgcgctctccg

SEQ ID NO: 577556 - DNA, 25 bp, Homo sapien
cgagggctagccccacatggccagg

SEQ ID NO: 577557 - DNA, 25 bp, Homo sapien
tttccgcagataggcgtccatgggc

SEQ ID NO: 577558 - DNA, 25 bp, Homo sapien
gtccatgggcgtcgcgtcctcgcgg

SEQ ID NO: 577559 - DNA, 25 bp, Homo sapien
cgtccttggcgaccagtttccgata

SEQ ID NO: 577560 - DNA, 25 bp, Homo sapien
tacaagcccagtttccgcagatagg

SEQ ID NO: 577561 - DNA, 25 bp, Homo sapien
gaaacattaggttccagattagtta

SEQ ID NO: 577562 - DNA, 25 bp, Homo sapien
aaatgatcctcctataatcgcttca

SEQ ID NO: 577563 - DNA, 25 bp, Homo sapien
taggttccagattagttataaaatc

SEQ ID NO: 577564 - DNA, 25 bp, Homo sapien
aaggagaaacattaggttccagatt

SEQ ID NO: 577565 - DNA, 25 bp, Homo sapien
ttcagctgctcgttgcctgacaaag

SEQ ID NO: 577566 - DNA, 25 bp, Homo sapien
tcagctgctcgttgcctgacaaagg

SEQ ID NO: 577567 - DNA, 25 bp, Homo sapien
cagctgctcgttgcctgacaaaggt

SEQ ID NO: 577568 - DNA, 25 bp, Homo sapien
tgaaggatgctgcagtcgaggaggt

SEQ ID NO: 577569 - DNA, 25 bp, Homo sapien
gaggtagtgctaatggggcttttat

SEQ ID NO: 577570 - DNA, 25 bp, Homo sapien
ggcttttattggcttgcttggattc

SEQ ID NO: 577571 - DNA, 25 bp, Homo sapien
ctgcagtcgaggaggtagtgctaat

SEQ ID NO: 577572 - DNA, 25 bp, Homo sapien
ggagaatttctgagactgtgaccct

SEQ ID NO: 577573 - DNA, 25 bp, Homo sapien
cctgaagaatgactagagaactcac

SEQ ID NO: 577574 - DNA, 25 bp, Homo sapien
tgtgaccctgaagaatgactagaga

SEQ ID NO: 577575 - DNA, 25 bp, Homo sapien
tggagaatttctgagactgtgaccc

SEQ ID NO: 577576 - DNA, 25 bp, Homo sapien
tgtccggctaagatttttgtgctca

SEQ ID NO: 577577 - DNA, 25 bp, Homo sapien
ctgtgaaggtgtccggctaagattt

SEQ ID NO: 577578 - DNA, 25 bp, Homo sapien
aggtgtccggctaagatttttgtgc

SEQ ID NO: 577579 - DNA, 25 bp, Homo sapien
cttatgatctgtgaaggtgtccggc

SEQ ID NO: 577580 - DNA, 25 bp, Homo sapien
tgagaagtagcaatagttagattct

SEQ ID NO: 577581 - DNA, 25 bp, Homo sapien
gagaagtagcaatagttagattctc

SEQ ID NO: 577582 - DNA, 25 bp, Homo sapien
gaagggcactctaacttctttgact

SEQ ID NO: 577583 - DNA, 25 bp, Homo sapien
gagaagggcactctaacttctttga

SEQ ID NO: 577584 - DNA, 25 bp, Homo sapien
ggagaagggcactctaacttctttg

SEQ ID NO: 577585 - DNA, 25 bp, Homo sapien
aagggcactctaacttctttgactt

SEQ ID NO: 577586 - DNA, 25 bp, Homo sapien
aggggagctggatttgacaaagaca

SEQ ID NO: 577587 - DNA, 25 bp, Homo sapien
tgacaaagacacatgttctgctggc

SEQ ID NO: 577588 - DNA, 25 bp, Homo sapien
ggagctggatttgacaaagacacat

SEQ ID NO: 577589 - DNA, 25 bp, Homo sapien
gaaggggagctggatttgacaaaga

SEQ ID NO: 577590 - DNA, 25 bp, Homo sapien
tgttggtccaaaagttgtaggttca

SEQ ID NO: 577591 - DNA, 25 bp, Homo sapien
tccaaaagttgtaggttcacttggc

SEQ ID NO: 577592 - DNA, 25 bp, Homo sapien
caaaagttgtaggttcacttggcca

SEQ ID NO: 577593 - DNA, 25 bp, Homo sapien
tgaccgaccaggaattggagcaggg

SEQ ID NO: 577594 - DNA, 25 bp, Homo sapien
actgaccgaccaggaattggagcag

SEQ ID NO: 577595 - DNA, 25 bp, Homo sapien
ctgtgtcactgaccgaccaggaatt

SEQ ID NO: 577596 - DNA, 25 bp, Homo sapien
gtctgtgtcactgaccgaccaggaa

SEQ ID NO: 577597 - DNA, 25 bp, Homo sapien
tttaggtaggtcctccccagtctga

SEQ ID NO: 577598 - DNA, 25 bp, Homo sapien
ttcattacaaggaaacccaggatag

SEQ ID NO: 577599 - DNA, 25 bp, Homo sapien
caaaggcatcaagggctggttaact

SEQ ID NO: 577600 - DNA, 25 bp, Homo sapien
cccaggatagagtgggtcttgataa

SEQ ID NO: 577601 - DNA, 25 bp, Homo sapien
ggtgcagagggtacaggtaagaatg

SEQ ID NO: 577602 - DNA, 25 bp, Homo sapien
gtgcagagggtacaggtaagaatgt

SEQ ID NO: 577603 - DNA, 25 bp, Homo sapien
tgcagagggtacaggtaagaatgtg

SEQ ID NO: 577604 - DNA, 25 bp, Homo sapien
cagagggtacaggtaagaatgtggg

SEQ ID NO: 577605 - DNA, 25 bp, Homo sapien
ggcggcaggagcctctttgaaccag

SEQ ID NO: 577606 - DNA, 25 bp, Homo sapien
tttaattctgggcggcaggagcctc

SEQ ID NO: 577607 - DNA, 25 bp, Homo sapien
tttgaaccagggattatgaagataa

SEQ ID NO: 577608 - DNA, 25 bp, Homo sapien
tatgaagataaacagggacagggac

SEQ ID NO: 577609 - DNA, 25 bp, Homo sapien
gcatttgaccattaacactagcctc

SEQ ID NO: 577610 - DNA, 25 bp, Homo sapien
agcatttgaccattaacactagcct

SEQ ID NO: 577611 - DNA, 25 bp, Homo sapien
tttgaccattaacactagcctcagt

SEQ ID NO: 577612 - DNA, 25 bp, Homo sapien
ctgtagcatttgaccattaacacta

SEQ ID NO: 577613 - DNA, 25 bp, Homo sapien
agaggtgaagaaaatgtcggcggtc

SEQ ID NO: 577614 - DNA, 25 bp, Homo sapien
ggtgaagaaaatgtcggcggtccaa

SEQ ID NO: 577615 - DNA, 25 bp, Homo sapien
tgaagaaaatgtcggcggtccaatc

SEQ ID NO: 577616 - DNA, 25 bp, Homo sapien
ctgagatggagggataaccagaggt

SEQ ID NO: 577617 - DNA, 25 bp, Homo sapien
gatcagcctggtaagacaattgtcc

SEQ ID NO: 577618 - DNA, 25 bp, Homo sapien
cctaagaatggattgggtccaaaag

SEQ ID NO: 577619 - DNA, 25 bp, Homo sapien
tcatcagagggcaggacaatattct

SEQ ID NO: 577620 - DNA, 25 bp, Homo sapien
caatattctgcctcattactggatt

SEQ ID NO: 577621 - DNA, 25 bp, Homo sapien
tcctggctgctggaaactcatctac

SEQ ID NO: 577622 - DNA, 25 bp, Homo sapien
agagaatgtacatgttcactcctgg

SEQ ID NO: 577623 - DNA, 25 bp, Homo sapien
agggagagaatgtacatgttcactc

SEQ ID NO: 577624 - DNA, 25 bp, Homo sapien
tgctcacacttgcttcagggagaga

SEQ ID NO: 577625 - DNA, 25 bp, Homo sapien
ggaagattgctctgtccggccttcg

SEQ ID NO: 577626 - DNA, 25 bp, Homo sapien
aagattgctctgtccggccttcgtc

SEQ ID NO: 577627 - DNA, 25 bp, Homo sapien
gaagattgctctgtccggccttcgt

SEQ ID NO: 577628 - DNA, 25 bp, Homo sapien
agcagtcttaggatcttttactttt

SEQ ID NO: 577629 - DNA, 25 bp, Homo sapien
gcagcagtcttaggatcttttactt

SEQ ID NO: 577630 - DNA, 25 bp, Homo sapien
cagcagtcttaggatcttttacttt

SEQ ID NO: 577631 - DNA, 25 bp, Homo sapien
ctgctcccataagtttgattataga

SEQ ID NO: 577632 - DNA, 25 bp, Homo sapien
agtttgattatagaactgcttggat

SEQ ID NO: 577633 - DNA, 25 bp, Homo sapien
ctcccataagtttgattatagaact

SEQ ID NO: 577634 - DNA, 25 bp, Homo sapien
aagtttgattatagaactgcttgga

SEQ ID NO: 577635 - DNA, 25 bp, Homo sapien
ccctaccagaatagccccaatcact

SEQ ID NO: 577636 - DNA, 25 bp, Homo sapien
gaatagccccaatcacttttgtact

SEQ ID NO: 577637 - DNA, 25 bp, Homo sapien
gataaccttcatcccgacttctgct

SEQ ID NO: 577638 - DNA, 25 bp, Homo sapien
ttcatcccgacttctgcttggctgt

SEQ ID NO: 577639 - DNA, 25 bp, Homo sapien
tctcccctaaatggtcgccctctga

SEQ ID NO: 577640 - DNA, 25 bp, Homo sapien
gatctcctcctatctcccctaaatg

SEQ ID NO: 577641 - DNA, 25 bp, Homo sapien
gctgtcccctatggccatctcccat

SEQ ID NO: 577642 - DNA, 25 bp, Homo sapien
tcctatctcccctaaatggtcgccc

SEQ ID NO: 577643 - DNA, 25 bp, Homo sapien
taatgcagcatcacaccatgtaggg

SEQ ID NO: 577644 - DNA, 25 bp, Homo sapien
tcagctacactagagtggaccttgc

SEQ ID NO: 577645 - DNA, 25 bp, Homo sapien
tccattcaagtaagttcaaccccaa

SEQ ID NO: 577646 - DNA, 25 bp, Homo sapien
tgtactcagtgtaaggctattatcg

SEQ ID NO: 577647 - DNA, 25 bp, Homo sapien
gcaaacttgcgtgggaagaataatc

SEQ ID NO: 577648 - DNA, 25 bp, Homo sapien
cagccagcaaacttgcgtgggaaga

SEQ ID NO: 577649 - DNA, 25 bp, Homo sapien
gaataatcttgcaaacgctgccatt

SEQ ID NO: 577650 - DNA, 25 bp, Homo sapien
tccttgacagccagcaaacttgcgt

SEQ ID NO: 577651 - DNA, 25 bp, Homo sapien
cacttctgggacgaaagatgggcag

SEQ ID NO: 577652 - DNA, 25 bp, Homo sapien
agagggagagactgcttccgaggct

SEQ ID NO: 577653 - DNA, 25 bp, Homo sapien
caaagtgtcatacttcggggtagta

SEQ ID NO: 577654 - DNA, 25 bp, Homo sapien
tacttcggggtagtattttctgagc

SEQ ID NO: 577655 - DNA, 25 bp, Homo sapien
cagcatttgaaaatctaacaaactt

SEQ ID NO: 577656 - DNA, 25 bp, Homo sapien
ttctccgtctgatgattttcatttc

SEQ ID NO: 577657 - DNA, 25 bp, Homo sapien
acaaacttcatggggttccagggag

SEQ ID NO: 577658 - DNA, 25 bp, Homo sapien
gcatttgaaaatctaacaaacttca

SEQ ID NO: 577659 - DNA, 25 bp, Homo sapien
tttcccggagcagcgaaaactaata

SEQ ID NO: 577660 - DNA, 25 bp, Homo sapien
cgtgatgaccaaaaccctaatgtgg

SEQ ID NO: 577661 - DNA, 25 bp, Homo sapien
ttttgactgccgctgtgagctgaat

SEQ ID NO: 577662 - DNA, 25 bp, Homo sapien
cattgtgcgtagataatttcccgga

SEQ ID NO: 577663 - DNA, 25 bp, Homo sapien
tcagaaagaatcaccaaatcttctg

SEQ ID NO: 577664 - DNA, 25 bp, Homo sapien
catgtgagcaaggtcaaaggaaggc

SEQ ID NO: 577665 - DNA, 25 bp, Homo sapien
atttctacatgtgagcaaggtcaaa

SEQ ID NO: 577666 - DNA, 25 bp, Homo sapien
ggaaggcagtttgataactcagaaa

SEQ ID NO: 577667 - DNA, 25 bp, Homo sapien
ggatgtcatcaaacactcaggatct

SEQ ID NO: 577668 - DNA, 25 bp, Homo sapien
ccccaggattgagtcatgaggccat

SEQ ID NO: 577669 - DNA, 25 bp, Homo sapien
cccagtttcaggattgatgtcatag

SEQ ID NO: 577670 - DNA, 25 bp, Homo sapien
catgggcaggttcagggttgcttaa

SEQ ID NO: 577671 - DNA, 25 bp, Homo sapien
gagctcagtggtctaggatggccac

SEQ ID NO: 577672 - DNA, 25 bp, Homo sapien
cacacttgcacgtctggggacttag

SEQ ID NO: 577673 - DNA, 25 bp, Homo sapien
cagtggtctaggatggccacacttg

SEQ ID NO: 577674 - DNA, 25 bp, Homo sapien
gatcattcagacagctagggtcttt

SEQ ID NO: 577675 - DNA, 25 bp, Homo sapien
taacatgggcacatgcgggtactac

SEQ ID NO: 577676 - DNA, 25 bp, Homo sapien
ggtcctcaggcatctcgggcaagat

SEQ ID NO: 577677 - DNA, 25 bp, Homo sapien
tgaagcgtaatagctccgagacagc

SEQ ID NO: 577678 - DNA, 25 bp, Homo sapien
cacacttctgttggcggtggtcact

SEQ ID NO: 577679 - DNA, 25 bp, Homo sapien
gagagccaggcggtagttaacacaa

SEQ ID NO: 577680 - DNA, 25 bp, Homo sapien
tgtgccttgggttgctattaaagcc

SEQ ID NO: 577681 - DNA, 25 bp, Homo sapien
cccaaggaacactccaatagtgtgt

SEQ ID NO: 577682 - DNA, 25 bp, Homo sapien
cactgatcatataatcgtgctgggc

SEQ ID NO: 577683 - DNA, 25 bp, Homo sapien
cgtccaccacgagggaggagcatgt

SEQ ID NO: 577684 - DNA, 25 bp, Homo sapien
ggtgcagacttcaccagccttacgt

SEQ ID NO: 577685 - DNA, 25 bp, Homo sapien
agccttacgtccaccacgagggagg

SEQ ID NO: 577686 - DNA, 25 bp, Homo sapien
aggagcatgtgtcggccctgagcat

SEQ ID NO: 577687 - DNA, 25 bp, Homo sapien
gaaattgcttagattaaatcctcgc

SEQ ID NO: 577688 - DNA, 25 bp, Homo sapien
acaagcccggctgcaaatgatagct

SEQ ID NO: 577689 - DNA, 25 bp, Homo sapien
agattaaatcctcgcttctttccag

SEQ ID NO: 577690 - DNA, 25 bp, Homo sapien
tagtggtcaaaatggcgcccaagcg

SEQ ID NO: 577691 - DNA, 25 bp, Homo sapien
tgtggccttcctgtagtctgtttct

SEQ ID NO: 577692 - DNA, 25 bp, Homo sapien
gagttaatttctcgctcgtggtcag

SEQ ID NO: 577693 - DNA, 25 bp, Homo sapien
gctttgcttgtggtcatgtagggat

SEQ ID NO: 577694 - DNA, 25 bp, Homo sapien
atgtagggatgcaggcacctttcct

SEQ ID NO: 577695 - DNA, 25 bp, Homo sapien
tcacccacggcctctaacaatttgg

SEQ ID NO: 577696 - DNA, 25 bp, Homo sapien
ccaatgcaggcttttccgtgcaggg

SEQ ID NO: 577697 - DNA, 25 bp, Homo sapien
gggaatctaaagcatgggctgcttt

SEQ ID NO: 577698 - DNA, 25 bp, Homo sapien
gctccaacccggctgacacagccat

SEQ ID NO: 577699 - DNA, 25 bp, Homo sapien
tggcctgctggtgggcagcgtgtac

SEQ ID NO: 577700 - DNA, 25 bp, Homo sapien
atggtggccgattgatccctggtac

SEQ ID NO: 577701 - DNA, 25 bp, Homo sapien
catggtggccgattgatccctggta

SEQ ID NO: 577702 - DNA, 25 bp, Homo sapien
tggtggccgattgatccctggtacc

SEQ ID NO: 577703 - DNA, 25 bp, Homo sapien
aagtcttaagaatagctggggcatc

SEQ ID NO: 577704 - DNA, 25 bp, Homo sapien
tattttgaaagtcttaagaatagct

SEQ ID NO: 577705 - DNA, 25 bp, Homo sapien
tttgaaagtcttaagaatagctggg

SEQ ID NO: 577706 - DNA, 25 bp, Homo sapien
cttaagaatagctggggcatctttc

SEQ ID NO: 577707 - DNA, 25 bp, Homo sapien
cagattcacttcctcaacttagaga

SEQ ID NO: 577708 - DNA, 25 bp, Homo sapien
tgggaactctagctccattgaccct

SEQ ID NO: 577709 - DNA, 25 bp, Homo sapien
tgtgctgtaccctcgaaactctttc

SEQ ID NO: 577710 - DNA, 25 bp, Homo sapien
tagtgtgctgatattctgccctggg

SEQ ID NO: 577711 - DNA, 25 bp, Homo sapien
ctcccagatcgagaattcttggccg

SEQ ID NO: 577712 - DNA, 25 bp, Homo sapien
gccggctggagcgataggccccttc

SEQ ID NO: 577713 - DNA, 25 bp, Homo sapien
ccagatcgagaattcttggccggct

SEQ ID NO: 577714 - DNA, 25 bp, Homo sapien
tcgagaattcttggccggctggagc

SEQ ID NO: 577715 - DNA, 25 bp, Homo sapien
ctacccctgattcccatgattagat

SEQ ID NO: 577716 - DNA, 25 bp, Homo sapien
cctgattcccatgattagatgtgga

SEQ ID NO: 577717 - DNA, 25 bp, Homo sapien
tgattcccatgattagatgtggacc

SEQ ID NO: 577718 - DNA, 25 bp, Homo sapien
cccctgattcccatgattagatgtg

SEQ ID NO: 577719 - DNA, 25 bp, Homo sapien
cctaatatctgttatcgctctcttc

SEQ ID NO: 577720 - DNA, 25 bp, Homo sapien
ggcaaaaagtcaggtcaggtctgcc

SEQ ID NO: 577721 - DNA, 25 bp, Homo sapien
gcaaaaagtcaggtcaggtctgcca

SEQ ID NO: 577722 - DNA, 25 bp, Homo sapien
tgttatcgctctcttccttagaaac

SEQ ID NO: 577723 - DNA, 25 bp, Homo sapien
tttgttctctggcgggcaggagtgg

SEQ ID NO: 577724 - DNA, 25 bp, Homo sapien
ggtcgcaaggtgctcggtgggggtg

SEQ ID NO: 577725 - DNA, 25 bp, Homo sapien
agtgggggtcgcaaggtgctcggtg

SEQ ID NO: 577726 - DNA, 25 bp, Homo sapien
gggtttgttctctggcgggcaggag

SEQ ID NO: 577727 - DNA, 25 bp, Homo sapien
gaagaggccgcttacctgatttaaa

SEQ ID NO: 577728 - DNA, 25 bp, Homo sapien
ggttgagctacttgcccctacccca

SEQ ID NO: 577729 - DNA, 25 bp, Homo sapien
cggaaataagctattgggggcttct

SEQ ID NO: 577730 - DNA, 25 bp, Homo sapien
gggagagattgaagagtggaaagga

SEQ ID NO: 577731 - DNA, 25 bp, Homo sapien
acccgaagctcagcgtcggtgatgg

SEQ ID NO: 577732 - DNA, 25 bp, Homo sapien
gagagttacccgaagctcagcgtcg

SEQ ID NO: 577733 - DNA, 25 bp, Homo sapien
tacccgaagctcagcgtcggtgatg

SEQ ID NO: 577734 - DNA, 25 bp, Homo sapien
agttacccgaagctcagcgtcggtg

SEQ ID NO: 577735 - DNA, 25 bp, Homo sapien
accatggggtggataggcaacaaaa

SEQ ID NO: 577736 - DNA, 25 bp, Homo sapien
ggataggcaacaaaacaatgtggtt

SEQ ID NO: 577737 - DNA, 25 bp, Homo sapien
gcaccatggggtggataggcaacaa

SEQ ID NO: 577738 - DNA, 25 bp, Homo sapien
ggtggataggcaacaaaacaatgtg

SEQ ID NO: 577739 - DNA, 25 bp, Homo sapien
gcctctacctattttgagggcctct

SEQ ID NO: 577740 - DNA, 25 bp, Homo sapien
aggcctctacctattttgagggcct

SEQ ID NO: 577741 - DNA, 25 bp, Homo sapien
gaccctgcaggaaaggcctctacct

SEQ ID NO: 577742 - DNA, 25 bp, Homo sapien
gcaggaaaggcctctacctattttg

SEQ ID NO: 577743 - DNA, 25 bp, Homo sapien
gacacaagaaaatcgcaattcctcc

SEQ ID NO: 577744 - DNA, 25 bp, Homo sapien
catcttatacatatggcatgcccat

SEQ ID NO: 577745 - DNA, 25 bp, Homo sapien
tgacaaaacaagtggcgaaggagac

SEQ ID NO: 577746 - DNA, 25 bp, Homo sapien
cacgcctgacccgactgagttcttt

SEQ ID NO: 577747 - DNA, 25 bp, Homo sapien
tgccagtagcacaaaagcggagcac

SEQ ID NO: 577748 - DNA, 25 bp, Homo sapien
atgccagtagcacaaaagcggagca

SEQ ID NO: 577749 - DNA, 25 bp, Homo sapien
taaattacaatcactcagggctcag

SEQ ID NO: 577750 - DNA, 25 bp, Homo sapien
tattgagctttaacttcgggccagg

SEQ ID NO: 577751 - DNA, 25 bp, Homo sapien
taggcgccgctgagaaaagatgaat

SEQ ID NO: 577752 - DNA, 25 bp, Homo sapien
gctgtctggagctgcacgcgttaat

SEQ ID NO: 577753 - DNA, 25 bp, Homo sapien
tttaaaggcttgcccgaagtggtca

SEQ ID NO: 577754 - DNA, 25 bp, Homo sapien
ttgcccgaagtggtcatgcccctct

SEQ ID NO: 577755 - DNA, 25 bp, Homo sapien
gtggtcatgcccctctgagcaaata

SEQ ID NO: 577756 - DNA, 25 bp, Homo sapien
tgcccctctgagcaaataccacagg

SEQ ID NO: 577757 - DNA, 25 bp, Homo sapien
agtaacaggtgccaaattgcctctt

SEQ ID NO: 577758 - DNA, 25 bp, Homo sapien
cagtaacaggtgccaaattgcctct

SEQ ID NO: 577759 - DNA, 25 bp, Homo sapien
gtaacaggtgccaaattgcctcttc

SEQ ID NO: 577760 - DNA, 25 bp, Homo sapien
aacaggtgccaaattgcctcttctt

SEQ ID NO: 577761 - DNA, 25 bp, Homo sapien
taatgcactgcgtaatgaggccgga

SEQ ID NO: 577762 - DNA, 25 bp, Homo sapien
gagggaagcggaatgctctggagta

SEQ ID NO: 577763 - DNA, 25 bp, Homo sapien
ctggagtaatgatatggagcctcct

SEQ ID NO: 577764 - DNA, 25 bp, Homo sapien
gcacaagttgttagcttgatctgag

SEQ ID NO: 577765 - DNA, 25 bp, Homo sapien
tccactactgcacttggcttaagca

SEQ ID NO: 577766 - DNA, 25 bp, Homo sapien
catccactactgcacttggcttaag

SEQ ID NO: 577767 - DNA, 25 bp, Homo sapien
ggcatccactactgcacttggctta

SEQ ID NO: 577768 - DNA, 25 bp, Homo sapien
caggcatccactactgcacttggct

SEQ ID NO: 577769 - DNA, 25 bp, Homo sapien
aggaggttgaggaaaccaaatctgc

SEQ ID NO: 577770 - DNA, 25 bp, Homo sapien
ggaggttgaggaaaccaaatctgct

SEQ ID NO: 577771 - DNA, 25 bp, Homo sapien
gctgcagaaacctcaagttggttat

SEQ ID NO: 577772 - DNA, 25 bp, Homo sapien
ggaaccggttgttcatcttctgaca

SEQ ID NO: 577773 - DNA, 25 bp, Homo sapien
gttatagagcgtccctgctgagtgc

SEQ ID NO: 577774 - DNA, 25 bp, Homo sapien
gaggactccttcgaagaggcagaaa

SEQ ID NO: 577775 - DNA, 25 bp, Homo sapien
cgttcagtgtccgtagaggcgacat

SEQ ID NO: 577776 - DNA, 25 bp, Homo sapien
tcgttcagtgtccgtagaggcgaca

SEQ ID NO: 577777 - DNA, 25 bp, Homo sapien
gttcagtgtccgtagaggcgacata

SEQ ID NO: 577778 - DNA, 25 bp, Homo sapien
ttcagtgtccgtagaggcgacatag

SEQ ID NO: 577779 - DNA, 25 bp, Homo sapien
gaggataccttctctggatagaagc

SEQ ID NO: 577780 - DNA, 25 bp, Homo sapien
gattctttgcggcatcaccagtcat

SEQ ID NO: 577781 - DNA, 25 bp, Homo sapien
tctgtgtgcaatcagacgtttggca

SEQ ID NO: 577782 - DNA, 25 bp, Homo sapien
cagaaccatagaggataccttctct

SEQ ID NO: 577783 - DNA, 25 bp, Homo sapien
gcagcagttggctcattaataattc

SEQ ID NO: 577784 - DNA, 25 bp, Homo sapien
cttttgtctaagccataagcagcag

SEQ ID NO: 577785 - DNA, 25 bp, Homo sapien
agcagttggctcattaataattcta

SEQ ID NO: 577786 - DNA, 25 bp, Homo sapien
tctaagccataagcagcagcagttg

SEQ ID NO: 577787 - DNA, 25 bp, Homo sapien
tcaataccaagggattgacacatca

SEQ ID NO: 577788 - DNA, 25 bp, Homo sapien
ttcaataccaagggattgacacatc

SEQ ID NO: 577789 - DNA, 25 bp, Homo sapien
ctgtcagaataggtagtgaggatct

SEQ ID NO: 577790 - DNA, 25 bp, Homo sapien
tgtcagaataggtagtgaggatctg

SEQ ID NO: 577791 - DNA, 25 bp, Homo sapien
cagaataggtagtgaggatctgtgt

SEQ ID NO: 577792 - DNA, 25 bp, Homo sapien
tcagaataggtagtgaggatctgtg

SEQ ID NO: 577793 - DNA, 25 bp, Homo sapien
aaacctgaaccagcacaccaggctg

SEQ ID NO: 577794 - DNA, 25 bp, Homo sapien
ataaacctgaaccagcacaccaggc

SEQ ID NO: 577795 - DNA, 25 bp, Homo sapien
tcataaacctgaaccagcacaccag

SEQ ID NO: 577796 - DNA, 25 bp, Homo sapien
cttcataaacctgaaccagcacacc

SEQ ID NO: 577797 - DNA, 25 bp, Homo sapien
aaaatctccacccgagtgggtgtct

SEQ ID NO: 577798 - DNA, 25 bp, Homo sapien
caaaatctccacccgagtgggtgtc

SEQ ID NO: 577799 - DNA, 25 bp, Homo sapien
tcaaaatctccacccgagtgggtgt

SEQ ID NO: 577800 - DNA, 25 bp, Homo sapien
aatctgtgacttgtcaaatttggca

SEQ ID NO: 577801 - DNA, 25 bp, Homo sapien
catgggtaatggaggtacagaagtt

SEQ ID NO: 577802 - DNA, 25 bp, Homo sapien
acttgtcaaatttggcatctcgaag

SEQ ID NO: 577803 - DNA, 25 bp, Homo sapien
cagaagttgattccttcatagagac

SEQ ID NO: 577804 - DNA, 25 bp, Homo sapien
agctataccatatgcaacagcttca

SEQ ID NO: 577805 - DNA, 25 bp, Homo sapien
cagctataccatatgcaacagcttc

SEQ ID NO: 577806 - DNA, 25 bp, Homo sapien
gctataccatatgcaacagcttcat

SEQ ID NO: 577807 - DNA, 25 bp, Homo sapien
ctataccatatgcaacagcttcatc

SEQ ID NO: 577808 - DNA, 25 bp, Homo sapien
ggtaagaatggtagtattatacttg

SEQ ID NO: 577809 - DNA, 25 bp, Homo sapien
aagaatggtagtattatacttgatg

SEQ ID NO: 577810 - DNA, 25 bp, Homo sapien
tagtattatacttgatgaggacggt

SEQ ID NO: 577811 - DNA, 25 bp, Homo sapien
gtaagaatggtagtattatacttga

SEQ ID NO: 577812 - DNA, 25 bp, Homo sapien
gctggctgtcagaataggtagtgag

SEQ ID NO: 577813 - DNA, 25 bp, Homo sapien
tgtcagaataggtagtgaggatctg

SEQ ID NO: 577814 - DNA, 25 bp, Homo sapien
gctgtcagaataggtagtgaggatc

SEQ ID NO: 577815 - DNA, 25 bp, Homo sapien
tcagaataggtagtgaggatctgtg

SEQ ID NO: 577816 - DNA, 25 bp, Homo sapien
tgttatccttggtcatggcatgctt

SEQ ID NO: 577817 - DNA, 25 bp, Homo sapien
ccatgagttcaaacttgccaagcag

SEQ ID NO: 577818 - DNA, 25 bp, Homo sapien
ttatccttggtcatggcatgcttac

SEQ ID NO: 577819 - DNA, 25 bp, Homo sapien
tgcaggaggtatgcccatgagttca

SEQ ID NO: 577820 - DNA, 25 bp, Homo sapien
tgtcaaaagtgacttcagtctgagg

SEQ ID NO: 577821 - DNA, 25 bp, Homo sapien
attggcatcactgtcaaaagtgact

SEQ ID NO: 577822 - DNA, 25 bp, Homo sapien
attgaggatgccattggcatcactg

SEQ ID NO: 577823 - DNA, 25 bp, Homo sapien
aaagtgacttcagtctgaggaacac

SEQ ID NO: 577824 - DNA, 25 bp, Homo sapien
gcagtctcattctcattgagccaga

SEQ ID NO: 577825 - DNA, 25 bp, Homo sapien
tcattctcattgagccagatgataa

SEQ ID NO: 577826 - DNA, 25 bp, Homo sapien
ttggcagtctcattctcattgagcc

SEQ ID NO: 577827 - DNA, 25 bp, Homo sapien
cattgagccagatgataatttcatt

SEQ ID NO: 577828 - DNA, 25 bp, Homo sapien
tcaagtattgagaatgccccataac

SEQ ID NO: 577829 - DNA, 25 bp, Homo sapien
acagtgtttatgaagcgcaatgtta

SEQ ID NO: 577830 - DNA, 25 bp, Homo sapien
tagatccttcaatgttttatatgtg

SEQ ID NO: 577831 - DNA, 25 bp, Homo sapien
aatgctacatctatacttgggtcgg

SEQ ID NO: 577832 - DNA, 25 bp, Homo sapien
tttggtcatggatctctctagtttc

SEQ ID NO: 577833 - DNA, 25 bp, Homo sapien
tggtcatggatctctctagtttctg

SEQ ID NO: 577834 - DNA, 25 bp, Homo sapien
ttggtcatggatctctctagtttct

SEQ ID NO: 577835 - DNA, 25 bp, Homo sapien
tcatctttcaaagccacagggcgaa

SEQ ID NO: 577836 - DNA, 25 bp, Homo sapien
tgggtattcatctttcaaagccaca

SEQ ID NO: 577837 - DNA, 25 bp, Homo sapien
tattcatctttcaaagccacagggc

SEQ ID NO: 577838 - DNA, 25 bp, Homo sapien
gggtattcatctttcaaagccacag

SEQ ID NO: 577839 - DNA, 25 bp, Homo sapien
ctctgaacaaccaccacgtcacatc

SEQ ID NO: 577840 - DNA, 25 bp, Homo sapien
accacgtcacatccctcactcttga

SEQ ID NO: 577841 - DNA, 25 bp, Homo sapien
cagcaaggctagacagcccctagac

SEQ ID NO: 577842 - DNA, 25 bp, Homo sapien
gacagcccctagaccttgtctttct

SEQ ID NO: 577843 - DNA, 25 bp, Homo sapien
acagcctttcaattaacttccaggg

SEQ ID NO: 577844 - DNA, 25 bp, Homo sapien
cccttaggactgaccatcttttctg

SEQ ID NO: 577845 - DNA, 25 bp, Homo sapien
tgtagacagcctttcaattaacttc

SEQ ID NO: 577846 - DNA, 25 bp, Homo sapien
gggactcgatgcctcgagaatcatt

SEQ ID NO: 577847 - DNA, 25 bp, Homo sapien
tgagaggccatggtagatcgctgaa

SEQ ID NO: 577848 - DNA, 25 bp, Homo sapien
tcagtcactcctaaatgagaggcca

SEQ ID NO: 577849 - DNA, 25 bp, Homo sapien
catggtagatcgctgaaggctctca

SEQ ID NO: 577850 - DNA, 25 bp, Homo sapien
gaaggctctcaatgacatatttgct

SEQ ID NO: 577851 - DNA, 25 bp, Homo sapien
taagtttaacggatgatgtgttgcc

SEQ ID NO: 577852 - DNA, 25 bp, Homo sapien
ctcactaacgctgtacccgaaaggg

SEQ ID NO: 577853 - DNA, 25 bp, Homo sapien
aacggatgatgtgttgccctgacaa

SEQ ID NO: 577854 - DNA, 25 bp, Homo sapien
ggatgatgtgttgccctgacaatta

SEQ ID NO: 577855 - DNA, 25 bp, Homo sapien
gccctccttgaagatgcacagagac

SEQ ID NO: 577856 - DNA, 25 bp, Homo sapien
taaagtgagcgtttagccacgttca

SEQ ID NO: 577857 - DNA, 25 bp, Homo sapien
cgttttacataaagtgagcgtttag

SEQ ID NO: 577858 - DNA, 25 bp, Homo sapien
ttccttccacgtcgagccctcctgg

SEQ ID NO: 577859 - DNA, 25 bp, Homo sapien
gcgtttagccacgttcacttcctct

SEQ ID NO: 577860 - DNA, 25 bp, Homo sapien
acactatgttctcattgggcgccac

SEQ ID NO: 577861 - DNA, 25 bp, Homo sapien
cagtcccaggcagaccgggggctct

SEQ ID NO: 577862 - DNA, 25 bp, Homo sapien
tccttgtcccattaccctgagggta

SEQ ID NO: 577863 - DNA, 25 bp, Homo sapien
tatgttctcattgggcgccacagcc

SEQ ID NO: 577864 - DNA, 25 bp, Homo sapien
gctccaggtaccgacccatgaggac

SEQ ID NO: 577865 - DNA, 25 bp, Homo sapien
ctccaggtaccgacccatgaggacc

SEQ ID NO: 577866 - DNA, 25 bp, Homo sapien
tccaggtaccgacccatgaggacca

SEQ ID NO: 577867 - DNA, 25 bp, Homo sapien
gccgcactcgatgagtgcacaggaa

SEQ ID NO: 577868 - DNA, 25 bp, Homo sapien
tagtgaatgacacccatggtcctgg

SEQ ID NO: 577869 - DNA, 25 bp, Homo sapien
tagttggtgtcccagccgcactcga

SEQ ID NO: 577870 - DNA, 25 bp, Homo sapien
ggcagggagcgcatctcggtcatag

SEQ ID NO: 577871 - DNA, 25 bp, Homo sapien
gcgcatgcttttatctgtcttctta

SEQ ID NO: 577872 - DNA, 25 bp, Homo sapien
cgcatgcttttatctgtcttcttaa

SEQ ID NO: 577873 - DNA, 25 bp, Homo sapien
catgcttttatctgtcttcttaagc

SEQ ID NO: 577874 - DNA, 25 bp, Homo sapien
gcatgcttttatctgtcttcttaag

SEQ ID NO: 577875 - DNA, 25 bp, Homo sapien
tgcccactgcctgcttcctgtctat

SEQ ID NO: 577876 - DNA, 25 bp, Homo sapien
ctggtaaaaagtatactgaatgccc

SEQ ID NO: 577877 - DNA, 25 bp, Homo sapien
ggtaaaaagtatactgaatgcccac

SEQ ID NO: 577878 - DNA, 25 bp, Homo sapien
gaatgcccactgcctgcttcctgtc

SEQ ID NO: 577879 - DNA, 25 bp, Homo sapien
ggtgaccagggaacctgaagcctag

SEQ ID NO: 577880 - DNA, 25 bp, Homo sapien
tggtgaccagggaacctgaagccta

SEQ ID NO: 577881 - DNA, 25 bp, Homo sapien
tgaccagggaacctgaagcctagca

SEQ ID NO: 577882 - DNA, 25 bp, Homo sapien
gtgaccagggaacctgaagcctagc

SEQ ID NO: 577883 - DNA, 25 bp, Homo sapien
catttattaaggactggaggttcca

SEQ ID NO: 577884 - DNA, 25 bp, Homo sapien
cagcatttattaaggactggaggtt

SEQ ID NO: 577885 - DNA, 25 bp, Homo sapien
tgaaactttctccatattcagcatt

SEQ ID NO: 577886 - DNA, 25 bp, Homo sapien
attcagcatttattaaggactggag

SEQ ID NO: 577887 - DNA, 25 bp, Homo sapien
ttgtctgtgattacagcccatatca

SEQ ID NO: 577888 - DNA, 25 bp, Homo sapien
ctcattgtctgtgattacagcccat

SEQ ID NO: 577889 - DNA, 25 bp, Homo sapien
cattgtctgtgattacagcccatat

SEQ ID NO: 577890 - DNA, 25 bp, Homo sapien
aagttccttaaacccacactcattg

SEQ ID NO: 577891 - DNA, 25 bp, Homo sapien
tcttcttattctgaccattactagc

SEQ ID NO: 577892 - DNA, 25 bp, Homo sapien
cttcttattctgaccattactagca

SEQ ID NO: 577893 - DNA, 25 bp, Homo sapien
tcttattctgaccattactagcatg

SEQ ID NO: 577894 - DNA, 25 bp, Homo sapien
agcaacagtccccacttggacggga

SEQ ID NO: 577895 - DNA, 25 bp, Homo sapien
accggagtgtcgcttctgagatgga

SEQ ID NO: 577896 - DNA, 25 bp, Homo sapien
tgaccacagcaaccggagtgtcgct

SEQ ID NO: 577897 - DNA, 25 bp, Homo sapien
tgtacaggcgagtcataattgtgag

SEQ ID NO: 577898 - DNA, 25 bp, Homo sapien
ccatgtacaggcgagtcataattgt

SEQ ID NO: 577899 - DNA, 25 bp, Homo sapien
cacagagtcttgttggtccaaagag

SEQ ID NO: 577900 - DNA, 25 bp, Homo sapien
cctctatgatcacagagtcttgttg

SEQ ID NO: 577901 - DNA, 25 bp, Homo sapien
ttggtgggaacctggcattcatgct

SEQ ID NO: 577902 - DNA, 25 bp, Homo sapien
gggaacctggcattcatgctcacat

SEQ ID NO: 577903 - DNA, 25 bp, Homo sapien
tctctggtactggtcatagtcatcg

SEQ ID NO: 577904 - DNA, 25 bp, Homo sapien
catagtcatcgttgtcagcatcatc

SEQ ID NO: 577905 - DNA, 25 bp, Homo sapien
gaattcaggtctctggtactggtca

SEQ ID NO: 577906 - DNA, 25 bp, Homo sapien
ctgaatgaattcaggtctctggtac

SEQ ID NO: 577907 - DNA, 25 bp, Homo sapien
gcattaaggctctcagtggcactag

SEQ ID NO: 577908 - DNA, 25 bp, Homo sapien
gtgagctaccaggtcatcatctata

SEQ ID NO: 577909 - DNA, 25 bp, Homo sapien
gccctgggtagtacatgtgagctac

SEQ ID NO: 577910 - DNA, 25 bp, Homo sapien
gcagctttggagattgactggttga

SEQ ID NO: 577911 - DNA, 25 bp, Homo sapien
gctcttccattttgccctctagggc

SEQ ID NO: 577912 - DNA, 25 bp, Homo sapien
tctcattatttgctgcctgctcttc

SEQ ID NO: 577913 - DNA, 25 bp, Homo sapien
gcctgctcttccattttgccctcta

SEQ ID NO: 577914 - DNA, 25 bp, Homo sapien
tcagccatgttctctgaaggctttc

SEQ ID NO: 577915 - DNA, 25 bp, Homo sapien
ctcagtgtagactgtgccagggcca

SEQ ID NO: 577916 - DNA, 25 bp, Homo sapien
cctcagtgtagactgtgccagggcc

SEQ ID NO: 577917 - DNA, 25 bp, Homo sapien
tcagtgtagactgtgccagggccat

SEQ ID NO: 577918 - DNA, 25 bp, Homo sapien
cagtgtagactgtgccagggccatc

SEQ ID NO: 577919 - DNA, 25 bp, Homo sapien
tccacggggccttgcaagagtgatt

SEQ ID NO: 577920 - DNA, 25 bp, Homo sapien
cctctacctccacggggccttgcaa

SEQ ID NO: 577921 - DNA, 25 bp, Homo sapien
cctccacggggccttgcaagagtga

SEQ ID NO: 577922 - DNA, 25 bp, Homo sapien
cacggggccttgcaagagtgatttg

SEQ ID NO: 577923 - DNA, 25 bp, Homo sapien
ggtcaaggcttaaagtaaaatgaca

SEQ ID NO: 577924 - DNA, 25 bp, Homo sapien
cgtggagctccgtgaaatccttcat

SEQ ID NO: 577925 - DNA, 25 bp, Homo sapien
aagaaaagcctccaccagcccgtgg

SEQ ID NO: 577926 - DNA, 25 bp, Homo sapien
cattatgggatttcccttgtcaggg

SEQ ID NO: 577927 - DNA, 25 bp, Homo sapien
tcccctcgagggttggcttctctgt

SEQ ID NO: 577928 - DNA, 25 bp, Homo sapien
tgggccgtgcacaaaggcgagtcat

SEQ ID NO: 577929 - DNA, 25 bp, Homo sapien
cctgccaggggagacctcaaagtcc

SEQ ID NO: 577930 - DNA, 25 bp, Homo sapien
aggcggtggagacagcaactacaca

SEQ ID NO: 577931 - DNA, 25 bp, Homo sapien
tctggggggtaccaatcacaggcca

SEQ ID NO: 577932 - DNA, 25 bp, Homo sapien
ggaatctggggggtaccaatcacag

SEQ ID NO: 577933 - DNA, 25 bp, Homo sapien
ctggaaggaacaatgccagcgtgtt

SEQ ID NO: 577934 - DNA, 25 bp, Homo sapien
aacaatgccagcgtgttcaccgtct

SEQ ID NO: 577935 - DNA, 25 bp, Homo sapien
aactttagctgccgttgtgtcttca

SEQ ID NO: 577936 - DNA, 25 bp, Homo sapien
taactttagctgccgttgtgtcttc

SEQ ID NO: 577937 - DNA, 25 bp, Homo sapien
ctaactttagctgccgttgtgtctt

SEQ ID NO: 577938 - DNA, 25 bp, Homo sapien
actttagctgccgttgtgtcttcat

SEQ ID NO: 577939 - DNA, 25 bp, Homo sapien
attaagtggtccaagaaagagaatg

SEQ ID NO: 577940 - DNA, 25 bp, Homo sapien
ttaagtggtccaagaaagagaatga

SEQ ID NO: 577941 - DNA, 25 bp, Homo sapien
caattaagtggtccaagaaagagaa

SEQ ID NO: 577942 - DNA, 25 bp, Homo sapien
aattaagtggtccaagaaagagaat

SEQ ID NO: 577943 - DNA, 25 bp, Homo sapien
gaaacctcggaccatcaaggcagtt

SEQ ID NO: 577944 - DNA, 25 bp, Homo sapien
tcctccagtaccactggggatactg

SEQ ID NO: 577945 - DNA, 25 bp, Homo sapien
aagaatacaatagggcgtgactgcc

SEQ ID NO: 577946 - DNA, 25 bp, Homo sapien
tcagaaacctcggaccatcaaggca

SEQ ID NO: 577947 - DNA, 25 bp, Homo sapien
agccagcgccgcgacccgcctccct

SEQ ID NO: 577948 - DNA, 25 bp, Homo sapien
ccggagccagcgccgcgacccgcct

SEQ ID NO: 577949 - DNA, 25 bp, Homo sapien
cccggagccagcgccgcgacccgcc

SEQ ID NO: 577950 - DNA, 25 bp, Homo sapien
ggagccagcgccgcgacccgcctcc

SEQ ID NO: 577951 - DNA, 25 bp, Homo sapien
ctcgcggtgggcgcagcgccgggca

SEQ ID NO: 577952 - DNA, 25 bp, Homo sapien
ggccctgggcagcgcggcagaggag

SEQ ID NO: 577953 - DNA, 25 bp, Homo sapien
gcggtgggcgcagcgccgggcaggg

SEQ ID NO: 577954 - DNA, 25 bp, Homo sapien
ggcagcgcggcagaggaggccgtgc

SEQ ID NO: 577955 - DNA, 25 bp, Homo sapien
actcccttcggcgaatttcggcttg

SEQ ID NO: 577956 - DNA, 25 bp, Homo sapien
tgtgcatccgcactcccttcggcga

SEQ ID NO: 577957 - DNA, 25 bp, Homo sapien
cttcggcgaatttcggcttggacgg

SEQ ID NO: 577958 - DNA, 25 bp, Homo sapien
catccgcactcccttcggcgaattt

SEQ ID NO: 577959 - DNA, 25 bp, Homo sapien
tcccagccaggtgattccgcggtcg

SEQ ID NO: 577960 - DNA, 25 bp, Homo sapien
agcgcgagttcgagtcccgccttct

SEQ ID NO: 577961 - DNA, 25 bp, Homo sapien
gagcagcgcgagttcgagtcccgcc

SEQ ID NO: 577962 - DNA, 25 bp, Homo sapien
gtgattccgcggtcggctcaaggcc

SEQ ID NO: 577963 - DNA, 25 bp, Homo sapien
gtcggccccgaacaatcacctattg

SEQ ID NO: 577964 - DNA, 25 bp, Homo sapien
gaccttatcaatagcagcgggaatg

SEQ ID NO: 577965 - DNA, 25 bp, Homo sapien
tcaaaatgaaacagtccagcgccgc

SEQ ID NO: 577966 - DNA, 25 bp, Homo sapien
taagcttttgagtcaccccggataa

SEQ ID NO: 577967 - DNA, 25 bp, Homo sapien
ggcgcgggctgggtgagccgtacac

SEQ ID NO: 577968 - DNA, 25 bp, Homo sapien
cgggctgggtgagccgtacactagg

SEQ ID NO: 577969 - DNA, 25 bp, Homo sapien
gctgggtgagccgtacactaggttc

SEQ ID NO: 577970 - DNA, 25 bp, Homo sapien
ctgggtgagccgtacactaggttcc

SEQ ID NO: 577971 - DNA, 25 bp, Homo sapien
gcggtgcagcgtctagggccgccgc

SEQ ID NO: 577972 - DNA, 25 bp, Homo sapien
gtgtctgcgctgagcgtggccacac

SEQ ID NO: 577973 - DNA, 25 bp, Homo sapien
agcggccacgcaggaaaaacccgct

SEQ ID NO: 577974 - DNA, 25 bp, Homo sapien
tgcatctgctgacaagccgcccgag

SEQ ID NO: 577975 - DNA, 25 bp, Homo sapien
tcctgataacttcgaagctgtttcg

SEQ ID NO: 577976 - DNA, 25 bp, Homo sapien
gggaccagaacaacgtcccttctgc

SEQ ID NO: 577977 - DNA, 25 bp, Homo sapien
agtctgtgttcctgataacttcgaa

SEQ ID NO: 577978 - DNA, 25 bp, Homo sapien
gaagctgtttcgaaagccccgatta

SEQ ID NO: 577979 - DNA, 25 bp, Homo sapien
gaggggagagcgttcccctgacctc

SEQ ID NO: 577980 - DNA, 25 bp, Homo sapien
cagaagggaggcgaggattgggtgg

SEQ ID NO: 577981 - DNA, 25 bp, Homo sapien
gctcgctcttctccgctctgaagcg

SEQ ID NO: 577982 - DNA, 25 bp, Homo sapien
ttaaaactggtctcgctctcccctg

SEQ ID NO: 577983 - DNA, 25 bp, Homo sapien
cagcccggcggcccctctccctcct

SEQ ID NO: 577984 - DNA, 25 bp, Homo sapien
gccagcccggcggcccctctccctc

SEQ ID NO: 577985 - DNA, 25 bp, Homo sapien
agcccggcggcccctctccctcctg

SEQ ID NO: 577986 - DNA, 25 bp, Homo sapien
gcccggcggcccctctccctcctgc

SEQ ID NO: 577987 - DNA, 25 bp, Homo sapien
tgcggaccgggtccacctcgtggca

SEQ ID NO: 577988 - DNA, 25 bp, Homo sapien
gtggccaccattctgcgcatgtagg

SEQ ID NO: 577989 - DNA, 25 bp, Homo sapien
agcactgcggaaggtagcgctcctc

SEQ ID NO: 577990 - DNA, 25 bp, Homo sapien
ttctgcacgcacttgaagtaggagc

SEQ ID NO: 577991 - DNA, 25 bp, Homo sapien
acagaaactagggaacgcggtgacg

SEQ ID NO: 577992 - DNA, 25 bp, Homo sapien
aaacacgcgtttcttcaatgggact

SEQ ID NO: 577993 - DNA, 25 bp, Homo sapien
gaaacagaggtttcgggtgccagaa

SEQ ID NO: 577994 - DNA, 25 bp, Homo sapien
acacggctcgctgggcaaagacttg

SEQ ID NO: 577995 - DNA, 25 bp, Homo sapien
ccagccaagaaacggtccaggtaat

SEQ ID NO: 577996 - DNA, 25 bp, Homo sapien
cagatgggacttcggagtcgggacc

SEQ ID NO: 577997 - DNA, 25 bp, Homo sapien
gtaaatgcacagcttctccgcggtc

SEQ ID NO: 577998 - DNA, 25 bp, Homo sapien
ttcggagtcgggaccccagccaaga

SEQ ID NO: 577999 - DNA, 25 bp, Homo sapien
tattcacagatgtagcctcagtgct

SEQ ID NO: 578000 - DNA, 25 bp, Homo sapien
tgcaaatgagtctcaccaacccaaa

SEQ ID NO: 578001 - DNA, 25 bp, Homo sapien
gagctatcgcccataagtgggtaaa

SEQ ID NO: 578002 - DNA, 25 bp, Homo sapien
tctggatcccaagaatttgctctgg

SEQ ID NO: 578003 - DNA, 25 bp, Homo sapien
catgcggtacagctgcaatatggtc

SEQ ID NO: 578004 - DNA, 25 bp, Homo sapien
tttgtgcgggccctaccagtgagga

SEQ ID NO: 578005 - DNA, 25 bp, Homo sapien
taatgcgagtacgaaccactggtct

SEQ ID NO: 578006 - DNA, 25 bp, Homo sapien
caggcctcggactccttcagtgaaa

SEQ ID NO: 578007 - DNA, 25 bp, Homo sapien
gggcagcttgcgcaagatgtgctca

SEQ ID NO: 578008 - DNA, 25 bp, Homo sapien
catgcttgcggatcagagacagctt

SEQ ID NO: 578009 - DNA, 25 bp, Homo sapien
gctcaatgaagtcatgaggagtgac

SEQ ID NO: 578010 - DNA, 25 bp, Homo sapien
cacagagcaatgaaggtctgagcat

SEQ ID NO: 578011 - DNA, 25 bp, Homo sapien
tcctgacatctctcccttggatgag

SEQ ID NO: 578012 - DNA, 25 bp, Homo sapien
ctctcccttggatgagtaaggttcc

SEQ ID NO: 578013 - DNA, 25 bp, Homo sapien
catctctcccttggatgagtaaggt

SEQ ID NO: 578014 - DNA, 25 bp, Homo sapien
tgacatctctcccttggatgagtaa

SEQ ID NO: 578015 - DNA, 25 bp, Homo sapien
ttttcccatcaaatagctgcacggc

SEQ ID NO: 578016 - DNA, 25 bp, Homo sapien
cctgagggttggcggccatctctcg

SEQ ID NO: 578017 - DNA, 25 bp, Homo sapien
ccctggccgcaggtgtttcatcagc

SEQ ID NO: 578018 - DNA, 25 bp, Homo sapien
atcagctccaggacggaacatccag

SEQ ID NO: 578019 - DNA, 25 bp, Homo sapien
acttggcgatggaatctgagggaac

SEQ ID NO: 578020 - DNA, 25 bp, Homo sapien
cacttggcgatggaatctgagggaa

SEQ ID NO: 578021 - DNA, 25 bp, Homo sapien
tcacttggcgatggaatctgaggga

SEQ ID NO: 578022 - DNA, 25 bp, Homo sapien
gatacgcactctgacgctgaagaag

SEQ ID NO: 578023 - DNA, 25 bp, Homo sapien
aagggaatgcccatgcaactgcaag

SEQ ID NO: 578024 - DNA, 25 bp, Homo sapien
cagtcaggtggaagttcaaagggcc

SEQ ID NO: 578025 - DNA, 25 bp, Homo sapien
tcaaagggccagaaccagagtgttc

SEQ ID NO: 578026 - DNA, 25 bp, Homo sapien
ccatcgttaattgcccacctggaga

SEQ ID NO: 578027 - DNA, 25 bp, Homo sapien
gccaacaagcaatatgctggtgcag

SEQ ID NO: 578028 - DNA, 25 bp, Homo sapien
gtgagatgctggtgacttcctgaga

SEQ ID NO: 578029 - DNA, 25 bp, Homo sapien
gttaagtctcttgatcaaaaatgcc

SEQ ID NO: 578030 - DNA, 25 bp, Homo sapien
catgcagtacgctacacattacgtc

SEQ ID NO: 578031 - DNA, 25 bp, Homo sapien
tagagggctcctcttggaagaccag

SEQ ID NO: 578032 - DNA, 25 bp, Homo sapien
acagaagatgcacacgagcgtcacc

SEQ ID NO: 578033 - DNA, 25 bp, Homo sapien
ccctaatggtatgggtgagaaccct

SEQ ID NO: 578034 - DNA, 25 bp, Homo sapien
tgtcctccctcgagttctttcacaa

SEQ ID NO: 578035 - DNA, 25 bp, Homo sapien
tcgagttctttcacaaggagcctgt

SEQ ID NO: 578036 - DNA, 25 bp, Homo sapien
ggcatgtcctccctcgagttctttc

SEQ ID NO: 578037 - DNA, 25 bp, Homo sapien
cctccctcgagttctttcacaagga

SEQ ID NO: 578038 - DNA, 25 bp, Homo sapien
cgacggtgggtacatggcaaactta

SEQ ID NO: 578039 - DNA, 25 bp, Homo sapien
tcagtcagggcatcacaagtgagcg

SEQ ID NO: 578040 - DNA, 25 bp, Homo sapien
gggcatcacaagtgagcgagctcac

SEQ ID NO: 578041 - DNA, 25 bp, Homo sapien
acacttccagttgcgatcatcgacg

SEQ ID NO: 578042 - DNA, 25 bp, Homo sapien
taaaaagcgtatgtttggagcccgc

SEQ ID NO: 578043 - DNA, 25 bp, Homo sapien
gaggaccccggatttgctccgtcag

SEQ ID NO: 578044 - DNA, 25 bp, Homo sapien
tatctacgaactatctcagaggagg

SEQ ID NO: 578045 - DNA, 25 bp, Homo sapien
tctgtgttctggagtcctcgtttaa

SEQ ID NO: 578046 - DNA, 25 bp, Homo sapien
tcacaacacctttatggcctgtgag

SEQ ID NO: 578047 - DNA, 25 bp, Homo sapien
tataaggaacagatgactagagtct

SEQ ID NO: 578048 - DNA, 25 bp, Homo sapien
gacagaccagtgaatcggaaaccca

SEQ ID NO: 578049 - DNA, 25 bp, Homo sapien
gctgggccttattcaagaggttcta

SEQ ID NO: 578050 - DNA, 25 bp, Homo sapien
caggattctcggctgactgagggaa

SEQ ID NO: 578051 - DNA, 25 bp, Homo sapien
gagtatctccataccatagaggcag

SEQ ID NO: 578052 - DNA, 25 bp, Homo sapien
gaagttcacgtgtaatgttcctcca

SEQ ID NO: 578053 - DNA, 25 bp, Homo sapien
tacccaaagcataaggcctaagagc

SEQ ID NO: 578054 - DNA, 25 bp, Homo sapien
tctcagacgttcctgtggcatctcc

SEQ ID NO: 578055 - DNA, 25 bp, Homo sapien
gggacttgctaacacctctcagacg

SEQ ID NO: 578056 - DNA, 25 bp, Homo sapien
tgaacatgacagacgtgacgcagca

SEQ ID NO: 578057 - DNA, 25 bp, Homo sapien
tgccaccctgaacgaggctgaaatg

SEQ ID NO: 578058 - DNA, 25 bp, Homo sapien
taagaggaacaggacatagagcatc

SEQ ID NO: 578059 - DNA, 25 bp, Homo sapien
tagaacaatggtccagaccagagtt

SEQ ID NO: 578060 - DNA, 25 bp, Homo sapien
gcgtaatttagcttgcataagtctg

SEQ ID NO: 578061 - DNA, 25 bp, Homo sapien
gcatcctacggagaaaacatgcgta

SEQ ID NO: 578062 - DNA, 25 bp, Homo sapien
cgttggtcctgacggtactgctgca

SEQ ID NO: 578063 - DNA, 25 bp, Homo sapien
gacttggatccgtcacgttggtcct

SEQ ID NO: 578064 - DNA, 25 bp, Homo sapien
gtcgatatcccgcacgtctgtaggg

SEQ ID NO: 578065 - DNA, 25 bp, Homo sapien
tgcaggctattgaggagcaccgcct

SEQ ID NO: 578066 - DNA, 25 bp, Homo sapien
gaccagattatggacgcgtctctct

SEQ ID NO: 578067 - DNA, 25 bp, Homo sapien
gatctttaaatatgatctaggtggg

SEQ ID NO: 578068 - DNA, 25 bp, Homo sapien
tatggacgcgtctctctctttcggc

SEQ ID NO: 578069 - DNA, 25 bp, Homo sapien
gaagaagagaccagattatggacgc

SEQ ID NO: 578070 - DNA, 25 bp, Homo sapien
tgtgaaccagacatgccaatcagca

SEQ ID NO: 578071 - DNA, 25 bp, Homo sapien
gttatggcccatagctacatttccc

SEQ ID NO: 578072 - DNA, 25 bp, Homo sapien
aataactgttcgcatatacaaggga

SEQ ID NO: 578073 - DNA, 25 bp, Homo sapien
taggtagcagctactgtagacagca

SEQ ID NO: 578074 - DNA, 25 bp, Homo sapien
catcccatctatcgctcgggaacaa

SEQ ID NO: 578075 - DNA, 25 bp, Homo sapien
tcaaagtgcttttcgaatggaatgg

SEQ ID NO: 578076 - DNA, 25 bp, Homo sapien
tatcgctcgggaacaatttttcaaa

SEQ ID NO: 578077 - DNA, 25 bp, Homo sapien
cgaatggaatggtttataacaatgc

SEQ ID NO: 578078 - DNA, 25 bp, Homo sapien
cagtgtgattgaaaacccgaccgtt

SEQ ID NO: 578079 - DNA, 25 bp, Homo sapien
aaatagagtcgggtaggcttgtgcc

SEQ ID NO: 578080 - DNA, 25 bp, Homo sapien
gaatagggtctgatagcccagccaa

SEQ ID NO: 578081 - DNA, 25 bp, Homo sapien
gaccgtttagtaccgctcagcagag

SEQ ID NO: 578082 - DNA, 25 bp, Homo sapien
gaagtaatctggtgtaatattcagc

SEQ ID NO: 578083 - DNA, 25 bp, Homo sapien
cttttgagtacttgcttcgtgtcag

SEQ ID NO: 578084 - DNA, 25 bp, Homo sapien
gcttcgtgtcagtattttgacagta

SEQ ID NO: 578085 - DNA, 25 bp, Homo sapien
cttgatactctgaatctccctactc

SEQ ID NO: 578086 - DNA, 25 bp, Homo sapien
tcaaagcttgaagcataaactcaaa

SEQ ID NO: 578087 - DNA, 25 bp, Homo sapien
ctcaaagcttgaagcataaactcaa

SEQ ID NO: 578088 - DNA, 25 bp, Homo sapien
catgttgaaaccatgcggacagtca

SEQ ID NO: 578089 - DNA, 25 bp, Homo sapien
cagggtcctccgagcgaatcagcat

SEQ ID NO: 578090 - DNA, 25 bp, Homo sapien
ggacttcgcaggaagaactgcatgt

SEQ ID NO: 578091 - DNA, 25 bp, Homo sapien
accatgcggacagtcatttaccaga

SEQ ID NO: 578092 - DNA, 25 bp, Homo sapien
gtttccttgtgagtgatcctgtccg

SEQ ID NO: 578093 - DNA, 25 bp, Homo sapien
gatcctgtccgtggcattagtacca

SEQ ID NO: 578094 - DNA, 25 bp, Homo sapien
cttgtgagtgatcctgtccgtggca

SEQ ID NO: 578095 - DNA, 25 bp, Homo sapien
ctctgggtttccttgtgagtgatcc

SEQ ID NO: 578096 - DNA, 25 bp, Homo sapien
cgatgtggcggtagtgagagaagca

SEQ ID NO: 578097 - DNA, 25 bp, Homo sapien
cgccaggtgtggacgggaaaggcct

SEQ ID NO: 578098 - DNA, 25 bp, Homo sapien
caggtgagggaactgcgccaggtgt

SEQ ID NO: 578099 - DNA, 25 bp, Homo sapien
ccaccccagatggagtcacgatgtg

SEQ ID NO: 578100 - DNA, 25 bp, Homo sapien
agaaggagaggttatggtccacaaa

SEQ ID NO: 578101 - DNA, 25 bp, Homo sapien
tgaggcagtacggtctttcttcgtc

SEQ ID NO: 578102 - DNA, 25 bp, Homo sapien
ggttatggtccacaaactgaaagaa

SEQ ID NO: 578103 - DNA, 25 bp, Homo sapien
ggagaggttatggtccacaaactga

SEQ ID NO: 578104 - DNA, 25 bp, Homo sapien
ttgaataaacgagcagtgcccagga

SEQ ID NO: 578105 - DNA, 25 bp, Homo sapien
tgttgaataaacgagcagtgcccag

SEQ ID NO: 578106 - DNA, 25 bp, Homo sapien
tttgttgaataaacgagcagtgccc

SEQ ID NO: 578107 - DNA, 25 bp, Homo sapien
atttgttgaataaacgagcagtgcc

SEQ ID NO: 578108 - DNA, 25 bp, Homo sapien
tatgtcctgaatccaccacttctgg

SEQ ID NO: 578109 - DNA, 25 bp, Homo sapien
ggattactgtgatagcctgttggca

SEQ ID NO: 578110 - DNA, 25 bp, Homo sapien
tctatatatacgtctgaagcaagct

SEQ ID NO: 578111 - DNA, 25 bp, Homo sapien
tactcagccattgaagagatgtccc

SEQ ID NO: 578112 - DNA, 25 bp, Homo sapien
gctgcccctgcactgcgggctacct

SEQ ID NO: 578113 - DNA, 25 bp, Homo sapien
tccgccgccataggccgaggcggcc

SEQ ID NO: 578114 - DNA, 25 bp, Homo sapien
ggccggctccgccgccataggccga

SEQ ID NO: 578115 - DNA, 25 bp, Homo sapien
tgcccctgcactgcgggctacctcc

SEQ ID NO: 578116 - DNA, 25 bp, Homo sapien
acaacagtcagagcgaagcgagcca

SEQ ID NO: 578117 - DNA, 25 bp, Homo sapien
caacagtcagagcgaagcgagccat

SEQ ID NO: 578118 - DNA, 25 bp, Homo sapien
tgtacagtgcgtgccagcggccgca

SEQ ID NO: 578119 - DNA, 25 bp, Homo sapien
acgtgtcctgcgagcagctgacgca

SEQ ID NO: 578120 - DNA, 25 bp, Homo sapien
tgcggcggaaacagaactcgctgct

SEQ ID NO: 578121 - DNA, 25 bp, Homo sapien
tataagctggtgaagcactgccggc

SEQ ID NO: 578122 - DNA, 25 bp, Homo sapien
ctggaagtcagaatcacaaactcag

SEQ ID NO: 578123 - DNA, 25 bp, Homo sapien
ggaagtcagaatcacaaactcaggc

SEQ ID NO: 578124 - DNA, 25 bp, Homo sapien
gaagtcagaatcacaaactcaggcc

SEQ ID NO: 578125 - DNA, 25 bp, Homo sapien
tggaagtcagaatcacaaactcagg

SEQ ID NO: 578126 - DNA, 25 bp, Homo sapien
aatagaaagagaaggacaaccttat

SEQ ID NO: 578127 - DNA, 25 bp, Homo sapien
tagaaagagaaggacaaccttatta

SEQ ID NO: 578128 - DNA, 25 bp, Homo sapien
agaaagagaaggacaaccttattag

SEQ ID NO: 578129 - DNA, 25 bp, Homo sapien
atagaaagagaaggacaaccttatt

SEQ ID NO: 578130 - DNA, 25 bp, Homo sapien
ttctccttgttaaatcttgtttctc

SEQ ID NO: 578131 - DNA, 25 bp, Homo sapien
tggattattttctccttgttaaatc

SEQ ID NO: 578132 - DNA, 25 bp, Homo sapien
ctccttgttaaatcttgtttctcca

SEQ ID NO: 578133 - DNA, 25 bp, Homo sapien
attattttctccttgttaaatcttg

SEQ ID NO: 578134 - DNA, 25 bp, Homo sapien
tcctgtaaggagacttaatgcagcc

SEQ ID NO: 578135 - DNA, 25 bp, Homo sapien
cacaacattcttgggagcgagggct

SEQ ID NO: 578136 - DNA, 25 bp, Homo sapien
taacggttggctggacactctgaag

SEQ ID NO: 578137 - DNA, 25 bp, Homo sapien
ggagggcccctcaatggataaacag

SEQ ID NO: 578138 - DNA, 25 bp, Homo sapien
agtttctgaaagaggttcatctact

SEQ ID NO: 578139 - DNA, 25 bp, Homo sapien
tttgtcctcatgagatcactggaga

SEQ ID NO: 578140 - DNA, 25 bp, Homo sapien
tgtcctcatgagatcactggagaaa

SEQ ID NO: 578141 - DNA, 25 bp, Homo sapien
gctttgtcctcatgagatcactgga

SEQ ID NO: 578142 - DNA, 25 bp, Homo sapien
tgctttgtcctcatgagatcactgg

SEQ ID NO: 578143 - DNA, 25 bp, Homo sapien
attcccacctacgagtgagaaaacg

SEQ ID NO: 578144 - DNA, 25 bp, Homo sapien
ccacctacgagtgagaaaacgcggt

SEQ ID NO: 578145 - DNA, 25 bp, Homo sapien
acctacgagtgagaaaacgcggtgt

SEQ ID NO: 578146 - DNA, 25 bp, Homo sapien
tcccacctacgagtgagaaaacgcg

SEQ ID NO: 578147 - DNA, 25 bp, Homo sapien
tgctgggtataaaactctaggttaa

SEQ ID NO: 578148 - DNA, 25 bp, Homo sapien
aaagttacttcagaatctctttgtc

SEQ ID NO: 578149 - DNA, 25 bp, Homo sapien
cctggttgggatttggtacacttct

SEQ ID NO: 578150 - DNA, 25 bp, Homo sapien
tttgctgacagcctaactaatggtc

SEQ ID NO: 578151 - DNA, 25 bp, Homo sapien
gagtcatactttaccgtcatatctt

SEQ ID NO: 578152 - DNA, 25 bp, Homo sapien
cgaagtcttgagtcatactttaccg

SEQ ID NO: 578153 - DNA, 25 bp, Homo sapien
tactttaccgtcatatctttgcaaa

SEQ ID NO: 578154 - DNA, 25 bp, Homo sapien
cctttcccgaagtcttgagtcatac

SEQ ID NO: 578155 - DNA, 25 bp, Homo sapien
taaattggcacaggttttctggaag

SEQ ID NO: 578156 - DNA, 25 bp, Homo sapien
gagtctaataataccaattgttggt

SEQ ID NO: 578157 - DNA, 25 bp, Homo sapien
cctaggtcattcatgggactataaa

SEQ ID NO: 578158 - DNA, 25 bp, Homo sapien
cacatggcaacattgttaagctatt

SEQ ID NO: 578159 - DNA, 25 bp, Homo sapien
cacttagcgctttgccttctacaac

SEQ ID NO: 578160 - DNA, 25 bp, Homo sapien
ggccctcagctcacttagcgctttg

SEQ ID NO: 578161 - DNA, 25 bp, Homo sapien
ggtgtaaacacagggcactcttccc

SEQ ID NO: 578162 - DNA, 25 bp, Homo sapien
tggtccagcgtctctcctccgggcg

SEQ ID NO: 578163 - DNA, 25 bp, Homo sapien
tcaggattagttgacaaagaaattc

SEQ ID NO: 578164 - DNA, 25 bp, Homo sapien
ctctgccaaagaagtttccagacag

SEQ ID NO: 578165 - DNA, 25 bp, Homo sapien
tggctgctaatcctggaataccgct

SEQ ID NO: 578166 - DNA, 25 bp, Homo sapien
tttgatccgcttctttcaggattag

SEQ ID NO: 578167 - DNA, 25 bp, Homo sapien
ttctcatgtaagcaccgtgactcac

SEQ ID NO: 578168 - DNA, 25 bp, Homo sapien
aaataatcaaacagacttctcatgt

SEQ ID NO: 578169 - DNA, 25 bp, Homo sapien
gacttctcatgtaagcaccgtgact

SEQ ID NO: 578170 - DNA, 25 bp, Homo sapien
caaacagacttctcatgtaagcacc

SEQ ID NO: 578171 - DNA, 25 bp, Homo sapien
ttatgataaagagactcatccctgt

SEQ ID NO: 578172 - DNA, 25 bp, Homo sapien
gtttatgataaagagactcatccct

SEQ ID NO: 578173 - DNA, 25 bp, Homo sapien
gtgactgacataagttcagatctgc

SEQ ID NO: 578174 - DNA, 25 bp, Homo sapien
gactcatccctgtattgggagtgac

SEQ ID NO: 578175 - DNA, 25 bp, Homo sapien
tcagtcagtccatttagatgatcct

SEQ ID NO: 578176 - DNA, 25 bp, Homo sapien
cagtccatttagatgatcctgtagg

SEQ ID NO: 578177 - DNA, 25 bp, Homo sapien
ccatttagatgatcctgtaggttca

SEQ ID NO: 578178 - DNA, 25 bp, Homo sapien
tttagatgatcctgtaggttcatac

SEQ ID NO: 578179 - DNA, 25 bp, Homo sapien
gcagaggagagaagtaaataaagcc

SEQ ID NO: 578180 - DNA, 25 bp, Homo sapien
gttagattttgatgcagatttaacc

SEQ ID NO: 578181 - DNA, 25 bp, Homo sapien
tcagaggctcaaaatggttagattt

SEQ ID NO: 578182 - DNA, 25 bp, Homo sapien
aatggcactcccttcagaggctcaa

SEQ ID NO: 578183 - DNA, 25 bp, Homo sapien
cttcatcatccatgtgcaatccaga

SEQ ID NO: 578184 - DNA, 25 bp, Homo sapien
tggaaaatgccaactgtacttggac

SEQ ID NO: 578185 - DNA, 25 bp, Homo sapien
cagagatgacatctagcagggtggt

SEQ ID NO: 578186 - DNA, 25 bp, Homo sapien
tatgtggctatggttccactggagc

SEQ ID NO: 578187 - DNA, 25 bp, Homo sapien
aaaattccaatagttgatttatacg

SEQ ID NO: 578188 - DNA, 25 bp, Homo sapien
ggcattatttagaaaaggctgttct

SEQ ID NO: 578189 - DNA, 25 bp, Homo sapien
gatttatacgtaaaacatgttagtg

SEQ ID NO: 578190 - DNA, 25 bp, Homo sapien
cataatctgtattcatccacatttc

SEQ ID NO: 578191 - DNA, 25 bp, Homo sapien
tctgatgctcaaacacgtgccctgt

SEQ ID NO: 578192 - DNA, 25 bp, Homo sapien
gcaacatggtgacttaaaagcgaac

SEQ ID NO: 578193 - DNA, 25 bp, Homo sapien
cgtgccctgtttcaatactggtaga

SEQ ID NO: 578194 - DNA, 25 bp, Homo sapien
gactcacagcatttagcaacatggt

SEQ ID NO: 578195 - DNA, 25 bp, Homo sapien
tttaaagcaccaaaacagtaccatc

SEQ ID NO: 578196 - DNA, 25 bp, Homo sapien
tgaacattgcaagcagatgaacagg

SEQ ID NO: 578197 - DNA, 25 bp, Homo sapien
gatgaacaggtgaacatatacacag

SEQ ID NO: 578198 - DNA, 25 bp, Homo sapien
catctccttccagacactaggtgaa

SEQ ID NO: 578199 - DNA, 25 bp, Homo sapien
tgttctgactgttcaggtctgggtc

SEQ ID NO: 578200 - DNA, 25 bp, Homo sapien
taaatgacttcgatggtctgaaagt

SEQ ID NO: 578201 - DNA, 25 bp, Homo sapien
ctgggtccttattccttcctgtgcc

SEQ ID NO: 578202 - DNA, 25 bp, Homo sapien
tggtctgaaagtgaatctgctccag

SEQ ID NO: 578203 - DNA, 25 bp, Homo sapien
ggctatttcaaaccatcttacaaaa

SEQ ID NO: 578204 - DNA, 25 bp, Homo sapien
gaggaaagcatcgaactgcagcctg

SEQ ID NO: 578205 - DNA, 25 bp, Homo sapien
cctgcgagtctcaataatgaacaac

SEQ ID NO: 578206 - DNA, 25 bp, Homo sapien
tgaacaacataacaatctcccacat

SEQ ID NO: 578207 - DNA, 25 bp, Homo sapien
atgagggaatacttatttctctcac

SEQ ID NO: 578208 - DNA, 25 bp, Homo sapien
tatgagggaatacttatttctctca

SEQ ID NO: 578209 - DNA, 25 bp, Homo sapien
cagacgaggtttgtgttccatcgca

SEQ ID NO: 578210 - DNA, 25 bp, Homo sapien
ctcctccatcagacgaggtttgtgt

SEQ ID NO: 578211 - DNA, 25 bp, Homo sapien
tgtgttccatcgcagtgccatggca

SEQ ID NO: 578212 - DNA, 25 bp, Homo sapien
aggtttgtgttccatcgcagtgcca

SEQ ID NO: 578213 - DNA, 25 bp, Homo sapien
tgacaagaacacaagggcctctcat

SEQ ID NO: 578214 - DNA, 25 bp, Homo sapien
ctgacaagaacacaagggcctctca

SEQ ID NO: 578215 - DNA, 25 bp, Homo sapien
cttcttcacttccttattgacacca

SEQ ID NO: 578216 - DNA, 25 bp, Homo sapien
cggtgccagattgctaactctcttt

SEQ ID NO: 578217 - DNA, 25 bp, Homo sapien
gtaaatatgcaaaacggtgccagat

SEQ ID NO: 578218 - DNA, 25 bp, Homo sapien
ctactgataggaatgctcccaagag

SEQ ID NO: 578219 - DNA, 25 bp, Homo sapien
aagtctaaatgattcaacatatatt

SEQ ID NO: 578220 - DNA, 25 bp, Homo sapien
tcacaaaaaacagtaatagttcctg

SEQ ID NO: 578221 - DNA, 25 bp, Homo sapien
cacaaaaaacagtaatagttcctgg

SEQ ID NO: 578222 - DNA, 25 bp, Homo sapien
caaagtcacaaaaaacagtaatagt

SEQ ID NO: 578223 - DNA, 25 bp, Homo sapien
agaacccatttagaccccttgtgtg

SEQ ID NO: 578224 - DNA, 25 bp, Homo sapien
gaaatcttcgctcttctgcataaag

SEQ ID NO: 578225 - DNA, 25 bp, Homo sapien
ggcactttggcccactggacctgga

SEQ ID NO: 578226 - DNA, 25 bp, Homo sapien
ggacctggaaatcttcgctcttctg

SEQ ID NO: 578227 - DNA, 25 bp, Homo sapien
ggctttgatgcccctggtgcctgga

SEQ ID NO: 578228 - DNA, 25 bp, Homo sapien
aaggctttgatgcccctggtgcctg

SEQ ID NO: 578229 - DNA, 25 bp, Homo sapien
gctttgatgcccctggtgcctggaa

SEQ ID NO: 578230 - DNA, 25 bp, Homo sapien
caaggctttgatgcccctggtgcct

SEQ ID NO: 578231 - DNA, 25 bp, Homo sapien
tttaacaggaaccttctgggttgca

SEQ ID NO: 578232 - DNA, 25 bp, Homo sapien
ttctgggttgcatgctttaagaata

SEQ ID NO: 578233 - DNA, 25 bp, Homo sapien
acaggaaccttctgggttgcatgct

SEQ ID NO: 578234 - DNA, 25 bp, Homo sapien
cttctgggttgcatgctttaagaat

SEQ ID NO: 578235 - DNA, 25 bp, Homo sapien
ttctatgctgcatacaacttcctgg

SEQ ID NO: 578236 - DNA, 25 bp, Homo sapien
tgaacaatgatcatacaagttgacc

SEQ ID NO: 578237 - DNA, 25 bp, Homo sapien
tctttccagggactacacaaatctg

SEQ ID NO: 578238 - DNA, 25 bp, Homo sapien
cagagaactgtcagaggcaccttct

SEQ ID NO: 578239 - DNA, 25 bp, Homo sapien
gggaagcagccatataacaaggtgc

SEQ ID NO: 578240 - DNA, 25 bp, Homo sapien
gcagccatataacaaggtgccctgt

SEQ ID NO: 578241 - DNA, 25 bp, Homo sapien
cccggggaagcagccatataacaag

SEQ ID NO: 578242 - DNA, 25 bp, Homo sapien
agccatataacaaggtgccctgtac

SEQ ID NO: 578243 - DNA, 25 bp, Homo sapien
caaaacccatgcaatatgcaaagag

SEQ ID NO: 578244 - DNA, 25 bp, Homo sapien
ccacatctttcataaaaacggaagc

SEQ ID NO: 578245 - DNA, 25 bp, Homo sapien
tgaattcaggggcagattcttactg

SEQ ID NO: 578246 - DNA, 25 bp, Homo sapien
cctagagtgggctttgaattcaggg

SEQ ID NO: 578247 - DNA, 25 bp, Homo sapien
ccctcctagagtgggctttgaattc

SEQ ID NO: 578248 - DNA, 25 bp, Homo sapien
ccctccctcctagagtgggctttga

SEQ ID NO: 578249 - DNA, 25 bp, Homo sapien
atgaatgtcattttaggcacttcag

SEQ ID NO: 578250 - DNA, 25 bp, Homo sapien
tcattttaggcacttcagatagcca

SEQ ID NO: 578251 - DNA, 25 bp, Homo sapien
tctaaaggaatcttcacgtctttac

SEQ ID NO: 578252 - DNA, 25 bp, Homo sapien
aaggcatatttgtatctctaaagga

SEQ ID NO: 578253 - DNA, 25 bp, Homo sapien
accagccagtggtactcccttccct

SEQ ID NO: 578254 - DNA, 25 bp, Homo sapien
cctttgcctgtcccaaaacctctgc

SEQ ID NO: 578255 - DNA, 25 bp, Homo sapien
cctcaccagccagtggtactccctt

SEQ ID NO: 578256 - DNA, 25 bp, Homo sapien
ccaaaacctctgccattagagccat

SEQ ID NO: 578257 - DNA, 25 bp, Homo sapien
catcagcaacaagaatttgcagact

SEQ ID NO: 578258 - DNA, 25 bp, Homo sapien
tcagcaacaagaatttgcagactca

SEQ ID NO: 578259 - DNA, 25 bp, Homo sapien
cagcaacaagaatttgcagactcat

SEQ ID NO: 578260 - DNA, 25 bp, Homo sapien
gcatcagcaacaagaatttgcagac

SEQ ID NO: 578261 - DNA, 25 bp, Homo sapien
tgtccaaactgggcgagttgcaatt

SEQ ID NO: 578262 - DNA, 25 bp, Homo sapien
tccaaactgggcgagttgcaatttg

SEQ ID NO: 578263 - DNA, 25 bp, Homo sapien
caaactgggcgagttgcaatttggg

SEQ ID NO: 578264 - DNA, 25 bp, Homo sapien
ctgtccaaactgggcgagttgcaat

SEQ ID NO: 578265 - DNA, 25 bp, Homo sapien
aaataatgagccagtttctcactgg

SEQ ID NO: 578266 - DNA, 25 bp, Homo sapien
tggctgatctacttgactgacaggt

SEQ ID NO: 578267 - DNA, 25 bp, Homo sapien
gccaattggctgagtaactgctgga

SEQ ID NO: 578268 - DNA, 25 bp, Homo sapien
acacgatgccactccagaattcaat

SEQ ID NO: 578269 - DNA, 25 bp, Homo sapien
gcacgggagctgtgtcagattcaat

SEQ ID NO: 578270 - DNA, 25 bp, Homo sapien
cctttggtgaaagggtgacattgca

SEQ ID NO: 578271 - DNA, 25 bp, Homo sapien
gtttcaaatcgcctggagacgcaag

SEQ ID NO: 578272 - DNA, 25 bp, Homo sapien
gagacgcaagaaatctgctctgagt

SEQ ID NO: 578273 - DNA, 25 bp, Homo sapien
gctgctcatcttttaggaccaccag

SEQ ID NO: 578274 - DNA, 25 bp, Homo sapien
tcagtggagtatccagacagctcgc

SEQ ID NO: 578275 - DNA, 25 bp, Homo sapien
taacctcattgactgtgactttcag

SEQ ID NO: 578276 - DNA, 25 bp, Homo sapien
gattcaaggtgtctgtgctgctcat

SEQ ID NO: 578277 - DNA, 25 bp, Homo sapien
caagctggttatatggaaatgattt

SEQ ID NO: 578278 - DNA, 25 bp, Homo sapien
tagggtcttctaatctctctaaaag

SEQ ID NO: 578279 - DNA, 25 bp, Homo sapien
gaccactggacaagctggacacctt

SEQ ID NO: 578280 - DNA, 25 bp, Homo sapien
tggacaccttttgagcgagatgcac

SEQ ID NO: 578281 - DNA, 25 bp, Homo sapien
gctctagggaggcaatcgccccgct

SEQ ID NO: 578282 - DNA, 25 bp, Homo sapien
gtgttcctttgcatcaggaagcttg

SEQ ID NO: 578283 - DNA, 25 bp, Homo sapien
cgctccggtgttcctttgcatcagg

SEQ ID NO: 578284 - DNA, 25 bp, Homo sapien
gggtggccggcccagctctagggag

SEQ ID NO: 578285 - DNA, 25 bp, Homo sapien
gtctgggtctccacactcggaattc

SEQ ID NO: 578286 - DNA, 25 bp, Homo sapien
agaaacttgtcaggcgggcattggc

SEQ ID NO: 578287 - DNA, 25 bp, Homo sapien
agatgccccagaaacttgtcaggcg

SEQ ID NO: 578288 - DNA, 25 bp, Homo sapien
tgctgaacgcccagggttgcgtggg

SEQ ID NO: 578289 - DNA, 25 bp, Homo sapien
taaatgtatagacccttgggagtcc

SEQ ID NO: 578290 - DNA, 25 bp, Homo sapien
tggctccctgacatcgtatcagtgt

SEQ ID NO: 578291 - DNA, 25 bp, Homo sapien
agttctggccaatcacaagaagcca

SEQ ID NO: 578292 - DNA, 25 bp, Homo sapien
gctggttggaggactggattctcct

SEQ ID NO: 578293 - DNA, 25 bp, Homo sapien
tggcccaaggatcgcttctttctgg

SEQ ID NO: 578294 - DNA, 25 bp, Homo sapien
caaggatcgcttctttctggctaag

SEQ ID NO: 578295 - DNA, 25 bp, Homo sapien
gcatttggcccaaggatcgcttctt

SEQ ID NO: 578296 - DNA, 25 bp, Homo sapien
tctggctaagaatcttattgcttct

SEQ ID NO: 578297 - DNA, 25 bp, Homo sapien
gataacaatccttctagagcatttg

SEQ ID NO: 578298 - DNA, 25 bp, Homo sapien
cactgtattagaaggaaagatcagg

SEQ ID NO: 578299 - DNA, 25 bp, Homo sapien
ggttgtgagatccactgagaaggaa

SEQ ID NO: 578300 - DNA, 25 bp, Homo sapien
tgttcccaaacactgtattagaagg

SEQ ID NO: 578301 - DNA, 25 bp, Homo sapien
tatccatattgtacatgctaccaca

SEQ ID NO: 578302 - DNA, 25 bp, Homo sapien
gaagcaggctctccatacagtagtc

SEQ ID NO: 578303 - DNA, 25 bp, Homo sapien
tagtcctctcggctaccagattgac

SEQ ID NO: 578304 - DNA, 25 bp, Homo sapien
tctgcatctcggttacctatggtca

SEQ ID NO: 578305 - DNA, 25 bp, Homo sapien
ttcagaaacccaggcgttcgtcagt

SEQ ID NO: 578306 - DNA, 25 bp, Homo sapien
ttcgtcagtcagcacatggtattcc

SEQ ID NO: 578307 - DNA, 25 bp, Homo sapien
atcccaatccccttgatggcaattg

SEQ ID NO: 578308 - DNA, 25 bp, Homo sapien
aatccccttgatggcaattggttca

SEQ ID NO: 578309 - DNA, 25 bp, Homo sapien
aatccctgagcttgaaatgcctgca

SEQ ID NO: 578310 - DNA, 25 bp, Homo sapien
aagatctggtagctggccttgctcc

SEQ ID NO: 578311 - DNA, 25 bp, Homo sapien
tgctaaaggagaagccccaagatct

SEQ ID NO: 578312 - DNA, 25 bp, Homo sapien
ggccttgctcccatgtagctctagc

SEQ ID NO: 578313 - DNA, 25 bp, Homo sapien
taacagctaattgcttcagttgcac

SEQ ID NO: 578314 - DNA, 25 bp, Homo sapien
tgtcactacgttttgggatggttcg

SEQ ID NO: 578315 - DNA, 25 bp, Homo sapien
cacaagcacatcagcccgtttctaa

SEQ ID NO: 578316 - DNA, 25 bp, Homo sapien
caatagcttgcattccacccataag

SEQ ID NO: 578317 - DNA, 25 bp, Homo sapien
aaccatgggaatgttcagctgtgcc

SEQ ID NO: 578318 - DNA, 25 bp, Homo sapien
cacagctttggttagtgaccttcca

SEQ ID NO: 578319 - DNA, 25 bp, Homo sapien
ggaaaaccttagctcctgcttggat

SEQ ID NO: 578320 - DNA, 25 bp, Homo sapien
cacactgtttgctgagttccctgaa

SEQ ID NO: 578321 - DNA, 25 bp, Homo sapien
atggagctgggttcttgaaacactg

SEQ ID NO: 578322 - DNA, 25 bp, Homo sapien
aggagccatggaagtcaaatgctga

SEQ ID NO: 578323 - DNA, 25 bp, Homo sapien
catggaagtcaaatgctgaggatgg

SEQ ID NO: 578324 - DNA, 25 bp, Homo sapien
aatggagctgggttcttgaaacact

SEQ ID NO: 578325 - DNA, 25 bp, Homo sapien
tgttttgttcttcatgttctcttct

SEQ ID NO: 578326 - DNA, 25 bp, Homo sapien
atgcctcccataaaaacctcctgtt

SEQ ID NO: 578327 - DNA, 25 bp, Homo sapien
acctcctgttttgttcttcatgttc

SEQ ID NO: 578328 - DNA, 25 bp, Homo sapien
ctcctgttttgttcttcatgttctc

SEQ ID NO: 578329 - DNA, 25 bp, Homo sapien
tgctgatggagattccaacttggga

SEQ ID NO: 578330 - DNA, 25 bp, Homo sapien
tgtccaatgtagattaaaagagcct

SEQ ID NO: 578331 - DNA, 25 bp, Homo sapien
cactagtggttatctgctgatggag

SEQ ID NO: 578332 - DNA, 25 bp, Homo sapien
tttcttaatcgtcctcactagtggt

SEQ ID NO: 578333 - DNA, 25 bp, Homo sapien
cagatgggttgaagcagcaaaattg

SEQ ID NO: 578334 - DNA, 25 bp, Homo sapien
gcagatgggttgaagcagcaaaatt

SEQ ID NO: 578335 - DNA, 25 bp, Homo sapien
agcagatgggttgaagcagcaaaat

SEQ ID NO: 578336 - DNA, 25 bp, Homo sapien
aaagctttcattatcaggtgccttc

SEQ ID NO: 578337 - DNA, 25 bp, Homo sapien
ttatcaggtgccttcacctctgttt

SEQ ID NO: 578338 - DNA, 25 bp, Homo sapien
gctttcattatcaggtgccttcacc

SEQ ID NO: 578339 - DNA, 25 bp, Homo sapien
tcattatcaggtgccttcacctctg

SEQ ID NO: 578340 - DNA, 25 bp, Homo sapien
cacagggaaggactggcttggtatt

SEQ ID NO: 578341 - DNA, 25 bp, Homo sapien
gagttttcaactgctgatgccccac

SEQ ID NO: 578342 - DNA, 25 bp, Homo sapien
ttcaactgctgatgccccacactga

SEQ ID NO: 578343 - DNA, 25 bp, Homo sapien
aaggactggcttggtattctgagtt

SEQ ID NO: 578344 - DNA, 25 bp, Homo sapien
ctcggtcttgggcaaacgcgttcat

SEQ ID NO: 578345 - DNA, 25 bp, Homo sapien
cttctataaacacccgcacggggcg

SEQ ID NO: 578346 - DNA, 25 bp, Homo sapien
gggcgactcttatgactccatttta

SEQ ID NO: 578347 - DNA, 25 bp, Homo sapien
cattttaacactcggtcttgggcaa

SEQ ID NO: 578348 - DNA, 25 bp, Homo sapien
tgacctccccgaggtttcgtcttca

SEQ ID NO: 578349 - DNA, 25 bp, Homo sapien
ggtttcgtcttcaatgcaacgtgag

SEQ ID NO: 578350 - DNA, 25 bp, Homo sapien
gaaggaaagacagcgcctgacctcc

SEQ ID NO: 578351 - DNA, 25 bp, Homo sapien
ttcaatgcaacgtgagctctgccct

SEQ ID NO: 578352 - DNA, 25 bp, Homo sapien
cttctcgggagggttgtgttctccg

SEQ ID NO: 578353 - DNA, 25 bp, Homo sapien
ctgggcttctcgggagggttgtgtt

SEQ ID NO: 578354 - DNA, 25 bp, Homo sapien
tgggcttctcgggagggttgtgttc

SEQ ID NO: 578355 - DNA, 25 bp, Homo sapien
ggcttctcgggagggttgtgttctc

SEQ ID NO: 578356 - DNA, 25 bp, Homo sapien
ccttctgggtatgcagccatcccga

SEQ ID NO: 578357 - DNA, 25 bp, Homo sapien
tgtcccttctgggtatgcagccatc

SEQ ID NO: 578358 - DNA, 25 bp, Homo sapien
tgggtatgcagccatcccgagccag

SEQ ID NO: 578359 - DNA, 25 bp, Homo sapien
gtatgcagccatcccgagccagagc

SEQ ID NO: 578360 - DNA, 25 bp, Homo sapien
gcagctcacctcgaaaacactttat

SEQ ID NO: 578361 - DNA, 25 bp, Homo sapien
gcaccctaagtgcaccaatacttgt

SEQ ID NO: 578362 - DNA, 25 bp, Homo sapien
cacggaataccgcaccctaagtgca

SEQ ID NO: 578363 - DNA, 25 bp, Homo sapien
ttataaagcccccaccagacgtgca

SEQ ID NO: 578364 - DNA, 25 bp, Homo sapien
agcctgcgataaccagtgctgatag

SEQ ID NO: 578365 - DNA, 25 bp, Homo sapien
cctgaaggacacacttggattctcc

SEQ ID NO: 578366 - DNA, 25 bp, Homo sapien
cacacttggattctcctgaggaagg

SEQ ID NO: 578367 - DNA, 25 bp, Homo sapien
ggaaggccagtcttaatattgtcaa

SEQ ID NO: 578368 - DNA, 25 bp, Homo sapien
tttgccatcttcactgcggtcctct

SEQ ID NO: 578369 - DNA, 25 bp, Homo sapien
taatgtccaagcacgtaattccggc

SEQ ID NO: 578370 - DNA, 25 bp, Homo sapien
taattccggcagcattaggcttttc

SEQ ID NO: 578371 - DNA, 25 bp, Homo sapien
ttgacgcaactacgcagacagctgt

SEQ ID NO: 578372 - DNA, 25 bp, Homo sapien
cacaattgattgagcacttggccca

SEQ ID NO: 578373 - DNA, 25 bp, Homo sapien
tacagacaacaattgtcagttcctt

SEQ ID NO: 578374 - DNA, 25 bp, Homo sapien
ttggcccaagctatgccaatcagag

SEQ ID NO: 578375 - DNA, 25 bp, Homo sapien
tatttttgaatcgaggatacagaca

SEQ ID NO: 578376 - DNA, 25 bp, Homo sapien
tctgctttgcaactggttcttccca

SEQ ID NO: 578377 - DNA, 25 bp, Homo sapien
tgtgtctgctttgcaactggttctt

SEQ ID NO: 578378 - DNA, 25 bp, Homo sapien
ctgctttgcaactggttcttcccaa

SEQ ID NO: 578379 - DNA, 25 bp, Homo sapien
tgtctgctttgcaactggttcttcc

SEQ ID NO: 578380 - DNA, 25 bp, Homo sapien
agggcagtcaaatttctatgtccca

SEQ ID NO: 578381 - DNA, 25 bp, Homo sapien
cagtcaaatttctatgtcccagttt

SEQ ID NO: 578382 - DNA, 25 bp, Homo sapien
ctgaactggctctgtcatcaaataa

SEQ ID NO: 578383 - DNA, 25 bp, Homo sapien
ctgtcatcaaataagtaggtgatct

SEQ ID NO: 578384 - DNA, 25 bp, Homo sapien
tagaatttgcttaaacagagggcac

SEQ ID NO: 578385 - DNA, 25 bp, Homo sapien
gatacctgggtctatgattccttag

SEQ ID NO: 578386 - DNA, 25 bp, Homo sapien
tcaggtgccctcttgaaccaaggat

SEQ ID NO: 578387 - DNA, 25 bp, Homo sapien
gatgcaactagatattcaggtgccc

SEQ ID NO: 578388 - DNA, 25 bp, Homo sapien
tgtgttcccattaccaaagtgctca

SEQ ID NO: 578389 - DNA, 25 bp, Homo sapien
ggcttccacgcagttgcttggcttg

SEQ ID NO: 578390 - DNA, 25 bp, Homo sapien
gcttgttttccatgacgcggcaaca

SEQ ID NO: 578391 - DNA, 25 bp, Homo sapien
aacacagctgaaaggccttcagagt

SEQ ID NO: 578392 - DNA, 25 bp, Homo sapien
cctgctaatccctggaatcgctaag

SEQ ID NO: 578393 - DNA, 25 bp, Homo sapien
ggtgagtcagccgtgccctgctaat

SEQ ID NO: 578394 - DNA, 25 bp, Homo sapien
tggaatcgctaagaaggctctggtg

SEQ ID NO: 578395 - DNA, 25 bp, Homo sapien
gtgagtcagccgtgccctgctaatc

SEQ ID NO: 578396 - DNA, 25 bp, Homo sapien
tttctccagctcatgtcagggaccc

SEQ ID NO: 578397 - DNA, 25 bp, Homo sapien
caaagcctgctgtgattgctggctc

SEQ ID NO: 578398 - DNA, 25 bp, Homo sapien
tcactccccaggtcgctaatggcaa

SEQ ID NO: 578399 - DNA, 25 bp, Homo sapien
gcaattgaagccattcgcatcactc

SEQ ID NO: 578400 - DNA, 25 bp, Homo sapien
cctctgcagttctcttcggcgcaag

SEQ ID NO: 578401 - DNA, 25 bp, Homo sapien
ttcggcgcaagaacagcttcatcag

SEQ ID NO: 578402 - DNA, 25 bp, Homo sapien
tgccctcccatactgattcctgcct

SEQ ID NO: 578403 - DNA, 25 bp, Homo sapien
tctcttcggcgcaagaacagcttca

SEQ ID NO: 578404 - DNA, 25 bp, Homo sapien
gtctcaatcccagggaactgagggg

SEQ ID NO: 578405 - DNA, 25 bp, Homo sapien
ctgtctcaatcccagggaactgagg

SEQ ID NO: 578406 - DNA, 25 bp, Homo sapien
tgtctcaatcccagggaactgaggg

SEQ ID NO: 578407 - DNA, 25 bp, Homo sapien
tgctgtctcaatcccagggaactga

SEQ ID NO: 578408 - DNA, 25 bp, Homo sapien
ttgcagggaaccaagaccatgccat

SEQ ID NO: 578409 - DNA, 25 bp, Homo sapien
ggaggttgcagggaaccaagaccat

SEQ ID NO: 578410 - DNA, 25 bp, Homo sapien
agggaaccaagaccatgccattgta

SEQ ID NO: 578411 - DNA, 25 bp, Homo sapien
tgcagggaaccaagaccatgccatt

SEQ ID NO: 578412 - DNA, 25 bp, Homo sapien
ttaaaatttcagtcatgaagtgaat

SEQ ID NO: 578413 - DNA, 25 bp, Homo sapien
cagctttgaagtctcagacttcggt

SEQ ID NO: 578414 - DNA, 25 bp, Homo sapien
tgaagtctcagacttcggtaaaggt

SEQ ID NO: 578415 - DNA, 25 bp, Homo sapien
taaaatttcagtcatgaagtgaatt

SEQ ID NO: 578416 - DNA, 25 bp, Homo sapien
gctggtgaacacatctttagaatga

SEQ ID NO: 578417 - DNA, 25 bp, Homo sapien
ggtgaacacatctttagaatgaata

SEQ ID NO: 578418 - DNA, 25 bp, Homo sapien
ctctctccacttgaagggcacatct

SEQ ID NO: 578419 - DNA, 25 bp, Homo sapien
tctccacttgaagggcacatctatt

SEQ ID NO: 578420 - DNA, 25 bp, Homo sapien
ttaactggacgcatgaggccatctt

SEQ ID NO: 578421 - DNA, 25 bp, Homo sapien
gccatcgagaaattgccagttcttt

SEQ ID NO: 578422 - DNA, 25 bp, Homo sapien
gggtcacatggatcttaactggacg

SEQ ID NO: 578423 - DNA, 25 bp, Homo sapien
catgcttagaaacaccatagttgac

SEQ ID NO: 578424 - DNA, 25 bp, Homo sapien
tcagtataagagctcaggggcagcc

SEQ ID NO: 578425 - DNA, 25 bp, Homo sapien
tcaggggcagccttctgggaagaac

SEQ ID NO: 578426 - DNA, 25 bp, Homo sapien
gaagaactagggtgctctctgcagc

SEQ ID NO: 578427 - DNA, 25 bp, Homo sapien
ttctgggaagaactagggtgctctc

SEQ ID NO: 578428 - DNA, 25 bp, Homo sapien
cacttgaccactctgttgttggtca

SEQ ID NO: 578429 - DNA, 25 bp, Homo sapien
tgttggtggcaccacttgaccactc

SEQ ID NO: 578430 - DNA, 25 bp, Homo sapien
actgatcagaacaagtggttgttgg

SEQ ID NO: 578431 - DNA, 25 bp, Homo sapien
caagtggttgttggtggcaccactt

SEQ ID NO: 578432 - DNA, 25 bp, Homo sapien
cctttggactcctgtgtggttctca

SEQ ID NO: 578433 - DNA, 25 bp, Homo sapien
ctgaacaaatggcatctcctggagt

SEQ ID NO: 578434 - DNA, 25 bp, Homo sapien
tctcctggagtaggctggcagcttg

SEQ ID NO: 578435 - DNA, 25 bp, Homo sapien
tatcatccctcaacccttttccagc

SEQ ID NO: 578436 - DNA, 25 bp, Homo sapien
tttactgtaatccttccaatgtctg

SEQ ID NO: 578437 - DNA, 25 bp, Homo sapien
tctactgagtttgcacgtgggtgtc

SEQ ID NO: 578438 - DNA, 25 bp, Homo sapien
tcatcctggtttggcatgtgctgct

SEQ ID NO: 578439 - DNA, 25 bp, Homo sapien
ggttctagaaggtcgtggcagccat

SEQ ID NO: 578440 - DNA, 25 bp, Homo sapien
cacatagggcctgttaactggaggg

SEQ ID NO: 578441 - DNA, 25 bp, Homo sapien
aaagcaggtggtaagccatctgtgg

SEQ ID NO: 578442 - DNA, 25 bp, Homo sapien
gaactaggaagcagccgtcttcccc

SEQ ID NO: 578443 - DNA, 25 bp, Homo sapien
agtgcctgctaaaggaaccctccgg

SEQ ID NO: 578444 - DNA, 25 bp, Homo sapien
tcaggctgagcaatgccccagaact

SEQ ID NO: 578445 - DNA, 25 bp, Homo sapien
tcccaggatgcagtatatttaaagc

SEQ ID NO: 578446 - DNA, 25 bp, Homo sapien
cagtgactttagtgtgcagccaaga

SEQ ID NO: 578447 - DNA, 25 bp, Homo sapien
cccaggagtggatttacaggtcaaa

SEQ ID NO: 578448 - DNA, 25 bp, Homo sapien
aagaatcttgatgccccggtaacac

SEQ ID NO: 578449 - DNA, 25 bp, Homo sapien
caggaaaggcataaggaaagtgtac

SEQ ID NO: 578450 - DNA, 25 bp, Homo sapien
gggtcattagtccaagtgccaaagg

SEQ ID NO: 578451 - DNA, 25 bp, Homo sapien
tcacagagagccaaaacctacatct

SEQ ID NO: 578452 - DNA, 25 bp, Homo sapien
tgtataaatcaacacccatcagctg

SEQ ID NO: 578453 - DNA, 25 bp, Homo sapien
agcggtggggagtggctgggcgcct

SEQ ID NO: 578454 - DNA, 25 bp, Homo sapien
ggtggggagtggctgggcgcctggg

SEQ ID NO: 578455 - DNA, 25 bp, Homo sapien
gtagcggtggggagtggctgggcgc

SEQ ID NO: 578456 - DNA, 25 bp, Homo sapien
tggggagtggctgggcgcctgggct

SEQ ID NO: 578457 - DNA, 25 bp, Homo sapien
cagctcattgcgcatgtctgcgtct

SEQ ID NO: 578458 - DNA, 25 bp, Homo sapien
ttgcgcatgtctgcgtcttcggcca

SEQ ID NO: 578459 - DNA, 25 bp, Homo sapien
cattgcgcatgtctgcgtcttcggc

SEQ ID NO: 578460 - DNA, 25 bp, Homo sapien
ctccagctcattgcgcatgtctgcg

SEQ ID NO: 578461 - DNA, 25 bp, Homo sapien
acctgaataagacaaaccactcagg

SEQ ID NO: 578462 - DNA, 25 bp, Homo sapien
cctgaataagacaaaccactcaggc

SEQ ID NO: 578463 - DNA, 25 bp, Homo sapien
agacaaaccactcaggccttcatct

SEQ ID NO: 578464 - DNA, 25 bp, Homo sapien
aataagacaaaccactcaggccttc

SEQ ID NO: 578465 - DNA, 25 bp, Homo sapien
tacatgatcagattccctaaagcaa

SEQ ID NO: 578466 - DNA, 25 bp, Homo sapien
ctccctgggccaggaacattaaatt

SEQ ID NO: 578467 - DNA, 25 bp, Homo sapien
gaaacacaaagggtctctgtcacat

SEQ ID NO: 578468 - DNA, 25 bp, Homo sapien
tactcagaggactaatttggcctcc

SEQ ID NO: 578469 - DNA, 25 bp, Homo sapien
ccagttgcagcatacgacgggtgct

SEQ ID NO: 578470 - DNA, 25 bp, Homo sapien
ctcttcaaccagttgcagcatacga

SEQ ID NO: 578471 - DNA, 25 bp, Homo sapien
gcatacgacgggtgctttccagcga

SEQ ID NO: 578472 - DNA, 25 bp, Homo sapien
tgcagcatacgacgggtgctttcca

SEQ ID NO: 578473 - DNA, 25 bp, Homo sapien
gctacatccacactggaatctaggg

SEQ ID NO: 578474 - DNA, 25 bp, Homo sapien
ttcccagaccagactacagaggtgg

SEQ ID NO: 578475 - DNA, 25 bp, Homo sapien
ggctatctggcaacttaaatacagc

SEQ ID NO: 578476 - DNA, 25 bp, Homo sapien
gcaactaggaaaggatgtatcagca

SEQ ID NO: 578477 - DNA, 25 bp, Homo sapien
aaagttgaaaaggagttagagagag

SEQ ID NO: 578478 - DNA, 25 bp, Homo sapien
aagttgaaaaggagttagagagaga

SEQ ID NO: 578479 - DNA, 25 bp, Homo sapien
caaagtcctgataccagcatcttta

SEQ ID NO: 578480 - DNA, 25 bp, Homo sapien
accaaagtcctgataccagcatctt

SEQ ID NO: 578481 - DNA, 25 bp, Homo sapien
taaccaaagtcctgataccagcatc

SEQ ID NO: 578482 - DNA, 25 bp, Homo sapien
aagtcctgataccagcatctttact

SEQ ID NO: 578483 - DNA, 25 bp, Homo sapien
acacatgtcaaagcgaccatctgcg

SEQ ID NO: 578484 - DNA, 25 bp, Homo sapien
aaagcgaccatctgcgtatgcacaa

SEQ ID NO: 578485 - DNA, 25 bp, Homo sapien
catgtgtaacacatgtcaaagcgac

SEQ ID NO: 578486 - DNA, 25 bp, Homo sapien
gaccatctgcgtatgcacaaataat

SEQ ID NO: 578487 - DNA, 25 bp, Homo sapien
ttttgcaccggaaatcaggtaccac

SEQ ID NO: 578488 - DNA, 25 bp, Homo sapien
cagatccagccaacaagtcacgtaa

SEQ ID NO: 578489 - DNA, 25 bp, Homo sapien
caggtaccactcttctattgggcac

SEQ ID NO: 578490 - DNA, 25 bp, Homo sapien
taagacttccattgctactgcagta

SEQ ID NO: 578491 - DNA, 25 bp, Homo sapien
tggacaacctggaatggcctggcct

SEQ ID NO: 578492 - DNA, 25 bp, Homo sapien
agttccagggctcagtacgtttcca

SEQ ID NO: 578493 - DNA, 25 bp, Homo sapien
gaatggctgtttcttgaggctcccg

SEQ ID NO: 578494 - DNA, 25 bp, Homo sapien
tgtgtaccatttaagaccggccaga

SEQ ID NO: 578495 - DNA, 25 bp, Homo sapien
caaggtaaatattcaagtggaggga

SEQ ID NO: 578496 - DNA, 25 bp, Homo sapien
tggcaatcccctacattcaagaaga

SEQ ID NO: 578497 - DNA, 25 bp, Homo sapien
caagtaattgctaatggcctctggg

SEQ ID NO: 578498 - DNA, 25 bp, Homo sapien
tatatatacagacaatagggatgcc

SEQ ID NO: 578499 - DNA, 25 bp, Homo sapien
taccgctgccctacacaggtatggg

SEQ ID NO: 578500 - DNA, 25 bp, Homo sapien
taacgctactaaggaaaggatctgc

SEQ ID NO: 578501 - DNA, 25 bp, Homo sapien
cattgttgaagactgctaccgctgc

SEQ ID NO: 578502 - DNA, 25 bp, Homo sapien
taagcatcctcaaccagataagggt

SEQ ID NO: 578503 - DNA, 25 bp, Homo sapien
gccttcttcgacacgatcgagttgt

SEQ ID NO: 578504 - DNA, 25 bp, Homo sapien
gatatggttcatgccttcttcgaca

SEQ ID NO: 578505 - DNA, 25 bp, Homo sapien
tgtcttggttgatatggttcatgcc

SEQ ID NO: 578506 - DNA, 25 bp, Homo sapien
gccacagcatttccctaaatctttt

SEQ ID NO: 578507 - DNA, 25 bp, Homo sapien
tgtccttattgatttggtccatccc

SEQ ID NO: 578508 - DNA, 25 bp, Homo sapien
ttattgatttggtccatcccttcct

SEQ ID NO: 578509 - DNA, 25 bp, Homo sapien
acacaaagcccgcagaattttccta

SEQ ID NO: 578510 - DNA, 25 bp, Homo sapien
gcagaattttcctaggtccgtcaaa

SEQ ID NO: 578511 - DNA, 25 bp, Homo sapien
gagatgggccttgggaaatcaaagc

SEQ ID NO: 578512 - DNA, 25 bp, Homo sapien
gatgaatgcattggagacggtattg

SEQ ID NO: 578513 - DNA, 25 bp, Homo sapien
ggtattgatctgttctgcatgccac

SEQ ID NO: 578514 - DNA, 25 bp, Homo sapien
gaagctttcactgtagtatgcctga

SEQ ID NO: 578515 - DNA, 25 bp, Homo sapien
ttcaacatttcagccagtgtacggg

SEQ ID NO: 578516 - DNA, 25 bp, Homo sapien
agtgtacgggtagatcttccaagga

SEQ ID NO: 578517 - DNA, 25 bp, Homo sapien
gagaacagttgaatgttttgtgatg

SEQ ID NO: 578518 - DNA, 25 bp, Homo sapien
tgtgatgttgtgcatgcaaaatcta

SEQ ID NO: 578519 - DNA, 25 bp, Homo sapien
catgttgggcaatccactcatgcat

SEQ ID NO: 578520 - DNA, 25 bp, Homo sapien
caagagcatgcagctgaggtttcca

SEQ ID NO: 578521 - DNA, 25 bp, Homo sapien
gaggtttccagttagctagattcca

SEQ ID NO: 578522 - DNA, 25 bp, Homo sapien
ttttttgcaatatgagcccctcccc

SEQ ID NO: 578523 - DNA, 25 bp, Homo sapien
ggaattcgtaggagccatcatttca

SEQ ID NO: 578524 - DNA, 25 bp, Homo sapien
tagggtctcttgtgcattaaggaaa

SEQ ID NO: 578525 - DNA, 25 bp, Homo sapien
tagaacatcagaatccatcccaggg

SEQ ID NO: 578526 - DNA, 25 bp, Homo sapien
ttacacacaatagggaacacctcag

SEQ ID NO: 578527 - DNA, 25 bp, Homo sapien
aaacatgccgagacagggcgaagcc

SEQ ID NO: 578528 - DNA, 25 bp, Homo sapien
agggcgaagccctcagagagtccag

SEQ ID NO: 578529 - DNA, 25 bp, Homo sapien
atcactgccgtacatctaccatcgt

SEQ ID NO: 578530 - DNA, 25 bp, Homo sapien
catcgtcccttgaaacatgccgaga

SEQ ID NO: 578531 - DNA, 25 bp, Homo sapien
aatcaagtctataatgccgcaggcc

SEQ ID NO: 578532 - DNA, 25 bp, Homo sapien
ttcttctttcgccagaggaccacag

SEQ ID NO: 578533 - DNA, 25 bp, Homo sapien
aattaattgcaccaaagggccatgg

SEQ ID NO: 578534 - DNA, 25 bp, Homo sapien
cattctcgaaaaaggcactagcagg

SEQ ID NO: 578535 - DNA, 25 bp, Homo sapien
tcgtccactacacgagcaggctggc

SEQ ID NO: 578536 - DNA, 25 bp, Homo sapien
tttgtaagcatcacttgatttaagc

SEQ ID NO: 578537 - DNA, 25 bp, Homo sapien
tcctgattattgccccaggcttttt

SEQ ID NO: 578538 - DNA, 25 bp, Homo sapien
ggccaccactccgtcctgattattg

SEQ ID NO: 578539 - DNA, 25 bp, Homo sapien
ctgcggatgaagccgccactgatgg

SEQ ID NO: 578540 - DNA, 25 bp, Homo sapien
ccccaggactatggtggtaacaact

SEQ ID NO: 578541 - DNA, 25 bp, Homo sapien
tgatagttccttgcccacagtcgta

SEQ ID NO: 578542 - DNA, 25 bp, Homo sapien
cacagtcgtaactattgctgggttc

SEQ ID NO: 578543 - DNA, 25 bp, Homo sapien
tttcagtaggctttggctaatggcc

SEQ ID NO: 578544 - DNA, 25 bp, Homo sapien
gatgatgccgctcacctgctctagg

SEQ ID NO: 578545 - DNA, 25 bp, Homo sapien
ccatgtgacggaggttcccgatgat

SEQ ID NO: 578546 - DNA, 25 bp, Homo sapien
tgcccatatccagggccatgtgacg

SEQ ID NO: 578547 - DNA, 25 bp, Homo sapien
gattctgtgtatcgatctcattgcc

SEQ ID NO: 578548 - DNA, 25 bp, Homo sapien
ttctccatgatcctgtcgatctggc

SEQ ID NO: 578549 - DNA, 25 bp, Homo sapien
cttctccatgatcctgtcgatctgg

SEQ ID NO: 578550 - DNA, 25 bp, Homo sapien
tcatttcagaagtgactcgcagtag

SEQ ID NO: 578551 - DNA, 25 bp, Homo sapien
agtgactcgcagtagggacttgctg

SEQ ID NO: 578552 - DNA, 25 bp, Homo sapien
tcgcagtagggacttgctgactgcc

SEQ ID NO: 578553 - DNA, 25 bp, Homo sapien
tcagaagtgactcgcagtagggact

SEQ ID NO: 578554 - DNA, 25 bp, Homo sapien
ggaaccctaattggctttgatgcat

SEQ ID NO: 578555 - DNA, 25 bp, Homo sapien
tgcatctgcaagtaaagtgggtcca

SEQ ID NO: 578556 - DNA, 25 bp, Homo sapien
tagtaaagacgctccttctggaacc

SEQ ID NO: 578557 - DNA, 25 bp, Homo sapien
tgtctttatagtacactgggcgtag

SEQ ID NO: 578558 - DNA, 25 bp, Homo sapien
tatactgtaggattgaaaccatggc

SEQ ID NO: 578559 - DNA, 25 bp, Homo sapien
tctgttggaccaagttgaattacac

SEQ ID NO: 578560 - DNA, 25 bp, Homo sapien
taataattttccctaccagagagcg

SEQ ID NO: 578561 - DNA, 25 bp, Homo sapien
tacagtggacccttggacatcatgg

SEQ ID NO: 578562 - DNA, 25 bp, Homo sapien
tccttggtcagcatgggccatcctt

SEQ ID NO: 578563 - DNA, 25 bp, Homo sapien
tctgggtccgggtccaatgcttcct

SEQ ID NO: 578564 - DNA, 25 bp, Homo sapien
gctatggctctatttgaatgtgacc

SEQ ID NO: 578565 - DNA, 25 bp, Homo sapien
tcttcccagaatgacggctatggct

SEQ ID NO: 578566 - DNA, 25 bp, Homo sapien
tcatcaattctggttttgttggaat

SEQ ID NO: 578567 - DNA, 25 bp, Homo sapien
ttgttgcacgttggttggcctcatc

SEQ ID NO: 578568 - DNA, 25 bp, Homo sapien
acgttggttggcctcatcaattctg

SEQ ID NO: 578569 - DNA, 25 bp, Homo sapien
catctttgttgcacgttggttggcc

SEQ ID NO: 578570 - DNA, 25 bp, Homo sapien
gaaggagctatcttgcccgacagca

SEQ ID NO: 578571 - DNA, 25 bp, Homo sapien
gacactcaaaggaccgtggcagtaa

SEQ ID NO: 578572 - DNA, 25 bp, Homo sapien
cacaaagtattgttgggaagctgac

SEQ ID NO: 578573 - DNA, 25 bp, Homo sapien
ggagttagagccaccaaatgaccac

SEQ ID NO: 578574 - DNA, 25 bp, Homo sapien
gaagattgagctttcacagtgttcc

SEQ ID NO: 578575 - DNA, 25 bp, Homo sapien
tgagagtccgacaagagaaaaggac

SEQ ID NO: 578576 - DNA, 25 bp, Homo sapien
tgtagaagggtcctctgccagtgcc

SEQ ID NO: 578577 - DNA, 25 bp, Homo sapien
gaaaaggactctgttactgggatct

SEQ ID NO: 578578 - DNA, 25 bp, Homo sapien
ttatttttaggagccgcatgatttc

SEQ ID NO: 578579 - DNA, 25 bp, Homo sapien
ttttaggagccgcatgatttccctc

SEQ ID NO: 578580 - DNA, 25 bp, Homo sapien
ttaggagccgcatgatttccctcat

SEQ ID NO: 578581 - DNA, 25 bp, Homo sapien
ttgtcattatttttaggagccgcat

SEQ ID NO: 578582 - DNA, 25 bp, Homo sapien
gattctgcagctttgcaaagcagcc

SEQ ID NO: 578583 - DNA, 25 bp, Homo sapien
ttttcttcaagaactcaagccagag

SEQ ID NO: 578584 - DNA, 25 bp, Homo sapien
aacatcttcacttttgcaatataat

SEQ ID NO: 578585 - DNA, 25 bp, Homo sapien
gtgcagaaggccatgaaacatcttc

SEQ ID NO: 578586 - DNA, 25 bp, Homo sapien
cagaattcccaatatagggaatagc

SEQ ID NO: 578587 - DNA, 25 bp, Homo sapien
acctgctattccagtgggattaatg

SEQ ID NO: 578588 - DNA, 25 bp, Homo sapien
cagtgggattaatggtgtcttttca

SEQ ID NO: 578589 - DNA, 25 bp, Homo sapien
ttcaaataagtttggattcctgatc

SEQ ID NO: 578590 - DNA, 25 bp, Homo sapien
tctgcacaaggtattggtgacctga

SEQ ID NO: 578591 - DNA, 25 bp, Homo sapien
cactgggtcacattccagctgtgtt

SEQ ID NO: 578592 - DNA, 25 bp, Homo sapien
tgttcaggctctgtgggactcccta

SEQ ID NO: 578593 - DNA, 25 bp, Homo sapien
tcaggtcttaaccaaggaagcctaa

SEQ ID NO: 578594 - DNA, 25 bp, Homo sapien
tgatctctcaacctaacacagtctt

SEQ ID NO: 578595 - DNA, 25 bp, Homo sapien
gtgtttaaccactcttatggccata

SEQ ID NO: 578596 - DNA, 25 bp, Homo sapien
tgagggtcagagtcctgtagacagc

SEQ ID NO: 578597 - DNA, 25 bp, Homo sapien
tctccccagtgtgttgagttgcatt

SEQ ID NO: 578598 - DNA, 25 bp, Homo sapien
cgtgctggaagtgtgccaaaactca

SEQ ID NO: 578599 - DNA, 25 bp, Homo sapien
aggaaatcaacagactggtttaact

SEQ ID NO: 578600 - DNA, 25 bp, Homo sapien
ggcattgtctgacccatgatcttgg

SEQ ID NO: 578601 - DNA, 25 bp, Homo sapien
ggagctccgctgattcatttcttaa

SEQ ID NO: 578602 - DNA, 25 bp, Homo sapien
tgggtctagcttgatccgattctgt

SEQ ID NO: 578603 - DNA, 25 bp, Homo sapien
gatccgattctgtgactgcggcagg

SEQ ID NO: 578604 - DNA, 25 bp, Homo sapien
caatgcaggccggtgggtctagctt

SEQ ID NO: 578605 - DNA, 25 bp, Homo sapien
gactgcggcaggttactgggcagct

SEQ ID NO: 578606 - DNA, 25 bp, Homo sapien
gtagtgattttactgctgtagaaac

SEQ ID NO: 578607 - DNA, 25 bp, Homo sapien
tgtagtgattttactgctgtagaaa

SEQ ID NO: 578608 - DNA, 25 bp, Homo sapien
ctgtagtgattttactgctgtagaa

SEQ ID NO: 578609 - DNA, 25 bp, Homo sapien
aattaagatgcagacatttaggctg

SEQ ID NO: 578610 - DNA, 25 bp, Homo sapien
ataattaagatgcagacatttaggc

SEQ ID NO: 578611 - DNA, 25 bp, Homo sapien
taattaagatgcagacatttaggct

SEQ ID NO: 578612 - DNA, 25 bp, Homo sapien
attaagatgcagacatttaggctgt

SEQ ID NO: 578613 - DNA, 25 bp, Homo sapien
gaagatctggatcttatacggtata

SEQ ID NO: 578614 - DNA, 25 bp, Homo sapien
catttgaagatctggatcttatacg

SEQ ID NO: 578615 - DNA, 25 bp, Homo sapien
tctggatcttatacggtataattgc

SEQ ID NO: 578616 - DNA, 25 bp, Homo sapien
tcttatacggtataattgcaggaga

SEQ ID NO: 578617 - DNA, 25 bp, Homo sapien
atatcagtcacaatatgtgtgtata

SEQ ID NO: 578618 - DNA, 25 bp, Homo sapien
tgcattcactttcctgttcttgtgt

SEQ ID NO: 578619 - DNA, 25 bp, Homo sapien
ttttgcaatactgcattcactttcc

SEQ ID NO: 578620 - DNA, 25 bp, Homo sapien
gatgtacttgaaattttgcaatact

SEQ ID NO: 578621 - DNA, 25 bp, Homo sapien
gcggttgcattgctatgtcttaaca

SEQ ID NO: 578622 - DNA, 25 bp, Homo sapien
tgacagttttggcatcattccagat

SEQ ID NO: 578623 - DNA, 25 bp, Homo sapien
cttagagaaatgtgcagttgtgata

SEQ ID NO: 578624 - DNA, 25 bp, Homo sapien
tccctctgtagagttcaatcattac

SEQ ID NO: 578625 - DNA, 25 bp, Homo sapien
ttctcagattcggagttacagtcct

SEQ ID NO: 578626 - DNA, 25 bp, Homo sapien
ttgtttctcagattcggagttacag

SEQ ID NO: 578627 - DNA, 25 bp, Homo sapien
tcaaacttctccttagttcactcaa

SEQ ID NO: 578628 - DNA, 25 bp, Homo sapien
ttcaaacttctccttagttcactca

SEQ ID NO: 578629 - DNA, 25 bp, Homo sapien
gagaacatcgagctgttttctcttt

SEQ ID NO: 578630 - DNA, 25 bp, Homo sapien
cagagaacatcgagctgttttctct

SEQ ID NO: 578631 - DNA, 25 bp, Homo sapien
gtgcagcaaacggaggatctttgtt

SEQ ID NO: 578632 - DNA, 25 bp, Homo sapien
caaacggaggatctttgttacttct

SEQ ID NO: 578633 - DNA, 25 bp, Homo sapien
tggaggcctcagtaggcttaccctg

SEQ ID NO: 578634 - DNA, 25 bp, Homo sapien
ggaggcctcagtaggcttaccctgg

SEQ ID NO: 578635 - DNA, 25 bp, Homo sapien
ggcctcagtaggcttaccctggaat

SEQ ID NO: 578636 - DNA, 25 bp, Homo sapien
gaggcctcagtaggcttaccctgga

SEQ ID NO: 578637 - DNA, 25 bp, Homo sapien
catcggaagagtgttgcacatcaat

SEQ ID NO: 578638 - DNA, 25 bp, Homo sapien
tcatcggaagagtgttgcacatcaa

SEQ ID NO: 578639 - DNA, 25 bp, Homo sapien
cttcatcggaagagtgttgcacatc

SEQ ID NO: 578640 - DNA, 25 bp, Homo sapien
ttcatcggaagagtgttgcacatca

SEQ ID NO: 578641 - DNA, 25 bp, Homo sapien
agtgcatctcgtagcaccaactgtt

SEQ ID NO: 578642 - DNA, 25 bp, Homo sapien
aagtgcatctcgtagcaccaactgt

SEQ ID NO: 578643 - DNA, 25 bp, Homo sapien
tctcctctttatttgtcaaactggg

SEQ ID NO: 578644 - DNA, 25 bp, Homo sapien
aaaatattacaggctgaaggaaggc

SEQ ID NO: 578645 - DNA, 25 bp, Homo sapien
acagtgggctgaaaatattacaggc

SEQ ID NO: 578646 - DNA, 25 bp, Homo sapien
attgagacaaggtaaacagtgggct

SEQ ID NO: 578647 - DNA, 25 bp, Homo sapien
aaggtactatttatacttaaggcag

SEQ ID NO: 578648 - DNA, 25 bp, Homo sapien
gactgcaaagcttagtggcctacag

SEQ ID NO: 578649 - DNA, 25 bp, Homo sapien
agccaggaagaactcaactggtctt

SEQ ID NO: 578650 - DNA, 25 bp, Homo sapien
tttcttaagaagcacacgtcgtcca

SEQ ID NO: 578651 - DNA, 25 bp, Homo sapien
cctgaccttggactgtttgactgca

SEQ ID NO: 578652 - DNA, 25 bp, Homo sapien
gccaagcccgtgcatccaagaatag

SEQ ID NO: 578653 - DNA, 25 bp, Homo sapien
taatgagtgctcaagccacttaggg

SEQ ID NO: 578654 - DNA, 25 bp, Homo sapien
ccaagaatagtcaggaccattcgtc

SEQ ID NO: 578655 - DNA, 25 bp, Homo sapien
tccttgtgatatgacccacgtagtc

SEQ ID NO: 578656 - DNA, 25 bp, Homo sapien
tactgatcctaatcatttcccaagc

SEQ ID NO: 578657 - DNA, 25 bp, Homo sapien
gactattatatgtacagtgtgatac

SEQ ID NO: 578658 - DNA, 25 bp, Homo sapien
tgaaaagcccttccatactgatcct

SEQ ID NO: 578659 - DNA, 25 bp, Homo sapien
ttgtaacgtgaaaagcccttccata

SEQ ID NO: 578660 - DNA, 25 bp, Homo sapien
ttgctgtagcactaaaggcccattc

SEQ ID NO: 578661 - DNA, 25 bp, Homo sapien
cccattcatctaggtatctgatctg

SEQ ID NO: 578662 - DNA, 25 bp, Homo sapien
ggtatctgatctggaacaatctggc

SEQ ID NO: 578663 - DNA, 25 bp, Homo sapien
tgtagcactaaaggcccattcatct

SEQ ID NO: 578664 - DNA, 25 bp, Homo sapien
gctgtggaccttgtagggatgaccc

SEQ ID NO: 578665 - DNA, 25 bp, Homo sapien
tctaaggtcatgctcgtcttcctcc

SEQ ID NO: 578666 - DNA, 25 bp, Homo sapien
tgccagctacgtgaaagcagccgcg

SEQ ID NO: 578667 - DNA, 25 bp, Homo sapien
tagagacgttgtgcagcgtggccct

SEQ ID NO: 578668 - DNA, 25 bp, Homo sapien
tgccgccttctacgccgaacctgtg

SEQ ID NO: 578669 - DNA, 25 bp, Homo sapien
ctgcgctgccgccttctacgccgaa

SEQ ID NO: 578670 - DNA, 25 bp, Homo sapien
gccttctacgccgaacctgtgactc

SEQ ID NO: 578671 - DNA, 25 bp, Homo sapien
gctgccgccttctacgccgaacctg

SEQ ID NO: 578672 - DNA, 25 bp, Homo sapien
taaatgttgcggtcggcacggatgc

SEQ ID NO: 578673 - DNA, 25 bp, Homo sapien
tggaggagtggcgcctcaccacgct

SEQ ID NO: 578674 - DNA, 25 bp, Homo sapien
tctgaaatagctgccgatggtaaat

SEQ ID NO: 578675 - DNA, 25 bp, Homo sapien
cggcgaggaggtcttcccgccggtg

SEQ ID NO: 578676 - DNA, 25 bp, Homo sapien
ttttccggtgacggccgctgttggc

SEQ ID NO: 578677 - DNA, 25 bp, Homo sapien
caatttgctggaatatacgctgaat

SEQ ID NO: 578678 - DNA, 25 bp, Homo sapien
tgccctcgcgcgacgcgaaggttgt

SEQ ID NO: 578679 - DNA, 25 bp, Homo sapien
aaggttgtcgggatccgcggcagca

SEQ ID NO: 578680 - DNA, 25 bp, Homo sapien
gttttgttactgtccagggtcactg

SEQ ID NO: 578681 - DNA, 25 bp, Homo sapien
tagtacctggctgtggaaactcgga

SEQ ID NO: 578682 - DNA, 25 bp, Homo sapien
gaaactcggactacacaggtagccg

SEQ ID NO: 578683 - DNA, 25 bp, Homo sapien
aggtagccggaactgcagccaacct

SEQ ID NO: 578684 - DNA, 25 bp, Homo sapien
caagagcagcctgtataacacagca

SEQ ID NO: 578685 - DNA, 25 bp, Homo sapien
attcaagagcagcctgtataacaca

SEQ ID NO: 578686 - DNA, 25 bp, Homo sapien
agagcagcctgtataacacagcaag

SEQ ID NO: 578687 - DNA, 25 bp, Homo sapien
tcaagagcagcctgtataacacagc

SEQ ID NO: 578688 - DNA, 25 bp, Homo sapien
tctatgtccacgatattgtaatagc

SEQ ID NO: 578689 - DNA, 25 bp, Homo sapien
agccaccgtactgggtctggaataa

SEQ ID NO: 578690 - DNA, 25 bp, Homo sapien
tagaagataaatcaaaagtgacaca

SEQ ID NO: 578691 - DNA, 25 bp, Homo sapien
ggctaaagcgcagttgcactatctt

SEQ ID NO: 578692 - DNA, 25 bp, Homo sapien
ttattgattccacagtaactacaga

SEQ ID NO: 578693 - DNA, 25 bp, Homo sapien
ggcttattgattccacagtaactac

SEQ ID NO: 578694 - DNA, 25 bp, Homo sapien
gcttattgattccacagtaactaca

SEQ ID NO: 578695 - DNA, 25 bp, Homo sapien
tattgattccacagtaactacagac

SEQ ID NO: 578696 - DNA, 25 bp, Homo sapien
tttaacagcaaatttcttagatgcc

SEQ ID NO: 578697 - DNA, 25 bp, Homo sapien
taacagcaaatttcttagatgccat

SEQ ID NO: 578698 - DNA, 25 bp, Homo sapien
ttaacagcaaatttcttagatgcca

SEQ ID NO: 578699 - DNA, 25 bp, Homo sapien
catttgcttgtagaaaaggcaggaa

SEQ ID NO: 578700 - DNA, 25 bp, Homo sapien
taacccaatgataccagtagatact

SEQ ID NO: 578701 - DNA, 25 bp, Homo sapien
tataggttgaggagacatacacggg

SEQ ID NO: 578702 - DNA, 25 bp, Homo sapien
gcagactgcctaatactatgcacag

SEQ ID NO: 578703 - DNA, 25 bp, Homo sapien
caacagtatttagggaagctcaagg

SEQ ID NO: 578704 - DNA, 25 bp, Homo sapien
tctttctcacgaagagcattgtggg

SEQ ID NO: 578705 - DNA, 25 bp, Homo sapien
tgtcaaaggaaaggtcaagagcgct

SEQ ID NO: 578706 - DNA, 25 bp, Homo sapien
tactcctaagacaagccagtcagtg

SEQ ID NO: 578707 - DNA, 25 bp, Homo sapien
gggcttctacacacagacctagtaa

SEQ ID NO: 578708 - DNA, 25 bp, Homo sapien
cagagtcttccgtggctataggtcg

SEQ ID NO: 578709 - DNA, 25 bp, Homo sapien
tgtgttgcgtactcttccctatagg

SEQ ID NO: 578710 - DNA, 25 bp, Homo sapien
tccctataggcagtggatcacagcc

SEQ ID NO: 578711 - DNA, 25 bp, Homo sapien
ataagccttgtgcaacctcccagga

SEQ ID NO: 578712 - DNA, 25 bp, Homo sapien
gatgagaggcgttccttcagcttgg

SEQ ID NO: 578713 - DNA, 25 bp, Homo sapien
gcccagtagctgaacataagccttg

SEQ ID NO: 578714 - DNA, 25 bp, Homo sapien
taagttcacagtcgggctaaagaag

SEQ ID NO: 578715 - DNA, 25 bp, Homo sapien
tggttcagataaattacagcccaaa

SEQ ID NO: 578716 - DNA, 25 bp, Homo sapien
tatcaagaaaaaccccattaagtga

SEQ ID NO: 578717 - DNA, 25 bp, Homo sapien
taacaaaacatctaggattctccta

SEQ ID NO: 578718 - DNA, 25 bp, Homo sapien
gattctcctacttagcacccacttg

SEQ ID NO: 578719 - DNA, 25 bp, Homo sapien
atacgttaatttattgaccaagaca

SEQ ID NO: 578720 - DNA, 25 bp, Homo sapien
caaaaaatgactgaccatggtaagg

SEQ ID NO: 578721 - DNA, 25 bp, Homo sapien
ccatggtaaggacataaaccaaagt

SEQ ID NO: 578722 - DNA, 25 bp, Homo sapien
catggtaaggacataaaccaaagtt

SEQ ID NO: 578723 - DNA, 25 bp, Homo sapien
ggaaaagtcacctgatgcagaaaag

SEQ ID NO: 578724 - DNA, 25 bp, Homo sapien
gacctcttcctggactaggacagga

SEQ ID NO: 578725 - DNA, 25 bp, Homo sapien
gaaaagtcacctgatgcagaaaagt

SEQ ID NO: 578726 - DNA, 25 bp, Homo sapien
cctggactaggacaggatagaaatc

SEQ ID NO: 578727 - DNA, 25 bp, Homo sapien
catacttaactcctggggttagcag

SEQ ID NO: 578728 - DNA, 25 bp, Homo sapien
ctgtttcctaagataggccatatat

SEQ ID NO: 578729 - DNA, 25 bp, Homo sapien
acaggcactactcccaaaaagtaag

SEQ ID NO: 578730 - DNA, 25 bp, Homo sapien
acacaggcactactcccaaaaagta

SEQ ID NO: 578731 - DNA, 25 bp, Homo sapien
gagatttctcttaaccagcaggcct

SEQ ID NO: 578732 - DNA, 25 bp, Homo sapien
caatctcccagcttgggttctggag

SEQ ID NO: 578733 - DNA, 25 bp, Homo sapien
gagccagacagtgtaggcctgaatc

SEQ ID NO: 578734 - DNA, 25 bp, Homo sapien
taggatgagaggtatgtcttccacc

SEQ ID NO: 578735 - DNA, 25 bp, Homo sapien
tgtcctcgctagaagccacaggtgt

SEQ ID NO: 578736 - DNA, 25 bp, Homo sapien
gcctaaagtataagagtccagagac

SEQ ID NO: 578737 - DNA, 25 bp, Homo sapien
cagtgataggcacagctaggactcc

SEQ ID NO: 578738 - DNA, 25 bp, Homo sapien
gctgtgctgcatactgactactctg

SEQ ID NO: 578739 - DNA, 25 bp, Homo sapien
ttgcacttttctttgaatgagtagc

SEQ ID NO: 578740 - DNA, 25 bp, Homo sapien
aatgagtagcttgcaaaagctccaa

SEQ ID NO: 578741 - DNA, 25 bp, Homo sapien
tgcacttttctttgaatgagtagct

SEQ ID NO: 578742 - DNA, 25 bp, Homo sapien
gtcctgatgccaaaacgaacttaag

SEQ ID NO: 578743 - DNA, 25 bp, Homo sapien
taatgcattgtacagagggtgatcc

SEQ ID NO: 578744 - DNA, 25 bp, Homo sapien
agggtgatccttccgtgctacaaga

SEQ ID NO: 578745 - DNA, 25 bp, Homo sapien
gggccaggaggcatattcaccggtt

SEQ ID NO: 578746 - DNA, 25 bp, Homo sapien
aaatggccaaatccaaattgtccac

SEQ ID NO: 578747 - DNA, 25 bp, Homo sapien
aattgcttaacctgacatacagcgg

SEQ ID NO: 578748 - DNA, 25 bp, Homo sapien
agagagtcctgtgttccaaagttgg

SEQ ID NO: 578749 - DNA, 25 bp, Homo sapien
catacagcggatgcaacagggtggt

SEQ ID NO: 578750 - DNA, 25 bp, Homo sapien
agtccactttacaaaccccatgagg

SEQ ID NO: 578751 - DNA, 25 bp, Homo sapien
tgcgagccatccctgtaactgtgta

SEQ ID NO: 578752 - DNA, 25 bp, Homo sapien
taactgtgtaatcaatcccaaacgg

SEQ ID NO: 578753 - DNA, 25 bp, Homo sapien
ctgggcactgtggaacaaaaacaga

SEQ ID NO: 578754 - DNA, 25 bp, Homo sapien
gagaactagaatcttcacgctgcca

SEQ ID NO: 578755 - DNA, 25 bp, Homo sapien
gcctgttcacaatatggattcccaa

SEQ ID NO: 578756 - DNA, 25 bp, Homo sapien
gtgctggctcggcagttgagacttc

SEQ ID NO: 578757 - DNA, 25 bp, Homo sapien
cagtaggtaggcagagtgtcagcct

SEQ ID NO: 578758 - DNA, 25 bp, Homo sapien
caacaggaaagggtactacaatcag

SEQ ID NO: 578759 - DNA, 25 bp, Homo sapien
cccaatcaagggtaagccaacagga

SEQ ID NO: 578760 - DNA, 25 bp, Homo sapien
tttgatgcaccaacctagtgagggt

SEQ ID NO: 578761 - DNA, 25 bp, Homo sapien
gcatgtggctgcactatgtcccaat

SEQ ID NO: 578762 - DNA, 25 bp, Homo sapien
tgacttttcggactcccttggtgga

SEQ ID NO: 578763 - DNA, 25 bp, Homo sapien
taagagccattctacattcaggttc

SEQ ID NO: 578764 - DNA, 25 bp, Homo sapien
aggttcaagttcacccacagtgccc

SEQ ID NO: 578765 - DNA, 25 bp, Homo sapien
tcagggtcttcaggctttctcaaaa

SEQ ID NO: 578766 - DNA, 25 bp, Homo sapien
ccatactagctataaaacttgtcac

SEQ ID NO: 578767 - DNA, 25 bp, Homo sapien
tttaaagttatcctctctcctgtcc

SEQ ID NO: 578768 - DNA, 25 bp, Homo sapien
cagccctattcaccacattttaaag

SEQ ID NO: 578769 - DNA, 25 bp, Homo sapien
ggtgtgttaaagatctctaagtgga

SEQ ID NO: 578770 - DNA, 25 bp, Homo sapien
cagggattctcaacagggtcccaca

SEQ ID NO: 578771 - DNA, 25 bp, Homo sapien
ctgggcagcctgattccatgtctga

SEQ ID NO: 578772 - DNA, 25 bp, Homo sapien
agatacggagagctcactgtagggc

SEQ ID NO: 578773 - DNA, 25 bp, Homo sapien
ccattccaacacagatacggagagc

SEQ ID NO: 578774 - DNA, 25 bp, Homo sapien
agtaccagagggagcggagtgacag

SEQ ID NO: 578775 - DNA, 25 bp, Homo sapien
aagtaccagagggagcggagtgaca

SEQ ID NO: 578776 - DNA, 25 bp, Homo sapien
ccaagtaccagagggagcggagtga

SEQ ID NO: 578777 - DNA, 25 bp, Homo sapien
gtaccagagggagcggagtgacagc

SEQ ID NO: 578778 - DNA, 25 bp, Homo sapien
agatgtagaaaggtccccacattct

SEQ ID NO: 578779 - DNA, 25 bp, Homo sapien
tgcactcattgatcatctgaaacac

SEQ ID NO: 578780 - DNA, 25 bp, Homo sapien
agaaaggtccccacattctctcatg

SEQ ID NO: 578781 - DNA, 25 bp, Homo sapien
ctctggagcagactcagaactctta

SEQ ID NO: 578782 - DNA, 25 bp, Homo sapien
ggatgtccaagcatcccggcagcag

SEQ ID NO: 578783 - DNA, 25 bp, Homo sapien
cagcagttggaagacgtgaagcatc

SEQ ID NO: 578784 - DNA, 25 bp, Homo sapien
caaaaggattggctaggacggtaca

SEQ ID NO: 578785 - DNA, 25 bp, Homo sapien
aataggtcagtactaggtaggctcc

SEQ ID NO: 578786 - DNA, 25 bp, Homo sapien
ctgaaagacattaatggcagagtca

SEQ ID NO: 578787 - DNA, 25 bp, Homo sapien
aaagacattaatggcagagtcagtg

SEQ ID NO: 578788 - DNA, 25 bp, Homo sapien
cagagtcagtgtctgtgcggctcat

SEQ ID NO: 578789 - DNA, 25 bp, Homo sapien
gcagagtcagtgtctgtgcggctca

SEQ ID NO: 578790 - DNA, 25 bp, Homo sapien
gtatctttgtttgaaccttgtggca

SEQ ID NO: 578791 - DNA, 25 bp, Homo sapien
tcagaaaaccagcttgtatctttgt

SEQ ID NO: 578792 - DNA, 25 bp, Homo sapien
tccacgaggacagcaaaattcccac

SEQ ID NO: 578793 - DNA, 25 bp, Homo sapien
gatatgaagatccacgaggacagca

SEQ ID NO: 578794 - DNA, 25 bp, Homo sapien
ctgaactcttgaatcaatggtttct

SEQ ID NO: 578795 - DNA, 25 bp, Homo sapien
gggattggatcttgtgaattctgca

SEQ ID NO: 578796 - DNA, 25 bp, Homo sapien
cttttaaggacaagggattggatct

SEQ ID NO: 578797 - DNA, 25 bp, Homo sapien
tggcctgtgctgtttgcgaacttcc

SEQ ID NO: 578798 - DNA, 25 bp, Homo sapien
acaataccagcctgtgcccggtgat

SEQ ID NO: 578799 - DNA, 25 bp, Homo sapien
gatgcccagagtacatgatctgtct

SEQ ID NO: 578800 - DNA, 25 bp, Homo sapien
ccctgcattccccagaactatctgc

SEQ ID NO: 578801 - DNA, 25 bp, Homo sapien
tctgcatgccgatctgtgtgacaat

SEQ ID NO: 578802 - DNA, 25 bp, Homo sapien
aagcctggctagaaaggactgtctc

SEQ ID NO: 578803 - DNA, 25 bp, Homo sapien
gtaggtggaagatctaacccagagc

SEQ ID NO: 578804 - DNA, 25 bp, Homo sapien
ggctaagaagcctggctagaaagga

SEQ ID NO: 578805 - DNA, 25 bp, Homo sapien
tctcagggatctgccatgggtaggt

SEQ ID NO: 578806 - DNA, 25 bp, Homo sapien
cccaacatggtggtaatgtgcccca

SEQ ID NO: 578807 - DNA, 25 bp, Homo sapien
gaacaccttggtaattcgtccttga

SEQ ID NO: 578808 - DNA, 25 bp, Homo sapien
tgttgacgaagagagagaacacctt

SEQ ID NO: 578809 - DNA, 25 bp, Homo sapien
ccacagaacgctgcttgggaggtga

SEQ ID NO: 578810 - DNA, 25 bp, Homo sapien
ttgggtatcaaaggccaccatcaag

SEQ ID NO: 578811 - DNA, 25 bp, Homo sapien
tatacaaacggccagtaagtacttg

SEQ ID NO: 578812 - DNA, 25 bp, Homo sapien
gaaaatagaagcctcatacactgct

SEQ ID NO: 578813 - DNA, 25 bp, Homo sapien
aatgctgcagctacttggaaaacag

SEQ ID NO: 578814 - DNA, 25 bp, Homo sapien
tctaccaccagcacctacttctgga

SEQ ID NO: 578815 - DNA, 25 bp, Homo sapien
cacactgctactctgcttgtttgca

SEQ ID NO: 578816 - DNA, 25 bp, Homo sapien
acttctggacacactgctactctgc

SEQ ID NO: 578817 - DNA, 25 bp, Homo sapien
gaagccaaatatcactacttttcag

SEQ ID NO: 578818 - DNA, 25 bp, Homo sapien
tcagggcctttcaagatgatacatt

SEQ ID NO: 578819 - DNA, 25 bp, Homo sapien
gatctaataggtgattgtaaagctc

SEQ ID NO: 578820 - DNA, 25 bp, Homo sapien
tattaatatagaccctcttccaaag

SEQ ID NO: 578821 - DNA, 25 bp, Homo sapien
tgtaaagctcttatcttccttaagc

SEQ ID NO: 578822 - DNA, 25 bp, Homo sapien
tacattgttagcgtgaaattagaag

SEQ ID NO: 578823 - DNA, 25 bp, Homo sapien
gcttaaacagtatttactagtaata

SEQ ID NO: 578824 - DNA, 25 bp, Homo sapien
atataaatacctaatgaacaaatct

SEQ ID NO: 578825 - DNA, 25 bp, Homo sapien
tttcagaagcctacgtaaaagagtc

SEQ ID NO: 578826 - DNA, 25 bp, Homo sapien
tggggcgaactgtcctggtaaaata

SEQ ID NO: 578827 - DNA, 25 bp, Homo sapien
aatgaattggagatgttaacattta

SEQ ID NO: 578828 - DNA, 25 bp, Homo sapien
cataaaactggagttacctagttct

SEQ ID NO: 578829 - DNA, 25 bp, Homo sapien
aaaatgaattggagatgttaacatt

SEQ ID NO: 578830 - DNA, 25 bp, Homo sapien
tgagagccaacgtagctttatattg

SEQ ID NO: 578831 - DNA, 25 bp, Homo sapien
gctggccactaccaaatgcttgaag

SEQ ID NO: 578832 - DNA, 25 bp, Homo sapien
tgtcttcggcagagctaaaggaaag

SEQ ID NO: 578833 - DNA, 25 bp, Homo sapien
ccttaaccttactaaacagggcatg

SEQ ID NO: 578834 - DNA, 25 bp, Homo sapien
tgacaattcaaagactggcatacag

SEQ ID NO: 578835 - DNA, 25 bp, Homo sapien
caaaatttcaacctgtatgctcttt

SEQ ID NO: 578836 - DNA, 25 bp, Homo sapien
caggttcaaactaaagctataatga

SEQ ID NO: 578837 - DNA, 25 bp, Homo sapien
aattacaggttcaaactaaagctat

SEQ ID NO: 578838 - DNA, 25 bp, Homo sapien
aagctgaacttaggcatgaacatac

SEQ ID NO: 578839 - DNA, 25 bp, Homo sapien
caatagcactcttcacaatagtctc

SEQ ID NO: 578840 - DNA, 25 bp, Homo sapien
agtgttcacaatagcactcttcaca

SEQ ID NO: 578841 - DNA, 25 bp, Homo sapien
tgaacttaggcatgaacatacagtg

SEQ ID NO: 578842 - DNA, 25 bp, Homo sapien
taggctgtgatttgaaagccataac

SEQ ID NO: 578843 - DNA, 25 bp, Homo sapien
ggaaataggctgtgatttgaaagcc

SEQ ID NO: 578844 - DNA, 25 bp, Homo sapien
gctcctgatgcagcgaaggcgtatc

SEQ ID NO: 578845 - DNA, 25 bp, Homo sapien
gaaggcgtatccctctcttgaggaa

SEQ ID NO: 578846 - DNA, 25 bp, Homo sapien
aatcttcattctgacttgctaaaag

SEQ ID NO: 578847 - DNA, 25 bp, Homo sapien
ttgctaaaagatcacgactgaatgc

SEQ ID NO: 578848 - DNA, 25 bp, Homo sapien
gatcacgactgaatgcaagctgact

SEQ ID NO: 578849 - DNA, 25 bp, Homo sapien
aatgcaagctgactgacacaaacca

SEQ ID NO: 578850 - DNA, 25 bp, Homo sapien
cataagcaccatcacagcttttgtg

SEQ ID NO: 578851 - DNA, 25 bp, Homo sapien
ttaaacactatcataagcaccatca

SEQ ID NO: 578852 - DNA, 25 bp, Homo sapien
ggaaaaggtactgctgattaaaatg

SEQ ID NO: 578853 - DNA, 25 bp, Homo sapien
acagttgatatggaaaaggtactgc

SEQ ID NO: 578854 - DNA, 25 bp, Homo sapien
atgtcacacttcatggcccggttaa

SEQ ID NO: 578855 - DNA, 25 bp, Homo sapien
gtcacacttcatggcccggttaatg

SEQ ID NO: 578856 - DNA, 25 bp, Homo sapien
tggcccggttaatgtctgttggatt

SEQ ID NO: 578857 - DNA, 25 bp, Homo sapien
cttcatggcccggttaatgtctgtt

SEQ ID NO: 578858 - DNA, 25 bp, Homo sapien
taagtactggggagctaagtgcagc

SEQ ID NO: 578859 - DNA, 25 bp, Homo sapien
ggctgcattcgctctgctccgtaaa

SEQ ID NO: 578860 - DNA, 25 bp, Homo sapien
tcttttgtgcaaccacctttaagta

SEQ ID NO: 578861 - DNA, 25 bp, Homo sapien
tactccctttgtactgcctgatctg

SEQ ID NO: 578862 - DNA, 25 bp, Homo sapien
tcatgtgtgcactgacggtgtggca

SEQ ID NO: 578863 - DNA, 25 bp, Homo sapien
tcttagtgtcatcagcgaaatccag

SEQ ID NO: 578864 - DNA, 25 bp, Homo sapien
gcataatattggtcactacacggaa

SEQ ID NO: 578865 - DNA, 25 bp, Homo sapien
gaagcataaggcagagaacccaaat

SEQ ID NO: 578866 - DNA, 25 bp, Homo sapien
tgctgtctcttgattcctacgtact

SEQ ID NO: 578867 - DNA, 25 bp, Homo sapien
cgtactttagagaggtgactgggtt

SEQ ID NO: 578868 - DNA, 25 bp, Homo sapien
tccaaagccgtatctcaatgtgagt

SEQ ID NO: 578869 - DNA, 25 bp, Homo sapien
caaagccgtatctcaatgtgagtct

SEQ ID NO: 578870 - DNA, 25 bp, Homo sapien
cacaatgtgctgatggacgggatat

SEQ ID NO: 578871 - DNA, 25 bp, Homo sapien
gactagtgatgaggcctcggcaatg

SEQ ID NO: 578872 - DNA, 25 bp, Homo sapien
ggaagttggcctttaccaacacaga

SEQ ID NO: 578873 - DNA, 25 bp, Homo sapien
taccttgggcgttgtagagggacaa

SEQ ID NO: 578874 - DNA, 25 bp, Homo sapien
ttgggccaaggaataaaattctaca

SEQ ID NO: 578875 - DNA, 25 bp, Homo sapien
cactcttcaattgtgcctatccatc

SEQ ID NO: 578876 - DNA, 25 bp, Homo sapien
ctcttcaattgtgcctatccatctc

SEQ ID NO: 578877 - DNA, 25 bp, Homo sapien
ttcacactcttcaattgtgcctatc

SEQ ID NO: 578878 - DNA, 25 bp, Homo sapien
cacactcttcaattgtgcctatcca

SEQ ID NO: 578879 - DNA, 25 bp, Homo sapien
agacactccatggagaactctttct

SEQ ID NO: 578880 - DNA, 25 bp, Homo sapien
caaagtaatcagacactccatggag

SEQ ID NO: 578881 - DNA, 25 bp, Homo sapien
ggaggaagtgaactctctgcacact

SEQ ID NO: 578882 - DNA, 25 bp, Homo sapien
gcatttctccggagctttgcactgg

SEQ ID NO: 578883 - DNA, 25 bp, Homo sapien
ttgtaaagctgtcactgcactgttt

SEQ ID NO: 578884 - DNA, 25 bp, Homo sapien
ccagattccctctaccacatttcct

SEQ ID NO: 578885 - DNA, 25 bp, Homo sapien
tccagattccctctaccacatttcc

SEQ ID NO: 578886 - DNA, 25 bp, Homo sapien
tcctccagattccctctaccacatt

SEQ ID NO: 578887 - DNA, 25 bp, Homo sapien
taaccctggatctgacaactctgaa

SEQ ID NO: 578888 - DNA, 25 bp, Homo sapien
gtctttaaccgctccccaggatgag

SEQ ID NO: 578889 - DNA, 25 bp, Homo sapien
ggtcgaagtcttccgcagagctgca

SEQ ID NO: 578890 - DNA, 25 bp, Homo sapien
agaaactctcccgtggtggtcgaag

SEQ ID NO: 578891 - DNA, 25 bp, Homo sapien
ggcatctatattcgcagctctcttg

SEQ ID NO: 578892 - DNA, 25 bp, Homo sapien
tttggccactatgtcctcaactcca

SEQ ID NO: 578893 - DNA, 25 bp, Homo sapien
ttgtcacaggtttggccactatgtc

SEQ ID NO: 578894 - DNA, 25 bp, Homo sapien
ttaaaatcccggcatctatattcgc

SEQ ID NO: 578895 - DNA, 25 bp, Homo sapien
agagagtgacccatacaccaaaccc

SEQ ID NO: 578896 - DNA, 25 bp, Homo sapien
tgtagaacccggaagagagtgaccc

SEQ ID NO: 578897 - DNA, 25 bp, Homo sapien
tcatgggtgccatggctgccatact

SEQ ID NO: 578898 - DNA, 25 bp, Homo sapien
caagtgttttacgagtttgagggag

SEQ ID NO: 578899 - DNA, 25 bp, Homo sapien
tgctctaagagaggcgcctacagtg

SEQ ID NO: 578900 - DNA, 25 bp, Homo sapien
tacagtgggccatggaaatgcacat

SEQ ID NO: 578901 - DNA, 25 bp, Homo sapien
tatagaatcccctgactgggttccg

SEQ ID NO: 578902 - DNA, 25 bp, Homo sapien
cttttacatgaagggacgtgagggc

SEQ ID NO: 578903 - DNA, 25 bp, Homo sapien
cccagtactgggtagctctagataa

SEQ ID NO: 578904 - DNA, 25 bp, Homo sapien
gaatgacgacactgtgatcccaggc

SEQ ID NO: 578905 - DNA, 25 bp, Homo sapien
cacagcacgctgaaaagagaacttt

SEQ ID NO: 578906 - DNA, 25 bp, Homo sapien
gacgacagttaacctccagtggcaa

SEQ ID NO: 578907 - DNA, 25 bp, Homo sapien
ttcagcattaatttctaagagaaaa

SEQ ID NO: 578908 - DNA, 25 bp, Homo sapien
cttcagcattaatttctaagagaaa

SEQ ID NO: 578909 - DNA, 25 bp, Homo sapien
tcttcagcattaatttctaagagaa

SEQ ID NO: 578910 - DNA, 25 bp, Homo sapien
gccttctggggtttgatcgccttag

SEQ ID NO: 578911 - DNA, 25 bp, Homo sapien
cttctggggtttgatcgccttagag

SEQ ID NO: 578912 - DNA, 25 bp, Homo sapien
ttctggggtttgatcgccttagagc

SEQ ID NO: 578913 - DNA, 25 bp, Homo sapien
ccttctggggtttgatcgccttaga

SEQ ID NO: 578914 - DNA, 25 bp, Homo sapien
tcagcgctctgctcaccccgcacac

SEQ ID NO: 578915 - DNA, 25 bp, Homo sapien
gaggtcagcgctctgctcaccccgc

SEQ ID NO: 578916 - DNA, 25 bp, Homo sapien
aggtcagcgctctgctcaccccgca

SEQ ID NO: 578917 - DNA, 25 bp, Homo sapien
gtcagcgctctgctcaccccgcaca

SEQ ID NO: 578918 - DNA, 25 bp, Homo sapien
gaggaactgaaaaggccttgggagc

SEQ ID NO: 578919 - DNA, 25 bp, Homo sapien
aaattcccagtcaatccatcacctg

SEQ ID NO: 578920 - DNA, 25 bp, Homo sapien
gagctgctgggcctagaaaaattcc

SEQ ID NO: 578921 - DNA, 25 bp, Homo sapien
tctggagcagggtctgtcagtctct

SEQ ID NO: 578922 - DNA, 25 bp, Homo sapien
ggaaagagccttctgcgttcttctc

SEQ ID NO: 578923 - DNA, 25 bp, Homo sapien
gtttgggaaagagccttctgcgttc

SEQ ID NO: 578924 - DNA, 25 bp, Homo sapien
aaagagccttctgcgttcttctcac

SEQ ID NO: 578925 - DNA, 25 bp, Homo sapien
tgggaaagagccttctgcgttcttc

SEQ ID NO: 578926 - DNA, 25 bp, Homo sapien
agagttcctggaactgcctgtgggc

SEQ ID NO: 578927 - DNA, 25 bp, Homo sapien
tcctggaactgcctgtgggcagctc

SEQ ID NO: 578928 - DNA, 25 bp, Homo sapien
ctgagagttcctggaactgcctgtg

SEQ ID NO: 578929 - DNA, 25 bp, Homo sapien
gagttcctggaactgcctgtgggca

SEQ ID NO: 578930 - DNA, 25 bp, Homo sapien
tgtgatgaagttcgccacgtccagt

SEQ ID NO: 578931 - DNA, 25 bp, Homo sapien
gcttccttccaggttatcaccacaa

SEQ ID NO: 578932 - DNA, 25 bp, Homo sapien
gcaattatcattaggcctcatccca

SEQ ID NO: 578933 - DNA, 25 bp, Homo sapien
taacaggactaaaatccagatcgct

SEQ ID NO: 578934 - DNA, 25 bp, Homo sapien
tgcacctgaagagtgaaaagctgtt

SEQ ID NO: 578935 - DNA, 25 bp, Homo sapien
tggtggtgctcatcggtgatcctcg

SEQ ID NO: 578936 - DNA, 25 bp, Homo sapien
tactcagtcaaccaaacaggttcgc

SEQ ID NO: 578937 - DNA, 25 bp, Homo sapien
aaatacaagtttgcagctggcttcc

SEQ ID NO: 578938 - DNA, 25 bp, Homo sapien
catttccgtttcgactgtgggtctc

SEQ ID NO: 578939 - DNA, 25 bp, Homo sapien
aaaggtgcagcaaaaaaccagttgc

SEQ ID NO: 578940 - DNA, 25 bp, Homo sapien
cttgcctctactgggaatgagaaac

SEQ ID NO: 578941 - DNA, 25 bp, Homo sapien
tgtctgctccaaagtgagcaaaggt

SEQ ID NO: 578942 - DNA, 25 bp, Homo sapien
aagttgagaggaagggactcagtgc

SEQ ID NO: 578943 - DNA, 25 bp, Homo sapien
gaggaagggactcagtgcctttacc

SEQ ID NO: 578944 - DNA, 25 bp, Homo sapien
gactcagtgcctttaccattcattc

SEQ ID NO: 578945 - DNA, 25 bp, Homo sapien
actcagtgcctttaccattcattcc

SEQ ID NO: 578946 - DNA, 25 bp, Homo sapien
tctgggacacccctggtattgggag

SEQ ID NO: 578947 - DNA, 25 bp, Homo sapien
ctcagtgccaggactttaattgtga

SEQ ID NO: 578948 - DNA, 25 bp, Homo sapien
agtgccaggactttaattgtgaagg

SEQ ID NO: 578949 - DNA, 25 bp, Homo sapien
ggctcagtgccaggactttaattgt

SEQ ID NO: 578950 - DNA, 25 bp, Homo sapien
caggagacagtcatttcgcagcagt

SEQ ID NO: 578951 - DNA, 25 bp, Homo sapien
ccagaattccttgggtagctgccag

SEQ ID NO: 578952 - DNA, 25 bp, Homo sapien
gaattccttgggtagctgccagatg

SEQ ID NO: 578953 - DNA, 25 bp, Homo sapien
cagtcatttcgcagcagtggagtca

SEQ ID NO: 578954 - DNA, 25 bp, Homo sapien
gccagtagacagctgggtttccaca

SEQ ID NO: 578955 - DNA, 25 bp, Homo sapien
gcgtagctccgctttctcaccaatg

SEQ ID NO: 578956 - DNA, 25 bp, Homo sapien
accaatgtctgccagtagacagctg

SEQ ID NO: 578957 - DNA, 25 bp, Homo sapien
tcaaagggagggagaaatctagatc

SEQ ID NO: 578958 - DNA, 25 bp, Homo sapien
tgaaggacccggacagcgaagagtt

SEQ ID NO: 578959 - DNA, 25 bp, Homo sapien
aaggacccggacagcgaagagttga

SEQ ID NO: 578960 - DNA, 25 bp, Homo sapien
cccggacagcgaagagttgaggttt

SEQ ID NO: 578961 - DNA, 25 bp, Homo sapien
gcctgaaggacccggacagcgaaga

SEQ ID NO: 578962 - DNA, 25 bp, Homo sapien
ttggagtgctggtgttctggtcttc

SEQ ID NO: 578963 - DNA, 25 bp, Homo sapien
tctgtgaggttccagagttgggctg

SEQ ID NO: 578964 - DNA, 25 bp, Homo sapien
cccacctgtcacgggcaggagaact

SEQ ID NO: 578965 - DNA, 25 bp, Homo sapien
cacctgtcacgggcaggagaactct

SEQ ID NO: 578966 - DNA, 25 bp, Homo sapien
ggagccttgattcccttgttattca

SEQ ID NO: 578967 - DNA, 25 bp, Homo sapien
tgaagctggaactgcgggagcccca

SEQ ID NO: 578968 - DNA, 25 bp, Homo sapien
caacagcaagtgtgaatactgcttg

SEQ ID NO: 578969 - DNA, 25 bp, Homo sapien
gttctcaaagacctggggctgctgt

SEQ ID NO: 578970 - DNA, 25 bp, Homo sapien
tacgtagttctaccggctttgccat

SEQ ID NO: 578971 - DNA, 25 bp, Homo sapien
cacgttttaaggactgactgaggca

SEQ ID NO: 578972 - DNA, 25 bp, Homo sapien
aaacaataggatgggcttctgtgcc

SEQ ID NO: 578973 - DNA, 25 bp, Homo sapien
gatttgccatagagtacactgcctg

SEQ ID NO: 578974 - DNA, 25 bp, Homo sapien
cttggatctgttgcttggtgacggc

SEQ ID NO: 578975 - DNA, 25 bp, Homo sapien
tgctctccccatgcgaagtcaaaga

SEQ ID NO: 578976 - DNA, 25 bp, Homo sapien
gagctgcctcagtagccagacttaa

SEQ ID NO: 578977 - DNA, 25 bp, Homo sapien
tggtgacggccttctactggtgcct

SEQ ID NO: 578978 - DNA, 25 bp, Homo sapien
tgtggccattgtaagtataagaccc

SEQ ID NO: 578979 - DNA, 25 bp, Homo sapien
ggtcttactacggagcacatttgca

SEQ ID NO: 578980 - DNA, 25 bp, Homo sapien
tattcaatctacatcgcttgcgagc

SEQ ID NO: 578981 - DNA, 25 bp, Homo sapien
tcattattcgatggcaaggcagttc

SEQ ID NO: 578982 - DNA, 25 bp, Homo sapien
cagtcctaagcatgggtcttgcaaa

SEQ ID NO: 578983 - DNA, 25 bp, Homo sapien
gaccaagctctgctcaaggagccag

SEQ ID NO: 578984 - DNA, 25 bp, Homo sapien
cagaatctgctaacaaggccttgaa

SEQ ID NO: 578985 - DNA, 25 bp, Homo sapien
tatttgccgacaaggctgcagtcct

SEQ ID NO: 578986 - DNA, 25 bp, Homo sapien
gagaaaggtggaatgcatcaagttc

SEQ ID NO: 578987 - DNA, 25 bp, Homo sapien
aaggtcttggtatttaagagctggc

SEQ ID NO: 578988 - DNA, 25 bp, Homo sapien
gctttaaaggttgccatgttaacaa

SEQ ID NO: 578989 - DNA, 25 bp, Homo sapien
ttggtgaattattctcccatctgcc

SEQ ID NO: 578990 - DNA, 25 bp, Homo sapien
cgagattttggaaagtcgaccctgt

SEQ ID NO: 578991 - DNA, 25 bp, Homo sapien
ttttctctaaacacacgtggaagtg

SEQ ID NO: 578992 - DNA, 25 bp, Homo sapien
taatgacaccgttcgtaagtatcgc

SEQ ID NO: 578993 - DNA, 25 bp, Homo sapien
cagaggtcctatacgttgcttgtgg

SEQ ID NO: 578994 - DNA, 25 bp, Homo sapien
taaatagtcaaacatgcagagtcct

SEQ ID NO: 578995 - DNA, 25 bp, Homo sapien
ccagtgacatctaccattggtgcag

SEQ ID NO: 578996 - DNA, 25 bp, Homo sapien
caggcttgctctgtgtgaaccagac

SEQ ID NO: 578997 - DNA, 25 bp, Homo sapien
caaggtggctcccagtagttaaagg

SEQ ID NO: 578998 - DNA, 25 bp, Homo sapien
caattgccacgatgctaatcacaga

SEQ ID NO: 578999 - DNA, 25 bp, Homo sapien
gcttctgtagatatggtgtgggcac

SEQ ID NO: 579000 - DNA, 25 bp, Homo sapien
gcatgtggagaaaacgccttttgcc

SEQ ID NO: 579001 - DNA, 25 bp, Homo sapien
tcacagaatgtaattgacaggccct

SEQ ID NO: 579002 - DNA, 25 bp, Homo sapien
gagggtgtaagtgataggccctcat

SEQ ID NO: 579003 - DNA, 25 bp, Homo sapien
gaggcccttgcaacatcccaaaatg

SEQ ID NO: 579004 - DNA, 25 bp, Homo sapien
ccccgagtggtgtagctcttgtggc

SEQ ID NO: 579005 - DNA, 25 bp, Homo sapien
ttggggccctcacaggagctgtaga

SEQ ID NO: 579006 - DNA, 25 bp, Homo sapien
tcaaggagtatcagtcccgcgtcac

SEQ ID NO: 579007 - DNA, 25 bp, Homo sapien
ctgcagcttcggctcagggtccacg

SEQ ID NO: 579008 - DNA, 25 bp, Homo sapien
tgtgacacatacttcaaagtgtgcc

SEQ ID NO: 579009 - DNA, 25 bp, Homo sapien
tgcacccgcgacgagtgtgacacat

SEQ ID NO: 579010 - DNA, 25 bp, Homo sapien
gagtccttgaacgtagtttcgcaaa

SEQ ID NO: 579011 - DNA, 25 bp, Homo sapien
aaattattttcactcggcgaggagg

SEQ ID NO: 579012 - DNA, 25 bp, Homo sapien
ttttgccccggaatcatgttgagtc

SEQ ID NO: 579013 - DNA, 25 bp, Homo sapien
tgcgagccaaggtaggagcccttct

SEQ ID NO: 579014 - DNA, 25 bp, Homo sapien
ggagcgtctcaaagaagcgatcaga

SEQ ID NO: 579015 - DNA, 25 bp, Homo sapien
aaagggaataaaaggctgcgcataa

SEQ ID NO: 579016 - DNA, 25 bp, Homo sapien
ttgttttccagtcgtgcatgctcca

SEQ ID NO: 579017 - DNA, 25 bp, Homo sapien
tctttgccttctggaacgggccgct

SEQ ID NO: 579018 - DNA, 25 bp, Homo sapien
gaggcttcccctcgaatctgcggca

SEQ ID NO: 579019 - DNA, 25 bp, Homo sapien
aatctgcggcaagcctggctccagg

SEQ ID NO: 579020 - DNA, 25 bp, Homo sapien
ccagcagcgtctgcccaggtcgcct

SEQ ID NO: 579021 - DNA, 25 bp, Homo sapien
agcagagcgctctgggcggctcgct

SEQ ID NO: 579022 - DNA, 25 bp, Homo sapien
cctcaaggtggaaaacagtatcggt

SEQ ID NO: 579023 - DNA, 25 bp, Homo sapien
ccagagaaggcaagttccgcggctg

SEQ ID NO: 579024 - DNA, 25 bp, Homo sapien
gctgttaattgcgaggcttgcctca

SEQ ID NO: 579025 - DNA, 25 bp, Homo sapien
cacgggctttcttcgaccttgatta

SEQ ID NO: 579026 - DNA, 25 bp, Homo sapien
catccaattctcaactgaagtagcc

SEQ ID NO: 579027 - DNA, 25 bp, Homo sapien
ggagactgttaatcttgtagctgac

SEQ ID NO: 579028 - DNA, 25 bp, Homo sapien
gaaggactagcttgttgattctgca

SEQ ID NO: 579029 - DNA, 25 bp, Homo sapien
actttggctgtcaaggagctcagca

SEQ ID NO: 579030 - DNA, 25 bp, Homo sapien
cctctgcattccataatgtaagacg

SEQ ID NO: 579031 - DNA, 25 bp, Homo sapien
cataatgtaagacgcaaggtcaccc

SEQ ID NO: 579032 - DNA, 25 bp, Homo sapien
gacgcaaggtcacccaaaatattta

SEQ ID NO: 579033 - DNA, 25 bp, Homo sapien
gcattccataatgtaagacgcaagg

SEQ ID NO: 579034 - DNA, 25 bp, Homo sapien
gcgtgtgggtcgtgcgtctcagaaa

SEQ ID NO: 579035 - DNA, 25 bp, Homo sapien
tgtccacccatgtgtgtctgggtac

SEQ ID NO: 579036 - DNA, 25 bp, Homo sapien
tcactgaaatccctgcagtgaaggg

SEQ ID NO: 579037 - DNA, 25 bp, Homo sapien
tctgggtactgggaggagcgtgtgg

SEQ ID NO: 579038 - DNA, 25 bp, Homo sapien
gtaggcccaggctcgctggctttcc

SEQ ID NO: 579039 - DNA, 25 bp, Homo sapien
gcgcaagggccctaacagatgggcc

SEQ ID NO: 579040 - DNA, 25 bp, Homo sapien
gccctaacagatgggcctgaaggct

SEQ ID NO: 579041 - DNA, 25 bp, Homo sapien
gaggtaggcccaggctcgctggctt

SEQ ID NO: 579042 - DNA, 25 bp, Homo sapien
gtttctgcatcatttgtaggctttg

SEQ ID NO: 579043 - DNA, 25 bp, Homo sapien
tttctgcatcatttgtaggctttgc

SEQ ID NO: 579044 - DNA, 25 bp, Homo sapien
tgtttctgcatcatttgtaggcttt

SEQ ID NO: 579045 - DNA, 25 bp, Homo sapien
ttctgcatcatttgtaggctttgct

SEQ ID NO: 579046 - DNA, 25 bp, Homo sapien
gctacattccttccttccacgctct

SEQ ID NO: 579047 - DNA, 25 bp, Homo sapien
cactttgagctacattccttccttc

SEQ ID NO: 579048 - DNA, 25 bp, Homo sapien
cattccttccttccacgctctggct

SEQ ID NO: 579049 - DNA, 25 bp, Homo sapien
gagctacattccttccttccacgct

SEQ ID NO: 579050 - DNA, 25 bp, Homo sapien
cagcaacacctctagttcaggttgt

SEQ ID NO: 579051 - DNA, 25 bp, Homo sapien
caacacctctagttcaggttgttca

SEQ ID NO: 579052 - DNA, 25 bp, Homo sapien
ctggcagcaacacctctagttcagg

SEQ ID NO: 579053 - DNA, 25 bp, Homo sapien
ggcagcaacacctctagttcaggtt

SEQ ID NO: 579054 - DNA, 25 bp, Homo sapien
gtgaaatggcagggaattcttttcc

SEQ ID NO: 579055 - DNA, 25 bp, Homo sapien
tgaaatggcagggaattcttttccc

SEQ ID NO: 579056 - DNA, 25 bp, Homo sapien
cactatcctcttcttattgtgaaat

SEQ ID NO: 579057 - DNA, 25 bp, Homo sapien
taacagaatacgctttcactatcct

SEQ ID NO: 579058 - DNA, 25 bp, Homo sapien
ttttgaaggtattctggaaaatctc

SEQ ID NO: 579059 - DNA, 25 bp, Homo sapien
aaatctctgatcaaagggtctttcc

SEQ ID NO: 579060 - DNA, 25 bp, Homo sapien
gctgctttttgaaggtattctggaa

SEQ ID NO: 579061 - DNA, 25 bp, Homo sapien
ttctggaaaatctctgatcaaaggg

SEQ ID NO: 579062 - DNA, 25 bp, Homo sapien
tgttacaggaaatgtgtgtccacac

SEQ ID NO: 579063 - DNA, 25 bp, Homo sapien
tggagcggtaaacacccgcggcgtc

SEQ ID NO: 579064 - DNA, 25 bp, Homo sapien
gcggcgtctgtgactaacggtgaaa

SEQ ID NO: 579065 - DNA, 25 bp, Homo sapien
aaatcacttctgtgccgagccgacg

SEQ ID NO: 579066 - DNA, 25 bp, Homo sapien
ggtcactcctttgctgggagcaggt

SEQ ID NO: 579067 - DNA, 25 bp, Homo sapien
ggagcaggtgattcccgcatccaca

SEQ ID NO: 579068 - DNA, 25 bp, Homo sapien
ggacactggtacgtttccaagccaa

SEQ ID NO: 579069 - DNA, 25 bp, Homo sapien
ttgaggagaaatgttcagaggaaag

SEQ ID NO: 579070 - DNA, 25 bp, Homo sapien
caaagtatggagcaaggcttatgtt

SEQ ID NO: 579071 - DNA, 25 bp, Homo sapien
taatgcttttctgggtagcaaagta

SEQ ID NO: 579072 - DNA, 25 bp, Homo sapien
cattcctggaatgttagtactaagt

SEQ ID NO: 579073 - DNA, 25 bp, Homo sapien
tatgttgattttatgcagcccacat

SEQ ID NO: 579074 - DNA, 25 bp, Homo sapien
tatttcacccgtacagaagaatgaa

SEQ ID NO: 579075 - DNA, 25 bp, Homo sapien
gataattatttcacccgtacagaag

SEQ ID NO: 579076 - DNA, 25 bp, Homo sapien
tgaacaaagcctgtcaaaatcatag

SEQ ID NO: 579077 - DNA, 25 bp, Homo sapien
aatcatagcctgtcctcatcgctgg

SEQ ID NO: 579078 - DNA, 25 bp, Homo sapien
gaaacaactgccctggtccatacat

SEQ ID NO: 579079 - DNA, 25 bp, Homo sapien
cagacagatgtcttcttgagtgctt

SEQ ID NO: 579080 - DNA, 25 bp, Homo sapien
taccaagaagcctgttcaaccaggt

SEQ ID NO: 579081 - DNA, 25 bp, Homo sapien
gagtgctttgcctttgtctatacca

SEQ ID NO: 579082 - DNA, 25 bp, Homo sapien
tctgcaaataattgtgagcaacaag

SEQ ID NO: 579083 - DNA, 25 bp, Homo sapien
gccttcatgatgctcaagaagctcg

SEQ ID NO: 579084 - DNA, 25 bp, Homo sapien
caagaagctcgtgttccctctgcaa

SEQ ID NO: 579085 - DNA, 25 bp, Homo sapien
gcaacaagctcaagatgtgttccaa

SEQ ID NO: 579086 - DNA, 25 bp, Homo sapien
gatggacgaactgttcttttgtggc

SEQ ID NO: 579087 - DNA, 25 bp, Homo sapien
gcagctgagcaggtgagaatacaca

SEQ ID NO: 579088 - DNA, 25 bp, Homo sapien
ggctctgaaggtctatatcaatgac

SEQ ID NO: 579089 - DNA, 25 bp, Homo sapien
ctccatactagatggacgaactgtt

SEQ ID NO: 579090 - DNA, 25 bp, Homo sapien
cgtcctggtccagcgttcactcagg

SEQ ID NO: 579091 - DNA, 25 bp, Homo sapien
cactcaggcctttagggaaccggag

SEQ ID NO: 579092 - DNA, 25 bp, Homo sapien
acgtcctggtccagcgttcactcag

SEQ ID NO: 579093 - DNA, 25 bp, Homo sapien
gcgttcactcaggcctttagggaac

SEQ ID NO: 579094 - DNA, 25 bp, Homo sapien
catacagtggcatactattcagtag

SEQ ID NO: 579095 - DNA, 25 bp, Homo sapien
gaagataacactaagtgagggaagc

SEQ ID NO: 579096 - DNA, 25 bp, Homo sapien
cagaaagggacattctagggagatg

SEQ ID NO: 579097 - DNA, 25 bp, Homo sapien
aagtagtgaatattgttggactcca

SEQ ID NO: 579098 - DNA, 25 bp, Homo sapien
gtgcacatcatgaggccacgttttc

SEQ ID NO: 579099 - DNA, 25 bp, Homo sapien
catcatgaggccacgttttccaaac

SEQ ID NO: 579100 - DNA, 25 bp, Homo sapien
cacatcatgaggccacgttttccaa

SEQ ID NO: 579101 - DNA, 25 bp, Homo sapien
atcatgaggccacgttttccaaaca

SEQ ID NO: 579102 - DNA, 25 bp, Homo sapien
tgcagcttgtttgtagaacagcccc

SEQ ID NO: 579103 - DNA, 25 bp, Homo sapien
aaaatcccatttgttgcagcttgtt

SEQ ID NO: 579104 - DNA, 25 bp, Homo sapien
ccccatttccacagtggtggtatta

SEQ ID NO: 579105 - DNA, 25 bp, Homo sapien
cacagtggtggtattaattagcaaa

SEQ ID NO: 579106 - DNA, 25 bp, Homo sapien
gatgacctcacggttctctcttccc

SEQ ID NO: 579107 - DNA, 25 bp, Homo sapien
cgagccagtcgtttctctaatcttc

SEQ ID NO: 579108 - DNA, 25 bp, Homo sapien
tggccttccaccttgaggacccgag

SEQ ID NO: 579109 - DNA, 25 bp, Homo sapien
ccctcgagccagtcgtttctctaat

SEQ ID NO: 579110 - DNA, 25 bp, Homo sapien
atgtgtgccaaaggtctcttttcaa

SEQ ID NO: 579111 - DNA, 25 bp, Homo sapien
ccttcaatgtgtgccaaaggtctct

SEQ ID NO: 579112 - DNA, 25 bp, Homo sapien
tcaatgtgtgccaaaggtctctttt

SEQ ID NO: 579113 - DNA, 25 bp, Homo sapien
cccttcaatgtgtgccaaaggtctc

SEQ ID NO: 579114 - DNA, 25 bp, Homo sapien
ggaggacctcagtcaatactatcta

SEQ ID NO: 579115 - DNA, 25 bp, Homo sapien
tgaagcagagataacacggaggacc

SEQ ID NO: 579116 - DNA, 25 bp, Homo sapien
taattaggcaccattgaatttcatt

SEQ ID NO: 579117 - DNA, 25 bp, Homo sapien
cctccctgattcagtattaacattc

SEQ ID NO: 579118 - DNA, 25 bp, Homo sapien
gctaccaacatagctgtgccacctg

SEQ ID NO: 579119 - DNA, 25 bp, Homo sapien
gaatctttgccaagaagacttctgc

SEQ ID NO: 579120 - DNA, 25 bp, Homo sapien
cacctgattccatggattggcatct

SEQ ID NO: 579121 - DNA, 25 bp, Homo sapien
gaagacttctgctatagctaccaac

SEQ ID NO: 579122 - DNA, 25 bp, Homo sapien
tatgtagacaaaccaagcttaaggc

SEQ ID NO: 579123 - DNA, 25 bp, Homo sapien
tattaacaatactaagaaggccttg

SEQ ID NO: 579124 - DNA, 25 bp, Homo sapien
tatttatgcaaataccagccttggt

SEQ ID NO: 579125 - DNA, 25 bp, Homo sapien
ccatgagttaggtttgcctagggct

SEQ ID NO: 579126 - DNA, 25 bp, Homo sapien
tagtcacattggaggaaatcagaac

SEQ ID NO: 579127 - DNA, 25 bp, Homo sapien
agaaatagtcacattggaggaaatc

SEQ ID NO: 579128 - DNA, 25 bp, Homo sapien
tatatcagaaatagtcacattggag

SEQ ID NO: 579129 - DNA, 25 bp, Homo sapien
aatatatcagaaatagtcacattgg

SEQ ID NO: 579130 - DNA, 25 bp, Homo sapien
tgagctgcctctcgaagggctgaaa

SEQ ID NO: 579131 - DNA, 25 bp, Homo sapien
tctctctacgcaagggctgccaaga

SEQ ID NO: 579132 - DNA, 25 bp, Homo sapien
cagcttctgagcacattcgttgcag

SEQ ID NO: 579133 - DNA, 25 bp, Homo sapien
tcgttgcagtcagccacttgaggaa

SEQ ID NO: 579134 - DNA, 25 bp, Homo sapien
tgcagagaacatatcctgattccag

SEQ ID NO: 579135 - DNA, 25 bp, Homo sapien
taggtttttctgtcatacactgaat

SEQ ID NO: 579136 - DNA, 25 bp, Homo sapien
gcagagaacatatcctgattccagg

SEQ ID NO: 579137 - DNA, 25 bp, Homo sapien
ctttccctgttgtctgagaacgtgg

SEQ ID NO: 579138 - DNA, 25 bp, Homo sapien
tgttgtctgagaacgtggctttgag

SEQ ID NO: 579139 - DNA, 25 bp, Homo sapien
agaacgtggctttgagacagtgtca

SEQ ID NO: 579140 - DNA, 25 bp, Homo sapien
ctatgcttggataactgtgtgcatc

SEQ ID NO: 579141 - DNA, 25 bp, Homo sapien
agctcagttctaacgttctccggga

SEQ ID NO: 579142 - DNA, 25 bp, Homo sapien
ccgggagttctcaccatcgttttct

SEQ ID NO: 579143 - DNA, 25 bp, Homo sapien
gccagactcctatgcattctgcaag

SEQ ID NO: 579144 - DNA, 25 bp, Homo sapien
caaagaccctgtaactggaactgtg

SEQ ID NO: 579145 - DNA, 25 bp, Homo sapien
catttacaaaattctgagcatatca

SEQ ID NO: 579146 - DNA, 25 bp, Homo sapien
atctggaacccaactttcaacttct

SEQ ID NO: 579147 - DNA, 25 bp, Homo sapien
gttccctgggtacatcaaaatccac

SEQ ID NO: 579148 - DNA, 25 bp, Homo sapien
tatcatcacttggatgttccctggg

SEQ ID NO: 579149 - DNA, 25 bp, Homo sapien
tgttactgagacctcctgatcaggg

SEQ ID NO: 579150 - DNA, 25 bp, Homo sapien
tccaagctgcagtcaggctcgtggg

SEQ ID NO: 579151 - DNA, 25 bp, Homo sapien
ttgatgcttccctgttcagtgttac

SEQ ID NO: 579152 - DNA, 25 bp, Homo sapien
gggaccgcacaagcccttcctttga

SEQ ID NO: 579153 - DNA, 25 bp, Homo sapien
gctttactcatttcagccatggatt

SEQ ID NO: 579154 - DNA, 25 bp, Homo sapien
atccacactcatgtttagaagttta

SEQ ID NO: 579155 - DNA, 25 bp, Homo sapien
tagggtcacaagaagctcttgaaaa

SEQ ID NO: 579156 - DNA, 25 bp, Homo sapien
ttctgtaatgttaggacaccagcct

SEQ ID NO: 579157 - DNA, 25 bp, Homo sapien
aggtgcaaatgaggcactgagcata

SEQ ID NO: 579158 - DNA, 25 bp, Homo sapien
ccctaaggggtacattattctgatc

SEQ ID NO: 579159 - DNA, 25 bp, Homo sapien
gcatattttgaaggtgcaaatgagg

SEQ ID NO: 579160 - DNA, 25 bp, Homo sapien
tagccctaaggggtacattattctg

SEQ ID NO: 579161 - DNA, 25 bp, Homo sapien
ttattcaccagctcggcagttagca

SEQ ID NO: 579162 - DNA, 25 bp, Homo sapien
ggcacctttttcttacagccacaaa

SEQ ID NO: 579163 - DNA, 25 bp, Homo sapien
accagctcggcagttagcaaagacc

SEQ ID NO: 579164 - DNA, 25 bp, Homo sapien
ttagcaaagaccttgaaacggcacc

SEQ ID NO: 579165 - DNA, 25 bp, Homo sapien
caaaaagccgctttgcagccactgt

SEQ ID NO: 579166 - DNA, 25 bp, Homo sapien
aattggaaaccttgcagctgtacct

SEQ ID NO: 579167 - DNA, 25 bp, Homo sapien
ctggcaggcaaacgggaaaattgga

SEQ ID NO: 579168 - DNA, 25 bp, Homo sapien
caaggagcctaaactttgaggacaa

SEQ ID NO: 579169 - DNA, 25 bp, Homo sapien
ctccatgcatcattcccttgagaga

SEQ ID NO: 579170 - DNA, 25 bp, Homo sapien
ggtaggaactcagaaggtcatggac

SEQ ID NO: 579171 - DNA, 25 bp, Homo sapien
aaggtcatggactgctggagtatgt

SEQ ID NO: 579172 - DNA, 25 bp, Homo sapien
gaagactctccatgcatcattccct

SEQ ID NO: 579173 - DNA, 25 bp, Homo sapien
ctttgaaggtctgcacacactccag

SEQ ID NO: 579174 - DNA, 25 bp, Homo sapien
aagatgtagccttcactttgaaggt

SEQ ID NO: 579175 - DNA, 25 bp, Homo sapien
cactccagccatgtttacttcccac

SEQ ID NO: 579176 - DNA, 25 bp, Homo sapien
gctccaataggtcagttggttgaac

SEQ ID NO: 579177 - DNA, 25 bp, Homo sapien
gttgaaggcacatgcccctctcgtt

SEQ ID NO: 579178 - DNA, 25 bp, Homo sapien
ttaagcaaaataaggagtgtgagca

SEQ ID NO: 579179 - DNA, 25 bp, Homo sapien
agtgtgagcaactgacaagttgaag

SEQ ID NO: 579180 - DNA, 25 bp, Homo sapien
gttcaacactctatccagtctgcgg

SEQ ID NO: 579181 - DNA, 25 bp, Homo sapien
aaagtcgagccgctgagcctcaagg

SEQ ID NO: 579182 - DNA, 25 bp, Homo sapien
aggggaaggaaagtcgagccgctga

SEQ ID NO: 579183 - DNA, 25 bp, Homo sapien
cagtgagagcgatcaaaggggaagg

SEQ ID NO: 579184 - DNA, 25 bp, Homo sapien
gggaaggaaagtcgagccgctgagc

SEQ ID NO: 579185 - DNA, 25 bp, Homo sapien
caaatgaaccccttacagtctcgtc

SEQ ID NO: 579186 - DNA, 25 bp, Homo sapien
tcagctggtagaagtaatggaacca

SEQ ID NO: 579187 - DNA, 25 bp, Homo sapien
tctaagacagggtaaacctgtgtcc

SEQ ID NO: 579188 - DNA, 25 bp, Homo sapien
ccacaggtcaagctaaaacccaggt

SEQ ID NO: 579189 - DNA, 25 bp, Homo sapien
ctttctatactgggcctttctatgc

SEQ ID NO: 579190 - DNA, 25 bp, Homo sapien
tatactgggcctttctatgccacag

SEQ ID NO: 579191 - DNA, 25 bp, Homo sapien
ctatactgggcctttctatgccaca

SEQ ID NO: 579192 - DNA, 25 bp, Homo sapien
ttctatactgggcctttctatgcca

SEQ ID NO: 579193 - DNA, 25 bp, Homo sapien
tcaaccacccttcagagttggaaac

SEQ ID NO: 579194 - DNA, 25 bp, Homo sapien
cccagactcatctacaatatcagct

SEQ ID NO: 579195 - DNA, 25 bp, Homo sapien
gcgtacacccagactcatctacaat

SEQ ID NO: 579196 - DNA, 25 bp, Homo sapien
ataagccgcgtacacccagactcat

SEQ ID NO: 579197 - DNA, 25 bp, Homo sapien
ctaatactataagccgcgtacaccc

SEQ ID NO: 579198 - DNA, 25 bp, Homo sapien
aattgttaccttcattcttgagtgc

SEQ ID NO: 579199 - DNA, 25 bp, Homo sapien
caaaatcttactcgaatgtgttccc

SEQ ID NO: 579200 - DNA, 25 bp, Homo sapien
taatggtttctttggaattgcccca

SEQ ID NO: 579201 - DNA, 25 bp, Homo sapien
gaggttaattaaagtcactcccaga

SEQ ID NO: 579202 - DNA, 25 bp, Homo sapien
ctactcagctttacaacgtggcctc

SEQ ID NO: 579203 - DNA, 25 bp, Homo sapien
gctttacaacgtggcctctttgctg

SEQ ID NO: 579204 - DNA, 25 bp, Homo sapien
acaacgtggcctctttgctgtaaaa

SEQ ID NO: 579205 - DNA, 25 bp, Homo sapien
cagctttacaacgtggcctctttgc

SEQ ID NO: 579206 - DNA, 25 bp, Homo sapien
ttgaagtcagtcgaggaaactcaga

SEQ ID NO: 579207 - DNA, 25 bp, Homo sapien
ccttcatgcccctctagaaacaggt

SEQ ID NO: 579208 - DNA, 25 bp, Homo sapien
tgcttatgaagtcacagccaccttc

SEQ ID NO: 579209 - DNA, 25 bp, Homo sapien
gaaacaggtccattgaagtcagtcg

SEQ ID NO: 579210 - DNA, 25 bp, Homo sapien
ctccacatccgaaagccctcctact

SEQ ID NO: 579211 - DNA, 25 bp, Homo sapien
ccagatggcaccaatccttgaagac

SEQ ID NO: 579212 - DNA, 25 bp, Homo sapien
agccctcctactcctcttcaacctg

SEQ ID NO: 579213 - DNA, 25 bp, Homo sapien
gaagacctgtctcaagttttgcctc

SEQ ID NO: 579214 - DNA, 25 bp, Homo sapien
tatatttcctagctggcctgtgcca

SEQ ID NO: 579215 - DNA, 25 bp, Homo sapien
ggtttgctgaattttaacgagacca

SEQ ID NO: 579216 - DNA, 25 bp, Homo sapien
gcctgtgccatgtgttatagagggc

SEQ ID NO: 579217 - DNA, 25 bp, Homo sapien
agttcactgccatatctccactgga

SEQ ID NO: 579218 - DNA, 25 bp, Homo sapien
tgatctttctcccaatggaccataa

SEQ ID NO: 579219 - DNA, 25 bp, Homo sapien
caatggaccataatccaactggcat

SEQ ID NO: 579220 - DNA, 25 bp, Homo sapien
ttaaggaagaatgaatgttgttctc

SEQ ID NO: 579221 - DNA, 25 bp, Homo sapien
ggtttcaccttaattgatctttctc

SEQ ID NO: 579222 - DNA, 25 bp, Homo sapien
tctctagtgcctcctgttataaggg

SEQ ID NO: 579223 - DNA, 25 bp, Homo sapien
tcagggtactagcatggttgggatc

SEQ ID NO: 579224 - DNA, 25 bp, Homo sapien
tcctaattacctcctaagagctcca

SEQ ID NO: 579225 - DNA, 25 bp, Homo sapien
gatatttagtccataccattaacca

SEQ ID NO: 579226 - DNA, 25 bp, Homo sapien
tggtatcaagttcagaggtcacaaa

SEQ ID NO: 579227 - DNA, 25 bp, Homo sapien
gatgcttcagatcttcgcttcctgg

SEQ ID NO: 579228 - DNA, 25 bp, Homo sapien
cttccatttccgtctggtatcaagt

SEQ ID NO: 579229 - DNA, 25 bp, Homo sapien
tctccacctcttttgccaaggttct

SEQ ID NO: 579230 - DNA, 25 bp, Homo sapien
gatcgaccttaaactgacattgggc

SEQ ID NO: 579231 - DNA, 25 bp, Homo sapien
cctgggtttgagtcttagatcgacc

SEQ ID NO: 579232 - DNA, 25 bp, Homo sapien
tgtaaaatgtacaagcctgggtttg

SEQ ID NO: 579233 - DNA, 25 bp, Homo sapien
gcagagtttagtatggaaagagcat

SEQ ID NO: 579234 - DNA, 25 bp, Homo sapien
ctgaagttttcctgattgtctacat

SEQ ID NO: 579235 - DNA, 25 bp, Homo sapien
gaagttttcctgattgtctacatgt

SEQ ID NO: 579236 - DNA, 25 bp, Homo sapien
aagttttcctgattgtctacatgta

SEQ ID NO: 579237 - DNA, 25 bp, Homo sapien
tgaagttttcctgattgtctacatg

SEQ ID NO: 579238 - DNA, 25 bp, Homo sapien
attcttcattatggcggctgaagag

SEQ ID NO: 579239 - DNA, 25 bp, Homo sapien
tcattatggcggctgaagagagtga

SEQ ID NO: 579240 - DNA, 25 bp, Homo sapien
ccctctgaacttagtgggtgaagag

SEQ ID NO: 579241 - DNA, 25 bp, Homo sapien
gagagtgacaccctctgaacttagt

SEQ ID NO: 579242 - DNA, 25 bp, Homo sapien
acaaggttataaactgttctgtgac

SEQ ID NO: 579243 - DNA, 25 bp, Homo sapien
ctacaaggttataaactgttctgtg

SEQ ID NO: 579244 - DNA, 25 bp, Homo sapien
tacaaggttataaactgttctgtga

SEQ ID NO: 579245 - DNA, 25 bp, Homo sapien
gaaagtgaggttcaccacctcggct

SEQ ID NO: 579246 - DNA, 25 bp, Homo sapien
tctattacctctgggtccttggaca

SEQ ID NO: 579247 - DNA, 25 bp, Homo sapien
tctttcgtcactgggccctctggtt

SEQ ID NO: 579248 - DNA, 25 bp, Homo sapien
taaagtcccattgacgtgaccctgg

SEQ ID NO: 579249 - DNA, 25 bp, Homo sapien
taggttggccgctgagcattagccc

SEQ ID NO: 579250 - DNA, 25 bp, Homo sapien
agcctgtcacactgaatggtatcca

SEQ ID NO: 579251 - DNA, 25 bp, Homo sapien
cactaaccagctgtgggaacccagt

SEQ ID NO: 579252 - DNA, 25 bp, Homo sapien
ccatgtagcctgagatgagttcatg

SEQ ID NO: 579253 - DNA, 25 bp, Homo sapien
tcatcattagcatcaaggccgccat

SEQ ID NO: 579254 - DNA, 25 bp, Homo sapien
tttcatcatcattagcatcaaggcc

SEQ ID NO: 579255 - DNA, 25 bp, Homo sapien
tcatcatcattagcatcaaggccgc

SEQ ID NO: 579256 - DNA, 25 bp, Homo sapien
ttcaagctctgttttcatcatcatt

SEQ ID NO: 579257 - DNA, 25 bp, Homo sapien
ttttactgtactttcaagatactca

SEQ ID NO: 579258 - DNA, 25 bp, Homo sapien
acatctacatcatccgtatcttcaa

SEQ ID NO: 579259 - DNA, 25 bp, Homo sapien
tcaacatctgtatcatctacatctg

SEQ ID NO: 579260 - DNA, 25 bp, Homo sapien
catctacatcatccgtatcttcaac

SEQ ID NO: 579261 - DNA, 25 bp, Homo sapien
atgtgggcatagaggtctgtcttac

SEQ ID NO: 579262 - DNA, 25 bp, Homo sapien
gatgtgggcatagaggtctgtctta

SEQ ID NO: 579263 - DNA, 25 bp, Homo sapien
tgtgggcatagaggtctgtcttacc

SEQ ID NO: 579264 - DNA, 25 bp, Homo sapien
gatagctgagatcttgtgtgtattt

SEQ ID NO: 579265 - DNA, 25 bp, Homo sapien
ttctttctggaaattatcgaatgtg

SEQ ID NO: 579266 - DNA, 25 bp, Homo sapien
tgtgatagctgagatcttgtgtgta

SEQ ID NO: 579267 - DNA, 25 bp, Homo sapien
gaaattatcgaatgtgatagctgag

SEQ ID NO: 579268 - DNA, 25 bp, Homo sapien
gatatgcattagaatggctctagca

SEQ ID NO: 579269 - DNA, 25 bp, Homo sapien
cacacttaggaatattcccaagaga

SEQ ID NO: 579270 - DNA, 25 bp, Homo sapien
aaatgtacatctacgacccagcaat

SEQ ID NO: 579271 - DNA, 25 bp, Homo sapien
tcccaagagaactgcgtatatgtgt

SEQ ID NO: 579272 - DNA, 25 bp, Homo sapien
tgtgatgagactgaaaccattacca

SEQ ID NO: 579273 - DNA, 25 bp, Homo sapien
agggccatgtgtagcagatatgaat

SEQ ID NO: 579274 - DNA, 25 bp, Homo sapien
caagagtagaccatcaaaccgtaag

SEQ ID NO: 579275 - DNA, 25 bp, Homo sapien
tcagagccccacaaaacaagagtag

SEQ ID NO: 579276 - DNA, 25 bp, Homo sapien
gcaaagagccagagtacattcctat

SEQ ID NO: 579277 - DNA, 25 bp, Homo sapien
tccttttagaagttcgtccattgct

SEQ ID NO: 579278 - DNA, 25 bp, Homo sapien
tgaagattgtcagagatgggcccca

SEQ ID NO: 579279 - DNA, 25 bp, Homo sapien
gtccattgcttataacaaacccagc

SEQ ID NO: 579280 - DNA, 25 bp, Homo sapien
ccagattagcaattatctctccaag

SEQ ID NO: 579281 - DNA, 25 bp, Homo sapien
gactactcatgaaaggggcaaattg

SEQ ID NO: 579282 - DNA, 25 bp, Homo sapien
attaaaggtatgatgatttgtttcc

SEQ ID NO: 579283 - DNA, 25 bp, Homo sapien
gggcaaattggagccagtattaaag

SEQ ID NO: 579284 - DNA, 25 bp, Homo sapien
gagtaggtctccttctgtattctga

SEQ ID NO: 579285 - DNA, 25 bp, Homo sapien
gaacagggctataaaaagtgtcttc

SEQ ID NO: 579286 - DNA, 25 bp, Homo sapien
tagattgtgatcaaagaagagtagg

SEQ ID NO: 579287 - DNA, 25 bp, Homo sapien
ctgtattctgaacagggctataaaa

SEQ ID NO: 579288 - DNA, 25 bp, Homo sapien
gcttttcattgaaagactagttttg

SEQ ID NO: 579289 - DNA, 25 bp, Homo sapien
tattttgctaggatggtacgccaag

SEQ ID NO: 579290 - DNA, 25 bp, Homo sapien
tggtacgccaagtgatcctggtctg

SEQ ID NO: 579291 - DNA, 25 bp, Homo sapien
tcagggcaactccaagaagatatat

SEQ ID NO: 579292 - DNA, 25 bp, Homo sapien
cttcccatttggtgaaacagttgct

SEQ ID NO: 579293 - DNA, 25 bp, Homo sapien
gaaacagttgctcagctttaatttc

SEQ ID NO: 579294 - DNA, 25 bp, Homo sapien
acagcaccaaggtaggggattgttt

SEQ ID NO: 579295 - DNA, 25 bp, Homo sapien
cagcaccaaggtaggggattgttta

SEQ ID NO: 579296 - DNA, 25 bp, Homo sapien
cggacatgtgtgccatacactcagg

SEQ ID NO: 579297 - DNA, 25 bp, Homo sapien
tgtgtgccatacactcagggctcca

SEQ ID NO: 579298 - DNA, 25 bp, Homo sapien
cagggctccactttctttcgtatta

SEQ ID NO: 579299 - DNA, 25 bp, Homo sapien
acatgtgtgccatacactcagggct

SEQ ID NO: 579300 - DNA, 25 bp, Homo sapien
tgaataagcttcatagcacccaaac

SEQ ID NO: 579301 - DNA, 25 bp, Homo sapien
taagcttcatagcacccaaacgcca

SEQ ID NO: 579302 - DNA, 25 bp, Homo sapien
attgctggtctgtggcgatgaataa

SEQ ID NO: 579303 - DNA, 25 bp, Homo sapien
ggtctgtggcgatgaataagcttca

SEQ ID NO: 579304 - DNA, 25 bp, Homo sapien
cacacttctaagtttatcctcttct

SEQ ID NO: 579305 - DNA, 25 bp, Homo sapien
gtttatcctcttctttgaagacaaa

SEQ ID NO: 579306 - DNA, 25 bp, Homo sapien
tctaagtttatcctcttctttgaag

SEQ ID NO: 579307 - DNA, 25 bp, Homo sapien
tcttctttgaagacaaaacttcctc

SEQ ID NO: 579308 - DNA, 25 bp, Homo sapien
ggaaatccccaggtatgacttttgc

SEQ ID NO: 579309 - DNA, 25 bp, Homo sapien
aaatccccaggtatgacttttgcac

SEQ ID NO: 579310 - DNA, 25 bp, Homo sapien
tggaaatccccaggtatgacttttg

SEQ ID NO: 579311 - DNA, 25 bp, Homo sapien
gaaatccccaggtatgacttttgca

SEQ ID NO: 579312 - DNA, 25 bp, Homo sapien
aaaagggagcttgttccagacacaa

SEQ ID NO: 579313 - DNA, 25 bp, Homo sapien
tagtgaaaagattgagtcgaatgtc

SEQ ID NO: 579314 - DNA, 25 bp, Homo sapien
caaagctaacatactgaggacaggt

SEQ ID NO: 579315 - DNA, 25 bp, Homo sapien
gaggacaggtcagcaaagagcctgc

SEQ ID NO: 579316 - DNA, 25 bp, Homo sapien
ttgcagctgttgaggggagaaaaca

SEQ ID NO: 579317 - DNA, 25 bp, Homo sapien
tcattggcactgttaccagcttagc

SEQ ID NO: 579318 - DNA, 25 bp, Homo sapien
aaacataggtaaatttcccactctg

SEQ ID NO: 579319 - DNA, 25 bp, Homo sapien
taaggctgccagttacaggatgcca

SEQ ID NO: 579320 - DNA, 25 bp, Homo sapien
cattttctgaaatcccccttcagtc

SEQ ID NO: 579321 - DNA, 25 bp, Homo sapien
aatcccccttcagtctgtttaagtg

SEQ ID NO: 579322 - DNA, 25 bp, Homo sapien
caagggtcaccacaaagagagtcaa

SEQ ID NO: 579323 - DNA, 25 bp, Homo sapien
accacaaagagagtcaaacattttc

SEQ ID NO: 579324 - DNA, 25 bp, Homo sapien
ttacacgctgaaccctcaagaagaa

SEQ ID NO: 579325 - DNA, 25 bp, Homo sapien
ggatcgacatcaccttgccttgtag

SEQ ID NO: 579326 - DNA, 25 bp, Homo sapien
gcttcaagttttacacgctgaaccc

SEQ ID NO: 579327 - DNA, 25 bp, Homo sapien
tctggatcgacatcaccttgccttg

SEQ ID NO: 579328 - DNA, 25 bp, Homo sapien
gtctccagatttctgatttgctcct

SEQ ID NO: 579329 - DNA, 25 bp, Homo sapien
ctcgttttctgacatccactgcctt

SEQ ID NO: 579330 - DNA, 25 bp, Homo sapien
agatttctgatttgctcctcgtttt

SEQ ID NO: 579331 - DNA, 25 bp, Homo sapien
tgctcctcgttttctgacatccact

SEQ ID NO: 579332 - DNA, 25 bp, Homo sapien
gaaataagacactccgaatcctttc

SEQ ID NO: 579333 - DNA, 25 bp, Homo sapien
taagacactccgaatcctttccatc

SEQ ID NO: 579334 - DNA, 25 bp, Homo sapien
cggtacaggaatatacgaagacatc

SEQ ID NO: 579335 - DNA, 25 bp, Homo sapien
gacatcataaaggtttacacctgaa

SEQ ID NO: 579336 - DNA, 25 bp, Homo sapien
gccttccaacaaattgcttgttttc

SEQ ID NO: 579337 - DNA, 25 bp, Homo sapien
tcccatctgaacaataaccttattg

SEQ ID NO: 579338 - DNA, 25 bp, Homo sapien
tattgtttgcactaaagtacagtac

SEQ ID NO: 579339 - DNA, 25 bp, Homo sapien
cttttcgccttccaacaaattgctt

SEQ ID NO: 579340 - DNA, 25 bp, Homo sapien
cttgattcatatcaactcttctgta

SEQ ID NO: 579341 - DNA, 25 bp, Homo sapien
gcttcattcatccagtcttgattca

SEQ ID NO: 579342 - DNA, 25 bp, Homo sapien
ggcttcattcatccagtcttgattc

SEQ ID NO: 579343 - DNA, 25 bp, Homo sapien
actaactgatgaggtggacgtgacc

SEQ ID NO: 579344 - DNA, 25 bp, Homo sapien
gcaggtaaccttctgagaggcctaa

SEQ ID NO: 579345 - DNA, 25 bp, Homo sapien
cctaaaattggatccttcagggagg

SEQ ID NO: 579346 - DNA, 25 bp, Homo sapien
ttggaactgtccttcaggccaaact

SEQ ID NO: 579347 - DNA, 25 bp, Homo sapien
agagtccacaagtgagactcacagc

SEQ ID NO: 579348 - DNA, 25 bp, Homo sapien
caggttcccacatttttccaggaca

SEQ ID NO: 579349 - DNA, 25 bp, Homo sapien
ctgatgttgttccttccttagagag

SEQ ID NO: 579350 - DNA, 25 bp, Homo sapien
tgaatggatggtcctctctccaggt

SEQ ID NO: 579351 - DNA, 25 bp, Homo sapien
taattgcccactttatcacaggcac

SEQ ID NO: 579352 - DNA, 25 bp, Homo sapien
gtaaatggtgttccacctccgctgg

SEQ ID NO: 579353 - DNA, 25 bp, Homo sapien
gacactcaggacttgtcaggcaatg

SEQ ID NO: 579354 - DNA, 25 bp, Homo sapien
tcacaggcactatcaggtaaatggt

SEQ ID NO: 579355 - DNA, 25 bp, Homo sapien
caggccacgttatgccacagtgtga

SEQ ID NO: 579356 - DNA, 25 bp, Homo sapien
ccacagtgtgaagagaccgtctgtc

SEQ ID NO: 579357 - DNA, 25 bp, Homo sapien
aagagaccgtctgtcaggaggtcac

SEQ ID NO: 579358 - DNA, 25 bp, Homo sapien
gaccgtctgtcaggaggtcacaggc

SEQ ID NO: 579359 - DNA, 25 bp, Homo sapien
acagagacggtagttgcccatggga

SEQ ID NO: 579360 - DNA, 25 bp, Homo sapien
tcgttttggccatggggtagcatgc

SEQ ID NO: 579361 - DNA, 25 bp, Homo sapien
cacaggcaactctgccatcgttttg

SEQ ID NO: 579362 - DNA, 25 bp, Homo sapien
ggtagcatgcggatggcaggagaaa

SEQ ID NO: 579363 - DNA, 25 bp, Homo sapien
gaagcttctccaccacacaaccacg

SEQ ID NO: 579364 - DNA, 25 bp, Homo sapien
ttaagcccataacccctgaagcttc

SEQ ID NO: 579365 - DNA, 25 bp, Homo sapien
tctgagaaaagacccgaagtcctac

SEQ ID NO: 579366 - DNA, 25 bp, Homo sapien
ccacggcattgaccttctctgagaa

SEQ ID NO: 579367 - DNA, 25 bp, Homo sapien
tctgtgcatagtaaactgtatgctt

SEQ ID NO: 579368 - DNA, 25 bp, Homo sapien
tgctttatcaatgttaaataagcct

SEQ ID NO: 579369 - DNA, 25 bp, Homo sapien
ggccaggaaagtgtgacgttccata

SEQ ID NO: 579370 - DNA, 25 bp, Homo sapien
ccataacagaggctttctgtgcctc

SEQ ID NO: 579371 - DNA, 25 bp, Homo sapien
ctacccatatggaaaaagggagatc

SEQ ID NO: 579372 - DNA, 25 bp, Homo sapien
tacccatatggaaaaagggagatca

SEQ ID NO: 579373 - DNA, 25 bp, Homo sapien
atggaaaaagggagatcattactcc

SEQ ID NO: 579374 - DNA, 25 bp, Homo sapien
gaaaaagggagatcattactcctaa

SEQ ID NO: 579375 - DNA, 25 bp, Homo sapien
tcacttatatcaggacaatgccgga

SEQ ID NO: 579376 - DNA, 25 bp, Homo sapien
tacatggtccactactgagctatta

SEQ ID NO: 579377 - DNA, 25 bp, Homo sapien
tagaaagctcggaattcagcggcaa

SEQ ID NO: 579378 - DNA, 25 bp, Homo sapien
tgtgagtacagccaagagccccttt

SEQ ID NO: 579379 - DNA, 25 bp, Homo sapien
caaaatgaggacatgtcaaaatcac

SEQ ID NO: 579380 - DNA, 25 bp, Homo sapien
cttgggatgactggaatgaccctgg

SEQ ID NO: 579381 - DNA, 25 bp, Homo sapien
cgaacttgggatgactggaatgacc

SEQ ID NO: 579382 - DNA, 25 bp, Homo sapien
gggccctgaagaatcttctttataa

SEQ ID NO: 579383 - DNA, 25 bp, Homo sapien
gctgtgtctttagcacgagagtctg

SEQ ID NO: 579384 - DNA, 25 bp, Homo sapien
ctggggggtcatgcacagatttagt

SEQ ID NO: 579385 - DNA, 25 bp, Homo sapien
ctttagcacgagagtctgttgatgg

SEQ ID NO: 579386 - DNA, 25 bp, Homo sapien
tcatgcacagatttagtggggagtg

SEQ ID NO: 579387 - DNA, 25 bp, Homo sapien
ttatccttgttaattgtcctgagct

SEQ ID NO: 579388 - DNA, 25 bp, Homo sapien
ttgctttgattctcccagtaattgc

SEQ ID NO: 579389 - DNA, 25 bp, Homo sapien
taattgctttgattctcccagtaac

SEQ ID NO: 579390 - DNA, 25 bp, Homo sapien
ccttgttaattgtcctgagcttaca

SEQ ID NO: 579391 - DNA, 25 bp, Homo sapien
cgaatgtttccgacagaaggtggct

SEQ ID NO: 579392 - DNA, 25 bp, Homo sapien
agctctgtctagcaacagtggccga

SEQ ID NO: 579393 - DNA, 25 bp, Homo sapien
agccacatctcaacagcgtactcag

SEQ ID NO: 579394 - DNA, 25 bp, Homo sapien
tcaacagcgtactcagtgacagctc

SEQ ID NO: 579395 - DNA, 25 bp, Homo sapien
tcacctctccatcatagtagggcag

SEQ ID NO: 579396 - DNA, 25 bp, Homo sapien
tccttacaatggaagttgatcagct

SEQ ID NO: 579397 - DNA, 25 bp, Homo sapien
tcaggaagacttagactacaccaac

SEQ ID NO: 579398 - DNA, 25 bp, Homo sapien
gggtggcaaatacatccttacaatg

SEQ ID NO: 579399 - DNA, 25 bp, Homo sapien
cagcatctggttccaagtaaagttc

SEQ ID NO: 579400 - DNA, 25 bp, Homo sapien
acagcatctggttccaagtaaagtt

SEQ ID NO: 579401 - DNA, 25 bp, Homo sapien
ctggctcagaacccacagcatctgg

SEQ ID NO: 579402 - DNA, 25 bp, Homo sapien
catctggttccaagtaaagttcctc

SEQ ID NO: 579403 - DNA, 25 bp, Homo sapien
ttggcaacattctggtggccaaagg

SEQ ID NO: 579404 - DNA, 25 bp, Homo sapien
gagaatgtgggatactaagcaacaa

SEQ ID NO: 579405 - DNA, 25 bp, Homo sapien
agctgcgtggccttaggtgacttac

SEQ ID NO: 579406 - DNA, 25 bp, Homo sapien
gcttagcactgagccaagaatgtag

SEQ ID NO: 579407 - DNA, 25 bp, Homo sapien
gattcatttatctcctagctgcgtg

SEQ ID NO: 579408 - DNA, 25 bp, Homo sapien
gataaaatgtgtcccgtgtagctca

SEQ ID NO: 579409 - DNA, 25 bp, Homo sapien
ctgataaaatgtgtcccgtgtagct

SEQ ID NO: 579410 - DNA, 25 bp, Homo sapien
tgataaaatgtgtcccgtgtagctc

SEQ ID NO: 579411 - DNA, 25 bp, Homo sapien
ataaaatgtgtcccgtgtagctcat

SEQ ID NO: 579412 - DNA, 25 bp, Homo sapien
cccaaatccatcaattgttttgaag

SEQ ID NO: 579413 - DNA, 25 bp, Homo sapien
tcagcagatcccaaatccatcaatt

SEQ ID NO: 579414 - DNA, 25 bp, Homo sapien
aaagtggaaggattttcagcagatc

SEQ ID NO: 579415 - DNA, 25 bp, Homo sapien
tggaaggattttcagcagatcccaa

SEQ ID NO: 579416 - DNA, 25 bp, Homo sapien
ccacaatctctattcgatcatgcat

SEQ ID NO: 579417 - DNA, 25 bp, Homo sapien
tttccacaatctctattcgatcatg

SEQ ID NO: 579418 - DNA, 25 bp, Homo sapien
gtacactttccacaatctctattcg

SEQ ID NO: 579419 - DNA, 25 bp, Homo sapien
actttccacaatctctattcgatca

SEQ ID NO: 579420 - DNA, 25 bp, Homo sapien
gtcgttaacaatgggctggctgatt

SEQ ID NO: 579421 - DNA, 25 bp, Homo sapien
tgactaaagatgcagtaggagacat

SEQ ID NO: 579422 - DNA, 25 bp, Homo sapien
tggcatagcaaggaatgtccccagg

SEQ ID NO: 579423 - DNA, 25 bp, Homo sapien
tcttggagaattacattgggacagc

SEQ ID NO: 579424 - DNA, 25 bp, Homo sapien
gagccctcagtgttcgtattttcac

SEQ ID NO: 579425 - DNA, 25 bp, Homo sapien
cagtgcaggtaggtcgtttctccca

SEQ ID NO: 579426 - DNA, 25 bp, Homo sapien
cattaaatttacatcttcagtgcag

SEQ ID NO: 579427 - DNA, 25 bp, Homo sapien
cacttgtctgagtccgagccctcag

SEQ ID NO: 579428 - DNA, 25 bp, Homo sapien
gctgttacactccagttcagtgagc

SEQ ID NO: 579429 - DNA, 25 bp, Homo sapien
gcatgaagtggctgttacactccag

SEQ ID NO: 579430 - DNA, 25 bp, Homo sapien
ccacatacagataagcaactgaaaa

SEQ ID NO: 579431 - DNA, 25 bp, Homo sapien
cccactcactataaccacatacaga

SEQ ID NO: 579432 - DNA, 25 bp, Homo sapien
caggctgtgggctcagcaatgtaga

SEQ ID NO: 579433 - DNA, 25 bp, Homo sapien
tccagtgtgcgccttgtggttgtcc

SEQ ID NO: 579434 - DNA, 25 bp, Homo sapien
tcctaactctccagtgtgcgccttg

SEQ ID NO: 579435 - DNA, 25 bp, Homo sapien
ggttgtcctgtctgctaaagcaaac

SEQ ID NO: 579436 - DNA, 25 bp, Homo sapien
gcttaaaggttctaggctcccatga

SEQ ID NO: 579437 - DNA, 25 bp, Homo sapien
tgatcaggcttaaaggttctaggct

SEQ ID NO: 579438 - DNA, 25 bp, Homo sapien
aaaggttctaggctcccatgatcca

SEQ ID NO: 579439 - DNA, 25 bp, Homo sapien
tgtttgcagactgatcaggcttaaa

SEQ ID NO: 579440 - DNA, 25 bp, Homo sapien
tgccccagtcgtcacactggactgg

SEQ ID NO: 579441 - DNA, 25 bp, Homo sapien
actgcattcagaggcaaggaaccca

SEQ ID NO: 579442 - DNA, 25 bp, Homo sapien
actggtctactgcattcagaggcaa

SEQ ID NO: 579443 - DNA, 25 bp, Homo sapien
tcctctggcgtaaagatgggatgcc

SEQ ID NO: 579444 - DNA, 25 bp, Homo sapien
gaagcatttcttccttgaggtcctc

SEQ ID NO: 579445 - DNA, 25 bp, Homo sapien
gagacccagtgtctgtgcgttattc

SEQ ID NO: 579446 - DNA, 25 bp, Homo sapien
gatgcagccgttggtcccagtctct

SEQ ID NO: 579447 - DNA, 25 bp, Homo sapien
aagttctccctgacggatgcagccg

SEQ ID NO: 579448 - DNA, 25 bp, Homo sapien
gaaacacgctgagtcctcagagaca

SEQ ID NO: 579449 - DNA, 25 bp, Homo sapien
atgtttgtggtgaagatgtggttct

SEQ ID NO: 579450 - DNA, 25 bp, Homo sapien
caatgtttgtggtgaagatgtggtt

SEQ ID NO: 579451 - DNA, 25 bp, Homo sapien
cagcaatgtttgtggtgaagatgtg

SEQ ID NO: 579452 - DNA, 25 bp, Homo sapien
gcaatgtttgtggtgaagatgtggt

SEQ ID NO: 579453 - DNA, 25 bp, Homo sapien
tctggagaaccccaccagcaaaggt

SEQ ID NO: 579454 - DNA, 25 bp, Homo sapien
ctggagaaccccaccagcaaaggtt

SEQ ID NO: 579455 - DNA, 25 bp, Homo sapien
ttctggagaaccccaccagcaaagg

SEQ ID NO: 579456 - DNA, 25 bp, Homo sapien
tggagaaccccaccagcaaaggtta

SEQ ID NO: 579457 - DNA, 25 bp, Homo sapien
aaggttttcggaggcaagtggtcat

SEQ ID NO: 579458 - DNA, 25 bp, Homo sapien
ctctagcgcttcctgtggagtcctc

SEQ ID NO: 579459 - DNA, 25 bp, Homo sapien
tagcgcttcctgtggagtcctccca

SEQ ID NO: 579460 - DNA, 25 bp, Homo sapien
ctgtgcaaaggttttcggaggcaag

SEQ ID NO: 579461 - DNA, 25 bp, Homo sapien
gaggcgccaagtccttgctacaagc

SEQ ID NO: 579462 - DNA, 25 bp, Homo sapien
acttcactccttatggcccaagcgg

SEQ ID NO: 579463 - DNA, 25 bp, Homo sapien
aagccaccatgtctagtcaatcgca

SEQ ID NO: 579464 - DNA, 25 bp, Homo sapien
gatctgcaccagtgtgtaggcagcc

SEQ ID NO: 579465 - DNA, 25 bp, Homo sapien
tgctttattgaggttagtcagttcc

SEQ ID NO: 579466 - DNA, 25 bp, Homo sapien
gctttattgaggttagtcagttccc

SEQ ID NO: 579467 - DNA, 25 bp, Homo sapien
tctgctttattgaggttagtcagtt

SEQ ID NO: 579468 - DNA, 25 bp, Homo sapien
ctgctttattgaggttagtcagttc

SEQ ID NO: 579469 - DNA, 25 bp, Homo sapien
ggagtcctcattgacattgctatgg

SEQ ID NO: 579470 - DNA, 25 bp, Homo sapien
gctatggaagagatggtcaggctcc

SEQ ID NO: 579471 - DNA, 25 bp, Homo sapien
gacatcataggagggcttgagacct

SEQ ID NO: 579472 - DNA, 25 bp, Homo sapien
aggctccatgagagggggtgggaca

SEQ ID NO: 579473 - DNA, 25 bp, Homo sapien
agctgatcttcggtgaaatctgcat

SEQ ID NO: 579474 - DNA, 25 bp, Homo sapien
ctgatcttcggtgaaatctgcatac

SEQ ID NO: 579475 - DNA, 25 bp, Homo sapien
gtagctgatcttcggtgaaatctgc

SEQ ID NO: 579476 - DNA, 25 bp, Homo sapien
gggtagctgatcttcggtgaaatct

SEQ ID NO: 579477 - DNA, 25 bp, Homo sapien
tgtaggttacatctatctccatggg

SEQ ID NO: 579478 - DNA, 25 bp, Homo sapien
tctccatgggaatgactagatcttt

SEQ ID NO: 579479 - DNA, 25 bp, Homo sapien
ttcacattatcatgtaggttacatc

SEQ ID NO: 579480 - DNA, 25 bp, Homo sapien
catctatctccatgggaatgactag

SEQ ID NO: 579481 - DNA, 25 bp, Homo sapien
ttattacatttatctggagccagct

SEQ ID NO: 579482 - DNA, 25 bp, Homo sapien
tgaagacttctagagccagcttctc

SEQ ID NO: 579483 - DNA, 25 bp, Homo sapien
ttacatttatctggagccagctcct

SEQ ID NO: 579484 - DNA, 25 bp, Homo sapien
catcatgcaggttacatttattaca

SEQ ID NO: 579485 - DNA, 25 bp, Homo sapien
tgtaaattcaaccaagagtttattg

SEQ ID NO: 579486 - DNA, 25 bp, Homo sapien
aaccaagagtttattgaggatgttg

SEQ ID NO: 579487 - DNA, 25 bp, Homo sapien
attcaaccaagagtttattgaggat

SEQ ID NO: 579488 - DNA, 25 bp, Homo sapien
tcaaccaagagtttattgaggatgt

SEQ ID NO: 579489 - DNA, 25 bp, Homo sapien
ccaaacagattctcttgggcatctg

SEQ ID NO: 579490 - DNA, 25 bp, Homo sapien
catttccagaattggtacagctcta

SEQ ID NO: 579491 - DNA, 25 bp, Homo sapien
gggcatctgtttggtgttagcattt

SEQ ID NO: 579492 - DNA, 25 bp, Homo sapien
agcagccttgtatttgatcttcctc

SEQ ID NO: 579493 - DNA, 25 bp, Homo sapien
taaggtgtggcaatagcaactgtcc

SEQ ID NO: 579494 - DNA, 25 bp, Homo sapien
tcacaaatagtcttgtttccacctg

SEQ ID NO: 579495 - DNA, 25 bp, Homo sapien
catctcaggcaggtgctaggtgaag

SEQ ID NO: 579496 - DNA, 25 bp, Homo sapien
ccttcaagtttccactgtcaagctt

SEQ ID NO: 579497 - DNA, 25 bp, Homo sapien
agatcccctgctttcctttttgagg

SEQ ID NO: 579498 - DNA, 25 bp, Homo sapien
gttcaccaggggcacagatcccctg

SEQ ID NO: 579499 - DNA, 25 bp, Homo sapien
tattggattattttgttcaccaggg

SEQ ID NO: 579500 - DNA, 25 bp, Homo sapien
ggcacagatcccctgctttcctttt

SEQ ID NO: 579501 - DNA, 25 bp, Homo sapien
catatgtaaagctgtttgccttaga

SEQ ID NO: 579502 - DNA, 25 bp, Homo sapien
gatgagctaatgatctttgcatatg

SEQ ID NO: 579503 - DNA, 25 bp, Homo sapien
ggaggacgtcagaagcactgctatc

SEQ ID NO: 579504 - DNA, 25 bp, Homo sapien
cgagttggtcctggctatctctgga

SEQ ID NO: 579505 - DNA, 25 bp, Homo sapien
cggtagagatttttgtttgtttctg

SEQ ID NO: 579506 - DNA, 25 bp, Homo sapien
agtctccggtagagatttttgtttg

SEQ ID NO: 579507 - DNA, 25 bp, Homo sapien
tatgccctttttggggtcgagcaac

SEQ ID NO: 579508 - DNA, 25 bp, Homo sapien
gtccttcttggtcacatttgtaatg

SEQ ID NO: 579509 - DNA, 25 bp, Homo sapien
taatggatattgtagattatgccct

SEQ ID NO: 579510 - DNA, 25 bp, Homo sapien
tctttcaatttgctacctgctcgta

SEQ ID NO: 579511 - DNA, 25 bp, Homo sapien
agcatataggtctcagccatcagag

SEQ ID NO: 579512 - DNA, 25 bp, Homo sapien
gatatggggacaaaggcccaatgtt

SEQ ID NO: 579513 - DNA, 25 bp, Homo sapien
attgggaagagcatataggtctcag

SEQ ID NO: 579514 - DNA, 25 bp, Homo sapien
tcagagcagcacagatatggggaca

SEQ ID NO: 579515 - DNA, 25 bp, Homo sapien
tttctctgttcttcttatctttttc

SEQ ID NO: 579516 - DNA, 25 bp, Homo sapien
actttctctgttcttcttatctttt

SEQ ID NO: 579517 - DNA, 25 bp, Homo sapien
tcagtcaattccactttctctgttc

SEQ ID NO: 579518 - DNA, 25 bp, Homo sapien
tctctgttcttcttatctttttcct

SEQ ID NO: 579519 - DNA, 25 bp, Homo sapien
cctgtcaggcggacacagcaaggcg

SEQ ID NO: 579520 - DNA, 25 bp, Homo sapien
caggacctgctaaatccctgtcagg

SEQ ID NO: 579521 - DNA, 25 bp, Homo sapien
catcttttgaccgaaagttcaggaa

SEQ ID NO: 579522 - DNA, 25 bp, Homo sapien
gggtctgttgcttcctccggcaatg

SEQ ID NO: 579523 - DNA, 25 bp, Homo sapien
ggatgatcaggagctttggccactg

SEQ ID NO: 579524 - DNA, 25 bp, Homo sapien
gatgatcaggagctttggccactga

SEQ ID NO: 579525 - DNA, 25 bp, Homo sapien
cactgatctgagcccggaactgcca

SEQ ID NO: 579526 - DNA, 25 bp, Homo sapien
gctttggccactgatctgagcccgg

SEQ ID NO: 579527 - DNA, 25 bp, Homo sapien
taaagtccatgaagaatcttgttca

SEQ ID NO: 579528 - DNA, 25 bp, Homo sapien
catgaagaatcttgttcatctgagc

SEQ ID NO: 579529 - DNA, 25 bp, Homo sapien
ttaaagtccatgaagaatcttgttc

SEQ ID NO: 579530 - DNA, 25 bp, Homo sapien
agtccatgaagaatcttgttcatct

SEQ ID NO: 579531 - DNA, 25 bp, Homo sapien
gtcttgtgactatggtaacttctga

SEQ ID NO: 579532 - DNA, 25 bp, Homo sapien
ccaatagtcttgtgactatggtaac

SEQ ID NO: 579533 - DNA, 25 bp, Homo sapien
ctatggtaacttctgatggcacact

SEQ ID NO: 579534 - DNA, 25 bp, Homo sapien
ataaccaatagtcttgtgactatgg

SEQ ID NO: 579535 - DNA, 25 bp, Homo sapien
gggaatctgcactgactgcctgttt

SEQ ID NO: 579536 - DNA, 25 bp, Homo sapien
ggaatctgcactgactgcctgtttg

SEQ ID NO: 579537 - DNA, 25 bp, Homo sapien
cggttgtcgtattgaagtgttattc

SEQ ID NO: 579538 - DNA, 25 bp, Homo sapien
tgtagtacttttctcggttgtcgta

SEQ ID NO: 579539 - DNA, 25 bp, Homo sapien
gtttaccctgacagagtaatgatat

SEQ ID NO: 579540 - DNA, 25 bp, Homo sapien
cagagtaatgatatgttggctggat

SEQ ID NO: 579541 - DNA, 25 bp, Homo sapien
tctctttgtgagcagtcatagagtt

SEQ ID NO: 579542 - DNA, 25 bp, Homo sapien
tttctcagcagtgtcagccgccagc

SEQ ID NO: 579543 - DNA, 25 bp, Homo sapien
agtttctcagcagtgtcagccgcca

SEQ ID NO: 579544 - DNA, 25 bp, Homo sapien
tctcagcagtgtcagccgccagcga

SEQ ID NO: 579545 - DNA, 25 bp, Homo sapien
agaagccttccgttgcatcctccat

SEQ ID NO: 579546 - DNA, 25 bp, Homo sapien
gagaagccttccgttgcatcctcca

SEQ ID NO: 579547 - DNA, 25 bp, Homo sapien
ggagaagccttccgttgcatcctcc

SEQ ID NO: 579548 - DNA, 25 bp, Homo sapien
tgtcatacccaagtaagagatgctt

SEQ ID NO: 579549 - DNA, 25 bp, Homo sapien
ggctaagttcttattcaaatgcagc

SEQ ID NO: 579550 - DNA, 25 bp, Homo sapien
ggagaagggcctgtttgcttctaag

SEQ ID NO: 579551 - DNA, 25 bp, Homo sapien
catcccatacagatttgccaagaag

SEQ ID NO: 579552 - DNA, 25 bp, Homo sapien
tatcaacctcatgccacttgttttc

SEQ ID NO: 579553 - DNA, 25 bp, Homo sapien
ttttatcaacctcatgccacttgtt

SEQ ID NO: 579554 - DNA, 25 bp, Homo sapien
tttgggcctaacatggaagcatggg

SEQ ID NO: 579555 - DNA, 25 bp, Homo sapien
catcttttgatgtatgcccaggact

SEQ ID NO: 579556 - DNA, 25 bp, Homo sapien
gagaaagtgcctctgacagtgggtc

SEQ ID NO: 579557 - DNA, 25 bp, Homo sapien
ccaatgggagataaaagttcgtgat

SEQ ID NO: 579558 - DNA, 25 bp, Homo sapien
tatcaattctgaaggcccaagttgg

SEQ ID NO: 579559 - DNA, 25 bp, Homo sapien
tttgtttatgcaagtccaaatggcc

SEQ ID NO: 579560 - DNA, 25 bp, Homo sapien
ctgacatattcgcaggaaaataaac

SEQ ID NO: 579561 - DNA, 25 bp, Homo sapien
gcggacatgtgaactaaactgaaac

SEQ ID NO: 579562 - DNA, 25 bp, Homo sapien
cctcttaagttcagtgtttgcggac

SEQ ID NO: 579563 - DNA, 25 bp, Homo sapien
actgaaactgacatattcgcaggaa

SEQ ID NO: 579564 - DNA, 25 bp, Homo sapien
gaatttagtctcagcacttgaactg

SEQ ID NO: 579565 - DNA, 25 bp, Homo sapien
agggtttcatcatggctctcgccgg

SEQ ID NO: 579566 - DNA, 25 bp, Homo sapien
agtactggcacttctgtatgtgttc

SEQ ID NO: 579567 - DNA, 25 bp, Homo sapien
gaactgttaagtactggcacttctg

SEQ ID NO: 579568 - DNA, 25 bp, Homo sapien
ttattgaacacttgcactggcagag

SEQ ID NO: 579569 - DNA, 25 bp, Homo sapien
tacagggcatcctccggtaatagag

SEQ ID NO: 579570 - DNA, 25 bp, Homo sapien
tttctctctgggtcattcatcaatg

SEQ ID NO: 579571 - DNA, 25 bp, Homo sapien
taatagagggccgattgcatttggc

SEQ ID NO: 579572 - DNA, 25 bp, Homo sapien
gcgcgtgcccggtcaccgggaggga

SEQ ID NO: 579573 - DNA, 25 bp, Homo sapien
tcaccgggagggagcggagcggcat

SEQ ID NO: 579574 - DNA, 25 bp, Homo sapien
ccggtcaccgggagggagcggagcg

SEQ ID NO: 579575 - DNA, 25 bp, Homo sapien
agcgagcgcgcgtgcccggtcaccg

SEQ ID NO: 579576 - DNA, 25 bp, Homo sapien
actcggagatccagcgcccggcggg

SEQ ID NO: 579577 - DNA, 25 bp, Homo sapien
tcctcctcgcctcgggcgacgcagc

SEQ ID NO: 579578 - DNA, 25 bp, Homo sapien
ccggggcactcggagatccagcgcc

SEQ ID NO: 579579 - DNA, 25 bp, Homo sapien
gggcactcggagatccagcgcccgg

SEQ ID NO: 579580 - DNA, 25 bp, Homo sapien
attcttccgaaaaggaagagtcctg

SEQ ID NO: 579581 - DNA, 25 bp, Homo sapien
tcttggaactgcataagctcaccct

SEQ ID NO: 579582 - DNA, 25 bp, Homo sapien
tatcatcccatacaacggcgttaat

SEQ ID NO: 579583 - DNA, 25 bp, Homo sapien
caagttatcagtgcaaggattggga

SEQ ID NO: 579584 - DNA, 25 bp, Homo sapien
caattcttaggcatgtgcacctcca

SEQ ID NO: 579585 - DNA, 25 bp, Homo sapien
gaaaagccgagaagtactcactcca

SEQ ID NO: 579586 - DNA, 25 bp, Homo sapien
ttggcagacaatcctagaacctagc

SEQ ID NO: 579587 - DNA, 25 bp, Homo sapien
gagggaatgctataccaacagtgag

SEQ ID NO: 579588 - DNA, 25 bp, Homo sapien
ccgagccttccagattaagacggta

SEQ ID NO: 579589 - DNA, 25 bp, Homo sapien
ccagcggtatagaagggaaggcaac

SEQ ID NO: 579590 - DNA, 25 bp, Homo sapien
tggtgtcctcaagaatcaaatgaag

SEQ ID NO: 579591 - DNA, 25 bp, Homo sapien
tatttgtgacaacaggcgggtgaga

SEQ ID NO: 579592 - DNA, 25 bp, Homo sapien
tctggccatatttaggctgaagcgt

SEQ ID NO: 579593 - DNA, 25 bp, Homo sapien
cggcccagatcatgtaaggttttat

SEQ ID NO: 579594 - DNA, 25 bp, Homo sapien
caattacgtgcatccaagtggctct

SEQ ID NO: 579595 - DNA, 25 bp, Homo sapien
ggccatgaaagatgtcccaaacagc

SEQ ID NO: 579596 - DNA, 25 bp, Homo sapien
caaatactttaagggtctgagacat

SEQ ID NO: 579597 - DNA, 25 bp, Homo sapien
tcagatttgtgtgacgactagaggg

SEQ ID NO: 579598 - DNA, 25 bp, Homo sapien
agtgagaggaagcatggcttgcaat

SEQ ID NO: 579599 - DNA, 25 bp, Homo sapien
agaagtgcaaacaagcatccgcccc

SEQ ID NO: 579600 - DNA, 25 bp, Homo sapien
gaagcatggcttgcaatgcattttg

SEQ ID NO: 579601 - DNA, 25 bp, Homo sapien
gcatccgccccggaagaagggaaga

SEQ ID NO: 579602 - DNA, 25 bp, Homo sapien
gactgtagattccttgtgcctcccc

SEQ ID NO: 579603 - DNA, 25 bp, Homo sapien
gtcttacacctgatggcaccctaca

SEQ ID NO: 579604 - DNA, 25 bp, Homo sapien
gagactgctactatgacaaccattg

SEQ ID NO: 579605 - DNA, 25 bp, Homo sapien
caagatgatggctcagaattctggc

SEQ ID NO: 579606 - DNA, 25 bp, Homo sapien
gacaatgacccagtttgaattccag

SEQ ID NO: 579607 - DNA, 25 bp, Homo sapien
ggccaaggcatacctcagtgctgtc

SEQ ID NO: 579608 - DNA, 25 bp, Homo sapien
tcttagaaggcagggaacgatgatt

SEQ ID NO: 579609 - DNA, 25 bp, Homo sapien
aatttggcctctctcgacaatgacc

SEQ ID NO: 579610 - DNA, 25 bp, Homo sapien
aaatatggagtcaagcgctggaagc

SEQ ID NO: 579611 - DNA, 25 bp, Homo sapien
accttaaggtcagtatttgtgagcc

SEQ ID NO: 579612 - DNA, 25 bp, Homo sapien
gagctaacaacaagtgaccttaagg

SEQ ID NO: 579613 - DNA, 25 bp, Homo sapien
cagcagtgaggttaacagaggttta

SEQ ID NO: 579614 - DNA, 25 bp, Homo sapien
gaggacgctgctcaaaaacagaaga

SEQ ID NO: 579615 - DNA, 25 bp, Homo sapien
tatgtcaacaactaataatgctggc

SEQ ID NO: 579616 - DNA, 25 bp, Homo sapien
aagaggctctccaggtaaaataaag

SEQ ID NO: 579617 - DNA, 25 bp, Homo sapien
taacttgctctaactctggactcct

SEQ ID NO: 579618 - DNA, 25 bp, Homo sapien
tgaagggtaaaaaaggatagcagcc

SEQ ID NO: 579619 - DNA, 25 bp, Homo sapien
tcctcaagctgtcggtgaaattggc

SEQ ID NO: 579620 - DNA, 25 bp, Homo sapien
tctgccatgagtaattgcaacccaa

SEQ ID NO: 579621 - DNA, 25 bp, Homo sapien
tcaagaattcagactagggaccacc

SEQ ID NO: 579622 - DNA, 25 bp, Homo sapien
gtaggtattacagccctgcagatgg

SEQ ID NO: 579623 - DNA, 25 bp, Homo sapien
taacaaagggtagggacagatatct

SEQ ID NO: 579624 - DNA, 25 bp, Homo sapien
acattatgtccccagttaagcagga

SEQ ID NO: 579625 - DNA, 25 bp, Homo sapien
tagcccgggctaagaggttaactga

SEQ ID NO: 579626 - DNA, 25 bp, Homo sapien
caagaagaaggtgagacatttcatg

SEQ ID NO: 579627 - DNA, 25 bp, Homo sapien
aagaagaaggtgagacatttcatgt

SEQ ID NO: 579628 - DNA, 25 bp, Homo sapien
gaagaaggtgagacatttcatgttc

SEQ ID NO: 579629 - DNA, 25 bp, Homo sapien
agaagaaggtgagacatttcatgtt

SEQ ID NO: 579630 - DNA, 25 bp, Homo sapien
ctttgagcttttcttggacctgttc

SEQ ID NO: 579631 - DNA, 25 bp, Homo sapien
gagcttttcttggacctgttcttta

SEQ ID NO: 579632 - DNA, 25 bp, Homo sapien
tttgagcttttcttggacctgttct

SEQ ID NO: 579633 - DNA, 25 bp, Homo sapien
gctggtatttgctttctttgagctt

SEQ ID NO: 579634 - DNA, 25 bp, Homo sapien
gtcttcaaggtaattatttcataac

SEQ ID NO: 579635 - DNA, 25 bp, Homo sapien
ttatttcataacaaactggtggcaa

SEQ ID NO: 579636 - DNA, 25 bp, Homo sapien
aattatttcataacaaactggtggc

SEQ ID NO: 579637 - DNA, 25 bp, Homo sapien
tttagtcttcaaggtaattatttca

SEQ ID NO: 579638 - DNA, 25 bp, Homo sapien
ctctaatggtgggataaagaccctg

SEQ ID NO: 579639 - DNA, 25 bp, Homo sapien
gttgttgttactgagattctgctgg

SEQ ID NO: 579640 - DNA, 25 bp, Homo sapien
tttacgggggaatatatcagcagcc

SEQ ID NO: 579641 - DNA, 25 bp, Homo sapien
gccgggataaggttgttgttactga

SEQ ID NO: 579642 - DNA, 25 bp, Homo sapien
tgtgtcctggcaaccgttgagtccc

SEQ ID NO: 579643 - DNA, 25 bp, Homo sapien
tgtacatctgccatcaaatcattat

SEQ ID NO: 579644 - DNA, 25 bp, Homo sapien
accacaaaatgtacatctgccatca

SEQ ID NO: 579645 - DNA, 25 bp, Homo sapien
caaccgttgagtcccacctggtggc

SEQ ID NO: 579646 - DNA, 25 bp, Homo sapien
caccaagttacaggcttatggaaag

SEQ ID NO: 579647 - DNA, 25 bp, Homo sapien
caggcttatggaaagggtccctctt

SEQ ID NO: 579648 - DNA, 25 bp, Homo sapien
taaaccggtcatgcagctgttgctt

SEQ ID NO: 579649 - DNA, 25 bp, Homo sapien
aaacgtcaggactaaaccggtcatg

SEQ ID NO: 579650 - DNA, 25 bp, Homo sapien
tctaggagaagggtaaacatacgac

SEQ ID NO: 579651 - DNA, 25 bp, Homo sapien
tcgagtgaaacatgcactgcctgac

SEQ ID NO: 579652 - DNA, 25 bp, Homo sapien
tgacctgtcacaacaacttcccatg

SEQ ID NO: 579653 - DNA, 25 bp, Homo sapien
gagggtgcgctctctccctaatcga

SEQ ID NO: 579654 - DNA, 25 bp, Homo sapien
ctttgtcctctgcaagttctccgta

SEQ ID NO: 579655 - DNA, 25 bp, Homo sapien
gacatctggtatacggatttcatct

SEQ ID NO: 579656 - DNA, 25 bp, Homo sapien
aagttctccgtaaaacatcgcatgg

SEQ ID NO: 579657 - DNA, 25 bp, Homo sapien
gagaaaagcagcaggttcgacatct

SEQ ID NO: 579658 - DNA, 25 bp, Homo sapien
gcactttcgagctcttaccctggaa

SEQ ID NO: 579659 - DNA, 25 bp, Homo sapien
gcactagagcaaatggcacctgact

SEQ ID NO: 579660 - DNA, 25 bp, Homo sapien
gaatactggctactcatactcgatg

SEQ ID NO: 579661 - DNA, 25 bp, Homo sapien
tcctagagcatggtcagcactttcg

SEQ ID NO: 579662 - DNA, 25 bp, Homo sapien
tgataggcgaagtcacctactgatg

SEQ ID NO: 579663 - DNA, 25 bp, Homo sapien
ctcttctctgataggcgaagtcacc

SEQ ID NO: 579664 - DNA, 25 bp, Homo sapien
acttgatagtacacctgcggctcag

SEQ ID NO: 579665 - DNA, 25 bp, Homo sapien
gatagtacacctgcggctcagtgat

SEQ ID NO: 579666 - DNA, 25 bp, Homo sapien
tttccaaatagttccaagttcaatg

SEQ ID NO: 579667 - DNA, 25 bp, Homo sapien
aatgtccacgagcacaaatgaaacc

SEQ ID NO: 579668 - DNA, 25 bp, Homo sapien
caaaagtatggactgcaatgctatc

SEQ ID NO: 579669 - DNA, 25 bp, Homo sapien
ggcagtctcccaaagaggcacgtaa

SEQ ID NO: 579670 - DNA, 25 bp, Homo sapien
caggaaattaacacaggctctggca

SEQ ID NO: 579671 - DNA, 25 bp, Homo sapien
ggcaaggtgagggacaatgtacttt

SEQ ID NO: 579672 - DNA, 25 bp, Homo sapien
ttggcagcataaagtgtggccagca

SEQ ID NO: 579673 - DNA, 25 bp, Homo sapien
tgtactttttggcagcataaagtgt

SEQ ID NO: 579674 - DNA, 25 bp, Homo sapien
taggcacacgactggaaacggtgac

SEQ ID NO: 579675 - DNA, 25 bp, Homo sapien
tgagagttaataccccggactgtgc

SEQ ID NO: 579676 - DNA, 25 bp, Homo sapien
tagaaggtgtctggctcgatctgca

SEQ ID NO: 579677 - DNA, 25 bp, Homo sapien
ggcattcagagtttccctacggaga

SEQ ID NO: 579678 - DNA, 25 bp, Homo sapien
cacagtgaatacgtcagggcagtca

SEQ ID NO: 579679 - DNA, 25 bp, Homo sapien
tgaacaacgacaaagactgccagcc

SEQ ID NO: 579680 - DNA, 25 bp, Homo sapien
taagcatcaggcaagttggaaccag

SEQ ID NO: 579681 - DNA, 25 bp, Homo sapien
gaatgaacgcactgcacctgaagac

SEQ ID NO: 579682 - DNA, 25 bp, Homo sapien
tagctgagcttatttaaacacctta

SEQ ID NO: 579683 - DNA, 25 bp, Homo sapien
tgatgcacaagtggctacagtgtct

SEQ ID NO: 579684 - DNA, 25 bp, Homo sapien
cattcatgtgtctaacaagatctgc

SEQ ID NO: 579685 - DNA, 25 bp, Homo sapien
gaatgtcacattagaactgctagcc

SEQ ID NO: 579686 - DNA, 25 bp, Homo sapien
ctgaactgtattaagctgtctgcca

SEQ ID NO: 579687 - DNA, 25 bp, Homo sapien
acacagtaggtggcctcattcttcc

SEQ ID NO: 579688 - DNA, 25 bp, Homo sapien
cacagtaggtggcctcattcttcca

SEQ ID NO: 579689 - DNA, 25 bp, Homo sapien
tggactccggatatttctcaggctg

SEQ ID NO: 579690 - DNA, 25 bp, Homo sapien
gaaactttgacaccgtcttctggac

SEQ ID NO: 579691 - DNA, 25 bp, Homo sapien
tgctgtgagcaagaccgggcacttt

SEQ ID NO: 579692 - DNA, 25 bp, Homo sapien
cagcaaagcggacaggaaagaaact

SEQ ID NO: 579693 - DNA, 25 bp, Homo sapien
tccaaaggccataaagggaggtcag

SEQ ID NO: 579694 - DNA, 25 bp, Homo sapien
ccaaaggccataaagggaggtcagt

SEQ ID NO: 579695 - DNA, 25 bp, Homo sapien
caaaggccataaagggaggtcagtg

SEQ ID NO: 579696 - DNA, 25 bp, Homo sapien
caccttcaatctttgctgatcaatg

SEQ ID NO: 579697 - DNA, 25 bp, Homo sapien
tccatcattgtgacaacatggcccc

SEQ ID NO: 579698 - DNA, 25 bp, Homo sapien
acctgttgtgaagcagtcttttagc

SEQ ID NO: 579699 - DNA, 25 bp, Homo sapien
tgagtgccattctgcaagataatgt

SEQ ID NO: 579700 - DNA, 25 bp, Homo sapien
gccacttgtcatgtgtctggtgaca

SEQ ID NO: 579701 - DNA, 25 bp, Homo sapien
gtcatgtgtctggtgacattaagct

SEQ ID NO: 579702 - DNA, 25 bp, Homo sapien
ggtgacattaagctgtttcttccca

SEQ ID NO: 579703 - DNA, 25 bp, Homo sapien
aagaagccacttgtcatgtgtctgg

SEQ ID NO: 579704 - DNA, 25 bp, Homo sapien
cctctcaggctgaaaggagctctct

SEQ ID NO: 579705 - DNA, 25 bp, Homo sapien
gatgccctaggtacccttgtgttga

SEQ ID NO: 579706 - DNA, 25 bp, Homo sapien
ttactacggtacaggagaactccac

SEQ ID NO: 579707 - DNA, 25 bp, Homo sapien
gaagaggcttatactgggtcatgct

SEQ ID NO: 579708 - DNA, 25 bp, Homo sapien
ccttcaaaaaagagagccgcctgta

SEQ ID NO: 579709 - DNA, 25 bp, Homo sapien
tctggatgctctctgtaacaaggga

SEQ ID NO: 579710 - DNA, 25 bp, Homo sapien
cccatgaggatccagcgtaggcatt

SEQ ID NO: 579711 - DNA, 25 bp, Homo sapien
gaaaccacttggtaactctgcttgg

SEQ ID NO: 579712 - DNA, 25 bp, Homo sapien
cttcagcgttgtaccatttggtttt

SEQ ID NO: 579713 - DNA, 25 bp, Homo sapien
tcagcgttgtaccatttggttttat

SEQ ID NO: 579714 - DNA, 25 bp, Homo sapien
gcgttgtaccatttggttttattgc

SEQ ID NO: 579715 - DNA, 25 bp, Homo sapien
cagcgttgtaccatttggttttatt

SEQ ID NO: 579716 - DNA, 25 bp, Homo sapien
tgatagctcatgagagaaagctgat

SEQ ID NO: 579717 - DNA, 25 bp, Homo sapien
gttgatttgagatgggtactgcccc

SEQ ID NO: 579718 - DNA, 25 bp, Homo sapien
tgccgggatgcaggaagaaacactg

SEQ ID NO: 579719 - DNA, 25 bp, Homo sapien
catgtttttggctgatgatagctca

SEQ ID NO: 579720 - DNA, 25 bp, Homo sapien
catggttattattatctaagaggac

SEQ ID NO: 579721 - DNA, 25 bp, Homo sapien
cagtagaaagggcttgatgtatatt

SEQ ID NO: 579722 - DNA, 25 bp, Homo sapien
tggacagagtgagaaaggagtagcg

SEQ ID NO: 579723 - DNA, 25 bp, Homo sapien
cagtgacagatattaatggagcaga

SEQ ID NO: 579724 - DNA, 25 bp, Homo sapien
caccgcttcatccagtcctggctct

SEQ ID NO: 579725 - DNA, 25 bp, Homo sapien
gtgcccacaccgcttcatccagtcc

SEQ ID NO: 579726 - DNA, 25 bp, Homo sapien
ctcagtgcccacaccgcttcatcca

SEQ ID NO: 579727 - DNA, 25 bp, Homo sapien
gcccacaccgcttcatccagtcctg

SEQ ID NO: 579728 - DNA, 25 bp, Homo sapien
taggacctgttagctgtagggctgt

SEQ ID NO: 579729 - DNA, 25 bp, Homo sapien
tgagcaccttcaccagtcgccttcc

SEQ ID NO: 579730 - DNA, 25 bp, Homo sapien
tgaataactgaagacaaccaaggag

SEQ ID NO: 579731 - DNA, 25 bp, Homo sapien
tgtgttgaatgggaggctggctagg

SEQ ID NO: 579732 - DNA, 25 bp, Homo sapien
ttcacccttgtggaggttttgtcca

SEQ ID NO: 579733 - DNA, 25 bp, Homo sapien
gcaggcagcatgaagtctaaagtgc

SEQ ID NO: 579734 - DNA, 25 bp, Homo sapien
tccataggtgaaggtgtatttgtgg

SEQ ID NO: 579735 - DNA, 25 bp, Homo sapien
cagcatgaagtctaaagtgccagct

SEQ ID NO: 579736 - DNA, 25 bp, Homo sapien
agccgtagcttcctctcatccccat

SEQ ID NO: 579737 - DNA, 25 bp, Homo sapien
caaccagccgtagcttcctctcatc

SEQ ID NO: 579738 - DNA, 25 bp, Homo sapien
cagccgtagcttcctctcatcccca

SEQ ID NO: 579739 - DNA, 25 bp, Homo sapien
accagccgtagcttcctctcatccc

SEQ ID NO: 579740 - DNA, 25 bp, Homo sapien
ccgcgaggcttgatttatcgaacgg

SEQ ID NO: 579741 - DNA, 25 bp, Homo sapien
cgtgaaaatactgtcaggcttctgg

SEQ ID NO: 579742 - DNA, 25 bp, Homo sapien
tttatcgaacgggagatcaacgtga

SEQ ID NO: 579743 - DNA, 25 bp, Homo sapien
cgggagatcaacgtgaaaatactgt

SEQ ID NO: 579744 - DNA, 25 bp, Homo sapien
ctgcgttggcgtcgcagttcacaca

SEQ ID NO: 579745 - DNA, 25 bp, Homo sapien
ctgcgaaacgggaagcgcggcagcc

SEQ ID NO: 579746 - DNA, 25 bp, Homo sapien
cagagctactgcgttggcgtcgcag

SEQ ID NO: 579747 - DNA, 25 bp, Homo sapien
agccccgctcctccagagctactgc

SEQ ID NO: 579748 - DNA, 25 bp, Homo sapien
cacaagtaaagatttgtgaaccagc

SEQ ID NO: 579749 - DNA, 25 bp, Homo sapien
aacacacacgtttggactgacagtt

SEQ ID NO: 579750 - DNA, 25 bp, Homo sapien
gaaccagcgatttggcaaaacacac

SEQ ID NO: 579751 - DNA, 25 bp, Homo sapien
tggcaaaacacacacgtttggactg

SEQ ID NO: 579752 - DNA, 25 bp, Homo sapien
tttataagtatcactatcttctcca

SEQ ID NO: 579753 - DNA, 25 bp, Homo sapien
catcatcatctttataagtatcact

SEQ ID NO: 579754 - DNA, 25 bp, Homo sapien
catcatctttataagtatcactatc

SEQ ID NO: 579755 - DNA, 25 bp, Homo sapien
catctttataagtatcactatcttc

SEQ ID NO: 579756 - DNA, 25 bp, Homo sapien
tgaccactaggtgttttcgccgaac

SEQ ID NO: 579757 - DNA, 25 bp, Homo sapien
gccgaactttctggtgaatggcaga

SEQ ID NO: 579758 - DNA, 25 bp, Homo sapien
tatgtagcatgaatacaagtcagcc

SEQ ID NO: 579759 - DNA, 25 bp, Homo sapien
tcagccaattggtagggtgaagaaa

SEQ ID NO: 579760 - DNA, 25 bp, Homo sapien
agtaggacagattcccacactttcc

SEQ ID NO: 579761 - DNA, 25 bp, Homo sapien
ccactgttgttctgagcgtcctcag

SEQ ID NO: 579762 - DNA, 25 bp, Homo sapien
ttggccactgttgttctgagcgtcc

SEQ ID NO: 579763 - DNA, 25 bp, Homo sapien
tcagtaggacagattcccacacttt

SEQ ID NO: 579764 - DNA, 25 bp, Homo sapien
gcccagtcctgcacgtctaggtcct

SEQ ID NO: 579765 - DNA, 25 bp, Homo sapien
cccagtcctgcacgtctaggtcctc

SEQ ID NO: 579766 - DNA, 25 bp, Homo sapien
cagtcctgcacgtctaggtcctcca

SEQ ID NO: 579767 - DNA, 25 bp, Homo sapien
agcccagtcctgcacgtctaggtcc

SEQ ID NO: 579768 - DNA, 25 bp, Homo sapien
cagacccaaactccttggattctgg

SEQ ID NO: 579769 - DNA, 25 bp, Homo sapien
gacccaaactccttggattctgggc

SEQ ID NO: 579770 - DNA, 25 bp, Homo sapien
caaactccttggattctgggcccac

SEQ ID NO: 579771 - DNA, 25 bp, Homo sapien
ctccttggattctgggcccacccag

SEQ ID NO: 579772 - DNA, 25 bp, Homo sapien
catttggatgtagtaaagtgcaatt

SEQ ID NO: 579773 - DNA, 25 bp, Homo sapien
ttggatgtagtaaagtgcaattctt

SEQ ID NO: 579774 - DNA, 25 bp, Homo sapien
ttcgtcagcatttggatgtagtaaa

SEQ ID NO: 579775 - DNA, 25 bp, Homo sapien
cagcatttggatgtagtaaagtgca

SEQ ID NO: 579776 - DNA, 25 bp, Homo sapien
gaagtggtcagctgaccccaatcag

SEQ ID NO: 579777 - DNA, 25 bp, Homo sapien
ggaagtggtcagctgaccccaatca

SEQ ID NO: 579778 - DNA, 25 bp, Homo sapien
gtggtcagctgaccccaatcagcat

SEQ ID NO: 579779 - DNA, 25 bp, Homo sapien
cagctgaccccaatcagcatcccag

SEQ ID NO: 579780 - DNA, 25 bp, Homo sapien
tcttaaaaagccagtcccatctctt

SEQ ID NO: 579781 - DNA, 25 bp, Homo sapien
cttaaaaagccagtcccatctctta

SEQ ID NO: 579782 - DNA, 25 bp, Homo sapien
ttaaaaagccagtcccatctcttaa

SEQ ID NO: 579783 - DNA, 25 bp, Homo sapien
tatgaaaaccgcagcaggcaatctc

SEQ ID NO: 579784 - DNA, 25 bp, Homo sapien
caggagcagttgagacacgaggcat

SEQ ID NO: 579785 - DNA, 25 bp, Homo sapien
cctgagatgtcagacgctggctgct

SEQ ID NO: 579786 - DNA, 25 bp, Homo sapien
tgagaggcaccgaaataaggacagc

SEQ ID NO: 579787 - DNA, 25 bp, Homo sapien
tattgatctagtaattatttagaag

SEQ ID NO: 579788 - DNA, 25 bp, Homo sapien
ctcatttatattggttcccattgtt

SEQ ID NO: 579789 - DNA, 25 bp, Homo sapien
tgaagttcacctacttatagttatt

SEQ ID NO: 579790 - DNA, 25 bp, Homo sapien
aatatagctgtaattacatcccaca

SEQ ID NO: 579791 - DNA, 25 bp, Homo sapien
gttaaatcacatgtctagtcattcc

SEQ ID NO: 579792 - DNA, 25 bp, Homo sapien
attattttgaccaagtccaattcag

SEQ ID NO: 579793 - DNA, 25 bp, Homo sapien
tgatattagtcctcccatccaaaaa

SEQ ID NO: 579794 - DNA, 25 bp, Homo sapien
aaatcccttgtttgatatacttgag

SEQ ID NO: 579795 - DNA, 25 bp, Homo sapien
gaaggaccatggcattccccattgg

SEQ ID NO: 579796 - DNA, 25 bp, Homo sapien
ttttagtcgcaatgcaaatgcactg

SEQ ID NO: 579797 - DNA, 25 bp, Homo sapien
tcccaccgatgaggtgatatgggct

SEQ ID NO: 579798 - DNA, 25 bp, Homo sapien
tttaacttcctggtcaggacccagc

SEQ ID NO: 579799 - DNA, 25 bp, Homo sapien
gcaggacctggtttcaagaagggcc

SEQ ID NO: 579800 - DNA, 25 bp, Homo sapien
caggacctggtttcaagaagggcct

SEQ ID NO: 579801 - DNA, 25 bp, Homo sapien
atgcaggacctggtttcaagaaggg

SEQ ID NO: 579802 - DNA, 25 bp, Homo sapien
tgcaggacctggtttcaagaagggc

SEQ ID NO: 579803 - DNA, 25 bp, Homo sapien
ctgctcagagatgtctccagcattc

SEQ ID NO: 579804 - DNA, 25 bp, Homo sapien
gctcagagatgtctccagcattctt

SEQ ID NO: 579805 - DNA, 25 bp, Homo sapien
ctccagcattcttagttgagtaatt

SEQ ID NO: 579806 - DNA, 25 bp, Homo sapien
tccagcattcttagttgagtaattg

SEQ ID NO: 579807 - DNA, 25 bp, Homo sapien
cattctaagctctggttggtcctca

SEQ ID NO: 579808 - DNA, 25 bp, Homo sapien
gaggctaggctccaatttgacaggc

SEQ ID NO: 579809 - DNA, 25 bp, Homo sapien
catagatggacacaccattccaggc

SEQ ID NO: 579810 - DNA, 25 bp, Homo sapien
tgtgaggaccttgcatgcaataggc

SEQ ID NO: 579811 - DNA, 25 bp, Homo sapien
tatggcgtggattgaaacaacagct

SEQ ID NO: 579812 - DNA, 25 bp, Homo sapien
cagatattcacatgaggaccctctc

SEQ ID NO: 579813 - DNA, 25 bp, Homo sapien
tccttgacgatgtgaagccttcaga

SEQ ID NO: 579814 - DNA, 25 bp, Homo sapien
agtcatccaaggacgaaatcccgag

SEQ ID NO: 579815 - DNA, 25 bp, Homo sapien
gactcgatgacaaacccaagttctg

SEQ ID NO: 579816 - DNA, 25 bp, Homo sapien
cacagatgactcgatgacaaaccca

SEQ ID NO: 579817 - DNA, 25 bp, Homo sapien
taatgactccacagatgactcgatg

SEQ ID NO: 579818 - DNA, 25 bp, Homo sapien
gactccacagatgactcgatgacaa

SEQ ID NO: 579819 - DNA, 25 bp, Homo sapien
cagtgcagaagggatagtggtcatg

SEQ ID NO: 579820 - DNA, 25 bp, Homo sapien
cagaagggatagtggtcatgagaat

SEQ ID NO: 579821 - DNA, 25 bp, Homo sapien
ggtcatgagaatgcctcattttttc

SEQ ID NO: 579822 - DNA, 25 bp, Homo sapien
atagtggtcatgagaatgcctcatt

SEQ ID NO: 579823 - DNA, 25 bp, Homo sapien
tatcctgtctaattgaatgagtgcc

SEQ ID NO: 579824 - DNA, 25 bp, Homo sapien
tatttcccattgagctactgtttgc

SEQ ID NO: 579825 - DNA, 25 bp, Homo sapien
catttagcattaagcacatgcaggc

SEQ ID NO: 579826 - DNA, 25 bp, Homo sapien
gaatgtagttactctgacgtcccaa

SEQ ID NO: 579827 - DNA, 25 bp, Homo sapien
gaagctgccatactcacctgtaaaa

SEQ ID NO: 579828 - DNA, 25 bp, Homo sapien
gcagctcaggttcagtagaaggtct

SEQ ID NO: 579829 - DNA, 25 bp, Homo sapien
tcatgcctgtccactaaagtgtgaa

SEQ ID NO: 579830 - DNA, 25 bp, Homo sapien
cgtggaaccagtacaacatcatttc

SEQ ID NO: 579831 - DNA, 25 bp, Homo sapien
tggtaacaaggttatgaaaccctca

SEQ ID NO: 579832 - DNA, 25 bp, Homo sapien
catggttaaacgtactgaagtttgg

SEQ ID NO: 579833 - DNA, 25 bp, Homo sapien
tggtgaaatccctacgtaagcagat

SEQ ID NO: 579834 - DNA, 25 bp, Homo sapien
gcagatataatgttggctctaatat

SEQ ID NO: 579835 - DNA, 25 bp, Homo sapien
cgtgaacaagttctttgtagcagca

SEQ ID NO: 579836 - DNA, 25 bp, Homo sapien
tacattagtttgaatagtagagcca

SEQ ID NO: 579837 - DNA, 25 bp, Homo sapien
gacacttccgaatgactctgggact

SEQ ID NO: 579838 - DNA, 25 bp, Homo sapien
tgtgacctagataacatagtcttat

SEQ ID NO: 579839 - DNA, 25 bp, Homo sapien
taggatttagagattagcttgaaca

SEQ ID NO: 579840 - DNA, 25 bp, Homo sapien
atattttacaacatccaactgaagc

SEQ ID NO: 579841 - DNA, 25 bp, Homo sapien
tacaacatccaactgaagctcgttc

SEQ ID NO: 579842 - DNA, 25 bp, Homo sapien
tccaactgaagctcgttcagtattc

SEQ ID NO: 579843 - DNA, 25 bp, Homo sapien
gaagctcgttcagtattctttccat

SEQ ID NO: 579844 - DNA, 25 bp, Homo sapien
gcatccaagcaagaaattacagagg

SEQ ID NO: 579845 - DNA, 25 bp, Homo sapien
tgaggagaactataaagcacccatg

SEQ ID NO: 579846 - DNA, 25 bp, Homo sapien
tccaatagggataagggcaagacag

SEQ ID NO: 579847 - DNA, 25 bp, Homo sapien
gcaaatgcctctctgctaatgcaaa

SEQ ID NO: 579848 - DNA, 25 bp, Homo sapien
gacgttcacaaggtagatatctaaa

SEQ ID NO: 579849 - DNA, 25 bp, Homo sapien
caatcagtgctatattgtacttcac

SEQ ID NO: 579850 - DNA, 25 bp, Homo sapien
tattgtacttcacccatttaagcag

SEQ ID NO: 579851 - DNA, 25 bp, Homo sapien
cacccatttaagcaggacgttcaca

SEQ ID NO: 579852 - DNA, 25 bp, Homo sapien
cggtcacttgctgggtctgattgga

SEQ ID NO: 579853 - DNA, 25 bp, Homo sapien
ccggtcacttgctgggtctgattgg

SEQ ID NO: 579854 - DNA, 25 bp, Homo sapien
tctgattggattttcactgttgcct

SEQ ID NO: 579855 - DNA, 25 bp, Homo sapien
gtcacttgctgggtctgattggatt

SEQ ID NO: 579856 - DNA, 25 bp, Homo sapien
gacccaataaaggatgtgggagcag

SEQ ID NO: 579857 - DNA, 25 bp, Homo sapien
aagcagaacattattctgtagcttt

SEQ ID NO: 579858 - DNA, 25 bp, Homo sapien
gggacccaataaaggatgtgggagc

SEQ ID NO: 579859 - DNA, 25 bp, Homo sapien
ctgggacccaataaaggatgtggga

SEQ ID NO: 579860 - DNA, 25 bp, Homo sapien
aatctggtacgcgagtttctcttac

SEQ ID NO: 579861 - DNA, 25 bp, Homo sapien
tcttactccttgctcaatgttccct

SEQ ID NO: 579862 - DNA, 25 bp, Homo sapien
cagcctgcgtcacacatagaatctg

SEQ ID NO: 579863 - DNA, 25 bp, Homo sapien
cacacatagaatctggtacgcgagt

SEQ ID NO: 579864 - DNA, 25 bp, Homo sapien
gaaaattgaagtctggtaaatatcc

SEQ ID NO: 579865 - DNA, 25 bp, Homo sapien
tgccctcattaatggagatgcgtca

SEQ ID NO: 579866 - DNA, 25 bp, Homo sapien
gaggcacaatcataatgaggtctgc

SEQ ID NO: 579867 - DNA, 25 bp, Homo sapien
gatgcgtcactaatttgagatgaaa

SEQ ID NO: 579868 - DNA, 25 bp, Homo sapien
accacatcaaagtaagcctaaccaa

SEQ ID NO: 579869 - DNA, 25 bp, Homo sapien
ggtaaccacattctagcctctcttt

SEQ ID NO: 579870 - DNA, 25 bp, Homo sapien
tgtaacgataaatgttcaaatcaac

SEQ ID NO: 579871 - DNA, 25 bp, Homo sapien
cgtggataagttcttattactctgg

SEQ ID NO: 579872 - DNA, 25 bp, Homo sapien
tgctgagaacggttgagcccaatca

SEQ ID NO: 579873 - DNA, 25 bp, Homo sapien
tttcatgctgagaacggttgagccc

SEQ ID NO: 579874 - DNA, 25 bp, Homo sapien
agatttcatgctgagaacggttgag

SEQ ID NO: 579875 - DNA, 25 bp, Homo sapien
catcttggaaattgggattaagggt

SEQ ID NO: 579876 - DNA, 25 bp, Homo sapien
gaaaatactctgagactatagcatg

SEQ ID NO: 579877 - DNA, 25 bp, Homo sapien
tgaggaaaatactctgagactatag

SEQ ID NO: 579878 - DNA, 25 bp, Homo sapien
tactctgagactatagcatgattcc

SEQ ID NO: 579879 - DNA, 25 bp, Homo sapien
ctgagactatagcatgattcctcac

SEQ ID NO: 579880 - DNA, 25 bp, Homo sapien
gacagagaagacctttgaagttcat

SEQ ID NO: 579881 - DNA, 25 bp, Homo sapien
tgacagagaagacctttgaagttca

SEQ ID NO: 579882 - DNA, 25 bp, Homo sapien
agagaagacctttgaagttcattaa

SEQ ID NO: 579883 - DNA, 25 bp, Homo sapien
ctggaaacatgacagagaagacctt

SEQ ID NO: 579884 - DNA, 25 bp, Homo sapien
gcttcattctcatggactttactgc

SEQ ID NO: 579885 - DNA, 25 bp, Homo sapien
gctgttggtgaagacttttctagga

SEQ ID NO: 579886 - DNA, 25 bp, Homo sapien
tacaaggctctagaaagatagcaat

SEQ ID NO: 579887 - DNA, 25 bp, Homo sapien
gaagtggtttttgcttgattactgc

SEQ ID NO: 579888 - DNA, 25 bp, Homo sapien
gatagcaatgttataacctatagag

SEQ ID NO: 579889 - DNA, 25 bp, Homo sapien
tcttccctgtgacagatttcacatt

SEQ ID NO: 579890 - DNA, 25 bp, Homo sapien
ggtaatgactaaattgctgctcagg

SEQ ID NO: 579891 - DNA, 25 bp, Homo sapien
tgctgctcagggaaacggtatttgg

SEQ ID NO: 579892 - DNA, 25 bp, Homo sapien
tatcgtggggtaatgactaaattgc

SEQ ID NO: 579893 - DNA, 25 bp, Homo sapien
tctgtgagcccttgacgccagcagc

SEQ ID NO: 579894 - DNA, 25 bp, Homo sapien
gccacactgtacaacaattttgttg

SEQ ID NO: 579895 - DNA, 25 bp, Homo sapien
gctgactgaatctcctttacagaag

SEQ ID NO: 579896 - DNA, 25 bp, Homo sapien
tcttttataatgcttgccacactgt

SEQ ID NO: 579897 - DNA, 25 bp, Homo sapien
tccttgaagacttggatcaataccc

SEQ ID NO: 579898 - DNA, 25 bp, Homo sapien
ccttgaagacttggatcaatacccc

SEQ ID NO: 579899 - DNA, 25 bp, Homo sapien
cttgaagacttggatcaatacccct

SEQ ID NO: 579900 - DNA, 25 bp, Homo sapien
tgaagacttggatcaataccccttt

SEQ ID NO: 579901 - DNA, 25 bp, Homo sapien
cacacttcttagatggttgaaagag

SEQ ID NO: 579902 - DNA, 25 bp, Homo sapien
tgcacacttcttagatggttgaaag

SEQ ID NO: 579903 - DNA, 25 bp, Homo sapien
gcacacttcttagatggttgaaaga

SEQ ID NO: 579904 - DNA, 25 bp, Homo sapien
agtggttttcaaagttggctgtgta

SEQ ID NO: 579905 - DNA, 25 bp, Homo sapien
tccaggccagcagtggttttcaaag

SEQ ID NO: 579906 - DNA, 25 bp, Homo sapien
ggttttcaaagttggctgtgtagga

SEQ ID NO: 579907 - DNA, 25 bp, Homo sapien
ttggctgtgtaggagaaccacctgg

SEQ ID NO: 579908 - DNA, 25 bp, Homo sapien
actgcttgggtgagtgctgtttctg

SEQ ID NO: 579909 - DNA, 25 bp, Homo sapien
cttcaagtggactgcttgggtgagt

SEQ ID NO: 579910 - DNA, 25 bp, Homo sapien
tatcttcaagtggactgcttgggtg

SEQ ID NO: 579911 - DNA, 25 bp, Homo sapien
gactgcttgggtgagtgctgtttct

SEQ ID NO: 579912 - DNA, 25 bp, Homo sapien
tgcatcttttttacttcgtcctcag

SEQ ID NO: 579913 - DNA, 25 bp, Homo sapien
catcttttttacttcgtcctcagga

SEQ ID NO: 579914 - DNA, 25 bp, Homo sapien
gcatcttttttacttcgtcctcagg

SEQ ID NO: 579915 - DNA, 25 bp, Homo sapien
tagtaaagtgggtcttcttatacat

SEQ ID NO: 579916 - DNA, 25 bp, Homo sapien
gattttccaatcctacatctgacca

SEQ ID NO: 579917 - DNA, 25 bp, Homo sapien
tacatctgaccagttagtaaagtgg

SEQ ID NO: 579918 - DNA, 25 bp, Homo sapien
tgaccagttagtaaagtgggtcttc

SEQ ID NO: 579919 - DNA, 25 bp, Homo sapien
caaaacttaactttctgacggtgtg

SEQ ID NO: 579920 - DNA, 25 bp, Homo sapien
tccgaggttttgtacttgtgtcaaa

SEQ ID NO: 579921 - DNA, 25 bp, Homo sapien
tgacggtgtgtcttcccatgaaaga

SEQ ID NO: 579922 - DNA, 25 bp, Homo sapien
tcaaagacactgtccgaggttttgt

SEQ ID NO: 579923 - DNA, 25 bp, Homo sapien
ttaaatcatgtgtgaaattgtgagg

SEQ ID NO: 579924 - DNA, 25 bp, Homo sapien
tcatgtgtgaaattgtgaggccttg

SEQ ID NO: 579925 - DNA, 25 bp, Homo sapien
tgtgtgaaattgtgaggccttgcat

SEQ ID NO: 579926 - DNA, 25 bp, Homo sapien
cctccaggatgaaggtttctgccca

SEQ ID NO: 579927 - DNA, 25 bp, Homo sapien
gaattatcctggtactgaatgcctc

SEQ ID NO: 579928 - DNA, 25 bp, Homo sapien
aattatcctggtactgaatgcctct

SEQ ID NO: 579929 - DNA, 25 bp, Homo sapien
tccccgtggccctcaaccctctgaa

SEQ ID NO: 579930 - DNA, 25 bp, Homo sapien
ccgtggccctcaaccctctgaatta

SEQ ID NO: 579931 - DNA, 25 bp, Homo sapien
cccgtggccctcaaccctctgaatt

SEQ ID NO: 579932 - DNA, 25 bp, Homo sapien
ccccgtggccctcaaccctctgaat

SEQ ID NO: 579933 - DNA, 25 bp, Homo sapien
tgacctcaattctccgatagctaag

SEQ ID NO: 579934 - DNA, 25 bp, Homo sapien
ctgtttcttcaatttttagggcagc

SEQ ID NO: 579935 - DNA, 25 bp, Homo sapien
tggtactggttctcatgaacagcag

SEQ ID NO: 579936 - DNA, 25 bp, Homo sapien
gcaattcatcaatgacagttatggc

SEQ ID NO: 579937 - DNA, 25 bp, Homo sapien
tgcctcacagtcacaacatggctac

SEQ ID NO: 579938 - DNA, 25 bp, Homo sapien
tcacagtcacaacatggctaccaca

SEQ ID NO: 579939 - DNA, 25 bp, Homo sapien
cttaaagttgttggcctattcctgc

SEQ ID NO: 579940 - DNA, 25 bp, Homo sapien
ccttaaagttgttggcctattcctg

SEQ ID NO: 579941 - DNA, 25 bp, Homo sapien
ctgtgccatctgcactaccagattc

SEQ ID NO: 579942 - DNA, 25 bp, Homo sapien
tgtgccatctgcactaccagattca

SEQ ID NO: 579943 - DNA, 25 bp, Homo sapien
ccatctgcactaccagattcaaata

SEQ ID NO: 579944 - DNA, 25 bp, Homo sapien
tgccatctgcactaccagattcaaa

SEQ ID NO: 579945 - DNA, 25 bp, Homo sapien
cattaatatcaaaatcgtgtttgta

SEQ ID NO: 579946 - DNA, 25 bp, Homo sapien
ggctctttggctatactcacacatt

SEQ ID NO: 579947 - DNA, 25 bp, Homo sapien
tatcaaaatcgtgtttgtagctgtc

SEQ ID NO: 579948 - DNA, 25 bp, Homo sapien
tagctgtcccacattccaggctctt

SEQ ID NO: 579949 - DNA, 25 bp, Homo sapien
tgtaacaaaccattgttgcccttct

SEQ ID NO: 579950 - DNA, 25 bp, Homo sapien
gaacagtagtctaagatactttttg

SEQ ID NO: 579951 - DNA, 25 bp, Homo sapien
aaatgaacagtagtctaagatactt

SEQ ID NO: 579952 - DNA, 25 bp, Homo sapien
tgggctctttggaacactgtaacca

SEQ ID NO: 579953 - DNA, 25 bp, Homo sapien
ctcgccctgggtgcatagaatgtgg

SEQ ID NO: 579954 - DNA, 25 bp, Homo sapien
ccaaaggcgataaggctgcactaca

SEQ ID NO: 579955 - DNA, 25 bp, Homo sapien
cagggagcattggtaggcatcctca

SEQ ID NO: 579956 - DNA, 25 bp, Homo sapien
taatcccgggtagaacagggagcat

SEQ ID NO: 579957 - DNA, 25 bp, Homo sapien
tgcggcatccacatggcaagtctgc

SEQ ID NO: 579958 - DNA, 25 bp, Homo sapien
caagtctgccgtagagtttggctga

SEQ ID NO: 579959 - DNA, 25 bp, Homo sapien
taatctgcaaagtggtctggacagc

SEQ ID NO: 579960 - DNA, 25 bp, Homo sapien
gccattgtagggtcctgcggcatcc

SEQ ID NO: 579961 - DNA, 25 bp, Homo sapien
acgatgactcctgaaggggttaatt

SEQ ID NO: 579962 - DNA, 25 bp, Homo sapien
gacgatgactcctgaaggggttaat

SEQ ID NO: 579963 - DNA, 25 bp, Homo sapien
tgacgatgactcctgaaggggttaa

SEQ ID NO: 579964 - DNA, 25 bp, Homo sapien
ccgtctcacaccaggcataatggct

SEQ ID NO: 579965 - DNA, 25 bp, Homo sapien
accgtctcacaccaggcataatggc

SEQ ID NO: 579966 - DNA, 25 bp, Homo sapien
tgattttacactgttagtcagagtg

SEQ ID NO: 579967 - DNA, 25 bp, Homo sapien
atgattttacactgttagtcagagt

SEQ ID NO: 579968 - DNA, 25 bp, Homo sapien
ggcctaatgtatggcttattcttga

SEQ ID NO: 579969 - DNA, 25 bp, Homo sapien
tcttgaagatgatccataagttgaa

SEQ ID NO: 579970 - DNA, 25 bp, Homo sapien
tctctttctctagtgtggctaaagg

SEQ ID NO: 579971 - DNA, 25 bp, Homo sapien
gtcctgtttctactatatcctatag

SEQ ID NO: 579972 - DNA, 25 bp, Homo sapien
gagattcacagtataccagcagcac

SEQ ID NO: 579973 - DNA, 25 bp, Homo sapien
agcaggagattcacagtataccagc

SEQ ID NO: 579974 - DNA, 25 bp, Homo sapien
gacaaatatcagtactttgtccacc

SEQ ID NO: 579975 - DNA, 25 bp, Homo sapien
gattcacagtataccagcagcacct

SEQ ID NO: 579976 - DNA, 25 bp, Homo sapien
ttgttgccgtgaggaagtacccctg

SEQ ID NO: 579977 - DNA, 25 bp, Homo sapien
cagcaatgactctgaggataacact

SEQ ID NO: 579978 - DNA, 25 bp, Homo sapien
tcctacaaccacatccacagcaaca

SEQ ID NO: 579979 - DNA, 25 bp, Homo sapien
tgaaccgcactataactcctacaac

SEQ ID NO: 579980 - DNA, 25 bp, Homo sapien
agagaaaagcttgagctgactcttc

SEQ ID NO: 579981 - DNA, 25 bp, Homo sapien
tgtggcttagaccttcttacagttc

SEQ ID NO: 579982 - DNA, 25 bp, Homo sapien
cttacagttcctgttgatagctgcc

SEQ ID NO: 579983 - DNA, 25 bp, Homo sapien
ttccatagagaaaagcttgagctga

SEQ ID NO: 579984 - DNA, 25 bp, Homo sapien
caagtctgctccacgtgttttcatc

SEQ ID NO: 579985 - DNA, 25 bp, Homo sapien
tacgagggattcttagctgctgatc

SEQ ID NO: 579986 - DNA, 25 bp, Homo sapien
tcaggtgggctacgagggattctta

SEQ ID NO: 579987 - DNA, 25 bp, Homo sapien
tagctgctgatcacagtcaagtctg

SEQ ID NO: 579988 - DNA, 25 bp, Homo sapien
ggatgtcgcaccaccgaatctattt

SEQ ID NO: 579989 - DNA, 25 bp, Homo sapien
gaggcctccctatcctggatgtcgc

SEQ ID NO: 579990 - DNA, 25 bp, Homo sapien
gaagtcagtgccaaaagggcagcca

SEQ ID NO: 579991 - DNA, 25 bp, Homo sapien
tagggaagattgtcaccagaagtca

SEQ ID NO: 579992 - DNA, 25 bp, Homo sapien
tgcatccttgataagtatgtgcttt

SEQ ID NO: 579993 - DNA, 25 bp, Homo sapien
gcatccttgataagtatgtgctttg

SEQ ID NO: 579994 - DNA, 25 bp, Homo sapien
catccttgataagtatgtgctttgg

SEQ ID NO: 579995 - DNA, 25 bp, Homo sapien
attgcatccttgataagtatgtgct

SEQ ID NO: 579996 - DNA, 25 bp, Homo sapien
gggagctaacagtagataagctgtc

SEQ ID NO: 579997 - DNA, 25 bp, Homo sapien
gaccgagtgctcattgaaagcaaac

SEQ ID NO: 579998 - DNA, 25 bp, Homo sapien
aaattatactgatagaccgagtgct

SEQ ID NO: 579999 - DNA, 25 bp, Homo sapien
tgatttcctcaaaggatgcttgaaa

SEQ ID NO: 580000 - DNA, 25 bp, Homo sapien
tctcattggttgtaaaacctacgtg

SEQ ID NO: 580001 - DNA, 25 bp, Homo sapien
gccagggtccacacactggcggaca

SEQ ID NO: 580002 - DNA, 25 bp, Homo sapien
ggatgcgaacataccaaacactggt

SEQ ID NO: 580003 - DNA, 25 bp, Homo sapien
caaaactaaaggtatgaaccaggat

SEQ ID NO: 580004 - DNA, 25 bp, Homo sapien
tttgaaactccatggtgtaccgcag

SEQ ID NO: 580005 - DNA, 25 bp, Homo sapien
tggtttagatttcgccacttagtca

SEQ ID NO: 580006 - DNA, 25 bp, Homo sapien
tttggattctggtttagatttcgcc

SEQ ID NO: 580007 - DNA, 25 bp, Homo sapien
atttgaaactccatggtgtaccgca

SEQ ID NO: 580008 - DNA, 25 bp, Homo sapien
gcacaacagagactatgtaacacca

SEQ ID NO: 580009 - DNA, 25 bp, Homo sapien
tgtaacaccaagaatgcaagcacgg

SEQ ID NO: 580010 - DNA, 25 bp, Homo sapien
tgcttgcccagacacgagattatta

SEQ ID NO: 580011 - DNA, 25 bp, Homo sapien
gcaagcacggctccatctgaaagct

SEQ ID NO: 580012 - DNA, 25 bp, Homo sapien
acagatgcagggctgtaacttcaaa

SEQ ID NO: 580013 - DNA, 25 bp, Homo sapien
agatgcagggctgtaacttcaaaca

SEQ ID NO: 580014 - DNA, 25 bp, Homo sapien
caggccctatcctgagtcctcagaa

SEQ ID NO: 580015 - DNA, 25 bp, Homo sapien
agccaccttcgttggttgatgttac

SEQ ID NO: 580016 - DNA, 25 bp, Homo sapien
tttctcccatagaagatgggctttc

SEQ ID NO: 580017 - DNA, 25 bp, Homo sapien
gtttctcccatagaagatgggcttt

SEQ ID NO: 580018 - DNA, 25 bp, Homo sapien
tatattgatgcatgtttttgcattt

SEQ ID NO: 580019 - DNA, 25 bp, Homo sapien
ctatattgatgcatgtttttgcatt

SEQ ID NO: 580020 - DNA, 25 bp, Homo sapien
aaagctctagctggctcaagtagtt

SEQ ID NO: 580021 - DNA, 25 bp, Homo sapien
gtaaagctctagctggctcaagtag

SEQ ID NO: 580022 - DNA, 25 bp, Homo sapien
taaagctctagctggctcaagtagt

SEQ ID NO: 580023 - DNA, 25 bp, Homo sapien
tgcaagggcactcattgaacaggtg

SEQ ID NO: 580024 - DNA, 25 bp, Homo sapien
tagacagccttttgtgccaggattc

SEQ ID NO: 580025 - DNA, 25 bp, Homo sapien
ccaggattcttcttgtgtaactagg

SEQ ID NO: 580026 - DNA, 25 bp, Homo sapien
taactaggagcattgcaagggcact

SEQ ID NO: 580027 - DNA, 25 bp, Homo sapien
tgctgctggaccttgcccaacatct

SEQ ID NO: 580028 - DNA, 25 bp, Homo sapien
cctgctgctggaccttgcccaacat

SEQ ID NO: 580029 - DNA, 25 bp, Homo sapien
gctgctggaccttgcccaacatctt

SEQ ID NO: 580030 - DNA, 25 bp, Homo sapien
ctcctgctgctggaccttgcccaac

SEQ ID NO: 580031 - DNA, 25 bp, Homo sapien
cggttggcgatgtggtccccccaca

SEQ ID NO: 580032 - DNA, 25 bp, Homo sapien
cgaagtacccggttggcgatgtggt

SEQ ID NO: 580033 - DNA, 25 bp, Homo sapien
gaagtacccggttggcgatgtggtc

SEQ ID NO: 580034 - DNA, 25 bp, Homo sapien
atgtggtccccccacacatcttata

SEQ ID NO: 580035 - DNA, 25 bp, Homo sapien
tggcatctcctttctcgcacaggct

SEQ ID NO: 580036 - DNA, 25 bp, Homo sapien
catggcatctcctttctcgcacagg

SEQ ID NO: 580037 - DNA, 25 bp, Homo sapien
cataatcatggcatctcctttctcg

SEQ ID NO: 580038 - DNA, 25 bp, Homo sapien
taatcatggcatctcctttctcgca

SEQ ID NO: 580039 - DNA, 25 bp, Homo sapien
ctccaggcttctctcacttgtatgt

SEQ ID NO: 580040 - DNA, 25 bp, Homo sapien
tgctggtctgtaggattctggataa

SEQ ID NO: 580041 - DNA, 25 bp, Homo sapien
tgtttttttcaccatcgatgacatg

SEQ ID NO: 580042 - DNA, 25 bp, Homo sapien
ctgtaggattctggataatgttttt

SEQ ID NO: 580043 - DNA, 25 bp, Homo sapien
ggtctgtaggattctggataatgtt

SEQ ID NO: 580044 - DNA, 25 bp, Homo sapien
tctcctgagctgacgagaacatccg

SEQ ID NO: 580045 - DNA, 25 bp, Homo sapien
gctgacgagaacatccgcagcatat

SEQ ID NO: 580046 - DNA, 25 bp, Homo sapien
catccgcagcatatacttcatgtac

SEQ ID NO: 580047 - DNA, 25 bp, Homo sapien
gaacatccgcagcatatacttcatg

SEQ ID NO: 580048 - DNA, 25 bp, Homo sapien
gtgcactccaccacatccatcggag

SEQ ID NO: 580049 - DNA, 25 bp, Homo sapien
aaacggttgcagcagtctatgtttg

SEQ ID NO: 580050 - DNA, 25 bp, Homo sapien
tgcactccaccacatccatcggagc

SEQ ID NO: 580051 - DNA, 25 bp, Homo sapien
attaaacggttgcagcagtctatgt

SEQ ID NO: 580052 - DNA, 25 bp, Homo sapien
caggcttgaagggaccactggtttt

SEQ ID NO: 580053 - DNA, 25 bp, Homo sapien
cagacctgtagaggtcaggcttgaa

SEQ ID NO: 580054 - DNA, 25 bp, Homo sapien
aacaaattcgccctccttctcatag

SEQ ID NO: 580055 - DNA, 25 bp, Homo sapien
tagaggagggcctttagctctgcat

SEQ ID NO: 580056 - DNA, 25 bp, Homo sapien
ttttctgggtttctcgacttgcaga

SEQ ID NO: 580057 - DNA, 25 bp, Homo sapien
ttctgggtttctcgacttgcagaac

SEQ ID NO: 580058 - DNA, 25 bp, Homo sapien
tctttttctgggtttctcgacttgc

SEQ ID NO: 580059 - DNA, 25 bp, Homo sapien
tctgggtttctcgacttgcagaact

SEQ ID NO: 580060 - DNA, 25 bp, Homo sapien
gtttccccactggtggcattctccg

SEQ ID NO: 580061 - DNA, 25 bp, Homo sapien
cttctaatgtttccccactggtggc

SEQ ID NO: 580062 - DNA, 25 bp, Homo sapien
aatgtttccccactggtggcattct

SEQ ID NO: 580063 - DNA, 25 bp, Homo sapien
ctcagtccccagcttcactttcttc

SEQ ID NO: 580064 - DNA, 25 bp, Homo sapien
tcaaagtctggggtatggtgggaag

SEQ ID NO: 580065 - DNA, 25 bp, Homo sapien
ccctgctctgctgcgggtcctaggt

SEQ ID NO: 580066 - DNA, 25 bp, Homo sapien
ggagaagaagaactgtacttctcaa

SEQ ID NO: 580067 - DNA, 25 bp, Homo sapien
gatggagcagaagtagcaagctggg

SEQ ID NO: 580068 - DNA, 25 bp, Homo sapien
accaacacaaggctctacctttgct

SEQ ID NO: 580069 - DNA, 25 bp, Homo sapien
caacacaaggctctacctttgctgt

SEQ ID NO: 580070 - DNA, 25 bp, Homo sapien
aacacaaggctctacctttgctgtt

SEQ ID NO: 580071 - DNA, 25 bp, Homo sapien
ccaccaacacaaggctctacctttg

SEQ ID NO: 580072 - DNA, 25 bp, Homo sapien
ccttctcagtaggacaattctcaga

SEQ ID NO: 580073 - DNA, 25 bp, Homo sapien
catgtatgccgtactgaagcctgag

SEQ ID NO: 580074 - DNA, 25 bp, Homo sapien
cagtggtaaccagtgccatgtatgc

SEQ ID NO: 580075 - DNA, 25 bp, Homo sapien
gatccccagcattttaagtccacag

SEQ ID NO: 580076 - DNA, 25 bp, Homo sapien
gatagtgcctttccaacaggtcttg

SEQ ID NO: 580077 - DNA, 25 bp, Homo sapien
caagccctcaacagcagacaatgat

SEQ ID NO: 580078 - DNA, 25 bp, Homo sapien
ttccacagggttcattgtaaaagcc

SEQ ID NO: 580079 - DNA, 25 bp, Homo sapien
ttcttgaatgttcatcaagccctca

SEQ ID NO: 580080 - DNA, 25 bp, Homo sapien
tggagttttgatcattgtcccacac

SEQ ID NO: 580081 - DNA, 25 bp, Homo sapien
gtggagttttgatcattgtcccaca

SEQ ID NO: 580082 - DNA, 25 bp, Homo sapien
ctaataagtgtgagcctcccttatc

SEQ ID NO: 580083 - DNA, 25 bp, Homo sapien
gctaataagtgtgagcctcccttat

SEQ ID NO: 580084 - DNA, 25 bp, Homo sapien
gagacagccctcaaatatcggggga

SEQ ID NO: 580085 - DNA, 25 bp, Homo sapien
gaggcaacacagaccattcatcagg

SEQ ID NO: 580086 - DNA, 25 bp, Homo sapien
tcatcaggtatggatggacttcctg

SEQ ID NO: 580087 - DNA, 25 bp, Homo sapien
ggaagtacagagcttctaggacctc

SEQ ID NO: 580088 - DNA, 25 bp, Homo sapien
gtctgtaaatgatccaccacttggt

SEQ ID NO: 580089 - DNA, 25 bp, Homo sapien
cctttggagaccacctgtcactcat

SEQ ID NO: 580090 - DNA, 25 bp, Homo sapien
taaatgatccaccacttggtccacc

SEQ ID NO: 580091 - DNA, 25 bp, Homo sapien
cctgagcacgtctgtaaatgatcca

SEQ ID NO: 580092 - DNA, 25 bp, Homo sapien
gacagatatcccctctgaagggcac

SEQ ID NO: 580093 - DNA, 25 bp, Homo sapien
tttattagctggtatcagctgacag

SEQ ID NO: 580094 - DNA, 25 bp, Homo sapien
gtgaacagccatatcagccactggg

SEQ ID NO: 580095 - DNA, 25 bp, Homo sapien
actgactttaagctcatcgtgaaca

SEQ ID NO: 580096 - DNA, 25 bp, Homo sapien
ctccaactgttgctagatgccccaa

SEQ ID NO: 580097 - DNA, 25 bp, Homo sapien
aaatggatatagagactaacttcaa

SEQ ID NO: 580098 - DNA, 25 bp, Homo sapien
gaacagtttggccagtaggggaaca

SEQ ID NO: 580099 - DNA, 25 bp, Homo sapien
ccagtaggggaacagtttgaatatc

SEQ ID NO: 580100 - DNA, 25 bp, Homo sapien
ctggaagatgctaggaagcaatttg

SEQ ID NO: 580101 - DNA, 25 bp, Homo sapien
catggtgaatgaataatagccattc

SEQ ID NO: 580102 - DNA, 25 bp, Homo sapien
tagccattccataagaaaagggctc

SEQ ID NO: 580103 - DNA, 25 bp, Homo sapien
atgcattaggatggccagctcttga

SEQ ID NO: 580104 - DNA, 25 bp, Homo sapien
gaatgaataatagccattccataag

SEQ ID NO: 580105 - DNA, 25 bp, Homo sapien
aactttagcacaatgcagcatagaa

SEQ ID NO: 580106 - DNA, 25 bp, Homo sapien
gaactgcctgtaatttgcaggcctc

SEQ ID NO: 580107 - DNA, 25 bp, Homo sapien
caatgcagcatagaactgcctgtaa

SEQ ID NO: 580108 - DNA, 25 bp, Homo sapien
aatagtgaacaataatttaagcatc

SEQ ID NO: 580109 - DNA, 25 bp, Homo sapien
aattttacttcattgttaatattca

SEQ ID NO: 580110 - DNA, 25 bp, Homo sapien
tgaaattttacttcattgttaatat

SEQ ID NO: 580111 - DNA, 25 bp, Homo sapien
catgaaattttacttcattgttaat

SEQ ID NO: 580112 - DNA, 25 bp, Homo sapien
tcatcatgaaattttacttcattgt

SEQ ID NO: 580113 - DNA, 25 bp, Homo sapien
ttaatgagcttttagcgaagcctgg

SEQ ID NO: 580114 - DNA, 25 bp, Homo sapien
caaattgtgagatgcgtgttcctgt

SEQ ID NO: 580115 - DNA, 25 bp, Homo sapien
gatcctggagtgaaacagcccatta

SEQ ID NO: 580116 - DNA, 25 bp, Homo sapien
cgaagcctggtttttgtcagacata

SEQ ID NO: 580117 - DNA, 25 bp, Homo sapien
cttgaccagatgtctgacaatgacc

SEQ ID NO: 580118 - DNA, 25 bp, Homo sapien
gaccagatgtctgacaatgacccag

SEQ ID NO: 580119 - DNA, 25 bp, Homo sapien
tgaccagatgtctgacaatgaccca

SEQ ID NO: 580120 - DNA, 25 bp, Homo sapien
accagatgtctgacaatgacccaga

SEQ ID NO: 580121 - DNA, 25 bp, Homo sapien
gttagctgcattgacattatcttca

SEQ ID NO: 580122 - DNA, 25 bp, Homo sapien
cagttagctgcattgacattatctt

SEQ ID NO: 580123 - DNA, 25 bp, Homo sapien
gcagttagctgcattgacattatct

SEQ ID NO: 580124 - DNA, 25 bp, Homo sapien
tagctgcattgacattatcttcatc

SEQ ID NO: 580125 - DNA, 25 bp, Homo sapien
ttagctaagtatatagctaagtata

SEQ ID NO: 580126 - DNA, 25 bp, Homo sapien
ttttcatgggaatatttagctaagt

SEQ ID NO: 580127 - DNA, 25 bp, Homo sapien
gactttgaacaaaggataatatttc

SEQ ID NO: 580128 - DNA, 25 bp, Homo sapien
agtcacttagctggtcttcctggag

SEQ ID NO: 580129 - DNA, 25 bp, Homo sapien
tctaatcttcttgtatgtaggagtc

SEQ ID NO: 580130 - DNA, 25 bp, Homo sapien
ttggaatctctaatcttcttgtatg

SEQ ID NO: 580131 - DNA, 25 bp, Homo sapien
aatcttcttgtatgtaggagtctaa

SEQ ID NO: 580132 - DNA, 25 bp, Homo sapien
tcttgtatgtaggagtctaaatctc

SEQ ID NO: 580133 - DNA, 25 bp, Homo sapien
aacatgagttgtggggggaacattc

SEQ ID NO: 580134 - DNA, 25 bp, Homo sapien
gttaatccattatggaggcaaagca

SEQ ID NO: 580135 - DNA, 25 bp, Homo sapien
gggggcccatctggtgaaaggcttc

SEQ ID NO: 580136 - DNA, 25 bp, Homo sapien
tagagcaattagtggataactcact

SEQ ID NO: 580137 - DNA, 25 bp, Homo sapien
ttctgcaatgggccacagcgaggaa

SEQ ID NO: 580138 - DNA, 25 bp, Homo sapien
tctgcaatgggccacagcgaggaag

SEQ ID NO: 580139 - DNA, 25 bp, Homo sapien
caatgggccacagcgaggaagggaa

SEQ ID NO: 580140 - DNA, 25 bp, Homo sapien
tgcaatgggccacagcgaggaaggg

SEQ ID NO: 580141 - DNA, 25 bp, Homo sapien
aacacagtgcgctgtagagtgctgg

SEQ ID NO: 580142 - DNA, 25 bp, Homo sapien
ttagcctgtaattgggcaaatcatc

SEQ ID NO: 580143 - DNA, 25 bp, Homo sapien
tcaggagtgagtatcctaccccata

SEQ ID NO: 580144 - DNA, 25 bp, Homo sapien
ctttgtaattacatggctgactggg

SEQ ID NO: 580145 - DNA, 25 bp, Homo sapien
acatggcttagctgagatgctcagt

SEQ ID NO: 580146 - DNA, 25 bp, Homo sapien
cattctttcctcctcggtcaaacct

SEQ ID NO: 580147 - DNA, 25 bp, Homo sapien
gacagtcatgatgtggaactgccat

SEQ ID NO: 580148 - DNA, 25 bp, Homo sapien
gatgctcagttgacagtcatgatgt

SEQ ID NO: 580149 - DNA, 25 bp, Homo sapien
ccaccaggaaagacacttccagttc

SEQ ID NO: 580150 - DNA, 25 bp, Homo sapien
actactgtctccctactcatggata

SEQ ID NO: 580151 - DNA, 25 bp, Homo sapien
aagatggaaaccaagccagcgtgct

SEQ ID NO: 580152 - DNA, 25 bp, Homo sapien
tctctggggaaaactccttgctgct

SEQ ID NO: 580153 - DNA, 25 bp, Homo sapien
gccgcggacactgccagtcctcttt

SEQ ID NO: 580154 - DNA, 25 bp, Homo sapien
ggtggctccagccatgggtcctgca

SEQ ID NO: 580155 - DNA, 25 bp, Homo sapien
tccagccatgggtcctgcatggtca

SEQ ID NO: 580156 - DNA, 25 bp, Homo sapien
atgggtcctgcatggtcacatccat

SEQ ID NO: 580157 - DNA, 25 bp, Homo sapien
agccatgggtcctgcatggtcacat

SEQ ID NO: 580158 - DNA, 25 bp, Homo sapien
ccttgcagagaaatgtatatgagct

SEQ ID NO: 580159 - DNA, 25 bp, Homo sapien
gcgacattcaatagaccttgcagag

SEQ ID NO: 580160 - DNA, 25 bp, Homo sapien
cagagaaatgtatatgagcttgggc

SEQ ID NO: 580161 - DNA, 25 bp, Homo sapien
ttacgaataccagcgacattcaata

SEQ ID NO: 580162 - DNA, 25 bp, Homo sapien
aggaacataggatttagtgccccca

SEQ ID NO: 580163 - DNA, 25 bp, Homo sapien
ggaacataggatttagtgcccccat

SEQ ID NO: 580164 - DNA, 25 bp, Homo sapien
ccagctatctgagaataatcagcac

SEQ ID NO: 580165 - DNA, 25 bp, Homo sapien
tccagcataaactctgggctctgta

SEQ ID NO: 580166 - DNA, 25 bp, Homo sapien
tagtggagcagatacgagactgttg

SEQ ID NO: 580167 - DNA, 25 bp, Homo sapien
taatcagcacattctagtagtggag

SEQ ID NO: 580168 - DNA, 25 bp, Homo sapien
ctgagaaatgcacaaccgggatggc

SEQ ID NO: 580169 - DNA, 25 bp, Homo sapien
caccatggcagagaatgtgatcagc

SEQ ID NO: 580170 - DNA, 25 bp, Homo sapien
ggatggcaacattagaaacagggct

SEQ ID NO: 580171 - DNA, 25 bp, Homo sapien
tttctgggctctaggacactcttgc

SEQ ID NO: 580172 - DNA, 25 bp, Homo sapien
tgcttctttgctttcggaatggttg

SEQ ID NO: 580173 - DNA, 25 bp, Homo sapien
tcggaatggttgatggcagacttta

SEQ ID NO: 580174 - DNA, 25 bp, Homo sapien
ctttgctttcggaatggttgatggc

SEQ ID NO: 580175 - DNA, 25 bp, Homo sapien
gctttcggaatggttgatggcagac

SEQ ID NO: 580176 - DNA, 25 bp, Homo sapien
cttctatgaagtttatgggctcaaa

SEQ ID NO: 580177 - DNA, 25 bp, Homo sapien
gaatgagtgatctgaacacaggaca

SEQ ID NO: 580178 - DNA, 25 bp, Homo sapien
tcaattcggttttgggaatgagtga

SEQ ID NO: 580179 - DNA, 25 bp, Homo sapien
aagtaactggtgagaaagcattttc

SEQ ID NO: 580180 - DNA, 25 bp, Homo sapien
cagcttaccctctcagtgttagcca

SEQ ID NO: 580181 - DNA, 25 bp, Homo sapien
tcatcaaatgtgcagcttaccctct

SEQ ID NO: 580182 - DNA, 25 bp, Homo sapien
tcttcatcagcaatgggttctactg

SEQ ID NO: 580183 - DNA, 25 bp, Homo sapien
tctactgagtaattgtcatcaaatg

SEQ ID NO: 580184 - DNA, 25 bp, Homo sapien
gaataactatgaactcaggctgtgg

SEQ ID NO: 580185 - DNA, 25 bp, Homo sapien
cattgccatgtaccattgatgtctg

SEQ ID NO: 580186 - DNA, 25 bp, Homo sapien
tatatagtggctcaaactgatgagc

SEQ ID NO: 580187 - DNA, 25 bp, Homo sapien
actgatgagcagtccgtgtcagaaa

SEQ ID NO: 580188 - DNA, 25 bp, Homo sapien
tgtgtgttgagtggcttctgcctct

SEQ ID NO: 580189 - DNA, 25 bp, Homo sapien
ctgggctgtgtgttgagtggcttct

SEQ ID NO: 580190 - DNA, 25 bp, Homo sapien
ctggcagcttgagacttgaatggac

SEQ ID NO: 580191 - DNA, 25 bp, Homo sapien
tctggcagcttgagacttgaatgga

SEQ ID NO: 580192 - DNA, 25 bp, Homo sapien
ccttgcttcattgtcagggcagctg

SEQ ID NO: 580193 - DNA, 25 bp, Homo sapien
tccttgcttcattgtcagggcagct

SEQ ID NO: 580194 - DNA, 25 bp, Homo sapien
tctccttgcttcattgtcagggcag

SEQ ID NO: 580195 - DNA, 25 bp, Homo sapien
ctccttgcttcattgtcagggcagc

SEQ ID NO: 580196 - DNA, 25 bp, Homo sapien
taactaggtcttctccaaaagtcac

SEQ ID NO: 580197 - DNA, 25 bp, Homo sapien
tttaaattccatatcaagaggcaac

SEQ ID NO: 580198 - DNA, 25 bp, Homo sapien
aaaatatgtgaggtttgcaagctgc

SEQ ID NO: 580199 - DNA, 25 bp, Homo sapien
cttagtttaaggagagtgtgtcaca

SEQ ID NO: 580200 - DNA, 25 bp, Homo sapien
tctgatttgcaatccatatcacaac

SEQ ID NO: 580201 - DNA, 25 bp, Homo sapien
ctcacagagcgaagaacaggaggac

SEQ ID NO: 580202 - DNA, 25 bp, Homo sapien
ttctcacagagcgaagaacaggagg

SEQ ID NO: 580203 - DNA, 25 bp, Homo sapien
ctttctcacagagcgaagaacagga

SEQ ID NO: 580204 - DNA, 25 bp, Homo sapien
atctttctcacagagcgaagaacag

SEQ ID NO: 580205 - DNA, 25 bp, Homo sapien
tttggtcgataaggcgcagatcctg

SEQ ID NO: 580206 - DNA, 25 bp, Homo sapien
aacaatttggtcgataaggcgcaga

SEQ ID NO: 580207 - DNA, 25 bp, Homo sapien
caatttggtcgataaggcgcagatc

SEQ ID NO: 580208 - DNA, 25 bp, Homo sapien
aatttggtcgataaggcgcagatcc

SEQ ID NO: 580209 - DNA, 25 bp, Homo sapien
agtctgggccgggaacaatggtaat

SEQ ID NO: 580210 - DNA, 25 bp, Homo sapien
tatatgcatcaggtatgaggagaaa

SEQ ID NO: 580211 - DNA, 25 bp, Homo sapien
atcagggtgaggaacgggaaaccag

SEQ ID NO: 580212 - DNA, 25 bp, Homo sapien
attgaagtctgggccgggaacaatg

SEQ ID NO: 580213 - DNA, 25 bp, Homo sapien
gccaaggtaggctctaagctcaagg

SEQ ID NO: 580214 - DNA, 25 bp, Homo sapien
tgcttgttgactattgaggaccatc

SEQ ID NO: 580215 - DNA, 25 bp, Homo sapien
gagtgtttcacattagccaaggtag

SEQ ID NO: 580216 - DNA, 25 bp, Homo sapien
gaggaccatcttagcacagctggag

SEQ ID NO: 580217 - DNA, 25 bp, Homo sapien
taaccaggtatgtccagagatggga

SEQ ID NO: 580218 - DNA, 25 bp, Homo sapien
taaaaacggcttctatatgtcgtga

SEQ ID NO: 580219 - DNA, 25 bp, Homo sapien
aattgatgctgtagataaaaacggc

SEQ ID NO: 580220 - DNA, 25 bp, Homo sapien
agagatgggacactcattttgctca

SEQ ID NO: 580221 - DNA, 25 bp, Homo sapien
cttgtgatgttggtaatgaactgcc

SEQ ID NO: 580222 - DNA, 25 bp, Homo sapien
cagccccgtctgcttaatttccggt

SEQ ID NO: 580223 - DNA, 25 bp, Homo sapien
cggtggaccttcaatgcccagggag

SEQ ID NO: 580224 - DNA, 25 bp, Homo sapien
cccagggagagcgcatgttttgctt

SEQ ID NO: 580225 - DNA, 25 bp, Homo sapien
ggcacatccgacttacaggacagca

SEQ ID NO: 580226 - DNA, 25 bp, Homo sapien
tttgatgactcctttagtagacagg

SEQ ID NO: 580227 - DNA, 25 bp, Homo sapien
caaggccatgattggtcaaaacggc

SEQ ID NO: 580228 - DNA, 25 bp, Homo sapien
tagacaggagatggtgcataatttc

SEQ ID NO: 580229 - DNA, 25 bp, Homo sapien
ggccactcactggtgtcattctgcc

SEQ ID NO: 580230 - DNA, 25 bp, Homo sapien
taaaggccgcaatgacatattccgt

SEQ ID NO: 580231 - DNA, 25 bp, Homo sapien
catattccgtttttgagtcagaggg

SEQ ID NO: 580232 - DNA, 25 bp, Homo sapien
ccagcacagcgttgaagaacaggtc

SEQ ID NO: 580233 - DNA, 25 bp, Homo sapien
gcagcttgggtaggttttccagcca

SEQ ID NO: 580234 - DNA, 25 bp, Homo sapien
gtttttgcagagccagtcctccggt

SEQ ID NO: 580235 - DNA, 25 bp, Homo sapien
tgtttttgcagagccagtcctccgg

SEQ ID NO: 580236 - DNA, 25 bp, Homo sapien
gtgtttttgcagagccagtcctccg

SEQ ID NO: 580237 - DNA, 25 bp, Homo sapien
ctgtgtttttgcagagccagtcctc

SEQ ID NO: 580238 - DNA, 25 bp, Homo sapien
tggagtgatcaacagggtgtctgaa

SEQ ID NO: 580239 - DNA, 25 bp, Homo sapien
caatataggtggagtgatcaacagg

SEQ ID NO: 580240 - DNA, 25 bp, Homo sapien
caacagggtgtctgaagttgctgct

SEQ ID NO: 580241 - DNA, 25 bp, Homo sapien
ctgagtcatggcaatataggtggag

SEQ ID NO: 580242 - DNA, 25 bp, Homo sapien
catcttctcccacgttagcagccag

SEQ ID NO: 580243 - DNA, 25 bp, Homo sapien
cccatcttctcccacgttagcagcc

SEQ ID NO: 580244 - DNA, 25 bp, Homo sapien
ccatcttctcccacgttagcagcca

SEQ ID NO: 580245 - DNA, 25 bp, Homo sapien
atcttctcccacgttagcagccagc

SEQ ID NO: 580246 - DNA, 25 bp, Homo sapien
tccacttgctcgttttctttatggg

SEQ ID NO: 580247 - DNA, 25 bp, Homo sapien
ccacttgctcgttttctttatgggc

SEQ ID NO: 580248 - DNA, 25 bp, Homo sapien
gttccacttgctcgttttctttatg

SEQ ID NO: 580249 - DNA, 25 bp, Homo sapien
cttgttccacttgctcgttttcttt

SEQ ID NO: 580250 - DNA, 25 bp, Homo sapien
taatcttctagtttattcctcttaa

SEQ ID NO: 580251 - DNA, 25 bp, Homo sapien
ttaatcttctagtttattcctctta

SEQ ID NO: 580252 - DNA, 25 bp, Homo sapien
tgcaaacatccctgagcaggaaaag

SEQ ID NO: 580253 - DNA, 25 bp, Homo sapien
ctgagcaggaaaagcgttatgccat

SEQ ID NO: 580254 - DNA, 25 bp, Homo sapien
gcgttatgccattgtcagtaattaa

SEQ ID NO: 580255 - DNA, 25 bp, Homo sapien
aaatgcaaacatccctgagcaggaa

SEQ ID NO: 580256 - DNA, 25 bp, Homo sapien
gactttcccatcagtacatgcacca

SEQ ID NO: 580257 - DNA, 25 bp, Homo sapien
gccaaatagctctatagacattatt

SEQ ID NO: 580258 - DNA, 25 bp, Homo sapien
ttagaggagcggaaggtacatttgt

SEQ ID NO: 580259 - DNA, 25 bp, Homo sapien
gggactttcccatcagtacatgcac

SEQ ID NO: 580260 - DNA, 25 bp, Homo sapien
tcagcagaggtaaacgtgagacaca

SEQ ID NO: 580261 - DNA, 25 bp, Homo sapien
taacttgagatacataccgtttggt

SEQ ID NO: 580262 - DNA, 25 bp, Homo sapien
gagacacagaatcctccttgaaccc

SEQ ID NO: 580263 - DNA, 25 bp, Homo sapien
tttcaggagcgttggattcagtgtc

SEQ ID NO: 580264 - DNA, 25 bp, Homo sapien
tactactgctaatactgcctcaaaa

SEQ ID NO: 580265 - DNA, 25 bp, Homo sapien
atactactgctaatactgcctcaaa

SEQ ID NO: 580266 - DNA, 25 bp, Homo sapien
tactgcctcaaaacgaaatttagtc

SEQ ID NO: 580267 - DNA, 25 bp, Homo sapien
atactgcctcaaaacgaaatttagt

SEQ ID NO: 580268 - DNA, 25 bp, Homo sapien
tgctggaatgaatggctaaagttcg

SEQ ID NO: 580269 - DNA, 25 bp, Homo sapien
agttcgggtaatgccaatggtaaca

SEQ ID NO: 580270 - DNA, 25 bp, Homo sapien
caaaggatcacttccaaatcaccag

SEQ ID NO: 580271 - DNA, 25 bp, Homo sapien
gccaatggtaacaaaggatcacttc

SEQ ID NO: 580272 - DNA, 25 bp, Homo sapien
ctgcaatatacgtttcaatgttgtt

SEQ ID NO: 580273 - DNA, 25 bp, Homo sapien
tgcaatatacgtttcaatgttgttg

SEQ ID NO: 580274 - DNA, 25 bp, Homo sapien
tcttcctccttggattattctcact

SEQ ID NO: 580275 - DNA, 25 bp, Homo sapien
caggtggtgcattggtccaggctaa

SEQ ID NO: 580276 - DNA, 25 bp, Homo sapien
gctgagagctctagacaatccttct

SEQ ID NO: 580277 - DNA, 25 bp, Homo sapien
tccccactggtgctgatgcagatgc

SEQ ID NO: 580278 - DNA, 25 bp, Homo sapien
tgcattggtccaggctaagatgctc

SEQ ID NO: 580279 - DNA, 25 bp, Homo sapien
atgggagccatgagtaacacctgag

SEQ ID NO: 580280 - DNA, 25 bp, Homo sapien
ataggagatactggactatggttat

SEQ ID NO: 580281 - DNA, 25 bp, Homo sapien
tgggagccatgagtaacacctgagg

SEQ ID NO: 580282 - DNA, 25 bp, Homo sapien
atactggactatggttatgatgtaa

SEQ ID NO: 580283 - DNA, 25 bp, Homo sapien
acctgcaacacaccggactctgatt

SEQ ID NO: 580284 - DNA, 25 bp, Homo sapien
agcacctgcaacacaccggactctg

SEQ ID NO: 580285 - DNA, 25 bp, Homo sapien
cggactctgatttcctattctggac

SEQ ID NO: 580286 - DNA, 25 bp, Homo sapien
aacacaccggactctgatttcctat

SEQ ID NO: 580287 - DNA, 25 bp, Homo sapien
gccttctgcagttaaagaaactcac

SEQ ID NO: 580288 - DNA, 25 bp, Homo sapien
caacctcggacagggggtcagagaa

SEQ ID NO: 580289 - DNA, 25 bp, Homo sapien
tgtgtcctgtgcactaggccttctg

SEQ ID NO: 580290 - DNA, 25 bp, Homo sapien
gagaataactccacaggggggccac

SEQ ID NO: 580291 - DNA, 25 bp, Homo sapien
ctgagcaccaaagcagagaagagag

SEQ ID NO: 580292 - DNA, 25 bp, Homo sapien
tggcttcttgtgaccaactccaaat

SEQ ID NO: 580293 - DNA, 25 bp, Homo sapien
ttgtgaccaactccaaatgatccat

SEQ ID NO: 580294 - DNA, 25 bp, Homo sapien
cttcttgtgaccaactccaaatgat

SEQ ID NO: 580295 - DNA, 25 bp, Homo sapien
ggcttcttgtgaccaactccaaatg

SEQ ID NO: 580296 - DNA, 25 bp, Homo sapien
taaattgaggccctactgcagctat

SEQ ID NO: 580297 - DNA, 25 bp, Homo sapien
gagattacacatgaaacacagggct

SEQ ID NO: 580298 - DNA, 25 bp, Homo sapien
agagatttttgacaacctgaggtgc

SEQ ID NO: 580299 - DNA, 25 bp, Homo sapien
cagggatcacgacacacagagagat

SEQ ID NO: 580300 - DNA, 25 bp, Homo sapien
ttttccatgcacagacactcagtca

SEQ ID NO: 580301 - DNA, 25 bp, Homo sapien
cattccactttttgatttgggattc

SEQ ID NO: 580302 - DNA, 25 bp, Homo sapien
gacactcagtcattccactttttga

SEQ ID NO: 580303 - DNA, 25 bp, Homo sapien
atgcacagacactcagtcattccac

SEQ ID NO: 580304 - DNA, 25 bp, Homo sapien
cagatctttgtgttgcaaatgagca

SEQ ID NO: 580305 - DNA, 25 bp, Homo sapien
gaaaggctatggtaagttactctgc

SEQ ID NO: 580306 - DNA, 25 bp, Homo sapien
gattactttgccactcttaagactg

SEQ ID NO: 580307 - DNA, 25 bp, Homo sapien
caaatagtcccatcccttgtgtaac

SEQ ID NO: 580308 - DNA, 25 bp, Homo sapien
catttgtgtgtaaaatttctccatc

SEQ ID NO: 580309 - DNA, 25 bp, Homo sapien
gacatttgtgtgtaaaatttctcca

SEQ ID NO: 580310 - DNA, 25 bp, Homo sapien
gaggacatttgtgtgtaaaatttct

SEQ ID NO: 580311 - DNA, 25 bp, Homo sapien
ggacatttgtgtgtaaaatttctcc

SEQ ID NO: 580312 - DNA, 25 bp, Homo sapien
tgcatctggcaggtatcttttctct

SEQ ID NO: 580313 - DNA, 25 bp, Homo sapien
cacgagatgacgtttctctgaatgg

SEQ ID NO: 580314 - DNA, 25 bp, Homo sapien
catttggactgtatggattgaagtc

SEQ ID NO: 580315 - DNA, 25 bp, Homo sapien
cacataccgactttctttgatttcc

SEQ ID NO: 580316 - DNA, 25 bp, Homo sapien
aaaatttaagtgcatctgaaggctc

SEQ ID NO: 580317 - DNA, 25 bp, Homo sapien
ggctctccagcttgaaaccctgcag

SEQ ID NO: 580318 - DNA, 25 bp, Homo sapien
gaagctgcagcgtcattttgataca

SEQ ID NO: 580319 - DNA, 25 bp, Homo sapien
tgcagagcgggatgaagctccctga

SEQ ID NO: 580320 - DNA, 25 bp, Homo sapien
gggccaaggagtccgagcccctgac

SEQ ID NO: 580321 - DNA, 25 bp, Homo sapien
gacctcgctcccagcctgaggtatg

SEQ ID NO: 580322 - DNA, 25 bp, Homo sapien
acccatcccacactttggtgtagac

SEQ ID NO: 580323 - DNA, 25 bp, Homo sapien
gagcagagccggcttggaggaaaat

SEQ ID NO: 580324 - DNA, 25 bp, Homo sapien
ggcagatgtaatgaatcacctctgg

SEQ ID NO: 580325 - DNA, 25 bp, Homo sapien
gagtaaaaccctgtgcataaaccca

SEQ ID NO: 580326 - DNA, 25 bp, Homo sapien
gtcctttattctggatcaactcttg

SEQ ID NO: 580327 - DNA, 25 bp, Homo sapien
aaaaccctgtgcataaacccagagg

SEQ ID NO: 580328 - DNA, 25 bp, Homo sapien
gaattcagatgctaatggagagtat

SEQ ID NO: 580329 - DNA, 25 bp, Homo sapien
ctaatggagagtatgtatgcgcgca

SEQ ID NO: 580330 - DNA, 25 bp, Homo sapien
tcagatgctaatggagagtatgtat

SEQ ID NO: 580331 - DNA, 25 bp, Homo sapien
gagagtatgtatgcgcgcatgcaca

SEQ ID NO: 580332 - DNA, 25 bp, Homo sapien
ttttttgatcacaaagttggttaca

SEQ ID NO: 580333 - DNA, 25 bp, Homo sapien
ctctgtctgataaggttttttgatc

SEQ ID NO: 580334 - DNA, 25 bp, Homo sapien
gaagctcacagaacgtaagacaggt

SEQ ID NO: 580335 - DNA, 25 bp, Homo sapien
taacttaagagaacgtggttcattg

SEQ ID NO: 580336 - DNA, 25 bp, Homo sapien
tctgattatgtgtcttctactcttg

SEQ ID NO: 580337 - DNA, 25 bp, Homo sapien
cagaatggatgccttggagtcttcc

SEQ ID NO: 580338 - DNA, 25 bp, Homo sapien
tgtttattccagtctgctcggtatt

SEQ ID NO: 580339 - DNA, 25 bp, Homo sapien
gaaacactgaaagccgatgtttatt

SEQ ID NO: 580340 - DNA, 25 bp, Homo sapien
ctttggtaggttgtggaggacagct

SEQ ID NO: 580341 - DNA, 25 bp, Homo sapien
cagtgaccattgtcacagactgatt

SEQ ID NO: 580342 - DNA, 25 bp, Homo sapien
agtgcagatgaaggtgccccatgcc

SEQ ID NO: 580343 - DNA, 25 bp, Homo sapien
ctagtactgtgaaatcagggccatg

SEQ ID NO: 580344 - DNA, 25 bp, Homo sapien
ccacagagggcagccctagcttgat

SEQ ID NO: 580345 - DNA, 25 bp, Homo sapien
gggcagccctagcttgattgctctg

SEQ ID NO: 580346 - DNA, 25 bp, Homo sapien
cagagggcagccctagcttgattgc

SEQ ID NO: 580347 - DNA, 25 bp, Homo sapien
gctctggattgaagggagtccctct

SEQ ID NO: 580348 - DNA, 25 bp, Homo sapien
tgtgcgtggctatgaatgtgaggtc

SEQ ID NO: 580349 - DNA, 25 bp, Homo sapien
tgtgtgtagatgtgttttcgtgtgc

SEQ ID NO: 580350 - DNA, 25 bp, Homo sapien
ctttgagtgagcacggtgttcccct

SEQ ID NO: 580351 - DNA, 25 bp, Homo sapien
catctcagctttgagtgagcacggt

SEQ ID NO: 580352 - DNA, 25 bp, Homo sapien
catgacaccgagtgaggtttctgaa

SEQ ID NO: 580353 - DNA, 25 bp, Homo sapien
caactgccttatctgcagcttccat

SEQ ID NO: 580354 - DNA, 25 bp, Homo sapien
gggaaaatctttgcagtttgaggga

SEQ ID NO: 580355 - DNA, 25 bp, Homo sapien
ccaccagcaccgagggtattgtcac

SEQ ID NO: 580356 - DNA, 25 bp, Homo sapien
tcatagtccagaagtgttaacataa

SEQ ID NO: 580357 - DNA, 25 bp, Homo sapien
aaaaccacgttgcatgttgaaaaag

SEQ ID NO: 580358 - DNA, 25 bp, Homo sapien
tagtccagaagtgttaacataaaac

SEQ ID NO: 580359 - DNA, 25 bp, Homo sapien
acataaaaccacgttgcatgttgaa

SEQ ID NO: 580360 - DNA, 25 bp, Homo sapien
cgagatgaggattatagaacaaagg

SEQ ID NO: 580361 - DNA, 25 bp, Homo sapien
aatgaaaagacaaagcacgtccaaa

SEQ ID NO: 580362 - DNA, 25 bp, Homo sapien
gaaaagacaaagcacgtccaaactc

SEQ ID NO: 580363 - DNA, 25 bp, Homo sapien
tgaggattctgcgagatgaggatta

SEQ ID NO: 580364 - DNA, 25 bp, Homo sapien
gagaaaaagcatcgcacatccaacc

SEQ ID NO: 580365 - DNA, 25 bp, Homo sapien
atccaacccaaagccaagtctcatt

SEQ ID NO: 580366 - DNA, 25 bp, Homo sapien
tttctctgagaaaaagcatcgcaca

SEQ ID NO: 580367 - DNA, 25 bp, Homo sapien
aaagcatcgcacatccaacccaaag

SEQ ID NO: 580368 - DNA, 25 bp, Homo sapien
ccgcagaggatgcatcaagggtgta

SEQ ID NO: 580369 - DNA, 25 bp, Homo sapien
tcaggatgaagcctggtcccctgtg

SEQ ID NO: 580370 - DNA, 25 bp, Homo sapien
ggaccacttatgattcaagccttga

SEQ ID NO: 580371 - DNA, 25 bp, Homo sapien
ggtgtttagtgttcctgaggccctg

SEQ ID NO: 580372 - DNA, 25 bp, Homo sapien
aaaattcagaataattttgctcttt

SEQ ID NO: 580373 - DNA, 25 bp, Homo sapien
ttcagaataattttgctctttcacc

SEQ ID NO: 580374 - DNA, 25 bp, Homo sapien
ccttccaaaattcagaataattttg

SEQ ID NO: 580375 - DNA, 25 bp, Homo sapien
aattcagaataattttgctctttca

SEQ ID NO: 580376 - DNA, 25 bp, Homo sapien
ctgcacattcttgcagagaggttgc

SEQ ID NO: 580377 - DNA, 25 bp, Homo sapien
gctatagtctgcacattcttgcaga

SEQ ID NO: 580378 - DNA, 25 bp, Homo sapien
tatagtctgcacattcttgcagaga

SEQ ID NO: 580379 - DNA, 25 bp, Homo sapien
tagtctgcacattcttgcagagagg

SEQ ID NO: 580380 - DNA, 25 bp, Homo sapien
taagtgctctaggatcagtatgtga

SEQ ID NO: 580381 - DNA, 25 bp, Homo sapien
agatataagtgctctaggatcagta

SEQ ID NO: 580382 - DNA, 25 bp, Homo sapien
taggatcagtatgtgaggctgccac

SEQ ID NO: 580383 - DNA, 25 bp, Homo sapien
tgctctaggatcagtatgtgaggct

SEQ ID NO: 580384 - DNA, 25 bp, Homo sapien
gatgaagatgactgcttgcattttc

SEQ ID NO: 580385 - DNA, 25 bp, Homo sapien
tattagatctaacaaagcttcacag

SEQ ID NO: 580386 - DNA, 25 bp, Homo sapien
cactttgtcgatgagacatgcatcc

SEQ ID NO: 580387 - DNA, 25 bp, Homo sapien
agtccataggactgtgatgaagatg

SEQ ID NO: 580388 - DNA, 25 bp, Homo sapien
tcccaacctagcgattttgggaagc

SEQ ID NO: 580389 - DNA, 25 bp, Homo sapien
caacctagcgattttgggaagcctt

SEQ ID NO: 580390 - DNA, 25 bp, Homo sapien
tgtcctggaaatgagcctcaattat

SEQ ID NO: 580391 - DNA, 25 bp, Homo sapien
ggcagccacacgtctctgacccctc

SEQ ID NO: 580392 - DNA, 25 bp, Homo sapien
tactgtcgccatgggaacctctgaa

SEQ ID NO: 580393 - DNA, 25 bp, Homo sapien
agcagccaacaagatcaggagtggg

SEQ ID NO: 580394 - DNA, 25 bp, Homo sapien
cagtggagacttgtttactgtcgcc

SEQ ID NO: 580395 - DNA, 25 bp, Homo sapien
tgagcagccaacaagatcaggagtg

SEQ ID NO: 580396 - DNA, 25 bp, Homo sapien
aggctgctcttccctaaatccaagc

SEQ ID NO: 580397 - DNA, 25 bp, Homo sapien
tgctgggcagaatttagacagcttg

SEQ ID NO: 580398 - DNA, 25 bp, Homo sapien
tttcaggtgagcagattgtttgagg

SEQ ID NO: 580399 - DNA, 25 bp, Homo sapien
agtgagcctttcaggtgagcagatt

SEQ ID NO: 580400 - DNA, 25 bp, Homo sapien
atgtcatcagcacaacattttcaca

SEQ ID NO: 580401 - DNA, 25 bp, Homo sapien
caagttcttccaaatagtctatgct

SEQ ID NO: 580402 - DNA, 25 bp, Homo sapien
ttccaaatagtctatgcttggcttc

SEQ ID NO: 580403 - DNA, 25 bp, Homo sapien
ggtcagctctcgctccttcaagttc

SEQ ID NO: 580404 - DNA, 25 bp, Homo sapien
tcagctctcgctccttcaagttctt

SEQ ID NO: 580405 - DNA, 25 bp, Homo sapien
tcctgccataccctggaggaaggaa

SEQ ID NO: 580406 - DNA, 25 bp, Homo sapien
gctgcacagaggtgctaacaagaat

SEQ ID NO: 580407 - DNA, 25 bp, Homo sapien
gatcctcatttgagaaaggtcctgc

SEQ ID NO: 580408 - DNA, 25 bp, Homo sapien
tctcaggagcagacctcagaaaata

SEQ ID NO: 580409 - DNA, 25 bp, Homo sapien
aagataagccatcagttcagctttg

SEQ ID NO: 580410 - DNA, 25 bp, Homo sapien
aaggtcctttgaagataagccatca

SEQ ID NO: 580411 - DNA, 25 bp, Homo sapien
gaaggtcctttgaagataagccatc

SEQ ID NO: 580412 - DNA, 25 bp, Homo sapien
agataagccatcagttcagctttga

SEQ ID NO: 580413 - DNA, 25 bp, Homo sapien
aagggtggagggagtcaacggctgc

SEQ ID NO: 580414 - DNA, 25 bp, Homo sapien
tgtcctggaaatgagcctcaattaa

SEQ ID NO: 580415 - DNA, 25 bp, Homo sapien
gggcagcagtaagtctctgacccct

SEQ ID NO: 580416 - DNA, 25 bp, Homo sapien
caacggctgccgctgggtgtgtctc

SEQ ID NO: 580417 - DNA, 25 bp, Homo sapien
tgtttactgtcaccattgggaacct

SEQ ID NO: 580418 - DNA, 25 bp, Homo sapien
tactgtcaccattgggaacctctga

SEQ ID NO: 580419 - DNA, 25 bp, Homo sapien
ctgtcaccattgggaacctctgaag

SEQ ID NO: 580420 - DNA, 25 bp, Homo sapien
tttactgtcaccattgggaacctct

SEQ ID NO: 580421 - DNA, 25 bp, Homo sapien
tccctgttcctgctcatcacagcct

SEQ ID NO: 580422 - DNA, 25 bp, Homo sapien
gggctccaggcctccctgttcctgc

SEQ ID NO: 580423 - DNA, 25 bp, Homo sapien
ggctccaggcctccctgttcctgct

SEQ ID NO: 580424 - DNA, 25 bp, Homo sapien
ggcctccctgttcctgctcatcaca

SEQ ID NO: 580425 - DNA, 25 bp, Homo sapien
ccctttcctataaggctctttcctg

SEQ ID NO: 580426 - DNA, 25 bp, Homo sapien
agtaactgggcatagaaaccttaag

SEQ ID NO: 580427 - DNA, 25 bp, Homo sapien
gagcctgggctacagtactgagccc

SEQ ID NO: 580428 - DNA, 25 bp, Homo sapien
tccatatccacttacctaggctgct

SEQ ID NO: 580429 - DNA, 25 bp, Homo sapien
ctgctgggcagaatttaggcagatc

SEQ ID NO: 580430 - DNA, 25 bp, Homo sapien
ggcagaatttaggcagatcagggaa

SEQ ID NO: 580431 - DNA, 25 bp, Homo sapien
ctgggcagaatttaggcagatcagg

SEQ ID NO: 580432 - DNA, 25 bp, Homo sapien
gctgggcagaatttaggcagatcag

SEQ ID NO: 580433 - DNA, 25 bp, Homo sapien
catttattgcattaggagtgagcca

SEQ ID NO: 580434 - DNA, 25 bp, Homo sapien
tgttttaccctttgagatgagcaga

SEQ ID NO: 580435 - DNA, 25 bp, Homo sapien
taccctttgagatgagcagattgct

SEQ ID NO: 580436 - DNA, 25 bp, Homo sapien
gcattaggagtgagccaatgtttta

SEQ ID NO: 580437 - DNA, 25 bp, Homo sapien
cccgtaggtggtttctagatattct

SEQ ID NO: 580438 - DNA, 25 bp, Homo sapien
ggtggggtcagctctccttcttgaa

SEQ ID NO: 580439 - DNA, 25 bp, Homo sapien
aagtggcctatgcttgcttcccgta

SEQ ID NO: 580440 - DNA, 25 bp, Homo sapien
ttgcttcccgtaggtggtttctaga

SEQ ID NO: 580441 - DNA, 25 bp, Homo sapien
cttttccatgaccacaggtggagtt

SEQ ID NO: 580442 - DNA, 25 bp, Homo sapien
ggtctgccagagcaaaggccctttt

SEQ ID NO: 580443 - DNA, 25 bp, Homo sapien
cttgttgaaggagcatttccaatga

SEQ ID NO: 580444 - DNA, 25 bp, Homo sapien
tccaatgagtgactggggtctgcca

SEQ ID NO: 580445 - DNA, 25 bp, Homo sapien
ggcttactgtcagagacactatgat

SEQ ID NO: 580446 - DNA, 25 bp, Homo sapien
ttccactcagcattagttacgggac

SEQ ID NO: 580447 - DNA, 25 bp, Homo sapien
taaaagctggcttactgtcagagac

SEQ ID NO: 580448 - DNA, 25 bp, Homo sapien
ttaattgtttgagcctgtaaaatcc

SEQ ID NO: 580449 - DNA, 25 bp, Homo sapien
ccataaaaccatagggtgtgtgact

SEQ ID NO: 580450 - DNA, 25 bp, Homo sapien
agctgtccctgtggtataaagccca

SEQ ID NO: 580451 - DNA, 25 bp, Homo sapien
taactcccttacaaaaatgccagag

SEQ ID NO: 580452 - DNA, 25 bp, Homo sapien
tgatgaggagggaatcagctgtccc

SEQ ID NO: 580453 - DNA, 25 bp, Homo sapien
ttccatgtccaaatgcccagatgct

SEQ ID NO: 580454 - DNA, 25 bp, Homo sapien
gcatgaactctgatgcagctctgag

SEQ ID NO: 580455 - DNA, 25 bp, Homo sapien
ccgttccctggccatgagatgcttg

SEQ ID NO: 580456 - DNA, 25 bp, Homo sapien
tgcttgactcttgtcctaggaccag

SEQ ID NO: 580457 - DNA, 25 bp, Homo sapien
catgtgtctgatatccctttcaaga

SEQ ID NO: 580458 - DNA, 25 bp, Homo sapien
gtaatggtgagacgcatggtcagac

SEQ ID NO: 580459 - DNA, 25 bp, Homo sapien
actgatgtaatggtgagacgcatgg

SEQ ID NO: 580460 - DNA, 25 bp, Homo sapien
tgagacgcatggtcagacatgtgtc

SEQ ID NO: 580461 - DNA, 25 bp, Homo sapien
cacttttaatatggcgatgggcaat

SEQ ID NO: 580462 - DNA, 25 bp, Homo sapien
aatgtggcaggttaagttcatccag

SEQ ID NO: 580463 - DNA, 25 bp, Homo sapien
tgcaggtggccacttttaatatggc

SEQ ID NO: 580464 - DNA, 25 bp, Homo sapien
gaggtatagagtagccccagattac

SEQ ID NO: 580465 - DNA, 25 bp, Homo sapien
gaccaatggtggagatccgtgtaca

SEQ ID NO: 580466 - DNA, 25 bp, Homo sapien
tgccccagagcataactgaggaagg

SEQ ID NO: 580467 - DNA, 25 bp, Homo sapien
tgtacacccacacttggaatgcagt

SEQ ID NO: 580468 - DNA, 25 bp, Homo sapien
tccctgggtggtgtcacagaaagga

SEQ ID NO: 580469 - DNA, 25 bp, Homo sapien
gatttgagagtctgtcgtagcctac

SEQ ID NO: 580470 - DNA, 25 bp, Homo sapien
tattactggttccattcaaacctag

SEQ ID NO: 580471 - DNA, 25 bp, Homo sapien
gcagctctaaatgattgaagcggat

SEQ ID NO: 580472 - DNA, 25 bp, Homo sapien
tttgttcctactaatagctacctgt

SEQ ID NO: 580473 - DNA, 25 bp, Homo sapien
ggaactgcaacccattttcaccagg

SEQ ID NO: 580474 - DNA, 25 bp, Homo sapien
tcatctcggtattggaactgcaacc

SEQ ID NO: 580475 - DNA, 25 bp, Homo sapien
ctggagtcatctcggtattggaact

SEQ ID NO: 580476 - DNA, 25 bp, Homo sapien
ggtattggaactgcaacccattttc

SEQ ID NO: 580477 - DNA, 25 bp, Homo sapien
caggcaaacagagccgtcctggcct

SEQ ID NO: 580478 - DNA, 25 bp, Homo sapien
tgtagttgtacttttgagaaccctg

SEQ ID NO: 580479 - DNA, 25 bp, Homo sapien
gccgtcctggccttgtagttgtact

SEQ ID NO: 580480 - DNA, 25 bp, Homo sapien
gtacttttgagaaccctgtggcttg

SEQ ID NO: 580481 - DNA, 25 bp, Homo sapien
aaacctcttgccttcaataccttca

SEQ ID NO: 580482 - DNA, 25 bp, Homo sapien
gtttgtattcacaaaacctcttgcc

SEQ ID NO: 580483 - DNA, 25 bp, Homo sapien
tgagtttgtattcacaaaacctctt

SEQ ID NO: 580484 - DNA, 25 bp, Homo sapien
tcttgccttcaataccttcataact

SEQ ID NO: 580485 - DNA, 25 bp, Homo sapien
atttctagaacaaacttgtgaattt

SEQ ID NO: 580486 - DNA, 25 bp, Homo sapien
actcgtcagtgctccattgctctta

SEQ ID NO: 580487 - DNA, 25 bp, Homo sapien
cattgctcttatccgcgggcttgct

SEQ ID NO: 580488 - DNA, 25 bp, Homo sapien
tgtgaattttcattacactcgtcag

SEQ ID NO: 580489 - DNA, 25 bp, Homo sapien
tcctcttttcacatttgtccttttc

SEQ ID NO: 580490 - DNA, 25 bp, Homo sapien
ctttcctcttttcacatttgtcctt

SEQ ID NO: 580491 - DNA, 25 bp, Homo sapien
aaataaatcttaaaacacagctgaa

SEQ ID NO: 580492 - DNA, 25 bp, Homo sapien
ttacaagggacaaaaggtatatata

SEQ ID NO: 580493 - DNA, 25 bp, Homo sapien
ctttatacttctcaactcccgtcaa

SEQ ID NO: 580494 - DNA, 25 bp, Homo sapien
caacaaacctgcttccgaaactgta

SEQ ID NO: 580495 - DNA, 25 bp, Homo sapien
tcaaaatgtgaactccatggcaaca

SEQ ID NO: 580496 - DNA, 25 bp, Homo sapien
actgtaaaggagattgtccatgctg

SEQ ID NO: 580497 - DNA, 25 bp, Homo sapien
gcctatctttttgtcagatcgttga

SEQ ID NO: 580498 - DNA, 25 bp, Homo sapien
ttgtcagatcgttgaaactaaaaca

SEQ ID NO: 580499 - DNA, 25 bp, Homo sapien
taccaatcaggcttttccagaagaa

SEQ ID NO: 580500 - DNA, 25 bp, Homo sapien
ctgagcccttaaaggaatcttacca

SEQ ID NO: 580501 - DNA, 25 bp, Homo sapien
ggtgtgaagtgacagagcccgggac

SEQ ID NO: 580502 - DNA, 25 bp, Homo sapien
gggtgtgaagtgacagagcccggga

SEQ ID NO: 580503 - DNA, 25 bp, Homo sapien
gtgaagtttcccgttgcaaacagca

SEQ ID NO: 580504 - DNA, 25 bp, Homo sapien
gattgtgaagtttcccgttgcaaac

SEQ ID NO: 580505 - DNA, 25 bp, Homo sapien
gtgattgtgaagtttcccgttgcaa

SEQ ID NO: 580506 - DNA, 25 bp, Homo sapien
aagtttcccgttgcaaacagcacca

SEQ ID NO: 580507 - DNA, 25 bp, Homo sapien
tggaaaggctctggtccttgccagc

SEQ ID NO: 580508 - DNA, 25 bp, Homo sapien
ctaagaatggaaaggctctggtcct

SEQ ID NO: 580509 - DNA, 25 bp, Homo sapien
agaatggaaaggctctggtccttgc

SEQ ID NO: 580510 - DNA, 25 bp, Homo sapien
aatggaaaggctctggtccttgcca

SEQ ID NO: 580511 - DNA, 25 bp, Homo sapien
gcaagttgtcttcccagcctaggtc

SEQ ID NO: 580512 - DNA, 25 bp, Homo sapien
tgtgttgtacgccatctcccagatg

SEQ ID NO: 580513 - DNA, 25 bp, Homo sapien
caatggtaacttgctcatgagcgta

SEQ ID NO: 580514 - DNA, 25 bp, Homo sapien
gtctcagtcccagttgccaacaatg

SEQ ID NO: 580515 - DNA, 25 bp, Homo sapien
gtgcttttgcattggtttaggttca

SEQ ID NO: 580516 - DNA, 25 bp, Homo sapien
tcatctctggttaagggcttaagca

SEQ ID NO: 580517 - DNA, 25 bp, Homo sapien
ggcaattttcaaatgggtgtgcttt

SEQ ID NO: 580518 - DNA, 25 bp, Homo sapien
tttggcttttacagccggacactca

SEQ ID NO: 580519 - DNA, 25 bp, Homo sapien
tgtgcaccactgactatgaaatctg

SEQ ID NO: 580520 - DNA, 25 bp, Homo sapien
gaggcgagccaaattctctgagcca

SEQ ID NO: 580521 - DNA, 25 bp, Homo sapien
tcataagagttcctcaaacctgcag

SEQ ID NO: 580522 - DNA, 25 bp, Homo sapien
catctaacgaaggtttgtgcaccac

SEQ ID NO: 580523 - DNA, 25 bp, Homo sapien
ttctgaagtctgattccactggact

SEQ ID NO: 580524 - DNA, 25 bp, Homo sapien
gacaaactggaacatatttcagaaa

SEQ ID NO: 580525 - DNA, 25 bp, Homo sapien
tctcaggtgaatactagtagctgca

SEQ ID NO: 580526 - DNA, 25 bp, Homo sapien
aaagcttgacttccacgtgcgtgta

SEQ ID NO: 580527 - DNA, 25 bp, Homo sapien
tcagaaatagagtacccatgggact

SEQ ID NO: 580528 - DNA, 25 bp, Homo sapien
gggaggaacatgaagctaacactgg

SEQ ID NO: 580529 - DNA, 25 bp, Homo sapien
ctgggaggaacatgaagctaacact

SEQ ID NO: 580530 - DNA, 25 bp, Homo sapien
tgggaggaacatgaagctaacactg

SEQ ID NO: 580531 - DNA, 25 bp, Homo sapien
cattgagtgtccatgttaccaactg

SEQ ID NO: 580532 - DNA, 25 bp, Homo sapien
catagagagatgttcagggaacagc

SEQ ID NO: 580533 - DNA, 25 bp, Homo sapien
gctgacaaatggtacatagagagat

SEQ ID NO: 580534 - DNA, 25 bp, Homo sapien
cagttcaacactaaaccaagtctca

SEQ ID NO: 580535 - DNA, 25 bp, Homo sapien
ttgcaaaccaccagatccagaagga

SEQ ID NO: 580536 - DNA, 25 bp, Homo sapien
gactcattctggctgatggactctg

SEQ ID NO: 580537 - DNA, 25 bp, Homo sapien
tgaatagacccgtaaaaatgaaggc

SEQ ID NO: 580538 - DNA, 25 bp, Homo sapien
caccatatggcagacagaatacagc

SEQ ID NO: 580539 - DNA, 25 bp, Homo sapien
taaagcagtgcttaacaggacattt

SEQ ID NO: 580540 - DNA, 25 bp, Homo sapien
catttttctaaagcgcatatggaac

SEQ ID NO: 580541 - DNA, 25 bp, Homo sapien
tccaacggcaatggaattagaaatc

SEQ ID NO: 580542 - DNA, 25 bp, Homo sapien
tatggaacacgtctccccaaaacag

SEQ ID NO: 580543 - DNA, 25 bp, Homo sapien
cattgcctacagtatctagtcgttt

SEQ ID NO: 580544 - DNA, 25 bp, Homo sapien
gcctacagtatctagtcgtttggga

SEQ ID NO: 580545 - DNA, 25 bp, Homo sapien
cagtatctagtcgtttgggatgatg

SEQ ID NO: 580546 - DNA, 25 bp, Homo sapien
ttaaaaataaacagaccctgagcca

SEQ ID NO: 580547 - DNA, 25 bp, Homo sapien
gggtgcttcctcaaacgattcaaca

SEQ ID NO: 580548 - DNA, 25 bp, Homo sapien
taagtgaaaaccataacatgaaggg

SEQ ID NO: 580549 - DNA, 25 bp, Homo sapien
tcctcaaacgattcaacaatgagct

SEQ ID NO: 580550 - DNA, 25 bp, Homo sapien
aatgagcttatcataaaaatgtggc

SEQ ID NO: 580551 - DNA, 25 bp, Homo sapien
cagctgcgttgcatttttctattcc

SEQ ID NO: 580552 - DNA, 25 bp, Homo sapien
tgcgttgcatttttctattccccag

SEQ ID NO: 580553 - DNA, 25 bp, Homo sapien
gctgcgttgcatttttctattcccc

SEQ ID NO: 580554 - DNA, 25 bp, Homo sapien
cacagctgcgttgcatttttctatt

SEQ ID NO: 580555 - DNA, 25 bp, Homo sapien
ttctgagaacactttagagaggagt

SEQ ID NO: 580556 - DNA, 25 bp, Homo sapien
caaatagtagttgcccatgagatgt

SEQ ID NO: 580557 - DNA, 25 bp, Homo sapien
acaggtccataagcccatgggtaat

SEQ ID NO: 580558 - DNA, 25 bp, Homo sapien
ctcatgctttctaggatctgcacct

SEQ ID NO: 580559 - DNA, 25 bp, Homo sapien
tctcatttgggaaagtctagggctg

SEQ ID NO: 580560 - DNA, 25 bp, Homo sapien
tagaagaccaaagtacagtcccacc

SEQ ID NO: 580561 - DNA, 25 bp, Homo sapien
gatagggccccaattctgtcttagc

SEQ ID NO: 580562 - DNA, 25 bp, Homo sapien
gataccagtgcctgttccagtagag

SEQ ID NO: 580563 - DNA, 25 bp, Homo sapien
tacccctgctatcttttggtgtcta

SEQ ID NO: 580564 - DNA, 25 bp, Homo sapien
tattgtcagtcacttcaaagaactt

SEQ ID NO: 580565 - DNA, 25 bp, Homo sapien
tcttagcactgccttaggttttgat

SEQ ID NO: 580566 - DNA, 25 bp, Homo sapien
gctttacagttgtctgatattagaa

SEQ ID NO: 580567 - DNA, 25 bp, Homo sapien
tcatcctcatggatttatcgacctt

SEQ ID NO: 580568 - DNA, 25 bp, Homo sapien
cctcatcctcatggatttatcgacc

SEQ ID NO: 580569 - DNA, 25 bp, Homo sapien
atttatcgacctttggtcttctatg

SEQ ID NO: 580570 - DNA, 25 bp, Homo sapien
tatcgacctttggtcttctatgttg

SEQ ID NO: 580571 - DNA, 25 bp, Homo sapien
cctttataactcaagaacctttatg

SEQ ID NO: 580572 - DNA, 25 bp, Homo sapien
aacctttatgtcctcaaagctgtct

SEQ ID NO: 580573 - DNA, 25 bp, Homo sapien
tttataactcaagaacctttatgtc

SEQ ID NO: 580574 - DNA, 25 bp, Homo sapien
ctttatgtcctcaaagctgtctgtg

SEQ ID NO: 580575 - DNA, 25 bp, Homo sapien
gaaacctgcgtctctggaagcatgc

SEQ ID NO: 580576 - DNA, 25 bp, Homo sapien
ttcccagttacattgtcagctctac

SEQ ID NO: 580577 - DNA, 25 bp, Homo sapien
tactaggaccagagaaacctgcgtc

SEQ ID NO: 580578 - DNA, 25 bp, Homo sapien
tcagctctactaggaccagagaaac

SEQ ID NO: 580579 - DNA, 25 bp, Homo sapien
gcctctagaacagtgcagctggtgg

SEQ ID NO: 580580 - DNA, 25 bp, Homo sapien
gggccatggagatcactgtgagaat

SEQ ID NO: 580581 - DNA, 25 bp, Homo sapien
ccgactggtgataagagcctctaga

SEQ ID NO: 580582 - DNA, 25 bp, Homo sapien
gaatgcccaaggagaattccccttc

SEQ ID NO: 580583 - DNA, 25 bp, Homo sapien
caagtgttgaagtgcaggctgccat

SEQ ID NO: 580584 - DNA, 25 bp, Homo sapien
gaggcttacagctccatgaggattg

SEQ ID NO: 580585 - DNA, 25 bp, Homo sapien
tgaaatgctgtaagtctctaacggg

SEQ ID NO: 580586 - DNA, 25 bp, Homo sapien
tgcaggagtaaaaagatctagcccc

SEQ ID NO: 580587 - DNA, 25 bp, Homo sapien
acaggtggcctcgataggaacccag

SEQ ID NO: 580588 - DNA, 25 bp, Homo sapien
aaacaaggtagagcatatgcacccc

SEQ ID NO: 580589 - DNA, 25 bp, Homo sapien
gctgaatgactgctgatgactgtga

SEQ ID NO: 580590 - DNA, 25 bp, Homo sapien
gcccctgactctgtgatgatatgca

SEQ ID NO: 580591 - DNA, 25 bp, Homo sapien
gaagtgcagtcatactattaatcag

SEQ ID NO: 580592 - DNA, 25 bp, Homo sapien
caaaggataggaactgccagtctga

SEQ ID NO: 580593 - DNA, 25 bp, Homo sapien
gatataagagcacatagagttcctc

SEQ ID NO: 580594 - DNA, 25 bp, Homo sapien
tccacatttatgtgcggctaaatat

SEQ ID NO: 580595 - DNA, 25 bp, Homo sapien
tgaacccatggggagaaggtttgca

SEQ ID NO: 580596 - DNA, 25 bp, Homo sapien
aacccatggggagaaggtttgcagt

SEQ ID NO: 580597 - DNA, 25 bp, Homo sapien
aaacatacacaaattaagtgggtgt

SEQ ID NO: 580598 - DNA, 25 bp, Homo sapien
cacttgaacccatggggagaaggtt

SEQ ID NO: 580599 - DNA, 25 bp, Homo sapien
aaaggtcaatgtcctctagtcccag

SEQ ID NO: 580600 - DNA, 25 bp, Homo sapien
aactgacttgcttttgggcgtggcc

SEQ ID NO: 580601 - DNA, 25 bp, Homo sapien
tacatgtttctgagagggccaattg

SEQ ID NO: 580602 - DNA, 25 bp, Homo sapien
taacccagatctgatacacaaggtc

SEQ ID NO: 580603 - DNA, 25 bp, Homo sapien
tgaagcagggaagaagacctggaag

SEQ ID NO: 580604 - DNA, 25 bp, Homo sapien
aagcagggaagaagacctggaagag

SEQ ID NO: 580605 - DNA, 25 bp, Homo sapien
ttgaagcagggaagaagacctggaa

SEQ ID NO: 580606 - DNA, 25 bp, Homo sapien
aattgaagcagggaagaagacctgg

SEQ ID NO: 580607 - DNA, 25 bp, Homo sapien
gttgtctctgattcgcatgtaaagg

SEQ ID NO: 580608 - DNA, 25 bp, Homo sapien
taaacgtccagttatagtcgtctga

SEQ ID NO: 580609 - DNA, 25 bp, Homo sapien
tcaaagtcttgatacagtggcacaa

SEQ ID NO: 580610 - DNA, 25 bp, Homo sapien
gatgggccggttccagttgtctctg

SEQ ID NO: 580611 - DNA, 25 bp, Homo sapien
acgcctgtgccatacacctctaaaa

SEQ ID NO: 580612 - DNA, 25 bp, Homo sapien
gtcctcatagactcatcatacttgg

SEQ ID NO: 580613 - DNA, 25 bp, Homo sapien
gttataggagcccatgttgatgaca

SEQ ID NO: 580614 - DNA, 25 bp, Homo sapien
tacttggctgcaagaccaaggaagt

SEQ ID NO: 580615 - DNA, 25 bp, Homo sapien
tgatgaacatcgttaagaaaagtgg

SEQ ID NO: 580616 - DNA, 25 bp, Homo sapien
ccagctagaggaggcacagtgttgc

SEQ ID NO: 580617 - DNA, 25 bp, Homo sapien
caaggaatctgagacctaacagcaa

SEQ ID NO: 580618 - DNA, 25 bp, Homo sapien
tgcctggcaacagcctaatgcttga

SEQ ID NO: 580619 - DNA, 25 bp, Homo sapien
attttccatgaccagggtggcccct

SEQ ID NO: 580620 - DNA, 25 bp, Homo sapien
tggcactgagtcagcttgcaagacc

SEQ ID NO: 580621 - DNA, 25 bp, Homo sapien
cattttccatgaccagggtggcccc

SEQ ID NO: 580622 - DNA, 25 bp, Homo sapien
actgagtcagcttgcaagacccctc

SEQ ID NO: 580623 - DNA, 25 bp, Homo sapien
tcaaattgctctctaattttctctg

SEQ ID NO: 580624 - DNA, 25 bp, Homo sapien
tgtcaatggtatatgagagtgctct

SEQ ID NO: 580625 - DNA, 25 bp, Homo sapien
caaaagggttgagaaatgtcacact

SEQ ID NO: 580626 - DNA, 25 bp, Homo sapien
aaaattgctcaaaatagagttacaa

SEQ ID NO: 580627 - DNA, 25 bp, Homo sapien
tgcacgtactatttcctccacataa

SEQ ID NO: 580628 - DNA, 25 bp, Homo sapien
taggctttcccgatgttgcacgtac

SEQ ID NO: 580629 - DNA, 25 bp, Homo sapien
aatgccattttaggctttcccgatg

SEQ ID NO: 580630 - DNA, 25 bp, Homo sapien
ttgcagagggattgagaaaaatgcc

SEQ ID NO: 580631 - DNA, 25 bp, Homo sapien
ttcattgagttagttgcgaatccca

SEQ ID NO: 580632 - DNA, 25 bp, Homo sapien
cattcaggaacttagccacaaggtc

SEQ ID NO: 580633 - DNA, 25 bp, Homo sapien
atcccaaagaccatagctgcttcca

SEQ ID NO: 580634 - DNA, 25 bp, Homo sapien
actaatgctgggatattcattgagt

SEQ ID NO: 580635 - DNA, 25 bp, Homo sapien
taactcatcacttaaaatgaggcat

SEQ ID NO: 580636 - DNA, 25 bp, Homo sapien
cacaagcgatgtgtggtttaactca

SEQ ID NO: 580637 - DNA, 25 bp, Homo sapien
agagtcgggccccaagcacaagcga

SEQ ID NO: 580638 - DNA, 25 bp, Homo sapien
gaagattcttatggttgcacctgag

SEQ ID NO: 580639 - DNA, 25 bp, Homo sapien
tcttctaggagcaatccagtacatg

SEQ ID NO: 580640 - DNA, 25 bp, Homo sapien
tttcttctaggagcaatccagtaca

SEQ ID NO: 580641 - DNA, 25 bp, Homo sapien
ctaggagcaatccagtacatgttga

SEQ ID NO: 580642 - DNA, 25 bp, Homo sapien
ttctaggagcaatccagtacatgtt

SEQ ID NO: 580643 - DNA, 25 bp, Homo sapien
catagctactgaaagcggctcagta

SEQ ID NO: 580644 - DNA, 25 bp, Homo sapien
ctcagtgagagccatagatttttca

SEQ ID NO: 580645 - DNA, 25 bp, Homo sapien
cagtgagagccatagatttttcatt

SEQ ID NO: 580646 - DNA, 25 bp, Homo sapien
tactgaaagcggctcagtaaggcat

SEQ ID NO: 580647 - DNA, 25 bp, Homo sapien
ttaaacatgtggatagatgtcgcac

SEQ ID NO: 580648 - DNA, 25 bp, Homo sapien
tgggcttatggatgaggcaggtgct

SEQ ID NO: 580649 - DNA, 25 bp, Homo sapien
cagccttaggcagttgaaagaagca

SEQ ID NO: 580650 - DNA, 25 bp, Homo sapien
tcttggaagagtgcaaaagacagct

SEQ ID NO: 580651 - DNA, 25 bp, Homo sapien
ccttcctgatatagcctctgcctgt

SEQ ID NO: 580652 - DNA, 25 bp, Homo sapien
gcctgtctttctgacatagtttgtc

SEQ ID NO: 580653 - DNA, 25 bp, Homo sapien
gaggtttgttccagtaatagttgcc

SEQ ID NO: 580654 - DNA, 25 bp, Homo sapien
taatacaatctcgaatggcccttcc

SEQ ID NO: 580655 - DNA, 25 bp, Homo sapien
aaaggtgacttcctatgacttggag

SEQ ID NO: 580656 - DNA, 25 bp, Homo sapien
tgttagcatggcaccttccaagctg

SEQ ID NO: 580657 - DNA, 25 bp, Homo sapien
gctgcatactagcaagatctcttgg

SEQ ID NO: 580658 - DNA, 25 bp, Homo sapien
ccactagagactgggtatcgggtcc

SEQ ID NO: 580659 - DNA, 25 bp, Homo sapien
actgttatgcaatgttcaccaggca

SEQ ID NO: 580660 - DNA, 25 bp, Homo sapien
ttaaaatgctcacaaaaggtgacat

SEQ ID NO: 580661 - DNA, 25 bp, Homo sapien
gatggagatgctacttaactgctgg

SEQ ID NO: 580662 - DNA, 25 bp, Homo sapien
ttaagtgggtatggtggtaggcacc

SEQ ID NO: 580663 - DNA, 25 bp, Homo sapien
ttcacactcagacctaaactttcag

SEQ ID NO: 580664 - DNA, 25 bp, Homo sapien
tcacactcagacctaaactttcaga

SEQ ID NO: 580665 - DNA, 25 bp, Homo sapien
tgagtcatgaaagggtttacttttc

SEQ ID NO: 580666 - DNA, 25 bp, Homo sapien
attgagtcatgaaagggtttacttt

SEQ ID NO: 580667 - DNA, 25 bp, Homo sapien
tttccaagctctgcgggttcgaggc

SEQ ID NO: 580668 - DNA, 25 bp, Homo sapien
ctctgcgggttcgaggctggccata

SEQ ID NO: 580669 - DNA, 25 bp, Homo sapien
ttcgaggctggccatagatgacagc

SEQ ID NO: 580670 - DNA, 25 bp, Homo sapien
tttttccaagctctgcgggttcgag

SEQ ID NO: 580671 - DNA, 25 bp, Homo sapien
gccactgtggtggatggcttccaaa

SEQ ID NO: 580672 - DNA, 25 bp, Homo sapien
ccccaagagcgattgaggcttgtca

SEQ ID NO: 580673 - DNA, 25 bp, Homo sapien
caaaggaggctttgtgtaggtacca

SEQ ID NO: 580674 - DNA, 25 bp, Homo sapien
catcaccaggttgattgagccactg

SEQ ID NO: 580675 - DNA, 25 bp, Homo sapien
gcaagtaatctaagcctcggagcct

SEQ ID NO: 580676 - DNA, 25 bp, Homo sapien
tcaggaatacttggaggcttactca

SEQ ID NO: 580677 - DNA, 25 bp, Homo sapien
gatttgaacctaggtcccaggcctg

SEQ ID NO: 580678 - DNA, 25 bp, Homo sapien
aaagtaccctatggaggccacacag

SEQ ID NO: 580679 - DNA, 25 bp, Homo sapien
gataagggatctagacttctcagag

SEQ ID NO: 580680 - DNA, 25 bp, Homo sapien
tatttgggacaccacacctcaagga

SEQ ID NO: 580681 - DNA, 25 bp, Homo sapien
tattttgaaagttagtgctccagct

SEQ ID NO: 580682 - DNA, 25 bp, Homo sapien
cagctatgctagtttatgtcccagg

SEQ ID NO: 580683 - DNA, 25 bp, Homo sapien
cacactcaccacacaaaggaacttg

SEQ ID NO: 580684 - DNA, 25 bp, Homo sapien
gactgcattgacaggcaagttgtac

SEQ ID NO: 580685 - DNA, 25 bp, Homo sapien
caagttgtacgaaaacacacagaca

SEQ ID NO: 580686 - DNA, 25 bp, Homo sapien
ttaggtcgattcagtcaaaacagtc

SEQ ID NO: 580687 - DNA, 25 bp, Homo sapien
gatcctcctgggaagctttggtaca

SEQ ID NO: 580688 - DNA, 25 bp, Homo sapien
tcaagtcaaagaccgaggtgtctcc

SEQ ID NO: 580689 - DNA, 25 bp, Homo sapien
tctgggacagatacacgatagaacc

SEQ ID NO: 580690 - DNA, 25 bp, Homo sapien
tgcggaccacatatagagggccact

SEQ ID NO: 580691 - DNA, 25 bp, Homo sapien
cctcctgaagctccaaaacttttgg

SEQ ID NO: 580692 - DNA, 25 bp, Homo sapien
tgtgcccatgagcacatcaacttca

SEQ ID NO: 580693 - DNA, 25 bp, Homo sapien
gggtctagtccaaagaactccgtga

SEQ ID NO: 580694 - DNA, 25 bp, Homo sapien
tcatctatgtagaggtaagccttgt

SEQ ID NO: 580695 - DNA, 25 bp, Homo sapien
tgccatctagtggtaaatttagaca

SEQ ID NO: 580696 - DNA, 25 bp, Homo sapien
gctgccatctagtggtaaatttaga

SEQ ID NO: 580697 - DNA, 25 bp, Homo sapien
cttgctgccatctagtggtaaattt

SEQ ID NO: 580698 - DNA, 25 bp, Homo sapien
ttcttgctgccatctagtggtaaat

SEQ ID NO: 580699 - DNA, 25 bp, Homo sapien
gaattccagccctgcaacctatcag

SEQ ID NO: 580700 - DNA, 25 bp, Homo sapien
aagggctaccatcgcttcattcatt

SEQ ID NO: 580701 - DNA, 25 bp, Homo sapien
catgcaggtggactcaagatccttg

SEQ ID NO: 580702 - DNA, 25 bp, Homo sapien
agtgttcggcaccaggcatgcaggt

SEQ ID NO: 580703 - DNA, 25 bp, Homo sapien
aagttttagtgatctgatgatttgc

SEQ ID NO: 580704 - DNA, 25 bp, Homo sapien
tcatggatgaagcataaacagcact

SEQ ID NO: 580705 - DNA, 25 bp, Homo sapien
gagtgaacccgtaaataatccacga

SEQ ID NO: 580706 - DNA, 25 bp, Homo sapien
ttgctctgctatcggtgggctcatg

SEQ ID NO: 580707 - DNA, 25 bp, Homo sapien
cttgagtggtcccatccagtcccat

SEQ ID NO: 580708 - DNA, 25 bp, Homo sapien
gagctaatgcaatattcctaacctg

SEQ ID NO: 580709 - DNA, 25 bp, Homo sapien
cagccattgttgcaaatgaggccag

SEQ ID NO: 580710 - DNA, 25 bp, Homo sapien
cactgcttcaaaagatgtgtcaggc

SEQ ID NO: 580711 - DNA, 25 bp, Homo sapien
tcctaacctgtcctgctcatttgat

SEQ ID NO: 580712 - DNA, 25 bp, Homo sapien
tcttgcatgaaacagtgcatccttt

SEQ ID NO: 580713 - DNA, 25 bp, Homo sapien
tcagagcccggcttctctttctcag

SEQ ID NO: 580714 - DNA, 25 bp, Homo sapien
agctcttgcatgaaacagtgcatcc

SEQ ID NO: 580715 - DNA, 25 bp, Homo sapien
catgaaacagtgcatcctttgagct

SEQ ID NO: 580716 - DNA, 25 bp, Homo sapien
aagcgtatggctttgcattgcagat

SEQ ID NO: 580717 - DNA, 25 bp, Homo sapien
cattgcagattaaagtgaagacatt

SEQ ID NO: 580718 - DNA, 25 bp, Homo sapien
ggctccaatcacagttgtagtggag

SEQ ID NO: 580719 - DNA, 25 bp, Homo sapien
acattcatcaaggaacagatctggc

SEQ ID NO: 580720 - DNA, 25 bp, Homo sapien
agctgagcactgagtttgacactca

SEQ ID NO: 580721 - DNA, 25 bp, Homo sapien
aagacacatttcttgcccttaaggg

SEQ ID NO: 580722 - DNA, 25 bp, Homo sapien
gagaaatcaaatctccacttttggg

SEQ ID NO: 580723 - DNA, 25 bp, Homo sapien
cactcctcagagtgacagaccagga

SEQ ID NO: 580724 - DNA, 25 bp, Homo sapien
aatcactgagtgatcccttccgctg

SEQ ID NO: 580725 - DNA, 25 bp, Homo sapien
tagataagaaaacgactgagctgcg

SEQ ID NO: 580726 - DNA, 25 bp, Homo sapien
tgtggaaccaattcccagctcccag

SEQ ID NO: 580727 - DNA, 25 bp, Homo sapien
cttccgctgccacaactggtgtgga

SEQ ID NO: 580728 - DNA, 25 bp, Homo sapien
cagagagatcaagtttaatctggca

SEQ ID NO: 580729 - DNA, 25 bp, Homo sapien
tagatgggaagccagcggaatagct

SEQ ID NO: 580730 - DNA, 25 bp, Homo sapien
cactcttttgagatctgctgcaatg

SEQ ID NO: 580731 - DNA, 25 bp, Homo sapien
acttcatgagaagggtagatgggaa

SEQ ID NO: 580732 - DNA, 25 bp, Homo sapien
tttggaaaccgtacattgaagctgg

SEQ ID NO: 580733 - DNA, 25 bp, Homo sapien
tgtgggcagaaatgcaatgtgcctt

SEQ ID NO: 580734 - DNA, 25 bp, Homo sapien
gcaaagtctggttcttactcaccaa

SEQ ID NO: 580735 - DNA, 25 bp, Homo sapien
tcagaaagtcggaggaaagaatgtc

SEQ ID NO: 580736 - DNA, 25 bp, Homo sapien
gaattcagtctcgtgcctggttacc

SEQ ID NO: 580737 - DNA, 25 bp, Homo sapien
cttagttactcaagggctgggtgcc

SEQ ID NO: 580738 - DNA, 25 bp, Homo sapien
gctgggtgccaatgtgatgaacatc

SEQ ID NO: 580739 - DNA, 25 bp, Homo sapien
gaacttgcccatctagacataacag

SEQ ID NO: 580740 - DNA, 25 bp, Homo sapien
tacagccaacctggccatcccggtc

SEQ ID NO: 580741 - DNA, 25 bp, Homo sapien
ctgcggcacctacagccaacctggc

SEQ ID NO: 580742 - DNA, 25 bp, Homo sapien
gcacctacagccaacctggccatcc

SEQ ID NO: 580743 - DNA, 25 bp, Homo sapien
ggccatcccggtctccttcttggtc

SEQ ID NO: 580744 - DNA, 25 bp, Homo sapien
gggtccctcttgtctacataactga

SEQ ID NO: 580745 - DNA, 25 bp, Homo sapien
aaactgggtccctcttgtctacata

SEQ ID NO: 580746 - DNA, 25 bp, Homo sapien
ggatttgctctctaaaactgggtcc

SEQ ID NO: 580747 - DNA, 25 bp, Homo sapien
ttggatttgctctctaaaactgggt

SEQ ID NO: 580748 - DNA, 25 bp, Homo sapien
tgtcgggattccagggctacagcat

SEQ ID NO: 580749 - DNA, 25 bp, Homo sapien
gagtggtttgctaagaggaatgcac

SEQ ID NO: 580750 - DNA, 25 bp, Homo sapien
catacacatgttccaagggctctcc

SEQ ID NO: 580751 - DNA, 25 bp, Homo sapien
gaagctctcccttttgatgtcggga

SEQ ID NO: 580752 - DNA, 25 bp, Homo sapien
tccgaaggataagcaagtactaacc

SEQ ID NO: 580753 - DNA, 25 bp, Homo sapien
gaagctgtggcaacctataaagaag

SEQ ID NO: 580754 - DNA, 25 bp, Homo sapien
gcagtgcaaggtgagtcagtaacaa

SEQ ID NO: 580755 - DNA, 25 bp, Homo sapien
caaagccggacatagaatagtgttc

SEQ ID NO: 580756 - DNA, 25 bp, Homo sapien
gctcatcaggcctaaatgaacttca

SEQ ID NO: 580757 - DNA, 25 bp, Homo sapien
ttagttgagtggaacacagaccaag

SEQ ID NO: 580758 - DNA, 25 bp, Homo sapien
accaggtgtagacaagcacccaaag

SEQ ID NO: 580759 - DNA, 25 bp, Homo sapien
aaggaggaggatgctaaatgcccca

SEQ ID NO: 580760 - DNA, 25 bp, Homo sapien
taaaggtccggtcaacttggcaagc

SEQ ID NO: 580761 - DNA, 25 bp, Homo sapien
aggtccggtcaacttggcaagcatc

SEQ ID NO: 580762 - DNA, 25 bp, Homo sapien
tcaacttggcaagcatctttaagtc

SEQ ID NO: 580763 - DNA, 25 bp, Homo sapien
tccggtcaacttggcaagcatcttt

SEQ ID NO: 580764 - DNA, 25 bp, Homo sapien
aaagagacaggcgtgaaatccatca

SEQ ID NO: 580765 - DNA, 25 bp, Homo sapien
caggcgtgaaatccatcaattccca

SEQ ID NO: 580766 - DNA, 25 bp, Homo sapien
gaaaagagacaggcgtgaaatccat

SEQ ID NO: 580767 - DNA, 25 bp, Homo sapien
gagacaggcgtgaaatccatcaatt

SEQ ID NO: 580768 - DNA, 25 bp, Homo sapien
ctgaagtatcttgtgtttttcgcaa

SEQ ID NO: 580769 - DNA, 25 bp, Homo sapien
tcctgcagtctttgtctgaagtatc

SEQ ID NO: 580770 - DNA, 25 bp, Homo sapien
ttcgcaagttgctgtactctctgca

SEQ ID NO: 580771 - DNA, 25 bp, Homo sapien
caggcatataaagaagcagaggaac

SEQ ID NO: 580772 - DNA, 25 bp, Homo sapien
tgcccacggaactgcacagaatgag

SEQ ID NO: 580773 - DNA, 25 bp, Homo sapien
tcattagtctaacctggcgtctccc

SEQ ID NO: 580774 - DNA, 25 bp, Homo sapien
tattgctagagtacaaaccacctga

SEQ ID NO: 580775 - DNA, 25 bp, Homo sapien
tcttgatcaccctatggaaggctgc

SEQ ID NO: 580776 - DNA, 25 bp, Homo sapien
ctctagcatatgccttgcaaaagcc

SEQ ID NO: 580777 - DNA, 25 bp, Homo sapien
cgtgtctaacatctcccgggtatgt

SEQ ID NO: 580778 - DNA, 25 bp, Homo sapien
agtggctggaaatcccacgaccacc

SEQ ID NO: 580779 - DNA, 25 bp, Homo sapien
aaccgagcccgagcttctgcgaggg

SEQ ID NO: 580780 - DNA, 25 bp, Homo sapien
ggtatgtgccgctgaaacacaaaac

SEQ ID NO: 580781 - DNA, 25 bp, Homo sapien
tcctctccagttcatttgtcacgtt

SEQ ID NO: 580782 - DNA, 25 bp, Homo sapien
tttaaatagctacatcttagatcct

SEQ ID NO: 580783 - DNA, 25 bp, Homo sapien
taccattagccttgtcatctcttgt

SEQ ID NO: 580784 - DNA, 25 bp, Homo sapien
gacatgattgtgtcactccactgat

SEQ ID NO: 580785 - DNA, 25 bp, Homo sapien
gaacacactcgtgctcagagttagg

SEQ ID NO: 580786 - DNA, 25 bp, Homo sapien
gtgtctcttatataatgtacgtaat

SEQ ID NO: 580787 - DNA, 25 bp, Homo sapien
ggacactgcagaagaaccgtgggca

SEQ ID NO: 580788 - DNA, 25 bp, Homo sapien
gagcttgtgcctgagatgactctaa

SEQ ID NO: 580789 - DNA, 25 bp, Homo sapien
tatatcttcatgacacagcaaatca

SEQ ID NO: 580790 - DNA, 25 bp, Homo sapien
ttatatcttcatgacacagcaaatc

SEQ ID NO: 580791 - DNA, 25 bp, Homo sapien
atatcttcatgacacagcaaatcac

SEQ ID NO: 580792 - DNA, 25 bp, Homo sapien
aaatgtagtgacttatatgtagtct

SEQ ID NO: 580793 - DNA, 25 bp, Homo sapien
aaaatgtagtgacttatatgtagtc

SEQ ID NO: 580794 - DNA, 25 bp, Homo sapien
agaaaaagataaggttgcagaatgc

SEQ ID NO: 580795 - DNA, 25 bp, Homo sapien
catcatagagctcaggacgtgctga

SEQ ID NO: 580796 - DNA, 25 bp, Homo sapien
aagagatcacccatttcatcaagag

SEQ ID NO: 580797 - DNA, 25 bp, Homo sapien
gacgtgctgacttcttgtgccggga

SEQ ID NO: 580798 - DNA, 25 bp, Homo sapien
gttcaaagctcgtctcatcatagag

SEQ ID NO: 580799 - DNA, 25 bp, Homo sapien
tcagtgcacagcatgaaagcttggg

SEQ ID NO: 580800 - DNA, 25 bp, Homo sapien
cttgggagtcgattctaaaggacac

SEQ ID NO: 580801 - DNA, 25 bp, Homo sapien
tcagttcaatcaagctggtctggga

SEQ ID NO: 580802 - DNA, 25 bp, Homo sapien
ttttgtctctgcagtccaagctgga

SEQ ID NO: 580803 - DNA, 25 bp, Homo sapien
tcaagataagaacagtatgtctccc

SEQ ID NO: 580804 - DNA, 25 bp, Homo sapien
tagatatctcgctgtctttttgacc

SEQ ID NO: 580805 - DNA, 25 bp, Homo sapien
tattgctttccataccttgtggaag

SEQ ID NO: 580806 - DNA, 25 bp, Homo sapien
tatagaacgcaaggcatttatgcat

SEQ ID NO: 580807 - DNA, 25 bp, Homo sapien
tgggcaccttctaatgcactgtgga

SEQ ID NO: 580808 - DNA, 25 bp, Homo sapien
catggactctctaacagaaacaggt

SEQ ID NO: 580809 - DNA, 25 bp, Homo sapien
acattgcagtgtaataaattgcccc

SEQ ID NO: 580810 - DNA, 25 bp, Homo sapien
gcactgtggaagcattctacttgga

SEQ ID NO: 580811 - DNA, 25 bp, Homo sapien
tgttcttactgttttgagaccagga

SEQ ID NO: 580812 - DNA, 25 bp, Homo sapien
ccacgtacatcaggacaccataaga

SEQ ID NO: 580813 - DNA, 25 bp, Homo sapien
taccctactgaagagctgttgttgg

SEQ ID NO: 580814 - DNA, 25 bp, Homo sapien
tgcagctgagtagggcattctaaag

SEQ ID NO: 580815 - DNA, 25 bp, Homo sapien
ccatatcaaagagacctgtacattt

SEQ ID NO: 580816 - DNA, 25 bp, Homo sapien
tctgaggaactgaaactagaggcgc

SEQ ID NO: 580817 - DNA, 25 bp, Homo sapien
agagcaaagtcacatattacacggc

SEQ ID NO: 580818 - DNA, 25 bp, Homo sapien
ccctgcctggaatatcttaagagta

SEQ ID NO: 580819 - DNA, 25 bp, Homo sapien
ctttgttgcctaagtcttcatcttt

SEQ ID NO: 580820 - DNA, 25 bp, Homo sapien
atctttgttgcctaagtcttcatct

SEQ ID NO: 580821 - DNA, 25 bp, Homo sapien
tctttgttgcctaagtcttcatctt

SEQ ID NO: 580822 - DNA, 25 bp, Homo sapien
tatagtaatcaaattagggtaacta

SEQ ID NO: 580823 - DNA, 25 bp, Homo sapien
tattgaccctgtgtgacgggcactc

SEQ ID NO: 580824 - DNA, 25 bp, Homo sapien
tatctggagactctccagagtggac

SEQ ID NO: 580825 - DNA, 25 bp, Homo sapien
ctgggtgtcctaaaaaccgtatctg

SEQ ID NO: 580826 - DNA, 25 bp, Homo sapien
ctctgaatggagcagactctccggg

SEQ ID NO: 580827 - DNA, 25 bp, Homo sapien
ggtatcctccaagaggtctctcttg

SEQ ID NO: 580828 - DNA, 25 bp, Homo sapien
tcctaggtatcctccaagaggtctc

SEQ ID NO: 580829 - DNA, 25 bp, Homo sapien
ggtcctaggtatcctccaagaggtc

SEQ ID NO: 580830 - DNA, 25 bp, Homo sapien
ccacaaggtcctaggtatcctccaa

SEQ ID NO: 580831 - DNA, 25 bp, Homo sapien
gcatccagtccaccaagacccacag

SEQ ID NO: 580832 - DNA, 25 bp, Homo sapien
cagacactgccaatgtcccgtatca

SEQ ID NO: 580833 - DNA, 25 bp, Homo sapien
gattctgaagtagcttgttgcagac

SEQ ID NO: 580834 - DNA, 25 bp, Homo sapien
aagtagcttgttgcagacactgcca

SEQ ID NO: 580835 - DNA, 25 bp, Homo sapien
caccaagtgtgtgtagtgagttaaa

SEQ ID NO: 580836 - DNA, 25 bp, Homo sapien
gtgtgtagtgagttaaagcaggagc

SEQ ID NO: 580837 - DNA, 25 bp, Homo sapien
accaagtgtgtgtagtgagttaaag

SEQ ID NO: 580838 - DNA, 25 bp, Homo sapien
cttttgtaccacctgtgatccatat

SEQ ID NO: 580839 - DNA, 25 bp, Homo sapien
cctgtgatccatatgccacacttag

SEQ ID NO: 580840 - DNA, 25 bp, Homo sapien
taccacctgtgatccatatgccaca

SEQ ID NO: 580841 - DNA, 25 bp, Homo sapien
tgtgatccatatgccacacttagaa

SEQ ID NO: 580842 - DNA, 25 bp, Homo sapien
aaaatagaatctcaggcacatgtta

SEQ ID NO: 580843 - DNA, 25 bp, Homo sapien
aatagaatctcaggcacatgttata

SEQ ID NO: 580844 - DNA, 25 bp, Homo sapien
gaaagcaaaatagaatctcaggcac

SEQ ID NO: 580845 - DNA, 25 bp, Homo sapien
agcaaaatagaatctcaggcacatg

SEQ ID NO: 580846 - DNA, 25 bp, Homo sapien
aaagagacccctttattgcatttgc

SEQ ID NO: 580847 - DNA, 25 bp, Homo sapien
cccttatagttcctatctgcattga

SEQ ID NO: 580848 - DNA, 25 bp, Homo sapien
cttctgcaaatagccaacccttata

SEQ ID NO: 580849 - DNA, 25 bp, Homo sapien
tctgcaaatagccaacccttatagt

SEQ ID NO: 580850 - DNA, 25 bp, Homo sapien
ctgcatttctgtgtgatattaaaac

SEQ ID NO: 580851 - DNA, 25 bp, Homo sapien
tgccagactcctttactgcatttct

SEQ ID NO: 580852 - DNA, 25 bp, Homo sapien
ctgtgtgatattaaaacataatgac

SEQ ID NO: 580853 - DNA, 25 bp, Homo sapien
atgccagactcctttactgcatttc

SEQ ID NO: 580854 - DNA, 25 bp, Homo sapien
taattcaactgctttcgagttctcg

SEQ ID NO: 580855 - DNA, 25 bp, Homo sapien
actgctttcgagttctcgcaaggca

SEQ ID NO: 580856 - DNA, 25 bp, Homo sapien
ttccttctccgcgtcctagaaagat

SEQ ID NO: 580857 - DNA, 25 bp, Homo sapien
tccgcgtcctagaaagatttaagat

SEQ ID NO: 580858 - DNA, 25 bp, Homo sapien
ccgggatggagcctccgaattctcc

SEQ ID NO: 580859 - DNA, 25 bp, Homo sapien
tccacgcgttcgcacacagccgcgt

SEQ ID NO: 580860 - DNA, 25 bp, Homo sapien
acagccgcgtcgcacatttccaagc

SEQ ID NO: 580861 - DNA, 25 bp, Homo sapien
cagtgcctccgggatggagcctccg

SEQ ID NO: 580862 - DNA, 25 bp, Homo sapien
cagtccggccgggacttttatactg

SEQ ID NO: 580863 - DNA, 25 bp, Homo sapien
ctcggagtagcggacgctcagtccg

SEQ ID NO: 580864 - DNA, 25 bp, Homo sapien
agtgactcggagtagcggacgctca

SEQ ID NO: 580865 - DNA, 25 bp, Homo sapien
ggacttttatactgcgcttcccctc

SEQ ID NO: 580866 - DNA, 25 bp, Homo sapien
tcagatgctagagcgaactgtgtcg

SEQ ID NO: 580867 - DNA, 25 bp, Homo sapien
cgcggagtccgagcgtcagatgcta

SEQ ID NO: 580868 - DNA, 25 bp, Homo sapien
tctaggcgttcgtctggtcacgggc

SEQ ID NO: 580869 - DNA, 25 bp, Homo sapien
gaggagtgccaaagtgtcgttccga

SEQ ID NO: 580870 - DNA, 25 bp, Homo sapien
agttgcagtgatggaaaacggaggg

SEQ ID NO: 580871 - DNA, 25 bp, Homo sapien
caagccatgcgtctgcctgcgaccc

SEQ ID NO: 580872 - DNA, 25 bp, Homo sapien
gttgcagtgatggaaaacggagggg

SEQ ID NO: 580873 - DNA, 25 bp, Homo sapien
ccatgcgtctgcctgcgacccctgc

SEQ ID NO: 580874 - DNA, 25 bp, Homo sapien
ggggtggtgcctgggctgctttaga

SEQ ID NO: 580875 - DNA, 25 bp, Homo sapien
gggtggggtggtgcctgggctgctt

SEQ ID NO: 580876 - DNA, 25 bp, Homo sapien
gtggtgcctgggctgctttagaaac

SEQ ID NO: 580877 - DNA, 25 bp, Homo sapien
gtgggtggggtggtgcctgggctgc

SEQ ID NO: 580878 - DNA, 25 bp, Homo sapien
agcctgccgggctgtaccaagtgcc

SEQ ID NO: 580879 - DNA, 25 bp, Homo sapien
cgctgccgaggtcgctgtgacgggc

SEQ ID NO: 580880 - DNA, 25 bp, Homo sapien
tgacgggcgcgggtagagcccttgt

SEQ ID NO: 580881 - DNA, 25 bp, Homo sapien
acaccgaggttgtcacggtttggcg

SEQ ID NO: 580882 - DNA, 25 bp, Homo sapien
ttcagctgcggccgggagttacctc

SEQ ID NO: 580883 - DNA, 25 bp, Homo sapien
tgcggccgggagttacctccacgct

SEQ ID NO: 580884 - DNA, 25 bp, Homo sapien
gaggagtaggagggcttcagctgcg

SEQ ID NO: 580885 - DNA, 25 bp, Homo sapien
cgggagttacctccacgcttggcgc

SEQ ID NO: 580886 - DNA, 25 bp, Homo sapien
gcggcgccgcagctggagcgggagc

SEQ ID NO: 580887 - DNA, 25 bp, Homo sapien
caccacggcggagccaccgcgaggc

SEQ ID NO: 580888 - DNA, 25 bp, Homo sapien
gagcgcacatgggcgccccagatgt

SEQ ID NO: 580889 - DNA, 25 bp, Homo sapien
tgtccaagccggctgcggagcaagc

SEQ ID NO: 580890 - DNA, 25 bp, Homo sapien
agccgcgcagcacggtgatgtgcag

SEQ ID NO: 580891 - DNA, 25 bp, Homo sapien
ggcttggctggcgttgcccgcggcc

SEQ ID NO: 580892 - DNA, 25 bp, Homo sapien
ggcggctcccgagccgcgcagcacg

SEQ ID NO: 580893 - DNA, 25 bp, Homo sapien
acggtgatgtgcagcgtgagcagca

SEQ ID NO: 580894 - DNA, 25 bp, Homo sapien
tataaagtctccttgcgtccctcca

SEQ ID NO: 580895 - DNA, 25 bp, Homo sapien
gagtaacattactcagcctccgaag

SEQ ID NO: 580896 - DNA, 25 bp, Homo sapien
tccgaagggcaacgaaagactggta

SEQ ID NO: 580897 - DNA, 25 bp, Homo sapien
tctgcctaagtcaagtggcccgggc

SEQ ID NO: 580898 - DNA, 25 bp, Homo sapien
aggcgaggctcccggaggaagagga

SEQ ID NO: 580899 - DNA, 25 bp, Homo sapien
cgaggctcccggaggaagaggaaca

SEQ ID NO: 580900 - DNA, 25 bp, Homo sapien
gcgaggctcccggaggaagaggaac

SEQ ID NO: 580901 - DNA, 25 bp, Homo sapien
tcaggcgaggctcccggaggaagag

SEQ ID NO: 580902 - DNA, 25 bp, Homo sapien
aatcactaccggtgccttcactctg

SEQ ID NO: 580903 - DNA, 25 bp, Homo sapien
ccaggtaaccctggcccaaatcact

SEQ ID NO: 580904 - DNA, 25 bp, Homo sapien
tggcccaaatcactaccggtgcctt

SEQ ID NO: 580905 - DNA, 25 bp, Homo sapien
accctggcccaaatcactaccggtg

SEQ ID NO: 580906 - DNA, 25 bp, Homo sapien
gccctgaagttgaaatggataaaca

SEQ ID NO: 580907 - DNA, 25 bp, Homo sapien
cattgctaaagcgaccttcaacggg

SEQ ID NO: 580908 - DNA, 25 bp, Homo sapien
attatgtctgaccgtccactacgcc

SEQ ID NO: 580909 - DNA, 25 bp, Homo sapien
tctccttgccctgaagttgaaatgg

SEQ ID NO: 580910 - DNA, 25 bp, Homo sapien
tatgctccaagtttacagttgtccc

SEQ ID NO: 580911 - DNA, 25 bp, Homo sapien
tgagcagattttaggagccagagaa

SEQ ID NO: 580912 - DNA, 25 bp, Homo sapien
ccctagactcaaggaaaggcgctaa

SEQ ID NO: 580913 - DNA, 25 bp, Homo sapien
taacatagcggcaggaaatgcctag

SEQ ID NO: 580914 - DNA, 25 bp, Homo sapien
tgagagaacccacaaagttaggaca

SEQ ID NO: 580915 - DNA, 25 bp, Homo sapien
gaaattccctcagtctgtcactgta

SEQ ID NO: 580916 - DNA, 25 bp, Homo sapien
tcctggtagagacaaaatttggtgt

SEQ ID NO: 580917 - DNA, 25 bp, Homo sapien
actgtacttatctacccacgggaga

SEQ ID NO: 580918 - DNA, 25 bp, Homo sapien
agaaagcatcatgtataaaatataa

SEQ ID NO: 580919 - DNA, 25 bp, Homo sapien
tattaagaattatctccgcagtgtt

SEQ ID NO: 580920 - DNA, 25 bp, Homo sapien
gtcaattgcacttcaacaaagctgt

SEQ ID NO: 580921 - DNA, 25 bp, Homo sapien
cttggagattgctgaagctcacaga

SEQ ID NO: 580922 - DNA, 25 bp, Homo sapien
tcaatggcccatcgcattcaaagcc

SEQ ID NO: 580923 - DNA, 25 bp, Homo sapien
ggaaatccaacactaatctacagtg

SEQ ID NO: 580924 - DNA, 25 bp, Homo sapien
gggagagggctagagcataaaaata

SEQ ID NO: 580925 - DNA, 25 bp, Homo sapien
ctagggagagggctagagcataaaa

SEQ ID NO: 580926 - DNA, 25 bp, Homo sapien
gagggctagagcataaaaatataat

SEQ ID NO: 580927 - DNA, 25 bp, Homo sapien
gagagggctagagcataaaaatata

SEQ ID NO: 580928 - DNA, 25 bp, Homo sapien
gagtaatgggctatgaattttgcca

SEQ ID NO: 580929 - DNA, 25 bp, Homo sapien
tggtttgaagtagattgcctctcat

SEQ ID NO: 580930 - DNA, 25 bp, Homo sapien
gaagggcagctccaaataagttaat

SEQ ID NO: 580931 - DNA, 25 bp, Homo sapien
ttgcctgattttagtgaggtggccc

SEQ ID NO: 580932 - DNA, 25 bp, Homo sapien
gagttctagtatctggaaatgctaa

SEQ ID NO: 580933 - DNA, 25 bp, Homo sapien
cagactccatgtgaagccaaaaaca

SEQ ID NO: 580934 - DNA, 25 bp, Homo sapien
gaactatgtataatcgatccaggag

SEQ ID NO: 580935 - DNA, 25 bp, Homo sapien
cattttgatcgtagatgtgactttc

SEQ ID NO: 580936 - DNA, 25 bp, Homo sapien
gatgcactgagttgttagccttttt

SEQ ID NO: 580937 - DNA, 25 bp, Homo sapien
gtcttcctgaatgtaccagtgaggg

SEQ ID NO: 580938 - DNA, 25 bp, Homo sapien
ctggttcgtgtcttcctgaatgtac

SEQ ID NO: 580939 - DNA, 25 bp, Homo sapien
aaggatgcactgagttgttagcctt

SEQ ID NO: 580940 - DNA, 25 bp, Homo sapien
cttcttggttccatggctaactcct

SEQ ID NO: 580941 - DNA, 25 bp, Homo sapien
tcttggttccatggctaactcctga

SEQ ID NO: 580942 - DNA, 25 bp, Homo sapien
ttggttccatggctaactcctgact

SEQ ID NO: 580943 - DNA, 25 bp, Homo sapien
ggttccatggctaactcctgacttt

SEQ ID NO: 580944 - DNA, 25 bp, Homo sapien
taaactggctaacagggctctcttt

SEQ ID NO: 580945 - DNA, 25 bp, Homo sapien
gatttgtctataaatgtgaccttcc

SEQ ID NO: 580946 - DNA, 25 bp, Homo sapien
cctgcagatgaatcaccagtgccta

SEQ ID NO: 580947 - DNA, 25 bp, Homo sapien
tacactggagatgtggtaatagaca

SEQ ID NO: 580948 - DNA, 25 bp, Homo sapien
tgctgctggatatcagatcccttgt

SEQ ID NO: 580949 - DNA, 25 bp, Homo sapien
ctgctggatatcagatcccttgttg

SEQ ID NO: 580950 - DNA, 25 bp, Homo sapien
gctgctggatatcagatcccttgtt

SEQ ID NO: 580951 - DNA, 25 bp, Homo sapien
cacggaagggttccagttggcctgc

SEQ ID NO: 580952 - DNA, 25 bp, Homo sapien
ggaacacatcactactttgctggag

SEQ ID NO: 580953 - DNA, 25 bp, Homo sapien
cctttgggccaaaacatcctcgatt

SEQ ID NO: 580954 - DNA, 25 bp, Homo sapien
tggcctgcccgtgtttcatgtctgg

SEQ ID NO: 580955 - DNA, 25 bp, Homo sapien
ctactgggtgaaagaaatccccagg

SEQ ID NO: 580956 - DNA, 25 bp, Homo sapien
actactgggtgaaagaaatccccag

SEQ ID NO: 580957 - DNA, 25 bp, Homo sapien
cattcaactactgggtgaaagaaat

SEQ ID NO: 580958 - DNA, 25 bp, Homo sapien
tcaactactgggtgaaagaaatccc

SEQ ID NO: 580959 - DNA, 25 bp, Homo sapien
gccttcccctgcaaagtggactttc

SEQ ID NO: 580960 - DNA, 25 bp, Homo sapien
ctgccttcccctgcaaagtggactt

SEQ ID NO: 580961 - DNA, 25 bp, Homo sapien
tgccttcccctgcaaagtggacttt

SEQ ID NO: 580962 - DNA, 25 bp, Homo sapien
cttcccctgcaaagtggactttctc

SEQ ID NO: 580963 - DNA, 25 bp, Homo sapien
cacttgctcgttgctcttccaggga

SEQ ID NO: 580964 - DNA, 25 bp, Homo sapien
tcttttcagataaatctcacagccc

SEQ ID NO: 580965 - DNA, 25 bp, Homo sapien
tgtcttaaggctccgtagacagggc

SEQ ID NO: 580966 - DNA, 25 bp, Homo sapien
catctcccttgtgcacttgctcgtt

SEQ ID NO: 580967 - DNA, 25 bp, Homo sapien
tgccagcctctccaaaaaggtccac

SEQ ID NO: 580968 - DNA, 25 bp, Homo sapien
taaagagagtgctcagaatacagag

SEQ ID NO: 580969 - DNA, 25 bp, Homo sapien
caatctcagtgtaaagagagtgctc

SEQ ID NO: 580970 - DNA, 25 bp, Homo sapien
aatacctcttccaacaatctcagtg

SEQ ID NO: 580971 - DNA, 25 bp, Homo sapien
cagctgtcggggagagtgaatacct

SEQ ID NO: 580972 - DNA, 25 bp, Homo sapien
tgttatttccctgtggctcgagctt

SEQ ID NO: 580973 - DNA, 25 bp, Homo sapien
gagcctggccgatactctcttaaag

SEQ ID NO: 580974 - DNA, 25 bp, Homo sapien
gaagccaagcttctctgttactgtt

SEQ ID NO: 580975 - DNA, 25 bp, Homo sapien
gcatctgtgtggtaaaaacacttct

SEQ ID NO: 580976 - DNA, 25 bp, Homo sapien
taagaggcccctatccggatgttgg

SEQ ID NO: 580977 - DNA, 25 bp, Homo sapien
ggaaccagtatggagaaccacggct

SEQ ID NO: 580978 - DNA, 25 bp, Homo sapien
gagaaccacggcttgtgagcaggac

SEQ ID NO: 580979 - DNA, 25 bp, Homo sapien
tctaatgcactgacaagccggaacc

SEQ ID NO: 580980 - DNA, 25 bp, Homo sapien
caggacccaatttgaagaggcacca

SEQ ID NO: 580981 - DNA, 25 bp, Homo sapien
tcgaacaggacaccagaaggcgaac

SEQ ID NO: 580982 - DNA, 25 bp, Homo sapien
taagtcctcctacgaccagagggaa

SEQ ID NO: 580983 - DNA, 25 bp, Homo sapien
tctaggactcggtttccaggaccca

SEQ ID NO: 580984 - DNA, 25 bp, Homo sapien
gccaccagggggcttccatccctcc

SEQ ID NO: 580985 - DNA, 25 bp, Homo sapien
tcagggctataaaggccaggccacc

SEQ ID NO: 580986 - DNA, 25 bp, Homo sapien
cagctcagggctataaaggccaggc

SEQ ID NO: 580987 - DNA, 25 bp, Homo sapien
gctcagggctataaaggccaggcca

SEQ ID NO: 580988 - DNA, 25 bp, Homo sapien
aacaccaagaatgtccaatcactgc

SEQ ID NO: 580989 - DNA, 25 bp, Homo sapien
tgaccaaggtggatggccatagcca

SEQ ID NO: 580990 - DNA, 25 bp, Homo sapien
cactgcatagctggcgttgctcatc

SEQ ID NO: 580991 - DNA, 25 bp, Homo sapien
tgctcatcgtggctgtgtttgtgac

SEQ ID NO: 580992 - DNA, 25 bp, Homo sapien
ccatggttttcgtctcctggcacat

SEQ ID NO: 580993 - DNA, 25 bp, Homo sapien
ctctctgccatggttttcgtctcct

SEQ ID NO: 580994 - DNA, 25 bp, Homo sapien
ccacagctcagaagatgtggccggg

SEQ ID NO: 580995 - DNA, 25 bp, Homo sapien
gccacctctctgccatggttttcgt

SEQ ID NO: 580996 - DNA, 25 bp, Homo sapien
tctgaatgttcgaagaagccaaggg

SEQ ID NO: 580997 - DNA, 25 bp, Homo sapien
ttcagagaccgcctctgaatgttcg

SEQ ID NO: 580998 - DNA, 25 bp, Homo sapien
ggtggagatagagacctcgtctgtc

SEQ ID NO: 580999 - DNA, 25 bp, Homo sapien
gagatagagacctcgtctgtcacct

SEQ ID NO: 581000 - DNA, 25 bp, Homo sapien
agctggtttctgatgtggtgtcact

SEQ ID NO: 581001 - DNA, 25 bp, Homo sapien
tgtcacttcccacgttgaggttatt

SEQ ID NO: 581002 - DNA, 25 bp, Homo sapien
gtttctgatgtggtgtcacttccca

SEQ ID NO: 581003 - DNA, 25 bp, Homo sapien
ggtgtcacttcccacgttgaggtta

SEQ ID NO: 581004 - DNA, 25 bp, Homo sapien
ggtgccccgtctcttgtcggaatcg

SEQ ID NO: 581005 - DNA, 25 bp, Homo sapien
atctctttgcaatgaagggtgcccc

SEQ ID NO: 581006 - DNA, 25 bp, Homo sapien
aaagtttggtagatcaaggagaaag

SEQ ID NO: 581007 - DNA, 25 bp, Homo sapien
cattgatatcagctttggaaagatc

SEQ ID NO: 581008 - DNA, 25 bp, Homo sapien
ggaactgagctgcaacaatcgtctg

SEQ ID NO: 581009 - DNA, 25 bp, Homo sapien
acaatcgtctgcaaggctattaagg

SEQ ID NO: 581010 - DNA, 25 bp, Homo sapien
tgagctgcaacaatcgtctgcaagg

SEQ ID NO: 581011 - DNA, 25 bp, Homo sapien
tgagggaactgagctgcaacaatcg

SEQ ID NO: 581012 - DNA, 25 bp, Homo sapien
catctgatagagttgctgagatgct

SEQ ID NO: 581013 - DNA, 25 bp, Homo sapien
ccaaattgcaccagggcgtgcccat

SEQ ID NO: 581014 - DNA, 25 bp, Homo sapien
ttgctgagatgctctgccaaattgc

SEQ ID NO: 581015 - DNA, 25 bp, Homo sapien
tgccaaattgcaccagggcgtgccc

SEQ ID NO: 581016 - DNA, 25 bp, Homo sapien
aggaagttgctgtcgtctgaggtac

SEQ ID NO: 581017 - DNA, 25 bp, Homo sapien
ctgggcttattctccggatgctgat

SEQ ID NO: 581018 - DNA, 25 bp, Homo sapien
ggtactgtcgtacttgtagtcctgg

SEQ ID NO: 581019 - DNA, 25 bp, Homo sapien
ggaccgtcgaccacctctatggtga

SEQ ID NO: 581020 - DNA, 25 bp, Homo sapien
gctcaatggtactctaggtctagga

SEQ ID NO: 581021 - DNA, 25 bp, Homo sapien
ggcatgctacgagctcctgatgtga

SEQ ID NO: 581022 - DNA, 25 bp, Homo sapien
aacttcagtgtgcaagagaatcatc

SEQ ID NO: 581023 - DNA, 25 bp, Homo sapien
gtagcaatcccgatgtccagtctaa

SEQ ID NO: 581024 - DNA, 25 bp, Homo sapien
ttctggttgccgttcccgcaggtga

SEQ ID NO: 581025 - DNA, 25 bp, Homo sapien
cgcgtagccacaagaccgggtccgt

SEQ ID NO: 581026 - DNA, 25 bp, Homo sapien
cagtttggacggtcacaggtcctcg

SEQ ID NO: 581027 - DNA, 25 bp, Homo sapien
caggtcctcgattctgttgcagtgc

SEQ ID NO: 581028 - DNA, 25 bp, Homo sapien
ctctcctcagaaacgcctttgtgct

SEQ ID NO: 581029 - DNA, 25 bp, Homo sapien
ttcagccctgttttctacgtgtccc

SEQ ID NO: 581030 - DNA, 25 bp, Homo sapien
atggagccagaaccgccacttcttg

SEQ ID NO: 581031 - DNA, 25 bp, Homo sapien
tacgtgtccccttttgctaacatac

SEQ ID NO: 581032 - DNA, 25 bp, Homo sapien
tattttcgtttacttcatattcttc

SEQ ID NO: 581033 - DNA, 25 bp, Homo sapien
catcattattttcgtttacttcata

SEQ ID NO: 581034 - DNA, 25 bp, Homo sapien
ttaccttcatcattattttcgttta

SEQ ID NO: 581035 - DNA, 25 bp, Homo sapien
ccttcatcattattttcgtttactt

SEQ ID NO: 581036 - DNA, 25 bp, Homo sapien
cacttcggtggcagctgtcctaaaa

SEQ ID NO: 581037 - DNA, 25 bp, Homo sapien
ttcccgcaagcagactcacttcggt

SEQ ID NO: 581038 - DNA, 25 bp, Homo sapien
tggtggcattaaactcctcgcttcc

SEQ ID NO: 581039 - DNA, 25 bp, Homo sapien
gtggcattaaactcctcgcttcccg

SEQ ID NO: 581040 - DNA, 25 bp, Homo sapien
catgttgtcgccgtagcagcagtgc

SEQ ID NO: 581041 - DNA, 25 bp, Homo sapien
cttgatgcggtcgaagatgtcggcc

SEQ ID NO: 581042 - DNA, 25 bp, Homo sapien
tgcttgatgtagtcctcgtccgagg

SEQ ID NO: 581043 - DNA, 25 bp, Homo sapien
accttgtagtggagctccgcggaga

SEQ ID NO: 581044 - DNA, 25 bp, Homo sapien
gaattgagtcgcacccactgtggct

SEQ ID NO: 581045 - DNA, 25 bp, Homo sapien
agctatgaaggtctcggcgccagtc

SEQ ID NO: 581046 - DNA, 25 bp, Homo sapien
tatacaaatatacacgaccgcagct

SEQ ID NO: 581047 - DNA, 25 bp, Homo sapien
gaatctgagactccagcaaggtgcc

SEQ ID NO: 581048 - DNA, 25 bp, Homo sapien
ctcttttactagaattttgcaaagt

SEQ ID NO: 581049 - DNA, 25 bp, Homo sapien
attatatactctcttttactagaat

SEQ ID NO: 581050 - DNA, 25 bp, Homo sapien
tactctcttttactagaattttgca

SEQ ID NO: 581051 - DNA, 25 bp, Homo sapien
ctctcttttactagaattttgcaaa

SEQ ID NO: 581052 - DNA, 25 bp, Homo sapien
tggaatatgtccctctccttctact

SEQ ID NO: 581053 - DNA, 25 bp, Homo sapien
ctggaatatgtccctctccttctac

SEQ ID NO: 581054 - DNA, 25 bp, Homo sapien
cctggaatatgtccctctccttcta

SEQ ID NO: 581055 - DNA, 25 bp, Homo sapien
tgaagttggtgcttagtcttcccat

SEQ ID NO: 581056 - DNA, 25 bp, Homo sapien
ttgtcttgaagttggtgcttagtct

SEQ ID NO: 581057 - DNA, 25 bp, Homo sapien
tcattcatctcagaggtaactattg

SEQ ID NO: 581058 - DNA, 25 bp, Homo sapien
gtcattcatctcagaggtaactatt

SEQ ID NO: 581059 - DNA, 25 bp, Homo sapien
tgccttttagctcgagggggacctg

SEQ ID NO: 581060 - DNA, 25 bp, Homo sapien
cttttagctcgagggggacctgcta

SEQ ID NO: 581061 - DNA, 25 bp, Homo sapien
atgccttttagctcgagggggacct

SEQ ID NO: 581062 - DNA, 25 bp, Homo sapien
ttagctcgagggggacctgctagaa

SEQ ID NO: 581063 - DNA, 25 bp, Homo sapien
ggatccaagcgacaatcccctctta

SEQ ID NO: 581064 - DNA, 25 bp, Homo sapien
tagagcgtttctccccttggatcca

SEQ ID NO: 581065 - DNA, 25 bp, Homo sapien
ccagaattctggaacgtcctagagc

SEQ ID NO: 581066 - DNA, 25 bp, Homo sapien
tctggaacgtcctagagcgtttctc

SEQ ID NO: 581067 - DNA, 25 bp, Homo sapien
tacacaagcattcgtgagggttatg

SEQ ID NO: 581068 - DNA, 25 bp, Homo sapien
tggggctgtgaaagtcagagacaac

SEQ ID NO: 581069 - DNA, 25 bp, Homo sapien
catggggacatgctttgtaaacagc

SEQ ID NO: 581070 - DNA, 25 bp, Homo sapien
cagccacttgttgtaaacaggtaca

SEQ ID NO: 581071 - DNA, 25 bp, Homo sapien
tgtcctgtgggcaccctctggtggt

SEQ ID NO: 581072 - DNA, 25 bp, Homo sapien
tggtcacttaggtcgagtggctctc

SEQ ID NO: 581073 - DNA, 25 bp, Homo sapien
taggtcgagtggctctctgttcctt

SEQ ID NO: 581074 - DNA, 25 bp, Homo sapien
cccatttgtcgggctgtcctgtggg

SEQ ID NO: 581075 - DNA, 25 bp, Homo sapien
ccatggtttgctgcacggattatcc

SEQ ID NO: 581076 - DNA, 25 bp, Homo sapien
atggtttgctgcacggattatccca

SEQ ID NO: 581077 - DNA, 25 bp, Homo sapien
catggtttgctgcacggattatccc

SEQ ID NO: 581078 - DNA, 25 bp, Homo sapien
taatccatttgcatcctgacccaaa

SEQ ID NO: 581079 - DNA, 25 bp, Homo sapien
ttcttcaatgagaccgaacattaaa

SEQ ID NO: 581080 - DNA, 25 bp, Homo sapien
gaccgaacattaaaacgtgctccag

SEQ ID NO: 581081 - DNA, 25 bp, Homo sapien
tttgcatcctgacccaaacaaatcc

SEQ ID NO: 581082 - DNA, 25 bp, Homo sapien
gagagaattgtaggaggaatttctc

SEQ ID NO: 581083 - DNA, 25 bp, Homo sapien
agagaattgtaggaggaatttctca

SEQ ID NO: 581084 - DNA, 25 bp, Homo sapien
gagaattgtaggaggaatttctcat

SEQ ID NO: 581085 - DNA, 25 bp, Homo sapien
tgggcagagagaattgtaggaggaa

SEQ ID NO: 581086 - DNA, 25 bp, Homo sapien
ggcctcttgccggacctcatttaat

SEQ ID NO: 581087 - DNA, 25 bp, Homo sapien
ctcttgccggacctcatttaatacc

SEQ ID NO: 581088 - DNA, 25 bp, Homo sapien
cttgccggacctcatttaatacctt

SEQ ID NO: 581089 - DNA, 25 bp, Homo sapien
gatcctggcctcttgccggacctca

SEQ ID NO: 581090 - DNA, 25 bp, Homo sapien
cacaggacacgggtgggccatcttc

SEQ ID NO: 581091 - DNA, 25 bp, Homo sapien
cgcccaattccctgagtcccgaggg

SEQ ID NO: 581092 - DNA, 25 bp, Homo sapien
caattccctgagtcccgagggggag

SEQ ID NO: 581093 - DNA, 25 bp, Homo sapien
gtggacgcccaattccctgagtccc

SEQ ID NO: 581094 - DNA, 25 bp, Homo sapien
ctggccctagtgatgaccttggaaa

SEQ ID NO: 581095 - DNA, 25 bp, Homo sapien
agtgacaggaagtgcgcagaagccc

SEQ ID NO: 581096 - DNA, 25 bp, Homo sapien
caggatgcaaccgtctgctgggaga

SEQ ID NO: 581097 - DNA, 25 bp, Homo sapien
caatgcttggcgaatgggaattgca

SEQ ID NO: 581098 - DNA, 25 bp, Homo sapien
aaccttggagaccactgggaccaat

SEQ ID NO: 581099 - DNA, 25 bp, Homo sapien
gagaaaccttggagaccactgggac

SEQ ID NO: 581100 - DNA, 25 bp, Homo sapien
gagcctgagggccttcgatgtgctt

SEQ ID NO: 581101 - DNA, 25 bp, Homo sapien
ttcgatgtgcttcaagccagagaaa

SEQ ID NO: 581102 - DNA, 25 bp, Homo sapien
cattgccttgcgagctggttccagg

SEQ ID NO: 581103 - DNA, 25 bp, Homo sapien
agccagccattggtgaactccagca

SEQ ID NO: 581104 - DNA, 25 bp, Homo sapien
taaggatgcttagattggctccagg

SEQ ID NO: 581105 - DNA, 25 bp, Homo sapien
gggatggaggcactacagtatttgc

SEQ ID NO: 581106 - DNA, 25 bp, Homo sapien
atgcccagagccaaaaataaagccc

SEQ ID NO: 581107 - DNA, 25 bp, Homo sapien
tagatgcccagagccaaaaataaag

SEQ ID NO: 581108 - DNA, 25 bp, Homo sapien
tgcccagagccaaaaataaagcccc

SEQ ID NO: 581109 - DNA, 25 bp, Homo sapien
catagatgcccagagccaaaaataa

SEQ ID NO: 581110 - DNA, 25 bp, Homo sapien
tctatgatacgcttgattggctgtg

SEQ ID NO: 581111 - DNA, 25 bp, Homo sapien
gcgttttgcacgtcagagttgctgg

SEQ ID NO: 581112 - DNA, 25 bp, Homo sapien
gctcttctatgatacgcttgattgg

SEQ ID NO: 581113 - DNA, 25 bp, Homo sapien
gacatgggcgttttgcacgtcagag

SEQ ID NO: 581114 - DNA, 25 bp, Homo sapien
taaatcatccaactgattaaagaaa

SEQ ID NO: 581115 - DNA, 25 bp, Homo sapien
ccctggtgtatttaccgctaaccat

SEQ ID NO: 581116 - DNA, 25 bp, Homo sapien
agcccaagacagttaaaagcagaga

SEQ ID NO: 581117 - DNA, 25 bp, Homo sapien
cagggtttgacctaccctggtgtat

SEQ ID NO: 581118 - DNA, 25 bp, Homo sapien
gttactgaagccctgaaaccacaag

SEQ ID NO: 581119 - DNA, 25 bp, Homo sapien
tgccttgaattgccatggggatttc

SEQ ID NO: 581120 - DNA, 25 bp, Homo sapien
ctttgccttgaattgccatggggat

SEQ ID NO: 581121 - DNA, 25 bp, Homo sapien
caagtggcaatgcagaaaaactttg

SEQ ID NO: 581122 - DNA, 25 bp, Homo sapien
gaaactcctcattgtgtgaccagga

SEQ ID NO: 581123 - DNA, 25 bp, Homo sapien
ttcgtaaagaggtaccaactgtcgc

SEQ ID NO: 581124 - DNA, 25 bp, Homo sapien
tagttagcgcttagtgacacgcggg

SEQ ID NO: 581125 - DNA, 25 bp, Homo sapien
tctccgtggatgaaatagaaactcc

SEQ ID NO: 581126 - DNA, 25 bp, Homo sapien
gctgagtgtgaagcgtctcagaggc

SEQ ID NO: 581127 - DNA, 25 bp, Homo sapien
ctgagtgtgaagcgtctcagaggca

SEQ ID NO: 581128 - DNA, 25 bp, Homo sapien
tgagtgtgaagcgtctcagaggcat

SEQ ID NO: 581129 - DNA, 25 bp, Homo sapien
ggctgagtgtgaagcgtctcagagg

SEQ ID NO: 581130 - DNA, 25 bp, Homo sapien
atttcaagacttcctcctggtgcgg

SEQ ID NO: 581131 - DNA, 25 bp, Homo sapien
caagacttcctcctggtgcggtggc

SEQ ID NO: 581132 - DNA, 25 bp, Homo sapien
acttcctcctggtgcggtggcagga

SEQ ID NO: 581133 - DNA, 25 bp, Homo sapien
tcaagacttcctcctggtgcggtgg

SEQ ID NO: 581134 - DNA, 25 bp, Homo sapien
tttggacacgggtaggggtgtggca

SEQ ID NO: 581135 - DNA, 25 bp, Homo sapien
gtaggggtgtggcaagggacaccgc

SEQ ID NO: 581136 - DNA, 25 bp, Homo sapien
agggacaccgctgacccctctgatg

SEQ ID NO: 581137 - DNA, 25 bp, Homo sapien
gctgacccctctgatgctctgctgt

SEQ ID NO: 581138 - DNA, 25 bp, Homo sapien
ggcaggagcagggtgccttaagatt

SEQ ID NO: 581139 - DNA, 25 bp, Homo sapien
cttgaatggcaggagcagggtgcct

SEQ ID NO: 581140 - DNA, 25 bp, Homo sapien
gaatggcaggagcagggtgccttaa

SEQ ID NO: 581141 - DNA, 25 bp, Homo sapien
atggcaggagcagggtgccttaaga

SEQ ID NO: 581142 - DNA, 25 bp, Homo sapien
tgaccagcgcccgatactgccaaat

SEQ ID NO: 581143 - DNA, 25 bp, Homo sapien
gcgcccgatactgccaaatcttttt

SEQ ID NO: 581144 - DNA, 25 bp, Homo sapien
agccctggtgaccagcgcccgatac

SEQ ID NO: 581145 - DNA, 25 bp, Homo sapien
cagggatgtggctagcactgcatga

SEQ ID NO: 581146 - DNA, 25 bp, Homo sapien
ggtcactgatggtgagaacatctgc

SEQ ID NO: 581147 - DNA, 25 bp, Homo sapien
ggggtcactgatggtgagaacatct

SEQ ID NO: 581148 - DNA, 25 bp, Homo sapien
atcatatgggaacatgtagactatg

SEQ ID NO: 581149 - DNA, 25 bp, Homo sapien
tatgggaacatgtagactatgtagt

SEQ ID NO: 581150 - DNA, 25 bp, Homo sapien
tggtgggctccataatgtactcagc

SEQ ID NO: 581151 - DNA, 25 bp, Homo sapien
ctggtgggctccataatgtactcag

SEQ ID NO: 581152 - DNA, 25 bp, Homo sapien
cttttggctccctgctgcaagtgag

SEQ ID NO: 581153 - DNA, 25 bp, Homo sapien
tccctgctgcaagtgagctccagcc

SEQ ID NO: 581154 - DNA, 25 bp, Homo sapien
gctccctgctgcaagtgagctccag

SEQ ID NO: 581155 - DNA, 25 bp, Homo sapien
tggctccctgctgcaagtgagctcc

SEQ ID NO: 581156 - DNA, 25 bp, Homo sapien
cagacggtaggtcaggtccataact

SEQ ID NO: 581157 - DNA, 25 bp, Homo sapien
ggtccataactgacacattggcaat

SEQ ID NO: 581158 - DNA, 25 bp, Homo sapien
gaagagtgggtatcactgttggagg

SEQ ID NO: 581159 - DNA, 25 bp, Homo sapien
atgttctggagagccacacagccct

SEQ ID NO: 581160 - DNA, 25 bp, Homo sapien
gttcagcatcatgactggtttccga

SEQ ID NO: 581161 - DNA, 25 bp, Homo sapien
ctgttcagcatcatgactggtttcc

SEQ ID NO: 581162 - DNA, 25 bp, Homo sapien
tcagcatcatgactggtttccgaaa

SEQ ID NO: 581163 - DNA, 25 bp, Homo sapien
gcatcatgactggtttccgaaacat

SEQ ID NO: 581164 - DNA, 25 bp, Homo sapien
gctccagagaaaaccagcatatcta

SEQ ID NO: 581165 - DNA, 25 bp, Homo sapien
gttaacaatgctaacagctccagag

SEQ ID NO: 581166 - DNA, 25 bp, Homo sapien
ccagctaagttgatgtggatgaatt

SEQ ID NO: 581167 - DNA, 25 bp, Homo sapien
tcataagcatccgaataagaacagt

SEQ ID NO: 581168 - DNA, 25 bp, Homo sapien
agtggtgcctgatgtatattgtgtg

SEQ ID NO: 581169 - DNA, 25 bp, Homo sapien
acaaacactataggtcatccacggg

SEQ ID NO: 581170 - DNA, 25 bp, Homo sapien
tgtatattgtgtgattgttgtcgat

SEQ ID NO: 581171 - DNA, 25 bp, Homo sapien
atacaaacactataggtcatccacg

SEQ ID NO: 581172 - DNA, 25 bp, Homo sapien
tcatctctcaactgggctgccacag

SEQ ID NO: 581173 - DNA, 25 bp, Homo sapien
tgttatcactgtctgtgacctggcc

SEQ ID NO: 581174 - DNA, 25 bp, Homo sapien
gcttgccttgccactacattctgca

SEQ ID NO: 581175 - DNA, 25 bp, Homo sapien
gattatcacatggttagctccttac

SEQ ID NO: 581176 - DNA, 25 bp, Homo sapien
cttttgccacaagatccctcaggtc

SEQ ID NO: 581177 - DNA, 25 bp, Homo sapien
ttctcttttgccacaagatccctca

SEQ ID NO: 581178 - DNA, 25 bp, Homo sapien
attcttctcttttgccacaagatcc

SEQ ID NO: 581179 - DNA, 25 bp, Homo sapien
ctcttttgccacaagatccctcagg

SEQ ID NO: 581180 - DNA, 25 bp, Homo sapien
attcttcatcttagtagcaggtctt

SEQ ID NO: 581181 - DNA, 25 bp, Homo sapien
catcttagtagcaggtctttctttg

SEQ ID NO: 581182 - DNA, 25 bp, Homo sapien
ttagtagcaggtctttctttgtagc

SEQ ID NO: 581183 - DNA, 25 bp, Homo sapien
gcaggtctttctttgtagcttttca

SEQ ID NO: 581184 - DNA, 25 bp, Homo sapien
attcttagaatgctgaggagctgcc

SEQ ID NO: 581185 - DNA, 25 bp, Homo sapien
cttctctgagagtgttctggcatga

SEQ ID NO: 581186 - DNA, 25 bp, Homo sapien
tgaggaatgatccagacgctgagag

SEQ ID NO: 581187 - DNA, 25 bp, Homo sapien
tgttggtgacatccagactctttag

SEQ ID NO: 581188 - DNA, 25 bp, Homo sapien
cttgtttctgctgtgaggccaaagg

SEQ ID NO: 581189 - DNA, 25 bp, Homo sapien
tgtgaggccaaaggatttctgattt

SEQ ID NO: 581190 - DNA, 25 bp, Homo sapien
ggccaaaggatttctgattttctca

SEQ ID NO: 581191 - DNA, 25 bp, Homo sapien
ggtcttggctctgggcatttctaga

SEQ ID NO: 581192 - DNA, 25 bp, Homo sapien
cagaacctggggatgatagagtaaa

SEQ ID NO: 581193 - DNA, 25 bp, Homo sapien
cagtccctcttgtccgttggacttt

SEQ ID NO: 581194 - DNA, 25 bp, Homo sapien
cctggggatgatagagtaaatctcc

SEQ ID NO: 581195 - DNA, 25 bp, Homo sapien
tcttgtccgttggactttgtgtgat

SEQ ID NO: 581196 - DNA, 25 bp, Homo sapien
ttgcatgtagcatagatcctggaac

SEQ ID NO: 581197 - DNA, 25 bp, Homo sapien
gtgagtcctttctgacttcctggtg

SEQ ID NO: 581198 - DNA, 25 bp, Homo sapien
gacttttgaggtgcatgtgagtcct

SEQ ID NO: 581199 - DNA, 25 bp, Homo sapien
tctgcgatctctgatgcaagtgact

SEQ ID NO: 581200 - DNA, 25 bp, Homo sapien
agtttgttttaagaagttgccacag

SEQ ID NO: 581201 - DNA, 25 bp, Homo sapien
aaaatgctgtcaagtaacatcatgt

SEQ ID NO: 581202 - DNA, 25 bp, Homo sapien
gggtcattcaatgtgataaacttcc

SEQ ID NO: 581203 - DNA, 25 bp, Homo sapien
taaagcaacggcagggtttgagagt

SEQ ID NO: 581204 - DNA, 25 bp, Homo sapien
ggagttctcgcagttcttcacccac

SEQ ID NO: 581205 - DNA, 25 bp, Homo sapien
cagacagccgagaatgtgcgccttg

SEQ ID NO: 581206 - DNA, 25 bp, Homo sapien
tcagagtccgaggttcgcagacagc

SEQ ID NO: 581207 - DNA, 25 bp, Homo sapien
tcatctccggcttggcgtcctcgtg

SEQ ID NO: 581208 - DNA, 25 bp, Homo sapien
catccctttaagtctcctcagtgga

SEQ ID NO: 581209 - DNA, 25 bp, Homo sapien
tgtaaagcagctgtattcctggttc

SEQ ID NO: 581210 - DNA, 25 bp, Homo sapien
cagtggagctatgctgttttctatc

SEQ ID NO: 581211 - DNA, 25 bp, Homo sapien
gctgtattcctggttctctgtcatc

SEQ ID NO: 581212 - DNA, 25 bp, Homo sapien
ctctgcaaaacacgcactaccacca

SEQ ID NO: 581213 - DNA, 25 bp, Homo sapien
ccctctgcaaaacacgcactaccac

SEQ ID NO: 581214 - DNA, 25 bp, Homo sapien
ctgcaaaacacgcactaccaccatt

SEQ ID NO: 581215 - DNA, 25 bp, Homo sapien
tgcaaaacacgcactaccaccatta

SEQ ID NO: 581216 - DNA, 25 bp, Homo sapien
caggtaattggagtgtgtttcctgg

SEQ ID NO: 581217 - DNA, 25 bp, Homo sapien
gtaattggagtgtgtttcctggtga

SEQ ID NO: 581218 - DNA, 25 bp, Homo sapien
cagcaggtaattggagtgtgtttcc

SEQ ID NO: 581219 - DNA, 25 bp, Homo sapien
ttcctggtgatgagtccaacaaaat

SEQ ID NO: 581220 - DNA, 25 bp, Homo sapien
gaatttgattgctccaatccacagt

SEQ ID NO: 581221 - DNA, 25 bp, Homo sapien
tagaatgtgttgcaccaatctcaca

SEQ ID NO: 581222 - DNA, 25 bp, Homo sapien
acatttctagaagcaagaatttgat

SEQ ID NO: 581223 - DNA, 25 bp, Homo sapien
cagtttaagtgaacatcacattgaa

SEQ ID NO: 581224 - DNA, 25 bp, Homo sapien
ccgtggagagtaggtcaatcctgta

SEQ ID NO: 581225 - DNA, 25 bp, Homo sapien
taaagctctgatttgcttcaccagc

SEQ ID NO: 581226 - DNA, 25 bp, Homo sapien
ccagcagcaattgttggagatcagc

SEQ ID NO: 581227 - DNA, 25 bp, Homo sapien
gtcactacatattctctgagagagg

SEQ ID NO: 581228 - DNA, 25 bp, Homo sapien
tttgagtttacagtaagctgtgatt

SEQ ID NO: 581229 - DNA, 25 bp, Homo sapien
aggagtttgagtttacagtaagctg

SEQ ID NO: 581230 - DNA, 25 bp, Homo sapien
agtttgagtttacagtaagctgtga

SEQ ID NO: 581231 - DNA, 25 bp, Homo sapien
gagtttgagtttacagtaagctgtg

SEQ ID NO: 581232 - DNA, 25 bp, Homo sapien
actctaatatctgactcggagtctc

SEQ ID NO: 581233 - DNA, 25 bp, Homo sapien
cacacccagctagagatgtggttcc

SEQ ID NO: 581234 - DNA, 25 bp, Homo sapien
gcctcagtaaggattggttagattt

SEQ ID NO: 581235 - DNA, 25 bp, Homo sapien
gcctaaaaggattctagcctcagta

SEQ ID NO: 581236 - DNA, 25 bp, Homo sapien
tgagcagttagccataggttataga

SEQ ID NO: 581237 - DNA, 25 bp, Homo sapien
tataaggacttgctgaaaaaagaaa

SEQ ID NO: 581238 - DNA, 25 bp, Homo sapien
gctaaatgcttaataatgtcagaca

SEQ ID NO: 581239 - DNA, 25 bp, Homo sapien
agatacaaggacaatctgttaacac

SEQ ID NO: 581240 - DNA, 25 bp, Homo sapien
caattgccggcgctttttgtgcgca

SEQ ID NO: 581241 - DNA, 25 bp, Homo sapien
cagcgcggcttttgtgtctactcca

SEQ ID NO: 581242 - DNA, 25 bp, Homo sapien
tcttctcgagggaacgtgcaagtag

SEQ ID NO: 581243 - DNA, 25 bp, Homo sapien
agtagtttggcctagttcgcttgcc

SEQ ID NO: 581244 - DNA, 25 bp, Homo sapien
tcgccgcccaaggtcgccgacataa

SEQ ID NO: 581245 - DNA, 25 bp, Homo sapien
ggccaagattctccgctgggaccct

SEQ ID NO: 581246 - DNA, 25 bp, Homo sapien
ctacggccaagattctccgctggga

SEQ ID NO: 581247 - DNA, 25 bp, Homo sapien
aaggtcgccgacataagcgccagag

SEQ ID NO: 581248 - DNA, 25 bp, Homo sapien
gttctgggcgaggtgctaccgcggg

SEQ ID NO: 581249 - DNA, 25 bp, Homo sapien
tcctccttcaggtagtcaaatttgg

SEQ ID NO: 581250 - DNA, 25 bp, Homo sapien
ttcaaatcccggtcgaaaatattca

SEQ ID NO: 581251 - DNA, 25 bp, Homo sapien
tagtcaaatttggtcggctcgggct

SEQ ID NO: 581252 - DNA, 25 bp, Homo sapien
tctagtctcacaaattggcgaggcc

SEQ ID NO: 581253 - DNA, 25 bp, Homo sapien
catcagcagtgtagtacgtgcacca

SEQ ID NO: 581254 - DNA, 25 bp, Homo sapien
tggcgaggcctcaatcaagttgtag

SEQ ID NO: 581255 - DNA, 25 bp, Homo sapien
gatcagacctgtacttgcacagagc

SEQ ID NO: 581256 - DNA, 25 bp, Homo sapien
cttttcaatttcaccacaggaactt

SEQ ID NO: 581257 - DNA, 25 bp, Homo sapien
tttccagtattcaacaatccacaag

SEQ ID NO: 581258 - DNA, 25 bp, Homo sapien
gaaggattacacgaggcgtaggtta

SEQ ID NO: 581259 - DNA, 25 bp, Homo sapien
ctgaaggattacacgaggcgtaggt

SEQ ID NO: 581260 - DNA, 25 bp, Homo sapien
acacggtctgcgatccgacttccaa

SEQ ID NO: 581261 - DNA, 25 bp, Homo sapien
tatgtcatatacacggtctgcgatc

SEQ ID NO: 581262 - DNA, 25 bp, Homo sapien
ctgggtatgtcatatacacggtctg

SEQ ID NO: 581263 - DNA, 25 bp, Homo sapien
tcatatacacggtctgcgatccgac

SEQ ID NO: 581264 - DNA, 25 bp, Homo sapien
aatgtaacctcttccacaaccaaga

SEQ ID NO: 581265 - DNA, 25 bp, Homo sapien
acaaccaagatccaaagcaaggggg

SEQ ID NO: 581266 - DNA, 25 bp, Homo sapien
caaccaagatccaaagcaaggggga

SEQ ID NO: 581267 - DNA, 25 bp, Homo sapien
attcaaatattgtgcaatgtaacct

SEQ ID NO: 581268 - DNA, 25 bp, Homo sapien
caatgtcagcttggaaaaactttcc

SEQ ID NO: 581269 - DNA, 25 bp, Homo sapien
caaagcattttctgcaatgtcagct

SEQ ID NO: 581270 - DNA, 25 bp, Homo sapien
tctgcaatgtcagcttggaaaaact

SEQ ID NO: 581271 - DNA, 25 bp, Homo sapien
ttttctgcaatgtcagcttggaaaa

SEQ ID NO: 581272 - DNA, 25 bp, Homo sapien
cagctaaaacgctgacagtaggtat

SEQ ID NO: 581273 - DNA, 25 bp, Homo sapien
ttcatcagctaaaacgctgacagta

SEQ ID NO: 581274 - DNA, 25 bp, Homo sapien
tcagctaaaacgctgacagtaggta

SEQ ID NO: 581275 - DNA, 25 bp, Homo sapien
catcagctaaaacgctgacagtagg

SEQ ID NO: 581276 - DNA, 25 bp, Homo sapien
gtgctctaggaaggtcattcaccca

SEQ ID NO: 581277 - DNA, 25 bp, Homo sapien
gctcaagtgctctaggaaggtcatt

SEQ ID NO: 581278 - DNA, 25 bp, Homo sapien
ctgctcaagtgctctaggaaggtca

SEQ ID NO: 581279 - DNA, 25 bp, Homo sapien
aggaaggtcattcacccaatgcaaa

SEQ ID NO: 581280 - DNA, 25 bp, Homo sapien
gctctcccaagcagatgtcccaggt

SEQ ID NO: 581281 - DNA, 25 bp, Homo sapien
cacagtcagagtattaaagccagct

SEQ ID NO: 581282 - DNA, 25 bp, Homo sapien
caccgaagttcatagagtgtgtcgc

SEQ ID NO: 581283 - DNA, 25 bp, Homo sapien
cgctaactgtaaggaacaccgaagt

SEQ ID NO: 581284 - DNA, 25 bp, Homo sapien
gatgtgttatacaaactaaacattg

SEQ ID NO: 581285 - DNA, 25 bp, Homo sapien
aactaaacattgtcaatcagagctt

SEQ ID NO: 581286 - DNA, 25 bp, Homo sapien
tgtgttatacaaactaaacattgtc

SEQ ID NO: 581287 - DNA, 25 bp, Homo sapien
aaacattgtcaatcagagcttttcc

SEQ ID NO: 581288 - DNA, 25 bp, Homo sapien
caaaagatcaacactagtcacaggt

SEQ ID NO: 581289 - DNA, 25 bp, Homo sapien
gcactcatgtgaagcggttttccgc

SEQ ID NO: 581290 - DNA, 25 bp, Homo sapien
tttctagccgagcaacctctcagga

SEQ ID NO: 581291 - DNA, 25 bp, Homo sapien
tcattacaaagtagagcactcatgt

SEQ ID NO: 581292 - DNA, 25 bp, Homo sapien
tcctgcattgtgagagaaatcatcc

SEQ ID NO: 581293 - DNA, 25 bp, Homo sapien
ccttcaggacacaaaaatctggaga

SEQ ID NO: 581294 - DNA, 25 bp, Homo sapien
gaacaattgggtaatgacttcctct

SEQ ID NO: 581295 - DNA, 25 bp, Homo sapien
cagttaagagctagagccttttcca

SEQ ID NO: 581296 - DNA, 25 bp, Homo sapien
aaatcttccatcaattcaaacattc

SEQ ID NO: 581297 - DNA, 25 bp, Homo sapien
aatcttccatcaattcaaacattcc

SEQ ID NO: 581298 - DNA, 25 bp, Homo sapien
taaatcttccatcaattcaaacatt

SEQ ID NO: 581299 - DNA, 25 bp, Homo sapien
ttggcctacctttcccaatggagtc

SEQ ID NO: 581300 - DNA, 25 bp, Homo sapien
gcctacctttcccaatggagtctaa

SEQ ID NO: 581301 - DNA, 25 bp, Homo sapien
gtttctctcaaatggagtctaaaaa

SEQ ID NO: 581302 - DNA, 25 bp, Homo sapien
caaaatgtttctctcaaatggagtc

SEQ ID NO: 581303 - DNA, 25 bp, Homo sapien
tctttgtaggctcagacgtcgacta

SEQ ID NO: 581304 - DNA, 25 bp, Homo sapien
tatcctaggcaaacgctttgaatgc

SEQ ID NO: 581305 - DNA, 25 bp, Homo sapien
agcctcagtaccaagccactttgtc

SEQ ID NO: 581306 - DNA, 25 bp, Homo sapien
taaactcaagggctgtacctgccca

SEQ ID NO: 581307 - DNA, 25 bp, Homo sapien
tccttgattacatcaggtaagtcct

SEQ ID NO: 581308 - DNA, 25 bp, Homo sapien
gcctttggataaagtggctccttga

SEQ ID NO: 581309 - DNA, 25 bp, Homo sapien
tcaagcctttggataaagtggctcc

SEQ ID NO: 581310 - DNA, 25 bp, Homo sapien
aaagtggctccttgattacatcagg

SEQ ID NO: 581311 - DNA, 25 bp, Homo sapien
tcaggatggtggttaaaatacaagc

SEQ ID NO: 581312 - DNA, 25 bp, Homo sapien
tcagagaattgcactaagcacagag

SEQ ID NO: 581313 - DNA, 25 bp, Homo sapien
gagcacaaggctaccttctgggaga

SEQ ID NO: 581314 - DNA, 25 bp, Homo sapien
gatacttaacttctcgatgcctcaa

SEQ ID NO: 581315 - DNA, 25 bp, Homo sapien
tcgtttaggtgctgcctcttttgca

SEQ ID NO: 581316 - DNA, 25 bp, Homo sapien
ctttcattctccgggcaaactcatt

SEQ ID NO: 581317 - DNA, 25 bp, Homo sapien
taagcagatttagggccttttcctc

SEQ ID NO: 581318 - DNA, 25 bp, Homo sapien
ttcctgaccccctaagcagatttag

SEQ ID NO: 581319 - DNA, 25 bp, Homo sapien
caggctgttcgactaggtttaaatc

SEQ ID NO: 581320 - DNA, 25 bp, Homo sapien
ggcagaatggctaagatttcagcat

SEQ ID NO: 581321 - DNA, 25 bp, Homo sapien
gaatggcacacctgaaagtctccca

SEQ ID NO: 581322 - DNA, 25 bp, Homo sapien
cactaattacaacatctgggacaag

SEQ ID NO: 581323 - DNA, 25 bp, Homo sapien
ttaggtcaacattctggacttttgt

SEQ ID NO: 581324 - DNA, 25 bp, Homo sapien
taggtcaacattctggacttttgtt

SEQ ID NO: 581325 - DNA, 25 bp, Homo sapien
attcatcagctgatatgcagcttgt

SEQ ID NO: 581326 - DNA, 25 bp, Homo sapien
ttcatcagctgatatgcagcttgtt

SEQ ID NO: 581327 - DNA, 25 bp, Homo sapien
tcatcagctgatatgcagcttgttt

SEQ ID NO: 581328 - DNA, 25 bp, Homo sapien
ccgtaaaggcttctagtgctcacat

SEQ ID NO: 581329 - DNA, 25 bp, Homo sapien
tagtaggcataacactctctgaagg

SEQ ID NO: 581330 - DNA, 25 bp, Homo sapien
caagagcactactgcagagcacagg

SEQ ID NO: 581331 - DNA, 25 bp, Homo sapien
taaactgggtctcacattggaagag

SEQ ID NO: 581332 - DNA, 25 bp, Homo sapien
caggcaagtgaaatttcaggaggca

SEQ ID NO: 581333 - DNA, 25 bp, Homo sapien
gcaatggtctaaagtaagcccgctg

SEQ ID NO: 581334 - DNA, 25 bp, Homo sapien
ccaggtgagttgtcagcaattggca

SEQ ID NO: 581335 - DNA, 25 bp, Homo sapien
ttttcaacattaagacaggcaagtg

SEQ ID NO: 581336 - DNA, 25 bp, Homo sapien
gcagcagggcttttctattccaagc

SEQ ID NO: 581337 - DNA, 25 bp, Homo sapien
gccagcattgtgtctcgatgcagca

SEQ ID NO: 581338 - DNA, 25 bp, Homo sapien
tattccaagcacagttactctcacc

SEQ ID NO: 581339 - DNA, 25 bp, Homo sapien
ttgtgtctcgatgcagcagggcttt

SEQ ID NO: 581340 - DNA, 25 bp, Homo sapien
tcaacatgatacagcacaagtgcct

SEQ ID NO: 581341 - DNA, 25 bp, Homo sapien
cattggcaacgtgaagggaatcaac

SEQ ID NO: 581342 - DNA, 25 bp, Homo sapien
caagaagtctgagggagccttaaca

SEQ ID NO: 581343 - DNA, 25 bp, Homo sapien
ctacaggatctgtgttttgagagga

SEQ ID NO: 581344 - DNA, 25 bp, Homo sapien
gtaatagatctggtatgtagcaggt

SEQ ID NO: 581345 - DNA, 25 bp, Homo sapien
cctatcatgtaatagatctggtatg

SEQ ID NO: 581346 - DNA, 25 bp, Homo sapien
tgactcatgatatttccatcctatc

SEQ ID NO: 581347 - DNA, 25 bp, Homo sapien
tttccatcctatcatgtaatagatc

SEQ ID NO: 581348 - DNA, 25 bp, Homo sapien
ccaaatgacacagttgcggaacctc

SEQ ID NO: 581349 - DNA, 25 bp, Homo sapien
caaatgacacagttgcggaacctct

SEQ ID NO: 581350 - DNA, 25 bp, Homo sapien
gcttagagtgcttcttgcttcaaaa

SEQ ID NO: 581351 - DNA, 25 bp, Homo sapien
gacactcagcagtatccttatgaga

SEQ ID NO: 581352 - DNA, 25 bp, Homo sapien
taaaaccacataactctggagaagg

SEQ ID NO: 581353 - DNA, 25 bp, Homo sapien
actgaaatggttactatagatgtga

SEQ ID NO: 581354 - DNA, 25 bp, Homo sapien
gtcccacccacaccatggagataaa

SEQ ID NO: 581355 - DNA, 25 bp, Homo sapien
tgttacatgtgattctacttctggt

SEQ ID NO: 581356 - DNA, 25 bp, Homo sapien
ctgttacatgtgattctacttctgg

SEQ ID NO: 581357 - DNA, 25 bp, Homo sapien
acccacaccatggagataaaaaaga

SEQ ID NO: 581358 - DNA, 25 bp, Homo sapien
tgaaaagtacaagtctccctcctag

SEQ ID NO: 581359 - DNA, 25 bp, Homo sapien
cattgcacctggctagcgcagtttg

SEQ ID NO: 581360 - DNA, 25 bp, Homo sapien
gaaagtcccatgtgctacgtacagg

SEQ ID NO: 581361 - DNA, 25 bp, Homo sapien
ccacccatggacagcttgttgctaa

SEQ ID NO: 581362 - DNA, 25 bp, Homo sapien
agagactagttggatgcctggcaca

SEQ ID NO: 581363 - DNA, 25 bp, Homo sapien
cagccaacaggtgtcacggtgtgca

SEQ ID NO: 581364 - DNA, 25 bp, Homo sapien
ggtgtgcacatactagagccctgtc

SEQ ID NO: 581365 - DNA, 25 bp, Homo sapien
tccttcacagaagccaatccacggt

SEQ ID NO: 581366 - DNA, 25 bp, Homo sapien
tgaggttgtggtcaatgcattggct

SEQ ID NO: 581367 - DNA, 25 bp, Homo sapien
gagtggccttacaatatggctgctg

SEQ ID NO: 581368 - DNA, 25 bp, Homo sapien
tcagtttctgtagataagatatttg

SEQ ID NO: 581369 - DNA, 25 bp, Homo sapien
tgtggtcaatgcattggctgggacc

SEQ ID NO: 581370 - DNA, 25 bp, Homo sapien
tatttggctgaaagcaccctctctc

SEQ ID NO: 581371 - DNA, 25 bp, Homo sapien
catagtgttacatgactccttggca

SEQ ID NO: 581372 - DNA, 25 bp, Homo sapien
caatgagcaggatactatttggctg

SEQ ID NO: 581373 - DNA, 25 bp, Homo sapien
ccttggcaatgagcaggatactatt

SEQ ID NO: 581374 - DNA, 25 bp, Homo sapien
agtgcttgaatttgtgggaatttca

SEQ ID NO: 581375 - DNA, 25 bp, Homo sapien
ttcttcctgtacccggtagattgtg

SEQ ID NO: 581376 - DNA, 25 bp, Homo sapien
gattgtggttttttacagggagtgc

SEQ ID NO: 581377 - DNA, 25 bp, Homo sapien
agggagtgcttgaatttgtgggaat

SEQ ID NO: 581378 - DNA, 25 bp, Homo sapien
cagcctctactctctatttttatga

SEQ ID NO: 581379 - DNA, 25 bp, Homo sapien
agtgagatcaggaagtatttctttc

SEQ ID NO: 581380 - DNA, 25 bp, Homo sapien
gatcaggaagtatttctttctcact

SEQ ID NO: 581381 - DNA, 25 bp, Homo sapien
gagtttcaactctttagattccaca

SEQ ID NO: 581382 - DNA, 25 bp, Homo sapien
tcgggctcgacgccgacgacgctag

SEQ ID NO: 581383 - DNA, 25 bp, Homo sapien
ctagccacggcgcgccccaacttgg

SEQ ID NO: 581384 - DNA, 25 bp, Homo sapien
gctcgacgccgacgacgctagggag

SEQ ID NO: 581385 - DNA, 25 bp, Homo sapien
aggcgcaggctcgggctcgacgccg

SEQ ID NO: 581386 - DNA, 25 bp, Homo sapien
tgcgtcctgcgctgctcgccgctcg

SEQ ID NO: 581387 - DNA, 25 bp, Homo sapien
aagtgaaagaggctctgcgtcctgc

SEQ ID NO: 581388 - DNA, 25 bp, Homo sapien
acctcagagcctgtcaactaggtca

SEQ ID NO: 581389 - DNA, 25 bp, Homo sapien
tgtcaactaggtcacgcctcgcgct

SEQ ID NO: 581390 - DNA, 25 bp, Homo sapien
ggctcacgggcaaacagggtgtgtg

SEQ ID NO: 581391 - DNA, 25 bp, Homo sapien
gctcacgggcaaacagggtgtgtgt

SEQ ID NO: 581392 - DNA, 25 bp, Homo sapien
ggggtggctggctttaagctgcaag

SEQ ID NO: 581393 - DNA, 25 bp, Homo sapien
caggctcacgggcaaacagggtgtg

SEQ ID NO: 581394 - DNA, 25 bp, Homo sapien
ctttctcctctctccacaccttttt

SEQ ID NO: 581395 - DNA, 25 bp, Homo sapien
ttttcttcttgttgctggggtacat

SEQ ID NO: 581396 - DNA, 25 bp, Homo sapien
tttttcttcttgttgctggggtaca

SEQ ID NO: 581397 - DNA, 25 bp, Homo sapien
tcctctctccacacctttttcttct

SEQ ID NO: 581398 - DNA, 25 bp, Homo sapien
tgctgttcaggggaatatagtctct

SEQ ID NO: 581399 - DNA, 25 bp, Homo sapien
cctccttccatgatagaatgctgtt

SEQ ID NO: 581400 - DNA, 25 bp, Homo sapien
tctttgcgtctctcttctaaggtca

SEQ ID NO: 581401 - DNA, 25 bp, Homo sapien
catcattttggcccttgcccttcat

SEQ ID NO: 581402 - DNA, 25 bp, Homo sapien
ctggctagggcaatgcaggtggctc

SEQ ID NO: 581403 - DNA, 25 bp, Homo sapien
ggaatcagaccattcttaaaacaac

SEQ ID NO: 581404 - DNA, 25 bp, Homo sapien
gggcagcaaatcatctttgggttcc

SEQ ID NO: 581405 - DNA, 25 bp, Homo sapien
gtggtgggcagcaaatcatctttgg

SEQ ID NO: 581406 - DNA, 25 bp, Homo sapien
caccaacccataaggcaccattcca

SEQ ID NO: 581407 - DNA, 25 bp, Homo sapien
aacccataaggcaccattccaggtg

SEQ ID NO: 581408 - DNA, 25 bp, Homo sapien
ttaagccccaccaacccataaggca

SEQ ID NO: 581409 - DNA, 25 bp, Homo sapien
caacccataaggcaccattccaggt

SEQ ID NO: 581410 - DNA, 25 bp, Homo sapien
aatcatcatatgcagaatagaagcc

SEQ ID NO: 581411 - DNA, 25 bp, Homo sapien
caggctctttccaatcccaaccaga

SEQ ID NO: 581412 - DNA, 25 bp, Homo sapien
atcatcatatgcagaatagaagcca

SEQ ID NO: 581413 - DNA, 25 bp, Homo sapien
aggctctttccaatcccaaccagaa

SEQ ID NO: 581414 - DNA, 25 bp, Homo sapien
gccccatgtcacttaaacacttgtt

SEQ ID NO: 581415 - DNA, 25 bp, Homo sapien
tcctctccaatgtaacttgtagttc

SEQ ID NO: 581416 - DNA, 25 bp, Homo sapien
tatttatctaatacgccacggcatt

SEQ ID NO: 581417 - DNA, 25 bp, Homo sapien
tctttcttgtacacatttgaacatg

SEQ ID NO: 581418 - DNA, 25 bp, Homo sapien
ggatgggcctttcaagtggtccaga

SEQ ID NO: 581419 - DNA, 25 bp, Homo sapien
agtggtccagaataccactacaaac

SEQ ID NO: 581420 - DNA, 25 bp, Homo sapien
tcacaaaaaggatgggcctttcaag

SEQ ID NO: 581421 - DNA, 25 bp, Homo sapien
gtggtccagaataccactacaaacc

SEQ ID NO: 581422 - DNA, 25 bp, Homo sapien
cataacttgttccaggcaaggatcc

SEQ ID NO: 581423 - DNA, 25 bp, Homo sapien
tgttccaggcaaggatcctcaggca

SEQ ID NO: 581424 - DNA, 25 bp, Homo sapien
ctttccataacttgttccaggcaag

SEQ ID NO: 581425 - DNA, 25 bp, Homo sapien
acttgttccaggcaaggatcctcag

SEQ ID NO: 581426 - DNA, 25 bp, Homo sapien
agacaaggtgggataaaaggctctt

SEQ ID NO: 581427 - DNA, 25 bp, Homo sapien
tctaggaaggtctcttagagttaca

SEQ ID NO: 581428 - DNA, 25 bp, Homo sapien
tcaatcattccttaatttactccct

SEQ ID NO: 581429 - DNA, 25 bp, Homo sapien
aattcctaggactgaagcactagct

SEQ ID NO: 581430 - DNA, 25 bp, Homo sapien
aagaagaccagcgtttttccatcaa

SEQ ID NO: 581431 - DNA, 25 bp, Homo sapien
gtgagaagagtttatgacaactgcc

SEQ ID NO: 581432 - DNA, 25 bp, Homo sapien
gattgtgagaagagtttatgacaac

SEQ ID NO: 581433 - DNA, 25 bp, Homo sapien
ggacaaagagcagctcggattgtga

SEQ ID NO: 581434 - DNA, 25 bp, Homo sapien
aagagcagctcggattgtgagaaga

SEQ ID NO: 581435 - DNA, 25 bp, Homo sapien
gctctcgtgataaacacactgtact

SEQ ID NO: 581436 - DNA, 25 bp, Homo sapien
gaagtaccttacaaagctctcgtga

SEQ ID NO: 581437 - DNA, 25 bp, Homo sapien
taagttccatcacgctatctatggg

SEQ ID NO: 581438 - DNA, 25 bp, Homo sapien
gattacgcatcacaaaaagcacagt

SEQ ID NO: 581439 - DNA, 25 bp, Homo sapien
tggcaaaggatcagtagagtcaaaa

SEQ ID NO: 581440 - DNA, 25 bp, Homo sapien
tggaaatcgatcactagagggcggc

SEQ ID NO: 581441 - DNA, 25 bp, Homo sapien
gagggcggcattgcaaagactatga

SEQ ID NO: 581442 - DNA, 25 bp, Homo sapien
taaagaacgccaatgtgtttaatcc

SEQ ID NO: 581443 - DNA, 25 bp, Homo sapien
tgggccagcaccctcgcaacctttt

SEQ ID NO: 581444 - DNA, 25 bp, Homo sapien
taaatatatgcacaaccaccaacct

SEQ ID NO: 581445 - DNA, 25 bp, Homo sapien
gattatgatcagactttgagtactg

SEQ ID NO: 581446 - DNA, 25 bp, Homo sapien
ccaacctgtattagaagcaccagtc

SEQ ID NO: 581447 - DNA, 25 bp, Homo sapien
gtcaaacttttcttcacctgggatg

SEQ ID NO: 581448 - DNA, 25 bp, Homo sapien
tagcatctacctctagcaatgtgat

SEQ ID NO: 581449 - DNA, 25 bp, Homo sapien
cggcattgactatagcatctacctc

SEQ ID NO: 581450 - DNA, 25 bp, Homo sapien
atgtgatgtcacctctatagagaga

SEQ ID NO: 581451 - DNA, 25 bp, Homo sapien
ggctgctttggcatagtgactaggg

SEQ ID NO: 581452 - DNA, 25 bp, Homo sapien
acctgaaaagttaacagctgttcca

SEQ ID NO: 581453 - DNA, 25 bp, Homo sapien
tcacctgaaaagttaacagctgttc

SEQ ID NO: 581454 - DNA, 25 bp, Homo sapien
tgactaggggtactgtttttcactc

SEQ ID NO: 581455 - DNA, 25 bp, Homo sapien
taaagtctgtagtctagacaacagt

SEQ ID NO: 581456 - DNA, 25 bp, Homo sapien
gccaccattgggagaagtttacaca

SEQ ID NO: 581457 - DNA, 25 bp, Homo sapien
ttttgacattgggtaaacatggaca

SEQ ID NO: 581458 - DNA, 25 bp, Homo sapien
gtaacaagtatacaagcactccctg

SEQ ID NO: 581459 - DNA, 25 bp, Homo sapien
cagcatgagggagttcttttatgat

SEQ ID NO: 581460 - DNA, 25 bp, Homo sapien
ccagcatgagggagttcttttatga

SEQ ID NO: 581461 - DNA, 25 bp, Homo sapien
catgagggagttcttttatgataat

SEQ ID NO: 581462 - DNA, 25 bp, Homo sapien
gcatgagggagttcttttatgataa

SEQ ID NO: 581463 - DNA, 25 bp, Homo sapien
cctcttcatggccaatactcttaga

SEQ ID NO: 581464 - DNA, 25 bp, Homo sapien
gtagatgtttactggtgtctgggca

SEQ ID NO: 581465 - DNA, 25 bp, Homo sapien
ctactaccttatttaagttcattgg

SEQ ID NO: 581466 - DNA, 25 bp, Homo sapien
taagttcattgggtgaggtcatttt

SEQ ID NO: 581467 - DNA, 25 bp, Homo sapien
ttcaatttgaagttaccgtgaggcg

SEQ ID NO: 581468 - DNA, 25 bp, Homo sapien
tctttgtacttgagtagtttataca

SEQ ID NO: 581469 - DNA, 25 bp, Homo sapien
tatatcttgaaaagctgttgtactt

SEQ ID NO: 581470 - DNA, 25 bp, Homo sapien
cgtgaggcgtgcaaacattatctta

SEQ ID NO: 581471 - DNA, 25 bp, Homo sapien
tggattagcgatcagtgaaattgcc

SEQ ID NO: 581472 - DNA, 25 bp, Homo sapien
ttgaactggaattcatcctctttct

SEQ ID NO: 581473 - DNA, 25 bp, Homo sapien
gcctgataagctgtcagatccattt

SEQ ID NO: 581474 - DNA, 25 bp, Homo sapien
cagtgaaattgcctgataagctgtc

SEQ ID NO: 581475 - DNA, 25 bp, Homo sapien
caaagcattggagatacgtaaacgg

SEQ ID NO: 581476 - DNA, 25 bp, Homo sapien
tgggccagacatgatacaaagcatt

SEQ ID NO: 581477 - DNA, 25 bp, Homo sapien
gtaaacggataacgcagtctctgcc

SEQ ID NO: 581478 - DNA, 25 bp, Homo sapien
tttgagtactaacaatgggccagac

SEQ ID NO: 581479 - DNA, 25 bp, Homo sapien
attcaatgatttgacccacctctgc

SEQ ID NO: 581480 - DNA, 25 bp, Homo sapien
tcagtttcctactcaaagtttcttc

SEQ ID NO: 581481 - DNA, 25 bp, Homo sapien
cttcagtttcctactcaaagtttct

SEQ ID NO: 581482 - DNA, 25 bp, Homo sapien
tattcaatgatttgacccacctctg

SEQ ID NO: 581483 - DNA, 25 bp, Homo sapien
cgttcagaaaccacataattagcat

SEQ ID NO: 581484 - DNA, 25 bp, Homo sapien
gtggttgttactggtgtagattgta

SEQ ID NO: 581485 - DNA, 25 bp, Homo sapien
gattgtatcacgttcagaaaccaca

SEQ ID NO: 581486 - DNA, 25 bp, Homo sapien
ggtgtagattgtatcacgttcagaa

SEQ ID NO: 581487 - DNA, 25 bp, Homo sapien
aaacatttattggcttagagttggt

SEQ ID NO: 581488 - DNA, 25 bp, Homo sapien
acatttattggcttagagttggtgc

SEQ ID NO: 581489 - DNA, 25 bp, Homo sapien
aacatttattggcttagagttggtg

SEQ ID NO: 581490 - DNA, 25 bp, Homo sapien
catttattggcttagagttggtgct

SEQ ID NO: 581491 - DNA, 25 bp, Homo sapien
catacaaagaatctgcatcagggtg

SEQ ID NO: 581492 - DNA, 25 bp, Homo sapien
tacaaagaatctgcatcagggtgtt

SEQ ID NO: 581493 - DNA, 25 bp, Homo sapien
caaagaatctgcatcagggtgtttt

SEQ ID NO: 581494 - DNA, 25 bp, Homo sapien
tacatacaaagaatctgcatcaggg

SEQ ID NO: 581495 - DNA, 25 bp, Homo sapien
tccagaccactgacaactgttcttg

SEQ ID NO: 581496 - DNA, 25 bp, Homo sapien
ttgtctccattaggaagggccaaga

SEQ ID NO: 581497 - DNA, 25 bp, Homo sapien
tgttcttgggactatttccccaaca

SEQ ID NO: 581498 - DNA, 25 bp, Homo sapien
agtaattgtctccattaggaagggc

SEQ ID NO: 581499 - DNA, 25 bp, Homo sapien
agctcctttgtatatagccacatac

SEQ ID NO: 581500 - DNA, 25 bp, Homo sapien
gccacatactcatcatagtataaaa

SEQ ID NO: 581501 - DNA, 25 bp, Homo sapien
tccactgttgttcatagtttgaacc

SEQ ID NO: 581502 - DNA, 25 bp, Homo sapien
ttcatagtttgaaccctacaccctc

SEQ ID NO: 581503 - DNA, 25 bp, Homo sapien
tcagcatcaatattaagggccctag

SEQ ID NO: 581504 - DNA, 25 bp, Homo sapien
cagaatttttgggtaactagttgca

SEQ ID NO: 581505 - DNA, 25 bp, Homo sapien
attattccttggtgcatgggctgaa

SEQ ID NO: 581506 - DNA, 25 bp, Homo sapien
tgcattaacccctaccaagagtgtc

SEQ ID NO: 581507 - DNA, 25 bp, Homo sapien
taaagcgccaagctgaaaaacctgt

SEQ ID NO: 581508 - DNA, 25 bp, Homo sapien
gcccaggtgatggtaaagcgccaag

SEQ ID NO: 581509 - DNA, 25 bp, Homo sapien
gacaataaagagattcccatccagc

SEQ ID NO: 581510 - DNA, 25 bp, Homo sapien
cctgtggtcgctaagcagcagcaaa

SEQ ID NO: 581511 - DNA, 25 bp, Homo sapien
aaagatgactggtttgacagaaaag

SEQ ID NO: 581512 - DNA, 25 bp, Homo sapien
agaaaagaaactatgaagaatgtgg

SEQ ID NO: 581513 - DNA, 25 bp, Homo sapien
ggcacagataaactagtatcacata

SEQ ID NO: 581514 - DNA, 25 bp, Homo sapien
ggattgaagaggaggtcattatgtt

SEQ ID NO: 581515 - DNA, 25 bp, Homo sapien
gttgaagacatacctgcactcatgt

SEQ ID NO: 581516 - DNA, 25 bp, Homo sapien
ctagtatcacatattctcaatcata

SEQ ID NO: 581517 - DNA, 25 bp, Homo sapien
gcctggccaatgttatttttcatag

SEQ ID NO: 581518 - DNA, 25 bp, Homo sapien
aaaagcaatcctaaaatttgtatag

SEQ ID NO: 581519 - DNA, 25 bp, Homo sapien
gcaatcctaaaatttgtatagaacc

SEQ ID NO: 581520 - DNA, 25 bp, Homo sapien
cctggccaatgttatttttcataga

SEQ ID NO: 581521 - DNA, 25 bp, Homo sapien
taagcaatctcaaacattcacaaaa

SEQ ID NO: 581522 - DNA, 25 bp, Homo sapien
cagcctcacgctatcccttgaaatt

SEQ ID NO: 581523 - DNA, 25 bp, Homo sapien
tctaatttaaacctcatctgagagg

SEQ ID NO: 581524 - DNA, 25 bp, Homo sapien
taaggcttggtgtcttatgttcaat

SEQ ID NO: 581525 - DNA, 25 bp, Homo sapien
acccacagaccttctgagatccatg

SEQ ID NO: 581526 - DNA, 25 bp, Homo sapien
agaccttctgagatccatgtcttca

SEQ ID NO: 581527 - DNA, 25 bp, Homo sapien
cagaccttctgagatccatgtcttc

SEQ ID NO: 581528 - DNA, 25 bp, Homo sapien
cacagaccttctgagatccatgtct

SEQ ID NO: 581529 - DNA, 25 bp, Homo sapien
ccactcagcattctccaccattccc

SEQ ID NO: 581530 - DNA, 25 bp, Homo sapien
actcagcattctccaccattcccca

SEQ ID NO: 581531 - DNA, 25 bp, Homo sapien
tcaccactcagcattctccaccatt

SEQ ID NO: 581532 - DNA, 25 bp, Homo sapien
accactcagcattctccaccattcc

SEQ ID NO: 581533 - DNA, 25 bp, Homo sapien
aatgatttaccaaactgtgcacaca

SEQ ID NO: 581534 - DNA, 25 bp, Homo sapien
tattaagggactgtgtatcaacagc

SEQ ID NO: 581535 - DNA, 25 bp, Homo sapien
cacacaagaggaagttcaaatacaa

SEQ ID NO: 581536 - DNA, 25 bp, Homo sapien
ccatgtttagctgtcacattagcaa

SEQ ID NO: 581537 - DNA, 25 bp, Homo sapien
tcataggtaaaaaggaatagtccaa

SEQ ID NO: 581538 - DNA, 25 bp, Homo sapien
acataaacaaaaacatccttcatag

SEQ ID NO: 581539 - DNA, 25 bp, Homo sapien
acatccttcataggtaaaaaggaat

SEQ ID NO: 581540 - DNA, 25 bp, Homo sapien
taaacaaaaacatccttcataggta

SEQ ID NO: 581541 - DNA, 25 bp, Homo sapien
tgtaacactactatcaatttcagat

SEQ ID NO: 581542 - DNA, 25 bp, Homo sapien
actgagttgtagctatatggtgcta

SEQ ID NO: 581543 - DNA, 25 bp, Homo sapien
ggtgctaacggccaactgaactcca

SEQ ID NO: 581544 - DNA, 25 bp, Homo sapien
catgagagtctgagtagtgcagctt

SEQ ID NO: 581545 - DNA, 25 bp, Homo sapien
tttcaaagctaggaggcatacagcc

SEQ ID NO: 581546 - DNA, 25 bp, Homo sapien
tgggcggcacctcgcactgtgaatt

SEQ ID NO: 581547 - DNA, 25 bp, Homo sapien
gagacaatcccaaaactgcgagtgc

SEQ ID NO: 581548 - DNA, 25 bp, Homo sapien
tagcatcagatcgactgcaaaacaa

SEQ ID NO: 581549 - DNA, 25 bp, Homo sapien
cacttcctagtgtccattgcatatc

SEQ ID NO: 581550 - DNA, 25 bp, Homo sapien
taagaactgggaataagtcagaaag

SEQ ID NO: 581551 - DNA, 25 bp, Homo sapien
tatacatggactgcatgcatagtgg

SEQ ID NO: 581552 - DNA, 25 bp, Homo sapien
gaaagtagcatctaacaataatcgc

SEQ ID NO: 581553 - DNA, 25 bp, Homo sapien
cccctcattaggcaaactagtagtc

SEQ ID NO: 581554 - DNA, 25 bp, Homo sapien
cacccctcattaggcaaactagtag

SEQ ID NO: 581555 - DNA, 25 bp, Homo sapien
ctcattaggcaaactagtagtcccc

SEQ ID NO: 581556 - DNA, 25 bp, Homo sapien
cctcattaggcaaactagtagtccc

SEQ ID NO: 581557 - DNA, 25 bp, Homo sapien
tcctggagctatccatcaattgcat

SEQ ID NO: 581558 - DNA, 25 bp, Homo sapien
tgtctttcacaccatgactagatag

SEQ ID NO: 581559 - DNA, 25 bp, Homo sapien
ctttcacaccatgactagatagggc

SEQ ID NO: 581560 - DNA, 25 bp, Homo sapien
caattgcataagagccttgccttct

SEQ ID NO: 581561 - DNA, 25 bp, Homo sapien
tacagacagctattcacaacagtgg

SEQ ID NO: 581562 - DNA, 25 bp, Homo sapien
tcagcagtctgtaggccaaatcaac

SEQ ID NO: 581563 - DNA, 25 bp, Homo sapien
tcagaaaggcacacggtcttagcag

SEQ ID NO: 581564 - DNA, 25 bp, Homo sapien
cagtgctcactggaatacggtatca

SEQ ID NO: 581565 - DNA, 25 bp, Homo sapien
cttctaccaacttccctctcacact

SEQ ID NO: 581566 - DNA, 25 bp, Homo sapien
gcttctaccaacttccctctcacac

SEQ ID NO: 581567 - DNA, 25 bp, Homo sapien
tgcttctaccaacttccctctcaca

SEQ ID NO: 581568 - DNA, 25 bp, Homo sapien
taatgaaaactgtataagctcgtgt

SEQ ID NO: 581569 - DNA, 25 bp, Homo sapien
gcagtacatgagaataaacagatgc

SEQ ID NO: 581570 - DNA, 25 bp, Homo sapien
tgcttgcaatagaaaaggtgtataa

SEQ ID NO: 581571 - DNA, 25 bp, Homo sapien
tctgaaaggctctgaacattaggga

SEQ ID NO: 581572 - DNA, 25 bp, Homo sapien
ttgttctgtatagatccacccatgg

SEQ ID NO: 581573 - DNA, 25 bp, Homo sapien
tgggttagggcctttgttctgtata

SEQ ID NO: 581574 - DNA, 25 bp, Homo sapien
cccatgggctgctatggatcttcat

SEQ ID NO: 581575 - DNA, 25 bp, Homo sapien
tatagatccacccatgggctgctat

SEQ ID NO: 581576 - DNA, 25 bp, Homo sapien
ggcagaaccaagacgaagcctatct

SEQ ID NO: 581577 - DNA, 25 bp, Homo sapien
gagtccctgagatcttacactcctg

SEQ ID NO: 581578 - DNA, 25 bp, Homo sapien
ggctccagaaaggtagcagggtata

SEQ ID NO: 581579 - DNA, 25 bp, Homo sapien
acctacgtatagtcagtcttggctg

SEQ ID NO: 581580 - DNA, 25 bp, Homo sapien
ggatcatcagccaaattgcattgtg

SEQ ID NO: 581581 - DNA, 25 bp, Homo sapien
tacgtccagtagtgcaaattggtgc

SEQ ID NO: 581582 - DNA, 25 bp, Homo sapien
tgtgtattatatatgcctgctcggt

SEQ ID NO: 581583 - DNA, 25 bp, Homo sapien
tgtggacatgtattcctggtacgtc

SEQ ID NO: 581584 - DNA, 25 bp, Homo sapien
catcagctggcataaaaggagcatg

SEQ ID NO: 581585 - DNA, 25 bp, Homo sapien
ggttttgcctataccatcctgattt

SEQ ID NO: 581586 - DNA, 25 bp, Homo sapien
aatgtaattataagcgattcccctc

SEQ ID NO: 581587 - DNA, 25 bp, Homo sapien
taatgggcaatatcaaacttcctgc

SEQ ID NO: 581588 - DNA, 25 bp, Homo sapien
tctctatatcgttccaatttaagtc

SEQ ID NO: 581589 - DNA, 25 bp, Homo sapien
tctatatcgttccaatttaagtcta

SEQ ID NO: 581590 - DNA, 25 bp, Homo sapien
atatcgttccaatttaagtctatgt

SEQ ID NO: 581591 - DNA, 25 bp, Homo sapien
tatatcgttccaatttaagtctatg

SEQ ID NO: 581592 - DNA, 25 bp, Homo sapien
tgctaggatatagcaagcaaaggct

SEQ ID NO: 581593 - DNA, 25 bp, Homo sapien
tggttcttcgaataagacacaagaa

SEQ ID NO: 581594 - DNA, 25 bp, Homo sapien
ttttagtcttgcagacactttgaaa

SEQ ID NO: 581595 - DNA, 25 bp, Homo sapien
aaagacccaattctacatatatggg

SEQ ID NO: 581596 - DNA, 25 bp, Homo sapien
tcttacctgctacaagactcagagt

SEQ ID NO: 581597 - DNA, 25 bp, Homo sapien
tgttgccaatattaacctagattat

SEQ ID NO: 581598 - DNA, 25 bp, Homo sapien
tagccatttcagaatgctttctcca

SEQ ID NO: 581599 - DNA, 25 bp, Homo sapien
taatatctgttacatgtgttgccaa

SEQ ID NO: 581600 - DNA, 25 bp, Homo sapien
ggcccttccagtagccaaactctgt

SEQ ID NO: 581601 - DNA, 25 bp, Homo sapien
caaactctgtccagtccccttcccg

SEQ ID NO: 581602 - DNA, 25 bp, Homo sapien
caggcccttccagtagccaaactct

SEQ ID NO: 581603 - DNA, 25 bp, Homo sapien
agccaaactctgtccagtccccttc

SEQ ID NO: 581604 - DNA, 25 bp, Homo sapien
tgttacaccttatgccaaaagcaga

SEQ ID NO: 581605 - DNA, 25 bp, Homo sapien
taagtggctgatatattaagctctc

SEQ ID NO: 581606 - DNA, 25 bp, Homo sapien
taagctctcaggctacaaagtcatg

SEQ ID NO: 581607 - DNA, 25 bp, Homo sapien
gttactctgtaactatgcacacaca

SEQ ID NO: 581608 - DNA, 25 bp, Homo sapien
ctccttcatgatcagcagtctctga

SEQ ID NO: 581609 - DNA, 25 bp, Homo sapien
gtaaaatacgtctccttcatgatca

SEQ ID NO: 581610 - DNA, 25 bp, Homo sapien
taaatctgtaaaatacgtctccttc

SEQ ID NO: 581611 - DNA, 25 bp, Homo sapien
atctgtaaaatacgtctccttcatg

SEQ ID NO: 581612 - DNA, 25 bp, Homo sapien
taaacacaatccaattatgagttct

SEQ ID NO: 581613 - DNA, 25 bp, Homo sapien
aaacacaatccaattatgagttctc

SEQ ID NO: 581614 - DNA, 25 bp, Homo sapien
tcatcacagcggcttcgacgggaag

SEQ ID NO: 581615 - DNA, 25 bp, Homo sapien
agaagagctgctcggattagaactc

SEQ ID NO: 581616 - DNA, 25 bp, Homo sapien
atatgtaaaccagacagaagaagag

SEQ ID NO: 581617 - DNA, 25 bp, Homo sapien
cggcttcgacgggaaggcttcatta

SEQ ID NO: 581618 - DNA, 25 bp, Homo sapien
gacagaagctggaggtctctgattc

SEQ ID NO: 581619 - DNA, 25 bp, Homo sapien
acagaagctggaggtctctgattct

SEQ ID NO: 581620 - DNA, 25 bp, Homo sapien
tgattctgaacccacaggtgatgct

SEQ ID NO: 581621 - DNA, 25 bp, Homo sapien
tctctgattctgaacccacaggtga

SEQ ID NO: 581622 - DNA, 25 bp, Homo sapien
atcatagatgagaacatctggtaaa

SEQ ID NO: 581623 - DNA, 25 bp, Homo sapien
catttgactctgataatcatagatg

SEQ ID NO: 581624 - DNA, 25 bp, Homo sapien
tgactctgataatcatagatgagaa

SEQ ID NO: 581625 - DNA, 25 bp, Homo sapien
taatcatagatgagaacatctggta

SEQ ID NO: 581626 - DNA, 25 bp, Homo sapien
cctgccatctgtatcctgaggaaga

SEQ ID NO: 581627 - DNA, 25 bp, Homo sapien
taaggagctgcatcggatttctgag

SEQ ID NO: 581628 - DNA, 25 bp, Homo sapien
gagaattgtctaccttcggactatg

SEQ ID NO: 581629 - DNA, 25 bp, Homo sapien
tgtatcctgaggaagactgtctaaa

SEQ ID NO: 581630 - DNA, 25 bp, Homo sapien
gtatgtccattgtttagctctcacc

SEQ ID NO: 581631 - DNA, 25 bp, Homo sapien
cactctgcatgtccatgtatgtcca

SEQ ID NO: 581632 - DNA, 25 bp, Homo sapien
cagtcattcctcgatcaacatttag

SEQ ID NO: 581633 - DNA, 25 bp, Homo sapien
cccagaagtaggatacatggatagt

SEQ ID NO: 581634 - DNA, 25 bp, Homo sapien
acatcatgagtaattgctggcaggc

SEQ ID NO: 581635 - DNA, 25 bp, Homo sapien
tcagggagaggccataatcttaggc

SEQ ID NO: 581636 - DNA, 25 bp, Homo sapien
tgaccaaactctcagcagaagggag

SEQ ID NO: 581637 - DNA, 25 bp, Homo sapien
tacaggcaaggcagttggactttcg

SEQ ID NO: 581638 - DNA, 25 bp, Homo sapien
acaaagaatatctgagaggcagtca

SEQ ID NO: 581639 - DNA, 25 bp, Homo sapien
gattatcaatccctcccttaaatga

SEQ ID NO: 581640 - DNA, 25 bp, Homo sapien
actgcttgtaactaaatccatctga

SEQ ID NO: 581641 - DNA, 25 bp, Homo sapien
ggtgaatttaccttccccgatatca

SEQ ID NO: 581642 - DNA, 25 bp, Homo sapien
gacttttagctagcagcagctttaa

SEQ ID NO: 581643 - DNA, 25 bp, Homo sapien
aaagaagtgcattccataaaatttg

SEQ ID NO: 581644 - DNA, 25 bp, Homo sapien
gggttaggacttttagctagcagca

SEQ ID NO: 581645 - DNA, 25 bp, Homo sapien
taggacttttagctagcagcagctt

SEQ ID NO: 581646 - DNA, 25 bp, Homo sapien
tcaagttcctccaagatgagggact

SEQ ID NO: 581647 - DNA, 25 bp, Homo sapien
taatcacctgaaacctgctggtctg

SEQ ID NO: 581648 - DNA, 25 bp, Homo sapien
tagcatcctgagatatcacattcaa

SEQ ID NO: 581649 - DNA, 25 bp, Homo sapien
gaaaaattctacttagcatcaaggc

SEQ ID NO: 581650 - DNA, 25 bp, Homo sapien
tacacttggcattgtagggctaact

SEQ ID NO: 581651 - DNA, 25 bp, Homo sapien
gaaagatctgttagcctggcttatc

SEQ ID NO: 581652 - DNA, 25 bp, Homo sapien
cagattactcacagtagttgtaggg

SEQ ID NO: 581653 - DNA, 25 bp, Homo sapien
agggctaacttggaatgagaaatgc

SEQ ID NO: 581654 - DNA, 25 bp, Homo sapien
cactgccattggacagaattaactt

SEQ ID NO: 581655 - DNA, 25 bp, Homo sapien
catgtgcttcaaagcctctaatggc

SEQ ID NO: 581656 - DNA, 25 bp, Homo sapien
tatccctgtttttggaatacatccc

SEQ ID NO: 581657 - DNA, 25 bp, Homo sapien
gatcattctatctaaaacggtacct

SEQ ID NO: 581658 - DNA, 25 bp, Homo sapien
taatgtgtcaccaacgtggagaacc

SEQ ID NO: 581659 - DNA, 25 bp, Homo sapien
gactgattttgtggcctaccgctga

SEQ ID NO: 581660 - DNA, 25 bp, Homo sapien
gaacctttatacacagagcccagaa

SEQ ID NO: 581661 - DNA, 25 bp, Homo sapien
aatttcaattgctcccagtactggg

SEQ ID NO: 581662 - DNA, 25 bp, Homo sapien
gagaaatcctcccaaggcctgactg

SEQ ID NO: 581663 - DNA, 25 bp, Homo sapien
gaaatagtgcctcggttctgaaagg

SEQ ID NO: 581664 - DNA, 25 bp, Homo sapien
gggatctgggtacccaccagagcat

SEQ ID NO: 581665 - DNA, 25 bp, Homo sapien
tcaagtccagtagagggacttagcc

SEQ ID NO: 581666 - DNA, 25 bp, Homo sapien
gccgtgagtcatcagcagacaacac

SEQ ID NO: 581667 - DNA, 25 bp, Homo sapien
caggtcctcgaggattctagtctat

SEQ ID NO: 581668 - DNA, 25 bp, Homo sapien
agcaggtcctcgaggattctagtct

SEQ ID NO: 581669 - DNA, 25 bp, Homo sapien
ggtcctcgaggattctagtctatct

SEQ ID NO: 581670 - DNA, 25 bp, Homo sapien
gtcctcgaggattctagtctatctc

SEQ ID NO: 581671 - DNA, 25 bp, Homo sapien
ctactgtctgtatgatatggtccct

SEQ ID NO: 581672 - DNA, 25 bp, Homo sapien
agatctccctatccacatagccaat

SEQ ID NO: 581673 - DNA, 25 bp, Homo sapien
gccaattgtcttaggacatctccaa

SEQ ID NO: 581674 - DNA, 25 bp, Homo sapien
gatatggtccctaaaccagatctcc

SEQ ID NO: 581675 - DNA, 25 bp, Homo sapien
tcccactgtatatgtgctcctggaa

SEQ ID NO: 581676 - DNA, 25 bp, Homo sapien
tatctttggagctggaattgtcttc

SEQ ID NO: 581677 - DNA, 25 bp, Homo sapien
tgaagatgaacagctcttgtcacta

SEQ ID NO: 581678 - DNA, 25 bp, Homo sapien
tatcttgggtaagagaccacactaa

SEQ ID NO: 581679 - DNA, 25 bp, Homo sapien
catctttcatatcaactggaatagt

SEQ ID NO: 581680 - DNA, 25 bp, Homo sapien
caactggaatagtcactggtctgac

SEQ ID NO: 581681 - DNA, 25 bp, Homo sapien
aactcggagacacgcgttttagtca

SEQ ID NO: 581682 - DNA, 25 bp, Homo sapien
ctggtctgacgcgaaattcactggc

SEQ ID NO: 581683 - DNA, 25 bp, Homo sapien
cgaaacgtgggtcttggaaatatgc

SEQ ID NO: 581684 - DNA, 25 bp, Homo sapien
ttggaaatatgcctgaatgtcagca

SEQ ID NO: 581685 - DNA, 25 bp, Homo sapien
cgtgggtcttggaaatatgcctgaa

SEQ ID NO: 581686 - DNA, 25 bp, Homo sapien
tcttggaaatatgcctgaatgtcag

SEQ ID NO: 581687 - DNA, 25 bp, Homo sapien
gggattacaggtgtgagccactgtg

SEQ ID NO: 581688 - DNA, 25 bp, Homo sapien
acctgcttcagcctcccaaagtgct

SEQ ID NO: 581689 - DNA, 25 bp, Homo sapien
tcaggctagtgtcgaactcctcacc

SEQ ID NO: 581690 - DNA, 25 bp, Homo sapien
tcaagtgatccacctgcttcagcct

SEQ ID NO: 581691 - DNA, 25 bp, Homo sapien
tgcattatttagattgctccttaat

SEQ ID NO: 581692 - DNA, 25 bp, Homo sapien
aatgcagtttgcagatatctaattc

SEQ ID NO: 581693 - DNA, 25 bp, Homo sapien
gattgctccttaatgcagtttgcag

SEQ ID NO: 581694 - DNA, 25 bp, Homo sapien
gcagtttgcagatatctaattctca

SEQ ID NO: 581695 - DNA, 25 bp, Homo sapien
gccattcaggttacgacattcagct

SEQ ID NO: 581696 - DNA, 25 bp, Homo sapien
tttttgcatgtccagtatcacagcc

SEQ ID NO: 581697 - DNA, 25 bp, Homo sapien
tgcaggaaggtcatagccacatgtg

SEQ ID NO: 581698 - DNA, 25 bp, Homo sapien
gggccggctgctctatgaatacagc

SEQ ID NO: 581699 - DNA, 25 bp, Homo sapien
agttatacactggagtaaaacaagt

SEQ ID NO: 581700 - DNA, 25 bp, Homo sapien
ccagttatacactggagtaaaacaa

SEQ ID NO: 581701 - DNA, 25 bp, Homo sapien
ttccagttatacactggagtaaaac

SEQ ID NO: 581702 - DNA, 25 bp, Homo sapien
ccttttccagttatacactggagta

SEQ ID NO: 581703 - DNA, 25 bp, Homo sapien
tccgcattcaaagagcaaacacatt

SEQ ID NO: 581704 - DNA, 25 bp, Homo sapien
ggaaattttgaccattccgcattca

SEQ ID NO: 581705 - DNA, 25 bp, Homo sapien
tcagcctttacatggcagctggaaa

SEQ ID NO: 581706 - DNA, 25 bp, Homo sapien
caaagtgtgacagatgccttggctg

SEQ ID NO: 581707 - DNA, 25 bp, Homo sapien
tattggcaaagctcatgggaccata

SEQ ID NO: 581708 - DNA, 25 bp, Homo sapien
tcaaagagactaagagaggcagtac

SEQ ID NO: 581709 - DNA, 25 bp, Homo sapien
tcaccatacttctataagagggttg

SEQ ID NO: 581710 - DNA, 25 bp, Homo sapien
tgtctcttaccacatgacctgggaa

SEQ ID NO: 581711 - DNA, 25 bp, Homo sapien
gaaagcccagttccatgagcttagc

SEQ ID NO: 581712 - DNA, 25 bp, Homo sapien
aacaataggtaggacatatcccgga

SEQ ID NO: 581713 - DNA, 25 bp, Homo sapien
cagcacagcagttagctcttctctg

SEQ ID NO: 581714 - DNA, 25 bp, Homo sapien
atatcccggacatatggaggaaagc

SEQ ID NO: 581715 - DNA, 25 bp, Homo sapien
aagagtctggtgcagctccatgagc

SEQ ID NO: 581716 - DNA, 25 bp, Homo sapien
ggacgaaccttccaaggctatagaa

SEQ ID NO: 581717 - DNA, 25 bp, Homo sapien
caggcttgaacaggccaggacgaac

SEQ ID NO: 581718 - DNA, 25 bp, Homo sapien
cttcgaaggctgtggaatcaagcta

SEQ ID NO: 581719 - DNA, 25 bp, Homo sapien
tacactacatgggtacattctgcat

SEQ ID NO: 581720 - DNA, 25 bp, Homo sapien
tgcattagttccatgctaggcatag

SEQ ID NO: 581721 - DNA, 25 bp, Homo sapien
catgaatgtaggtgagacgaacgga

SEQ ID NO: 581722 - DNA, 25 bp, Homo sapien
gacgaacggagagatgtagctcaaa

SEQ ID NO: 581723 - DNA, 25 bp, Homo sapien
aatgatcttgctgagtccgaatgag

SEQ ID NO: 581724 - DNA, 25 bp, Homo sapien
aaattcaccccgatctttatgcctg

SEQ ID NO: 581725 - DNA, 25 bp, Homo sapien
caaatagttgtgatgggcgccttcc

SEQ ID NO: 581726 - DNA, 25 bp, Homo sapien
ttatgcctgtggtgagtgagcctca

SEQ ID NO: 581727 - DNA, 25 bp, Homo sapien
gtgtttccctgttgattatggtgtc

SEQ ID NO: 581728 - DNA, 25 bp, Homo sapien
tttccctgttgattatggtgtccat

SEQ ID NO: 581729 - DNA, 25 bp, Homo sapien
gtttccctgttgattatggtgtcca

SEQ ID NO: 581730 - DNA, 25 bp, Homo sapien
tgtttccctgttgattatggtgtcc

SEQ ID NO: 581731 - DNA, 25 bp, Homo sapien
tgtttatgtccttcaacccagcctc

SEQ ID NO: 581732 - DNA, 25 bp, Homo sapien
tctttacacttttgttaaggcctga

SEQ ID NO: 581733 - DNA, 25 bp, Homo sapien
cacttttgttaaggcctgaattcat

SEQ ID NO: 581734 - DNA, 25 bp, Homo sapien
ttatgtccttcaacccagcctcctg

SEQ ID NO: 581735 - DNA, 25 bp, Homo sapien
taggaagctagtctcgttcatcagc

SEQ ID NO: 581736 - DNA, 25 bp, Homo sapien
caaagccaattaatatgccaggttc

SEQ ID NO: 581737 - DNA, 25 bp, Homo sapien
cactgcctcatcaacatcatactgt

SEQ ID NO: 581738 - DNA, 25 bp, Homo sapien
tggaacatttgcatacagcagaact

SEQ ID NO: 581739 - DNA, 25 bp, Homo sapien
gggcctgataacatcctccctatct

SEQ ID NO: 581740 - DNA, 25 bp, Homo sapien
cttttgctaagtccacagtcacttc

SEQ ID NO: 581741 - DNA, 25 bp, Homo sapien
aggtcaaagggcctgataacatcct

SEQ ID NO: 581742 - DNA, 25 bp, Homo sapien
agcttttgctaagtccacagtcact

SEQ ID NO: 581743 - DNA, 25 bp, Homo sapien
tatcagcctcaaagggatagccagg

SEQ ID NO: 581744 - DNA, 25 bp, Homo sapien
gttggatttctggaaacacactgta

SEQ ID NO: 581745 - DNA, 25 bp, Homo sapien
tcctttatcagcctcaaagggatag

SEQ ID NO: 581746 - DNA, 25 bp, Homo sapien
aggttggatttctggaaacacactg

SEQ ID NO: 581747 - DNA, 25 bp, Homo sapien
ttttaagaagatgtgtcagaatggg

SEQ ID NO: 581748 - DNA, 25 bp, Homo sapien
atcagagggtaagggagcttaataa

SEQ ID NO: 581749 - DNA, 25 bp, Homo sapien
gggagggatatgttttcagactctt

SEQ ID NO: 581750 - DNA, 25 bp, Homo sapien
tcagactctttgacggtttttaaga

SEQ ID NO: 581751 - DNA, 25 bp, Homo sapien
aatggttcataagacctaccttgtg

SEQ ID NO: 581752 - DNA, 25 bp, Homo sapien
gacagaccagcgtttgagttttgca

SEQ ID NO: 581753 - DNA, 25 bp, Homo sapien
ctaagcctttaataagcggaggaat

SEQ ID NO: 581754 - DNA, 25 bp, Homo sapien
tgccctaccttaacataccatgaat

SEQ ID NO: 581755 - DNA, 25 bp, Homo sapien
tagcgccaacattaccttctctgag

SEQ ID NO: 581756 - DNA, 25 bp, Homo sapien
tgaacatgatgcttggtctaaagga

SEQ ID NO: 581757 - DNA, 25 bp, Homo sapien
tgaccaatgtggtaataatagcgcc

SEQ ID NO: 581758 - DNA, 25 bp, Homo sapien
tataagcatcatacaacctgttgga

SEQ ID NO: 581759 - DNA, 25 bp, Homo sapien
ttctaatggcatgggttatacggca

SEQ ID NO: 581760 - DNA, 25 bp, Homo sapien
cacctgtgggttctatggaggcatc

SEQ ID NO: 581761 - DNA, 25 bp, Homo sapien
tatgacgtacgagctgcagaaatgg

SEQ ID NO: 581762 - DNA, 25 bp, Homo sapien
ggaggctaggcacgttttcattaca

SEQ ID NO: 581763 - DNA, 25 bp, Homo sapien
aggagtcataaatggcaatctggtt

SEQ ID NO: 581764 - DNA, 25 bp, Homo sapien
aaggagtcataaatggcaatctggt

SEQ ID NO: 581765 - DNA, 25 bp, Homo sapien
tctggttcttcttaggcatcaacat

SEQ ID NO: 581766 - DNA, 25 bp, Homo sapien
caatctggttcttcttaggcatcaa

SEQ ID NO: 581767 - DNA, 25 bp, Homo sapien
ggcatgtggatgtccttggccacca

SEQ ID NO: 581768 - DNA, 25 bp, Homo sapien
tggcctttatgacaggaaggttgga

SEQ ID NO: 581769 - DNA, 25 bp, Homo sapien
tatgacaggaaggttggacacattc

SEQ ID NO: 581770 - DNA, 25 bp, Homo sapien
tccctggacggctacggcatagagt

SEQ ID NO: 581771 - DNA, 25 bp, Homo sapien
ggccgaccatgtccatgaccaaatt

SEQ ID NO: 581772 - DNA, 25 bp, Homo sapien
cgaccatgtccatgaccaaattcgc

SEQ ID NO: 581773 - DNA, 25 bp, Homo sapien
caaatttattgaggtggccgaccat

SEQ ID NO: 581774 - DNA, 25 bp, Homo sapien
ttgaggtggccgaccatgtccatga

SEQ ID NO: 581775 - DNA, 25 bp, Homo sapien
tctagtgaatcgtaagtgtgagggc

SEQ ID NO: 581776 - DNA, 25 bp, Homo sapien
gcttcctagatttaggaggctctcc

SEQ ID NO: 581777 - DNA, 25 bp, Homo sapien
tgtggattaaggtgctgcttcctag

SEQ ID NO: 581778 - DNA, 25 bp, Homo sapien
caggagcctccacgcaatagtgaca

SEQ ID NO: 581779 - DNA, 25 bp, Homo sapien
ccacacagttggttccagctagtgt

SEQ ID NO: 581780 - DNA, 25 bp, Homo sapien
cacacagttggttccagctagtgtt

SEQ ID NO: 581781 - DNA, 25 bp, Homo sapien
cattttggatctagaccgggtctta

SEQ ID NO: 581782 - DNA, 25 bp, Homo sapien
gctgtggacaacttgaggattcatt

SEQ ID NO: 581783 - DNA, 25 bp, Homo sapien
attcattttggatctagaccgggtc

SEQ ID NO: 581784 - DNA, 25 bp, Homo sapien
ggtcttagtgaagagctgtggacaa

SEQ ID NO: 581785 - DNA, 25 bp, Homo sapien
tgaagtgccaccaactatagcagaa

SEQ ID NO: 581786 - DNA, 25 bp, Homo sapien
ccaagctccgtcctgaacaaaggct

SEQ ID NO: 581787 - DNA, 25 bp, Homo sapien
tatcttagagaaagtgagcttggag

SEQ ID NO: 581788 - DNA, 25 bp, Homo sapien
cagagatgtctatgaacccgactta

SEQ ID NO: 581789 - DNA, 25 bp, Homo sapien
agtgcttagaatttcggatggtgat

SEQ ID NO: 581790 - DNA, 25 bp, Homo sapien
ggtacaaatatccagtgcttagaat

SEQ ID NO: 581791 - DNA, 25 bp, Homo sapien
ttagaatttcggatggtgataaagg

SEQ ID NO: 581792 - DNA, 25 bp, Homo sapien
tggtacaaatatccagtgcttagaa

SEQ ID NO: 581793 - DNA, 25 bp, Homo sapien
taaggaaggtatagtccgaacaaga

SEQ ID NO: 581794 - DNA, 25 bp, Homo sapien
aatcctgtggtccaagaatgccaca

SEQ ID NO: 581795 - DNA, 25 bp, Homo sapien
tcttcagggaaataatacttaagga

SEQ ID NO: 581796 - DNA, 25 bp, Homo sapien
tcaagtgcttccaatcctgtggtcc

SEQ ID NO: 581797 - DNA, 25 bp, Homo sapien
tgtcctacggtggttactactggct

SEQ ID NO: 581798 - DNA, 25 bp, Homo sapien
ggttgcacttaaacaattcttggtc

SEQ ID NO: 581799 - DNA, 25 bp, Homo sapien
ctcttgtctgtcctacggtggttac

SEQ ID NO: 581800 - DNA, 25 bp, Homo sapien
ccagcctggttgcacttaaacaatt

SEQ ID NO: 581801 - DNA, 25 bp, Homo sapien
ttcttgtgcaagatgactaacttac

SEQ ID NO: 581802 - DNA, 25 bp, Homo sapien
acttagcagtagtttttgttctctc

SEQ ID NO: 581803 - DNA, 25 bp, Homo sapien
tggacttagcagtagtttttgttct

SEQ ID NO: 581804 - DNA, 25 bp, Homo sapien
aaattttctcgccttcttgtgcaag

SEQ ID NO: 581805 - DNA, 25 bp, Homo sapien
agccagcttcaaatcatggtctcca

SEQ ID NO: 581806 - DNA, 25 bp, Homo sapien
ggtctccacttcttggtaatagatt

SEQ ID NO: 581807 - DNA, 25 bp, Homo sapien
tgcagccagcttcaaatcatggtct

SEQ ID NO: 581808 - DNA, 25 bp, Homo sapien
atggtctccacttcttggtaataga

SEQ ID NO: 581809 - DNA, 25 bp, Homo sapien
caaaatattagaggatccacggacc

SEQ ID NO: 581810 - DNA, 25 bp, Homo sapien
tagaaactcattgttgaggcaccag

SEQ ID NO: 581811 - DNA, 25 bp, Homo sapien
caatgaactctctcccctaaaaagg

SEQ ID NO: 581812 - DNA, 25 bp, Homo sapien
ttttgggcaaccattataccacagg

SEQ ID NO: 581813 - DNA, 25 bp, Homo sapien
gaaattattttgtcgttgttgtgtc

SEQ ID NO: 581814 - DNA, 25 bp, Homo sapien
cctggtttaatcttgcgggggcagt

SEQ ID NO: 581815 - DNA, 25 bp, Homo sapien
tgaaattattttgtcgttgttgtgt

SEQ ID NO: 581816 - DNA, 25 bp, Homo sapien
ttgcgggggcagtgtatgtgtccag

SEQ ID NO: 581817 - DNA, 25 bp, Homo sapien
gacctcaatgatggtggtgtgtcat

SEQ ID NO: 581818 - DNA, 25 bp, Homo sapien
aaacactttcactctccagaccttg

SEQ ID NO: 581819 - DNA, 25 bp, Homo sapien
gcattgcaagcacaccaaatggctt

SEQ ID NO: 581820 - DNA, 25 bp, Homo sapien
tccagaccttgtaacgccaagccat

SEQ ID NO: 581821 - DNA, 25 bp, Homo sapien
caagccatagctcatgatagcattg

SEQ ID NO: 581822 - DNA, 25 bp, Homo sapien
cagtgaattaatcaggatgctcggc

SEQ ID NO: 581823 - DNA, 25 bp, Homo sapien
cataacaaagccctgatggatgtgc

SEQ ID NO: 581824 - DNA, 25 bp, Homo sapien
aataaaacagggttgctgctcgccc

SEQ ID NO: 581825 - DNA, 25 bp, Homo sapien
cgtgaatacttcgactggagggtac

SEQ ID NO: 581826 - DNA, 25 bp, Homo sapien
cgctgtgaaaggagactaactactg

SEQ ID NO: 581827 - DNA, 25 bp, Homo sapien
tgtgaagtctatcagggtgcaaaac

SEQ ID NO: 581828 - DNA, 25 bp, Homo sapien
tacaacttcctacttaatgcggtcg

SEQ ID NO: 581829 - DNA, 25 bp, Homo sapien
tcccaaggatatcaatacagagttc

SEQ ID NO: 581830 - DNA, 25 bp, Homo sapien
cataaaatgtagaaccatcgtctgg

SEQ ID NO: 581831 - DNA, 25 bp, Homo sapien
gattagtctgactttcaatatgaac

SEQ ID NO: 581832 - DNA, 25 bp, Homo sapien
caactaacacaagatattccacaag

SEQ ID NO: 581833 - DNA, 25 bp, Homo sapien
acaaggcacccttaatccactcaga

SEQ ID NO: 581834 - DNA, 25 bp, Homo sapien
atatcattgtaactaggctgtcagg

SEQ ID NO: 581835 - DNA, 25 bp, Homo sapien
gaatttgacatagaacctgtcctca

SEQ ID NO: 581836 - DNA, 25 bp, Homo sapien
tgtgcctcaaaagagtgtcagaatg

SEQ ID NO: 581837 - DNA, 25 bp, Homo sapien
caaagaacttacaaactagcaggtt

SEQ ID NO: 581838 - DNA, 25 bp, Homo sapien
cttaccaagaaatgctaatcattct

SEQ ID NO: 581839 - DNA, 25 bp, Homo sapien
gatcaaagataacttcaattccttg

SEQ ID NO: 581840 - DNA, 25 bp, Homo sapien
gaagtgtgcctcatttgcatcacaa

SEQ ID NO: 581841 - DNA, 25 bp, Homo sapien
tgtgtgttgcattgtactgctctgc

SEQ ID NO: 581842 - DNA, 25 bp, Homo sapien
gatttttcggtggagtgattgaagt

SEQ ID NO: 581843 - DNA, 25 bp, Homo sapien
tggtagatttttcggtggagtgatt

SEQ ID NO: 581844 - DNA, 25 bp, Homo sapien
ctttggtagatttttcggtggagtg

SEQ ID NO: 581845 - DNA, 25 bp, Homo sapien
cggtggagtgattgaagtaatagat

SEQ ID NO: 581846 - DNA, 25 bp, Homo sapien
catcctacgttattttggccacaag

SEQ ID NO: 581847 - DNA, 25 bp, Homo sapien
gatctgtaacaatcctaacctgcag

SEQ ID NO: 581848 - DNA, 25 bp, Homo sapien
ggcctgtgccacctcaactgatttg

SEQ ID NO: 581849 - DNA, 25 bp, Homo sapien
tgtgaagctctgatattccctgaga

SEQ ID NO: 581850 - DNA, 25 bp, Homo sapien
ttaataagctgacctgtaaacaggg

SEQ ID NO: 581851 - DNA, 25 bp, Homo sapien
acttcatgccaacttaattaagggc

SEQ ID NO: 581852 - DNA, 25 bp, Homo sapien
ttcatcttagtatccctgtagctcc

SEQ ID NO: 581853 - DNA, 25 bp, Homo sapien
gatgctcttgaaaccgtcctcatat

SEQ ID NO: 581854 - DNA, 25 bp, Homo sapien
cctgttcagagttccactcagactc

SEQ ID NO: 581855 - DNA, 25 bp, Homo sapien
tcagactcctgcatcgggttaacca

SEQ ID NO: 581856 - DNA, 25 bp, Homo sapien
tgttcagagttccactcagactcct

SEQ ID NO: 581857 - DNA, 25 bp, Homo sapien
agactcctgcatcgggttaaccaca

SEQ ID NO: 581858 - DNA, 25 bp, Homo sapien
caatcaagtttgtaatctggatcca

SEQ ID NO: 581859 - DNA, 25 bp, Homo sapien
gcatcaactcaaagaatctcttctg

SEQ ID NO: 581860 - DNA, 25 bp, Homo sapien
gctgttcggagaaacaataacccga

SEQ ID NO: 581861 - DNA, 25 bp, Homo sapien
caaaatcataaggactatctgtttt

SEQ ID NO: 581862 - DNA, 25 bp, Homo sapien
caagaacgttaaatattggccctca

SEQ ID NO: 581863 - DNA, 25 bp, Homo sapien
tggtgacactgaattcccttagcat

SEQ ID NO: 581864 - DNA, 25 bp, Homo sapien
tcagccgagcggtccactgttagtc

SEQ ID NO: 581865 - DNA, 25 bp, Homo sapien
caattatgaagttgagtttggccat

SEQ ID NO: 581866 - DNA, 25 bp, Homo sapien
tggatctgaagcagcatgccagctc

SEQ ID NO: 581867 - DNA, 25 bp, Homo sapien
tgaagccatcacagtgtactcaggc

SEQ ID NO: 581868 - DNA, 25 bp, Homo sapien
ctttttcagtctgcagtgtagggca

SEQ ID NO: 581869 - DNA, 25 bp, Homo sapien
tctgggtcagtcatgtaaacgtggt

SEQ ID NO: 581870 - DNA, 25 bp, Homo sapien
tccatatcccttacctcttactggg

SEQ ID NO: 581871 - DNA, 25 bp, Homo sapien
tcaacagacctcgacaccatgaagc

SEQ ID NO: 581872 - DNA, 25 bp, Homo sapien
tccatcactggtcatatcttcttag

SEQ ID NO: 581873 - DNA, 25 bp, Homo sapien
ttctctggttcctgtccatatccct

SEQ ID NO: 581874 - DNA, 25 bp, Homo sapien
gaaaatcagtgtgcattagtcccaa

SEQ ID NO: 581875 - DNA, 25 bp, Homo sapien
tgtccctgatccacaaaagctgtac

SEQ ID NO: 581876 - DNA, 25 bp, Homo sapien
catagaagagcaataactcaggcca

SEQ ID NO: 581877 - DNA, 25 bp, Homo sapien
taaaagtagaggtaaaagccaggca

SEQ ID NO: 581878 - DNA, 25 bp, Homo sapien
tcttttgcacgccagtgggtgccat

SEQ ID NO: 581879 - DNA, 25 bp, Homo sapien
tgacttgacaaacgatatgaacccg

SEQ ID NO: 581880 - DNA, 25 bp, Homo sapien
tgttcagagtttagtatggcgtcca

SEQ ID NO: 581881 - DNA, 25 bp, Homo sapien
tctacactgacattggcatgcagcc

SEQ ID NO: 581882 - DNA, 25 bp, Homo sapien
atgtagacatccttcagagcatggc

SEQ ID NO: 581883 - DNA, 25 bp, Homo sapien
tcaacaaaatggacaccttctagtg

SEQ ID NO: 581884 - DNA, 25 bp, Homo sapien
gatgaggacttaggacctatgcttt

SEQ ID NO: 581885 - DNA, 25 bp, Homo sapien
taccatgtggcatcatgtgcatgct

SEQ ID NO: 581886 - DNA, 25 bp, Homo sapien
gcgtgagataccgcgcccagcaaac

SEQ ID NO: 581887 - DNA, 25 bp, Homo sapien
aatttctaagtgatggggtgacagg

SEQ ID NO: 581888 - DNA, 25 bp, Homo sapien
cgcgcccagcaaactcatgtaaatt

SEQ ID NO: 581889 - DNA, 25 bp, Homo sapien
caaactcatgtaaatttctaagtga

SEQ ID NO: 581890 - DNA, 25 bp, Homo sapien
tgatcttgtacttaggaaaacctta

SEQ ID NO: 581891 - DNA, 25 bp, Homo sapien
caaattagccttgttcaggtttagg

SEQ ID NO: 581892 - DNA, 25 bp, Homo sapien
taggatttcctatatacagacgaca

SEQ ID NO: 581893 - DNA, 25 bp, Homo sapien
tatataccagcagtgaataatctga

SEQ ID NO: 581894 - DNA, 25 bp, Homo sapien
ccaggagttcctagaaaacagcttt

SEQ ID NO: 581895 - DNA, 25 bp, Homo sapien
ttagcaaggaaggtacccaaatgta

SEQ ID NO: 581896 - DNA, 25 bp, Homo sapien
tactttgctatcacaggacagtcac

SEQ ID NO: 581897 - DNA, 25 bp, Homo sapien
taaaggctgcaaggtccaagaagat

SEQ ID NO: 581898 - DNA, 25 bp, Homo sapien
caactttatgggagacaggaacctt

SEQ ID NO: 581899 - DNA, 25 bp, Homo sapien
tgtcagatacatggtaggcagtaaa

SEQ ID NO: 581900 - DNA, 25 bp, Homo sapien
gaatgccttatgttcaagactcgct

SEQ ID NO: 581901 - DNA, 25 bp, Homo sapien
cacaactacacatctgatgggtcag

SEQ ID NO: 581902 - DNA, 25 bp, Homo sapien
taaaagcagcttttaccaggccaag

SEQ ID NO: 581903 - DNA, 25 bp, Homo sapien
ggatcatatgtcaaccaaccagtga

SEQ ID NO: 581904 - DNA, 25 bp, Homo sapien
ggttcctatctgctcaacaggtctg

SEQ ID NO: 581905 - DNA, 25 bp, Homo sapien
catggtcataggtagaggagtttca

SEQ ID NO: 581906 - DNA, 25 bp, Homo sapien
gaaggtaccctgcttccctgcgcct

SEQ ID NO: 581907 - DNA, 25 bp, Homo sapien
gtcgaaggtaccctgcttccctgcg

SEQ ID NO: 581908 - DNA, 25 bp, Homo sapien
aggtaccctgcttccctgcgccttc

SEQ ID NO: 581909 - DNA, 25 bp, Homo sapien
ctgtcgaaggtaccctgcttccctg

SEQ ID NO: 581910 - DNA, 25 bp, Homo sapien
ccacattaaccaaaatcgtccaatt

SEQ ID NO: 581911 - DNA, 25 bp, Homo sapien
gaaagtattcattaagatcttccac

SEQ ID NO: 581912 - DNA, 25 bp, Homo sapien
tgtatatagccttactcttagaaag

SEQ ID NO: 581913 - DNA, 25 bp, Homo sapien
cttgaattcaggcaagcaatgaact

SEQ ID NO: 581914 - DNA, 25 bp, Homo sapien
cctcaagtgaaatgccaggccagct

SEQ ID NO: 581915 - DNA, 25 bp, Homo sapien
tggaaatgtgaacagctggctcctc

SEQ ID NO: 581916 - DNA, 25 bp, Homo sapien
taagctgccggctacttgtaaaaac

SEQ ID NO: 581917 - DNA, 25 bp, Homo sapien
gaaatgaccagtgtaactgcctacc

SEQ ID NO: 581918 - DNA, 25 bp, Homo sapien
catagcaggctagcaaatctgcaac

SEQ ID NO: 581919 - DNA, 25 bp, Homo sapien
ggagttgagcccctgtcttcagaga

SEQ ID NO: 581920 - DNA, 25 bp, Homo sapien
tattcaagtcacatccttccaaagg

SEQ ID NO: 581921 - DNA, 25 bp, Homo sapien
caaagacctcaggtcctggtggagt

SEQ ID NO: 581922 - DNA, 25 bp, Homo sapien
acagctgcagtactaggagggttct

SEQ ID NO: 581923 - DNA, 25 bp, Homo sapien
cgacagctgcagtactaggagggtt

SEQ ID NO: 581924 - DNA, 25 bp, Homo sapien
agctgcagtactaggagggttctgg

SEQ ID NO: 581925 - DNA, 25 bp, Homo sapien
gacagctgcagtactaggagggttc

SEQ ID NO: 581926 - DNA, 25 bp, Homo sapien
gatgaacatcccacacaaagtgttg

SEQ ID NO: 581927 - DNA, 25 bp, Homo sapien
gtttctcaagaacctgcaccatgat

SEQ ID NO: 581928 - DNA, 25 bp, Homo sapien
tcttccttattctccccgatgaaca

SEQ ID NO: 581929 - DNA, 25 bp, Homo sapien
gcaccatgatcaggtcatctttgct

SEQ ID NO: 581930 - DNA, 25 bp, Homo sapien
cacaaatttccatgtcatccctgca

SEQ ID NO: 581931 - DNA, 25 bp, Homo sapien
tatatgtgttgccaaagcaagcact

SEQ ID NO: 581932 - DNA, 25 bp, Homo sapien
catgctaatattctctgtatcgttc

SEQ ID NO: 581933 - DNA, 25 bp, Homo sapien
ttccatgtcatccctgcacagggga

SEQ ID NO: 581934 - DNA, 25 bp, Homo sapien
tcagtgctaaaaggtgacatccagt

SEQ ID NO: 581935 - DNA, 25 bp, Homo sapien
tctctatcgaaatggccttgaagct

SEQ ID NO: 581936 - DNA, 25 bp, Homo sapien
ggacttgcctatcctgagcccaggt

SEQ ID NO: 581937 - DNA, 25 bp, Homo sapien
tcttcatgcatcatctgggaggccc

SEQ ID NO: 581938 - DNA, 25 bp, Homo sapien
gcagtatcagcctcatcggaaaagt

SEQ ID NO: 581939 - DNA, 25 bp, Homo sapien
gaaggatgagtctataagaggtagc

SEQ ID NO: 581940 - DNA, 25 bp, Homo sapien
tcagaaagtctgtggataggcctca

SEQ ID NO: 581941 - DNA, 25 bp, Homo sapien
ccaatgaattaataagtctcgtgca

SEQ ID NO: 581942 - DNA, 25 bp, Homo sapien
ttattcactgcctcttatatgtttc

SEQ ID NO: 581943 - DNA, 25 bp, Homo sapien
tgtgcttctgataaactaacttgag

SEQ ID NO: 581944 - DNA, 25 bp, Homo sapien
cattataatgattggtagagggtga

SEQ ID NO: 581945 - DNA, 25 bp, Homo sapien
cttcatacacttggcataactgtgg

SEQ ID NO: 581946 - DNA, 25 bp, Homo sapien
tgtcactttgacaggtgcatctgaa

SEQ ID NO: 581947 - DNA, 25 bp, Homo sapien
gcatctgaatttgcattatctggaa

SEQ ID NO: 581948 - DNA, 25 bp, Homo sapien
ttgcattatctggaatctctgccat

SEQ ID NO: 581949 - DNA, 25 bp, Homo sapien
acttttgcctgtaatcttctttttg

SEQ ID NO: 581950 - DNA, 25 bp, Homo sapien
gtgtggaactactgaaactgctggg

SEQ ID NO: 581951 - DNA, 25 bp, Homo sapien
catccaactagggaccatcacctgg

SEQ ID NO: 581952 - DNA, 25 bp, Homo sapien
tcatgagcacattgaacgtcacccc

SEQ ID NO: 581953 - DNA, 25 bp, Homo sapien
aggcctgacctcgtcctcatgagca

SEQ ID NO: 581954 - DNA, 25 bp, Homo sapien
gcaaactatggcacgctgagcttct

SEQ ID NO: 581955 - DNA, 25 bp, Homo sapien
tcctgcttctgttctatgcaaacta

SEQ ID NO: 581956 - DNA, 25 bp, Homo sapien
tgctaagacagggaccttcaagttc

SEQ ID NO: 581957 - DNA, 25 bp, Homo sapien
aagacagggaccttcaagttcatcc

SEQ ID NO: 581958 - DNA, 25 bp, Homo sapien
ctttaccttagactgcctgggagag

SEQ ID NO: 581959 - DNA, 25 bp, Homo sapien
tccattgagacagtccatacagatc

SEQ ID NO: 581960 - DNA, 25 bp, Homo sapien
agaaggcagagaagtccattgagac

SEQ ID NO: 581961 - DNA, 25 bp, Homo sapien
tctcctctttaccttagactgcctg

SEQ ID NO: 581962 - DNA, 25 bp, Homo sapien
caaaaacacagacgtgacacttgtt

SEQ ID NO: 581963 - DNA, 25 bp, Homo sapien
tactgggagtaattgtgtcacagac

SEQ ID NO: 581964 - DNA, 25 bp, Homo sapien
tggtaggaagatgttctcattgggt

SEQ ID NO: 581965 - DNA, 25 bp, Homo sapien
tgtcacagacagaaacagaccgtct

SEQ ID NO: 581966 - DNA, 25 bp, Homo sapien
agttctattcggattgccacgtaca

SEQ ID NO: 581967 - DNA, 25 bp, Homo sapien
tattcggattgccacgtacagacat

SEQ ID NO: 581968 - DNA, 25 bp, Homo sapien
ttggtcccaagttctattcggattg

SEQ ID NO: 581969 - DNA, 25 bp, Homo sapien
ccaagttctattcggattgccacgt

SEQ ID NO: 581970 - DNA, 25 bp, Homo sapien
ttatgaattacacaagatcagcatc

SEQ ID NO: 581971 - DNA, 25 bp, Homo sapien
ccaaagatcatcagtgcccctcctt

SEQ ID NO: 581972 - DNA, 25 bp, Homo sapien
agatgccgtctgacgttccactggg

SEQ ID NO: 581973 - DNA, 25 bp, Homo sapien
ttacacaagatcagcatctgagcag

SEQ ID NO: 581974 - DNA, 25 bp, Homo sapien
tatatattggccagtgaggtagttc

SEQ ID NO: 581975 - DNA, 25 bp, Homo sapien
gtttcatttccgtgtatggcctaag

SEQ ID NO: 581976 - DNA, 25 bp, Homo sapien
tatgcaaatctatgggtggcccctt

SEQ ID NO: 581977 - DNA, 25 bp, Homo sapien
tccatccaaccaactggctatcaag

SEQ ID NO: 581978 - DNA, 25 bp, Homo sapien
tgttgacggcaataaagcagttacg

SEQ ID NO: 581979 - DNA, 25 bp, Homo sapien
tataagccaggataattacagagtg

SEQ ID NO: 581980 - DNA, 25 bp, Homo sapien
tcctaggtcctgaacatacagcact

SEQ ID NO: 581981 - DNA, 25 bp, Homo sapien
tgtttttacgagcaccaatattggg

SEQ ID NO: 581982 - DNA, 25 bp, Homo sapien
cctaggatatttactttgggctgaa

SEQ ID NO: 581983 - DNA, 25 bp, Homo sapien
ctgagttgcagggataagatgagtc

SEQ ID NO: 581984 - DNA, 25 bp, Homo sapien
gctgaagaaatatcgctgctagaaa

SEQ ID NO: 581985 - DNA, 25 bp, Homo sapien
tgcaagtgacggtgaggaatgagaa

SEQ ID NO: 581986 - DNA, 25 bp, Homo sapien
cctttcagcttacctgccatggtat

SEQ ID NO: 581987 - DNA, 25 bp, Homo sapien
tttctgtgctaagggtttgaaccac

SEQ ID NO: 581988 - DNA, 25 bp, Homo sapien
tctccttgtaaacaatataagggct

SEQ ID NO: 581989 - DNA, 25 bp, Homo sapien
cagcatttactgttgcttctgtcag

SEQ ID NO: 581990 - DNA, 25 bp, Homo sapien
aatgtaattatagtagataatgaga

SEQ ID NO: 581991 - DNA, 25 bp, Homo sapien
atctcttctgggatgtatgactgaa

SEQ ID NO: 581992 - DNA, 25 bp, Homo sapien
cctctgaagagcaattgtaaaaagc

SEQ ID NO: 581993 - DNA, 25 bp, Homo sapien
ctctgaagagcaattgtaaaaagca

SEQ ID NO: 581994 - DNA, 25 bp, Homo sapien
tcggcaaacttttggcagcacagaa

SEQ ID NO: 581995 - DNA, 25 bp, Homo sapien
tcaagaggcccagggaaagtaagtg

SEQ ID NO: 581996 - DNA, 25 bp, Homo sapien
tccttggcataggatcctaggatcc

SEQ ID NO: 581997 - DNA, 25 bp, Homo sapien
ggcttttagctgaccatgtcggcaa

SEQ ID NO: 581998 - DNA, 25 bp, Homo sapien
attttctaaacgaatgcacgatcca

SEQ ID NO: 581999 - DNA, 25 bp, Homo sapien
tgcacgatccaatgatgctcgagag

SEQ ID NO: 582000 - DNA, 25 bp, Homo sapien
taaacgaatgcacgatccaatgatg

SEQ ID NO: 582001 - DNA, 25 bp, Homo sapien
gatccaatgatgctcgagaggtaat

SEQ ID NO: 582002 - DNA, 25 bp, Homo sapien
tcctagaaccctctgctgtttatcc

SEQ ID NO: 582003 - DNA, 25 bp, Homo sapien
ctgctgtttatcctctaaatgtccc

SEQ ID NO: 582004 - DNA, 25 bp, Homo sapien
tgtaaaacttgatctactgtggaac

SEQ ID NO: 582005 - DNA, 25 bp, Homo sapien
aacttgatctactgtggaacaacat

SEQ ID NO: 582006 - DNA, 25 bp, Homo sapien
agtaggagaatgaaggagtgacagc

SEQ ID NO: 582007 - DNA, 25 bp, Homo sapien
taggagaatgaaggagtgacagcgg

SEQ ID NO: 582008 - DNA, 25 bp, Homo sapien
aggagaatgaaggagtgacagcggg

SEQ ID NO: 582009 - DNA, 25 bp, Homo sapien
agagtaggagaatgaaggagtgaca

SEQ ID NO: 582010 - DNA, 25 bp, Homo sapien
cgctcctttgtacataaccaccaag

SEQ ID NO: 582011 - DNA, 25 bp, Homo sapien
tctggtgattctgccaatacctgat

SEQ ID NO: 582012 - DNA, 25 bp, Homo sapien
gaagcatggaaagattcagcaacca

SEQ ID NO: 582013 - DNA, 25 bp, Homo sapien
tactatagacaccaggttggagatt

SEQ ID NO: 582014 - DNA, 25 bp, Homo sapien
cttcttcacagttttccctctgctc

SEQ ID NO: 582015 - DNA, 25 bp, Homo sapien
ttcacagttttccctctgctcagtc

SEQ ID NO: 582016 - DNA, 25 bp, Homo sapien
tcttcacagttttccctctgctcag

SEQ ID NO: 582017 - DNA, 25 bp, Homo sapien
cttcacagttttccctctgctcagt

SEQ ID NO: 582018 - DNA, 25 bp, Homo sapien
caaaatgtggcaagtgcatccctgg

SEQ ID NO: 582019 - DNA, 25 bp, Homo sapien
catccctggtaaggcctgagcctgt

SEQ ID NO: 582020 - DNA, 25 bp, Homo sapien
aactggctctatgcgaccttcctga

SEQ ID NO: 582021 - DNA, 25 bp, Homo sapien
tgctctttggatacctgaggcccaa

SEQ ID NO: 582022 - DNA, 25 bp, Homo sapien
aggtgaggattttggatatgtctcc

SEQ ID NO: 582023 - DNA, 25 bp, Homo sapien
ccactagtgaggtgaggattttgga

SEQ ID NO: 582024 - DNA, 25 bp, Homo sapien
ctcttccaaacctgggcgtaacctg

SEQ ID NO: 582025 - DNA, 25 bp, Homo sapien
ggaaggtttctgcatccactagtga

SEQ ID NO: 582026 - DNA, 25 bp, Homo sapien
acttctcagtgtgaaagtttgtcgc

SEQ ID NO: 582027 - DNA, 25 bp, Homo sapien
tctcaaaataagatgagtgaggaaa

SEQ ID NO: 582028 - DNA, 25 bp, Homo sapien
tttgtcgctgtcacagtcagcttac

SEQ ID NO: 582029 - DNA, 25 bp, Homo sapien
cagtgtgaaagtttgtcgctgtcac

SEQ ID NO: 582030 - DNA, 25 bp, Homo sapien
ggagtaattgcctgcaaaaggaaca

SEQ ID NO: 582031 - DNA, 25 bp, Homo sapien
gcttacttctaagacaaccttcagg

SEQ ID NO: 582032 - DNA, 25 bp, Homo sapien
gccaattttgaagtatagcctacca

SEQ ID NO: 582033 - DNA, 25 bp, Homo sapien
catctggattggcacgggaagagcc

SEQ ID NO: 582034 - DNA, 25 bp, Homo sapien
cctcctaaagtaggcaatttcccag

SEQ ID NO: 582035 - DNA, 25 bp, Homo sapien
ctcctaaagtaggcaatttcccagg

SEQ ID NO: 582036 - DNA, 25 bp, Homo sapien
taatatggcccctggctattggccc

SEQ ID NO: 582037 - DNA, 25 bp, Homo sapien
tccttgtgggaaccattaatatggc

SEQ ID NO: 582038 - DNA, 25 bp, Homo sapien
tctttcacgagcttcagagatgatt

SEQ ID NO: 582039 - DNA, 25 bp, Homo sapien
aactgatcggatgttattttctttc

SEQ ID NO: 582040 - DNA, 25 bp, Homo sapien
ttatacacattatcccgactgatcc

SEQ ID NO: 582041 - DNA, 25 bp, Homo sapien
ttatatttgaagtaacattgtcaaa

SEQ ID NO: 582042 - DNA, 25 bp, Homo sapien
caacagccacatgagttggacaggt

SEQ ID NO: 582043 - DNA, 25 bp, Homo sapien
tgatccctataacaacagccacatg

SEQ ID NO: 582044 - DNA, 25 bp, Homo sapien
ataatgattttcctgagaatgttcc

SEQ ID NO: 582045 - DNA, 25 bp, Homo sapien
actgttgtagaaaccaataatgatt

SEQ ID NO: 582046 - DNA, 25 bp, Homo sapien
caagatgaaagcttgcattgcaaat

SEQ ID NO: 582047 - DNA, 25 bp, Homo sapien
aaatctctttactgtttctatacaa

SEQ ID NO: 582048 - DNA, 25 bp, Homo sapien
taataactgccgctcaggtcaggga

SEQ ID NO: 582049 - DNA, 25 bp, Homo sapien
ttcactgtaatatactctctttgac

SEQ ID NO: 582050 - DNA, 25 bp, Homo sapien
gggcgaatatgctgaccccatcaaa

SEQ ID NO: 582051 - DNA, 25 bp, Homo sapien
gagtcaaggggcgaatatgctgacc

SEQ ID NO: 582052 - DNA, 25 bp, Homo sapien
caagccaggctctggtgagcagctg

SEQ ID NO: 582053 - DNA, 25 bp, Homo sapien
gaccccatcaaagtgatgccatgat

SEQ ID NO: 582054 - DNA, 25 bp, Homo sapien
tacattgggattgcactaaagcctc

SEQ ID NO: 582055 - DNA, 25 bp, Homo sapien
tattctgtttgatatacaccaggag

SEQ ID NO: 582056 - DNA, 25 bp, Homo sapien
actatgatttgagtagatgagtcca

SEQ ID NO: 582057 - DNA, 25 bp, Homo sapien
aatataattctgtgttaggcaatgc

SEQ ID NO: 582058 - DNA, 25 bp, Homo sapien
gaaatgcaaatagaccccttgggca

SEQ ID NO: 582059 - DNA, 25 bp, Homo sapien
aattgtactgtttgggcttggcatc

SEQ ID NO: 582060 - DNA, 25 bp, Homo sapien
tactaacacgatgctcaaccagtgc

SEQ ID NO: 582061 - DNA, 25 bp, Homo sapien
gtctgaaggctagaaagcgcaaggc

SEQ ID NO: 582062 - DNA, 25 bp, Homo sapien
ggcagggaatgccactacatgaagg

SEQ ID NO: 582063 - DNA, 25 bp, Homo sapien
taccatgggaaagtgtagtcaagca

SEQ ID NO: 582064 - DNA, 25 bp, Homo sapien
ccagtggcctatatagtgagtacaa

SEQ ID NO: 582065 - DNA, 25 bp, Homo sapien
caacctggtgattatccagtggcct

SEQ ID NO: 582066 - DNA, 25 bp, Homo sapien
ttagtaatactgatgccaccttctt

SEQ ID NO: 582067 - DNA, 25 bp, Homo sapien
tccctttagtaatactgatgccacc

SEQ ID NO: 582068 - DNA, 25 bp, Homo sapien
gtcatttgtagctcctttatacaca

SEQ ID NO: 582069 - DNA, 25 bp, Homo sapien
ctggaattccctttagtaatactga

SEQ ID NO: 582070 - DNA, 25 bp, Homo sapien
tagtgctgtagcacccaagatgctg

SEQ ID NO: 582071 - DNA, 25 bp, Homo sapien
cactcattccaatcaacctcatgaa

SEQ ID NO: 582072 - DNA, 25 bp, Homo sapien
gctgtgttgttaatctactggctag

SEQ ID NO: 582073 - DNA, 25 bp, Homo sapien
caacctcatgaaataatggaagatg

SEQ ID NO: 582074 - DNA, 25 bp, Homo sapien
atagaaacatgactttcggacaaat

SEQ ID NO: 582075 - DNA, 25 bp, Homo sapien
tagaaacatgactttcggacaaata

SEQ ID NO: 582076 - DNA, 25 bp, Homo sapien
aaacatgactttcggacaaatattg

SEQ ID NO: 582077 - DNA, 25 bp, Homo sapien
cggacaaatattgacaagtctccat

SEQ ID NO: 582078 - DNA, 25 bp, Homo sapien
gaagtgtcggcatgttctctcaaca

SEQ ID NO: 582079 - DNA, 25 bp, Homo sapien
gacacgtctgttttatcccttgaag

SEQ ID NO: 582080 - DNA, 25 bp, Homo sapien
cacataattggagaaggagcaggtt

SEQ ID NO: 582081 - DNA, 25 bp, Homo sapien
gatttcacgcctgcagagtcttgac

SEQ ID NO: 582082 - DNA, 25 bp, Homo sapien
tgtgaaaaggagaacaggtctccat

SEQ ID NO: 582083 - DNA, 25 bp, Homo sapien
caaaatgttggaaccagcaaatgga

SEQ ID NO: 582084 - DNA, 25 bp, Homo sapien
tggccatgaatagtagcagccctct

SEQ ID NO: 582085 - DNA, 25 bp, Homo sapien
gaagacagctggattagtttcacca

SEQ ID NO: 582086 - DNA, 25 bp, Homo sapien
tgcctgttgagatgcagggaaatgc

SEQ ID NO: 582087 - DNA, 25 bp, Homo sapien
cataaatgcctgttgagatgcaggg

SEQ ID NO: 582088 - DNA, 25 bp, Homo sapien
taaatgcctgttgagatgcagggaa

SEQ ID NO: 582089 - DNA, 25 bp, Homo sapien
aatgcctgttgagatgcagggaaat

SEQ ID NO: 582090 - DNA, 25 bp, Homo sapien
gagctgccggtgatcactttcacag

SEQ ID NO: 582091 - DNA, 25 bp, Homo sapien
aacttgcggaagcttggagcccctg

SEQ ID NO: 582092 - DNA, 25 bp, Homo sapien
taattatatgcaagggctggcgttc

SEQ ID NO: 582093 - DNA, 25 bp, Homo sapien
cataaaccacgggatgtgcaccttc

SEQ ID NO: 582094 - DNA, 25 bp, Homo sapien
acttgctgggtaggctttggtgaac

SEQ ID NO: 582095 - DNA, 25 bp, Homo sapien
aagctacttatgtcacctctcaggg

SEQ ID NO: 582096 - DNA, 25 bp, Homo sapien
taacgatctggtgcataaagctcgg

SEQ ID NO: 582097 - DNA, 25 bp, Homo sapien
gggctacaagcttctctcgccatga

SEQ ID NO: 582098 - DNA, 25 bp, Homo sapien
tagctttctccataaacccaatatt

SEQ ID NO: 582099 - DNA, 25 bp, Homo sapien
ttagctttctccataaacccaatat

SEQ ID NO: 582100 - DNA, 25 bp, Homo sapien
tttagctttctccataaacccaata

SEQ ID NO: 582101 - DNA, 25 bp, Homo sapien
tcccaaccgtttagctttctccata

SEQ ID NO: 582102 - DNA, 25 bp, Homo sapien
gatgagccagtcttagattgcagat

SEQ ID NO: 582103 - DNA, 25 bp, Homo sapien
tgcagattggtcacgcagcaggaca

SEQ ID NO: 582104 - DNA, 25 bp, Homo sapien
ttatctgctaaccttgatgagccag

SEQ ID NO: 582105 - DNA, 25 bp, Homo sapien
aaatctctgtttgacatcagcactg

SEQ ID NO: 582106 - DNA, 25 bp, Homo sapien
attcttggcaagccattccttaatg

SEQ ID NO: 582107 - DNA, 25 bp, Homo sapien
tgactgcagcaggctcgttgggaaa

SEQ ID NO: 582108 - DNA, 25 bp, Homo sapien
tgattcttggcaagccattccttaa

SEQ ID NO: 582109 - DNA, 25 bp, Homo sapien
actgcagcaggctcgttgggaaagc

SEQ ID NO: 582110 - DNA, 25 bp, Homo sapien
gcttcagaaaatgcaaccttatcca

SEQ ID NO: 582111 - DNA, 25 bp, Homo sapien
cctcaagcagggctgattgacccat

SEQ ID NO: 582112 - DNA, 25 bp, Homo sapien
tgcaaccttatccactgaacccagg

SEQ ID NO: 582113 - DNA, 25 bp, Homo sapien
gacccatgaatggacagacacagtc

SEQ ID NO: 582114 - DNA, 25 bp, Homo sapien
caagtgttttgccagacctatttgg

SEQ ID NO: 582115 - DNA, 25 bp, Homo sapien
cacagtcttcggatgttttttccag

SEQ ID NO: 582116 - DNA, 25 bp, Homo sapien
cattgagccatgaaattggagaagc

SEQ ID NO: 582117 - DNA, 25 bp, Homo sapien
ccagagacccacagtcttcggatgt

SEQ ID NO: 582118 - DNA, 25 bp, Homo sapien
agttaatagtagatcccccaatatt

SEQ ID NO: 582119 - DNA, 25 bp, Homo sapien
ctattcaacacaagtttagttaata

SEQ ID NO: 582120 - DNA, 25 bp, Homo sapien
gatcccccaatattcttctattctc

SEQ ID NO: 582121 - DNA, 25 bp, Homo sapien
tattcaacacaagtttagttaatag

SEQ ID NO: 582122 - DNA, 25 bp, Homo sapien
tgctgtggaatcgagtctaaggcca

SEQ ID NO: 582123 - DNA, 25 bp, Homo sapien
ttgcctgaggcccttaacctggaat

SEQ ID NO: 582124 - DNA, 25 bp, Homo sapien
ggccagtatttcaggatccacgtgg

SEQ ID NO: 582125 - DNA, 25 bp, Homo sapien
tgtgaatctgaccaggttttagtaa

SEQ ID NO: 582126 - DNA, 25 bp, Homo sapien
caacagaggatatatgcgtgcatag

SEQ ID NO: 582127 - DNA, 25 bp, Homo sapien
gagtgcacacaacagaggatatatg

SEQ ID NO: 582128 - DNA, 25 bp, Homo sapien
tatgcgtgcatagctccttcctgtc

SEQ ID NO: 582129 - DNA, 25 bp, Homo sapien
tgtcactggccatcacttgccctgg

SEQ ID NO: 582130 - DNA, 25 bp, Homo sapien
tccagggcctgagtctatgagtgag

SEQ ID NO: 582131 - DNA, 25 bp, Homo sapien
gaacgagtcataacaaaaacgattg

SEQ ID NO: 582132 - DNA, 25 bp, Homo sapien
aaacgattgcactggactctcctag

SEQ ID NO: 582133 - DNA, 25 bp, Homo sapien
gagtgagtatttctccaatctagag

SEQ ID NO: 582134 - DNA, 25 bp, Homo sapien
tgggcataacccagtgcttggcgac

SEQ ID NO: 582135 - DNA, 25 bp, Homo sapien
ggaatgattgcaggctccggtctct

SEQ ID NO: 582136 - DNA, 25 bp, Homo sapien
ttctgaagatgtccaatccccaggg

SEQ ID NO: 582137 - DNA, 25 bp, Homo sapien
cagggcccttagaataatggaatcc

SEQ ID NO: 582138 - DNA, 25 bp, Homo sapien
atggaaacgatcataataaagctca

SEQ ID NO: 582139 - DNA, 25 bp, Homo sapien
aagagaagtatatcttaggatggaa

SEQ ID NO: 582140 - DNA, 25 bp, Homo sapien
tggaaacgatcataataaagctcag

SEQ ID NO: 582141 - DNA, 25 bp, Homo sapien
agtatatcttaggatggaaacgatc

SEQ ID NO: 582142 - DNA, 25 bp, Homo sapien
gaaaactccacttaagcattataaa

SEQ ID NO: 582143 - DNA, 25 bp, Homo sapien
aaagaaaactccacttaagcattat

SEQ ID NO: 582144 - DNA, 25 bp, Homo sapien
acaaagaaaactccacttaagcatt

SEQ ID NO: 582145 - DNA, 25 bp, Homo sapien
aaactccacttaagcattataaaca

SEQ ID NO: 582146 - DNA, 25 bp, Homo sapien
cagttcagaactcagagggcaaggg

SEQ ID NO: 582147 - DNA, 25 bp, Homo sapien
ctcagaggagggtagtcagttcaga

SEQ ID NO: 582148 - DNA, 25 bp, Homo sapien
ggtagtcagttcagaactcagaggg

SEQ ID NO: 582149 - DNA, 25 bp, Homo sapien
ggagggtagtcagttcagaactcag

SEQ ID NO: 582150 - DNA, 25 bp, Homo sapien
gactatccctggtgactaatcaaca

SEQ ID NO: 582151 - DNA, 25 bp, Homo sapien
cctggtgactaatcaacatgtgcaa

SEQ ID NO: 582152 - DNA, 25 bp, Homo sapien
aagtgaaagactatccctggtgact

SEQ ID NO: 582153 - DNA, 25 bp, Homo sapien
tcccaggcaaagtgaaagactatcc

SEQ ID NO: 582154 - DNA, 25 bp, Homo sapien
tatggcctctatgttgggagacagg

SEQ ID NO: 582155 - DNA, 25 bp, Homo sapien
tgccaggctggcactctactaagtg

SEQ ID NO: 582156 - DNA, 25 bp, Homo sapien
tccttcgtggaaaactgcaatagtt

SEQ ID NO: 582157 - DNA, 25 bp, Homo sapien
tcgtgatctagcatgggagccagag

SEQ ID NO: 582158 - DNA, 25 bp, Homo sapien
cattgagcaagaaatcttagattcc

SEQ ID NO: 582159 - DNA, 25 bp, Homo sapien
tatctgacatgtacattgtaggcac

SEQ ID NO: 582160 - DNA, 25 bp, Homo sapien
catctcaaattgtttagtgggtcct

SEQ ID NO: 582161 - DNA, 25 bp, Homo sapien
caccctctatttggtcattgagcaa

SEQ ID NO: 582162 - DNA, 25 bp, Homo sapien
atctgatgagcatctcaaactccac

SEQ ID NO: 582163 - DNA, 25 bp, Homo sapien
gatttgcactgaacaatgatgcttc

SEQ ID NO: 582164 - DNA, 25 bp, Homo sapien
caaactccacatgttcaacttgagc

SEQ ID NO: 582165 - DNA, 25 bp, Homo sapien
ctaacatttgaattcccctggaaga

SEQ ID NO: 582166 - DNA, 25 bp, Homo sapien
agtcagcttaagccccacatgctcc

SEQ ID NO: 582167 - DNA, 25 bp, Homo sapien
tgtcactgatttgaatctctctcat

SEQ ID NO: 582168 - DNA, 25 bp, Homo sapien
ctgtgtcctcctacagtcagcttaa

SEQ ID NO: 582169 - DNA, 25 bp, Homo sapien
acagtcagcttaagccccacatgct

SEQ ID NO: 582170 - DNA, 25 bp, Homo sapien
ggtagactcggaagagccatctgct

SEQ ID NO: 582171 - DNA, 25 bp, Homo sapien
gtgatctccaatatcaagtcctagg

SEQ ID NO: 582172 - DNA, 25 bp, Homo sapien
ttgacaagttgtgctgcgtaggacg

SEQ ID NO: 582173 - DNA, 25 bp, Homo sapien
gtggacaaggatgtcacgtgatctc

SEQ ID NO: 582174 - DNA, 25 bp, Homo sapien
tatgttcttgggattacaaccgatg

SEQ ID NO: 582175 - DNA, 25 bp, Homo sapien
ccctctgaggaatgcggcctggaaa

SEQ ID NO: 582176 - DNA, 25 bp, Homo sapien
gaattgtctacttccatcccagtca

SEQ ID NO: 582177 - DNA, 25 bp, Homo sapien
ccgatgatcaagaagttgcaaacca

SEQ ID NO: 582178 - DNA, 25 bp, Homo sapien
gatgtgctttgagtgtccatttcaa

SEQ ID NO: 582179 - DNA, 25 bp, Homo sapien
ctttgcattgatgtgctttgagtgt

SEQ ID NO: 582180 - DNA, 25 bp, Homo sapien
gcattgatgtgctttgagtgtccat

SEQ ID NO: 582181 - DNA, 25 bp, Homo sapien
ttcttttatgtgaatctgaattatt

SEQ ID NO: 582182 - DNA, 25 bp, Homo sapien
cagaatctcctttggaaaaggggat

SEQ ID NO: 582183 - DNA, 25 bp, Homo sapien
gaaacttcactagatcaacacagga

SEQ ID NO: 582184 - DNA, 25 bp, Homo sapien
ccacttatggcaggagacaaatcat

SEQ ID NO: 582185 - DNA, 25 bp, Homo sapien
cggtcctgctacatgctcagtggca

SEQ ID NO: 582186 - DNA, 25 bp, Homo sapien
tggcaccatgtccacttatggcagg

SEQ ID NO: 582187 - DNA, 25 bp, Homo sapien
gattacaggatgataaagagatctg

SEQ ID NO: 582188 - DNA, 25 bp, Homo sapien
agagatctgacaagtaaatgtgatg

SEQ ID NO: 582189 - DNA, 25 bp, Homo sapien
ctgtattaataaagatactctatta

SEQ ID NO: 582190 - DNA, 25 bp, Homo sapien
gatctgacaagtaaatgtgatgcat

SEQ ID NO: 582191 - DNA, 25 bp, Homo sapien
tgcactagcagagggcagaacccat

SEQ ID NO: 582192 - DNA, 25 bp, Homo sapien
tatgttttgcactagcagagggcag

SEQ ID NO: 582193 - DNA, 25 bp, Homo sapien
tttcagtgatatgttttgcactagc

SEQ ID NO: 582194 - DNA, 25 bp, Homo sapien
cagtgatatgttttgcactagcaga

SEQ ID NO: 582195 - DNA, 25 bp, Homo sapien
caaaagggttaggattccatcagaa

SEQ ID NO: 582196 - DNA, 25 bp, Homo sapien
gctgtaaaatcctcacgtagctgct

SEQ ID NO: 582197 - DNA, 25 bp, Homo sapien
tcacaaaagggttaggattccatca

SEQ ID NO: 582198 - DNA, 25 bp, Homo sapien
cacgtagctgctccaagatggacag

SEQ ID NO: 582199 - DNA, 25 bp, Homo sapien
tcacacactgttgatattaaactgg

SEQ ID NO: 582200 - DNA, 25 bp, Homo sapien
tgatattaaactggcgacatgagaa

SEQ ID NO: 582201 - DNA, 25 bp, Homo sapien
cactgttgatattaaactggcgaca

SEQ ID NO: 582202 - DNA, 25 bp, Homo sapien
taaactggcgacatgagaaaccatc

SEQ ID NO: 582203 - DNA, 25 bp, Homo sapien
ccttcaagttgttgccagagtatcc

SEQ ID NO: 582204 - DNA, 25 bp, Homo sapien
tgccagagtatcctgcaatacacta

SEQ ID NO: 582205 - DNA, 25 bp, Homo sapien
ggcagtcacattaaggccttcaagt

SEQ ID NO: 582206 - DNA, 25 bp, Homo sapien
gagtatcctgcaatacactacagaa

SEQ ID NO: 582207 - DNA, 25 bp, Homo sapien
gctaaatctggaggacgtaatgcta

SEQ ID NO: 582208 - DNA, 25 bp, Homo sapien
cacggttgcttactcagtgacccag

SEQ ID NO: 582209 - DNA, 25 bp, Homo sapien
tcatcgcagcagagcgtagaatggt

SEQ ID NO: 582210 - DNA, 25 bp, Homo sapien
taacactgtatgtcggcacggttgc

SEQ ID NO: 582211 - DNA, 25 bp, Homo sapien
atccaagtgtaactggagccagtcc

SEQ ID NO: 582212 - DNA, 25 bp, Homo sapien
ggccgggcatgtgacctaaattggt

SEQ ID NO: 582213 - DNA, 25 bp, Homo sapien
taaagctagggccaacatgtagtgg

SEQ ID NO: 582214 - DNA, 25 bp, Homo sapien
ccaatgcagtgttttgagtgctgaa

SEQ ID NO: 582215 - DNA, 25 bp, Homo sapien
ctggaagtcagatggagcacacgga

SEQ ID NO: 582216 - DNA, 25 bp, Homo sapien
attatctaggcacaatgctgcatgc

SEQ ID NO: 582217 - DNA, 25 bp, Homo sapien
gcacacggagagatcaaagggggta

SEQ ID NO: 582218 - DNA, 25 bp, Homo sapien
cctccagcacagatagtggtggctg

SEQ ID NO: 582219 - DNA, 25 bp, Homo sapien
tgatgggtatcagacaacgtatgcc

SEQ ID NO: 582220 - DNA, 25 bp, Homo sapien
cacggccggcctcaatttaaacact

SEQ ID NO: 582221 - DNA, 25 bp, Homo sapien
agttaaaattcaggacacccagtga

SEQ ID NO: 582222 - DNA, 25 bp, Homo sapien
cattgcagatattgatggctccagc

SEQ ID NO: 582223 - DNA, 25 bp, Homo sapien
atcctggtctgcatttcgatattct

SEQ ID NO: 582224 - DNA, 25 bp, Homo sapien
tcaaaagctcttccatcctggtctg

SEQ ID NO: 582225 - DNA, 25 bp, Homo sapien
tttcgatattctgatgacatgagca

SEQ ID NO: 582226 - DNA, 25 bp, Homo sapien
tctgcatttcgatattctgatgaca

SEQ ID NO: 582227 - DNA, 25 bp, Homo sapien
tctctgggtgccatctagaaatctc

SEQ ID NO: 582228 - DNA, 25 bp, Homo sapien
actggtctgggttcttgtgctgcta

SEQ ID NO: 582229 - DNA, 25 bp, Homo sapien
tgtgctgctagtatcgagtgccggc

SEQ ID NO: 582230 - DNA, 25 bp, Homo sapien
ggctcaatcacagatgatctctggg

SEQ ID NO: 582231 - DNA, 25 bp, Homo sapien
agcccatagcgtccccatatctgtg

SEQ ID NO: 582232 - DNA, 25 bp, Homo sapien
tagcataggtcctagctcatgtagg

SEQ ID NO: 582233 - DNA, 25 bp, Homo sapien
catatctgtgaatctagctcctagc

SEQ ID NO: 582234 - DNA, 25 bp, Homo sapien
tgtggttttactggacaagaagctt

SEQ ID NO: 582235 - DNA, 25 bp, Homo sapien
atgttgtttccaccgtaacaactca

SEQ ID NO: 582236 - DNA, 25 bp, Homo sapien
cagaaagcggctggagacattatat

SEQ ID NO: 582237 - DNA, 25 bp, Homo sapien
gtcattgtttgccactatttgtcag

SEQ ID NO: 582238 - DNA, 25 bp, Homo sapien
tatttgtcagaaagcggctggagac

SEQ ID NO: 582239 - DNA, 25 bp, Homo sapien
tggactaaggtgactcgcccaagag

SEQ ID NO: 582240 - DNA, 25 bp, Homo sapien
ggactaaggtgactcgcccaagagc

SEQ ID NO: 582241 - DNA, 25 bp, Homo sapien
actaaggtgactcgcccaagagcag

SEQ ID NO: 582242 - DNA, 25 bp, Homo sapien
aaggtgactcgcccaagagcagatg

SEQ ID NO: 582243 - DNA, 25 bp, Homo sapien
tggaatcgattttgtggtcccctct

SEQ ID NO: 582244 - DNA, 25 bp, Homo sapien
ctgtcccagtttggatcttccaact

SEQ ID NO: 582245 - DNA, 25 bp, Homo sapien
caactcagttggaggcttcacacca

SEQ ID NO: 582246 - DNA, 25 bp, Homo sapien
agttctgttggaatcgattttgtgg

SEQ ID NO: 582247 - DNA, 25 bp, Homo sapien
ccagagttttcctgcactacagtgg

SEQ ID NO: 582248 - DNA, 25 bp, Homo sapien
tgaagtcctagatctgtgcctggct

SEQ ID NO: 582249 - DNA, 25 bp, Homo sapien
tccatcagggccagagttttcctgc

SEQ ID NO: 582250 - DNA, 25 bp, Homo sapien
cagcagcttcttccgtaacatcttt

SEQ ID NO: 582251 - DNA, 25 bp, Homo sapien
ttttctctgcgcttccagggctctg

SEQ ID NO: 582252 - DNA, 25 bp, Homo sapien
cttttctctgcgcttccagggctct

SEQ ID NO: 582253 - DNA, 25 bp, Homo sapien
caagttagtgagtcgagtaaaggtg

SEQ ID NO: 582254 - DNA, 25 bp, Homo sapien
tgagtcaagttagtgagtcgagtaa

SEQ ID NO: 582255 - DNA, 25 bp, Homo sapien
gtcaagttagtgagtcgagtaaagg

SEQ ID NO: 582256 - DNA, 25 bp, Homo sapien
gctgagtcaagttagtgagtcgagt

SEQ ID NO: 582257 - DNA, 25 bp, Homo sapien
cagtgtggctttagtggagagttta

SEQ ID NO: 582258 - DNA, 25 bp, Homo sapien
gatggtgagtcaatcagtgtggctt

SEQ ID NO: 582259 - DNA, 25 bp, Homo sapien
ttatttggaagatggtgagtcaatc

SEQ ID NO: 582260 - DNA, 25 bp, Homo sapien
aatcagtgtggctttagtggagagt

SEQ ID NO: 582261 - DNA, 25 bp, Homo sapien
cctaacttattccatgaggcaggaa

SEQ ID NO: 582262 - DNA, 25 bp, Homo sapien
ggaacattactacagatctcacaga

SEQ ID NO: 582263 - DNA, 25 bp, Homo sapien
gaattatcctaatatcaaacccaga

SEQ ID NO: 582264 - DNA, 25 bp, Homo sapien
ccacatgggtttgctagtgaattct

SEQ ID NO: 582265 - DNA, 25 bp, Homo sapien
ctatgtagtaggaaatgcagatggc

SEQ ID NO: 582266 - DNA, 25 bp, Homo sapien
cataggcagtggcagaggttaccaa

SEQ ID NO: 582267 - DNA, 25 bp, Homo sapien
gcataacatagtaccagtggcgggc

SEQ ID NO: 582268 - DNA, 25 bp, Homo sapien
ccaagtgcctcttcatagacagggt

SEQ ID NO: 582269 - DNA, 25 bp, Homo sapien
tccaggctagaccagtgaatgacta

SEQ ID NO: 582270 - DNA, 25 bp, Homo sapien
ccatacagtaagagcattagcagct

SEQ ID NO: 582271 - DNA, 25 bp, Homo sapien
gaagagcccactcaactcacagaat

SEQ ID NO: 582272 - DNA, 25 bp, Homo sapien
gactagaagaaccacccagaagagc

SEQ ID NO: 582273 - DNA, 25 bp, Homo sapien
catctgccttgcgtcttagcaggaa

SEQ ID NO: 582274 - DNA, 25 bp, Homo sapien
gtccatctgccttgcgtcttagcag

SEQ ID NO: 582275 - DNA, 25 bp, Homo sapien
tgccttgcgtcttagcaggaagtat

SEQ ID NO: 582276 - DNA, 25 bp, Homo sapien
ccttgcgtcttagcaggaagtatag

SEQ ID NO: 582277 - DNA, 25 bp, Homo sapien
tttcccaaaagatcataagctcttt

SEQ ID NO: 582278 - DNA, 25 bp, Homo sapien
ccttgaacttggcagttcttggcat

SEQ ID NO: 582279 - DNA, 25 bp, Homo sapien
tcccaaaagatcataagctctttga

SEQ ID NO: 582280 - DNA, 25 bp, Homo sapien
tgaagagaagagttggtgccttgaa

SEQ ID NO: 582281 - DNA, 25 bp, Homo sapien
ttaattattgagggcctttgatatg

SEQ ID NO: 582282 - DNA, 25 bp, Homo sapien
taattattgagggcctttgatatgt

SEQ ID NO: 582283 - DNA, 25 bp, Homo sapien
caattggcctgtaaatgatcaagac

SEQ ID NO: 582284 - DNA, 25 bp, Homo sapien
gactgaattggattgggctgcccag

SEQ ID NO: 582285 - DNA, 25 bp, Homo sapien
tcagtggcttcacaattggcctgta

SEQ ID NO: 582286 - DNA, 25 bp, Homo sapien
tccagttgtcttaatgactgaattg

SEQ ID NO: 582287 - DNA, 25 bp, Homo sapien
gtgtgcatcctattccttgagtctg

SEQ ID NO: 582288 - DNA, 25 bp, Homo sapien
cctattccttgagtctgcaaagtct

SEQ ID NO: 582289 - DNA, 25 bp, Homo sapien
gcagctgtgtgcatcctattccttg

SEQ ID NO: 582290 - DNA, 25 bp, Homo sapien
gcagactctggaacatgccatcatt

SEQ ID NO: 582291 - DNA, 25 bp, Homo sapien
tgctctatttccaactgggttaccc

SEQ ID NO: 582292 - DNA, 25 bp, Homo sapien
caaagcagaaacacttagcgttgac

SEQ ID NO: 582293 - DNA, 25 bp, Homo sapien
tgtgactttgtatgctgtggatgcc

SEQ ID NO: 582294 - DNA, 25 bp, Homo sapien
tgtggatgcctcttcttgctctatt

SEQ ID NO: 582295 - DNA, 25 bp, Homo sapien
caacagtcaggtgtgttcacaaggt

SEQ ID NO: 582296 - DNA, 25 bp, Homo sapien
gcacctgatagttcagaggcagagt

SEQ ID NO: 582297 - DNA, 25 bp, Homo sapien
tgaggagtgactaggtcacaacagt

SEQ ID NO: 582298 - DNA, 25 bp, Homo sapien
acactggactggctttgctatccag

SEQ ID NO: 582299 - DNA, 25 bp, Homo sapien
actttccaactttcattccatggcc

SEQ ID NO: 582300 - DNA, 25 bp, Homo sapien
ggccaatctgattcacatctgcatc

SEQ ID NO: 582301 - DNA, 25 bp, Homo sapien
cagtcataaggggtttgttgccaca

SEQ ID NO: 582302 - DNA, 25 bp, Homo sapien
cataaggggtttgttgccacaaata

SEQ ID NO: 582303 - DNA, 25 bp, Homo sapien
cccaaagctatctttccaatataaa

SEQ ID NO: 582304 - DNA, 25 bp, Homo sapien
gaatttaaggatgtgtgcaatccag

SEQ ID NO: 582305 - DNA, 25 bp, Homo sapien
tcacaaagttaagttgcagtgatct

SEQ ID NO: 582306 - DNA, 25 bp, Homo sapien
ccagaaaaagctaattgatgcttaa

SEQ ID NO: 582307 - DNA, 25 bp, Homo sapien
ttgatactgcttagtcgtggaaaaa

SEQ ID NO: 582308 - DNA, 25 bp, Homo sapien
aaggcttgttatggcatattcttga

SEQ ID NO: 582309 - DNA, 25 bp, Homo sapien
atactgcttagtcgtggaaaaaccg

SEQ ID NO: 582310 - DNA, 25 bp, Homo sapien
ttacgtaaggcttgttatggcatat

SEQ ID NO: 582311 - DNA, 25 bp, Homo sapien
catggtgcccttggtacccttacac

SEQ ID NO: 582312 - DNA, 25 bp, Homo sapien
tcttctcactccgataaggtacggg

SEQ ID NO: 582313 - DNA, 25 bp, Homo sapien
gacagtgccaagaataggtctcttg

SEQ ID NO: 582314 - DNA, 25 bp, Homo sapien
cccttacacgaagaagacagtgcca

SEQ ID NO: 582315 - DNA, 25 bp, Homo sapien
tgacttttcttcaactcaataagaa

SEQ ID NO: 582316 - DNA, 25 bp, Homo sapien
ttgacttttcttcaactcaataaga

SEQ ID NO: 582317 - DNA, 25 bp, Homo sapien
tcgatgaacttttgttggtcccggc

SEQ ID NO: 582318 - DNA, 25 bp, Homo sapien
agacacagaaaatgatccgatccac

SEQ ID NO: 582319 - DNA, 25 bp, Homo sapien
tgtagattttgaagtcaacttctaa

SEQ ID NO: 582320 - DNA, 25 bp, Homo sapien
aagtcaacttctaagaagacacaga

SEQ ID NO: 582321 - DNA, 25 bp, Homo sapien
aagacacagaaaatgatccgatcca

SEQ ID NO: 582322 - DNA, 25 bp, Homo sapien
ttatcatggtccatggccaggattc

SEQ ID NO: 582323 - DNA, 25 bp, Homo sapien
agctgagtggcaagattatcatggt

SEQ ID NO: 582324 - DNA, 25 bp, Homo sapien
gattcctagattggctaggagacat

SEQ ID NO: 582325 - DNA, 25 bp, Homo sapien
tggccaggattcctagattggctag

SEQ ID NO: 582326 - DNA, 25 bp, Homo sapien
ttctttcatttcaacatcctcttct

SEQ ID NO: 582327 - DNA, 25 bp, Homo sapien
ctgaatcttctttcatttcaacatc

SEQ ID NO: 582328 - DNA, 25 bp, Homo sapien
aatcttctttcatttcaacatcctc

SEQ ID NO: 582329 - DNA, 25 bp, Homo sapien
tcttctttcatttcaacatcctctt

SEQ ID NO: 582330 - DNA, 25 bp, Homo sapien
tcagcactcaggtataggaaattgg

SEQ ID NO: 582331 - DNA, 25 bp, Homo sapien
ggtgaggccagctggaaccattcag

SEQ ID NO: 582332 - DNA, 25 bp, Homo sapien
gatttcagcactcaggtataggaaa

SEQ ID NO: 582333 - DNA, 25 bp, Homo sapien
tctggtgaggccagctggaaccatt

SEQ ID NO: 582334 - DNA, 25 bp, Homo sapien
tcgctagagtctttcgaacattctg

SEQ ID NO: 582335 - DNA, 25 bp, Homo sapien
gagtctttcgaacattctggcttct

SEQ ID NO: 582336 - DNA, 25 bp, Homo sapien
gctagagtctttcgaacattctggc

SEQ ID NO: 582337 - DNA, 25 bp, Homo sapien
cctcgctagagtctttcgaacattc

SEQ ID NO: 582338 - DNA, 25 bp, Homo sapien
gacaccatcagtattattacactct

SEQ ID NO: 582339 - DNA, 25 bp, Homo sapien
atcttggcatcttcttccctcaaga

SEQ ID NO: 582340 - DNA, 25 bp, Homo sapien
gcatcttcttccctcaagacccaac

SEQ ID NO: 582341 - DNA, 25 bp, Homo sapien
aagacccaacctgacaccatcagta

SEQ ID NO: 582342 - DNA, 25 bp, Homo sapien
gtgagggtgggaagtgggccaggga

SEQ ID NO: 582343 - DNA, 25 bp, Homo sapien
tgagggtgggaagtgggccagggaa

SEQ ID NO: 582344 - DNA, 25 bp, Homo sapien
ctgtgagggtgggaagtgggccagg

SEQ ID NO: 582345 - DNA, 25 bp, Homo sapien
tgtgagggtgggaagtgggccaggg

SEQ ID NO: 582346 - DNA, 25 bp, Homo sapien
cagttaaaaggtggaaatcagtagt

SEQ ID NO: 582347 - DNA, 25 bp, Homo sapien
ctagggtcataaatatagtgggaga

SEQ ID NO: 582348 - DNA, 25 bp, Homo sapien
gggcccatgctagggtcataaatat

SEQ ID NO: 582349 - DNA, 25 bp, Homo sapien
gaagctgatggatgcagattcaaga

SEQ ID NO: 582350 - DNA, 25 bp, Homo sapien
ttgaatgagccacacgtgtgaggca

SEQ ID NO: 582351 - DNA, 25 bp, Homo sapien
aaagagagcttcatagacaactcca

SEQ ID NO: 582352 - DNA, 25 bp, Homo sapien
caactccagaattgtgtttaatcta

SEQ ID NO: 582353 - DNA, 25 bp, Homo sapien
cacttttgaatctagtggtcctacg

SEQ ID NO: 582354 - DNA, 25 bp, Homo sapien
tacgtcctcatctaccatcaaaact

SEQ ID NO: 582355 - DNA, 25 bp, Homo sapien
gaactagaatagaaggcataccgtc

SEQ ID NO: 582356 - DNA, 25 bp, Homo sapien
cagagttgccatgtgtcctagacct

SEQ ID NO: 582357 - DNA, 25 bp, Homo sapien
tcctagacctagtcagggcagtaca

SEQ ID NO: 582358 - DNA, 25 bp, Homo sapien
tataccagggttgatgagagagcag

SEQ ID NO: 582359 - DNA, 25 bp, Homo sapien
tgttaagataacctccaactgcctc

SEQ ID NO: 582360 - DNA, 25 bp, Homo sapien
tagtgtaggaattggcttgatcctc

SEQ ID NO: 582361 - DNA, 25 bp, Homo sapien
gaactcattgcggagtgattaccct

SEQ ID NO: 582362 - DNA, 25 bp, Homo sapien
tcttgtccaccaaagtcattacttt

SEQ ID NO: 582363 - DNA, 25 bp, Homo sapien
tatgtcataaataagaatatagcct

SEQ ID NO: 582364 - DNA, 25 bp, Homo sapien
tatagcctattgtgggccctcggga

SEQ ID NO: 582365 - DNA, 25 bp, Homo sapien
cgttgtacattttgactgatggtct

SEQ ID NO: 582366 - DNA, 25 bp, Homo sapien
ttttcctttcgtgatcttgtctgcg

SEQ ID NO: 582367 - DNA, 25 bp, Homo sapien
aaaccacagaggaaaaaaaatgcat

SEQ ID NO: 582368 - DNA, 25 bp, Homo sapien
actttgcttctcctctggaccgttc

SEQ ID NO: 582369 - DNA, 25 bp, Homo sapien
atttcttccacactttgcttctcct

SEQ ID NO: 582370 - DNA, 25 bp, Homo sapien
tgcttctcctctggaccgttctcat

SEQ ID NO: 582371 - DNA, 25 bp, Homo sapien
tttgcttctcctctggaccgttctc

SEQ ID NO: 582372 - DNA, 25 bp, Homo sapien
tgaggcctaggtgacttctcaaaag

SEQ ID NO: 582373 - DNA, 25 bp, Homo sapien
atgaggcctaggtgacttctcaaaa

SEQ ID NO: 582374 - DNA, 25 bp, Homo sapien
agatgaggcctaggtgacttctcaa

SEQ ID NO: 582375 - DNA, 25 bp, Homo sapien
gatgaggcctaggtgacttctcaaa

SEQ ID NO: 582376 - DNA, 25 bp, Homo sapien
ttcatctttacagtcttcaactgcc

SEQ ID NO: 582377 - DNA, 25 bp, Homo sapien
cttcatctttacagtcttcaactgc

SEQ ID NO: 582378 - DNA, 25 bp, Homo sapien
ggcacagtgacagtgttgacaccat

SEQ ID NO: 582379 - DNA, 25 bp, Homo sapien
cattgggaacaggtgtcatcagtgt

SEQ ID NO: 582380 - DNA, 25 bp, Homo sapien
tgtcatcagtgtgtagctcacaatc

SEQ ID NO: 582381 - DNA, 25 bp, Homo sapien
acaggtgtcatcagtgtgtagctca

SEQ ID NO: 582382 - DNA, 25 bp, Homo sapien
tgtgtagctcacaatctagctcttg

SEQ ID NO: 582383 - DNA, 25 bp, Homo sapien
cttgttggctcagaacttgggtttt

SEQ ID NO: 582384 - DNA, 25 bp, Homo sapien
cacttcaccgccttttgtaatattt

SEQ ID NO: 582385 - DNA, 25 bp, Homo sapien
gatgatcttggtcacgcacagaatg

SEQ ID NO: 582386 - DNA, 25 bp, Homo sapien
tggtcacgcacagaatgatctgtca

SEQ ID NO: 582387 - DNA, 25 bp, Homo sapien
tgatctgtcacttcaccgccttttg

SEQ ID NO: 582388 - DNA, 25 bp, Homo sapien
tatagtatctaatctgccactgttc

SEQ ID NO: 582389 - DNA, 25 bp, Homo sapien
tcatagaacttcttgcatatgtggg

SEQ ID NO: 582390 - DNA, 25 bp, Homo sapien
tgtctcgaattaacatggtcagtcc

SEQ ID NO: 582391 - DNA, 25 bp, Homo sapien
tgcatcatttatgggttgagttcca

SEQ ID NO: 582392 - DNA, 25 bp, Homo sapien
gctaatcctgctacgtttcttggtt

SEQ ID NO: 582393 - DNA, 25 bp, Homo sapien
cctgccctgtggagcatcctgcggg

SEQ ID NO: 582394 - DNA, 25 bp, Homo sapien
tgtctgcggctaatcctgctacgtt

SEQ ID NO: 582395 - DNA, 25 bp, Homo sapien
gaaacgaggtaactgatggacagcc

SEQ ID NO: 582396 - DNA, 25 bp, Homo sapien
tactcggtacctgttttgagagaaa

SEQ ID NO: 582397 - DNA, 25 bp, Homo sapien
agagaccctcccgtatcgctttata

SEQ ID NO: 582398 - DNA, 25 bp, Homo sapien
gaccctcccgtatcgctttatattg

SEQ ID NO: 582399 - DNA, 25 bp, Homo sapien
agaagactattgtgaaactctctgc

SEQ ID NO: 582400 - DNA, 25 bp, Homo sapien
tgaatgcacaggatatggatagagg

SEQ ID NO: 582401 - DNA, 25 bp, Homo sapien
tttctgggctgtatgggttaactac

SEQ ID NO: 582402 - DNA, 25 bp, Homo sapien
ggctgtatgggttaactacatttaa

SEQ ID NO: 582403 - DNA, 25 bp, Homo sapien
caggatatggatagaggacacaacc

SEQ ID NO: 582404 - DNA, 25 bp, Homo sapien
gagctctgcgattctgtttcaattt

SEQ ID NO: 582405 - DNA, 25 bp, Homo sapien
tatttcattcttcgttgaatcattc

SEQ ID NO: 582406 - DNA, 25 bp, Homo sapien
cattcttcgttgaatcattctcttg

SEQ ID NO: 582407 - DNA, 25 bp, Homo sapien
tatgagctctgcgattctgtttcaa

SEQ ID NO: 582408 - DNA, 25 bp, Homo sapien
ttctggttgctccacaatcacggca

SEQ ID NO: 582409 - DNA, 25 bp, Homo sapien
ggaatcacttctggttgctccacaa

SEQ ID NO: 582410 - DNA, 25 bp, Homo sapien
cctctgttaatggaatcacttctgg

SEQ ID NO: 582411 - DNA, 25 bp, Homo sapien
tcttggtcctctgttaatggaatca

SEQ ID NO: 582412 - DNA, 25 bp, Homo sapien
tgggttaatttaagagcagtcctac

SEQ ID NO: 582413 - DNA, 25 bp, Homo sapien
ttacaaactgtaattgcatgagaat

SEQ ID NO: 582414 - DNA, 25 bp, Homo sapien
tctaggcaggaatccaaagaaactc

SEQ ID NO: 582415 - DNA, 25 bp, Homo sapien
taactttgatggttgaattctaggc

SEQ ID NO: 582416 - DNA, 25 bp, Homo sapien
gtcaaaagaggaaaacgtacagctg

SEQ ID NO: 582417 - DNA, 25 bp, Homo sapien
gaaaacgtacagctgtttgattttc

SEQ ID NO: 582418 - DNA, 25 bp, Homo sapien
caaaagaggaaaacgtacagctgtt

SEQ ID NO: 582419 - DNA, 25 bp, Homo sapien
aagaggaaaacgtacagctgtttga

SEQ ID NO: 582420 - DNA, 25 bp, Homo sapien
cttaatgttgcaacatctgtgccca

SEQ ID NO: 582421 - DNA, 25 bp, Homo sapien
tctgtgcccatatacctgggagcca

SEQ ID NO: 582422 - DNA, 25 bp, Homo sapien
gagccatagaagatgtatcctgaag

SEQ ID NO: 582423 - DNA, 25 bp, Homo sapien
aacttcaaaacttaatgttgcaaca

SEQ ID NO: 582424 - DNA, 25 bp, Homo sapien
tttcttccctaagttagcaggttca

SEQ ID NO: 582425 - DNA, 25 bp, Homo sapien
tcttccctaagttagcaggttcatt

SEQ ID NO: 582426 - DNA, 25 bp, Homo sapien
gatccacctccattcgtgttttctt

SEQ ID NO: 582427 - DNA, 25 bp, Homo sapien
aaggcagtgggtgcacatcgatcca

SEQ ID NO: 582428 - DNA, 25 bp, Homo sapien
tggctccgagaatctcttcatgttc

SEQ ID NO: 582429 - DNA, 25 bp, Homo sapien
cgtctcagcatcattaggcctggct

SEQ ID NO: 582430 - DNA, 25 bp, Homo sapien
gcatcattaggcctggctccgagaa

SEQ ID NO: 582431 - DNA, 25 bp, Homo sapien
atggtgctgactggtgggtctgcct

SEQ ID NO: 582432 - DNA, 25 bp, Homo sapien
gcagtaataggatgccattacttac

SEQ ID NO: 582433 - DNA, 25 bp, Homo sapien
tctggcagtaataggatgccattac

SEQ ID NO: 582434 - DNA, 25 bp, Homo sapien
taataggatgccattacttacagct

SEQ ID NO: 582435 - DNA, 25 bp, Homo sapien
aaccttctggcagtaataggatgcc

SEQ ID NO: 582436 - DNA, 25 bp, Homo sapien
cttggctgcaatgaagatgcagtac

SEQ ID NO: 582437 - DNA, 25 bp, Homo sapien
ggtgaagttcttggctgcaatgaag

SEQ ID NO: 582438 - DNA, 25 bp, Homo sapien
ttgtacgtggctgcatgcttttagt

SEQ ID NO: 582439 - DNA, 25 bp, Homo sapien
tacgtggctgcatgcttttagtcag

SEQ ID NO: 582440 - DNA, 25 bp, Homo sapien
tccaggtattcaaaaggacaatcat

SEQ ID NO: 582441 - DNA, 25 bp, Homo sapien
ttccaggtattcaaaaggacaatca

SEQ ID NO: 582442 - DNA, 25 bp, Homo sapien
gatttcctttgtgactggcctctat

SEQ ID NO: 582443 - DNA, 25 bp, Homo sapien
ggcctctatttgcacagcttcacaa

SEQ ID NO: 582444 - DNA, 25 bp, Homo sapien
tgatgctgccatttcggattgctga

SEQ ID NO: 582445 - DNA, 25 bp, Homo sapien
ttcacaaggtgcttcgataagatgc

SEQ ID NO: 582446 - DNA, 25 bp, Homo sapien
cctggagtattttctaggtcactgg

SEQ ID NO: 582447 - DNA, 25 bp, Homo sapien
ctggagtattttctaggtcactgga

SEQ ID NO: 582448 - DNA, 25 bp, Homo sapien
gagtattttctaggtcactggagcc

SEQ ID NO: 582449 - DNA, 25 bp, Homo sapien
ggagtattttctaggtcactggagc

SEQ ID NO: 582450 - DNA, 25 bp, Homo sapien
ttgtcaacctgactattcatttcaa

SEQ ID NO: 582451 - DNA, 25 bp, Homo sapien
cttgtcaacctgactattcatttca

SEQ ID NO: 582452 - DNA, 25 bp, Homo sapien
gttgactctctgttgggtcatttac

SEQ ID NO: 582453 - DNA, 25 bp, Homo sapien
gttgatcttcttgttgactctctgt

SEQ ID NO: 582454 - DNA, 25 bp, Homo sapien
gatcttcttgttgactctctgttgg

SEQ ID NO: 582455 - DNA, 25 bp, Homo sapien
tcttgttgactctctgttgggtcat

SEQ ID NO: 582456 - DNA, 25 bp, Homo sapien
tgttccttcgcttcatcttgtgccc

SEQ ID NO: 582457 - DNA, 25 bp, Homo sapien
tttctttgttccttcgcttcatctt

SEQ ID NO: 582458 - DNA, 25 bp, Homo sapien
tctttgttccttcgcttcatcttgt

SEQ ID NO: 582459 - DNA, 25 bp, Homo sapien
catttagttccatttctttgttcct

SEQ ID NO: 582460 - DNA, 25 bp, Homo sapien
aggagaggccttgcgatgctgagga

SEQ ID NO: 582461 - DNA, 25 bp, Homo sapien
gtgtgctgctatcttcccgagctcc

SEQ ID NO: 582462 - DNA, 25 bp, Homo sapien
acagcgtgtgctgctatcttcccga

SEQ ID NO: 582463 - DNA, 25 bp, Homo sapien
tcctccacagcgtgtgctgctatct

SEQ ID NO: 582464 - DNA, 25 bp, Homo sapien
tccttccatgggacttgccttcccc

SEQ ID NO: 582465 - DNA, 25 bp, Homo sapien
tccccgtccttccatgggacttgcc

SEQ ID NO: 582466 - DNA, 25 bp, Homo sapien
ccgtccttccatgggacttgccttc

SEQ ID NO: 582467 - DNA, 25 bp, Homo sapien
gtccttccatgggacttgccttccc

SEQ ID NO: 582468 - DNA, 25 bp, Homo sapien
aacaaattgtgccttgggaaccctg

SEQ ID NO: 582469 - DNA, 25 bp, Homo sapien
tgaagacctcatgaaccaagtaagc

SEQ ID NO: 582470 - DNA, 25 bp, Homo sapien
tgtaacacctagcaaagggccatcc

SEQ ID NO: 582471 - DNA, 25 bp, Homo sapien
gaaagatgcgtcaacatgggtccct

SEQ ID NO: 582472 - DNA, 25 bp, Homo sapien
aaaacgagcttctagcagattgcac

SEQ ID NO: 582473 - DNA, 25 bp, Homo sapien
tttgggagtcacaagaaaaacgagc

SEQ ID NO: 582474 - DNA, 25 bp, Homo sapien
tctgaaaagcaacaacatctaacgg

SEQ ID NO: 582475 - DNA, 25 bp, Homo sapien
taagtagcactaacatttgggagtc

SEQ ID NO: 582476 - DNA, 25 bp, Homo sapien
tagaactattatggtgaaggcctac

SEQ ID NO: 582477 - DNA, 25 bp, Homo sapien
taaacaaattcaggagtcgggctga

SEQ ID NO: 582478 - DNA, 25 bp, Homo sapien
tatgtgcgggaaaatcaatcagctt

SEQ ID NO: 582479 - DNA, 25 bp, Homo sapien
ttgtacagcctgtgcaatggcagca

SEQ ID NO: 582480 - DNA, 25 bp, Homo sapien
tctgaatagttaccagctagaggaa

SEQ ID NO: 582481 - DNA, 25 bp, Homo sapien
cacagacagtgattcggatgccttc

SEQ ID NO: 582482 - DNA, 25 bp, Homo sapien
ttttcaaatcaagtgcatcaagcag

SEQ ID NO: 582483 - DNA, 25 bp, Homo sapien
tttcaaagcaaagccgacatgcgcc

SEQ ID NO: 582484 - DNA, 25 bp, Homo sapien
ttatgatgctttctgttcaccaaaa

SEQ ID NO: 582485 - DNA, 25 bp, Homo sapien
tatgatgctttctgttcaccaaaaa

SEQ ID NO: 582486 - DNA, 25 bp, Homo sapien
cactgtcaagctcaactttagcaat

SEQ ID NO: 582487 - DNA, 25 bp, Homo sapien
actttagcaatgttgtgtctctgta

SEQ ID NO: 582488 - DNA, 25 bp, Homo sapien
tgaccctctgacactgtcaagctca

SEQ ID NO: 582489 - DNA, 25 bp, Homo sapien
tgtcaagctcaactttagcaatgtt

SEQ ID NO: 582490 - DNA, 25 bp, Homo sapien
ctttgcaggggccatgtcaggcatc

SEQ ID NO: 582491 - DNA, 25 bp, Homo sapien
cataatagcccaaacaatgatgcgg

SEQ ID NO: 582492 - DNA, 25 bp, Homo sapien
taatagcccaaacaatgatgcggca

SEQ ID NO: 582493 - DNA, 25 bp, Homo sapien
caggggccatgtcaggcatcacagc

SEQ ID NO: 582494 - DNA, 25 bp, Homo sapien
gaaaccagttcttcacgggagcaca

SEQ ID NO: 582495 - DNA, 25 bp, Homo sapien
catgctgctggcaattccgtgctag

SEQ ID NO: 582496 - DNA, 25 bp, Homo sapien
aacggaggccactatctgctgctgg

SEQ ID NO: 582497 - DNA, 25 bp, Homo sapien
tgctagagcattgccaacggaggcc

SEQ ID NO: 582498 - DNA, 25 bp, Homo sapien
cataagatgctcgtcttccctctga

SEQ ID NO: 582499 - DNA, 25 bp, Homo sapien
aatagcctcattgggtgcgagtgtg

SEQ ID NO: 582500 - DNA, 25 bp, Homo sapien
gtgtggagggcccagacatgaagtt

SEQ ID NO: 582501 - DNA, 25 bp, Homo sapien
tctgccaatagcctcattgggtgcg

SEQ ID NO: 582502 - DNA, 25 bp, Homo sapien
agctggagtccttatctgccctgga

SEQ ID NO: 582503 - DNA, 25 bp, Homo sapien
gagtccttatctgccctggaccatt

SEQ ID NO: 582504 - DNA, 25 bp, Homo sapien
tggagtccttatctgccctggacca

SEQ ID NO: 582505 - DNA, 25 bp, Homo sapien
gctggagtccttatctgccctggac

SEQ ID NO: 582506 - DNA, 25 bp, Homo sapien
aggaagaacgttctcttggaaggag

SEQ ID NO: 582507 - DNA, 25 bp, Homo sapien
cttttcattgttttcgctgttgggc

SEQ ID NO: 582508 - DNA, 25 bp, Homo sapien
tccctagccattgaggaagaacgtt

SEQ ID NO: 582509 - DNA, 25 bp, Homo sapien
gttgggcttccctagccattgagga

SEQ ID NO: 582510 - DNA, 25 bp, Homo sapien
gccatgcgactttttagactcttgt

SEQ ID NO: 582511 - DNA, 25 bp, Homo sapien
agcaaacttgttctgcttctcgccc

SEQ ID NO: 582512 - DNA, 25 bp, Homo sapien
ttttccacagatccagccatgcgac

SEQ ID NO: 582513 - DNA, 25 bp, Homo sapien
agtacaatgaattagggcagcaaac

SEQ ID NO: 582514 - DNA, 25 bp, Homo sapien
catcctgactcttgggttcatggtc

SEQ ID NO: 582515 - DNA, 25 bp, Homo sapien
gacttggatgcgtaactctggactc

SEQ ID NO: 582516 - DNA, 25 bp, Homo sapien
tctcctacatcctgactcttgggtt

SEQ ID NO: 582517 - DNA, 25 bp, Homo sapien
cgtaactctggactcctaccctgga

SEQ ID NO: 582518 - DNA, 25 bp, Homo sapien
ctaaagcccagtgaaaactgcagag

SEQ ID NO: 582519 - DNA, 25 bp, Homo sapien
agtgaaaactgcagagctgaaacat

SEQ ID NO: 582520 - DNA, 25 bp, Homo sapien
ccagtgaaaactgcagagctgaaac

SEQ ID NO: 582521 - DNA, 25 bp, Homo sapien
gcccagtgaaaactgcagagctgaa

SEQ ID NO: 582522 - DNA, 25 bp, Homo sapien
tagctgcatttcccaaccaacattc

SEQ ID NO: 582523 - DNA, 25 bp, Homo sapien
aatagctgcatttcccaaccaacat

SEQ ID NO: 582524 - DNA, 25 bp, Homo sapien
cagaaatactagcctgctcttataa

SEQ ID NO: 582525 - DNA, 25 bp, Homo sapien
tactagcctgctcttataattaaaa

SEQ ID NO: 582526 - DNA, 25 bp, Homo sapien
ttgcttgcctgtgaattccagccag

SEQ ID NO: 582527 - DNA, 25 bp, Homo sapien
gatcctccaatattccaggtactgg

SEQ ID NO: 582528 - DNA, 25 bp, Homo sapien
gaattagaacttgtgaaccatttaa

SEQ ID NO: 582529 - DNA, 25 bp, Homo sapien
cgctatctgtaggtgttttccaacc

SEQ ID NO: 582530 - DNA, 25 bp, Homo sapien
tactgcggacactgggataagccga

SEQ ID NO: 582531 - DNA, 25 bp, Homo sapien
tgtactgcggacactgggataagcc

SEQ ID NO: 582532 - DNA, 25 bp, Homo sapien
actgcggacactgggataagccgac

SEQ ID NO: 582533 - DNA, 25 bp, Homo sapien
ctgcggacactgggataagccgaca

SEQ ID NO: 582534 - DNA, 25 bp, Homo sapien
acgaaataaaccagttgtgaatttg

SEQ ID NO: 582535 - DNA, 25 bp, Homo sapien
gcacgaaataaaccagttgtgaatt

SEQ ID NO: 582536 - DNA, 25 bp, Homo sapien
agcacgaaataaaccagttgtgaat

SEQ ID NO: 582537 - DNA, 25 bp, Homo sapien
cagcacgaaataaaccagttgtgaa

SEQ ID NO: 582538 - DNA, 25 bp, Homo sapien
tctttccctgggtaccatgcagctg

SEQ ID NO: 582539 - DNA, 25 bp, Homo sapien
catgcagctgacaaagagagatctc

SEQ ID NO: 582540 - DNA, 25 bp, Homo sapien
gatgtaaatactcatggcgcctcct

SEQ ID NO: 582541 - DNA, 25 bp, Homo sapien
gagagatctcattgttttccgtggt

SEQ ID NO: 582542 - DNA, 25 bp, Homo sapien
tcctcaagctgattgggatacacca

SEQ ID NO: 582543 - DNA, 25 bp, Homo sapien
ctttggcataaagatcaagagcagt

SEQ ID NO: 582544 - DNA, 25 bp, Homo sapien
gcagtttgctcatagaatatcaggg

SEQ ID NO: 582545 - DNA, 25 bp, Homo sapien
actctttgaccagaatgtctttggc

SEQ ID NO: 582546 - DNA, 25 bp, Homo sapien
cacattggaagaccactgtgaagtc

SEQ ID NO: 582547 - DNA, 25 bp, Homo sapien
gggcatgactgcagcacattggaag

SEQ ID NO: 582548 - DNA, 25 bp, Homo sapien
ctgtgaagtcacaatgatgtccggt

SEQ ID NO: 582549 - DNA, 25 bp, Homo sapien
tgtccggtgcctcgcagttagggaa

SEQ ID NO: 582550 - DNA, 25 bp, Homo sapien
tttgaaagacaattaggaatggagg

SEQ ID NO: 582551 - DNA, 25 bp, Homo sapien
ccacgtttgaaagacaattaggaat

SEQ ID NO: 582552 - DNA, 25 bp, Homo sapien
ttcctggttccacgtttgaaagaca

SEQ ID NO: 582553 - DNA, 25 bp, Homo sapien
tggttccacgtttgaaagacaatta

SEQ ID NO: 582554 - DNA, 25 bp, Homo sapien
aaggtgtccactgcgccacggctct

SEQ ID NO: 582555 - DNA, 25 bp, Homo sapien
aggtgtccactgcgccacggctcta

SEQ ID NO: 582556 - DNA, 25 bp, Homo sapien
ggtgtccactgcgccacggctctac

SEQ ID NO: 582557 - DNA, 25 bp, Homo sapien
cactgggtgcccgtctgcttctccc

SEQ ID NO: 582558 - DNA, 25 bp, Homo sapien
gagaaaactgccagggcccatctct

SEQ ID NO: 582559 - DNA, 25 bp, Homo sapien
tgtgcacaagggcaggttgcaggca

SEQ ID NO: 582560 - DNA, 25 bp, Homo sapien
tcctgcactggtcctggtcagggct

SEQ ID NO: 582561 - DNA, 25 bp, Homo sapien
cacgtgagacagacccgctgctgaa

SEQ ID NO: 582562 - DNA, 25 bp, Homo sapien
ttgggctttcaatgtggtcccttcc

SEQ ID NO: 582563 - DNA, 25 bp, Homo sapien
gccgaggctctcaacacatatttag

SEQ ID NO: 582564 - DNA, 25 bp, Homo sapien
gggctggccactgtgcaaaggcaca

SEQ ID NO: 582565 - DNA, 25 bp, Homo sapien
caagatctggttgctgtctgaaaac

SEQ ID NO: 582566 - DNA, 25 bp, Homo sapien
tctgcatcttggagtggttgatacc

SEQ ID NO: 582567 - DNA, 25 bp, Homo sapien
aagactctggctgcgtcccatgggg

SEQ ID NO: 582568 - DNA, 25 bp, Homo sapien
ccagaaagacactgagaagttcctc

SEQ ID NO: 582569 - DNA, 25 bp, Homo sapien
catctaatttctcatcttcatgtaa

SEQ ID NO: 582570 - DNA, 25 bp, Homo sapien
aatttctcatcttcatgtaaaatat

SEQ ID NO: 582571 - DNA, 25 bp, Homo sapien
ctcatctaatttctcatcttcatgt

SEQ ID NO: 582572 - DNA, 25 bp, Homo sapien
tctaatttctcatcttcatgtaaaa

SEQ ID NO: 582573 - DNA, 25 bp, Homo sapien
tgctctgcccctcggctcccttttt

SEQ ID NO: 582574 - DNA, 25 bp, Homo sapien
ctccctttttgcctaccttgcccat

SEQ ID NO: 582575 - DNA, 25 bp, Homo sapien
gactctcctcccaagtgctctgccc

SEQ ID NO: 582576 - DNA, 25 bp, Homo sapien
cagcaggaatgaggaaatcctggac

SEQ ID NO: 582577 - DNA, 25 bp, Homo sapien
tcttaaagctcacatgggaaatctg

SEQ ID NO: 582578 - DNA, 25 bp, Homo sapien
tatcgggtgccatcctaggtaaggt

SEQ ID NO: 582579 - DNA, 25 bp, Homo sapien
tctctgagggaacaccccttggcag

SEQ ID NO: 582580 - DNA, 25 bp, Homo sapien
gagatgctccatagctgagttggct

SEQ ID NO: 582581 - DNA, 25 bp, Homo sapien
cagctggctctgctgtcacatctgg

SEQ ID NO: 582582 - DNA, 25 bp, Homo sapien
gctctcatttgagtgatgtctcaca

SEQ ID NO: 582583 - DNA, 25 bp, Homo sapien
tctcatttgagtgatgtctcacaga

SEQ ID NO: 582584 - DNA, 25 bp, Homo sapien
ggctctgctgtcacatctgggctct

SEQ ID NO: 582585 - DNA, 25 bp, Homo sapien
aaaatcgcctcagggttactctagc

SEQ ID NO: 582586 - DNA, 25 bp, Homo sapien
gacttgagccaccttgcgctgtcct

SEQ ID NO: 582587 - DNA, 25 bp, Homo sapien
gcgttaaaaatagtgacagcacaca

SEQ ID NO: 582588 - DNA, 25 bp, Homo sapien
tcttctccggttatctgcaccctgg

SEQ ID NO: 582589 - DNA, 25 bp, Homo sapien
cctgggggaccgtcatggcacactg

SEQ ID NO: 582590 - DNA, 25 bp, Homo sapien
caacctgggggaccgtcatggcaca

SEQ ID NO: 582591 - DNA, 25 bp, Homo sapien
acctgggggaccgtcatggcacact

SEQ ID NO: 582592 - DNA, 25 bp, Homo sapien
tcccaacctgggggaccgtcatggc

SEQ ID NO: 582593 - DNA, 25 bp, Homo sapien
ccagcaggggacacgtggtaaggct

SEQ ID NO: 582594 - DNA, 25 bp, Homo sapien
aaggtgacctggtgcattagggcca

SEQ ID NO: 582595 - DNA, 25 bp, Homo sapien
tgacttgggtgtgttaggaccagca

SEQ ID NO: 582596 - DNA, 25 bp, Homo sapien
ctgatatgctggggccatcagggac

SEQ ID NO: 582597 - DNA, 25 bp, Homo sapien
ccagcagggaccacgtggcgaggct

SEQ ID NO: 582598 - DNA, 25 bp, Homo sapien
cagcagggaccacgtggcgaggctg

SEQ ID NO: 582599 - DNA, 25 bp, Homo sapien
agcagggaccacgtggcgaggctgc

SEQ ID NO: 582600 - DNA, 25 bp, Homo sapien
gcagggaccacgtggcgaggctgcg

SEQ ID NO: 582601 - DNA, 25 bp, Homo sapien
tgaaggccacctgggtgcgagaggg

SEQ ID NO: 582602 - DNA, 25 bp, Homo sapien
gaaggtgaaggccacctgggtgcga

SEQ ID NO: 582603 - DNA, 25 bp, Homo sapien
ggccacctgggtgcgagagggccag

SEQ ID NO: 582604 - DNA, 25 bp, Homo sapien
acctgggtgcgagagggccagcagg

SEQ ID NO: 582605 - DNA, 25 bp, Homo sapien
gaatggctgatacgccatcattgca

SEQ ID NO: 582606 - DNA, 25 bp, Homo sapien
caaatctaggtgtttgagttgtgcc

SEQ ID NO: 582607 - DNA, 25 bp, Homo sapien
tctgtggaagcttggtggcattgct

SEQ ID NO: 582608 - DNA, 25 bp, Homo sapien
tggtaaagagggaatagcaaaacac

SEQ ID NO: 582609 - DNA, 25 bp, Homo sapien
aaaatttaaattgagctgctatcaa

SEQ ID NO: 582610 - DNA, 25 bp, Homo sapien
tatatgtatacattctgtacagtag

SEQ ID NO: 582611 - DNA, 25 bp, Homo sapien
attgagctgctatcaatattaaatg

SEQ ID NO: 582612 - DNA, 25 bp, Homo sapien
tgtacagtagttccatcaaaatatg

SEQ ID NO: 582613 - DNA, 25 bp, Homo sapien
gtggcaagatagatgtggttgggcc

SEQ ID NO: 582614 - DNA, 25 bp, Homo sapien
ctgtggcaagatagatgtggttggg

SEQ ID NO: 582615 - DNA, 25 bp, Homo sapien
tgtggcaagatagatgtggttgggc

SEQ ID NO: 582616 - DNA, 25 bp, Homo sapien
ggcaagatagatgtggttgggccat

SEQ ID NO: 582617 - DNA, 25 bp, Homo sapien
tccattgcggttgaacgtggccttt

SEQ ID NO: 582618 - DNA, 25 bp, Homo sapien
acagcagtgccttctcgtcgaagcg

SEQ ID NO: 582619 - DNA, 25 bp, Homo sapien
gacaggcagccgttaccgttccatt

SEQ ID NO: 582620 - DNA, 25 bp, Homo sapien
ttctcactgcgcagcaaagttcgtc

SEQ ID NO: 582621 - DNA, 25 bp, Homo sapien
ggataagtcacttaaactcctaata

SEQ ID NO: 582622 - DNA, 25 bp, Homo sapien
cttttataaagcgtgctgacctggg

SEQ ID NO: 582623 - DNA, 25 bp, Homo sapien
gatgcagcttgacacctggactgat

SEQ ID NO: 582624 - DNA, 25 bp, Homo sapien
tatccttcagttttcgcaatgctct

SEQ ID NO: 582625 - DNA, 25 bp, Homo sapien
ccaacgttgttgtgctggtttggtt

SEQ ID NO: 582626 - DNA, 25 bp, Homo sapien
tctccaacgttgttgtgctggtttg

SEQ ID NO: 582627 - DNA, 25 bp, Homo sapien
ccgtctccaacgttgttgtgctggt

SEQ ID NO: 582628 - DNA, 25 bp, Homo sapien
cgtctccaacgttgttgtgctggtt

SEQ ID NO: 582629 - DNA, 25 bp, Homo sapien
cagctgccccagttgagattgccag

SEQ ID NO: 582630 - DNA, 25 bp, Homo sapien
gaatttgctagacctgtgatccatg

SEQ ID NO: 582631 - DNA, 25 bp, Homo sapien
ttcatactgtctgtgagcatggcct

SEQ ID NO: 582632 - DNA, 25 bp, Homo sapien
gtcaccaagcagtagagtctcagtc

SEQ ID NO: 582633 - DNA, 25 bp, Homo sapien
cgatggccgagtcttttaggtcctg

SEQ ID NO: 582634 - DNA, 25 bp, Homo sapien
tgtacaactactcctcgatggccga

SEQ ID NO: 582635 - DNA, 25 bp, Homo sapien
gctgcagaggcacacgatagagtca

SEQ ID NO: 582636 - DNA, 25 bp, Homo sapien
gagtgttctcgatgcatccagttgt

SEQ ID NO: 582637 - DNA, 25 bp, Homo sapien
agtattattcagacagcccgccaag

SEQ ID NO: 582638 - DNA, 25 bp, Homo sapien
gcccgccaaggccagctgaatttta

SEQ ID NO: 582639 - DNA, 25 bp, Homo sapien
ttaaccgaaggagatttgccctcag

SEQ ID NO: 582640 - DNA, 25 bp, Homo sapien
gagactcagtattattcagacagcc

SEQ ID NO: 582641 - DNA, 25 bp, Homo sapien
tgggcttttccggtgtgggtgtctg

SEQ ID NO: 582642 - DNA, 25 bp, Homo sapien
gggcttttccggtgtgggtgtctgc

SEQ ID NO: 582643 - DNA, 25 bp, Homo sapien
ccccaccaggtctgttagcttttct

SEQ ID NO: 582644 - DNA, 25 bp, Homo sapien
cacaggctgacatacgctgtgctgt

SEQ ID NO: 582645 - DNA, 25 bp, Homo sapien
caggctgacatacgctgtgctgttg

SEQ ID NO: 582646 - DNA, 25 bp, Homo sapien
cccacaggctgacatacgctgtgct

SEQ ID NO: 582647 - DNA, 25 bp, Homo sapien
ggctgacatacgctgtgctgttgcc

SEQ ID NO: 582648 - DNA, 25 bp, Homo sapien
tcatttctgccagaacctgcttttt

SEQ ID NO: 582649 - DNA, 25 bp, Homo sapien
tctgccagaacctgctttttctcct

SEQ ID NO: 582650 - DNA, 25 bp, Homo sapien
tcagctgtagctgctcatttctgcc

SEQ ID NO: 582651 - DNA, 25 bp, Homo sapien
cctcttcttcagtacactcctcgtc

SEQ ID NO: 582652 - DNA, 25 bp, Homo sapien
ctgttggagtattcaaggaaactga

SEQ ID NO: 582653 - DNA, 25 bp, Homo sapien
tggctgttggagtattcaaggaaac

SEQ ID NO: 582654 - DNA, 25 bp, Homo sapien
tatgtttagtggctgttggagtatt

SEQ ID NO: 582655 - DNA, 25 bp, Homo sapien
tagtggctgttggagtattcaagga

SEQ ID NO: 582656 - DNA, 25 bp, Homo sapien
aacaacactcctcatatgtgacatg

SEQ ID NO: 582657 - DNA, 25 bp, Homo sapien
aacactcctcatatgtgacatgctt

SEQ ID NO: 582658 - DNA, 25 bp, Homo sapien
caacactcctcatatgtgacatgct

SEQ ID NO: 582659 - DNA, 25 bp, Homo sapien
ctaacaacactcctcatatgtgaca

SEQ ID NO: 582660 - DNA, 25 bp, Homo sapien
cttcattccagtcattcagcaggtc

SEQ ID NO: 582661 - DNA, 25 bp, Homo sapien
atcagggccctcatttttcagagac

SEQ ID NO: 582662 - DNA, 25 bp, Homo sapien
caggtcagcatcagggccctcattt

SEQ ID NO: 582663 - DNA, 25 bp, Homo sapien
tccagtcattcagcaggtcagcatc

SEQ ID NO: 582664 - DNA, 25 bp, Homo sapien
tcatccccatatttagcataggcag

SEQ ID NO: 582665 - DNA, 25 bp, Homo sapien
gtgggcgataaagccaaacgcttgc

SEQ ID NO: 582666 - DNA, 25 bp, Homo sapien
cagtttgagctgtggcggtttccca

SEQ ID NO: 582667 - DNA, 25 bp, Homo sapien
cgccttcctccttgagtggaattgc

SEQ ID NO: 582668 - DNA, 25 bp, Homo sapien
tccagctatgcattcagactcacaa

SEQ ID NO: 582669 - DNA, 25 bp, Homo sapien
gctatgcattcagactcacaactcc

SEQ ID NO: 582670 - DNA, 25 bp, Homo sapien
tatgcattcagactcacaactccca

SEQ ID NO: 582671 - DNA, 25 bp, Homo sapien
tgcattcagactcacaactcccata

SEQ ID NO: 582672 - DNA, 25 bp, Homo sapien
cataaaggagcatggcccgtgcaaa

SEQ ID NO: 582673 - DNA, 25 bp, Homo sapien
gcttgagaagagcatttcccttatg

SEQ ID NO: 582674 - DNA, 25 bp, Homo sapien
cctgaggtggcagagaatatgcgca

SEQ ID NO: 582675 - DNA, 25 bp, Homo sapien
cccttatgtgcaagttaagttccca

SEQ ID NO: 582676 - DNA, 25 bp, Homo sapien
ttctgtgcaaacaggctgcagcatg

SEQ ID NO: 582677 - DNA, 25 bp, Homo sapien
tgtgcaaacaggctgcagcatgccc

SEQ ID NO: 582678 - DNA, 25 bp, Homo sapien
agtggttccattaacttcctgggct

SEQ ID NO: 582679 - DNA, 25 bp, Homo sapien
tcacaggtcatgaagtggttccatt

SEQ ID NO: 582680 - DNA, 25 bp, Homo sapien
tcacagtcgtgttgctttcagtctg

SEQ ID NO: 582681 - DNA, 25 bp, Homo sapien
tgccctgttctccatcctgtcacca

SEQ ID NO: 582682 - DNA, 25 bp, Homo sapien
cggcagaagagtttgttgtctcatc

SEQ ID NO: 582683 - DNA, 25 bp, Homo sapien
tgtaaaatctggaagtaatcggcag

SEQ ID NO: 582684 - DNA, 25 bp, Homo sapien
cacttggtgttgaggcctgaggggc

SEQ ID NO: 582685 - DNA, 25 bp, Homo sapien
tatttagggtcccagctgatttgtg

SEQ ID NO: 582686 - DNA, 25 bp, Homo sapien
ccaggggtgtagctgcccaggttct

SEQ ID NO: 582687 - DNA, 25 bp, Homo sapien
ccccaggagggagacaacacgccag

SEQ ID NO: 582688 - DNA, 25 bp, Homo sapien
tagagtatgttatgcttgtggatac

SEQ ID NO: 582689 - DNA, 25 bp, Homo sapien
gggaagcagataaagttagagtatg

SEQ ID NO: 582690 - DNA, 25 bp, Homo sapien
tttgagaacccgatcattcacgtga

SEQ ID NO: 582691 - DNA, 25 bp, Homo sapien
tactgtcgtccacacttttttgaga

SEQ ID NO: 582692 - DNA, 25 bp, Homo sapien
tagatggcagtccttaggccagacc

SEQ ID NO: 582693 - DNA, 25 bp, Homo sapien
gatctgagtggatgtaagtgccgct

SEQ ID NO: 582694 - DNA, 25 bp, Homo sapien
tgtatactgaatttgaccgtctggt

SEQ ID NO: 582695 - DNA, 25 bp, Homo sapien
ggaccgtttcatgttctctgagagc

SEQ ID NO: 582696 - DNA, 25 bp, Homo sapien
tcaggagttctaagcctacagcacc

SEQ ID NO: 582697 - DNA, 25 bp, Homo sapien
tgctgtggcttcaatcctaggagct

SEQ ID NO: 582698 - DNA, 25 bp, Homo sapien
taagtattaaggttgtcgtgatgcc

SEQ ID NO: 582699 - DNA, 25 bp, Homo sapien
tgtgatttcaatcctagtagctccc

SEQ ID NO: 582700 - DNA, 25 bp, Homo sapien
gatttcacctgaatagatgcctgga

SEQ ID NO: 582701 - DNA, 25 bp, Homo sapien
gattaaaagagctagactccctgct

SEQ ID NO: 582702 - DNA, 25 bp, Homo sapien
gagtcccagcaaagggcatgtgttt

SEQ ID NO: 582703 - DNA, 25 bp, Homo sapien
ggttacacgggccttgcgcattgag

SEQ ID NO: 582704 - DNA, 25 bp, Homo sapien
tgaaattcttcacttcttctatttt

SEQ ID NO: 582705 - DNA, 25 bp, Homo sapien
ttgaaattcttcacttcttctattt

SEQ ID NO: 582706 - DNA, 25 bp, Homo sapien
ttttgaaattcttcacttcttctat

SEQ ID NO: 582707 - DNA, 25 bp, Homo sapien
tgttttgaaattcttcacttcttct

SEQ ID NO: 582708 - DNA, 25 bp, Homo sapien
agtaaaagccattggagaaaaggag

SEQ ID NO: 582709 - DNA, 25 bp, Homo sapien
gcttgtaagtaaaagccattggaga

SEQ ID NO: 582710 - DNA, 25 bp, Homo sapien
cagagctagcttgtaagtaaaagcc

SEQ ID NO: 582711 - DNA, 25 bp, Homo sapien
taaaagccattggagaaaaggagga

SEQ ID NO: 582712 - DNA, 25 bp, Homo sapien
tcatgggtaaggcaggtgaagacct

SEQ ID NO: 582713 - DNA, 25 bp, Homo sapien
ccctggtccccaccttgtaatatct

SEQ ID NO: 582714 - DNA, 25 bp, Homo sapien
gaaacagctggatgtattcaggacc

SEQ ID NO: 582715 - DNA, 25 bp, Homo sapien
tggatgtattcaggacccgcctcac

SEQ ID NO: 582716 - DNA, 25 bp, Homo sapien
actgtaagattccatgaggcaaagg

SEQ ID NO: 582717 - DNA, 25 bp, Homo sapien
aagacaaggctaggcagcatattac

SEQ ID NO: 582718 - DNA, 25 bp, Homo sapien
gagctggaaactgtaagattccatg

SEQ ID NO: 582719 - DNA, 25 bp, Homo sapien
gcctttcaacggattgtttagtatc

SEQ ID NO: 582720 - DNA, 25 bp, Homo sapien
gaacaagtttcctgcggtcctctgg

SEQ ID NO: 582721 - DNA, 25 bp, Homo sapien
ttcggaagcagctctcgtaactggg

SEQ ID NO: 582722 - DNA, 25 bp, Homo sapien
tgtgtattgggagtgtaatggattc

SEQ ID NO: 582723 - DNA, 25 bp, Homo sapien
ctgttgctcagcaggcttgtaggcg

SEQ ID NO: 582724 - DNA, 25 bp, Homo sapien
gatgctcggtgcatcctctgtggga

SEQ ID NO: 582725 - DNA, 25 bp, Homo sapien
gggcgatgctcggtgcatcctctgt

SEQ ID NO: 582726 - DNA, 25 bp, Homo sapien
ctgtgatgggggtatctcgatttcc

SEQ ID NO: 582727 - DNA, 25 bp, Homo sapien
gatttccttgccaagacctctggag

SEQ ID NO: 582728 - DNA, 25 bp, Homo sapien
gtgctgcagcactaaactaggatgt

SEQ ID NO: 582729 - DNA, 25 bp, Homo sapien
tctttgtgtttcatagtgctgcagc

SEQ ID NO: 582730 - DNA, 25 bp, Homo sapien
tgttcttatgttctgcaatacctct

SEQ ID NO: 582731 - DNA, 25 bp, Homo sapien
cgatttaatgtctgaatccaggaaa

SEQ ID NO: 582732 - DNA, 25 bp, Homo sapien
tctccttggtgtgggcacccatgcc

SEQ ID NO: 582733 - DNA, 25 bp, Homo sapien
gtgggcacccatgcctgattgacag

SEQ ID NO: 582734 - DNA, 25 bp, Homo sapien
ggtgtgggcacccatgcctgattga

SEQ ID NO: 582735 - DNA, 25 bp, Homo sapien
gtctctccttggtgtgggcacccat

SEQ ID NO: 582736 - DNA, 25 bp, Homo sapien
ggatgacagcaaaatgaaaataatg

SEQ ID NO: 582737 - DNA, 25 bp, Homo sapien
gatgacagcaaaatgaaaataatgc

SEQ ID NO: 582738 - DNA, 25 bp, Homo sapien
ctggatgacagcaaaatgaaaataa

SEQ ID NO: 582739 - DNA, 25 bp, Homo sapien
tgacagcaaaatgaaaataatgcat

SEQ ID NO: 582740 - DNA, 25 bp, Homo sapien
cgtggaccatggtcagcgtgcttgc

SEQ ID NO: 582741 - DNA, 25 bp, Homo sapien
atgcagcatgccgtggaccatggtc

SEQ ID NO: 582742 - DNA, 25 bp, Homo sapien
tggaccatggtcagcgtgcttgcct

SEQ ID NO: 582743 - DNA, 25 bp, Homo sapien
catgccgtggaccatggtcagcgtg

SEQ ID NO: 582744 - DNA, 25 bp, Homo sapien
ggaatgaaagctggagagatgcggc

SEQ ID NO: 582745 - DNA, 25 bp, Homo sapien
tttagggccttgggaggtacaggca

SEQ ID NO: 582746 - DNA, 25 bp, Homo sapien
gaaggaatgaaagctggagagatgc

SEQ ID NO: 582747 - DNA, 25 bp, Homo sapien
tagggccttgggaggtacaggcacc

SEQ ID NO: 582748 - DNA, 25 bp, Homo sapien
tgcatgtctcacattgttctccgtg

SEQ ID NO: 582749 - DNA, 25 bp, Homo sapien
tagtcacggcgtttgttgcatgtct

SEQ ID NO: 582750 - DNA, 25 bp, Homo sapien
tttctgtggttgctcgtgagggatt

SEQ ID NO: 582751 - DNA, 25 bp, Homo sapien
tgttctccgtgaggaggaaaagagc

SEQ ID NO: 582752 - DNA, 25 bp, Homo sapien
gcaattgcatttcctcctctcacca

SEQ ID NO: 582753 - DNA, 25 bp, Homo sapien
ggcaattgcatttcctcctctcacc

SEQ ID NO: 582754 - DNA, 25 bp, Homo sapien
caattgcatttcctcctctcaccaa

SEQ ID NO: 582755 - DNA, 25 bp, Homo sapien
taactctctccatcgtattaacttg

SEQ ID NO: 582756 - DNA, 25 bp, Homo sapien
ggcctggaggacttcgtgcactgct

SEQ ID NO: 582757 - DNA, 25 bp, Homo sapien
aaaggagaagattctattaactctc

SEQ ID NO: 582758 - DNA, 25 bp, Homo sapien
tcgtgcactgctgtcccgttcacat

SEQ ID NO: 582759 - DNA, 25 bp, Homo sapien
tctgcgccaaggtccacaacgtggc

SEQ ID NO: 582760 - DNA, 25 bp, Homo sapien
tggctttaaattgctgcgatcctct

SEQ ID NO: 582761 - DNA, 25 bp, Homo sapien
tccagacttgcagatcccggaggct

SEQ ID NO: 582762 - DNA, 25 bp, Homo sapien
caggactgtgatccttgccgctggc

SEQ ID NO: 582763 - DNA, 25 bp, Homo sapien
gctactgcgcatgcttggcaagctc

SEQ ID NO: 582764 - DNA, 25 bp, Homo sapien
gctccttaatatcctgctccggctg

SEQ ID NO: 582765 - DNA, 25 bp, Homo sapien
agcaggcgtggctgtctctcagacc

SEQ ID NO: 582766 - DNA, 25 bp, Homo sapien
gctgttcctgccacccgttggtcaa

SEQ ID NO: 582767 - DNA, 25 bp, Homo sapien
tcctattgaaaagctccaggcatgc

SEQ ID NO: 582768 - DNA, 25 bp, Homo sapien
gaaagtgcccgttccgtatcgtctg

SEQ ID NO: 582769 - DNA, 25 bp, Homo sapien
ttgttgtctaaagcgtctgccgggc

SEQ ID NO: 582770 - DNA, 25 bp, Homo sapien
gcgatggtccgttttgtgtcagaca

SEQ ID NO: 582771 - DNA, 25 bp, Homo sapien
aagagattctacttcccattgaggg

SEQ ID NO: 582772 - DNA, 25 bp, Homo sapien
tgttccgctggtctggacgggctca

SEQ ID NO: 582773 - DNA, 25 bp, Homo sapien
tgggacacaccaacattcagtaggt

SEQ ID NO: 582774 - DNA, 25 bp, Homo sapien
gcagcaagtttcctagagccagggt

SEQ ID NO: 582775 - DNA, 25 bp, Homo sapien
tacaaatgagatctcagccctggag

SEQ ID NO: 582776 - DNA, 25 bp, Homo sapien
gctgtgccttcaataatcttactgg

SEQ ID NO: 582777 - DNA, 25 bp, Homo sapien
gctttgctgtgactggacactctac

SEQ ID NO: 582778 - DNA, 25 bp, Homo sapien
cagtcatagggtgagttaacagggt

SEQ ID NO: 582779 - DNA, 25 bp, Homo sapien
tttcagggaaatggatgtatcagct

SEQ ID NO: 582780 - DNA, 25 bp, Homo sapien
gacactttgttgctggaatcggatc

SEQ ID NO: 582781 - DNA, 25 bp, Homo sapien
agctatttgtgtgacctcggagagg

SEQ ID NO: 582782 - DNA, 25 bp, Homo sapien
gggctgcgtactccattctggaact

SEQ ID NO: 582783 - DNA, 25 bp, Homo sapien
gtttaagatacacagttcccagctg

SEQ ID NO: 582784 - DNA, 25 bp, Homo sapien
tcagtcaaataggagctgcctcccc

SEQ ID NO: 582785 - DNA, 25 bp, Homo sapien
tttcccataaggagcagccttgcca

SEQ ID NO: 582786 - DNA, 25 bp, Homo sapien
cagccttgccaatgactgaccaata

SEQ ID NO: 582787 - DNA, 25 bp, Homo sapien
tcacggcggcatctggtgctatgtt

SEQ ID NO: 582788 - DNA, 25 bp, Homo sapien
caatcctgtcgtccccagaaatgag

SEQ ID NO: 582789 - DNA, 25 bp, Homo sapien
gaggatcattaatattcacggcggc

SEQ ID NO: 582790 - DNA, 25 bp, Homo sapien
cagtaatgagaaaagagcatcttcc

SEQ ID NO: 582791 - DNA, 25 bp, Homo sapien
tggaaacttcgacaagtgggctttc

SEQ ID NO: 582792 - DNA, 25 bp, Homo sapien
aatggaaacttcgacaagtgggctt

SEQ ID NO: 582793 - DNA, 25 bp, Homo sapien
ccaacagttccgtggtgccacacat

SEQ ID NO: 582794 - DNA, 25 bp, Homo sapien
tggccctcaccaacagttccgtggt

SEQ ID NO: 582795 - DNA, 25 bp, Homo sapien
tcagtcgggttaggtggcttctttg

SEQ ID NO: 582796 - DNA, 25 bp, Homo sapien
gttaggtggcttctttgggagaggc

SEQ ID NO: 582797 - DNA, 25 bp, Homo sapien
gagactccctccacaagagctgggt

SEQ ID NO: 582798 - DNA, 25 bp, Homo sapien
atccagcatcccgttccctctgaga

SEQ ID NO: 582799 - DNA, 25 bp, Homo sapien
cctgcccaagatgagcacgtcaaca

SEQ ID NO: 582800 - DNA, 25 bp, Homo sapien
ttgtgctgccatatcccatctgttg

SEQ ID NO: 582801 - DNA, 25 bp, Homo sapien
cattcttccccactcgggtaacata

SEQ ID NO: 582802 - DNA, 25 bp, Homo sapien
taggaagcttgactctgtttggtgt

SEQ ID NO: 582803 - DNA, 25 bp, Homo sapien
acgtaggaagcttgactctgtttgg

SEQ ID NO: 582804 - DNA, 25 bp, Homo sapien
gcttgactctgtttggtgtcatcac

SEQ ID NO: 582805 - DNA, 25 bp, Homo sapien
ctaagagtccccgagatttgctgaa

SEQ ID NO: 582806 - DNA, 25 bp, Homo sapien
cccgagatttgctgaaagcatacaa

SEQ ID NO: 582807 - DNA, 25 bp, Homo sapien
atacaaggcccataattcttcagcc

SEQ ID NO: 582808 - DNA, 25 bp, Homo sapien
ccacttcagcatgctgtgtccaaga

SEQ ID NO: 582809 - DNA, 25 bp, Homo sapien
tctatatcaatgatgagagagaatg

SEQ ID NO: 582810 - DNA, 25 bp, Homo sapien
ttctatatcaatgatgagagagaat

SEQ ID NO: 582811 - DNA, 25 bp, Homo sapien
tttctatatcaatgatgagagagaa

SEQ ID NO: 582812 - DNA, 25 bp, Homo sapien
atacattgatggaaggtttttcctt

SEQ ID NO: 582813 - DNA, 25 bp, Homo sapien
tacattgatggaaggtttttccttc

SEQ ID NO: 582814 - DNA, 25 bp, Homo sapien
catacattgatggaaggtttttcct

SEQ ID NO: 582815 - DNA, 25 bp, Homo sapien
tcatacattgatggaaggtttttcc

SEQ ID NO: 582816 - DNA, 25 bp, Homo sapien
tgttgtaaccggaacctggatattc

SEQ ID NO: 582817 - DNA, 25 bp, Homo sapien
catgaggactagagttgttgtaacc

SEQ ID NO: 582818 - DNA, 25 bp, Homo sapien
cgtggtctctccaactgtgaaatgg

SEQ ID NO: 582819 - DNA, 25 bp, Homo sapien
ctgggaggccctgaatagtacaatt

SEQ ID NO: 582820 - DNA, 25 bp, Homo sapien
tactcggggactgattccactgttt

SEQ ID NO: 582821 - DNA, 25 bp, Homo sapien
cggggactgattccactgtttgcat

SEQ ID NO: 582822 - DNA, 25 bp, Homo sapien
tctttgtactcggggactgattcca

SEQ ID NO: 582823 - DNA, 25 bp, Homo sapien
tgtactcggggactgattccactgt

SEQ ID NO: 582824 - DNA, 25 bp, Homo sapien
gatatacaggccataacagagtctg

SEQ ID NO: 582825 - DNA, 25 bp, Homo sapien
caagcacagaggtagactgcacatc

SEQ ID NO: 582826 - DNA, 25 bp, Homo sapien
gatcccgtgaagaagaaaacgccat

SEQ ID NO: 582827 - DNA, 25 bp, Homo sapien
ggaataaactggacaagcctgatag

SEQ ID NO: 582828 - DNA, 25 bp, Homo sapien
gccgagcacagagccgatcgatgct

SEQ ID NO: 582829 - DNA, 25 bp, Homo sapien
caatcgagcgccgacaagtctagaa

SEQ ID NO: 582830 - DNA, 25 bp, Homo sapien
ggcaatctctctgcgcgtgcgtctg

SEQ ID NO: 582831 - DNA, 25 bp, Homo sapien
aacgtagccacgctcctcaatcgag

SEQ ID NO: 582832 - DNA, 25 bp, Homo sapien
ggcctacgccgactactgtaagaac

SEQ ID NO: 582833 - DNA, 25 bp, Homo sapien
ctaaggcctacgccgactactgtaa

SEQ ID NO: 582834 - DNA, 25 bp, Homo sapien
tacgccgactactgtaagaaccaaa

SEQ ID NO: 582835 - DNA, 25 bp, Homo sapien
gccgactactgtaagaaccaaaagc

SEQ ID NO: 582836 - DNA, 25 bp, Homo sapien
aaccgaaacagcgaggtagaaggcg

SEQ ID NO: 582837 - DNA, 25 bp, Homo sapien
cgaggagccaggaaaaccgaaacag

SEQ ID NO: 582838 - DNA, 25 bp, Homo sapien
gagccaggaaaaccgaaacagcgag

SEQ ID NO: 582839 - DNA, 25 bp, Homo sapien
accgaaacagcgaggtagaaggcgc

SEQ ID NO: 582840 - DNA, 25 bp, Homo sapien
ccagcttcgcgcttcgtccgctccc

SEQ ID NO: 582841 - DNA, 25 bp, Homo sapien
agcttcgcgcttcgtccgctcccag

SEQ ID NO: 582842 - DNA, 25 bp, Homo sapien
cagcttcgcgcttcgtccgctccca

SEQ ID NO: 582843 - DNA, 25 bp, Homo sapien
cccagcttcgcgcttcgtccgctcc

SEQ ID NO: 582844 - DNA, 25 bp, Homo sapien
gcctgcccctccgagatccaaaccc

SEQ ID NO: 582845 - DNA, 25 bp, Homo sapien
ccaagcctgcccctccgagatccaa

SEQ ID NO: 582846 - DNA, 25 bp, Homo sapien
aagcctgcccctccgagatccaaac

SEQ ID NO: 582847 - DNA, 25 bp, Homo sapien
ctgcccctccgagatccaaacccgg

SEQ ID NO: 582848 - DNA, 25 bp, Homo sapien
acacaagcaccttcgcccaaggccc

SEQ ID NO: 582849 - DNA, 25 bp, Homo sapien
cctaacgaagtccaagggagctgcc

SEQ ID NO: 582850 - DNA, 25 bp, Homo sapien
gatgcccggccccagagtcagtctc

SEQ ID NO: 582851 - DNA, 25 bp, Homo sapien
gagctgccacgcgatgcccggcccc

SEQ ID NO: 582852 - DNA, 25 bp, Homo sapien
gccaccaccaaaagggagccgctgg

SEQ ID NO: 582853 - DNA, 25 bp, Homo sapien
cgccaccaccaaaagggagccgctg

SEQ ID NO: 582854 - DNA, 25 bp, Homo sapien
ccgccaccaccaaaagggagccgct

SEQ ID NO: 582855 - DNA, 25 bp, Homo sapien
tcgcaaaggagacgacgaaagggaa

SEQ ID NO: 582856 - DNA, 25 bp, Homo sapien
cccctaaatcgaaatctggagaagg

SEQ ID NO: 582857 - DNA, 25 bp, Homo sapien
acgcttctcaaagccttgcgacccc

SEQ ID NO: 582858 - DNA, 25 bp, Homo sapien
cacttgtgcaggtaacaggtaaaac

SEQ ID NO: 582859 - DNA, 25 bp, Homo sapien
ggatgattgacaagggaagagccta

SEQ ID NO: 582860 - DNA, 25 bp, Homo sapien
gatgattgacaagggaagagcctac

SEQ ID NO: 582861 - DNA, 25 bp, Homo sapien
tgaactgcattggatgattgacaag

SEQ ID NO: 582862 - DNA, 25 bp, Homo sapien
tccactgtatgtgaactgcattgga

SEQ ID NO: 582863 - DNA, 25 bp, Homo sapien
tttgtgttaaattcttcaggagaca

SEQ ID NO: 582864 - DNA, 25 bp, Homo sapien
gttaaattcttcaggagacagtaaa

SEQ ID NO: 582865 - DNA, 25 bp, Homo sapien
gtgttaaattcttcaggagacagta

SEQ ID NO: 582866 - DNA, 25 bp, Homo sapien
taaattcttcaggagacagtaaaaa

SEQ ID NO: 582867 - DNA, 25 bp, Homo sapien
taaattgtatgatttggtctgatat

SEQ ID NO: 582868 - DNA, 25 bp, Homo sapien
aaattgtatgatttggtctgatatc

SEQ ID NO: 582869 - DNA, 25 bp, Homo sapien
ataaattgtatgatttggtctgata

SEQ ID NO: 582870 - DNA, 25 bp, Homo sapien
gcatttgtggatgagcccagttcct

SEQ ID NO: 582871 - DNA, 25 bp, Homo sapien
tggatgagcccagttccttaaatat

SEQ ID NO: 582872 - DNA, 25 bp, Homo sapien
tgtggatgagcccagttccttaaat

SEQ ID NO: 582873 - DNA, 25 bp, Homo sapien
atttgtggatgagcccagttcctta

SEQ ID NO: 582874 - DNA, 25 bp, Homo sapien
gaaagcaatagccacagtttcaagc

SEQ ID NO: 582875 - DNA, 25 bp, Homo sapien
cataaacccaaacacacataattaa

SEQ ID NO: 582876 - DNA, 25 bp, Homo sapien
gccacagtttcaagcatatttacaa

SEQ ID NO: 582877 - DNA, 25 bp, Homo sapien
tcccatcaatatcattaatttcttg

SEQ ID NO: 582878 - DNA, 25 bp, Homo sapien
atataacctggaggctgccttcctt

SEQ ID NO: 582879 - DNA, 25 bp, Homo sapien
cacagggcagttctatcacctaaaa

SEQ ID NO: 582880 - DNA, 25 bp, Homo sapien
ccgttgcttttaacagcgagtagta

SEQ ID NO: 582881 - DNA, 25 bp, Homo sapien
aactttttggatgtacagctctgag

SEQ ID NO: 582882 - DNA, 25 bp, Homo sapien
gttgttgcagtctgttccacagttt

SEQ ID NO: 582883 - DNA, 25 bp, Homo sapien
ggttgttgcagtctgttccacagtt

SEQ ID NO: 582884 - DNA, 25 bp, Homo sapien
ccaatacaaacaggaactttcttgg

SEQ ID NO: 582885 - DNA, 25 bp, Homo sapien
caatacaaacaggaactttcttggt

SEQ ID NO: 582886 - DNA, 25 bp, Homo sapien
acaccaatacaaacaggaactttct

SEQ ID NO: 582887 - DNA, 25 bp, Homo sapien
atacaaacaggaactttcttggtct

SEQ ID NO: 582888 - DNA, 25 bp, Homo sapien
taacattaattccaagagatatcct

SEQ ID NO: 582889 - DNA, 25 bp, Homo sapien
gagatatccttcttactccatttaa

SEQ ID NO: 582890 - DNA, 25 bp, Homo sapien
tccctccaaaaacgcagcaggtatt

SEQ ID NO: 582891 - DNA, 25 bp, Homo sapien
gagtttaaatatccaatccctccaa

SEQ ID NO: 582892 - DNA, 25 bp, Homo sapien
atttccttgggtattagctgaattt

SEQ ID NO: 582893 - DNA, 25 bp, Homo sapien
ctgaggatttggtgttgaatttcct

SEQ ID NO: 582894 - DNA, 25 bp, Homo sapien
tccttgggtattagctgaatttgga

SEQ ID NO: 582895 - DNA, 25 bp, Homo sapien
gtgttgaatttccttgggtattagc

SEQ ID NO: 582896 - DNA, 25 bp, Homo sapien
caagaaataaagtcaggtgtcgttt

SEQ ID NO: 582897 - DNA, 25 bp, Homo sapien
taaggtaagcacgacatggaaaaaa

SEQ ID NO: 582898 - DNA, 25 bp, Homo sapien
tggcagacaatttaacgcactgtgt

SEQ ID NO: 582899 - DNA, 25 bp, Homo sapien
gagttcttacattgcagtggcagac

SEQ ID NO: 582900 - DNA, 25 bp, Homo sapien
cagcatcgtaagctaggcatgtgaa

SEQ ID NO: 582901 - DNA, 25 bp, Homo sapien
taaagctgaaaaacaatgacactgg

SEQ ID NO: 582902 - DNA, 25 bp, Homo sapien
ggcatgtgaaatcttactatatcaa

SEQ ID NO: 582903 - DNA, 25 bp, Homo sapien
tagcttgtaagtttaaacagcatcg

SEQ ID NO: 582904 - DNA, 25 bp, Homo sapien
cagcatggataacatcatctcatta

SEQ ID NO: 582905 - DNA, 25 bp, Homo sapien
catggataacatcatctcattagtc

SEQ ID NO: 582906 - DNA, 25 bp, Homo sapien
taaacagcatggataacatcatctc

SEQ ID NO: 582907 - DNA, 25 bp, Homo sapien
tgattaaacagcatggataacatca

SEQ ID NO: 582908 - DNA, 25 bp, Homo sapien
gaatactgagtagacggaagagcct

SEQ ID NO: 582909 - DNA, 25 bp, Homo sapien
tgctaaatcggcaaattggctccaa

SEQ ID NO: 582910 - DNA, 25 bp, Homo sapien
gataaatggattcaacccacggaag

SEQ ID NO: 582911 - DNA, 25 bp, Homo sapien
gaacctgtaaggaattactgctgtg

SEQ ID NO: 582912 - DNA, 25 bp, Homo sapien
tcttaaatccctgtaaagcatccct

SEQ ID NO: 582913 - DNA, 25 bp, Homo sapien
aaaagcaatgtcatgcctccctggt

SEQ ID NO: 582914 - DNA, 25 bp, Homo sapien
aagcaatgtcatgcctccctggtac

SEQ ID NO: 582915 - DNA, 25 bp, Homo sapien
tgtgatcttaaatccctgtaaagca

SEQ ID NO: 582916 - DNA, 25 bp, Homo sapien
cttttaaagacgactatcccaaatg

SEQ ID NO: 582917 - DNA, 25 bp, Homo sapien
ctaactattaaaatgacccagccaa

SEQ ID NO: 582918 - DNA, 25 bp, Homo sapien
tagaaaagcatcctattacacaagt

SEQ ID NO: 582919 - DNA, 25 bp, Homo sapien
tcaatgatgttgtataattagctcc

SEQ ID NO: 582920 - DNA, 25 bp, Homo sapien
tctagactagaagtcatttgatgat

SEQ ID NO: 582921 - DNA, 25 bp, Homo sapien
tagctcctccaaagtaacactagaa

SEQ ID NO: 582922 - DNA, 25 bp, Homo sapien
gagattgcatattaaccttagaaca

SEQ ID NO: 582923 - DNA, 25 bp, Homo sapien
ccttagaacagtcctgcctcatgaa

SEQ ID NO: 582924 - DNA, 25 bp, Homo sapien
tgtggaatccctactagcagcaaaa

SEQ ID NO: 582925 - DNA, 25 bp, Homo sapien
ccctggaggtctttcaataaagaga

SEQ ID NO: 582926 - DNA, 25 bp, Homo sapien
gatacccatggtttactcagcagag

SEQ ID NO: 582927 - DNA, 25 bp, Homo sapien
aaatatttgaacattggtgtttaag

SEQ ID NO: 582928 - DNA, 25 bp, Homo sapien
taagaattacaaagaagtagcaagc

SEQ ID NO: 582929 - DNA, 25 bp, Homo sapien
gtccacttctggagatacccatggt

SEQ ID NO: 582930 - DNA, 25 bp, Homo sapien
ctgtaatatacaagaacatggccca

SEQ ID NO: 582931 - DNA, 25 bp, Homo sapien
gatactgtctacgtaagtctaaaag

SEQ ID NO: 582932 - DNA, 25 bp, Homo sapien
gagtcagactaactgtgacaaagtt

SEQ ID NO: 582933 - DNA, 25 bp, Homo sapien
aaagtacaggagcttgactactggg

SEQ ID NO: 582934 - DNA, 25 bp, Homo sapien
atgggatcagtctgtgaattatttt

SEQ ID NO: 582935 - DNA, 25 bp, Homo sapien
tcactcagagtataagcaaatcctg

SEQ ID NO: 582936 - DNA, 25 bp, Homo sapien
atacagccactcaaagcatggccag

SEQ ID NO: 582937 - DNA, 25 bp, Homo sapien
aatcctgaagaagacctacacgacc

SEQ ID NO: 582938 - DNA, 25 bp, Homo sapien
taacttgaactctgactggaagcgg

SEQ ID NO: 582939 - DNA, 25 bp, Homo sapien
aacttgaactctgactggaagcggg

SEQ ID NO: 582940 - DNA, 25 bp, Homo sapien
ttaacttgaactctgactggaagcg

SEQ ID NO: 582941 - DNA, 25 bp, Homo sapien
tacagccacaagacccgggaggaaa

SEQ ID NO: 582942 - DNA, 25 bp, Homo sapien
acatacagccacaagacccgggagg

SEQ ID NO: 582943 - DNA, 25 bp, Homo sapien
agcacatacagccacaagacccggg

SEQ ID NO: 582944 - DNA, 25 bp, Homo sapien
acagcacatacagccacaagacccg

SEQ ID NO: 582945 - DNA, 25 bp, Homo sapien
gagcttcttggaagctagacggtcc

SEQ ID NO: 582946 - DNA, 25 bp, Homo sapien
acagagcttcttggaagctagacgg

SEQ ID NO: 582947 - DNA, 25 bp, Homo sapien
gcttcttggaagctagacggtccat

SEQ ID NO: 582948 - DNA, 25 bp, Homo sapien
cagagcttcttggaagctagacggt

SEQ ID NO: 582949 - DNA, 25 bp, Homo sapien
ccaagtgaattctccgtagtaagat

SEQ ID NO: 582950 - DNA, 25 bp, Homo sapien
aaagctgataacatacacattggag

SEQ ID NO: 582951 - DNA, 25 bp, Homo sapien
gataattcccagttcatagctggtg

SEQ ID NO: 582952 - DNA, 25 bp, Homo sapien
tagctggtgtctatccaagagaaag

SEQ ID NO: 582953 - DNA, 25 bp, Homo sapien
ccggggcattataatcttcttgagc

SEQ ID NO: 582954 - DNA, 25 bp, Homo sapien
ttaatgaatctacagtccggggcat

SEQ ID NO: 582955 - DNA, 25 bp, Homo sapien
cagctttgagtacacatagatctgc

SEQ ID NO: 582956 - DNA, 25 bp, Homo sapien
atcttcttgagcactagccagagaa

SEQ ID NO: 582957 - DNA, 25 bp, Homo sapien
attctccagctccattttcttttac

SEQ ID NO: 582958 - DNA, 25 bp, Homo sapien
aaattctccagctccattttctttt

SEQ ID NO: 582959 - DNA, 25 bp, Homo sapien
caaaattctccagctccattttctt

SEQ ID NO: 582960 - DNA, 25 bp, Homo sapien
actgccagcccaaaattctccagct

SEQ ID NO: 582961 - DNA, 25 bp, Homo sapien
taagagcaatattcgtcaataggtg

SEQ ID NO: 582962 - DNA, 25 bp, Homo sapien
tctacttggcaaatcttctcagacg

SEQ ID NO: 582963 - DNA, 25 bp, Homo sapien
cagacgttttcggataagattcaaa

SEQ ID NO: 582964 - DNA, 25 bp, Homo sapien
gaccgcccctgtatattttaactga

SEQ ID NO: 582965 - DNA, 25 bp, Homo sapien
gactttattttacgcaatcttgtga

SEQ ID NO: 582966 - DNA, 25 bp, Homo sapien
tattttacgcaatcttgtgagttgc

SEQ ID NO: 582967 - DNA, 25 bp, Homo sapien
tagcatgactttattttacgcaatc

SEQ ID NO: 582968 - DNA, 25 bp, Homo sapien
cgcaatcttgtgagttgcctgaaat

SEQ ID NO: 582969 - DNA, 25 bp, Homo sapien
tacttggagcactaagttaacccgc

SEQ ID NO: 582970 - DNA, 25 bp, Homo sapien
tgcggcaaatccgaagtttacttgg

SEQ ID NO: 582971 - DNA, 25 bp, Homo sapien
agttaacccgcaggaattgtgcatc

SEQ ID NO: 582972 - DNA, 25 bp, Homo sapien
ggcaaatccgaagtttacttggagc

SEQ ID NO: 582973 - DNA, 25 bp, Homo sapien
gtcctctttgctgatagtgagaatc

SEQ ID NO: 582974 - DNA, 25 bp, Homo sapien
ctttgctgatagtgagaatcatagc

SEQ ID NO: 582975 - DNA, 25 bp, Homo sapien
tcttctgagaaactcgcaggcgtcc

SEQ ID NO: 582976 - DNA, 25 bp, Homo sapien
atcatagctgccaatacctcccttt

SEQ ID NO: 582977 - DNA, 25 bp, Homo sapien
tacacacgctgttccttgaccaagt

SEQ ID NO: 582978 - DNA, 25 bp, Homo sapien
cgtggtgggaacttccttggtagct

SEQ ID NO: 582979 - DNA, 25 bp, Homo sapien
acgactcccatctcgtcctggccat

SEQ ID NO: 582980 - DNA, 25 bp, Homo sapien
cttggtagcttcctggtacacacgc

SEQ ID NO: 582981 - DNA, 25 bp, Homo sapien
tcccatttgtgtaggatgagcagtg

SEQ ID NO: 582982 - DNA, 25 bp, Homo sapien
taagaagtgatgacaagtgagtccc

SEQ ID NO: 582983 - DNA, 25 bp, Homo sapien
tgagtttacaggaccccagggcatt

SEQ ID NO: 582984 - DNA, 25 bp, Homo sapien
aagattgaacgaaatagcctaggct

SEQ ID NO: 582985 - DNA, 25 bp, Homo sapien
ttggccacttttgctcttttcttta

SEQ ID NO: 582986 - DNA, 25 bp, Homo sapien
tggccacttttgctcttttctttat

SEQ ID NO: 582987 - DNA, 25 bp, Homo sapien
agggaagacatacgacccacctatt

SEQ ID NO: 582988 - DNA, 25 bp, Homo sapien
caattggccagagagacaaatgagt

SEQ ID NO: 582989 - DNA, 25 bp, Homo sapien
tttccccgctctagctcgtgggcag

SEQ ID NO: 582990 - DNA, 25 bp, Homo sapien
catttgagctcaacatttccccgct

SEQ ID NO: 582991 - DNA, 25 bp, Homo sapien
catctatgggtccaaaaactcttct

SEQ ID NO: 582992 - DNA, 25 bp, Homo sapien
tatagaaaaacttgtgggcccatca

SEQ ID NO: 582993 - DNA, 25 bp, Homo sapien
ccagcaaggatacatattaagggaa

SEQ ID NO: 582994 - DNA, 25 bp, Homo sapien
tgactagaggaatttgcacaggaag

SEQ ID NO: 582995 - DNA, 25 bp, Homo sapien
gcttaggggatgtccagatcacaga

SEQ ID NO: 582996 - DNA, 25 bp, Homo sapien
gtctgtggctcaccctaaatgccct

SEQ ID NO: 582997 - DNA, 25 bp, Homo sapien
aaatgaccctgggccaagtctgtgg

SEQ ID NO: 582998 - DNA, 25 bp, Homo sapien
agatattcacccaaaatcacagctg

SEQ ID NO: 582999 - DNA, 25 bp, Homo sapien
tattcttctataggtagatgtctta

SEQ ID NO: 583000 - DNA, 25 bp, Homo sapien
tataggtagatgtcttacttcccat

SEQ ID NO: 583001 - DNA, 25 bp, Homo sapien
tccactgctctgcaatggttcttta

SEQ ID NO: 583002 - DNA, 25 bp, Homo sapien
ctttcctccccacatccactgctct

SEQ ID NO: 583003 - DNA, 25 bp, Homo sapien
tgcttttgagtgccaggtgttcttc

SEQ ID NO: 583004 - DNA, 25 bp, Homo sapien
gtgcttttgagtgccaggtgttctt

SEQ ID NO: 583005 - DNA, 25 bp, Homo sapien
gcttttgagtgccaggtgttcttcc

SEQ ID NO: 583006 - DNA, 25 bp, Homo sapien
tagtcagtcctagcttgatgaattt

SEQ ID NO: 583007 - DNA, 25 bp, Homo sapien
tgtttgaatagtcagtcctagcttg

SEQ ID NO: 583008 - DNA, 25 bp, Homo sapien
aaagaactgtcttgtttgaatagtc

SEQ ID NO: 583009 - DNA, 25 bp, Homo sapien
aggaattaaagaactgtcttgtttg

SEQ ID NO: 583010 - DNA, 25 bp, Homo sapien
gcctgtactacaaggttttcgtagc

SEQ ID NO: 583011 - DNA, 25 bp, Homo sapien
gcacccaaaagcctgtactacaagg

SEQ ID NO: 583012 - DNA, 25 bp, Homo sapien
ttaataaaatgcacccaaaagcctg

SEQ ID NO: 583013 - DNA, 25 bp, Homo sapien
caaggttttcgtagctctgagtcat

SEQ ID NO: 583014 - DNA, 25 bp, Homo sapien
gacctttctcaacctagcagccatt

SEQ ID NO: 583015 - DNA, 25 bp, Homo sapien
gtaaagacctttctcaacctagcag

SEQ ID NO: 583016 - DNA, 25 bp, Homo sapien
agaaaatgttccctctttgttgagt

SEQ ID NO: 583017 - DNA, 25 bp, Homo sapien
tattcagcttcctgacttgagaaaa

SEQ ID NO: 583018 - DNA, 25 bp, Homo sapien
tgcctgaacttgtcgtccagggctg

SEQ ID NO: 583019 - DNA, 25 bp, Homo sapien
tccagggctgccatgaggttacagg

SEQ ID NO: 583020 - DNA, 25 bp, Homo sapien
tgtgcctgatgcctgaacttgtcgt

SEQ ID NO: 583021 - DNA, 25 bp, Homo sapien
agaatagaaagactccatgtgtgcc

SEQ ID NO: 583022 - DNA, 25 bp, Homo sapien
cacactgtcagtcaagggacaatcc

SEQ ID NO: 583023 - DNA, 25 bp, Homo sapien
actgtcagtcaagggacaatccact

SEQ ID NO: 583024 - DNA, 25 bp, Homo sapien
aataagcattcattatctccaccat

SEQ ID NO: 583025 - DNA, 25 bp, Homo sapien
gtcacactgtcagtcaagggacaat

SEQ ID NO: 583026 - DNA, 25 bp, Homo sapien
cattcttgtagtggcttgaggctct

SEQ ID NO: 583027 - DNA, 25 bp, Homo sapien
gaccctagctctaaggctgacagaa

SEQ ID NO: 583028 - DNA, 25 bp, Homo sapien
caaacgcattgtctaggccgggcga

SEQ ID NO: 583029 - DNA, 25 bp, Homo sapien
tatacaataggaaaacgcaggattc

SEQ ID NO: 583030 - DNA, 25 bp, Homo sapien
cacacgagggagctcccacttctca

SEQ ID NO: 583031 - DNA, 25 bp, Homo sapien
tccccagtatggagctgccacacga

SEQ ID NO: 583032 - DNA, 25 bp, Homo sapien
cttaaagtcacaagctggattagga

SEQ ID NO: 583033 - DNA, 25 bp, Homo sapien
ttaaagtcacaagctggattaggag

SEQ ID NO: 583034 - DNA, 25 bp, Homo sapien
catcttgagctaaggtcagcaaatg

SEQ ID NO: 583035 - DNA, 25 bp, Homo sapien
ttgcctgcattaatatcatcttgag

SEQ ID NO: 583036 - DNA, 25 bp, Homo sapien
attgcctgcattaatatcatcttga

SEQ ID NO: 583037 - DNA, 25 bp, Homo sapien
atatcatcttgagctaaggtcagca

SEQ ID NO: 583038 - DNA, 25 bp, Homo sapien
ctggcaatggcagttcggatgaggg

SEQ ID NO: 583039 - DNA, 25 bp, Homo sapien
tcggatgaggggtaacaccttctct

SEQ ID NO: 583040 - DNA, 25 bp, Homo sapien
gcagttcggatgaggggtaacacct

SEQ ID NO: 583041 - DNA, 25 bp, Homo sapien
gatgaggggtaacaccttctctcac

SEQ ID NO: 583042 - DNA, 25 bp, Homo sapien
cctcgacaacttggtgtaggattgg

SEQ ID NO: 583043 - DNA, 25 bp, Homo sapien
gattttcctcgacaacttggtgtag

SEQ ID NO: 583044 - DNA, 25 bp, Homo sapien
agattttcctcgacaacttggtgta

SEQ ID NO: 583045 - DNA, 25 bp, Homo sapien
gacaacttggtgtaggattgggccc

SEQ ID NO: 583046 - DNA, 25 bp, Homo sapien
aacccagttcttcaactttcttcat

SEQ ID NO: 583047 - DNA, 25 bp, Homo sapien
ctctttcaaacccagttcttcaact

SEQ ID NO: 583048 - DNA, 25 bp, Homo sapien
tgggggggatcaaacagccagacag

SEQ ID NO: 583049 - DNA, 25 bp, Homo sapien
cagctgctgtgggggggatcaaaca

SEQ ID NO: 583050 - DNA, 25 bp, Homo sapien
tgtgggggggatcaaacagccagac

SEQ ID NO: 583051 - DNA, 25 bp, Homo sapien
tgctgtgggggggatcaaacagcca

SEQ ID NO: 583052 - DNA, 25 bp, Homo sapien
gggcccactggtgggtgctgcactt

SEQ ID NO: 583053 - DNA, 25 bp, Homo sapien
ggccacctcagagaactttctccac

SEQ ID NO: 583054 - DNA, 25 bp, Homo sapien
cttgctggagacatcagtgttgtcc

SEQ ID NO: 583055 - DNA, 25 bp, Homo sapien
aagatccaaagctataccaggagag

SEQ ID NO: 583056 - DNA, 25 bp, Homo sapien
ctttgaactggatgcatggactcac

SEQ ID NO: 583057 - DNA, 25 bp, Homo sapien
agagggtagccctttgaactggatg

SEQ ID NO: 583058 - DNA, 25 bp, Homo sapien
aatgcaatgcagtgaacatccccag

SEQ ID NO: 583059 - DNA, 25 bp, Homo sapien
gatgttcagaacagcaaacttctcc

SEQ ID NO: 583060 - DNA, 25 bp, Homo sapien
catccccagcaccattaaacttggg

SEQ ID NO: 583061 - DNA, 25 bp, Homo sapien
ctcacgactcgttttcccaatggca

SEQ ID NO: 583062 - DNA, 25 bp, Homo sapien
gctggacgcagctgagctcgtggag

SEQ ID NO: 583063 - DNA, 25 bp, Homo sapien
gaaggtctccatagagaaagctggg

SEQ ID NO: 583064 - DNA, 25 bp, Homo sapien
gcagctgagctcgtggagattggct

SEQ ID NO: 583065 - DNA, 25 bp, Homo sapien
tggctgaaggtctccatagagaaag

SEQ ID NO: 583066 - DNA, 25 bp, Homo sapien
caggtcgggaaactggactcttacg

SEQ ID NO: 583067 - DNA, 25 bp, Homo sapien
ctggactcttacgttgttttccaag

SEQ ID NO: 583068 - DNA, 25 bp, Homo sapien
tccatagcaactggtgtggtaaggc

SEQ ID NO: 583069 - DNA, 25 bp, Homo sapien
tgtggtaaggcataccagtgtactg

SEQ ID NO: 583070 - DNA, 25 bp, Homo sapien
taaggcataccagtgtactggaaac

SEQ ID NO: 583071 - DNA, 25 bp, Homo sapien
caactggtgtggtaaggcataccag

SEQ ID NO: 583072 - DNA, 25 bp, Homo sapien
agttttatcaaccaaatcttccagg

SEQ ID NO: 583073 - DNA, 25 bp, Homo sapien
tatcaaccaaatcttccaggtgtca

SEQ ID NO: 583074 - DNA, 25 bp, Homo sapien
ttttatcaaccaaatcttccaggtg

SEQ ID NO: 583075 - DNA, 25 bp, Homo sapien
taggcagttttatcaaccaaatctt

SEQ ID NO: 583076 - DNA, 25 bp, Homo sapien
cagggcttcacttgttgcaaatcta

SEQ ID NO: 583077 - DNA, 25 bp, Homo sapien
tacagtcacaaacttagtcaaaggg

SEQ ID NO: 583078 - DNA, 25 bp, Homo sapien
tctacctggtaggatggccttacca

SEQ ID NO: 583079 - DNA, 25 bp, Homo sapien
tttttgaaggcaatacagtcacaaa

SEQ ID NO: 583080 - DNA, 25 bp, Homo sapien
tgttcttgctgtaatatttaagtta

SEQ ID NO: 583081 - DNA, 25 bp, Homo sapien
caagttattccttacacgagtttgc

SEQ ID NO: 583082 - DNA, 25 bp, Homo sapien
cagtgtaaccaaagtaatggttgcc

SEQ ID NO: 583083 - DNA, 25 bp, Homo sapien
tggttgccaagatgctcaatacggt

SEQ ID NO: 583084 - DNA, 25 bp, Homo sapien
cagaagcaatcagaaacttaaagct

SEQ ID NO: 583085 - DNA, 25 bp, Homo sapien
ttcagaagcaatcagaaacttaaag

SEQ ID NO: 583086 - DNA, 25 bp, Homo sapien
tcagggttaaattcagaagcaatca

SEQ ID NO: 583087 - DNA, 25 bp, Homo sapien
ctttaagatcagggttaaattcaga

SEQ ID NO: 583088 - DNA, 25 bp, Homo sapien
tccagtccactcatgttcccacaaa

SEQ ID NO: 583089 - DNA, 25 bp, Homo sapien
ttagctgctgatgcatattgatcag

SEQ ID NO: 583090 - DNA, 25 bp, Homo sapien
ctttgcccttaagtaggccccagtg

SEQ ID NO: 583091 - DNA, 25 bp, Homo sapien
tctttgtgtccgtatattctcatca

SEQ ID NO: 583092 - DNA, 25 bp, Homo sapien
tgtgttggttaacctctcattcatg

SEQ ID NO: 583093 - DNA, 25 bp, Homo sapien
tagataaactgccttcccctttgac

SEQ ID NO: 583094 - DNA, 25 bp, Homo sapien
gcagcaccattaacaccagggctgg

SEQ ID NO: 583095 - DNA, 25 bp, Homo sapien
ttaacaccagggctggagatccctg

SEQ ID NO: 583096 - DNA, 25 bp, Homo sapien
gaatgtggtggctgcggtacaatac

SEQ ID NO: 583097 - DNA, 25 bp, Homo sapien
tgagaatgtggtggctgcggtacaa

SEQ ID NO: 583098 - DNA, 25 bp, Homo sapien
gatgagaatgtggtggctgcggtac

SEQ ID NO: 583099 - DNA, 25 bp, Homo sapien
gggatgagaatgtggtggctgcggt

SEQ ID NO: 583100 - DNA, 25 bp, Homo sapien
gggcatccactaagtcttacattta

SEQ ID NO: 583101 - DNA, 25 bp, Homo sapien
tggggcatccactaagtcttacatt

SEQ ID NO: 583102 - DNA, 25 bp, Homo sapien
cctggggcatccactaagtcttaca

SEQ ID NO: 583103 - DNA, 25 bp, Homo sapien
ggcatccactaagtcttacatttat

SEQ ID NO: 583104 - DNA, 25 bp, Homo sapien
tctaaaatgaatgccacgaacagag

SEQ ID NO: 583105 - DNA, 25 bp, Homo sapien
acagagtgggggatataaaatagct

SEQ ID NO: 583106 - DNA, 25 bp, Homo sapien
gggcttctaaaatgaatgccacgaa

SEQ ID NO: 583107 - DNA, 25 bp, Homo sapien
aaatgaatgccacgaacagagtggg

SEQ ID NO: 583108 - DNA, 25 bp, Homo sapien
gctgtacatctggagtagcaaaata

SEQ ID NO: 583109 - DNA, 25 bp, Homo sapien
gataactgaatctagaaggctgtac

SEQ ID NO: 583110 - DNA, 25 bp, Homo sapien
cttaattggtgataactgaatctag

SEQ ID NO: 583111 - DNA, 25 bp, Homo sapien
gaatctagaaggctgtacatctgga

SEQ ID NO: 583112 - DNA, 25 bp, Homo sapien
gaacgttacccacatttctgtccaa

SEQ ID NO: 583113 - DNA, 25 bp, Homo sapien
ggagcagtgtcctgttgattcccac

SEQ ID NO: 583114 - DNA, 25 bp, Homo sapien
caaacaattggtaaaagagagcctc

SEQ ID NO: 583115 - DNA, 25 bp, Homo sapien
gagcctccacagcttcattagcaga

SEQ ID NO: 583116 - DNA, 25 bp, Homo sapien
cctgaagaaaccacaaaagcgttct

SEQ ID NO: 583117 - DNA, 25 bp, Homo sapien
tcctcagcccatggcttggatcctg

SEQ ID NO: 583118 - DNA, 25 bp, Homo sapien
cccagttaggaaggactgctatgcc

SEQ ID NO: 583119 - DNA, 25 bp, Homo sapien
ctcagatatcccacagcccagttag

SEQ ID NO: 583120 - DNA, 25 bp, Homo sapien
ttgagcccttcaggctgacttcctg

SEQ ID NO: 583121 - DNA, 25 bp, Homo sapien
tctggatagagatgcacctcctctg

SEQ ID NO: 583122 - DNA, 25 bp, Homo sapien
tgcaactccacctattgccatgtac

SEQ ID NO: 583123 - DNA, 25 bp, Homo sapien
catttgtcatctggatagagatgca

SEQ ID NO: 583124 - DNA, 25 bp, Homo sapien
tgaagaacagaccccgtatgtcaga

SEQ ID NO: 583125 - DNA, 25 bp, Homo sapien
ctgataccagagtcatgacataagg

SEQ ID NO: 583126 - DNA, 25 bp, Homo sapien
tgataccagagtcatgacataaggt

SEQ ID NO: 583127 - DNA, 25 bp, Homo sapien
gacccaggagatggtaatctgtctc

SEQ ID NO: 583128 - DNA, 25 bp, Homo sapien
gggaagggatgctgacacctttttg

SEQ ID NO: 583129 - DNA, 25 bp, Homo sapien
cattcagaacttgatacgcagcccc

SEQ ID NO: 583130 - DNA, 25 bp, Homo sapien
tgcatatgggaaatgagcgtgttcc

SEQ ID NO: 583131 - DNA, 25 bp, Homo sapien
tctctccctctcaataacaccagtg

SEQ ID NO: 583132 - DNA, 25 bp, Homo sapien
tctccctctcaataacaccagtgag

SEQ ID NO: 583133 - DNA, 25 bp, Homo sapien
cttgtgtagtatcttacaggggtta

SEQ ID NO: 583134 - DNA, 25 bp, Homo sapien
gtagtatcttacaggggttatttgc

SEQ ID NO: 583135 - DNA, 25 bp, Homo sapien
tagtatatgtgctgcggaggggagc

SEQ ID NO: 583136 - DNA, 25 bp, Homo sapien
agtatatgtgctgcggaggggagca

SEQ ID NO: 583137 - DNA, 25 bp, Homo sapien
tatatgtgctgcggaggggagcacc

SEQ ID NO: 583138 - DNA, 25 bp, Homo sapien
gtcacatctctatatcaattcttct

SEQ ID NO: 583139 - DNA, 25 bp, Homo sapien
ttctgcaacgtcacatctctatatc

SEQ ID NO: 583140 - DNA, 25 bp, Homo sapien
ttacagacagtaacacccaggtttc

SEQ ID NO: 583141 - DNA, 25 bp, Homo sapien
tacagacagtaacacccaggtttct

SEQ ID NO: 583142 - DNA, 25 bp, Homo sapien
tgaaaaaaaatacttcgacatagag

SEQ ID NO: 583143 - DNA, 25 bp, Homo sapien
gacatcatccaaaacgaatatttga

SEQ ID NO: 583144 - DNA, 25 bp, Homo sapien
cccttacaaatggtaaagcggacat

SEQ ID NO: 583145 - DNA, 25 bp, Homo sapien
gaaccacagtcagatcatgcagccc

SEQ ID NO: 583146 - DNA, 25 bp, Homo sapien
attgcaggagtttgtacatccagag

SEQ ID NO: 583147 - DNA, 25 bp, Homo sapien
aggagtttgtacatccagagtgcaa

SEQ ID NO: 583148 - DNA, 25 bp, Homo sapien
caggagtttgtacatccagagtgca

SEQ ID NO: 583149 - DNA, 25 bp, Homo sapien
tgcaggagtttgtacatccagagtg

SEQ ID NO: 583150 - DNA, 25 bp, Homo sapien
tctgccttcaggagagacgcggccg

SEQ ID NO: 583151 - DNA, 25 bp, Homo sapien
tggaggaggctcctctaggagtcct

SEQ ID NO: 583152 - DNA, 25 bp, Homo sapien
cacaaggacagcgagggtgctagtt

SEQ ID NO: 583153 - DNA, 25 bp, Homo sapien
caagtcgcccgctgaacgtcttcta

SEQ ID NO: 583154 - DNA, 25 bp, Homo sapien
cttctaggggtgatccatggggggc

SEQ ID NO: 583155 - DNA, 25 bp, Homo sapien
gggcgagagtgcaaggacgagccct

SEQ ID NO: 583156 - DNA, 25 bp, Homo sapien
ccatggggggcgagagtgcaaggac

SEQ ID NO: 583157 - DNA, 25 bp, Homo sapien
gagtgcaaggacgagcccttgtttt

SEQ ID NO: 583158 - DNA, 25 bp, Homo sapien
gaaagagactgaacagggtcttgga

SEQ ID NO: 583159 - DNA, 25 bp, Homo sapien
gtctgtgcttgatgctaaatctgca

SEQ ID NO: 583160 - DNA, 25 bp, Homo sapien
gtcttggaaagcagcgaatcagtgt

SEQ ID NO: 583161 - DNA, 25 bp, Homo sapien
aaagagcgagtgtaggtctgtgctt

SEQ ID NO: 583162 - DNA, 25 bp, Homo sapien
cacagaagaggaacccggcggccgc

SEQ ID NO: 583163 - DNA, 25 bp, Homo sapien
gacacagaagaggaacccggcggcc

SEQ ID NO: 583164 - DNA, 25 bp, Homo sapien
acacagaagaggaacccggcggccg

SEQ ID NO: 583165 - DNA, 25 bp, Homo sapien
tgcaacttggcgagctttgtcctct

SEQ ID NO: 583166 - DNA, 25 bp, Homo sapien
aagaccggtcgctcagcagatgcaa

SEQ ID NO: 583167 - DNA, 25 bp, Homo sapien
ctttcggactccaaagccgtgttct

SEQ ID NO: 583168 - DNA, 25 bp, Homo sapien
caagaaaatgattcgtgaagaccgg

SEQ ID NO: 583169 - DNA, 25 bp, Homo sapien
caggcagcctcgagaacttggtacc

SEQ ID NO: 583170 - DNA, 25 bp, Homo sapien
gaattgcagtgtccaaacgtccagc

SEQ ID NO: 583171 - DNA, 25 bp, Homo sapien
ggccaagtagccaacgccaggctta

SEQ ID NO: 583172 - DNA, 25 bp, Homo sapien
aacgtccagcctcgtctgtaggaaa

SEQ ID NO: 583173 - DNA, 25 bp, Homo sapien
ttgagaactagggagccaaccagaa

SEQ ID NO: 583174 - DNA, 25 bp, Homo sapien
tccaaatctagagtcaggaagccgt

SEQ ID NO: 583175 - DNA, 25 bp, Homo sapien
tgagggcgcagaagttccgccccga

SEQ ID NO: 583176 - DNA, 25 bp, Homo sapien
tcctgtagccgggagttgagaacta

SEQ ID NO: 583177 - DNA, 25 bp, Homo sapien
acgctctagtgggaaagccaggctg

SEQ ID NO: 583178 - DNA, 25 bp, Homo sapien
tcaaactgtcgaactctggcaactt

SEQ ID NO: 583179 - DNA, 25 bp, Homo sapien
tggccgcccacgcatcaggagagga

SEQ ID NO: 583180 - DNA, 25 bp, Homo sapien
ggacacctcgacttctccgtaggga

SEQ ID NO: 583181 - DNA, 25 bp, Homo sapien
cccctaaggacactggagaaccctg

SEQ ID NO: 583182 - DNA, 25 bp, Homo sapien
aggccacgggccaaaaccacagcgg

SEQ ID NO: 583183 - DNA, 25 bp, Homo sapien
gctttccagagcaacaagttccttt

SEQ ID NO: 583184 - DNA, 25 bp, Homo sapien
tcgaaattccggtactgcctacgcc

SEQ ID NO: 583185 - DNA, 25 bp, Homo sapien
aaactcgtcgccagacccttctggg

SEQ ID NO: 583186 - DNA, 25 bp, Homo sapien
cctgaagacataaatacacgtaccc

SEQ ID NO: 583187 - DNA, 25 bp, Homo sapien
aaatattcatatacaggccaccatg

SEQ ID NO: 583188 - DNA, 25 bp, Homo sapien
gaaagcatgttcttctagcctccat

SEQ ID NO: 583189 - DNA, 25 bp, Homo sapien
catctgagaattacagctgatgcca

SEQ ID NO: 583190 - DNA, 25 bp, Homo sapien
tcatcacacttgatgctttccttca

SEQ ID NO: 583191 - DNA, 25 bp, Homo sapien
acttcatcacacttgatgctttcct

SEQ ID NO: 583192 - DNA, 25 bp, Homo sapien
catcacacttgatgctttccttcat

SEQ ID NO: 583193 - DNA, 25 bp, Homo sapien
ctccacttcatcacacttgatgctt

SEQ ID NO: 583194 - DNA, 25 bp, Homo sapien
tgaagggatggtctatatttggtac

SEQ ID NO: 583195 - DNA, 25 bp, Homo sapien
ttgaagggatggtctatatttggta

SEQ ID NO: 583196 - DNA, 25 bp, Homo sapien
cttgaagggatggtctatatttggt

SEQ ID NO: 583197 - DNA, 25 bp, Homo sapien
actgaacttcaagagatcacaaatg

SEQ ID NO: 583198 - DNA, 25 bp, Homo sapien
tgcctaaagtgctgctactgaactt

SEQ ID NO: 583199 - DNA, 25 bp, Homo sapien
aagtgctgctactgaacttcaagag

SEQ ID NO: 583200 - DNA, 25 bp, Homo sapien
gctgctactgaacttcaagagatca

SEQ ID NO: 583201 - DNA, 25 bp, Homo sapien
cccacagccaagtggattgtacaca

SEQ ID NO: 583202 - DNA, 25 bp, Homo sapien
gtcaattctaatagagccgctccaa

SEQ ID NO: 583203 - DNA, 25 bp, Homo sapien
gatcatctgccttgtcgtgttctca

SEQ ID NO: 583204 - DNA, 25 bp, Homo sapien
ttgtcaacctccaactgaatatccc

SEQ ID NO: 583205 - DNA, 25 bp, Homo sapien
gataaaagtggtacagaccttcagc

SEQ ID NO: 583206 - DNA, 25 bp, Homo sapien
tgtgataaaagtggtacagaccttc

SEQ ID NO: 583207 - DNA, 25 bp, Homo sapien
taaaagtggtacagaccttcagcaa

SEQ ID NO: 583208 - DNA, 25 bp, Homo sapien
agtggtacagaccttcagcaaaggg

SEQ ID NO: 583209 - DNA, 25 bp, Homo sapien
gtaggctgcgtcttctcttggcctt

SEQ ID NO: 583210 - DNA, 25 bp, Homo sapien
gtgtaggctgcgtcttctcttggcc

SEQ ID NO: 583211 - DNA, 25 bp, Homo sapien
ggtgtaggctgcgtcttctcttggc

SEQ ID NO: 583212 - DNA, 25 bp, Homo sapien
tgtggtgtaggctgcgtcttctctt

SEQ ID NO: 583213 - DNA, 25 bp, Homo sapien
gtagatgaagccctgaaagcgaata

SEQ ID NO: 583214 - DNA, 25 bp, Homo sapien
aagcgaatagcagctcagaccaccc

SEQ ID NO: 583215 - DNA, 25 bp, Homo sapien
gaagccctgaaagcgaatagcagct

SEQ ID NO: 583216 - DNA, 25 bp, Homo sapien
cctgaaagcgaatagcagctcagac

SEQ ID NO: 583217 - DNA, 25 bp, Homo sapien
agaacagtgagctcaagtgccgccc

SEQ ID NO: 583218 - DNA, 25 bp, Homo sapien
acagtgagctcaagtgccgcccttt

SEQ ID NO: 583219 - DNA, 25 bp, Homo sapien
gctcaagtgccgccctttttatttc

SEQ ID NO: 583220 - DNA, 25 bp, Homo sapien
tcacttttccatttatagctgagct

SEQ ID NO: 583221 - DNA, 25 bp, Homo sapien
gggaaccgaggccaactgcatactc

SEQ ID NO: 583222 - DNA, 25 bp, Homo sapien
gaaccgaggccaactgcatactcag

SEQ ID NO: 583223 - DNA, 25 bp, Homo sapien
ggccaactgcatactcagctgcctt

SEQ ID NO: 583224 - DNA, 25 bp, Homo sapien
ccgaggccaactgcatactcagctg

SEQ ID NO: 583225 - DNA, 25 bp, Homo sapien
gctgtcaagtaactctcaacttgca

SEQ ID NO: 583226 - DNA, 25 bp, Homo sapien
tttcctgatgctgtcaagtaactct

SEQ ID NO: 583227 - DNA, 25 bp, Homo sapien
tcctgatgctgtcaagtaactctca

SEQ ID NO: 583228 - DNA, 25 bp, Homo sapien
ctccttttcctgatgctgtcaagta

SEQ ID NO: 583229 - DNA, 25 bp, Homo sapien
ggagatgctgaaagtcctccctgcc

SEQ ID NO: 583230 - DNA, 25 bp, Homo sapien
ctgcaatgcccagaggagatgctga

SEQ ID NO: 583231 - DNA, 25 bp, Homo sapien
gcccagaggagatgctgaaagtcct

SEQ ID NO: 583232 - DNA, 25 bp, Homo sapien
tgctgaaagtcctccctgccacatt

SEQ ID NO: 583233 - DNA, 25 bp, Homo sapien
tagttaattatagcaccagcagcag

SEQ ID NO: 583234 - DNA, 25 bp, Homo sapien
tgtagctgtagtaaataattctccc

SEQ ID NO: 583235 - DNA, 25 bp, Homo sapien
cattagcagctttccctgtgccttt

SEQ ID NO: 583236 - DNA, 25 bp, Homo sapien
ttccccacaaatagttaattatagc

SEQ ID NO: 583237 - DNA, 25 bp, Homo sapien
acggtatatcaatctctccacctgg

SEQ ID NO: 583238 - DNA, 25 bp, Homo sapien
tctctccccacggtatatcaatctc

SEQ ID NO: 583239 - DNA, 25 bp, Homo sapien
cctggcttggcctactcacagcatg

SEQ ID NO: 583240 - DNA, 25 bp, Homo sapien
tggagttctcagggtaatcacaatt

SEQ ID NO: 583241 - DNA, 25 bp, Homo sapien
gagagtcttgaaggtgaacctcacc

SEQ ID NO: 583242 - DNA, 25 bp, Homo sapien
catgcccagtttgacctcagatgga

SEQ ID NO: 583243 - DNA, 25 bp, Homo sapien
ccattgcacagttaggaggacaaag

SEQ ID NO: 583244 - DNA, 25 bp, Homo sapien
tgaaagaccttccagacaagtgaaa

SEQ ID NO: 583245 - DNA, 25 bp, Homo sapien
aaagttcactggctttccttctgga

SEQ ID NO: 583246 - DNA, 25 bp, Homo sapien
atcagggccaggagaagtgtttaga

SEQ ID NO: 583247 - DNA, 25 bp, Homo sapien
tctggactgcattcttcatcagggc

SEQ ID NO: 583248 - DNA, 25 bp, Homo sapien
aaggctgaagttaggtatggggtca

SEQ ID NO: 583249 - DNA, 25 bp, Homo sapien
tgcaaatggcagactaagagccact

SEQ ID NO: 583250 - DNA, 25 bp, Homo sapien
taatgagtctcctttgcttgtccgt

SEQ ID NO: 583251 - DNA, 25 bp, Homo sapien
ccatgggctaaagtgaacatttggg

SEQ ID NO: 583252 - DNA, 25 bp, Homo sapien
tctttgaaaagatcagaccatgggc

SEQ ID NO: 583253 - DNA, 25 bp, Homo sapien
ctgtgaacgatataaatgtaaatga

SEQ ID NO: 583254 - DNA, 25 bp, Homo sapien
gatgacagagctttgttaactccca

SEQ ID NO: 583255 - DNA, 25 bp, Homo sapien
ggtggagttgatataacaatgccca

SEQ ID NO: 583256 - DNA, 25 bp, Homo sapien
tcacacagtactcagaagatgacag

SEQ ID NO: 583257 - DNA, 25 bp, Homo sapien
ccaaaccagatgagatggcaatggt

SEQ ID NO: 583258 - DNA, 25 bp, Homo sapien
aagacagggcgttctgggacagaaa

SEQ ID NO: 583259 - DNA, 25 bp, Homo sapien
tgaggaagacagggcgttctgggac

SEQ ID NO: 583260 - DNA, 25 bp, Homo sapien
gattcccagtcaggctgctctttca

SEQ ID NO: 583261 - DNA, 25 bp, Homo sapien
tccccagattcccagtcaggctgct

SEQ ID NO: 583262 - DNA, 25 bp, Homo sapien
cagcccttgggtgagagctcatcac

SEQ ID NO: 583263 - DNA, 25 bp, Homo sapien
gtacagctgtgtgatccagcctgca

SEQ ID NO: 583264 - DNA, 25 bp, Homo sapien
gaagggcatgtacagctgtgtgatc

SEQ ID NO: 583265 - DNA, 25 bp, Homo sapien
gccagcccttgggtgagagctcatc

SEQ ID NO: 583266 - DNA, 25 bp, Homo sapien
agaccatgttgcagaatccctggcc

SEQ ID NO: 583267 - DNA, 25 bp, Homo sapien
tgacagaccatgttgcagaatccct

SEQ ID NO: 583268 - DNA, 25 bp, Homo sapien
ctctgtgacagaccatgttgcagaa

SEQ ID NO: 583269 - DNA, 25 bp, Homo sapien
attgctgtccatcgaagccaccctc

SEQ ID NO: 583270 - DNA, 25 bp, Homo sapien
cagtaaaatcggacagacaccagat

SEQ ID NO: 583271 - DNA, 25 bp, Homo sapien
gaggctggagcagtaaaatcggaca

SEQ ID NO: 583272 - DNA, 25 bp, Homo sapien
aggctggagcagtaaaatcggacag

SEQ ID NO: 583273 - DNA, 25 bp, Homo sapien
gtaaaatcggacagacaccagattc

SEQ ID NO: 583274 - DNA, 25 bp, Homo sapien
ttgctgctttacactggcagtcaca

SEQ ID NO: 583275 - DNA, 25 bp, Homo sapien
ctgtcttgctgctttacactggcag

SEQ ID NO: 583276 - DNA, 25 bp, Homo sapien
tcttgctgctttacactggcagtca

SEQ ID NO: 583277 - DNA, 25 bp, Homo sapien
gctgctttacactggcagtcacatt

SEQ ID NO: 583278 - DNA, 25 bp, Homo sapien
gtttgacaggccaggttggaagaat

SEQ ID NO: 583279 - DNA, 25 bp, Homo sapien
aagggatgttcatttaggataaaat

SEQ ID NO: 583280 - DNA, 25 bp, Homo sapien
agtttgacaggccaggttggaagaa

SEQ ID NO: 583281 - DNA, 25 bp, Homo sapien
tttgacaggccaggttggaagaatt

SEQ ID NO: 583282 - DNA, 25 bp, Homo sapien
tttctcaaggcctggggttgcctga

SEQ ID NO: 583283 - DNA, 25 bp, Homo sapien
tactgtaacccaataagaatattct

SEQ ID NO: 583284 - DNA, 25 bp, Homo sapien
ttgacttgagcacaaaactcctact

SEQ ID NO: 583285 - DNA, 25 bp, Homo sapien
gttgcctgaagttctgggttaagca

SEQ ID NO: 583286 - DNA, 25 bp, Homo sapien
atacgagtgtttccctaaattcctg

SEQ ID NO: 583287 - DNA, 25 bp, Homo sapien
ttttcttgcctaacatttattagta

SEQ ID NO: 583288 - DNA, 25 bp, Homo sapien
attcctgggccatagaaacattttc

SEQ ID NO: 583289 - DNA, 25 bp, Homo sapien
gcagaaactgaactccctcttagaa

SEQ ID NO: 583290 - DNA, 25 bp, Homo sapien
cttcatcagtacagattgccaagcc

SEQ ID NO: 583291 - DNA, 25 bp, Homo sapien
cttctggtccatggcttcatcagta

SEQ ID NO: 583292 - DNA, 25 bp, Homo sapien
tctcttctggtccatggcttcatca

SEQ ID NO: 583293 - DNA, 25 bp, Homo sapien
tcttctggtccatggcttcatcagt

SEQ ID NO: 583294 - DNA, 25 bp, Homo sapien
agggccagagagtgatcggccaccc

SEQ ID NO: 583295 - DNA, 25 bp, Homo sapien
agagtgatcggccacccacgggttc

SEQ ID NO: 583296 - DNA, 25 bp, Homo sapien
ggagtcgcaggtccgacagagaccc

SEQ ID NO: 583297 - DNA, 25 bp, Homo sapien
gctgtgcaccgggacgctttccgcg

SEQ ID NO: 583298 - DNA, 25 bp, Homo sapien
tgcactgtgggagcatgctttttaa

SEQ ID NO: 583299 - DNA, 25 bp, Homo sapien
tctccatgcactgtgggagcatgct

SEQ ID NO: 583300 - DNA, 25 bp, Homo sapien
actgtgggagcatgctttttaagca

SEQ ID NO: 583301 - DNA, 25 bp, Homo sapien
gctgtaagtctttcgggagggccag

SEQ ID NO: 583302 - DNA, 25 bp, Homo sapien
tagggcacaggacctagcattttgc

SEQ ID NO: 583303 - DNA, 25 bp, Homo sapien
agggcacaggacctagcattttgct

SEQ ID NO: 583304 - DNA, 25 bp, Homo sapien
ggtagggcacaggacctagcatttt

SEQ ID NO: 583305 - DNA, 25 bp, Homo sapien
gtagggcacaggacctagcattttg

SEQ ID NO: 583306 - DNA, 25 bp, Homo sapien
gaaggggcagagggcgtcttccttc

SEQ ID NO: 583307 - DNA, 25 bp, Homo sapien
agggaggagaggggaaggggcagag

SEQ ID NO: 583308 - DNA, 25 bp, Homo sapien
ctgccccagggaggagaggggaagg

SEQ ID NO: 583309 - DNA, 25 bp, Homo sapien
gagaggggaaggggcagagggcgtc

SEQ ID NO: 583310 - DNA, 25 bp, Homo sapien
agggagcgccgcgttgccatggcag

SEQ ID NO: 583311 - DNA, 25 bp, Homo sapien
gtctatgggagggagcgccgcgttg

SEQ ID NO: 583312 - DNA, 25 bp, Homo sapien
tcgtggagggtgcactgtctatggg

SEQ ID NO: 583313 - DNA, 25 bp, Homo sapien
gagggtgcactgtctatgggaggga

SEQ ID NO: 583314 - DNA, 25 bp, Homo sapien
aatttgttgtattattctggccaat

SEQ ID NO: 583315 - DNA, 25 bp, Homo sapien
tcatggtgggattgttctaggtgca

SEQ ID NO: 583316 - DNA, 25 bp, Homo sapien
tcttctcaacatgggcatcgcgtgc

SEQ ID NO: 583317 - DNA, 25 bp, Homo sapien
cacagccgcttagcaaatttcttct

SEQ ID NO: 583318 - DNA, 25 bp, Homo sapien
caggctcaggattcaacaaacacag

SEQ ID NO: 583319 - DNA, 25 bp, Homo sapien
gggctcgatatagagggagatttct

SEQ ID NO: 583320 - DNA, 25 bp, Homo sapien
tccggggtgtggagatgaaagaggg

SEQ ID NO: 583321 - DNA, 25 bp, Homo sapien
tatttacgtaacagattatcttctg

SEQ ID NO: 583322 - DNA, 25 bp, Homo sapien
tgaccatatatttacgtaacagatt

SEQ ID NO: 583323 - DNA, 25 bp, Homo sapien
acattttttggccatccgtggccct

SEQ ID NO: 583324 - DNA, 25 bp, Homo sapien
aagtcagccatcaccttttttgaag

SEQ ID NO: 583325 - DNA, 25 bp, Homo sapien
tccgtggccctggactcattgcccc

SEQ ID NO: 583326 - DNA, 25 bp, Homo sapien
cgtaagaatccgctctgatcgctgt

SEQ ID NO: 583327 - DNA, 25 bp, Homo sapien
cattttcttccaggtgttgttctcc

SEQ ID NO: 583328 - DNA, 25 bp, Homo sapien
gatgtgtgggtgagaagtactggtc

SEQ ID NO: 583329 - DNA, 25 bp, Homo sapien
gagaagtactggtcctgtggttcca

SEQ ID NO: 583330 - DNA, 25 bp, Homo sapien
tgtgggtgagaagtactggtcctgt

SEQ ID NO: 583331 - DNA, 25 bp, Homo sapien
atctcagctttcagtcgaccctctt

SEQ ID NO: 583332 - DNA, 25 bp, Homo sapien
cactatgctacttagtgccacaggg

SEQ ID NO: 583333 - DNA, 25 bp, Homo sapien
gagctgtttccatggattggttgga

SEQ ID NO: 583334 - DNA, 25 bp, Homo sapien
gtcgaccctcttcagacacggatgg

SEQ ID NO: 583335 - DNA, 25 bp, Homo sapien
tccctaagaacatcgcaaaaactga

SEQ ID NO: 583336 - DNA, 25 bp, Homo sapien
caaccaagtgctgaaaatgtgctcc

SEQ ID NO: 583337 - DNA, 25 bp, Homo sapien
tctgggactgtatcctttaggaagc

SEQ ID NO: 583338 - DNA, 25 bp, Homo sapien
caaaatgttgtgatacgggcctgag

SEQ ID NO: 583339 - DNA, 25 bp, Homo sapien
cagctcctcagcttgggaatattcc

SEQ ID NO: 583340 - DNA, 25 bp, Homo sapien
ttagaccgagggcagcaatgacagg

SEQ ID NO: 583341 - DNA, 25 bp, Homo sapien
atttatcagtgtgtaccagctcctc

SEQ ID NO: 583342 - DNA, 25 bp, Homo sapien
cagcttgggaatattcctaacaata

SEQ ID NO: 583343 - DNA, 25 bp, Homo sapien
atggttctcactgaacagcagctga

SEQ ID NO: 583344 - DNA, 25 bp, Homo sapien
tattgcacatgtgagtattgagagg

SEQ ID NO: 583345 - DNA, 25 bp, Homo sapien
gtggccctggagcatgttcatggaa

SEQ ID NO: 583346 - DNA, 25 bp, Homo sapien
gctggacaggattggaaagatgcaa

SEQ ID NO: 583347 - DNA, 25 bp, Homo sapien
tcccgcatgcagagagagagctaat

SEQ ID NO: 583348 - DNA, 25 bp, Homo sapien
tctagggcttagaatgtgggcatct

SEQ ID NO: 583349 - DNA, 25 bp, Homo sapien
ccaccttgccatgtggcataacata

SEQ ID NO: 583350 - DNA, 25 bp, Homo sapien
gaggttggttgctgacaagttctac

SEQ ID NO: 583351 - DNA, 25 bp, Homo sapien
gccccagcacggtgatgcggaacaa

SEQ ID NO: 583352 - DNA, 25 bp, Homo sapien
acagagcacccgatgacagggcgtt

SEQ ID NO: 583353 - DNA, 25 bp, Homo sapien
gatgacagggcgttaatgagcccca

SEQ ID NO: 583354 - DNA, 25 bp, Homo sapien
taatgaatcgactttgcaatagtgc

SEQ ID NO: 583355 - DNA, 25 bp, Homo sapien
agctttttgcaaagatgctggttga

SEQ ID NO: 583356 - DNA, 25 bp, Homo sapien
gcaaagatgctggttgagattgttc

SEQ ID NO: 583357 - DNA, 25 bp, Homo sapien
ttgagattgttcgaggaaggaacag

SEQ ID NO: 583358 - DNA, 25 bp, Homo sapien
atgctggttgagattgttcgaggaa

SEQ ID NO: 583359 - DNA, 25 bp, Homo sapien
gggctcagatattctagttcatctg

SEQ ID NO: 583360 - DNA, 25 bp, Homo sapien
gttcatctgctttgccgccaactgc

SEQ ID NO: 583361 - DNA, 25 bp, Homo sapien
tgctggctttggttgtcgagatcca

SEQ ID NO: 583362 - DNA, 25 bp, Homo sapien
cccaaaagcgattgatggaagtgat

SEQ ID NO: 583363 - DNA, 25 bp, Homo sapien
agtgaagttctaggtgcccgcctgc

SEQ ID NO: 583364 - DNA, 25 bp, Homo sapien
tgcacactgacatgagaaggcctga

SEQ ID NO: 583365 - DNA, 25 bp, Homo sapien
tgcaacagttgtggccagtctccga

SEQ ID NO: 583366 - DNA, 25 bp, Homo sapien
ttttggacagccagaaagaacccca

SEQ ID NO: 583367 - DNA, 25 bp, Homo sapien
ttgatgtcgatctcattgatgtctc

SEQ ID NO: 583368 - DNA, 25 bp, Homo sapien
tctgtaacctcgcttttttcggtca

SEQ ID NO: 583369 - DNA, 25 bp, Homo sapien
ttcatgttgatgtcgatctcattga

SEQ ID NO: 583370 - DNA, 25 bp, Homo sapien
tgtaaaaagaggatcgttcatgttg

SEQ ID NO: 583371 - DNA, 25 bp, Homo sapien
tcactgggttggatactggctaaca

SEQ ID NO: 583372 - DNA, 25 bp, Homo sapien
cactgggttggatactggctaacat

SEQ ID NO: 583373 - DNA, 25 bp, Homo sapien
actgggttggatactggctaacatc

SEQ ID NO: 583374 - DNA, 25 bp, Homo sapien
catccataattccaatggtaacacc

SEQ ID NO: 583375 - DNA, 25 bp, Homo sapien
cataattccaatggtaacacctttc

SEQ ID NO: 583376 - DNA, 25 bp, Homo sapien
tttccctgtgtatcccagctcccag

SEQ ID NO: 583377 - DNA, 25 bp, Homo sapien
tccaatggtaacacctttccctgtg

SEQ ID NO: 583378 - DNA, 25 bp, Homo sapien
tgcaggtcgttaagagagagaatgc

SEQ ID NO: 583379 - DNA, 25 bp, Homo sapien
tgcagtactgatgttgccagccttc

SEQ ID NO: 583380 - DNA, 25 bp, Homo sapien
cattcatgcgtgcaggtcgttaaga

SEQ ID NO: 583381 - DNA, 25 bp, Homo sapien
tatcttgccaagaaaatgtctggga

SEQ ID NO: 583382 - DNA, 25 bp, Homo sapien
aggtccgggtggagatagtcaatcc

SEQ ID NO: 583383 - DNA, 25 bp, Homo sapien
caggtccgggtggagatagtcaatc

SEQ ID NO: 583384 - DNA, 25 bp, Homo sapien
gccaggtccgggtggagatagtcaa

SEQ ID NO: 583385 - DNA, 25 bp, Homo sapien
ccaggtccgggtggagatagtcaat

SEQ ID NO: 583386 - DNA, 25 bp, Homo sapien
gtccaacaagaacccaaatggctca

SEQ ID NO: 583387 - DNA, 25 bp, Homo sapien
tgtccatttgcttgtggcctgagct

SEQ ID NO: 583388 - DNA, 25 bp, Homo sapien
gcactctgctctttcagatgtcagg

SEQ ID NO: 583389 - DNA, 25 bp, Homo sapien
tagagttgatttaaaccttgccaag

SEQ ID NO: 583390 - DNA, 25 bp, Homo sapien
aataagaatggtggtattatggcta

SEQ ID NO: 583391 - DNA, 25 bp, Homo sapien
aaatgtttatggcacatcaagcaga

SEQ ID NO: 583392 - DNA, 25 bp, Homo sapien
ggtattatggctagttttgaatctg

SEQ ID NO: 583393 - DNA, 25 bp, Homo sapien
gaatatgcaataagagctcaatttc

SEQ ID NO: 583394 - DNA, 25 bp, Homo sapien
ttgcagccataggaactcagttagg

SEQ ID NO: 583395 - DNA, 25 bp, Homo sapien
gatcatcgtcgatagagggtcatca

SEQ ID NO: 583396 - DNA, 25 bp, Homo sapien
gaaggaggcaatggtggcatccacc

SEQ ID NO: 583397 - DNA, 25 bp, Homo sapien
tacacagagggttgtgcatgctgca

SEQ ID NO: 583398 - DNA, 25 bp, Homo sapien
catatgctgtatcgacccaagaaaa

SEQ ID NO: 583399 - DNA, 25 bp, Homo sapien
gaggccgctggttcattctctcatg

SEQ ID NO: 583400 - DNA, 25 bp, Homo sapien
cccatgtggtgagctgcattcttta

SEQ ID NO: 583401 - DNA, 25 bp, Homo sapien
gaatctgtcgaagggctttagggaa

SEQ ID NO: 583402 - DNA, 25 bp, Homo sapien
tcagagtttctggacgtgggttaac

SEQ ID NO: 583403 - DNA, 25 bp, Homo sapien
caggtcctgccatactcaagagagg

SEQ ID NO: 583404 - DNA, 25 bp, Homo sapien
ggagtccgccattccttgccatgtg

SEQ ID NO: 583405 - DNA, 25 bp, Homo sapien
tcaagagagggactatacagagtgc

SEQ ID NO: 583406 - DNA, 25 bp, Homo sapien
tcagggcttctctgggagttatttc

SEQ ID NO: 583407 - DNA, 25 bp, Homo sapien
cttctctgggagttatttctgggag

SEQ ID NO: 583408 - DNA, 25 bp, Homo sapien
ctcagggcttctctgggagttattt

SEQ ID NO: 583409 - DNA, 25 bp, Homo sapien
gaagccagagtggacagatgatgaa

SEQ ID NO: 583410 - DNA, 25 bp, Homo sapien
aatggtgttactgcagaagccagag

SEQ ID NO: 583411 - DNA, 25 bp, Homo sapien
gaatcttttgaagcttgagggcgct

SEQ ID NO: 583412 - DNA, 25 bp, Homo sapien
ggcaaaacctgagcggactgagacc

SEQ ID NO: 583413 - DNA, 25 bp, Homo sapien
catctgagctacaggcttggggcag

SEQ ID NO: 583414 - DNA, 25 bp, Homo sapien
gatgtgacgctgagaactagctggc

SEQ ID NO: 583415 - DNA, 25 bp, Homo sapien
agatcagaaatgcccctgtgaggca

SEQ ID NO: 583416 - DNA, 25 bp, Homo sapien
gggacatagtgttgcagatcagaaa

SEQ ID NO: 583417 - DNA, 25 bp, Homo sapien
gagccaaagcatgtctttggggttt

SEQ ID NO: 583418 - DNA, 25 bp, Homo sapien
caaagcatgtctttggggttttcca

SEQ ID NO: 583419 - DNA, 25 bp, Homo sapien
gccaaagcatgtctttggggttttc

SEQ ID NO: 583420 - DNA, 25 bp, Homo sapien
aaagcatgtctttggggttttccat

SEQ ID NO: 583421 - DNA, 25 bp, Homo sapien
atctgtgtaccgagggtaaggatag

SEQ ID NO: 583422 - DNA, 25 bp, Homo sapien
gggtcgttgctgctgaagtcgtaac

SEQ ID NO: 583423 - DNA, 25 bp, Homo sapien
tgaagtcgtaacttgcttcggcatt

SEQ ID NO: 583424 - DNA, 25 bp, Homo sapien
ttaaaccagtcatctgtgtaccgag

SEQ ID NO: 583425 - DNA, 25 bp, Homo sapien
tggacagatgtcaaggccactcaac

SEQ ID NO: 583426 - DNA, 25 bp, Homo sapien
tattgacaaaacgtgggctgcagac

SEQ ID NO: 583427 - DNA, 25 bp, Homo sapien
cattgacctaaaatgagcagggctg

SEQ ID NO: 583428 - DNA, 25 bp, Homo sapien
tgcagaccttgagagcagcaggcag

SEQ ID NO: 583429 - DNA, 25 bp, Homo sapien
caagccttcaaggtgggagctttag

SEQ ID NO: 583430 - DNA, 25 bp, Homo sapien
tatacctgtcttgaatccgcagtac

SEQ ID NO: 583431 - DNA, 25 bp, Homo sapien
tctgtaccaagcactctatacctgt

SEQ ID NO: 583432 - DNA, 25 bp, Homo sapien
tccgcagtacaagccttcaaggtgg

SEQ ID NO: 583433 - DNA, 25 bp, Homo sapien
acttcctggctagtttggcgtcgac

SEQ ID NO: 583434 - DNA, 25 bp, Homo sapien
taatgtccaatgagctctacagggt

SEQ ID NO: 583435 - DNA, 25 bp, Homo sapien
tacaacagtgtttcagggatctgca

SEQ ID NO: 583436 - DNA, 25 bp, Homo sapien
ggcgtcgaccacgtttgctggctaa

SEQ ID NO: 583437 - DNA, 25 bp, Homo sapien
ctccaactccacagatattgttgtt

SEQ ID NO: 583438 - DNA, 25 bp, Homo sapien
ttgttgttggcggcagcagaaactt

SEQ ID NO: 583439 - DNA, 25 bp, Homo sapien
gaaacttctcctgcacatcgggtcc

SEQ ID NO: 583440 - DNA, 25 bp, Homo sapien
gatattgttgttggcggcagcagaa

SEQ ID NO: 583441 - DNA, 25 bp, Homo sapien
tgtggacacgttgagcagaggacac

SEQ ID NO: 583442 - DNA, 25 bp, Homo sapien
cagtccagggatcaagaaagaggca

SEQ ID NO: 583443 - DNA, 25 bp, Homo sapien
gaggacaccatgtttgggttcccca

SEQ ID NO: 583444 - DNA, 25 bp, Homo sapien
ggttccccagttcgcaggagacaag

SEQ ID NO: 583445 - DNA, 25 bp, Homo sapien
gaatggctggtccagcatccggatg

SEQ ID NO: 583446 - DNA, 25 bp, Homo sapien
cagctggcgctgtagatgtcaatca

SEQ ID NO: 583447 - DNA, 25 bp, Homo sapien
cagctgtggcatatgactgatggag

SEQ ID NO: 583448 - DNA, 25 bp, Homo sapien
gaggcctcgatgatgtctgtcatga

SEQ ID NO: 583449 - DNA, 25 bp, Homo sapien
ttcccaacagaaccacacttcttgg

SEQ ID NO: 583450 - DNA, 25 bp, Homo sapien
ctcatcttggggtgtttcccctaat

SEQ ID NO: 583451 - DNA, 25 bp, Homo sapien
aacagaaccacacttcttggttttg

SEQ ID NO: 583452 - DNA, 25 bp, Homo sapien
tgcaagttccaaaccttcccaacag

SEQ ID NO: 583453 - DNA, 25 bp, Homo sapien
tattggggattaggaccccaacata

SEQ ID NO: 583454 - DNA, 25 bp, Homo sapien
agaagaggtgctgatgccgtttggc

SEQ ID NO: 583455 - DNA, 25 bp, Homo sapien
tgctgatgccgtttggctgtgcccc

SEQ ID NO: 583456 - DNA, 25 bp, Homo sapien
cacaattgaacccacaacagaagag

SEQ ID NO: 583457 - DNA, 25 bp, Homo sapien
tattgcaaactgtccacggtctgag

SEQ ID NO: 583458 - DNA, 25 bp, Homo sapien
tctgtctcactgctcaaaggatcca

SEQ ID NO: 583459 - DNA, 25 bp, Homo sapien
taaggatgatgcagttgccctggcc

SEQ ID NO: 583460 - DNA, 25 bp, Homo sapien
gaatattgcctttctgcactcgtag

SEQ ID NO: 583461 - DNA, 25 bp, Homo sapien
acacgtagatgctgcctttgccgcc

SEQ ID NO: 583462 - DNA, 25 bp, Homo sapien
cgtcgcagttgcagtcgtcatagct

SEQ ID NO: 583463 - DNA, 25 bp, Homo sapien
agatggtccacatgctggaggcgta

SEQ ID NO: 583464 - DNA, 25 bp, Homo sapien
tgcagtcgtcatagctgccgccgtc

SEQ ID NO: 583465 - DNA, 25 bp, Homo sapien
tcctcccgttgctgaaggtggaagc

SEQ ID NO: 583466 - DNA, 25 bp, Homo sapien
agccaaggtggaagagcagctctcg

SEQ ID NO: 583467 - DNA, 25 bp, Homo sapien
gctctcgtcgtacagggcagtcctg

SEQ ID NO: 583468 - DNA, 25 bp, Homo sapien
tcccgttgctgaaggtggaagccaa

SEQ ID NO: 583469 - DNA, 25 bp, Homo sapien
agtgcagttgccgtacaaatctgtg

SEQ ID NO: 583470 - DNA, 25 bp, Homo sapien
aatgcctcagagtgcagttgccgta

SEQ ID NO: 583471 - DNA, 25 bp, Homo sapien
agttgccgtacaaatctgtggttgc

SEQ ID NO: 583472 - DNA, 25 bp, Homo sapien
tcagagtgcagttgccgtacaaatc

SEQ ID NO: 583473 - DNA, 25 bp, Homo sapien
agctggccctggacccagagctatg

SEQ ID NO: 583474 - DNA, 25 bp, Homo sapien
tggccctggacccagagctatgaac

SEQ ID NO: 583475 - DNA, 25 bp, Homo sapien
tgcagagctggccctggacccagag

SEQ ID NO: 583476 - DNA, 25 bp, Homo sapien
cctgcagagctggccctggacccag

SEQ ID NO: 583477 - DNA, 25 bp, Homo sapien
ggcatgtgggcagagagacacgtgt

SEQ ID NO: 583478 - DNA, 25 bp, Homo sapien
tccatggacacctggcatgtgggca

SEQ ID NO: 583479 - DNA, 25 bp, Homo sapien
aacttttccctccatggacacctgg

SEQ ID NO: 583480 - DNA, 25 bp, Homo sapien
gggcagagagacacgtgttagtcca

SEQ ID NO: 583481 - DNA, 25 bp, Homo sapien
tttaggaccggctcccgtgatggac

SEQ ID NO: 583482 - DNA, 25 bp, Homo sapien
ttgcctggaggtagaacaaactctg

SEQ ID NO: 583483 - DNA, 25 bp, Homo sapien
ggtgactaatcaaggcagagccatg

SEQ ID NO: 583484 - DNA, 25 bp, Homo sapien
tacactcgggattagactgaggcca

SEQ ID NO: 583485 - DNA, 25 bp, Homo sapien
tgattcacaatggtaccccggtacc

SEQ ID NO: 583486 - DNA, 25 bp, Homo sapien
cacccagagtcatagattcacagag

SEQ ID NO: 583487 - DNA, 25 bp, Homo sapien
ggctggcagcttaagtattcccggg

SEQ ID NO: 583488 - DNA, 25 bp, Homo sapien
tgaaaagtcaggttcctgggccacc

SEQ ID NO: 583489 - DNA, 25 bp, Homo sapien
gagtgtctaccacattcaggcatcg

SEQ ID NO: 583490 - DNA, 25 bp, Homo sapien
tcaggcatcgtgctaactctgggca

SEQ ID NO: 583491 - DNA, 25 bp, Homo sapien
tgagaaggtactgcgcaatgaagtg

SEQ ID NO: 583492 - DNA, 25 bp, Homo sapien
catgtcagacggatgtccctgtccc

SEQ ID NO: 583493 - DNA, 25 bp, Homo sapien
cgcacaggttgttgggactgcccat

SEQ ID NO: 583494 - DNA, 25 bp, Homo sapien
tttttgggccaggttatcgcacagg

SEQ ID NO: 583495 - DNA, 25 bp, Homo sapien
cattgaagatctcatgcctagggcc

SEQ ID NO: 583496 - DNA, 25 bp, Homo sapien
tctcaaattcaagggagggtgtcca

SEQ ID NO: 583497 - DNA, 25 bp, Homo sapien
gaatctctcaggcacggttttccag

SEQ ID NO: 583498 - DNA, 25 bp, Homo sapien
ctggttccgtttggaggtgagcaca

SEQ ID NO: 583499 - DNA, 25 bp, Homo sapien
gacctcgtcgtgaagctggttccgt

SEQ ID NO: 583500 - DNA, 25 bp, Homo sapien
gaccccgtagccaaagaggtgatta

SEQ ID NO: 583501 - DNA, 25 bp, Homo sapien
tgagctacgactacacatggtgacc

SEQ ID NO: 583502 - DNA, 25 bp, Homo sapien
taagccacggaggtgtattctcaag

SEQ ID NO: 583503 - DNA, 25 bp, Homo sapien
gccaggctcgatggtcctcggaaat

SEQ ID NO: 583504 - DNA, 25 bp, Homo sapien
catggtgacctggacgaatctcaca

SEQ ID NO: 583505 - DNA, 25 bp, Homo sapien
tgggctacccttctacgggaggaca

SEQ ID NO: 583506 - DNA, 25 bp, Homo sapien
actggcccatgggaggatgctcacc

SEQ ID NO: 583507 - DNA, 25 bp, Homo sapien
tgcccgtctatagcaggatgctggt

SEQ ID NO: 583508 - DNA, 25 bp, Homo sapien
gatgctcacctatagtgggctaccc

SEQ ID NO: 583509 - DNA, 25 bp, Homo sapien
gtaacatcacttgggacttgggcag

SEQ ID NO: 583510 - DNA, 25 bp, Homo sapien
tcaacaatagggtggctgtgaagct

SEQ ID NO: 583511 - DNA, 25 bp, Homo sapien
gacacacctcctgggcttacaagga

SEQ ID NO: 583512 - DNA, 25 bp, Homo sapien
taaatgggcctagcatataccacac

SEQ ID NO: 583513 - DNA, 25 bp, Homo sapien
gctcctcgagtgtgcttcgtggtca

SEQ ID NO: 583514 - DNA, 25 bp, Homo sapien
cagccctgcacattatggagagtgg

SEQ ID NO: 583515 - DNA, 25 bp, Homo sapien
ggctgttgattcctgtaccccaccg

SEQ ID NO: 583516 - DNA, 25 bp, Homo sapien
tggcgattgccacggctgttgattc

SEQ ID NO: 583517 - DNA, 25 bp, Homo sapien
tttttagcaccacggagagactgcc

SEQ ID NO: 583518 - DNA, 25 bp, Homo sapien
tgtgaattccagaggcagcgaactt

SEQ ID NO: 583519 - DNA, 25 bp, Homo sapien
cattgggagagcctaggaacagtat

SEQ ID NO: 583520 - DNA, 25 bp, Homo sapien
gagactgccagctagaaaaacgccc

SEQ ID NO: 583521 - DNA, 25 bp, Homo sapien
cacttgtggctggttgcgtctgtac

SEQ ID NO: 583522 - DNA, 25 bp, Homo sapien
taaggtccttcgctacgtgaaaaga

SEQ ID NO: 583523 - DNA, 25 bp, Homo sapien
aatttgcacccaggacccttgtgga

SEQ ID NO: 583524 - DNA, 25 bp, Homo sapien
tatcacagggtttctaggcagacaa

SEQ ID NO: 583525 - DNA, 25 bp, Homo sapien
ggggttgatcaatcagacctgggtt

SEQ ID NO: 583526 - DNA, 25 bp, Homo sapien
gaggagataggataagcagtggtgg

SEQ ID NO: 583527 - DNA, 25 bp, Homo sapien
taggataagcagtggtgggtgcacc

SEQ ID NO: 583528 - DNA, 25 bp, Homo sapien
gcagcttcaggtggcggaaagggca

SEQ ID NO: 583529 - DNA, 25 bp, Homo sapien
caacttggactggtaatcccgcacc

SEQ ID NO: 583530 - DNA, 25 bp, Homo sapien
ttgtcaaagcccaccttggagtcgt

SEQ ID NO: 583531 - DNA, 25 bp, Homo sapien
tgcgttgaccgtgatgacagcctgg

SEQ ID NO: 583532 - DNA, 25 bp, Homo sapien
gagtgccatgcagcatcagggtcca

SEQ ID NO: 583533 - DNA, 25 bp, Homo sapien
gagggcggtgggaaaggcggatgtg

SEQ ID NO: 583534 - DNA, 25 bp, Homo sapien
ctgaaacgtggagcgaggacagagg

SEQ ID NO: 583535 - DNA, 25 bp, Homo sapien
gaaacgtggagcgaggacagaggcg

SEQ ID NO: 583536 - DNA, 25 bp, Homo sapien
cggtgggaaaggcggatgtgcagcg

SEQ ID NO: 583537 - DNA, 25 bp, Homo sapien
taagaagacggaattgcctgtacgg

SEQ ID NO: 583538 - DNA, 25 bp, Homo sapien
tgagtgaagcttcagattaagaaga

SEQ ID NO: 583539 - DNA, 25 bp, Homo sapien
cctgtacgggtgatggaattgctag

SEQ ID NO: 583540 - DNA, 25 bp, Homo sapien
tgaaaataatcattgacagtgagtg

SEQ ID NO: 583541 - DNA, 25 bp, Homo sapien
tttagagtcacacataggacatgga

SEQ ID NO: 583542 - DNA, 25 bp, Homo sapien
atttagagtcacacataggacatgg

SEQ ID NO: 583543 - DNA, 25 bp, Homo sapien
acagccccttgtttgagaccatgga

SEQ ID NO: 583544 - DNA, 25 bp, Homo sapien
gaaaaatttgggctgctctagcgga

SEQ ID NO: 583545 - DNA, 25 bp, Homo sapien
gatagcgctcgcatcttcaaacgtg

SEQ ID NO: 583546 - DNA, 25 bp, Homo sapien
cagggactgcttagttgccgagaag

SEQ ID NO: 583547 - DNA, 25 bp, Homo sapien
tcttcagttaggatcagggatatca

SEQ ID NO: 583548 - DNA, 25 bp, Homo sapien
tatcataaaaacatcactagcgaga

SEQ ID NO: 583549 - DNA, 25 bp, Homo sapien
tttataaattacaccacacctgtga

SEQ ID NO: 583550 - DNA, 25 bp, Homo sapien
tgagcctcctaatttacaacatgtc

SEQ ID NO: 583551 - DNA, 25 bp, Homo sapien
ggatgccttaggatcctgcccgagc

SEQ ID NO: 583552 - DNA, 25 bp, Homo sapien
taggcacttgtattccataaccagc

SEQ ID NO: 583553 - DNA, 25 bp, Homo sapien
tctgctgacaagaagtggcccacta

SEQ ID NO: 583554 - DNA, 25 bp, Homo sapien
gactgatttgcacattgggaccact

SEQ ID NO: 583555 - DNA, 25 bp, Homo sapien
gaagggctcacaggttggactgtga

SEQ ID NO: 583556 - DNA, 25 bp, Homo sapien
gacatgtgaggatgtaaaccgcatc

SEQ ID NO: 583557 - DNA, 25 bp, Homo sapien
tacttgtactgtaaatgccaatatt

SEQ ID NO: 583558 - DNA, 25 bp, Homo sapien
cccactcctgccttgtattctcatc

SEQ ID NO: 583559 - DNA, 25 bp, Homo sapien
ccacccatggcagcaaatgcatcag

SEQ ID NO: 583560 - DNA, 25 bp, Homo sapien
tgccaggaatgagcatggtgcacat

SEQ ID NO: 583561 - DNA, 25 bp, Homo sapien
ttcatcggccccgttgttcttgtga

SEQ ID NO: 583562 - DNA, 25 bp, Homo sapien
tctgtgatgagggagcgtgcggaag

SEQ ID NO: 583563 - DNA, 25 bp, Homo sapien
ggtcttccctgtgagggttttcaca

SEQ ID NO: 583564 - DNA, 25 bp, Homo sapien
tctgagggttcaaccttgagggtga

SEQ ID NO: 583565 - DNA, 25 bp, Homo sapien
tcttccctgtgagggttttcacaaa

SEQ ID NO: 583566 - DNA, 25 bp, Homo sapien
tatattttctatcgtatctgagggt

SEQ ID NO: 583567 - DNA, 25 bp, Homo sapien
tgttgtagtcagacaaagcacatcc

SEQ ID NO: 583568 - DNA, 25 bp, Homo sapien
agtcagacaaagcacatccatcctc

SEQ ID NO: 583569 - DNA, 25 bp, Homo sapien
ccacgaagtctcaacacaagatgaa

SEQ ID NO: 583570 - DNA, 25 bp, Homo sapien
gtagtcagacaaagcacatccatcc

SEQ ID NO: 583571 - DNA, 25 bp, Homo sapien
gaagggcactctcgatgaaggtgac

SEQ ID NO: 583572 - DNA, 25 bp, Homo sapien
cactctcgatgaaggtgactaattt

SEQ ID NO: 583573 - DNA, 25 bp, Homo sapien
ttgccattctcgtctaccttatagt

SEQ ID NO: 583574 - DNA, 25 bp, Homo sapien
tgccattctcgtctaccttatagta

SEQ ID NO: 583575 - DNA, 25 bp, Homo sapien
agttccttgtcttctggtttgttga

SEQ ID NO: 583576 - DNA, 25 bp, Homo sapien
ggtttgttgaagcagtaagtcagac

SEQ ID NO: 583577 - DNA, 25 bp, Homo sapien
tgtcttctggtttgttgaagcagta

SEQ ID NO: 583578 - DNA, 25 bp, Homo sapien
tctggtttgttgaagcagtaagtca

SEQ ID NO: 583579 - DNA, 25 bp, Homo sapien
ctggggattcaccctgcagcagaaa

SEQ ID NO: 583580 - DNA, 25 bp, Homo sapien
tggggattcaccctgcagcagaaac

SEQ ID NO: 583581 - DNA, 25 bp, Homo sapien
cattaagggctcagaatggtaaccc

SEQ ID NO: 583582 - DNA, 25 bp, Homo sapien
tgactcctgctacttagattcctgg

SEQ ID NO: 583583 - DNA, 25 bp, Homo sapien
tctggaagaagaaacgctatagctg

SEQ ID NO: 583584 - DNA, 25 bp, Homo sapien
catcagtctgggtctgatcgccccg

SEQ ID NO: 583585 - DNA, 25 bp, Homo sapien
gggcttcccaggcttgtgaaatact

SEQ ID NO: 583586 - DNA, 25 bp, Homo sapien
ctagatgattctgctggtgaagctt

SEQ ID NO: 583587 - DNA, 25 bp, Homo sapien
atctagatgattctgctggtgaagc

SEQ ID NO: 583588 - DNA, 25 bp, Homo sapien
cacaagcgtctacacatttctgagt

SEQ ID NO: 583589 - DNA, 25 bp, Homo sapien
taataaaaacacaagcgtctacaca

SEQ ID NO: 583590 - DNA, 25 bp, Homo sapien
tcctgtggaatctatctctacgaac

SEQ ID NO: 583591 - DNA, 25 bp, Homo sapien
aagtcctgtggaatctatctctacg

SEQ ID NO: 583592 - DNA, 25 bp, Homo sapien
agtcctgtggaatctatctctacga

SEQ ID NO: 583593 - DNA, 25 bp, Homo sapien
ctgtggaatctatctctacgaacat

SEQ ID NO: 583594 - DNA, 25 bp, Homo sapien
cctcttgtggcagacatttgcatgt

SEQ ID NO: 583595 - DNA, 25 bp, Homo sapien
cagggcattcaattttagtataggg

SEQ ID NO: 583596 - DNA, 25 bp, Homo sapien
gggaccatgtggcagggcattcaat

SEQ ID NO: 583597 - DNA, 25 bp, Homo sapien
ttagtatagggtggccctcttgtgg

SEQ ID NO: 583598 - DNA, 25 bp, Homo sapien
ttggtacgacaatgtctcaaggaca

SEQ ID NO: 583599 - DNA, 25 bp, Homo sapien
caatgtctcaaggacattctgagac

SEQ ID NO: 583600 - DNA, 25 bp, Homo sapien
cagaatgacgatgagttggtacgac

SEQ ID NO: 583601 - DNA, 25 bp, Homo sapien
ttttcatgcataaccagaatgacga

SEQ ID NO: 583602 - DNA, 25 bp, Homo sapien
cgggagcggagtcgcgggccgcggc

SEQ ID NO: 583603 - DNA, 25 bp, Homo sapien
aggacccacgggagcggagtcgcgg

SEQ ID NO: 583604 - DNA, 25 bp, Homo sapien
ggaggacccacgggagcggagtcgc

SEQ ID NO: 583605 - DNA, 25 bp, Homo sapien
cccacgggagcggagtcgcgggccg

SEQ ID NO: 583606 - DNA, 25 bp, Homo sapien
ggtgggggtgcgtcctctctggtct

SEQ ID NO: 583607 - DNA, 25 bp, Homo sapien
gctagaaggcggactgggctggctc

SEQ ID NO: 583608 - DNA, 25 bp, Homo sapien
ggtgcgtcctctctggtctgcagga

SEQ ID NO: 583609 - DNA, 25 bp, Homo sapien
tctgcaggaggctagaaggcggact

SEQ ID NO: 583610 - DNA, 25 bp, Homo sapien
acggaacgcggctgcgcacgtcacg

SEQ ID NO: 583611 - DNA, 25 bp, Homo sapien
agagacccagcgctgagctgacgcg

SEQ ID NO: 583612 - DNA, 25 bp, Homo sapien
tccagagtctcggaggggagcttcc

SEQ ID NO: 583613 - DNA, 25 bp, Homo sapien
gttgctacgcaaccagccggccagg

SEQ ID NO: 583614 - DNA, 25 bp, Homo sapien
ggcagcgagtatgcagaccgtcctc

SEQ ID NO: 583615 - DNA, 25 bp, Homo sapien
agcgagtatgcagaccgtcctcctc

SEQ ID NO: 583616 - DNA, 25 bp, Homo sapien
cgggcagcgagtatgcagaccgtcc

SEQ ID NO: 583617 - DNA, 25 bp, Homo sapien
agccggcgggcagcgagtatgcaga

SEQ ID NO: 583618 - DNA, 25 bp, Homo sapien
cgccccagagacacactgctcccgg

SEQ ID NO: 583619 - DNA, 25 bp, Homo sapien
ccgactccgcggcgccccagagaca

SEQ ID NO: 583620 - DNA, 25 bp, Homo sapien
agagacacactgctcccggccgcct

SEQ ID NO: 583621 - DNA, 25 bp, Homo sapien
tccgcggcgccccagagacacactg

SEQ ID NO: 583622 - DNA, 25 bp, Homo sapien
caacaaggacggtggccggattccg

SEQ ID NO: 583623 - DNA, 25 bp, Homo sapien
gggcgctcgaccccagccagttgtt

SEQ ID NO: 583624 - DNA, 25 bp, Homo sapien
cccggatggatttcacagagcgggt

SEQ ID NO: 583625 - DNA, 25 bp, Homo sapien
tggagacacccgcagaggccacgct

SEQ ID NO: 583626 - DNA, 25 bp, Homo sapien
gtcaccaagcgcctcagcgccagct

SEQ ID NO: 583627 - DNA, 25 bp, Homo sapien
agacctcaagggctggaacgcgcac

SEQ ID NO: 583628 - DNA, 25 bp, Homo sapien
cttccttattgagatggacagacct

SEQ ID NO: 583629 - DNA, 25 bp, Homo sapien
ggctggaacgcgcacaagtcaccaa

SEQ ID NO: 583630 - DNA, 25 bp, Homo sapien
gtgtgtgcacactaacgaaaacgac

SEQ ID NO: 583631 - DNA, 25 bp, Homo sapien
taagcgtaccataactcaaagcccc

SEQ ID NO: 583632 - DNA, 25 bp, Homo sapien
tatgcagataagctggtaccaactg

SEQ ID NO: 583633 - DNA, 25 bp, Homo sapien
caaagtctggtaaggctacgcctgc

SEQ ID NO: 583634 - DNA, 25 bp, Homo sapien
tacaccatggagagatacacactgg

SEQ ID NO: 583635 - DNA, 25 bp, Homo sapien
aatatgtatgctccaatccagggct

SEQ ID NO: 583636 - DNA, 25 bp, Homo sapien
cagggcttccgcttctagatataca

SEQ ID NO: 583637 - DNA, 25 bp, Homo sapien
tgatgagatacaaccagaacgaacc

SEQ ID NO: 583638 - DNA, 25 bp, Homo sapien
gaacttctggtaattagctggctaa

SEQ ID NO: 583639 - DNA, 25 bp, Homo sapien
gaaggacattaatctccacagccct

SEQ ID NO: 583640 - DNA, 25 bp, Homo sapien
ggtacacagcaaattttagcagaag

SEQ ID NO: 583641 - DNA, 25 bp, Homo sapien
ggaaagaactctgtcctaagtcact

SEQ ID NO: 583642 - DNA, 25 bp, Homo sapien
tttatatttataaatcccatcttta

SEQ ID NO: 583643 - DNA, 25 bp, Homo sapien
taaatttatatttataaatcccatc

SEQ ID NO: 583644 - DNA, 25 bp, Homo sapien
ataaatcccatctttatatatgtaa

SEQ ID NO: 583645 - DNA, 25 bp, Homo sapien
aatcccatctttatatatgtaaagc

SEQ ID NO: 583646 - DNA, 25 bp, Homo sapien
actgacttcaaagattgctccaggg

SEQ ID NO: 583647 - DNA, 25 bp, Homo sapien
taccttccggtaccaagcatttgat

SEQ ID NO: 583648 - DNA, 25 bp, Homo sapien
gacaacactggcctaaagatgaaat

SEQ ID NO: 583649 - DNA, 25 bp, Homo sapien
gagaagccttacctgtatttgcctg

SEQ ID NO: 583650 - DNA, 25 bp, Homo sapien
tttgagcgcttttctatggttcagg

SEQ ID NO: 583651 - DNA, 25 bp, Homo sapien
gcctcaatgagcatgaaattccacg

SEQ ID NO: 583652 - DNA, 25 bp, Homo sapien
aactggcatttattgaggactttca

SEQ ID NO: 583653 - DNA, 25 bp, Homo sapien
tgagcatgaaattccacggtttcat

SEQ ID NO: 583654 - DNA, 25 bp, Homo sapien
gtcatacagttagtgcaagtggcag

SEQ ID NO: 583655 - DNA, 25 bp, Homo sapien
taatgtggcagtacagtttaacaca

SEQ ID NO: 583656 - DNA, 25 bp, Homo sapien
tgaggcacagaatgtgtcaggaact

SEQ ID NO: 583657 - DNA, 25 bp, Homo sapien
ctatctcaatgaactgctataaggg

SEQ ID NO: 583658 - DNA, 25 bp, Homo sapien
tcatactgctaactcaaaaggactg

SEQ ID NO: 583659 - DNA, 25 bp, Homo sapien
taaggccttccatgcactaagcaaa

SEQ ID NO: 583660 - DNA, 25 bp, Homo sapien
tatgtaacaatactacacacagggc

SEQ ID NO: 583661 - DNA, 25 bp, Homo sapien
ggagaaagtgtaccacagggttgaa

SEQ ID NO: 583662 - DNA, 25 bp, Homo sapien
ccttcttctaaactccattctcgta

SEQ ID NO: 583663 - DNA, 25 bp, Homo sapien
ctggtagctctcttacgtctttgcc

SEQ ID NO: 583664 - DNA, 25 bp, Homo sapien
tgtgtatctcctctcaatacgctgg

SEQ ID NO: 583665 - DNA, 25 bp, Homo sapien
ctcgtagtgcctgtgtatctcctct

SEQ ID NO: 583666 - DNA, 25 bp, Homo sapien
gctgtagtccctaggttcttgataa

SEQ ID NO: 583667 - DNA, 25 bp, Homo sapien
tagtccctaggttcttgataatgat

SEQ ID NO: 583668 - DNA, 25 bp, Homo sapien
ccctaggttcttgataatgattttt

SEQ ID NO: 583669 - DNA, 25 bp, Homo sapien
tggctgtagtccctaggttcttgat

SEQ ID NO: 583670 - DNA, 25 bp, Homo sapien
cacggatctcgttggaaggcttcac

SEQ ID NO: 583671 - DNA, 25 bp, Homo sapien
cccaggattctctcgattagtgact

SEQ ID NO: 583672 - DNA, 25 bp, Homo sapien
tattttggactagcccacaccatgg

SEQ ID NO: 583673 - DNA, 25 bp, Homo sapien
tacgacacatccactctgaagactg

SEQ ID NO: 583674 - DNA, 25 bp, Homo sapien
gtcataaaaaatgcgacatacttca

SEQ ID NO: 583675 - DNA, 25 bp, Homo sapien
tcatcagctacttgcactcctgagg

SEQ ID NO: 583676 - DNA, 25 bp, Homo sapien
aatgcgacatacttcatcagctact

SEQ ID NO: 583677 - DNA, 25 bp, Homo sapien
catcagctacttgcactcctgaggc

SEQ ID NO: 583678 - DNA, 25 bp, Homo sapien
gcatcatacaaagcatagcgacaat

SEQ ID NO: 583679 - DNA, 25 bp, Homo sapien
gatcagttatggttacaccaacatc

SEQ ID NO: 583680 - DNA, 25 bp, Homo sapien
ggtgtggagcatttacgaactttca

SEQ ID NO: 583681 - DNA, 25 bp, Homo sapien
tgccttcttctacaatgatgcactt

SEQ ID NO: 583682 - DNA, 25 bp, Homo sapien
tgacaacaactgcaaatagtttgaa

SEQ ID NO: 583683 - DNA, 25 bp, Homo sapien
ggtgctggaactggtcttcccgagt

SEQ ID NO: 583684 - DNA, 25 bp, Homo sapien
aaacatcagccctggtaacattatg

SEQ ID NO: 583685 - DNA, 25 bp, Homo sapien
tcccgagtgctaacaaaatgagttt

SEQ ID NO: 583686 - DNA, 25 bp, Homo sapien
ggagcttgcatagatcattttactt

SEQ ID NO: 583687 - DNA, 25 bp, Homo sapien
tacttttcagaggtgctagttctgg

SEQ ID NO: 583688 - DNA, 25 bp, Homo sapien
ttttcagaggtgctagttctggtgc

SEQ ID NO: 583689 - DNA, 25 bp, Homo sapien
tctttttaattgcatccttggagct

SEQ ID NO: 583690 - DNA, 25 bp, Homo sapien
gaagtctggccaggccatctcatca

SEQ ID NO: 583691 - DNA, 25 bp, Homo sapien
tcacccagtggcaagtcaaatacaa

SEQ ID NO: 583692 - DNA, 25 bp, Homo sapien
ccagctcaggagtgggtgcactttc

SEQ ID NO: 583693 - DNA, 25 bp, Homo sapien
ggccatctcatcaggatcccaatca

SEQ ID NO: 583694 - DNA, 25 bp, Homo sapien
tcaaaccaaatgcacgaagaacctg

SEQ ID NO: 583695 - DNA, 25 bp, Homo sapien
gaacctgacccagcaataaactatg

SEQ ID NO: 583696 - DNA, 25 bp, Homo sapien
tatgcagcagcaaggctcgggaaag

SEQ ID NO: 583697 - DNA, 25 bp, Homo sapien
taaaagtgtcagttagcaacccagt

SEQ ID NO: 583698 - DNA, 25 bp, Homo sapien
ttacaattatggcagcagtttacct

SEQ ID NO: 583699 - DNA, 25 bp, Homo sapien
tatacaaacacggaatactacacag

SEQ ID NO: 583700 - DNA, 25 bp, Homo sapien
tttaaaagaccagttctaatctgga

SEQ ID NO: 583701 - DNA, 25 bp, Homo sapien
gcatcaagatagatgggcctcacaa

SEQ ID NO: 583702 - DNA, 25 bp, Homo sapien
tctggtccatttgcttgacattcat

SEQ ID NO: 583703 - DNA, 25 bp, Homo sapien
tcttctggtccatttgcttgacatt

SEQ ID NO: 583704 - DNA, 25 bp, Homo sapien
aaaggctacaattaaggatccacct

SEQ ID NO: 583705 - DNA, 25 bp, Homo sapien
aaggatccacctaacttttcagcaa

SEQ ID NO: 583706 - DNA, 25 bp, Homo sapien
atttatatagcaagaggataacatt

SEQ ID NO: 583707 - DNA, 25 bp, Homo sapien
tttatatagcaagaggataacatta

SEQ ID NO: 583708 - DNA, 25 bp, Homo sapien
ttatatagcaagaggataacattaa

SEQ ID NO: 583709 - DNA, 25 bp, Homo sapien
agggctgtttgcatatgtttataga

SEQ ID NO: 583710 - DNA, 25 bp, Homo sapien
ttagggctgtttgcatatgtttata

SEQ ID NO: 583711 - DNA, 25 bp, Homo sapien
tatttagggctgtttgcatatgttt

SEQ ID NO: 583712 - DNA, 25 bp, Homo sapien
atttagggctgtttgcatatgttta

SEQ ID NO: 583713 - DNA, 25 bp, Homo sapien
ccaataagaatttaatttcacatca

SEQ ID NO: 583714 - DNA, 25 bp, Homo sapien
ggccaataagaatttaatttcacat

SEQ ID NO: 583715 - DNA, 25 bp, Homo sapien
gccaataagaatttaatttcacatc

SEQ ID NO: 583716 - DNA, 25 bp, Homo sapien
caataagaatttaatttcacatcaa

SEQ ID NO: 583717 - DNA, 25 bp, Homo sapien
tccaatcagtgaatggcgagctcac

SEQ ID NO: 583718 - DNA, 25 bp, Homo sapien
ccaatgatgtgcctgaaatagcgct

SEQ ID NO: 583719 - DNA, 25 bp, Homo sapien
taaagataccacaggtgtcctagct

SEQ ID NO: 583720 - DNA, 25 bp, Homo sapien
gacactgcacattctcctgaagaca

SEQ ID NO: 583721 - DNA, 25 bp, Homo sapien
tatatcgttcaaagtgttacgcccg

SEQ ID NO: 583722 - DNA, 25 bp, Homo sapien
agtgtcatcatggtacctctcccca

SEQ ID NO: 583723 - DNA, 25 bp, Homo sapien
caagtgtcagtgaacagtggctccc

SEQ ID NO: 583724 - DNA, 25 bp, Homo sapien
tattaacaatgaccgcttccaagtg

SEQ ID NO: 583725 - DNA, 25 bp, Homo sapien
ggcaaaatcctgtattcccaattca

SEQ ID NO: 583726 - DNA, 25 bp, Homo sapien
attggaaatacccaaacctcaatgc

SEQ ID NO: 583727 - DNA, 25 bp, Homo sapien
aacctcaatgccttaccccatatgg

SEQ ID NO: 583728 - DNA, 25 bp, Homo sapien
gccttaccccatatggaaggcaaaa

SEQ ID NO: 583729 - DNA, 25 bp, Homo sapien
ttgtcagggcaagagagtaaccgct

SEQ ID NO: 583730 - DNA, 25 bp, Homo sapien
tatgtaccagaatcgccttgagtgc

SEQ ID NO: 583731 - DNA, 25 bp, Homo sapien
tacggcagtcttgggcttatggcac

SEQ ID NO: 583732 - DNA, 25 bp, Homo sapien
tattactcctagaccacaaacctgg

SEQ ID NO: 583733 - DNA, 25 bp, Homo sapien
gctgcccgacagaggaaccactgct

SEQ ID NO: 583734 - DNA, 25 bp, Homo sapien
cagagcccacagagtagatgtgaag

SEQ ID NO: 583735 - DNA, 25 bp, Homo sapien
gaagttccaggttaacatggcccat

SEQ ID NO: 583736 - DNA, 25 bp, Homo sapien
gggtgaagatggatcagagcccaca

SEQ ID NO: 583737 - DNA, 25 bp, Homo sapien
cctgcggaaggggctagcagcaccc

SEQ ID NO: 583738 - DNA, 25 bp, Homo sapien
ctgcggaaggggctagcagcacccc

SEQ ID NO: 583739 - DNA, 25 bp, Homo sapien
aaacttcctgcggaaggggctagca

SEQ ID NO: 583740 - DNA, 25 bp, Homo sapien
cttcctgcggaaggggctagcagca

SEQ ID NO: 583741 - DNA, 25 bp, Homo sapien
tggactctggctaaaagcctgctcc

SEQ ID NO: 583742 - DNA, 25 bp, Homo sapien
tctaagggcccatcatctgttgtcc

SEQ ID NO: 583743 - DNA, 25 bp, Homo sapien
gggtacccattttgagcagcggaaa

SEQ ID NO: 583744 - DNA, 25 bp, Homo sapien
tgtaggactcctgtgcggctggcct

SEQ ID NO: 583745 - DNA, 25 bp, Homo sapien
tcaggtcagtggtgtgggccccggt

SEQ ID NO: 583746 - DNA, 25 bp, Homo sapien
tgtaggtcaggtcagtggtgtgggc

SEQ ID NO: 583747 - DNA, 25 bp, Homo sapien
ggtcagtggtgtgggccccggtgag

SEQ ID NO: 583748 - DNA, 25 bp, Homo sapien
cccggtgagtgtggggaacggacag

SEQ ID NO: 583749 - DNA, 25 bp, Homo sapien
ttgagtgtaaacaataggaacctgg

SEQ ID NO: 583750 - DNA, 25 bp, Homo sapien
ctttgagtgtaaacaataggaacct

SEQ ID NO: 583751 - DNA, 25 bp, Homo sapien
gagtgtaaacaataggaacctggag

SEQ ID NO: 583752 - DNA, 25 bp, Homo sapien
tgagtgtaaacaataggaacctgga

SEQ ID NO: 583753 - DNA, 25 bp, Homo sapien
aagagagtaagcgtgggcctcagct

SEQ ID NO: 583754 - DNA, 25 bp, Homo sapien
aaaccaacgttggtgcccggtgctg

SEQ ID NO: 583755 - DNA, 25 bp, Homo sapien
cagatacatttactgctgccccgca

SEQ ID NO: 583756 - DNA, 25 bp, Homo sapien
gcttaggtttgccacgaccctcaga

SEQ ID NO: 583757 - DNA, 25 bp, Homo sapien
cgagtgacgccaaagccctggttga

SEQ ID NO: 583758 - DNA, 25 bp, Homo sapien
caaccagaactgacgtgtgacctcc

SEQ ID NO: 583759 - DNA, 25 bp, Homo sapien
ttgactctgacagccccgtgggtgt

SEQ ID NO: 583760 - DNA, 25 bp, Homo sapien
tccggtagctccgagagaagccatg

SEQ ID NO: 583761 - DNA, 25 bp, Homo sapien
gaattggagaagctccgcacagccg

SEQ ID NO: 583762 - DNA, 25 bp, Homo sapien
catgtcggttacaagaagaattgga

SEQ ID NO: 583763 - DNA, 25 bp, Homo sapien
tcagacctcggcatgtcggttacaa

SEQ ID NO: 583764 - DNA, 25 bp, Homo sapien
caagaagaattggagaagctccgca

SEQ ID NO: 583765 - DNA, 25 bp, Homo sapien
gaagcacaagcccagtatcccaatt

SEQ ID NO: 583766 - DNA, 25 bp, Homo sapien
gagtcctcaggcgtttgcccgaagc

SEQ ID NO: 583767 - DNA, 25 bp, Homo sapien
gacgttctaggttatccctccgcaa

SEQ ID NO: 583768 - DNA, 25 bp, Homo sapien
tctctcagggcaggtttcaaaaagg

SEQ ID NO: 583769 - DNA, 25 bp, Homo sapien
aaaacagacaaaaatgcgtttgtgc

SEQ ID NO: 583770 - DNA, 25 bp, Homo sapien
aacagacaaaaatgcgtttgtgcat

SEQ ID NO: 583771 - DNA, 25 bp, Homo sapien
aaacagacaaaaatgcgtttgtgca

SEQ ID NO: 583772 - DNA, 25 bp, Homo sapien
tctatgttacgtggacggcccacac

SEQ ID NO: 583773 - DNA, 25 bp, Homo sapien
cacaccagtctgagcgggtagcgat

SEQ ID NO: 583774 - DNA, 25 bp, Homo sapien
ggctctcctacagggagactgtgaa

SEQ ID NO: 583775 - DNA, 25 bp, Homo sapien
gtcctggaatgacaaaggctctcct

SEQ ID NO: 583776 - DNA, 25 bp, Homo sapien
gccgagggggcccagaaccagggca

SEQ ID NO: 583777 - DNA, 25 bp, Homo sapien
ttggaggattcatggttgtttctgc

SEQ ID NO: 583778 - DNA, 25 bp, Homo sapien
ggtctttggaggattcatggttgtt

SEQ ID NO: 583779 - DNA, 25 bp, Homo sapien
atcttcctggtgtcgactttctcca

SEQ ID NO: 583780 - DNA, 25 bp, Homo sapien
ttgtggtctttggaggattcatggt

SEQ ID NO: 583781 - DNA, 25 bp, Homo sapien
cgcataggcatgctgtcttcctcaa

SEQ ID NO: 583782 - DNA, 25 bp, Homo sapien
ggtgaagcccgtaggcttcttggaa

SEQ ID NO: 583783 - DNA, 25 bp, Homo sapien
cttggaagttcgcagaagatttagg

SEQ ID NO: 583784 - DNA, 25 bp, Homo sapien
tcctcaataaggtgaagcccgtagg

SEQ ID NO: 583785 - DNA, 25 bp, Homo sapien
tgaggcagggtggtctggttgggaa

SEQ ID NO: 583786 - DNA, 25 bp, Homo sapien
tgtgtggcagtccactaagtaggag

SEQ ID NO: 583787 - DNA, 25 bp, Homo sapien
gaggcaatactacgtccagccccat

SEQ ID NO: 583788 - DNA, 25 bp, Homo sapien
tttctcagaggaattttgtgtggca

SEQ ID NO: 583789 - DNA, 25 bp, Homo sapien
ttgttttgggtgtgaacagtgtgct

SEQ ID NO: 583790 - DNA, 25 bp, Homo sapien
gttttgggtgtgaacagtgtgctgg

SEQ ID NO: 583791 - DNA, 25 bp, Homo sapien
tgttttgggtgtgaacagtgtgctg

SEQ ID NO: 583792 - DNA, 25 bp, Homo sapien
ctggcgagggtgaccccgaccaagt

SEQ ID NO: 583793 - DNA, 25 bp, Homo sapien
taagtcgcgagttttagctctagag

SEQ ID NO: 583794 - DNA, 25 bp, Homo sapien
tcagggacccctctccgaatgataa

SEQ ID NO: 583795 - DNA, 25 bp, Homo sapien
cctgttagcttcgatttgcgaggaa

SEQ ID NO: 583796 - DNA, 25 bp, Homo sapien
aagaggcggctcgatgaatggctgg

SEQ ID NO: 583797 - DNA, 25 bp, Homo sapien
cggcgtcagggtcgcagcgtctaca

SEQ ID NO: 583798 - DNA, 25 bp, Homo sapien
aaagtgccacgactccacacgcgcg

SEQ ID NO: 583799 - DNA, 25 bp, Homo sapien
gccgttcgccagctctgaggcagaa

SEQ ID NO: 583800 - DNA, 25 bp, Homo sapien
gtagggtctgttatacctgctcatt

SEQ ID NO: 583801 - DNA, 25 bp, Homo sapien
tagggtctgttatacctgctcattt

SEQ ID NO: 583802 - DNA, 25 bp, Homo sapien
ggtctgttatacctgctcatttctc

SEQ ID NO: 583803 - DNA, 25 bp, Homo sapien
agggtctgttatacctgctcatttc

SEQ ID NO: 583804 - DNA, 25 bp, Homo sapien
caggtgctcctgataagccagtggc

SEQ ID NO: 583805 - DNA, 25 bp, Homo sapien
actgcaggccagaggttcagcttat

SEQ ID NO: 583806 - DNA, 25 bp, Homo sapien
agaggttcagcttatgtcttaggcc

SEQ ID NO: 583807 - DNA, 25 bp, Homo sapien
gtttgtctcagtcaccttggatctg

SEQ ID NO: 583808 - DNA, 25 bp, Homo sapien
cacgggtcctatccaaggagcatca

SEQ ID NO: 583809 - DNA, 25 bp, Homo sapien
tccttggtgcataacatctgtccgt

SEQ ID NO: 583810 - DNA, 25 bp, Homo sapien
tccacaaacagttgcacacgggtcc

SEQ ID NO: 583811 - DNA, 25 bp, Homo sapien
ggctactatttcagggcaccacgca

SEQ ID NO: 583812 - DNA, 25 bp, Homo sapien
gcaagcgggagaaatggaaccgaat

SEQ ID NO: 583813 - DNA, 25 bp, Homo sapien
gaaccgaattgagctggcgagtaag

SEQ ID NO: 583814 - DNA, 25 bp, Homo sapien
gaaatggaaccgaattgagctggcg

SEQ ID NO: 583815 - DNA, 25 bp, Homo sapien
aggatcacaggcaagcgggagaaat

SEQ ID NO: 583816 - DNA, 25 bp, Homo sapien
cctgcagattccgtgggtattcaaa

SEQ ID NO: 583817 - DNA, 25 bp, Homo sapien
tcacccctccatggcaaggagcaga

SEQ ID NO: 583818 - DNA, 25 bp, Homo sapien
cagattccgtgggtattcaaagtcc

SEQ ID NO: 583819 - DNA, 25 bp, Homo sapien
catcatcctgcagattccgtgggta

SEQ ID NO: 583820 - DNA, 25 bp, Homo sapien
ctcttgtaaccccgggcgagctgca

SEQ ID NO: 583821 - DNA, 25 bp, Homo sapien
cgggcgagctgcagcattgggtcca

SEQ ID NO: 583822 - DNA, 25 bp, Homo sapien
gggagcgcccctcttctaaggcatc

SEQ ID NO: 583823 - DNA, 25 bp, Homo sapien
gctctccatctttcaggggagcgcc

SEQ ID NO: 583824 - DNA, 25 bp, Homo sapien
actctcccggaagagatgaatccaa

SEQ ID NO: 583825 - DNA, 25 bp, Homo sapien
cttgctctgaaggacgttttgtaac

SEQ ID NO: 583826 - DNA, 25 bp, Homo sapien
agagtcgagctcctcgtgtacgcct

SEQ ID NO: 583827 - DNA, 25 bp, Homo sapien
gagctcctcgtgtacgccttcttgc

SEQ ID NO: 583828 - DNA, 25 bp, Homo sapien
gggtctactaaatgcaggtgcactg

SEQ ID NO: 583829 - DNA, 25 bp, Homo sapien
gcactggcctccactaaggccttca

SEQ ID NO: 583830 - DNA, 25 bp, Homo sapien
catccagcatttcccggggtctact

SEQ ID NO: 583831 - DNA, 25 bp, Homo sapien
cactggcctccactaaggccttcac

SEQ ID NO: 583832 - DNA, 25 bp, Homo sapien
aattgatcgcgagctcatggctgat

SEQ ID NO: 583833 - DNA, 25 bp, Homo sapien
ttggtgaccaaattgatcgcgagct

SEQ ID NO: 583834 - DNA, 25 bp, Homo sapien
ccaatgggttcggagaggaaggctc

SEQ ID NO: 583835 - DNA, 25 bp, Homo sapien
ggttcggagaggaaggctctcagcc

SEQ ID NO: 583836 - DNA, 25 bp, Homo sapien
tttgctctctgatggcccttcacag

SEQ ID NO: 583837 - DNA, 25 bp, Homo sapien
ttgctctctgatggcccttcacagg

SEQ ID NO: 583838 - DNA, 25 bp, Homo sapien
gctctctgatggcccttcacaggga

SEQ ID NO: 583839 - DNA, 25 bp, Homo sapien
tgctctctgatggcccttcacaggg

SEQ ID NO: 583840 - DNA, 25 bp, Homo sapien
gggtcaatagcacgaaagcatgtgg

SEQ ID NO: 583841 - DNA, 25 bp, Homo sapien
tgtggggtcaatagcacgaaagcat

SEQ ID NO: 583842 - DNA, 25 bp, Homo sapien
tcaatagcacgaaagcatgtggcac

SEQ ID NO: 583843 - DNA, 25 bp, Homo sapien
ctatgtgtatgtgcccatcatctgc

SEQ ID NO: 583844 - DNA, 25 bp, Homo sapien
ttgaagcgcttgcccatctcggagg

SEQ ID NO: 583845 - DNA, 25 bp, Homo sapien
tgaagcgcttgcccatctcggaggg

SEQ ID NO: 583846 - DNA, 25 bp, Homo sapien
aagcgcttgcccatctcggaggggc

SEQ ID NO: 583847 - DNA, 25 bp, Homo sapien
cttgaagcgcttgcccatctcggag

SEQ ID NO: 583848 - DNA, 25 bp, Homo sapien
agcaagggcggaacccaaggtggct

SEQ ID NO: 583849 - DNA, 25 bp, Homo sapien
cgaggccaggaacgccgtcacaagc

SEQ ID NO: 583850 - DNA, 25 bp, Homo sapien
gaacgccgtcacaagcaagggcgga

SEQ ID NO: 583851 - DNA, 25 bp, Homo sapien
cgtcacaagcaagggcggaacccaa

SEQ ID NO: 583852 - DNA, 25 bp, Homo sapien
ctctagagagagccgatggctgagt

SEQ ID NO: 583853 - DNA, 25 bp, Homo sapien
cgatggctgagtgcggagcccaggg

SEQ ID NO: 583854 - DNA, 25 bp, Homo sapien
gagagagccgatggctgagtgcgga

SEQ ID NO: 583855 - DNA, 25 bp, Homo sapien
agccgatggctgagtgcggagccca

SEQ ID NO: 583856 - DNA, 25 bp, Homo sapien
gtaataggacatccggataaattgg

SEQ ID NO: 583857 - DNA, 25 bp, Homo sapien
cagagaggtaataggacatccggat

SEQ ID NO: 583858 - DNA, 25 bp, Homo sapien
taggacatccggataaattggcggg

SEQ ID NO: 583859 - DNA, 25 bp, Homo sapien
ggactcccagagaggtaataggaca

SEQ ID NO: 583860 - DNA, 25 bp, Homo sapien
cgctgtctggatctagatcctcagg

SEQ ID NO: 583861 - DNA, 25 bp, Homo sapien
gatctagatcctcaggccacagctg

SEQ ID NO: 583862 - DNA, 25 bp, Homo sapien
tgtctggatctagatcctcaggcca

SEQ ID NO: 583863 - DNA, 25 bp, Homo sapien
ctgcggccgctgtctggatctagat

SEQ ID NO: 583864 - DNA, 25 bp, Homo sapien
ccttcagaggcttcgctgtggacac

SEQ ID NO: 583865 - DNA, 25 bp, Homo sapien
ctatcgttggctgccggcatgcgag

SEQ ID NO: 583866 - DNA, 25 bp, Homo sapien
accagtggccacgaagtaacggagg

SEQ ID NO: 583867 - DNA, 25 bp, Homo sapien
agagtctagaggtagggctatcgtt

SEQ ID NO: 583868 - DNA, 25 bp, Homo sapien
tgaacggacttcaatcaccaccaga

SEQ ID NO: 583869 - DNA, 25 bp, Homo sapien
tgttctctagctgcttacaatgccc

SEQ ID NO: 583870 - DNA, 25 bp, Homo sapien
tgggccttgtcaagcagagataagc

SEQ ID NO: 583871 - DNA, 25 bp, Homo sapien
tctttgattctctctcgccagtcgc

SEQ ID NO: 583872 - DNA, 25 bp, Homo sapien
tccccaggtggaggtactaagtctc

SEQ ID NO: 583873 - DNA, 25 bp, Homo sapien
catcccctgcccgttttagaagtgg

SEQ ID NO: 583874 - DNA, 25 bp, Homo sapien
ttagtgagagcctccacatacccac

SEQ ID NO: 583875 - DNA, 25 bp, Homo sapien
ggcctggaggctaatgcatcccctg

SEQ ID NO: 583876 - DNA, 25 bp, Homo sapien
tctgaaactcggcttcattcttgtg

SEQ ID NO: 583877 - DNA, 25 bp, Homo sapien
gaaactcggcttcattcttgtgcat

SEQ ID NO: 583878 - DNA, 25 bp, Homo sapien
atcagaaggaattgtcccagcagga

SEQ ID NO: 583879 - DNA, 25 bp, Homo sapien
agaaggaattgtcccagcaggatgt

SEQ ID NO: 583880 - DNA, 25 bp, Homo sapien
cactcagtggcaccaaaacagcaaa

SEQ ID NO: 583881 - DNA, 25 bp, Homo sapien
acactcagtggcaccaaaacagcaa

SEQ ID NO: 583882 - DNA, 25 bp, Homo sapien
actcagtggcaccaaaacagcaaat

SEQ ID NO: 583883 - DNA, 25 bp, Homo sapien
ctcagtggcaccaaaacagcaaatg

SEQ ID NO: 583884 - DNA, 25 bp, Homo sapien
ggtggagaaggcgtcattttcccca

SEQ ID NO: 583885 - DNA, 25 bp, Homo sapien
tggagaaggcgtcattttccccaga

SEQ ID NO: 583886 - DNA, 25 bp, Homo sapien
tggggggcagcaatgaggtttgtgt

SEQ ID NO: 583887 - DNA, 25 bp, Homo sapien
ataggtggagaaggcgtcattttcc

SEQ ID NO: 583888 - DNA, 25 bp, Homo sapien
cacgaggagcaggtctgccatgttc

SEQ ID NO: 583889 - DNA, 25 bp, Homo sapien
gctacagaacacgaacatttcccca

SEQ ID NO: 583890 - DNA, 25 bp, Homo sapien
tctgacagctgatagctacagaaca

SEQ ID NO: 583891 - DNA, 25 bp, Homo sapien
caggatctttctcaggcacgaggag

SEQ ID NO: 583892 - DNA, 25 bp, Homo sapien
gaggagctgccaccaatgttagtca

SEQ ID NO: 583893 - DNA, 25 bp, Homo sapien
gcagctgctgtccaaagtaaaatat

SEQ ID NO: 583894 - DNA, 25 bp, Homo sapien
gctgctgtccaaagtaaaatatatc

SEQ ID NO: 583895 - DNA, 25 bp, Homo sapien
gctgtccaaagtaaaatatatcaat

SEQ ID NO: 583896 - DNA, 25 bp, Homo sapien
cacgcacattggttaagaaactcag

SEQ ID NO: 583897 - DNA, 25 bp, Homo sapien
ccacgcacattggttaagaaactca

SEQ ID NO: 583898 - DNA, 25 bp, Homo sapien
gcagaacaaacaacccttgaggcag

SEQ ID NO: 583899 - DNA, 25 bp, Homo sapien
tccaggtttcaccacaaggcagaac

SEQ ID NO: 583900 - DNA, 25 bp, Homo sapien
gctttgcacgcctcccagaaacaaa

SEQ ID NO: 583901 - DNA, 25 bp, Homo sapien
cagtcacgagcgaatttttctctca

SEQ ID NO: 583902 - DNA, 25 bp, Homo sapien
cattgtggctgttcaggaaactgcc

SEQ ID NO: 583903 - DNA, 25 bp, Homo sapien
cggactcagccagccaagggatttc

SEQ ID NO: 583904 - DNA, 25 bp, Homo sapien
tgagagtttgatccctggcaggtcc

SEQ ID NO: 583905 - DNA, 25 bp, Homo sapien
gagactggccggaagtgttacacaa

SEQ ID NO: 583906 - DNA, 25 bp, Homo sapien
ttcctggtactgctatagctgaggt

SEQ ID NO: 583907 - DNA, 25 bp, Homo sapien
ggaaaagctagtggcttgtgagcca

SEQ ID NO: 583908 - DNA, 25 bp, Homo sapien
ggtactgctatagctgaggtaggaa

SEQ ID NO: 583909 - DNA, 25 bp, Homo sapien
ctgaggtaggaaaagctagtggctt

SEQ ID NO: 583910 - DNA, 25 bp, Homo sapien
tatggttgagtctgcaaggcctgcc

SEQ ID NO: 583911 - DNA, 25 bp, Homo sapien
tgaatggcccctcgaaacttgggta

SEQ ID NO: 583912 - DNA, 25 bp, Homo sapien
taaactgtccatcgtgttgcctcac

SEQ ID NO: 583913 - DNA, 25 bp, Homo sapien
taaactcggagcaaacaggtatggt

SEQ ID NO: 583914 - DNA, 25 bp, Homo sapien
ttcacagataggactgccagagcct

SEQ ID NO: 583915 - DNA, 25 bp, Homo sapien
cctggatcctgcaggaccacattcc

SEQ ID NO: 583916 - DNA, 25 bp, Homo sapien
cttcacagataggactgccagagcc

SEQ ID NO: 583917 - DNA, 25 bp, Homo sapien
gatcctgcaggaccacattccttct

SEQ ID NO: 583918 - DNA, 25 bp, Homo sapien
taaagaaagttgccacttcctcttc

SEQ ID NO: 583919 - DNA, 25 bp, Homo sapien
agttgccacttcctcttctcccaat

SEQ ID NO: 583920 - DNA, 25 bp, Homo sapien
aaagaaagttgccacttcctcttct

SEQ ID NO: 583921 - DNA, 25 bp, Homo sapien
tgccacttcctcttctcccaatgac

SEQ ID NO: 583922 - DNA, 25 bp, Homo sapien
gcagcatctggtacagtttctggga

SEQ ID NO: 583923 - DNA, 25 bp, Homo sapien
ttttatatgtcagcgctgtgaggag

SEQ ID NO: 583924 - DNA, 25 bp, Homo sapien
tgctttttatatgtcagcgctgtga

SEQ ID NO: 583925 - DNA, 25 bp, Homo sapien
gtattgcagcatctggtacagtttc

SEQ ID NO: 583926 - DNA, 25 bp, Homo sapien
gaggtgcccactcgctgttcgtaag

SEQ ID NO: 583927 - DNA, 25 bp, Homo sapien
cactcgctgttcgtaagtggacaca

SEQ ID NO: 583928 - DNA, 25 bp, Homo sapien
agccgaggtgcccactcgctgttcg

SEQ ID NO: 583929 - DNA, 25 bp, Homo sapien
tcgtaagtggacacaggcattccac

SEQ ID NO: 583930 - DNA, 25 bp, Homo sapien
ctctcagtttgacaggcactgcctt

SEQ ID NO: 583931 - DNA, 25 bp, Homo sapien
cctctcagtttgacaggcactgcct

SEQ ID NO: 583932 - DNA, 25 bp, Homo sapien
gtgtccatctgatctccgccctgtg

SEQ ID NO: 583933 - DNA, 25 bp, Homo sapien
ccgccctgtgtgtgctgtagagggt

SEQ ID NO: 583934 - DNA, 25 bp, Homo sapien
tcatgctttactggcaccttgtagg

SEQ ID NO: 583935 - DNA, 25 bp, Homo sapien
cgcaagtttgggcagtgagcttcac

SEQ ID NO: 583936 - DNA, 25 bp, Homo sapien
caccttgtaggactcctgggccttc

SEQ ID NO: 583937 - DNA, 25 bp, Homo sapien
aatggagggaggtacacgggcttct

SEQ ID NO: 583938 - DNA, 25 bp, Homo sapien
gtaacccaatctatctgaaatatca

SEQ ID NO: 583939 - DNA, 25 bp, Homo sapien
cagtgtgtgttccaccctcacagca

SEQ ID NO: 583940 - DNA, 25 bp, Homo sapien
agcagttggattagattagctgcat

SEQ ID NO: 583941 - DNA, 25 bp, Homo sapien
tatatttcatgtaacccaatctatc

SEQ ID NO: 583942 - DNA, 25 bp, Homo sapien
tacgtgaagtttgaaactagagaat

SEQ ID NO: 583943 - DNA, 25 bp, Homo sapien
ttacgtgaagtttgaaactagagaa

SEQ ID NO: 583944 - DNA, 25 bp, Homo sapien
cacgatgagtgttctagcaccccag

SEQ ID NO: 583945 - DNA, 25 bp, Homo sapien
gagagggtcccttcagtatcagatt

SEQ ID NO: 583946 - DNA, 25 bp, Homo sapien
tgctatggaaccatgggccacgggc

SEQ ID NO: 583947 - DNA, 25 bp, Homo sapien
ttttcgaggccgtctcagacatcca

SEQ ID NO: 583948 - DNA, 25 bp, Homo sapien
cttcagggacctgcccttgggcact

SEQ ID NO: 583949 - DNA, 25 bp, Homo sapien
ctgataccttcagggacctgccctt

SEQ ID NO: 583950 - DNA, 25 bp, Homo sapien
ataccttcagggacctgcccttggg

SEQ ID NO: 583951 - DNA, 25 bp, Homo sapien
ccctgataccttcagggacctgccc

SEQ ID NO: 583952 - DNA, 25 bp, Homo sapien
tccagtgcctcagcaatgaatcctg

SEQ ID NO: 583953 - DNA, 25 bp, Homo sapien
gtgaatgtaatgaactgtacaccct

SEQ ID NO: 583954 - DNA, 25 bp, Homo sapien
tattggtgaatgtaatgaactgtac

SEQ ID NO: 583955 - DNA, 25 bp, Homo sapien
gcgtcttatatgaattattggtgaa

SEQ ID NO: 583956 - DNA, 25 bp, Homo sapien
tagtttggcatgaaaagtgctggct

SEQ ID NO: 583957 - DNA, 25 bp, Homo sapien
tgcccgctggcttccgccagtagtt

SEQ ID NO: 583958 - DNA, 25 bp, Homo sapien
tggtctgtggacaaccactgctgcc

SEQ ID NO: 583959 - DNA, 25 bp, Homo sapien
agccaacctatcctggcatccagtt

SEQ ID NO: 583960 - DNA, 25 bp, Homo sapien
catgagggaaattcctctttgtctc

SEQ ID NO: 583961 - DNA, 25 bp, Homo sapien
catcttgtcctccaggtcatgaggg

SEQ ID NO: 583962 - DNA, 25 bp, Homo sapien
caatgctccaagtgcctgtgggcct

SEQ ID NO: 583963 - DNA, 25 bp, Homo sapien
gcctgtgtggctgagcaatgctcca

SEQ ID NO: 583964 - DNA, 25 bp, Homo sapien
gatgctccgtagctgccggcagctt

SEQ ID NO: 583965 - DNA, 25 bp, Homo sapien
tcagcttcctgctcattgacaggga

SEQ ID NO: 583966 - DNA, 25 bp, Homo sapien
aactgtgtcatgaatgggacctccc

SEQ ID NO: 583967 - DNA, 25 bp, Homo sapien
gcttggctgctattagccctgtcag

SEQ ID NO: 583968 - DNA, 25 bp, Homo sapien
cactttgcagatgctcactgtttca

SEQ ID NO: 583969 - DNA, 25 bp, Homo sapien
tgcactttgcagatgctcactgttt

SEQ ID NO: 583970 - DNA, 25 bp, Homo sapien
ttgcagatgctcactgtttcaactc

SEQ ID NO: 583971 - DNA, 25 bp, Homo sapien
ctttgcagatgctcactgtttcaac

SEQ ID NO: 583972 - DNA, 25 bp, Homo sapien
aagcggctccaaactccacagagaa

SEQ ID NO: 583973 - DNA, 25 bp, Homo sapien
ggatccctggataagcggctccaaa

SEQ ID NO: 583974 - DNA, 25 bp, Homo sapien
gatttcaaaagacaggccatctcct

SEQ ID NO: 583975 - DNA, 25 bp, Homo sapien
tcttgagtcttcaggatccctggat

SEQ ID NO: 583976 - DNA, 25 bp, Homo sapien
cagaggacggctgcgctccctggtt

SEQ ID NO: 583977 - DNA, 25 bp, Homo sapien
ggcctctttgtgagttgccttcctg

SEQ ID NO: 583978 - DNA, 25 bp, Homo sapien
cggctgcgctccctggtttcaggag

SEQ ID NO: 583979 - DNA, 25 bp, Homo sapien
tgtacccaggcgctgtggcctcttt

SEQ ID NO: 583980 - DNA, 25 bp, Homo sapien
cacctggaaaagtcaaccgagaatt

SEQ ID NO: 583981 - DNA, 25 bp, Homo sapien
aaggaaccatggagccacctggaaa

SEQ ID NO: 583982 - DNA, 25 bp, Homo sapien
tcttccagctcaaagacagtccgtg

SEQ ID NO: 583983 - DNA, 25 bp, Homo sapien
tgccaccacactgaaggaaccatgg

SEQ ID NO: 583984 - DNA, 25 bp, Homo sapien
ctggctccatttcctctgtgctcag

SEQ ID NO: 583985 - DNA, 25 bp, Homo sapien
ggctccatttcctctgtgctcagtg

SEQ ID NO: 583986 - DNA, 25 bp, Homo sapien
ctccatttcctctgtgctcagtgga

SEQ ID NO: 583987 - DNA, 25 bp, Homo sapien
gctccatttcctctgtgctcagtgg

SEQ ID NO: 583988 - DNA, 25 bp, Homo sapien
aaggaccccaccactcttgtggcct

SEQ ID NO: 583989 - DNA, 25 bp, Homo sapien
gtgtcaaagaccaccaaggacccca

SEQ ID NO: 583990 - DNA, 25 bp, Homo sapien
tttctattccgggtgtcaaagacca

SEQ ID NO: 583991 - DNA, 25 bp, Homo sapien
tccgggtgtcaaagaccaccaagga

SEQ ID NO: 583992 - DNA, 25 bp, Homo sapien
ctgagggggtctgtgcggtggctgc

SEQ ID NO: 583993 - DNA, 25 bp, Homo sapien
cttgtcacagtggagacgggcccaa

SEQ ID NO: 583994 - DNA, 25 bp, Homo sapien
gggaagtccctagcttccagattct

SEQ ID NO: 583995 - DNA, 25 bp, Homo sapien
gcagggggctgcttactggaaagaa

SEQ ID NO: 583996 - DNA, 25 bp, Homo sapien
cagactaggtatccggtcaggaaca

SEQ ID NO: 583997 - DNA, 25 bp, Homo sapien
gaggtgcgggcggttgctccggata

SEQ ID NO: 583998 - DNA, 25 bp, Homo sapien
cggttgctccggataatgacagaat

SEQ ID NO: 583999 - DNA, 25 bp, Homo sapien
aaccagactaggtatccggtcagga

SEQ ID NO: 584000 - DNA, 25 bp, Homo sapien
gaggctcagagttcccaaaggagca

SEQ ID NO: 584001 - DNA, 25 bp, Homo sapien
cccaaaggtcgtaggtggtcagcga

SEQ ID NO: 584002 - DNA, 25 bp, Homo sapien
tcaagcccagggtcaagataaggag

SEQ ID NO: 584003 - DNA, 25 bp, Homo sapien
tctgatggtgcagcaatagcaggtc

SEQ ID NO: 584004 - DNA, 25 bp, Homo sapien
tccaggctctgattcccgggtgagg

SEQ ID NO: 584005 - DNA, 25 bp, Homo sapien
cagtccaggctctgattcccgggtg

SEQ ID NO: 584006 - DNA, 25 bp, Homo sapien
tcattatctccagttctaagagtaa

SEQ ID NO: 584007 - DNA, 25 bp, Homo sapien
tttcattatctccagttctaagagt

SEQ ID NO: 584008 - DNA, 25 bp, Homo sapien
ttcccgagacccatgcccacatggc

SEQ ID NO: 584009 - DNA, 25 bp, Homo sapien
cgtcaaaatgctcctttcccgagac

SEQ ID NO: 584010 - DNA, 25 bp, Homo sapien
ctttgggttcttaggagcaccgtca

SEQ ID NO: 584011 - DNA, 25 bp, Homo sapien
acatggcacactcgatgtcgggcac

SEQ ID NO: 584012 - DNA, 25 bp, Homo sapien
attgcatctcatggctcccctggaa

SEQ ID NO: 584013 - DNA, 25 bp, Homo sapien
ccatggctgcgtgcacacccactgc

SEQ ID NO: 584014 - DNA, 25 bp, Homo sapien
tgcatctcatggctcccctggaagc

SEQ ID NO: 584015 - DNA, 25 bp, Homo sapien
tggctgcgtgcacacccactgcagg

SEQ ID NO: 584016 - DNA, 25 bp, Homo sapien
gcgggctgtttccaaacgtgaatca

SEQ ID NO: 584017 - DNA, 25 bp, Homo sapien
tcagcacagattcccgcgggctgtt

SEQ ID NO: 584018 - DNA, 25 bp, Homo sapien
taaccttatccttagggaagccaca

SEQ ID NO: 584019 - DNA, 25 bp, Homo sapien
tccactgggtcctccgatgagtcag

SEQ ID NO: 584020 - DNA, 25 bp, Homo sapien
caccaaggcaaccaggctcaaaact

SEQ ID NO: 584021 - DNA, 25 bp, Homo sapien
gactgaaaacgggtcaccaaggcaa

SEQ ID NO: 584022 - DNA, 25 bp, Homo sapien
ggctcgagagaacatgagatggtta

SEQ ID NO: 584023 - DNA, 25 bp, Homo sapien
taggaggtgaataaggactgaaaac

SEQ ID NO: 584024 - DNA, 25 bp, Homo sapien
gacacatctatatggagggatgatg

SEQ ID NO: 584025 - DNA, 25 bp, Homo sapien
gcaatgacacatctatatggaggga

SEQ ID NO: 584026 - DNA, 25 bp, Homo sapien
tggcagcaatgacacatctatatgg

SEQ ID NO: 584027 - DNA, 25 bp, Homo sapien
atgcttggcagcaatgacacatcta

SEQ ID NO: 584028 - DNA, 25 bp, Homo sapien
gagcccatcacacacagtagtcaca

SEQ ID NO: 584029 - DNA, 25 bp, Homo sapien
tatcggatgcacttggtgagcccat

SEQ ID NO: 584030 - DNA, 25 bp, Homo sapien
tggaccagtgtctacctcctctgta

SEQ ID NO: 584031 - DNA, 25 bp, Homo sapien
catttagtgactggctggagctgca

SEQ ID NO: 584032 - DNA, 25 bp, Homo sapien
agctgcctcattggcaactggattc

SEQ ID NO: 584033 - DNA, 25 bp, Homo sapien
tcattggcaactggattctgtctgg

SEQ ID NO: 584034 - DNA, 25 bp, Homo sapien
ccctgtgcggtcagcgagccaggat

SEQ ID NO: 584035 - DNA, 25 bp, Homo sapien
ttgatgtggctccaatgcaggcgcc

SEQ ID NO: 584036 - DNA, 25 bp, Homo sapien
aaggaataaagctgttctttgctgc

SEQ ID NO: 584037 - DNA, 25 bp, Homo sapien
cagagccgctggcagtgaaggaata

SEQ ID NO: 584038 - DNA, 25 bp, Homo sapien
aagctgttctttgctgccttgcagg

SEQ ID NO: 584039 - DNA, 25 bp, Homo sapien
ctcccagagccgctggcagtgaagg

SEQ ID NO: 584040 - DNA, 25 bp, Homo sapien
tcagttcctgggagtggaatgactg

SEQ ID NO: 584041 - DNA, 25 bp, Homo sapien
aatgactgggccacgtcatcttcca

SEQ ID NO: 584042 - DNA, 25 bp, Homo sapien
tgggagtggaatgactgggccacgt

SEQ ID NO: 584043 - DNA, 25 bp, Homo sapien
tggaatgactgggccacgtcatctt

SEQ ID NO: 584044 - DNA, 25 bp, Homo sapien
tattcccacccattctgcgatgtag

SEQ ID NO: 584045 - DNA, 25 bp, Homo sapien
ccttggaccattggaagctcattcc

SEQ ID NO: 584046 - DNA, 25 bp, Homo sapien
gactcattcctgattccttggacca

SEQ ID NO: 584047 - DNA, 25 bp, Homo sapien
tgcgatgtagctgacaatggctttc

SEQ ID NO: 584048 - DNA, 25 bp, Homo sapien
tctcaagaacccagccatcctggtt

SEQ ID NO: 584049 - DNA, 25 bp, Homo sapien
cccacctaagatcattctcccacag

SEQ ID NO: 584050 - DNA, 25 bp, Homo sapien
gatagggtgacaaagacttctccct

SEQ ID NO: 584051 - DNA, 25 bp, Homo sapien
taatgcggggattgatctccagctc

SEQ ID NO: 584052 - DNA, 25 bp, Homo sapien
cccaaatggctaatatgaggactca

SEQ ID NO: 584053 - DNA, 25 bp, Homo sapien
cagaggcatactgtctcagctgagc

SEQ ID NO: 584054 - DNA, 25 bp, Homo sapien
ccattggaatatgttgggagtcacc

SEQ ID NO: 584055 - DNA, 25 bp, Homo sapien
tcaagaggccctgagtactgctgct

SEQ ID NO: 584056 - DNA, 25 bp, Homo sapien
taggggagagcgagtgggctggcct

SEQ ID NO: 584057 - DNA, 25 bp, Homo sapien
tttaggggagagcgagtgggctggc

SEQ ID NO: 584058 - DNA, 25 bp, Homo sapien
gggagagcgagtgggctggcctttc

SEQ ID NO: 584059 - DNA, 25 bp, Homo sapien
ctgtgctcccggttgtttaggggag

SEQ ID NO: 584060 - DNA, 25 bp, Homo sapien
caaccagggatacagatggtccagc

SEQ ID NO: 584061 - DNA, 25 bp, Homo sapien
ttgtggcccactaaaaggattttca

SEQ ID NO: 584062 - DNA, 25 bp, Homo sapien
tctgcaaaagcgcagtcacgtaggc

SEQ ID NO: 584063 - DNA, 25 bp, Homo sapien
cattctcggcgttttgcaggagagc

SEQ ID NO: 584064 - DNA, 25 bp, Homo sapien
tctccatagtttgaacaggacctgc

SEQ ID NO: 584065 - DNA, 25 bp, Homo sapien
gagtctcctcctacctcgcagactg

SEQ ID NO: 584066 - DNA, 25 bp, Homo sapien
ttgcttgccctctccatagtttgaa

SEQ ID NO: 584067 - DNA, 25 bp, Homo sapien
ctcctacctcgcagactggcttctt

SEQ ID NO: 584068 - DNA, 25 bp, Homo sapien
catggcctgtctgcgggtcagtgtc

SEQ ID NO: 584069 - DNA, 25 bp, Homo sapien
gctgtctccgtgtccttagtccttt

SEQ ID NO: 584070 - DNA, 25 bp, Homo sapien
cagggcatggcctgtctgcgggtca

SEQ ID NO: 584071 - DNA, 25 bp, Homo sapien
gtgtctgctgtctccgtgtccttag

SEQ ID NO: 584072 - DNA, 25 bp, Homo sapien
acagctctcccccatcaggggtggc

SEQ ID NO: 584073 - DNA, 25 bp, Homo sapien
agctctcccccatcaggggtggcgg

SEQ ID NO: 584074 - DNA, 25 bp, Homo sapien
tctcccccatcaggggtggcggcat

SEQ ID NO: 584075 - DNA, 25 bp, Homo sapien
gggcacagctctcccccatcagggg

SEQ ID NO: 584076 - DNA, 25 bp, Homo sapien
gtttgctggttggcccaggagtcta

SEQ ID NO: 584077 - DNA, 25 bp, Homo sapien
tttgctggttggcccaggagtctac

SEQ ID NO: 584078 - DNA, 25 bp, Homo sapien
ggtttgctggttggcccaggagtct

SEQ ID NO: 584079 - DNA, 25 bp, Homo sapien
ccactcctcgttatggtaactctcg

SEQ ID NO: 584080 - DNA, 25 bp, Homo sapien
tcgttatggtaactctcgttcccaa

SEQ ID NO: 584081 - DNA, 25 bp, Homo sapien
ggtaactctcgttcccaactccaga

SEQ ID NO: 584082 - DNA, 25 bp, Homo sapien
tcccattgcagcacccctactccta

SEQ ID NO: 584083 - DNA, 25 bp, Homo sapien
tttctggcagacaggtcgcgtggtc

SEQ ID NO: 584084 - DNA, 25 bp, Homo sapien
tctggcagacaggtcgcgtggtctt

SEQ ID NO: 584085 - DNA, 25 bp, Homo sapien
ctttctggcagacaggtcgcgtggt

SEQ ID NO: 584086 - DNA, 25 bp, Homo sapien
tggcagacaggtcgcgtggtcttct

SEQ ID NO: 584087 - DNA, 25 bp, Homo sapien
ttggggagacgagggtcccacacac

SEQ ID NO: 584088 - DNA, 25 bp, Homo sapien
cttggggagacgagggtcccacaca

SEQ ID NO: 584089 - DNA, 25 bp, Homo sapien
ggtttcctccactttagctcccata

SEQ ID NO: 584090 - DNA, 25 bp, Homo sapien
cctctcggtttcctccactttagct

SEQ ID NO: 584091 - DNA, 25 bp, Homo sapien
tcggtttcctccactttagctccca

SEQ ID NO: 584092 - DNA, 25 bp, Homo sapien
tccactttagctcccatacctggtt

SEQ ID NO: 584093 - DNA, 25 bp, Homo sapien
catgcctccagcgtgtgcccctcag

SEQ ID NO: 584094 - DNA, 25 bp, Homo sapien
agccatgcctccagcgtgtgcccct

SEQ ID NO: 584095 - DNA, 25 bp, Homo sapien
gccatgcctccagcgtgtgcccctc

SEQ ID NO: 584096 - DNA, 25 bp, Homo sapien
ctccagcgtgtgcccctcaggggcc

SEQ ID NO: 584097 - DNA, 25 bp, Homo sapien
tttgagaacccttcacagttcgcag

SEQ ID NO: 584098 - DNA, 25 bp, Homo sapien
tgcaaaattgaaaccctgcttttga

SEQ ID NO: 584099 - DNA, 25 bp, Homo sapien
ctgcttttgagaacccttcacagtt

SEQ ID NO: 584100 - DNA, 25 bp, Homo sapien
ctgtttgcaaaattgaaaccctgct

SEQ ID NO: 584101 - DNA, 25 bp, Homo sapien
ggaacggccaccagctgattggaaa

SEQ ID NO: 584102 - DNA, 25 bp, Homo sapien
ctcccgaggcgcattgggcttccgg

SEQ ID NO: 584103 - DNA, 25 bp, Homo sapien
cccaaatctggttatggtaacgagt

SEQ ID NO: 584104 - DNA, 25 bp, Homo sapien
cagcggactcctctcccgaggtatg

SEQ ID NO: 584105 - DNA, 25 bp, Homo sapien
ccttcaagtgaaccggagggagacg

SEQ ID NO: 584106 - DNA, 25 bp, Homo sapien
cagggaactgattaccagaggagcc

SEQ ID NO: 584107 - DNA, 25 bp, Homo sapien
tcctattaggaaaccctggactcag

SEQ ID NO: 584108 - DNA, 25 bp, Homo sapien
gaaagaagcagagagcccttcaagt

SEQ ID NO: 584109 - DNA, 25 bp, Homo sapien
atggctgtgggtccattatactcca

SEQ ID NO: 584110 - DNA, 25 bp, Homo sapien
ctagtcgatgcataatcaacacttt

SEQ ID NO: 584111 - DNA, 25 bp, Homo sapien
actttagttacgtcacataacggct

SEQ ID NO: 584112 - DNA, 25 bp, Homo sapien
cgatgcataatcaacactttagtta

SEQ ID NO: 584113 - DNA, 25 bp, Homo sapien
taatcaacactttagttacgtcaca

SEQ ID NO: 584114 - DNA, 25 bp, Homo sapien
caggactgggtgtgttggtgacagc

SEQ ID NO: 584115 - DNA, 25 bp, Homo sapien
gccaggactgggtgtgttggtgaca

SEQ ID NO: 584116 - DNA, 25 bp, Homo sapien
atccgcagcaccttgcatggtgtgc

SEQ ID NO: 584117 - DNA, 25 bp, Homo sapien
gggccaggactgggtgtgttggtga

SEQ ID NO: 584118 - DNA, 25 bp, Homo sapien
gactgcccaacaacttggagctgtt

SEQ ID NO: 584119 - DNA, 25 bp, Homo sapien
cccttgccgtcttcagtgggtggca

SEQ ID NO: 584120 - DNA, 25 bp, Homo sapien
gcaagtggccctcctttgagaccca

SEQ ID NO: 584121 - DNA, 25 bp, Homo sapien
cttgttcgtagcactttctggcctc

SEQ ID NO: 584122 - DNA, 25 bp, Homo sapien
cagtcgtgagaacctgcatggagtc

SEQ ID NO: 584123 - DNA, 25 bp, Homo sapien
tatcaggggtcccacagcccttcgg

SEQ ID NO: 584124 - DNA, 25 bp, Homo sapien
cagcccttcggtaaatccctctttg

SEQ ID NO: 584125 - DNA, 25 bp, Homo sapien
catggagtccgttgttcttatcagg

SEQ ID NO: 584126 - DNA, 25 bp, Homo sapien
gtcttcgtggaatggctgtctggca

SEQ ID NO: 584127 - DNA, 25 bp, Homo sapien
tgtggccttccggtgcatctttccc

SEQ ID NO: 584128 - DNA, 25 bp, Homo sapien
gaacgtcatcaaggaggttgctgga

SEQ ID NO: 584129 - DNA, 25 bp, Homo sapien
ggaactatttgtcctctccctggct

SEQ ID NO: 584130 - DNA, 25 bp, Homo sapien
cctttaaagggagccagagcaggga

SEQ ID NO: 584131 - DNA, 25 bp, Homo sapien
ttcccctgccgtcctggcgctgttc

SEQ ID NO: 584132 - DNA, 25 bp, Homo sapien
gagggaaacggagctcttcccctgc

SEQ ID NO: 584133 - DNA, 25 bp, Homo sapien
ggcagccacctttaaagggagccag

SEQ ID NO: 584134 - DNA, 25 bp, Homo sapien
ccttatcaggcagtagggcgagctg

SEQ ID NO: 584135 - DNA, 25 bp, Homo sapien
aatgcatcctgagggcggagagcta

SEQ ID NO: 584136 - DNA, 25 bp, Homo sapien
tcgacctgggtcgtggcgcctacta

SEQ ID NO: 584137 - DNA, 25 bp, Homo sapien
tgctgagggcattcctcgacctggg

SEQ ID NO: 584138 - DNA, 25 bp, Homo sapien
tccttgatcatcgaacacttctgtg

SEQ ID NO: 584139 - DNA, 25 bp, Homo sapien
gtcagctaagttgtttgaagcagta

SEQ ID NO: 584140 - DNA, 25 bp, Homo sapien
taaagtccagacgttccttgatcat

SEQ ID NO: 584141 - DNA, 25 bp, Homo sapien
cttctgtgtcagctaagttgtttga

SEQ ID NO: 584142 - DNA, 25 bp, Homo sapien
tttcccaatccagtaagccatcttt

SEQ ID NO: 584143 - DNA, 25 bp, Homo sapien
cccaatccagtaagccatctttcat

SEQ ID NO: 584144 - DNA, 25 bp, Homo sapien
atgatttagggtccaatccatttcc

SEQ ID NO: 584145 - DNA, 25 bp, Homo sapien
tagggtccaatccatttcccaatcc

SEQ ID NO: 584146 - DNA, 25 bp, Homo sapien
tgctggcagctcacgtgcttggccc

SEQ ID NO: 584147 - DNA, 25 bp, Homo sapien
cacagcccccttggttggaaagcga

SEQ ID NO: 584148 - DNA, 25 bp, Homo sapien
gcatcccagggtgctaaggcctgct

SEQ ID NO: 584149 - DNA, 25 bp, Homo sapien
tgtgagagttcgacccagaaaggtg

SEQ ID NO: 584150 - DNA, 25 bp, Homo sapien
acaggcaaactctgtgtgtccagtg

SEQ ID NO: 584151 - DNA, 25 bp, Homo sapien
ggcaaactctgtgtgtccagtgtac

SEQ ID NO: 584152 - DNA, 25 bp, Homo sapien
caggcaaactctgtgtgtccagtgt

SEQ ID NO: 584153 - DNA, 25 bp, Homo sapien
tcacaggcaaactctgtgtgtccag

SEQ ID NO: 584154 - DNA, 25 bp, Homo sapien
tggaacttttcatgaattcgtgtgt

SEQ ID NO: 584155 - DNA, 25 bp, Homo sapien
atatggaacttttcatgaattcgtg

SEQ ID NO: 584156 - DNA, 25 bp, Homo sapien
gaacttttcatgaattcgtgtgtca

SEQ ID NO: 584157 - DNA, 25 bp, Homo sapien
tatggaacttttcatgaattcgtgt

SEQ ID NO: 584158 - DNA, 25 bp, Homo sapien
aatttccctcgagacaccttgacct

SEQ ID NO: 584159 - DNA, 25 bp, Homo sapien
ttgactccaatttccctcgagacac

SEQ ID NO: 584160 - DNA, 25 bp, Homo sapien
accattgactccaatttccctcgag

SEQ ID NO: 584161 - DNA, 25 bp, Homo sapien
tccaatttccctcgagacaccttga

SEQ ID NO: 584162 - DNA, 25 bp, Homo sapien
tgagtccaagccctcaaggtgccga

SEQ ID NO: 584163 - DNA, 25 bp, Homo sapien
tccaagccctcaaggtgccgaagca

SEQ ID NO: 584164 - DNA, 25 bp, Homo sapien
agtccaagccctcaaggtgccgaag

SEQ ID NO: 584165 - DNA, 25 bp, Homo sapien
ctgagtccaagccctcaaggtgccg

SEQ ID NO: 584166 - DNA, 25 bp, Homo sapien
ctgatcccgtggataggctcctcat

SEQ ID NO: 584167 - DNA, 25 bp, Homo sapien
caactgatcccgtggataggctcct

SEQ ID NO: 584168 - DNA, 25 bp, Homo sapien
actgatcccgtggataggctcctca

SEQ ID NO: 584169 - DNA, 25 bp, Homo sapien
agcaactgatcccgtggataggctc

SEQ ID NO: 584170 - DNA, 25 bp, Homo sapien
tctggcgggaagtgatttgagctcc

SEQ ID NO: 584171 - DNA, 25 bp, Homo sapien
agtgatttgagctcccatagcccag

SEQ ID NO: 584172 - DNA, 25 bp, Homo sapien
gcccagggggtcgtctggaccatta

SEQ ID NO: 584173 - DNA, 25 bp, Homo sapien
cagagaagccttctggcgggaagtg

SEQ ID NO: 584174 - DNA, 25 bp, Homo sapien
accggtgaccatggccaagctcctg

SEQ ID NO: 584175 - DNA, 25 bp, Homo sapien
cctggcaccggtgaccatggccaag

SEQ ID NO: 584176 - DNA, 25 bp, Homo sapien
ggcaccggtgaccatggccaagctc

SEQ ID NO: 584177 - DNA, 25 bp, Homo sapien
tggcaccggtgaccatggccaagct

SEQ ID NO: 584178 - DNA, 25 bp, Homo sapien
tggaaggaaaccttgcaccatccgc

SEQ ID NO: 584179 - DNA, 25 bp, Homo sapien
tgtgaagggcgatttccgtttggaa

SEQ ID NO: 584180 - DNA, 25 bp, Homo sapien
tctttgtggtaattcccaggctcag

SEQ ID NO: 584181 - DNA, 25 bp, Homo sapien
gctcagctctgtgaagggcgatttc

SEQ ID NO: 584182 - DNA, 25 bp, Homo sapien
ctgactgcgacctgtgtggtgtgct

SEQ ID NO: 584183 - DNA, 25 bp, Homo sapien
ctgtatgtgagggtgcattcatagt

SEQ ID NO: 584184 - DNA, 25 bp, Homo sapien
gatgggtttagatgctgactgcgac

SEQ ID NO: 584185 - DNA, 25 bp, Homo sapien
tatgtgagggtgcattcatagtggt

SEQ ID NO: 584186 - DNA, 25 bp, Homo sapien
tctacattaggaaaagtataagccc

SEQ ID NO: 584187 - DNA, 25 bp, Homo sapien
gcacctcctttttttagtcgagata

SEQ ID NO: 584188 - DNA, 25 bp, Homo sapien
tgctttataagatggccagatctac

SEQ ID NO: 584189 - DNA, 25 bp, Homo sapien
ctttatatactctttgcacctcctt

SEQ ID NO: 584190 - DNA, 25 bp, Homo sapien
ttgttttgccctgttactccactgg

SEQ ID NO: 584191 - DNA, 25 bp, Homo sapien
tactccactggtagtcatctggtgt

SEQ ID NO: 584192 - DNA, 25 bp, Homo sapien
tgccctgttactccactggtagtca

SEQ ID NO: 584193 - DNA, 25 bp, Homo sapien
cactggtagtcatctggtgtttgta

SEQ ID NO: 584194 - DNA, 25 bp, Homo sapien
gaaacaagtagaagccatcacctgg

SEQ ID NO: 584195 - DNA, 25 bp, Homo sapien
ggtgtaggacacattagccttctgg

SEQ ID NO: 584196 - DNA, 25 bp, Homo sapien
ggtgccagttacagcaggtgattca

SEQ ID NO: 584197 - DNA, 25 bp, Homo sapien
tacaaacccatgattgtcagggagg

SEQ ID NO: 584198 - DNA, 25 bp, Homo sapien
ttaaatcattaccacggaagatata

SEQ ID NO: 584199 - DNA, 25 bp, Homo sapien
taaatcattaccacggaagatatat

SEQ ID NO: 584200 - DNA, 25 bp, Homo sapien
gatatattagcttcaactttagttt

SEQ ID NO: 584201 - DNA, 25 bp, Homo sapien
acggaagatatattagcttcaactt

SEQ ID NO: 584202 - DNA, 25 bp, Homo sapien
cagcatttactaaattgggaaagac

SEQ ID NO: 584203 - DNA, 25 bp, Homo sapien
acgcctgggcggcttgaatagcaca

SEQ ID NO: 584204 - DNA, 25 bp, Homo sapien
tagcacacttcagttattccggagg

SEQ ID NO: 584205 - DNA, 25 bp, Homo sapien
tgcatccaagggaagtttgtctctg

SEQ ID NO: 584206 - DNA, 25 bp, Homo sapien
gagtgatgctcacacttgttgctca

SEQ ID NO: 584207 - DNA, 25 bp, Homo sapien
gaaaatcagttaattgagtattcag

SEQ ID NO: 584208 - DNA, 25 bp, Homo sapien
ggattgtgctaattaagtaaggcct

SEQ ID NO: 584209 - DNA, 25 bp, Homo sapien
cgggcagaaatggagttaggtagtt

SEQ ID NO: 584210 - DNA, 25 bp, Homo sapien
gcagctttgctggtagagtcgtaag

SEQ ID NO: 584211 - DNA, 25 bp, Homo sapien
ttggaccaaaagtgagtttatgaag

SEQ ID NO: 584212 - DNA, 25 bp, Homo sapien
tgtaagccattaaaccttttgaaga

SEQ ID NO: 584213 - DNA, 25 bp, Homo sapien
gtgttgttcagtcatccaggtgccc

SEQ ID NO: 584214 - DNA, 25 bp, Homo sapien
tcaaactgagatgaccaaggttaag

SEQ ID NO: 584215 - DNA, 25 bp, Homo sapien
gctctaccactgttgctgaatcgtc

SEQ ID NO: 584216 - DNA, 25 bp, Homo sapien
aatgtccaaccaaaaagcgggcagc

SEQ ID NO: 584217 - DNA, 25 bp, Homo sapien
ggcccctggtctgagtattggaata

SEQ ID NO: 584218 - DNA, 25 bp, Homo sapien
gagctgtaaactcctcattcggtga

SEQ ID NO: 584219 - DNA, 25 bp, Homo sapien
tgatcacttttgttgaggagtgccc

SEQ ID NO: 584220 - DNA, 25 bp, Homo sapien
cattcggtgagacctagtggtcatc

SEQ ID NO: 584221 - DNA, 25 bp, Homo sapien
tccagttcaacatgccgggattaca

SEQ ID NO: 584222 - DNA, 25 bp, Homo sapien
ggaaacttgagaccacgattctttg

SEQ ID NO: 584223 - DNA, 25 bp, Homo sapien
cagctaggtaaaaggactcaattgc

SEQ ID NO: 584224 - DNA, 25 bp, Homo sapien
gaaactgtccgtatctgtagcgaag

SEQ ID NO: 584225 - DNA, 25 bp, Homo sapien
taaaatgacttccaccaccctgatc

SEQ ID NO: 584226 - DNA, 25 bp, Homo sapien
caaagcggctggattgttccaacaa

SEQ ID NO: 584227 - DNA, 25 bp, Homo sapien
ttaaagattcagacgagcctccact

SEQ ID NO: 584228 - DNA, 25 bp, Homo sapien
gatgtaaactgtccctaggtcacgt

SEQ ID NO: 584229 - DNA, 25 bp, Homo sapien
tcttgagaagttaaaggcacctcca

SEQ ID NO: 584230 - DNA, 25 bp, Homo sapien
ggttcccgagttgctgcagcagcag

SEQ ID NO: 584231 - DNA, 25 bp, Homo sapien
cgagctccggggtcgctgcattctt

SEQ ID NO: 584232 - DNA, 25 bp, Homo sapien
tgcgcgtccataggccgtggctgct

SEQ ID NO: 584233 - DNA, 25 bp, Homo sapien
gcattctttcccttgcgcgtccata

SEQ ID NO: 584234 - DNA, 25 bp, Homo sapien
gaaacgcggtctttctctagacgcg

SEQ ID NO: 584235 - DNA, 25 bp, Homo sapien
tctagacgcgtcttgctgggagagt

SEQ ID NO: 584236 - DNA, 25 bp, Homo sapien
cacgagatctggtgacgtcagcgct

SEQ ID NO: 584237 - DNA, 25 bp, Homo sapien
tctttgcccggctccaagatggacg

SEQ ID NO: 584238 - DNA, 25 bp, Homo sapien
tttggtttcgaattaggcacagcct

SEQ ID NO: 584239 - DNA, 25 bp, Homo sapien
catccgtcccgcgctttggtttcga

SEQ ID NO: 584240 - DNA, 25 bp, Homo sapien
cgaggctttcgtcggcctccgccaa

SEQ ID NO: 584241 - DNA, 25 bp, Homo sapien
aacgcgccaccagttagaggcaggg

SEQ ID NO: 584242 - DNA, 25 bp, Homo sapien
accacacttcgcttaactctcaagg

SEQ ID NO: 584243 - DNA, 25 bp, Homo sapien
gcttaactctcaaggcgcgaacaac

SEQ ID NO: 584244 - DNA, 25 bp, Homo sapien
cttggaagccaccacacttcgctta

SEQ ID NO: 584245 - DNA, 25 bp, Homo sapien
tcaaggcgcgaacaacctctcgcga

SEQ ID NO: 584246 - DNA, 25 bp, Homo sapien
taaaagcccagcctacggcaagtgt

SEQ ID NO: 584247 - DNA, 25 bp, Homo sapien
aaataaaagcccagcctacggcaag

SEQ ID NO: 584248 - DNA, 25 bp, Homo sapien
tggcaggagtctggattagagaaaa

SEQ ID NO: 584249 - DNA, 25 bp, Homo sapien
cccagcctacggcaagtgtcggtac

SEQ ID NO: 584250 - DNA, 25 bp, Homo sapien
tggcggggccaggacggcggtggcc

SEQ ID NO: 584251 - DNA, 25 bp, Homo sapien
ctggcggggccaggacggcggtggc

SEQ ID NO: 584252 - DNA, 25 bp, Homo sapien
ttgcacagacgtggaaatcgggttg

SEQ ID NO: 584253 - DNA, 25 bp, Homo sapien
cgtgggtctagaatgaacccgttgc

SEQ ID NO: 584254 - DNA, 25 bp, Homo sapien
agggtcccgtcgctcgccggtcaga

SEQ ID NO: 584255 - DNA, 25 bp, Homo sapien
tggcggcgctgaggtcccattactg

SEQ ID NO: 584256 - DNA, 25 bp, Homo sapien
ttctaatctgcaggaatgtgacgcc

SEQ ID NO: 584257 - DNA, 25 bp, Homo sapien
gcttgaggcaagacgtcccagtttc

SEQ ID NO: 584258 - DNA, 25 bp, Homo sapien
gaaaaacacaaagatggagcccgtc

SEQ ID NO: 584259 - DNA, 25 bp, Homo sapien
cagtcctaggtgacagacgacgact

SEQ ID NO: 584260 - DNA, 25 bp, Homo sapien
gagccctttcttaagaaagtcgaca

SEQ ID NO: 584261 - DNA, 25 bp, Homo sapien
ttttcgacatgtttggacagagccc

SEQ ID NO: 584262 - DNA, 25 bp, Homo sapien
taaatcaagactcaatacccgaagg

SEQ ID NO: 584263 - DNA, 25 bp, Homo sapien
ccatcaaagcgaaagctgcatcaga

SEQ ID NO: 584264 - DNA, 25 bp, Homo sapien
tttcactttagtctatttgcaacgg

SEQ ID NO: 584265 - DNA, 25 bp, Homo sapien
tttgcaacggtcgaaggcctttatg

SEQ ID NO: 584266 - DNA, 25 bp, Homo sapien
cggtcgaaggcctttatgtttgtat

SEQ ID NO: 584267 - DNA, 25 bp, Homo sapien
tagtctatttgcaacggtcgaaggc

SEQ ID NO: 584268 - DNA, 25 bp, Homo sapien
ccggccacatgagtaagaggaagta

SEQ ID NO: 584269 - DNA, 25 bp, Homo sapien
tgcctgcaaatggtctgaaataact

SEQ ID NO: 584270 - DNA, 25 bp, Homo sapien
ggaagtagagaaagccacaagggca

SEQ ID NO: 584271 - DNA, 25 bp, Homo sapien
cttccggccacatgagtaagaggaa

SEQ ID NO: 584272 - DNA, 25 bp, Homo sapien
ctggatgacaagacagactgaacta

SEQ ID NO: 584273 - DNA, 25 bp, Homo sapien
attagagtatttttcttggtccact

SEQ ID NO: 584274 - DNA, 25 bp, Homo sapien
cttggtccacttcttcatatgggtt

SEQ ID NO: 584275 - DNA, 25 bp, Homo sapien
gacagactgaactaaattagagtat

SEQ ID NO: 584276 - DNA, 25 bp, Homo sapien
cttcctccaccgatcccggggtctg

SEQ ID NO: 584277 - DNA, 25 bp, Homo sapien
tatgcttgctcacgggtccacagag

SEQ ID NO: 584278 - DNA, 25 bp, Homo sapien
cttggtttggcagcttatgcttgct

SEQ ID NO: 584279 - DNA, 25 bp, Homo sapien
gggtccacagagcaaagcatcttcc

SEQ ID NO: 584280 - DNA, 25 bp, Homo sapien
ctctctggattgaagataggaaacc

SEQ ID NO: 584281 - DNA, 25 bp, Homo sapien
catggtctgctgaaggactcgggtc

SEQ ID NO: 584282 - DNA, 25 bp, Homo sapien
gactcgggtcacacttggtatcaca

SEQ ID NO: 584283 - DNA, 25 bp, Homo sapien
ccagttttgtggcactcgtctgtcc

SEQ ID NO: 584284 - DNA, 25 bp, Homo sapien
tcaagtcctcgtatatgaagtgcac

SEQ ID NO: 584285 - DNA, 25 bp, Homo sapien
tatactccacaggactaccatgagg

SEQ ID NO: 584286 - DNA, 25 bp, Homo sapien
tctaaaaagagtgattctgcctggg

SEQ ID NO: 584287 - DNA, 25 bp, Homo sapien
caggctatggcaagggtcagtacac

SEQ ID NO: 584288 - DNA, 25 bp, Homo sapien
tagaccatacatttctcgctgcaaa

SEQ ID NO: 584289 - DNA, 25 bp, Homo sapien
tgactgatggaattaaagcctagga

SEQ ID NO: 584290 - DNA, 25 bp, Homo sapien
tattaacacgtgaaagacctacaag

SEQ ID NO: 584291 - DNA, 25 bp, Homo sapien
tctacacactaggttaatgaagcag

SEQ ID NO: 584292 - DNA, 25 bp, Homo sapien
agagatgcaatctctctacgttgcc

SEQ ID NO: 584293 - DNA, 25 bp, Homo sapien
gagatgcaatctctctacgttgcct

SEQ ID NO: 584294 - DNA, 25 bp, Homo sapien
acaaagatggaaatgtcaattcttt

SEQ ID NO: 584295 - DNA, 25 bp, Homo sapien
aagatggaaatgtcaattctttttt

SEQ ID NO: 584296 - DNA, 25 bp, Homo sapien
ttcagtgctcgttggcctccaagcg

SEQ ID NO: 584297 - DNA, 25 bp, Homo sapien
tccaagcgcttgcatagtaagcccc

SEQ ID NO: 584298 - DNA, 25 bp, Homo sapien
gatttatggcttgtaggaggacaca

SEQ ID NO: 584299 - DNA, 25 bp, Homo sapien
aagatctggcggctacaagaccaca

SEQ ID NO: 584300 - DNA, 25 bp, Homo sapien
tcaagagctcgcactccactgacat

SEQ ID NO: 584301 - DNA, 25 bp, Homo sapien
cagtccagcagacctatatagttta

SEQ ID NO: 584302 - DNA, 25 bp, Homo sapien
tggacactttcaatgtaaccagact

SEQ ID NO: 584303 - DNA, 25 bp, Homo sapien
tgctttccaaggcttcgtggaaccg

SEQ ID NO: 584304 - DNA, 25 bp, Homo sapien
tacaaaatcagccacacatggtggc

SEQ ID NO: 584305 - DNA, 25 bp, Homo sapien
aatacaaaatcagccacacatggtg

SEQ ID NO: 584306 - DNA, 25 bp, Homo sapien
aaatcagccacacatggtggcgcat

SEQ ID NO: 584307 - DNA, 25 bp, Homo sapien
caaaatcagccacacatggtggcgc

SEQ ID NO: 584308 - DNA, 25 bp, Homo sapien
tgccatgttggctaggctggtcttg

SEQ ID NO: 584309 - DNA, 25 bp, Homo sapien
gccatgttggctaggctggtcttga

SEQ ID NO: 584310 - DNA, 25 bp, Homo sapien
tataggcacacaccactgcgcctgg

SEQ ID NO: 584311 - DNA, 25 bp, Homo sapien
ataggcacacaccactgcgcctggc

SEQ ID NO: 584312 - DNA, 25 bp, Homo sapien
tattgggctgtggaatagacaagct

SEQ ID NO: 584313 - DNA, 25 bp, Homo sapien
agttttcagactatcaagggtgccc

SEQ ID NO: 584314 - DNA, 25 bp, Homo sapien
tgtagccacctttgtatcagaggcg

SEQ ID NO: 584315 - DNA, 25 bp, Homo sapien
tcccagaaagtcaggcattcatagc

SEQ ID NO: 584316 - DNA, 25 bp, Homo sapien
gagacagagagcgactaagtaatta

SEQ ID NO: 584317 - DNA, 25 bp, Homo sapien
taagcactcttcagggaatatctca

SEQ ID NO: 584318 - DNA, 25 bp, Homo sapien
aggctgaggtgaggatcatacttcc

SEQ ID NO: 584319 - DNA, 25 bp, Homo sapien
cacacacgagtagtagattgggcaa

SEQ ID NO: 584320 - DNA, 25 bp, Homo sapien
ggttatataccagcttatgccagta

SEQ ID NO: 584321 - DNA, 25 bp, Homo sapien
taaaagcagacaccttaaaccaatg

SEQ ID NO: 584322 - DNA, 25 bp, Homo sapien
tataccagcataaccacgaacacga

SEQ ID NO: 584323 - DNA, 25 bp, Homo sapien
gaataggaggttagtttataccagc

SEQ ID NO: 584324 - DNA, 25 bp, Homo sapien
catgcaaactcagtctagagcagca

SEQ ID NO: 584325 - DNA, 25 bp, Homo sapien
tatagcacaccttagtttggcctga

SEQ ID NO: 584326 - DNA, 25 bp, Homo sapien
tatcctggtcgggtttatacttgcc

SEQ ID NO: 584327 - DNA, 25 bp, Homo sapien
gtgactctcaaaggactctatcggt

SEQ ID NO: 584328 - DNA, 25 bp, Homo sapien
tagttggtatcatggttcatggcac

SEQ ID NO: 584329 - DNA, 25 bp, Homo sapien
tcaaatgtactttgaataaaaggct

SEQ ID NO: 584330 - DNA, 25 bp, Homo sapien
atgtatgccacaacttgcagtgggt

SEQ ID NO: 584331 - DNA, 25 bp, Homo sapien
agtgggttgtcaaatgtactttgaa

SEQ ID NO: 584332 - DNA, 25 bp, Homo sapien
agaaacacagggcaattctcgtttc

SEQ ID NO: 584333 - DNA, 25 bp, Homo sapien
aacacagggcaattctcgtttcact

SEQ ID NO: 584334 - DNA, 25 bp, Homo sapien
ggcaattctcgtttcactacagtag

SEQ ID NO: 584335 - DNA, 25 bp, Homo sapien
cagggcaattctcgtttcactacag

SEQ ID NO: 584336 - DNA, 25 bp, Homo sapien
gggaacagagctctgcatccatgaa

SEQ ID NO: 584337 - DNA, 25 bp, Homo sapien
gatccatctttgtaggccaccacaa

SEQ ID NO: 584338 - DNA, 25 bp, Homo sapien
tgtaggccaccacaattaagccaca

SEQ ID NO: 584339 - DNA, 25 bp, Homo sapien
ggtgggcaggtgatccatctttgta

SEQ ID NO: 584340 - DNA, 25 bp, Homo sapien
ccgtatattcttctagtcgaagaag

SEQ ID NO: 584341 - DNA, 25 bp, Homo sapien
tttccgtatattcttctagtcgaag

SEQ ID NO: 584342 - DNA, 25 bp, Homo sapien
tccgtatattcttctagtcgaagaa

SEQ ID NO: 584343 - DNA, 25 bp, Homo sapien
tcttttccgtatattcttctagtcg

SEQ ID NO: 584344 - DNA, 25 bp, Homo sapien
gagaaggtgctgaatgttcccaaat

SEQ ID NO: 584345 - DNA, 25 bp, Homo sapien
cagcaatatatgttcccaaactgtg

SEQ ID NO: 584346 - DNA, 25 bp, Homo sapien
atgttcccaaatagcaacttgctcc

SEQ ID NO: 584347 - DNA, 25 bp, Homo sapien
aacagcaatatatgttcccaaactg

SEQ ID NO: 584348 - DNA, 25 bp, Homo sapien
tccctcaagggagtacaagagtcac

SEQ ID NO: 584349 - DNA, 25 bp, Homo sapien
gggaaatcttggcaccctcagcctc

SEQ ID NO: 584350 - DNA, 25 bp, Homo sapien
ttcgcgtgccgaagtctaggtcttt

SEQ ID NO: 584351 - DNA, 25 bp, Homo sapien
tgtagcactcagatccagtggcacc

SEQ ID NO: 584352 - DNA, 25 bp, Homo sapien
tctgttgactcacgccagaaatagt

SEQ ID NO: 584353 - DNA, 25 bp, Homo sapien
tccccagggctgtaatgggcattta

SEQ ID NO: 584354 - DNA, 25 bp, Homo sapien
taatagttcccctcccctatagctg

SEQ ID NO: 584355 - DNA, 25 bp, Homo sapien
caatgacatattgccagcgacatgg

SEQ ID NO: 584356 - DNA, 25 bp, Homo sapien
tgcctggttgtcctggtgacaagct

SEQ ID NO: 584357 - DNA, 25 bp, Homo sapien
acaagctggaggtcctggaactgga

SEQ ID NO: 584358 - DNA, 25 bp, Homo sapien
agcagttggagaggccaccagtcct

SEQ ID NO: 584359 - DNA, 25 bp, Homo sapien
gccgtgcagggagtgagggctgcct

SEQ ID NO: 584360 - DNA, 25 bp, Homo sapien
gcccagccggcgcgcgggcttccat

SEQ ID NO: 584361 - DNA, 25 bp, Homo sapien
agggcccagccggcgcgcgggcttc

SEQ ID NO: 584362 - DNA, 25 bp, Homo sapien
gggcccagccggcgcgcgggcttcc

SEQ ID NO: 584363 - DNA, 25 bp, Homo sapien
ggcccagccggcgcgcgggcttcca

SEQ ID NO: 584364 - DNA, 25 bp, Homo sapien
ggatggaatgacaaatagcaggatg

SEQ ID NO: 584365 - DNA, 25 bp, Homo sapien
cgtgccccgacgtagtctagacaca

SEQ ID NO: 584366 - DNA, 25 bp, Homo sapien
cattttagctgacgtgggtgagcgt

SEQ ID NO: 584367 - DNA, 25 bp, Homo sapien
tgcacgtgccccgacgtagtctaga

SEQ ID NO: 584368 - DNA, 25 bp, Homo sapien
cacagttgctatttcagttgtcccc

SEQ ID NO: 584369 - DNA, 25 bp, Homo sapien
cctgttctgtcagcctgacatttcc

SEQ ID NO: 584370 - DNA, 25 bp, Homo sapien
gacatttccccagccgattccaagc

SEQ ID NO: 584371 - DNA, 25 bp, Homo sapien
ccagccgattccaagcccagtgtac

SEQ ID NO: 584372 - DNA, 25 bp, Homo sapien
tacgcaaaggggcagatttgtgtca

SEQ ID NO: 584373 - DNA, 25 bp, Homo sapien
acgcaaaggggcagatttgtgtcac

SEQ ID NO: 584374 - DNA, 25 bp, Homo sapien
ctacgcaaaggggcagatttgtgtc

SEQ ID NO: 584375 - DNA, 25 bp, Homo sapien
gtcggtcatggcatgggctactttg

SEQ ID NO: 584376 - DNA, 25 bp, Homo sapien
caagtacaccaggatcataggtgaa

SEQ ID NO: 584377 - DNA, 25 bp, Homo sapien
gactgtcggtcatggcatgggctac

SEQ ID NO: 584378 - DNA, 25 bp, Homo sapien
gctgtcctgtgactgtcggtcatgg

SEQ ID NO: 584379 - DNA, 25 bp, Homo sapien
ctgtggtgatgaagtgtccggagtc

SEQ ID NO: 584380 - DNA, 25 bp, Homo sapien
tgcgtctgacatggtccggcacacc

SEQ ID NO: 584381 - DNA, 25 bp, Homo sapien
aagtgtccggagtccgcagcggtaa

SEQ ID NO: 584382 - DNA, 25 bp, Homo sapien
ggtccggcacaccagtgatccgatg

SEQ ID NO: 584383 - DNA, 25 bp, Homo sapien
gccttcccattagcaggggtgtctc

SEQ ID NO: 584384 - DNA, 25 bp, Homo sapien
cattagccttcccattagcaggggt

SEQ ID NO: 584385 - DNA, 25 bp, Homo sapien
cttcccattagcaggggtgtctctt

SEQ ID NO: 584386 - DNA, 25 bp, Homo sapien
tagccttcccattagcaggggtgtc

SEQ ID NO: 584387 - DNA, 25 bp, Homo sapien
tcagctgcccgcttgacctagcgga

SEQ ID NO: 584388 - DNA, 25 bp, Homo sapien
tcttggtataggcatcatcattctc

SEQ ID NO: 584389 - DNA, 25 bp, Homo sapien
ttgacctagcggactcagcttcctc

SEQ ID NO: 584390 - DNA, 25 bp, Homo sapien
tgcccgcttgacctagcggactcag

SEQ ID NO: 584391 - DNA, 25 bp, Homo sapien
tctaaaggtctccaagcagaggaag

SEQ ID NO: 584392 - DNA, 25 bp, Homo sapien
tgaatggcaccaccgaagttgtccc

SEQ ID NO: 584393 - DNA, 25 bp, Homo sapien
ggcaaggcataaccaccgggcattt

SEQ ID NO: 584394 - DNA, 25 bp, Homo sapien
tcctagaagcggagtctgagacaag

SEQ ID NO: 584395 - DNA, 25 bp, Homo sapien
tacgtctgcgaggattgcggctaca

SEQ ID NO: 584396 - DNA, 25 bp, Homo sapien
tatgcctataagcagcggcgggaca

SEQ ID NO: 584397 - DNA, 25 bp, Homo sapien
tccgggcagctcgtttctcaaaaag

SEQ ID NO: 584398 - DNA, 25 bp, Homo sapien
ggaggacctgtacctgcacgtgaac

SEQ ID NO: 584399 - DNA, 25 bp, Homo sapien
aggaagctgccacctcgatggctgc

SEQ ID NO: 584400 - DNA, 25 bp, Homo sapien
cgatggctgcccgtccctgcatctg

SEQ ID NO: 584401 - DNA, 25 bp, Homo sapien
ccaatcaggaagctgccacctcgat

SEQ ID NO: 584402 - DNA, 25 bp, Homo sapien
tcaggaagctgccacctcgatggct

SEQ ID NO: 584403 - DNA, 25 bp, Homo sapien
tgctggatccatctgcaggtcttca

SEQ ID NO: 584404 - DNA, 25 bp, Homo sapien
ttgtctctttactactgagaattct

SEQ ID NO: 584405 - DNA, 25 bp, Homo sapien
ccaaacaaataagggtgagaagatg

SEQ ID NO: 584406 - DNA, 25 bp, Homo sapien
tgcctcagggcagattgtgaaattg

SEQ ID NO: 584407 - DNA, 25 bp, Homo sapien
ccatgcttatgttctggacctgggc

SEQ ID NO: 584408 - DNA, 25 bp, Homo sapien
gcttgacacatagtgggcctctccc

SEQ ID NO: 584409 - DNA, 25 bp, Homo sapien
tcccaacatgaaccggttcccagtg

SEQ ID NO: 584410 - DNA, 25 bp, Homo sapien
ttatgttctggacctgggcggcagc

SEQ ID NO: 584411 - DNA, 25 bp, Homo sapien
cagcagcccgttctgtgcgctaggc

SEQ ID NO: 584412 - DNA, 25 bp, Homo sapien
gtggccccgcctgatgccgagtgct

SEQ ID NO: 584413 - DNA, 25 bp, Homo sapien
tggaactgccgaaaaggcacaggca

SEQ ID NO: 584414 - DNA, 25 bp, Homo sapien
gctgcctctggaactgccgaaaagg

SEQ ID NO: 584415 - DNA, 25 bp, Homo sapien
acttggcgaggtgcccaggtccggg

SEQ ID NO: 584416 - DNA, 25 bp, Homo sapien
gttgcccacttggcgaggtgcccag

SEQ ID NO: 584417 - DNA, 25 bp, Homo sapien
cccacttggcgaggtgcccaggtcc

SEQ ID NO: 584418 - DNA, 25 bp, Homo sapien
ttgcccacttggcgaggtgcccagg

SEQ ID NO: 584419 - DNA, 25 bp, Homo sapien
tgggagtcgccaggcgtgcggggga

SEQ ID NO: 584420 - DNA, 25 bp, Homo sapien
ccgttgcccctagcggggagcagcc

SEQ ID NO: 584421 - DNA, 25 bp, Homo sapien
gagccgccgccgttgcccctagcgg

SEQ ID NO: 584422 - DNA, 25 bp, Homo sapien
gagtcgccaggcgtgcgggggagag

SEQ ID NO: 584423 - DNA, 25 bp, Homo sapien
ttaaggcataggtgtcgccgagccg

SEQ ID NO: 584424 - DNA, 25 bp, Homo sapien
gacaccgttatgttgcagggcgcat

SEQ ID NO: 584425 - DNA, 25 bp, Homo sapien
ggtctcactcgcgatttaaggcata

SEQ ID NO: 584426 - DNA, 25 bp, Homo sapien
gacaggtagcgagcttgttgacacc

SEQ ID NO: 584427 - DNA, 25 bp, Homo sapien
aaacattcatgcctaaggaagggct

SEQ ID NO: 584428 - DNA, 25 bp, Homo sapien
aacattcatgcctaaggaagggctg

SEQ ID NO: 584429 - DNA, 25 bp, Homo sapien
tgcaaacattcatgcctaaggaagg

SEQ ID NO: 584430 - DNA, 25 bp, Homo sapien
gcaaacattcatgcctaaggaaggg

SEQ ID NO: 584431 - DNA, 25 bp, Homo sapien
agctcgcctcgaggtgcaggtgatg

SEQ ID NO: 584432 - DNA, 25 bp, Homo sapien
cctggggtttacctcgaagagctcg

SEQ ID NO: 584433 - DNA, 25 bp, Homo sapien
cctcgaagagctcgcctcgaggtgc

SEQ ID NO: 584434 - DNA, 25 bp, Homo sapien
gtttacctcgaagagctcgcctcga

SEQ ID NO: 584435 - DNA, 25 bp, Homo sapien
gctcgtcgaagacaaatccaccggg

SEQ ID NO: 584436 - DNA, 25 bp, Homo sapien
gccattttctggctcgtcgaagaca

SEQ ID NO: 584437 - DNA, 25 bp, Homo sapien
gggaactgagccattttctggctcg

SEQ ID NO: 584438 - DNA, 25 bp, Homo sapien
ttctgaccgcccagatttcatcaag

SEQ ID NO: 584439 - DNA, 25 bp, Homo sapien
gaacagggaaaaccgctgtgttgat

SEQ ID NO: 584440 - DNA, 25 bp, Homo sapien
cgagaaatccgttaccaggcggttg

SEQ ID NO: 584441 - DNA, 25 bp, Homo sapien
gagtccgccagtagcgccgagaaat

SEQ ID NO: 584442 - DNA, 25 bp, Homo sapien
ccccaagggccattcagggcggaag

SEQ ID NO: 584443 - DNA, 25 bp, Homo sapien
agttcagtccagagagggtgactcc

SEQ ID NO: 584444 - DNA, 25 bp, Homo sapien
ttcagtccagagagggtgactcctt

SEQ ID NO: 584445 - DNA, 25 bp, Homo sapien
gttcagtccagagagggtgactcct

SEQ ID NO: 584446 - DNA, 25 bp, Homo sapien
tcagtccagagagggtgactccttg

SEQ ID NO: 584447 - DNA, 25 bp, Homo sapien
tctttctagcaaatcccgtttgttg

SEQ ID NO: 584448 - DNA, 25 bp, Homo sapien
tctgaacgaagtgaagttttgaaga

SEQ ID NO: 584449 - DNA, 25 bp, Homo sapien
gcaaatcccgtttgttggtggataa

SEQ ID NO: 584450 - DNA, 25 bp, Homo sapien
ttaatggagttgacagcctcttctg

SEQ ID NO: 584451 - DNA, 25 bp, Homo sapien
ctaggacaccaatggcagaatcgat

SEQ ID NO: 584452 - DNA, 25 bp, Homo sapien
taggacaccaatggcagaatcgatg

SEQ ID NO: 584453 - DNA, 25 bp, Homo sapien
gcagaatcgatgacccaggatgtgg

SEQ ID NO: 584454 - DNA, 25 bp, Homo sapien
tggcagaatcgatgacccaggatgt

SEQ ID NO: 584455 - DNA, 25 bp, Homo sapien
atcagaagacagctgaaggtcttaa

SEQ ID NO: 584456 - DNA, 25 bp, Homo sapien
tcagaagacagctgaaggtcttaat

SEQ ID NO: 584457 - DNA, 25 bp, Homo sapien
aagacagctgaaggtcttaatgctg

SEQ ID NO: 584458 - DNA, 25 bp, Homo sapien
agaagacagctgaaggtcttaatgc

SEQ ID NO: 584459 - DNA, 25 bp, Homo sapien
aattacagtggggtggggacgatga

SEQ ID NO: 584460 - DNA, 25 bp, Homo sapien
ttgaattacagtggggtggggacga

SEQ ID NO: 584461 - DNA, 25 bp, Homo sapien
tggggtggggacgatgagacaccat

SEQ ID NO: 584462 - DNA, 25 bp, Homo sapien
cagtggggtggggacgatgagacac

SEQ ID NO: 584463 - DNA, 25 bp, Homo sapien
cactgtgttttccatgagtcactag

SEQ ID NO: 584464 - DNA, 25 bp, Homo sapien
tggtgccccaaatgatggcgatctg

SEQ ID NO: 584465 - DNA, 25 bp, Homo sapien
tggtggcctttggagaaccaacttg

SEQ ID NO: 584466 - DNA, 25 bp, Homo sapien
tcacgagggtgagctaaaacattat

SEQ ID NO: 584467 - DNA, 25 bp, Homo sapien
gcaccaatcaggtagctgttcttca

SEQ ID NO: 584468 - DNA, 25 bp, Homo sapien
tccatcggcaccaatcaggtagctg

SEQ ID NO: 584469 - DNA, 25 bp, Homo sapien
gttttcctccatcggcaccaatcag

SEQ ID NO: 584470 - DNA, 25 bp, Homo sapien
tcggcaccaatcaggtagctgttct

SEQ ID NO: 584471 - DNA, 25 bp, Homo sapien
tatggagggagaagcagtctgatct

SEQ ID NO: 584472 - DNA, 25 bp, Homo sapien
aatccacttggccccataaagtgcg

SEQ ID NO: 584473 - DNA, 25 bp, Homo sapien
ccccaatccacttggccccataaag

SEQ ID NO: 584474 - DNA, 25 bp, Homo sapien
cacttggccccataaagtgcgccga

SEQ ID NO: 584475 - DNA, 25 bp, Homo sapien
agcaaggactagggccttctctggc

SEQ ID NO: 584476 - DNA, 25 bp, Homo sapien
tagcaaggactagggccttctctgg

SEQ ID NO: 584477 - DNA, 25 bp, Homo sapien
gccacagggtgctgacaacaaatgt

SEQ ID NO: 584478 - DNA, 25 bp, Homo sapien
cagtaggcagccgtcattgtgtagg

SEQ ID NO: 584479 - DNA, 25 bp, Homo sapien
aggtgtttgcagtaggcagccgtca

SEQ ID NO: 584480 - DNA, 25 bp, Homo sapien
gtgcatggcatatggacagtgtctg

SEQ ID NO: 584481 - DNA, 25 bp, Homo sapien
tcatcatcccctttgttattgaaag

SEQ ID NO: 584482 - DNA, 25 bp, Homo sapien
tagcttcattttcacccagcaggag

SEQ ID NO: 584483 - DNA, 25 bp, Homo sapien
tctttgttctctggtgaccctggag

SEQ ID NO: 584484 - DNA, 25 bp, Homo sapien
aatatttatcaagggtagggactgc

SEQ ID NO: 584485 - DNA, 25 bp, Homo sapien
gcagagtgcgcaccgccgcctgtac

SEQ ID NO: 584486 - DNA, 25 bp, Homo sapien
aggctcgacccctcgagcgcagagc

SEQ ID NO: 584487 - DNA, 25 bp, Homo sapien
tcgccgctgccaggcgtgagcaatc

SEQ ID NO: 584488 - DNA, 25 bp, Homo sapien
gcgtgagcaatcgagagccgagcat

SEQ ID NO: 584489 - DNA, 25 bp, Homo sapien
tgctgcttcacatgtacgccggcca

SEQ ID NO: 584490 - DNA, 25 bp, Homo sapien
gcttcacatgtacgccggccactgt

SEQ ID NO: 584491 - DNA, 25 bp, Homo sapien
gccactgtggccgccgtcagcagca

SEQ ID NO: 584492 - DNA, 25 bp, Homo sapien
cactgctgcttcacatgtacgccgg

SEQ ID NO: 584493 - DNA, 25 bp, Homo sapien
cgggcagccgggtcgtcctgaatct

SEQ ID NO: 584494 - DNA, 25 bp, Homo sapien
cgcggagctccaaaggcgctaagcc

SEQ ID NO: 584495 - DNA, 25 bp, Homo sapien
tcgtcctgaatctgcgggctgcaca

SEQ ID NO: 584496 - DNA, 25 bp, Homo sapien
gctccaaaggcgctaagccgggcag

SEQ ID NO: 584497 - DNA, 25 bp, Homo sapien
cggctgtgacttgaaaacagagcca

SEQ ID NO: 584498 - DNA, 25 bp, Homo sapien
cctgcgggccggctgtgacttgaaa

SEQ ID NO: 584499 - DNA, 25 bp, Homo sapien
gccggctgtgacttgaaaacagagc

SEQ ID NO: 584500 - DNA, 25 bp, Homo sapien
gctgtgacttgaaaacagagccact

SEQ ID NO: 584501 - DNA, 25 bp, Homo sapien
ccaagtgagatgtggaaaggtccgc

SEQ ID NO: 584502 - DNA, 25 bp, Homo sapien
aagtgagatgtggaaaggtccgcac

SEQ ID NO: 584503 - DNA, 25 bp, Homo sapien
tttctagcggcccaagtgagatgtg

SEQ ID NO: 584504 - DNA, 25 bp, Homo sapien
ttctattttctagcggcccaagtga

SEQ ID NO: 584505 - DNA, 25 bp, Homo sapien
gcagaatgcaccccaagaaactcct

SEQ ID NO: 584506 - DNA, 25 bp, Homo sapien
ggtagcttgcagaatgcaccccaag

SEQ ID NO: 584507 - DNA, 25 bp, Homo sapien
aggctggtagcttgcagaatgcacc

SEQ ID NO: 584508 - DNA, 25 bp, Homo sapien
tagcttgcagaatgcaccccaagaa

SEQ ID NO: 584509 - DNA, 25 bp, Homo sapien
tcatccacttcatctctgtatatca

SEQ ID NO: 584510 - DNA, 25 bp, Homo sapien
tcaagcacatagcacagtccaaagg

SEQ ID NO: 584511 - DNA, 25 bp, Homo sapien
acaccaagaacaaagacctcatcca

SEQ ID NO: 584512 - DNA, 25 bp, Homo sapien
tctgtatatcaagcacatagcacag

SEQ ID NO: 584513 - DNA, 25 bp, Homo sapien
tcttttttccgaatttgcctctcaa

SEQ ID NO: 584514 - DNA, 25 bp, Homo sapien
ttcttttttccgaatttgcctctca

SEQ ID NO: 584515 - DNA, 25 bp, Homo sapien
cttttttccgaatttgcctctcaat

SEQ ID NO: 584516 - DNA, 25 bp, Homo sapien
gatttttgagatccttttgccaata

SEQ ID NO: 584517 - DNA, 25 bp, Homo sapien
tgatttttgagatccttttgccaat

SEQ ID NO: 584518 - DNA, 25 bp, Homo sapien
gacccactgtcctttatttgatcaa

SEQ ID NO: 584519 - DNA, 25 bp, Homo sapien
agcactggacagtgaccctaatggg

SEQ ID NO: 584520 - DNA, 25 bp, Homo sapien
gaagatactactaagctactctcca

SEQ ID NO: 584521 - DNA, 25 bp, Homo sapien
tataagggaccctgaaagcagtaac

SEQ ID NO: 584522 - DNA, 25 bp, Homo sapien
ccttccttctcacaagctcggcagt

SEQ ID NO: 584523 - DNA, 25 bp, Homo sapien
cttccttctcacaagctcggcagtg

SEQ ID NO: 584524 - DNA, 25 bp, Homo sapien
cccttccttctcacaagctcggcag

SEQ ID NO: 584525 - DNA, 25 bp, Homo sapien
cactctggtcgtgcgataagtccac

SEQ ID NO: 584526 - DNA, 25 bp, Homo sapien
tcggattcgacgatcaggagcgtct

SEQ ID NO: 584527 - DNA, 25 bp, Homo sapien
tcatcactgttgagggaatccccac

SEQ ID NO: 584528 - DNA, 25 bp, Homo sapien
taagtccactgatgcctgatcctcg

SEQ ID NO: 584529 - DNA, 25 bp, Homo sapien
tgacaaatcaaaggaattgagaagc

SEQ ID NO: 584530 - DNA, 25 bp, Homo sapien
tcttttacattcacgtttctttcac

SEQ ID NO: 584531 - DNA, 25 bp, Homo sapien
ctcttttacattcacgtttctttca

SEQ ID NO: 584532 - DNA, 25 bp, Homo sapien
tctcttttacattcacgtttctttc

SEQ ID NO: 584533 - DNA, 25 bp, Homo sapien
caatgtgatagaggttgacagtacg

SEQ ID NO: 584534 - DNA, 25 bp, Homo sapien
caaacatgcctatgttttatataaa

SEQ ID NO: 584535 - DNA, 25 bp, Homo sapien
tgttaatttaacaatgtgatagagg

SEQ ID NO: 584536 - DNA, 25 bp, Homo sapien
tacgtttcattagtacaaacatgcc

SEQ ID NO: 584537 - DNA, 25 bp, Homo sapien
acatcatgggtttatctagagcagc

SEQ ID NO: 584538 - DNA, 25 bp, Homo sapien
tctagagcagcggtaacctaaaggt

SEQ ID NO: 584539 - DNA, 25 bp, Homo sapien
aaaagtcacatcatgggtttatcta

SEQ ID NO: 584540 - DNA, 25 bp, Homo sapien
taatccgtttatcacccagattttc

SEQ ID NO: 584541 - DNA, 25 bp, Homo sapien
taaggtaactgagctgttccctcag

SEQ ID NO: 584542 - DNA, 25 bp, Homo sapien
cttaaggtaactgagctgttccctc

SEQ ID NO: 584543 - DNA, 25 bp, Homo sapien
aggtaactgagctgttccctcagct

SEQ ID NO: 584544 - DNA, 25 bp, Homo sapien
ccttaaggtaactgagctgttccct

SEQ ID NO: 584545 - DNA, 25 bp, Homo sapien
ttccttccagagacaagttgtacat

SEQ ID NO: 584546 - DNA, 25 bp, Homo sapien
gagacaagttgtacattgccaacat

SEQ ID NO: 584547 - DNA, 25 bp, Homo sapien
tccagagacaagttgtacattgcca

SEQ ID NO: 584548 - DNA, 25 bp, Homo sapien
ccttccagagacaagttgtacattg

SEQ ID NO: 584549 - DNA, 25 bp, Homo sapien
taaaaaagtccaatgtttctcaata

SEQ ID NO: 584550 - DNA, 25 bp, Homo sapien
tagtaaaaaagtccaatgtttctca

SEQ ID NO: 584551 - DNA, 25 bp, Homo sapien
aaaagcacagatatcttctttccac

SEQ ID NO: 584552 - DNA, 25 bp, Homo sapien
ttctcaataaaagcacagatatctt

SEQ ID NO: 584553 - DNA, 25 bp, Homo sapien
taaaagtcttgatagatccacgtgg

SEQ ID NO: 584554 - DNA, 25 bp, Homo sapien
tatggtcgcaaggtctgtgcatcgg

SEQ ID NO: 584555 - DNA, 25 bp, Homo sapien
tgtgcatcggcatccccgagtctaa

SEQ ID NO: 584556 - DNA, 25 bp, Homo sapien
ccgagtctaatgcaccaaagcagcc

SEQ ID NO: 584557 - DNA, 25 bp, Homo sapien
aagtacatgggacttcccacgctga

SEQ ID NO: 584558 - DNA, 25 bp, Homo sapien
atgggacttcccacgctgaggcaac

SEQ ID NO: 584559 - DNA, 25 bp, Homo sapien
tacatgggacttcccacgctgaggc

SEQ ID NO: 584560 - DNA, 25 bp, Homo sapien
acgctgaggcaacctgccacggtgc

SEQ ID NO: 584561 - DNA, 25 bp, Homo sapien
tcaggtttcatcgttgggggcttgt

SEQ ID NO: 584562 - DNA, 25 bp, Homo sapien
tgggggcttgttatgaacaagtttc

SEQ ID NO: 584563 - DNA, 25 bp, Homo sapien
tctccttcaggtttcatcgttgggg

SEQ ID NO: 584564 - DNA, 25 bp, Homo sapien
catcgttgggggcttgttatgaaca

SEQ ID NO: 584565 - DNA, 25 bp, Homo sapien
tgcggcctcggcttatgaattttac

SEQ ID NO: 584566 - DNA, 25 bp, Homo sapien
gattccacaggattccgacttgctc

SEQ ID NO: 584567 - DNA, 25 bp, Homo sapien
ttctgaaagcaagctaggtgtggca

SEQ ID NO: 584568 - DNA, 25 bp, Homo sapien
gctcgttttctaagtccctcaacag

SEQ ID NO: 584569 - DNA, 25 bp, Homo sapien
cactgtcaatatccatcctgtcggg

SEQ ID NO: 584570 - DNA, 25 bp, Homo sapien
caatcagtttgcgtttcagtctccg

SEQ ID NO: 584571 - DNA, 25 bp, Homo sapien
cgagcttccggagtcatggcaacag

SEQ ID NO: 584572 - DNA, 25 bp, Homo sapien
tgctcacgggagtatacctgggctc

SEQ ID NO: 584573 - DNA, 25 bp, Homo sapien
catatcttctgatcctaccaagcga

SEQ ID NO: 584574 - DNA, 25 bp, Homo sapien
taagggctgacaatactctggtcca

SEQ ID NO: 584575 - DNA, 25 bp, Homo sapien
caaaaacttggtggtctggtgtcga

SEQ ID NO: 584576 - DNA, 25 bp, Homo sapien
gatataaggtttcaagatccgagag

SEQ ID NO: 584577 - DNA, 25 bp, Homo sapien
gaagataaacaaattcaagtcaaga

SEQ ID NO: 584578 - DNA, 25 bp, Homo sapien
tccggtaccacagaagataaacaaa

SEQ ID NO: 584579 - DNA, 25 bp, Homo sapien
ctccggtaccacagaagataaacaa

SEQ ID NO: 584580 - DNA, 25 bp, Homo sapien
acagaagataaacaaattcaagtca

SEQ ID NO: 584581 - DNA, 25 bp, Homo sapien
tgtgcaggtgggaacgaatctgtga

SEQ ID NO: 584582 - DNA, 25 bp, Homo sapien
tgggatgtgatttggccgcacataa

SEQ ID NO: 584583 - DNA, 25 bp, Homo sapien
gacacatggagttgatcgttgggat

SEQ ID NO: 584584 - DNA, 25 bp, Homo sapien
ctccggcgtccagtgagggtcgctc

SEQ ID NO: 584585 - DNA, 25 bp, Homo sapien
cataacagtaatcgagaggtgcgtc

SEQ ID NO: 584586 - DNA, 25 bp, Homo sapien
gtaagcttcattgtatttcacatca

SEQ ID NO: 584587 - DNA, 25 bp, Homo sapien
ctgaatcagatgatagatcatgaaa

SEQ ID NO: 584588 - DNA, 25 bp, Homo sapien
tgaaagttgcaatccctgctcttct

SEQ ID NO: 584589 - DNA, 25 bp, Homo sapien
aagtctgggtactgcagacactcag

SEQ ID NO: 584590 - DNA, 25 bp, Homo sapien
atcttgcctgcataaacatataatc

SEQ ID NO: 584591 - DNA, 25 bp, Homo sapien
aaacatataatcctccataccaaat

SEQ ID NO: 584592 - DNA, 25 bp, Homo sapien
ggaatcttgcctgcataaacatata

SEQ ID NO: 584593 - DNA, 25 bp, Homo sapien
cttgcctgcataaacatataatcct

SEQ ID NO: 584594 - DNA, 25 bp, Homo sapien
gactctgtaccagccctcatgttgg

SEQ ID NO: 584595 - DNA, 25 bp, Homo sapien
aaatatacgtgatctcaccgtggcc

SEQ ID NO: 584596 - DNA, 25 bp, Homo sapien
cccttaccagtgacagatacggcag

SEQ ID NO: 584597 - DNA, 25 bp, Homo sapien
cacttaccagtatgccagggacaag

SEQ ID NO: 584598 - DNA, 25 bp, Homo sapien
tcattctatcaacacaaggcaagtc

SEQ ID NO: 584599 - DNA, 25 bp, Homo sapien
gaggcccttgtatagaccttctgaa

SEQ ID NO: 584600 - DNA, 25 bp, Homo sapien
gatttctacattcagctttgaccta

SEQ ID NO: 584601 - DNA, 25 bp, Homo sapien
tactaggcctgctaaattacatgca

SEQ ID NO: 584602 - DNA, 25 bp, Homo sapien
cattgcaacacctagcaacagctgg

SEQ ID NO: 584603 - DNA, 25 bp, Homo sapien
tcaaaacattcacaagaccaaggaa

SEQ ID NO: 584604 - DNA, 25 bp, Homo sapien
aagaaacgcttttaagtgtaggcag

SEQ ID NO: 584605 - DNA, 25 bp, Homo sapien
tgtaggcagttagttatggaaaccg

SEQ ID NO: 584606 - DNA, 25 bp, Homo sapien
gccaaaagagtggaaaaatacaaga

SEQ ID NO: 584607 - DNA, 25 bp, Homo sapien
tgccaaaagagtggaaaaatacaag

SEQ ID NO: 584608 - DNA, 25 bp, Homo sapien
ctgccaaaagagtggaaaaatacaa

SEQ ID NO: 584609 - DNA, 25 bp, Homo sapien
ccaaaagagtggaaaaatacaagat

SEQ ID NO: 584610 - DNA, 25 bp, Homo sapien
cgtgaagggttacgtccttgcccat

SEQ ID NO: 584611 - DNA, 25 bp, Homo sapien
gcctcagaaagaatgcgtgtttaca

SEQ ID NO: 584612 - DNA, 25 bp, Homo sapien
caaacttctggtacagtagcatagc

SEQ ID NO: 584613 - DNA, 25 bp, Homo sapien
catagcagggttgcttgctgagacg

SEQ ID NO: 584614 - DNA, 25 bp, Homo sapien
tcagtgccctagaaatcctcctgga

SEQ ID NO: 584615 - DNA, 25 bp, Homo sapien
caggacagtgccttttgggactgca

SEQ ID NO: 584616 - DNA, 25 bp, Homo sapien
caatgacaacacatcaatggccggg

SEQ ID NO: 584617 - DNA, 25 bp, Homo sapien
cgattttgctaaagggctgctcact

SEQ ID NO: 584618 - DNA, 25 bp, Homo sapien
cacacagggtacatctagagggttc

SEQ ID NO: 584619 - DNA, 25 bp, Homo sapien
taattgacagtctatcgccaacatc

SEQ ID NO: 584620 - DNA, 25 bp, Homo sapien
aactgtcttgggcatgagaagggcc

SEQ ID NO: 584621 - DNA, 25 bp, Homo sapien
cctgcaggaagatgctaataggtac

SEQ ID NO: 584622 - DNA, 25 bp, Homo sapien
tgctcaagtctgctgcttgtgggac

SEQ ID NO: 584623 - DNA, 25 bp, Homo sapien
caccaggcaagctatcagaccccat

SEQ ID NO: 584624 - DNA, 25 bp, Homo sapien
tgctgcttgtgggaccaccaggcaa

SEQ ID NO: 584625 - DNA, 25 bp, Homo sapien
aggagctgctcaagtctgctgcttg

SEQ ID NO: 584626 - DNA, 25 bp, Homo sapien
gccaggtcatagctggtgcctcctt

SEQ ID NO: 584627 - DNA, 25 bp, Homo sapien
caaaggatgtgagttcttgccaggt

SEQ ID NO: 584628 - DNA, 25 bp, Homo sapien
tcttgccaggtcatagctggtgcct

SEQ ID NO: 584629 - DNA, 25 bp, Homo sapien
gatgtgagttcttgccaggtcatag

SEQ ID NO: 584630 - DNA, 25 bp, Homo sapien
tgcacctaggcaaggaagatgggct

SEQ ID NO: 584631 - DNA, 25 bp, Homo sapien
gaagagactcttatgtggcaacaga

SEQ ID NO: 584632 - DNA, 25 bp, Homo sapien
agatctggagattggccttactaca

SEQ ID NO: 584633 - DNA, 25 bp, Homo sapien
taaaaagccctcaggcgatgaccac

SEQ ID NO: 584634 - DNA, 25 bp, Homo sapien
ctgaacaggcagtctgggccgtttc

SEQ ID NO: 584635 - DNA, 25 bp, Homo sapien
tctacgtctaccaggaaccttccaa

SEQ ID NO: 584636 - DNA, 25 bp, Homo sapien
gcagtctgggccgtttctacgtcta

SEQ ID NO: 584637 - DNA, 25 bp, Homo sapien
tgggccgtttctacgtctaccagga

SEQ ID NO: 584638 - DNA, 25 bp, Homo sapien
cccggatgtccttgcagcctgagtt

SEQ ID NO: 584639 - DNA, 25 bp, Homo sapien
tggaggtggatctctcagtcagcag

SEQ ID NO: 584640 - DNA, 25 bp, Homo sapien
tgagtttgccgtgtcccactagatg

SEQ ID NO: 584641 - DNA, 25 bp, Homo sapien
caggcgggccatgtagaagaacacc

SEQ ID NO: 584642 - DNA, 25 bp, Homo sapien
tgtacggtcatttggtcccacagct

SEQ ID NO: 584643 - DNA, 25 bp, Homo sapien
tttgcacctatgcaaataacctttt

SEQ ID NO: 584644 - DNA, 25 bp, Homo sapien
gagttcgtgattcctttttgatgat

SEQ ID NO: 584645 - DNA, 25 bp, Homo sapien
tttcctgtacggtcatttggtccca

SEQ ID NO: 584646 - DNA, 25 bp, Homo sapien
gaattatccatgtagctggcttggg

SEQ ID NO: 584647 - DNA, 25 bp, Homo sapien
taacatcaggtcctatatagcagct

SEQ ID NO: 584648 - DNA, 25 bp, Homo sapien
ggaaaaacacccttctgagaatgca

SEQ ID NO: 584649 - DNA, 25 bp, Homo sapien
tcaattccagaccttagtgcagacc

SEQ ID NO: 584650 - DNA, 25 bp, Homo sapien
gtttctccagttatgtgtggtgtga

SEQ ID NO: 584651 - DNA, 25 bp, Homo sapien
gtgacctcagattgtctatgtgttc

SEQ ID NO: 584652 - DNA, 25 bp, Homo sapien
cctcagattgtctatgtgttctctt

SEQ ID NO: 584653 - DNA, 25 bp, Homo sapien
tttctccagttatgtgtggtgtgac

SEQ ID NO: 584654 - DNA, 25 bp, Homo sapien
tcatctgccggccagactttctgcg

SEQ ID NO: 584655 - DNA, 25 bp, Homo sapien
tgcggagtcatctgccggccagact

SEQ ID NO: 584656 - DNA, 25 bp, Homo sapien
ctgcgcagcatatgctgagcggaaa

SEQ ID NO: 584657 - DNA, 25 bp, Homo sapien
gaaatcttcatctccggtcctatat

SEQ ID NO: 584658 - DNA, 25 bp, Homo sapien
ctcagggggattccatacgtagaat

SEQ ID NO: 584659 - DNA, 25 bp, Homo sapien
ggcgtagaaagaggactgagctctc

SEQ ID NO: 584660 - DNA, 25 bp, Homo sapien
tagaattttaattcgatctccccag

SEQ ID NO: 584661 - DNA, 25 bp, Homo sapien
gatgtgcactgttccttcacaaggg

SEQ ID NO: 584662 - DNA, 25 bp, Homo sapien
tatcagtataaccttaaattggtcc

SEQ ID NO: 584663 - DNA, 25 bp, Homo sapien
agagagtcagggatgacttgtagct

SEQ ID NO: 584664 - DNA, 25 bp, Homo sapien
ggcaataaggaagacgaagagagtc

SEQ ID NO: 584665 - DNA, 25 bp, Homo sapien
atgaagaaattaagggcaataagga

SEQ ID NO: 584666 - DNA, 25 bp, Homo sapien
attaagggcaataaggaagacgaag

SEQ ID NO: 584667 - DNA, 25 bp, Homo sapien
aatttaagactgtgcatccattaat

SEQ ID NO: 584668 - DNA, 25 bp, Homo sapien
cattaatgattcttgcctagactag

SEQ ID NO: 584669 - DNA, 25 bp, Homo sapien
aagctgtaatttccaatgccaacac

SEQ ID NO: 584670 - DNA, 25 bp, Homo sapien
tgtgagggatatcacatttggtagt

SEQ ID NO: 584671 - DNA, 25 bp, Homo sapien
ctgacctcaggtgattgacccagct

SEQ ID NO: 584672 - DNA, 25 bp, Homo sapien
acctcaggtgattgacccagctcag

SEQ ID NO: 584673 - DNA, 25 bp, Homo sapien
gacctcaggtgattgacccagctca

SEQ ID NO: 584674 - DNA, 25 bp, Homo sapien
ctcaggtgattgacccagctcagcc

SEQ ID NO: 584675 - DNA, 25 bp, Homo sapien
tacactaccccgaatcctcggcaca

SEQ ID NO: 584676 - DNA, 25 bp, Homo sapien
agcggggcgccaggactacactacc

SEQ ID NO: 584677 - DNA, 25 bp, Homo sapien
cagcgccaccaaagaacaaggggtc

SEQ ID NO: 584678 - DNA, 25 bp, Homo sapien
aggggtcgctccagccaccagctgg

SEQ ID NO: 584679 - DNA, 25 bp, Homo sapien
gagactagccctcaaccgaccaatg

SEQ ID NO: 584680 - DNA, 25 bp, Homo sapien
tccactccagcaaagccgaagaata

SEQ ID NO: 584681 - DNA, 25 bp, Homo sapien
atagtgtggccccaagagactagcc

SEQ ID NO: 584682 - DNA, 25 bp, Homo sapien
ttgtttggtcaagccagaccgctcc

SEQ ID NO: 584683 - DNA, 25 bp, Homo sapien
gaagcatcttcctgtcatccatggc

SEQ ID NO: 584684 - DNA, 25 bp, Homo sapien
gagcaccaggacaatggcaaaagcc

SEQ ID NO: 584685 - DNA, 25 bp, Homo sapien
taccctcactgacatgaaagtctag

SEQ ID NO: 584686 - DNA, 25 bp, Homo sapien
tgataggcactattttaaaccctgg

SEQ ID NO: 584687 - DNA, 25 bp, Homo sapien
tagagtggtttgttgtgtagcagtc

SEQ ID NO: 584688 - DNA, 25 bp, Homo sapien
agtcaataaccagaacccttgctgg

SEQ ID NO: 584689 - DNA, 25 bp, Homo sapien
aaaacatagttgctctcctaagcca

SEQ ID NO: 584690 - DNA, 25 bp, Homo sapien
gatcacatccgctttgggtaaaccc

SEQ ID NO: 584691 - DNA, 25 bp, Homo sapien
ctggctctccgggaccctgtggctt

SEQ ID NO: 584692 - DNA, 25 bp, Homo sapien
ttttccttatctccctgaagaagga

SEQ ID NO: 584693 - DNA, 25 bp, Homo sapien
gaaggatgatatctcagaaggtaga

SEQ ID NO: 584694 - DNA, 25 bp, Homo sapien
tggctctccgggaccctgtggcttt

SEQ ID NO: 584695 - DNA, 25 bp, Homo sapien
tgtgacgttactctcaggcagcaga

SEQ ID NO: 584696 - DNA, 25 bp, Homo sapien
ggaactggaggccttcaactagact

SEQ ID NO: 584697 - DNA, 25 bp, Homo sapien
gaatcttcccgttccattactgtga

SEQ ID NO: 584698 - DNA, 25 bp, Homo sapien
taggtacacctgatagatcctgcca

SEQ ID NO: 584699 - DNA, 25 bp, Homo sapien
ctgaaactatttgtgcctttggata

SEQ ID NO: 584700 - DNA, 25 bp, Homo sapien
aactgtgttcctatacagctccatc

SEQ ID NO: 584701 - DNA, 25 bp, Homo sapien
tgataaggagggactgatttctgct

SEQ ID NO: 584702 - DNA, 25 bp, Homo sapien
tatatcttcttgctgtagtaaacct

SEQ ID NO: 584703 - DNA, 25 bp, Homo sapien
ccaggagggcctgattgtttatcag

SEQ ID NO: 584704 - DNA, 25 bp, Homo sapien
agggcatccgatttgttggcataca

SEQ ID NO: 584705 - DNA, 25 bp, Homo sapien
tcaatctcctcactagttatacact

SEQ ID NO: 584706 - DNA, 25 bp, Homo sapien
tctgtagaaacaatagtaatgtcct

SEQ ID NO: 584707 - DNA, 25 bp, Homo sapien
cacatttaagatcacgccacctgca

SEQ ID NO: 584708 - DNA, 25 bp, Homo sapien
caccatggagtatgttagctgtgag

SEQ ID NO: 584709 - DNA, 25 bp, Homo sapien
atactctgttggctataagtggcaa

SEQ ID NO: 584710 - DNA, 25 bp, Homo sapien
ccttattgctgatgttggagctttc

SEQ ID NO: 584711 - DNA, 25 bp, Homo sapien
gtgctcaccatggagcttcttggcc

SEQ ID NO: 584712 - DNA, 25 bp, Homo sapien
caccatggagcttcttggccactca

SEQ ID NO: 584713 - DNA, 25 bp, Homo sapien
ctcaccatggagcttcttggccact

SEQ ID NO: 584714 - DNA, 25 bp, Homo sapien
accatggagcttcttggccactcag

SEQ ID NO: 584715 - DNA, 25 bp, Homo sapien
catcacctctctgtacagagtcctt

SEQ ID NO: 584716 - DNA, 25 bp, Homo sapien
cagcctccactcatcctgggtgaaa

SEQ ID NO: 584717 - DNA, 25 bp, Homo sapien
cacctctctgtacagagtcctttga

SEQ ID NO: 584718 - DNA, 25 bp, Homo sapien
gtacagagtcctttgagcagggctc

SEQ ID NO: 584719 - DNA, 25 bp, Homo sapien
tccagctgggtgatgagttctggtt

SEQ ID NO: 584720 - DNA, 25 bp, Homo sapien
ctggacaggttgccggtgaacattt

SEQ ID NO: 584721 - DNA, 25 bp, Homo sapien
caatttctctattggctttttagat

SEQ ID NO: 584722 - DNA, 25 bp, Homo sapien
tttagatttcttcctcccactgggc

SEQ ID NO: 584723 - DNA, 25 bp, Homo sapien
tgggcttgccttctttctgtaggtc

SEQ ID NO: 584724 - DNA, 25 bp, Homo sapien
ttctgtaggtcacagttgtttccat

SEQ ID NO: 584725 - DNA, 25 bp, Homo sapien
tggcggcccaaggtgactaatacag

SEQ ID NO: 584726 - DNA, 25 bp, Homo sapien
tgaggactcagagcaaccaaacctg

SEQ ID NO: 584727 - DNA, 25 bp, Homo sapien
tgtttaagccagctagtccacagta

SEQ ID NO: 584728 - DNA, 25 bp, Homo sapien
cacagtattttgtcatggcggccca

SEQ ID NO: 584729 - DNA, 25 bp, Homo sapien
cccttgtattcaggacaggtgccgg

SEQ ID NO: 584730 - DNA, 25 bp, Homo sapien
gactttaaaggatgctccctcctgg

SEQ ID NO: 584731 - DNA, 25 bp, Homo sapien
tatcacaactgggtctagtcagctg

SEQ ID NO: 584732 - DNA, 25 bp, Homo sapien
taaccctaggactcatgtggaaatg

SEQ ID NO: 584733 - DNA, 25 bp, Homo sapien
ttctgactggagaaacccggagggc

SEQ ID NO: 584734 - DNA, 25 bp, Homo sapien
ttctgcttgatcactccagggtctc

SEQ ID NO: 584735 - DNA, 25 bp, Homo sapien
gcagaaaggatcgaggtagagctct

SEQ ID NO: 584736 - DNA, 25 bp, Homo sapien
tggatgttaccttctgcacacaagc

SEQ ID NO: 584737 - DNA, 25 bp, Homo sapien
cctaagacttctatcctcttcaaca

SEQ ID NO: 584738 - DNA, 25 bp, Homo sapien
ccctgagtgtatccgctggtgactg

SEQ ID NO: 584739 - DNA, 25 bp, Homo sapien
tccacccctctgaggccgttccgag

SEQ ID NO: 584740 - DNA, 25 bp, Homo sapien
gtccacactctccacagttgactgt

SEQ ID NO: 584741 - DNA, 25 bp, Homo sapien
cattcccggcacacgtaaggctttt

SEQ ID NO: 584742 - DNA, 25 bp, Homo sapien
tgaggtttgacctgtcgctgaagcc

SEQ ID NO: 584743 - DNA, 25 bp, Homo sapien
cagtcactgcacacgatggtcttct

SEQ ID NO: 584744 - DNA, 25 bp, Homo sapien
tgacttccggttaaagcctcgtcca

SEQ ID NO: 584745 - DNA, 25 bp, Homo sapien
ctctgcctgaagcatcgcccacact

SEQ ID NO: 584746 - DNA, 25 bp, Homo sapien
ctctggtggttgacaagggtggtcc

SEQ ID NO: 584747 - DNA, 25 bp, Homo sapien
gtgtcctctggtggttgacaagggt

SEQ ID NO: 584748 - DNA, 25 bp, Homo sapien
ttgacaagggtggtcctctgcctga

SEQ ID NO: 584749 - DNA, 25 bp, Homo sapien
cccagtgtgtgtccgcctgtgagag

SEQ ID NO: 584750 - DNA, 25 bp, Homo sapien
gtgtgtgtccgcctgtgagagatga

SEQ ID NO: 584751 - DNA, 25 bp, Homo sapien
tgtgtgtccgcctgtgagagatgag

SEQ ID NO: 584752 - DNA, 25 bp, Homo sapien
gtgtccgcctgtgagagatgagggt

SEQ ID NO: 584753 - DNA, 25 bp, Homo sapien
tctctcctgagtgtatgttctggtg

SEQ ID NO: 584754 - DNA, 25 bp, Homo sapien
tgtctgttgaggtgtgacttgagac

SEQ ID NO: 584755 - DNA, 25 bp, Homo sapien
tcctgagtgtatgttctggtgtctg

SEQ ID NO: 584756 - DNA, 25 bp, Homo sapien
cttgcacacaatgggcttctctcct

SEQ ID NO: 584757 - DNA, 25 bp, Homo sapien
attgctggctgaagccccggccaca

SEQ ID NO: 584758 - DNA, 25 bp, Homo sapien
cctctggtgtgcaacaaggtttgac

SEQ ID NO: 584759 - DNA, 25 bp, Homo sapien
tgtctgatgaggttggattgctggc

SEQ ID NO: 584760 - DNA, 25 bp, Homo sapien
caccatgggcttctcgcctgagtgc

SEQ ID NO: 584761 - DNA, 25 bp, Homo sapien
gagtgcttccgcttgtgcctgatga

SEQ ID NO: 584762 - DNA, 25 bp, Homo sapien
tgagaccggcctggtggctaaagcc

SEQ ID NO: 584763 - DNA, 25 bp, Homo sapien
ttagagctgacttattgccaaagcc

SEQ ID NO: 584764 - DNA, 25 bp, Homo sapien
aaggcttctcttccgagtgagcccg

SEQ ID NO: 584765 - DNA, 25 bp, Homo sapien
ccgtatgtgtcatttgatgtaaggt

SEQ ID NO: 584766 - DNA, 25 bp, Homo sapien
aggtgaggtgtgacttttggagaaa

SEQ ID NO: 584767 - DNA, 25 bp, Homo sapien
catttgatgtaaggtgaggtgtgac

SEQ ID NO: 584768 - DNA, 25 bp, Homo sapien
ccgcccacacgtcttgcacacatat

SEQ ID NO: 584769 - DNA, 25 bp, Homo sapien
gtggacagacgtggtcttcctgtgt

SEQ ID NO: 584770 - DNA, 25 bp, Homo sapien
ggtggacagacgtggtcttcctgtg

SEQ ID NO: 584771 - DNA, 25 bp, Homo sapien
tataaggaatccgaaggttgccctg

SEQ ID NO: 584772 - DNA, 25 bp, Homo sapien
aggaatccgaaggttgccctgcaca

SEQ ID NO: 584773 - DNA, 25 bp, Homo sapien
agagagtataaggaatccgaaggtt

SEQ ID NO: 584774 - DNA, 25 bp, Homo sapien
gctcagggtcgggctgcactggcag

SEQ ID NO: 584775 - DNA, 25 bp, Homo sapien
ttagtccttgtccccatctttgcct

SEQ ID NO: 584776 - DNA, 25 bp, Homo sapien
catggagaagacttagtgtggagaa

SEQ ID NO: 584777 - DNA, 25 bp, Homo sapien
tattacaaccgaaggccacaaaaca

SEQ ID NO: 584778 - DNA, 25 bp, Homo sapien
gcatttctctactccatttcatcaa

SEQ ID NO: 584779 - DNA, 25 bp, Homo sapien
catcaaagtgtcaacattctgactc

SEQ ID NO: 584780 - DNA, 25 bp, Homo sapien
gctgcaagaccaggccgtgggactg

SEQ ID NO: 584781 - DNA, 25 bp, Homo sapien
caggggcaaaggcaacaacggagat

SEQ ID NO: 584782 - DNA, 25 bp, Homo sapien
caagaccaggccgtgggactggagt

SEQ ID NO: 584783 - DNA, 25 bp, Homo sapien
aggcaacaacggagatgtttgaaag

SEQ ID NO: 584784 - DNA, 25 bp, Homo sapien
gtttgcgtgacccagctttcagctg

SEQ ID NO: 584785 - DNA, 25 bp, Homo sapien
ccaagtcgggtagagatgatcaaac

SEQ ID NO: 584786 - DNA, 25 bp, Homo sapien
tttagctactgaactacgctgcggg

SEQ ID NO: 584787 - DNA, 25 bp, Homo sapien
tgggacaacctgctgatatttcaaa

SEQ ID NO: 584788 - DNA, 25 bp, Homo sapien
agctaagagcacagaatgttatatt

SEQ ID NO: 584789 - DNA, 25 bp, Homo sapien
attttgtaaaccaatttagacatat

SEQ ID NO: 584790 - DNA, 25 bp, Homo sapien
gaaaagctaagagcacagaatgtta

SEQ ID NO: 584791 - DNA, 25 bp, Homo sapien
tctcctgtaatttcattaagagtaa

SEQ ID NO: 584792 - DNA, 25 bp, Homo sapien
tttagcagtgggggggtcatatacc

SEQ ID NO: 584793 - DNA, 25 bp, Homo sapien
tctgagttgcaaaaattatctgccc

SEQ ID NO: 584794 - DNA, 25 bp, Homo sapien
tcaatcttagctgtcataatcagac

SEQ ID NO: 584795 - DNA, 25 bp, Homo sapien
tgcatctgtggtagggaccttagca

SEQ ID NO: 584796 - DNA, 25 bp, Homo sapien
gcagcagtgactccagtcaaagcat

SEQ ID NO: 584797 - DNA, 25 bp, Homo sapien
cccatcgtcacgcgaactacaaaag

SEQ ID NO: 584798 - DNA, 25 bp, Homo sapien
tgcgtgtgaacaccccatcgtcacg

SEQ ID NO: 584799 - DNA, 25 bp, Homo sapien
tgtgaacaccccatcgtcacgcgaa

SEQ ID NO: 584800 - DNA, 25 bp, Homo sapien
catcgtcacgcgaactacaaaagga

SEQ ID NO: 584801 - DNA, 25 bp, Homo sapien
tattatcttgtacaagtcagcagca

SEQ ID NO: 584802 - DNA, 25 bp, Homo sapien
ctgtcttgtcacttggcgctctagc

SEQ ID NO: 584803 - DNA, 25 bp, Homo sapien
tgtacaagtcagcagcatagcactg

SEQ ID NO: 584804 - DNA, 25 bp, Homo sapien
tctagctgaatgtaatgtcactatt

SEQ ID NO: 584805 - DNA, 25 bp, Homo sapien
caggtgccattcaaacagagttggg

SEQ ID NO: 584806 - DNA, 25 bp, Homo sapien
gaagacaagctgctagccctgttct

SEQ ID NO: 584807 - DNA, 25 bp, Homo sapien
gaagctgggagtcactatgtcagtg

SEQ ID NO: 584808 - DNA, 25 bp, Homo sapien
tacttacctatccaagccctggagg

SEQ ID NO: 584809 - DNA, 25 bp, Homo sapien
cccttctctgggtggcccgcgatgt

SEQ ID NO: 584810 - DNA, 25 bp, Homo sapien
aacgcccttcccgacttggctggcg

SEQ ID NO: 584811 - DNA, 25 bp, Homo sapien
gacttggctggcgactccgtggtcc

SEQ ID NO: 584812 - DNA, 25 bp, Homo sapien
tggcccgcgatgtcttcctgagaaa

SEQ ID NO: 584813 - DNA, 25 bp, Homo sapien
gaatcagagcatcttctagagtcca

SEQ ID NO: 584814 - DNA, 25 bp, Homo sapien
tctttacatcctcttgaatcagagc

SEQ ID NO: 584815 - DNA, 25 bp, Homo sapien
tcttatcggcttagagaatttcttt

SEQ ID NO: 584816 - DNA, 25 bp, Homo sapien
tctatttttcttatcggcttagaga

SEQ ID NO: 584817 - DNA, 25 bp, Homo sapien
cataaagctgcctaggtgcctgacc

SEQ ID NO: 584818 - DNA, 25 bp, Homo sapien
cagacttgtcctatgtccccagtgg

SEQ ID NO: 584819 - DNA, 25 bp, Homo sapien
ggtcctaaggccatgtcctctcaag

SEQ ID NO: 584820 - DNA, 25 bp, Homo sapien
tcagccagaattgcccatcatggtg

SEQ ID NO: 584821 - DNA, 25 bp, Homo sapien
tggagagggcagtcaactgctatgt

SEQ ID NO: 584822 - DNA, 25 bp, Homo sapien
ctatgtggcccaagaatgcctcagc

SEQ ID NO: 584823 - DNA, 25 bp, Homo sapien
gaagaggatgggtgtttattgggat

SEQ ID NO: 584824 - DNA, 25 bp, Homo sapien
gagggcagtcaactgctatgtggcc

SEQ ID NO: 584825 - DNA, 25 bp, Homo sapien
tgtggtataagcacatgtacagagg

SEQ ID NO: 584826 - DNA, 25 bp, Homo sapien
tattatgtagggatacgtccctccc

SEQ ID NO: 584827 - DNA, 25 bp, Homo sapien
atcagcgtcgacttgcctttcccgg

SEQ ID NO: 584828 - DNA, 25 bp, Homo sapien
taaatggacagctcccagtatactg

SEQ ID NO: 584829 - DNA, 25 bp, Homo sapien
gaaatgaaggcaagcgcacacaaag

SEQ ID NO: 584830 - DNA, 25 bp, Homo sapien
ccctgaagcaaaacgggatagagct

SEQ ID NO: 584831 - DNA, 25 bp, Homo sapien
ggagtttccctctaattgcacagaa

SEQ ID NO: 584832 - DNA, 25 bp, Homo sapien
tattctagataacagagcggtccct

SEQ ID NO: 584833 - DNA, 25 bp, Homo sapien
gctgtgcatgtttccgattgtttgt

SEQ ID NO: 584834 - DNA, 25 bp, Homo sapien
gtgcatgtttccgattgtttgtgag

SEQ ID NO: 584835 - DNA, 25 bp, Homo sapien
catgtttccgattgtttgtgaggtt

SEQ ID NO: 584836 - DNA, 25 bp, Homo sapien
gcatgtttccgattgtttgtgaggt

SEQ ID NO: 584837 - DNA, 25 bp, Homo sapien
ctaaccaagcccgacctgcctaggt

SEQ ID NO: 584838 - DNA, 25 bp, Homo sapien
ccaagcccgacctgcctaggttttg

SEQ ID NO: 584839 - DNA, 25 bp, Homo sapien
agcccgacctgcctaggttttgaga

SEQ ID NO: 584840 - DNA, 25 bp, Homo sapien
gacctgcctaggttttgagatcaga

SEQ ID NO: 584841 - DNA, 25 bp, Homo sapien
acaggacaagccagagcccgagcaa

SEQ ID NO: 584842 - DNA, 25 bp, Homo sapien
tggggccaaggctgctgataaactt

SEQ ID NO: 584843 - DNA, 25 bp, Homo sapien
cctcatacacatcaaatccaatgtg

SEQ ID NO: 584844 - DNA, 25 bp, Homo sapien
tgccatgatcaagaagttatatgga

SEQ ID NO: 584845 - DNA, 25 bp, Homo sapien
cacagtcaggtccttataactgaag

SEQ ID NO: 584846 - DNA, 25 bp, Homo sapien
ctctgctcacagtcaggtccttata

SEQ ID NO: 584847 - DNA, 25 bp, Homo sapien
gctcacagtcaggtccttataactg

SEQ ID NO: 584848 - DNA, 25 bp, Homo sapien
agtcaggtccttataactgaagtca

SEQ ID NO: 584849 - DNA, 25 bp, Homo sapien
gaaacagtgctgtacattgatggtt

SEQ ID NO: 584850 - DNA, 25 bp, Homo sapien
caatgtcttgacttaccttagccaa

SEQ ID NO: 584851 - DNA, 25 bp, Homo sapien
taataaatttgacctactgatacag

SEQ ID NO: 584852 - DNA, 25 bp, Homo sapien
caaggtaagatgtcccggtgctggc

SEQ ID NO: 584853 - DNA, 25 bp, Homo sapien
cttttagcacttggcaactctgtga

SEQ ID NO: 584854 - DNA, 25 bp, Homo sapien
gacgcacaagcctggttccttcatt

SEQ ID NO: 584855 - DNA, 25 bp, Homo sapien
aatgtcaatgcccatcggacgcaca

SEQ ID NO: 584856 - DNA, 25 bp, Homo sapien
tgcctatgggaaagcactgggaaag

SEQ ID NO: 584857 - DNA, 25 bp, Homo sapien
tttcggcgggaggtggccaagctgc

SEQ ID NO: 584858 - DNA, 25 bp, Homo sapien
ctttcggcgggaggtggccaagctg

SEQ ID NO: 584859 - DNA, 25 bp, Homo sapien
gaaagatgcacggagcagcccggta

SEQ ID NO: 584860 - DNA, 25 bp, Homo sapien
ttcttcctcgtgtcgcagccggtcc

SEQ ID NO: 584861 - DNA, 25 bp, Homo sapien
tcgtgtcgcagccggtccttccttg

SEQ ID NO: 584862 - DNA, 25 bp, Homo sapien
gaaccagtggaggatagcgctctgc

SEQ ID NO: 584863 - DNA, 25 bp, Homo sapien
tttcgaccggatccgcgtcaggcgg

SEQ ID NO: 584864 - DNA, 25 bp, Homo sapien
ggatccgcgtcaggcggctgcacct

SEQ ID NO: 584865 - DNA, 25 bp, Homo sapien
ctgttttctatttcgaccggatccg

SEQ ID NO: 584866 - DNA, 25 bp, Homo sapien
tttctatttcgaccggatccgcgtc

SEQ ID NO: 584867 - DNA, 25 bp, Homo sapien
tgggcgcctgatggagtgccaagcc

SEQ ID NO: 584868 - DNA, 25 bp, Homo sapien
tccagctgcccaaatgactgggcgc

SEQ ID NO: 584869 - DNA, 25 bp, Homo sapien
ccaagccggagcctcactggtttac

SEQ ID NO: 584870 - DNA, 25 bp, Homo sapien
ctgatggagtgccaagccggagcct

SEQ ID NO: 584871 - DNA, 25 bp, Homo sapien
cgtgaaaatctaagagtggcagtgc

SEQ ID NO: 584872 - DNA, 25 bp, Homo sapien
ggcagtgcctcggtaaaatataaaa

SEQ ID NO: 584873 - DNA, 25 bp, Homo sapien
cctaacagtctgagaaagttgagtc

SEQ ID NO: 584874 - DNA, 25 bp, Homo sapien
ctttgggtgtcctaaaagtcttgag

SEQ ID NO: 584875 - DNA, 25 bp, Homo sapien
catgagggaactggtgacataattc

SEQ ID NO: 584876 - DNA, 25 bp, Homo sapien
tctatatgaggcatttcattctgaa

SEQ ID NO: 584877 - DNA, 25 bp, Homo sapien
tacttggtctgtgattccatgaggg

SEQ ID NO: 584878 - DNA, 25 bp, Homo sapien
tattgatggctactgcccgctgctg

SEQ ID NO: 584879 - DNA, 25 bp, Homo sapien
gcacaagattcatagcccagctcaa

SEQ ID NO: 584880 - DNA, 25 bp, Homo sapien
gaatggattggatgatgctcaccca

SEQ ID NO: 584881 - DNA, 25 bp, Homo sapien
gagctgatggtgtagataccagtcc

SEQ ID NO: 584882 - DNA, 25 bp, Homo sapien
taggaatcctgtatcttagtcaagt

SEQ ID NO: 584883 - DNA, 25 bp, Homo sapien
gagttgagtcctaatgcgttagtca

SEQ ID NO: 584884 - DNA, 25 bp, Homo sapien
acttcctggagacaatggcagagtt

SEQ ID NO: 584885 - DNA, 25 bp, Homo sapien
tggcagagttgagtcctaatgcgtt

SEQ ID NO: 584886 - DNA, 25 bp, Homo sapien
cagtgacttcctggagacaatggca

SEQ ID NO: 584887 - DNA, 25 bp, Homo sapien
tattctatataaaaggcccgtattg

SEQ ID NO: 584888 - DNA, 25 bp, Homo sapien
tctatataaaaggcccgtattgctc

SEQ ID NO: 584889 - DNA, 25 bp, Homo sapien
attctatataaaaggcccgtattgc

SEQ ID NO: 584890 - DNA, 25 bp, Homo sapien
ttctatataaaaggcccgtattgct

SEQ ID NO: 584891 - DNA, 25 bp, Homo sapien
caacacatacgtttgcaaataataa

SEQ ID NO: 584892 - DNA, 25 bp, Homo sapien
taattttgtattagctttattccca

SEQ ID NO: 584893 - DNA, 25 bp, Homo sapien
gctttattcccaacacatacgtttg

SEQ ID NO: 584894 - DNA, 25 bp, Homo sapien
ttgtattagctttattcccaacaca

SEQ ID NO: 584895 - DNA, 25 bp, Homo sapien
taaggtaaggactataggataatct

SEQ ID NO: 584896 - DNA, 25 bp, Homo sapien
taatctaataatctacatcactact

SEQ ID NO: 584897 - DNA, 25 bp, Homo sapien
ggtaaggactataggataatctaat

SEQ ID NO: 584898 - DNA, 25 bp, Homo sapien
acatcactacttaaacaaaattagc

SEQ ID NO: 584899 - DNA, 25 bp, Homo sapien
catcctctatgatttgatatactag

SEQ ID NO: 584900 - DNA, 25 bp, Homo sapien
ttcctgcatcctctatgatttgata

SEQ ID NO: 584901 - DNA, 25 bp, Homo sapien
atatactagtttttcttggttatcg

SEQ ID NO: 584902 - DNA, 25 bp, Homo sapien
tcttggttatcggatcccttcattt

SEQ ID NO: 584903 - DNA, 25 bp, Homo sapien
tgggtgtccttcaagcacatgcatg

SEQ ID NO: 584904 - DNA, 25 bp, Homo sapien
tgtgactcagaattcagacgtcttt

SEQ ID NO: 584905 - DNA, 25 bp, Homo sapien
tctctttcaaggcaacaacggcctt

SEQ ID NO: 584906 - DNA, 25 bp, Homo sapien
gatctgggtccctatatctagttcc

SEQ ID NO: 584907 - DNA, 25 bp, Homo sapien
tagcggatatctctgctccatattc

SEQ ID NO: 584908 - DNA, 25 bp, Homo sapien
cagctttgataagctttttactttc

SEQ ID NO: 584909 - DNA, 25 bp, Homo sapien
ggcaaattacttttatagcggatat

SEQ ID NO: 584910 - DNA, 25 bp, Homo sapien
ttttatagcggatatctctgctcca

SEQ ID NO: 584911 - DNA, 25 bp, Homo sapien
tgttttcttattgctgaattttagg

SEQ ID NO: 584912 - DNA, 25 bp, Homo sapien
gttttcttattgctgaattttagga

SEQ ID NO: 584913 - DNA, 25 bp, Homo sapien
ccaaagtgttgttttcttattgctg

SEQ ID NO: 584914 - DNA, 25 bp, Homo sapien
aagtgttgttttcttattgctgaat

SEQ ID NO: 584915 - DNA, 25 bp, Homo sapien
caggttatagagcatatacaccttc

SEQ ID NO: 584916 - DNA, 25 bp, Homo sapien
ggttaagcacctctacaaattcaga

SEQ ID NO: 584917 - DNA, 25 bp, Homo sapien
gattcaaaatcctggtcactgtacc

SEQ ID NO: 584918 - DNA, 25 bp, Homo sapien
caccagtcacagaccggtctggctg

SEQ ID NO: 584919 - DNA, 25 bp, Homo sapien
ttcccaattcgcagatatatttcca

SEQ ID NO: 584920 - DNA, 25 bp, Homo sapien
caattcgcagatatatttccacact

SEQ ID NO: 584921 - DNA, 25 bp, Homo sapien
ttcgcagatatatttccacacttca

SEQ ID NO: 584922 - DNA, 25 bp, Homo sapien
tactgattcccaattcgcagatata

SEQ ID NO: 584923 - DNA, 25 bp, Homo sapien
gatgattggattgactgccctgtac

SEQ ID NO: 584924 - DNA, 25 bp, Homo sapien
tgtgtccatctacactgccaactgt

SEQ ID NO: 584925 - DNA, 25 bp, Homo sapien
ttttgcagcaataatcgtcatctcc

SEQ ID NO: 584926 - DNA, 25 bp, Homo sapien
acagggtgcccggaccaaacctgtg

SEQ ID NO: 584927 - DNA, 25 bp, Homo sapien
gcttaggcatatagacaaaggttgg

SEQ ID NO: 584928 - DNA, 25 bp, Homo sapien
ggcatatagacaaaggttggtataa

SEQ ID NO: 584929 - DNA, 25 bp, Homo sapien
gagagcttaggcatatagacaaagg

SEQ ID NO: 584930 - DNA, 25 bp, Homo sapien
aggcatagagagcttaggcatatag

SEQ ID NO: 584931 - DNA, 25 bp, Homo sapien
ctaatatgttagccttttgtctagg

SEQ ID NO: 584932 - DNA, 25 bp, Homo sapien
aatatgttagccttttgtctaggga

SEQ ID NO: 584933 - DNA, 25 bp, Homo sapien
taatatgttagccttttgtctaggg

SEQ ID NO: 584934 - DNA, 25 bp, Homo sapien
ccaggtaacacaggaatatgggcag

SEQ ID NO: 584935 - DNA, 25 bp, Homo sapien
ggcaaaaggctatcaccaggtaaca

SEQ ID NO: 584936 - DNA, 25 bp, Homo sapien
taagatgaccatgctcacctgtctg

SEQ ID NO: 584937 - DNA, 25 bp, Homo sapien
tgggcagggagacctatacatatga

SEQ ID NO: 584938 - DNA, 25 bp, Homo sapien
caccaccttcgtggcagtcatcaaa

SEQ ID NO: 584939 - DNA, 25 bp, Homo sapien
caccttcgtggcagtcatcaaaaac

SEQ ID NO: 584940 - DNA, 25 bp, Homo sapien
tctgtcatgtaaatacagttagatg

SEQ ID NO: 584941 - DNA, 25 bp, Homo sapien
taaaattcgagccactctgtcatgt

SEQ ID NO: 584942 - DNA, 25 bp, Homo sapien
aaagatgtggtcctccggagtttca

SEQ ID NO: 584943 - DNA, 25 bp, Homo sapien
tttcatagcagcaagtctacgtcca

SEQ ID NO: 584944 - DNA, 25 bp, Homo sapien
gctttcaaggagatttcgtgttcca

SEQ ID NO: 584945 - DNA, 25 bp, Homo sapien
tacgggtatgttggcatctttttcc

SEQ ID NO: 584946 - DNA, 25 bp, Homo sapien
gcgctgttactctcctgacctatca

SEQ ID NO: 584947 - DNA, 25 bp, Homo sapien
tggtagcataatctcctaaaagaac

SEQ ID NO: 584948 - DNA, 25 bp, Homo sapien
tattgtgcggaaaaggcatgttcca

SEQ ID NO: 584949 - DNA, 25 bp, Homo sapien
tatgtccttgacagtagtcattggg

SEQ ID NO: 584950 - DNA, 25 bp, Homo sapien
tatagattcgcatatacgtgaccaa

SEQ ID NO: 584951 - DNA, 25 bp, Homo sapien
tcctctttccgtttgtgttcatcat

SEQ ID NO: 584952 - DNA, 25 bp, Homo sapien
ctcctctttccgtttgtgttcatca

SEQ ID NO: 584953 - DNA, 25 bp, Homo sapien
ttcgcatatacgtgaccaaaggaac

SEQ ID NO: 584954 - DNA, 25 bp, Homo sapien
tagagtgcttcatgtgctcagtatg

SEQ ID NO: 584955 - DNA, 25 bp, Homo sapien
ttggcaagaatattgcccttgttta

SEQ ID NO: 584956 - DNA, 25 bp, Homo sapien
caagaatattgcccttgtttattta

SEQ ID NO: 584957 - DNA, 25 bp, Homo sapien
cagtatgcacattaatgctcttggc

SEQ ID NO: 584958 - DNA, 25 bp, Homo sapien
tggcacttcagttgaacccaggtaa

SEQ ID NO: 584959 - DNA, 25 bp, Homo sapien
ctggcacttcagttgaacccaggta

SEQ ID NO: 584960 - DNA, 25 bp, Homo sapien
tgccatgaattcatacggaataagt

SEQ ID NO: 584961 - DNA, 25 bp, Homo sapien
catacggaataagttccagcagctc

SEQ ID NO: 584962 - DNA, 25 bp, Homo sapien
ttcatacggaataagttccagcagc

SEQ ID NO: 584963 - DNA, 25 bp, Homo sapien
gaattcatacggaataagttccagc

SEQ ID NO: 584964 - DNA, 25 bp, Homo sapien
cactggtggctattggttaccttac

SEQ ID NO: 584965 - DNA, 25 bp, Homo sapien
gaaagctctattggacaacattggt

SEQ ID NO: 584966 - DNA, 25 bp, Homo sapien
gccaaatatagtaaccagtaaccac

SEQ ID NO: 584967 - DNA, 25 bp, Homo sapien
tataggattgttgaactttgctgcc

SEQ ID NO: 584968 - DNA, 25 bp, Homo sapien
ctgtttagcactaatttgaccaaat

SEQ ID NO: 584969 - DNA, 25 bp, Homo sapien
gaccaaatctatagtcaaagtttga

SEQ ID NO: 584970 - DNA, 25 bp, Homo sapien
gcactaatttgaccaaatctatagt

SEQ ID NO: 584971 - DNA, 25 bp, Homo sapien
gctgttgtattacttattctttgcc

SEQ ID NO: 584972 - DNA, 25 bp, Homo sapien
tcccgctggttcacgtggtttacag

SEQ ID NO: 584973 - DNA, 25 bp, Homo sapien
gacgaagtcccgctggttcacgtgg

SEQ ID NO: 584974 - DNA, 25 bp, Homo sapien
ttcacgtggtttacaggaactccag

SEQ ID NO: 584975 - DNA, 25 bp, Homo sapien
cgtggtttacaggaactccaggcat

SEQ ID NO: 584976 - DNA, 25 bp, Homo sapien
atgacgccgtttctctgacgtcccc

SEQ ID NO: 584977 - DNA, 25 bp, Homo sapien
ggcaattctgcccagatctctctgt

SEQ ID NO: 584978 - DNA, 25 bp, Homo sapien
cacctgtccggcaattctgcccaga

SEQ ID NO: 584979 - DNA, 25 bp, Homo sapien
cttggaggacccggcggaggacact

SEQ ID NO: 584980 - DNA, 25 bp, Homo sapien
agctgccacctgtccggcaattctg

SEQ ID NO: 584981 - DNA, 25 bp, Homo sapien
gaggcaatgtattaacccagcatgg

SEQ ID NO: 584982 - DNA, 25 bp, Homo sapien
gaatgaggcaatgtattaacccagc

SEQ ID NO: 584983 - DNA, 25 bp, Homo sapien
ttttttctgaatgaggcaatgtatt

SEQ ID NO: 584984 - DNA, 25 bp, Homo sapien
tttctgaatgaggcaatgtattaac

SEQ ID NO: 584985 - DNA, 25 bp, Homo sapien
gctcgtctcagtgggaagtcccgct

SEQ ID NO: 584986 - DNA, 25 bp, Homo sapien
taccggaaagcgagaacgatgacgt

SEQ ID NO: 584987 - DNA, 25 bp, Homo sapien
gctgatcgccttagctaccggaaag

SEQ ID NO: 584988 - DNA, 25 bp, Homo sapien
gaggttcgccctgatacaatatgac

SEQ ID NO: 584989 - DNA, 25 bp, Homo sapien
ggccaatcaaagagcgcttctccga

SEQ ID NO: 584990 - DNA, 25 bp, Homo sapien
caagacaggtgtatgtcgcacttca

SEQ ID NO: 584991 - DNA, 25 bp, Homo sapien
gctcagctctcaaccgattggccag

SEQ ID NO: 584992 - DNA, 25 bp, Homo sapien
gcacttcaaaacgagagttcctcgg

SEQ ID NO: 584993 - DNA, 25 bp, Homo sapien
gccctcggccctccgtcacctatgc

SEQ ID NO: 584994 - DNA, 25 bp, Homo sapien
tccgtcacctatgcgccccgctcac

SEQ ID NO: 584995 - DNA, 25 bp, Homo sapien
ccggcagaaactcatacccgtgccc

SEQ ID NO: 584996 - DNA, 25 bp, Homo sapien
cagaaactcatacccgtgccctcgg

SEQ ID NO: 584997 - DNA, 25 bp, Homo sapien
ggtgtgcgcactccgcaattctggg

SEQ ID NO: 584998 - DNA, 25 bp, Homo sapien
agcaaaagtcgtttcacttgtctga

SEQ ID NO: 584999 - DNA, 25 bp, Homo sapien
ccagctgtcatgaagcaaaagtcgt

SEQ ID NO: 585000 - DNA, 25 bp, Homo sapien
gaaactggagccagaaatcggtccc

SEQ ID NO: 585001 - DNA, 25 bp, Homo sapien
ttcttcattctgctggatgaactcc

SEQ ID NO: 585002 - DNA, 25 bp, Homo sapien
tggatgaactccaggtatgtcgcca

SEQ ID NO: 585003 - DNA, 25 bp, Homo sapien
ggatgaactccaggtatgtcgccat

SEQ ID NO: 585004 - DNA, 25 bp, Homo sapien
cttcattctgctggatgaactccag

SEQ ID NO: 585005 - DNA, 25 bp, Homo sapien
ggccacacgttccaactaaaacgca

SEQ ID NO: 585006 - DNA, 25 bp, Homo sapien
gctggaaggccacacgttccaacta

SEQ ID NO: 585007 - DNA, 25 bp, Homo sapien
tggaaggccacacgttccaactaaa

SEQ ID NO: 585008 - DNA, 25 bp, Homo sapien
gccacacgttccaactaaaacgcac

SEQ ID NO: 585009 - DNA, 25 bp, Homo sapien
taggtctggacgttctttcaaagga

SEQ ID NO: 585010 - DNA, 25 bp, Homo sapien
caaagcacaggttcatattgtacag

SEQ ID NO: 585011 - DNA, 25 bp, Homo sapien
caaagtgggttgagaacagctttac

SEQ ID NO: 585012 - DNA, 25 bp, Homo sapien
tacaagttggcctgctgcaaagcac

SEQ ID NO: 585013 - DNA, 25 bp, Homo sapien
aataaccagtggctatgcattcaca

SEQ ID NO: 585014 - DNA, 25 bp, Homo sapien
catctttattgtccggctatgtgaa

SEQ ID NO: 585015 - DNA, 25 bp, Homo sapien
catatgggcacattaaataaaagca

SEQ ID NO: 585016 - DNA, 25 bp, Homo sapien
tcctcaaattggttcaagataatgc

SEQ ID NO: 585017 - DNA, 25 bp, Homo sapien
cccaaagttttgctcgataatcaac

SEQ ID NO: 585018 - DNA, 25 bp, Homo sapien
tacaggcccaaagttttgctcgata

SEQ ID NO: 585019 - DNA, 25 bp, Homo sapien
aattacaggcccaaagttttgctcg

SEQ ID NO: 585020 - DNA, 25 bp, Homo sapien
cagaaattacaggcccaaagttttg

SEQ ID NO: 585021 - DNA, 25 bp, Homo sapien
ctcagatatgcctccataagctgga

SEQ ID NO: 585022 - DNA, 25 bp, Homo sapien
catcaattcggcaggttgattcacc

SEQ ID NO: 585023 - DNA, 25 bp, Homo sapien
aaaactggggcatcaattcggcagg

SEQ ID NO: 585024 - DNA, 25 bp, Homo sapien
ctgtatcacgtactcaattgtagaa

SEQ ID NO: 585025 - DNA, 25 bp, Homo sapien
gatggagtaccatcaactgagatga

SEQ ID NO: 585026 - DNA, 25 bp, Homo sapien
gccttctataatgtcaggacttgaa

SEQ ID NO: 585027 - DNA, 25 bp, Homo sapien
caggtttggaatttaatcagttcta

SEQ ID NO: 585028 - DNA, 25 bp, Homo sapien
ggacttgaaaacaatgccagtagat

SEQ ID NO: 585029 - DNA, 25 bp, Homo sapien
caggcatgtgtcaaccacatagaga

SEQ ID NO: 585030 - DNA, 25 bp, Homo sapien
aggcatgtgtcaaccacatagagaa

SEQ ID NO: 585031 - DNA, 25 bp, Homo sapien
tctgcagggactctttgagtgcttg

SEQ ID NO: 585032 - DNA, 25 bp, Homo sapien
ctttgagtgcttgaaggtcatcttc

SEQ ID NO: 585033 - DNA, 25 bp, Homo sapien
tccctcggaagacataacttttgga

SEQ ID NO: 585034 - DNA, 25 bp, Homo sapien
ttgcagttaaatccttggtccctcg

SEQ ID NO: 585035 - DNA, 25 bp, Homo sapien
acagcttagctcatgaacctgcacc

SEQ ID NO: 585036 - DNA, 25 bp, Homo sapien
ttggagattccttcacagcttagct

SEQ ID NO: 585037 - DNA, 25 bp, Homo sapien
ttgtgcaggtcgtgcttgctgcatg

SEQ ID NO: 585038 - DNA, 25 bp, Homo sapien
gtggttgtgcaggtcgtgcttgctg

SEQ ID NO: 585039 - DNA, 25 bp, Homo sapien
gcaggtcgtgcttgctgcatgggca

SEQ ID NO: 585040 - DNA, 25 bp, Homo sapien
caggtcgtgcttgctgcatgggcat

SEQ ID NO: 585041 - DNA, 25 bp, Homo sapien
tgtagctccccaagaagatcagtga

SEQ ID NO: 585042 - DNA, 25 bp, Homo sapien
tcatatcaatcttgtgaacaggctg

SEQ ID NO: 585043 - DNA, 25 bp, Homo sapien
tgagttactggccatgggtccctct

SEQ ID NO: 585044 - DNA, 25 bp, Homo sapien
ggatcgcaaaggtctcttcccctga

SEQ ID NO: 585045 - DNA, 25 bp, Homo sapien
tatctttctcaatatcatgccaaga

SEQ ID NO: 585046 - DNA, 25 bp, Homo sapien
aacgaataggaatctttaattcatc

SEQ ID NO: 585047 - DNA, 25 bp, Homo sapien
tcatgccaagaacgaataggaatct

SEQ ID NO: 585048 - DNA, 25 bp, Homo sapien
gcctttttcatgaatcgtgcattat

SEQ ID NO: 585049 - DNA, 25 bp, Homo sapien
ccagtaagatttgcacaacacttca

SEQ ID NO: 585050 - DNA, 25 bp, Homo sapien
tgatcaagggcacaagcataaatat

SEQ ID NO: 585051 - DNA, 25 bp, Homo sapien
ttcgattagcaagcatctcatagtg

SEQ ID NO: 585052 - DNA, 25 bp, Homo sapien
agcataaatatcaatgcagtgacca

SEQ ID NO: 585053 - DNA, 25 bp, Homo sapien
aaagtagcaccaaatgccattcgga

SEQ ID NO: 585054 - DNA, 25 bp, Homo sapien
agtaaagattctttggaatgtctgc

SEQ ID NO: 585055 - DNA, 25 bp, Homo sapien
tgccattcggaaatctccattaaaa

SEQ ID NO: 585056 - DNA, 25 bp, Homo sapien
accaaatgccattcggaaatctcca

SEQ ID NO: 585057 - DNA, 25 bp, Homo sapien
ttttctgacacacacggtcctttca

SEQ ID NO: 585058 - DNA, 25 bp, Homo sapien
ttcacattcagagatacgcatggac

SEQ ID NO: 585059 - DNA, 25 bp, Homo sapien
tcagagatacgcatggaccaatggc

SEQ ID NO: 585060 - DNA, 25 bp, Homo sapien
ggctcctgcaatcttcagttcccga

SEQ ID NO: 585061 - DNA, 25 bp, Homo sapien
ggatctaggccacagattttccact

SEQ ID NO: 585062 - DNA, 25 bp, Homo sapien
tagatgtaggatctaggccacagat

SEQ ID NO: 585063 - DNA, 25 bp, Homo sapien
caagtgtagatgtaggatctaggcc

SEQ ID NO: 585064 - DNA, 25 bp, Homo sapien
attttccactgactcgtgccaccaa

SEQ ID NO: 585065 - DNA, 25 bp, Homo sapien
ttttaactatgcagtgtcagcaccc

SEQ ID NO: 585066 - DNA, 25 bp, Homo sapien
tcagcaccccaacactactcaaggg

SEQ ID NO: 585067 - DNA, 25 bp, Homo sapien
gatttttaactatgcagtgtcagca

SEQ ID NO: 585068 - DNA, 25 bp, Homo sapien
gtggatttttaactatgcagtgtca

SEQ ID NO: 585069 - DNA, 25 bp, Homo sapien
tttcaagaaattccggccaggcatg

SEQ ID NO: 585070 - DNA, 25 bp, Homo sapien
ctggaaggaagagtcgactgatgca

SEQ ID NO: 585071 - DNA, 25 bp, Homo sapien
gcataagcaaagaaagtcatttgtt

SEQ ID NO: 585072 - DNA, 25 bp, Homo sapien
gagtcgactgatgcagcaaatttca

SEQ ID NO: 585073 - DNA, 25 bp, Homo sapien
actgcaacctccatcacttggttta

SEQ ID NO: 585074 - DNA, 25 bp, Homo sapien
ctccatcacttggtttaagcaattc

SEQ ID NO: 585075 - DNA, 25 bp, Homo sapien
aacctccatcacttggtttaagcaa

SEQ ID NO: 585076 - DNA, 25 bp, Homo sapien
caacctccatcacttggtttaagca

SEQ ID NO: 585077 - DNA, 25 bp, Homo sapien
tggcaatcgtacatcaagcaagact

SEQ ID NO: 585078 - DNA, 25 bp, Homo sapien
gactattggcgcaagttttctaaca

SEQ ID NO: 585079 - DNA, 25 bp, Homo sapien
gatacacctactgaagtgtttaggc

SEQ ID NO: 585080 - DNA, 25 bp, Homo sapien
tgcagcaaaacgaagatggattgat

SEQ ID NO: 585081 - DNA, 25 bp, Homo sapien
tgtaggatgagaggccataaccttg

SEQ ID NO: 585082 - DNA, 25 bp, Homo sapien
gtaggatgagaggccataaccttgt

SEQ ID NO: 585083 - DNA, 25 bp, Homo sapien
ctgtaggatgagaggccataacctt

SEQ ID NO: 585084 - DNA, 25 bp, Homo sapien
tcacgcggatgcgtctctgggtgct

SEQ ID NO: 585085 - DNA, 25 bp, Homo sapien
ttcgggcgatggtggtcacgcggat

SEQ ID NO: 585086 - DNA, 25 bp, Homo sapien
cgtgacaaactggatggctcctctg

SEQ ID NO: 585087 - DNA, 25 bp, Homo sapien
ggagtgctgataatgcgtgacaaac

SEQ ID NO: 585088 - DNA, 25 bp, Homo sapien
ctgacaattccagagttagtgccat

SEQ ID NO: 585089 - DNA, 25 bp, Homo sapien
tgacaattccagagttagtgccatg

SEQ ID NO: 585090 - DNA, 25 bp, Homo sapien
cttctatgtgcctgagctgactctg

SEQ ID NO: 585091 - DNA, 25 bp, Homo sapien
agccgtgccatcaacactgccgcag

SEQ ID NO: 585092 - DNA, 25 bp, Homo sapien
gtcggatgagttgtcggtccagcca

SEQ ID NO: 585093 - DNA, 25 bp, Homo sapien
cctcctctgactccgctcggaacac

SEQ ID NO: 585094 - DNA, 25 bp, Homo sapien
gggtcttctttgttatactgtccaa

SEQ ID NO: 585095 - DNA, 25 bp, Homo sapien
aatctgataacctaaaagaagtggg

SEQ ID NO: 585096 - DNA, 25 bp, Homo sapien
aaggaatctgataacctaaaagaag

SEQ ID NO: 585097 - DNA, 25 bp, Homo sapien
aagtggggtcttctttgttatactg

SEQ ID NO: 585098 - DNA, 25 bp, Homo sapien
tgttgttaaacacttgaagaaatgg

SEQ ID NO: 585099 - DNA, 25 bp, Homo sapien
gagatcttctcagatggaacataaa

SEQ ID NO: 585100 - DNA, 25 bp, Homo sapien
ctgtaatatgacgactcatcaggac

SEQ ID NO: 585101 - DNA, 25 bp, Homo sapien
gacgactcatcaggactgttgttaa

SEQ ID NO: 585102 - DNA, 25 bp, Homo sapien
tagagaatgggctggatcatgatga

SEQ ID NO: 585103 - DNA, 25 bp, Homo sapien
aagtatccatcagcaaaattctgtc

SEQ ID NO: 585104 - DNA, 25 bp, Homo sapien
aattctgtcagctagaatgctgctg

SEQ ID NO: 585105 - DNA, 25 bp, Homo sapien
gataaatgacaatttgaaagaaagt

SEQ ID NO: 585106 - DNA, 25 bp, Homo sapien
tcagctagaatgctgctgctatcca

SEQ ID NO: 585107 - DNA, 25 bp, Homo sapien
cataagaacactcgcgttcagcacg

SEQ ID NO: 585108 - DNA, 25 bp, Homo sapien
acactcgcgttcagcacgctcagga

SEQ ID NO: 585109 - DNA, 25 bp, Homo sapien
cagaagttcataagaacactcgcgt

SEQ ID NO: 585110 - DNA, 25 bp, Homo sapien
gttcataagaacactcgcgttcagc

SEQ ID NO: 585111 - DNA, 25 bp, Homo sapien
tcgggaagcgtgcttgcagaatttc

SEQ ID NO: 585112 - DNA, 25 bp, Homo sapien
gaagttttcatactcgggcatgtcc

SEQ ID NO: 585113 - DNA, 25 bp, Homo sapien
tcctggtagccagctttacgccact

SEQ ID NO: 585114 - DNA, 25 bp, Homo sapien
cagctttacgccactgggctatggt

SEQ ID NO: 585115 - DNA, 25 bp, Homo sapien
ctgactgcctccatgctccgtgttg

SEQ ID NO: 585116 - DNA, 25 bp, Homo sapien
tccatgctccgtgttgatgtaacgt

SEQ ID NO: 585117 - DNA, 25 bp, Homo sapien
gactgcctccatgctccgtgttgat

SEQ ID NO: 585118 - DNA, 25 bp, Homo sapien
cctccatgctccgtgttgatgtaac

SEQ ID NO: 585119 - DNA, 25 bp, Homo sapien
gtccccaagcatacaggttattgtg

SEQ ID NO: 585120 - DNA, 25 bp, Homo sapien
tgtctgagatgggttcactttggac

SEQ ID NO: 585121 - DNA, 25 bp, Homo sapien
tgtccccaagcatacaggttattgt

SEQ ID NO: 585122 - DNA, 25 bp, Homo sapien
tgagatgggttcactttggacaaaa

SEQ ID NO: 585123 - DNA, 25 bp, Homo sapien
taaaaatctcaatatcccggttgtg

SEQ ID NO: 585124 - DNA, 25 bp, Homo sapien
aagtgcataagtgtggtgatggaaa

SEQ ID NO: 585125 - DNA, 25 bp, Homo sapien
tcccggttgtgatactgtattatag

SEQ ID NO: 585126 - DNA, 25 bp, Homo sapien
aatgctgcacatcttgaccttaaaa

SEQ ID NO: 585127 - DNA, 25 bp, Homo sapien
caggaagttcatccccaatggccaa

SEQ ID NO: 585128 - DNA, 25 bp, Homo sapien
cagagaaggctaagtatggaaccag

SEQ ID NO: 585129 - DNA, 25 bp, Homo sapien
taagtacaactgaaaacttcgggca

SEQ ID NO: 585130 - DNA, 25 bp, Homo sapien
ctgtactccgggcaaaaatgagagg

SEQ ID NO: 585131 - DNA, 25 bp, Homo sapien
taagtgctctgcttaccacagaagc

SEQ ID NO: 585132 - DNA, 25 bp, Homo sapien
ccacagaagctggataatggtgtac

SEQ ID NO: 585133 - DNA, 25 bp, Homo sapien
tctccactgaacagatggatatttc

SEQ ID NO: 585134 - DNA, 25 bp, Homo sapien
cacaaacgagtgaactggtatctcc

SEQ ID NO: 585135 - DNA, 25 bp, Homo sapien
tgataaagattagttggcagatatc

SEQ ID NO: 585136 - DNA, 25 bp, Homo sapien
ctttcctggtatgccgagatcaggc

SEQ ID NO: 585137 - DNA, 25 bp, Homo sapien
tctgcctcacgaacaacttcttttg

SEQ ID NO: 585138 - DNA, 25 bp, Homo sapien
ttcatgagctgtcaagcaccttccc

SEQ ID NO: 585139 - DNA, 25 bp, Homo sapien
catcagttaggatgggtgctccagt

SEQ ID NO: 585140 - DNA, 25 bp, Homo sapien
cagttaggatgggtgctccagtttc

SEQ ID NO: 585141 - DNA, 25 bp, Homo sapien
acatcatcagttaggatgggtgctc

SEQ ID NO: 585142 - DNA, 25 bp, Homo sapien
tcatcagttaggatgggtgctccag

SEQ ID NO: 585143 - DNA, 25 bp, Homo sapien
aaattataatctaaagagttacata

SEQ ID NO: 585144 - DNA, 25 bp, Homo sapien
tttatagtgcaagaaaaaggacaaa

SEQ ID NO: 585145 - DNA, 25 bp, Homo sapien
tagattctaaaagttaggatacaaa

SEQ ID NO: 585146 - DNA, 25 bp, Homo sapien
gagttacatataaaatgtccttgat

SEQ ID NO: 585147 - DNA, 25 bp, Homo sapien
ttaagattctcacctaaacaagctg

SEQ ID NO: 585148 - DNA, 25 bp, Homo sapien
cctttatgatcattaagattctcac

SEQ ID NO: 585149 - DNA, 25 bp, Homo sapien
tgatcattaagattctcacctaaac

SEQ ID NO: 585150 - DNA, 25 bp, Homo sapien
gattctcacctaaacaagctgccaa

SEQ ID NO: 585151 - DNA, 25 bp, Homo sapien
tatgagaattaggttcaggaaacac

SEQ ID NO: 585152 - DNA, 25 bp, Homo sapien
tctgagtttatagagtggaggtaac

SEQ ID NO: 585153 - DNA, 25 bp, Homo sapien
acacactcacacagagacctcagga

SEQ ID NO: 585154 - DNA, 25 bp, Homo sapien
taaggagaggttaaaagcagttatc

SEQ ID NO: 585155 - DNA, 25 bp, Homo sapien
ctgtgggcgtgcgatactttttacc

SEQ ID NO: 585156 - DNA, 25 bp, Homo sapien
gcgtgcgatactttttaccacgtga

SEQ ID NO: 585157 - DNA, 25 bp, Homo sapien
gatactttttaccacgtgacgagga

SEQ ID NO: 585158 - DNA, 25 bp, Homo sapien
gcgatactttttaccacgtgacgag

SEQ ID NO: 585159 - DNA, 25 bp, Homo sapien
tcaggtgtccggactttcgggtgta

SEQ ID NO: 585160 - DNA, 25 bp, Homo sapien
ctctggcccggaaagtcgctcaggt

SEQ ID NO: 585161 - DNA, 25 bp, Homo sapien
tgccgccggaaccattaaggagccg

SEQ ID NO: 585162 - DNA, 25 bp, Homo sapien
taaggagccgccagttttcagcgtc

SEQ ID NO: 585163 - DNA, 25 bp, Homo sapien
gggtacgccagcgagtgcctcgatt

SEQ ID NO: 585164 - DNA, 25 bp, Homo sapien
agcgagtgcctcgattctcgcaggc

SEQ ID NO: 585165 - DNA, 25 bp, Homo sapien
tccggtgagggcgtcgctgcggtcc

SEQ ID NO: 585166 - DNA, 25 bp, Homo sapien
cgggacttccggtgagggcgtcgct

SEQ ID NO: 585167 - DNA, 25 bp, Homo sapien
aggccgtgaactcatttcgatacat

SEQ ID NO: 585168 - DNA, 25 bp, Homo sapien
caggccgtgaactcatttcgataca

SEQ ID NO: 585169 - DNA, 25 bp, Homo sapien
ccaggccgtgaactcatttcgatac

SEQ ID NO: 585170 - DNA, 25 bp, Homo sapien
tgccgatcccgtagaccaccgacat

SEQ ID NO: 585171 - DNA, 25 bp, Homo sapien
caggtgccgatcccgtagaccaccg

SEQ ID NO: 585172 - DNA, 25 bp, Homo sapien
aggtgccgatcccgtagaccaccga

SEQ ID NO: 585173 - DNA, 25 bp, Homo sapien
ggtgccgatcccgtagaccaccgac

SEQ ID NO: 585174 - DNA, 25 bp, Homo sapien
tgacgacttcgccattgtccggcta

SEQ ID NO: 585175 - DNA, 25 bp, Homo sapien
ctatagtaaagcagtgagcccaaca

SEQ ID NO: 585176 - DNA, 25 bp, Homo sapien
cgacttcgccattgtccggctatag

SEQ ID NO: 585177 - DNA, 25 bp, Homo sapien
ccattgtccggctatagtaaagcag

SEQ ID NO: 585178 - DNA, 25 bp, Homo sapien
tctccaaccccaataatgaaggaag

SEQ ID NO: 585179 - DNA, 25 bp, Homo sapien
aactaaggtaagaattacatccact

SEQ ID NO: 585180 - DNA, 25 bp, Homo sapien
gaacacctgaattattaacttagaa

SEQ ID NO: 585181 - DNA, 25 bp, Homo sapien
gaaagcagtcattaaagtcttagaa

SEQ ID NO: 585182 - DNA, 25 bp, Homo sapien
ctttatatgtgacaactgtttccac

SEQ ID NO: 585183 - DNA, 25 bp, Homo sapien
tcagagagttcactgggtacttcac

SEQ ID NO: 585184 - DNA, 25 bp, Homo sapien
taaaatccttttgggcgttcagaga

SEQ ID NO: 585185 - DNA, 25 bp, Homo sapien
tccaatagttgaggatcttttctgt

SEQ ID NO: 585186 - DNA, 25 bp, Homo sapien
catacacttttcacaaacccaaaat

SEQ ID NO: 585187 - DNA, 25 bp, Homo sapien
tgtgaatcccaaagtgaatatggag

SEQ ID NO: 585188 - DNA, 25 bp, Homo sapien
cttaaagcgaccactaaagctgtgc

SEQ ID NO: 585189 - DNA, 25 bp, Homo sapien
caaagggctactgtgaatcccaaag

SEQ ID NO: 585190 - DNA, 25 bp, Homo sapien
gagatttgctgaaactaaccttaaa

SEQ ID NO: 585191 - DNA, 25 bp, Homo sapien
tgaactgagtctctcgcaagggtgg

SEQ ID NO: 585192 - DNA, 25 bp, Homo sapien
cagactttggcactgcacatgggag

SEQ ID NO: 585193 - DNA, 25 bp, Homo sapien
ccaaagaccaggttgaggagaggct

SEQ ID NO: 585194 - DNA, 25 bp, Homo sapien
gaggcagtactctataatccatagg

SEQ ID NO: 585195 - DNA, 25 bp, Homo sapien
cagccaattggcacgaatccatgct

SEQ ID NO: 585196 - DNA, 25 bp, Homo sapien
gcttgacctgatatcccttgggaag

SEQ ID NO: 585197 - DNA, 25 bp, Homo sapien
gcacgaatccatgcttgacctgata

SEQ ID NO: 585198 - DNA, 25 bp, Homo sapien
ctggaatacacagccaattggcacg

SEQ ID NO: 585199 - DNA, 25 bp, Homo sapien
cttccccatctactgtcgtacactg

SEQ ID NO: 585200 - DNA, 25 bp, Homo sapien
tctactgtcgtacactgcttctcat

SEQ ID NO: 585201 - DNA, 25 bp, Homo sapien
cattcatcagtttgatgccaaccaa

SEQ ID NO: 585202 - DNA, 25 bp, Homo sapien
tcattcatcagtttgatgccaacca

SEQ ID NO: 585203 - DNA, 25 bp, Homo sapien
ccaaaacgttcatgctactgttccc

SEQ ID NO: 585204 - DNA, 25 bp, Homo sapien
ttcgtgaaaggttcttaaatcaatg

SEQ ID NO: 585205 - DNA, 25 bp, Homo sapien
agctgcagaaggttcgtgaaaggtt

SEQ ID NO: 585206 - DNA, 25 bp, Homo sapien
gcagaaggttcgtgaaaggttctta

SEQ ID NO: 585207 - DNA, 25 bp, Homo sapien
tcgtgaaaggttcttaaatcaatgc

SEQ ID NO: 585208 - DNA, 25 bp, Homo sapien
cgccagagccctttgatccccccat

SEQ ID NO: 585209 - DNA, 25 bp, Homo sapien
ctgggtcccgccagagccctttgat

SEQ ID NO: 585210 - DNA, 25 bp, Homo sapien
ggtcccgccagagccctttgatccc

SEQ ID NO: 585211 - DNA, 25 bp, Homo sapien
ccgccagagccctttgatcccccca

SEQ ID NO: 585212 - DNA, 25 bp, Homo sapien
ttgaaaagcccagtccccacgctcg

SEQ ID NO: 585213 - DNA, 25 bp, Homo sapien
cattgaaaagcccagtccccacgct

SEQ ID NO: 585214 - DNA, 25 bp, Homo sapien
gcccgtcattgaaaagcccagtccc

SEQ ID NO: 585215 - DNA, 25 bp, Homo sapien
ccccgcccgtcattgaaaagcccag

SEQ ID NO: 585216 - DNA, 25 bp, Homo sapien
aggtgacacccggaagcgcgcccaa

SEQ ID NO: 585217 - DNA, 25 bp, Homo sapien
caactggccggtccgactcggtcgg

SEQ ID NO: 585218 - DNA, 25 bp, Homo sapien
gccggtccgactcggtcggctgcta

SEQ ID NO: 585219 - DNA, 25 bp, Homo sapien
tcggctgctacccaccccacgtcgg

SEQ ID NO: 585220 - DNA, 25 bp, Homo sapien
tcgcgactctgagggcggctccgca

SEQ ID NO: 585221 - DNA, 25 bp, Homo sapien
cctcgcgactctgagggcggctccg

SEQ ID NO: 585222 - DNA, 25 bp, Homo sapien
ggcctcgcgactctgagggcggctc

SEQ ID NO: 585223 - DNA, 25 bp, Homo sapien
cggcctcgcgactctgagggcggct

SEQ ID NO: 585224 - DNA, 25 bp, Homo sapien
ccgggtgacgcgctgcaccacggcc

SEQ ID NO: 585225 - DNA, 25 bp, Homo sapien
tggcccgggtgacgcgctgcaccac

SEQ ID NO: 585226 - DNA, 25 bp, Homo sapien
gggtgacgcgctgcaccacggcctt

SEQ ID NO: 585227 - DNA, 25 bp, Homo sapien
acgctggcccgggtgacgcgctgca

SEQ ID NO: 585228 - DNA, 25 bp, Homo sapien
aaggatggcgcaggaagacccccca

SEQ ID NO: 585229 - DNA, 25 bp, Homo sapien
ccgcagcggccccaaggatggcgca

SEQ ID NO: 585230 - DNA, 25 bp, Homo sapien
gcaagacagccggtcgcgggggtca

SEQ ID NO: 585231 - DNA, 25 bp, Homo sapien
cgcgaaggggaccaggctcgcggag

SEQ ID NO: 585232 - DNA, 25 bp, Homo sapien
cgcgccggggccggtcgggcacgtg

SEQ ID NO: 585233 - DNA, 25 bp, Homo sapien
ctggggactcgcggctgcgcggacc

SEQ ID NO: 585234 - DNA, 25 bp, Homo sapien
gccgcgctgccccgaagccggccct

SEQ ID NO: 585235 - DNA, 25 bp, Homo sapien
tctgatgcccaaccgagacgaaagt

SEQ ID NO: 585236 - DNA, 25 bp, Homo sapien
gtgcctgctccggaaatgctctaag

SEQ ID NO: 585237 - DNA, 25 bp, Homo sapien
taggctccagtcacgtacgtgcacg

SEQ ID NO: 585238 - DNA, 25 bp, Homo sapien
tacgtgcacgcaactgtcaaagctc

SEQ ID NO: 585239 - DNA, 25 bp, Homo sapien
tcttcagttgcaatggcaagagacc

SEQ ID NO: 585240 - DNA, 25 bp, Homo sapien
gagaccacctgctattcagatccca

SEQ ID NO: 585241 - DNA, 25 bp, Homo sapien
tagattcagctcatcaagtagactg

SEQ ID NO: 585242 - DNA, 25 bp, Homo sapien
gactatgtcatgttacaatacactg

SEQ ID NO: 585243 - DNA, 25 bp, Homo sapien
tctggtcctgggaactcaccatatt

SEQ ID NO: 585244 - DNA, 25 bp, Homo sapien
acctaggttggtccatccctcctga

SEQ ID NO: 585245 - DNA, 25 bp, Homo sapien
tgacagcaggtcagcatagtgtact

SEQ ID NO: 585246 - DNA, 25 bp, Homo sapien
gggactatggatgcacgccatcata

SEQ ID NO: 585247 - DNA, 25 bp, Homo sapien
acatatgccccttccaatggcacta

SEQ ID NO: 585248 - DNA, 25 bp, Homo sapien
catatgccccttccaatggcactaa

SEQ ID NO: 585249 - DNA, 25 bp, Homo sapien
cacatatgccccttccaatggcact

SEQ ID NO: 585250 - DNA, 25 bp, Homo sapien
tacacgcaggtttagaatctttcgg

SEQ ID NO: 585251 - DNA, 25 bp, Homo sapien
gaatctcgtactgtttgtccatcac

SEQ ID NO: 585252 - DNA, 25 bp, Homo sapien
tggagggtaaactggctgacacaca

SEQ ID NO: 585253 - DNA, 25 bp, Homo sapien
gaagctgttgtagaagccctctgcc

SEQ ID NO: 585254 - DNA, 25 bp, Homo sapien
gattactcagaaatggaatgattcc

SEQ ID NO: 585255 - DNA, 25 bp, Homo sapien
gagattactcagaaatggaatgatt

SEQ ID NO: 585256 - DNA, 25 bp, Homo sapien
tactcagaaatggaatgattccaca

SEQ ID NO: 585257 - DNA, 25 bp, Homo sapien
catctgagattactcagaaatggaa

SEQ ID NO: 585258 - DNA, 25 bp, Homo sapien
ttccatccgtacagatgataaatcc

SEQ ID NO: 585259 - DNA, 25 bp, Homo sapien
cagtatatgcttcaccttgtttatc

SEQ ID NO: 585260 - DNA, 25 bp, Homo sapien
gtgaatttccatccgtacagatgat

SEQ ID NO: 585261 - DNA, 25 bp, Homo sapien
catccgtacagatgataaatccaaa

SEQ ID NO: 585262 - DNA, 25 bp, Homo sapien
cacctgcatgtaggccccaaacttg

SEQ ID NO: 585263 - DNA, 25 bp, Homo sapien
cacaggcccatcattctgaatgtgc

SEQ ID NO: 585264 - DNA, 25 bp, Homo sapien
tgtgcacctgcatgtaggccccaaa

SEQ ID NO: 585265 - DNA, 25 bp, Homo sapien
gcccatcattctgaatgtgcacctg

SEQ ID NO: 585266 - DNA, 25 bp, Homo sapien
gtcagaggtagcagtgccgggagct

SEQ ID NO: 585267 - DNA, 25 bp, Homo sapien
ggagctggcgattccagctctatgg

SEQ ID NO: 585268 - DNA, 25 bp, Homo sapien
ctttgggtcagaggtagcagtgccg

SEQ ID NO: 585269 - DNA, 25 bp, Homo sapien
cagtgccgggagctggcgattccag

SEQ ID NO: 585270 - DNA, 25 bp, Homo sapien
gcaccgtaaacatgcactcttggga

SEQ ID NO: 585271 - DNA, 25 bp, Homo sapien
tcatgagagcttacaaattggcagc

SEQ ID NO: 585272 - DNA, 25 bp, Homo sapien
cattcggaatgggtgaaccggccaa

SEQ ID NO: 585273 - DNA, 25 bp, Homo sapien
gaattcaaaggcaggacgaggcaag

SEQ ID NO: 585274 - DNA, 25 bp, Homo sapien
caggttgcccagcttcacgtttcta

SEQ ID NO: 585275 - DNA, 25 bp, Homo sapien
tcaggctttgaacaggttgcccagc

SEQ ID NO: 585276 - DNA, 25 bp, Homo sapien
cccttactgccgcatcactggccat

SEQ ID NO: 585277 - DNA, 25 bp, Homo sapien
tttctatcacgctgtccccttactg

SEQ ID NO: 585278 - DNA, 25 bp, Homo sapien
tcagcccaggaaagggtagctctgc

SEQ ID NO: 585279 - DNA, 25 bp, Homo sapien
tgacgtcctgggaaacaaggctcca

SEQ ID NO: 585280 - DNA, 25 bp, Homo sapien
aaaaccagagggagtagccagaggc

SEQ ID NO: 585281 - DNA, 25 bp, Homo sapien
aactaaatgccgtgtggaatcctgc

SEQ ID NO: 585282 - DNA, 25 bp, Homo sapien
cacctactggagagctaggggcaga

SEQ ID NO: 585283 - DNA, 25 bp, Homo sapien
gggcagagcgcagtgcaatgttcag

SEQ ID NO: 585284 - DNA, 25 bp, Homo sapien
gaagttgatgcaagacaatttgtgt

SEQ ID NO: 585285 - DNA, 25 bp, Homo sapien
tggtccatgtaaatgaagttgatgc

SEQ ID NO: 585286 - DNA, 25 bp, Homo sapien
tgtgctcctcctatcaacacaaaag

SEQ ID NO: 585287 - DNA, 25 bp, Homo sapien
cattactgattggaatataatggaa

SEQ ID NO: 585288 - DNA, 25 bp, Homo sapien
ggaaactccttctaattcagaagaa

SEQ ID NO: 585289 - DNA, 25 bp, Homo sapien
gaaacacgtgtttatctatcagtaa

SEQ ID NO: 585290 - DNA, 25 bp, Homo sapien
taattgcgttgagaaggcaccatat

SEQ ID NO: 585291 - DNA, 25 bp, Homo sapien
gcgttgagaaggcaccatattctgg

SEQ ID NO: 585292 - DNA, 25 bp, Homo sapien
atctgtaattgcgttgagaaggcac

SEQ ID NO: 585293 - DNA, 25 bp, Homo sapien
tgtaattgcgttgagaaggcaccat

SEQ ID NO: 585294 - DNA, 25 bp, Homo sapien
tattatgtgagtatcatgttcctga

SEQ ID NO: 585295 - DNA, 25 bp, Homo sapien
ggtttcatgacccaacaatgacacg

SEQ ID NO: 585296 - DNA, 25 bp, Homo sapien
tgacacgaatggttaataatagcct

SEQ ID NO: 585297 - DNA, 25 bp, Homo sapien
ctgacttagcaaaggagaagtggaa

SEQ ID NO: 585298 - DNA, 25 bp, Homo sapien
ctttttgccatgaggccttctcaga

SEQ ID NO: 585299 - DNA, 25 bp, Homo sapien
gaagccatggaagcctgctggcctg

SEQ ID NO: 585300 - DNA, 25 bp, Homo sapien
ccaggcactgcaggtctttttgcca

SEQ ID NO: 585301 - DNA, 25 bp, Homo sapien
gacagtcagtactcctcaccaggca

SEQ ID NO: 585302 - DNA, 25 bp, Homo sapien
cccctggtccccatgtcaaacagca

SEQ ID NO: 585303 - DNA, 25 bp, Homo sapien
ccacagcctggaggtagtcgctgac

SEQ ID NO: 585304 - DNA, 25 bp, Homo sapien
tccacagcctggaggtagtcgctga

SEQ ID NO: 585305 - DNA, 25 bp, Homo sapien
gaatggcacccaaaatccctgagca

SEQ ID NO: 585306 - DNA, 25 bp, Homo sapien
catggatccagcaaccggaaggtat

SEQ ID NO: 585307 - DNA, 25 bp, Homo sapien
gacatttggcaaggatacagctttc

SEQ ID NO: 585308 - DNA, 25 bp, Homo sapien
gccagacttcaaaatggtccccagt

SEQ ID NO: 585309 - DNA, 25 bp, Homo sapien
tgcagacagagggctgcgaggtggc

SEQ ID NO: 585310 - DNA, 25 bp, Homo sapien
cagacagagggctgcgaggtggccc

SEQ ID NO: 585311 - DNA, 25 bp, Homo sapien
cctgcagacagagggctgcgaggtg

SEQ ID NO: 585312 - DNA, 25 bp, Homo sapien
acagagggctgcgaggtggccccat

SEQ ID NO: 585313 - DNA, 25 bp, Homo sapien
taagccatctaatggatgaccagac

SEQ ID NO: 585314 - DNA, 25 bp, Homo sapien
gcccagggtctcactagctttttct

SEQ ID NO: 585315 - DNA, 25 bp, Homo sapien
ggctcactccgggtttaactctgaa

SEQ ID NO: 585316 - DNA, 25 bp, Homo sapien
acctggttaagggtgtggctcactc

SEQ ID NO: 585317 - DNA, 25 bp, Homo sapien
gacaaatcaccaccttgaaatctgg

SEQ ID NO: 585318 - DNA, 25 bp, Homo sapien
gacaagcaaatccagagtggcagtt

SEQ ID NO: 585319 - DNA, 25 bp, Homo sapien
atcaaaactgtttgtggctgggtgc

SEQ ID NO: 585320 - DNA, 25 bp, Homo sapien
caacaggatttgagaaacttccgac

SEQ ID NO: 585321 - DNA, 25 bp, Homo sapien
tagcacgagtattagaaatgcacac

SEQ ID NO: 585322 - DNA, 25 bp, Homo sapien
aacacagctatagtctttttcctag

SEQ ID NO: 585323 - DNA, 25 bp, Homo sapien
gaaatgcacacaatgtttctaattt

SEQ ID NO: 585324 - DNA, 25 bp, Homo sapien
ggtccacgcattaaactttaacaca

SEQ ID NO: 585325 - DNA, 25 bp, Homo sapien
cagaggtaccctaaagaaagtctat

SEQ ID NO: 585326 - DNA, 25 bp, Homo sapien
tctcaactgtatctgttcacatggg

SEQ ID NO: 585327 - DNA, 25 bp, Homo sapien
aactaaagcctcagttgcatccctg

SEQ ID NO: 585328 - DNA, 25 bp, Homo sapien
tagaaccagcttctttattccgaaa

SEQ ID NO: 585329 - DNA, 25 bp, Homo sapien
taagtggcagcctgaaaactggctt

SEQ ID NO: 585330 - DNA, 25 bp, Homo sapien
gctgaccaggtgtgagattctccaa

SEQ ID NO: 585331 - DNA, 25 bp, Homo sapien
gagtaggagtaatgcatgcacccca

SEQ ID NO: 585332 - DNA, 25 bp, Homo sapien
cagatgcaggcaacaaggtgggaca

SEQ ID NO: 585333 - DNA, 25 bp, Homo sapien
caacaatgattaggttacatagcaa

SEQ ID NO: 585334 - DNA, 25 bp, Homo sapien
catagcaagattttacaatggacct

SEQ ID NO: 585335 - DNA, 25 bp, Homo sapien
ggacctcaggcatcgcactgtatat

SEQ ID NO: 585336 - DNA, 25 bp, Homo sapien
gacaaatcggcaattcgagagactt

SEQ ID NO: 585337 - DNA, 25 bp, Homo sapien
gtgatgaaagggctcagattcttca

SEQ ID NO: 585338 - DNA, 25 bp, Homo sapien
gctgattcttaaataaggtttctac

SEQ ID NO: 585339 - DNA, 25 bp, Homo sapien
ctgctggcactgcggtcttcttttc

SEQ ID NO: 585340 - DNA, 25 bp, Homo sapien
gctgctgtttttcgagctttgacag

SEQ ID NO: 585341 - DNA, 25 bp, Homo sapien
ctggcactgcggtcttcttttcggg

SEQ ID NO: 585342 - DNA, 25 bp, Homo sapien
agaggacacgtcgccctcagccccg

SEQ ID NO: 585343 - DNA, 25 bp, Homo sapien
agtgcttgacccttatactctcttg

SEQ ID NO: 585344 - DNA, 25 bp, Homo sapien
taacacactaacttttgtctccatc

SEQ ID NO: 585345 - DNA, 25 bp, Homo sapien
tcagcagctattccctcctattcat

SEQ ID NO: 585346 - DNA, 25 bp, Homo sapien
ttaaggaagctatggatgaacgctg

SEQ ID NO: 585347 - DNA, 25 bp, Homo sapien
actgtgcccaattacaactaatgta

SEQ ID NO: 585348 - DNA, 25 bp, Homo sapien
cactgtgcccaattacaactaatgt

SEQ ID NO: 585349 - DNA, 25 bp, Homo sapien
gtaaaagaatgacctagagaaatgt

SEQ ID NO: 585350 - DNA, 25 bp, Homo sapien
tatacagtatgtctccaactttgta

SEQ ID NO: 585351 - DNA, 25 bp, Homo sapien
gatgcaggacagtagctgcagcaca

SEQ ID NO: 585352 - DNA, 25 bp, Homo sapien
tgtgcagatggaaattataaagctc

SEQ ID NO: 585353 - DNA, 25 bp, Homo sapien
ccaaattcttaaagtagtgtaggtg

SEQ ID NO: 585354 - DNA, 25 bp, Homo sapien
ttttgcagagctattcaggttccca

SEQ ID NO: 585355 - DNA, 25 bp, Homo sapien
tagtgtaggtgcttagcatcttgaa

SEQ ID NO: 585356 - DNA, 25 bp, Homo sapien
aaagtagtgtaggtgcttagcatct

SEQ ID NO: 585357 - DNA, 25 bp, Homo sapien
ctaccacatgcgcacccgccccctg

SEQ ID NO: 585358 - DNA, 25 bp, Homo sapien
ttctaccacatgcgcacccgccccc

SEQ ID NO: 585359 - DNA, 25 bp, Homo sapien
accacatgcgcacccgccccctggc

SEQ ID NO: 585360 - DNA, 25 bp, Homo sapien
cttctaccacatgcgcacccgcccc

SEQ ID NO: 585361 - DNA, 25 bp, Homo sapien
tcttgacacttcaacacgggccctg

SEQ ID NO: 585362 - DNA, 25 bp, Homo sapien
tggacacgcagaatacaccacagtg

SEQ ID NO: 585363 - DNA, 25 bp, Homo sapien
cagtgtgagtgtattggagaacccc

SEQ ID NO: 585364 - DNA, 25 bp, Homo sapien
caaaagcaagccaagatgtggtaga

SEQ ID NO: 585365 - DNA, 25 bp, Homo sapien
gagatgagggtgtttaactctattt

SEQ ID NO: 585366 - DNA, 25 bp, Homo sapien
agatgagggtgtttaactctatttt

SEQ ID NO: 585367 - DNA, 25 bp, Homo sapien
aatgctgtcagcgatagaggtatca

SEQ ID NO: 585368 - DNA, 25 bp, Homo sapien
tctggaccaatgctgtcagcgatag

SEQ ID NO: 585369 - DNA, 25 bp, Homo sapien
cagcgatagaggtatcattttgatg

SEQ ID NO: 585370 - DNA, 25 bp, Homo sapien
tgctttctctggaccaatgctgtca

SEQ ID NO: 585371 - DNA, 25 bp, Homo sapien
ttaaatgtcacctttttacaacatc

SEQ ID NO: 585372 - DNA, 25 bp, Homo sapien
tcagttaaatgtcacctttttacaa

SEQ ID NO: 585373 - DNA, 25 bp, Homo sapien
gatttgagcttctacatttgcggga

SEQ ID NO: 585374 - DNA, 25 bp, Homo sapien
gacagtccctaatgtcgggcaccta

SEQ ID NO: 585375 - DNA, 25 bp, Homo sapien
ctgagagctgaatctgccgcaggcc

SEQ ID NO: 585376 - DNA, 25 bp, Homo sapien
tagattcaaccagagagacggaagc

SEQ ID NO: 585377 - DNA, 25 bp, Homo sapien
cattggctgggattggctttcacgc

SEQ ID NO: 585378 - DNA, 25 bp, Homo sapien
cataaaagcggtcctgaggtagggc

SEQ ID NO: 585379 - DNA, 25 bp, Homo sapien
tcttcatatgtaagcccagtgcgtg

SEQ ID NO: 585380 - DNA, 25 bp, Homo sapien
gacaggaccctctatggctgaaaga

SEQ ID NO: 585381 - DNA, 25 bp, Homo sapien
aatgtacaaggtgtatcttcccaca

SEQ ID NO: 585382 - DNA, 25 bp, Homo sapien
atatcacaagtatactcaactggca

SEQ ID NO: 585383 - DNA, 25 bp, Homo sapien
cacaagtatactcaactggcaatat

SEQ ID NO: 585384 - DNA, 25 bp, Homo sapien
cattttctaagtgatgcacttttcc

SEQ ID NO: 585385 - DNA, 25 bp, Homo sapien
cacaggtcagattgtgacatcaaag

SEQ ID NO: 585386 - DNA, 25 bp, Homo sapien
gcagctgtgaccagattaataccca

SEQ ID NO: 585387 - DNA, 25 bp, Homo sapien
gaccttgccatctagtctgtgagca

SEQ ID NO: 585388 - DNA, 25 bp, Homo sapien
tgtgctagtcccctggaccttgcca

SEQ ID NO: 585389 - DNA, 25 bp, Homo sapien
gaacctcgaactggcccaccagagg

SEQ ID NO: 585390 - DNA, 25 bp, Homo sapien
gaacccagaacctcgaactggccca

SEQ ID NO: 585391 - DNA, 25 bp, Homo sapien
tgaacccagaacctcgaactggccc

SEQ ID NO: 585392 - DNA, 25 bp, Homo sapien
ccagaacctcgaactggcccaccag

SEQ ID NO: 585393 - DNA, 25 bp, Homo sapien
gatcaatggtccaccgcaaaatggt

SEQ ID NO: 585394 - DNA, 25 bp, Homo sapien
gaagcctaatgtcctgaaacactgg

SEQ ID NO: 585395 - DNA, 25 bp, Homo sapien
cagactccgggattgtaaagacagt

SEQ ID NO: 585396 - DNA, 25 bp, Homo sapien
caaggaaagccttctgcgggttcat

SEQ ID NO: 585397 - DNA, 25 bp, Homo sapien
agcttccagctaagcagaaccttgc

SEQ ID NO: 585398 - DNA, 25 bp, Homo sapien
tccagctaagcagaaccttgccact

SEQ ID NO: 585399 - DNA, 25 bp, Homo sapien
ttccagctaagcagaaccttgccac

SEQ ID NO: 585400 - DNA, 25 bp, Homo sapien
agctaagcagaaccttgccactcac

SEQ ID NO: 585401 - DNA, 25 bp, Homo sapien
aagttcttccttggtatttttgcat

SEQ ID NO: 585402 - DNA, 25 bp, Homo sapien
agttcttccttggtatttttgcatg

SEQ ID NO: 585403 - DNA, 25 bp, Homo sapien
gaagttcttccttggtatttttgca

SEQ ID NO: 585404 - DNA, 25 bp, Homo sapien
gttcttccttggtatttttgcatgc

SEQ ID NO: 585405 - DNA, 25 bp, Homo sapien
atcttcagattaagcatgatttcca

SEQ ID NO: 585406 - DNA, 25 bp, Homo sapien
ttcagattaagcatgatttccactc

SEQ ID NO: 585407 - DNA, 25 bp, Homo sapien
gatttccactcgacattatcatcga

SEQ ID NO: 585408 - DNA, 25 bp, Homo sapien
catgatttccactcgacattatcat

SEQ ID NO: 585409 - DNA, 25 bp, Homo sapien
acaacgctttttactgcttcagaac

SEQ ID NO: 585410 - DNA, 25 bp, Homo sapien
aatcaattaaacttgaataggaaga

SEQ ID NO: 585411 - DNA, 25 bp, Homo sapien
actacaacgctttttactgcttcag

SEQ ID NO: 585412 - DNA, 25 bp, Homo sapien
catcaacaggaaaatcaattaaact

SEQ ID NO: 585413 - DNA, 25 bp, Homo sapien
aaagcggagccccactgagtttgta

SEQ ID NO: 585414 - DNA, 25 bp, Homo sapien
tcctgcttcaatcgcagtgcccgat

SEQ ID NO: 585415 - DNA, 25 bp, Homo sapien
gataaaacgagccagcgacaggcag

SEQ ID NO: 585416 - DNA, 25 bp, Homo sapien
agaaagcaggatgccatagttttcc

SEQ ID NO: 585417 - DNA, 25 bp, Homo sapien
tttgaaaactggtcattgatgtgtg

SEQ ID NO: 585418 - DNA, 25 bp, Homo sapien
ttttgaaaactggtcattgatgtgt

SEQ ID NO: 585419 - DNA, 25 bp, Homo sapien
ctatacttgtggctgctgtgctctg

SEQ ID NO: 585420 - DNA, 25 bp, Homo sapien
tatacttgtggctgctgtgctctgg

SEQ ID NO: 585421 - DNA, 25 bp, Homo sapien
atacttgtggctgctgtgctctggc

SEQ ID NO: 585422 - DNA, 25 bp, Homo sapien
tacttgtggctgctgtgctctggca

SEQ ID NO: 585423 - DNA, 25 bp, Homo sapien
ctcagggtgggcttctagaaccagc

SEQ ID NO: 585424 - DNA, 25 bp, Homo sapien
tgactgttggagcttccatgtccga

SEQ ID NO: 585425 - DNA, 25 bp, Homo sapien
agtttgccacactctctggaccagt

SEQ ID NO: 585426 - DNA, 25 bp, Homo sapien
tctagaaccagcttaggactcttca

SEQ ID NO: 585427 - DNA, 25 bp, Homo sapien
cagcattgagcatgcctggaactca

SEQ ID NO: 585428 - DNA, 25 bp, Homo sapien
acagacatcttagggtaggcttgga

SEQ ID NO: 585429 - DNA, 25 bp, Homo sapien
cagatctttagtaacacctcagagt

SEQ ID NO: 585430 - DNA, 25 bp, Homo sapien
gcaattgactccagaccagggaggt

SEQ ID NO: 585431 - DNA, 25 bp, Homo sapien
cttttttaggtcataaggaacacag

SEQ ID NO: 585432 - DNA, 25 bp, Homo sapien
tttttaggtcataaggaacacagcc

SEQ ID NO: 585433 - DNA, 25 bp, Homo sapien
ttttttaggtcataaggaacacagc

SEQ ID NO: 585434 - DNA, 25 bp, Homo sapien
gcttttttaggtcataaggaacaca

SEQ ID NO: 585435 - DNA, 25 bp, Homo sapien
ggcagtataggagagaaccgcgccc

SEQ ID NO: 585436 - DNA, 25 bp, Homo sapien
agtataggagagaaccgcgccctct

SEQ ID NO: 585437 - DNA, 25 bp, Homo sapien
tataggagagaaccgcgccctctcc

SEQ ID NO: 585438 - DNA, 25 bp, Homo sapien
caggcagtataggagagaaccgcgc

SEQ ID NO: 585439 - DNA, 25 bp, Homo sapien
tacattaagtctgagccatatggag

SEQ ID NO: 585440 - DNA, 25 bp, Homo sapien
cattaagtctgagccatatggagaa

SEQ ID NO: 585441 - DNA, 25 bp, Homo sapien
aactctattgtgctacagtgtagcc

SEQ ID NO: 585442 - DNA, 25 bp, Homo sapien
gaaacctggaactctattgtgctac

SEQ ID NO: 585443 - DNA, 25 bp, Homo sapien
atcggggagtaagcctggcaagtct

SEQ ID NO: 585444 - DNA, 25 bp, Homo sapien
ggtgaattcccatatcaagtccttt

SEQ ID NO: 585445 - DNA, 25 bp, Homo sapien
agtctgagggaagatcctggtgaat

SEQ ID NO: 585446 - DNA, 25 bp, Homo sapien
agatgtgtgagattcggatgatagt

SEQ ID NO: 585447 - DNA, 25 bp, Homo sapien
ctagtctcggtgttcaggtttggag

SEQ ID NO: 585448 - DNA, 25 bp, Homo sapien
tcaactcttgcatccagggaccaca

SEQ ID NO: 585449 - DNA, 25 bp, Homo sapien
catcaactcttgcatccagggacca

SEQ ID NO: 585450 - DNA, 25 bp, Homo sapien
agtctcggtgttcaggtttggagat

SEQ ID NO: 585451 - DNA, 25 bp, Homo sapien
acactgtggtgcagaaatcttcttg

SEQ ID NO: 585452 - DNA, 25 bp, Homo sapien
tgtagctgttggatgcaccaagcca

SEQ ID NO: 585453 - DNA, 25 bp, Homo sapien
gaagctgcggttgtggctgggaaac

SEQ ID NO: 585454 - DNA, 25 bp, Homo sapien
gttggatgcaccaagccactttgcc

SEQ ID NO: 585455 - DNA, 25 bp, Homo sapien
atgccagtgcaagcaatgccacgtt

SEQ ID NO: 585456 - DNA, 25 bp, Homo sapien
gccagtgcaagcaatgccacgttgc

SEQ ID NO: 585457 - DNA, 25 bp, Homo sapien
aatgccagtgcaagcaatgccacgt

SEQ ID NO: 585458 - DNA, 25 bp, Homo sapien
tgccagtgcaagcaatgccacgttg

SEQ ID NO: 585459 - DNA, 25 bp, Homo sapien
ggaggcaaagcagagaggccacata

SEQ ID NO: 585460 - DNA, 25 bp, Homo sapien
ctaaggaggcaaagcagagaggcca

SEQ ID NO: 585461 - DNA, 25 bp, Homo sapien
aaggaggcaaagcagagaggccaca

SEQ ID NO: 585462 - DNA, 25 bp, Homo sapien
gaggcaaagcagagaggccacatac

SEQ ID NO: 585463 - DNA, 25 bp, Homo sapien
agtttgatattgtaccttgtggtca

SEQ ID NO: 585464 - DNA, 25 bp, Homo sapien
taaattgagctattgaccagtttga

SEQ ID NO: 585465 - DNA, 25 bp, Homo sapien
tgagctattgaccagtttgatattg

SEQ ID NO: 585466 - DNA, 25 bp, Homo sapien
gtaccttgtggtcagggcttggcca

SEQ ID NO: 585467 - DNA, 25 bp, Homo sapien
tcctcgccgctgcccgtctcctcgt

SEQ ID NO: 585468 - DNA, 25 bp, Homo sapien
ccgcgcgtcctcgctgcgctcccac

SEQ ID NO: 585469 - DNA, 25 bp, Homo sapien
agcagccgcgcgtcctcgctgcgct

SEQ ID NO: 585470 - DNA, 25 bp, Homo sapien
cagccgcgcgtcctcgctgcgctcc

SEQ ID NO: 585471 - DNA, 25 bp, Homo sapien
cggccgctcctgtcgcgggcggccg

SEQ ID NO: 585472 - DNA, 25 bp, Homo sapien
ggccgctcctgtcgcgggcggccgc

SEQ ID NO: 585473 - DNA, 25 bp, Homo sapien
gcggccgctcctgtcgcgggcggcc

SEQ ID NO: 585474 - DNA, 25 bp, Homo sapien
ccgctcctgtcgcgggcggccgcgg

SEQ ID NO: 585475 - DNA, 25 bp, Homo sapien
tctcgcaggctcgacagcgaccaga

SEQ ID NO: 585476 - DNA, 25 bp, Homo sapien
acgcgcgcggtcctcgtcgccggac

SEQ ID NO: 585477 - DNA, 25 bp, Homo sapien
ggctcgacagcgaccagagcagcag

SEQ ID NO: 585478 - DNA, 25 bp, Homo sapien
gcaggctcgacagcgaccagagcag

SEQ ID NO: 585479 - DNA, 25 bp, Homo sapien
agccgcagcgcccactcggggcagg

SEQ ID NO: 585480 - DNA, 25 bp, Homo sapien
agcgcccactcggggcaggcagcgt

SEQ ID NO: 585481 - DNA, 25 bp, Homo sapien
gcccactcggggcaggcagcgtgca

SEQ ID NO: 585482 - DNA, 25 bp, Homo sapien
gagccgcagcgcccactcggggcag

SEQ ID NO: 585483 - DNA, 25 bp, Homo sapien
tgttttcccactaatcgtgccactt

SEQ ID NO: 585484 - DNA, 25 bp, Homo sapien
tagacagctgaatcccaggatcgaa

SEQ ID NO: 585485 - DNA, 25 bp, Homo sapien
attttacaacagttattctcccatg

SEQ ID NO: 585486 - DNA, 25 bp, Homo sapien
gtgccacttccacggccgggatata

SEQ ID NO: 585487 - DNA, 25 bp, Homo sapien
acaccggcacggcccccttcctgat

SEQ ID NO: 585488 - DNA, 25 bp, Homo sapien
ctgatgtcagaacccaaggctacgg

SEQ ID NO: 585489 - DNA, 25 bp, Homo sapien
atgtcagaacccaaggctacgggat

SEQ ID NO: 585490 - DNA, 25 bp, Homo sapien
ttcctgatgtcagaacccaaggcta

SEQ ID NO: 585491 - DNA, 25 bp, Homo sapien
ctaggaatagccctttccaaaggtg

SEQ ID NO: 585492 - DNA, 25 bp, Homo sapien
ggcatgaactataaactggtttttc

SEQ ID NO: 585493 - DNA, 25 bp, Homo sapien
aaaggtggcatgaactataaactgg

SEQ ID NO: 585494 - DNA, 25 bp, Homo sapien
ttccaaaggtggcatgaactataaa

SEQ ID NO: 585495 - DNA, 25 bp, Homo sapien
acctgatgccaggtgagaattccct

SEQ ID NO: 585496 - DNA, 25 bp, Homo sapien
caagctgacgttgaagaggcaaggt

SEQ ID NO: 585497 - DNA, 25 bp, Homo sapien
tcatagaggttctgggcatttctga

SEQ ID NO: 585498 - DNA, 25 bp, Homo sapien
aattggtagctcctcctttgccatc

SEQ ID NO: 585499 - DNA, 25 bp, Homo sapien
attctgagcagcgttcatgggcagc

SEQ ID NO: 585500 - DNA, 25 bp, Homo sapien
gagcagcgttcatgggcagctgcat

SEQ ID NO: 585501 - DNA, 25 bp, Homo sapien
atcttccatttagagggtgagctgg

SEQ ID NO: 585502 - DNA, 25 bp, Homo sapien
ttccattctgagcagcgttcatggg

SEQ ID NO: 585503 - DNA, 25 bp, Homo sapien
gagagacacatagcgtatgcttggg

SEQ ID NO: 585504 - DNA, 25 bp, Homo sapien
tttgagtgagtcaagctggctccca

SEQ ID NO: 585505 - DNA, 25 bp, Homo sapien
tgagcttacactgaactgcccatgg

SEQ ID NO: 585506 - DNA, 25 bp, Homo sapien
ctgggcagactgcacttttgagtga

SEQ ID NO: 585507 - DNA, 25 bp, Homo sapien
gttcccggcacagtgcacagcttga

SEQ ID NO: 585508 - DNA, 25 bp, Homo sapien
acattgttgcgtgccttcaaagttc

SEQ ID NO: 585509 - DNA, 25 bp, Homo sapien
gatctctccatctctaaagcccaat

SEQ ID NO: 585510 - DNA, 25 bp, Homo sapien
cacagacattgttgcgtgccttcaa

SEQ ID NO: 585511 - DNA, 25 bp, Homo sapien
tgcatgttggcctaattagtcaggg

SEQ ID NO: 585512 - DNA, 25 bp, Homo sapien
gaggccgctccacaaagctatactt

SEQ ID NO: 585513 - DNA, 25 bp, Homo sapien
ggaggcagcaggctcacatgtcaca

SEQ ID NO: 585514 - DNA, 25 bp, Homo sapien
cacatgtcacgggtggaggcagtct

SEQ ID NO: 585515 - DNA, 25 bp, Homo sapien
gggatacggagaggcgcccacactg

SEQ ID NO: 585516 - DNA, 25 bp, Homo sapien
atacggagaggcgcccacactggct

SEQ ID NO: 585517 - DNA, 25 bp, Homo sapien
gtgaaggggatacggagaggcgccc

SEQ ID NO: 585518 - DNA, 25 bp, Homo sapien
gagaggcgcccacactggctatcct

SEQ ID NO: 585519 - DNA, 25 bp, Homo sapien
tctgggcatcaccttggacatccat

SEQ ID NO: 585520 - DNA, 25 bp, Homo sapien
caccttcctgtcattgcccaaggcc

SEQ ID NO: 585521 - DNA, 25 bp, Homo sapien
ggcacagtgcagcttctagcacctt

SEQ ID NO: 585522 - DNA, 25 bp, Homo sapien
caaggcctttttctgggcatcacct

SEQ ID NO: 585523 - DNA, 25 bp, Homo sapien
tgccgtggtgctcgacccatattac

SEQ ID NO: 585524 - DNA, 25 bp, Homo sapien
agcatgactctctctttaggtaccg

SEQ ID NO: 585525 - DNA, 25 bp, Homo sapien
ctttaggtaccgtgtagataggcag

SEQ ID NO: 585526 - DNA, 25 bp, Homo sapien
taggcagatgccgtggtgctcgacc

SEQ ID NO: 585527 - DNA, 25 bp, Homo sapien
ttctgtcttcccctacgaggtccat

SEQ ID NO: 585528 - DNA, 25 bp, Homo sapien
tttctgtcttcccctacgaggtcca

SEQ ID NO: 585529 - DNA, 25 bp, Homo sapien
cactttctgtcttcccctacgaggt

SEQ ID NO: 585530 - DNA, 25 bp, Homo sapien
ccactttctgtcttcccctacgagg

SEQ ID NO: 585531 - DNA, 25 bp, Homo sapien
catcttcggaagtcagagtgtcgtt

SEQ ID NO: 585532 - DNA, 25 bp, Homo sapien
tggttcggtgcagttcttgctgttc

SEQ ID NO: 585533 - DNA, 25 bp, Homo sapien
cagagtgtcgttcacctgcatcagc

SEQ ID NO: 585534 - DNA, 25 bp, Homo sapien
cttgctgttccggagtccggcatct

SEQ ID NO: 585535 - DNA, 25 bp, Homo sapien
tgctgcccatgagtagtcagcactg

SEQ ID NO: 585536 - DNA, 25 bp, Homo sapien
ctgctgcccatgagtagtcagcact

SEQ ID NO: 585537 - DNA, 25 bp, Homo sapien
gctgcccatgagtagtcagcactgt

SEQ ID NO: 585538 - DNA, 25 bp, Homo sapien
ctgcccatgagtagtcagcactgtt

SEQ ID NO: 585539 - DNA, 25 bp, Homo sapien
acattagagatagaatgttccatat

SEQ ID NO: 585540 - DNA, 25 bp, Homo sapien
tcacagctcctcattccctttgatc

SEQ ID NO: 585541 - DNA, 25 bp, Homo sapien
tttctgtttagtaacattagagata

SEQ ID NO: 585542 - DNA, 25 bp, Homo sapien
cacagctcctcattccctttgatct

SEQ ID NO: 585543 - DNA, 25 bp, Homo sapien
caagtgctgaggcaactgaggaccc

SEQ ID NO: 585544 - DNA, 25 bp, Homo sapien
tacaggtggacaaccctaagtggct

SEQ ID NO: 585545 - DNA, 25 bp, Homo sapien
gaggttccaatccagtagggcgcag

SEQ ID NO: 585546 - DNA, 25 bp, Homo sapien
gctgaacacacatagaccctgctgg

SEQ ID NO: 585547 - DNA, 25 bp, Homo sapien
tattaatgatcaccaagggtgtgcc

SEQ ID NO: 585548 - DNA, 25 bp, Homo sapien
gggaacaagaacttagcaaggcact

SEQ ID NO: 585549 - DNA, 25 bp, Homo sapien
tgatggcagagcaacatattaatga

SEQ ID NO: 585550 - DNA, 25 bp, Homo sapien
caaatcaacttgtgtgtcaggaacc

SEQ ID NO: 585551 - DNA, 25 bp, Homo sapien
ggttcactctcccacatccattttc

SEQ ID NO: 585552 - DNA, 25 bp, Homo sapien
tctttgtgttctggtggaggggact

SEQ ID NO: 585553 - DNA, 25 bp, Homo sapien
atccattttctaagggccctctttg

SEQ ID NO: 585554 - DNA, 25 bp, Homo sapien
ggaggggacttctgtgtcatgtgtc

SEQ ID NO: 585555 - DNA, 25 bp, Homo sapien
aggagttacaggctgcctgatggca

SEQ ID NO: 585556 - DNA, 25 bp, Homo sapien
tgacattccttccggaagactgtga

SEQ ID NO: 585557 - DNA, 25 bp, Homo sapien
ggcagagaagcttccgcagcaactc

SEQ ID NO: 585558 - DNA, 25 bp, Homo sapien
agtacggatgggaagcgtgctggca

SEQ ID NO: 585559 - DNA, 25 bp, Homo sapien
caatcagaattttgttcctaccagc

SEQ ID NO: 585560 - DNA, 25 bp, Homo sapien
aaaaagagttatcaatctgctttgc

SEQ ID NO: 585561 - DNA, 25 bp, Homo sapien
ccattttccctatgaactactatac

SEQ ID NO: 585562 - DNA, 25 bp, Homo sapien
ctgtccatgtcactaatggccttgg

SEQ ID NO: 585563 - DNA, 25 bp, Homo sapien
cctgtcatacattttaaccattgaa

SEQ ID NO: 585564 - DNA, 25 bp, Homo sapien
tctgatataatgcacctgtcataca

SEQ ID NO: 585565 - DNA, 25 bp, Homo sapien
cttttcttctgatataatgcacctg

SEQ ID NO: 585566 - DNA, 25 bp, Homo sapien
tcatagtcacacttgtctatttctc

SEQ ID NO: 585567 - DNA, 25 bp, Homo sapien
gctcggccgatgtgtggactgttaa

SEQ ID NO: 585568 - DNA, 25 bp, Homo sapien
tgtatgaggtactaggaaaagcact

SEQ ID NO: 585569 - DNA, 25 bp, Homo sapien
cacatgcttacagagtatgcttgag

SEQ ID NO: 585570 - DNA, 25 bp, Homo sapien
gactcagagaggctaacatgaaccc

SEQ ID NO: 585571 - DNA, 25 bp, Homo sapien
tcagggagttccacacgtctgagaa

SEQ ID NO: 585572 - DNA, 25 bp, Homo sapien
gaagaaatccgatatgcaaccagcc

SEQ ID NO: 585573 - DNA, 25 bp, Homo sapien
ggctgtggaacttgtgagaatgtca

SEQ ID NO: 585574 - DNA, 25 bp, Homo sapien
tcataaaccaatccaagggctgtgg

SEQ ID NO: 585575 - DNA, 25 bp, Homo sapien
cttcgacgttatctcttccgtcaag

SEQ ID NO: 585576 - DNA, 25 bp, Homo sapien
caccttcatctggaagaattggcat

SEQ ID NO: 585577 - DNA, 25 bp, Homo sapien
ttccgtcaagccaccttcatctgga

SEQ ID NO: 585578 - DNA, 25 bp, Homo sapien
tcgacgttatctcttccgtcaagcc

SEQ ID NO: 585579 - DNA, 25 bp, Homo sapien
tgtgaaaccgaaaccccacatcagg

SEQ ID NO: 585580 - DNA, 25 bp, Homo sapien
cgccttttgccagcccataaagaat

SEQ ID NO: 585581 - DNA, 25 bp, Homo sapien
tctgaagtgtgaaacgccttttgcc

SEQ ID NO: 585582 - DNA, 25 bp, Homo sapien
tggcttctagcagaacccgaacaga

SEQ ID NO: 585583 - DNA, 25 bp, Homo sapien
tgggtgtatgaggaaatccaacaac

SEQ ID NO: 585584 - DNA, 25 bp, Homo sapien
agctaagcccacaggcaggcgatga

SEQ ID NO: 585585 - DNA, 25 bp, Homo sapien
ctttgcaaaagtatttaggagtggg

SEQ ID NO: 585586 - DNA, 25 bp, Homo sapien
gagatgatccccacgtttgggtgta

SEQ ID NO: 585587 - DNA, 25 bp, Homo sapien
cacggtgttagcactgttggaggtc

SEQ ID NO: 585588 - DNA, 25 bp, Homo sapien
gctattagcacggtgttagcactgt

SEQ ID NO: 585589 - DNA, 25 bp, Homo sapien
tagcactgttggaggtctccccagt

SEQ ID NO: 585590 - DNA, 25 bp, Homo sapien
tctttgctattagcacggtgttagc

SEQ ID NO: 585591 - DNA, 25 bp, Homo sapien
gaagcatctgagatatccagcagcc

SEQ ID NO: 585592 - DNA, 25 bp, Homo sapien
ccatataaatgtagtgcagtgctga

SEQ ID NO: 585593 - DNA, 25 bp, Homo sapien
ttttcccaacaaagatctggaagca

SEQ ID NO: 585594 - DNA, 25 bp, Homo sapien
cagtgctgatggattgttgcaaagc

SEQ ID NO: 585595 - DNA, 25 bp, Homo sapien
tgtatctagaaccaggctcacctgg

SEQ ID NO: 585596 - DNA, 25 bp, Homo sapien
tatcgtggttcctctacagctgtgt

SEQ ID NO: 585597 - DNA, 25 bp, Homo sapien
tgttttctgcaggagctatcgtggt

SEQ ID NO: 585598 - DNA, 25 bp, Homo sapien
gagattaaagaaacgccccacagtg

SEQ ID NO: 585599 - DNA, 25 bp, Homo sapien
gccaatcggctcctgtgaccactat

SEQ ID NO: 585600 - DNA, 25 bp, Homo sapien
tgtgaccactatccagaggaatttt

SEQ ID NO: 585601 - DNA, 25 bp, Homo sapien
tatccagaggaattttctggtagct

SEQ ID NO: 585602 - DNA, 25 bp, Homo sapien
taaggaactcctctttggggagcca

SEQ ID NO: 585603 - DNA, 25 bp, Homo sapien
ggccaatgcaccaatgccaagtgga

SEQ ID NO: 585604 - DNA, 25 bp, Homo sapien
tgggcccagggctatctgagatcct

SEQ ID NO: 585605 - DNA, 25 bp, Homo sapien
tttctcagacaaacacggccaatgc

SEQ ID NO: 585606 - DNA, 25 bp, Homo sapien
ggatcattccaaaacagaactagct

SEQ ID NO: 585607 - DNA, 25 bp, Homo sapien
tgggaggtcacctcagccattggcc

SEQ ID NO: 585608 - DNA, 25 bp, Homo sapien
tcacctttaccaagtgcaggagaga

SEQ ID NO: 585609 - DNA, 25 bp, Homo sapien
tgtggagctcttgcctcattaaaaa

SEQ ID NO: 585610 - DNA, 25 bp, Homo sapien
gcgcctggcccctggtttgacagat

SEQ ID NO: 585611 - DNA, 25 bp, Homo sapien
actcgcctgcaggacttttcatcca

SEQ ID NO: 585612 - DNA, 25 bp, Homo sapien
tctcgtggccaactcagccgtgaac

SEQ ID NO: 585613 - DNA, 25 bp, Homo sapien
tacaatccactgctcgctggtgacg

SEQ ID NO: 585614 - DNA, 25 bp, Homo sapien
cagaaataattaggaacacagggtc

SEQ ID NO: 585615 - DNA, 25 bp, Homo sapien
ccagtaactgtggaatgagaaaaca

SEQ ID NO: 585616 - DNA, 25 bp, Homo sapien
caattgcatttgtcccctttcatta

SEQ ID NO: 585617 - DNA, 25 bp, Homo sapien
caagccttaggtgataccaattgca

SEQ ID NO: 585618 - DNA, 25 bp, Homo sapien
gacctgtgtgtctcgttagcaaatc

SEQ ID NO: 585619 - DNA, 25 bp, Homo sapien
taataagcacttcgggatgggctgc

SEQ ID NO: 585620 - DNA, 25 bp, Homo sapien
gaattggattgactctctggataaa

SEQ ID NO: 585621 - DNA, 25 bp, Homo sapien
gaaaatctgtaaaactgcactccaa

SEQ ID NO: 585622 - DNA, 25 bp, Homo sapien
tgttcagagtggactggcaataaac

SEQ ID NO: 585623 - DNA, 25 bp, Homo sapien
tattatacgggttaatctcttagga

SEQ ID NO: 585624 - DNA, 25 bp, Homo sapien
caggcatgtgtttcacaatcagaca

SEQ ID NO: 585625 - DNA, 25 bp, Homo sapien
cttaggaatggcaaagcattatgta

SEQ ID NO: 585626 - DNA, 25 bp, Homo sapien
aatgttaatggtatatctgaatgat

SEQ ID NO: 585627 - DNA, 25 bp, Homo sapien
agttcacttgtctgatccggcacag

SEQ ID NO: 585628 - DNA, 25 bp, Homo sapien
gtggctcatccacaaaggtgctcag

SEQ ID NO: 585629 - DNA, 25 bp, Homo sapien
ggtgtctccttgtaattcagtccca

SEQ ID NO: 585630 - DNA, 25 bp, Homo sapien
gatgggaaacatcctgcctctagac

SEQ ID NO: 585631 - DNA, 25 bp, Homo sapien
gcaagattgttccaacagccagggt

SEQ ID NO: 585632 - DNA, 25 bp, Homo sapien
tgccaactaacaggataccacagag

SEQ ID NO: 585633 - DNA, 25 bp, Homo sapien
tctgctcggcgatgtccaaggcaaa

SEQ ID NO: 585634 - DNA, 25 bp, Homo sapien
taatgtactactggagatcaacgcg

SEQ ID NO: 585635 - DNA, 25 bp, Homo sapien
cttaaaacaaagatgcactggatgg

SEQ ID NO: 585636 - DNA, 25 bp, Homo sapien
tcaatttggcatttcgctcacaggg

SEQ ID NO: 585637 - DNA, 25 bp, Homo sapien
gaatggtcacaatcttcttcatgac

SEQ ID NO: 585638 - DNA, 25 bp, Homo sapien
atgactttcccatctttatcctatc

SEQ ID NO: 585639 - DNA, 25 bp, Homo sapien
tccagaacaggaatttgacaccacg

SEQ ID NO: 585640 - DNA, 25 bp, Homo sapien
cccgtttgccagaggagggcattga

SEQ ID NO: 585641 - DNA, 25 bp, Homo sapien
tccagtagacggactagccacctaa

SEQ ID NO: 585642 - DNA, 25 bp, Homo sapien
tcaggccctagtcgtactgcttggg

SEQ ID NO: 585643 - DNA, 25 bp, Homo sapien
gacacgtgacgttgcacagagggaa

SEQ ID NO: 585644 - DNA, 25 bp, Homo sapien
ggaaaggtggccactatcctcaaga

SEQ ID NO: 585645 - DNA, 25 bp, Homo sapien
gatgcaaccccatcctacatgagag

SEQ ID NO: 585646 - DNA, 25 bp, Homo sapien
tgaatcaccgtgctctcacttggca

SEQ ID NO: 585647 - DNA, 25 bp, Homo sapien
taggatgtgcaatgcccaaggacct

SEQ ID NO: 585648 - DNA, 25 bp, Homo sapien
ttcaggcgagaatagtcatacacag

SEQ ID NO: 585649 - DNA, 25 bp, Homo sapien
caactgggtgctgatatcctgccac

SEQ ID NO: 585650 - DNA, 25 bp, Homo sapien
gacctttgactgaagaggcaactgg

SEQ ID NO: 585651 - DNA, 25 bp, Homo sapien
gaaaatagccacagagagaatcctg

SEQ ID NO: 585652 - DNA, 25 bp, Homo sapien
taaagattggctccgctcaaagggc

SEQ ID NO: 585653 - DNA, 25 bp, Homo sapien
gatctgaggtgccagcgcatgacat

SEQ ID NO: 585654 - DNA, 25 bp, Homo sapien
tattggcagctgaaaatgtgacctt

SEQ ID NO: 585655 - DNA, 25 bp, Homo sapien
tctggtatcagatgcatagcggcct

SEQ ID NO: 585656 - DNA, 25 bp, Homo sapien
caagtgtgctgttcaatgggctaaa

SEQ ID NO: 585657 - DNA, 25 bp, Homo sapien
tgatccagccttgatcagtggcccc

SEQ ID NO: 585658 - DNA, 25 bp, Homo sapien
ctgtatttcaggcaacggtagtggg

SEQ ID NO: 585659 - DNA, 25 bp, Homo sapien
ttggaggccaatgaagcaacatggg

SEQ ID NO: 585660 - DNA, 25 bp, Homo sapien
caacatgggctatggtggagtccag

SEQ ID NO: 585661 - DNA, 25 bp, Homo sapien
gattcccttggcctacatggcagag

SEQ ID NO: 585662 - DNA, 25 bp, Homo sapien
tctaagacctgtgcaaggatggctg

SEQ ID NO: 585663 - DNA, 25 bp, Homo sapien
cacagccgagggagtcaagtcttgc

SEQ ID NO: 585664 - DNA, 25 bp, Homo sapien
tgtgggactctgcttgacaccgtgc

SEQ ID NO: 585665 - DNA, 25 bp, Homo sapien
tgaggttcagcagtcagtcacggac

SEQ ID NO: 585666 - DNA, 25 bp, Homo sapien
tattcagatgaaacggtcctagccc

SEQ ID NO: 585667 - DNA, 25 bp, Homo sapien
ggagcgcagtaacactatcatggct

SEQ ID NO: 585668 - DNA, 25 bp, Homo sapien
tgccagggctggagcgcagtaacac

SEQ ID NO: 585669 - DNA, 25 bp, Homo sapien
cccaacaggtgtgcatcaacatgcc

SEQ ID NO: 585670 - DNA, 25 bp, Homo sapien
cttagcctcccaacaggtgtgcatc

SEQ ID NO: 585671 - DNA, 25 bp, Homo sapien
tcaagaaaccatccgcatgtctggg

SEQ ID NO: 585672 - DNA, 25 bp, Homo sapien
ctgtcactgtttagggctgtcccaa

SEQ ID NO: 585673 - DNA, 25 bp, Homo sapien
catgtctgggtgtaggaatgcccca

SEQ ID NO: 585674 - DNA, 25 bp, Homo sapien
gaaggccctagaaagagtcacaggt

SEQ ID NO: 585675 - DNA, 25 bp, Homo sapien
ggaggaccaccgcaccttgtcttct

SEQ ID NO: 585676 - DNA, 25 bp, Homo sapien
gaagatgtcattggggaattcatgc

SEQ ID NO: 585677 - DNA, 25 bp, Homo sapien
tcttctatcctcgtttgtgaagatg

SEQ ID NO: 585678 - DNA, 25 bp, Homo sapien
cgcaccttgtcttctatcctcgttt

SEQ ID NO: 585679 - DNA, 25 bp, Homo sapien
gagtgatgttaatggtcctcttcct

SEQ ID NO: 585680 - DNA, 25 bp, Homo sapien
aggagtgatgttaatggtcctcttc

SEQ ID NO: 585681 - DNA, 25 bp, Homo sapien
aaaggagtgatgttaatggtcctct

SEQ ID NO: 585682 - DNA, 25 bp, Homo sapien
tgatgttaatggtcctcttcctcat

SEQ ID NO: 585683 - DNA, 25 bp, Homo sapien
taatcagtaaaaagcatccaaacca

SEQ ID NO: 585684 - DNA, 25 bp, Homo sapien
aaccaaagtcgcaatagtgagggcc

SEQ ID NO: 585685 - DNA, 25 bp, Homo sapien
cctgattttcctatgtgcttggcga

SEQ ID NO: 585686 - DNA, 25 bp, Homo sapien
gcttggcgatttccaagtaaaagga

SEQ ID NO: 585687 - DNA, 25 bp, Homo sapien
gaaaaggtacatgcctccaaaccag

SEQ ID NO: 585688 - DNA, 25 bp, Homo sapien
gggaaaatactgcaggatatgctcc

SEQ ID NO: 585689 - DNA, 25 bp, Homo sapien
tcttgtgattagaccagaagatggg

SEQ ID NO: 585690 - DNA, 25 bp, Homo sapien
gcattttgtcccagtcctgggaaaa

SEQ ID NO: 585691 - DNA, 25 bp, Homo sapien
tctgggattctcaagtgacacatta

SEQ ID NO: 585692 - DNA, 25 bp, Homo sapien
tccagtaggccacagatatgcaaag

SEQ ID NO: 585693 - DNA, 25 bp, Homo sapien
tgagtgttcattggcctcaccccat

SEQ ID NO: 585694 - DNA, 25 bp, Homo sapien
tatcttggccgaaaacctagtttca

SEQ ID NO: 585695 - DNA, 25 bp, Homo sapien
gcatgttatagcaactccaccaagg

SEQ ID NO: 585696 - DNA, 25 bp, Homo sapien
tccaacacagggcaatatgaggtct

SEQ ID NO: 585697 - DNA, 25 bp, Homo sapien
tttgagccccaatgatagatcaggc

SEQ ID NO: 585698 - DNA, 25 bp, Homo sapien
tagaagaggctaggaggaaaccgca

SEQ ID NO: 585699 - DNA, 25 bp, Homo sapien
tgaacttctatgtagatggccacac

SEQ ID NO: 585700 - DNA, 25 bp, Homo sapien
gaacttctatgtagatggccacaca

SEQ ID NO: 585701 - DNA, 25 bp, Homo sapien
tcaccggagggagactttttgtctg

SEQ ID NO: 585702 - DNA, 25 bp, Homo sapien
aactgacactggaggagtcaccgga

SEQ ID NO: 585703 - DNA, 25 bp, Homo sapien
tttttgtctgtgagattacaggcca

SEQ ID NO: 585704 - DNA, 25 bp, Homo sapien
gaaactgacactggaggagtcaccg

SEQ ID NO: 585705 - DNA, 25 bp, Homo sapien
gggacatttccccagtggagaagac

SEQ ID NO: 585706 - DNA, 25 bp, Homo sapien
acatttccccagtggagaagacaga

SEQ ID NO: 585707 - DNA, 25 bp, Homo sapien
tgtgggacatttccccagtggagaa

SEQ ID NO: 585708 - DNA, 25 bp, Homo sapien
ctgtgggacatttccccagtggaga

SEQ ID NO: 585709 - DNA, 25 bp, Homo sapien
tacaactgaaaagcggatggtgtct

SEQ ID NO: 585710 - DNA, 25 bp, Homo sapien
tcatcagggatgaccaacgcagtgg

SEQ ID NO: 585711 - DNA, 25 bp, Homo sapien
gtggtaaaatccaatctgcccctgg

SEQ ID NO: 585712 - DNA, 25 bp, Homo sapien
ttaggattccccagcggtcatcagg

SEQ ID NO: 585713 - DNA, 25 bp, Homo sapien
tgattctagtcactagagagaaatg

SEQ ID NO: 585714 - DNA, 25 bp, Homo sapien
ccagtgtgaatatcattgttctgga

SEQ ID NO: 585715 - DNA, 25 bp, Homo sapien
gggtgctgctaccagtgtgaatatc

SEQ ID NO: 585716 - DNA, 25 bp, Homo sapien
tctggaaccattcattgattctagt

SEQ ID NO: 585717 - DNA, 25 bp, Homo sapien
ggaccaggaagctgggagccctcat

SEQ ID NO: 585718 - DNA, 25 bp, Homo sapien
cctctgttgcttgctgtggaccagg

SEQ ID NO: 585719 - DNA, 25 bp, Homo sapien
tggaccaggaagctgggagccctca

SEQ ID NO: 585720 - DNA, 25 bp, Homo sapien
ctgttgcttgctgtggaccaggaag

SEQ ID NO: 585721 - DNA, 25 bp, Homo sapien
cacacaatggccagcgcatagaaca

SEQ ID NO: 585722 - DNA, 25 bp, Homo sapien
cgaagaagtcatcacacacaatggc

SEQ ID NO: 585723 - DNA, 25 bp, Homo sapien
cagatcttttccaaggaagggacga

SEQ ID NO: 585724 - DNA, 25 bp, Homo sapien
ccagcgcatagaacatgtatatggc

SEQ ID NO: 585725 - DNA, 25 bp, Homo sapien
tggggccgaacttcccgctgccatg

SEQ ID NO: 585726 - DNA, 25 bp, Homo sapien
gaacttcccgctgccatgaatgtgg

SEQ ID NO: 585727 - DNA, 25 bp, Homo sapien
ccgaacttcccgctgccatgaatgt

SEQ ID NO: 585728 - DNA, 25 bp, Homo sapien
ggccgaacttcccgctgccatgaat

SEQ ID NO: 585729 - DNA, 25 bp, Homo sapien
cacagacaccaatgatgcacaggat

SEQ ID NO: 585730 - DNA, 25 bp, Homo sapien
gcacaggatgttgaataccgctgag

SEQ ID NO: 585731 - DNA, 25 bp, Homo sapien
atggtgccaactcccacatcgcctt

SEQ ID NO: 585732 - DNA, 25 bp, Homo sapien
gttgaataccgctgagcccacgatg

SEQ ID NO: 585733 - DNA, 25 bp, Homo sapien
caaatcaataggcacgaagatgacg

SEQ ID NO: 585734 - DNA, 25 bp, Homo sapien
tggagaatgcaatggtggacccggg

SEQ ID NO: 585735 - DNA, 25 bp, Homo sapien
tacatcagtggaacgggcagcatgg

SEQ ID NO: 585736 - DNA, 25 bp, Homo sapien
gagaccctcgagtctacatcagtgg

SEQ ID NO: 585737 - DNA, 25 bp, Homo sapien
tgacaatgccaattaggagagtgct

SEQ ID NO: 585738 - DNA, 25 bp, Homo sapien
taataacagccagactaataaccat

SEQ ID NO: 585739 - DNA, 25 bp, Homo sapien
taacagcgacagactcttctgctgg

SEQ ID NO: 585740 - DNA, 25 bp, Homo sapien
taataaccatactgctgatggtgac

SEQ ID NO: 585741 - DNA, 25 bp, Homo sapien
tgtgaggtgagccagcaaagacctt

SEQ ID NO: 585742 - DNA, 25 bp, Homo sapien
tctgtccatggctacagggttgtga

SEQ ID NO: 585743 - DNA, 25 bp, Homo sapien
tcagaaggaaaggttggcatccaga

SEQ ID NO: 585744 - DNA, 25 bp, Homo sapien
ggcatccagagtcatcgcgtggact

SEQ ID NO: 585745 - DNA, 25 bp, Homo sapien
ctctgaacggcagatcgaaattcac

SEQ ID NO: 585746 - DNA, 25 bp, Homo sapien
ctgtttgtggttaggcatttaaatc

SEQ ID NO: 585747 - DNA, 25 bp, Homo sapien
aatttctgtttgtggttaggcattt

SEQ ID NO: 585748 - DNA, 25 bp, Homo sapien
aattcacaagtacattgttttacaa

SEQ ID NO: 585749 - DNA, 25 bp, Homo sapien
gacataggtgtcaccgtatctgaag

SEQ ID NO: 585750 - DNA, 25 bp, Homo sapien
caggacataggtgtcaccgtatctg

SEQ ID NO: 585751 - DNA, 25 bp, Homo sapien
tccaggacataggtgtcaccgtatc

SEQ ID NO: 585752 - DNA, 25 bp, Homo sapien
atccaggacataggtgtcaccgtat

SEQ ID NO: 585753 - DNA, 25 bp, Homo sapien
tacatatacagatgcgcgggagggt

SEQ ID NO: 585754 - DNA, 25 bp, Homo sapien
ggtagccaggctcagcactatcagg

SEQ ID NO: 585755 - DNA, 25 bp, Homo sapien
caggaggcagcatcttgtgttccac

SEQ ID NO: 585756 - DNA, 25 bp, Homo sapien
taatgagggcatgcataaacgtagc

SEQ ID NO: 585757 - DNA, 25 bp, Homo sapien
ggaaagtgggctccccactagtgac

SEQ ID NO: 585758 - DNA, 25 bp, Homo sapien
gggctggaaagtgggctccccacta

SEQ ID NO: 585759 - DNA, 25 bp, Homo sapien
ccccactagtgaccttcttccccat

SEQ ID NO: 585760 - DNA, 25 bp, Homo sapien
tgggctccccactagtgaccttctt

SEQ ID NO: 585761 - DNA, 25 bp, Homo sapien
gtgcaatcatgcactgaagtccttt

SEQ ID NO: 585762 - DNA, 25 bp, Homo sapien
tcaagttcctgaaggttcgtggcac

SEQ ID NO: 585763 - DNA, 25 bp, Homo sapien
tgcactgaagtcctttacttcttgc

SEQ ID NO: 585764 - DNA, 25 bp, Homo sapien
tcgtggcactggtttagtgcaatca

SEQ ID NO: 585765 - DNA, 25 bp, Homo sapien
atcacagtttcatcatcaggaaaaa

SEQ ID NO: 585766 - DNA, 25 bp, Homo sapien
tcaggaaaaatgataagaatattct

SEQ ID NO: 585767 - DNA, 25 bp, Homo sapien
tcatcaggaaaaatgataagaatat

SEQ ID NO: 585768 - DNA, 25 bp, Homo sapien
ataagaatattcttggtctgcttca

SEQ ID NO: 585769 - DNA, 25 bp, Homo sapien
tcaactggctctacgtgacagccca

SEQ ID NO: 585770 - DNA, 25 bp, Homo sapien
cagtttgtataaccttgtaggatgt

SEQ ID NO: 585771 - DNA, 25 bp, Homo sapien
tttcacagtattcaactggctctac

SEQ ID NO: 585772 - DNA, 25 bp, Homo sapien
cagtattcaactggctctacgtgac

SEQ ID NO: 585773 - DNA, 25 bp, Homo sapien
gtatactgttgatcccttctggtga

SEQ ID NO: 585774 - DNA, 25 bp, Homo sapien
cccagtctctatggactgtcttcag

SEQ ID NO: 585775 - DNA, 25 bp, Homo sapien
tccaattagccccactagagattct

SEQ ID NO: 585776 - DNA, 25 bp, Homo sapien
tagccctagattttctgtttagttc

SEQ ID NO: 585777 - DNA, 25 bp, Homo sapien
ctggtcagtgtaagtagcagatgac

SEQ ID NO: 585778 - DNA, 25 bp, Homo sapien
aaaagcaatatttatctgacccttc

SEQ ID NO: 585779 - DNA, 25 bp, Homo sapien
accattcaccacaaaagcaatattt

SEQ ID NO: 585780 - DNA, 25 bp, Homo sapien
tgacaccaccattcaccacaaaagc

SEQ ID NO: 585781 - DNA, 25 bp, Homo sapien
accaccattcaccacaaaagcaata

SEQ ID NO: 585782 - DNA, 25 bp, Homo sapien
gacagcgtgtagtaaatagaatccc

SEQ ID NO: 585783 - DNA, 25 bp, Homo sapien
cacgatgagcgcgatcacagacagc

SEQ ID NO: 585784 - DNA, 25 bp, Homo sapien
cacagacagcgtgtagtaaatagaa

SEQ ID NO: 585785 - DNA, 25 bp, Homo sapien
cgcgatcacagacagcgtgtagtaa

SEQ ID NO: 585786 - DNA, 25 bp, Homo sapien
cacccctggtgcttaaaagagcact

SEQ ID NO: 585787 - DNA, 25 bp, Homo sapien
cccctggtgcttaaaagagcactga

SEQ ID NO: 585788 - DNA, 25 bp, Homo sapien
ccctggtgcttaaaagagcactgat

SEQ ID NO: 585789 - DNA, 25 bp, Homo sapien
acccctggtgcttaaaagagcactg

SEQ ID NO: 585790 - DNA, 25 bp, Homo sapien
ctgggagttgagggaaaggtcagtt

SEQ ID NO: 585791 - DNA, 25 bp, Homo sapien
agtttaatctcattcccagtctgtg

SEQ ID NO: 585792 - DNA, 25 bp, Homo sapien
ttgagggaaaggtcagtttaatctc

SEQ ID NO: 585793 - DNA, 25 bp, Homo sapien
gaaaggtcagtttaatctcattccc

SEQ ID NO: 585794 - DNA, 25 bp, Homo sapien
tggtaacctgaaattcacggtacaa

SEQ ID NO: 585795 - DNA, 25 bp, Homo sapien
caggccggcaatgcagagagcctca

SEQ ID NO: 585796 - DNA, 25 bp, Homo sapien
tggaggaatgcagtggacagattgt

SEQ ID NO: 585797 - DNA, 25 bp, Homo sapien
cgtcaggccggcaatgcagagagcc

SEQ ID NO: 585798 - DNA, 25 bp, Homo sapien
tcttcatgagcacagtcgtctcctt

SEQ ID NO: 585799 - DNA, 25 bp, Homo sapien
gtgctcccaggagatccaaatctgc

SEQ ID NO: 585800 - DNA, 25 bp, Homo sapien
tgctcccaggagatccaaatctgct

SEQ ID NO: 585801 - DNA, 25 bp, Homo sapien
gtcttcatgagcacagtcgtctcct

SEQ ID NO: 585802 - DNA, 25 bp, Homo sapien
tagttattccgactttgccagaaag

SEQ ID NO: 585803 - DNA, 25 bp, Homo sapien
caggcgacctttgtaagaccatagt

SEQ ID NO: 585804 - DNA, 25 bp, Homo sapien
caaagtcattctcggtgaggatctt

SEQ ID NO: 585805 - DNA, 25 bp, Homo sapien
agaccatagtcgatttgtttaagga

SEQ ID NO: 585806 - DNA, 25 bp, Homo sapien
caggaaactttttcatcataaataa

SEQ ID NO: 585807 - DNA, 25 bp, Homo sapien
ctctgtagatcaaatattcggaaaa

SEQ ID NO: 585808 - DNA, 25 bp, Homo sapien
tgtaacgagaatgcacaatacactc

SEQ ID NO: 585809 - DNA, 25 bp, Homo sapien
caatacactcgatttccatttccat

SEQ ID NO: 585810 - DNA, 25 bp, Homo sapien
ttcggaaaatatgtaacgagaatgc

SEQ ID NO: 585811 - DNA, 25 bp, Homo sapien
taataacaagttacacgacaggcca

SEQ ID NO: 585812 - DNA, 25 bp, Homo sapien
tctgggaagaatgtagttctggtgc

SEQ ID NO: 585813 - DNA, 25 bp, Homo sapien
agaatgtagttctggtgccaccaag

SEQ ID NO: 585814 - DNA, 25 bp, Homo sapien
tcttcatcagcccatgcgtgtaata

SEQ ID NO: 585815 - DNA, 25 bp, Homo sapien
gtgcaggtgacactccctccaaaca

SEQ ID NO: 585816 - DNA, 25 bp, Homo sapien
tgtgcaggtgacactccctccaaac

SEQ ID NO: 585817 - DNA, 25 bp, Homo sapien
tgcaggtgacactccctccaaacat

SEQ ID NO: 585818 - DNA, 25 bp, Homo sapien
ctgtgcaggtgacactccctccaaa

SEQ ID NO: 585819 - DNA, 25 bp, Homo sapien
ttaaaatgccgacaactgatttctc

SEQ ID NO: 585820 - DNA, 25 bp, Homo sapien
tgatttctccccacgcagacacccc

SEQ ID NO: 585821 - DNA, 25 bp, Homo sapien
aaatgccgacaactgatttctcccc

SEQ ID NO: 585822 - DNA, 25 bp, Homo sapien
ctcattatccagagatttaaaatgc

SEQ ID NO: 585823 - DNA, 25 bp, Homo sapien
ttcatgatgacaatgtagataagat

SEQ ID NO: 585824 - DNA, 25 bp, Homo sapien
catgatgacaatgtagataagatac

SEQ ID NO: 585825 - DNA, 25 bp, Homo sapien
atgtagataagatacatcagcacaa

SEQ ID NO: 585826 - DNA, 25 bp, Homo sapien
tagataagatacatcagcacaagga

SEQ ID NO: 585827 - DNA, 25 bp, Homo sapien
agcttccacatttggtacggtttgg

SEQ ID NO: 585828 - DNA, 25 bp, Homo sapien
tactgtacacgtgtcctgccagcga

SEQ ID NO: 585829 - DNA, 25 bp, Homo sapien
tcctgccagcgactcatgggcttca

SEQ ID NO: 585830 - DNA, 25 bp, Homo sapien
ggatgtgttcgctgtactatcttac

SEQ ID NO: 585831 - DNA, 25 bp, Homo sapien
gaagaacttggctgaggtcccatga

SEQ ID NO: 585832 - DNA, 25 bp, Homo sapien
gcttaactaagctgtcacattccgt

SEQ ID NO: 585833 - DNA, 25 bp, Homo sapien
tacagtgcccagtgattaggttttg

SEQ ID NO: 585834 - DNA, 25 bp, Homo sapien
catttatcagggtttagagaacagg

SEQ ID NO: 585835 - DNA, 25 bp, Homo sapien
caccttttgtcctcctctcaaagca

SEQ ID NO: 585836 - DNA, 25 bp, Homo sapien
ggcaccttttgtcctcctctcaaag

SEQ ID NO: 585837 - DNA, 25 bp, Homo sapien
tcccggcaccttttgtcctcctctc

SEQ ID NO: 585838 - DNA, 25 bp, Homo sapien
cggcaccttttgtcctcctctcaaa

SEQ ID NO: 585839 - DNA, 25 bp, Homo sapien
gcattgttggccaatccgttgacca

SEQ ID NO: 585840 - DNA, 25 bp, Homo sapien
cagttgcgtcgcagttgctgctgtc

SEQ ID NO: 585841 - DNA, 25 bp, Homo sapien
tttcttaagtagcaccacagttgcg

SEQ ID NO: 585842 - DNA, 25 bp, Homo sapien
cagttgctgctgtcatcaatttcag

SEQ ID NO: 585843 - DNA, 25 bp, Homo sapien
gctgacagcagctcgtctaccatga

SEQ ID NO: 585844 - DNA, 25 bp, Homo sapien
tcattgatcaacatgcgactggcca

SEQ ID NO: 585845 - DNA, 25 bp, Homo sapien
gatcactgatgctttgcggtggaaa

SEQ ID NO: 585846 - DNA, 25 bp, Homo sapien
ttatcatgattcgaaggccagcctc

SEQ ID NO: 585847 - DNA, 25 bp, Homo sapien
ccctgtccagtgggcagtggacagt

SEQ ID NO: 585848 - DNA, 25 bp, Homo sapien
tgtccagtgggcagtggacagtgct

SEQ ID NO: 585849 - DNA, 25 bp, Homo sapien
cagtggacagtgctttcccaggtac

SEQ ID NO: 585850 - DNA, 25 bp, Homo sapien
ccagtgggcagtggacagtgctttc

SEQ ID NO: 585851 - DNA, 25 bp, Homo sapien
ggaaattagtccatgtctcaacacg

SEQ ID NO: 585852 - DNA, 25 bp, Homo sapien
tgtctcaacacgtggagggaagagc

SEQ ID NO: 585853 - DNA, 25 bp, Homo sapien
aaactttgagttaggtgcttcttct

SEQ ID NO: 585854 - DNA, 25 bp, Homo sapien
ctgagggatgctgcggtgttaaact

SEQ ID NO: 585855 - DNA, 25 bp, Homo sapien
gcaaataccttacactcagaacatg

SEQ ID NO: 585856 - DNA, 25 bp, Homo sapien
aacatgagctgttgggatctttccc

SEQ ID NO: 585857 - DNA, 25 bp, Homo sapien
cacggtcagagggattgcaaatacc

SEQ ID NO: 585858 - DNA, 25 bp, Homo sapien
ggcagctgacgatatgcttccagaa

SEQ ID NO: 585859 - DNA, 25 bp, Homo sapien
tgtcccattctccacggtgtgctta

SEQ ID NO: 585860 - DNA, 25 bp, Homo sapien
ttttgatggccacctcagattcccc

SEQ ID NO: 585861 - DNA, 25 bp, Homo sapien
gattccccgttggtataagccctgc

SEQ ID NO: 585862 - DNA, 25 bp, Homo sapien
cacggtgtgcttaattgggattttg

SEQ ID NO: 585863 - DNA, 25 bp, Homo sapien
acatcgtccctccgtgtcccattca

SEQ ID NO: 585864 - DNA, 25 bp, Homo sapien
aacatcgtccctccgtgtcccattc

SEQ ID NO: 585865 - DNA, 25 bp, Homo sapien
catcgtccctccgtgtcccattcac

SEQ ID NO: 585866 - DNA, 25 bp, Homo sapien
ctctgtttcgttgccagcctcagcc

SEQ ID NO: 585867 - DNA, 25 bp, Homo sapien
tctgtttcgttgccagcctcagcca

SEQ ID NO: 585868 - DNA, 25 bp, Homo sapien
ggtgtgtacggtccttcatcatcat

SEQ ID NO: 585869 - DNA, 25 bp, Homo sapien
tcgaatggtgtgtacggtccttcat

SEQ ID NO: 585870 - DNA, 25 bp, Homo sapien
gaatggtgtgtacggtccttcatca

SEQ ID NO: 585871 - DNA, 25 bp, Homo sapien
gtgtcgaatggtgtgtacggtcctt

SEQ ID NO: 585872 - DNA, 25 bp, Homo sapien
tggaacaaccaagtccttgttggag

SEQ ID NO: 585873 - DNA, 25 bp, Homo sapien
ctgataatgggtggggtggggtgaa

SEQ ID NO: 585874 - DNA, 25 bp, Homo sapien
tctgataatgggtggggtggggtga

SEQ ID NO: 585875 - DNA, 25 bp, Homo sapien
gaggttgctgcacatgtatactgag

SEQ ID NO: 585876 - DNA, 25 bp, Homo sapien
tgacagtccatgtgaatcaaactag

SEQ ID NO: 585877 - DNA, 25 bp, Homo sapien
ctggaaggtccagcaaataggctga

SEQ ID NO: 585878 - DNA, 25 bp, Homo sapien
aataggctgaattctttgggcttgg

SEQ ID NO: 585879 - DNA, 25 bp, Homo sapien
gggcatctctggttcaagttttact

SEQ ID NO: 585880 - DNA, 25 bp, Homo sapien
caagaccctgcgcatccaaaattaa

SEQ ID NO: 585881 - DNA, 25 bp, Homo sapien
gtcaatcaaacgtttcttcagataa

SEQ ID NO: 585882 - DNA, 25 bp, Homo sapien
aggactctgacactcggcaccatgt

SEQ ID NO: 585883 - DNA, 25 bp, Homo sapien
gtccacaggaacttgacttgatagg

SEQ ID NO: 585884 - DNA, 25 bp, Homo sapien
tggccggaagcacccgacaggcttc

SEQ ID NO: 585885 - DNA, 25 bp, Homo sapien
tctgctggccggaagcacccgacag

SEQ ID NO: 585886 - DNA, 25 bp, Homo sapien
ttgacttgataggaacccatctggg

SEQ ID NO: 585887 - DNA, 25 bp, Homo sapien
ggcccgtaagcatgatagtatccct

SEQ ID NO: 585888 - DNA, 25 bp, Homo sapien
gtaagcatgatagtatccctttgag

SEQ ID NO: 585889 - DNA, 25 bp, Homo sapien
gccggagctggcccgtaagcatgat

SEQ ID NO: 585890 - DNA, 25 bp, Homo sapien
gagctggcccgtaagcatgatagta

SEQ ID NO: 585891 - DNA, 25 bp, Homo sapien
aaacgtcaccatgaaccatttctcc

SEQ ID NO: 585892 - DNA, 25 bp, Homo sapien
cagcgtggaggaagcaaacgtcacc

SEQ ID NO: 585893 - DNA, 25 bp, Homo sapien
agcggccaggtgaacgcccatttca

SEQ ID NO: 585894 - DNA, 25 bp, Homo sapien
gtataagacgaaactcagcggccag

SEQ ID NO: 585895 - DNA, 25 bp, Homo sapien
gctgtttctattttgtcgctctgga

SEQ ID NO: 585896 - DNA, 25 bp, Homo sapien
aaatggagctaccagcgtcctggcc

SEQ ID NO: 585897 - DNA, 25 bp, Homo sapien
tcagctcagtccctgtaggaacctg

SEQ ID NO: 585898 - DNA, 25 bp, Homo sapien
acctggtttggctcagccagtcttg

SEQ ID NO: 585899 - DNA, 25 bp, Homo sapien
tttctgacttccggtctccagggag

SEQ ID NO: 585900 - DNA, 25 bp, Homo sapien
ttctgacttccggtctccagggagg

SEQ ID NO: 585901 - DNA, 25 bp, Homo sapien
gctttctgacttccggtctccaggg

SEQ ID NO: 585902 - DNA, 25 bp, Homo sapien
ggctttctgacttccggtctccagg

SEQ ID NO: 585903 - DNA, 25 bp, Homo sapien
gaaggtgatccccatgatgacgtca

SEQ ID NO: 585904 - DNA, 25 bp, Homo sapien
gctggccatgcagtcaggcacgctg

SEQ ID NO: 585905 - DNA, 25 bp, Homo sapien
gaatccccagggtgtaaccaatgat

SEQ ID NO: 585906 - DNA, 25 bp, Homo sapien
ccatgatgacgtcaggaatccccag

SEQ ID NO: 585907 - DNA, 25 bp, Homo sapien
tccgtaatccacagccagggtctgc

SEQ ID NO: 585908 - DNA, 25 bp, Homo sapien
gtcaaacacgttgctcccaatggag

SEQ ID NO: 585909 - DNA, 25 bp, Homo sapien
gtaggatccgtaatccacagccagg

SEQ ID NO: 585910 - DNA, 25 bp, Homo sapien
ggagaccgaggccaatcaggatgtc

SEQ ID NO: 585911 - DNA, 25 bp, Homo sapien
agctgtataaacatcctctggccca

SEQ ID NO: 585912 - DNA, 25 bp, Homo sapien
cctgcaagcctgactagtaaggcct

SEQ ID NO: 585913 - DNA, 25 bp, Homo sapien
taaagtcctgaatgtccctgcaagc

SEQ ID NO: 585914 - DNA, 25 bp, Homo sapien
tatttagtatttgcccctcgacaga

SEQ ID NO: 585915 - DNA, 25 bp, Homo sapien
tgtgaatttggctgatgtgagtcaa

SEQ ID NO: 585916 - DNA, 25 bp, Homo sapien
ccatctgttgacattctatcctaga

SEQ ID NO: 585917 - DNA, 25 bp, Homo sapien
tgcaaaagtctcaccctgtgggctg

SEQ ID NO: 585918 - DNA, 25 bp, Homo sapien
cagggcgttgccctttcagtggcca

SEQ ID NO: 585919 - DNA, 25 bp, Homo sapien
agtaaaccagatggactgccaacgg

SEQ ID NO: 585920 - DNA, 25 bp, Homo sapien
aacgggttcatcagacccctgcatg

SEQ ID NO: 585921 - DNA, 25 bp, Homo sapien
aaacaagctgaggagtaaaccagat

SEQ ID NO: 585922 - DNA, 25 bp, Homo sapien
cataactttgataagaggtcaatgg

SEQ ID NO: 585923 - DNA, 25 bp, Homo sapien
gttcactactggagtgtgcatatgg

SEQ ID NO: 585924 - DNA, 25 bp, Homo sapien
ggagtctccataggtgggtgtgtca

SEQ ID NO: 585925 - DNA, 25 bp, Homo sapien
cactactggagtgtgcatatgggaa

SEQ ID NO: 585926 - DNA, 25 bp, Homo sapien
gtgcatatgggaaggagtctccata

SEQ ID NO: 585927 - DNA, 25 bp, Homo sapien
ccaggagcaagcctacggagtagat

SEQ ID NO: 585928 - DNA, 25 bp, Homo sapien
ggagcaagcctacggagtagatcag

SEQ ID NO: 585929 - DNA, 25 bp, Homo sapien
atcagccccctgctattcagccgga

SEQ ID NO: 585930 - DNA, 25 bp, Homo sapien
caagcctacggagtagatcagcccc

SEQ ID NO: 585931 - DNA, 25 bp, Homo sapien
cagattgtgggaggtgagaacatca

SEQ ID NO: 585932 - DNA, 25 bp, Homo sapien
tgtgggaggtgagaacatcaacatc

SEQ ID NO: 585933 - DNA, 25 bp, Homo sapien
ctctctgagcctgcaaaatccacct

SEQ ID NO: 585934 - DNA, 25 bp, Homo sapien
cctgcaaaatccacctctcgtctca

SEQ ID NO: 585935 - DNA, 25 bp, Homo sapien
gccacttgttcaggtggacgccgaa

SEQ ID NO: 585936 - DNA, 25 bp, Homo sapien
gctgccacttgttcaggtggacgcc

SEQ ID NO: 585937 - DNA, 25 bp, Homo sapien
cagctgccacttgttcaggtggacg

SEQ ID NO: 585938 - DNA, 25 bp, Homo sapien
acttgttcaggtggacgccgaacac

SEQ ID NO: 585939 - DNA, 25 bp, Homo sapien
tgaacacgttgaactcagtcatgat

SEQ ID NO: 585940 - DNA, 25 bp, Homo sapien
caaaggtgaacacgttgaactcagt

SEQ ID NO: 585941 - DNA, 25 bp, Homo sapien
ggttcacaaaggtgaacacgttgaa

SEQ ID NO: 585942 - DNA, 25 bp, Homo sapien
ggtgaacacgttgaactcagtcatg

SEQ ID NO: 585943 - DNA, 25 bp, Homo sapien
ttggatgtcttcacacggaggaggc

SEQ ID NO: 585944 - DNA, 25 bp, Homo sapien
caacagtctcaggtcacaaattagg

SEQ ID NO: 585945 - DNA, 25 bp, Homo sapien
ggaatcagtgttgcctggctcaggc

SEQ ID NO: 585946 - DNA, 25 bp, Homo sapien
ggccgggtctcgtattgcacagaaa

SEQ ID NO: 585947 - DNA, 25 bp, Homo sapien
gggatgcaagcccagacaacacggc

SEQ ID NO: 585948 - DNA, 25 bp, Homo sapien
agcccagacaacacggcaggtgcag

SEQ ID NO: 585949 - DNA, 25 bp, Homo sapien
caggtgcagcctttgggtaattgat

SEQ ID NO: 585950 - DNA, 25 bp, Homo sapien
gtaattgattaatccagagcccagt

SEQ ID NO: 585951 - DNA, 25 bp, Homo sapien
tgacgacgtctgtgcaaagtgcgct

SEQ ID NO: 585952 - DNA, 25 bp, Homo sapien
taacttatgcccttgagcgagtctg

SEQ ID NO: 585953 - DNA, 25 bp, Homo sapien
ccataagactttagcgaggcgtcct

SEQ ID NO: 585954 - DNA, 25 bp, Homo sapien
catggtgtgtctcaactgggtggaa

SEQ ID NO: 585955 - DNA, 25 bp, Homo sapien
gggagaaagtaatgcactctgctct

SEQ ID NO: 585956 - DNA, 25 bp, Homo sapien
ggggagaaagtaatgcactctgctc

SEQ ID NO: 585957 - DNA, 25 bp, Homo sapien
tgataggcctaaagtcccttcaaga

SEQ ID NO: 585958 - DNA, 25 bp, Homo sapien
caggtgaggcaacgcagaaacagca

SEQ ID NO: 585959 - DNA, 25 bp, Homo sapien
acgtacgccagctttccaggtgagg

SEQ ID NO: 585960 - DNA, 25 bp, Homo sapien
tggccacttcattctcgtaatctgc

SEQ ID NO: 585961 - DNA, 25 bp, Homo sapien
tggaaatatcccctcatagtgacct

SEQ ID NO: 585962 - DNA, 25 bp, Homo sapien
agagtctcggatccctagtatgcaa

SEQ ID NO: 585963 - DNA, 25 bp, Homo sapien
tattactaaaaaggtagagccagca

SEQ ID NO: 585964 - DNA, 25 bp, Homo sapien
gggcagacgctatctttccattgtg

SEQ ID NO: 585965 - DNA, 25 bp, Homo sapien
tagttttgtactggaagcaccttca

SEQ ID NO: 585966 - DNA, 25 bp, Homo sapien
gaaaaaagcaattgcagggattctg

SEQ ID NO: 585967 - DNA, 25 bp, Homo sapien
gatttataagcatggctcagaagca

SEQ ID NO: 585968 - DNA, 25 bp, Homo sapien
gattgattgtcccaacaaaccagaa

SEQ ID NO: 585969 - DNA, 25 bp, Homo sapien
aggaagtgaaccgagaggttcttga

SEQ ID NO: 585970 - DNA, 25 bp, Homo sapien
ggttcttgaccttgcacgtgtgtca

SEQ ID NO: 585971 - DNA, 25 bp, Homo sapien
gaaccgagaggttcttgaccttgca

SEQ ID NO: 585972 - DNA, 25 bp, Homo sapien
ttgaccttgcacgtgtgtcagcatg

SEQ ID NO: 585973 - DNA, 25 bp, Homo sapien
acactgggtagcaaaggcctgcagg

SEQ ID NO: 585974 - DNA, 25 bp, Homo sapien
cacactgggtagcaaaggcctgcag

SEQ ID NO: 585975 - DNA, 25 bp, Homo sapien
tcaaagctgccgggttaaggcccac

SEQ ID NO: 585976 - DNA, 25 bp, Homo sapien
gctgccgggttaaggcccactcaca

SEQ ID NO: 585977 - DNA, 25 bp, Homo sapien
tgtaagagcgcatggcagcagaagc

SEQ ID NO: 585978 - DNA, 25 bp, Homo sapien
ctatgtaagagcgcatggcagcaga

SEQ ID NO: 585979 - DNA, 25 bp, Homo sapien
gtaagagcgcatggcagcagaagct

SEQ ID NO: 585980 - DNA, 25 bp, Homo sapien
gcttcccatccccactagacggcat

SEQ ID NO: 585981 - DNA, 25 bp, Homo sapien
gagagagcccgctcccctatctgcc

SEQ ID NO: 585982 - DNA, 25 bp, Homo sapien
cagctccttccaaaggatcccggtc

SEQ ID NO: 585983 - DNA, 25 bp, Homo sapien
gggtgtctgcccctgtctcacccca

SEQ ID NO: 585984 - DNA, 25 bp, Homo sapien
cgtcccatccatccggagggtgtct

SEQ ID NO: 585985 - DNA, 25 bp, Homo sapien
ccaaaggctggaaccatgatcgtcc

SEQ ID NO: 585986 - DNA, 25 bp, Homo sapien
aatgataaccaccagtaggatgcct

SEQ ID NO: 585987 - DNA, 25 bp, Homo sapien
agggcatctctgcagagtgaataaa

SEQ ID NO: 585988 - DNA, 25 bp, Homo sapien
ccagtaggatgcctcctagggtgtg

SEQ ID NO: 585989 - DNA, 25 bp, Homo sapien
tctctgcagagtgaataaataatga

SEQ ID NO: 585990 - DNA, 25 bp, Homo sapien
ctctctcttaacacctgcggctcgg

SEQ ID NO: 585991 - DNA, 25 bp, Homo sapien
cggttgtgtgctgccctgaaagcct

SEQ ID NO: 585992 - DNA, 25 bp, Homo sapien
acggttgtgtgctgccctgaaagcc

SEQ ID NO: 585993 - DNA, 25 bp, Homo sapien
ctcttaacacctgcggctcggtggc

SEQ ID NO: 585994 - DNA, 25 bp, Homo sapien
caccagtgctgtgccggcccttgtt

SEQ ID NO: 585995 - DNA, 25 bp, Homo sapien
tgccggcccttgtttcaatggtact

SEQ ID NO: 585996 - DNA, 25 bp, Homo sapien
gctgtgccggcccttgtttcaatgg

SEQ ID NO: 585997 - DNA, 25 bp, Homo sapien
gttccaccagtgctgtgccggccct

SEQ ID NO: 585998 - DNA, 25 bp, Homo sapien
gagaacaactgttggtcactgccat

SEQ ID NO: 585999 - DNA, 25 bp, Homo sapien
ttgattttccaccagatgacatcca

SEQ ID NO: 586000 - DNA, 25 bp, Homo sapien
gatgacatccacacttggggtttca

SEQ ID NO: 586001 - DNA, 25 bp, Homo sapien
ggtcctggagaacaactgttggtca

SEQ ID NO: 586002 - DNA, 25 bp, Homo sapien
gagcacaagtgctcatggggcactt

SEQ ID NO: 586003 - DNA, 25 bp, Homo sapien
acaagtgctcatggggcacttttgc

SEQ ID NO: 586004 - DNA, 25 bp, Homo sapien
cagagagcacaagtgctcatggggc

SEQ ID NO: 586005 - DNA, 25 bp, Homo sapien
ggcacttttgcaggcttggggacca

SEQ ID NO: 586006 - DNA, 25 bp, Homo sapien
cttttcggaatcaggcgggtccctg

SEQ ID NO: 586007 - DNA, 25 bp, Homo sapien
ccaggcgaggaccagagttttgttc

SEQ ID NO: 586008 - DNA, 25 bp, Homo sapien
cagggttggatacgctctggacgcc

SEQ ID NO: 586009 - DNA, 25 bp, Homo sapien
tcttgttttagcacaaacgcgcacg

SEQ ID NO: 586010 - DNA, 25 bp, Homo sapien
taagccggagcaaacttggctggac

SEQ ID NO: 586011 - DNA, 25 bp, Homo sapien
tacaaggaacccaggctgcaaccag

SEQ ID NO: 586012 - DNA, 25 bp, Homo sapien
cagaaagtttatctaagccggagca

SEQ ID NO: 586013 - DNA, 25 bp, Homo sapien
caaacttggctggaccggcccctga

SEQ ID NO: 586014 - DNA, 25 bp, Homo sapien
accggtggccccaaagacgagcgcg

SEQ ID NO: 586015 - DNA, 25 bp, Homo sapien
gaccggtggccccaaagacgagcgc

SEQ ID NO: 586016 - DNA, 25 bp, Homo sapien
gcgaccggtggccccaaagacgagc

SEQ ID NO: 586017 - DNA, 25 bp, Homo sapien
cggtggccccaaagacgagcgcggg

SEQ ID NO: 586018 - DNA, 25 bp, Homo sapien
cagccccgcacaggtcagctgagga

SEQ ID NO: 586019 - DNA, 25 bp, Homo sapien
ctcaagtcccctccggagtagggag

SEQ ID NO: 586020 - DNA, 25 bp, Homo sapien
tccgggctctctaggtgcgggcaca

SEQ ID NO: 586021 - DNA, 25 bp, Homo sapien
agtagggagagagtgcgcacagcag

SEQ ID NO: 586022 - DNA, 25 bp, Homo sapien
tccgcgctggggatcaaagctgtgc

SEQ ID NO: 586023 - DNA, 25 bp, Homo sapien
aagctgtgcgacaccgggtctgacc

SEQ ID NO: 586024 - DNA, 25 bp, Homo sapien
gcgctcaggcgcagggagcacttga

SEQ ID NO: 586025 - DNA, 25 bp, Homo sapien
cgcagggagcacttgacaccccaca

SEQ ID NO: 586026 - DNA, 25 bp, Homo sapien
gaaatctccggtcggagcatctgcc

SEQ ID NO: 586027 - DNA, 25 bp, Homo sapien
taggctttcaagctgaacttctgca

SEQ ID NO: 586028 - DNA, 25 bp, Homo sapien
tcttggcaacatatcataggctttc

SEQ ID NO: 586029 - DNA, 25 bp, Homo sapien
agccccagggatttaagagctctga

SEQ ID NO: 586030 - DNA, 25 bp, Homo sapien
agagatggagggtcgatgatgatga

SEQ ID NO: 586031 - DNA, 25 bp, Homo sapien
cagagatggagggtcgatgatgatg

SEQ ID NO: 586032 - DNA, 25 bp, Homo sapien
aacatccaaaataccgacttcaatg

SEQ ID NO: 586033 - DNA, 25 bp, Homo sapien
ataccgacttcaatgggggccccat

SEQ ID NO: 586034 - DNA, 25 bp, Homo sapien
acatccaaaataccgacttcaatgg

SEQ ID NO: 586035 - DNA, 25 bp, Homo sapien
atccaaaataccgacttcaatgggg

SEQ ID NO: 586036 - DNA, 25 bp, Homo sapien
gggaaatgtggaagaatgcagagct

SEQ ID NO: 586037 - DNA, 25 bp, Homo sapien
cttctcgataggtgggaccctgctc

SEQ ID NO: 586038 - DNA, 25 bp, Homo sapien
tgtaagagacattggggctacccca

SEQ ID NO: 586039 - DNA, 25 bp, Homo sapien
caccccaggcttctcgataggtggg

SEQ ID NO: 586040 - DNA, 25 bp, Homo sapien
tctgtatcaggggacttagtttttc

SEQ ID NO: 586041 - DNA, 25 bp, Homo sapien
gaaaatatattcaggtggactccaa

SEQ ID NO: 586042 - DNA, 25 bp, Homo sapien
tcaggtggactccaaacaaaggcat

SEQ ID NO: 586043 - DNA, 25 bp, Homo sapien
gtagcatcgttagcctttttaggaa

SEQ ID NO: 586044 - DNA, 25 bp, Homo sapien
gctgctaggcattctaggctcctcc

SEQ ID NO: 586045 - DNA, 25 bp, Homo sapien
accgtcaaacacctgttgaatggcc

SEQ ID NO: 586046 - DNA, 25 bp, Homo sapien
gggatgcagtcaaaccgtcaaacac

SEQ ID NO: 586047 - DNA, 25 bp, Homo sapien
tggacagccagcatacaggtaggca

SEQ ID NO: 586048 - DNA, 25 bp, Homo sapien
cttggggtagcaggcaattggccaa

SEQ ID NO: 586049 - DNA, 25 bp, Homo sapien
gcaaagccgcatgtgattttccagt

SEQ ID NO: 586050 - DNA, 25 bp, Homo sapien
caatttcaagcagcgccatccggtg

SEQ ID NO: 586051 - DNA, 25 bp, Homo sapien
aggagttgctggcaaagccgcatgt

SEQ ID NO: 586052 - DNA, 25 bp, Homo sapien
aaacttcctacatcaactgcatcag

SEQ ID NO: 586053 - DNA, 25 bp, Homo sapien
aagggcacagcacccttgatagcat

SEQ ID NO: 586054 - DNA, 25 bp, Homo sapien
tcatcagccatcaccaaaacaagca

SEQ ID NO: 586055 - DNA, 25 bp, Homo sapien
gcacccttgatagcatctgctgtcc

SEQ ID NO: 586056 - DNA, 25 bp, Homo sapien
tacagatgacagagtgatagatgct

SEQ ID NO: 586057 - DNA, 25 bp, Homo sapien
tgacagtgaataagagtgatagggc

SEQ ID NO: 586058 - DNA, 25 bp, Homo sapien
gatagggcacgcttgtgttattcca

SEQ ID NO: 586059 - DNA, 25 bp, Homo sapien
gccttagtgtcctggtaagactacc

SEQ ID NO: 586060 - DNA, 25 bp, Homo sapien
agtggacacgatacaggcaaagaaa

SEQ ID NO: 586061 - DNA, 25 bp, Homo sapien
aagccttgctagttgcactaagaca

SEQ ID NO: 586062 - DNA, 25 bp, Homo sapien
agaaagccttgctagttgcactaag

SEQ ID NO: 586063 - DNA, 25 bp, Homo sapien
tgttgcctgaagtggacacgataca

SEQ ID NO: 586064 - DNA, 25 bp, Homo sapien
tttctggtgtagaatatcctccctg

SEQ ID NO: 586065 - DNA, 25 bp, Homo sapien
tccttgagaagattcagctcttggg

SEQ ID NO: 586066 - DNA, 25 bp, Homo sapien
ccatgttagctttctggtgtagaat

SEQ ID NO: 586067 - DNA, 25 bp, Homo sapien
cttccttgagaagattcagctcttg

SEQ ID NO: 586068 - DNA, 25 bp, Homo sapien
cacaaaaattgaccattcagggttt

SEQ ID NO: 586069 - DNA, 25 bp, Homo sapien
acaacacaaaaattgaccattcagg

SEQ ID NO: 586070 - DNA, 25 bp, Homo sapien
attgaccattcagggttttgtatgt

SEQ ID NO: 586071 - DNA, 25 bp, Homo sapien
aaattgaccattcagggttttgtat

SEQ ID NO: 586072 - DNA, 25 bp, Homo sapien
tatcttttccggtagatgttcagaa

SEQ ID NO: 586073 - DNA, 25 bp, Homo sapien
aacctccccagcgttctgaagggct

SEQ ID NO: 586074 - DNA, 25 bp, Homo sapien
tccggtagatgttcagaagtccaga

SEQ ID NO: 586075 - DNA, 25 bp, Homo sapien
tgaagggcttgcacattttatcttt

SEQ ID NO: 586076 - DNA, 25 bp, Homo sapien
gggcaagtgacctaacctcatgaga

SEQ ID NO: 586077 - DNA, 25 bp, Homo sapien
cctaactgggtgatgtagggcaagt

SEQ ID NO: 586078 - DNA, 25 bp, Homo sapien
ctttctgccaagcatgtaggtcacc

SEQ ID NO: 586079 - DNA, 25 bp, Homo sapien
tccgccttgatactgcctaactggg

SEQ ID NO: 586080 - DNA, 25 bp, Homo sapien
cgtacaggatataatcatgatgttc

SEQ ID NO: 586081 - DNA, 25 bp, Homo sapien
gcacacgtaaaagctgatgccagag

SEQ ID NO: 586082 - DNA, 25 bp, Homo sapien
tagcttgcctattagctaggactac

SEQ ID NO: 586083 - DNA, 25 bp, Homo sapien
aaaaatgggtggcaacgtacaggat

SEQ ID NO: 586084 - DNA, 25 bp, Homo sapien
aggtctgagataaagagattcctgg

SEQ ID NO: 586085 - DNA, 25 bp, Homo sapien
tcctggagccttagggtgtgcagct

SEQ ID NO: 586086 - DNA, 25 bp, Homo sapien
taaggtgaacaaagccatcatacaa

SEQ ID NO: 586087 - DNA, 25 bp, Homo sapien
tcatctcccattaataacaacttag

SEQ ID NO: 586088 - DNA, 25 bp, Homo sapien
ccaagtctgatcatttgaggcagct

SEQ ID NO: 586089 - DNA, 25 bp, Homo sapien
aagtttgggcaactggtgtgtgctg

SEQ ID NO: 586090 - DNA, 25 bp, Homo sapien
gcagctgctgaagtgctaacaggtt

SEQ ID NO: 586091 - DNA, 25 bp, Homo sapien
gtgtgctgaatccaagtctgatcat

SEQ ID NO: 586092 - DNA, 25 bp, Homo sapien
cagtgacctgtggacagctaaccgg

SEQ ID NO: 586093 - DNA, 25 bp, Homo sapien
caaccagggtagaccatccattgga

SEQ ID NO: 586094 - DNA, 25 bp, Homo sapien
agctaaccggaaccctgcggagtgt

SEQ ID NO: 586095 - DNA, 25 bp, Homo sapien
atattgcgtggcgagcagcaggcct

SEQ ID NO: 586096 - DNA, 25 bp, Homo sapien
tgtgaagtatatggacgtggtttgc

SEQ ID NO: 586097 - DNA, 25 bp, Homo sapien
ctgtgaagtatatggacgtggtttg

SEQ ID NO: 586098 - DNA, 25 bp, Homo sapien
tgaagtatatggacgtggtttgcat

SEQ ID NO: 586099 - DNA, 25 bp, Homo sapien
gtgaagtatatggacgtggtttgca

SEQ ID NO: 586100 - DNA, 25 bp, Homo sapien
caatttcctggttgggcagctctgt

SEQ ID NO: 586101 - DNA, 25 bp, Homo sapien
ggaggtcagtcgcttcactccaaca

SEQ ID NO: 586102 - DNA, 25 bp, Homo sapien
ctgtgcccttgcaccctgcagagag

SEQ ID NO: 586103 - DNA, 25 bp, Homo sapien
gagaggcctgctcgctgatcagact

SEQ ID NO: 586104 - DNA, 25 bp, Homo sapien
tgtgggttgtgacatgtggttcatg

SEQ ID NO: 586105 - DNA, 25 bp, Homo sapien
ggtcgcagcggccatctagctttcc

SEQ ID NO: 586106 - DNA, 25 bp, Homo sapien
agcggccatctagctttcctgggct

SEQ ID NO: 586107 - DNA, 25 bp, Homo sapien
ttctatctcagtggtcgcagcggcc

SEQ ID NO: 586108 - DNA, 25 bp, Homo sapien
catacttgaatcacgcatgggtggc

SEQ ID NO: 586109 - DNA, 25 bp, Homo sapien
taaaaccactcgcaggtgaggtctc

SEQ ID NO: 586110 - DNA, 25 bp, Homo sapien
gaagttgtggataaacaccccagct

SEQ ID NO: 586111 - DNA, 25 bp, Homo sapien
tgccaagggtttcccactgcaggta

SEQ ID NO: 586112 - DNA, 25 bp, Homo sapien
gtctttctttacccaacatctggac

SEQ ID NO: 586113 - DNA, 25 bp, Homo sapien
ccctgcactgttaggtggatacaaa

SEQ ID NO: 586114 - DNA, 25 bp, Homo sapien
agcaagtgactcttgatcagaccca

SEQ ID NO: 586115 - DNA, 25 bp, Homo sapien
gctgagtaacttctgcagtaaccaa

SEQ ID NO: 586116 - DNA, 25 bp, Homo sapien
ggtggtgaatgaatagctcccctca

SEQ ID NO: 586117 - DNA, 25 bp, Homo sapien
tgtgagtgattgttgtcgtaatcag

SEQ ID NO: 586118 - DNA, 25 bp, Homo sapien
gggtgagatgttgtgtgaccacacc

SEQ ID NO: 586119 - DNA, 25 bp, Homo sapien
tcagtgacaaggcagagtcagactt

SEQ ID NO: 586120 - DNA, 25 bp, Homo sapien
cgtaatcagtgatgatgttagacaa

SEQ ID NO: 586121 - DNA, 25 bp, Homo sapien
tcggtcgtcctgaatccgggttcat

SEQ ID NO: 586122 - DNA, 25 bp, Homo sapien
ttcggtcgtcctgaatccgggttca

SEQ ID NO: 586123 - DNA, 25 bp, Homo sapien
gatctgggcaaaagaagggccttga

SEQ ID NO: 586124 - DNA, 25 bp, Homo sapien
catggaaatgatcatcggcgggacc

SEQ ID NO: 586125 - DNA, 25 bp, Homo sapien
tcacacagggaggatccaggtctca

SEQ ID NO: 586126 - DNA, 25 bp, Homo sapien
caacagtgatataagagggtggcct

SEQ ID NO: 586127 - DNA, 25 bp, Homo sapien
gacctaacttgtgggcagattcagc

SEQ ID NO: 586128 - DNA, 25 bp, Homo sapien
ggcagactcagctgtccgcacatat

SEQ ID NO: 586129 - DNA, 25 bp, Homo sapien
gagttggagtctataaaaagtgccc

SEQ ID NO: 586130 - DNA, 25 bp, Homo sapien
gctactgtgatgacaggatgccaca

SEQ ID NO: 586131 - DNA, 25 bp, Homo sapien
caaagcgtcccatcatataggtggc

SEQ ID NO: 586132 - DNA, 25 bp, Homo sapien
tgcaagcacgccatacaactttggg

SEQ ID NO: 586133 - DNA, 25 bp, Homo sapien
tgagccaaaccaagcctagcaggaa

SEQ ID NO: 586134 - DNA, 25 bp, Homo sapien
attaaacgtggtgaaatgccctggc

SEQ ID NO: 586135 - DNA, 25 bp, Homo sapien
tagattctaccacgcagatgggctc

SEQ ID NO: 586136 - DNA, 25 bp, Homo sapien
ccttgctgctgggatatggctacgt

SEQ ID NO: 586137 - DNA, 25 bp, Homo sapien
gccattctgggagtcacttgggaag

SEQ ID NO: 586138 - DNA, 25 bp, Homo sapien
gccaaccccttggtgggctgattct

SEQ ID NO: 586139 - DNA, 25 bp, Homo sapien
cggcccaacctcattgagagtcctg

SEQ ID NO: 586140 - DNA, 25 bp, Homo sapien
acaggaaattccggcccaacctcat

SEQ ID NO: 586141 - DNA, 25 bp, Homo sapien
gaaattccggcccaacctcattgag

SEQ ID NO: 586142 - DNA, 25 bp, Homo sapien
taaacatttgctggtatgttatgca

SEQ ID NO: 586143 - DNA, 25 bp, Homo sapien
tacattccacacacatacctataga

SEQ ID NO: 586144 - DNA, 25 bp, Homo sapien
tttacacatgagcacttcaaacaat

SEQ ID NO: 586145 - DNA, 25 bp, Homo sapien
tgggagttagtctaggaaatccctc

SEQ ID NO: 586146 - DNA, 25 bp, Homo sapien
caattactagtgcagacatgaagaa

SEQ ID NO: 586147 - DNA, 25 bp, Homo sapien
tagttaatacaatggcgcagtggcc

SEQ ID NO: 586148 - DNA, 25 bp, Homo sapien
taagttcagcaagattataggatgt

SEQ ID NO: 586149 - DNA, 25 bp, Homo sapien
aggatgaggctctttcaatatcttc

SEQ ID NO: 586150 - DNA, 25 bp, Homo sapien
tataggatgttacctataaacgtaa

SEQ ID NO: 586151 - DNA, 25 bp, Homo sapien
aacagcacagtaatggtaccaaaac

SEQ ID NO: 586152 - DNA, 25 bp, Homo sapien
gcacagtaatggtaccaaaacaggt

SEQ ID NO: 586153 - DNA, 25 bp, Homo sapien
acagcacagtaatggtaccaaaaca

SEQ ID NO: 586154 - DNA, 25 bp, Homo sapien
agcacagtaatggtaccaaaacagg

SEQ ID NO: 586155 - DNA, 25 bp, Homo sapien
tttctctttgccactgaccccctcc

SEQ ID NO: 586156 - DNA, 25 bp, Homo sapien
atctttgatgtaaaagggataagct

SEQ ID NO: 586157 - DNA, 25 bp, Homo sapien
atggcttttgcagccccagccacag

SEQ ID NO: 586158 - DNA, 25 bp, Homo sapien
gctgccctttcttgtcccacgaaaa

SEQ ID NO: 586159 - DNA, 25 bp, Homo sapien
cgacactgatggcttttgcagcccc

SEQ ID NO: 586160 - DNA, 25 bp, Homo sapien
cccagccacagaacaggctgctgat

SEQ ID NO: 586161 - DNA, 25 bp, Homo sapien
tggttcggctctttgtgcaccagca

SEQ ID NO: 586162 - DNA, 25 bp, Homo sapien
ctgtggagcttggttcggctctttg

SEQ ID NO: 586163 - DNA, 25 bp, Homo sapien
agcttggttcggctctttgtgcacc

SEQ ID NO: 586164 - DNA, 25 bp, Homo sapien
tggagcttggttcggctctttgtgc

SEQ ID NO: 586165 - DNA, 25 bp, Homo sapien
aaagcagggaactggccacactcac

SEQ ID NO: 586166 - DNA, 25 bp, Homo sapien
gtcaccaaagcagggaactggccac

SEQ ID NO: 586167 - DNA, 25 bp, Homo sapien
accaaagcagggaactggccacact

SEQ ID NO: 586168 - DNA, 25 bp, Homo sapien
caaagcagggaactggccacactca

SEQ ID NO: 586169 - DNA, 25 bp, Homo sapien
gcctaaccatatcacccaccctgtt

SEQ ID NO: 586170 - DNA, 25 bp, Homo sapien
gcaggagagagacgagtgaaaaagg

SEQ ID NO: 586171 - DNA, 25 bp, Homo sapien
tcagttactatcactaggcatgggg

SEQ ID NO: 586172 - DNA, 25 bp, Homo sapien
tgaaaaaggaggaacttctgaactc

SEQ ID NO: 586173 - DNA, 25 bp, Homo sapien
ttggactgcgccgaccctaatggct

SEQ ID NO: 586174 - DNA, 25 bp, Homo sapien
ttaaatgtctgtgcatccccactgt

SEQ ID NO: 586175 - DNA, 25 bp, Homo sapien
gacacattctgctgggaacgtgttg

SEQ ID NO: 586176 - DNA, 25 bp, Homo sapien
gcaggcccacaccaaaggacacatt

SEQ ID NO: 586177 - DNA, 25 bp, Homo sapien
catatccccatttcgcctgtctgtt

SEQ ID NO: 586178 - DNA, 25 bp, Homo sapien
acagcacccagccggtatgtggtat

SEQ ID NO: 586179 - DNA, 25 bp, Homo sapien
tataaagggcttttactcacatatc

SEQ ID NO: 586180 - DNA, 25 bp, Homo sapien
cacccagccggtatgtggtattttg

SEQ ID NO: 586181 - DNA, 25 bp, Homo sapien
ttgggagacatcctgccaagcagtg

SEQ ID NO: 586182 - DNA, 25 bp, Homo sapien
cacgcgggaagagattccagagctt

SEQ ID NO: 586183 - DNA, 25 bp, Homo sapien
tattctcctaccacgacaaatgtgc

SEQ ID NO: 586184 - DNA, 25 bp, Homo sapien
tgtgcctttacgaggacttgggaaa

SEQ ID NO: 586185 - DNA, 25 bp, Homo sapien
caagtaaaatgctgccatcgggaat

SEQ ID NO: 586186 - DNA, 25 bp, Homo sapien
ctttaataccttacgtgctgcctgg

SEQ ID NO: 586187 - DNA, 25 bp, Homo sapien
gaaaccagtgctttatccatgaaac

SEQ ID NO: 586188 - DNA, 25 bp, Homo sapien
catcgggaatagttaaaggaagcca

SEQ ID NO: 586189 - DNA, 25 bp, Homo sapien
taataaattagcctctaggatacat

SEQ ID NO: 586190 - DNA, 25 bp, Homo sapien
tactaacagcctatgtcattagtgg

SEQ ID NO: 586191 - DNA, 25 bp, Homo sapien
tgttttgggtcgaaatgtcatgaca

SEQ ID NO: 586192 - DNA, 25 bp, Homo sapien
gagaggaacatcatccctatataat

SEQ ID NO: 586193 - DNA, 25 bp, Homo sapien
cctgggttacatttggaatgtccga

SEQ ID NO: 586194 - DNA, 25 bp, Homo sapien
tctatgaagttccaaattccctggg

SEQ ID NO: 586195 - DNA, 25 bp, Homo sapien
gtaagactgatgcttccgtcacttg

SEQ ID NO: 586196 - DNA, 25 bp, Homo sapien
aattctgttgagtgcatcttcaccc

SEQ ID NO: 586197 - DNA, 25 bp, Homo sapien
catggactagtgcagtttgaaaacc

SEQ ID NO: 586198 - DNA, 25 bp, Homo sapien
caaggctctctgtccatgatggtaa

SEQ ID NO: 586199 - DNA, 25 bp, Homo sapien
ggtctactcatcaacctgttagcag

SEQ ID NO: 586200 - DNA, 25 bp, Homo sapien
cactcgaaaagctccatgtgatcag

SEQ ID NO: 586201 - DNA, 25 bp, Homo sapien
tgtttccagatactagctaaaagct

SEQ ID NO: 586202 - DNA, 25 bp, Homo sapien
gactaaggacactgcaaacatttgg

SEQ ID NO: 586203 - DNA, 25 bp, Homo sapien
gcagccctcataggactaaggacac

SEQ ID NO: 586204 - DNA, 25 bp, Homo sapien
ctgcaaacatttgggagctgccaag

SEQ ID NO: 586205 - DNA, 25 bp, Homo sapien
tgaaattcctccagacttgtaccgg

SEQ ID NO: 586206 - DNA, 25 bp, Homo sapien
ggtaaagtggattcttgagaaaatg

SEQ ID NO: 586207 - DNA, 25 bp, Homo sapien
cttgtaccggttggaagcttgttct

SEQ ID NO: 586208 - DNA, 25 bp, Homo sapien
gattcttgagaaaatgagtccaaca

SEQ ID NO: 586209 - DNA, 25 bp, Homo sapien
tcattagcaaaaggccacaggttgg

SEQ ID NO: 586210 - DNA, 25 bp, Homo sapien
tgatgatctgtgcacggaatcccat

SEQ ID NO: 586211 - DNA, 25 bp, Homo sapien
ccatgctcagaactagggacggaat

SEQ ID NO: 586212 - DNA, 25 bp, Homo sapien
gatttgatgtcacctggcagttcag

SEQ ID NO: 586213 - DNA, 25 bp, Homo sapien
tcgccataacatgcacaggaggtag

SEQ ID NO: 586214 - DNA, 25 bp, Homo sapien
gatcaagtataaaaccaccctgtct

SEQ ID NO: 586215 - DNA, 25 bp, Homo sapien
gtgactgtcccaggatcaagtataa

SEQ ID NO: 586216 - DNA, 25 bp, Homo sapien
attcatcccttctcgccataacatg

SEQ ID NO: 586217 - DNA, 25 bp, Homo sapien
ccccaccagcgcagttcctagactg

SEQ ID NO: 586218 - DNA, 25 bp, Homo sapien
tttcctgtccccaccagcgcagttc

SEQ ID NO: 586219 - DNA, 25 bp, Homo sapien
ctgtccccaccagcgcagttcctag

SEQ ID NO: 586220 - DNA, 25 bp, Homo sapien
tcccttcagcccaatttcctgtccc

SEQ ID NO: 586221 - DNA, 25 bp, Homo sapien
tctaagccacagaacactcacaaca

SEQ ID NO: 586222 - DNA, 25 bp, Homo sapien
ctgaaggtagagacatttttaatgg

SEQ ID NO: 586223 - DNA, 25 bp, Homo sapien
caacagtcctgccaagatctttttc

SEQ ID NO: 586224 - DNA, 25 bp, Homo sapien
taatggttagtccagcctgtaggaa

SEQ ID NO: 586225 - DNA, 25 bp, Homo sapien
cccagcgaggctccactgcacgccg

SEQ ID NO: 586226 - DNA, 25 bp, Homo sapien
gaggctccactgcacgccggggact

SEQ ID NO: 586227 - DNA, 25 bp, Homo sapien
ttcccccagcgaggctccactgcac

SEQ ID NO: 586228 - DNA, 25 bp, Homo sapien
cagcgaggctccactgcacgccggg

SEQ ID NO: 586229 - DNA, 25 bp, Homo sapien
aaagaaacttcctcgcttgtccaga

SEQ ID NO: 586230 - DNA, 25 bp, Homo sapien
ctcgcttgtccagaccgcgggcgcc

SEQ ID NO: 586231 - DNA, 25 bp, Homo sapien
ttaaagaaacttcctcgcttgtcca

SEQ ID NO: 586232 - DNA, 25 bp, Homo sapien
ttcctcgcttgtccagaccgcgggc

SEQ ID NO: 586233 - DNA, 25 bp, Homo sapien
tgtaaatcagaagcgaccaccaagt

SEQ ID NO: 586234 - DNA, 25 bp, Homo sapien
tataagccctggtaacaatcagcag

SEQ ID NO: 586235 - DNA, 25 bp, Homo sapien
tctaaggtgcggtccaggaagctgt

SEQ ID NO: 586236 - DNA, 25 bp, Homo sapien
gcaagccgacgagttgagatcccaa

SEQ ID NO: 586237 - DNA, 25 bp, Homo sapien
gcgattccacagtaaccacagggca

SEQ ID NO: 586238 - DNA, 25 bp, Homo sapien
gctaccatgtgtagggtgttacccc

SEQ ID NO: 586239 - DNA, 25 bp, Homo sapien
tgtgtgttatccacgcacctcatgt

SEQ ID NO: 586240 - DNA, 25 bp, Homo sapien
caatagctttcccagcctagatgac

SEQ ID NO: 586241 - DNA, 25 bp, Homo sapien
gtcacatgagcactaatagccaagt

SEQ ID NO: 586242 - DNA, 25 bp, Homo sapien
agaatgagaacctaaactggatggg

SEQ ID NO: 586243 - DNA, 25 bp, Homo sapien
cgaaaaagaggtccaatgattgcct

SEQ ID NO: 586244 - DNA, 25 bp, Homo sapien
cagggtcttcaagcaggtgacatgg

SEQ ID NO: 586245 - DNA, 25 bp, Homo sapien
aaaatctttgaatgtcaaggtacag

SEQ ID NO: 586246 - DNA, 25 bp, Homo sapien
agagttccgggaaagtggaagcaca

SEQ ID NO: 586247 - DNA, 25 bp, Homo sapien
tgaatgtcaaggtacagacttggtc

SEQ ID NO: 586248 - DNA, 25 bp, Homo sapien
gttccgggaaagtggaagcacagcc

SEQ ID NO: 586249 - DNA, 25 bp, Homo sapien
cctggcactgcattgagactacagc

SEQ ID NO: 586250 - DNA, 25 bp, Homo sapien
gatgaagtgggtctaaagcctggaa

SEQ ID NO: 586251 - DNA, 25 bp, Homo sapien
aactaaaggaagataccagcccagc

SEQ ID NO: 586252 - DNA, 25 bp, Homo sapien
tacagctaggccttcatacataaca

SEQ ID NO: 586253 - DNA, 25 bp, Homo sapien
gatccctctcaggatcatagccgtg

SEQ ID NO: 586254 - DNA, 25 bp, Homo sapien
tgtcgaccggacaattcaccctggt

SEQ ID NO: 586255 - DNA, 25 bp, Homo sapien
catagccgtgatgacaaatggaaag

SEQ ID NO: 586256 - DNA, 25 bp, Homo sapien
tctcttctggcaccattctttgcta

SEQ ID NO: 586257 - DNA, 25 bp, Homo sapien
gtttcttcaaagctagtcgcaggtc

SEQ ID NO: 586258 - DNA, 25 bp, Homo sapien
gaggtcaagtgaatcatcacccact

SEQ ID NO: 586259 - DNA, 25 bp, Homo sapien
cacccactggttcatctattcggta

SEQ ID NO: 586260 - DNA, 25 bp, Homo sapien
aatgccaagaagagaccaatagttg

SEQ ID NO: 586261 - DNA, 25 bp, Homo sapien
tcccctggcgaagatgagcatgtgt

SEQ ID NO: 586262 - DNA, 25 bp, Homo sapien
aatacatcattgaggggaacctggg

SEQ ID NO: 586263 - DNA, 25 bp, Homo sapien
tgttggaacgacacatgctgttagc

SEQ ID NO: 586264 - DNA, 25 bp, Homo sapien
tgacacaatagtccttcaaaactac

SEQ ID NO: 586265 - DNA, 25 bp, Homo sapien
gaggctctcagctaaactgcgttta

SEQ ID NO: 586266 - DNA, 25 bp, Homo sapien
gagtttagggattagagcaacacca

SEQ ID NO: 586267 - DNA, 25 bp, Homo sapien
aattcacctcggaccactggacata

SEQ ID NO: 586268 - DNA, 25 bp, Homo sapien
tgcgtttagatctctgacccacaga

SEQ ID NO: 586269 - DNA, 25 bp, Homo sapien
caggacatctgcccaccttggactc

SEQ ID NO: 586270 - DNA, 25 bp, Homo sapien
ggtctgggactcccgacctcaggac

SEQ ID NO: 586271 - DNA, 25 bp, Homo sapien
ctcaggacatctgcccaccttggac

SEQ ID NO: 586272 - DNA, 25 bp, Homo sapien
tctgggactcccgacctcaggacat

SEQ ID NO: 586273 - DNA, 25 bp, Homo sapien
aagtaataagtggagagcttctggt

SEQ ID NO: 586274 - DNA, 25 bp, Homo sapien
agcttctggtgatgggtggaacttc

SEQ ID NO: 586275 - DNA, 25 bp, Homo sapien
ttctggtgatgggtggaacttcctt

SEQ ID NO: 586276 - DNA, 25 bp, Homo sapien
tccttccttgaagtaataagtggag

SEQ ID NO: 586277 - DNA, 25 bp, Homo sapien
agctctgtgccttgtcctcaaaatc

SEQ ID NO: 586278 - DNA, 25 bp, Homo sapien
gtgccttgtcctcaaaatctgcgtt

SEQ ID NO: 586279 - DNA, 25 bp, Homo sapien
tgtcctcaaaatctgcgttgatgga

SEQ ID NO: 586280 - DNA, 25 bp, Homo sapien
tcaaaatctgcgttgatggacactt

SEQ ID NO: 586281 - DNA, 25 bp, Homo sapien
gaccatcccagcaatggatgcaggg

SEQ ID NO: 586282 - DNA, 25 bp, Homo sapien
gacagtggaatcgtttgaactccgg

SEQ ID NO: 586283 - DNA, 25 bp, Homo sapien
ggtgagagcacagttgaaccccagg

SEQ ID NO: 586284 - DNA, 25 bp, Homo sapien
tctggcctggtaaaaagcatggacc

SEQ ID NO: 586285 - DNA, 25 bp, Homo sapien
gcactgctgtcatcccgaaggtctt

SEQ ID NO: 586286 - DNA, 25 bp, Homo sapien
ccgtagggccttttctcccagctgc

SEQ ID NO: 586287 - DNA, 25 bp, Homo sapien
ttgaggttgtagtgaccagaactgg

SEQ ID NO: 586288 - DNA, 25 bp, Homo sapien
catcccgaaggtcttagggaatggc

SEQ ID NO: 586289 - DNA, 25 bp, Homo sapien
gattcgctccatcttaggcagtcag

SEQ ID NO: 586290 - DNA, 25 bp, Homo sapien
cgctccatcttaggcagtcagatac

SEQ ID NO: 586291 - DNA, 25 bp, Homo sapien
tgggattcgctccatcttaggcagt

SEQ ID NO: 586292 - DNA, 25 bp, Homo sapien
tgctgggattcgctccatcttaggc

SEQ ID NO: 586293 - DNA, 25 bp, Homo sapien
catttggaacctgcgctctgatgcg

SEQ ID NO: 586294 - DNA, 25 bp, Homo sapien
ttatgtggaacaacttggatgcccc

SEQ ID NO: 586295 - DNA, 25 bp, Homo sapien
gagactgtgagtgctctgcccacaa

SEQ ID NO: 586296 - DNA, 25 bp, Homo sapien
tgtctctgctactggaggaacccaa

SEQ ID NO: 586297 - DNA, 25 bp, Homo sapien
tttctcgttgtaaactctgagttgt

SEQ ID NO: 586298 - DNA, 25 bp, Homo sapien
tgagttgtacttttcctgcgcccac

SEQ ID NO: 586299 - DNA, 25 bp, Homo sapien
gttgtacttttcctgcgcccactgc

SEQ ID NO: 586300 - DNA, 25 bp, Homo sapien
ttttctcgttgtaaactctgagttg

SEQ ID NO: 586301 - DNA, 25 bp, Homo sapien
gatataaccttcaatttggcgcatg

SEQ ID NO: 586302 - DNA, 25 bp, Homo sapien
tgagtccagtgttgccttagattac

SEQ ID NO: 586303 - DNA, 25 bp, Homo sapien
caatgtgtgaactacggaagcagcg

SEQ ID NO: 586304 - DNA, 25 bp, Homo sapien
gctgaggccttgatctattgcatca

SEQ ID NO: 586305 - DNA, 25 bp, Homo sapien
ctttcaaatgacctttgcccccagg

SEQ ID NO: 586306 - DNA, 25 bp, Homo sapien
tttcaaatgacctttgcccccagga

SEQ ID NO: 586307 - DNA, 25 bp, Homo sapien
aggtgttcacctgagtgctcctgca

SEQ ID NO: 586308 - DNA, 25 bp, Homo sapien
ggtgttcacctgagtgctcctgcat

SEQ ID NO: 586309 - DNA, 25 bp, Homo sapien
tcacctgagtgctcctgcataagag

SEQ ID NO: 586310 - DNA, 25 bp, Homo sapien
gagtgctcctgcataagagctggca

SEQ ID NO: 586311 - DNA, 25 bp, Homo sapien
tgttgcctttagaagctgggagaga

SEQ ID NO: 586312 - DNA, 25 bp, Homo sapien
tcgtcctgcattcgtgcataacaca

SEQ ID NO: 586313 - DNA, 25 bp, Homo sapien
tcaacggaggtcttgccggggcatt

SEQ ID NO: 586314 - DNA, 25 bp, Homo sapien
tgcaggcatgtacagcaggacagag

SEQ ID NO: 586315 - DNA, 25 bp, Homo sapien
gaattcctgcaagcatggggagggg

SEQ ID NO: 586316 - DNA, 25 bp, Homo sapien
gtgagtgctgctcactacacccctg

SEQ ID NO: 586317 - DNA, 25 bp, Homo sapien
gggctgtctaaacatctgcaaagct

SEQ ID NO: 586318 - DNA, 25 bp, Homo sapien
catggggaggggctgtctaaacatc

SEQ ID NO: 586319 - DNA, 25 bp, Homo sapien
tttgtctgggtaccgctcttgccga

SEQ ID NO: 586320 - DNA, 25 bp, Homo sapien
ggtaccgctcttgccgatgctgttg

SEQ ID NO: 586321 - DNA, 25 bp, Homo sapien
cttgccgatgctgttggctggatct

SEQ ID NO: 586322 - DNA, 25 bp, Homo sapien
gtttttgtctgggtaccgctcttgc

SEQ ID NO: 586323 - DNA, 25 bp, Homo sapien
tctccgaggcaattgtgtcaatgag

SEQ ID NO: 586324 - DNA, 25 bp, Homo sapien
tctccgatctccgaggcaattgtgt

SEQ ID NO: 586325 - DNA, 25 bp, Homo sapien
tcagttctccgatctccgaggcaat

SEQ ID NO: 586326 - DNA, 25 bp, Homo sapien
tcctgtttcagttctccgatctccg

SEQ ID NO: 586327 - DNA, 25 bp, Homo sapien
tgggtttcagcgggttccaggccat

SEQ ID NO: 586328 - DNA, 25 bp, Homo sapien
gagaatgcaaaatgagtccatcctc

SEQ ID NO: 586329 - DNA, 25 bp, Homo sapien
gactcacacggctacactgaattct

SEQ ID NO: 586330 - DNA, 25 bp, Homo sapien
tgaattctactttgcacacgctgga

SEQ ID NO: 586331 - DNA, 25 bp, Homo sapien
gctgctcccctgtaagccttctgga

SEQ ID NO: 586332 - DNA, 25 bp, Homo sapien
cattggtgatagtgtagcgaagagt

SEQ ID NO: 586333 - DNA, 25 bp, Homo sapien
gagtcaccctgcccggcttaaatat

SEQ ID NO: 586334 - DNA, 25 bp, Homo sapien
tggtcaaccctcatagaattcattg

SEQ ID NO: 586335 - DNA, 25 bp, Homo sapien
gagtttagttgttgctacattggtg

SEQ ID NO: 586336 - DNA, 25 bp, Homo sapien
tgggtctgggatcaacaacttgtgg

SEQ ID NO: 586337 - DNA, 25 bp, Homo sapien
caatgatttcttaacaccttcagac

SEQ ID NO: 586338 - DNA, 25 bp, Homo sapien
aatctttggcacaggacaaattcca

SEQ ID NO: 586339 - DNA, 25 bp, Homo sapien
cagaggccccttatgtagagagaca

SEQ ID NO: 586340 - DNA, 25 bp, Homo sapien
agtaggacaaccaggcagacaaggg

SEQ ID NO: 586341 - DNA, 25 bp, Homo sapien
cccaacattagtcgcctgagcaggt

SEQ ID NO: 586342 - DNA, 25 bp, Homo sapien
tgctctcgtgacaaccaggttaagg

SEQ ID NO: 586343 - DNA, 25 bp, Homo sapien
gagaaaccatcgacacagagcagaa

SEQ ID NO: 586344 - DNA, 25 bp, Homo sapien
ggacagaaccctaaatgcgaaatag

SEQ ID NO: 586345 - DNA, 25 bp, Homo sapien
tgcgaaatagcatggatggtaaccg

SEQ ID NO: 586346 - DNA, 25 bp, Homo sapien
aactttgaggacagaaccctaaatg

SEQ ID NO: 586347 - DNA, 25 bp, Homo sapien
cgtgagttcctaatgctcagtagca

SEQ ID NO: 586348 - DNA, 25 bp, Homo sapien
ggagccggtccaagatgctgagcct

SEQ ID NO: 586349 - DNA, 25 bp, Homo sapien
gccaccatccttgtgtcttaccatg

SEQ ID NO: 586350 - DNA, 25 bp, Homo sapien
ttcctcggaatagccaccatccttg

SEQ ID NO: 586351 - DNA, 25 bp, Homo sapien
agaggctgtcatagcctgagtcccg

SEQ ID NO: 586352 - DNA, 25 bp, Homo sapien
tccataggactcatccagtagcagg

SEQ ID NO: 586353 - DNA, 25 bp, Homo sapien
tatctccagttgatatctcataaga

SEQ ID NO: 586354 - DNA, 25 bp, Homo sapien
tagcctacaaatgaagtgactctcc

SEQ ID NO: 586355 - DNA, 25 bp, Homo sapien
tctccctggagtatggcgtgtggca

SEQ ID NO: 586356 - DNA, 25 bp, Homo sapien
tatctagaatgttggaacccaagca

SEQ ID NO: 586357 - DNA, 25 bp, Homo sapien
ttgtggccaacagtgaaaaagcaga

SEQ ID NO: 586358 - DNA, 25 bp, Homo sapien
taagaactcccctagtctgcataag

SEQ ID NO: 586359 - DNA, 25 bp, Homo sapien
ggaaactctcctgccatagaaaggg

SEQ ID NO: 586360 - DNA, 25 bp, Homo sapien
tgagtggggccccaaattcacaggg

SEQ ID NO: 586361 - DNA, 25 bp, Homo sapien
cccaaattcacagggcaggcggagg

SEQ ID NO: 586362 - DNA, 25 bp, Homo sapien
catcttggtagatttatgaaccagg

SEQ ID NO: 586363 - DNA, 25 bp, Homo sapien
ctttatggcaaattccttgagtggg

SEQ ID NO: 586364 - DNA, 25 bp, Homo sapien
tgaaagggctctctcgctacagtct

SEQ ID NO: 586365 - DNA, 25 bp, Homo sapien
tagtcattcagtgccaagactcagg

SEQ ID NO: 586366 - DNA, 25 bp, Homo sapien
ttcacgaagaagtgcagacacatgc

SEQ ID NO: 586367 - DNA, 25 bp, Homo sapien
tattagttccctaccatatgccatg

SEQ ID NO: 586368 - DNA, 25 bp, Homo sapien
aatgaccaatcgtggaacagcagaa

SEQ ID NO: 586369 - DNA, 25 bp, Homo sapien
tcatagaagactgaacactgattgc

SEQ ID NO: 586370 - DNA, 25 bp, Homo sapien
tttggcctcccgacacttcacattt

SEQ ID NO: 586371 - DNA, 25 bp, Homo sapien
ttctgcctctgattagctgcatttc

SEQ ID NO: 586372 - DNA, 25 bp, Homo sapien
cagtacatcagaactgggtgttccc

SEQ ID NO: 586373 - DNA, 25 bp, Homo sapien
tgccctcccggctgagtagaatctc

SEQ ID NO: 586374 - DNA, 25 bp, Homo sapien
agtgggaatcccaggctctgtcttg

SEQ ID NO: 586375 - DNA, 25 bp, Homo sapien
gtagaatctcatctcggccctgaaa

SEQ ID NO: 586376 - DNA, 25 bp, Homo sapien
tgtggacttgtaagatccaggttga

SEQ ID NO: 586377 - DNA, 25 bp, Homo sapien
ttccgcctgcttgtgcgcctttcag

SEQ ID NO: 586378 - DNA, 25 bp, Homo sapien
tggttgcatcctaatgtatttacat

SEQ ID NO: 586379 - DNA, 25 bp, Homo sapien
ccatgaccttgtggacttgtaagat

SEQ ID NO: 586380 - DNA, 25 bp, Homo sapien
ttcaagcagtgggtttgcaatgtac

SEQ ID NO: 586381 - DNA, 25 bp, Homo sapien
cattatcaattcacctaacacatta

SEQ ID NO: 586382 - DNA, 25 bp, Homo sapien
taacacattattagctcaatatgaa

SEQ ID NO: 586383 - DNA, 25 bp, Homo sapien
ccagcctctcgcagactttcaaaag

SEQ ID NO: 586384 - DNA, 25 bp, Homo sapien
agaaaccagctgattctccctgagc

SEQ ID NO: 586385 - DNA, 25 bp, Homo sapien
aaccagctgattctccctgagcacg

SEQ ID NO: 586386 - DNA, 25 bp, Homo sapien
ccagctgattctccctgagcacgtt

SEQ ID NO: 586387 - DNA, 25 bp, Homo sapien
gaaaccagctgattctccctgagca

SEQ ID NO: 586388 - DNA, 25 bp, Homo sapien
tagaaagcaatgagccggaataaat

SEQ ID NO: 586389 - DNA, 25 bp, Homo sapien
gatgcagtagaaagcaatgagccgg

SEQ ID NO: 586390 - DNA, 25 bp, Homo sapien
aataaatctgcgaaactgattcctg

SEQ ID NO: 586391 - DNA, 25 bp, Homo sapien
caatgagccggaataaatctgcgaa

SEQ ID NO: 586392 - DNA, 25 bp, Homo sapien
cttcaaggtaaatggtagaacatcc

SEQ ID NO: 586393 - DNA, 25 bp, Homo sapien
tgagcctccgacttggctgttgaaa

SEQ ID NO: 586394 - DNA, 25 bp, Homo sapien
atctgggccagttcttcaagctgag

SEQ ID NO: 586395 - DNA, 25 bp, Homo sapien
ctgagcctccgacttggctgttgaa

SEQ ID NO: 586396 - DNA, 25 bp, Homo sapien
gctgagcctccgacttggctgttga

SEQ ID NO: 586397 - DNA, 25 bp, Homo sapien
cattgtcaaccattgtccggcagaa

SEQ ID NO: 586398 - DNA, 25 bp, Homo sapien
agaagtgccgtcaatgcccgtgtgc

SEQ ID NO: 586399 - DNA, 25 bp, Homo sapien
gctgggtcaagtatcacagtgagtg

SEQ ID NO: 586400 - DNA, 25 bp, Homo sapien
tccccggcagggttaggacatggac

SEQ ID NO: 586401 - DNA, 25 bp, Homo sapien
aaattaagagaaaaatatgccagag

SEQ ID NO: 586402 - DNA, 25 bp, Homo sapien
cgcttgcttcaaaacaagttcttta

SEQ ID NO: 586403 - DNA, 25 bp, Homo sapien
tctttaaattaagagaaaaatatgc

SEQ ID NO: 586404 - DNA, 25 bp, Homo sapien
ttaaattaagagaaaaatatgccag

SEQ ID NO: 586405 - DNA, 25 bp, Homo sapien
gacccggtgcacatcttcaagaggc

SEQ ID NO: 586406 - DNA, 25 bp, Homo sapien
taagcctgtggaccatcagactgga

SEQ ID NO: 586407 - DNA, 25 bp, Homo sapien
tctcggcatggcacaagcattgtcc

SEQ ID NO: 586408 - DNA, 25 bp, Homo sapien
tatatgttaattagccctcagtcgc

SEQ ID NO: 586409 - DNA, 25 bp, Homo sapien
tctgacaaacattcagggcctgagt

SEQ ID NO: 586410 - DNA, 25 bp, Homo sapien
tttaacctgtgtggctactagacag

SEQ ID NO: 586411 - DNA, 25 bp, Homo sapien
tggaacttggttatgagaatctacc

SEQ ID NO: 586412 - DNA, 25 bp, Homo sapien
agaaattacttccacctcctttgag

SEQ ID NO: 586413 - DNA, 25 bp, Homo sapien
tcccaaatcctatataacctcctca

SEQ ID NO: 586414 - DNA, 25 bp, Homo sapien
cagccaaggaatcgggccttgaagt

SEQ ID NO: 586415 - DNA, 25 bp, Homo sapien
tgccagccaaggaatcgggccttga

SEQ ID NO: 586416 - DNA, 25 bp, Homo sapien
gccaaggaatcgggccttgaagttc

SEQ ID NO: 586417 - DNA, 25 bp, Homo sapien
tgaagttcccctttaatgggcagga

SEQ ID NO: 586418 - DNA, 25 bp, Homo sapien
ttactgcattcctttactggaaagg

SEQ ID NO: 586419 - DNA, 25 bp, Homo sapien
actcaggtttactgcattcctttac

SEQ ID NO: 586420 - DNA, 25 bp, Homo sapien
gggtgcgttgtactcaggtttactg

SEQ ID NO: 586421 - DNA, 25 bp, Homo sapien
tgcatgacaacgcgagtcttgcggg

SEQ ID NO: 586422 - DNA, 25 bp, Homo sapien
gaaggttcgggggtttgctgtcagc

SEQ ID NO: 586423 - DNA, 25 bp, Homo sapien
ggttcgggggtttgctgtcagctgg

SEQ ID NO: 586424 - DNA, 25 bp, Homo sapien
aaggttcgggggtttgctgtcagct

SEQ ID NO: 586425 - DNA, 25 bp, Homo sapien
tggaaggttcgggggtttgctgtca

SEQ ID NO: 586426 - DNA, 25 bp, Homo sapien
actgtttctggcatgctcgtctggg

SEQ ID NO: 586427 - DNA, 25 bp, Homo sapien
ccatttataaggcagagctgacgca

SEQ ID NO: 586428 - DNA, 25 bp, Homo sapien
ctcgtctgggtttcagtcctggcca

SEQ ID NO: 586429 - DNA, 25 bp, Homo sapien
cattcgcgttgggagtccttgtgct

SEQ ID NO: 586430 - DNA, 25 bp, Homo sapien
aaggtctttgcaccgccctctgctt

SEQ ID NO: 586431 - DNA, 25 bp, Homo sapien
cgccgctcaaggtctttgcaccgcc

SEQ ID NO: 586432 - DNA, 25 bp, Homo sapien
gctcaaggtctttgcaccgccctct

SEQ ID NO: 586433 - DNA, 25 bp, Homo sapien
ggccggccgccgctcaaggtctttg

SEQ ID NO: 586434 - DNA, 25 bp, Homo sapien
gaaatgctcatgtcgctcagccgct

SEQ ID NO: 586435 - DNA, 25 bp, Homo sapien
gacttgacgagcttgggcagcacga

SEQ ID NO: 586436 - DNA, 25 bp, Homo sapien
catttgtcccgggaaagctcggcga

SEQ ID NO: 586437 - DNA, 25 bp, Homo sapien
tcttcagggatcagcgactcgatgg

SEQ ID NO: 586438 - DNA, 25 bp, Homo sapien
tggaagaaaagactgcttgccaaat

SEQ ID NO: 586439 - DNA, 25 bp, Homo sapien
gaagaaaagactgcttgccaaattc

SEQ ID NO: 586440 - DNA, 25 bp, Homo sapien
tcaccctggaagaaaagactgcttg

SEQ ID NO: 586441 - DNA, 25 bp, Homo sapien
gaaaagactgcttgccaaattcaaa

SEQ ID NO: 586442 - DNA, 25 bp, Homo sapien
tatttcaaaagcctagcactgtcac

SEQ ID NO: 586443 - DNA, 25 bp, Homo sapien
ctaatagttagggtcgcatctttcc

SEQ ID NO: 586444 - DNA, 25 bp, Homo sapien
gtccatgttctggtcagaggcctaa

SEQ ID NO: 586445 - DNA, 25 bp, Homo sapien
gacaagtgggctggctaagtccatg

SEQ ID NO: 586446 - DNA, 25 bp, Homo sapien
cctggaatgaatagagagctggcac

SEQ ID NO: 586447 - DNA, 25 bp, Homo sapien
gagggatttcccaagactgacatca

SEQ ID NO: 586448 - DNA, 25 bp, Homo sapien
tgtgaacacccaccagtgaggaacg

SEQ ID NO: 586449 - DNA, 25 bp, Homo sapien
agtaatgagcgcagcacactgtccg

SEQ ID NO: 586450 - DNA, 25 bp, Homo sapien
tgatgtaacataattgaccccattt

SEQ ID NO: 586451 - DNA, 25 bp, Homo sapien
caactccaggggtgtcaaccttgtt

SEQ ID NO: 586452 - DNA, 25 bp, Homo sapien
tgtaacataattgaccccattttga

SEQ ID NO: 586453 - DNA, 25 bp, Homo sapien
acaactccaggggtgtcaaccttgt

SEQ ID NO: 586454 - DNA, 25 bp, Homo sapien
gtgagcaaggtctttccgaattact

SEQ ID NO: 586455 - DNA, 25 bp, Homo sapien
ttccgaattactgagctaacagccc

SEQ ID NO: 586456 - DNA, 25 bp, Homo sapien
cttgtgagcaaggtctttccgaatt

SEQ ID NO: 586457 - DNA, 25 bp, Homo sapien
ctttccgaattactgagctaacagc

SEQ ID NO: 586458 - DNA, 25 bp, Homo sapien
tgctgaccacctactgcatggattc

SEQ ID NO: 586459 - DNA, 25 bp, Homo sapien
tttccttcatgctgaccacctactg

SEQ ID NO: 586460 - DNA, 25 bp, Homo sapien
ttcatgctgaccacctactgcatgg

SEQ ID NO: 586461 - DNA, 25 bp, Homo sapien
ccacctactgcatggattccagagg

SEQ ID NO: 586462 - DNA, 25 bp, Homo sapien
aacagacaacaccaagcagcgccat

SEQ ID NO: 586463 - DNA, 25 bp, Homo sapien
gcaactctatgcattggttgcaggc

SEQ ID NO: 586464 - DNA, 25 bp, Homo sapien
aaccaacagacaacaccaagcagcg

SEQ ID NO: 586465 - DNA, 25 bp, Homo sapien
caatggacatctgcaactctatgca

SEQ ID NO: 586466 - DNA, 25 bp, Homo sapien
gccaaagaaagtgtagctactatga

SEQ ID NO: 586467 - DNA, 25 bp, Homo sapien
tgccaaagaaagtgtagctactatg

SEQ ID NO: 586468 - DNA, 25 bp, Homo sapien
ctgccaaagaaagtgtagctactat

SEQ ID NO: 586469 - DNA, 25 bp, Homo sapien
tgtaaatgagcttgcagacccgcag

SEQ ID NO: 586470 - DNA, 25 bp, Homo sapien
gagttgttctccatgaccgtgtaaa

SEQ ID NO: 586471 - DNA, 25 bp, Homo sapien
gagttgcttccatgagccatcggcc

SEQ ID NO: 586472 - DNA, 25 bp, Homo sapien
gcatgaccttcttttccggcgaata

SEQ ID NO: 586473 - DNA, 25 bp, Homo sapien
taacagcgatgggtctaggagctcc

SEQ ID NO: 586474 - DNA, 25 bp, Homo sapien
gatttcagtgtccaattcaagcatg

SEQ ID NO: 586475 - DNA, 25 bp, Homo sapien
tgacataggtcaggactggcaagaa

SEQ ID NO: 586476 - DNA, 25 bp, Homo sapien
gcaagaagtcatcagcgccatacat

SEQ ID NO: 586477 - DNA, 25 bp, Homo sapien
aatagtttgacactaaataaaggtg

SEQ ID NO: 586478 - DNA, 25 bp, Homo sapien
accacgagtgtgtattacttttgca

SEQ ID NO: 586479 - DNA, 25 bp, Homo sapien
caagtaactgcttcatgggtgcaga

SEQ ID NO: 586480 - DNA, 25 bp, Homo sapien
tgtgacatgaatttcgtctcaatta

SEQ ID NO: 586481 - DNA, 25 bp, Homo sapien
gcctgggatcgggtacgggaggaga

SEQ ID NO: 586482 - DNA, 25 bp, Homo sapien
ggtacgggaggagagatattcatcc

SEQ ID NO: 586483 - DNA, 25 bp, Homo sapien
gaagggcataatcgggctccaagga

SEQ ID NO: 586484 - DNA, 25 bp, Homo sapien
tgagtcagcactacccatggtcacg

SEQ ID NO: 586485 - DNA, 25 bp, Homo sapien
gcttttgtatcctcactagctgtgc

SEQ ID NO: 586486 - DNA, 25 bp, Homo sapien
cagccacctgtccattagtcatcaa

SEQ ID NO: 586487 - DNA, 25 bp, Homo sapien
ggattcgtggaggagaagacagcca

SEQ ID NO: 586488 - DNA, 25 bp, Homo sapien
tctttcttgtgggattcgtggagga

SEQ ID NO: 586489 - DNA, 25 bp, Homo sapien
tgaggttattttttcccgcggcata

SEQ ID NO: 586490 - DNA, 25 bp, Homo sapien
cctctctctggtcaataagtggcaa

SEQ ID NO: 586491 - DNA, 25 bp, Homo sapien
cgcggcataatctgggtcaccctga

SEQ ID NO: 586492 - DNA, 25 bp, Homo sapien
gctttattcatgtgagaccctgcag

SEQ ID NO: 586493 - DNA, 25 bp, Homo sapien
aagagcatggcactcactcctccat

SEQ ID NO: 586494 - DNA, 25 bp, Homo sapien
caagagcatggcactcactcctcca

SEQ ID NO: 586495 - DNA, 25 bp, Homo sapien
ggttggtggttctccgtttgtgcca

SEQ ID NO: 586496 - DNA, 25 bp, Homo sapien
tatgcgcttgtcaagtaatagcctc

SEQ ID NO: 586497 - DNA, 25 bp, Homo sapien
tttctgagctgagcagtcgcgctgc

SEQ ID NO: 586498 - DNA, 25 bp, Homo sapien
gagaaagtgctccatatgcgcttgt

SEQ ID NO: 586499 - DNA, 25 bp, Homo sapien
tcatgaaacatgtaaacctgtggcc

SEQ ID NO: 586500 - DNA, 25 bp, Homo sapien
tgcctgcaaggtcaccacgagggtt

SEQ ID NO: 586501 - DNA, 25 bp, Homo sapien
caaagacgtttgcaggctcaggtgc

SEQ ID NO: 586502 - DNA, 25 bp, Homo sapien
ttacaagatacaaagcccagaccag

SEQ ID NO: 586503 - DNA, 25 bp, Homo sapien
ggtctttcctgtgcaaccactgttg

SEQ ID NO: 586504 - DNA, 25 bp, Homo sapien
tgctgccatgtctcgtcaacgaaga

SEQ ID NO: 586505 - DNA, 25 bp, Homo sapien
tggtgaggtcttcttccccgttctg

SEQ ID NO: 586506 - DNA, 25 bp, Homo sapien
taaggtctcacaaggagggtctttc

SEQ ID NO: 586507 - DNA, 25 bp, Homo sapien
taagccaacctagaacctgactggg

SEQ ID NO: 586508 - DNA, 25 bp, Homo sapien
tgtgttacgtggatacaagaccctc

SEQ ID NO: 586509 - DNA, 25 bp, Homo sapien
gaccctcatagtttgtgcacctgca

SEQ ID NO: 586510 - DNA, 25 bp, Homo sapien
taaagttgcccttggccgagttggc

SEQ ID NO: 586511 - DNA, 25 bp, Homo sapien
gaggccttggttacactttctcaga

SEQ ID NO: 586512 - DNA, 25 bp, Homo sapien
ggccttggttacactttctcagaaa

SEQ ID NO: 586513 - DNA, 25 bp, Homo sapien
gggaggccttggttacactttctca

SEQ ID NO: 586514 - DNA, 25 bp, Homo sapien
gccttggttacactttctcagaaat

SEQ ID NO: 586515 - DNA, 25 bp, Homo sapien
taaacctttgatacccattactgcc

SEQ ID NO: 586516 - DNA, 25 bp, Homo sapien
aacttgccagcagataatagcatga

SEQ ID NO: 586517 - DNA, 25 bp, Homo sapien
gaaatgccaaagcagtcgattatct

SEQ ID NO: 586518 - DNA, 25 bp, Homo sapien
tggtgcctggatgttctaagcactt

SEQ ID NO: 586519 - DNA, 25 bp, Homo sapien
acgcacacaccaccatcaccgccat

SEQ ID NO: 586520 - DNA, 25 bp, Homo sapien
ctacttatttttaaactgttatcag

SEQ ID NO: 586521 - DNA, 25 bp, Homo sapien
ttctcccttctctcctgtttgtcta

SEQ ID NO: 586522 - DNA, 25 bp, Homo sapien
tcccttctctcctgtttgtctactt

SEQ ID NO: 586523 - DNA, 25 bp, Homo sapien
tctacttatttttaaactgttatca

SEQ ID NO: 586524 - DNA, 25 bp, Homo sapien
agggcagtacagagaatatcctgga

SEQ ID NO: 586525 - DNA, 25 bp, Homo sapien
tgcagggcagtacagagaatatcct

SEQ ID NO: 586526 - DNA, 25 bp, Homo sapien
acgtgcagggcagtacagagaatat

SEQ ID NO: 586527 - DNA, 25 bp, Homo sapien
cattccaacacatggggtcagggga

SEQ ID NO: 586528 - DNA, 25 bp, Homo sapien
gggaattgccaggtcgctcctgtaa

SEQ ID NO: 586529 - DNA, 25 bp, Homo sapien
aaccgagcgagacggggtactgctt

SEQ ID NO: 586530 - DNA, 25 bp, Homo sapien
tgccggaagtctcccggagcgtggc

SEQ ID NO: 586531 - DNA, 25 bp, Homo sapien
tccgggctacgagttgctgggcaac

SEQ ID NO: 586532 - DNA, 25 bp, Homo sapien
ttgttgaagcggaacaggtcgtcgc

SEQ ID NO: 586533 - DNA, 25 bp, Homo sapien
acaggtcgtcgcaggtaaaggcccg

SEQ ID NO: 586534 - DNA, 25 bp, Homo sapien
aagcggaacaggtcgtcgcaggtaa

SEQ ID NO: 586535 - DNA, 25 bp, Homo sapien
cgtcgcaggtaaaggcccgtagcgt

SEQ ID NO: 586536 - DNA, 25 bp, Homo sapien
cggctggccctaggcgcgtgtcact

SEQ ID NO: 586537 - DNA, 25 bp, Homo sapien
ggaagcgaggcccggccaagagcgg

SEQ ID NO: 586538 - DNA, 25 bp, Homo sapien
ggccaagagcggctggccctaggcg

SEQ ID NO: 586539 - DNA, 25 bp, Homo sapien
gcccggccaagagcggctggcccta

SEQ ID NO: 586540 - DNA, 25 bp, Homo sapien
ccagggaggcgcccacgttggccgg

SEQ ID NO: 586541 - DNA, 25 bp, Homo sapien
tggccccagggaggcgcccacgttg

SEQ ID NO: 586542 - DNA, 25 bp, Homo sapien
agggaggcgcccacgttggccggcg

SEQ ID NO: 586543 - DNA, 25 bp, Homo sapien
ctctccctggaccctgtggccccag

SEQ ID NO: 586544 - DNA, 25 bp, Homo sapien
ccagagacaaagtttgagcacctcg

SEQ ID NO: 586545 - DNA, 25 bp, Homo sapien
ctgacagcgaccacgagcggaggcc

SEQ ID NO: 586546 - DNA, 25 bp, Homo sapien
gtttgagcacctcggccaaggtcgc

SEQ ID NO: 586547 - DNA, 25 bp, Homo sapien
caaggccggcgtgcgtcgactccag

SEQ ID NO: 586548 - DNA, 25 bp, Homo sapien
aggtgggcttcacgatgtacacatc

SEQ ID NO: 586549 - DNA, 25 bp, Homo sapien
gggacgcagtgatcagtgtcatttc

SEQ ID NO: 586550 - DNA, 25 bp, Homo sapien
gatacaatttaaccacggccaccag

SEQ ID NO: 586551 - DNA, 25 bp, Homo sapien
cacgatgtacacatcccaacagctg

SEQ ID NO: 586552 - DNA, 25 bp, Homo sapien
taagatctgccgtgactcctcacag

SEQ ID NO: 586553 - DNA, 25 bp, Homo sapien
ggtctggccttaactcgaatccaaa

SEQ ID NO: 586554 - DNA, 25 bp, Homo sapien
gctacagtaactaaacttgcaaaca

SEQ ID NO: 586555 - DNA, 25 bp, Homo sapien
ctcacagaggaaaggtgtgtacacc

SEQ ID NO: 586556 - DNA, 25 bp, Homo sapien
gaaggagagataccagcgtagcaaa

SEQ ID NO: 586557 - DNA, 25 bp, Homo sapien
agagataccagcgtagcaaaatgtt

SEQ ID NO: 586558 - DNA, 25 bp, Homo sapien
agataccagcgtagcaaaatgttaa

SEQ ID NO: 586559 - DNA, 25 bp, Homo sapien
ggagagataccagcgtagcaaaatg

SEQ ID NO: 586560 - DNA, 25 bp, Homo sapien
cttgaatcggaaccactttgtcctt

SEQ ID NO: 586561 - DNA, 25 bp, Homo sapien
ccagccatcttatcccatagttctt

SEQ ID NO: 586562 - DNA, 25 bp, Homo sapien
tgacacttgaatcggaaccactttg

SEQ ID NO: 586563 - DNA, 25 bp, Homo sapien
tcttcctgacacttgaatcggaacc

SEQ ID NO: 586564 - DNA, 25 bp, Homo sapien
gctgtcacagccactattaaggtgt

SEQ ID NO: 586565 - DNA, 25 bp, Homo sapien
caataaccagttgaaataagcctgc

SEQ ID NO: 586566 - DNA, 25 bp, Homo sapien
tctcgcagagacagaaggtcaaact

SEQ ID NO: 586567 - DNA, 25 bp, Homo sapien
gaccaactagggatgtatctcgcag

SEQ ID NO: 586568 - DNA, 25 bp, Homo sapien
agtttctgtaagtggatccaagtta

SEQ ID NO: 586569 - DNA, 25 bp, Homo sapien
ttctcagtaaatcttcattcaactt

SEQ ID NO: 586570 - DNA, 25 bp, Homo sapien
ctttattctcagtaaatcttcattc

SEQ ID NO: 586571 - DNA, 25 bp, Homo sapien
tattctcagtaaatcttcattcaac

SEQ ID NO: 586572 - DNA, 25 bp, Homo sapien
tctcagtaaatcttcattcaacttt

SEQ ID NO: 586573 - DNA, 25 bp, Homo sapien
gttcacactggagactatgcagcca

SEQ ID NO: 586574 - DNA, 25 bp, Homo sapien
ctttctggtgaatacagccatgctg

SEQ ID NO: 586575 - DNA, 25 bp, Homo sapien
gcttatgatgtttcctgacctacaa

SEQ ID NO: 586576 - DNA, 25 bp, Homo sapien
gctgtggcaacatctggaacaaggt

SEQ ID NO: 586577 - DNA, 25 bp, Homo sapien
gggtagttcctactttgacttcagc

SEQ ID NO: 586578 - DNA, 25 bp, Homo sapien
tattgtttgtttgcggtctgcctcc

SEQ ID NO: 586579 - DNA, 25 bp, Homo sapien
ttccagagccaacttaattacccag

SEQ ID NO: 586580 - DNA, 25 bp, Homo sapien
gcagagaatcaggaccccaaagttc

SEQ ID NO: 586581 - DNA, 25 bp, Homo sapien
tactttatccccagctctgtatgag

SEQ ID NO: 586582 - DNA, 25 bp, Homo sapien
aaggagtgtgaaaagtaatggacag

SEQ ID NO: 586583 - DNA, 25 bp, Homo sapien
agttcttcattaagggatattgtaa

SEQ ID NO: 586584 - DNA, 25 bp, Homo sapien
cagctctgtatgagtcctataatca

SEQ ID NO: 586585 - DNA, 25 bp, Homo sapien
tgggcgaggtattgtaggtagaaag

SEQ ID NO: 586586 - DNA, 25 bp, Homo sapien
tggccagtgggcgaggtattgtagg

SEQ ID NO: 586587 - DNA, 25 bp, Homo sapien
cagtgggcgaggtattgtaggtaga

SEQ ID NO: 586588 - DNA, 25 bp, Homo sapien
ggcgaggtattgtaggtagaaagga

SEQ ID NO: 586589 - DNA, 25 bp, Homo sapien
taacccattaattctccaccaggtg

SEQ ID NO: 586590 - DNA, 25 bp, Homo sapien
tataacccattaattctccaccagg

SEQ ID NO: 586591 - DNA, 25 bp, Homo sapien
ataacccattaattctccaccaggt

SEQ ID NO: 586592 - DNA, 25 bp, Homo sapien
caattctgcagtctaaagcaatcag

SEQ ID NO: 586593 - DNA, 25 bp, Homo sapien
tgccgttatcgcctgggcctagcac

SEQ ID NO: 586594 - DNA, 25 bp, Homo sapien
tgtctggttcactgccgttatcgcc

SEQ ID NO: 586595 - DNA, 25 bp, Homo sapien
tagcacagtgcccaaaacagagatc

SEQ ID NO: 586596 - DNA, 25 bp, Homo sapien
atgtaacactatctgttacatttag

SEQ ID NO: 586597 - DNA, 25 bp, Homo sapien
tgtaacactatctgttacatttaga

SEQ ID NO: 586598 - DNA, 25 bp, Homo sapien
aatgtaacactatctgttacattta

SEQ ID NO: 586599 - DNA, 25 bp, Homo sapien
gaaatctcctctagtaactccataa

SEQ ID NO: 586600 - DNA, 25 bp, Homo sapien
tagtaactccataagtttagcagcc

SEQ ID NO: 586601 - DNA, 25 bp, Homo sapien
tagcagccaaaccaaggcgtcgaaa

SEQ ID NO: 586602 - DNA, 25 bp, Homo sapien
gaaattctggggcaacagacagagc

SEQ ID NO: 586603 - DNA, 25 bp, Homo sapien
ttaagctcaagaacccttctcagca

SEQ ID NO: 586604 - DNA, 25 bp, Homo sapien
aatggcagcttgacaacaggtgaag

SEQ ID NO: 586605 - DNA, 25 bp, Homo sapien
gattagcaccgacttctttttcagc

SEQ ID NO: 586606 - DNA, 25 bp, Homo sapien
ttctagaatgaagatacgaggaggg

SEQ ID NO: 586607 - DNA, 25 bp, Homo sapien
ttacagtcacgtgctaccacacccg

SEQ ID NO: 586608 - DNA, 25 bp, Homo sapien
attacagtcacgtgctaccacaccc

SEQ ID NO: 586609 - DNA, 25 bp, Homo sapien
tgaagcgggactaacttgtccctaa

SEQ ID NO: 586610 - DNA, 25 bp, Homo sapien
tcagtgtatcactactaaatatatt

SEQ ID NO: 586611 - DNA, 25 bp, Homo sapien
aggaaagcattcagtgtatcactac

SEQ ID NO: 586612 - DNA, 25 bp, Homo sapien
aaattactgaagcgggactaacttg

SEQ ID NO: 586613 - DNA, 25 bp, Homo sapien
gtttatcgctccacttatcagggct

SEQ ID NO: 586614 - DNA, 25 bp, Homo sapien
tacactgaggccacagagacactct

SEQ ID NO: 586615 - DNA, 25 bp, Homo sapien
tacattggaactgcggtcgattacc

SEQ ID NO: 586616 - DNA, 25 bp, Homo sapien
cagagaggtcttgcatagcacttgc

SEQ ID NO: 586617 - DNA, 25 bp, Homo sapien
aggctccccgttgctggccgaatag

SEQ ID NO: 586618 - DNA, 25 bp, Homo sapien
ggccgaatagtactctatgaccgtc

SEQ ID NO: 586619 - DNA, 25 bp, Homo sapien
tatgaccgtcctatatacactgtag

SEQ ID NO: 586620 - DNA, 25 bp, Homo sapien
gtagcccaactgcttgtacatgtta

SEQ ID NO: 586621 - DNA, 25 bp, Homo sapien
tatccctggaaagtgctttcctcat

SEQ ID NO: 586622 - DNA, 25 bp, Homo sapien
agtatccctggaaagtgctttcctc

SEQ ID NO: 586623 - DNA, 25 bp, Homo sapien
tcagtatccctggaaagtgctttcc

SEQ ID NO: 586624 - DNA, 25 bp, Homo sapien
tccctggaaagtgctttcctcatat

SEQ ID NO: 586625 - DNA, 25 bp, Homo sapien
atgaggtaatggtatgatggatttc

SEQ ID NO: 586626 - DNA, 25 bp, Homo sapien
tgaggtaatggtatgatggatttct

SEQ ID NO: 586627 - DNA, 25 bp, Homo sapien
ggtatgatattgctaactggaaaca

SEQ ID NO: 586628 - DNA, 25 bp, Homo sapien
tatgtttccttctgacctagctgcc

SEQ ID NO: 586629 - DNA, 25 bp, Homo sapien
tgaatactatgaaccatgagagtgg

SEQ ID NO: 586630 - DNA, 25 bp, Homo sapien
aatattgtccataaagcatctagag

SEQ ID NO: 586631 - DNA, 25 bp, Homo sapien
aatgactaacaaacttcagaaaaca

SEQ ID NO: 586632 - DNA, 25 bp, Homo sapien
taaaatactacgtatggaagtcaca

SEQ ID NO: 586633 - DNA, 25 bp, Homo sapien
gcttcttaagtatgctggacagtga

SEQ ID NO: 586634 - DNA, 25 bp, Homo sapien
taatggtatgaacgcaggtgactgg

SEQ ID NO: 586635 - DNA, 25 bp, Homo sapien
tactacacgataagaagggagcttc

SEQ ID NO: 586636 - DNA, 25 bp, Homo sapien
ccaaacttagtggacaatggagtca

SEQ ID NO: 586637 - DNA, 25 bp, Homo sapien
aacatctcccagtgtgctatagtag

SEQ ID NO: 586638 - DNA, 25 bp, Homo sapien
catgtgtagaaacacctaaggtagc

SEQ ID NO: 586639 - DNA, 25 bp, Homo sapien
tcagttaggcgctcatcagttctcc

SEQ ID NO: 586640 - DNA, 25 bp, Homo sapien
tgaccagaccattattgaccgctta

SEQ ID NO: 586641 - DNA, 25 bp, Homo sapien
aaagctggcagtaatccagtgaggc

SEQ ID NO: 586642 - DNA, 25 bp, Homo sapien
tggctagaaactgtgctaagggctt

SEQ ID NO: 586643 - DNA, 25 bp, Homo sapien
tagagatgaacaggcgtggccctgc

SEQ ID NO: 586644 - DNA, 25 bp, Homo sapien
tccaggacgccgcactccacgcgct

SEQ ID NO: 586645 - DNA, 25 bp, Homo sapien
cgcgctgccgcaaggaggacgcgca

SEQ ID NO: 586646 - DNA, 25 bp, Homo sapien
aggacgccgcactccacgcgctgcc

SEQ ID NO: 586647 - DNA, 25 bp, Homo sapien
tccacgcgctgccgcaaggaggacg

SEQ ID NO: 586648 - DNA, 25 bp, Homo sapien
tgctagtcagcacggcgttacccac

SEQ ID NO: 586649 - DNA, 25 bp, Homo sapien
accgcagtccttgcgtcgctgctag

SEQ ID NO: 586650 - DNA, 25 bp, Homo sapien
tgcgtcgctgctagtcagcacggcg

SEQ ID NO: 586651 - DNA, 25 bp, Homo sapien
cagtccttgcgtcgctgctagtcag

SEQ ID NO: 586652 - DNA, 25 bp, Homo sapien
gatagatgatatttagcttcccaaa

SEQ ID NO: 586653 - DNA, 25 bp, Homo sapien
ttgatacaataaacatcctgtgatt

SEQ ID NO: 586654 - DNA, 25 bp, Homo sapien
cctgtgattctgttcttcggcaatg

SEQ ID NO: 586655 - DNA, 25 bp, Homo sapien
acagcttgcaggtaaattttctaat

SEQ ID NO: 586656 - DNA, 25 bp, Homo sapien
ttgtggctcctaagaaatctattag

SEQ ID NO: 586657 - DNA, 25 bp, Homo sapien
ctctccactattgaagatattctac

SEQ ID NO: 586658 - DNA, 25 bp, Homo sapien
tactatcttctgactactattgtgg

SEQ ID NO: 586659 - DNA, 25 bp, Homo sapien
taatctttagttctttgcaggtaac

SEQ ID NO: 586660 - DNA, 25 bp, Homo sapien
gcagtttttgcacggtatctcaggc

SEQ ID NO: 586661 - DNA, 25 bp, Homo sapien
acggcttacttgcatggttggcagc

SEQ ID NO: 586662 - DNA, 25 bp, Homo sapien
tatctcaggctatcaaatggcagca

SEQ ID NO: 586663 - DNA, 25 bp, Homo sapien
gactcagtgtctaagacggcttact

SEQ ID NO: 586664 - DNA, 25 bp, Homo sapien
ctctgccccagactcccagagtcat

SEQ ID NO: 586665 - DNA, 25 bp, Homo sapien
gctcctctgccccagactcccagag

SEQ ID NO: 586666 - DNA, 25 bp, Homo sapien
ctccctccagctcttggtcttctgg

SEQ ID NO: 586667 - DNA, 25 bp, Homo sapien
tccctccagctcttggtcttctggg

SEQ ID NO: 586668 - DNA, 25 bp, Homo sapien
attgcagagggtaacagcaaggttg

SEQ ID NO: 586669 - DNA, 25 bp, Homo sapien
cagagggtaacagcaaggttggcct

SEQ ID NO: 586670 - DNA, 25 bp, Homo sapien
ttgtcattgcagagggtaacagcaa

SEQ ID NO: 586671 - DNA, 25 bp, Homo sapien
tcattgcagagggtaacagcaaggt

SEQ ID NO: 586672 - DNA, 25 bp, Homo sapien
cactgtcgagctcccggaacactga

SEQ ID NO: 586673 - DNA, 25 bp, Homo sapien
atgtcactgtcgagctcccggaaca

SEQ ID NO: 586674 - DNA, 25 bp, Homo sapien
tgggatgtcactgtcgagctcccgg

SEQ ID NO: 586675 - DNA, 25 bp, Homo sapien
attccagttggggtagtccaggaag

SEQ ID NO: 586676 - DNA, 25 bp, Homo sapien
cagccaacagaatactcatccacgg

SEQ ID NO: 586677 - DNA, 25 bp, Homo sapien
aatactcatccacggccacaaagag

SEQ ID NO: 586678 - DNA, 25 bp, Homo sapien
gcaacagccaacagaatactcatcc

SEQ ID NO: 586679 - DNA, 25 bp, Homo sapien
cgaagaatctctttgcaacagccaa

SEQ ID NO: 586680 - DNA, 25 bp, Homo sapien
catctggacggtctggtgtgacatt

SEQ ID NO: 586681 - DNA, 25 bp, Homo sapien
gagaataaagggtgccatgttcata

SEQ ID NO: 586682 - DNA, 25 bp, Homo sapien
taacctttgacctggcatctggacg

SEQ ID NO: 586683 - DNA, 25 bp, Homo sapien
agggccccttttcgatctgtcccat

SEQ ID NO: 586684 - DNA, 25 bp, Homo sapien
gcagctctggcactgccttatacac

SEQ ID NO: 586685 - DNA, 25 bp, Homo sapien
tgtaggatggcacgatgagaaatat

SEQ ID NO: 586686 - DNA, 25 bp, Homo sapien
aggatggcacgatgagaaatatgaa

SEQ ID NO: 586687 - DNA, 25 bp, Homo sapien
ctctggcactgccttatacacggtt

SEQ ID NO: 586688 - DNA, 25 bp, Homo sapien
ccccacttggtcaaaaacagttatg

SEQ ID NO: 586689 - DNA, 25 bp, Homo sapien
gctttgcgaacgtgcagctgaggat

SEQ ID NO: 586690 - DNA, 25 bp, Homo sapien
ggctgtgcctgtgacatatatgcac

SEQ ID NO: 586691 - DNA, 25 bp, Homo sapien
tcttcctcatacgtcagacacggga

SEQ ID NO: 586692 - DNA, 25 bp, Homo sapien
aacatccaaatcttggagttctgaa

SEQ ID NO: 586693 - DNA, 25 bp, Homo sapien
aaacatccaaatcttggagttctga

SEQ ID NO: 586694 - DNA, 25 bp, Homo sapien
cctggggacatccactccgcttcca

SEQ ID NO: 586695 - DNA, 25 bp, Homo sapien
ctcctggggacatccactccgcttc

SEQ ID NO: 586696 - DNA, 25 bp, Homo sapien
tcctggggacatccactccgcttcc

SEQ ID NO: 586697 - DNA, 25 bp, Homo sapien
tccttcagaattgtgtcatagcgca

SEQ ID NO: 586698 - DNA, 25 bp, Homo sapien
gtattcaccgtaagtttccttcaga

SEQ ID NO: 586699 - DNA, 25 bp, Homo sapien
tcatcttgggcctctattagttcgg

SEQ ID NO: 586700 - DNA, 25 bp, Homo sapien
attagttcggccaggaagtattcac

SEQ ID NO: 586701 - DNA, 25 bp, Homo sapien
ttaagatcgaggtctgtggtctccc

SEQ ID NO: 586702 - DNA, 25 bp, Homo sapien
caaaggattcttgcagggttggaac

SEQ ID NO: 586703 - DNA, 25 bp, Homo sapien
tactgctgggcccaaatgcttccaa

SEQ ID NO: 586704 - DNA, 25 bp, Homo sapien
tctgatgcttgaggcagcacggcct

SEQ ID NO: 586705 - DNA, 25 bp, Homo sapien
caaaacttcgatggcctgaaatacc

SEQ ID NO: 586706 - DNA, 25 bp, Homo sapien
gcgcaacaaaacttcgatggcctga

SEQ ID NO: 586707 - DNA, 25 bp, Homo sapien
cgctggcgcaacaaaacttcgatgg

SEQ ID NO: 586708 - DNA, 25 bp, Homo sapien
caacaaaacttcgatggcctgaaat

SEQ ID NO: 586709 - DNA, 25 bp, Homo sapien
cagcagacgctgattaaccaatcca

SEQ ID NO: 586710 - DNA, 25 bp, Homo sapien
gccgcagttgtctagcttctctgta

SEQ ID NO: 586711 - DNA, 25 bp, Homo sapien
ttctctgtaatttcaggcccaagac

SEQ ID NO: 586712 - DNA, 25 bp, Homo sapien
tgtttgtcttgtttgcactcgtgaa

SEQ ID NO: 586713 - DNA, 25 bp, Homo sapien
agcacacactcatgaacccaacagc

SEQ ID NO: 586714 - DNA, 25 bp, Homo sapien
acacactcatgaacccaacagctgt

SEQ ID NO: 586715 - DNA, 25 bp, Homo sapien
cacactcatgaacccaacagctgtg

SEQ ID NO: 586716 - DNA, 25 bp, Homo sapien
gcacacactcatgaacccaacagct

SEQ ID NO: 586717 - DNA, 25 bp, Homo sapien
tcaggatgtgggaaacagagtccgt

SEQ ID NO: 586718 - DNA, 25 bp, Homo sapien
gattccagaacgtcatcaggatgtg

SEQ ID NO: 586719 - DNA, 25 bp, Homo sapien
gagtccgtggaaagggcccaagtca

SEQ ID NO: 586720 - DNA, 25 bp, Homo sapien
caagtcaaagcactcatgcagcagt

SEQ ID NO: 586721 - DNA, 25 bp, Homo sapien
cagccagacctccagggaaactttt

SEQ ID NO: 586722 - DNA, 25 bp, Homo sapien
gccagacctccagggaaacttttga

SEQ ID NO: 586723 - DNA, 25 bp, Homo sapien
cagacctccagggaaacttttgata

SEQ ID NO: 586724 - DNA, 25 bp, Homo sapien
tcctttctgttaacaccagccagac

SEQ ID NO: 586725 - DNA, 25 bp, Homo sapien
tcatggaataagcacataaacaagc

SEQ ID NO: 586726 - DNA, 25 bp, Homo sapien
aaacaagctggcttctctgcaccac

SEQ ID NO: 586727 - DNA, 25 bp, Homo sapien
atggaataagcacataaacaagctg

SEQ ID NO: 586728 - DNA, 25 bp, Homo sapien
acaagctggcttctctgcaccacac

SEQ ID NO: 586729 - DNA, 25 bp, Homo sapien
aagtaaagccgactttgctgccact

SEQ ID NO: 586730 - DNA, 25 bp, Homo sapien
atgaacattaagtaaagccgacttt

SEQ ID NO: 586731 - DNA, 25 bp, Homo sapien
ttaagtaaagccgactttgctgcca

SEQ ID NO: 586732 - DNA, 25 bp, Homo sapien
acattaagtaaagccgactttgctg

SEQ ID NO: 586733 - DNA, 25 bp, Homo sapien
aaatgccttctcccctgcttcataa

SEQ ID NO: 586734 - DNA, 25 bp, Homo sapien
aatgccttctcccctgcttcataaa

SEQ ID NO: 586735 - DNA, 25 bp, Homo sapien
taaatgccttctcccctgcttcata

SEQ ID NO: 586736 - DNA, 25 bp, Homo sapien
cctgggcaacaaaatgagaccttgt

SEQ ID NO: 586737 - DNA, 25 bp, Homo sapien
tgagccatacttgcaccactgtacc

SEQ ID NO: 586738 - DNA, 25 bp, Homo sapien
cagcctgggcaacaaaatgagacct

SEQ ID NO: 586739 - DNA, 25 bp, Homo sapien
gagccatacttgcaccactgtaccc

SEQ ID NO: 586740 - DNA, 25 bp, Homo sapien
tgagtgtgggcatgctgctctgcct

SEQ ID NO: 586741 - DNA, 25 bp, Homo sapien
actgctgctgtctccgtgagtgtgg

SEQ ID NO: 586742 - DNA, 25 bp, Homo sapien
gagtgtgggcatgctgctctgcctt

SEQ ID NO: 586743 - DNA, 25 bp, Homo sapien
ccctcctcagaagcgctgccacaga

SEQ ID NO: 586744 - DNA, 25 bp, Homo sapien
tgcccctcctcagaagcgctgccac

SEQ ID NO: 586745 - DNA, 25 bp, Homo sapien
ggctgcccctcctcagaagcgctgc

SEQ ID NO: 586746 - DNA, 25 bp, Homo sapien
ctgcccctcctcagaagcgctgcca

SEQ ID NO: 586747 - DNA, 25 bp, Homo sapien
ggaaccttggctgctactcctgagc

SEQ ID NO: 586748 - DNA, 25 bp, Homo sapien
tttccatggtatctggagagacagg

SEQ ID NO: 586749 - DNA, 25 bp, Homo sapien
aggttcctgcaactcctcgactatt

SEQ ID NO: 586750 - DNA, 25 bp, Homo sapien
gcaactcctcgactattttttggga

SEQ ID NO: 586751 - DNA, 25 bp, Homo sapien
ggactgctgttaaagcttcctcgga

SEQ ID NO: 586752 - DNA, 25 bp, Homo sapien
tgttaaagcttcctcggatgcagct

SEQ ID NO: 586753 - DNA, 25 bp, Homo sapien
catttccactttggactgctgttaa

SEQ ID NO: 586754 - DNA, 25 bp, Homo sapien
tcactaacatttccactttggactg

SEQ ID NO: 586755 - DNA, 25 bp, Homo sapien
gcacaaatcctctgaggtagaaagg

SEQ ID NO: 586756 - DNA, 25 bp, Homo sapien
gcagcaagtcctaaaggaggtggta

SEQ ID NO: 586757 - DNA, 25 bp, Homo sapien
tgaggcttggtgcagcaagtcctaa

SEQ ID NO: 586758 - DNA, 25 bp, Homo sapien
gtggctagaaggcacgcaaaggccc

SEQ ID NO: 586759 - DNA, 25 bp, Homo sapien
cagtggagatgtcactgagtttttc

SEQ ID NO: 586760 - DNA, 25 bp, Homo sapien
agtggagatgtcactgagtttttct

SEQ ID NO: 586761 - DNA, 25 bp, Homo sapien
cctactgctgacatggtgatactgt

SEQ ID NO: 586762 - DNA, 25 bp, Homo sapien
ctcctactgctgacatggtgatact

SEQ ID NO: 586763 - DNA, 25 bp, Homo sapien
tggacgggctcttcaggcagtacga

SEQ ID NO: 586764 - DNA, 25 bp, Homo sapien
ggctcttcaggcagtacgagcgatg

SEQ ID NO: 586765 - DNA, 25 bp, Homo sapien
gggcggaagtggacgggctcttcag

SEQ ID NO: 586766 - DNA, 25 bp, Homo sapien
ttcaggcagtacgagcgatgccaag

SEQ ID NO: 586767 - DNA, 25 bp, Homo sapien
tgacagccagccagaaggtcagtac

SEQ ID NO: 586768 - DNA, 25 bp, Homo sapien
gtgacagccagccagaaggtcagta

SEQ ID NO: 586769 - DNA, 25 bp, Homo sapien
tgtgacagccagccagaaggtcagt

SEQ ID NO: 586770 - DNA, 25 bp, Homo sapien
aacaaaattcataaaatccagcgac

SEQ ID NO: 586771 - DNA, 25 bp, Homo sapien
tgaaaacaaaattcataaaatccag

SEQ ID NO: 586772 - DNA, 25 bp, Homo sapien
agactgaaaacaaaattcataaaat

SEQ ID NO: 586773 - DNA, 25 bp, Homo sapien
aaaacaaaattcataaaatccagcg

SEQ ID NO: 586774 - DNA, 25 bp, Homo sapien
aagaactcgggggtgagatggggca

SEQ ID NO: 586775 - DNA, 25 bp, Homo sapien
gagaaattacacagaagttcttatc

SEQ ID NO: 586776 - DNA, 25 bp, Homo sapien
ggggcagagaaattacacagaagtt

SEQ ID NO: 586777 - DNA, 25 bp, Homo sapien
gagatggggcagagaaattacacag

SEQ ID NO: 586778 - DNA, 25 bp, Homo sapien
tggaagacgtagaggtcctgctcga

SEQ ID NO: 586779 - DNA, 25 bp, Homo sapien
ttgagcaatccagcccggtggaaga

SEQ ID NO: 586780 - DNA, 25 bp, Homo sapien
tagaggtcctgctcgagggtgcagg

SEQ ID NO: 586781 - DNA, 25 bp, Homo sapien
tgcaggtgttgaaagggaccatttt

SEQ ID NO: 586782 - DNA, 25 bp, Homo sapien
caggataaaggtcaatcttcactca

SEQ ID NO: 586783 - DNA, 25 bp, Homo sapien
tggctgggccaactctcccaatgtt

SEQ ID NO: 586784 - DNA, 25 bp, Homo sapien
gcactccgtattactttctcaagaa

SEQ ID NO: 586785 - DNA, 25 bp, Homo sapien
cactcatttcaagggtgcagtttga

SEQ ID NO: 586786 - DNA, 25 bp, Homo sapien
atgaactccttcccagacaaatgtt

SEQ ID NO: 586787 - DNA, 25 bp, Homo sapien
tatgaactccttcccagacaaatgt

SEQ ID NO: 586788 - DNA, 25 bp, Homo sapien
ctatgaactccttcccagacaaatg

SEQ ID NO: 586789 - DNA, 25 bp, Homo sapien
tgaactccttcccagacaaatgttt

SEQ ID NO: 586790 - DNA, 25 bp, Homo sapien
gaacagaggtgattcatgtccccta

SEQ ID NO: 586791 - DNA, 25 bp, Homo sapien
tctggccgtgggtctgaaactcttg

SEQ ID NO: 586792 - DNA, 25 bp, Homo sapien
taagtagggccatgcaaccaagttc

SEQ ID NO: 586793 - DNA, 25 bp, Homo sapien
ggaagaaaagtccactctggccgtg

SEQ ID NO: 586794 - DNA, 25 bp, Homo sapien
gggttgctctcccttctcatctgtg

SEQ ID NO: 586795 - DNA, 25 bp, Homo sapien
cactcctgcagccacgatcagctgc

SEQ ID NO: 586796 - DNA, 25 bp, Homo sapien
tctcatctgtgtagaagcctcttca

SEQ ID NO: 586797 - DNA, 25 bp, Homo sapien
cttcaggttggccaccctcctttct

SEQ ID NO: 586798 - DNA, 25 bp, Homo sapien
agcaaatctatgagcctgttccatc

SEQ ID NO: 586799 - DNA, 25 bp, Homo sapien
tctcctccagcaaatctatgagcct

SEQ ID NO: 586800 - DNA, 25 bp, Homo sapien
tccagcaaatctatgagcctgttcc

SEQ ID NO: 586801 - DNA, 25 bp, Homo sapien
tcctccagcaaatctatgagcctgt

SEQ ID NO: 586802 - DNA, 25 bp, Homo sapien
taacggtctaagtcctccaatatgc

SEQ ID NO: 586803 - DNA, 25 bp, Homo sapien
ctttgcgagccttgttgtaacggtc

SEQ ID NO: 586804 - DNA, 25 bp, Homo sapien
ttttattcaacatgagggtgctgac

SEQ ID NO: 586805 - DNA, 25 bp, Homo sapien
tttccacaccaggagtatccaagag

SEQ ID NO: 586806 - DNA, 25 bp, Homo sapien
actgcaataccaactatttgttctg

SEQ ID NO: 586807 - DNA, 25 bp, Homo sapien
tcactgcaataccaactatttgttc

SEQ ID NO: 586808 - DNA, 25 bp, Homo sapien
atcactgcaataccaactatttgtt

SEQ ID NO: 586809 - DNA, 25 bp, Homo sapien
cactgcaataccaactatttgttct

SEQ ID NO: 586810 - DNA, 25 bp, Homo sapien
tttaaagcctaaacgcaggatctcc

SEQ ID NO: 586811 - DNA, 25 bp, Homo sapien
tcttcaatgttgtaatgggaccgta

SEQ ID NO: 586812 - DNA, 25 bp, Homo sapien
gccttctctggattttgggtaaaca

SEQ ID NO: 586813 - DNA, 25 bp, Homo sapien
tcagaaagaacttggtgtagtgccg

SEQ ID NO: 586814 - DNA, 25 bp, Homo sapien
gaggaatgaatagaatgcggcgtac

SEQ ID NO: 586815 - DNA, 25 bp, Homo sapien
ggccattggaaattcagacccatgt

SEQ ID NO: 586816 - DNA, 25 bp, Homo sapien
cactgtgaacgttgacctgctggga

SEQ ID NO: 586817 - DNA, 25 bp, Homo sapien
gggaaagtgaattgcaccattctct

SEQ ID NO: 586818 - DNA, 25 bp, Homo sapien
tgtcagaaattcgaagcctacagaa

SEQ ID NO: 586819 - DNA, 25 bp, Homo sapien
gaaaagccaacatattgtactacca

SEQ ID NO: 586820 - DNA, 25 bp, Homo sapien
gcttatttggaatgctgggatagca

SEQ ID NO: 586821 - DNA, 25 bp, Homo sapien
catgttggcattgtactcacgtatc

SEQ ID NO: 586822 - DNA, 25 bp, Homo sapien
gatccttggagaccgcctttgatgg

SEQ ID NO: 586823 - DNA, 25 bp, Homo sapien
gacaatctgtcgtcgtggtcgcacg

SEQ ID NO: 586824 - DNA, 25 bp, Homo sapien
cacgggaaccaagtaatgaagggca

SEQ ID NO: 586825 - DNA, 25 bp, Homo sapien
gcctttgatggagcgtttatgccaa

SEQ ID NO: 586826 - DNA, 25 bp, Homo sapien
cgggagctggcaccgcgccgccctg

SEQ ID NO: 586827 - DNA, 25 bp, Homo sapien
aggttccctgtaattaagaagcagc

SEQ ID NO: 586828 - DNA, 25 bp, Homo sapien
ggttccctgtaattaagaagcagcc

SEQ ID NO: 586829 - DNA, 25 bp, Homo sapien
taagggtatgagcaccaggttccct

SEQ ID NO: 586830 - DNA, 25 bp, Homo sapien
ctgtaagggtatgagcaccaggttc

SEQ ID NO: 586831 - DNA, 25 bp, Homo sapien
tggcatgaccctgcagggtcctgtg

SEQ ID NO: 586832 - DNA, 25 bp, Homo sapien
tgtggctactgctttaggcttcccg

SEQ ID NO: 586833 - DNA, 25 bp, Homo sapien
catggcatgaccctgcagggtcctg

SEQ ID NO: 586834 - DNA, 25 bp, Homo sapien
gctactgctttaggcttcccgggaa

SEQ ID NO: 586835 - DNA, 25 bp, Homo sapien
gccccagggcagctcatatgcttct

SEQ ID NO: 586836 - DNA, 25 bp, Homo sapien
gctttgtcctaacagcgaatgacca

SEQ ID NO: 586837 - DNA, 25 bp, Homo sapien
gcccaaacatctcgaatgcagccag

SEQ ID NO: 586838 - DNA, 25 bp, Homo sapien
caagcccatatcagtcaacatgaga

SEQ ID NO: 586839 - DNA, 25 bp, Homo sapien
ctctgggtcgggtgatgtccttcct

SEQ ID NO: 586840 - DNA, 25 bp, Homo sapien
tgtttatttcagcatcgtctccagc

SEQ ID NO: 586841 - DNA, 25 bp, Homo sapien
agttggtctgatggaggtacgcccc

SEQ ID NO: 586842 - DNA, 25 bp, Homo sapien
tcctgcagcgccgagcgtattgcga

SEQ ID NO: 586843 - DNA, 25 bp, Homo sapien
tgaagtataagtgtcagcactgact

SEQ ID NO: 586844 - DNA, 25 bp, Homo sapien
tataagtgtcagcactgactgcaga

SEQ ID NO: 586845 - DNA, 25 bp, Homo sapien
ccactgaagtataagtgtcagcact

SEQ ID NO: 586846 - DNA, 25 bp, Homo sapien
gcttcctgatatccacgcagcagct

SEQ ID NO: 586847 - DNA, 25 bp, Homo sapien
ggtttcggatcatagcaacctggga

SEQ ID NO: 586848 - DNA, 25 bp, Homo sapien
ttttaataccgaggcccattccatg

SEQ ID NO: 586849 - DNA, 25 bp, Homo sapien
tactcaatgtaagcaatggtttcgg

SEQ ID NO: 586850 - DNA, 25 bp, Homo sapien
taagcacaatagcacgagcagcagg

SEQ ID NO: 586851 - DNA, 25 bp, Homo sapien
ctgtggagacattactatgaatctt

SEQ ID NO: 586852 - DNA, 25 bp, Homo sapien
ctttgaggcctgattctgaaatgtg

SEQ ID NO: 586853 - DNA, 25 bp, Homo sapien
atctttgaggcctgattctgaaatg

SEQ ID NO: 586854 - DNA, 25 bp, Homo sapien
ttctaggctcttttttatgacctgc

SEQ ID NO: 586855 - DNA, 25 bp, Homo sapien
gcagtggcagctctttttaacagca

SEQ ID NO: 586856 - DNA, 25 bp, Homo sapien
ttgtggcaagaacccgatcagcatc

SEQ ID NO: 586857 - DNA, 25 bp, Homo sapien
gacctctgtggcattcattaccctg

SEQ ID NO: 586858 - DNA, 25 bp, Homo sapien
tcaaacaaagaacctgctggtggct

SEQ ID NO: 586859 - DNA, 25 bp, Homo sapien
cagccatgtttgtccctactactta

SEQ ID NO: 586860 - DNA, 25 bp, Homo sapien
aaatcccctgagtatcccagccatg

SEQ ID NO: 586861 - DNA, 25 bp, Homo sapien
tagtcagtgatgattgcaattaaac

SEQ ID NO: 586862 - DNA, 25 bp, Homo sapien
agggtctttaggagtcacgtggtat

SEQ ID NO: 586863 - DNA, 25 bp, Homo sapien
cccagtgttcgtgttaatgacacca

SEQ ID NO: 586864 - DNA, 25 bp, Homo sapien
cagtcccagtgttcgtgttaatgac

SEQ ID NO: 586865 - DNA, 25 bp, Homo sapien
gtcagcggtaaacagtcccagtgtt

SEQ ID NO: 586866 - DNA, 25 bp, Homo sapien
gcggtaaacagtcccagtgttcgtg

SEQ ID NO: 586867 - DNA, 25 bp, Homo sapien
ccactggtggttgaactcaacttct

SEQ ID NO: 586868 - DNA, 25 bp, Homo sapien
ctggtggttgaactcaacttctggc

SEQ ID NO: 586869 - DNA, 25 bp, Homo sapien
tggtggttgaactcaacttctggct

SEQ ID NO: 586870 - DNA, 25 bp, Homo sapien
cactggtggttgaactcaacttctg

SEQ ID NO: 586871 - DNA, 25 bp, Homo sapien
tggcactccaggtatcattctcaat

SEQ ID NO: 586872 - DNA, 25 bp, Homo sapien
tcctttgccaccttgagtagtgtaa

SEQ ID NO: 586873 - DNA, 25 bp, Homo sapien
cattctactcgaatcctatctgaca

SEQ ID NO: 586874 - DNA, 25 bp, Homo sapien
tgacatgtgtcagctagctggcact

SEQ ID NO: 586875 - DNA, 25 bp, Homo sapien
ttcttgcaatgcaacgattgagtgc

SEQ ID NO: 586876 - DNA, 25 bp, Homo sapien
gagagtcatgtgcattatacgcaca

SEQ ID NO: 586877 - DNA, 25 bp, Homo sapien
ctgagcagcaaggtgcaaatttgat

SEQ ID NO: 586878 - DNA, 25 bp, Homo sapien
gaagcaaatattagtcattggagga

SEQ ID NO: 586879 - DNA, 25 bp, Homo sapien
catcgccaggtatgatgaagtcttc

SEQ ID NO: 586880 - DNA, 25 bp, Homo sapien
taactgctaagtacacaaagtggcc

SEQ ID NO: 586881 - DNA, 25 bp, Homo sapien
tcaagagcaggcaaccagtaccaat

SEQ ID NO: 586882 - DNA, 25 bp, Homo sapien
tatccgtgatacaaaggcaggctgg

SEQ ID NO: 586883 - DNA, 25 bp, Homo sapien
tatgctactgaaaacttcctagatt

SEQ ID NO: 586884 - DNA, 25 bp, Homo sapien
acttccttgattgtttaggccagtt

SEQ ID NO: 586885 - DNA, 25 bp, Homo sapien
ttagaaggaggaacctcaaaatcac

SEQ ID NO: 586886 - DNA, 25 bp, Homo sapien
tgaaaacttcctagattgatatagt

SEQ ID NO: 586887 - DNA, 25 bp, Homo sapien
ttctgtttgtatggtttaaagcata

SEQ ID NO: 586888 - DNA, 25 bp, Homo sapien
aatgatcttggcattgacagtaatt

SEQ ID NO: 586889 - DNA, 25 bp, Homo sapien
tgatcttggcattgacagtaatttt

SEQ ID NO: 586890 - DNA, 25 bp, Homo sapien
ttttctgtttgtatggtttaaagca

SEQ ID NO: 586891 - DNA, 25 bp, Homo sapien
tccatccacataggcagggtgtgtg

SEQ ID NO: 586892 - DNA, 25 bp, Homo sapien
ctgattcatccatccacataggcag

SEQ ID NO: 586893 - DNA, 25 bp, Homo sapien
tttacaaaagcagttggcaagccag

SEQ ID NO: 586894 - DNA, 25 bp, Homo sapien
aaaagcagttggcaagccaggcctg

SEQ ID NO: 586895 - DNA, 25 bp, Homo sapien
ctgagctaagaactctgctggcttc

SEQ ID NO: 586896 - DNA, 25 bp, Homo sapien
cctgagctaagaactctgctggctt

SEQ ID NO: 586897 - DNA, 25 bp, Homo sapien
tgagctaagaactctgctggcttcc

SEQ ID NO: 586898 - DNA, 25 bp, Homo sapien
gagctaagaactctgctggcttcca

SEQ ID NO: 586899 - DNA, 25 bp, Homo sapien
catttgcttacccagcccttcacaa

SEQ ID NO: 586900 - DNA, 25 bp, Homo sapien
tcctccatccatttgcttacccagc

SEQ ID NO: 586901 - DNA, 25 bp, Homo sapien
tccatccatttgcttacccagccct

SEQ ID NO: 586902 - DNA, 25 bp, Homo sapien
cttttgagggtcatttcctccatcc

SEQ ID NO: 586903 - DNA, 25 bp, Homo sapien
agtgcccaccggtgcttcctatgaa

SEQ ID NO: 586904 - DNA, 25 bp, Homo sapien
tctctagtcacacggagggtcgcgg

SEQ ID NO: 586905 - DNA, 25 bp, Homo sapien
gtcatccatgactccagtaagcatt

SEQ ID NO: 586906 - DNA, 25 bp, Homo sapien
agtgccattacaggctcttcaaaag

SEQ ID NO: 586907 - DNA, 25 bp, Homo sapien
ttgcgaggcgcacacgtgcagagac

SEQ ID NO: 586908 - DNA, 25 bp, Homo sapien
aactgatgtcccgtatgccctgtgg

SEQ ID NO: 586909 - DNA, 25 bp, Homo sapien
tgccgtttttgcacagcgcaatgaa

SEQ ID NO: 586910 - DNA, 25 bp, Homo sapien
caatgaacagggcaattgcgaggcg

SEQ ID NO: 586911 - DNA, 25 bp, Homo sapien
tctggtggcagaatgtcaactcttg

SEQ ID NO: 586912 - DNA, 25 bp, Homo sapien
tattggagtcgaataggaaacccca

SEQ ID NO: 586913 - DNA, 25 bp, Homo sapien
ggaaaccccattgtgattagtgaca

SEQ ID NO: 586914 - DNA, 25 bp, Homo sapien
gggagactgagactctgagcctggc

SEQ ID NO: 586915 - DNA, 25 bp, Homo sapien
ctccacgtggaggagactccagctc

SEQ ID NO: 586916 - DNA, 25 bp, Homo sapien
aaagtcaatgcaggcttccatgggg

SEQ ID NO: 586917 - DNA, 25 bp, Homo sapien
cctccacgtggaggagactccagct

SEQ ID NO: 586918 - DNA, 25 bp, Homo sapien
gccacttcccgcctttgaaagtcaa

SEQ ID NO: 586919 - DNA, 25 bp, Homo sapien
cctggacccgacactaaggtagaag

SEQ ID NO: 586920 - DNA, 25 bp, Homo sapien
taccctgagtctgggtgtgactcaa

SEQ ID NO: 586921 - DNA, 25 bp, Homo sapien
gcaaggagcaagtctcgtaaggtac

SEQ ID NO: 586922 - DNA, 25 bp, Homo sapien
aatgaggatgcgacctggagaaacg

SEQ ID NO: 586923 - DNA, 25 bp, Homo sapien
ttaaacggcagctgcatccatggcc

SEQ ID NO: 586924 - DNA, 25 bp, Homo sapien
agttgttggtcatgacacactctga

SEQ ID NO: 586925 - DNA, 25 bp, Homo sapien
tccatggccacaaagttgttggtca

SEQ ID NO: 586926 - DNA, 25 bp, Homo sapien
ccgaagagagagatccacagaggag

SEQ ID NO: 586927 - DNA, 25 bp, Homo sapien
ctttgttcagtgtccagaagttttt

SEQ ID NO: 586928 - DNA, 25 bp, Homo sapien
ccagactggcatggaagttctttgc

SEQ ID NO: 586929 - DNA, 25 bp, Homo sapien
tcagctgctgagtacaaatggccag

SEQ ID NO: 586930 - DNA, 25 bp, Homo sapien
ttctttgcctgatcagctgctgagt

SEQ ID NO: 586931 - DNA, 25 bp, Homo sapien
cagactggcatggaagttctttgcc

SEQ ID NO: 586932 - DNA, 25 bp, Homo sapien
ttagaccctaacacttgcttgagag

SEQ ID NO: 586933 - DNA, 25 bp, Homo sapien
gacatgcagttacccatgcaaaggg

SEQ ID NO: 586934 - DNA, 25 bp, Homo sapien
tgtgccaaggactgacccaggtatt

SEQ ID NO: 586935 - DNA, 25 bp, Homo sapien
ttttgaaaccccatgatcagagata

SEQ ID NO: 586936 - DNA, 25 bp, Homo sapien
ctcttaacacagggtaatgagctct

SEQ ID NO: 586937 - DNA, 25 bp, Homo sapien
gctctccctacgttcctccactgct

SEQ ID NO: 586938 - DNA, 25 bp, Homo sapien
gggtaatgagctctccctacgttcc

SEQ ID NO: 586939 - DNA, 25 bp, Homo sapien
gtaatgagctctccctacgttcctc

SEQ ID NO: 586940 - DNA, 25 bp, Homo sapien
gaaaggattgacctcaggtaaacca

SEQ ID NO: 586941 - DNA, 25 bp, Homo sapien
aggattgacctcaggtaaaccacct

SEQ ID NO: 586942 - DNA, 25 bp, Homo sapien
ctgaaaggattgacctcaggtaaac

SEQ ID NO: 586943 - DNA, 25 bp, Homo sapien
tgaaaggattgacctcaggtaaacc

SEQ ID NO: 586944 - DNA, 25 bp, Homo sapien
acagttttgtgagggttgtttccag

SEQ ID NO: 586945 - DNA, 25 bp, Homo sapien
tctaggaacggagacttcgaccgcc

SEQ ID NO: 586946 - DNA, 25 bp, Homo sapien
tcatgccatggcttcagcgtgctgt

SEQ ID NO: 586947 - DNA, 25 bp, Homo sapien
tgagcgctttcacgtagtatgataa

SEQ ID NO: 586948 - DNA, 25 bp, Homo sapien
tgacagcgggcattaattagacatc

SEQ ID NO: 586949 - DNA, 25 bp, Homo sapien
tagacatctggtgagctggttcaag

SEQ ID NO: 586950 - DNA, 25 bp, Homo sapien
caagtcccctagtgggctgagtccg

SEQ ID NO: 586951 - DNA, 25 bp, Homo sapien
gagaagctccgtaagtgacatctga

SEQ ID NO: 586952 - DNA, 25 bp, Homo sapien
accacgacattaacccaggagcaca

SEQ ID NO: 586953 - DNA, 25 bp, Homo sapien
tggtcgtagggcacgatctcgtccg

SEQ ID NO: 586954 - DNA, 25 bp, Homo sapien
ggtctatgccggtcattctacccac

SEQ ID NO: 586955 - DNA, 25 bp, Homo sapien
tgcttggctgctcggtctatgccgg

SEQ ID NO: 586956 - DNA, 25 bp, Homo sapien
aaacatatgaatggctttcatggag

SEQ ID NO: 586957 - DNA, 25 bp, Homo sapien
tgaatggctttcatggagctctcca

SEQ ID NO: 586958 - DNA, 25 bp, Homo sapien
catatgaatggctttcatggagctc

SEQ ID NO: 586959 - DNA, 25 bp, Homo sapien
agctctccagacacgtggcttgcgc

SEQ ID NO: 586960 - DNA, 25 bp, Homo sapien
tactcaaatgtggatggagagttta

SEQ ID NO: 586961 - DNA, 25 bp, Homo sapien
ttactcaaatgtggatggagagttt

SEQ ID NO: 586962 - DNA, 25 bp, Homo sapien
actcaaatgtggatggagagtttaa

SEQ ID NO: 586963 - DNA, 25 bp, Homo sapien
ccatgaacagtccataccacagtct

SEQ ID NO: 586964 - DNA, 25 bp, Homo sapien
cccgacccatgaacagtccatacca

SEQ ID NO: 586965 - DNA, 25 bp, Homo sapien
tagtgacccccgacccatgaacagt

SEQ ID NO: 586966 - DNA, 25 bp, Homo sapien
ctgtcagctgctagtgacccccgac

SEQ ID NO: 586967 - DNA, 25 bp, Homo sapien
aaagtggcagtgctaaagaacaaat

SEQ ID NO: 586968 - DNA, 25 bp, Homo sapien
tgaaaaagccttggcggaaagtggc

SEQ ID NO: 586969 - DNA, 25 bp, Homo sapien
catttcaagtagtggtgtttaggca

SEQ ID NO: 586970 - DNA, 25 bp, Homo sapien
tgtgcacttaaatgtgtagagttgt

SEQ ID NO: 586971 - DNA, 25 bp, Homo sapien
tgttgatagcattatattcatagtt

SEQ ID NO: 586972 - DNA, 25 bp, Homo sapien
gaatactgtgcttcgggcttttgaa

SEQ ID NO: 586973 - DNA, 25 bp, Homo sapien
gttattataaagcagcccactgaag

SEQ ID NO: 586974 - DNA, 25 bp, Homo sapien
tggcgaaaagtctgacgtgcacaat

SEQ ID NO: 586975 - DNA, 25 bp, Homo sapien
taccgccgctgactgctgttgggaa

SEQ ID NO: 586976 - DNA, 25 bp, Homo sapien
tgttgggaacctccctgtttgtcag

SEQ ID NO: 586977 - DNA, 25 bp, Homo sapien
cctcgttgagagtgaaatggttgca

SEQ ID NO: 586978 - DNA, 25 bp, Homo sapien
ttgactaatatcagcctctgtaggg

SEQ ID NO: 586979 - DNA, 25 bp, Homo sapien
tacatccctggactgaactctaaac

SEQ ID NO: 586980 - DNA, 25 bp, Homo sapien
cacttagtggttttacatccctgga

SEQ ID NO: 586981 - DNA, 25 bp, Homo sapien
caggtggctgtggaactcaaccagg

SEQ ID NO: 586982 - DNA, 25 bp, Homo sapien
ctgaactctaaaccacaggtggctg

SEQ ID NO: 586983 - DNA, 25 bp, Homo sapien
cagcagaataacactgatgctcttc

SEQ ID NO: 586984 - DNA, 25 bp, Homo sapien
tcagcagaataacactgatgctctt

SEQ ID NO: 586985 - DNA, 25 bp, Homo sapien
agcagaataacactgatgctcttcc

SEQ ID NO: 586986 - DNA, 25 bp, Homo sapien
aaatggctttatgcactggctgctg

SEQ ID NO: 586987 - DNA, 25 bp, Homo sapien
ctacatgtaagacaggaaactaatt

SEQ ID NO: 586988 - DNA, 25 bp, Homo sapien
tatcctggctatttggtggacaaaa

SEQ ID NO: 586989 - DNA, 25 bp, Homo sapien
gacaggaaactaatttccacatact

SEQ ID NO: 586990 - DNA, 25 bp, Homo sapien
agtcattaagcaccagacctggaga

SEQ ID NO: 586991 - DNA, 25 bp, Homo sapien
tgggggagtcattaagcaccagacc

SEQ ID NO: 586992 - DNA, 25 bp, Homo sapien
gcctgggggagtcattaagcaccag

SEQ ID NO: 586993 - DNA, 25 bp, Homo sapien
gggagtcattaagcaccagacctgg

SEQ ID NO: 586994 - DNA, 25 bp, Homo sapien
tgaacttggccaggtcaggtttccc

SEQ ID NO: 586995 - DNA, 25 bp, Homo sapien
gcatttcagtgttaagagcacctac

SEQ ID NO: 586996 - DNA, 25 bp, Homo sapien
tgagaatttacttgaaaagggcctc

SEQ ID NO: 586997 - DNA, 25 bp, Homo sapien
gaaaagggcctctacacagagttaa

SEQ ID NO: 586998 - DNA, 25 bp, Homo sapien
ggctttctgtcctaggcctcctctg

SEQ ID NO: 586999 - DNA, 25 bp, Homo sapien
gcctctgtgggtataattctgtctg

SEQ ID NO: 587000 - DNA, 25 bp, Homo sapien
ggacgggctttctgtcctaggcctc

SEQ ID NO: 587001 - DNA, 25 bp, Homo sapien
cactggatcctactctttgctgcat

SEQ ID NO: 587002 - DNA, 25 bp, Homo sapien
gactggcacctggtgtacacggatc

SEQ ID NO: 587003 - DNA, 25 bp, Homo sapien
acagtgcctctatagctgactggca

SEQ ID NO: 587004 - DNA, 25 bp, Homo sapien
gcacctggtgtacacggatccctgt

SEQ ID NO: 587005 - DNA, 25 bp, Homo sapien
cccacgttgttggcccagtgtcttt

SEQ ID NO: 587006 - DNA, 25 bp, Homo sapien
ttggattgacagctacctgaggcat

SEQ ID NO: 587007 - DNA, 25 bp, Homo sapien
tgcttggattgacagctacctgagg

SEQ ID NO: 587008 - DNA, 25 bp, Homo sapien
cctgcttggattgacagctacctga

SEQ ID NO: 587009 - DNA, 25 bp, Homo sapien
cttggattgacagctacctgaggca

SEQ ID NO: 587010 - DNA, 25 bp, Homo sapien
tggactgatgtcagctgatctggct

SEQ ID NO: 587011 - DNA, 25 bp, Homo sapien
gctgatctggctctaggttgtggct

SEQ ID NO: 587012 - DNA, 25 bp, Homo sapien
tgatgtcagctgatctggctctagg

SEQ ID NO: 587013 - DNA, 25 bp, Homo sapien
tgggtggactgatgtcagctgatct

SEQ ID NO: 587014 - DNA, 25 bp, Homo sapien
caaggtttaagagcgtctccacggt

SEQ ID NO: 587015 - DNA, 25 bp, Homo sapien
cggtacatagtgactccggcggctc

SEQ ID NO: 587016 - DNA, 25 bp, Homo sapien
ggctgccgctcacgccaaggtttaa

SEQ ID NO: 587017 - DNA, 25 bp, Homo sapien
tccaccgagtagttgttgatgcagg

SEQ ID NO: 587018 - DNA, 25 bp, Homo sapien
attagctggtggctcggtcacaggc

SEQ ID NO: 587019 - DNA, 25 bp, Homo sapien
cacaagacatgcatcattgagggct

SEQ ID NO: 587020 - DNA, 25 bp, Homo sapien
tcacaggctcaagggttggatcaaa

SEQ ID NO: 587021 - DNA, 25 bp, Homo sapien
gatgagccggtcaagattagctggt

SEQ ID NO: 587022 - DNA, 25 bp, Homo sapien
tggcttcatcaaggagaaggaagcc

SEQ ID NO: 587023 - DNA, 25 bp, Homo sapien
ctaatctgtggcttcatcaaggaga

SEQ ID NO: 587024 - DNA, 25 bp, Homo sapien
cttcatcaaggagaaggaagcctac

SEQ ID NO: 587025 - DNA, 25 bp, Homo sapien
taatctgtggcttcatcaaggagaa

SEQ ID NO: 587026 - DNA, 25 bp, Homo sapien
catttgtacctccaagggagttgga

SEQ ID NO: 587027 - DNA, 25 bp, Homo sapien
aatggtaagacccaggaagaatgcc

SEQ ID NO: 587028 - DNA, 25 bp, Homo sapien
cttggcaatatgcagataatggtaa

SEQ ID NO: 587029 - DNA, 25 bp, Homo sapien
ataattaggctgtgccatttgtacc

SEQ ID NO: 587030 - DNA, 25 bp, Homo sapien
ttaaacagcagaattcccaactgca

SEQ ID NO: 587031 - DNA, 25 bp, Homo sapien
cagaattcccaactgcacagcttct

SEQ ID NO: 587032 - DNA, 25 bp, Homo sapien
tgtgtcctttaaacagcagaattcc

SEQ ID NO: 587033 - DNA, 25 bp, Homo sapien
gaattcccaactgcacagcttctgc

SEQ ID NO: 587034 - DNA, 25 bp, Homo sapien
ggattccatgtacgtggccgaggct

SEQ ID NO: 587035 - DNA, 25 bp, Homo sapien
tgtcaagtccttgaggagccctgca

SEQ ID NO: 587036 - DNA, 25 bp, Homo sapien
gctgtgcacctcaagacgagggtca

SEQ ID NO: 587037 - DNA, 25 bp, Homo sapien
taggagggctgacttggattccatg

SEQ ID NO: 587038 - DNA, 25 bp, Homo sapien
taagtcccatttttcgcactgccgg

SEQ ID NO: 587039 - DNA, 25 bp, Homo sapien
cacacaggttgttgaggagttgctc

SEQ ID NO: 587040 - DNA, 25 bp, Homo sapien
ggagttgctcgtgctggccaaacaa

SEQ ID NO: 587041 - DNA, 25 bp, Homo sapien
gaaaggcacgtgatggtttccacca

SEQ ID NO: 587042 - DNA, 25 bp, Homo sapien
gggacttgaatatcatctcctccaa

SEQ ID NO: 587043 - DNA, 25 bp, Homo sapien
ctccaagcccgtccatggtaggctt

SEQ ID NO: 587044 - DNA, 25 bp, Homo sapien
gtggaaagggacttgaatatcatct

SEQ ID NO: 587045 - DNA, 25 bp, Homo sapien
ccatggtaggcttggttgcacctgg

SEQ ID NO: 587046 - DNA, 25 bp, Homo sapien
ggctgtgatcagagagggacttcct

SEQ ID NO: 587047 - DNA, 25 bp, Homo sapien
gacagtggctacctccacgaagatg

SEQ ID NO: 587048 - DNA, 25 bp, Homo sapien
gcagtgggcccatagatttccagta

SEQ ID NO: 587049 - DNA, 25 bp, Homo sapien
catgatcgcggagtcccatcaggat

SEQ ID NO: 587050 - DNA, 25 bp, Homo sapien
catttattatcatcagcaagtgttc

SEQ ID NO: 587051 - DNA, 25 bp, Homo sapien
ttcataagtagaaggcatacactcg

SEQ ID NO: 587052 - DNA, 25 bp, Homo sapien
gcaagtgttctgcactggacataac

SEQ ID NO: 587053 - DNA, 25 bp, Homo sapien
cccaaaggacctatctgagactgtt

SEQ ID NO: 587054 - DNA, 25 bp, Homo sapien
taactgacaaggcacagcggtgctc

SEQ ID NO: 587055 - DNA, 25 bp, Homo sapien
gacctggcagcatttcgtggcactt

SEQ ID NO: 587056 - DNA, 25 bp, Homo sapien
taacacacgcctggagtaactgaca

SEQ ID NO: 587057 - DNA, 25 bp, Homo sapien
caaaaattagcactaggacctggca

SEQ ID NO: 587058 - DNA, 25 bp, Homo sapien
aatgcggagaggaactgatactgaa

SEQ ID NO: 587059 - DNA, 25 bp, Homo sapien
agaggaactgatactgaagtcatgc

SEQ ID NO: 587060 - DNA, 25 bp, Homo sapien
ctgaatgcggagaggaactgatact

SEQ ID NO: 587061 - DNA, 25 bp, Homo sapien
cggagaggaactgatactgaagtca

SEQ ID NO: 587062 - DNA, 25 bp, Homo sapien
gagaggaaggatccaaaggatttct

SEQ ID NO: 587063 - DNA, 25 bp, Homo sapien
ttggccctcgatggagtgagaatag

SEQ ID NO: 587064 - DNA, 25 bp, Homo sapien
agggctgccaccgttcccattggca

SEQ ID NO: 587065 - DNA, 25 bp, Homo sapien
cagctagtgcctgcgctgttttggc

SEQ ID NO: 587066 - DNA, 25 bp, Homo sapien
gaaagacgatggagtggagtcagga

SEQ ID NO: 587067 - DNA, 25 bp, Homo sapien
caggaaagccgagaagacacgggac

SEQ ID NO: 587068 - DNA, 25 bp, Homo sapien
ttttgcagggtcatcgataagtggg

SEQ ID NO: 587069 - DNA, 25 bp, Homo sapien
agaagacacgggacaggggtgttcg

SEQ ID NO: 587070 - DNA, 25 bp, Homo sapien
aagggagagattctgtaggcgagac

SEQ ID NO: 587071 - DNA, 25 bp, Homo sapien
gaagaagggagagattctgtaggcg

SEQ ID NO: 587072 - DNA, 25 bp, Homo sapien
ctaattaaggtgaagaagggagaga

SEQ ID NO: 587073 - DNA, 25 bp, Homo sapien
gaagggagagattctgtaggcgaga

SEQ ID NO: 587074 - DNA, 25 bp, Homo sapien
ttcagcacgtatcctggcctggcag

SEQ ID NO: 587075 - DNA, 25 bp, Homo sapien
gagtggcacctattagcagctgcag

SEQ ID NO: 587076 - DNA, 25 bp, Homo sapien
taccgtgggatccaaagagtggcac

SEQ ID NO: 587077 - DNA, 25 bp, Homo sapien
taatgccgtgaaactctgggatccc

SEQ ID NO: 587078 - DNA, 25 bp, Homo sapien
cctttgtcctgttagatacaaccat

SEQ ID NO: 587079 - DNA, 25 bp, Homo sapien
caaaacctagtcttatctctgccct

SEQ ID NO: 587080 - DNA, 25 bp, Homo sapien
gccctttgtcctgttagatacaacc

SEQ ID NO: 587081 - DNA, 25 bp, Homo sapien
ccctttgtcctgttagatacaacca

SEQ ID NO: 587082 - DNA, 25 bp, Homo sapien
tgggaccaacgtacatctggataat

SEQ ID NO: 587083 - DNA, 25 bp, Homo sapien
tggagttgggaccaacgtacatctg

SEQ ID NO: 587084 - DNA, 25 bp, Homo sapien
tggggcttgcaacgtaaacatggga

SEQ ID NO: 587085 - DNA, 25 bp, Homo sapien
ttttggggcttgcaacgtaaacatg

SEQ ID NO: 587086 - DNA, 25 bp, Homo sapien
gaggtttgttggaatccgctcaacc

SEQ ID NO: 587087 - DNA, 25 bp, Homo sapien
gctcagaaatggagtgaaggccttg

SEQ ID NO: 587088 - DNA, 25 bp, Homo sapien
tgcacccagataggcaacaggctgc

SEQ ID NO: 587089 - DNA, 25 bp, Homo sapien
cccaacagtcatgttgggacttcat

SEQ ID NO: 587090 - DNA, 25 bp, Homo sapien
ctgtttctgctggaagaccaccatg

SEQ ID NO: 587091 - DNA, 25 bp, Homo sapien
tctcttctgttctcgagaggccaca

SEQ ID NO: 587092 - DNA, 25 bp, Homo sapien
ttgctaggcaacacgaggaccctct

SEQ ID NO: 587093 - DNA, 25 bp, Homo sapien
aacagcattcacaggttgctaggca

SEQ ID NO: 587094 - DNA, 25 bp, Homo sapien
agtcgagtggcagagtagctcacag

SEQ ID NO: 587095 - DNA, 25 bp, Homo sapien
aaggtatactggctcaaactagaat

SEQ ID NO: 587096 - DNA, 25 bp, Homo sapien
gagtggcagagtagctcacaggtat

SEQ ID NO: 587097 - DNA, 25 bp, Homo sapien
gaatcctcgcctagctgagccttgg

SEQ ID NO: 587098 - DNA, 25 bp, Homo sapien
gagcagcccagttaattaagtaagg

SEQ ID NO: 587099 - DNA, 25 bp, Homo sapien
cagcccttggcttttggatactggc

SEQ ID NO: 587100 - DNA, 25 bp, Homo sapien
tagcaagctgcaaatcagcacgtga

SEQ ID NO: 587101 - DNA, 25 bp, Homo sapien
gaactgagactttcacgtgctaaaa

SEQ ID NO: 587102 - DNA, 25 bp, Homo sapien
caatcccagggaaatcgcagtatgt

SEQ ID NO: 587103 - DNA, 25 bp, Homo sapien
aagagatgacaagacggttgatggc

SEQ ID NO: 587104 - DNA, 25 bp, Homo sapien
acagatggagctggataagggcccc

SEQ ID NO: 587105 - DNA, 25 bp, Homo sapien
atggagctggataagggccccaaga

SEQ ID NO: 587106 - DNA, 25 bp, Homo sapien
gtctggccagaattgctcctctcca

SEQ ID NO: 587107 - DNA, 25 bp, Homo sapien
ccagggatggcctccgtggttcgtc

SEQ ID NO: 587108 - DNA, 25 bp, Homo sapien
tctggccagaattgctcctctccat

SEQ ID NO: 587109 - DNA, 25 bp, Homo sapien
tccgtggttcgtccttgctttccca

SEQ ID NO: 587110 - DNA, 25 bp, Homo sapien
cggcgcctttaaactctgctctctg

SEQ ID NO: 587111 - DNA, 25 bp, Homo sapien
tctggtggcggaaccgcctgctcgc

SEQ ID NO: 587112 - DNA, 25 bp, Homo sapien
tgcctgttccaacagcccaggtgct

SEQ ID NO: 587113 - DNA, 25 bp, Homo sapien
ggtctacggccacctccgtctggtg

SEQ ID NO: 587114 - DNA, 25 bp, Homo sapien
ccaggcaccacggctcggtgaagta

SEQ ID NO: 587115 - DNA, 25 bp, Homo sapien
tcctgagatcaataaaacgatcgtg

SEQ ID NO: 587116 - DNA, 25 bp, Homo sapien
tggaggctaagatttggcgtaactc

SEQ ID NO: 587117 - DNA, 25 bp, Homo sapien
taaaacgatcgtggaacagggccag

SEQ ID NO: 587118 - DNA, 25 bp, Homo sapien
taggggcagtaggaagctgcggatg

SEQ ID NO: 587119 - DNA, 25 bp, Homo sapien
ggggcagtaggaagctgcggatgac

SEQ ID NO: 587120 - DNA, 25 bp, Homo sapien
gcagtaggaagctgcggatgacatt

SEQ ID NO: 587121 - DNA, 25 bp, Homo sapien
tgtaggggcagtaggaagctgcgga

SEQ ID NO: 587122 - DNA, 25 bp, Homo sapien
agaatggctggagggcctttagtgt

SEQ ID NO: 587123 - DNA, 25 bp, Homo sapien
gaatggctggagggcctttagtgtg

SEQ ID NO: 587124 - DNA, 25 bp, Homo sapien
aagaatggctggagggcctttagtg

SEQ ID NO: 587125 - DNA, 25 bp, Homo sapien
tgtcttgggcaaaggtccgtggcca

SEQ ID NO: 587126 - DNA, 25 bp, Homo sapien
gggccactcttctgtgccatcgcac

SEQ ID NO: 587127 - DNA, 25 bp, Homo sapien
tctctgaggtgggacggctggccac

SEQ ID NO: 587128 - DNA, 25 bp, Homo sapien
acacttcccctctgctactccccca

SEQ ID NO: 587129 - DNA, 25 bp, Homo sapien
actcttctgtgccatcgcacacttc

SEQ ID NO: 587130 - DNA, 25 bp, Homo sapien
ccctcttgcagtgtgaccatctccc

SEQ ID NO: 587131 - DNA, 25 bp, Homo sapien
cctctgacacagtctgaccacctcc

SEQ ID NO: 587132 - DNA, 25 bp, Homo sapien
ctcttgcagtgtgaccatctcccct

SEQ ID NO: 587133 - DNA, 25 bp, Homo sapien
tgacacagtctgaccacctcccctc

SEQ ID NO: 587134 - DNA, 25 bp, Homo sapien
cagtgtgaccacctcccctcagtgt

SEQ ID NO: 587135 - DNA, 25 bp, Homo sapien
tctcagtcgggttgatttcctcatc

SEQ ID NO: 587136 - DNA, 25 bp, Homo sapien
cttctatttgatgggctaactgctc

SEQ ID NO: 587137 - DNA, 25 bp, Homo sapien
tcaagagtgcttctctccaccaggg

SEQ ID NO: 587138 - DNA, 25 bp, Homo sapien
actcttttgaggtattgcctgggct

SEQ ID NO: 587139 - DNA, 25 bp, Homo sapien
ctaaacgatgcctggccacgcgtac

SEQ ID NO: 587140 - DNA, 25 bp, Homo sapien
gccgtgtgccacctactgggatgat

SEQ ID NO: 587141 - DNA, 25 bp, Homo sapien
tatttctacagagcgcgtttccagg

SEQ ID NO: 587142 - DNA, 25 bp, Homo sapien
atttgtaaagcgagcctgccccaga

SEQ ID NO: 587143 - DNA, 25 bp, Homo sapien
ggctgcagagaacttttctatttct

SEQ ID NO: 587144 - DNA, 25 bp, Homo sapien
cacaaccggcaggaaccgtgcgtta

SEQ ID NO: 587145 - DNA, 25 bp, Homo sapien
tgaccctcaccacggctggaaatca

SEQ ID NO: 587146 - DNA, 25 bp, Homo sapien
aatttctcctatcctggtgtgcggg

SEQ ID NO: 587147 - DNA, 25 bp, Homo sapien
tatcgcgtttggagacgtcggcgtt

SEQ ID NO: 587148 - DNA, 25 bp, Homo sapien
aaagcgccatcacagtgcgcccccg

SEQ ID NO: 587149 - DNA, 25 bp, Homo sapien
gggaagagcaaagcgccatcacagt

SEQ ID NO: 587150 - DNA, 25 bp, Homo sapien
gagcaaagcgccatcacagtgcgcc

SEQ ID NO: 587151 - DNA, 25 bp, Homo sapien
ctgggaagagcaaagcgccatcaca

SEQ ID NO: 587152 - DNA, 25 bp, Homo sapien
catcgggtcgagatatttgtcttcg

SEQ ID NO: 587153 - DNA, 25 bp, Homo sapien
ggccgtggatcgcagccgccttctg

SEQ ID NO: 587154 - DNA, 25 bp, Homo sapien
cagccgccttctgcgtgattttctc

SEQ ID NO: 587155 - DNA, 25 bp, Homo sapien
agaacctgtgcacccgcatgcatgg

SEQ ID NO: 587156 - DNA, 25 bp, Homo sapien
ggctggaaggagttaggctgcgcac

SEQ ID NO: 587157 - DNA, 25 bp, Homo sapien
gctggaaggagttaggctgcgcacg

SEQ ID NO: 587158 - DNA, 25 bp, Homo sapien
aaggagttaggctgcgcacgcgcgc

SEQ ID NO: 587159 - DNA, 25 bp, Homo sapien
tggaaggagttaggctgcgcacgcg

SEQ ID NO: 587160 - DNA, 25 bp, Homo sapien
tccctctgaaaataccctggcgtag

SEQ ID NO: 587161 - DNA, 25 bp, Homo sapien
tacttacgcttaattccactgaagg

SEQ ID NO: 587162 - DNA, 25 bp, Homo sapien
gtaaaaatagagtccacatgagtca

SEQ ID NO: 587163 - DNA, 25 bp, Homo sapien
gagtgctagtctccccaaaagttag

SEQ ID NO: 587164 - DNA, 25 bp, Homo sapien
ttgagctccggtcgcggccaatctg

SEQ ID NO: 587165 - DNA, 25 bp, Homo sapien
gcggccaatctggacgcaaaagaga

SEQ ID NO: 587166 - DNA, 25 bp, Homo sapien
aatctggacgcaaaagagacgcgtg

SEQ ID NO: 587167 - DNA, 25 bp, Homo sapien
ctgctattgagctccggtcgcggcc

SEQ ID NO: 587168 - DNA, 25 bp, Homo sapien
gcggagccgccaaatgggcccgtcc

SEQ ID NO: 587169 - DNA, 25 bp, Homo sapien
cgcggagccgccaaatgggcccgtc

SEQ ID NO: 587170 - DNA, 25 bp, Homo sapien
ggagccgccaaatgggcccgtccat

SEQ ID NO: 587171 - DNA, 25 bp, Homo sapien
cggagccgccaaatgggcccgtcca

SEQ ID NO: 587172 - DNA, 25 bp, Homo sapien
ccgagggcacggcactggctcggtc

SEQ ID NO: 587173 - DNA, 25 bp, Homo sapien
tcagtgcccccggcccattgcccgg

SEQ ID NO: 587174 - DNA, 25 bp, Homo sapien
gagggcacggcactggctcggtccc

SEQ ID NO: 587175 - DNA, 25 bp, Homo sapien
gcccgagggcacggcactggctcgg

SEQ ID NO: 587176 - DNA, 25 bp, Homo sapien
aggaaacgggcgtggacttcttgct

SEQ ID NO: 587177 - DNA, 25 bp, Homo sapien
tggacttcttgctgcgcttcaccag

SEQ ID NO: 587178 - DNA, 25 bp, Homo sapien
tcttgctgcgcttcaccaggaagcc

SEQ ID NO: 587179 - DNA, 25 bp, Homo sapien
taggaaacgggcgtggacttcttgc

SEQ ID NO: 587180 - DNA, 25 bp, Homo sapien
gcggcgagcgctgcatgggcgcgct

SEQ ID NO: 587181 - DNA, 25 bp, Homo sapien
gcgtgggactgtagagcggcgcggg

SEQ ID NO: 587182 - DNA, 25 bp, Homo sapien
tgctcgcggctcacgggccgcgtgg

SEQ ID NO: 587183 - DNA, 25 bp, Homo sapien
gggttgccgaagtgcgcggcccgcg

SEQ ID NO: 587184 - DNA, 25 bp, Homo sapien
aaggactcggccgagaccggcgagc

SEQ ID NO: 587185 - DNA, 25 bp, Homo sapien
ccgtgcccatcttgagctcggcggg

SEQ ID NO: 587186 - DNA, 25 bp, Homo sapien
ggcgcgaagagcagcgggtcgccgc

SEQ ID NO: 587187 - DNA, 25 bp, Homo sapien
tcggcgccagccgagaacgccgtgc

SEQ ID NO: 587188 - DNA, 25 bp, Homo sapien
ggccttgactgccttggcgggcggc

SEQ ID NO: 587189 - DNA, 25 bp, Homo sapien
tcgaagtgcagcttgcggatggcct

SEQ ID NO: 587190 - DNA, 25 bp, Homo sapien
agcttgcggatggccttgggcttct

SEQ ID NO: 587191 - DNA, 25 bp, Homo sapien
ctcgtcctcgaagtgcagcttgcgg

SEQ ID NO: 587192 - DNA, 25 bp, Homo sapien
tccttgatcttgagccccagcacgg

SEQ ID NO: 587193 - DNA, 25 bp, Homo sapien
cgggccctccttgatcttgagcccc

SEQ ID NO: 587194 - DNA, 25 bp, Homo sapien
cttgagccccagcacgggcgacgtg

SEQ ID NO: 587195 - DNA, 25 bp, Homo sapien
gatcttgagccccagcacgggcgac

SEQ ID NO: 587196 - DNA, 25 bp, Homo sapien
ccgcgcggccccgcggcgcctccac

SEQ ID NO: 587197 - DNA, 25 bp, Homo sapien
gccgcgccgcgccccccgcgcggcc

SEQ ID NO: 587198 - DNA, 25 bp, Homo sapien
cccgcgcggccccgcggcgcctcca

SEQ ID NO: 587199 - DNA, 25 bp, Homo sapien
cgcccagcggccgcgccgcgccccc

SEQ ID NO: 587200 - DNA, 25 bp, Homo sapien
agcatttgtgctgcgccagcgcgaa

SEQ ID NO: 587201 - DNA, 25 bp, Homo sapien
cacgatgcgcgagcatttgtgctgc

SEQ ID NO: 587202 - DNA, 25 bp, Homo sapien
agcgcgaacgggtcggcgtactcct

SEQ ID NO: 587203 - DNA, 25 bp, Homo sapien
tcgggacagcggtactccacacgca

SEQ ID NO: 587204 - DNA, 25 bp, Homo sapien
ccagcggcggtgcgaggccaggttg

SEQ ID NO: 587205 - DNA, 25 bp, Homo sapien
gcggcggtgcgaggccaggttggcc

SEQ ID NO: 587206 - DNA, 25 bp, Homo sapien
cggtgcgaggccaggttggccgggc

SEQ ID NO: 587207 - DNA, 25 bp, Homo sapien
ggtgcgaggccaggttggccgggca

SEQ ID NO: 587208 - DNA, 25 bp, Homo sapien
cggcgggcgcgggccgcggtttgtg

SEQ ID NO: 587209 - DNA, 25 bp, Homo sapien
cgccgccgggtgcctcccgcgcctc

SEQ ID NO: 587210 - DNA, 25 bp, Homo sapien
tgccgccgccgggtgcctcccgcgc

SEQ ID NO: 587211 - DNA, 25 bp, Homo sapien
cgccgggtgcctcccgcgcctcagc

SEQ ID NO: 587212 - DNA, 25 bp, Homo sapien
ctgccgccgccgggtgcctcccgcg

SEQ ID NO: 587213 - DNA, 25 bp, Homo sapien
agcccgactcggacacgccgccggg

SEQ ID NO: 587214 - DNA, 25 bp, Homo sapien
cgcagtgatggcactcgtagagccc

SEQ ID NO: 587215 - DNA, 25 bp, Homo sapien
tagagcccgtcctcggagcccgact

SEQ ID NO: 587216 - DNA, 25 bp, Homo sapien
tcttggcgcagtgatggcactcgta

SEQ ID NO: 587217 - DNA, 25 bp, Homo sapien
cagcaggtgcttgcgtaggtaggcc

SEQ ID NO: 587218 - DNA, 25 bp, Homo sapien
ctcctggggcgccttctcgtcgggc

SEQ ID NO: 587219 - DNA, 25 bp, Homo sapien
ggtacaaggccagtaggtcctcggc

SEQ ID NO: 587220 - DNA, 25 bp, Homo sapien
gctagcggcgcgcccttggcctgca

SEQ ID NO: 587221 - DNA, 25 bp, Homo sapien
tctccgcacactgggcacaggtggc

SEQ ID NO: 587222 - DNA, 25 bp, Homo sapien
ttgctggcgaacgactctccgcaca

SEQ ID NO: 587223 - DNA, 25 bp, Homo sapien
tggcgctcctgagcgcccttgctgg

SEQ ID NO: 587224 - DNA, 25 bp, Homo sapien
tgtctgttttcggatgggtggcact

SEQ ID NO: 587225 - DNA, 25 bp, Homo sapien
gagaagcggagacgacactttcacc

SEQ ID NO: 587226 - DNA, 25 bp, Homo sapien
ggcagttactacagcatcttcggaa

SEQ ID NO: 587227 - DNA, 25 bp, Homo sapien
tttgtgggtctccaagcgaaggcac

SEQ ID NO: 587228 - DNA, 25 bp, Homo sapien
gagctgtcggttgtacaagggccct

SEQ ID NO: 587229 - DNA, 25 bp, Homo sapien
ccagaagggcagagttccgcagctg

SEQ ID NO: 587230 - DNA, 25 bp, Homo sapien
gctctgaaaacccaccatcctggtg

SEQ ID NO: 587231 - DNA, 25 bp, Homo sapien
cagctgaggttcagctctgaaaacc

SEQ ID NO: 587232 - DNA, 25 bp, Homo sapien
agccgctaccaaggctataccctca

SEQ ID NO: 587233 - DNA, 25 bp, Homo sapien
tggatcttcgtttcaggcaccagga

SEQ ID NO: 587234 - DNA, 25 bp, Homo sapien
ttgatggctgattatgggcccagtg

SEQ ID NO: 587235 - DNA, 25 bp, Homo sapien
cttggatcttcgtttcaggcaccag

SEQ ID NO: 587236 - DNA, 25 bp, Homo sapien
atggctgattatgggcccagtggaa

SEQ ID NO: 587237 - DNA, 25 bp, Homo sapien
gactttgaggtaagagcaggtagcc

SEQ ID NO: 587238 - DNA, 25 bp, Homo sapien
tacacgcagagacgaaaacgctgga

SEQ ID NO: 587239 - DNA, 25 bp, Homo sapien
gcaggtagccaaagcaggtttttca

SEQ ID NO: 587240 - DNA, 25 bp, Homo sapien
gaagccatggactggaacctctgga

SEQ ID NO: 587241 - DNA, 25 bp, Homo sapien
tctgatttactgtgatgatttaata

SEQ ID NO: 587242 - DNA, 25 bp, Homo sapien
tggtgggaacaccttgcagacgtgt

SEQ ID NO: 587243 - DNA, 25 bp, Homo sapien
gccacaccgagaaagcacacatctc

SEQ ID NO: 587244 - DNA, 25 bp, Homo sapien
cacttcagtgctatatgtttctctc

SEQ ID NO: 587245 - DNA, 25 bp, Homo sapien
caaagtctgcggttcctaagagcca

SEQ ID NO: 587246 - DNA, 25 bp, Homo sapien
gcagcgtctgcatccgagggaaatt

SEQ ID NO: 587247 - DNA, 25 bp, Homo sapien
caaaatgtggtaagactcgctggcc

SEQ ID NO: 587248 - DNA, 25 bp, Homo sapien
tttatatctactgaagggcagcgtc

SEQ ID NO: 587249 - DNA, 25 bp, Homo sapien
tcaattgtaggcagcaaataactca

SEQ ID NO: 587250 - DNA, 25 bp, Homo sapien
agcaaataactcaaccctcctgtaa

SEQ ID NO: 587251 - DNA, 25 bp, Homo sapien
gcaaataactcaaccctcctgtaac

SEQ ID NO: 587252 - DNA, 25 bp, Homo sapien
tgggaaattcaattgtaggcagcaa

SEQ ID NO: 587253 - DNA, 25 bp, Homo sapien
tcctgttgggaaggccatcgcatgc

SEQ ID NO: 587254 - DNA, 25 bp, Homo sapien
gagaacgtttcatcttcaggctcta

SEQ ID NO: 587255 - DNA, 25 bp, Homo sapien
tgtaggtctctaccagcaggtcgcc

SEQ ID NO: 587256 - DNA, 25 bp, Homo sapien
ggctctagaaactcctgttgcggaa

SEQ ID NO: 587257 - DNA, 25 bp, Homo sapien
tttcactgaggagccagttttttcc

SEQ ID NO: 587258 - DNA, 25 bp, Homo sapien
ccaggcctgaagaagccttctgagg

SEQ ID NO: 587259 - DNA, 25 bp, Homo sapien
ggccacccaggcctgaagaagcctt

SEQ ID NO: 587260 - DNA, 25 bp, Homo sapien
ggctgcttggccacccaggcctgaa

SEQ ID NO: 587261 - DNA, 25 bp, Homo sapien
tgaagaagccttctgaggctctcac

SEQ ID NO: 587262 - DNA, 25 bp, Homo sapien
aggctttgttctcacagcggccagg

SEQ ID NO: 587263 - DNA, 25 bp, Homo sapien
tttgttctcacagcggccaggtaca

SEQ ID NO: 587264 - DNA, 25 bp, Homo sapien
acagcggccaggtacagagcaacgc

SEQ ID NO: 587265 - DNA, 25 bp, Homo sapien
ccactgcgcaggctttgttctcaca

SEQ ID NO: 587266 - DNA, 25 bp, Homo sapien
tgggaagtaaatccaagaagcttac

SEQ ID NO: 587267 - DNA, 25 bp, Homo sapien
catgacagtgatgcccctatcttag

SEQ ID NO: 587268 - DNA, 25 bp, Homo sapien
tcatgacagtgatgcccctatctta

SEQ ID NO: 587269 - DNA, 25 bp, Homo sapien
gaaatacagggtcctgtccttgcat

SEQ ID NO: 587270 - DNA, 25 bp, Homo sapien
agaacactcagaagattccagaaat

SEQ ID NO: 587271 - DNA, 25 bp, Homo sapien
ggcttggtgttgcagcaggcattct

SEQ ID NO: 587272 - DNA, 25 bp, Homo sapien
ggcattcttgtattcctctgagcac

SEQ ID NO: 587273 - DNA, 25 bp, Homo sapien
attcctctgagcacaccgacagcag

SEQ ID NO: 587274 - DNA, 25 bp, Homo sapien
aacagtggcttggtgttgcagcagg

SEQ ID NO: 587275 - DNA, 25 bp, Homo sapien
acctcccaggctcaaaatcctctca

SEQ ID NO: 587276 - DNA, 25 bp, Homo sapien
ggagtgcagtgaagccatcactgca

SEQ ID NO: 587277 - DNA, 25 bp, Homo sapien
cagtgaagccatcactgcagccttg

SEQ ID NO: 587278 - DNA, 25 bp, Homo sapien
agtgcagtgaagccatcactgcagc

SEQ ID NO: 587279 - DNA, 25 bp, Homo sapien
ccttgtaacaatctagcttctcttg

SEQ ID NO: 587280 - DNA, 25 bp, Homo sapien
tgtaacaatctagcttctcttgtgg

SEQ ID NO: 587281 - DNA, 25 bp, Homo sapien
ttctcttgtggatgatggtctagct

SEQ ID NO: 587282 - DNA, 25 bp, Homo sapien
tggatgatggtctagctgtgctgcc

SEQ ID NO: 587283 - DNA, 25 bp, Homo sapien
ctgggctgttggaatattgtctggg

SEQ ID NO: 587284 - DNA, 25 bp, Homo sapien
tctgattaccatagtgggctgggct

SEQ ID NO: 587285 - DNA, 25 bp, Homo sapien
gctgttggaatattgtctgggatta

SEQ ID NO: 587286 - DNA, 25 bp, Homo sapien
tgggattaaatcaagtctgttctcc

SEQ ID NO: 587287 - DNA, 25 bp, Homo sapien
gggatccctgctttcaggtgcacag

SEQ ID NO: 587288 - DNA, 25 bp, Homo sapien
tgtccatctgcaggaactcgaggtg

SEQ ID NO: 587289 - DNA, 25 bp, Homo sapien
gtgctgtggcacgagggcccagtgc

SEQ ID NO: 587290 - DNA, 25 bp, Homo sapien
tcagcgggacaaagctggcattcct

SEQ ID NO: 587291 - DNA, 25 bp, Homo sapien
agttggtaatgacaaggatcacggc

SEQ ID NO: 587292 - DNA, 25 bp, Homo sapien
gatgttagggtccagatttgttggt

SEQ ID NO: 587293 - DNA, 25 bp, Homo sapien
cacggcaatgccattcacaggagaa

SEQ ID NO: 587294 - DNA, 25 bp, Homo sapien
gaaagcaagtgagcgagctgccgtt

SEQ ID NO: 587295 - DNA, 25 bp, Homo sapien
ctttgaccgccagccttaatggagg

SEQ ID NO: 587296 - DNA, 25 bp, Homo sapien
gataagacacggcacgtgctgggcc

SEQ ID NO: 587297 - DNA, 25 bp, Homo sapien
ggtagcggaccctgcatcagtgctc

SEQ ID NO: 587298 - DNA, 25 bp, Homo sapien
ggaaaatgtctttgtcgcctgccct

SEQ ID NO: 587299 - DNA, 25 bp, Homo sapien
ttaactcaaccatggattggcagtt

SEQ ID NO: 587300 - DNA, 25 bp, Homo sapien
caaccatggattggcagttactgag

SEQ ID NO: 587301 - DNA, 25 bp, Homo sapien
ttctttgtggtccagcacaccacac

SEQ ID NO: 587302 - DNA, 25 bp, Homo sapien
ggattggcagttactgagacattct

SEQ ID NO: 587303 - DNA, 25 bp, Homo sapien
gaaagcatgccatagaaaggcccac

SEQ ID NO: 587304 - DNA, 25 bp, Homo sapien
tcagtaaccaggatccaaggacagg

SEQ ID NO: 587305 - DNA, 25 bp, Homo sapien
ttgcctaaagctggagccctagtcc

SEQ ID NO: 587306 - DNA, 25 bp, Homo sapien
ttgctatcccagtgagtacagctgg

SEQ ID NO: 587307 - DNA, 25 bp, Homo sapien
aattcacatactgtgcagttcaacc

SEQ ID NO: 587308 - DNA, 25 bp, Homo sapien
aatcatgggaatagtagtgccaccc

SEQ ID NO: 587309 - DNA, 25 bp, Homo sapien
agtatacaagtcgatgtttttggtc

SEQ ID NO: 587310 - DNA, 25 bp, Homo sapien
ccacttctgttgtgtcacttttgga

SEQ ID NO: 587311 - DNA, 25 bp, Homo sapien
ggtgacagtcgctgacccaacagca

SEQ ID NO: 587312 - DNA, 25 bp, Homo sapien
cacgtgcagtcattagggaagccct

SEQ ID NO: 587313 - DNA, 25 bp, Homo sapien
tatgggtagactctgcagtcagcgt

SEQ ID NO: 587314 - DNA, 25 bp, Homo sapien
tccaggtaacatctgggcatgcagc

SEQ ID NO: 587315 - DNA, 25 bp, Homo sapien
tcaggcaaaacaggaagtgtgcaca

SEQ ID NO: 587316 - DNA, 25 bp, Homo sapien
caggcaaaacaggaagtgtgcacac

SEQ ID NO: 587317 - DNA, 25 bp, Homo sapien
tcggaatacccaaactgacttgtgt

SEQ ID NO: 587318 - DNA, 25 bp, Homo sapien
aatactacgtatggttcctttctgc

SEQ ID NO: 587319 - DNA, 25 bp, Homo sapien
agatgccaatactacgtatggttcc

SEQ ID NO: 587320 - DNA, 25 bp, Homo sapien
taaatgagtggttcttctcggaata

SEQ ID NO: 587321 - DNA, 25 bp, Homo sapien
gtttaacatcgctggcctcaatcct

SEQ ID NO: 587322 - DNA, 25 bp, Homo sapien
ataagagggagaggcacgcacttgc

SEQ ID NO: 587323 - DNA, 25 bp, Homo sapien
ctcagagctttgttgggagataaga

SEQ ID NO: 587324 - DNA, 25 bp, Homo sapien
aataaaatcagccatgcatcattgt

SEQ ID NO: 587325 - DNA, 25 bp, Homo sapien
tctagcaaggttaatgaactttttc

SEQ ID NO: 587326 - DNA, 25 bp, Homo sapien
ccggttcattcaggagtgtgggttt

SEQ ID NO: 587327 - DNA, 25 bp, Homo sapien
tcaaatctagcaaggttaatgaact

SEQ ID NO: 587328 - DNA, 25 bp, Homo sapien
tttctcagtaatgtgctccggttca

SEQ ID NO: 587329 - DNA, 25 bp, Homo sapien
catatgtcagtaggctaagaatgtt

SEQ ID NO: 587330 - DNA, 25 bp, Homo sapien
agaagcgtctgcactgtcgtatcac

SEQ ID NO: 587331 - DNA, 25 bp, Homo sapien
tcaccaagttgcttgaagtatcaac

SEQ ID NO: 587332 - DNA, 25 bp, Homo sapien
agtatcaactcatatgtcagtaggc

SEQ ID NO: 587333 - DNA, 25 bp, Homo sapien
gttccccggaccagcggcttgctgg

SEQ ID NO: 587334 - DNA, 25 bp, Homo sapien
tccccggaccagcggcttgctgggg

SEQ ID NO: 587335 - DNA, 25 bp, Homo sapien
ttccccggaccagcggcttgctggg

SEQ ID NO: 587336 - DNA, 25 bp, Homo sapien
tagtgctaaacaacagtcaacaaac

SEQ ID NO: 587337 - DNA, 25 bp, Homo sapien
atagtgctaaacaacagtcaacaaa

SEQ ID NO: 587338 - DNA, 25 bp, Homo sapien
gatagtgctaaacaacagtcaacaa

SEQ ID NO: 587339 - DNA, 25 bp, Homo sapien
tgatagtgctaaacaacagtcaaca

SEQ ID NO: 587340 - DNA, 25 bp, Homo sapien
gagcgtcatgtccactcttgggaaa

SEQ ID NO: 587341 - DNA, 25 bp, Homo sapien
tttgccagtctgagcgtcatgtcca

SEQ ID NO: 587342 - DNA, 25 bp, Homo sapien
tgtccggggccactttgccagtctg

SEQ ID NO: 587343 - DNA, 25 bp, Homo sapien
ggccactttgccagtctgagcgtca

SEQ ID NO: 587344 - DNA, 25 bp, Homo sapien
cctgcttggttagctgcttccctcc

SEQ ID NO: 587345 - DNA, 25 bp, Homo sapien
ccctcccatcagagacttctttgag

SEQ ID NO: 587346 - DNA, 25 bp, Homo sapien
catcagagacttctttgagcttatc

SEQ ID NO: 587347 - DNA, 25 bp, Homo sapien
tgcttggttagctgcttccctccca

SEQ ID NO: 587348 - DNA, 25 bp, Homo sapien
cttcccgctcatggcattctctgtg

SEQ ID NO: 587349 - DNA, 25 bp, Homo sapien
tggcattctctgtgcccgaactgct

SEQ ID NO: 587350 - DNA, 25 bp, Homo sapien
agtatcccaacttccttcccgctca

SEQ ID NO: 587351 - DNA, 25 bp, Homo sapien
tcttacactccttaccccacttcat

SEQ ID NO: 587352 - DNA, 25 bp, Homo sapien
tagtccttcctggttatgcttaagg

SEQ ID NO: 587353 - DNA, 25 bp, Homo sapien
tggtcatttcaagcctgcaagtagc

SEQ ID NO: 587354 - DNA, 25 bp, Homo sapien
ttccctccacgccagggtgtgtgtg

SEQ ID NO: 587355 - DNA, 25 bp, Homo sapien
tgcaagtagcattcttacctcttcc

SEQ ID NO: 587356 - DNA, 25 bp, Homo sapien
tgggtctgccctgcattgtgccgct

SEQ ID NO: 587357 - DNA, 25 bp, Homo sapien
ggtctgccctgcattgtgccgcttc

SEQ ID NO: 587358 - DNA, 25 bp, Homo sapien
tgcattgtgccgcttcctcccctgc

SEQ ID NO: 587359 - DNA, 25 bp, Homo sapien
cattgtgccgcttcctcccctgcat

SEQ ID NO: 587360 - DNA, 25 bp, Homo sapien
agggttatgtccagaatccatctcc

SEQ ID NO: 587361 - DNA, 25 bp, Homo sapien
tttttactgatgtgagactttgagc

SEQ ID NO: 587362 - DNA, 25 bp, Homo sapien
agcgacggtgtcacggggcattttc

SEQ ID NO: 587363 - DNA, 25 bp, Homo sapien
tgtgagactttgagcgacggtgtca

SEQ ID NO: 587364 - DNA, 25 bp, Homo sapien
cacttggtgatttgcagaaggtgag

SEQ ID NO: 587365 - DNA, 25 bp, Homo sapien
ttctctagacttgaaataggctgaa

SEQ ID NO: 587366 - DNA, 25 bp, Homo sapien
gaaacacggttcaagtgacattgac

SEQ ID NO: 587367 - DNA, 25 bp, Homo sapien
tattggcgtcagcatggcagaactc

SEQ ID NO: 587368 - DNA, 25 bp, Homo sapien
tctttaggacgagtgaaaatctgtg

SEQ ID NO: 587369 - DNA, 25 bp, Homo sapien
agacatttagaggcagttctgcatt

SEQ ID NO: 587370 - DNA, 25 bp, Homo sapien
agagtttacaattcatgtgtgttgc

SEQ ID NO: 587371 - DNA, 25 bp, Homo sapien
tgctctttaattgtctactcttttt

SEQ ID NO: 587372 - DNA, 25 bp, Homo sapien
tctttaattgtctactctttttata

SEQ ID NO: 587373 - DNA, 25 bp, Homo sapien
aaggccgcttggcaaccttcacatc

SEQ ID NO: 587374 - DNA, 25 bp, Homo sapien
gataacttggtatcagatgaatatc

SEQ ID NO: 587375 - DNA, 25 bp, Homo sapien
ccaggaaggccgcttggcaaccttc

SEQ ID NO: 587376 - DNA, 25 bp, Homo sapien
caagcagtctgaatcggccaggaag

SEQ ID NO: 587377 - DNA, 25 bp, Homo sapien
tttcctttgaggtgcattcgtaaaa

SEQ ID NO: 587378 - DNA, 25 bp, Homo sapien
tgcattcgtaaaagggcatcccgta

SEQ ID NO: 587379 - DNA, 25 bp, Homo sapien
acctgaagggctgtcagaacaggga

SEQ ID NO: 587380 - DNA, 25 bp, Homo sapien
ctgcagacgccacacctgaagggct

SEQ ID NO: 587381 - DNA, 25 bp, Homo sapien
tcataagaggcagggccgtgactga

SEQ ID NO: 587382 - DNA, 25 bp, Homo sapien
tctcttgttgggagaattctgatca

SEQ ID NO: 587383 - DNA, 25 bp, Homo sapien
aattctgatcataagaggcagggcc

SEQ ID NO: 587384 - DNA, 25 bp, Homo sapien
tgactgagagccaggctctcaagtc

SEQ ID NO: 587385 - DNA, 25 bp, Homo sapien
agcaggtgcatggtaacggtgccca

SEQ ID NO: 587386 - DNA, 25 bp, Homo sapien
tactggcaacctgtgcggtcactgg

SEQ ID NO: 587387 - DNA, 25 bp, Homo sapien
tgacagtgcctcacgtcaaattgca

SEQ ID NO: 587388 - DNA, 25 bp, Homo sapien
ctcacgtcaaattgcaagccgaggg

SEQ ID NO: 587389 - DNA, 25 bp, Homo sapien
cctctgagggctgtaccgtgaacat

SEQ ID NO: 587390 - DNA, 25 bp, Homo sapien
cctgtctttggatctggagctagaa

SEQ ID NO: 587391 - DNA, 25 bp, Homo sapien
gtgcagtcccgagcgcactgcctgg

SEQ ID NO: 587392 - DNA, 25 bp, Homo sapien
cccagattggacagttggcgtgcgt

SEQ ID NO: 587393 - DNA, 25 bp, Homo sapien
cagagggacttgaactgttgcctgc

SEQ ID NO: 587394 - DNA, 25 bp, Homo sapien
tgcctgcggcttttcactggataat

SEQ ID NO: 587395 - DNA, 25 bp, Homo sapien
caggatcggtatctatcatgggaaa

SEQ ID NO: 587396 - DNA, 25 bp, Homo sapien
catttgctaagcacaggaaccatga

SEQ ID NO: 587397 - DNA, 25 bp, Homo sapien
cagagcgcgggctttcttccctagt

SEQ ID NO: 587398 - DNA, 25 bp, Homo sapien
aacagcgtgattgcacagtatggcc

SEQ ID NO: 587399 - DNA, 25 bp, Homo sapien
gaccacctggcagtgaggttgcccg

SEQ ID NO: 587400 - DNA, 25 bp, Homo sapien
taatgtaattgaagcgcgaccacct

SEQ ID NO: 587401 - DNA, 25 bp, Homo sapien
cagctctgtatctgaggctgatggc

SEQ ID NO: 587402 - DNA, 25 bp, Homo sapien
tggccagtgctccaaccatgggcaa

SEQ ID NO: 587403 - DNA, 25 bp, Homo sapien
gctttcccagcacatgtcaactcta

SEQ ID NO: 587404 - DNA, 25 bp, Homo sapien
gatggccagtgctccaaccatgggc

SEQ ID NO: 587405 - DNA, 25 bp, Homo sapien
tattctttggtgcttgctttgagtt

SEQ ID NO: 587406 - DNA, 25 bp, Homo sapien
gttttaatttgtttgtgctattcca

SEQ ID NO: 587407 - DNA, 25 bp, Homo sapien
ttattctttggtgcttgctttgagt

SEQ ID NO: 587408 - DNA, 25 bp, Homo sapien
gctttgagttttaatttgtttgtgc

SEQ ID NO: 587409 - DNA, 25 bp, Homo sapien
acatttcctaagtgcgagtttgggc

SEQ ID NO: 587410 - DNA, 25 bp, Homo sapien
gagtttgggcacagccagccaaaga

SEQ ID NO: 587411 - DNA, 25 bp, Homo sapien
gacttcatgacaaatgggccatcaa

SEQ ID NO: 587412 - DNA, 25 bp, Homo sapien
taaaacttagcagaactatggcagc

SEQ ID NO: 587413 - DNA, 25 bp, Homo sapien
tggattcgtacaagatgcaaaactc

SEQ ID NO: 587414 - DNA, 25 bp, Homo sapien
gcatggcatatggtgtctggattcg

SEQ ID NO: 587415 - DNA, 25 bp, Homo sapien
aaagtaataggccttcgcatggcat

SEQ ID NO: 587416 - DNA, 25 bp, Homo sapien
gcggtggcaccgaataaagtaatag

SEQ ID NO: 587417 - DNA, 25 bp, Homo sapien
atttttcacagagtacagataacac

SEQ ID NO: 587418 - DNA, 25 bp, Homo sapien
ctttcactaatctgcacctcacagg

SEQ ID NO: 587419 - DNA, 25 bp, Homo sapien
aggccactttcactaatctgcacct

SEQ ID NO: 587420 - DNA, 25 bp, Homo sapien
taaggccactttcactaatctgcac

SEQ ID NO: 587421 - DNA, 25 bp, Homo sapien
atctgtggatttcaggatacaacgt

SEQ ID NO: 587422 - DNA, 25 bp, Homo sapien
ccattcccatatctagttatcttga

SEQ ID NO: 587423 - DNA, 25 bp, Homo sapien
gatttcaggatacaacgtaaagtta

SEQ ID NO: 587424 - DNA, 25 bp, Homo sapien
tccattcccatatctagttatcttg

SEQ ID NO: 587425 - DNA, 25 bp, Homo sapien
gcaggcagcgatcgatagctctaat

SEQ ID NO: 587426 - DNA, 25 bp, Homo sapien
ccttctgcaggcagcgatcgatagc

SEQ ID NO: 587427 - DNA, 25 bp, Homo sapien
tttcgcacagcgagacccttctgca

SEQ ID NO: 587428 - DNA, 25 bp, Homo sapien
gatcgatagctctaatccgtggcag

SEQ ID NO: 587429 - DNA, 25 bp, Homo sapien
aacatcggtatagccgtggcaagca

SEQ ID NO: 587430 - DNA, 25 bp, Homo sapien
tcctgcaaccaacatcggtatagcc

SEQ ID NO: 587431 - DNA, 25 bp, Homo sapien
cctgccacatgtgccatggtaaatc

SEQ ID NO: 587432 - DNA, 25 bp, Homo sapien
cagaccctgccacatgtgccatggt

SEQ ID NO: 587433 - DNA, 25 bp, Homo sapien
tatgtttgcaacttgatccctgggc

SEQ ID NO: 587434 - DNA, 25 bp, Homo sapien
tctcatacctccacaaagggtaggg

SEQ ID NO: 587435 - DNA, 25 bp, Homo sapien
aggcagatgtatgcctggaagtgca

SEQ ID NO: 587436 - DNA, 25 bp, Homo sapien
gatgggattctgaatttataagcag

SEQ ID NO: 587437 - DNA, 25 bp, Homo sapien
tctatcctctgtctcagatgtggca

SEQ ID NO: 587438 - DNA, 25 bp, Homo sapien
tatcctctgtctcagatgtggcact

SEQ ID NO: 587439 - DNA, 25 bp, Homo sapien
tcctctatcctctgtctcagatgtg

SEQ ID NO: 587440 - DNA, 25 bp, Homo sapien
gggccttgtgtccattctgctgctg

SEQ ID NO: 587441 - DNA, 25 bp, Homo sapien
ggcctgtgctgttactctgcctgga

SEQ ID NO: 587442 - DNA, 25 bp, Homo sapien
attagagccaactggagacccctcc

SEQ ID NO: 587443 - DNA, 25 bp, Homo sapien
tgcagtgagtagaacagtgtccaac

SEQ ID NO: 587444 - DNA, 25 bp, Homo sapien
taaagcccaccctggccattagagc

SEQ ID NO: 587445 - DNA, 25 bp, Homo sapien
gcactgatggatttatgaatgttaa

SEQ ID NO: 587446 - DNA, 25 bp, Homo sapien
tctgcttgataagatatattgtcct

SEQ ID NO: 587447 - DNA, 25 bp, Homo sapien
attttgtcaatgtggatttttgcac

SEQ ID NO: 587448 - DNA, 25 bp, Homo sapien
gaatgttaaatgaaccttgagttcc

SEQ ID NO: 587449 - DNA, 25 bp, Homo sapien
ggaacacatgataggggctccacaa

SEQ ID NO: 587450 - DNA, 25 bp, Homo sapien
gaacacatgataggggctccacaag

SEQ ID NO: 587451 - DNA, 25 bp, Homo sapien
ttctttagtcaaggaacacatgata

SEQ ID NO: 587452 - DNA, 25 bp, Homo sapien
tttagtcaaggaacacatgataggg

SEQ ID NO: 587453 - DNA, 25 bp, Homo sapien
ggcatgctggctagtgttgccacgt

SEQ ID NO: 587454 - DNA, 25 bp, Homo sapien
gacttcagcgttatcactttgctgc

SEQ ID NO: 587455 - DNA, 25 bp, Homo sapien
gctttcacagtatcttgccaagaag

SEQ ID NO: 587456 - DNA, 25 bp, Homo sapien
gagtccctggatatgaagtgtcttc

SEQ ID NO: 587457 - DNA, 25 bp, Homo sapien
aatattccaatcctggaggctggag

SEQ ID NO: 587458 - DNA, 25 bp, Homo sapien
ggcaatattccaatcctggaggctg

SEQ ID NO: 587459 - DNA, 25 bp, Homo sapien
attccaatcctggaggctggaggtt

SEQ ID NO: 587460 - DNA, 25 bp, Homo sapien
tccaatcctggaggctggaggttat

SEQ ID NO: 587461 - DNA, 25 bp, Homo sapien
cctgcctctcggtaggcccatccat

SEQ ID NO: 587462 - DNA, 25 bp, Homo sapien
ttttcaatgtggcctgcctctcggt

SEQ ID NO: 587463 - DNA, 25 bp, Homo sapien
gatagcgtccctacccttgtgtttg

SEQ ID NO: 587464 - DNA, 25 bp, Homo sapien
caagatcagctcaaggtccgtatag

SEQ ID NO: 587465 - DNA, 25 bp, Homo sapien
tgacctttatgcaggacacccctga

SEQ ID NO: 587466 - DNA, 25 bp, Homo sapien
aatgttcagtgcatggactccttgg

SEQ ID NO: 587467 - DNA, 25 bp, Homo sapien
gctgtagacgctgatatcaaaatag

SEQ ID NO: 587468 - DNA, 25 bp, Homo sapien
tttgaattctcataggtccgactgc

SEQ ID NO: 587469 - DNA, 25 bp, Homo sapien
aatagctttgcccaatctttgcagt

SEQ ID NO: 587470 - DNA, 25 bp, Homo sapien
tagtagaactaacagtctcctcctt

SEQ ID NO: 587471 - DNA, 25 bp, Homo sapien
atttccagctaggaccaagcaggag

SEQ ID NO: 587472 - DNA, 25 bp, Homo sapien
tgtgtgtgtggctcaagcacgtaca

SEQ ID NO: 587473 - DNA, 25 bp, Homo sapien
tagcatccgtggtgcacatggcctc

SEQ ID NO: 587474 - DNA, 25 bp, Homo sapien
ggctgacttgtcatccacggattat

SEQ ID NO: 587475 - DNA, 25 bp, Homo sapien
gggtacctgaccacaaggcctcttg

SEQ ID NO: 587476 - DNA, 25 bp, Homo sapien
gacatagtcaagtggttgccctgac

SEQ ID NO: 587477 - DNA, 25 bp, Homo sapien
tgctagtttacacataacgtgtggt

SEQ ID NO: 587478 - DNA, 25 bp, Homo sapien
tattctgccttattggtgaacacca

SEQ ID NO: 587479 - DNA, 25 bp, Homo sapien
tggagacttgtggtagaatttcata

SEQ ID NO: 587480 - DNA, 25 bp, Homo sapien
aggcttgtagttaaaacctatcagg

SEQ ID NO: 587481 - DNA, 25 bp, Homo sapien
gagttattcctagcgtcactgtaga

SEQ ID NO: 587482 - DNA, 25 bp, Homo sapien
ttaacatataacaattggagacttg

SEQ ID NO: 587483 - DNA, 25 bp, Homo sapien
tatctgttaccgtccaaatcctgcc

SEQ ID NO: 587484 - DNA, 25 bp, Homo sapien
ccttgacacctcaaatggcaggatg

SEQ ID NO: 587485 - DNA, 25 bp, Homo sapien
tattctcctcgggtctaagattgca

SEQ ID NO: 587486 - DNA, 25 bp, Homo sapien
tgatctcttggataaaggtgttgcc

SEQ ID NO: 587487 - DNA, 25 bp, Homo sapien
tcctggtcatgcagtaggttctgaa

SEQ ID NO: 587488 - DNA, 25 bp, Homo sapien
gactatagcatcttgtgtagactcc

SEQ ID NO: 587489 - DNA, 25 bp, Homo sapien
gaatgacagattccctgatgtgctg

SEQ ID NO: 587490 - DNA, 25 bp, Homo sapien
gattaccatatagatgcagctgagc

SEQ ID NO: 587491 - DNA, 25 bp, Homo sapien
ctttcaaggtgtataacttgttcat

SEQ ID NO: 587492 - DNA, 25 bp, Homo sapien
ccagggacaatagctttcctcttgc

SEQ ID NO: 587493 - DNA, 25 bp, Homo sapien
agggacaatagctttcctcttgctg

SEQ ID NO: 587494 - DNA, 25 bp, Homo sapien
gctggtccagggacaatagctttcc

SEQ ID NO: 587495 - DNA, 25 bp, Homo sapien
ggtccagggacaatagctttcctct

SEQ ID NO: 587496 - DNA, 25 bp, Homo sapien
tttgatattctctttgtagctctgt

SEQ ID NO: 587497 - DNA, 25 bp, Homo sapien
ctgtaagctggtgagatggctaggg

SEQ ID NO: 587498 - DNA, 25 bp, Homo sapien
gatggctaggggttctcctggaata

SEQ ID NO: 587499 - DNA, 25 bp, Homo sapien
tgatattctctttgtagctctgtaa

SEQ ID NO: 587500 - DNA, 25 bp, Homo sapien
gaatgaatttgacagggtggccagt

SEQ ID NO: 587501 - DNA, 25 bp, Homo sapien
tcctgcaggccttgggcacttgctg

SEQ ID NO: 587502 - DNA, 25 bp, Homo sapien
tgatgtggtttgtgacactgtacag

SEQ ID NO: 587503 - DNA, 25 bp, Homo sapien
ttggaagggtctggcttgaagcctt

SEQ ID NO: 587504 - DNA, 25 bp, Homo sapien
tcccatgccgaggtgaaggacttcc

SEQ ID NO: 587505 - DNA, 25 bp, Homo sapien
gctgtccagtgtgcagccatccttc

SEQ ID NO: 587506 - DNA, 25 bp, Homo sapien
tctcaggctgatactgctttttatt

SEQ ID NO: 587507 - DNA, 25 bp, Homo sapien
gttatttcttattccaggctgtcca

SEQ ID NO: 587508 - DNA, 25 bp, Homo sapien
aaatcctagcgctggtgttggcatc

SEQ ID NO: 587509 - DNA, 25 bp, Homo sapien
catagctgggaactgggggctggag

SEQ ID NO: 587510 - DNA, 25 bp, Homo sapien
actgggggctggaggggatagtcac

SEQ ID NO: 587511 - DNA, 25 bp, Homo sapien
atagctgggaactgggggctggagg

SEQ ID NO: 587512 - DNA, 25 bp, Homo sapien
tgggaactgggggctggaggggata

SEQ ID NO: 587513 - DNA, 25 bp, Homo sapien
tctgtgtgcattgatcatatcttca

SEQ ID NO: 587514 - DNA, 25 bp, Homo sapien
caatgtttgggtgtggtttttgact

SEQ ID NO: 587515 - DNA, 25 bp, Homo sapien
tgacttattaagcttaaagtctttc

SEQ ID NO: 587516 - DNA, 25 bp, Homo sapien
agataagtggccagattacgggtac

SEQ ID NO: 587517 - DNA, 25 bp, Homo sapien
tccagccttctagctggtccgttgt

SEQ ID NO: 587518 - DNA, 25 bp, Homo sapien
gacctccctgaattggctccacggt

SEQ ID NO: 587519 - DNA, 25 bp, Homo sapien
tgtcagctccgacctccctgaattg

SEQ ID NO: 587520 - DNA, 25 bp, Homo sapien
tagctggtccgttgttgctggctcc

SEQ ID NO: 587521 - DNA, 25 bp, Homo sapien
ctacttcctcatcccgtaacaggaa

SEQ ID NO: 587522 - DNA, 25 bp, Homo sapien
tcctccatgaacctctacttcctca

SEQ ID NO: 587523 - DNA, 25 bp, Homo sapien
gtaacaggaagtcatgtccctcccc

SEQ ID NO: 587524 - DNA, 25 bp, Homo sapien
cctcatcccgtaacaggaagtcatg

SEQ ID NO: 587525 - DNA, 25 bp, Homo sapien
cagtgatggtaagtaacatggcgag

SEQ ID NO: 587526 - DNA, 25 bp, Homo sapien
taacatggcgaggtgtggtgttggg

SEQ ID NO: 587527 - DNA, 25 bp, Homo sapien
agctggtggcagaagtaacatgaca

SEQ ID NO: 587528 - DNA, 25 bp, Homo sapien
ctgaggacccttgcccagaggatgt

SEQ ID NO: 587529 - DNA, 25 bp, Homo sapien
ttcgcgtggcgcaggcgcctactgc

SEQ ID NO: 587530 - DNA, 25 bp, Homo sapien
gaccctatgctttgattcgcgtggc

SEQ ID NO: 587531 - DNA, 25 bp, Homo sapien
ccggcctcgaccctatgctttgatt

SEQ ID NO: 587532 - DNA, 25 bp, Homo sapien
tatgctttgattcgcgtggcgcagg

SEQ ID NO: 587533 - DNA, 25 bp, Homo sapien
ggagaatatttttaagcctgctgaa

SEQ ID NO: 587534 - DNA, 25 bp, Homo sapien
tctgagtgttggtgaaataagtgca

SEQ ID NO: 587535 - DNA, 25 bp, Homo sapien
caaaacggcattcagatgtgatggc

SEQ ID NO: 587536 - DNA, 25 bp, Homo sapien
gcatggaactgctttacaaaacggc

SEQ ID NO: 587537 - DNA, 25 bp, Homo sapien
tgtgtgagctggatgaccttgtgcc

SEQ ID NO: 587538 - DNA, 25 bp, Homo sapien
accaggatcgtttctaattccaagc

SEQ ID NO: 587539 - DNA, 25 bp, Homo sapien
attttgcctccttcttctaacttat

SEQ ID NO: 587540 - DNA, 25 bp, Homo sapien
aagaatatggatgtattttgcctcc

SEQ ID NO: 587541 - DNA, 25 bp, Homo sapien
atcttctgatggcctttatctctgc

SEQ ID NO: 587542 - DNA, 25 bp, Homo sapien
gctttccataggtctgcggtcacaa

SEQ ID NO: 587543 - DNA, 25 bp, Homo sapien
gcagggtggcattcaaacgccactt

SEQ ID NO: 587544 - DNA, 25 bp, Homo sapien
tgtgagtgcatgaaaacccttaagc

SEQ ID NO: 587545 - DNA, 25 bp, Homo sapien
tgtctctgggtaagtagagatgact

SEQ ID NO: 587546 - DNA, 25 bp, Homo sapien
gctgagaaacaaggacaaggcagaa

SEQ ID NO: 587547 - DNA, 25 bp, Homo sapien
actcccaaccaagtcaaccaggtct

SEQ ID NO: 587548 - DNA, 25 bp, Homo sapien
gctccagttccggaaatacagctga

SEQ ID NO: 587549 - DNA, 25 bp, Homo sapien
aagagagcttcagtcatcatgcccc

SEQ ID NO: 587550 - DNA, 25 bp, Homo sapien
cccatgaattctggccctccagtag

SEQ ID NO: 587551 - DNA, 25 bp, Homo sapien
ccttccatgagggtatcaatatgca

SEQ ID NO: 587552 - DNA, 25 bp, Homo sapien
ccagtagcaggatgttatacaaata

SEQ ID NO: 587553 - DNA, 25 bp, Homo sapien
gatgttatacaaataggccaagttt

SEQ ID NO: 587554 - DNA, 25 bp, Homo sapien
ccctgagccctgaagtggtcgttca

SEQ ID NO: 587555 - DNA, 25 bp, Homo sapien
ggtcgttcagactgggtcattctcc

SEQ ID NO: 587556 - DNA, 25 bp, Homo sapien
cttttggtaacctgctagaccctga

SEQ ID NO: 587557 - DNA, 25 bp, Homo sapien
cacaaggttgtctcaggaggaatga

SEQ ID NO: 587558 - DNA, 25 bp, Homo sapien
tcctcgttcagagttgatgtcctgt

SEQ ID NO: 587559 - DNA, 25 bp, Homo sapien
tcaaagtgtaagttcctcgttcaga

SEQ ID NO: 587560 - DNA, 25 bp, Homo sapien
agttcctcgttcagagttgatgtcc

SEQ ID NO: 587561 - DNA, 25 bp, Homo sapien
agtgtaagttcctcgttcagagttg

SEQ ID NO: 587562 - DNA, 25 bp, Homo sapien
tcatggactcctagtcgcagcctgc

SEQ ID NO: 587563 - DNA, 25 bp, Homo sapien
ttaaccttgatagagcatggatggg

SEQ ID NO: 587564 - DNA, 25 bp, Homo sapien
cccacgggacatccttggtatagtg

SEQ ID NO: 587565 - DNA, 25 bp, Homo sapien
tatagtggattctttctcaggcctg

SEQ ID NO: 587566 - DNA, 25 bp, Homo sapien
tcaacctgtcccttgagtctgccaa

SEQ ID NO: 587567 - DNA, 25 bp, Homo sapien
cctggaggtctctgcgagaggtccc

SEQ ID NO: 587568 - DNA, 25 bp, Homo sapien
gctctgaaaaccagacctggaggtc

SEQ ID NO: 587569 - DNA, 25 bp, Homo sapien
ccctcatgttgtgagagcttggttt

SEQ ID NO: 587570 - DNA, 25 bp, Homo sapien
taccttctgagtgacattattgcat

SEQ ID NO: 587571 - DNA, 25 bp, Homo sapien
ggtccccaaggggtctcaggcatgg

SEQ ID NO: 587572 - DNA, 25 bp, Homo sapien
gcccttgggcgtcaatgggaccagg

SEQ ID NO: 587573 - DNA, 25 bp, Homo sapien
cccaccaaggtgggggctcgtgcat

SEQ ID NO: 587574 - DNA, 25 bp, Homo sapien
ggtgggggctcgtgcatggtgggct

SEQ ID NO: 587575 - DNA, 25 bp, Homo sapien
ttctatcctctggtaaactggcctg

SEQ ID NO: 587576 - DNA, 25 bp, Homo sapien
gctttctatcctctggtaaactggc

SEQ ID NO: 587577 - DNA, 25 bp, Homo sapien
tttctatcctctggtaaactggcct

SEQ ID NO: 587578 - DNA, 25 bp, Homo sapien
ctttctatcctctggtaaactggcc

SEQ ID NO: 587579 - DNA, 25 bp, Homo sapien
cagcctgtaacatgaacctgcagtt

SEQ ID NO: 587580 - DNA, 25 bp, Homo sapien
gcaaggaccggctgtgttgcgaaat

SEQ ID NO: 587581 - DNA, 25 bp, Homo sapien
cagacagtgcggttggtaggcaagg

SEQ ID NO: 587582 - DNA, 25 bp, Homo sapien
tgtgttgcgaaatgccggcaccaac

SEQ ID NO: 587583 - DNA, 25 bp, Homo sapien
gcaggtctgacagctaactgaatct

SEQ ID NO: 587584 - DNA, 25 bp, Homo sapien
gatgtcagctttcatgcaattagca

SEQ ID NO: 587585 - DNA, 25 bp, Homo sapien
tttagattcagtatgaaaactgatg

SEQ ID NO: 587586 - DNA, 25 bp, Homo sapien
tctctgcggcacttgaagttgcagg

SEQ ID NO: 587587 - DNA, 25 bp, Homo sapien
agtcccgattggagagtagctcgag

SEQ ID NO: 587588 - DNA, 25 bp, Homo sapien
tagaagatggatcattggaatgtgc

SEQ ID NO: 587589 - DNA, 25 bp, Homo sapien
gcctgttggtaaacctggatgggaa

SEQ ID NO: 587590 - DNA, 25 bp, Homo sapien
gaagcaatagttctggatggtacac

SEQ ID NO: 587591 - DNA, 25 bp, Homo sapien
caaagagtctgatatcagaacttac

SEQ ID NO: 587592 - DNA, 25 bp, Homo sapien
tcataggtagtcagaagtagaacca

SEQ ID NO: 587593 - DNA, 25 bp, Homo sapien
aaccaaagagtctgatatcagaact

SEQ ID NO: 587594 - DNA, 25 bp, Homo sapien
taggtagtcagaagtagaaccaaag

SEQ ID NO: 587595 - DNA, 25 bp, Homo sapien
cagtgtagtgcggtaaacgttcgac

SEQ ID NO: 587596 - DNA, 25 bp, Homo sapien
caggacaggacggaaaagttgtgct

SEQ ID NO: 587597 - DNA, 25 bp, Homo sapien
ggtaaacgttcgacaactggctctc

SEQ ID NO: 587598 - DNA, 25 bp, Homo sapien
ggaggtgctgacagattgcaccagt

SEQ ID NO: 587599 - DNA, 25 bp, Homo sapien
atggtctgcggtttctgtggttttg

SEQ ID NO: 587600 - DNA, 25 bp, Homo sapien
ttatggtctgcggtttctgtggttt

SEQ ID NO: 587601 - DNA, 25 bp, Homo sapien
tatggtctgcggtttctgtggtttt

SEQ ID NO: 587602 - DNA, 25 bp, Homo sapien
ctttatggtctgcggtttctgtggt

SEQ ID NO: 587603 - DNA, 25 bp, Homo sapien
taacagccccgttgatgaagcatcc

SEQ ID NO: 587604 - DNA, 25 bp, Homo sapien
tctgggcagccggagtctcatttgg

SEQ ID NO: 587605 - DNA, 25 bp, Homo sapien
aattagtacctacacttgtcagccg

SEQ ID NO: 587606 - DNA, 25 bp, Homo sapien
tgtcagccgtctgattgcccagtaa

SEQ ID NO: 587607 - DNA, 25 bp, Homo sapien
tctggggaggtggttgagtatatct

SEQ ID NO: 587608 - DNA, 25 bp, Homo sapien
tggggaggtggttgagtatatctgt

SEQ ID NO: 587609 - DNA, 25 bp, Homo sapien
ggggaggtggttgagtatatctgtc

SEQ ID NO: 587610 - DNA, 25 bp, Homo sapien
ctggggaggtggttgagtatatctg

SEQ ID NO: 587611 - DNA, 25 bp, Homo sapien
tccgagggcaagtcagtcctgtcat

SEQ ID NO: 587612 - DNA, 25 bp, Homo sapien
ctccgagggcaagtcagtcctgtca

SEQ ID NO: 587613 - DNA, 25 bp, Homo sapien
ctgcctccgagggcaagtcagtcct

SEQ ID NO: 587614 - DNA, 25 bp, Homo sapien
gcctccgagggcaagtcagtcctgt

SEQ ID NO: 587615 - DNA, 25 bp, Homo sapien
ctgcagctgacagacgtccccaagg

SEQ ID NO: 587616 - DNA, 25 bp, Homo sapien
atccacgggctccagttgccctggt

SEQ ID NO: 587617 - DNA, 25 bp, Homo sapien
ttgacaacatccacgggctccagtt

SEQ ID NO: 587618 - DNA, 25 bp, Homo sapien
cctgcgtctctgaatagtgcctgct

SEQ ID NO: 587619 - DNA, 25 bp, Homo sapien
tcgctcctgcatctctttccccagt

SEQ ID NO: 587620 - DNA, 25 bp, Homo sapien
cctgcatctctttccccagtgccca

SEQ ID NO: 587621 - DNA, 25 bp, Homo sapien
gctcctgcatctctttccccagtgc

SEQ ID NO: 587622 - DNA, 25 bp, Homo sapien
tcctgcatctctttccccagtgccc

SEQ ID NO: 587623 - DNA, 25 bp, Homo sapien
gctcttggaatcctgccggacctgg

SEQ ID NO: 587624 - DNA, 25 bp, Homo sapien
ggaatcctgccggacctggcatcct

SEQ ID NO: 587625 - DNA, 25 bp, Homo sapien
tcttggaatcctgccggacctggca

SEQ ID NO: 587626 - DNA, 25 bp, Homo sapien
aatcctgccggacctggcatcctgg

SEQ ID NO: 587627 - DNA, 25 bp, Homo sapien
ccctgtctctccgacggtcatgacc

SEQ ID NO: 587628 - DNA, 25 bp, Homo sapien
tctccgacggtcatgaccctatttc

SEQ ID NO: 587629 - DNA, 25 bp, Homo sapien
cgacggtcatgaccctatttctctc

SEQ ID NO: 587630 - DNA, 25 bp, Homo sapien
gtctctccgacggtcatgaccctat

SEQ ID NO: 587631 - DNA, 25 bp, Homo sapien
gcagccgtgacaaaagctgcaggaa

SEQ ID NO: 587632 - DNA, 25 bp, Homo sapien
aagaagggcacaggcattaatgcac

SEQ ID NO: 587633 - DNA, 25 bp, Homo sapien
acaacaggcatagcagccgtgacaa

SEQ ID NO: 587634 - DNA, 25 bp, Homo sapien
ggaaagggtgttacccacatctgag

SEQ ID NO: 587635 - DNA, 25 bp, Homo sapien
ttctccaactgacttgctccaaatg

SEQ ID NO: 587636 - DNA, 25 bp, Homo sapien
aaatggcttcttcccgccctctctc

SEQ ID NO: 587637 - DNA, 25 bp, Homo sapien
cacagaatccatccaagtccaacat

SEQ ID NO: 587638 - DNA, 25 bp, Homo sapien
ctctcctgtgcatgagccacagaat

SEQ ID NO: 587639 - DNA, 25 bp, Homo sapien
tgggcctctcctgtgcatgagccac

SEQ ID NO: 587640 - DNA, 25 bp, Homo sapien
tgtgcatgagccacagaatccatcc

SEQ ID NO: 587641 - DNA, 25 bp, Homo sapien
tggaattcaggatattagaaactac

SEQ ID NO: 587642 - DNA, 25 bp, Homo sapien
aattcaggatattagaaactacaga

SEQ ID NO: 587643 - DNA, 25 bp, Homo sapien
gaaacaggctgagctaaggaacatt

SEQ ID NO: 587644 - DNA, 25 bp, Homo sapien
aaacaggctgagctaaggaacattg

SEQ ID NO: 587645 - DNA, 25 bp, Homo sapien
cttcgattcggagaggcacacagct

SEQ ID NO: 587646 - DNA, 25 bp, Homo sapien
tcacgttacacaggcataggtctct

SEQ ID NO: 587647 - DNA, 25 bp, Homo sapien
ggaacctctgccctgaagaacctta

SEQ ID NO: 587648 - DNA, 25 bp, Homo sapien
gaccactggtcctcaaggaacctct

SEQ ID NO: 587649 - DNA, 25 bp, Homo sapien
gttaaaagcacattgctcacatcta

SEQ ID NO: 587650 - DNA, 25 bp, Homo sapien
tataatcccttctgaaataactgtg

SEQ ID NO: 587651 - DNA, 25 bp, Homo sapien
catctataatcccttctgaaataac

SEQ ID NO: 587652 - DNA, 25 bp, Homo sapien
aatccttggtaagaagctctaacag

SEQ ID NO: 587653 - DNA, 25 bp, Homo sapien
tctaccctcctccgtctttgtccca

SEQ ID NO: 587654 - DNA, 25 bp, Homo sapien
cctcctccgtctttgtcccattggg

SEQ ID NO: 587655 - DNA, 25 bp, Homo sapien
ggcatccagctcccaaatcttgaga

SEQ ID NO: 587656 - DNA, 25 bp, Homo sapien
ctcctccgtctttgtcccattgggg

SEQ ID NO: 587657 - DNA, 25 bp, Homo sapien
tgagaacagagagacacagcaacac

SEQ ID NO: 587658 - DNA, 25 bp, Homo sapien
ctgagaacagagagacacagcaaca

SEQ ID NO: 587659 - DNA, 25 bp, Homo sapien
agctcatttggattccgttcagact

SEQ ID NO: 587660 - DNA, 25 bp, Homo sapien
tggattccgttcagacttgtagacc

SEQ ID NO: 587661 - DNA, 25 bp, Homo sapien
catttggattccgttcagacttgta

SEQ ID NO: 587662 - DNA, 25 bp, Homo sapien
gattccgttcagacttgtagacctt

SEQ ID NO: 587663 - DNA, 25 bp, Homo sapien
tgctgaacacccactttgagtatgg

SEQ ID NO: 587664 - DNA, 25 bp, Homo sapien
tatcacctgtgtaaggcgagcctgc

SEQ ID NO: 587665 - DNA, 25 bp, Homo sapien
caacttaaagagatcctggcatgat

SEQ ID NO: 587666 - DNA, 25 bp, Homo sapien
gatgtacccctgagatcaatttgta

SEQ ID NO: 587667 - DNA, 25 bp, Homo sapien
ctgcactcttgagcaaatgttacca

SEQ ID NO: 587668 - DNA, 25 bp, Homo sapien
tgcactcttgagcaaatgttaccat

SEQ ID NO: 587669 - DNA, 25 bp, Homo sapien
tctgcactcttgagcaaatgttacc

SEQ ID NO: 587670 - DNA, 25 bp, Homo sapien
gagaaccatcaatgtagtcagtaca

SEQ ID NO: 587671 - DNA, 25 bp, Homo sapien
acctccaaggccaagacttgttatt

SEQ ID NO: 587672 - DNA, 25 bp, Homo sapien
ttttgagaaccatcaatgtagtcag

SEQ ID NO: 587673 - DNA, 25 bp, Homo sapien
gcattttgagaaccatcaatgtagt

SEQ ID NO: 587674 - DNA, 25 bp, Homo sapien
cagacctgatgcaggcttactgttt

SEQ ID NO: 587675 - DNA, 25 bp, Homo sapien
tttggccccttgaatgacacagacc

SEQ ID NO: 587676 - DNA, 25 bp, Homo sapien
tgcaggcttactgtttgaagctgag

SEQ ID NO: 587677 - DNA, 25 bp, Homo sapien
actttggccccttgaatgacacaga

SEQ ID NO: 587678 - DNA, 25 bp, Homo sapien
tattttagactggtcactggtgggc

SEQ ID NO: 587679 - DNA, 25 bp, Homo sapien
cagagtgttcgtgaccaggccttta

SEQ ID NO: 587680 - DNA, 25 bp, Homo sapien
tgaacccgcaattggcacttgaacc

SEQ ID NO: 587681 - DNA, 25 bp, Homo sapien
cagagctccgtgttctgaacccgca

SEQ ID NO: 587682 - DNA, 25 bp, Homo sapien
ttgttactaatggatggaagtttcc

SEQ ID NO: 587683 - DNA, 25 bp, Homo sapien
gggaagagaagttgttactaatgga

SEQ ID NO: 587684 - DNA, 25 bp, Homo sapien
catgtttccagttgagttgctagag

SEQ ID NO: 587685 - DNA, 25 bp, Homo sapien
gcttcatctggcaaaagcttagctc

SEQ ID NO: 587686 - DNA, 25 bp, Homo sapien
cagtgtgggcctaataaagaacagt

SEQ ID NO: 587687 - DNA, 25 bp, Homo sapien
agtgtgggcctaataaagaacagtc

SEQ ID NO: 587688 - DNA, 25 bp, Homo sapien
ttttaatttcagtgtgggcctaata

SEQ ID NO: 587689 - DNA, 25 bp, Homo sapien
taatttcagtgtgggcctaataaag

SEQ ID NO: 587690 - DNA, 25 bp, Homo sapien
ctggggatgtttttaccctgcgtag

SEQ ID NO: 587691 - DNA, 25 bp, Homo sapien
ttaccctgcgtagaatacagattct

SEQ ID NO: 587692 - DNA, 25 bp, Homo sapien
gatgtttttaccctgcgtagaatac

SEQ ID NO: 587693 - DNA, 25 bp, Homo sapien
tttttaccctgcgtagaatacagat

SEQ ID NO: 587694 - DNA, 25 bp, Homo sapien
tgctgccaccgcttcatacccctcc

SEQ ID NO: 587695 - DNA, 25 bp, Homo sapien
tgccaccgcttcatacccctccaat

SEQ ID NO: 587696 - DNA, 25 bp, Homo sapien
caccgcttcatacccctccaatgtt

SEQ ID NO: 587697 - DNA, 25 bp, Homo sapien
cgcttcatacccctccaatgttctc

SEQ ID NO: 587698 - DNA, 25 bp, Homo sapien
ctaggtatagaaatgtcaggaggct

SEQ ID NO: 587699 - DNA, 25 bp, Homo sapien
aggtatagaaatgtcaggaggctgg

SEQ ID NO: 587700 - DNA, 25 bp, Homo sapien
taggtatagaaatgtcaggaggctg

SEQ ID NO: 587701 - DNA, 25 bp, Homo sapien
ggtatagaaatgtcaggaggctgga

SEQ ID NO: 587702 - DNA, 25 bp, Homo sapien
tcgcatcaagaaaaaccaggtgtct

SEQ ID NO: 587703 - DNA, 25 bp, Homo sapien
ccaagctatgactcttcgcatcaag

SEQ ID NO: 587704 - DNA, 25 bp, Homo sapien
tgggtatctgacactcacaagcaga

SEQ ID NO: 587705 - DNA, 25 bp, Homo sapien
tccagagaggtttgagaggtgtcac

SEQ ID NO: 587706 - DNA, 25 bp, Homo sapien
ttcagtgctcaacaggctaagtctg

SEQ ID NO: 587707 - DNA, 25 bp, Homo sapien
tcgatgctgttcagtgctcaacagg

SEQ ID NO: 587708 - DNA, 25 bp, Homo sapien
gaacttcgatgctgttcagtgctca

SEQ ID NO: 587709 - DNA, 25 bp, Homo sapien
gctgttcagtgctcaacaggctaag

SEQ ID NO: 587710 - DNA, 25 bp, Homo sapien
gtacaggactcagagcagaatcaat

SEQ ID NO: 587711 - DNA, 25 bp, Homo sapien
gagcagaatcaattcttccaaaaat

SEQ ID NO: 587712 - DNA, 25 bp, Homo sapien
tctccggtagcctccagtcctttta

SEQ ID NO: 587713 - DNA, 25 bp, Homo sapien
gactcagagcagaatcaattcttcc

SEQ ID NO: 587714 - DNA, 25 bp, Homo sapien
attgctgatgaaagcgtctctcttt

SEQ ID NO: 587715 - DNA, 25 bp, Homo sapien
tggatggttggttatgaactccttc

SEQ ID NO: 587716 - DNA, 25 bp, Homo sapien
gcgtctctctttggatggttggtta

SEQ ID NO: 587717 - DNA, 25 bp, Homo sapien
tggttggttatgaactccttctcca

SEQ ID NO: 587718 - DNA, 25 bp, Homo sapien
ctggaagtaggtgggaggagctggg

SEQ ID NO: 587719 - DNA, 25 bp, Homo sapien
agctggattagaggctctcctgtgc

SEQ ID NO: 587720 - DNA, 25 bp, Homo sapien
gggcagcatctcctacagaagcaaa

SEQ ID NO: 587721 - DNA, 25 bp, Homo sapien
cagtagggttggcatgtgcaggaag

SEQ ID NO: 587722 - DNA, 25 bp, Homo sapien
gaacagctggtgcatctctaacatg

SEQ ID NO: 587723 - DNA, 25 bp, Homo sapien
caaggcattgtgaacaggcatgggc

SEQ ID NO: 587724 - DNA, 25 bp, Homo sapien
gtggttccctgcgatgacttgccaa

SEQ ID NO: 587725 - DNA, 25 bp, Homo sapien
tcttaggactgctgacttctatggg

SEQ ID NO: 587726 - DNA, 25 bp, Homo sapien
gcctccactctatggaggctgcgaa

SEQ ID NO: 587727 - DNA, 25 bp, Homo sapien
tttaaaaccatgtcacgctcctgtg

SEQ ID NO: 587728 - DNA, 25 bp, Homo sapien
caccctgccaaatgaaaaacccgag

SEQ ID NO: 587729 - DNA, 25 bp, Homo sapien
tgtaagccaacaatgcagacatggc

SEQ ID NO: 587730 - DNA, 25 bp, Homo sapien
tgaaaaacccgagcgtgtgtctgcg

SEQ ID NO: 587731 - DNA, 25 bp, Homo sapien
cagacatggccgtattcttgaaagc

SEQ ID NO: 587732 - DNA, 25 bp, Homo sapien
ttcacattgctgattaactttgatg

SEQ ID NO: 587733 - DNA, 25 bp, Homo sapien
caaggcgggcctgatcatcattcca

SEQ ID NO: 587734 - DNA, 25 bp, Homo sapien
agacaagttatcaaggcgggcctga

SEQ ID NO: 587735 - DNA, 25 bp, Homo sapien
aactttgatgtgaaaactaatgaga

SEQ ID NO: 587736 - DNA, 25 bp, Homo sapien
aacgagagggtgtctaatgttttca

SEQ ID NO: 587737 - DNA, 25 bp, Homo sapien
gaaagagaacgagagggtgtctaat

SEQ ID NO: 587738 - DNA, 25 bp, Homo sapien
cgagagggtgtctaatgttttcatt

SEQ ID NO: 587739 - DNA, 25 bp, Homo sapien
gagaacgagagggtgtctaatgttt

SEQ ID NO: 587740 - DNA, 25 bp, Homo sapien
tcacgtcctgtccaggagtatcaca

SEQ ID NO: 587741 - DNA, 25 bp, Homo sapien
ctttttcacgtcctgtccaggagta

SEQ ID NO: 587742 - DNA, 25 bp, Homo sapien
tatcacaattgtgttctgaatgggc

SEQ ID NO: 587743 - DNA, 25 bp, Homo sapien
tgtccaggagtatcacaattgtgtt

SEQ ID NO: 587744 - DNA, 25 bp, Homo sapien
tgatcctcatctcccgaaaaaccag

SEQ ID NO: 587745 - DNA, 25 bp, Homo sapien
cgtgtaaacttccactactgtgatc

SEQ ID NO: 587746 - DNA, 25 bp, Homo sapien
ctgataatgagagtagtgaacgtgt

SEQ ID NO: 587747 - DNA, 25 bp, Homo sapien
ccagaagtcctgcaaaagtcgtcct

SEQ ID NO: 587748 - DNA, 25 bp, Homo sapien
tcggattaaatggactcccagctct

SEQ ID NO: 587749 - DNA, 25 bp, Homo sapien
tgataactgattcttggctaatgga

SEQ ID NO: 587750 - DNA, 25 bp, Homo sapien
ttctgtccacaatgggtcgaggccc

SEQ ID NO: 587751 - DNA, 25 bp, Homo sapien
ttgcggaactgctaatcggattaaa

SEQ ID NO: 587752 - DNA, 25 bp, Homo sapien
ggcaggaacggaagctcctgtctct

SEQ ID NO: 587753 - DNA, 25 bp, Homo sapien
tcattactgtgcacgtagcggctcc

SEQ ID NO: 587754 - DNA, 25 bp, Homo sapien
ctcactccggcattggaaacctggt

SEQ ID NO: 587755 - DNA, 25 bp, Homo sapien
catttctcaactaacaagaggcaac

SEQ ID NO: 587756 - DNA, 25 bp, Homo sapien
tctgtgggagccctcttagcaaacc

SEQ ID NO: 587757 - DNA, 25 bp, Homo sapien
aatgctgagttatggacgcccttga

SEQ ID NO: 587758 - DNA, 25 bp, Homo sapien
ctgcttggggcgcagaatatctgtg

SEQ ID NO: 587759 - DNA, 25 bp, Homo sapien
tgtgggagccctcttagcaaacctg

SEQ ID NO: 587760 - DNA, 25 bp, Homo sapien
tctcctggcgtgcacagtgccttgg

SEQ ID NO: 587761 - DNA, 25 bp, Homo sapien
aaatggccccattgtcattacagca

SEQ ID NO: 587762 - DNA, 25 bp, Homo sapien
gacagagcacggtgaagcttccaca

SEQ ID NO: 587763 - DNA, 25 bp, Homo sapien
ttacagcagggagattgaattcgcc

SEQ ID NO: 587764 - DNA, 25 bp, Homo sapien
agaagtcatgtaccctccttgggcc

SEQ ID NO: 587765 - DNA, 25 bp, Homo sapien
taaaggattctttggagcactccaa

SEQ ID NO: 587766 - DNA, 25 bp, Homo sapien
catacccagcgtgtcactaacaggc

SEQ ID NO: 587767 - DNA, 25 bp, Homo sapien
tcatacaagatgctcacacctggct

SEQ ID NO: 587768 - DNA, 25 bp, Homo sapien
cacacgagaatagtgaatgtccaga

SEQ ID NO: 587769 - DNA, 25 bp, Homo sapien
tgaatgtccagaggaaacggaaggg

SEQ ID NO: 587770 - DNA, 25 bp, Homo sapien
aacggaaggggcaccgactgcctcg

SEQ ID NO: 587771 - DNA, 25 bp, Homo sapien
tgaagttgctggctcacacgagaat

SEQ ID NO: 587772 - DNA, 25 bp, Homo sapien
attggcttttgaaagcagtcaaatt

SEQ ID NO: 587773 - DNA, 25 bp, Homo sapien
taagtgaggctgctggtattctact

SEQ ID NO: 587774 - DNA, 25 bp, Homo sapien
taggtatatgtgtatctggattaag

SEQ ID NO: 587775 - DNA, 25 bp, Homo sapien
cagattttcccgcagagtaataatt

SEQ ID NO: 587776 - DNA, 25 bp, Homo sapien
atatttggaacaaaagtgcttttag

SEQ ID NO: 587777 - DNA, 25 bp, Homo sapien
tggaacaccccgtaattagatggac

SEQ ID NO: 587778 - DNA, 25 bp, Homo sapien
tttcgacaggcaacggagcaaatga

SEQ ID NO: 587779 - DNA, 25 bp, Homo sapien
gaaaactcgatgcagtcgccctgtg

SEQ ID NO: 587780 - DNA, 25 bp, Homo sapien
tgcagtattggagacaggcacgtcc

SEQ ID NO: 587781 - DNA, 25 bp, Homo sapien
ccaggcagccttgctgtccgacatg

SEQ ID NO: 587782 - DNA, 25 bp, Homo sapien
cttgctgtccgacatgtcctgtcca

SEQ ID NO: 587783 - DNA, 25 bp, Homo sapien
gcagccttgctgtccgacatgtcct

SEQ ID NO: 587784 - DNA, 25 bp, Homo sapien
gctgtccgacatgtcctgtccacat

SEQ ID NO: 587785 - DNA, 25 bp, Homo sapien
gtgaatgctcagctaggccctggcg

SEQ ID NO: 587786 - DNA, 25 bp, Homo sapien
tgggtgaatgctcagctaggccctg

SEQ ID NO: 587787 - DNA, 25 bp, Homo sapien
aatgctcagctaggccctggcgctc

SEQ ID NO: 587788 - DNA, 25 bp, Homo sapien
gtgggtgaatgctcagctaggccct

SEQ ID NO: 587789 - DNA, 25 bp, Homo sapien
tgggccagttgggtggagcaacccc

SEQ ID NO: 587790 - DNA, 25 bp, Homo sapien
tccctgctggcacatgttggtacag

SEQ ID NO: 587791 - DNA, 25 bp, Homo sapien
tggtacagcactttcccgagctctg

SEQ ID NO: 587792 - DNA, 25 bp, Homo sapien
tgtggcagaagcgagtgtagccttc

SEQ ID NO: 587793 - DNA, 25 bp, Homo sapien
tgaagagcagcacgaagactggaat

SEQ ID NO: 587794 - DNA, 25 bp, Homo sapien
tcaaacatcctcatggagccaggat

SEQ ID NO: 587795 - DNA, 25 bp, Homo sapien
tcttgatcaagtgtaatgcgcagga

SEQ ID NO: 587796 - DNA, 25 bp, Homo sapien
gctgatcttgccctggaaaaatgaa

SEQ ID NO: 587797 - DNA, 25 bp, Homo sapien
caggcctcattaggtagatttgtaa

SEQ ID NO: 587798 - DNA, 25 bp, Homo sapien
ccaattgcctgatatattcacttaa

SEQ ID NO: 587799 - DNA, 25 bp, Homo sapien
aaaggtatgaaagcttccaattgcc

SEQ ID NO: 587800 - DNA, 25 bp, Homo sapien
tcctgtgtcattagataacaaggca

SEQ ID NO: 587801 - DNA, 25 bp, Homo sapien
atggcaattttcctcacttcccagt

SEQ ID NO: 587802 - DNA, 25 bp, Homo sapien
ctctggccactgtaccagcatccat

SEQ ID NO: 587803 - DNA, 25 bp, Homo sapien
ccctctggccactgtaccagcatcc

SEQ ID NO: 587804 - DNA, 25 bp, Homo sapien
ctggaccatggcaattttcctcact

SEQ ID NO: 587805 - DNA, 25 bp, Homo sapien
gcttatcagagtaactaatagtcct

SEQ ID NO: 587806 - DNA, 25 bp, Homo sapien
taatagtccttaatgagccacagtc

SEQ ID NO: 587807 - DNA, 25 bp, Homo sapien
ggaggtccctgaggactctcatacc

SEQ ID NO: 587808 - DNA, 25 bp, Homo sapien
tcagcccttaagacggcatgcacca

SEQ ID NO: 587809 - DNA, 25 bp, Homo sapien
gtcagcacagtcacagcaggacaat

SEQ ID NO: 587810 - DNA, 25 bp, Homo sapien
ctaattttgatgtggttcttgtctc

SEQ ID NO: 587811 - DNA, 25 bp, Homo sapien
acagtcacagcaggacaatctctgg

SEQ ID NO: 587812 - DNA, 25 bp, Homo sapien
cagcaggacaatctctggcaggctc

SEQ ID NO: 587813 - DNA, 25 bp, Homo sapien
tcactttgtggcatacacacactct

SEQ ID NO: 587814 - DNA, 25 bp, Homo sapien
tgtcttcggaagagatcctgtgtga

SEQ ID NO: 587815 - DNA, 25 bp, Homo sapien
tccttaagttctccttgtcttcgga

SEQ ID NO: 587816 - DNA, 25 bp, Homo sapien
gcatacacacactcttgttccttaa

SEQ ID NO: 587817 - DNA, 25 bp, Homo sapien
aacacagtgctcatgttcaaaatga

SEQ ID NO: 587818 - DNA, 25 bp, Homo sapien
cacagtgctcatgttcaaaatgaag

SEQ ID NO: 587819 - DNA, 25 bp, Homo sapien
acacagtgctcatgttcaaaatgaa

SEQ ID NO: 587820 - DNA, 25 bp, Homo sapien
cagtgctcatgttcaaaatgaagtg

SEQ ID NO: 587821 - DNA, 25 bp, Homo sapien
gatgaagaaattagagtgagttttc

SEQ ID NO: 587822 - DNA, 25 bp, Homo sapien
gaagaaattagagtgagttttcagc

SEQ ID NO: 587823 - DNA, 25 bp, Homo sapien
tgcagatgaagaaattagagtgagt

SEQ ID NO: 587824 - DNA, 25 bp, Homo sapien
cagatgaagaaattagagtgagttt

SEQ ID NO: 587825 - DNA, 25 bp, Homo sapien
gtaccataactatagactccatggg

SEQ ID NO: 587826 - DNA, 25 bp, Homo sapien
taactatagactccatgggctttct

SEQ ID NO: 587827 - DNA, 25 bp, Homo sapien
cactgaccgtgtcaggcctatctaa

SEQ ID NO: 587828 - DNA, 25 bp, Homo sapien
cataactatagactccatgggcttt

SEQ ID NO: 587829 - DNA, 25 bp, Homo sapien
taaaacaccttcagggagagaatta

SEQ ID NO: 587830 - DNA, 25 bp, Homo sapien
aaatcatttttactagacatccctc

SEQ ID NO: 587831 - DNA, 25 bp, Homo sapien
agagaattacgagcccagcgaagag

SEQ ID NO: 587832 - DNA, 25 bp, Homo sapien
tcagggagagaattacgagcccagc

SEQ ID NO: 587833 - DNA, 25 bp, Homo sapien
gcggaaccaaatgcaattcggagtc

SEQ ID NO: 587834 - DNA, 25 bp, Homo sapien
tgtaaatgtctttcaacacccagat

SEQ ID NO: 587835 - DNA, 25 bp, Homo sapien
tcatttaatccacgcccaagaagat

SEQ ID NO: 587836 - DNA, 25 bp, Homo sapien
taactgtgtcggaaagcggaaccaa

SEQ ID NO: 587837 - DNA, 25 bp, Homo sapien
cattttgcagcaagctccgagtgtc

SEQ ID NO: 587838 - DNA, 25 bp, Homo sapien
gagtgtcagaacttccatccgcagc

SEQ ID NO: 587839 - DNA, 25 bp, Homo sapien
tgatggctcggctccggaaaactgg

SEQ ID NO: 587840 - DNA, 25 bp, Homo sapien
gaccccggtgtcagactgcctgatg

SEQ ID NO: 587841 - DNA, 25 bp, Homo sapien
aatcaataagcagtcatggagagca

SEQ ID NO: 587842 - DNA, 25 bp, Homo sapien
ggaatcaataagcagtcatggagag

SEQ ID NO: 587843 - DNA, 25 bp, Homo sapien
gaatcaataagcagtcatggagagc

SEQ ID NO: 587844 - DNA, 25 bp, Homo sapien
tcaataagcagtcatggagagcagg

SEQ ID NO: 587845 - DNA, 25 bp, Homo sapien
taatatgttgatccggcgtgtaatg

SEQ ID NO: 587846 - DNA, 25 bp, Homo sapien
tgatccggcgtgtaatgaggtgttc

SEQ ID NO: 587847 - DNA, 25 bp, Homo sapien
tggcaataatatgttgatccggcgt

SEQ ID NO: 587848 - DNA, 25 bp, Homo sapien
ttgatccggcgtgtaatgaggtgtt

SEQ ID NO: 587849 - DNA, 25 bp, Homo sapien
ccagcaacatatcggataacacata

SEQ ID NO: 587850 - DNA, 25 bp, Homo sapien
gtgtagtcatgcatctccgggcagg

SEQ ID NO: 587851 - DNA, 25 bp, Homo sapien
ggcaggcctttgctggcgataaaga

SEQ ID NO: 587852 - DNA, 25 bp, Homo sapien
taacacataattggcgggtcacagc

SEQ ID NO: 587853 - DNA, 25 bp, Homo sapien
tcagtacatggatatccctcaagcc

SEQ ID NO: 587854 - DNA, 25 bp, Homo sapien
agaactggctacgatggccgcagga

SEQ ID NO: 587855 - DNA, 25 bp, Homo sapien
aagcctttgaatccagtctcctgtg

SEQ ID NO: 587856 - DNA, 25 bp, Homo sapien
tgtgcaggtttccagtcagtacatg

SEQ ID NO: 587857 - DNA, 25 bp, Homo sapien
tcttttatgatacaagtactgcctg

SEQ ID NO: 587858 - DNA, 25 bp, Homo sapien
gaaggatagggtatacatttgaatc

SEQ ID NO: 587859 - DNA, 25 bp, Homo sapien
cattcctttgggtcaagcattgccc

SEQ ID NO: 587860 - DNA, 25 bp, Homo sapien
tctggtgtcttagtgcaaatgaact

SEQ ID NO: 587861 - DNA, 25 bp, Homo sapien
tacagtttgagtacatagtggagtc

SEQ ID NO: 587862 - DNA, 25 bp, Homo sapien
agttagagctccaagaacactctgt

SEQ ID NO: 587863 - DNA, 25 bp, Homo sapien
gagctccaagaacactctgtacagt

SEQ ID NO: 587864 - DNA, 25 bp, Homo sapien
gagtctcaacacgagtgtctgtgca

SEQ ID NO: 587865 - DNA, 25 bp, Homo sapien
tcggcctgtggataattggaagcta

SEQ ID NO: 587866 - DNA, 25 bp, Homo sapien
aagaaacagctttgtcggcctgtgg

SEQ ID NO: 587867 - DNA, 25 bp, Homo sapien
tacagaagcaagttcaggttcttca

SEQ ID NO: 587868 - DNA, 25 bp, Homo sapien
catagatttcagctagccccgtggt

SEQ ID NO: 587869 - DNA, 25 bp, Homo sapien
tataataggatgttcgaggaggatc

SEQ ID NO: 587870 - DNA, 25 bp, Homo sapien
caatataataggatgttcgaggagg

SEQ ID NO: 587871 - DNA, 25 bp, Homo sapien
taggatgttcgaggaggatctttat

SEQ ID NO: 587872 - DNA, 25 bp, Homo sapien
ctgcaatataataggatgttcgagg

SEQ ID NO: 587873 - DNA, 25 bp, Homo sapien
gatgctctaattcgtgcaacctgca

SEQ ID NO: 587874 - DNA, 25 bp, Homo sapien
tttaccctggaattgttctgcaccc

SEQ ID NO: 587875 - DNA, 25 bp, Homo sapien
tcttgaatgagactcgggatgctct

SEQ ID NO: 587876 - DNA, 25 bp, Homo sapien
tactccaagcctgtgtttaccctgg

SEQ ID NO: 587877 - DNA, 25 bp, Homo sapien
tcaggtaccccaagatgaagaaata

SEQ ID NO: 587878 - DNA, 25 bp, Homo sapien
ccccaagatgaagaaatatgttggg

SEQ ID NO: 587879 - DNA, 25 bp, Homo sapien
ggagtggggctgggtgaagaatgac

SEQ ID NO: 587880 - DNA, 25 bp, Homo sapien
aggtaccccaagatgaagaaatatg

SEQ ID NO: 587881 - DNA, 25 bp, Homo sapien
gcttattgcaaatatttcctttttc

SEQ ID NO: 587882 - DNA, 25 bp, Homo sapien
ttattgcaaatatttcctttttcga

SEQ ID NO: 587883 - DNA, 25 bp, Homo sapien
attgcaaatatttcctttttcgagt

SEQ ID NO: 587884 - DNA, 25 bp, Homo sapien
tattgcaaatatttcctttttcgag

SEQ ID NO: 587885 - DNA, 25 bp, Homo sapien
tgacattatgggcccgatttggttt

SEQ ID NO: 587886 - DNA, 25 bp, Homo sapien
ctgatgacattatgggcccgatttg

SEQ ID NO: 587887 - DNA, 25 bp, Homo sapien
gatgacattatgggcccgatttggt

SEQ ID NO: 587888 - DNA, 25 bp, Homo sapien
tgatgacattatgggcccgatttgg

SEQ ID NO: 587889 - DNA, 25 bp, Homo sapien
ggccgctagcgacatcatcgggctg

SEQ ID NO: 587890 - DNA, 25 bp, Homo sapien
gccgctagcgacatcatcgggctgc

SEQ ID NO: 587891 - DNA, 25 bp, Homo sapien
gggccgctagcgacatcatcgggct

SEQ ID NO: 587892 - DNA, 25 bp, Homo sapien
ccgctagcgacatcatcgggctgcc

SEQ ID NO: 587893 - DNA, 25 bp, Homo sapien
tgtttgtcgcgggataaatctcctt

SEQ ID NO: 587894 - DNA, 25 bp, Homo sapien
aaatctccttgtttgcccgctgcat

SEQ ID NO: 587895 - DNA, 25 bp, Homo sapien
aattgatattgttgtctggcttttg

SEQ ID NO: 587896 - DNA, 25 bp, Homo sapien
gcccgctgcatgattaattgatatt

SEQ ID NO: 587897 - DNA, 25 bp, Homo sapien
tgtaaccgtgttctcctccgatgga

SEQ ID NO: 587898 - DNA, 25 bp, Homo sapien
aattaaggtcgacctccagcgctgg

SEQ ID NO: 587899 - DNA, 25 bp, Homo sapien
cagcgcgttttgttcccctgtcgga

SEQ ID NO: 587900 - DNA, 25 bp, Homo sapien
gttgaaccgcggagttttgctcgcc

SEQ ID NO: 587901 - DNA, 25 bp, Homo sapien
aaaggccaacgctctggttcccgca

SEQ ID NO: 587902 - DNA, 25 bp, Homo sapien
aaggccaacgctctggttcccgcat

SEQ ID NO: 587903 - DNA, 25 bp, Homo sapien
caaaggccaacgctctggttcccgc

SEQ ID NO: 587904 - DNA, 25 bp, Homo sapien
ttttcagctgggaaatggcattcga

SEQ ID NO: 587905 - DNA, 25 bp, Homo sapien
cctggtgtccggtgcttcgggctcc

SEQ ID NO: 587906 - DNA, 25 bp, Homo sapien
ctccaggtgcagtggccgaaccttc

SEQ ID NO: 587907 - DNA, 25 bp, Homo sapien
tgcagagcgccagaacggcgcgcct

SEQ ID NO: 587908 - DNA, 25 bp, Homo sapien
taaactgaggttactggagggactc

SEQ ID NO: 587909 - DNA, 25 bp, Homo sapien
tacctcgagaaaccacttgcgggac

SEQ ID NO: 587910 - DNA, 25 bp, Homo sapien
tccatggctctgtcgaagggctgaa

SEQ ID NO: 587911 - DNA, 25 bp, Homo sapien
gctgaacttttagcccgaggagggc

SEQ ID NO: 587912 - DNA, 25 bp, Homo sapien
ggagtagatcttgtatccgctgaaa

SEQ ID NO: 587913 - DNA, 25 bp, Homo sapien
ccggagtagatcttgtatccgctga

SEQ ID NO: 587914 - DNA, 25 bp, Homo sapien
tccggagtagatcttgtatccgctg

SEQ ID NO: 587915 - DNA, 25 bp, Homo sapien
cggagtagatcttgtatccgctgaa

SEQ ID NO: 587916 - DNA, 25 bp, Homo sapien
tcgcattttgaattaagaaaccgga

SEQ ID NO: 587917 - DNA, 25 bp, Homo sapien
ggacagtccagcttatctgccgaag

SEQ ID NO: 587918 - DNA, 25 bp, Homo sapien
cagtccagcttatctgccgaagatt

SEQ ID NO: 587919 - DNA, 25 bp, Homo sapien
tccagcttatctgccgaagattact

SEQ ID NO: 587920 - DNA, 25 bp, Homo sapien
gacagtccagcttatctgccgaaga

SEQ ID NO: 587921 - DNA, 25 bp, Homo sapien
tctgactgtccctttttgtgcttcg

SEQ ID NO: 587922 - DNA, 25 bp, Homo sapien
cagtaatggccctctggaatttgac

SEQ ID NO: 587923 - DNA, 25 bp, Homo sapien
ggaatttgactgctcgacgggttct

SEQ ID NO: 587924 - DNA, 25 bp, Homo sapien
tgctcgacgggttcttttcttctga

SEQ ID NO: 587925 - DNA, 25 bp, Homo sapien
ctgatagcttgttctctttgagcct

SEQ ID NO: 587926 - DNA, 25 bp, Homo sapien
gcagccctgatagcttgttctcttt

SEQ ID NO: 587927 - DNA, 25 bp, Homo sapien
atagcttgttctctttgagcctttc

SEQ ID NO: 587928 - DNA, 25 bp, Homo sapien
tccttagcagccctgatagcttgtt

SEQ ID NO: 587929 - DNA, 25 bp, Homo sapien
cattgcagtctttttagatgcttgc

SEQ ID NO: 587930 - DNA, 25 bp, Homo sapien
ccattgcagtctttttagatgcttg

SEQ ID NO: 587931 - DNA, 25 bp, Homo sapien
cctttgtaggtgccttagcagcagc

SEQ ID NO: 587932 - DNA, 25 bp, Homo sapien
ttaggtgctgcctttgtaggtgcct

SEQ ID NO: 587933 - DNA, 25 bp, Homo sapien
tttcacaaccttcacagtcttttgc

SEQ ID NO: 587934 - DNA, 25 bp, Homo sapien
actttcacaaccttcacagtctttt

SEQ ID NO: 587935 - DNA, 25 bp, Homo sapien
aactttcacaaccttcacagtcttt

SEQ ID NO: 587936 - DNA, 25 bp, Homo sapien
ctttcacaaccttcacagtcttttg

SEQ ID NO: 587937 - DNA, 25 bp, Homo sapien
aaaaatagaatctgccagcttagcg

SEQ ID NO: 587938 - DNA, 25 bp, Homo sapien
aaatagaatctgccagcttagcgtt

SEQ ID NO: 587939 - DNA, 25 bp, Homo sapien
aaaatagaatctgccagcttagcgt

SEQ ID NO: 587940 - DNA, 25 bp, Homo sapien
actaattttagcaagtagcacagag

SEQ ID NO: 587941 - DNA, 25 bp, Homo sapien
tgaggcagtcatttagcacccaaaa

SEQ ID NO: 587942 - DNA, 25 bp, Homo sapien
cacagagtaagcagatgaggcagtc

SEQ ID NO: 587943 - DNA, 25 bp, Homo sapien
taatgacgtatgacaaatctagatg

SEQ ID NO: 587944 - DNA, 25 bp, Homo sapien
ttgccgaaggagaccgccccaccat

SEQ ID NO: 587945 - DNA, 25 bp, Homo sapien
tgcaccgcgggtaaacaccgcgccg

SEQ ID NO: 587946 - DNA, 25 bp, Homo sapien
ctgccgctgcgccagctcagcacag

SEQ ID NO: 587947 - DNA, 25 bp, Homo sapien
gccccaccatgcaccgcgggtaaac

SEQ ID NO: 587948 - DNA, 25 bp, Homo sapien
ccagcctctcgtagtagtcgggact

SEQ ID NO: 587949 - DNA, 25 bp, Homo sapien
tctcgtagtagtcgggactcgacag

SEQ ID NO: 587950 - DNA, 25 bp, Homo sapien
tggagttggcccagcctctcgtagt

SEQ ID NO: 587951 - DNA, 25 bp, Homo sapien
cggccgatgcgagggtccggctcat

SEQ ID NO: 587952 - DNA, 25 bp, Homo sapien
tacagggggtggctctagtaaacac

SEQ ID NO: 587953 - DNA, 25 bp, Homo sapien
cctggggggcgttgcgcgcgggcct

SEQ ID NO: 587954 - DNA, 25 bp, Homo sapien
agggggtggctctagtaaacactgt

SEQ ID NO: 587955 - DNA, 25 bp, Homo sapien
ggcgggggcggtctctcacctctct

SEQ ID NO: 587956 - DNA, 25 bp, Homo sapien
aaaggcatcatgaaccctctggaag

SEQ ID NO: 587957 - DNA, 25 bp, Homo sapien
cagccaggtgttcctagcacaggaa

SEQ ID NO: 587958 - DNA, 25 bp, Homo sapien
tgggttgaaacagggaaggctctac

SEQ ID NO: 587959 - DNA, 25 bp, Homo sapien
cactgatatgggtgagcggtgacat

SEQ ID NO: 587960 - DNA, 25 bp, Homo sapien
ttcttttccaggtccaatctcttct

SEQ ID NO: 587961 - DNA, 25 bp, Homo sapien
tcttttccaggtccaatctcttctt

SEQ ID NO: 587962 - DNA, 25 bp, Homo sapien
cttttccaggtccaatctcttcttt

SEQ ID NO: 587963 - DNA, 25 bp, Homo sapien
tttccaggtccaatctcttcttttc

SEQ ID NO: 587964 - DNA, 25 bp, Homo sapien
gtcagaaaccggtaggaatacagcc

SEQ ID NO: 587965 - DNA, 25 bp, Homo sapien
ggctgcccttaccagtgggggtcag

SEQ ID NO: 587966 - DNA, 25 bp, Homo sapien
ctggggctgcccttaccagtggggg

SEQ ID NO: 587967 - DNA, 25 bp, Homo sapien
tcagaaaccggtaggaatacagccc

SEQ ID NO: 587968 - DNA, 25 bp, Homo sapien
tttagttttacatatttcagcttaa

SEQ ID NO: 587969 - DNA, 25 bp, Homo sapien
tagttttacatatttcagcttaact

SEQ ID NO: 587970 - DNA, 25 bp, Homo sapien
ttagttttacatatttcagcttaac

SEQ ID NO: 587971 - DNA, 25 bp, Homo sapien
ctttagttttacatatttcagctta

SEQ ID NO: 587972 - DNA, 25 bp, Homo sapien
agtgtacaacatgagcttggacacg

SEQ ID NO: 587973 - DNA, 25 bp, Homo sapien
ggacacgctcaaatcgctttaaata

SEQ ID NO: 587974 - DNA, 25 bp, Homo sapien
tcttggtttcgagtatgagccttct

SEQ ID NO: 587975 - DNA, 25 bp, Homo sapien
aatattcttggtttcgagtatgagc

SEQ ID NO: 587976 - DNA, 25 bp, Homo sapien
gctttggacctagggtgatggccaa

SEQ ID NO: 587977 - DNA, 25 bp, Homo sapien
gtctgggttcgtaggcacacaacaa

SEQ ID NO: 587978 - DNA, 25 bp, Homo sapien
cattggctttggacctagggtgatg

SEQ ID NO: 587979 - DNA, 25 bp, Homo sapien
ggtcgctgacattgctgtctgggtt

SEQ ID NO: 587980 - DNA, 25 bp, Homo sapien
aacatctgatacctggatggcagca

SEQ ID NO: 587981 - DNA, 25 bp, Homo sapien
tggcagcattaagaggagacaagtg

SEQ ID NO: 587982 - DNA, 25 bp, Homo sapien
ttctggcatacctgggccacctctg

SEQ ID NO: 587983 - DNA, 25 bp, Homo sapien
gaggtaaacatctgatacctggatg

SEQ ID NO: 587984 - DNA, 25 bp, Homo sapien
taacatctcctggtctggagcccct

SEQ ID NO: 587985 - DNA, 25 bp, Homo sapien
gacgtttaaaatctgctggccctgt

SEQ ID NO: 587986 - DNA, 25 bp, Homo sapien
catgtccggaacactggagagcagg

SEQ ID NO: 587987 - DNA, 25 bp, Homo sapien
tactgtttgcctgaaagtgccacca

SEQ ID NO: 587988 - DNA, 25 bp, Homo sapien
tcttttgagcatagcatcttcttaa

SEQ ID NO: 587989 - DNA, 25 bp, Homo sapien
tgtcttcatctgtcagttcctcttt

SEQ ID NO: 587990 - DNA, 25 bp, Homo sapien
tttagtcccaggctatcttttgagc

SEQ ID NO: 587991 - DNA, 25 bp, Homo sapien
tctgtcagttcctcttttagtccca

SEQ ID NO: 587992 - DNA, 25 bp, Homo sapien
cagcctgcttagcagatatataaag

SEQ ID NO: 587993 - DNA, 25 bp, Homo sapien
tttctgataagagtcttaaataccc

SEQ ID NO: 587994 - DNA, 25 bp, Homo sapien
cccaacagttaactgcataataaca

SEQ ID NO: 587995 - DNA, 25 bp, Homo sapien
gcctgcttagcagatatataaagca

SEQ ID NO: 587996 - DNA, 25 bp, Homo sapien
catgcaaggtaaagaatcagtgggt

SEQ ID NO: 587997 - DNA, 25 bp, Homo sapien
taaatatgtcctaaaaggagactcc

SEQ ID NO: 587998 - DNA, 25 bp, Homo sapien
tgaagtaccattgacactgccgtgc

SEQ ID NO: 587999 - DNA, 25 bp, Homo sapien
ggagactccacaactacatgcaagg

SEQ ID NO: 588000 - DNA, 25 bp, Homo sapien
gactggcactttatcacacactatt

SEQ ID NO: 588001 - DNA, 25 bp, Homo sapien
cacgtgactggcactttatcacaca

SEQ ID NO: 588002 - DNA, 25 bp, Homo sapien
gtttgtcccacgtgactggcacttt

SEQ ID NO: 588003 - DNA, 25 bp, Homo sapien
ctttatcacacactattctgtgcct

SEQ ID NO: 588004 - DNA, 25 bp, Homo sapien
gggctgggattactcaattcacagg

SEQ ID NO: 588005 - DNA, 25 bp, Homo sapien
agggctgggattactcaattcacag

SEQ ID NO: 588006 - DNA, 25 bp, Homo sapien
ggctgggattactcaattcacagga

SEQ ID NO: 588007 - DNA, 25 bp, Homo sapien
gatccttgcagggagggttaccaca

SEQ ID NO: 588008 - DNA, 25 bp, Homo sapien
gcatggcagatgaacagactaacta

SEQ ID NO: 588009 - DNA, 25 bp, Homo sapien
tactaccttagagggcattgctgca

SEQ ID NO: 588010 - DNA, 25 bp, Homo sapien
gaagtgaagctcctcaacaagcctt

SEQ ID NO: 588011 - DNA, 25 bp, Homo sapien
cttctctgacgtgtgcctctcctgc

SEQ ID NO: 588012 - DNA, 25 bp, Homo sapien
ggagcacctcggacacatgctcaga

SEQ ID NO: 588013 - DNA, 25 bp, Homo sapien
cgtggctaaagccactgcagagctc

SEQ ID NO: 588014 - DNA, 25 bp, Homo sapien
tctggaatggaagaaccctttccat

SEQ ID NO: 588015 - DNA, 25 bp, Homo sapien
tttactccttggagatgagccaggt

SEQ ID NO: 588016 - DNA, 25 bp, Homo sapien
cacacaaggtatctggtccctttac

SEQ ID NO: 588017 - DNA, 25 bp, Homo sapien
caagtttcccccacacaaggtatct

SEQ ID NO: 588018 - DNA, 25 bp, Homo sapien
ctccttggagatgagccaggtccta

SEQ ID NO: 588019 - DNA, 25 bp, Homo sapien
gaatagtgcctgaaagacccatggg

SEQ ID NO: 588020 - DNA, 25 bp, Homo sapien
gttccccgtgaaggcaactgctcag

SEQ ID NO: 588021 - DNA, 25 bp, Homo sapien
gctaccctagtggagaacaacaatg

SEQ ID NO: 588022 - DNA, 25 bp, Homo sapien
taatattccttggacgctgcccaga

SEQ ID NO: 588023 - DNA, 25 bp, Homo sapien
tcctgagttaatcccctcgtgcact

SEQ ID NO: 588024 - DNA, 25 bp, Homo sapien
tgagttaatcccctcgtgcactgca

SEQ ID NO: 588025 - DNA, 25 bp, Homo sapien
agttaatcccctcgtgcactgcaac

SEQ ID NO: 588026 - DNA, 25 bp, Homo sapien
cctgagttaatcccctcgtgcactg

SEQ ID NO: 588027 - DNA, 25 bp, Homo sapien
tggctgacatttggcggcccataaa

SEQ ID NO: 588028 - DNA, 25 bp, Homo sapien
tactgctctgggctgtctgtcggtg

SEQ ID NO: 588029 - DNA, 25 bp, Homo sapien
gaaatctctcatgcttaagatggct

SEQ ID NO: 588030 - DNA, 25 bp, Homo sapien
gttgctggttgatacaatcctcttg

SEQ ID NO: 588031 - DNA, 25 bp, Homo sapien
gatccgctggaactgtcacacttta

SEQ ID NO: 588032 - DNA, 25 bp, Homo sapien
tcctcagacaatacactggctgtga

SEQ ID NO: 588033 - DNA, 25 bp, Homo sapien
gataaattactcttgccatgacgtg

SEQ ID NO: 588034 - DNA, 25 bp, Homo sapien
tgaaactggtatcggagagactggc

SEQ ID NO: 588035 - DNA, 25 bp, Homo sapien
tgtgactttggttccctgtgagcaa

SEQ ID NO: 588036 - DNA, 25 bp, Homo sapien
tgaagggcttttgtgactttggttc

SEQ ID NO: 588037 - DNA, 25 bp, Homo sapien
ctttggttccctgtgagcaagatga

SEQ ID NO: 588038 - DNA, 25 bp, Homo sapien
tttctgaagggcttttgtgactttg

SEQ ID NO: 588039 - DNA, 25 bp, Homo sapien
tattgaaatggtaaggtcactgctg

SEQ ID NO: 588040 - DNA, 25 bp, Homo sapien
ttttttcagtggatagggcaactct

SEQ ID NO: 588041 - DNA, 25 bp, Homo sapien
tcttgccacctggatttggctgtgg

SEQ ID NO: 588042 - DNA, 25 bp, Homo sapien
ctcagcatggattaattttaaggcc

SEQ ID NO: 588043 - DNA, 25 bp, Homo sapien
tttatgcctccaagatcattaaaaa

SEQ ID NO: 588044 - DNA, 25 bp, Homo sapien
aaaaagactgagtcctgggtaagtg

SEQ ID NO: 588045 - DNA, 25 bp, Homo sapien
ttagtaggaattcatacacatactc

SEQ ID NO: 588046 - DNA, 25 bp, Homo sapien
cattcgaatggagacaggatgaaca

SEQ ID NO: 588047 - DNA, 25 bp, Homo sapien
aaagagaggcaaacgccaggtgctt

SEQ ID NO: 588048 - DNA, 25 bp, Homo sapien
caggatccctattgatgtggtggca

SEQ ID NO: 588049 - DNA, 25 bp, Homo sapien
cctggcctcctagagacttaactaa

SEQ ID NO: 588050 - DNA, 25 bp, Homo sapien
tgactgaggctagaatcccatatgg

SEQ ID NO: 588051 - DNA, 25 bp, Homo sapien
gtgaccttcaccaagtgcttctcag

SEQ ID NO: 588052 - DNA, 25 bp, Homo sapien
aggtacacaggccttcaagctgagg

SEQ ID NO: 588053 - DNA, 25 bp, Homo sapien
tgcagctgcaaatgtaggtatcaga

SEQ ID NO: 588054 - DNA, 25 bp, Homo sapien
tcagaggctaaactttccttgggtg

SEQ ID NO: 588055 - DNA, 25 bp, Homo sapien
tcctttagggtgaacaggtacacag

SEQ ID NO: 588056 - DNA, 25 bp, Homo sapien
gaagttgagttttgctacacccgta

SEQ ID NO: 588057 - DNA, 25 bp, Homo sapien
ttctgaaaccatgggtaagcctgct

SEQ ID NO: 588058 - DNA, 25 bp, Homo sapien
tatttgggtcttgaacaaccagggc

SEQ ID NO: 588059 - DNA, 25 bp, Homo sapien
tcccaacagaggctgaagtcggctc

SEQ ID NO: 588060 - DNA, 25 bp, Homo sapien
catgaggcaagaccaggtggctgct

SEQ ID NO: 588061 - DNA, 25 bp, Homo sapien
taaaatgacaaatgtgcatcctgcc

SEQ ID NO: 588062 - DNA, 25 bp, Homo sapien
tctgagttaacaatagaacccttgc

SEQ ID NO: 588063 - DNA, 25 bp, Homo sapien
aatagaacccttgccattggtgtgg

SEQ ID NO: 588064 - DNA, 25 bp, Homo sapien
gtcacaggacaaacaccttgctggg

SEQ ID NO: 588065 - DNA, 25 bp, Homo sapien
tgcattcccattttaacccaccagt

SEQ ID NO: 588066 - DNA, 25 bp, Homo sapien
tacctattcatcacaaacaacttgc

SEQ ID NO: 588067 - DNA, 25 bp, Homo sapien
ggtagagttgtctccagattcagtc

SEQ ID NO: 588068 - DNA, 25 bp, Homo sapien
aagctgacagcttgaattatgggct

SEQ ID NO: 588069 - DNA, 25 bp, Homo sapien
catttggtagggcaccatccgtctg

SEQ ID NO: 588070 - DNA, 25 bp, Homo sapien
tccgtctgtactaaggtcctcttca

SEQ ID NO: 588071 - DNA, 25 bp, Homo sapien
gacagcttgaattatgggctacatt

SEQ ID NO: 588072 - DNA, 25 bp, Homo sapien
gcaactatactgtctctcaacaaag

SEQ ID NO: 588073 - DNA, 25 bp, Homo sapien
gagatgcttatttaagcacagatca

SEQ ID NO: 588074 - DNA, 25 bp, Homo sapien
tctatgatggttcttcatggtttac

SEQ ID NO: 588075 - DNA, 25 bp, Homo sapien
tgcggcaattttaaatccatcagag

SEQ ID NO: 588076 - DNA, 25 bp, Homo sapien
ccagtaagccctgacttgcttttca

SEQ ID NO: 588077 - DNA, 25 bp, Homo sapien
gctgctctgtgagcttcaaggtctt

SEQ ID NO: 588078 - DNA, 25 bp, Homo sapien
ctgtgagcttcaaggtcttctttca

SEQ ID NO: 588079 - DNA, 25 bp, Homo sapien
cacgacagcaatgtcaagccagtaa

SEQ ID NO: 588080 - DNA, 25 bp, Homo sapien
gtgcctcggtacgtctgagtctggt

SEQ ID NO: 588081 - DNA, 25 bp, Homo sapien
ctgtgcctcggtacgtctgagtctg

SEQ ID NO: 588082 - DNA, 25 bp, Homo sapien
gcctcggtacgtctgagtctggtgt

SEQ ID NO: 588083 - DNA, 25 bp, Homo sapien
tgtgcctcggtacgtctgagtctgg

SEQ ID NO: 588084 - DNA, 25 bp, Homo sapien
tcaaggtggcaacatgctgacccac

SEQ ID NO: 588085 - DNA, 25 bp, Homo sapien
tctttgacagaattatcatgttctt

SEQ ID NO: 588086 - DNA, 25 bp, Homo sapien
tcttctttgacagaattatcatgtt

SEQ ID NO: 588087 - DNA, 25 bp, Homo sapien
ctcttctttgacagaattatcatgt

SEQ ID NO: 588088 - DNA, 25 bp, Homo sapien
cttctttgacagaattatcatgttc

SEQ ID NO: 588089 - DNA, 25 bp, Homo sapien
aaaacttcagacagtttagctacct

SEQ ID NO: 588090 - DNA, 25 bp, Homo sapien
ggtccacatttgtgattgggaaaac

SEQ ID NO: 588091 - DNA, 25 bp, Homo sapien
tggtccacatttgtgattgggaaaa

SEQ ID NO: 588092 - DNA, 25 bp, Homo sapien
aacttcagacagtttagctacctac

SEQ ID NO: 588093 - DNA, 25 bp, Homo sapien
aatggaccgataggcatttgctgaa

SEQ ID NO: 588094 - DNA, 25 bp, Homo sapien
gatctgggctgatatctgtgtacag

SEQ ID NO: 588095 - DNA, 25 bp, Homo sapien
ctctttccctccaacggatctgggc

SEQ ID NO: 588096 - DNA, 25 bp, Homo sapien
tgtacagtaatggaccgataggcat

SEQ ID NO: 588097 - DNA, 25 bp, Homo sapien
ttctaggactcacaaaagcattttg

SEQ ID NO: 588098 - DNA, 25 bp, Homo sapien
tgtccttcagttcacaaggcttgcc

SEQ ID NO: 588099 - DNA, 25 bp, Homo sapien
gcttgccccgcctgcatcattttgg

SEQ ID NO: 588100 - DNA, 25 bp, Homo sapien
taattagccatttacccaagagatc

SEQ ID NO: 588101 - DNA, 25 bp, Homo sapien
ggactcacagggaaacatcatttac

SEQ ID NO: 588102 - DNA, 25 bp, Homo sapien
gggactcacagggaaacatcattta

SEQ ID NO: 588103 - DNA, 25 bp, Homo sapien
agggactcacagggaaacatcattt

SEQ ID NO: 588104 - DNA, 25 bp, Homo sapien
cagggactcacagggaaacatcatt

SEQ ID NO: 588105 - DNA, 25 bp, Homo sapien
catacaccataatgttaacagggtt

SEQ ID NO: 588106 - DNA, 25 bp, Homo sapien
gaaaacatatgctcgctctaaagaa

SEQ ID NO: 588107 - DNA, 25 bp, Homo sapien
gaaatccaatttctgctatcagtgg

SEQ ID NO: 588108 - DNA, 25 bp, Homo sapien
tatcagtggtaccaatacagagaga

SEQ ID NO: 588109 - DNA, 25 bp, Homo sapien
taaggagttctagtccccttggcca

SEQ ID NO: 588110 - DNA, 25 bp, Homo sapien
ccaggacctttctgtggtgcagttc

SEQ ID NO: 588111 - DNA, 25 bp, Homo sapien
catgtttggcatttcagacgcttca

SEQ ID NO: 588112 - DNA, 25 bp, Homo sapien
caaggtgaagacactccgacaggga

SEQ ID NO: 588113 - DNA, 25 bp, Homo sapien
gaccacctctgttaatctgggcagg

SEQ ID NO: 588114 - DNA, 25 bp, Homo sapien
agatccggaaagatgtgaccttgcc

SEQ ID NO: 588115 - DNA, 25 bp, Homo sapien
tatacaaaaggtagagcctcagacc

SEQ ID NO: 588116 - DNA, 25 bp, Homo sapien
tatgtatatgaaacgtgaccacctc

SEQ ID NO: 588117 - DNA, 25 bp, Homo sapien
cagaatagatggcaagctgcaagat

SEQ ID NO: 588118 - DNA, 25 bp, Homo sapien
tacggccacactcttctgtaagggc

SEQ ID NO: 588119 - DNA, 25 bp, Homo sapien
tactgtgaatagctgacctacggcc

SEQ ID NO: 588120 - DNA, 25 bp, Homo sapien
tcccttgtaggaacactgttgagcc

SEQ ID NO: 588121 - DNA, 25 bp, Homo sapien
ctgtgattgggatatctgcagccac

SEQ ID NO: 588122 - DNA, 25 bp, Homo sapien
gctcttgtctccacagccacttgaa

SEQ ID NO: 588123 - DNA, 25 bp, Homo sapien
cttgtctccacagccacttgaaact

SEQ ID NO: 588124 - DNA, 25 bp, Homo sapien
ttgctcttgtctccacagccacttg

SEQ ID NO: 588125 - DNA, 25 bp, Homo sapien
atgcattatgcatactgcagagaga

SEQ ID NO: 588126 - DNA, 25 bp, Homo sapien
gacttgtctatagagcacagctgct

SEQ ID NO: 588127 - DNA, 25 bp, Homo sapien
ttggcttcagccaattgctgcctgg

SEQ ID NO: 588128 - DNA, 25 bp, Homo sapien
cctgtagcaggcaaggaggcacatg

SEQ ID NO: 588129 - DNA, 25 bp, Homo sapien
agtggtcctggtcttgccagacttc

SEQ ID NO: 588130 - DNA, 25 bp, Homo sapien
actgctgccgcccaactgtggatca

SEQ ID NO: 588131 - DNA, 25 bp, Homo sapien
actgtggatcagatgcatgggagat

SEQ ID NO: 588132 - DNA, 25 bp, Homo sapien
tgaggcaggaccacagacgtcaaag

SEQ ID NO: 588133 - DNA, 25 bp, Homo sapien
cacagacgtcaaagttgcgggagag

SEQ ID NO: 588134 - DNA, 25 bp, Homo sapien
aatcccagtgtgattccctccaatg

SEQ ID NO: 588135 - DNA, 25 bp, Homo sapien
tcccagtgtgattccctccaatggt

SEQ ID NO: 588136 - DNA, 25 bp, Homo sapien
ccccaatcccagtgtgattccctcc

SEQ ID NO: 588137 - DNA, 25 bp, Homo sapien
ccaatcccagtgtgattccctccaa

SEQ ID NO: 588138 - DNA, 25 bp, Homo sapien
cttcagcaactgataggcttctgtt

SEQ ID NO: 588139 - DNA, 25 bp, Homo sapien
cagtttgatttgtattatcctgaag

SEQ ID NO: 588140 - DNA, 25 bp, Homo sapien
agtgtgacacagaagcatctgtctt

SEQ ID NO: 588141 - DNA, 25 bp, Homo sapien
tttgtattatcctgaagggtggcct

SEQ ID NO: 588142 - DNA, 25 bp, Homo sapien
taaagtggcctcacagtaagtttgg

SEQ ID NO: 588143 - DNA, 25 bp, Homo sapien
tgagacccatggataacagtcaccc

SEQ ID NO: 588144 - DNA, 25 bp, Homo sapien
gcatatggatctctactgtgtcaca

SEQ ID NO: 588145 - DNA, 25 bp, Homo sapien
cattgttataacacacgggcagcaa

SEQ ID NO: 588146 - DNA, 25 bp, Homo sapien
gaatgcaccgctgccaatattcaaa

SEQ ID NO: 588147 - DNA, 25 bp, Homo sapien
gatgaaaaactagcttccgaagcaa

SEQ ID NO: 588148 - DNA, 25 bp, Homo sapien
ccttcactagatgaaaaactagctt

SEQ ID NO: 588149 - DNA, 25 bp, Homo sapien
tccgaagcaattttgttagctgtct

SEQ ID NO: 588150 - DNA, 25 bp, Homo sapien
caaaaatatggacgaaaactcaggc

SEQ ID NO: 588151 - DNA, 25 bp, Homo sapien
tatcaagtgcctagaaccaagagtt

SEQ ID NO: 588152 - DNA, 25 bp, Homo sapien
ccattgtgtggtctctaagcagtcc

SEQ ID NO: 588153 - DNA, 25 bp, Homo sapien
caaatggtaacattcggccctgaaa

SEQ ID NO: 588154 - DNA, 25 bp, Homo sapien
tgaatcaggcccacacataatgagg

SEQ ID NO: 588155 - DNA, 25 bp, Homo sapien
atgtatctctcaaaggcggctgaaa

SEQ ID NO: 588156 - DNA, 25 bp, Homo sapien
taaaatccctcagctgtagtttggg

SEQ ID NO: 588157 - DNA, 25 bp, Homo sapien
taaatgcatttttgcgcccaagccg

SEQ ID NO: 588158 - DNA, 25 bp, Homo sapien
gctccattgcccagatgagtgcatt

SEQ ID NO: 588159 - DNA, 25 bp, Homo sapien
ctccattgcccagatgagtgcattg

SEQ ID NO: 588160 - DNA, 25 bp, Homo sapien
tgctccattgcccagatgagtgcat

SEQ ID NO: 588161 - DNA, 25 bp, Homo sapien
tccattgcccagatgagtgcattgg

SEQ ID NO: 588162 - DNA, 25 bp, Homo sapien
tgaaaaatctagaaggccttaacca

SEQ ID NO: 588163 - DNA, 25 bp, Homo sapien
atgaaacgaagcctgccccactgcg

SEQ ID NO: 588164 - DNA, 25 bp, Homo sapien
tcagaaggttaagccttgaaaaatc

SEQ ID NO: 588165 - DNA, 25 bp, Homo sapien
caggtctccgcttaggaaacgttca

SEQ ID NO: 588166 - DNA, 25 bp, Homo sapien
taactgtacgaaatgcatgattccc

SEQ ID NO: 588167 - DNA, 25 bp, Homo sapien
gattccctgcagctcaagtacatga

SEQ ID NO: 588168 - DNA, 25 bp, Homo sapien
tgagggaacttgtacaaactgactt

SEQ ID NO: 588169 - DNA, 25 bp, Homo sapien
ggcatattcacagtcattaccagtc

SEQ ID NO: 588170 - DNA, 25 bp, Homo sapien
aagtgtgttcacccaggtcctgctt

SEQ ID NO: 588171 - DNA, 25 bp, Homo sapien
caagtgtgttcacccaggtcctgct

SEQ ID NO: 588172 - DNA, 25 bp, Homo sapien
aaagaaccccagtgaggctctctgc

SEQ ID NO: 588173 - DNA, 25 bp, Homo sapien
agtgtgttcacccaggtcctgcttc

SEQ ID NO: 588174 - DNA, 25 bp, Homo sapien
ggccagccaggacttcaacagaata

SEQ ID NO: 588175 - DNA, 25 bp, Homo sapien
tcactgtgcagtggttgagcccaga

SEQ ID NO: 588176 - DNA, 25 bp, Homo sapien
gaataggttttatccgagagcagcc

SEQ ID NO: 588177 - DNA, 25 bp, Homo sapien
caagagctctcatcaaggtcagggc

SEQ ID NO: 588178 - DNA, 25 bp, Homo sapien
aagggcagagcgtactttccagtgt

SEQ ID NO: 588179 - DNA, 25 bp, Homo sapien
ggcagagcgtactttccagtgtttt

SEQ ID NO: 588180 - DNA, 25 bp, Homo sapien
gcagagcgtactttccagtgttttg

SEQ ID NO: 588181 - DNA, 25 bp, Homo sapien
agggacctcacttccgcatgtggca

SEQ ID NO: 588182 - DNA, 25 bp, Homo sapien
gaagccatgtctctatgaggccact

SEQ ID NO: 588183 - DNA, 25 bp, Homo sapien
tatgcgagtgtgtgttagtcgtcac

SEQ ID NO: 588184 - DNA, 25 bp, Homo sapien
aatgctgagtcccaccacggaggtg

SEQ ID NO: 588185 - DNA, 25 bp, Homo sapien
tctgcaacaacctcctaactggtga

SEQ ID NO: 588186 - DNA, 25 bp, Homo sapien
tgggcactgccagtacactggtcaa

SEQ ID NO: 588187 - DNA, 25 bp, Homo sapien
gctcctcccgtctcagcaaatggca

SEQ ID NO: 588188 - DNA, 25 bp, Homo sapien
cacctccaaaggcagaggccttcac

SEQ ID NO: 588189 - DNA, 25 bp, Homo sapien
aaagaggctaatttgccagccgcgg

SEQ ID NO: 588190 - DNA, 25 bp, Homo sapien
gcagggatgtctattatttccccac

SEQ ID NO: 588191 - DNA, 25 bp, Homo sapien
ggtgagcctgcaagaacccatttta

SEQ ID NO: 588192 - DNA, 25 bp, Homo sapien
cactaaatgcaactgcagggatgtc

SEQ ID NO: 588193 - DNA, 25 bp, Homo sapien
ccatgaagcatggaagacccctacg

SEQ ID NO: 588194 - DNA, 25 bp, Homo sapien
cccctacgagcatctggaaaggcca

SEQ ID NO: 588195 - DNA, 25 bp, Homo sapien
tttagtgcctgtttctttaattgcc

SEQ ID NO: 588196 - DNA, 25 bp, Homo sapien
catgactgagtagtgctcacagcca

SEQ ID NO: 588197 - DNA, 25 bp, Homo sapien
gcctgaatggtcacaggagatgttg

SEQ ID NO: 588198 - DNA, 25 bp, Homo sapien
gtgtcactcgaatgttttatgatgc

SEQ ID NO: 588199 - DNA, 25 bp, Homo sapien
tctcctcagggagtgtcactcgaat

SEQ ID NO: 588200 - DNA, 25 bp, Homo sapien
tgcatggctcgacactttgccctac

SEQ ID NO: 588201 - DNA, 25 bp, Homo sapien
ttgggggaggatgatcgcatgttcc

SEQ ID NO: 588202 - DNA, 25 bp, Homo sapien
cttgggggaggatgatcgcatgttc

SEQ ID NO: 588203 - DNA, 25 bp, Homo sapien
tgggggaggatgatcgcatgttccc

SEQ ID NO: 588204 - DNA, 25 bp, Homo sapien
tgcgtgtgtcccctcggcaggtctg

SEQ ID NO: 588205 - DNA, 25 bp, Homo sapien
gcattgctcccgtcctgcgtgtgtc

SEQ ID NO: 588206 - DNA, 25 bp, Homo sapien
gagggtcgctactcaacagcattgc

SEQ ID NO: 588207 - DNA, 25 bp, Homo sapien
aatatcgggatgcagcgtggccttg

SEQ ID NO: 588208 - DNA, 25 bp, Homo sapien
cattagattttaaattgatcacggg

SEQ ID NO: 588209 - DNA, 25 bp, Homo sapien
attagattttaaattgatcacgggt

SEQ ID NO: 588210 - DNA, 25 bp, Homo sapien
tgcaaattacaatgctctgcccctg

SEQ ID NO: 588211 - DNA, 25 bp, Homo sapien
atgcccgcttcaggactcacatgag

SEQ ID NO: 588212 - DNA, 25 bp, Homo sapien
tctagtgtccgattatctctctcac

SEQ ID NO: 588213 - DNA, 25 bp, Homo sapien
ggcacccgtgtggtcctgtctgtga

SEQ ID NO: 588214 - DNA, 25 bp, Homo sapien
tgtggcttgacccaaagaggcgacc

SEQ ID NO: 588215 - DNA, 25 bp, Homo sapien
tagagttactccaagagcctgtccg

SEQ ID NO: 588216 - DNA, 25 bp, Homo sapien
tccccagattgtcccagtgaagagc

SEQ ID NO: 588217 - DNA, 25 bp, Homo sapien
catttacttgagaggtgatcccagg

SEQ ID NO: 588218 - DNA, 25 bp, Homo sapien
gacaccacatgatgtacctgaccag

SEQ ID NO: 588219 - DNA, 25 bp, Homo sapien
gagcttacaaaacagcacagcacgg

SEQ ID NO: 588220 - DNA, 25 bp, Homo sapien
caaaatgcataacagggacaccaca

SEQ ID NO: 588221 - DNA, 25 bp, Homo sapien
tcagggttacatggaagcagggttc

SEQ ID NO: 588222 - DNA, 25 bp, Homo sapien
gcgtaaagcagcctcaatttctgag

SEQ ID NO: 588223 - DNA, 25 bp, Homo sapien
aatcatcggtgttatggtttctggg

SEQ ID NO: 588224 - DNA, 25 bp, Homo sapien
atcatcagaatcatcggtgttatgg

SEQ ID NO: 588225 - DNA, 25 bp, Homo sapien
gttatggtttctggggcgtaaagca

SEQ ID NO: 588226 - DNA, 25 bp, Homo sapien
agactttatttgaaaccaatgtcac

SEQ ID NO: 588227 - DNA, 25 bp, Homo sapien
ttatttgaaaccaatgtcacagcac

SEQ ID NO: 588228 - DNA, 25 bp, Homo sapien
tatttgaaaccaatgtcacagcacg

SEQ ID NO: 588229 - DNA, 25 bp, Homo sapien
ctttatttgaaaccaatgtcacagc

SEQ ID NO: 588230 - DNA, 25 bp, Homo sapien
gcatagagattcctgctgcggcggc

SEQ ID NO: 588231 - DNA, 25 bp, Homo sapien
ccttgctgcatgtgctgcagatgaa

SEQ ID NO: 588232 - DNA, 25 bp, Homo sapien
tggtgccaccttcggcacatgcata

SEQ ID NO: 588233 - DNA, 25 bp, Homo sapien
tccccatttgctcgcctgtaggctg

SEQ ID NO: 588234 - DNA, 25 bp, Homo sapien
ggatggcttcacgctgtgtgcacac

SEQ ID NO: 588235 - DNA, 25 bp, Homo sapien
tgtctgtggctgaggtcttgctgca

SEQ ID NO: 588236 - DNA, 25 bp, Homo sapien
agctgtctgtggctgaggtcttgct

SEQ ID NO: 588237 - DNA, 25 bp, Homo sapien
tctgtggctgaggtcttgctgcact

SEQ ID NO: 588238 - DNA, 25 bp, Homo sapien
gaggcaagagctgtctgtggctgag

SEQ ID NO: 588239 - DNA, 25 bp, Homo sapien
agccttgccgcattcagagcactca

SEQ ID NO: 588240 - DNA, 25 bp, Homo sapien
gccttgccgcattcagagcactcac

SEQ ID NO: 588241 - DNA, 25 bp, Homo sapien
caccaggaggtcagagctgcgggtg

SEQ ID NO: 588242 - DNA, 25 bp, Homo sapien
ccttgccgcattcagagcactcaca

SEQ ID NO: 588243 - DNA, 25 bp, Homo sapien
ttcctccaggcatgagtggtctggt

SEQ ID NO: 588244 - DNA, 25 bp, Homo sapien
gaagccctggggcatcaacactagg

SEQ ID NO: 588245 - DNA, 25 bp, Homo sapien
taggatctgctcaggaaaaccagct

SEQ ID NO: 588246 - DNA, 25 bp, Homo sapien
ggtgtttcctccaggcatgagtggt

SEQ ID NO: 588247 - DNA, 25 bp, Homo sapien
ttgccttggtgtgtttatgcctgca

SEQ ID NO: 588248 - DNA, 25 bp, Homo sapien
tatgcctgcagaaagtgtgcttccc

SEQ ID NO: 588249 - DNA, 25 bp, Homo sapien
tccccatgttaatggaagaccctgg

SEQ ID NO: 588250 - DNA, 25 bp, Homo sapien
gaagaccctggattggcctctgctg

SEQ ID NO: 588251 - DNA, 25 bp, Homo sapien
caagatctgattgtcgccgaagaag

SEQ ID NO: 588252 - DNA, 25 bp, Homo sapien
cagccgttagtgacaggaatatcga

SEQ ID NO: 588253 - DNA, 25 bp, Homo sapien
aaaagctgtcaggattggtagctgc

SEQ ID NO: 588254 - DNA, 25 bp, Homo sapien
gaagaagtccgctgatgacacagcc

SEQ ID NO: 588255 - DNA, 25 bp, Homo sapien
ccagagcagggcttgagagtcctac

SEQ ID NO: 588256 - DNA, 25 bp, Homo sapien
taatcaatggttcgtcccctgaggc

SEQ ID NO: 588257 - DNA, 25 bp, Homo sapien
tcttcaaggatctcaagtttaccca

SEQ ID NO: 588258 - DNA, 25 bp, Homo sapien
gcagagatgatattgaccttccgtt

SEQ ID NO: 588259 - DNA, 25 bp, Homo sapien
cttcttaagacaaatttcacagaca

SEQ ID NO: 588260 - DNA, 25 bp, Homo sapien
gtgtgactcactaccttcttaagac

SEQ ID NO: 588261 - DNA, 25 bp, Homo sapien
ccttcttaagacaaatttcacagac

SEQ ID NO: 588262 - DNA, 25 bp, Homo sapien
gtgactcactaccttcttaagacaa

SEQ ID NO: 588263 - DNA, 25 bp, Homo sapien
caacaggatctaggttaggcatcag

SEQ ID NO: 588264 - DNA, 25 bp, Homo sapien
tccagggctgcaaatggacttaggc

SEQ ID NO: 588265 - DNA, 25 bp, Homo sapien
ggtcagggttaggatcaacaggatc

SEQ ID NO: 588266 - DNA, 25 bp, Homo sapien
tgacacacaatgaccaaccaaaagg

SEQ ID NO: 588267 - DNA, 25 bp, Homo sapien
tcaagttgtgtcttaaacggagacc

SEQ ID NO: 588268 - DNA, 25 bp, Homo sapien
cagaacatgtaatccacttgtcaag

SEQ ID NO: 588269 - DNA, 25 bp, Homo sapien
acctgatttctggtcagagttggca

SEQ ID NO: 588270 - DNA, 25 bp, Homo sapien
gaatacacaaacgtgactgccctgg

SEQ ID NO: 588271 - DNA, 25 bp, Homo sapien
tggcagatttctgtttaaggccaca

SEQ ID NO: 588272 - DNA, 25 bp, Homo sapien
aattctggcagatttctgtttaagg

SEQ ID NO: 588273 - DNA, 25 bp, Homo sapien
tttaaggccacaggttgtattgttc

SEQ ID NO: 588274 - DNA, 25 bp, Homo sapien
ttcattctctaatatgacatttgag

SEQ ID NO: 588275 - DNA, 25 bp, Homo sapien
gagccatttagaatccttaaccagc

SEQ ID NO: 588276 - DNA, 25 bp, Homo sapien
catgtacaccataggcagttcaggg

SEQ ID NO: 588277 - DNA, 25 bp, Homo sapien
ctgggaggtgctgttataggaacat

SEQ ID NO: 588278 - DNA, 25 bp, Homo sapien
cagttcagggatagacagctggcca

SEQ ID NO: 588279 - DNA, 25 bp, Homo sapien
cacagaatcgctgcgctctgcatgc

SEQ ID NO: 588280 - DNA, 25 bp, Homo sapien
cctgggcacagaatcgctgcgctct

SEQ ID NO: 588281 - DNA, 25 bp, Homo sapien
tgcgggggctcacgggcgactgctc

SEQ ID NO: 588282 - DNA, 25 bp, Homo sapien
gaatcgctgcgctctgcatgcccgg

SEQ ID NO: 588283 - DNA, 25 bp, Homo sapien
cgggtggcgaaggctgcagctcgcc

SEQ ID NO: 588284 - DNA, 25 bp, Homo sapien
cttcgctggatgagggagcggcgga

SEQ ID NO: 588285 - DNA, 25 bp, Homo sapien
aaggaggcttcgctggatgagggag

SEQ ID NO: 588286 - DNA, 25 bp, Homo sapien
tgggaaggaggcttcgctggatgag

SEQ ID NO: 588287 - DNA, 25 bp, Homo sapien
ctggatgagggagcggcggaaaagg

SEQ ID NO: 588288 - DNA, 25 bp, Homo sapien
tgacgagcgtaaccaaagagacggg

SEQ ID NO: 588289 - DNA, 25 bp, Homo sapien
gaccggctgacgagcgtaaccaaag

SEQ ID NO: 588290 - DNA, 25 bp, Homo sapien
cggccgaccggctgacgagcgtaac

SEQ ID NO: 588291 - DNA, 25 bp, Homo sapien
taaccaaagagacgggagcagcggc

SEQ ID NO: 588292 - DNA, 25 bp, Homo sapien
agccagcggaagaacgccgggactc

SEQ ID NO: 588293 - DNA, 25 bp, Homo sapien
cttccacgcagttgactatgatgga

SEQ ID NO: 588294 - DNA, 25 bp, Homo sapien
tgactatgatggacgggtacttgcg

SEQ ID NO: 588295 - DNA, 25 bp, Homo sapien
tacttgcggctgagccagcggaaga

SEQ ID NO: 588296 - DNA, 25 bp, Homo sapien
gctgcgactgctcgcgaggctggca

SEQ ID NO: 588297 - DNA, 25 bp, Homo sapien
tctgaacctcttccgagacccaaaa

SEQ ID NO: 588298 - DNA, 25 bp, Homo sapien
tgcgagttcggaaccctataggccc

SEQ ID NO: 588299 - DNA, 25 bp, Homo sapien
ccaaaatgcgcggtctggagaggaa

SEQ ID NO: 588300 - DNA, 25 bp, Homo sapien
ctgtccaacggcccaccacactcag

SEQ ID NO: 588301 - DNA, 25 bp, Homo sapien
cctgtccaacggcccaccacactca

SEQ ID NO: 588302 - DNA, 25 bp, Homo sapien
tgtccaacggcccaccacactcagg

SEQ ID NO: 588303 - DNA, 25 bp, Homo sapien
ccaaatacagattatcaaactccac

SEQ ID NO: 588304 - DNA, 25 bp, Homo sapien
acatcatttggattaggtttactgg

SEQ ID NO: 588305 - DNA, 25 bp, Homo sapien
tccaaatacagattatcaaactcca

SEQ ID NO: 588306 - DNA, 25 bp, Homo sapien
catttggattaggtttactggcatc

SEQ ID NO: 588307 - DNA, 25 bp, Homo sapien
gaaaagtctgtcaatgtactcaaaa

SEQ ID NO: 588308 - DNA, 25 bp, Homo sapien
tagagaagtcttcttggtcttacaa

SEQ ID NO: 588309 - DNA, 25 bp, Homo sapien
tcttggtcttacaatactgaaaagt

SEQ ID NO: 588310 - DNA, 25 bp, Homo sapien
caaaaattgcaaccatcatttcatc

SEQ ID NO: 588311 - DNA, 25 bp, Homo sapien
gccaacatccccagtatttcacagt

SEQ ID NO: 588312 - DNA, 25 bp, Homo sapien
ccatttatctatgcctccttccctt

SEQ ID NO: 588313 - DNA, 25 bp, Homo sapien
tttgacagtaagccaaaagttcaaa

SEQ ID NO: 588314 - DNA, 25 bp, Homo sapien
aaaagcaagggcagtcgccaacatc

SEQ ID NO: 588315 - DNA, 25 bp, Homo sapien
ccctgactcgctgcttctcgactgc

SEQ ID NO: 588316 - DNA, 25 bp, Homo sapien
gactcgctgcttctcgactgctgct

SEQ ID NO: 588317 - DNA, 25 bp, Homo sapien
gctggttcattttagcacgtggtgc

SEQ ID NO: 588318 - DNA, 25 bp, Homo sapien
ctgactcgctgcttctcgactgctg

SEQ ID NO: 588319 - DNA, 25 bp, Homo sapien
tggtgtaatacagttgctgtcaaat

SEQ ID NO: 588320 - DNA, 25 bp, Homo sapien
gtgtaatacagttgctgtcaaatct

SEQ ID NO: 588321 - DNA, 25 bp, Homo sapien
ggtgtaatacagttgctgtcaaatc

SEQ ID NO: 588322 - DNA, 25 bp, Homo sapien
tgtaatacagttgctgtcaaatctt

SEQ ID NO: 588323 - DNA, 25 bp, Homo sapien
caagattgtccatgaattcagttcc

SEQ ID NO: 588324 - DNA, 25 bp, Homo sapien
tgtaatagcgaaggcatttagcaag

SEQ ID NO: 588325 - DNA, 25 bp, Homo sapien
taaacgatcagctatgtaatagcga

SEQ ID NO: 588326 - DNA, 25 bp, Homo sapien
cacccagggtcattatttaaacgat

SEQ ID NO: 588327 - DNA, 25 bp, Homo sapien
taatccatgattttatgttctcctt

SEQ ID NO: 588328 - DNA, 25 bp, Homo sapien
caccaggagcactagcatcagataa

SEQ ID NO: 588329 - DNA, 25 bp, Homo sapien
ttcaccaggagcactagcatcagat

SEQ ID NO: 588330 - DNA, 25 bp, Homo sapien
tctccttcaccaggagcactagcat

SEQ ID NO: 588331 - DNA, 25 bp, Homo sapien
tgagtatttgggtcatggttaggct

SEQ ID NO: 588332 - DNA, 25 bp, Homo sapien
atgagtatttgggtcatggttaggc

SEQ ID NO: 588333 - DNA, 25 bp, Homo sapien
catctgctccacataaacaatgatg

SEQ ID NO: 588334 - DNA, 25 bp, Homo sapien
cacataaacaatgatgagtatttgg

SEQ ID NO: 588335 - DNA, 25 bp, Homo sapien
tggcaaggccaagcataatgagatc

SEQ ID NO: 588336 - DNA, 25 bp, Homo sapien
ggtaaagttcggttcatgtgtggca

SEQ ID NO: 588337 - DNA, 25 bp, Homo sapien
ccaaactgattacaaagaccacatg

SEQ ID NO: 588338 - DNA, 25 bp, Homo sapien
gaccacatggtttgggcttgtttgg

SEQ ID NO: 588339 - DNA, 25 bp, Homo sapien
ctcacgaagaacattaagccgaagg

SEQ ID NO: 588340 - DNA, 25 bp, Homo sapien
gaagactatcggcaagttcatcatg

SEQ ID NO: 588341 - DNA, 25 bp, Homo sapien
cttctgcacaaggaagactatcggc

SEQ ID NO: 588342 - DNA, 25 bp, Homo sapien
cattaagccgaaggaagataaactc

SEQ ID NO: 588343 - DNA, 25 bp, Homo sapien
ctaatctctaacgatggcaaatgag

SEQ ID NO: 588344 - DNA, 25 bp, Homo sapien
aatgctcctctcaacatcaaatgtg

SEQ ID NO: 588345 - DNA, 25 bp, Homo sapien
atggtaggctggccattgtgagttc

SEQ ID NO: 588346 - DNA, 25 bp, Homo sapien
atctctaacgatggcaaatgaggga

SEQ ID NO: 588347 - DNA, 25 bp, Homo sapien
tatatgttaaccaaacggtcaattg

SEQ ID NO: 588348 - DNA, 25 bp, Homo sapien
tatgttaaccaaacggtcaattgca

SEQ ID NO: 588349 - DNA, 25 bp, Homo sapien
tgttaaccaaacggtcaattgcatt

SEQ ID NO: 588350 - DNA, 25 bp, Homo sapien
taaccaaacggtcaattgcattttc

SEQ ID NO: 588351 - DNA, 25 bp, Homo sapien
gattgacataaccactttctgtaag

SEQ ID NO: 588352 - DNA, 25 bp, Homo sapien
ctgtactctttgcagattgacataa

SEQ ID NO: 588353 - DNA, 25 bp, Homo sapien
gcagattgacataaccactttctgt

SEQ ID NO: 588354 - DNA, 25 bp, Homo sapien
tctttgcagattgacataaccactt

SEQ ID NO: 588355 - DNA, 25 bp, Homo sapien
ttaaaaatgctatcctcaacttcac

SEQ ID NO: 588356 - DNA, 25 bp, Homo sapien
aaatgctatcctcaacttcaccaac

SEQ ID NO: 588357 - DNA, 25 bp, Homo sapien
cctaaatgctcaacttcaataacaa

SEQ ID NO: 588358 - DNA, 25 bp, Homo sapien
cttgcctaaatgctcaacttcaata

SEQ ID NO: 588359 - DNA, 25 bp, Homo sapien
tgcctaaatgctcaacttcaataac

SEQ ID NO: 588360 - DNA, 25 bp, Homo sapien
tgctcaacttcaataacaatttttt

SEQ ID NO: 588361 - DNA, 25 bp, Homo sapien
ggacgaccccagaaatctaggtaca

SEQ ID NO: 588362 - DNA, 25 bp, Homo sapien
tgtatgcacggcttactactctggg

SEQ ID NO: 588363 - DNA, 25 bp, Homo sapien
gaagtgggactctacgcaaacatta

SEQ ID NO: 588364 - DNA, 25 bp, Homo sapien
ttctatagcatgcatggcacaatgg

SEQ ID NO: 588365 - DNA, 25 bp, Homo sapien
ttctttctgtcgtcttctaaaactg

SEQ ID NO: 588366 - DNA, 25 bp, Homo sapien
ctttctgtcgtcttctaaaactgtc

SEQ ID NO: 588367 - DNA, 25 bp, Homo sapien
tctttctgtcgtcttctaaaactgt

SEQ ID NO: 588368 - DNA, 25 bp, Homo sapien
tgactaagtcctactggacaaggaa

SEQ ID NO: 588369 - DNA, 25 bp, Homo sapien
tcagacatcagagcctagaggacct

SEQ ID NO: 588370 - DNA, 25 bp, Homo sapien
gaggaccttctttaaatcgacacca

SEQ ID NO: 588371 - DNA, 25 bp, Homo sapien
tgggtggacacttacgtccctgact

SEQ ID NO: 588372 - DNA, 25 bp, Homo sapien
gaacccaaggcatgaggagttaata

SEQ ID NO: 588373 - DNA, 25 bp, Homo sapien
ttgaacccaaggcatgaggagttaa

SEQ ID NO: 588374 - DNA, 25 bp, Homo sapien
ccaaggcatgaggagttaatattcc

SEQ ID NO: 588375 - DNA, 25 bp, Homo sapien
aaggcatgaggagttaatattccac

SEQ ID NO: 588376 - DNA, 25 bp, Homo sapien
tttcataggctgcttgtctcggatt

SEQ ID NO: 588377 - DNA, 25 bp, Homo sapien
taggctgcttgtctcggattactgg

SEQ ID NO: 588378 - DNA, 25 bp, Homo sapien
ttgtctcggattactggctacttga

SEQ ID NO: 588379 - DNA, 25 bp, Homo sapien
gattactggctacttgagaacctgg

SEQ ID NO: 588380 - DNA, 25 bp, Homo sapien
gagccatcagatgtgaaactcgtat

SEQ ID NO: 588381 - DNA, 25 bp, Homo sapien
cttaattcctcctaatggagacggg

SEQ ID NO: 588382 - DNA, 25 bp, Homo sapien
tcgtattaggagatatcgaaggact

SEQ ID NO: 588383 - DNA, 25 bp, Homo sapien
ctgacattatcctctggctcaggtt

SEQ ID NO: 588384 - DNA, 25 bp, Homo sapien
ttggaggacgaaagcctgcacgcat

SEQ ID NO: 588385 - DNA, 25 bp, Homo sapien
tgatatctagccgatcttgtgcctg

SEQ ID NO: 588386 - DNA, 25 bp, Homo sapien
ttggagcccacggttcaaatctgga

SEQ ID NO: 588387 - DNA, 25 bp, Homo sapien
gaactttctaggttaagcagcttga

SEQ ID NO: 588388 - DNA, 25 bp, Homo sapien
gcaggtcaatgaatccactaaatta

SEQ ID NO: 588389 - DNA, 25 bp, Homo sapien
catttcttggtagaggcatttcctc

SEQ ID NO: 588390 - DNA, 25 bp, Homo sapien
caacacaaaggagtcacagaataac

SEQ ID NO: 588391 - DNA, 25 bp, Homo sapien
tactctctctatccttgcttgggcc

SEQ ID NO: 588392 - DNA, 25 bp, Homo sapien
caggcacagctcatttatgctgaat

SEQ ID NO: 588393 - DNA, 25 bp, Homo sapien
accaggcacagctcatttatgctga

SEQ ID NO: 588394 - DNA, 25 bp, Homo sapien
aaaccaggcacagctcatttatgct

SEQ ID NO: 588395 - DNA, 25 bp, Homo sapien
ctaaaaccaggcacagctcatttat

SEQ ID NO: 588396 - DNA, 25 bp, Homo sapien
caaagtccttcaacgtacgactgca

SEQ ID NO: 588397 - DNA, 25 bp, Homo sapien
ttgtagtaccgctgcttccagccag

SEQ ID NO: 588398 - DNA, 25 bp, Homo sapien
tacgactgcacaactttccgacgga

SEQ ID NO: 588399 - DNA, 25 bp, Homo sapien
ttccgacggaatttctcatcagctg

SEQ ID NO: 588400 - DNA, 25 bp, Homo sapien
tggataataccacttccaggaagca

SEQ ID NO: 588401 - DNA, 25 bp, Homo sapien
tcagatggcatgtctgcaatgcctt

SEQ ID NO: 588402 - DNA, 25 bp, Homo sapien
gtctgaagcaaatggtgcataatga

SEQ ID NO: 588403 - DNA, 25 bp, Homo sapien
caaatggtgcataatgaaatggata

SEQ ID NO: 588404 - DNA, 25 bp, Homo sapien
tattatctaatccagaattctataa

SEQ ID NO: 588405 - DNA, 25 bp, Homo sapien
agattattatctaatccagaattct

SEQ ID NO: 588406 - DNA, 25 bp, Homo sapien
tatctaatccagaattctataaact

SEQ ID NO: 588407 - DNA, 25 bp, Homo sapien
tatgactttaagtaattaagcttac

SEQ ID NO: 588408 - DNA, 25 bp, Homo sapien
ggatcactcatgagcttccgccatg

SEQ ID NO: 588409 - DNA, 25 bp, Homo sapien
gaggtagaaaattaccacttgcagc

SEQ ID NO: 588410 - DNA, 25 bp, Homo sapien
gcttccgccatgatggaggtagaaa

SEQ ID NO: 588411 - DNA, 25 bp, Homo sapien
taccacttgcagctggaaatacccc

SEQ ID NO: 588412 - DNA, 25 bp, Homo sapien
gcaaaatcttcaggatagaagtcaa

SEQ ID NO: 588413 - DNA, 25 bp, Homo sapien
aaatcttcaggatagaagtcaatta

SEQ ID NO: 588414 - DNA, 25 bp, Homo sapien
caaaatcttcaggatagaagtcaat

SEQ ID NO: 588415 - DNA, 25 bp, Homo sapien
cttgccatgcatatttcttcccatt

SEQ ID NO: 588416 - DNA, 25 bp, Homo sapien
gaggtctgggtatacctcttctagg

SEQ ID NO: 588417 - DNA, 25 bp, Homo sapien
gtagccttcgctcatccacgaatgg

SEQ ID NO: 588418 - DNA, 25 bp, Homo sapien
tccacgaatggcaagagagcaacac

SEQ ID NO: 588419 - DNA, 25 bp, Homo sapien
tctagggcagctcgtagccttcgct

SEQ ID NO: 588420 - DNA, 25 bp, Homo sapien
tgatgtttccccacaaataagacat

SEQ ID NO: 588421 - DNA, 25 bp, Homo sapien
ggaacctgtctggtacagctctaaa

SEQ ID NO: 588422 - DNA, 25 bp, Homo sapien
tctgtggaacctgtctggtacagct

SEQ ID NO: 588423 - DNA, 25 bp, Homo sapien
agtgggtgatgtttccccacaaata

SEQ ID NO: 588424 - DNA, 25 bp, Homo sapien
tccttgaatcccatgacatagttca

SEQ ID NO: 588425 - DNA, 25 bp, Homo sapien
ttgaatcccatgacatagttcaggg

SEQ ID NO: 588426 - DNA, 25 bp, Homo sapien
tcccatgacatagttcagggggtac

SEQ ID NO: 588427 - DNA, 25 bp, Homo sapien
cccatgacatagttcagggggtacc

SEQ ID NO: 588428 - DNA, 25 bp, Homo sapien
tacacatactctatggccagcagtt

SEQ ID NO: 588429 - DNA, 25 bp, Homo sapien
gctgtgacaagggtttgccaaaacg

SEQ ID NO: 588430 - DNA, 25 bp, Homo sapien
tcaatgagcatccaccagactgaca

SEQ ID NO: 588431 - DNA, 25 bp, Homo sapien
aactgccactgggattacaacacag

SEQ ID NO: 588432 - DNA, 25 bp, Homo sapien
gtgttctgtgtcagatcccttaaca

SEQ ID NO: 588433 - DNA, 25 bp, Homo sapien
cataggaacaggagaacatactatt

SEQ ID NO: 588434 - DNA, 25 bp, Homo sapien
attggtggattaacagctgccattt

SEQ ID NO: 588435 - DNA, 25 bp, Homo sapien
tggatttgcaagttcagagctgtgt

SEQ ID NO: 588436 - DNA, 25 bp, Homo sapien
gctgtgttctgggtgaatgccatga

SEQ ID NO: 588437 - DNA, 25 bp, Homo sapien
ctgggtgaatgccatgaattttgga

SEQ ID NO: 588438 - DNA, 25 bp, Homo sapien
tttgtgatgggtttaggagcgtggc

SEQ ID NO: 588439 - DNA, 25 bp, Homo sapien
tgtgatgggtttaggagcgtggctt

SEQ ID NO: 588440 - DNA, 25 bp, Homo sapien
attgtttgtgatgggtttaggagcg

SEQ ID NO: 588441 - DNA, 25 bp, Homo sapien
ggtttaggagcgtggctttcaattc

SEQ ID NO: 588442 - DNA, 25 bp, Homo sapien
cacatcttggatgggaacgttggga

SEQ ID NO: 588443 - DNA, 25 bp, Homo sapien
tagccaaggtaataagctcccaggg

SEQ ID NO: 588444 - DNA, 25 bp, Homo sapien
taaagaggtcaccaacagagcctaa

SEQ ID NO: 588445 - DNA, 25 bp, Homo sapien
gagaagagaaaatcccagcgtcaca

SEQ ID NO: 588446 - DNA, 25 bp, Homo sapien
attttctgtactggcaagatggcat

SEQ ID NO: 588447 - DNA, 25 bp, Homo sapien
ctcagattttctgtactggcaagat

SEQ ID NO: 588448 - DNA, 25 bp, Homo sapien
tcctggaagcattacagctttaaaa

SEQ ID NO: 588449 - DNA, 25 bp, Homo sapien
cacaggcctccggtcacggttaaag

SEQ ID NO: 588450 - DNA, 25 bp, Homo sapien
aggtgcacaggcctccggtcacggt

SEQ ID NO: 588451 - DNA, 25 bp, Homo sapien
aagtcctgaaggctgcctgatccag

SEQ ID NO: 588452 - DNA, 25 bp, Homo sapien
gccaagctgaggcttccactgccgt

SEQ ID NO: 588453 - DNA, 25 bp, Homo sapien
ggaggcttctacaccaatatattgg

SEQ ID NO: 588454 - DNA, 25 bp, Homo sapien
gagataccactgttcaagcactggg

SEQ ID NO: 588455 - DNA, 25 bp, Homo sapien
tttattcccttgaagtaagagtcag

SEQ ID NO: 588456 - DNA, 25 bp, Homo sapien
caattcaagcaactacgagatacca

SEQ ID NO: 588457 - DNA, 25 bp, Homo sapien
gcttgacagacattaggctcactta

SEQ ID NO: 588458 - DNA, 25 bp, Homo sapien
cacagagtggttcggtaaagttcac

SEQ ID NO: 588459 - DNA, 25 bp, Homo sapien
tataaattacatgttgatggtgacc

SEQ ID NO: 588460 - DNA, 25 bp, Homo sapien
ggaactaccctaagcgcttgacaga

SEQ ID NO: 588461 - DNA, 25 bp, Homo sapien
ttccctggtaagtcacaggtggtgg

SEQ ID NO: 588462 - DNA, 25 bp, Homo sapien
agtttccctggtaagtcacaggtgg

SEQ ID NO: 588463 - DNA, 25 bp, Homo sapien
aagcggcctgtataagtttccctgg

SEQ ID NO: 588464 - DNA, 25 bp, Homo sapien
ggcttgtcctctcaaaagcggcctg

SEQ ID NO: 588465 - DNA, 25 bp, Homo sapien
tttggatccactctgccagtgtagt

SEQ ID NO: 588466 - DNA, 25 bp, Homo sapien
ctccttaacccacagagttgtggtt

SEQ ID NO: 588467 - DNA, 25 bp, Homo sapien
ctctccttaacccacagagttgtgg

SEQ ID NO: 588468 - DNA, 25 bp, Homo sapien
tggatccactctgccagtgtagttc

SEQ ID NO: 588469 - DNA, 25 bp, Homo sapien
attatccagactttcagccttccct

SEQ ID NO: 588470 - DNA, 25 bp, Homo sapien
tatccagactttcagccttcccttc

SEQ ID NO: 588471 - DNA, 25 bp, Homo sapien
tcaattatccagactttcagccttc

SEQ ID NO: 588472 - DNA, 25 bp, Homo sapien
caattatccagactttcagccttcc

SEQ ID NO: 588473 - DNA, 25 bp, Homo sapien
gtctgtcgagggacggaaagagcgg

SEQ ID NO: 588474 - DNA, 25 bp, Homo sapien
tcagccggtctgtcgagggacggaa

SEQ ID NO: 588475 - DNA, 25 bp, Homo sapien
ggtgctctcgaagccgtgacagcct

SEQ ID NO: 588476 - DNA, 25 bp, Homo sapien
gaaagagcggagaggtgctctcgaa

SEQ ID NO: 588477 - DNA, 25 bp, Homo sapien
ccacatcagtccatggccagctgga

SEQ ID NO: 588478 - DNA, 25 bp, Homo sapien
catggccagctggaaaagtttctgc

SEQ ID NO: 588479 - DNA, 25 bp, Homo sapien
agcccactcccacatcagtccatgg

SEQ ID NO: 588480 - DNA, 25 bp, Homo sapien
agtccatggccagctggaaaagttt

SEQ ID NO: 588481 - DNA, 25 bp, Homo sapien
gtaacccctggtcactaaactcaca

SEQ ID NO: 588482 - DNA, 25 bp, Homo sapien
ttaatgaagggaccacccacttctc

SEQ ID NO: 588483 - DNA, 25 bp, Homo sapien
aaatggctcctgctcttctacataa

SEQ ID NO: 588484 - DNA, 25 bp, Homo sapien
tcttgtaacgcaaagctgaactagc

SEQ ID NO: 588485 - DNA, 25 bp, Homo sapien
ggaggaggacctcgccaggaatcct

SEQ ID NO: 588486 - DNA, 25 bp, Homo sapien
aggaggacctcgccaggaatcctgg

SEQ ID NO: 588487 - DNA, 25 bp, Homo sapien
ggaggacctcgccaggaatcctggg

SEQ ID NO: 588488 - DNA, 25 bp, Homo sapien
aggggaggaggacctcgccaggaat

SEQ ID NO: 588489 - DNA, 25 bp, Homo sapien
cactgccctacaataggcttgtcag

SEQ ID NO: 588490 - DNA, 25 bp, Homo sapien
ctgccctacaataggcttgtcagcc

SEQ ID NO: 588491 - DNA, 25 bp, Homo sapien
gacactgccctacaataggcttgtc

SEQ ID NO: 588492 - DNA, 25 bp, Homo sapien
agtgacactgccctacaataggctt

SEQ ID NO: 588493 - DNA, 25 bp, Homo sapien
ttttcaacaagtttatcacatgtct

SEQ ID NO: 588494 - DNA, 25 bp, Homo sapien
caagtttatcacatgtctagactaa

SEQ ID NO: 588495 - DNA, 25 bp, Homo sapien
ggatgtcatgtactaccttcttctg

SEQ ID NO: 588496 - DNA, 25 bp, Homo sapien
aagcaaggatgtcatgtactacctt

SEQ ID NO: 588497 - DNA, 25 bp, Homo sapien
cccggcgctgggctcattgggtaaa

SEQ ID NO: 588498 - DNA, 25 bp, Homo sapien
gactagctggtaatcagttataacc

SEQ ID NO: 588499 - DNA, 25 bp, Homo sapien
tgaactgctctctaaagaactctag

SEQ ID NO: 588500 - DNA, 25 bp, Homo sapien
ttacagttggtagctgaaaccagag

SEQ ID NO: 588501 - DNA, 25 bp, Homo sapien
gaaagtaccagttttacatcagaag

SEQ ID NO: 588502 - DNA, 25 bp, Homo sapien
ctgtaggaaagtaccagttttacat

SEQ ID NO: 588503 - DNA, 25 bp, Homo sapien
gtaccagttttacatcagaagccac

SEQ ID NO: 588504 - DNA, 25 bp, Homo sapien
gtaggaaagtaccagttttacatca

SEQ ID NO: 588505 - DNA, 25 bp, Homo sapien
tactggtttggctggaaggctgcat

SEQ ID NO: 588506 - DNA, 25 bp, Homo sapien
tggtttggctggaaggctgcattct

SEQ ID NO: 588507 - DNA, 25 bp, Homo sapien
tgcagcatccggttccatgggagca

SEQ ID NO: 588508 - DNA, 25 bp, Homo sapien
ctggtactggtttggctggaaggct

SEQ ID NO: 588509 - DNA, 25 bp, Homo sapien
gatcatctcgtctgggtggataccc

SEQ ID NO: 588510 - DNA, 25 bp, Homo sapien
tgtctccctccacgatcatctcgtc

SEQ ID NO: 588511 - DNA, 25 bp, Homo sapien
cctccacgatcatctcgtctgggtg

SEQ ID NO: 588512 - DNA, 25 bp, Homo sapien
cacgatcatctcgtctgggtggata

SEQ ID NO: 588513 - DNA, 25 bp, Homo sapien
tatacttttcatcccacaaccattt

SEQ ID NO: 588514 - DNA, 25 bp, Homo sapien
tacttttcatcccacaaccatttac

SEQ ID NO: 588515 - DNA, 25 bp, Homo sapien
agtatacttttcatcccacaaccat

SEQ ID NO: 588516 - DNA, 25 bp, Homo sapien
gtatacttttcatcccacaaccatt

SEQ ID NO: 588517 - DNA, 25 bp, Homo sapien
aagttcagccaagctactctaagct

SEQ ID NO: 588518 - DNA, 25 bp, Homo sapien
ttttggtgactgactatacttggac

SEQ ID NO: 588519 - DNA, 25 bp, Homo sapien
ttagtgaagcaggtactcaacccat

SEQ ID NO: 588520 - DNA, 25 bp, Homo sapien
tgactgctatgatttaaagggcttt

SEQ ID NO: 588521 - DNA, 25 bp, Homo sapien
catcacccattaagagggatctagg

SEQ ID NO: 588522 - DNA, 25 bp, Homo sapien
taagagggatctaggttctattgaa

SEQ ID NO: 588523 - DNA, 25 bp, Homo sapien
cccattaagagggatctaggttcta

SEQ ID NO: 588524 - DNA, 25 bp, Homo sapien
aaaatcatcacccattaagagggat

SEQ ID NO: 588525 - DNA, 25 bp, Homo sapien
caaaaggcctggaggcaacaccagg

SEQ ID NO: 588526 - DNA, 25 bp, Homo sapien
aactggatgctgtaaagagaaggac

SEQ ID NO: 588527 - DNA, 25 bp, Homo sapien
tgcaggtgccaaactccatacacat

SEQ ID NO: 588528 - DNA, 25 bp, Homo sapien
taatatgtgaagcactgcaaaaggc

SEQ ID NO: 588529 - DNA, 25 bp, Homo sapien
tcttcttgtaaggtggagatacttg

SEQ ID NO: 588530 - DNA, 25 bp, Homo sapien
attatttgcaattaaggtgattatc

SEQ ID NO: 588531 - DNA, 25 bp, Homo sapien
gtggagatacttgtaagaatacatc

SEQ ID NO: 588532 - DNA, 25 bp, Homo sapien
tcttgtaaggtggagatacttgtaa

SEQ ID NO: 588533 - DNA, 25 bp, Homo sapien
tgactagactacacattctccaagg

SEQ ID NO: 588534 - DNA, 25 bp, Homo sapien
taaagagccttagttcactgacacg

SEQ ID NO: 588535 - DNA, 25 bp, Homo sapien
tgctcatcactgaaacggcctagtg

SEQ ID NO: 588536 - DNA, 25 bp, Homo sapien
cctgacttggaaaatgaggtgacta

SEQ ID NO: 588537 - DNA, 25 bp, Homo sapien
tgtcctagcagtagtaattcaagtc

SEQ ID NO: 588538 - DNA, 25 bp, Homo sapien
gaccgatactcctgcaagtcagtta

SEQ ID NO: 588539 - DNA, 25 bp, Homo sapien
cataaaaggtgctttgatccagagc

SEQ ID NO: 588540 - DNA, 25 bp, Homo sapien
caaagttggaggctagcacaaatgc

SEQ ID NO: 588541 - DNA, 25 bp, Homo sapien
ttccaattgtatcttcctgagggtg

SEQ ID NO: 588542 - DNA, 25 bp, Homo sapien
attccaattgtatcttcctgagggt

SEQ ID NO: 588543 - DNA, 25 bp, Homo sapien
tccacaaatagcataaaactgtaga

SEQ ID NO: 588544 - DNA, 25 bp, Homo sapien
ccacaaatagcataaaactgtagaa

SEQ ID NO: 588545 - DNA, 25 bp, Homo sapien
catacatctttggaaagcaacataa

SEQ ID NO: 588546 - DNA, 25 bp, Homo sapien
tgagatcagatcagtagaaatatac

SEQ ID NO: 588547 - DNA, 25 bp, Homo sapien
gcaataataaattcagatccactgt

SEQ ID NO: 588548 - DNA, 25 bp, Homo sapien
ctgaggttccagctcgagttcaaac

SEQ ID NO: 588549 - DNA, 25 bp, Homo sapien
cgagaatgggccgtttgctagttca

SEQ ID NO: 588550 - DNA, 25 bp, Homo sapien
ctggcgagatcgcagctccaggatc

SEQ ID NO: 588551 - DNA, 25 bp, Homo sapien
gtggaggagaaatccatcgagaatg

SEQ ID NO: 588552 - DNA, 25 bp, Homo sapien
agtggatcaccaggaatagagtctg

SEQ ID NO: 588553 - DNA, 25 bp, Homo sapien
gaggataagtgtctccacaactgag

SEQ ID NO: 588554 - DNA, 25 bp, Homo sapien
ggaggataagtgtctccacaactga

SEQ ID NO: 588555 - DNA, 25 bp, Homo sapien
gaggaggataagtgtctccacaact

SEQ ID NO: 588556 - DNA, 25 bp, Homo sapien
aggataagtgtctccacaactgaga

SEQ ID NO: 588557 - DNA, 25 bp, Homo sapien
aggtcctggtgcacccgaagggtct

SEQ ID NO: 588558 - DNA, 25 bp, Homo sapien
gattcaaaacgaaccggtctcagag

SEQ ID NO: 588559 - DNA, 25 bp, Homo sapien
tgcgaaaaccgactcgcgcgtgtaa

SEQ ID NO: 588560 - DNA, 25 bp, Homo sapien
aacattatgccacgaggctttgagg

SEQ ID NO: 588561 - DNA, 25 bp, Homo sapien
agttcccgcacggcgccatgggcag

SEQ ID NO: 588562 - DNA, 25 bp, Homo sapien
catgggcagctactgcaacggcggc

SEQ ID NO: 588563 - DNA, 25 bp, Homo sapien
gccgcccggcgtctcgcagttcccg

SEQ ID NO: 588564 - DNA, 25 bp, Homo sapien
cagctactgcaacggcggcctgggc

SEQ ID NO: 588565 - DNA, 25 bp, Homo sapien
atcctgagccccatcgaggagacct

SEQ ID NO: 588566 - DNA, 25 bp, Homo sapien
tggctgcccgccgagccatgtcgtt

SEQ ID NO: 588567 - DNA, 25 bp, Homo sapien
acaagaagttcagcggcgccatgga

SEQ ID NO: 588568 - DNA, 25 bp, Homo sapien
tcgttgagcccaaagcacacgacgc

SEQ ID NO: 588569 - DNA, 25 bp, Homo sapien
tcgacgccagcctccgagtttctat

SEQ ID NO: 588570 - DNA, 25 bp, Homo sapien
gactttggtgcgaagtcactttaga

SEQ ID NO: 588571 - DNA, 25 bp, Homo sapien
gccaggcgcggagtccatgtctagc

SEQ ID NO: 588572 - DNA, 25 bp, Homo sapien
tctatttctggtgctcgagggctgg

SEQ ID NO: 588573 - DNA, 25 bp, Homo sapien
caaacttagcagcacgttccccatt

SEQ ID NO: 588574 - DNA, 25 bp, Homo sapien
gaatgaggggctgataactggagag

SEQ ID NO: 588575 - DNA, 25 bp, Homo sapien
actggagaggacgaagcaagccccc

SEQ ID NO: 588576 - DNA, 25 bp, Homo sapien
gcacgttccccattccgcaattata

SEQ ID NO: 588577 - DNA, 25 bp, Homo sapien
taaacttaaatcgattccacacacc

SEQ ID NO: 588578 - DNA, 25 bp, Homo sapien
aacttaaatcgattccacacaccct

SEQ ID NO: 588579 - DNA, 25 bp, Homo sapien
gttaaacttaaatcgattccacaca

SEQ ID NO: 588580 - DNA, 25 bp, Homo sapien
ttaaacttaaatcgattccacacac

SEQ ID NO: 588581 - DNA, 25 bp, Homo sapien
aagacctagccgatgtgtttcaagt

SEQ ID NO: 588582 - DNA, 25 bp, Homo sapien
aggtgaggatgaagacctagccgat

SEQ ID NO: 588583 - DNA, 25 bp, Homo sapien
ttcttaagtaggtaattccagtgca

SEQ ID NO: 588584 - DNA, 25 bp, Homo sapien
taagtgcttctttgtgtatcattag

SEQ ID NO: 588585 - DNA, 25 bp, Homo sapien
tgtttccggcatgaagatatgtaat

SEQ ID NO: 588586 - DNA, 25 bp, Homo sapien
tccacacataatttaggtacacgat

SEQ ID NO: 588587 - DNA, 25 bp, Homo sapien
gaatcatccacacgcatccaaatag

SEQ ID NO: 588588 - DNA, 25 bp, Homo sapien
gagaaaacactcctgagaaatacat

SEQ ID NO: 588589 - DNA, 25 bp, Homo sapien
tttatcatgaatggcagtcgaattt

SEQ ID NO: 588590 - DNA, 25 bp, Homo sapien
gaatggcagtcgaattttgtcacat

SEQ ID NO: 588591 - DNA, 25 bp, Homo sapien
tgtagagatgctttgtcaggttgag

SEQ ID NO: 588592 - DNA, 25 bp, Homo sapien
caaatgtgatgttactgacaggttt

SEQ ID NO: 588593 - DNA, 25 bp, Homo sapien
tacaaaacagttgatcatccttcct

SEQ ID NO: 588594 - DNA, 25 bp, Homo sapien
tacgtatagtagtgaaagttgccct

SEQ ID NO: 588595 - DNA, 25 bp, Homo sapien
taatttatccttttgtagcagcttt

SEQ ID NO: 588596 - DNA, 25 bp, Homo sapien
tatgtattccaccatacagatgtac

SEQ ID NO: 588597 - DNA, 25 bp, Homo sapien
caaaggcaggaattatgacagtttc

SEQ ID NO: 588598 - DNA, 25 bp, Homo sapien
tcaccacattctttatggaaagcaa

SEQ ID NO: 588599 - DNA, 25 bp, Homo sapien
caggaccaggcatatacgtggctga

SEQ ID NO: 588600 - DNA, 25 bp, Homo sapien
tacgtggctgacatcaccacattct

SEQ ID NO: 588601 - DNA, 25 bp, Homo sapien
tctggtagactcatctggtttggtc

SEQ ID NO: 588602 - DNA, 25 bp, Homo sapien
tctggtttggtcatagaatcaggca

SEQ ID NO: 588603 - DNA, 25 bp, Homo sapien
tggtcatagaatcaggcaatgtgag

SEQ ID NO: 588604 - DNA, 25 bp, Homo sapien
tcaggcaatgtgagaatgtggtctg

SEQ ID NO: 588605 - DNA, 25 bp, Homo sapien
catacccctagttgttactgctttt

SEQ ID NO: 588606 - DNA, 25 bp, Homo sapien
tccactgcattgactgagatccctt

SEQ ID NO: 588607 - DNA, 25 bp, Homo sapien
ggctccagcttcatacccctagttg

SEQ ID NO: 588608 - DNA, 25 bp, Homo sapien
tttctctcatacaaacaggggcacc

SEQ ID NO: 588609 - DNA, 25 bp, Homo sapien
tttccatctaccctaaacggctgca

SEQ ID NO: 588610 - DNA, 25 bp, Homo sapien
tgcaggcctagaacagccttctgac

SEQ ID NO: 588611 - DNA, 25 bp, Homo sapien
ggtttagtcctgtgcatccaccgca

SEQ ID NO: 588612 - DNA, 25 bp, Homo sapien
taccattcacttccctggctgggtg

SEQ ID NO: 588613 - DNA, 25 bp, Homo sapien
ctggacaaaccctgaggggacagcc

SEQ ID NO: 588614 - DNA, 25 bp, Homo sapien
cttgtcctctcctctatttgaaaca

SEQ ID NO: 588615 - DNA, 25 bp, Homo sapien
tcctctatttgaaacagccatttcc

SEQ ID NO: 588616 - DNA, 25 bp, Homo sapien
cccaaatcccaatctgatgaaatcc

SEQ ID NO: 588617 - DNA, 25 bp, Homo sapien
tttcccaaatcccaatctgatgaaa

SEQ ID NO: 588618 - DNA, 25 bp, Homo sapien
ggcgccttgggtctttgtacactaa

SEQ ID NO: 588619 - DNA, 25 bp, Homo sapien
ggacggcgccttgggtctttgtaca

SEQ ID NO: 588620 - DNA, 25 bp, Homo sapien
ctgtgcctctgaggacggcgccttg

SEQ ID NO: 588621 - DNA, 25 bp, Homo sapien
agccccagaacatcccggtcaccca

SEQ ID NO: 588622 - DNA, 25 bp, Homo sapien
aaggcagattaggaatgtccacgtc

SEQ ID NO: 588623 - DNA, 25 bp, Homo sapien
gcagattaggaatgtccacgtctag

SEQ ID NO: 588624 - DNA, 25 bp, Homo sapien
taaggcagattaggaatgtccacgt

SEQ ID NO: 588625 - DNA, 25 bp, Homo sapien
ggcagattaggaatgtccacgtcta

SEQ ID NO: 588626 - DNA, 25 bp, Homo sapien
gattgtggacgatcctgttcttccc

SEQ ID NO: 588627 - DNA, 25 bp, Homo sapien
gccgcgggacgatccaggatgtcca

SEQ ID NO: 588628 - DNA, 25 bp, Homo sapien
ctgaagaagcgtgcttgtgagcgcc

SEQ ID NO: 588629 - DNA, 25 bp, Homo sapien
tcagcactctgaagaagcgtgcttg

SEQ ID NO: 588630 - DNA, 25 bp, Homo sapien
gcaatgtggtgcatgaagtcctcag

SEQ ID NO: 588631 - DNA, 25 bp, Homo sapien
tctttcctccaaagctgcaatgtgg

SEQ ID NO: 588632 - DNA, 25 bp, Homo sapien
cccaggttgcagttccgagtatgga

SEQ ID NO: 588633 - DNA, 25 bp, Homo sapien
tggcatcccgaagaacaggcagatt

SEQ ID NO: 588634 - DNA, 25 bp, Homo sapien
aggcagagcttgccgcagaatgcag

SEQ ID NO: 588635 - DNA, 25 bp, Homo sapien
gcagagcttgccgcagaatgcagcc

SEQ ID NO: 588636 - DNA, 25 bp, Homo sapien
ggcagagcttgccgcagaatgcagc

SEQ ID NO: 588637 - DNA, 25 bp, Homo sapien
tcggccagcgagtgtcccctgagaa

SEQ ID NO: 588638 - DNA, 25 bp, Homo sapien
gaagcctgtatgtacaccagcacct

SEQ ID NO: 588639 - DNA, 25 bp, Homo sapien
ggccatctcggccagcgagtgtccc

SEQ ID NO: 588640 - DNA, 25 bp, Homo sapien
tgggccaaccccttgtcatcctcgg

SEQ ID NO: 588641 - DNA, 25 bp, Homo sapien
ctaatcagatcatcatagccaatct

SEQ ID NO: 588642 - DNA, 25 bp, Homo sapien
ccgctgccacgtactgagcaccttc

SEQ ID NO: 588643 - DNA, 25 bp, Homo sapien
caccgctgccacgtactgagcacct

SEQ ID NO: 588644 - DNA, 25 bp, Homo sapien
accgctgccacgtactgagcacctt

SEQ ID NO: 588645 - DNA, 25 bp, Homo sapien
cgctgccacgtactgagcaccttct

SEQ ID NO: 588646 - DNA, 25 bp, Homo sapien
ataaaatgatacaaagaaagcccca

SEQ ID NO: 588647 - DNA, 25 bp, Homo sapien
tcttcataaaatgatacaaagaaag

SEQ ID NO: 588648 - DNA, 25 bp, Homo sapien
ttcataaaatgatacaaagaaagcc

SEQ ID NO: 588649 - DNA, 25 bp, Homo sapien
cataaaatgatacaaagaaagcccc

SEQ ID NO: 588650 - DNA, 25 bp, Homo sapien
atcaaaggcatcgtggctccaaaca

SEQ ID NO: 588651 - DNA, 25 bp, Homo sapien
ctgcagtacccaggctttccgcggg

SEQ ID NO: 588652 - DNA, 25 bp, Homo sapien
cttcaaaaccagctgtcggtgggcc

SEQ ID NO: 588653 - DNA, 25 bp, Homo sapien
gagggcgtctgcagtacccaggctt

SEQ ID NO: 588654 - DNA, 25 bp, Homo sapien
taaagaggcgaataggcctcagcgc

SEQ ID NO: 588655 - DNA, 25 bp, Homo sapien
tgcgagtcgacctgtgttcggctgt

SEQ ID NO: 588656 - DNA, 25 bp, Homo sapien
tcccgaggcatcgttattaataaag

SEQ ID NO: 588657 - DNA, 25 bp, Homo sapien
ttccatcgtgtttgggcacagacca

SEQ ID NO: 588658 - DNA, 25 bp, Homo sapien
ttgtggctccctgagaggccaagcg

SEQ ID NO: 588659 - DNA, 25 bp, Homo sapien
gcagtgacactctaaaccgtgtcga

SEQ ID NO: 588660 - DNA, 25 bp, Homo sapien
gaggccaagcgcagtgacactctaa

SEQ ID NO: 588661 - DNA, 25 bp, Homo sapien
tctaaaccgtgtcgatatatcatct

SEQ ID NO: 588662 - DNA, 25 bp, Homo sapien
attccatatggccagctgggccgag

SEQ ID NO: 588663 - DNA, 25 bp, Homo sapien
gcacaaaacctaaattgtgtccggc

SEQ ID NO: 588664 - DNA, 25 bp, Homo sapien
tgggtccctttgtcatccacgggct

SEQ ID NO: 588665 - DNA, 25 bp, Homo sapien
cacgggctccatgctggattccata

SEQ ID NO: 588666 - DNA, 25 bp, Homo sapien
aatttggagctgtggccaggaccgc

SEQ ID NO: 588667 - DNA, 25 bp, Homo sapien
gccaggaccgcgggcctgcaatctg

SEQ ID NO: 588668 - DNA, 25 bp, Homo sapien
ttccaccacttgctcattgaggaca

SEQ ID NO: 588669 - DNA, 25 bp, Homo sapien
caatctgggtgtgcgctcctgtggc

SEQ ID NO: 588670 - DNA, 25 bp, Homo sapien
aattcaatatctaaagcaaacatga

SEQ ID NO: 588671 - DNA, 25 bp, Homo sapien
acatgattatccgtgcgaccaaatc

SEQ ID NO: 588672 - DNA, 25 bp, Homo sapien
ccctgtagttgatgatcaggtttaa

SEQ ID NO: 588673 - DNA, 25 bp, Homo sapien
gaccaaatctgtgcgtcgatagcac

SEQ ID NO: 588674 - DNA, 25 bp, Homo sapien
gaacgtcggcgcatttggaaattgt

SEQ ID NO: 588675 - DNA, 25 bp, Homo sapien
gacgctgagggactgaacgtcggcg

SEQ ID NO: 588676 - DNA, 25 bp, Homo sapien
gcccagcgggtgctgcagacgctga

SEQ ID NO: 588677 - DNA, 25 bp, Homo sapien
tgagggactgaacgtcggcgcattt

SEQ ID NO: 588678 - DNA, 25 bp, Homo sapien
ggagcgtcttaggaagcctggccaa

SEQ ID NO: 588679 - DNA, 25 bp, Homo sapien
cctggccaactggaggatgagcctt

SEQ ID NO: 588680 - DNA, 25 bp, Homo sapien
ccttgttgctggaggaagatctcct

SEQ ID NO: 588681 - DNA, 25 bp, Homo sapien
ttggcagatgctggcgcacacttgg

SEQ ID NO: 588682 - DNA, 25 bp, Homo sapien
gctcccatcctttccgggcttccag

SEQ ID NO: 588683 - DNA, 25 bp, Homo sapien
caggtcagcccttgagcgtggaact

SEQ ID NO: 588684 - DNA, 25 bp, Homo sapien
tctctccggggactggatcccgggc

SEQ ID NO: 588685 - DNA, 25 bp, Homo sapien
ttcggcggtccgaaccagggtgtgc

SEQ ID NO: 588686 - DNA, 25 bp, Homo sapien
tcagccgtcttctaaagcaagtgga

SEQ ID NO: 588687 - DNA, 25 bp, Homo sapien
ggagctcagctattcggcgcggttc

SEQ ID NO: 588688 - DNA, 25 bp, Homo sapien
aaccgtcccagcgttaatgtcgtca

SEQ ID NO: 588689 - DNA, 25 bp, Homo sapien
caaaatgaccttcaggaccggcctg

SEQ ID NO: 588690 - DNA, 25 bp, Homo sapien
gcttttctccaaggcgcagacctac

SEQ ID NO: 588691 - DNA, 25 bp, Homo sapien
tcttggtcagggacggcaaaccatg

SEQ ID NO: 588692 - DNA, 25 bp, Homo sapien
agaaaggtatggaggtgacgcccct

SEQ ID NO: 588693 - DNA, 25 bp, Homo sapien
gttccagaaccaccgctacaagatg

SEQ ID NO: 588694 - DNA, 25 bp, Homo sapien
tctcgaaccatgtcgctgaccaaca

SEQ ID NO: 588695 - DNA, 25 bp, Homo sapien
catttccgcgtgctttcaaagaaga

SEQ ID NO: 588696 - DNA, 25 bp, Homo sapien
caaggacatcttagacctgccggac

SEQ ID NO: 588697 - DNA, 25 bp, Homo sapien
ggagcgccacgaattgaccaagtga

SEQ ID NO: 588698 - DNA, 25 bp, Homo sapien
tccccaggttcgtgagtggagccca

SEQ ID NO: 588699 - DNA, 25 bp, Homo sapien
ccagccttatatggactgatcgctc

SEQ ID NO: 588700 - DNA, 25 bp, Homo sapien
gatcgctcgggcaatggcccatttt

SEQ ID NO: 588701 - DNA, 25 bp, Homo sapien
gcctccccaggttcgtgagtggagc

SEQ ID NO: 588702 - DNA, 25 bp, Homo sapien
gacttaacctggaaacgtggagcgc

SEQ ID NO: 588703 - DNA, 25 bp, Homo sapien
cacactaaagaactcgcgtgggaga

SEQ ID NO: 588704 - DNA, 25 bp, Homo sapien
aacgtggagcgcgtactccgaacgc

SEQ ID NO: 588705 - DNA, 25 bp, Homo sapien
cgcacccaaggcgtccaaaaagaga

SEQ ID NO: 588706 - DNA, 25 bp, Homo sapien
tgtccgcagcttagcaatcggtttg

SEQ ID NO: 588707 - DNA, 25 bp, Homo sapien
gggcttgctctaacctgggccattg

SEQ ID NO: 588708 - DNA, 25 bp, Homo sapien
caacgggagcgggacatttgtctac

SEQ ID NO: 588709 - DNA, 25 bp, Homo sapien
gggccattgtcacccacgtcacata

SEQ ID NO: 588710 - DNA, 25 bp, Homo sapien
cttgatcaatagcagcggtgctgat

SEQ ID NO: 588711 - DNA, 25 bp, Homo sapien
gggacttgatcaatagcagcggtgc

SEQ ID NO: 588712 - DNA, 25 bp, Homo sapien
cggtgctgatttagatcctgagaag

SEQ ID NO: 588713 - DNA, 25 bp, Homo sapien
gtgctgatttagatcctgagaagaa

SEQ ID NO: 588714 - DNA, 25 bp, Homo sapien
actaaagaatgccgagtgggggaga

SEQ ID NO: 588715 - DNA, 25 bp, Homo sapien
caggagctgaaactggtgcaggcag

SEQ ID NO: 588716 - DNA, 25 bp, Homo sapien
accaggagctgaaactggtgcaggc

SEQ ID NO: 588717 - DNA, 25 bp, Homo sapien
ttactaaagaatgccgagtggggga

SEQ ID NO: 588718 - DNA, 25 bp, Homo sapien
tgttcgggacgctaaggagacacca

SEQ ID NO: 588719 - DNA, 25 bp, Homo sapien
ccaaacttgacggaacggaggacat

SEQ ID NO: 588720 - DNA, 25 bp, Homo sapien
gcagagtgcctacgaggtctccaga

SEQ ID NO: 588721 - DNA, 25 bp, Homo sapien
aggacattgaactcgcttgggtgca

SEQ ID NO: 588722 - DNA, 25 bp, Homo sapien
ccctccgtagggtgtgccgaggcct

SEQ ID NO: 588723 - DNA, 25 bp, Homo sapien
caggtacctgcactgcaagctttca

SEQ ID NO: 588724 - DNA, 25 bp, Homo sapien
aagctttcaccaccggcttgaacgg

SEQ ID NO: 588725 - DNA, 25 bp, Homo sapien
tttgctgttgtttagagcgcacccc

SEQ ID NO: 588726 - DNA, 25 bp, Homo sapien
gaacgtctttatcgccacactcagg

SEQ ID NO: 588727 - DNA, 25 bp, Homo sapien
catccaggacgtgagagctgacacc

SEQ ID NO: 588728 - DNA, 25 bp, Homo sapien
ggagatgccatccttaaggtgaacg

SEQ ID NO: 588729 - DNA, 25 bp, Homo sapien
ccctgctcccgcattggaagtcgaa

SEQ ID NO: 588730 - DNA, 25 bp, Homo sapien
gagaggccggttccattttgtagcg

SEQ ID NO: 588731 - DNA, 25 bp, Homo sapien
ataatggattggctgggacaggctc

SEQ ID NO: 588732 - DNA, 25 bp, Homo sapien
tagagcagcgcgaacgaataaagcc

SEQ ID NO: 588733 - DNA, 25 bp, Homo sapien
cccaataaaccggtgataatggatt

SEQ ID NO: 588734 - DNA, 25 bp, Homo sapien
agaggcagaagtcccgaaggtaatt

SEQ ID NO: 588735 - DNA, 25 bp, Homo sapien
gacaggggcttctcctcagacggaa

SEQ ID NO: 588736 - DNA, 25 bp, Homo sapien
ctgtgcgtcgcagggagctcgggat

SEQ ID NO: 588737 - DNA, 25 bp, Homo sapien
taatttggagatggcgcccagtgga

SEQ ID NO: 588738 - DNA, 25 bp, Homo sapien
cgctgcgcactttccggtgcggtca

SEQ ID NO: 588739 - DNA, 25 bp, Homo sapien
gcggtcagggaaagcgggactgtcc

SEQ ID NO: 588740 - DNA, 25 bp, Homo sapien
gcactttccggtgcggtcagggaaa

SEQ ID NO: 588741 - DNA, 25 bp, Homo sapien
gccgaggccaggtgatcccgccgct

SEQ ID NO: 588742 - DNA, 25 bp, Homo sapien
ccgcgactcgggataaagagcggcc

SEQ ID NO: 588743 - DNA, 25 bp, Homo sapien
gcaagtgcgggcctccgaagttctc

SEQ ID NO: 588744 - DNA, 25 bp, Homo sapien
cagctcgcacgcgtttccggtgaac

SEQ ID NO: 588745 - DNA, 25 bp, Homo sapien
cccgactttgcggatcacggcagga

SEQ ID NO: 588746 - DNA, 25 bp, Homo sapien
ttcagactccgtctcagctctcacc

SEQ ID NO: 588747 - DNA, 25 bp, Homo sapien
actccgtctcagctctcacctccat

SEQ ID NO: 588748 - DNA, 25 bp, Homo sapien
ttccttcagactccgtctcagctct

SEQ ID NO: 588749 - DNA, 25 bp, Homo sapien
agactccgtctcagctctcacctcc

SEQ ID NO: 588750 - DNA, 25 bp, Homo sapien
agaaggaactggtattactcttggc

SEQ ID NO: 588751 - DNA, 25 bp, Homo sapien
taagaccatgactcttgccttctgg

SEQ ID NO: 588752 - DNA, 25 bp, Homo sapien
ctcataagaccatgactcttgcctt

SEQ ID NO: 588753 - DNA, 25 bp, Homo sapien
aactggtattactcttggcttctga

SEQ ID NO: 588754 - DNA, 25 bp, Homo sapien
tctgaatgctatctgtaacagctcc

SEQ ID NO: 588755 - DNA, 25 bp, Homo sapien
tgaccttccagttctgcagacgtgg

SEQ ID NO: 588756 - DNA, 25 bp, Homo sapien
ccaggatggaaacacgtgctcagga

SEQ ID NO: 588757 - DNA, 25 bp, Homo sapien
actccactgttgtaacaatgaagtg

SEQ ID NO: 588758 - DNA, 25 bp, Homo sapien
tgttcacctgaacagtcggtccctg

SEQ ID NO: 588759 - DNA, 25 bp, Homo sapien
tcctgctcgaacgaacagtacggga

SEQ ID NO: 588760 - DNA, 25 bp, Homo sapien
ggtccctgcaaatcccgagagatgt

SEQ ID NO: 588761 - DNA, 25 bp, Homo sapien
gaaagaagcatctgccgtgtcctgc

SEQ ID NO: 588762 - DNA, 25 bp, Homo sapien
gctgcaggtaggttttaaagactca

SEQ ID NO: 588763 - DNA, 25 bp, Homo sapien
tgcaagggtgaaatcccgccttact

SEQ ID NO: 588764 - DNA, 25 bp, Homo sapien
taaagactcataattcagaaaccat

SEQ ID NO: 588765 - DNA, 25 bp, Homo sapien
attcagtattaaccacaggagagga

SEQ ID NO: 588766 - DNA, 25 bp, Homo sapien
gctgtacttatacccttctttggat

SEQ ID NO: 588767 - DNA, 25 bp, Homo sapien
tttgctgcatgacttgcaagatgct

SEQ ID NO: 588768 - DNA, 25 bp, Homo sapien
gttggcaatgagcaacttcttctct

SEQ ID NO: 588769 - DNA, 25 bp, Homo sapien
ccactgcacctcagagttggcaatg

SEQ ID NO: 588770 - DNA, 25 bp, Homo sapien
cctagattttcatgctgagtagacg

SEQ ID NO: 588771 - DNA, 25 bp, Homo sapien
cctcctagattttcatgctgagtag

SEQ ID NO: 588772 - DNA, 25 bp, Homo sapien
gattttcatgctgagtagacgggct

SEQ ID NO: 588773 - DNA, 25 bp, Homo sapien
ttcatgctgagtagacgggcttgga

SEQ ID NO: 588774 - DNA, 25 bp, Homo sapien
tgctggggaacagccatgcaggttt

SEQ ID NO: 588775 - DNA, 25 bp, Homo sapien
tctgctggggaacagccatgcaggt

SEQ ID NO: 588776 - DNA, 25 bp, Homo sapien
tggggaacagccatgcaggtttgct

SEQ ID NO: 588777 - DNA, 25 bp, Homo sapien
tgcaggtttgctgagcaaatcccat

SEQ ID NO: 588778 - DNA, 25 bp, Homo sapien
gaacacacagactcagctggtacat

SEQ ID NO: 588779 - DNA, 25 bp, Homo sapien
tgtttgccatttagtgtgctccacc

SEQ ID NO: 588780 - DNA, 25 bp, Homo sapien
gactcagctggtacatttgtttgcc

SEQ ID NO: 588781 - DNA, 25 bp, Homo sapien
gccatttagtgtgctccacccttct

SEQ ID NO: 588782 - DNA, 25 bp, Homo sapien
tgagcaagcccactccaaaaatacc

SEQ ID NO: 588783 - DNA, 25 bp, Homo sapien
ggccagcgagatgtctgctgggaga

SEQ ID NO: 588784 - DNA, 25 bp, Homo sapien
gctagcagtggtcatagggtagggt

SEQ ID NO: 588785 - DNA, 25 bp, Homo sapien
ttgtcccccagccactttgcagcta

SEQ ID NO: 588786 - DNA, 25 bp, Homo sapien
aataaaggttgagagaaattcctgt

SEQ ID NO: 588787 - DNA, 25 bp, Homo sapien
catggaagacctcagaaattgaggc

SEQ ID NO: 588788 - DNA, 25 bp, Homo sapien
aaataaaggttgagagaaattcctg

SEQ ID NO: 588789 - DNA, 25 bp, Homo sapien
gtgccatggaagacctcagaaattg

SEQ ID NO: 588790 - DNA, 25 bp, Homo sapien
gagaggcctcctggtctcctttggg

SEQ ID NO: 588791 - DNA, 25 bp, Homo sapien
accctcctcagatgaatcaggagag

SEQ ID NO: 588792 - DNA, 25 bp, Homo sapien
caaaccctcctcagatgaatcagga

SEQ ID NO: 588793 - DNA, 25 bp, Homo sapien
cctcagatgaatcaggagaggcctc

SEQ ID NO: 588794 - DNA, 25 bp, Homo sapien
tacggagaaagatagagatttggct

SEQ ID NO: 588795 - DNA, 25 bp, Homo sapien
gtaagtggaaggacacttcccagcc

SEQ ID NO: 588796 - DNA, 25 bp, Homo sapien
aaacagggagagaacctattatacg

SEQ ID NO: 588797 - DNA, 25 bp, Homo sapien
gatttggctgccgaaaagctccaag

SEQ ID NO: 588798 - DNA, 25 bp, Homo sapien
gcctgtctttactatttccatactg

SEQ ID NO: 588799 - DNA, 25 bp, Homo sapien
gtctttactatttccatactgtcac

SEQ ID NO: 588800 - DNA, 25 bp, Homo sapien
tttactatttccatactgtcacaaa

SEQ ID NO: 588801 - DNA, 25 bp, Homo sapien
tttgggcctgtctttactatttcca

SEQ ID NO: 588802 - DNA, 25 bp, Homo sapien
ctggtaatagatattttcctgtatg

SEQ ID NO: 588803 - DNA, 25 bp, Homo sapien
taatagatattttcctgtatggtta

SEQ ID NO: 588804 - DNA, 25 bp, Homo sapien
ggtaatagatattttcctgtatggt

SEQ ID NO: 588805 - DNA, 25 bp, Homo sapien
aatagatattttcctgtatggttac

SEQ ID NO: 588806 - DNA, 25 bp, Homo sapien
gatcagtgccagggcgttggaacaa

SEQ ID NO: 588807 - DNA, 25 bp, Homo sapien
cactggatcagtgccagggcgttgg

SEQ ID NO: 588808 - DNA, 25 bp, Homo sapien
tgccagggcgttggaacaagtcctc

SEQ ID NO: 588809 - DNA, 25 bp, Homo sapien
cagtgccagggcgttggaacaagtc

SEQ ID NO: 588810 - DNA, 25 bp, Homo sapien
agccacagttggcggttaggcaacg

SEQ ID NO: 588811 - DNA, 25 bp, Homo sapien
cctccgatgcggttcctgtgctcag

SEQ ID NO: 588812 - DNA, 25 bp, Homo sapien
ttagcttgggttccctccgatgcgg

SEQ ID NO: 588813 - DNA, 25 bp, Homo sapien
ttaggcaacgggcactcacctcctg

SEQ ID NO: 588814 - DNA, 25 bp, Homo sapien
tctggatttgtttatgtgaacatcc

SEQ ID NO: 588815 - DNA, 25 bp, Homo sapien
caagtgggggttttctgctcagtat

SEQ ID NO: 588816 - DNA, 25 bp, Homo sapien
tctgctcagtattttgctctggatt

SEQ ID NO: 588817 - DNA, 25 bp, Homo sapien
gttttctgctcagtattttgctctg

SEQ ID NO: 588818 - DNA, 25 bp, Homo sapien
aggcatctctgggataccggtatga

SEQ ID NO: 588819 - DNA, 25 bp, Homo sapien
ccggtatgaccataaagcagaactc

SEQ ID NO: 588820 - DNA, 25 bp, Homo sapien
gcaagtttcagattcaggcatctct

SEQ ID NO: 588821 - DNA, 25 bp, Homo sapien
tcagcgagcaagtttcagattcagg

SEQ ID NO: 588822 - DNA, 25 bp, Homo sapien
tgagacccagtgaaaccatcccgtc

SEQ ID NO: 588823 - DNA, 25 bp, Homo sapien
ttcttaagaaggaccagggatgcac

SEQ ID NO: 588824 - DNA, 25 bp, Homo sapien
gaccttgaacgcagattcttaagaa

SEQ ID NO: 588825 - DNA, 25 bp, Homo sapien
acaatcacagagcatccataacgac

SEQ ID NO: 588826 - DNA, 25 bp, Homo sapien
agagagcctggacattgcactcctg

SEQ ID NO: 588827 - DNA, 25 bp, Homo sapien
cttccccctcgtagcgctctggctc

SEQ ID NO: 588828 - DNA, 25 bp, Homo sapien
gcctggacattgcactcctgatgcc

SEQ ID NO: 588829 - DNA, 25 bp, Homo sapien
cctggacgcacacccgcgggcactg

SEQ ID NO: 588830 - DNA, 25 bp, Homo sapien
agaagctggtagggcttggaggaaa

SEQ ID NO: 588831 - DNA, 25 bp, Homo sapien
gaagcagagaagctggtagggcttg

SEQ ID NO: 588832 - DNA, 25 bp, Homo sapien
agagaagctggtagggcttggagga

SEQ ID NO: 588833 - DNA, 25 bp, Homo sapien
agcagagaagctggtagggcttgga

SEQ ID NO: 588834 - DNA, 25 bp, Homo sapien
tggattcagtttccagtttgccagg

SEQ ID NO: 588835 - DNA, 25 bp, Homo sapien
tttgccagggcctcagcaaattctt

SEQ ID NO: 588836 - DNA, 25 bp, Homo sapien
gtgcacctgtttcctggtaaacttc

SEQ ID NO: 588837 - DNA, 25 bp, Homo sapien
aaattcttccttttgtgcacctgtt

SEQ ID NO: 588838 - DNA, 25 bp, Homo sapien
tttcattctcataccaaacaagtgc

SEQ ID NO: 588839 - DNA, 25 bp, Homo sapien
gcatttttaagaactcgcgagagtc

SEQ ID NO: 588840 - DNA, 25 bp, Homo sapien
taagaactcgcgagagtcttgctac

SEQ ID NO: 588841 - DNA, 25 bp, Homo sapien
aggcttgcccattgaagattggttc

SEQ ID NO: 588842 - DNA, 25 bp, Homo sapien
caattatagtggagacatcttcgca

SEQ ID NO: 588843 - DNA, 25 bp, Homo sapien
tagtggagacatcttcgcatttggg

SEQ ID NO: 588844 - DNA, 25 bp, Homo sapien
gaaggggccgtttgtgattgctcaa

SEQ ID NO: 588845 - DNA, 25 bp, Homo sapien
tgattgctcaattatagtggagaca

SEQ ID NO: 588846 - DNA, 25 bp, Homo sapien
cttattccacatgggtgttcaacgg

SEQ ID NO: 588847 - DNA, 25 bp, Homo sapien
cagtgagctcaccttcactccttat

SEQ ID NO: 588848 - DNA, 25 bp, Homo sapien
cagccctggtctgcgggacgctgct

SEQ ID NO: 588849 - DNA, 25 bp, Homo sapien
gaaggtggaactggcatcgagtgca

SEQ ID NO: 588850 - DNA, 25 bp, Homo sapien
ttggctggaagcccgcaacccttct

SEQ ID NO: 588851 - DNA, 25 bp, Homo sapien
tgaacctgaactttcagtgagggta

SEQ ID NO: 588852 - DNA, 25 bp, Homo sapien
tggaagcccgcaacccttctctctc

SEQ ID NO: 588853 - DNA, 25 bp, Homo sapien
tgaactttcagtgagggtaaagctt

SEQ ID NO: 588854 - DNA, 25 bp, Homo sapien
aaccaggtctttgcacctacaggaa

SEQ ID NO: 588855 - DNA, 25 bp, Homo sapien
tgttccctccttccatggatggagt

SEQ ID NO: 588856 - DNA, 25 bp, Homo sapien
ggtctttgcacctacaggaagcccc

SEQ ID NO: 588857 - DNA, 25 bp, Homo sapien
cgtgactggtgttccctccttccat

SEQ ID NO: 588858 - DNA, 25 bp, Homo sapien
tggccctaggcatcgtgctacagtg

SEQ ID NO: 588859 - DNA, 25 bp, Homo sapien
tgaggtgccttacagaggaaatcca

SEQ ID NO: 588860 - DNA, 25 bp, Homo sapien
gattcacactataccaccaacaagg

SEQ ID NO: 588861 - DNA, 25 bp, Homo sapien
tgctacagtgctggctagagttccc

SEQ ID NO: 588862 - DNA, 25 bp, Homo sapien
aagcccattcgagaatcattatcac

SEQ ID NO: 588863 - DNA, 25 bp, Homo sapien
ccatggagaagtgccccaaagcctt

SEQ ID NO: 588864 - DNA, 25 bp, Homo sapien
ggtgccttaggtcatgttgctcgtc

SEQ ID NO: 588865 - DNA, 25 bp, Homo sapien
ggcggcttatcacttctgaagggtc

SEQ ID NO: 588866 - DNA, 25 bp, Homo sapien
gatgctctatcagcctgacgactcc

SEQ ID NO: 588867 - DNA, 25 bp, Homo sapien
tcagatgctctatcagcctgacgac

SEQ ID NO: 588868 - DNA, 25 bp, Homo sapien
ttttaacttcccgtcagatgctcta

SEQ ID NO: 588869 - DNA, 25 bp, Homo sapien
ttcccgtcagatgctctatcagcct

SEQ ID NO: 588870 - DNA, 25 bp, Homo sapien
gcagctggtgaggtttccacaacaa

SEQ ID NO: 588871 - DNA, 25 bp, Homo sapien
gatggccggagcttacagagagcca

SEQ ID NO: 588872 - DNA, 25 bp, Homo sapien
gctttcggatggaggtgcattccca

SEQ ID NO: 588873 - DNA, 25 bp, Homo sapien
ttcagctggagcatcatggtcaacc

SEQ ID NO: 588874 - DNA, 25 bp, Homo sapien
agcatgccgtgcgttatttaaaacc

SEQ ID NO: 588875 - DNA, 25 bp, Homo sapien
ctgctgggttttcagagtacacctg

SEQ ID NO: 588876 - DNA, 25 bp, Homo sapien
agtacacctgaattagagcatgccg

SEQ ID NO: 588877 - DNA, 25 bp, Homo sapien
tatagaagcctctcttgggttccac

SEQ ID NO: 588878 - DNA, 25 bp, Homo sapien
tctcggtggtgttcatggttcccct

SEQ ID NO: 588879 - DNA, 25 bp, Homo sapien
ggtggtgttcatggttcccctgcat

SEQ ID NO: 588880 - DNA, 25 bp, Homo sapien
cttcatcatcatctcggtggtgttc

SEQ ID NO: 588881 - DNA, 25 bp, Homo sapien
tcatcatctcggtggtgttcatggt

SEQ ID NO: 588882 - DNA, 25 bp, Homo sapien
ctcagaatccccatgatgcagtcca

SEQ ID NO: 588883 - DNA, 25 bp, Homo sapien
gaatccccatgatgcagtccatgcc

SEQ ID NO: 588884 - DNA, 25 bp, Homo sapien
cctgaagtctgattatctctgtcct

SEQ ID NO: 588885 - DNA, 25 bp, Homo sapien
gaagtctgattatctctgtcctcag

SEQ ID NO: 588886 - DNA, 25 bp, Homo sapien
tgaagaaggtggaatacttcagagg

SEQ ID NO: 588887 - DNA, 25 bp, Homo sapien
gactgagttctgtttaaggagcagc

SEQ ID NO: 588888 - DNA, 25 bp, Homo sapien
gagttctgtttaaggagcagccaga

SEQ ID NO: 588889 - DNA, 25 bp, Homo sapien
agggggttgaggtctaaagatctca

SEQ ID NO: 588890 - DNA, 25 bp, Homo sapien
aggctgcccacccagcttgtacctc

SEQ ID NO: 588891 - DNA, 25 bp, Homo sapien
tgcccacccagcttgtacctctggc

SEQ ID NO: 588892 - DNA, 25 bp, Homo sapien
ctccaactctgagcacaaagagggc

SEQ ID NO: 588893 - DNA, 25 bp, Homo sapien
ttttcctccaactctgagcacaaag

SEQ ID NO: 588894 - DNA, 25 bp, Homo sapien
aaacggtggctcagaaggcacagga

SEQ ID NO: 588895 - DNA, 25 bp, Homo sapien
tgggatggccaagaacctgtcaagc

SEQ ID NO: 588896 - DNA, 25 bp, Homo sapien
aaaacaatgctagggcctgcgtggc

SEQ ID NO: 588897 - DNA, 25 bp, Homo sapien
ccatacctgggcttggccaaaagca

SEQ ID NO: 588898 - DNA, 25 bp, Homo sapien
tctcccgaattgtgctcccagctgg

SEQ ID NO: 588899 - DNA, 25 bp, Homo sapien
gagggctctgaaactctcccgaatt

SEQ ID NO: 588900 - DNA, 25 bp, Homo sapien
ccagtggatcttagagtggctctgc

SEQ ID NO: 588901 - DNA, 25 bp, Homo sapien
cagaggtgcccgtgaatgggagagc

SEQ ID NO: 588902 - DNA, 25 bp, Homo sapien
tggccgagaagtggccgagtgccat

SEQ ID NO: 588903 - DNA, 25 bp, Homo sapien
tgtggccgagaagtggccgagtgcc

SEQ ID NO: 588904 - DNA, 25 bp, Homo sapien
gtggccgagaagtggccgagtgcca

SEQ ID NO: 588905 - DNA, 25 bp, Homo sapien
gtggcatgttggcacccggcccagg

SEQ ID NO: 588906 - DNA, 25 bp, Homo sapien
agctgcctcgctgtggcatgttggc

SEQ ID NO: 588907 - DNA, 25 bp, Homo sapien
tgtggcatgttggcacccggcccag

SEQ ID NO: 588908 - DNA, 25 bp, Homo sapien
aggccgagctgcctcgctgtggcat

SEQ ID NO: 588909 - DNA, 25 bp, Homo sapien
ttgtgttccccgaatagcccataag

SEQ ID NO: 588910 - DNA, 25 bp, Homo sapien
ccctgagtcattggcttgtgttccc

SEQ ID NO: 588911 - DNA, 25 bp, Homo sapien
cacacaggccaaggacttttgactg

SEQ ID NO: 588912 - DNA, 25 bp, Homo sapien
gaatagcccataagtctctcaaggc

SEQ ID NO: 588913 - DNA, 25 bp, Homo sapien
tggcccagatgtagctgagaatccc

SEQ ID NO: 588914 - DNA, 25 bp, Homo sapien
taaatgagtggtctgccctgatctg

SEQ ID NO: 588915 - DNA, 25 bp, Homo sapien
tgtctggagtcagagtcattgcctg

SEQ ID NO: 588916 - DNA, 25 bp, Homo sapien
agaatgaattgatgggaccctttgc

SEQ ID NO: 588917 - DNA, 25 bp, Homo sapien
ggcaccagcagggtcgagcctgtct

SEQ ID NO: 588918 - DNA, 25 bp, Homo sapien
caatctccgagcctcctgcagaggt

SEQ ID NO: 588919 - DNA, 25 bp, Homo sapien
gaggaccccatagaatgttgccgga

SEQ ID NO: 588920 - DNA, 25 bp, Homo sapien
cattgtcacggtcataactgaggac

SEQ ID NO: 588921 - DNA, 25 bp, Homo sapien
agcatgaatcttggacaatggtgct

SEQ ID NO: 588922 - DNA, 25 bp, Homo sapien
gaatcttggacaatggtgctatcaa

SEQ ID NO: 588923 - DNA, 25 bp, Homo sapien
gcatgaatcttggacaatggtgcta

SEQ ID NO: 588924 - DNA, 25 bp, Homo sapien
ttggacaatggtgctatcaattttc

SEQ ID NO: 588925 - DNA, 25 bp, Homo sapien
catggatcttagctgactgttttgg

SEQ ID NO: 588926 - DNA, 25 bp, Homo sapien
taaccctggctctcccaacataatt

SEQ ID NO: 588927 - DNA, 25 bp, Homo sapien
gttagagataaatcatcagtgcttg

SEQ ID NO: 588928 - DNA, 25 bp, Homo sapien
tacagtttaaagagcgtaacaattc

SEQ ID NO: 588929 - DNA, 25 bp, Homo sapien
gccagctgttcccaggttagaaatg

SEQ ID NO: 588930 - DNA, 25 bp, Homo sapien
ggttagaaatgactgacttcctcat

SEQ ID NO: 588931 - DNA, 25 bp, Homo sapien
ggttgctgccagctgttcccaggtt

SEQ ID NO: 588932 - DNA, 25 bp, Homo sapien
agctgttcccaggttagaaatgact

SEQ ID NO: 588933 - DNA, 25 bp, Homo sapien
gagatgatccctgacacgtccttag

SEQ ID NO: 588934 - DNA, 25 bp, Homo sapien
ccagagccctttggtctagagccct

SEQ ID NO: 588935 - DNA, 25 bp, Homo sapien
tctcagctgttgtggcccttggagt

SEQ ID NO: 588936 - DNA, 25 bp, Homo sapien
cccttggagtctgattaggagaatg

SEQ ID NO: 588937 - DNA, 25 bp, Homo sapien
tcttctcgtctcctgggatgccttt

SEQ ID NO: 588938 - DNA, 25 bp, Homo sapien
accccttagtgtgagacagccccat

SEQ ID NO: 588939 - DNA, 25 bp, Homo sapien
gctgtgacctttaaggcccagaagg

SEQ ID NO: 588940 - DNA, 25 bp, Homo sapien
gaagggctcctataagcctctgtat

SEQ ID NO: 588941 - DNA, 25 bp, Homo sapien
tgaataccgcagctttccgagcccg

SEQ ID NO: 588942 - DNA, 25 bp, Homo sapien
aactgtccctgtgcttattcttggc

SEQ ID NO: 588943 - DNA, 25 bp, Homo sapien
ttggcttccggaatcactgcatcag

SEQ ID NO: 588944 - DNA, 25 bp, Homo sapien
acaggcaggagtggcggtgaatacc

SEQ ID NO: 588945 - DNA, 25 bp, Homo sapien
ggataagtgcttccgagttcccaaa

SEQ ID NO: 588946 - DNA, 25 bp, Homo sapien
gaggataagtgcttccgagttccca

SEQ ID NO: 588947 - DNA, 25 bp, Homo sapien
ctgaggataagtgcttccgagttcc

SEQ ID NO: 588948 - DNA, 25 bp, Homo sapien
ataagtgcttccgagttcccaaaag

SEQ ID NO: 588949 - DNA, 25 bp, Homo sapien
ttctttgctggcccgttgctaccac

SEQ ID NO: 588950 - DNA, 25 bp, Homo sapien
tttgctggcccgttgctaccaccta

SEQ ID NO: 588951 - DNA, 25 bp, Homo sapien
gcttctttgctggcccgttgctacc

SEQ ID NO: 588952 - DNA, 25 bp, Homo sapien
gctggcccgttgctaccacctattg

SEQ ID NO: 588953 - DNA, 25 bp, Homo sapien
tttattcgacaacaggaatgtggga

SEQ ID NO: 588954 - DNA, 25 bp, Homo sapien
catattatccacactgacgcggctg

SEQ ID NO: 588955 - DNA, 25 bp, Homo sapien
caggcaagtcaagctttgtgagtgc

SEQ ID NO: 588956 - DNA, 25 bp, Homo sapien
tgggataaaaggtgtcaggcaagtc

SEQ ID NO: 588957 - DNA, 25 bp, Homo sapien
tcattggttgggctggcttgagcct

SEQ ID NO: 588958 - DNA, 25 bp, Homo sapien
ggttgggctggcttgagcctgtcct

SEQ ID NO: 588959 - DNA, 25 bp, Homo sapien
tgtttgtggagtcattggttgggct

SEQ ID NO: 588960 - DNA, 25 bp, Homo sapien
tgtgtttgtggagtcattggttggg

SEQ ID NO: 588961 - DNA, 25 bp, Homo sapien
ctgggtgaaacccctgtcaggctca

SEQ ID NO: 588962 - DNA, 25 bp, Homo sapien
agaagcaatggtccggaactgggtg

SEQ ID NO: 588963 - DNA, 25 bp, Homo sapien
tgcagggagaagcaatggtccggaa

SEQ ID NO: 588964 - DNA, 25 bp, Homo sapien
tgggtgaaacccctgtcaggctcat

SEQ ID NO: 588965 - DNA, 25 bp, Homo sapien
ttggcttcttgagaatccagagctg

SEQ ID NO: 588966 - DNA, 25 bp, Homo sapien
gcttcttgagaatccagagctgatt

SEQ ID NO: 588967 - DNA, 25 bp, Homo sapien
gaggtggccctcatcaaagctagct

SEQ ID NO: 588968 - DNA, 25 bp, Homo sapien
ggcttcttgagaatccagagctgat

SEQ ID NO: 588969 - DNA, 25 bp, Homo sapien
tccactgcgtcaggaacctttagat

SEQ ID NO: 588970 - DNA, 25 bp, Homo sapien
catgcagttggtgatgtccatgcaa

SEQ ID NO: 588971 - DNA, 25 bp, Homo sapien
gaaaatcttgaggacctccactgcg

SEQ ID NO: 588972 - DNA, 25 bp, Homo sapien
caattggatttgaggcgtaagagcg

SEQ ID NO: 588973 - DNA, 25 bp, Homo sapien
tatgaagttgtcttgcttggcccca

SEQ ID NO: 588974 - DNA, 25 bp, Homo sapien
tctgtctacggccagaggagaccct

SEQ ID NO: 588975 - DNA, 25 bp, Homo sapien
aggagaccctcgctgagaattcagg

SEQ ID NO: 588976 - DNA, 25 bp, Homo sapien
tcttgagcggcccaagtgccatgag

SEQ ID NO: 588977 - DNA, 25 bp, Homo sapien
agaataaagttcaggctcccatctg

SEQ ID NO: 588978 - DNA, 25 bp, Homo sapien
agttcaggctcccatctggacaggt

SEQ ID NO: 588979 - DNA, 25 bp, Homo sapien
ataaagttcaggctcccatctggac

SEQ ID NO: 588980 - DNA, 25 bp, Homo sapien
aaagttcaggctcccatctggacag

SEQ ID NO: 588981 - DNA, 25 bp, Homo sapien
ggtcatttcatgtgcgggatatgtg

SEQ ID NO: 588982 - DNA, 25 bp, Homo sapien
atttcatgtgcgggatatgtgttca

SEQ ID NO: 588983 - DNA, 25 bp, Homo sapien
aatataacccagttcgttttgcaag

SEQ ID NO: 588984 - DNA, 25 bp, Homo sapien
atataacccagttcgttttgcaagg

SEQ ID NO: 588985 - DNA, 25 bp, Homo sapien
gagaggtaaactctttgccgaaagc

SEQ ID NO: 588986 - DNA, 25 bp, Homo sapien
tgagccgtgaactcaacacccgaaa

SEQ ID NO: 588987 - DNA, 25 bp, Homo sapien
gacagggccgctcttggagctacag

SEQ ID NO: 588988 - DNA, 25 bp, Homo sapien
tgccgaaagcgggagtcaaaaagga

SEQ ID NO: 588989 - DNA, 25 bp, Homo sapien
gagtgcaacaaagttccgcttccag

SEQ ID NO: 588990 - DNA, 25 bp, Homo sapien
cgtcctctggaagcggagtgcaaca

SEQ ID NO: 588991 - DNA, 25 bp, Homo sapien
ggttcccgagctgcaggctaggctt

SEQ ID NO: 588992 - DNA, 25 bp, Homo sapien
ggtttggcaccgtatttcagcgtcc

SEQ ID NO: 588993 - DNA, 25 bp, Homo sapien
tctgctgccgagcttggaaaagtgg

SEQ ID NO: 588994 - DNA, 25 bp, Homo sapien
tggttctccccggtagcagagtccg

SEQ ID NO: 588995 - DNA, 25 bp, Homo sapien
gaaaagtggcaaggagtcgcagtcc

SEQ ID NO: 588996 - DNA, 25 bp, Homo sapien
gagtccgcgagccttcgtctcaatc

SEQ ID NO: 588997 - DNA, 25 bp, Homo sapien
aactcgtggttttgaacatgaactg

SEQ ID NO: 588998 - DNA, 25 bp, Homo sapien
gccatgcggtgagggccaagaggag

SEQ ID NO: 588999 - DNA, 25 bp, Homo sapien
ctctgaggttgagcccagtaagcac

SEQ ID NO: 589000 - DNA, 25 bp, Homo sapien
tgtgcagctaactgtgtccgggagc

SEQ ID NO: 589001 - DNA, 25 bp, Homo sapien
gctgtgcgcggcagcggagcgcgct

SEQ ID NO: 589002 - DNA, 25 bp, Homo sapien
caggcccagggtgaacttcatccga

SEQ ID NO: 589003 - DNA, 25 bp, Homo sapien
ttgggagaaattcgtctgaccggga

SEQ ID NO: 589004 - DNA, 25 bp, Homo sapien
cgccgccgcgtgagaggcatagagg

SEQ ID NO: 589005 - DNA, 25 bp, Homo sapien
atgcgccagacaagagtgagccgga

SEQ ID NO: 589006 - DNA, 25 bp, Homo sapien
ggcgcacttccaaaggtgacctgtg

SEQ ID NO: 589007 - DNA, 25 bp, Homo sapien
tccccacgcggagcgagggactgca

SEQ ID NO: 589008 - DNA, 25 bp, Homo sapien
agacagctcggagtccaagggcaaa

SEQ ID NO: 589009 - DNA, 25 bp, Homo sapien
tgcttacttgcctcgtacggtccgg

SEQ ID NO: 589010 - DNA, 25 bp, Homo sapien
tagtcccggatgtgcttgaccacgt

SEQ ID NO: 589011 - DNA, 25 bp, Homo sapien
tccacaatgcgcaagcggatggcgt

SEQ ID NO: 589012 - DNA, 25 bp, Homo sapien
ttgtacttgtcacagacgccgtcgg

SEQ ID NO: 589013 - DNA, 25 bp, Homo sapien
cataaacgtccggatgcccaggatg

SEQ ID NO: 589014 - DNA, 25 bp, Homo sapien
ctccataaacgtccggatgcccagg

SEQ ID NO: 589015 - DNA, 25 bp, Homo sapien
tttgctccataaacgtccggatgcc

SEQ ID NO: 589016 - DNA, 25 bp, Homo sapien
ctgtttgctccataaacgtccggat

SEQ ID NO: 589017 - DNA, 25 bp, Homo sapien
gaatgttcaccactccgggtggggc

SEQ ID NO: 589018 - DNA, 25 bp, Homo sapien
taaaaggtgcctccgaatctgccct

SEQ ID NO: 589019 - DNA, 25 bp, Homo sapien
tttgtaggtggcctgacactccacc

SEQ ID NO: 589020 - DNA, 25 bp, Homo sapien
acacgtgtggccaaccacccaattt

SEQ ID NO: 589021 - DNA, 25 bp, Homo sapien
gtgcggttcacgccggcccagtctt

SEQ ID NO: 589022 - DNA, 25 bp, Homo sapien
tcttgggagagtaagcggtgccttc

SEQ ID NO: 589023 - DNA, 25 bp, Homo sapien
gtatttaatgtctgcctctaaggca

SEQ ID NO: 589024 - DNA, 25 bp, Homo sapien
gcaggtttctctagcccattcactg

SEQ ID NO: 589025 - DNA, 25 bp, Homo sapien
agccgcccacggcagagagggtgga

SEQ ID NO: 589026 - DNA, 25 bp, Homo sapien
ctggttggaggccgggtaggcgcag

SEQ ID NO: 589027 - DNA, 25 bp, Homo sapien
gcgcaggcggggagaaagccgccca

SEQ ID NO: 589028 - DNA, 25 bp, Homo sapien
ttggaggccgggtaggcgcaggcgg

SEQ ID NO: 589029 - DNA, 25 bp, Homo sapien
gggcgccagaggaggaccttgcgca

SEQ ID NO: 589030 - DNA, 25 bp, Homo sapien
agaggaggaccttgcgcaggcggcc

SEQ ID NO: 589031 - DNA, 25 bp, Homo sapien
agttccccgccatgcacagctacgc

SEQ ID NO: 589032 - DNA, 25 bp, Homo sapien
gcttgaaggtcattgctgccgcgag

SEQ ID NO: 589033 - DNA, 25 bp, Homo sapien
taaaggacactgattcacatggcct

SEQ ID NO: 589034 - DNA, 25 bp, Homo sapien
tttcccacagtgtgtatttaagaaa

SEQ ID NO: 589035 - DNA, 25 bp, Homo sapien
gacactgattcacatggcctctact

SEQ ID NO: 589036 - DNA, 25 bp, Homo sapien
catggcctctactttcccacagtgt

SEQ ID NO: 589037 - DNA, 25 bp, Homo sapien
cacacttcaaagtgaggacctgttt

SEQ ID NO: 589038 - DNA, 25 bp, Homo sapien
gtggacacacacttcaaagtgagga

SEQ ID NO: 589039 - DNA, 25 bp, Homo sapien
cttttctttctaccgtggacacaca

SEQ ID NO: 589040 - DNA, 25 bp, Homo sapien
tctttctaccgtggacacacacttc

SEQ ID NO: 589041 - DNA, 25 bp, Homo sapien
tggagcgcctcgatttgaagtaagg

SEQ ID NO: 589042 - DNA, 25 bp, Homo sapien
agcttggagcgcctcgatttgaagt

SEQ ID NO: 589043 - DNA, 25 bp, Homo sapien
cagcctcaggcgcaacttgctgtgg

SEQ ID NO: 589044 - DNA, 25 bp, Homo sapien
aacttgctgtggctgcgcagagctg

SEQ ID NO: 589045 - DNA, 25 bp, Homo sapien
gccacgattgcgcaagcctgttttt

SEQ ID NO: 589046 - DNA, 25 bp, Homo sapien
gaagccagaaagtgacgccacgatt

SEQ ID NO: 589047 - DNA, 25 bp, Homo sapien
tgggcctccggattaagtgacagtg

SEQ ID NO: 589048 - DNA, 25 bp, Homo sapien
caagttttgccaccggaagccagaa

SEQ ID NO: 589049 - DNA, 25 bp, Homo sapien
gaacaggactctaacgttgcgcgga

SEQ ID NO: 589050 - DNA, 25 bp, Homo sapien
gacttccgcagaagggaacaggact

SEQ ID NO: 589051 - DNA, 25 bp, Homo sapien
ttcaggtctgatggcgacttccgca

SEQ ID NO: 589052 - DNA, 25 bp, Homo sapien
gaagagcagccaatgcgtcgagtcc

SEQ ID NO: 589053 - DNA, 25 bp, Homo sapien
tccagagaccccaagcttccgtggg

SEQ ID NO: 589054 - DNA, 25 bp, Homo sapien
gagccacttgcaaggagagccttgg

SEQ ID NO: 589055 - DNA, 25 bp, Homo sapien
gtgaagcagagactcgcgctctcca

SEQ ID NO: 589056 - DNA, 25 bp, Homo sapien
ggtgcaattcccgttgccgtccaac

SEQ ID NO: 589057 - DNA, 25 bp, Homo sapien
ctagcgccgcgcagtgcgagaggca

SEQ ID NO: 589058 - DNA, 25 bp, Homo sapien
cagagcgaggtcgtgagcgctcaac

SEQ ID NO: 589059 - DNA, 25 bp, Homo sapien
gcactgggactcaggacgcctgcag

SEQ ID NO: 589060 - DNA, 25 bp, Homo sapien
cgcgcagtgcgagaggcactgggac

SEQ ID NO: 589061 - DNA, 25 bp, Homo sapien
ccgtgtaagctactgagggcgtccg

SEQ ID NO: 589062 - DNA, 25 bp, Homo sapien
tgggcagtccgtgtaagctactgag

SEQ ID NO: 589063 - DNA, 25 bp, Homo sapien
cgggatgggcagtccgtgtaagcta

SEQ ID NO: 589064 - DNA, 25 bp, Homo sapien
cagtccgtgtaagctactgagggcg

SEQ ID NO: 589065 - DNA, 25 bp, Homo sapien
tgtgcgcccgggtccgcctgccgtt

SEQ ID NO: 589066 - DNA, 25 bp, Homo sapien
gatcctgcccgtgccgattgccggg

SEQ ID NO: 589067 - DNA, 25 bp, Homo sapien
cccgcgggccggcactggcttcctc

SEQ ID NO: 589068 - DNA, 25 bp, Homo sapien
ttcctcctccgcgagtcctccgatc

SEQ ID NO: 589069 - DNA, 25 bp, Homo sapien
aggaagtgtggtgggtccggccaga

SEQ ID NO: 589070 - DNA, 25 bp, Homo sapien
gttcagagaagcctaaaaacccaga

SEQ ID NO: 589071 - DNA, 25 bp, Homo sapien
agtgtggtgggtccggccagaggca

SEQ ID NO: 589072 - DNA, 25 bp, Homo sapien
cagagaagcctaaaaacccagacca

SEQ ID NO: 589073 - DNA, 25 bp, Homo sapien
tagggcccttgacagtagaaccaga

SEQ ID NO: 589074 - DNA, 25 bp, Homo sapien
gtcggattccctagcaagtgttgcg

SEQ ID NO: 589075 - DNA, 25 bp, Homo sapien
tgcattatgtccagggtaccaccac

SEQ ID NO: 589076 - DNA, 25 bp, Homo sapien
cgatgtcaggctctcgccagggata

SEQ ID NO: 589077 - DNA, 25 bp, Homo sapien
caaattattctacctgacgtggtgc

SEQ ID NO: 589078 - DNA, 25 bp, Homo sapien
tcatttaaagcacgaagctggccct

SEQ ID NO: 589079 - DNA, 25 bp, Homo sapien
tgaagctggtggtacgcaaagagca

SEQ ID NO: 589080 - DNA, 25 bp, Homo sapien
cacagatccatacgaacaaagagca

SEQ ID NO: 589081 - DNA, 25 bp, Homo sapien
tttcttcacacaaggttttcccgca

SEQ ID NO: 589082 - DNA, 25 bp, Homo sapien
tcagtgatctgtagaacaactcggg

SEQ ID NO: 589083 - DNA, 25 bp, Homo sapien
tttggcagggaagttattacaatcc

SEQ ID NO: 589084 - DNA, 25 bp, Homo sapien
gaagggcaaaacttcatgcctcttg

SEQ ID NO: 589085 - DNA, 25 bp, Homo sapien
gacgaggtctctgcacaccagttct

SEQ ID NO: 589086 - DNA, 25 bp, Homo sapien
cgttttccaagcaggacgaggtctc

SEQ ID NO: 589087 - DNA, 25 bp, Homo sapien
ccataatcattgcactaaagtcagc

SEQ ID NO: 589088 - DNA, 25 bp, Homo sapien
cccctggaggtgaatgcgttttcca

SEQ ID NO: 589089 - DNA, 25 bp, Homo sapien
atacactgggctcctgcgcaaagat

SEQ ID NO: 589090 - DNA, 25 bp, Homo sapien
cactgggctcctgcgcaaagatccc

SEQ ID NO: 589091 - DNA, 25 bp, Homo sapien
gtatacactgggctcctgcgcaaag

SEQ ID NO: 589092 - DNA, 25 bp, Homo sapien
tacactgggctcctgcgcaaagatc

SEQ ID NO: 589093 - DNA, 25 bp, Homo sapien
gtcttcctggaagggcaaccttgcc

SEQ ID NO: 589094 - DNA, 25 bp, Homo sapien
cacaagcagcacgaagtgtggtgga

SEQ ID NO: 589095 - DNA, 25 bp, Homo sapien
tggtggatggactgcgtcctctgca

SEQ ID NO: 589096 - DNA, 25 bp, Homo sapien
tcccaaatggccgtggctcagatcc

SEQ ID NO: 589097 - DNA, 25 bp, Homo sapien
cgcagaggtttccaaaaaaatggcg

SEQ ID NO: 589098 - DNA, 25 bp, Homo sapien
ccaaaaaaatggcgctaaggctgag

SEQ ID NO: 589099 - DNA, 25 bp, Homo sapien
aaaaaaatggcgctaaggctgagag

SEQ ID NO: 589100 - DNA, 25 bp, Homo sapien
ttccaaaaaaatggcgctaaggctg

SEQ ID NO: 589101 - DNA, 25 bp, Homo sapien
tcttttgcgcttcagcctgcgcatt

SEQ ID NO: 589102 - DNA, 25 bp, Homo sapien
ttgcgcttcagcctgcgcattcgct

SEQ ID NO: 589103 - DNA, 25 bp, Homo sapien
tgcgcttcagcctgcgcattcgctt

SEQ ID NO: 589104 - DNA, 25 bp, Homo sapien
tcttcttttgcgcttcagcctgcgc

SEQ ID NO: 589105 - DNA, 25 bp, Homo sapien
attatatggttgttacactcggcca

SEQ ID NO: 589106 - DNA, 25 bp, Homo sapien
tatatggttgttacactcggccaca

SEQ ID NO: 589107 - DNA, 25 bp, Homo sapien
ttatatggttgttacactcggccac

SEQ ID NO: 589108 - DNA, 25 bp, Homo sapien
tattatatggttgttacactcggcc

SEQ ID NO: 589109 - DNA, 25 bp, Homo sapien
ggcttctccctcatcgtactcagtg

SEQ ID NO: 589110 - DNA, 25 bp, Homo sapien
ccacacccaaccctgaggcagcatt

SEQ ID NO: 589111 - DNA, 25 bp, Homo sapien
catccacacccaaccctgaggcagc

SEQ ID NO: 589112 - DNA, 25 bp, Homo sapien
gaggcagcattctccatgtggctcc

SEQ ID NO: 589113 - DNA, 25 bp, Homo sapien
taaaagtccccattccaatgttgct

SEQ ID NO: 589114 - DNA, 25 bp, Homo sapien
gaagaagaagagacactaaaagtcc

SEQ ID NO: 589115 - DNA, 25 bp, Homo sapien
gaagagacactaaaagtccccattc

SEQ ID NO: 589116 - DNA, 25 bp, Homo sapien
gacactaaaagtccccattccaatg

SEQ ID NO: 589117 - DNA, 25 bp, Homo sapien
ccaaaaacccagagatctcacttgc

SEQ ID NO: 589118 - DNA, 25 bp, Homo sapien
agagatctcacttgcccagagctca

SEQ ID NO: 589119 - DNA, 25 bp, Homo sapien
aaaacccagagatctcacttgccca

SEQ ID NO: 589120 - DNA, 25 bp, Homo sapien
gagatctcacttgcccagagctcag

SEQ ID NO: 589121 - DNA, 25 bp, Homo sapien
gcatggtctcttgtgtgcccaattt

SEQ ID NO: 589122 - DNA, 25 bp, Homo sapien
cagtcccatttcgtacagatgatgt

SEQ ID NO: 589123 - DNA, 25 bp, Homo sapien
cccatttcgtacagatgatgtcccc

SEQ ID NO: 589124 - DNA, 25 bp, Homo sapien
cctccataaccatgcataaaagcat

SEQ ID NO: 589125 - DNA, 25 bp, Homo sapien
taagtgaataaactagacaaccctg

SEQ ID NO: 589126 - DNA, 25 bp, Homo sapien
tgcaaaggtgcaagagtacacagac

SEQ ID NO: 589127 - DNA, 25 bp, Homo sapien
tgatcatagaaaagatccaacagga

SEQ ID NO: 589128 - DNA, 25 bp, Homo sapien
taagaaaactcaatgtgcaaaggtg

SEQ ID NO: 589129 - DNA, 25 bp, Homo sapien
cacatgcctcaccatcaggtgtggc

SEQ ID NO: 589130 - DNA, 25 bp, Homo sapien
ggtcacatgcctcaccatcaggtgt

SEQ ID NO: 589131 - DNA, 25 bp, Homo sapien
ttccactctcacaggacgcttgttc

SEQ ID NO: 589132 - DNA, 25 bp, Homo sapien
caaagccacatggatgacccatggc

SEQ ID NO: 589133 - DNA, 25 bp, Homo sapien
ctatgcattgacatatgtgaaattc

SEQ ID NO: 589134 - DNA, 25 bp, Homo sapien
gacatatgtgaaattcttaaggaag

SEQ ID NO: 589135 - DNA, 25 bp, Homo sapien
tatgtgaaattcttaaggaagttga

SEQ ID NO: 589136 - DNA, 25 bp, Homo sapien
tacttttcaatatacttcttttgag

SEQ ID NO: 589137 - DNA, 25 bp, Homo sapien
tctatctctaaggatatattcacca

SEQ ID NO: 589138 - DNA, 25 bp, Homo sapien
ccaggcttctgctgcaataatgttg

SEQ ID NO: 589139 - DNA, 25 bp, Homo sapien
caccaggcttctgctgcaataatgt

SEQ ID NO: 589140 - DNA, 25 bp, Homo sapien
cttccctctatctctaaggatatat

SEQ ID NO: 589141 - DNA, 25 bp, Homo sapien
aaggagggtgtaagagacagactaa

SEQ ID NO: 589142 - DNA, 25 bp, Homo sapien
ctacaatcagctcatgtagggagag

SEQ ID NO: 589143 - DNA, 25 bp, Homo sapien
tggaggccagggagtaaccagattc

SEQ ID NO: 589144 - DNA, 25 bp, Homo sapien
agattccagcccagaaggtagtggg

SEQ ID NO: 589145 - DNA, 25 bp, Homo sapien
caataagatcattagccttctccac

SEQ ID NO: 589146 - DNA, 25 bp, Homo sapien
tctctgaagtttgacaatcctggac

SEQ ID NO: 589147 - DNA, 25 bp, Homo sapien
agaggtttggtactgctcaagggca

SEQ ID NO: 589148 - DNA, 25 bp, Homo sapien
ttggatccattcagcaggaattgtc

SEQ ID NO: 589149 - DNA, 25 bp, Homo sapien
gccaattcccatgaagtgactgggt

SEQ ID NO: 589150 - DNA, 25 bp, Homo sapien
catgaagtgactgggttgtttcctg

SEQ ID NO: 589151 - DNA, 25 bp, Homo sapien
caattcccatgaagtgactgggttg

SEQ ID NO: 589152 - DNA, 25 bp, Homo sapien
tcccatgaagtgactgggttgtttc

SEQ ID NO: 589153 - DNA, 25 bp, Homo sapien
taaataccacgacaatggaattcca

SEQ ID NO: 589154 - DNA, 25 bp, Homo sapien
cgggactgacaagcaggtctggctt

SEQ ID NO: 589155 - DNA, 25 bp, Homo sapien
aagtaggtctttcatctgtttgcgg

SEQ ID NO: 589156 - DNA, 25 bp, Homo sapien
ggcgctaggcgactgtgagtaaata

SEQ ID NO: 589157 - DNA, 25 bp, Homo sapien
gaaggttcctcctgcagtacatggc

SEQ ID NO: 589158 - DNA, 25 bp, Homo sapien
gaccaggttattagtgtgggcatct

SEQ ID NO: 589159 - DNA, 25 bp, Homo sapien
gcagacatgccgcagagtcgtccca

SEQ ID NO: 589160 - DNA, 25 bp, Homo sapien
aaccctatcctatcattaccagaag

SEQ ID NO: 589161 - DNA, 25 bp, Homo sapien
tcagtattcaaaccaccaccaccca

SEQ ID NO: 589162 - DNA, 25 bp, Homo sapien
ttcagtattcaaaccaccaccaccc

SEQ ID NO: 589163 - DNA, 25 bp, Homo sapien
cagtattcaaaccaccaccacccac

SEQ ID NO: 589164 - DNA, 25 bp, Homo sapien
agccaagtctttccaggccggcttt

SEQ ID NO: 589165 - DNA, 25 bp, Homo sapien
aagccaagtctttccaggccggctt

SEQ ID NO: 589166 - DNA, 25 bp, Homo sapien
aggctggcttcccagttgtggtcat

SEQ ID NO: 589167 - DNA, 25 bp, Homo sapien
aaagccaagtctttccaggccggct

SEQ ID NO: 589168 - DNA, 25 bp, Homo sapien
caagacagaatgctcattcccaaat

SEQ ID NO: 589169 - DNA, 25 bp, Homo sapien
gccaagacagaatgctcattcccaa

SEQ ID NO: 589170 - DNA, 25 bp, Homo sapien
tggccaagacagaatgctcattccc

SEQ ID NO: 589171 - DNA, 25 bp, Homo sapien
ctggccaagacagaatgctcattcc

SEQ ID NO: 589172 - DNA, 25 bp, Homo sapien
cagaactgcaactctttaaagctgt

SEQ ID NO: 589173 - DNA, 25 bp, Homo sapien
aaagctgttcgttggaagtagccct

SEQ ID NO: 589174 - DNA, 25 bp, Homo sapien
ttaaagctgttcgttggaagtagcc

SEQ ID NO: 589175 - DNA, 25 bp, Homo sapien
tgttcgttggaagtagcccttccta

SEQ ID NO: 589176 - DNA, 25 bp, Homo sapien
caattgcatgaattagtgtatacca

SEQ ID NO: 589177 - DNA, 25 bp, Homo sapien
aaaccacatgaaatatctctgcaac

SEQ ID NO: 589178 - DNA, 25 bp, Homo sapien
gcatgaattagtgtataccaatgaa

SEQ ID NO: 589179 - DNA, 25 bp, Homo sapien
tctgcaaccggatatttttattgag

SEQ ID NO: 589180 - DNA, 25 bp, Homo sapien
actctgagtttcctaattttatgaa

SEQ ID NO: 589181 - DNA, 25 bp, Homo sapien
tctgagtttcctaattttatgaaca

SEQ ID NO: 589182 - DNA, 25 bp, Homo sapien
cactctgagtttcctaattttatga

SEQ ID NO: 589183 - DNA, 25 bp, Homo sapien
ctctgagtttcctaattttatgaac

SEQ ID NO: 589184 - DNA, 25 bp, Homo sapien
cagtaactcattccacatgtacgtt

SEQ ID NO: 589185 - DNA, 25 bp, Homo sapien
tcttcgcctcaatcacttttctcag

SEQ ID NO: 589186 - DNA, 25 bp, Homo sapien
actcattccacatgtacgttaccct

SEQ ID NO: 589187 - DNA, 25 bp, Homo sapien
tcatttgtgctcttcgcctcaatca

SEQ ID NO: 589188 - DNA, 25 bp, Homo sapien
aatggtacatacagtacttactgca

SEQ ID NO: 589189 - DNA, 25 bp, Homo sapien
tacatacagtacttactgcatgcca

SEQ ID NO: 589190 - DNA, 25 bp, Homo sapien
caaaaggaatctcaaccttgaaagc

SEQ ID NO: 589191 - DNA, 25 bp, Homo sapien
ttcaaaaggaatctcaaccttgaaa

SEQ ID NO: 589192 - DNA, 25 bp, Homo sapien
caggcttactagaaacaagggtaat

SEQ ID NO: 589193 - DNA, 25 bp, Homo sapien
tcagggccagacatatggtaggatc

SEQ ID NO: 589194 - DNA, 25 bp, Homo sapien
tctggactagatggatcacataaac

SEQ ID NO: 589195 - DNA, 25 bp, Homo sapien
tccatacttatcgaccagtctgctg

SEQ ID NO: 589196 - DNA, 25 bp, Homo sapien
ggttaatcggaaatccaaatgtgca

SEQ ID NO: 589197 - DNA, 25 bp, Homo sapien
caggaatgatttgtgagcctcagta

SEQ ID NO: 589198 - DNA, 25 bp, Homo sapien
ggaaatccaaatgtgcaagacagca

SEQ ID NO: 589199 - DNA, 25 bp, Homo sapien
ccacatctgttggttaatcggaaat

SEQ ID NO: 589200 - DNA, 25 bp, Homo sapien
gtccaggaactccactagaaaaatg

SEQ ID NO: 589201 - DNA, 25 bp, Homo sapien
gcaggtcaagattcagttcatacat

SEQ ID NO: 589202 - DNA, 25 bp, Homo sapien
ccagcaggtcaagattcagttcata

SEQ ID NO: 589203 - DNA, 25 bp, Homo sapien
ataccagcaggtcaagattcagttc

SEQ ID NO: 589204 - DNA, 25 bp, Homo sapien
gatgccgttttgatgctgctccaga

SEQ ID NO: 589205 - DNA, 25 bp, Homo sapien
gaaaatgtcagcctggatacaaatt

SEQ ID NO: 589206 - DNA, 25 bp, Homo sapien
agcaggtagaaaacccaggatggaa

SEQ ID NO: 589207 - DNA, 25 bp, Homo sapien
tatcttggccattccacatcacagc

SEQ ID NO: 589208 - DNA, 25 bp, Homo sapien
tagtgatgcaggtttgatgtttgtc

SEQ ID NO: 589209 - DNA, 25 bp, Homo sapien
gatgcaggtttgatgtttgtctcag

SEQ ID NO: 589210 - DNA, 25 bp, Homo sapien
gcaggtttgatgtttgtctcagcat

SEQ ID NO: 589211 - DNA, 25 bp, Homo sapien
gaggtagtgatgcaggtttgatgtt

SEQ ID NO: 589212 - DNA, 25 bp, Homo sapien
caccgaattagccaaatcatcaagt

SEQ ID NO: 589213 - DNA, 25 bp, Homo sapien
gttcagtgtctcttcgtttcctcca

SEQ ID NO: 589214 - DNA, 25 bp, Homo sapien
ccagtgcctttcccagctgacttgt

SEQ ID NO: 589215 - DNA, 25 bp, Homo sapien
ttaaataatccattgctcccagtgc

SEQ ID NO: 589216 - DNA, 25 bp, Homo sapien
gccgggtgtcccctggaagatgtaa

SEQ ID NO: 589217 - DNA, 25 bp, Homo sapien
caatagcagatactgaaagcctggt

SEQ ID NO: 589218 - DNA, 25 bp, Homo sapien
aacaagtatcggctctggacccaaa

SEQ ID NO: 589219 - DNA, 25 bp, Homo sapien
gccagccctgagatgtaaacaagta

SEQ ID NO: 589220 - DNA, 25 bp, Homo sapien
gagttccaataataagggtcagaac

SEQ ID NO: 589221 - DNA, 25 bp, Homo sapien
ataagggtcagaaccttgtccatac

SEQ ID NO: 589222 - DNA, 25 bp, Homo sapien
cccttactgccacatggtgccttct

SEQ ID NO: 589223 - DNA, 25 bp, Homo sapien
tactgccacatggtgccttctccat

SEQ ID NO: 589224 - DNA, 25 bp, Homo sapien
cttactgccacatggtgccttctcc

SEQ ID NO: 589225 - DNA, 25 bp, Homo sapien
ctcccttactgccacatggtgcctt

SEQ ID NO: 589226 - DNA, 25 bp, Homo sapien
gacaaaagaagatggcttcctcacc

SEQ ID NO: 589227 - DNA, 25 bp, Homo sapien
caatgtgtgcaagttaagagtgcca

SEQ ID NO: 589228 - DNA, 25 bp, Homo sapien
tccttgttaggatagcttgaccatt

SEQ ID NO: 589229 - DNA, 25 bp, Homo sapien
gcttgcaccctcagatattccaggt

SEQ ID NO: 589230 - DNA, 25 bp, Homo sapien
aaagatggcagattcgagcaaaagc

SEQ ID NO: 589231 - DNA, 25 bp, Homo sapien
cagagggtccggaactgacggattg

SEQ ID NO: 589232 - DNA, 25 bp, Homo sapien
actgacggattggaaatatttgtcc

SEQ ID NO: 589233 - DNA, 25 bp, Homo sapien
ttctttacctaattgaaaagatggc

SEQ ID NO: 589234 - DNA, 25 bp, Homo sapien
ctcaggcctgcagcgagcctttcct

SEQ ID NO: 589235 - DNA, 25 bp, Homo sapien
gaacttgcgaccttatctccttgga

SEQ ID NO: 589236 - DNA, 25 bp, Homo sapien
gtggcttctttatgaattgggaatg

SEQ ID NO: 589237 - DNA, 25 bp, Homo sapien
gtaaatgtgtgagatcgctcaggcc

SEQ ID NO: 589238 - DNA, 25 bp, Homo sapien
tctgcctgaagagcactttctagca

SEQ ID NO: 589239 - DNA, 25 bp, Homo sapien
ctgcctgaagagcactttctagcat

SEQ ID NO: 589240 - DNA, 25 bp, Homo sapien
gatggtggccggatcccacaggccc

SEQ ID NO: 589241 - DNA, 25 bp, Homo sapien
tggtggccggatcccacaggcccca

SEQ ID NO: 589242 - DNA, 25 bp, Homo sapien
atggtggccggatcccacaggcccc

SEQ ID NO: 589243 - DNA, 25 bp, Homo sapien
tgatggtggccggatcccacaggcc

SEQ ID NO: 589244 - DNA, 25 bp, Homo sapien
cgcaatctggtgactcatagttgca

SEQ ID NO: 589245 - DNA, 25 bp, Homo sapien
ctgcgcaatctggtgactcatagtt

SEQ ID NO: 589246 - DNA, 25 bp, Homo sapien
caatctggtgactcatagttgcacc

SEQ ID NO: 589247 - DNA, 25 bp, Homo sapien
tctggtgactcatagttgcaccagc

SEQ ID NO: 589248 - DNA, 25 bp, Homo sapien
gaaaggtcatctgaccttaggttca

SEQ ID NO: 589249 - DNA, 25 bp, Homo sapien
cagaaaggtcatctgaccttaggtt

SEQ ID NO: 589250 - DNA, 25 bp, Homo sapien
agaaaggtcatctgaccttaggttc

SEQ ID NO: 589251 - DNA, 25 bp, Homo sapien
aaaggtcatctgaccttaggttcat

SEQ ID NO: 589252 - DNA, 25 bp, Homo sapien
taaatttcgtaagcattggctttga

SEQ ID NO: 589253 - DNA, 25 bp, Homo sapien
catgtaaatttcgtaagcattggct

SEQ ID NO: 589254 - DNA, 25 bp, Homo sapien
tcctgagccatgtaaatttcgtaag

SEQ ID NO: 589255 - DNA, 25 bp, Homo sapien
gagccatgtaaatttcgtaagcatt

SEQ ID NO: 589256 - DNA, 25 bp, Homo sapien
ctgtgaaacccagtgataccttctc

SEQ ID NO: 589257 - DNA, 25 bp, Homo sapien
tagagacagcaattgtcattttgtg

SEQ ID NO: 589258 - DNA, 25 bp, Homo sapien
gaagaacctggctgtcatctcctac

SEQ ID NO: 589259 - DNA, 25 bp, Homo sapien
ccacctgccctaaagtagctggcag

SEQ ID NO: 589260 - DNA, 25 bp, Homo sapien
agaacctggctgtcatctcctacca

SEQ ID NO: 589261 - DNA, 25 bp, Homo sapien
catcaagtagtaattggtcggcgac

SEQ ID NO: 589262 - DNA, 25 bp, Homo sapien
gactgggcactacagcaaaatggag

SEQ ID NO: 589263 - DNA, 25 bp, Homo sapien
tgatacagcagatctaaggccccaa

SEQ ID NO: 589264 - DNA, 25 bp, Homo sapien
tatccaattgagagttcctagcaca

SEQ ID NO: 589265 - DNA, 25 bp, Homo sapien
atctggtgaacttcctcagggtgaa

SEQ ID NO: 589266 - DNA, 25 bp, Homo sapien
gaagtagggcaggttcacaagcctg

SEQ ID NO: 589267 - DNA, 25 bp, Homo sapien
gaccctgtcctaggtcaccagcaca

SEQ ID NO: 589268 - DNA, 25 bp, Homo sapien
tccaactgacgccaatggctccaga

SEQ ID NO: 589269 - DNA, 25 bp, Homo sapien
aacatctaggaggaaaggccccatc

SEQ ID NO: 589270 - DNA, 25 bp, Homo sapien
gatgagcctttggtcatgactctgg

SEQ ID NO: 589271 - DNA, 25 bp, Homo sapien
agggcatccttcaagctgactgtga

SEQ ID NO: 589272 - DNA, 25 bp, Homo sapien
aaaccaccacctagaaacatctagg

SEQ ID NO: 589273 - DNA, 25 bp, Homo sapien
gtctgggactagatccagatgctcc

SEQ ID NO: 589274 - DNA, 25 bp, Homo sapien
cagggtttatatagtgccagtaatc

SEQ ID NO: 589275 - DNA, 25 bp, Homo sapien
caaaatgctttgtatctgcctgatg

SEQ ID NO: 589276 - DNA, 25 bp, Homo sapien
taacgtctgccttacactctaatgg

SEQ ID NO: 589277 - DNA, 25 bp, Homo sapien
ttcctttggacaagggaccacactc

SEQ ID NO: 589278 - DNA, 25 bp, Homo sapien
aagggaccacactcagtatacactc

SEQ ID NO: 589279 - DNA, 25 bp, Homo sapien
gagagagccgggcaggatgtcggga

SEQ ID NO: 589280 - DNA, 25 bp, Homo sapien
ccagtggtccaagcaagagcaaaga

SEQ ID NO: 589281 - DNA, 25 bp, Homo sapien
tgtgtatcccgggaaagggatcagt

SEQ ID NO: 589282 - DNA, 25 bp, Homo sapien
gaaaaacagcccatgcggtttagtc

SEQ ID NO: 589283 - DNA, 25 bp, Homo sapien
ttcctagtgctaagcagtgcccagg

SEQ ID NO: 589284 - DNA, 25 bp, Homo sapien
ccaggatcccatagagtgatggctg

SEQ ID NO: 589285 - DNA, 25 bp, Homo sapien
caatgtgacttatctcttgaggaca

SEQ ID NO: 589286 - DNA, 25 bp, Homo sapien
cattttcaagatgggttcaaccctt

SEQ ID NO: 589287 - DNA, 25 bp, Homo sapien
gcatccaacctacttgagtcctgac

SEQ ID NO: 589288 - DNA, 25 bp, Homo sapien
gctatcagcatccaacctacttgag

SEQ ID NO: 589289 - DNA, 25 bp, Homo sapien
tgggtcatcaggccggagaatcaca

SEQ ID NO: 589290 - DNA, 25 bp, Homo sapien
tgcgggagaccagggacgactcctt

SEQ ID NO: 589291 - DNA, 25 bp, Homo sapien
gctgctacaaccagcggcttctcct

SEQ ID NO: 589292 - DNA, 25 bp, Homo sapien
gctggagtgttgctgctacaaccag

SEQ ID NO: 589293 - DNA, 25 bp, Homo sapien
ccaagatcacagtgcaagcaggggt

SEQ ID NO: 589294 - DNA, 25 bp, Homo sapien
cacagtgcaagcaggggtggtttct

SEQ ID NO: 589295 - DNA, 25 bp, Homo sapien
tgagatcttgctggtcaggttgcag

SEQ ID NO: 589296 - DNA, 25 bp, Homo sapien
ggtgagatcttgctggtcaggttgc

SEQ ID NO: 589297 - DNA, 25 bp, Homo sapien
agttataatttgactcagggagccc

SEQ ID NO: 589298 - DNA, 25 bp, Homo sapien
gacaactgttgatatgggcatgagg

SEQ ID NO: 589299 - DNA, 25 bp, Homo sapien
gaacccaagaactgagctgacacag

SEQ ID NO: 589300 - DNA, 25 bp, Homo sapien
gctgacacaggcctacttgggacaa

SEQ ID NO: 589301 - DNA, 25 bp, Homo sapien
tttgactgtacattactacttggac

SEQ ID NO: 589302 - DNA, 25 bp, Homo sapien
tatgtatgtagtttgtggtgtaaac

SEQ ID NO: 589303 - DNA, 25 bp, Homo sapien
agaggaactatttctagctactttg

SEQ ID NO: 589304 - DNA, 25 bp, Homo sapien
catgtcctaaggacaagaagaactg

SEQ ID NO: 589305 - DNA, 25 bp, Homo sapien
tgtcatcacaatccaaacaagatcc

SEQ ID NO: 589306 - DNA, 25 bp, Homo sapien
ctggcagaatcctatcttcaacagg

SEQ ID NO: 589307 - DNA, 25 bp, Homo sapien
ttcaacaggcagattgtcatcacaa

SEQ ID NO: 589308 - DNA, 25 bp, Homo sapien
gatcctctcccatgagtaactggaa

SEQ ID NO: 589309 - DNA, 25 bp, Homo sapien
tgcacagctcttctgcaccagagaa

SEQ ID NO: 589310 - DNA, 25 bp, Homo sapien
caacaggaaagcgagttcagctgac

SEQ ID NO: 589311 - DNA, 25 bp, Homo sapien
ttcctctataccagcaaagtgtagg

SEQ ID NO: 589312 - DNA, 25 bp, Homo sapien
caccagagaatttggttaattcgct

SEQ ID NO: 589313 - DNA, 25 bp, Homo sapien
gtgacaagagtcagatacagctgct

SEQ ID NO: 589314 - DNA, 25 bp, Homo sapien
gctgcttgtgcatagcatctgcagg

SEQ ID NO: 589315 - DNA, 25 bp, Homo sapien
tcagtgacaagagtcagatacagct

SEQ ID NO: 589316 - DNA, 25 bp, Homo sapien
agctgcttgtgcatagcatctgcag

SEQ ID NO: 589317 - DNA, 25 bp, Homo sapien
cttcttgatgccaatattgacccat

SEQ ID NO: 589318 - DNA, 25 bp, Homo sapien
agcttcttgatgccaatattgaccc

SEQ ID NO: 589319 - DNA, 25 bp, Homo sapien
gcttcttgatgccaatattgaccca

SEQ ID NO: 589320 - DNA, 25 bp, Homo sapien
acgaatcagcaaagaggtctacttg

SEQ ID NO: 589321 - DNA, 25 bp, Homo sapien
gaacgaatcagcaaagaggtctact

SEQ ID NO: 589322 - DNA, 25 bp, Homo sapien
gaatcagcaaagaggtctacttgct

SEQ ID NO: 589323 - DNA, 25 bp, Homo sapien
ttagaacgaatcagcaaagaggtct

SEQ ID NO: 589324 - DNA, 25 bp, Homo sapien
gcttttgctcggatttctcatttct

SEQ ID NO: 589325 - DNA, 25 bp, Homo sapien
aaggaggaacgctgcttcctgttct

SEQ ID NO: 589326 - DNA, 25 bp, Homo sapien
ctatgatgtggaaaaggaggaacgc

SEQ ID NO: 589327 - DNA, 25 bp, Homo sapien
aaaaggaggaacgctgcttcctgtt

SEQ ID NO: 589328 - DNA, 25 bp, Homo sapien
ctgtgcaagaatggggtacgtctgc

SEQ ID NO: 589329 - DNA, 25 bp, Homo sapien
gcaagaatggggtacgtctgcagca

SEQ ID NO: 589330 - DNA, 25 bp, Homo sapien
atggggtacgtctgcagcacccagc

SEQ ID NO: 589331 - DNA, 25 bp, Homo sapien
aagaatggggtacgtctgcagcacc

SEQ ID NO: 589332 - DNA, 25 bp, Homo sapien
ggagtaatgacgttcagctttcact

SEQ ID NO: 589333 - DNA, 25 bp, Homo sapien
tcattcaggtagtctgcaaaatatt

SEQ ID NO: 589334 - DNA, 25 bp, Homo sapien
tatttttgataccaggagtaatgac

SEQ ID NO: 589335 - DNA, 25 bp, Homo sapien
gctgtgtcatcccacgggttcccag

SEQ ID NO: 589336 - DNA, 25 bp, Homo sapien
tctggtaggacacatactattgtag

SEQ ID NO: 589337 - DNA, 25 bp, Homo sapien
ttcctggtggccagctatacttcca

SEQ ID NO: 589338 - DNA, 25 bp, Homo sapien
tgtagtatgactgacttttccactc

SEQ ID NO: 589339 - DNA, 25 bp, Homo sapien
caacttttccgatatttcctggtgg

SEQ ID NO: 589340 - DNA, 25 bp, Homo sapien
ctcagagtcccaaatacacattaaa

SEQ ID NO: 589341 - DNA, 25 bp, Homo sapien
ggctgctgtaactcagagtcccaaa

SEQ ID NO: 589342 - DNA, 25 bp, Homo sapien
gtgaattcgctgtacaaagcctgtg

SEQ ID NO: 589343 - DNA, 25 bp, Homo sapien
agcctgtgagaaacaactgaccaaa

SEQ ID NO: 589344 - DNA, 25 bp, Homo sapien
gagacatcaggtacagggtggcttc

SEQ ID NO: 589345 - DNA, 25 bp, Homo sapien
ttagggaagctctacttcatgcttt

SEQ ID NO: 589346 - DNA, 25 bp, Homo sapien
tgtggaaatgtgaagctctggaagc

SEQ ID NO: 589347 - DNA, 25 bp, Homo sapien
acttcccatgtgattcaaaattcca

SEQ ID NO: 589348 - DNA, 25 bp, Homo sapien
ccagcaagggctcagcatagatggt

SEQ ID NO: 589349 - DNA, 25 bp, Homo sapien
tctggaagctcctgtatctggtgct

SEQ ID NO: 589350 - DNA, 25 bp, Homo sapien
catagatggtatgacctgtgtgtgt

SEQ ID NO: 589351 - DNA, 25 bp, Homo sapien
tggtgctgaaagatcctgtcctaag

SEQ ID NO: 589352 - DNA, 25 bp, Homo sapien
cttatggaacacaggtgctgtctgg

SEQ ID NO: 589353 - DNA, 25 bp, Homo sapien
ttatggaacacaggtgctgtctggc

SEQ ID NO: 589354 - DNA, 25 bp, Homo sapien
tcagccagacttctgacttggccca

SEQ ID NO: 589355 - DNA, 25 bp, Homo sapien
cagagactagctgccagttatacca

SEQ ID NO: 589356 - DNA, 25 bp, Homo sapien
ctgcagagactagctgccagttata

SEQ ID NO: 589357 - DNA, 25 bp, Homo sapien
ctggccatagtggtgtatcagttga

SEQ ID NO: 589358 - DNA, 25 bp, Homo sapien
caggctgcaattgaacaaagttgct

SEQ ID NO: 589359 - DNA, 25 bp, Homo sapien
tcaggctgcaattgaacaaagttgc

SEQ ID NO: 589360 - DNA, 25 bp, Homo sapien
agtcaggctgcaattgaacaaagtt

SEQ ID NO: 589361 - DNA, 25 bp, Homo sapien
gtcaggctgcaattgaacaaagttg

SEQ ID NO: 589362 - DNA, 25 bp, Homo sapien
tcgcatattttggtagcttcttaaa

SEQ ID NO: 589363 - DNA, 25 bp, Homo sapien
aggcttcgcatattttggtagcttc

SEQ ID NO: 589364 - DNA, 25 bp, Homo sapien
ggcttcgcatattttggtagcttct

SEQ ID NO: 589365 - DNA, 25 bp, Homo sapien
cttcgcatattttggtagcttctta

SEQ ID NO: 589366 - DNA, 25 bp, Homo sapien
aaatacaggtacttacactctattg

SEQ ID NO: 589367 - DNA, 25 bp, Homo sapien
ttactttctaacattcttatactgg

SEQ ID NO: 589368 - DNA, 25 bp, Homo sapien
cactctattgttcatctttaagatt

SEQ ID NO: 589369 - DNA, 25 bp, Homo sapien
actttctaacattcttatactggag

SEQ ID NO: 589370 - DNA, 25 bp, Homo sapien
tcagacaccctagcattaatgccgg

SEQ ID NO: 589371 - DNA, 25 bp, Homo sapien
caatactggtggcatgctgtatgca

SEQ ID NO: 589372 - DNA, 25 bp, Homo sapien
cacatgaagagtgggaaactagact

SEQ ID NO: 589373 - DNA, 25 bp, Homo sapien
aaagaatagctgttccttcgactca

SEQ ID NO: 589374 - DNA, 25 bp, Homo sapien
tctgctcagcttggaagcactttag

SEQ ID NO: 589375 - DNA, 25 bp, Homo sapien
tagttcattcaagtccagttacagt

SEQ ID NO: 589376 - DNA, 25 bp, Homo sapien
tttcagatggtagagggaacctaat

SEQ ID NO: 589377 - DNA, 25 bp, Homo sapien
aacacaggaaattccccgtgaattg

SEQ ID NO: 589378 - DNA, 25 bp, Homo sapien
ctgtgtcgggtatcacacccaccat

SEQ ID NO: 589379 - DNA, 25 bp, Homo sapien
attgaatattcacaaatgccatttg

SEQ ID NO: 589380 - DNA, 25 bp, Homo sapien
tttcatgttccttcttacaacattg

SEQ ID NO: 589381 - DNA, 25 bp, Homo sapien
ccatttgttgtttaatagtgatttc

SEQ ID NO: 589382 - DNA, 25 bp, Homo sapien
aaagacttgcctttgaggtttcagc

SEQ ID NO: 589383 - DNA, 25 bp, Homo sapien
gagccctccgctgatgacatatgag

SEQ ID NO: 589384 - DNA, 25 bp, Homo sapien
cctccaggaaggcaatagaagccgc

SEQ ID NO: 589385 - DNA, 25 bp, Homo sapien
tcaggttctgttctcgccctcgaga

SEQ ID NO: 589386 - DNA, 25 bp, Homo sapien
gccatttgcagtaggcagctgttga

SEQ ID NO: 589387 - DNA, 25 bp, Homo sapien
ctggcaggatataggtgtcagccat

SEQ ID NO: 589388 - DNA, 25 bp, Homo sapien
atttgcagtaggcagctgttgatgt

SEQ ID NO: 589389 - DNA, 25 bp, Homo sapien
gggctggcaggatataggtgtcagc

SEQ ID NO: 589390 - DNA, 25 bp, Homo sapien
ttgttttcaggggtgttagtgccat

SEQ ID NO: 589391 - DNA, 25 bp, Homo sapien
ttttcaggggtgttagtgccattga

SEQ ID NO: 589392 - DNA, 25 bp, Homo sapien
tttcaggggtgttagtgccattgac

SEQ ID NO: 589393 - DNA, 25 bp, Homo sapien
gttgttttcaggggtgttagtgcca

SEQ ID NO: 589394 - DNA, 25 bp, Homo sapien
ctttccgtccacgcattcttttctg

SEQ ID NO: 589395 - DNA, 25 bp, Homo sapien
gatccacacacgttctccagaacag

SEQ ID NO: 589396 - DNA, 25 bp, Homo sapien
tcttccgaggctgcaactgcagctt

SEQ ID NO: 589397 - DNA, 25 bp, Homo sapien
ccagaacagcatttctaccagtgtc

SEQ ID NO: 589398 - DNA, 25 bp, Homo sapien
gaaggatcttaaggccttaaggcac

SEQ ID NO: 589399 - DNA, 25 bp, Homo sapien
catgtgcttgaaggatcttaaggcc

SEQ ID NO: 589400 - DNA, 25 bp, Homo sapien
gaagtcatagtccatgtgcttgaag

SEQ ID NO: 589401 - DNA, 25 bp, Homo sapien
caagagaggcacgaagtcatagtcc

SEQ ID NO: 589402 - DNA, 25 bp, Homo sapien
caggaaggctcccttgacaggtagg

SEQ ID NO: 589403 - DNA, 25 bp, Homo sapien
tgttcgccacttgtccaaatagtaa

SEQ ID NO: 589404 - DNA, 25 bp, Homo sapien
tggactttccgtagagtaatgctct

SEQ ID NO: 589405 - DNA, 25 bp, Homo sapien
gacaggtagggaatgtggactttcc

SEQ ID NO: 589406 - DNA, 25 bp, Homo sapien
acagccctaagaggagttgcagcaa

SEQ ID NO: 589407 - DNA, 25 bp, Homo sapien
aactgggagatgagcgacacaggat

SEQ ID NO: 589408 - DNA, 25 bp, Homo sapien
aggcaaaactgtccctggaatcagt

SEQ ID NO: 589409 - DNA, 25 bp, Homo sapien
caggcaaaactgtccctggaatcag

SEQ ID NO: 589410 - DNA, 25 bp, Homo sapien
atgagcgacacaggatagggcaggg

SEQ ID NO: 589411 - DNA, 25 bp, Homo sapien
tgtttcacccaaaatgtaatacgac

SEQ ID NO: 589412 - DNA, 25 bp, Homo sapien
aagctgtgcgtgatgtctctgattt

SEQ ID NO: 589413 - DNA, 25 bp, Homo sapien
tcttttacatgagggaagtgtttcc

SEQ ID NO: 589414 - DNA, 25 bp, Homo sapien
gcttttagtatgcagcaaagctgtg

SEQ ID NO: 589415 - DNA, 25 bp, Homo sapien
ttccactttttcaggcttctgagat

SEQ ID NO: 589416 - DNA, 25 bp, Homo sapien
gttttggttcatagctacatgagac

SEQ ID NO: 589417 - DNA, 25 bp, Homo sapien
tacatgagactttccaatgacgtcc

SEQ ID NO: 589418 - DNA, 25 bp, Homo sapien
gaacatatctcattagaaggatagc

SEQ ID NO: 589419 - DNA, 25 bp, Homo sapien
aaggcttccttgtgttattccagag

SEQ ID NO: 589420 - DNA, 25 bp, Homo sapien
tccttgtgttattccagagctgggc

SEQ ID NO: 589421 - DNA, 25 bp, Homo sapien
ggcttccttgtgttattccagagct

SEQ ID NO: 589422 - DNA, 25 bp, Homo sapien
cttccttgtgttattccagagctgg

SEQ ID NO: 589423 - DNA, 25 bp, Homo sapien
catcttccatctggcaaataacatg

SEQ ID NO: 589424 - DNA, 25 bp, Homo sapien
caaacaggtctcctatacacagctc

SEQ ID NO: 589425 - DNA, 25 bp, Homo sapien
ctgcaaacaggtctcctatacacag

SEQ ID NO: 589426 - DNA, 25 bp, Homo sapien
ccatcttccatctggcaaataacat

SEQ ID NO: 589427 - DNA, 25 bp, Homo sapien
actgggctgtcccacttggatgtca

SEQ ID NO: 589428 - DNA, 25 bp, Homo sapien
ctgggctgtcccacttggatgtcat

SEQ ID NO: 589429 - DNA, 25 bp, Homo sapien
gctactgtagatccatccatgcatc

SEQ ID NO: 589430 - DNA, 25 bp, Homo sapien
tcacgctactgtagatccatccatg

SEQ ID NO: 589431 - DNA, 25 bp, Homo sapien
gaaggtcacttgagatagacacccg

SEQ ID NO: 589432 - DNA, 25 bp, Homo sapien
tacaacttgttctgtgagctcactg

SEQ ID NO: 589433 - DNA, 25 bp, Homo sapien
tagacacccgcaattccacagaggg

SEQ ID NO: 589434 - DNA, 25 bp, Homo sapien
tctgctaaccgtgtggacagcttca

SEQ ID NO: 589435 - DNA, 25 bp, Homo sapien
cagtcggccagggaaaacgaggcaa

SEQ ID NO: 589436 - DNA, 25 bp, Homo sapien
gccatccttagggctggctccacgt

SEQ ID NO: 589437 - DNA, 25 bp, Homo sapien
caccagagagaagcggatgcaggaa

SEQ ID NO: 589438 - DNA, 25 bp, Homo sapien
ggaaaacgaggcaagcaccagagag

SEQ ID NO: 589439 - DNA, 25 bp, Homo sapien
gcaagccccacggttccagaaggag

SEQ ID NO: 589440 - DNA, 25 bp, Homo sapien
tggtccctgtaatgtgaagaggcaa

SEQ ID NO: 589441 - DNA, 25 bp, Homo sapien
tgtaatgtgaagaggcaagccccac

SEQ ID NO: 589442 - DNA, 25 bp, Homo sapien
ccccacggttccagaaggagccatt

SEQ ID NO: 589443 - DNA, 25 bp, Homo sapien
gccagtcagcaaaacccatcgttgt

SEQ ID NO: 589444 - DNA, 25 bp, Homo sapien
ctggcccattagtaagtgccagtca

SEQ ID NO: 589445 - DNA, 25 bp, Homo sapien
agtgccagtcagcaaaacccatcgt

SEQ ID NO: 589446 - DNA, 25 bp, Homo sapien
gcccattagtaagtgccagtcagca

SEQ ID NO: 589447 - DNA, 25 bp, Homo sapien
ttttttctgccagcgaaccttgaca

SEQ ID NO: 589448 - DNA, 25 bp, Homo sapien
tctgccagcgaaccttgacaccttt

SEQ ID NO: 589449 - DNA, 25 bp, Homo sapien
tttctgccagcgaaccttgacacct

SEQ ID NO: 589450 - DNA, 25 bp, Homo sapien
tttcccccacaatgcaatggattcc

SEQ ID NO: 589451 - DNA, 25 bp, Homo sapien
tcagtgtatctctggacgaaaaagc

SEQ ID NO: 589452 - DNA, 25 bp, Homo sapien
gtgtatctctggacgaaaaagcaga

SEQ ID NO: 589453 - DNA, 25 bp, Homo sapien
cagtgtatctctggacgaaaaagca

SEQ ID NO: 589454 - DNA, 25 bp, Homo sapien
agtgtatctctggacgaaaaagcag

SEQ ID NO: 589455 - DNA, 25 bp, Homo sapien
tggcgtaataatgataagctctgac

SEQ ID NO: 589456 - DNA, 25 bp, Homo sapien
gggcatcgtgagtttctgttcttgt

SEQ ID NO: 589457 - DNA, 25 bp, Homo sapien
ttcttgttaagatggcccaggaagg

SEQ ID NO: 589458 - DNA, 25 bp, Homo sapien
gtagaaagagggcatcgtgagtttc

SEQ ID NO: 589459 - DNA, 25 bp, Homo sapien
cactctcgacccttcacttggttaa

SEQ ID NO: 589460 - DNA, 25 bp, Homo sapien
ggttaactgctacacatctgtcagc

SEQ ID NO: 589461 - DNA, 25 bp, Homo sapien
cgacccttcacttggttaactgcta

SEQ ID NO: 589462 - DNA, 25 bp, Homo sapien
tctagcaccacgtcctttcctggcc

SEQ ID NO: 589463 - DNA, 25 bp, Homo sapien
ggagttctctgctggcttcattcca

SEQ ID NO: 589464 - DNA, 25 bp, Homo sapien
tggagttaggagttctctgctggct

SEQ ID NO: 589465 - DNA, 25 bp, Homo sapien
ccctggagttaggagttctctgctg

SEQ ID NO: 589466 - DNA, 25 bp, Homo sapien
agttctctgctggcttcattccaca

SEQ ID NO: 589467 - DNA, 25 bp, Homo sapien
atgcatgccccactctgcaaacacc

SEQ ID NO: 589468 - DNA, 25 bp, Homo sapien
agaggttggactctgacaacagctt

SEQ ID NO: 589469 - DNA, 25 bp, Homo sapien
gaagaggttggactctgacaacagc

SEQ ID NO: 589470 - DNA, 25 bp, Homo sapien
ttaggaagaggttggactctgacaa

SEQ ID NO: 589471 - DNA, 25 bp, Homo sapien
cctgggcagtggcatgcccggtact

SEQ ID NO: 589472 - DNA, 25 bp, Homo sapien
ctccttcatccactggtgaagaagg

SEQ ID NO: 589473 - DNA, 25 bp, Homo sapien
ggcaatagttcaataattctccttc

SEQ ID NO: 589474 - DNA, 25 bp, Homo sapien
cggtactgccatactctgctcttgg

SEQ ID NO: 589475 - DNA, 25 bp, Homo sapien
atttgacagtgggatgcttcctgcc

SEQ ID NO: 589476 - DNA, 25 bp, Homo sapien
agaaaggaaccgagcccacaagatt

SEQ ID NO: 589477 - DNA, 25 bp, Homo sapien
gaaccgagcccacaagattcatttg

SEQ ID NO: 589478 - DNA, 25 bp, Homo sapien
caagattcatttgacagtgggatgc

SEQ ID NO: 589479 - DNA, 25 bp, Homo sapien
attgggtactccactcttgattgcc

SEQ ID NO: 589480 - DNA, 25 bp, Homo sapien
tggtgagatcttgtccaatggcaca

SEQ ID NO: 589481 - DNA, 25 bp, Homo sapien
ggcacaaattgggtactccactctt

SEQ ID NO: 589482 - DNA, 25 bp, Homo sapien
gaagcagcgtccagtctcatagagc

SEQ ID NO: 589483 - DNA, 25 bp, Homo sapien
gcctctgtgtgagcaggcagccagt

SEQ ID NO: 589484 - DNA, 25 bp, Homo sapien
cctctgtgtgagcaggcagccagtg

SEQ ID NO: 589485 - DNA, 25 bp, Homo sapien
ggataggacttaggcccagttctga

SEQ ID NO: 589486 - DNA, 25 bp, Homo sapien
tccccagaggggataggacttaggc

SEQ ID NO: 589487 - DNA, 25 bp, Homo sapien
ggcatccccagaagtcaggccactt

SEQ ID NO: 589488 - DNA, 25 bp, Homo sapien
catccccagaagtcaggccacttac

SEQ ID NO: 589489 - DNA, 25 bp, Homo sapien
gcatccccagaagtcaggccactta

SEQ ID NO: 589490 - DNA, 25 bp, Homo sapien
catgtgtgagcctatagtggacgaa

SEQ ID NO: 589491 - DNA, 25 bp, Homo sapien
cagaatttaattccctagcagagct

SEQ ID NO: 589492 - DNA, 25 bp, Homo sapien
cccaaatagggattcttgtgctaag

SEQ ID NO: 589493 - DNA, 25 bp, Homo sapien
tgcaacacagataagcccaagaaat

SEQ ID NO: 589494 - DNA, 25 bp, Homo sapien
tttctgtcggcttccaaattccctg

SEQ ID NO: 589495 - DNA, 25 bp, Homo sapien
gtcggcttccaaattccctgttcca

SEQ ID NO: 589496 - DNA, 25 bp, Homo sapien
acctgcgcaagcctttctgtcggct

SEQ ID NO: 589497 - DNA, 25 bp, Homo sapien
tgtgatggggtatagacctgcgcaa

SEQ ID NO: 589498 - DNA, 25 bp, Homo sapien
aaaatgcttggcaaagatccactgg

SEQ ID NO: 589499 - DNA, 25 bp, Homo sapien
aaatgcttggcaaagatccactggg

SEQ ID NO: 589500 - DNA, 25 bp, Homo sapien
aatgcttggcaaagatccactggga

SEQ ID NO: 589501 - DNA, 25 bp, Homo sapien
taaaatgcttggcaaagatccactg

SEQ ID NO: 589502 - DNA, 25 bp, Homo sapien
ccaggaccaccgacaggattttcat

SEQ ID NO: 589503 - DNA, 25 bp, Homo sapien
accacaggtacaatcgagtgatccc

SEQ ID NO: 589504 - DNA, 25 bp, Homo sapien
ggtacaatcgagtgatccccactgc

SEQ ID NO: 589505 - DNA, 25 bp, Homo sapien
cagccaggaccaccgacaggatttt

SEQ ID NO: 589506 - DNA, 25 bp, Homo sapien
ccttagatcttctgtaaagtagact

SEQ ID NO: 589507 - DNA, 25 bp, Homo sapien
aggaggctccttagatcttctgtaa

SEQ ID NO: 589508 - DNA, 25 bp, Homo sapien
ctaaggaggctccttagatcttctg

SEQ ID NO: 589509 - DNA, 25 bp, Homo sapien
tagatcttctgtaaagtagactggg

SEQ ID NO: 589510 - DNA, 25 bp, Homo sapien
cactgcattatgaaggctcaggaca

SEQ ID NO: 589511 - DNA, 25 bp, Homo sapien
ctcaggacaaggatgctcgatggca

SEQ ID NO: 589512 - DNA, 25 bp, Homo sapien
tgagttgtccttgacatatggccac

SEQ ID NO: 589513 - DNA, 25 bp, Homo sapien
taccgttgagctatgcaaatgcaca

SEQ ID NO: 589514 - DNA, 25 bp, Homo sapien
gagaaaaagggagctcggcattatt

SEQ ID NO: 589515 - DNA, 25 bp, Homo sapien
aaaacttgagtaattctccttctgc

SEQ ID NO: 589516 - DNA, 25 bp, Homo sapien
tttgtagaagagtaaacagaaccac

SEQ ID NO: 589517 - DNA, 25 bp, Homo sapien
taaacagcggaaagcaggtgctcac

SEQ ID NO: 589518 - DNA, 25 bp, Homo sapien
gatgaaactccaacatgtggctcag

SEQ ID NO: 589519 - DNA, 25 bp, Homo sapien
gacaaagggtccacattatatccat

SEQ ID NO: 589520 - DNA, 25 bp, Homo sapien
tgcactggggaagacgactcctgtg

SEQ ID NO: 589521 - DNA, 25 bp, Homo sapien
acgactcctgtgactgactctgcca

SEQ ID NO: 589522 - DNA, 25 bp, Homo sapien
ggaagggttcttgtattagccttgc

SEQ ID NO: 589523 - DNA, 25 bp, Homo sapien
gggttcttgtattagccttgcctat

SEQ ID NO: 589524 - DNA, 25 bp, Homo sapien
aaccagagtttggcctcttgggcca

SEQ ID NO: 589525 - DNA, 25 bp, Homo sapien
cagagtttggcctcttgggccacgg

SEQ ID NO: 589526 - DNA, 25 bp, Homo sapien
cattcgtgtaggattgaatatgctc

SEQ ID NO: 589527 - DNA, 25 bp, Homo sapien
caacctgtttgcatcgtggagtaga

SEQ ID NO: 589528 - DNA, 25 bp, Homo sapien
tctgactggcgcacctgcgttctca

SEQ ID NO: 589529 - DNA, 25 bp, Homo sapien
ttctgcagccgattcctcgcacagt

SEQ ID NO: 589530 - DNA, 25 bp, Homo sapien
ctggtttatagtctgcctccacagg

SEQ ID NO: 589531 - DNA, 25 bp, Homo sapien
ccacaggtattaattctgcagacat

SEQ ID NO: 589532 - DNA, 25 bp, Homo sapien
ttgagtttgcaagccctggtttata

SEQ ID NO: 589533 - DNA, 25 bp, Homo sapien
agtctcttgagtttgcaagccctgg

SEQ ID NO: 589534 - DNA, 25 bp, Homo sapien
aaaagacgccagtgcaatagcccat

SEQ ID NO: 589535 - DNA, 25 bp, Homo sapien
taacccaaaagacgccagtgcaata

SEQ ID NO: 589536 - DNA, 25 bp, Homo sapien
tcttaacccaaaagacgccagtgca

SEQ ID NO: 589537 - DNA, 25 bp, Homo sapien
tggctcttaacccaaaagacgccag

SEQ ID NO: 589538 - DNA, 25 bp, Homo sapien
catttaggaacagttgcatcccttg

SEQ ID NO: 589539 - DNA, 25 bp, Homo sapien
ttaggaacagttgcatcccttgcca

SEQ ID NO: 589540 - DNA, 25 bp, Homo sapien
tttaggaacagttgcatcccttgcc

SEQ ID NO: 589541 - DNA, 25 bp, Homo sapien
taggaacagttgcatcccttgccag

SEQ ID NO: 589542 - DNA, 25 bp, Homo sapien
cacagcacatcattcagaaaccttt

SEQ ID NO: 589543 - DNA, 25 bp, Homo sapien
cttgtcaaaaagagaccacagcaca

SEQ ID NO: 589544 - DNA, 25 bp, Homo sapien
ttgtcaaaaagagaccacagcacat

SEQ ID NO: 589545 - DNA, 25 bp, Homo sapien
acatcattcagaaacctttgtgtct

SEQ ID NO: 589546 - DNA, 25 bp, Homo sapien
gctgtgtagtgcctctttccaccag

SEQ ID NO: 589547 - DNA, 25 bp, Homo sapien
tatggcagcttttggagattttccc

SEQ ID NO: 589548 - DNA, 25 bp, Homo sapien
ggttccacctctcgttctatggcag

SEQ ID NO: 589549 - DNA, 25 bp, Homo sapien
agatggcctccactcagttttccag

SEQ ID NO: 589550 - DNA, 25 bp, Homo sapien
ctttttaaaccagctctgtgcccct

SEQ ID NO: 589551 - DNA, 25 bp, Homo sapien
tagtgggcagttggttgtggtgcct

SEQ ID NO: 589552 - DNA, 25 bp, Homo sapien
gagccctttttaaaccagctctgtg

SEQ ID NO: 589553 - DNA, 25 bp, Homo sapien
tcttcagagattgcccatgggcact

SEQ ID NO: 589554 - DNA, 25 bp, Homo sapien
ccttggaacttggtgtgatgcaaag

SEQ ID NO: 589555 - DNA, 25 bp, Homo sapien
cacattgttcaccagccttggaact

SEQ ID NO: 589556 - DNA, 25 bp, Homo sapien
cttggaacttggtgtgatgcaaagg

SEQ ID NO: 589557 - DNA, 25 bp, Homo sapien
tcctcacattgttcaccagccttgg

SEQ ID NO: 589558 - DNA, 25 bp, Homo sapien
tccgattgcttctgcatccagaaag

SEQ ID NO: 589559 - DNA, 25 bp, Homo sapien
aggaagcgcattctcagcccgatct

SEQ ID NO: 589560 - DNA, 25 bp, Homo sapien
tgaacaattttagagaccagctgct

SEQ ID NO: 589561 - DNA, 25 bp, Homo sapien
gatctcaagatctgacatgatgacc

SEQ ID NO: 589562 - DNA, 25 bp, Homo sapien
cccctgcactaccatgtacatgtga

SEQ ID NO: 589563 - DNA, 25 bp, Homo sapien
gagccttccctcagaccttgttcct

SEQ ID NO: 589564 - DNA, 25 bp, Homo sapien
cctcctgtggttattgtggctgagc

SEQ ID NO: 589565 - DNA, 25 bp, Homo sapien
ccatgtacatgtgatgccccagcag

SEQ ID NO: 589566 - DNA, 25 bp, Homo sapien
ctcgaaaggcatgccatcccacaga

SEQ ID NO: 589567 - DNA, 25 bp, Homo sapien
ggcatgccatcccacagacattttt

SEQ ID NO: 589568 - DNA, 25 bp, Homo sapien
acagccctcgaaaggcatgccatcc

SEQ ID NO: 589569 - DNA, 25 bp, Homo sapien
tctctgtgacacacagccctcgaaa

SEQ ID NO: 589570 - DNA, 25 bp, Homo sapien
aggacaacgtttgttaccttcagcg

SEQ ID NO: 589571 - DNA, 25 bp, Homo sapien
ttttctctcagacttcgtgttaaaa

SEQ ID NO: 589572 - DNA, 25 bp, Homo sapien
ggacaacgtttgttaccttcagcga

SEQ ID NO: 589573 - DNA, 25 bp, Homo sapien
tcagacttcgtgttaaaacaggctc

SEQ ID NO: 589574 - DNA, 25 bp, Homo sapien
cagaactactttggctgttggatgg

SEQ ID NO: 589575 - DNA, 25 bp, Homo sapien
ctcacagcaaacacgacgggcagct

SEQ ID NO: 589576 - DNA, 25 bp, Homo sapien
ctccagaactactttggctgttgga

SEQ ID NO: 589577 - DNA, 25 bp, Homo sapien
acacgacgggcagctatgggtgcca

SEQ ID NO: 589578 - DNA, 25 bp, Homo sapien
gcagtgaccctgtaattggacgact

SEQ ID NO: 589579 - DNA, 25 bp, Homo sapien
tgtgtccagaccaccatagagactg

SEQ ID NO: 589580 - DNA, 25 bp, Homo sapien
tgtgtaaacacagcgcagacaacag

SEQ ID NO: 589581 - DNA, 25 bp, Homo sapien
ttggcccggactaaatccgactgag

SEQ ID NO: 589582 - DNA, 25 bp, Homo sapien
caacattgtgttctaagcgtgcctt

SEQ ID NO: 589583 - DNA, 25 bp, Homo sapien
caccaagtcaacattgtgttctaag

SEQ ID NO: 589584 - DNA, 25 bp, Homo sapien
caagtcaacattgtgttctaagcgt

SEQ ID NO: 589585 - DNA, 25 bp, Homo sapien
tgttctaagcgtgcctttattccca

SEQ ID NO: 589586 - DNA, 25 bp, Homo sapien
ctccctttcatttactgctgaccgg

SEQ ID NO: 589587 - DNA, 25 bp, Homo sapien
cctttcatttactgctgaccggatc

SEQ ID NO: 589588 - DNA, 25 bp, Homo sapien
gctgaccggatcttatgggccttac

SEQ ID NO: 589589 - DNA, 25 bp, Homo sapien
atttactgctgaccggatcttatgg

SEQ ID NO: 589590 - DNA, 25 bp, Homo sapien
tatcaacaggacttcgcttggggtt

SEQ ID NO: 589591 - DNA, 25 bp, Homo sapien
tttggattggattccagaggttggc

SEQ ID NO: 589592 - DNA, 25 bp, Homo sapien
gcaaacagggcttttgttgatttat

SEQ ID NO: 589593 - DNA, 25 bp, Homo sapien
tgcatttggcttgcgttgtgcaaac

SEQ ID NO: 589594 - DNA, 25 bp, Homo sapien
agtaagatgcattgatatggcacct

SEQ ID NO: 589595 - DNA, 25 bp, Homo sapien
tagtaagatgcattgatatggcacc

SEQ ID NO: 589596 - DNA, 25 bp, Homo sapien
taagatgcattgatatggcaccttt

SEQ ID NO: 589597 - DNA, 25 bp, Homo sapien
ttagtaagatgcattgatatggcac

SEQ ID NO: 589598 - DNA, 25 bp, Homo sapien
tcagagtagagattgtataagagcc

SEQ ID NO: 589599 - DNA, 25 bp, Homo sapien
tattcaccgtggaatcaacagcctc

SEQ ID NO: 589600 - DNA, 25 bp, Homo sapien
gccacggtgtctttgccagatgtac

SEQ ID NO: 589601 - DNA, 25 bp, Homo sapien
aagagccaagccagtctgctttcaa

SEQ ID NO: 589602 - DNA, 25 bp, Homo sapien
ggttggatgctcctttgacatgcct

SEQ ID NO: 589603 - DNA, 25 bp, Homo sapien
tggatgctcctttgacatgcctcat

SEQ ID NO: 589604 - DNA, 25 bp, Homo sapien
gactgcggttggatgctcctttgac

SEQ ID NO: 589605 - DNA, 25 bp, Homo sapien
ctggagactgcggttggatgctcct

SEQ ID NO: 589606 - DNA, 25 bp, Homo sapien
tgcgggattgcttgggcgtggtgat

SEQ ID NO: 589607 - DNA, 25 bp, Homo sapien
tggtgatgtggcatggctggagtag

SEQ ID NO: 589608 - DNA, 25 bp, Homo sapien
ctgcgggattgcttgggcgtggtga

SEQ ID NO: 589609 - DNA, 25 bp, Homo sapien
tagggagccagtacactatcttgca

SEQ ID NO: 589610 - DNA, 25 bp, Homo sapien
ctagtagtacagatggctgagtctc

SEQ ID NO: 589611 - DNA, 25 bp, Homo sapien
ggtgtttgccactcagcgaagctag

SEQ ID NO: 589612 - DNA, 25 bp, Homo sapien
tcctctttagaagcaagtcctccag

SEQ ID NO: 589613 - DNA, 25 bp, Homo sapien
tggccgcttgcaggccgccaaacct

SEQ ID NO: 589614 - DNA, 25 bp, Homo sapien
cttcatgcttcccacggagaacatc

SEQ ID NO: 589615 - DNA, 25 bp, Homo sapien
tgaacttcatgcttcccacggagaa

SEQ ID NO: 589616 - DNA, 25 bp, Homo sapien
ctgtgaacttcatgcttcccacgga

SEQ ID NO: 589617 - DNA, 25 bp, Homo sapien
gtctgtggactattgtttcgtaacc

SEQ ID NO: 589618 - DNA, 25 bp, Homo sapien
tttcgtaacctttgtggctgtgtgt

SEQ ID NO: 589619 - DNA, 25 bp, Homo sapien
tccaccggggctttgcactcaacta

SEQ ID NO: 589620 - DNA, 25 bp, Homo sapien
accagccccactattgaggtttgtg

SEQ ID NO: 589621 - DNA, 25 bp, Homo sapien
aagcaaaggccattccaaacgtgaa

SEQ ID NO: 589622 - DNA, 25 bp, Homo sapien
aagatcccctctaccaacagttttg

SEQ ID NO: 589623 - DNA, 25 bp, Homo sapien
ggtaggtgccatgaaacccgaagat

SEQ ID NO: 589624 - DNA, 25 bp, Homo sapien
tgaattctgctaggtgtgctattga

SEQ ID NO: 589625 - DNA, 25 bp, Homo sapien
gatgaccgactgtcccaatttgcct

SEQ ID NO: 589626 - DNA, 25 bp, Homo sapien
agatgaccgactgtcccaatttgcc

SEQ ID NO: 589627 - DNA, 25 bp, Homo sapien
tcagatgaccgactgtcccaatttg

SEQ ID NO: 589628 - DNA, 25 bp, Homo sapien
ctcagatgaccgactgtcccaattt

SEQ ID NO: 589629 - DNA, 25 bp, Homo sapien
cctctcctagctttggtgtgccttt

SEQ ID NO: 589630 - DNA, 25 bp, Homo sapien
tttccctctcctagctttggtgtgc

SEQ ID NO: 589631 - DNA, 25 bp, Homo sapien
ttccctctcctagctttggtgtgcc

SEQ ID NO: 589632 - DNA, 25 bp, Homo sapien
tccctctcctagctttggtgtgcct

SEQ ID NO: 589633 - DNA, 25 bp, Homo sapien
aacttacagacagttgattagtgag

SEQ ID NO: 589634 - DNA, 25 bp, Homo sapien
ggtgttgccgtcttgcatcacgaag

SEQ ID NO: 589635 - DNA, 25 bp, Homo sapien
gggacatggtgttgccgtcttgcat

SEQ ID NO: 589636 - DNA, 25 bp, Homo sapien
aaaggggacatggtgttgccgtctt

SEQ ID NO: 589637 - DNA, 25 bp, Homo sapien
cttgcatcacgaagatcagggccat

SEQ ID NO: 589638 - DNA, 25 bp, Homo sapien
ggccatcacaaggtcgatgagagac

SEQ ID NO: 589639 - DNA, 25 bp, Homo sapien
gctgttgtgaatattcccgttgagg

SEQ ID NO: 589640 - DNA, 25 bp, Homo sapien
tcaaggaaaatgatgggccatcaca

SEQ ID NO: 589641 - DNA, 25 bp, Homo sapien
gaccacaatgcagggaagctgttgt

SEQ ID NO: 589642 - DNA, 25 bp, Homo sapien
atcaagccaatattgttggtttctc

SEQ ID NO: 589643 - DNA, 25 bp, Homo sapien
tcgtacgtcttttgtatattgcaaa

SEQ ID NO: 589644 - DNA, 25 bp, Homo sapien
tctcctttcgtacgtcttttgtata

SEQ ID NO: 589645 - DNA, 25 bp, Homo sapien
gaccatagttctcctttcgtacgtc

SEQ ID NO: 589646 - DNA, 25 bp, Homo sapien
tattcgtggttcagagtcaaggtcc

SEQ ID NO: 589647 - DNA, 25 bp, Homo sapien
caatgacgtcataagcctgctggca

SEQ ID NO: 589648 - DNA, 25 bp, Homo sapien
tcagcatgaggtgataaaggccctt

SEQ ID NO: 589649 - DNA, 25 bp, Homo sapien
ttaaaatgggccgtggcactagcgc

SEQ ID NO: 589650 - DNA, 25 bp, Homo sapien
aggcaggtgggtgatcaaccagaac

SEQ ID NO: 589651 - DNA, 25 bp, Homo sapien
caggcaggtgggtgatcaaccagaa

SEQ ID NO: 589652 - DNA, 25 bp, Homo sapien
gttggcccatcagaggtcacctgca

SEQ ID NO: 589653 - DNA, 25 bp, Homo sapien
cttatatttagagggccaagggctc

SEQ ID NO: 589654 - DNA, 25 bp, Homo sapien
cagaaggcaccggaaataactgtgg

SEQ ID NO: 589655 - DNA, 25 bp, Homo sapien
tgtagacttcaattggccccagtgc

SEQ ID NO: 589656 - DNA, 25 bp, Homo sapien
ttgtttgattttgccgccactcttt

SEQ ID NO: 589657 - DNA, 25 bp, Homo sapien
gtttgattttgccgccactctttct

SEQ ID NO: 589658 - DNA, 25 bp, Homo sapien
ttgattttgccgccactctttcttc

SEQ ID NO: 589659 - DNA, 25 bp, Homo sapien
gattttgccgccactctttcttcat

SEQ ID NO: 589660 - DNA, 25 bp, Homo sapien
agcaggtacaggatgaacgttggtt

SEQ ID NO: 589661 - DNA, 25 bp, Homo sapien
caggtacaggatgaacgttggttgt

SEQ ID NO: 589662 - DNA, 25 bp, Homo sapien
tacaggatgaacgttggttgttaat

SEQ ID NO: 589663 - DNA, 25 bp, Homo sapien
aaagcaggtacaggatgaacgttgg

SEQ ID NO: 589664 - DNA, 25 bp, Homo sapien
cacacagggcgaattttcgggtaag

SEQ ID NO: 589665 - DNA, 25 bp, Homo sapien
tctggttccatcccatgagccacac

SEQ ID NO: 589666 - DNA, 25 bp, Homo sapien
ttctggttccatcccatgagccaca

SEQ ID NO: 589667 - DNA, 25 bp, Homo sapien
gatgcgtgccgacatttctatgttg

SEQ ID NO: 589668 - DNA, 25 bp, Homo sapien
tctagaactctgatgcgtgccgaca

SEQ ID NO: 589669 - DNA, 25 bp, Homo sapien
tctatgttgctttgagtctgcaacc

SEQ ID NO: 589670 - DNA, 25 bp, Homo sapien
tccatcacctctaatctgccagacc

SEQ ID NO: 589671 - DNA, 25 bp, Homo sapien
ggcaggaaggagttacgggtcaggc

SEQ ID NO: 589672 - DNA, 25 bp, Homo sapien
tgcccagtggttgggcagctatggc

SEQ ID NO: 589673 - DNA, 25 bp, Homo sapien
ggagttacgggtcaggctctgcctc

SEQ ID NO: 589674 - DNA, 25 bp, Homo sapien
aaggagttacgggtcaggctctgcc

SEQ ID NO: 589675 - DNA, 25 bp, Homo sapien
gatagccgccagtaggtactagatt

SEQ ID NO: 589676 - DNA, 25 bp, Homo sapien
ggaagcagatagccgccagtaggta

SEQ ID NO: 589677 - DNA, 25 bp, Homo sapien
ctggggaagcagatagccgccagta

SEQ ID NO: 589678 - DNA, 25 bp, Homo sapien
atgcagctgctcacatgctggggaa

SEQ ID NO: 589679 - DNA, 25 bp, Homo sapien
cggagaaaacctgacctcttggatg

SEQ ID NO: 589680 - DNA, 25 bp, Homo sapien
gcttctttgataatatgtccccaag

SEQ ID NO: 589681 - DNA, 25 bp, Homo sapien
cttggatgtggagttattctgttga

SEQ ID NO: 589682 - DNA, 25 bp, Homo sapien
agagacagaagttgaggagagcgga

SEQ ID NO: 589683 - DNA, 25 bp, Homo sapien
actctgtttagtagctgtggcctct

SEQ ID NO: 589684 - DNA, 25 bp, Homo sapien
actgtcctcttctcgataaaaccca

SEQ ID NO: 589685 - DNA, 25 bp, Homo sapien
cttctcgataaaacccataaacagg

SEQ ID NO: 589686 - DNA, 25 bp, Homo sapien
tattaatgcaccacaaagcactgtc

SEQ ID NO: 589687 - DNA, 25 bp, Homo sapien
cacatcggtggttctgtgtgtctgt

SEQ ID NO: 589688 - DNA, 25 bp, Homo sapien
gggcggctgaataggcattacaata

SEQ ID NO: 589689 - DNA, 25 bp, Homo sapien
gggcagtaatagttcccacatcggt

SEQ ID NO: 589690 - DNA, 25 bp, Homo sapien
tacaataacaataatcggagggcag

SEQ ID NO: 589691 - DNA, 25 bp, Homo sapien
gaaaagcagcccgagacatggtccc

SEQ ID NO: 589692 - DNA, 25 bp, Homo sapien
cagcccgagacatggtccccgccct

SEQ ID NO: 589693 - DNA, 25 bp, Homo sapien
aaagcagcccgagacatggtccccg

SEQ ID NO: 589694 - DNA, 25 bp, Homo sapien
atgaaaagcagcccgagacatggtc

SEQ ID NO: 589695 - DNA, 25 bp, Homo sapien
cggtttgagggtctgtatttgatcc

SEQ ID NO: 589696 - DNA, 25 bp, Homo sapien
cgtgcatgtgtctgtttccccgaac

SEQ ID NO: 589697 - DNA, 25 bp, Homo sapien
gcaccagagcctcggtttgagggtc

SEQ ID NO: 589698 - DNA, 25 bp, Homo sapien
ccttagaaaagagagaccttgttga

SEQ ID NO: 589699 - DNA, 25 bp, Homo sapien
gctgaaattagccaatgcgctgcta

SEQ ID NO: 589700 - DNA, 25 bp, Homo sapien
tgcgctgctacacaatgccctggtg

SEQ ID NO: 589701 - DNA, 25 bp, Homo sapien
aacaaagataagcaatagctttagc

SEQ ID NO: 589702 - DNA, 25 bp, Homo sapien
tggtgaccattatccaggctctgac

SEQ ID NO: 589703 - DNA, 25 bp, Homo sapien
tttcagcatctcaacctgcagatac

SEQ ID NO: 589704 - DNA, 25 bp, Homo sapien
aacctgcagatacatctcaaaggcc

SEQ ID NO: 589705 - DNA, 25 bp, Homo sapien
cttcagccgatgtcctcagtgccct

SEQ ID NO: 589706 - DNA, 25 bp, Homo sapien
ggaacgtcgtatgtgaattctcttc

SEQ ID NO: 589707 - DNA, 25 bp, Homo sapien
taaaggagatccgattgacattggg

SEQ ID NO: 589708 - DNA, 25 bp, Homo sapien
cagaccatagctgagtttaaaggag

SEQ ID NO: 589709 - DNA, 25 bp, Homo sapien
ctgctccagggctcgccaacaggag

SEQ ID NO: 589710 - DNA, 25 bp, Homo sapien
agtggcacccaataagatggctgtt

SEQ ID NO: 589711 - DNA, 25 bp, Homo sapien
tagagcttgcaggaatcaccgtcat

SEQ ID NO: 589712 - DNA, 25 bp, Homo sapien
tggctgactaatctctccaggtaca

SEQ ID NO: 589713 - DNA, 25 bp, Homo sapien
gggccagatggcattcaggctgatt

SEQ ID NO: 589714 - DNA, 25 bp, Homo sapien
caagagtaaacatggaacgtgggga

SEQ ID NO: 589715 - DNA, 25 bp, Homo sapien
gaagttggttagatgtcacaatttc

SEQ ID NO: 589716 - DNA, 25 bp, Homo sapien
ctctgaagttggttagatgtcacaa

SEQ ID NO: 589717 - DNA, 25 bp, Homo sapien
ttctctgaagttggttagatgtcac

SEQ ID NO: 589718 - DNA, 25 bp, Homo sapien
ctgaagttggttagatgtcacaatt

SEQ ID NO: 589719 - DNA, 25 bp, Homo sapien
ggactctggcgccactcttgttctg

SEQ ID NO: 589720 - DNA, 25 bp, Homo sapien
tgcacataacggtcctggtcacagc

SEQ ID NO: 589721 - DNA, 25 bp, Homo sapien
actgctccagcacggttttattttg

SEQ ID NO: 589722 - DNA, 25 bp, Homo sapien
tctgcatgcacataacggtcctggt

SEQ ID NO: 589723 - DNA, 25 bp, Homo sapien
aacataaacttcatgctctgaggaa

SEQ ID NO: 589724 - DNA, 25 bp, Homo sapien
cacaagtctgtggtctccaacataa

SEQ ID NO: 589725 - DNA, 25 bp, Homo sapien
ggaaacaggctctgtgaacccaact

SEQ ID NO: 589726 - DNA, 25 bp, Homo sapien
ccaacttcaaagcttggccatgtga

SEQ ID NO: 589727 - DNA, 25 bp, Homo sapien
ctatcctgttggcaaatgggtgcat

SEQ ID NO: 589728 - DNA, 25 bp, Homo sapien
ccactctggcgcattctccctgggt

SEQ ID NO: 589729 - DNA, 25 bp, Homo sapien
atatcctcgcctatcctgttggcaa

SEQ ID NO: 589730 - DNA, 25 bp, Homo sapien
caaatgggtgcatttctgtccacct

SEQ ID NO: 589731 - DNA, 25 bp, Homo sapien
cttctggccggcattccacttggct

SEQ ID NO: 589732 - DNA, 25 bp, Homo sapien
gcttctggccggcattccacttggc

SEQ ID NO: 589733 - DNA, 25 bp, Homo sapien
ttctggccggcattccacttggctc

SEQ ID NO: 589734 - DNA, 25 bp, Homo sapien
ggtaccctcggccaagaagcacttg

SEQ ID NO: 589735 - DNA, 25 bp, Homo sapien
tgtggccatggggaacggtaccctc

SEQ ID NO: 589736 - DNA, 25 bp, Homo sapien
cctcggccaagaagcacttggcatt

SEQ ID NO: 589737 - DNA, 25 bp, Homo sapien
gaacggtaccctcggccaagaagca

SEQ ID NO: 589738 - DNA, 25 bp, Homo sapien
gaaatcatatccgacatgcctgtgc

SEQ ID NO: 589739 - DNA, 25 bp, Homo sapien
atgaagaaagggttccatttaggca

SEQ ID NO: 589740 - DNA, 25 bp, Homo sapien
ttaacaccagtgagtattacctttg

SEQ ID NO: 589741 - DNA, 25 bp, Homo sapien
tgtgcccacagcagacttaagactg

SEQ ID NO: 589742 - DNA, 25 bp, Homo sapien
gaagagagcacctgttcatctcggc

SEQ ID NO: 589743 - DNA, 25 bp, Homo sapien
tgagctcagcgctggcaggcgaggg

SEQ ID NO: 589744 - DNA, 25 bp, Homo sapien
gagaagagagcacctgttcatctcg

SEQ ID NO: 589745 - DNA, 25 bp, Homo sapien
gagagcacctgttcatctcggctca

SEQ ID NO: 589746 - DNA, 25 bp, Homo sapien
ccactgatgttgatttcgggagcca

SEQ ID NO: 589747 - DNA, 25 bp, Homo sapien
ccactgagacgctgttctgcaagga

SEQ ID NO: 589748 - DNA, 25 bp, Homo sapien
tgcttgccaagccaaaatgttgcct

SEQ ID NO: 589749 - DNA, 25 bp, Homo sapien
gatcggatgcaatctttgtgggaca

SEQ ID NO: 589750 - DNA, 25 bp, Homo sapien
gggtagtggttttcccatgcgtcca

SEQ ID NO: 589751 - DNA, 25 bp, Homo sapien
aagaggatggctagcccttttctgg

SEQ ID NO: 589752 - DNA, 25 bp, Homo sapien
ggcacaaacaatgtaccagggagag

SEQ ID NO: 589753 - DNA, 25 bp, Homo sapien
gcttataggcccagagagcaacctt

SEQ ID NO: 589754 - DNA, 25 bp, Homo sapien
gagacagcttggagccatgatcctg

SEQ ID NO: 589755 - DNA, 25 bp, Homo sapien
cttgctccagcttaaagcaattaat

SEQ ID NO: 589756 - DNA, 25 bp, Homo sapien
tttggtagcccgtggagcttgctcc

SEQ ID NO: 589757 - DNA, 25 bp, Homo sapien
aacatcttttggacatttggtagcc

SEQ ID NO: 589758 - DNA, 25 bp, Homo sapien
tgttgatcccatacatatagattga

SEQ ID NO: 589759 - DNA, 25 bp, Homo sapien
tagattgattttgttcaggtagata

SEQ ID NO: 589760 - DNA, 25 bp, Homo sapien
ctctggaattgtatgttgatcccat

SEQ ID NO: 589761 - DNA, 25 bp, Homo sapien
tgttcaggtagataatgaaaagtca

SEQ ID NO: 589762 - DNA, 25 bp, Homo sapien
ggtagatatttaagctcccctgagg

SEQ ID NO: 589763 - DNA, 25 bp, Homo sapien
tgtcctgccctaagagctgaagctg

SEQ ID NO: 589764 - DNA, 25 bp, Homo sapien
tgtgtgaatacagagcccaggagaa

SEQ ID NO: 589765 - DNA, 25 bp, Homo sapien
tgacactgcatcagattgctcctgg

SEQ ID NO: 589766 - DNA, 25 bp, Homo sapien
ccttttcaaaacatgccttcaggaa

SEQ ID NO: 589767 - DNA, 25 bp, Homo sapien
taaagcacactgattgtcctaagag

SEQ ID NO: 589768 - DNA, 25 bp, Homo sapien
gactgcataactcttcttgaccaca

SEQ ID NO: 589769 - DNA, 25 bp, Homo sapien
ttacagctactggaacaaaaagatg

SEQ ID NO: 589770 - DNA, 25 bp, Homo sapien
tatgctggttgaagctcttatgtcg

SEQ ID NO: 589771 - DNA, 25 bp, Homo sapien
tccactgtgtcaggattctgcatgt

SEQ ID NO: 589772 - DNA, 25 bp, Homo sapien
tctgaggccacttagcaagacattt

SEQ ID NO: 589773 - DNA, 25 bp, Homo sapien
tcaacatgggctgcgttccactgtg

SEQ ID NO: 589774 - DNA, 25 bp, Homo sapien
agaaagaatgggtggcctccgcgtc

SEQ ID NO: 589775 - DNA, 25 bp, Homo sapien
tctccgacccggtatctcaaaagga

SEQ ID NO: 589776 - DNA, 25 bp, Homo sapien
tgatagaatcgaagggctgcccttg

SEQ ID NO: 589777 - DNA, 25 bp, Homo sapien
tcctcagtcctgatagaatcgaagg

SEQ ID NO: 589778 - DNA, 25 bp, Homo sapien
agatgcgccaaacgcggaacccggg

SEQ ID NO: 589779 - DNA, 25 bp, Homo sapien
tcccggtttggcgagctccggctgc

SEQ ID NO: 589780 - DNA, 25 bp, Homo sapien
gcttccgaaataaagcagcactccc

SEQ ID NO: 589781 - DNA, 25 bp, Homo sapien
tcgctgacataggacttccaagggt

SEQ ID NO: 589782 - DNA, 25 bp, Homo sapien
gaagttcattcagtcctggaccacg

SEQ ID NO: 589783 - DNA, 25 bp, Homo sapien
tcttctggggtaacagtcagaattc

SEQ ID NO: 589784 - DNA, 25 bp, Homo sapien
gccatggtccctcgaagttgggcag

SEQ ID NO: 589785 - DNA, 25 bp, Homo sapien
caggctggattctcatgctgtcttc

SEQ ID NO: 589786 - DNA, 25 bp, Homo sapien
tgcttctacacatccgggggtctgg

SEQ ID NO: 589787 - DNA, 25 bp, Homo sapien
gcatgcttctacacatccgggggtc

SEQ ID NO: 589788 - DNA, 25 bp, Homo sapien
gcagtgcatgcttctacacatccgg

SEQ ID NO: 589789 - DNA, 25 bp, Homo sapien
cagtgcatgcttctacacatccggg

SEQ ID NO: 589790 - DNA, 25 bp, Homo sapien
gaattccggaggacgcgagtttgta

SEQ ID NO: 589791 - DNA, 25 bp, Homo sapien
taggacccaacagaaccagccgcgt

SEQ ID NO: 589792 - DNA, 25 bp, Homo sapien
cgtgccgggcttgccctcgggaatt

SEQ ID NO: 589793 - DNA, 25 bp, Homo sapien
gacgcgagtttgtaggacccaacag

SEQ ID NO: 589794 - DNA, 25 bp, Homo sapien
tgaagccggaacaccactacgcctt

SEQ ID NO: 589795 - DNA, 25 bp, Homo sapien
tacgaacaggtgatgcactaccccg

SEQ ID NO: 589796 - DNA, 25 bp, Homo sapien
tcacgaacaaaacgggcctggacgc

SEQ ID NO: 589797 - DNA, 25 bp, Homo sapien
caaccccacaaaatggacctcaagg

SEQ ID NO: 589798 - DNA, 25 bp, Homo sapien
tatgaagtgtccaaaccatctgcat

SEQ ID NO: 589799 - DNA, 25 bp, Homo sapien
gcgggcttattaatgccctctttat

SEQ ID NO: 589800 - DNA, 25 bp, Homo sapien
ttatgaagtgtccaaaccatctgca

SEQ ID NO: 589801 - DNA, 25 bp, Homo sapien
tcggcgggcttattaatgccctctt

SEQ ID NO: 589802 - DNA, 25 bp, Homo sapien
aaggcgttttcggagagactgggag

SEQ ID NO: 589803 - DNA, 25 bp, Homo sapien
ctcccagaacctcgccagggtgcag

SEQ ID NO: 589804 - DNA, 25 bp, Homo sapien
cgttttgggttcgcgcagaacctag

SEQ ID NO: 589805 - DNA, 25 bp, Homo sapien
ggggagaaggtgctccggtgccgga

SEQ ID NO: 589806 - DNA, 25 bp, Homo sapien
tgcttccttcgcagcccgttggtgt

SEQ ID NO: 589807 - DNA, 25 bp, Homo sapien
ggagctccaaagaccgctgagctgg

SEQ ID NO: 589808 - DNA, 25 bp, Homo sapien
ggctgtctgaacgtccctgcttcct

SEQ ID NO: 589809 - DNA, 25 bp, Homo sapien
tcagaactccgggaaggaggagctc

SEQ ID NO: 589810 - DNA, 25 bp, Homo sapien
attcaagcctgagccagaactctgg

SEQ ID NO: 589811 - DNA, 25 bp, Homo sapien
taggtctcggccctacatgagggta

SEQ ID NO: 589812 - DNA, 25 bp, Homo sapien
gaaactccgggagcaatcttcagca

SEQ ID NO: 589813 - DNA, 25 bp, Homo sapien
tttattatagaagccggcggtgacc

SEQ ID NO: 589814 - DNA, 25 bp, Homo sapien
ccaaatgtatgaaatagctcccagg

SEQ ID NO: 589815 - DNA, 25 bp, Homo sapien
tcccaagaataacatccaaatgtat

SEQ ID NO: 589816 - DNA, 25 bp, Homo sapien
aatgcagatgcatctaatttaagca

SEQ ID NO: 589817 - DNA, 25 bp, Homo sapien
ataactgagatttctcccaagaata

SEQ ID NO: 589818 - DNA, 25 bp, Homo sapien
ggagtttaaaggcaaggcctgcagc

SEQ ID NO: 589819 - DNA, 25 bp, Homo sapien
gctgccatggatgacatctgtttca

SEQ ID NO: 589820 - DNA, 25 bp, Homo sapien
gcagctgccatggatgacatctgtt

SEQ ID NO: 589821 - DNA, 25 bp, Homo sapien
cacaggtgagtgcttgggagtttaa

SEQ ID NO: 589822 - DNA, 25 bp, Homo sapien
ccgcatcccaaacccatgcccgtcc

SEQ ID NO: 589823 - DNA, 25 bp, Homo sapien
ttgccgttgtagagctgccgtgttg

SEQ ID NO: 589824 - DNA, 25 bp, Homo sapien
ccttgccgttgtagagctgccgtgt

SEQ ID NO: 589825 - DNA, 25 bp, Homo sapien
caaaaccccgcatcccaaacccatg

SEQ ID NO: 589826 - DNA, 25 bp, Homo sapien
tgagtttttgatactggggcccagt

SEQ ID NO: 589827 - DNA, 25 bp, Homo sapien
gcccagtaagaatgtcaaggcctct

SEQ ID NO: 589828 - DNA, 25 bp, Homo sapien
cagcagctctcatgattacaagttt

SEQ ID NO: 589829 - DNA, 25 bp, Homo sapien
tcagggatcacataactggaagtcc

SEQ ID NO: 589830 - DNA, 25 bp, Homo sapien
tcagttccttggatgaggtttctct

SEQ ID NO: 589831 - DNA, 25 bp, Homo sapien
tttcttcagttccttggatgaggtt

SEQ ID NO: 589832 - DNA, 25 bp, Homo sapien
agttccttggatgaggtttctctcc

SEQ ID NO: 589833 - DNA, 25 bp, Homo sapien
cttcagttccttggatgaggtttct

SEQ ID NO: 589834 - DNA, 25 bp, Homo sapien
atccaaaggtatcatctcgattatc

SEQ ID NO: 589835 - DNA, 25 bp, Homo sapien
ccgtggacatcaggaattcatcagc

SEQ ID NO: 589836 - DNA, 25 bp, Homo sapien
tcagatcttgtagtagctccgtgga

SEQ ID NO: 589837 - DNA, 25 bp, Homo sapien
tacattcaggttctttatccaaagg

SEQ ID NO: 589838 - DNA, 25 bp, Homo sapien
gaatgagttctttttgaagggcaaa

SEQ ID NO: 589839 - DNA, 25 bp, Homo sapien
ctgctgaccaagaacattgtcaaga

SEQ ID NO: 589840 - DNA, 25 bp, Homo sapien
tggctttgacctcgcctgaaaaggg

SEQ ID NO: 589841 - DNA, 25 bp, Homo sapien
gggtgagggttgctaaataaactga

SEQ ID NO: 589842 - DNA, 25 bp, Homo sapien
gattccagcgacttcttggtggcct

SEQ ID NO: 589843 - DNA, 25 bp, Homo sapien
tttggaacgtttttgcaaaggctgc

SEQ ID NO: 589844 - DNA, 25 bp, Homo sapien
tatttgagactcagtcatctggtcc

SEQ ID NO: 589845 - DNA, 25 bp, Homo sapien
gaaaatataagtcatggttgttaag

SEQ ID NO: 589846 - DNA, 25 bp, Homo sapien
aatttgagtcaaagggaatggaaga

SEQ ID NO: 589847 - DNA, 25 bp, Homo sapien
gaatttgagtcaaagggaatggaag

SEQ ID NO: 589848 - DNA, 25 bp, Homo sapien
gcagagaatttgagtcaaagggaat

SEQ ID NO: 589849 - DNA, 25 bp, Homo sapien
gagaatttgagtcaaagggaatgga

SEQ ID NO: 589850 - DNA, 25 bp, Homo sapien
caactgtaggatctatggaggaaca

SEQ ID NO: 589851 - DNA, 25 bp, Homo sapien
tcaaagaccataggcattaatataa

SEQ ID NO: 589852 - DNA, 25 bp, Homo sapien
cataagctttgaaatcaactgtagg

SEQ ID NO: 589853 - DNA, 25 bp, Homo sapien
catcgaatcttgaaaaaaagccaac

SEQ ID NO: 589854 - DNA, 25 bp, Homo sapien
tcatgagttaatgctggagtatgca

SEQ ID NO: 589855 - DNA, 25 bp, Homo sapien
gagtatgcaggaagcatagagccca

SEQ ID NO: 589856 - DNA, 25 bp, Homo sapien
tccttggggaatcacatttttcctg

SEQ ID NO: 589857 - DNA, 25 bp, Homo sapien
aggaagcatagagcccagtgcctct

SEQ ID NO: 589858 - DNA, 25 bp, Homo sapien
cccgctgtccgtgagttttgccctg

SEQ ID NO: 589859 - DNA, 25 bp, Homo sapien
tcaacaaatagggacctgctctgcc

SEQ ID NO: 589860 - DNA, 25 bp, Homo sapien
atgcagtaaaccaggtccccgctgt

SEQ ID NO: 589861 - DNA, 25 bp, Homo sapien
cccacagcgctggtggatgcagtaa

SEQ ID NO: 589862 - DNA, 25 bp, Homo sapien
agcagagtcacagagccgagtgtag

SEQ ID NO: 589863 - DNA, 25 bp, Homo sapien
cctaagggctatcctctgaagcaga

SEQ ID NO: 589864 - DNA, 25 bp, Homo sapien
gcagcctaagggctatcctctgaag

SEQ ID NO: 589865 - DNA, 25 bp, Homo sapien
gtagcaagaaaaggctcggtgatgc

SEQ ID NO: 589866 - DNA, 25 bp, Homo sapien
gagctggcagtgtgaccgataatta

SEQ ID NO: 589867 - DNA, 25 bp, Homo sapien
ctcttccccagtggatgatgaaaga

SEQ ID NO: 589868 - DNA, 25 bp, Homo sapien
tgtgaccgataattagaggcagctc

SEQ ID NO: 589869 - DNA, 25 bp, Homo sapien
tgccgggaacaacacctttggtgac

SEQ ID NO: 589870 - DNA, 25 bp, Homo sapien
gtggtgtcctagaagccaaatgcag

SEQ ID NO: 589871 - DNA, 25 bp, Homo sapien
gatcaccttgagatgtgcttaggca

SEQ ID NO: 589872 - DNA, 25 bp, Homo sapien
gagctgacattacaaggtcatggac

SEQ ID NO: 589873 - DNA, 25 bp, Homo sapien
gaaaacaaagcagtgtgtggtgtcc

SEQ ID NO: 589874 - DNA, 25 bp, Homo sapien
ggagagtgcagaacgaggaagagaa

SEQ ID NO: 589875 - DNA, 25 bp, Homo sapien
gtgaagactgaacatcgtctgtttt

SEQ ID NO: 589876 - DNA, 25 bp, Homo sapien
tgaacatcgtctgttttgctaagtg

SEQ ID NO: 589877 - DNA, 25 bp, Homo sapien
gaggagagtgcagaacgaggaagag

SEQ ID NO: 589878 - DNA, 25 bp, Homo sapien
gcaaaggtccttgcgtcatgaggct

SEQ ID NO: 589879 - DNA, 25 bp, Homo sapien
ttctgaaccaggatccactctgggt

SEQ ID NO: 589880 - DNA, 25 bp, Homo sapien
gtggcccttggagcagtcgttctga

SEQ ID NO: 589881 - DNA, 25 bp, Homo sapien
aacctgcgcagaagtgtggcccttg

SEQ ID NO: 589882 - DNA, 25 bp, Homo sapien
ctggctggactgtccccatcagaag

SEQ ID NO: 589883 - DNA, 25 bp, Homo sapien
tggactgtccccatcagaagcatcc

SEQ ID NO: 589884 - DNA, 25 bp, Homo sapien
actgtccccatcagaagcatcccag

SEQ ID NO: 589885 - DNA, 25 bp, Homo sapien
tggctggactgtccccatcagaagc

SEQ ID NO: 589886 - DNA, 25 bp, Homo sapien
tgctggtgggccaccaattggtgac

SEQ ID NO: 589887 - DNA, 25 bp, Homo sapien
aggtgccctgtaggctccacggcca

SEQ ID NO: 589888 - DNA, 25 bp, Homo sapien
tctgaaagctctgaagcacccaccc

SEQ ID NO: 589889 - DNA, 25 bp, Homo sapien
tggtgacgtctgtactcagctgctg

SEQ ID NO: 589890 - DNA, 25 bp, Homo sapien
ggacacattgctgtggactctcttt

SEQ ID NO: 589891 - DNA, 25 bp, Homo sapien
gacacattgctgtggactctctttg

SEQ ID NO: 589892 - DNA, 25 bp, Homo sapien
gggacacattgctgtggactctctt

SEQ ID NO: 589893 - DNA, 25 bp, Homo sapien
tgggacacattgctgtggactctct

SEQ ID NO: 589894 - DNA, 25 bp, Homo sapien
tatctttgttgatgtgaagccccag

SEQ ID NO: 589895 - DNA, 25 bp, Homo sapien
tgtctactggtgctttcgagaggcc

SEQ ID NO: 589896 - DNA, 25 bp, Homo sapien
ttccagatctaccaggactgaccct

SEQ ID NO: 589897 - DNA, 25 bp, Homo sapien
cccaggcaggtatcactgtctactg

SEQ ID NO: 589898 - DNA, 25 bp, Homo sapien
taaggcttccttacatgggctcctg

SEQ ID NO: 589899 - DNA, 25 bp, Homo sapien
cagtgtgtgagatcataaggcttcc

SEQ ID NO: 589900 - DNA, 25 bp, Homo sapien
gaccagtggatgaatagtctcctcc

SEQ ID NO: 589901 - DNA, 25 bp, Homo sapien
agcccagcttcctacagtgtgtgag

SEQ ID NO: 589902 - DNA, 25 bp, Homo sapien
tcaaggaagttcctgcttgcctcag

SEQ ID NO: 589903 - DNA, 25 bp, Homo sapien
tcaggacaagttaaattttggcata

SEQ ID NO: 589904 - DNA, 25 bp, Homo sapien
ctgcttgcctcagggttaatgtgag

SEQ ID NO: 589905 - DNA, 25 bp, Homo sapien
aattttggcatatgggagatggggg

SEQ ID NO: 589906 - DNA, 25 bp, Homo sapien
tagggaatccacaagcacaagtctc

SEQ ID NO: 589907 - DNA, 25 bp, Homo sapien
ttccacgtgaaatccaacactctag

SEQ ID NO: 589908 - DNA, 25 bp, Homo sapien
cactctagaactatgaatttctgcc

SEQ ID NO: 589909 - DNA, 25 bp, Homo sapien
tcatccatcatctctctcgttaatt

SEQ ID NO: 589910 - DNA, 25 bp, Homo sapien
cacccaccaaatagtggatggcaaa

SEQ ID NO: 589911 - DNA, 25 bp, Homo sapien
gaccaccacccaccaaatagtggat

SEQ ID NO: 589912 - DNA, 25 bp, Homo sapien
cccaggagtaggaggccctgctgaa

SEQ ID NO: 589913 - DNA, 25 bp, Homo sapien
gaggctgagatctccacctactgcc

SEQ ID NO: 589914 - DNA, 25 bp, Homo sapien
tgtcggcgaagaacctgtgatgcag

SEQ ID NO: 589915 - DNA, 25 bp, Homo sapien
gctttgctgacactagcagctctga

SEQ ID NO: 589916 - DNA, 25 bp, Homo sapien
tgtgatgcaggcaaaccaccctggt

SEQ ID NO: 589917 - DNA, 25 bp, Homo sapien
cacagccattggtgatgtcggcgaa

SEQ ID NO: 589918 - DNA, 25 bp, Homo sapien
gagacaagtggagttgagggacgct

SEQ ID NO: 589919 - DNA, 25 bp, Homo sapien
caagtggagttgagggacgctcagg

SEQ ID NO: 589920 - DNA, 25 bp, Homo sapien
gaggagacaagtggagttgagggac

SEQ ID NO: 589921 - DNA, 25 bp, Homo sapien
tggaggagacaagtggagttgaggg

SEQ ID NO: 589922 - DNA, 25 bp, Homo sapien
agggttttccacttgcttcaagagg

SEQ ID NO: 589923 - DNA, 25 bp, Homo sapien
tgtgtaagcatttccaaaaatagaa

SEQ ID NO: 589924 - DNA, 25 bp, Homo sapien
cacatttgtgtaagcatttccaaaa

SEQ ID NO: 589925 - DNA, 25 bp, Homo sapien
tccacttgcttcaagaggtggaggg

SEQ ID NO: 589926 - DNA, 25 bp, Homo sapien
tcataggcatcggaaagacgaagac

SEQ ID NO: 589927 - DNA, 25 bp, Homo sapien
gccaggattgagacaaaatccttta

SEQ ID NO: 589928 - DNA, 25 bp, Homo sapien
caaattcatctattcccgaaacttt

SEQ ID NO: 589929 - DNA, 25 bp, Homo sapien
cgaagacttgccaggattgagacaa

SEQ ID NO: 589930 - DNA, 25 bp, Homo sapien
tgtgggttacccattaggaatgcag

SEQ ID NO: 589931 - DNA, 25 bp, Homo sapien
gaagtacagcatccatagagcttga

SEQ ID NO: 589932 - DNA, 25 bp, Homo sapien
caatgatgatgtgggctatggtcaa

SEQ ID NO: 589933 - DNA, 25 bp, Homo sapien
cccatagtgcattgggaagctgttt

SEQ ID NO: 589934 - DNA, 25 bp, Homo sapien
gtcagcccatctcctctgaaggcca

SEQ ID NO: 589935 - DNA, 25 bp, Homo sapien
tgtcagcccatctcctctgaaggcc

SEQ ID NO: 589936 - DNA, 25 bp, Homo sapien
ctgtcagcccatctcctctgaaggc

SEQ ID NO: 589937 - DNA, 25 bp, Homo sapien
tcagcccatctcctctgaaggccat

SEQ ID NO: 589938 - DNA, 25 bp, Homo sapien
gtgtgggcctctctttcagctgctc

SEQ ID NO: 589939 - DNA, 25 bp, Homo sapien
accagcctttggcagtgggctgccc

SEQ ID NO: 589940 - DNA, 25 bp, Homo sapien
tggaaaccatgaaggaggccaccag

SEQ ID NO: 589941 - DNA, 25 bp, Homo sapien
gctgcccctggatccccactgctga

SEQ ID NO: 589942 - DNA, 25 bp, Homo sapien
tgccctgtggttccggtgggaaatc

SEQ ID NO: 589943 - DNA, 25 bp, Homo sapien
gacacttgagttctcttgtgctgca

SEQ ID NO: 589944 - DNA, 25 bp, Homo sapien
aaactccactaccaactgcctggtg

SEQ ID NO: 589945 - DNA, 25 bp, Homo sapien
aatctgctacaccaggaatcaggag

SEQ ID NO: 589946 - DNA, 25 bp, Homo sapien
caccctttgaattgggtcaagaggg

SEQ ID NO: 589947 - DNA, 25 bp, Homo sapien
gggtttggtactgagtctatccagg

SEQ ID NO: 589948 - DNA, 25 bp, Homo sapien
tcttttcctgcttccgatcccgtcc

SEQ ID NO: 589949 - DNA, 25 bp, Homo sapien
gagtctatccaggagagtccaccac

SEQ ID NO: 589950 - DNA, 25 bp, Homo sapien
tgccatctccataggtttcaggtgg

SEQ ID NO: 589951 - DNA, 25 bp, Homo sapien
ggctttgccgtccacatgggatacg

SEQ ID NO: 589952 - DNA, 25 bp, Homo sapien
tggtcaatagcacaccctctctggg

SEQ ID NO: 589953 - DNA, 25 bp, Homo sapien
tctggtcaatagcacatgcctggct

SEQ ID NO: 589954 - DNA, 25 bp, Homo sapien
tctatgatggcttctcttgccagct

SEQ ID NO: 589955 - DNA, 25 bp, Homo sapien
tcaggcaagttgcatgagttctcca

SEQ ID NO: 589956 - DNA, 25 bp, Homo sapien
tagtacatgctcagtaagacgcctc

SEQ ID NO: 589957 - DNA, 25 bp, Homo sapien
gttctgcctcctctatgatggcttc

SEQ ID NO: 589958 - DNA, 25 bp, Homo sapien
acgtgaggcatgtgtcagtgcagca

SEQ ID NO: 589959 - DNA, 25 bp, Homo sapien
tgctgtgtttccttcggctctcggt

SEQ ID NO: 589960 - DNA, 25 bp, Homo sapien
ctctcggtcagtggacgtgaggcat

SEQ ID NO: 589961 - DNA, 25 bp, Homo sapien
tgcagcagcgaacttggagagaaga

SEQ ID NO: 589962 - DNA, 25 bp, Homo sapien
gtgactgaattcttctgccagggaa

SEQ ID NO: 589963 - DNA, 25 bp, Homo sapien
tggaaatccatggtgtgactgaatt

SEQ ID NO: 589964 - DNA, 25 bp, Homo sapien
ccctggaaatccatggtgtgactga

SEQ ID NO: 589965 - DNA, 25 bp, Homo sapien
tcaagtagccctggaaatccatggt

SEQ ID NO: 589966 - DNA, 25 bp, Homo sapien
ccaaatgtggaattgaagagtgaat

SEQ ID NO: 589967 - DNA, 25 bp, Homo sapien
tggatgcactgccaatcattggcat

SEQ ID NO: 589968 - DNA, 25 bp, Homo sapien
ggcatgctgccttcattttgaggca

SEQ ID NO: 589969 - DNA, 25 bp, Homo sapien
catttgaagtttttgggtgcaccca

SEQ ID NO: 589970 - DNA, 25 bp, Homo sapien
cttctggtgacatccactcccatgg

SEQ ID NO: 589971 - DNA, 25 bp, Homo sapien
gtcccctgttggcatgccagccttg

SEQ ID NO: 589972 - DNA, 25 bp, Homo sapien
catggcttctctctgacactttgct

SEQ ID NO: 589973 - DNA, 25 bp, Homo sapien
cactggactggatgcacctggatgc

SEQ ID NO: 589974 - DNA, 25 bp, Homo sapien
ttctcattttggtccgagcaagcca

SEQ ID NO: 589975 - DNA, 25 bp, Homo sapien
ctttagtcagtgcatggtcccggga

SEQ ID NO: 589976 - DNA, 25 bp, Homo sapien
gagtgtgctttcagctcgagcccct

SEQ ID NO: 589977 - DNA, 25 bp, Homo sapien
ttagtgtcctcccagaccaggattc

SEQ ID NO: 589978 - DNA, 25 bp, Homo sapien
catgagggtgagtatgctgctccac

SEQ ID NO: 589979 - DNA, 25 bp, Homo sapien
gcctttgaaaagcacggattcatct

SEQ ID NO: 589980 - DNA, 25 bp, Homo sapien
ggtggttgacttgcaggcagctcct

SEQ ID NO: 589981 - DNA, 25 bp, Homo sapien
tctaaaggctggaatgacttgtgcc

SEQ ID NO: 589982 - DNA, 25 bp, Homo sapien
ctccaactgcccgtgcctacaagaa

SEQ ID NO: 589983 - DNA, 25 bp, Homo sapien
ccaactgcccgtgcctacaagaaaa

SEQ ID NO: 589984 - DNA, 25 bp, Homo sapien
actgcccgtgcctacaagaaaacat

SEQ ID NO: 589985 - DNA, 25 bp, Homo sapien
aactgcccgtgcctacaagaaaaca

SEQ ID NO: 589986 - DNA, 25 bp, Homo sapien
gtgtgctgcagatcacgtgggcaaa

SEQ ID NO: 589987 - DNA, 25 bp, Homo sapien
tgtgctgcagatcacgtgggcaaac

SEQ ID NO: 589988 - DNA, 25 bp, Homo sapien
ttgtgtgctgcagatcacgtgggca

SEQ ID NO: 589989 - DNA, 25 bp, Homo sapien
tgtgtgctgcagatcacgtgggcaa

SEQ ID NO: 589990 - DNA, 25 bp, Homo sapien
gatgttgtgttcagatctttttcca

SEQ ID NO: 589991 - DNA, 25 bp, Homo sapien
tccctgcgttttgcagcctttcttc

SEQ ID NO: 589992 - DNA, 25 bp, Homo sapien
tgcatctaattttccctgcgttttg

SEQ ID NO: 589993 - DNA, 25 bp, Homo sapien
tcttcagatgttgtgttcagatctt

SEQ ID NO: 589994 - DNA, 25 bp, Homo sapien
aacaccagcagccttaggggtcctt

SEQ ID NO: 589995 - DNA, 25 bp, Homo sapien
ccagcagccttaggggtccttccaa

SEQ ID NO: 589996 - DNA, 25 bp, Homo sapien
gccttaggggtccttccaatgacag

SEQ ID NO: 589997 - DNA, 25 bp, Homo sapien
gcagccttaggggtccttccaatga

SEQ ID NO: 589998 - DNA, 25 bp, Homo sapien
cattgtggaagactcttggctttgc

SEQ ID NO: 589999 - DNA, 25 bp, Homo sapien
tcattgtggaagactcttggctttg

SEQ ID NO: 590000 - DNA, 25 bp, Homo sapien
ttaacatgctgtgtggagaatccac

SEQ ID NO: 590001 - DNA, 25 bp, Homo sapien
agccttagttgcttttcttttactg

SEQ ID NO: 590002 - DNA, 25 bp, Homo sapien
aacatgctgtgtggagaatccactt

SEQ ID NO: 590003 - DNA, 25 bp, Homo sapien
cttttactggacttgcttctgccac

SEQ ID NO: 590004 - DNA, 25 bp, Homo sapien
caagtgtacacaattcgactgtcag

SEQ ID NO: 590005 - DNA, 25 bp, Homo sapien
aaggaatctcatttcaacccgcagg

SEQ ID NO: 590006 - DNA, 25 bp, Homo sapien
ttcatgagcagtggaccaaggaatc

SEQ ID NO: 590007 - DNA, 25 bp, Homo sapien
tagcagagtagacatggtccaagtg

SEQ ID NO: 590008 - DNA, 25 bp, Homo sapien
tgctgctgaccagaactccacttgg

SEQ ID NO: 590009 - DNA, 25 bp, Homo sapien
cacagggcagacatggacccaccat

SEQ ID NO: 590010 - DNA, 25 bp, Homo sapien
aggatgtccggccacactgggtctg

SEQ ID NO: 590011 - DNA, 25 bp, Homo sapien
gctggtagccgcctgttggaatggt

SEQ ID NO: 590012 - DNA, 25 bp, Homo sapien
aggagaagaacaaaggcaaagtatt

SEQ ID NO: 590013 - DNA, 25 bp, Homo sapien
gcccagaaggaaaccataaaatgac

SEQ ID NO: 590014 - DNA, 25 bp, Homo sapien
caggcccagaaggaaaccataaaat

SEQ ID NO: 590015 - DNA, 25 bp, Homo sapien
tgtgcctcccacttgccaggacagg

SEQ ID NO: 590016 - DNA, 25 bp, Homo sapien
ttgtgcctcccacttgccaggacag

SEQ ID NO: 590017 - DNA, 25 bp, Homo sapien
tggaggaacaggctcatgtcttcag

SEQ ID NO: 590018 - DNA, 25 bp, Homo sapien
cttggaggaacaggctcatgtcttc

SEQ ID NO: 590019 - DNA, 25 bp, Homo sapien
gcatctctttcctcggtcaagccct

SEQ ID NO: 590020 - DNA, 25 bp, Homo sapien
aggaacaggctcatgtcttcagaga

SEQ ID NO: 590021 - DNA, 25 bp, Homo sapien
tggatggtagctctgacacctccat

SEQ ID NO: 590022 - DNA, 25 bp, Homo sapien
ccgtccctgtccaatgtgggagtgg

SEQ ID NO: 590023 - DNA, 25 bp, Homo sapien
ggagtggatggtagctctgacacct

SEQ ID NO: 590024 - DNA, 25 bp, Homo sapien
tccagccgtccctgtccaatgtggg

SEQ ID NO: 590025 - DNA, 25 bp, Homo sapien
ttgggaaatatgggacatgtgtgag

SEQ ID NO: 590026 - DNA, 25 bp, Homo sapien
tgggaaatatgggacatgtgtgaga

SEQ ID NO: 590027 - DNA, 25 bp, Homo sapien
tcacacagggcccttatgctgcagg

SEQ ID NO: 590028 - DNA, 25 bp, Homo sapien
cagggcccttatgctgcaggatggg

SEQ ID NO: 590029 - DNA, 25 bp, Homo sapien
aggatggggatctggactgtcttct

SEQ ID NO: 590030 - DNA, 25 bp, Homo sapien
gtcttctccaagccatggaaagtca

SEQ ID NO: 590031 - DNA, 25 bp, Homo sapien
gcacagtactggacatagatgtaaa

SEQ ID NO: 590032 - DNA, 25 bp, Homo sapien
cagtactggacatagatgtaaactc

SEQ ID NO: 590033 - DNA, 25 bp, Homo sapien
ctggacatagatgtaaactctctaa

SEQ ID NO: 590034 - DNA, 25 bp, Homo sapien
aaaagtgcacagtactggacataga

SEQ ID NO: 590035 - DNA, 25 bp, Homo sapien
gtcagtcctgcccatgtgagctggg

SEQ ID NO: 590036 - DNA, 25 bp, Homo sapien
tcctgcccatgtgagctgggtcagc

SEQ ID NO: 590037 - DNA, 25 bp, Homo sapien
cctgcccatgtgagctgggtcagca

SEQ ID NO: 590038 - DNA, 25 bp, Homo sapien
gtcctgcccatgtgagctgggtcag

SEQ ID NO: 590039 - DNA, 25 bp, Homo sapien
cttctgtggtattcactgggagtca

SEQ ID NO: 590040 - DNA, 25 bp, Homo sapien
gatcacactgcctgttagaatcaat

SEQ ID NO: 590041 - DNA, 25 bp, Homo sapien
aagcctagaacctgatcacactgcc

SEQ ID NO: 590042 - DNA, 25 bp, Homo sapien
gagcaagcctagaacctgatcacac

SEQ ID NO: 590043 - DNA, 25 bp, Homo sapien
ctgggggagcaagcctagaacctga

SEQ ID NO: 590044 - DNA, 25 bp, Homo sapien
tgctcttgctatgtccctgtgaatg

SEQ ID NO: 590045 - DNA, 25 bp, Homo sapien
ttgccttggaccagggacgctggcc

SEQ ID NO: 590046 - DNA, 25 bp, Homo sapien
ccctgtgaatgtcccactgtggatt

SEQ ID NO: 590047 - DNA, 25 bp, Homo sapien
cttgattcctgacttgccttggacc

SEQ ID NO: 590048 - DNA, 25 bp, Homo sapien
gcacggacagctcctcccctgcaca

SEQ ID NO: 590049 - DNA, 25 bp, Homo sapien
cacggacagctcctcccctgcacac

SEQ ID NO: 590050 - DNA, 25 bp, Homo sapien
attacagctgctggtccagtatcca

SEQ ID NO: 590051 - DNA, 25 bp, Homo sapien
acagctgctggtccagtatccacgc

SEQ ID NO: 590052 - DNA, 25 bp, Homo sapien
catgcaattacagctgctggtccag

SEQ ID NO: 590053 - DNA, 25 bp, Homo sapien
tcatgcaattacagctgctggtcca

SEQ ID NO: 590054 - DNA, 25 bp, Homo sapien
accatgacaaccatgaactcatgcc

SEQ ID NO: 590055 - DNA, 25 bp, Homo sapien
gatgctgtcagcaattgtcaccatg

SEQ ID NO: 590056 - DNA, 25 bp, Homo sapien
tgaattcctgatgctcatgaacaac

SEQ ID NO: 590057 - DNA, 25 bp, Homo sapien
gaactcatgccccttatagggccct

SEQ ID NO: 590058 - DNA, 25 bp, Homo sapien
ctatcttgggaacactccagacttc

SEQ ID NO: 590059 - DNA, 25 bp, Homo sapien
gcaggagtaggtgcagcagtaccca

SEQ ID NO: 590060 - DNA, 25 bp, Homo sapien
tcctgctggacttcggcaggagtag

SEQ ID NO: 590061 - DNA, 25 bp, Homo sapien
cactccagacttccttgtggtcagg

SEQ ID NO: 590062 - DNA, 25 bp, Homo sapien
tcctcccttacagatgaccacacag

SEQ ID NO: 590063 - DNA, 25 bp, Homo sapien
tctgcatcctcccttacagatgacc

SEQ ID NO: 590064 - DNA, 25 bp, Homo sapien
ttctgcatcctcccttacagatgac

SEQ ID NO: 590065 - DNA, 25 bp, Homo sapien
gcatcctcccttacagatgaccaca

SEQ ID NO: 590066 - DNA, 25 bp, Homo sapien
aacttgaatggcagcttcttagatc

SEQ ID NO: 590067 - DNA, 25 bp, Homo sapien
agaacttggggagggcacgaatcct

SEQ ID NO: 590068 - DNA, 25 bp, Homo sapien
ctaaagtcctactttctgttgcagc

SEQ ID NO: 590069 - DNA, 25 bp, Homo sapien
agctgagtcaacgtagacagctgag

SEQ ID NO: 590070 - DNA, 25 bp, Homo sapien
gagtcaacgtagacagctgagtgaa

SEQ ID NO: 590071 - DNA, 25 bp, Homo sapien
caaagatggcagcaaggtgtcttca

SEQ ID NO: 590072 - DNA, 25 bp, Homo sapien
tgaggctctggactcaatttcctgg

SEQ ID NO: 590073 - DNA, 25 bp, Homo sapien
cacgtcagtgctgatgtgaggctct

SEQ ID NO: 590074 - DNA, 25 bp, Homo sapien
tactcattagtcagcctcacgtcag

SEQ ID NO: 590075 - DNA, 25 bp, Homo sapien
ggctcggtacttgtggctgtttgct

SEQ ID NO: 590076 - DNA, 25 bp, Homo sapien
ataaatggaaggccagctaggtctc

SEQ ID NO: 590077 - DNA, 25 bp, Homo sapien
ttttatctggaagagggctcggtac

SEQ ID NO: 590078 - DNA, 25 bp, Homo sapien
tgtaagcagggcgtcttcctgtttt

SEQ ID NO: 590079 - DNA, 25 bp, Homo sapien
tcccttttcatcaggctgtaggttg

SEQ ID NO: 590080 - DNA, 25 bp, Homo sapien
cccttttcatcaggctgtaggttgc

SEQ ID NO: 590081 - DNA, 25 bp, Homo sapien
taggttgccagggttatcttgtgcc

SEQ ID NO: 590082 - DNA, 25 bp, Homo sapien
ctgtaggttgccagggttatcttgt

SEQ ID NO: 590083 - DNA, 25 bp, Homo sapien
taagctcctgcttagattgagacac

SEQ ID NO: 590084 - DNA, 25 bp, Homo sapien
ggtcttttctgggtcggaggtagca

SEQ ID NO: 590085 - DNA, 25 bp, Homo sapien
gagccctgcagattcttcacccagg

SEQ ID NO: 590086 - DNA, 25 bp, Homo sapien
ggtcggaggtagcagggagccctgc

SEQ ID NO: 590087 - DNA, 25 bp, Homo sapien
gcccaagctgtgcactggtttccaa

SEQ ID NO: 590088 - DNA, 25 bp, Homo sapien
tcatcaacctgggtcccacagaagg

SEQ ID NO: 590089 - DNA, 25 bp, Homo sapien
tgggtgctacccagatcccttgagc

SEQ ID NO: 590090 - DNA, 25 bp, Homo sapien
tgcccctgtggaaagcttcggtgta

SEQ ID NO: 590091 - DNA, 25 bp, Homo sapien
caagacctggaggatgtgagtctca

SEQ ID NO: 590092 - DNA, 25 bp, Homo sapien
gatcatcagtccatgagtaaataga

SEQ ID NO: 590093 - DNA, 25 bp, Homo sapien
tctggctgacagcacgatcgagctc

SEQ ID NO: 590094 - DNA, 25 bp, Homo sapien
cgagctccagcagatagaatgttga

SEQ ID NO: 590095 - DNA, 25 bp, Homo sapien
tacaagaaggaatggcattcgacat

SEQ ID NO: 590096 - DNA, 25 bp, Homo sapien
tcgacatagaccgactttcaaaaac

SEQ ID NO: 590097 - DNA, 25 bp, Homo sapien
ggcattcgacatagaccgactttca

SEQ ID NO: 590098 - DNA, 25 bp, Homo sapien
gaaggaatggcattcgacatagacc

SEQ ID NO: 590099 - DNA, 25 bp, Homo sapien
caggagctctgtggcatcttgcata

SEQ ID NO: 590100 - DNA, 25 bp, Homo sapien
cccaggagctctgtggcatcttgca

SEQ ID NO: 590101 - DNA, 25 bp, Homo sapien
gagctctgtggcatcttgcataagt

SEQ ID NO: 590102 - DNA, 25 bp, Homo sapien
ctgtggcatcttgcataagtaacaa

SEQ ID NO: 590103 - DNA, 25 bp, Homo sapien
cttgcagtcaacctgaagttaaaat

SEQ ID NO: 590104 - DNA, 25 bp, Homo sapien
ggtgtctctcaggtcctacaggaga

SEQ ID NO: 590105 - DNA, 25 bp, Homo sapien
ttaaaattcgcaatgcaagcttctg

SEQ ID NO: 590106 - DNA, 25 bp, Homo sapien
tgttcttgcagtcaacctgaagtta

SEQ ID NO: 590107 - DNA, 25 bp, Homo sapien
tacagggtctacacgactacagcac

SEQ ID NO: 590108 - DNA, 25 bp, Homo sapien
tgacctcatgatgaacgccgagtgg

SEQ ID NO: 590109 - DNA, 25 bp, Homo sapien
taggaactgtttcaggccggtcaca

SEQ ID NO: 590110 - DNA, 25 bp, Homo sapien
tcagaagaagcgtcagagagcagct

SEQ ID NO: 590111 - DNA, 25 bp, Homo sapien
gcaggctttcacatccacgttggct

SEQ ID NO: 590112 - DNA, 25 bp, Homo sapien
aaggcggtgttgtggttttcctgca

SEQ ID NO: 590113 - DNA, 25 bp, Homo sapien
tgcagtgaaggggaaatgcgctcct

SEQ ID NO: 590114 - DNA, 25 bp, Homo sapien
ggggctgctgagtcggtgaaggcgg

SEQ ID NO: 590115 - DNA, 25 bp, Homo sapien
ctgccatgctcatggtgttccccat

SEQ ID NO: 590116 - DNA, 25 bp, Homo sapien
tgcagctttaggagcacctgccatg

SEQ ID NO: 590117 - DNA, 25 bp, Homo sapien
tctgcagctttaggagcacctgcca

SEQ ID NO: 590118 - DNA, 25 bp, Homo sapien
agcacctgccatgctcatggtgttc

SEQ ID NO: 590119 - DNA, 25 bp, Homo sapien
ccactgagtggcactcatggcgtgg

SEQ ID NO: 590120 - DNA, 25 bp, Homo sapien
ggtcttgctgggcatttgcactgac

SEQ ID NO: 590121 - DNA, 25 bp, Homo sapien
actcatggcgtggtgcctggctctt

SEQ ID NO: 590122 - DNA, 25 bp, Homo sapien
cagctctgggggtgcctttggatgt

SEQ ID NO: 590123 - DNA, 25 bp, Homo sapien
aatccctgcatggaacgactgtctg

SEQ ID NO: 590124 - DNA, 25 bp, Homo sapien
ggcaccgactgtcactgccaacgag

SEQ ID NO: 590125 - DNA, 25 bp, Homo sapien
cgagtctttgcagcgcagggctatt

SEQ ID NO: 590126 - DNA, 25 bp, Homo sapien
agggctatttcctccactcaggctg

SEQ ID NO: 590127 - DNA, 25 bp, Homo sapien
tgtgagttaacctgccctcgagtga

SEQ ID NO: 590128 - DNA, 25 bp, Homo sapien
tgtcaatacaggagccactagaccc

SEQ ID NO: 590129 - DNA, 25 bp, Homo sapien
tattcctatagcaatgctgcccagg

SEQ ID NO: 590130 - DNA, 25 bp, Homo sapien
gacccctgtggctctttgaatttaa

SEQ ID NO: 590131 - DNA, 25 bp, Homo sapien
gagatgtaagatggaaagcaaggat

SEQ ID NO: 590132 - DNA, 25 bp, Homo sapien
ggatttcaattctgagccatctact

SEQ ID NO: 590133 - DNA, 25 bp, Homo sapien
tataaagagaatgagatgtaagatg

SEQ ID NO: 590134 - DNA, 25 bp, Homo sapien
agactgtcttagcaacctggcttca

SEQ ID NO: 590135 - DNA, 25 bp, Homo sapien
cattgtcaagagtggcatggagcca

SEQ ID NO: 590136 - DNA, 25 bp, Homo sapien
caagtgctgaaagcatggcccacag

SEQ ID NO: 590137 - DNA, 25 bp, Homo sapien
gccaaaggctgagtctaagggatct

SEQ ID NO: 590138 - DNA, 25 bp, Homo sapien
tatgagacgcttttcagcacacccg

SEQ ID NO: 590139 - DNA, 25 bp, Homo sapien
agacgcgcggctcttcccggctacg

SEQ ID NO: 590140 - DNA, 25 bp, Homo sapien
gctggcgcgcagacgcgcggctctt

SEQ ID NO: 590141 - DNA, 25 bp, Homo sapien
tgcgccagagagctcgggcggcggg

SEQ ID NO: 590142 - DNA, 25 bp, Homo sapien
ctgagcgcggcggagctagcgctgc

SEQ ID NO: 590143 - DNA, 25 bp, Homo sapien
catcaaggctggtcacgaagaggtt

SEQ ID NO: 590144 - DNA, 25 bp, Homo sapien
tagatgcactggatagcgaccatgc

SEQ ID NO: 590145 - DNA, 25 bp, Homo sapien
aaagtgtagaccacgaagactgccg

SEQ ID NO: 590146 - DNA, 25 bp, Homo sapien
gtgaacatgttgaggccgtcgacgc

SEQ ID NO: 590147 - DNA, 25 bp, Homo sapien
agtggcatagtagtccaggggctcc

SEQ ID NO: 590148 - DNA, 25 bp, Homo sapien
gtggcatagtagtccaggggctcct

SEQ ID NO: 590149 - DNA, 25 bp, Homo sapien
cagtggcatagtagtccaggggctc

SEQ ID NO: 590150 - DNA, 25 bp, Homo sapien
agcagtggcatagtagtccaggggc

SEQ ID NO: 590151 - DNA, 25 bp, Homo sapien
ggtgagggggatgcgcttgcggccg

SEQ ID NO: 590152 - DNA, 25 bp, Homo sapien
ggatgcgcttgcggccgggttctgg

SEQ ID NO: 590153 - DNA, 25 bp, Homo sapien
cttgcggccgggttctggttgcagg

SEQ ID NO: 590154 - DNA, 25 bp, Homo sapien
ccgggttctggttgcagggcttcct

SEQ ID NO: 590155 - DNA, 25 bp, Homo sapien
cccaagcagtggctgtaaggagtca

SEQ ID NO: 590156 - DNA, 25 bp, Homo sapien
tcaggaagagacataaagggcaggt

SEQ ID NO: 590157 - DNA, 25 bp, Homo sapien
gagttctgacactctccggcaggta

SEQ ID NO: 590158 - DNA, 25 bp, Homo sapien
aagcagatgttattcccaggccggg

SEQ ID NO: 590159 - DNA, 25 bp, Homo sapien
aataaaccccatgtcatgtctctcc

SEQ ID NO: 590160 - DNA, 25 bp, Homo sapien
ttactgacctggttttatgccttgc

SEQ ID NO: 590161 - DNA, 25 bp, Homo sapien
gttattactgacctggttttatgcc

SEQ ID NO: 590162 - DNA, 25 bp, Homo sapien
ccaaaccttttctactcacaggaag

SEQ ID NO: 590163 - DNA, 25 bp, Homo sapien
ggagttccgttcaaccatattcatc

SEQ ID NO: 590164 - DNA, 25 bp, Homo sapien
gttcaaccatattcatcagtgccca

SEQ ID NO: 590165 - DNA, 25 bp, Homo sapien
tcaacctgggtggtccttggagttc

SEQ ID NO: 590166 - DNA, 25 bp, Homo sapien
gtccttggagttccgttcaaccata

SEQ ID NO: 590167 - DNA, 25 bp, Homo sapien
tgcaaccagttgttacaaaagcctg

SEQ ID NO: 590168 - DNA, 25 bp, Homo sapien
actgttgatgggctccaaacacagc

SEQ ID NO: 590169 - DNA, 25 bp, Homo sapien
tacaagggagggtttcatgcaacca

SEQ ID NO: 590170 - DNA, 25 bp, Homo sapien
gaactaaagctggtagcactgttga

SEQ ID NO: 590171 - DNA, 25 bp, Homo sapien
tattcaccatgatgtcaacagctgt

SEQ ID NO: 590172 - DNA, 25 bp, Homo sapien
ggatcctggctgtatgtctcatgac

SEQ ID NO: 590173 - DNA, 25 bp, Homo sapien
aagatgaccatcgaagcaagcctcc

SEQ ID NO: 590174 - DNA, 25 bp, Homo sapien
caacagctgtgactcctggtcttag

SEQ ID NO: 590175 - DNA, 25 bp, Homo sapien
gaaacccaagggtagtgccaggaga

SEQ ID NO: 590176 - DNA, 25 bp, Homo sapien
tcagatccataaggtcaagagggct

SEQ ID NO: 590177 - DNA, 25 bp, Homo sapien
tccacagcacaggatacggccatga

SEQ ID NO: 590178 - DNA, 25 bp, Homo sapien
tgaactcgggaaatggtataaccag

SEQ ID NO: 590179 - DNA, 25 bp, Homo sapien
tagaaaaggctaggtacacagctct

SEQ ID NO: 590180 - DNA, 25 bp, Homo sapien
caccccatccagttcatgagaatct

SEQ ID NO: 590181 - DNA, 25 bp, Homo sapien
taatttgaggacaaccattccagac

SEQ ID NO: 590182 - DNA, 25 bp, Homo sapien
gtctttggttcagctaagctaggaa

SEQ ID NO: 590183 - DNA, 25 bp, Homo sapien
tcacatttatgaagcaagccccact

SEQ ID NO: 590184 - DNA, 25 bp, Homo sapien
caaactcccacttgtcatgtgacag

SEQ ID NO: 590185 - DNA, 25 bp, Homo sapien
catgtgacaggtaaactatcttggt

SEQ ID NO: 590186 - DNA, 25 bp, Homo sapien
gacagaacccctacatgaaacagaa

SEQ ID NO: 590187 - DNA, 25 bp, Homo sapien
ccctcagtggcttttagggctggca

SEQ ID NO: 590188 - DNA, 25 bp, Homo sapien
gacctgtgtaggacgtccagtgaaa

SEQ ID NO: 590189 - DNA, 25 bp, Homo sapien
tcagcaatgggtgcaagtggacctg

SEQ ID NO: 590190 - DNA, 25 bp, Homo sapien
gtgaatcagctagaatccatccaag

SEQ ID NO: 590191 - DNA, 25 bp, Homo sapien
cagcactgagggagtatgaggatca

SEQ ID NO: 590192 - DNA, 25 bp, Homo sapien
agcagaacactggtccttgaagcct

SEQ ID NO: 590193 - DNA, 25 bp, Homo sapien
atcagagtagcctcagccacggtgg

SEQ ID NO: 590194 - DNA, 25 bp, Homo sapien
cagagtagaggcactatcgcgagca

SEQ ID NO: 590195 - DNA, 25 bp, Homo sapien
tgtgagcctcgatgctgtccagggc

SEQ ID NO: 590196 - DNA, 25 bp, Homo sapien
ctgtgtgagcctcgatgctgtccag

SEQ ID NO: 590197 - DNA, 25 bp, Homo sapien
tgtgtgagcctcgatgctgtccagg

SEQ ID NO: 590198 - DNA, 25 bp, Homo sapien
gtgagcctcgatgctgtccagggcc

SEQ ID NO: 590199 - DNA, 25 bp, Homo sapien
caagatttctatgcaggatttacct

SEQ ID NO: 590200 - DNA, 25 bp, Homo sapien
gcttaagcttgaattagatccctgc

SEQ ID NO: 590201 - DNA, 25 bp, Homo sapien
gattttgcccactattcctctgagc

SEQ ID NO: 590202 - DNA, 25 bp, Homo sapien
tgttgctcttatctgcaaggtggca

SEQ ID NO: 590203 - DNA, 25 bp, Homo sapien
tacttcggctgcaaaacccatggtt

SEQ ID NO: 590204 - DNA, 25 bp, Homo sapien
cctgagcaatctttcgatggatgga

SEQ ID NO: 590205 - DNA, 25 bp, Homo sapien
ttgtttgagtgtcttatccctgagc

SEQ ID NO: 590206 - DNA, 25 bp, Homo sapien
cagctgcaaaatggtttaatgcccc

SEQ ID NO: 590207 - DNA, 25 bp, Homo sapien
gatgcaacacatctacgtgtagcac

SEQ ID NO: 590208 - DNA, 25 bp, Homo sapien
taagcgtcatcgtcattgccatagc

SEQ ID NO: 590209 - DNA, 25 bp, Homo sapien
tgcggtcactgtcggccttgcaagg

SEQ ID NO: 590210 - DNA, 25 bp, Homo sapien
gcactacgacgttatgtttgggtaa

SEQ ID NO: 590211 - DNA, 25 bp, Homo sapien
ttgtcatttgagaaaggatgcagga

SEQ ID NO: 590212 - DNA, 25 bp, Homo sapien
tttgagaaaggatgcaggaggacaa

SEQ ID NO: 590213 - DNA, 25 bp, Homo sapien
ccctctgggccttgaaaatccttgc

SEQ ID NO: 590214 - DNA, 25 bp, Homo sapien
tatgattcctgggatccaacgagcc

SEQ ID NO: 590215 - DNA, 25 bp, Homo sapien
gttctgattgctctcacagcccagg

SEQ ID NO: 590216 - DNA, 25 bp, Homo sapien
cagccccaacgcagtctgtgtatga

SEQ ID NO: 590217 - DNA, 25 bp, Homo sapien
tgctgaaaccttcgggcaacacctt

SEQ ID NO: 590218 - DNA, 25 bp, Homo sapien
gatcccatggcaggtagggaaagct

SEQ ID NO: 590219 - DNA, 25 bp, Homo sapien
gcaacaccttgataccaggatccca

SEQ ID NO: 590220 - DNA, 25 bp, Homo sapien
gagccctacacacgttgcctggatt

SEQ ID NO: 590221 - DNA, 25 bp, Homo sapien
agaacatgggccagcagtgagagca

SEQ ID NO: 590222 - DNA, 25 bp, Homo sapien
ggaattactcggctgaagccacaga

SEQ ID NO: 590223 - DNA, 25 bp, Homo sapien
gattgaatcctaccatcagggcaca

SEQ ID NO: 590224 - DNA, 25 bp, Homo sapien
tcatccacgtgtccagtgaggaaac

SEQ ID NO: 590225 - DNA, 25 bp, Homo sapien
ggtgtagatgccaggtttcccgact

SEQ ID NO: 590226 - DNA, 25 bp, Homo sapien
aggtttcccgactgctccagcgtgt

SEQ ID NO: 590227 - DNA, 25 bp, Homo sapien
tgtagatgccaggtttcccgactgc

SEQ ID NO: 590228 - DNA, 25 bp, Homo sapien
gatgccaggtttcccgactgctcca

SEQ ID NO: 590229 - DNA, 25 bp, Homo sapien
atttgccgcccactttgttcccacg

SEQ ID NO: 590230 - DNA, 25 bp, Homo sapien
cctgcatttgccgcccactttgttc

SEQ ID NO: 590231 - DNA, 25 bp, Homo sapien
gcatttgccgcccactttgttccca

SEQ ID NO: 590232 - DNA, 25 bp, Homo sapien
tgccgcccactttgttcccacggga

SEQ ID NO: 590233 - DNA, 25 bp, Homo sapien
ccactgaacacctcagctttgcggg

SEQ ID NO: 590234 - DNA, 25 bp, Homo sapien
tggccctttggacgggtgtgacttc

SEQ ID NO: 590235 - DNA, 25 bp, Homo sapien
gcaatgagcactggcctttggttca

SEQ ID NO: 590236 - DNA, 25 bp, Homo sapien
ggctgggcaatgagcactggccttt

SEQ ID NO: 590237 - DNA, 25 bp, Homo sapien
gccaactcccttggcccactcctgt

SEQ ID NO: 590238 - DNA, 25 bp, Homo sapien
tcgccaactcccttggcccactcct

SEQ ID NO: 590239 - DNA, 25 bp, Homo sapien
cagtcgccaactcccttggcccact

SEQ ID NO: 590240 - DNA, 25 bp, Homo sapien
ctcacagtcgccaactcccttggcc

SEQ ID NO: 590241 - DNA, 25 bp, Homo sapien
caaaagtcacggtctgatcagaaaa

SEQ ID NO: 590242 - DNA, 25 bp, Homo sapien
aactgcagggcagaatgggtccctg

SEQ ID NO: 590243 - DNA, 25 bp, Homo sapien
ctgaacctggcatccatagtggact

SEQ ID NO: 590244 - DNA, 25 bp, Homo sapien
caatatcacagccaaaagtcacggt

SEQ ID NO: 590245 - DNA, 25 bp, Homo sapien
tcgattgttcttgtggtcagcagtg

SEQ ID NO: 590246 - DNA, 25 bp, Homo sapien
acagcctttgctcgattgttcttgt

SEQ ID NO: 590247 - DNA, 25 bp, Homo sapien
cgattgttcttgtggtcagcagtgc

SEQ ID NO: 590248 - DNA, 25 bp, Homo sapien
agcacagcctttgctcgattgttct

SEQ ID NO: 590249 - DNA, 25 bp, Homo sapien
tagtttctctcatgggctttgccag

SEQ ID NO: 590250 - DNA, 25 bp, Homo sapien
agtttctctcatgggctttgccagc

SEQ ID NO: 590251 - DNA, 25 bp, Homo sapien
ctagtttctctcatgggctttgcca

SEQ ID NO: 590252 - DNA, 25 bp, Homo sapien
tttctctcatgggctttgccagcac

SEQ ID NO: 590253 - DNA, 25 bp, Homo sapien
attgttcacctgcagccagttctgg

SEQ ID NO: 590254 - DNA, 25 bp, Homo sapien
ggctgaaggctagggctaccttcct

SEQ ID NO: 590255 - DNA, 25 bp, Homo sapien
tggtctctaatcatccaccacatga

SEQ ID NO: 590256 - DNA, 25 bp, Homo sapien
caatccagtaacattcggcagaggt

SEQ ID NO: 590257 - DNA, 25 bp, Homo sapien
ggttattcctcacatcaagtatcaa

SEQ ID NO: 590258 - DNA, 25 bp, Homo sapien
gtgtgccctgccatgtgacgttagc

SEQ ID NO: 590259 - DNA, 25 bp, Homo sapien
gacttcttctggttattcctcacat

SEQ ID NO: 590260 - DNA, 25 bp, Homo sapien
gacgttagcagggttgacttcttct

SEQ ID NO: 590261 - DNA, 25 bp, Homo sapien
agcaggtcctccaggctaccaccct

SEQ ID NO: 590262 - DNA, 25 bp, Homo sapien
gaagcgaggaatggattcagatcct

SEQ ID NO: 590263 - DNA, 25 bp, Homo sapien
gggctttgtcctgccgtcgtgacct

SEQ ID NO: 590264 - DNA, 25 bp, Homo sapien
ttgtcctgccgtcgtgacctctgct

SEQ ID NO: 590265 - DNA, 25 bp, Homo sapien
aaaccacaggaacacgtagatgctc

SEQ ID NO: 590266 - DNA, 25 bp, Homo sapien
taatcagctgtacgtagagaggcag

SEQ ID NO: 590267 - DNA, 25 bp, Homo sapien
gaggcagtgctggtgtcatcaaaag

SEQ ID NO: 590268 - DNA, 25 bp, Homo sapien
tctagttgacatatgaacaccccgt

SEQ ID NO: 590269 - DNA, 25 bp, Homo sapien
tgcagccatgtccacaatgcttgac

SEQ ID NO: 590270 - DNA, 25 bp, Homo sapien
gaagcacagccctcgcaaagagctg

SEQ ID NO: 590271 - DNA, 25 bp, Homo sapien
tgacactcagcttaggccgactcag

SEQ ID NO: 590272 - DNA, 25 bp, Homo sapien
caagaccaagctgcggtcaaagcca

SEQ ID NO: 590273 - DNA, 25 bp, Homo sapien
ttcttgcctgctccgaagactgaag

SEQ ID NO: 590274 - DNA, 25 bp, Homo sapien
gataaagctagggacaagggtgctc

SEQ ID NO: 590275 - DNA, 25 bp, Homo sapien
ggttctctgtgtcatccccatagga

SEQ ID NO: 590276 - DNA, 25 bp, Homo sapien
gagaaggagtaaccattagtcacgc

SEQ ID NO: 590277 - DNA, 25 bp, Homo sapien
tggaccctccctcgtcgtgatgcat

SEQ ID NO: 590278 - DNA, 25 bp, Homo sapien
atggaccctccctcgtcgtgatgca

SEQ ID NO: 590279 - DNA, 25 bp, Homo sapien
gatggaccctccctcgtcgtgatgc

SEQ ID NO: 590280 - DNA, 25 bp, Homo sapien
tggtccagtggcttgatgtcctcca

SEQ ID NO: 590281 - DNA, 25 bp, Homo sapien
tgaaacacagctgggggtagcgatc

SEQ ID NO: 590282 - DNA, 25 bp, Homo sapien
ctgatttcttatcccatgaaacaca

SEQ ID NO: 590283 - DNA, 25 bp, Homo sapien
tgggggtagcgatcagagaagggct

SEQ ID NO: 590284 - DNA, 25 bp, Homo sapien
ggtgaaagtagtgcagaagaagcat

SEQ ID NO: 590285 - DNA, 25 bp, Homo sapien
ggcacccgtccatatgggcttttct

SEQ ID NO: 590286 - DNA, 25 bp, Homo sapien
gctgtcagcggagatgcccttgggt

SEQ ID NO: 590287 - DNA, 25 bp, Homo sapien
gacattgccctgtgtatgtgttggg

SEQ ID NO: 590288 - DNA, 25 bp, Homo sapien
acccgacaaggagacattgccctgt

SEQ ID NO: 590289 - DNA, 25 bp, Homo sapien
cttggagcagccagtgtcccaggtc

SEQ ID NO: 590290 - DNA, 25 bp, Homo sapien
taaccggcagaaaacccttggagca

SEQ ID NO: 590291 - DNA, 25 bp, Homo sapien
catcccaaatggatataaccggcag

SEQ ID NO: 590292 - DNA, 25 bp, Homo sapien
tctttttctcgcagctgatagaggc

SEQ ID NO: 590293 - DNA, 25 bp, Homo sapien
ctttgatgcctacatcatatccaca

SEQ ID NO: 590294 - DNA, 25 bp, Homo sapien
ctacatcatatccacaccctgtgtg

SEQ ID NO: 590295 - DNA, 25 bp, Homo sapien
ttgatgcctacatcatatccacacc

SEQ ID NO: 590296 - DNA, 25 bp, Homo sapien
tgtctttgatgcctacatcatatcc

SEQ ID NO: 590297 - DNA, 25 bp, Homo sapien
catgactgagagtcaggttccagga

SEQ ID NO: 590298 - DNA, 25 bp, Homo sapien
atgactgagagtcaggttccaggag

SEQ ID NO: 590299 - DNA, 25 bp, Homo sapien
cctctcccatgactgagagtcaggt

SEQ ID NO: 590300 - DNA, 25 bp, Homo sapien
tcccatgactgagagtcaggttcca

SEQ ID NO: 590301 - DNA, 25 bp, Homo sapien
ctatctttggtcctaggagcatcct

SEQ ID NO: 590302 - DNA, 25 bp, Homo sapien
ttggtcctaggagcatcctgtgggc

SEQ ID NO: 590303 - DNA, 25 bp, Homo sapien
cctaggagcatcctgtgggcgtaaa

SEQ ID NO: 590304 - DNA, 25 bp, Homo sapien
catcctgtgggcgtaaagggaagtc

SEQ ID NO: 590305 - DNA, 25 bp, Homo sapien
gaattttgcacggaagctccactgg

SEQ ID NO: 590306 - DNA, 25 bp, Homo sapien
cagaattttgcacggaagctccact

SEQ ID NO: 590307 - DNA, 25 bp, Homo sapien
acagaattttgcacggaagctccac

SEQ ID NO: 590308 - DNA, 25 bp, Homo sapien
attttgcacggaagctccactggct

SEQ ID NO: 590309 - DNA, 25 bp, Homo sapien
ctgatctttcggaaaggttggtcca

SEQ ID NO: 590310 - DNA, 25 bp, Homo sapien
ctttgaccctcactgtgacctggct

SEQ ID NO: 590311 - DNA, 25 bp, Homo sapien
gcagagatgcttacatgctgtttta

SEQ ID NO: 590312 - DNA, 25 bp, Homo sapien
tggcaatatccaggaagtgggctct

SEQ ID NO: 590313 - DNA, 25 bp, Homo sapien
agcagctgctgaggcccgtggctca

SEQ ID NO: 590314 - DNA, 25 bp, Homo sapien
actcagcagctgctgaggcccgtgg

SEQ ID NO: 590315 - DNA, 25 bp, Homo sapien
tcagcagctgctgaggcccgtggct

SEQ ID NO: 590316 - DNA, 25 bp, Homo sapien
gcagctgctgaggcccgtggctcac

SEQ ID NO: 590317 - DNA, 25 bp, Homo sapien
gtcctcaggcaacctcagggaaggg

SEQ ID NO: 590318 - DNA, 25 bp, Homo sapien
tggtccaggattcggagcaatagac

SEQ ID NO: 590319 - DNA, 25 bp, Homo sapien
tagaacagtgaaggcgtcctcaggc

SEQ ID NO: 590320 - DNA, 25 bp, Homo sapien
gagagaacgtcacttcctgagtccc

SEQ ID NO: 590321 - DNA, 25 bp, Homo sapien
ttctcacctacaggtgggaatttaa

SEQ ID NO: 590322 - DNA, 25 bp, Homo sapien
tcacctacaggtgggaatttaacaa

SEQ ID NO: 590323 - DNA, 25 bp, Homo sapien
tgttcatcaatgatactggattaag

SEQ ID NO: 590324 - DNA, 25 bp, Homo sapien
atgttcatcaatgatactggattaa

SEQ ID NO: 590325 - DNA, 25 bp, Homo sapien
aggacccagggcagctcagaaaacc

SEQ ID NO: 590326 - DNA, 25 bp, Homo sapien
acaggacccagggcagctcagaaaa

SEQ ID NO: 590327 - DNA, 25 bp, Homo sapien
ggacccagggcagctcagaaaaccc

SEQ ID NO: 590328 - DNA, 25 bp, Homo sapien
tcacaggacccagggcagctcagaa

SEQ ID NO: 590329 - DNA, 25 bp, Homo sapien
ggagggtgcacctgaaaacagaccc

SEQ ID NO: 590330 - DNA, 25 bp, Homo sapien
tgcagaagtgtcctagccgccacca

SEQ ID NO: 590331 - DNA, 25 bp, Homo sapien
tctgcagaagtgtcctagccgccac

SEQ ID NO: 590332 - DNA, 25 bp, Homo sapien
agaagtgtcctagccgccaccaggc

SEQ ID NO: 590333 - DNA, 25 bp, Homo sapien
ggctttcttaagtccctgtcacgca

SEQ ID NO: 590334 - DNA, 25 bp, Homo sapien
gagacaaaccccacacggctataat

SEQ ID NO: 590335 - DNA, 25 bp, Homo sapien
ttggtcacgcccttgccttgagcac

SEQ ID NO: 590336 - DNA, 25 bp, Homo sapien
tcacgcatgatcaagtgtgccagga

SEQ ID NO: 590337 - DNA, 25 bp, Homo sapien
ttgggaacacaggtttgaggtctca

SEQ ID NO: 590338 - DNA, 25 bp, Homo sapien
gggcatactctgctaggacttctgc

SEQ ID NO: 590339 - DNA, 25 bp, Homo sapien
tgcagcagcactaaccagcgtgggc

SEQ ID NO: 590340 - DNA, 25 bp, Homo sapien
tggaggtctctcatggtcttcggct

SEQ ID NO: 590341 - DNA, 25 bp, Homo sapien
ctcagccatgtctggcagccactta

SEQ ID NO: 590342 - DNA, 25 bp, Homo sapien
atgtctggcagccacttactttccc

SEQ ID NO: 590343 - DNA, 25 bp, Homo sapien
agtgacaacagctctcagccatgtc

SEQ ID NO: 590344 - DNA, 25 bp, Homo sapien
atcacctgggaacagcagctcgcct

SEQ ID NO: 590345 - DNA, 25 bp, Homo sapien
tcacatcgagggacgccgtgtgata

SEQ ID NO: 590346 - DNA, 25 bp, Homo sapien
tcgagggacgccgtgtgatatggct

SEQ ID NO: 590347 - DNA, 25 bp, Homo sapien
cacatcgagggacgccgtgtgatat

SEQ ID NO: 590348 - DNA, 25 bp, Homo sapien
ggacgccgtgtgatatggcttggag

SEQ ID NO: 590349 - DNA, 25 bp, Homo sapien
agagggagatccacggcccacttgc

SEQ ID NO: 590350 - DNA, 25 bp, Homo sapien
ggcagagggagatccacggcccact

SEQ ID NO: 590351 - DNA, 25 bp, Homo sapien
agatccacggcccacttgccatgtg

SEQ ID NO: 590352 - DNA, 25 bp, Homo sapien
aaagggcagagggagatccacggcc

SEQ ID NO: 590353 - DNA, 25 bp, Homo sapien
ttcagacctggccaaaggaaattcc

SEQ ID NO: 590354 - DNA, 25 bp, Homo sapien
attcccctgcgccacaaggtatctg

SEQ ID NO: 590355 - DNA, 25 bp, Homo sapien
ctgcgccacaaggtatctgcaaaat

SEQ ID NO: 590356 - DNA, 25 bp, Homo sapien
aggaaattcccctgcgccacaaggt

SEQ ID NO: 590357 - DNA, 25 bp, Homo sapien
gtttgggatactttgaagagggcac

SEQ ID NO: 590358 - DNA, 25 bp, Homo sapien
ggtttgggatactttgaagagggca

SEQ ID NO: 590359 - DNA, 25 bp, Homo sapien
tggtttgggatactttgaagagggc

SEQ ID NO: 590360 - DNA, 25 bp, Homo sapien
atgtttacccccaatagtcttctgg

SEQ ID NO: 590361 - DNA, 25 bp, Homo sapien
tgaatgtttacccccaatagtcttc

SEQ ID NO: 590362 - DNA, 25 bp, Homo sapien
gcctgaatgtttacccccaatagtc

SEQ ID NO: 590363 - DNA, 25 bp, Homo sapien
tggcctgaatgtttacccccaatag

SEQ ID NO: 590364 - DNA, 25 bp, Homo sapien
gcaatgcccagagccggagctcaat

SEQ ID NO: 590365 - DNA, 25 bp, Homo sapien
aatgttgccaaatcccatggtcgca

SEQ ID NO: 590366 - DNA, 25 bp, Homo sapien
tacaggatgacaagtctgggctgcc

SEQ ID NO: 590367 - DNA, 25 bp, Homo sapien
tcgcaacttcaatatgaggagcagc

SEQ ID NO: 590368 - DNA, 25 bp, Homo sapien
gtatattcacaagcttctcagggtc

SEQ ID NO: 590369 - DNA, 25 bp, Homo sapien
agcctgtatattcacaagcttctca

SEQ ID NO: 590370 - DNA, 25 bp, Homo sapien
tattcacaagcttctcagggtctcc

SEQ ID NO: 590371 - DNA, 25 bp, Homo sapien
cagcctgtatattcacaagcttctc

SEQ ID NO: 590372 - DNA, 25 bp, Homo sapien
tcttttccaatgtggtatccattct

SEQ ID NO: 590373 - DNA, 25 bp, Homo sapien
ttttccaatgtggtatccattcttc

SEQ ID NO: 590374 - DNA, 25 bp, Homo sapien
ctaggtgacacatttttcttttcca

SEQ ID NO: 590375 - DNA, 25 bp, Homo sapien
tttcttttccaatgtggtatccatt

SEQ ID NO: 590376 - DNA, 25 bp, Homo sapien
gcagaaaagaatacgtccatgtggt

SEQ ID NO: 590377 - DNA, 25 bp, Homo sapien
cgctcgtcgctctaggacccattta

SEQ ID NO: 590378 - DNA, 25 bp, Homo sapien
caaggtctggatgcaacaagaacac

SEQ ID NO: 590379 - DNA, 25 bp, Homo sapien
taattcagggtgcacgatgcctgca

SEQ ID NO: 590380 - DNA, 25 bp, Homo sapien
tagactagggtcccagacccgaggc

SEQ ID NO: 590381 - DNA, 25 bp, Homo sapien
tctgcagtatccctacttgtgagct

SEQ ID NO: 590382 - DNA, 25 bp, Homo sapien
gtatccctacttgtgagctccccat

SEQ ID NO: 590383 - DNA, 25 bp, Homo sapien
cctccataataagacatgagctggg

SEQ ID NO: 590384 - DNA, 25 bp, Homo sapien
cccgtgacgggcagcgaagtcagcc

SEQ ID NO: 590385 - DNA, 25 bp, Homo sapien
tcccgtgacgggcagcgaagtcagc

SEQ ID NO: 590386 - DNA, 25 bp, Homo sapien
ggtctccacgcagacgcgagcgccc

SEQ ID NO: 590387 - DNA, 25 bp, Homo sapien
cgcggccagccggtctccacgcaga

SEQ ID NO: 590388 - DNA, 25 bp, Homo sapien
gactttccggcgcagttccgcggct

SEQ ID NO: 590389 - DNA, 25 bp, Homo sapien
actttccggcgcagttccgcggctt

SEQ ID NO: 590390 - DNA, 25 bp, Homo sapien
aagcctctggtaggggcacgggaag

SEQ ID NO: 590391 - DNA, 25 bp, Homo sapien
ctggtaggggcacgggaagagccgc

SEQ ID NO: 590392 - DNA, 25 bp, Homo sapien
ctctggtaggggcacgggaagagcc

SEQ ID NO: 590393 - DNA, 25 bp, Homo sapien
cgaagcctctggtaggggcacggga

SEQ ID NO: 590394 - DNA, 25 bp, Homo sapien
ggccggccgcggaggtcacaaggtg

SEQ ID NO: 590395 - DNA, 25 bp, Homo sapien
gccgcggaggtcacaaggtgggccc

SEQ ID NO: 590396 - DNA, 25 bp, Homo sapien
cggccgcggaggtcacaaggtgggc

SEQ ID NO: 590397 - DNA, 25 bp, Homo sapien
cgcggaggtcacaaggtgggcccac

SEQ ID NO: 590398 - DNA, 25 bp, Homo sapien
gcgacgtccagggtcagcgcgggcc

SEQ ID NO: 590399 - DNA, 25 bp, Homo sapien
gcgcggcgacgtccagggtcagcgc

SEQ ID NO: 590400 - DNA, 25 bp, Homo sapien
gccccccgcgtgggacgcagttcca

SEQ ID NO: 590401 - DNA, 25 bp, Homo sapien
acgtccagggtcagcgcgggccgcg

SEQ ID NO: 590402 - DNA, 25 bp, Homo sapien
cgcggcggcaactctaccacgtgga

SEQ ID NO: 590403 - DNA, 25 bp, Homo sapien
actctaccacgtggacaaaggcaca

SEQ ID NO: 590404 - DNA, 25 bp, Homo sapien
cattctcgacaatggaggagggcgt

SEQ ID NO: 590405 - DNA, 25 bp, Homo sapien
ggacaaaggcacagccgtgtctcat

SEQ ID NO: 590406 - DNA, 25 bp, Homo sapien
tacctatgaggtcgtcagtcccgct

SEQ ID NO: 590407 - DNA, 25 bp, Homo sapien
gacgggaaaagctaccacagtggca

SEQ ID NO: 590408 - DNA, 25 bp, Homo sapien
taattcaaacctagacagacgcacg

SEQ ID NO: 590409 - DNA, 25 bp, Homo sapien
gttgatgagaattcgctgccacgct

SEQ ID NO: 590410 - DNA, 25 bp, Homo sapien
tagggctggatcaaagtaacgacgg

SEQ ID NO: 590411 - DNA, 25 bp, Homo sapien
ggaacccacgactaagaagcgctgt

SEQ ID NO: 590412 - DNA, 25 bp, Homo sapien
aagtctccatgagcacaactccagg

SEQ ID NO: 590413 - DNA, 25 bp, Homo sapien
taacgacggttaagtacactcctga

SEQ ID NO: 590414 - DNA, 25 bp, Homo sapien
ctatggaaggagggctccaccaggg

SEQ ID NO: 590415 - DNA, 25 bp, Homo sapien
gagggctccaccagggtatttcctc

SEQ ID NO: 590416 - DNA, 25 bp, Homo sapien
ggctccaccagggtatttcctctgc

SEQ ID NO: 590417 - DNA, 25 bp, Homo sapien
tggaaggagggctccaccagggtat

SEQ ID NO: 590418 - DNA, 25 bp, Homo sapien
aacgccgccgcttatccatggtggt

SEQ ID NO: 590419 - DNA, 25 bp, Homo sapien
gtacaggcgggacagcaaacgccgc

SEQ ID NO: 590420 - DNA, 25 bp, Homo sapien
taggtcttgaaatccacagatgcca

SEQ ID NO: 590421 - DNA, 25 bp, Homo sapien
catggtggtgtagtagacattgaca

SEQ ID NO: 590422 - DNA, 25 bp, Homo sapien
gggtgaggcctgggcggtcaggatg

SEQ ID NO: 590423 - DNA, 25 bp, Homo sapien
ggcctgggcggtcaggatgaagttc

SEQ ID NO: 590424 - DNA, 25 bp, Homo sapien
gtgaggcctgggcggtcaggatgaa

SEQ ID NO: 590425 - DNA, 25 bp, Homo sapien
gaggcctgggcggtcaggatgaagt

SEQ ID NO: 590426 - DNA, 25 bp, Homo sapien
ctggcccagtcctggaagcggaagc

SEQ ID NO: 590427 - DNA, 25 bp, Homo sapien
ccagtcctggaagcggaagcagtca

SEQ ID NO: 590428 - DNA, 25 bp, Homo sapien
gcccagtcctggaagcggaagcagt

SEQ ID NO: 590429 - DNA, 25 bp, Homo sapien
tagctggcccagtcctggaagcgga

SEQ ID NO: 590430 - DNA, 25 bp, Homo sapien
ccagaatcagagtctctactgggca

SEQ ID NO: 590431 - DNA, 25 bp, Homo sapien
gagtctgcagtgtctccgcaacaac

SEQ ID NO: 590432 - DNA, 25 bp, Homo sapien
tcagagtctctactgggcaagtaga

SEQ ID NO: 590433 - DNA, 25 bp, Homo sapien
tgtctccgcaacaacagaaatgaac

SEQ ID NO: 590434 - DNA, 25 bp, Homo sapien
tcaggattcttacccttctcaaaat

SEQ ID NO: 590435 - DNA, 25 bp, Homo sapien
tgtgtcactgtgcttatcaggattc

SEQ ID NO: 590436 - DNA, 25 bp, Homo sapien
gcttatcaggattcttacccttctc

SEQ ID NO: 590437 - DNA, 25 bp, Homo sapien
actgtgcttatcaggattcttaccc

SEQ ID NO: 590438 - DNA, 25 bp, Homo sapien
ccgaacggccgcttggtggagatgt

SEQ ID NO: 590439 - DNA, 25 bp, Homo sapien
aaggaggagggtgccacgcacattt

SEQ ID NO: 590440 - DNA, 25 bp, Homo sapien
agatgtgtcccagaaccgaaggagg

SEQ ID NO: 590441 - DNA, 25 bp, Homo sapien
ggtgccacgcacatttgtcttgcct

SEQ ID NO: 590442 - DNA, 25 bp, Homo sapien
tataattaaggcagcgggcagcgcg

SEQ ID NO: 590443 - DNA, 25 bp, Homo sapien
acgtggtcgcgccaccgcgcgatta

SEQ ID NO: 590444 - DNA, 25 bp, Homo sapien
cttctggagccgctggtatagctcc

SEQ ID NO: 590445 - DNA, 25 bp, Homo sapien
acaggctcgtgagggagcggccggt

SEQ ID NO: 590446 - DNA, 25 bp, Homo sapien
tactagctgtcaaaagagtcctcag

SEQ ID NO: 590447 - DNA, 25 bp, Homo sapien
caagcactggattattatgccggtc

SEQ ID NO: 590448 - DNA, 25 bp, Homo sapien
acgtaagggcgttcactgcagtgca

SEQ ID NO: 590449 - DNA, 25 bp, Homo sapien
tctgcacgagaaaagtacacgggag

SEQ ID NO: 590450 - DNA, 25 bp, Homo sapien
tacacgggagtgaacaattgttacg

SEQ ID NO: 590451 - DNA, 25 bp, Homo sapien
ctgtccgctggaccaggccggtagg

SEQ ID NO: 590452 - DNA, 25 bp, Homo sapien
cggccggcccggctgggcgtggcgt

SEQ ID NO: 590453 - DNA, 25 bp, Homo sapien
gcccggctgggcgtggcgtagcacc

SEQ ID NO: 590454 - DNA, 25 bp, Homo sapien
tccgctggaccaggccggtaggaac

SEQ ID NO: 590455 - DNA, 25 bp, Homo sapien
cgcgatttcctatgttgcttggcta

SEQ ID NO: 590456 - DNA, 25 bp, Homo sapien
aaagtgggttctgagcgcgatttcc

SEQ ID NO: 590457 - DNA, 25 bp, Homo sapien
ggtgacagctgcgtatccgccgaat

SEQ ID NO: 590458 - DNA, 25 bp, Homo sapien
aatctcattggcattccggccgcct

SEQ ID NO: 590459 - DNA, 25 bp, Homo sapien
acagatgtcacctcggattcaacgt

SEQ ID NO: 590460 - DNA, 25 bp, Homo sapien
ttcggccagaccacagatgtcacct

SEQ ID NO: 590461 - DNA, 25 bp, Homo sapien
cttctagcctccttcggccagacca

SEQ ID NO: 590462 - DNA, 25 bp, Homo sapien
cagatgtcacctcggattcaacgtg

SEQ ID NO: 590463 - DNA, 25 bp, Homo sapien
ctcatgcagtaggttaaatggggag

SEQ ID NO: 590464 - DNA, 25 bp, Homo sapien
gggaggatttggattccagcagaac

SEQ ID NO: 590465 - DNA, 25 bp, Homo sapien
aggatttggattccagcagaactgc

SEQ ID NO: 590466 - DNA, 25 bp, Homo sapien
ccagcagaactgcaccgctttccat

SEQ ID NO: 590467 - DNA, 25 bp, Homo sapien
ccaaggaatccgtgagaccactggg

SEQ ID NO: 590468 - DNA, 25 bp, Homo sapien
ggacttcttcggtggcaaatctgaa

SEQ ID NO: 590469 - DNA, 25 bp, Homo sapien
catgaagtctttgcggacaccctga

SEQ ID NO: 590470 - DNA, 25 bp, Homo sapien
tgatactccacgctgactgtcacgt

SEQ ID NO: 590471 - DNA, 25 bp, Homo sapien
tgtccgggctttggtcctggggaca

SEQ ID NO: 590472 - DNA, 25 bp, Homo sapien
gcctggcaaccctcatttttggaaa

SEQ ID NO: 590473 - DNA, 25 bp, Homo sapien
tgcctggcaaccctcatttttggaa

SEQ ID NO: 590474 - DNA, 25 bp, Homo sapien
ccgcacagctcgcatgggaaatggc

SEQ ID NO: 590475 - DNA, 25 bp, Homo sapien
tcacgtccttcttgcgcttgaactt

SEQ ID NO: 590476 - DNA, 25 bp, Homo sapien
ctcatgtgcgtcttgagcgcggacg

SEQ ID NO: 590477 - DNA, 25 bp, Homo sapien
tagggccggtctcccgtgtgtgtgc

SEQ ID NO: 590478 - DNA, 25 bp, Homo sapien
ctgcaaaaatcgtttactccaagag

SEQ ID NO: 590479 - DNA, 25 bp, Homo sapien
gcaaaaatcgtttactccaagagac

SEQ ID NO: 590480 - DNA, 25 bp, Homo sapien
tgcaaaaatcgtttactccaagaga

SEQ ID NO: 590481 - DNA, 25 bp, Homo sapien
cagatgataacttaggatgtatttc

SEQ ID NO: 590482 - DNA, 25 bp, Homo sapien
agctcactttgcaatacaatttcca

SEQ ID NO: 590483 - DNA, 25 bp, Homo sapien
tttgcaatacaatttccactctatc

SEQ ID NO: 590484 - DNA, 25 bp, Homo sapien
ttcaaagctcactttgcaatacaat

SEQ ID NO: 590485 - DNA, 25 bp, Homo sapien
cttttatgataaatcagcatgtggt

SEQ ID NO: 590486 - DNA, 25 bp, Homo sapien
catgtggttctgagtgaatcttgca

SEQ ID NO: 590487 - DNA, 25 bp, Homo sapien
tatgataaatcagcatgtggttctg

SEQ ID NO: 590488 - DNA, 25 bp, Homo sapien
aaatcagcatgtggttctgagtgaa

SEQ ID NO: 590489 - DNA, 25 bp, Homo sapien
agtgaattccgctgggcaaaagtcc

SEQ ID NO: 590490 - DNA, 25 bp, Homo sapien
ctgtgtggactttaatatgctggta

SEQ ID NO: 590491 - DNA, 25 bp, Homo sapien
taagtactccttagaagcaaaactc

SEQ ID NO: 590492 - DNA, 25 bp, Homo sapien
agcaaaactcttgccacatgtttca

SEQ ID NO: 590493 - DNA, 25 bp, Homo sapien
gtgggtccctttggcctactgtgct

SEQ ID NO: 590494 - DNA, 25 bp, Homo sapien
gctggtgggtccctttggcctactg

SEQ ID NO: 590495 - DNA, 25 bp, Homo sapien
gactgctggtgggtccctttggcct

SEQ ID NO: 590496 - DNA, 25 bp, Homo sapien
tggtgggtccctttggcctactgtg

SEQ ID NO: 590497 - DNA, 25 bp, Homo sapien
ccgtccgcacgcattgcacatgaat

SEQ ID NO: 590498 - DNA, 25 bp, Homo sapien
cgctggagggcgttgagctgggtga

SEQ ID NO: 590499 - DNA, 25 bp, Homo sapien
tgtgccgccgaagagtggacttgtc

SEQ ID NO: 590500 - DNA, 25 bp, Homo sapien
tggacttgtcggtgaatgtccgtcc

SEQ ID NO: 590501 - DNA, 25 bp, Homo sapien
tggagaatggtggtaggtatttctc

SEQ ID NO: 590502 - DNA, 25 bp, Homo sapien
cttggagaatggtggtaggtatttc

SEQ ID NO: 590503 - DNA, 25 bp, Homo sapien
ggagaatggtggtaggtatttctct

SEQ ID NO: 590504 - DNA, 25 bp, Homo sapien
agaatggtggtaggtatttctcttt

SEQ ID NO: 590505 - DNA, 25 bp, Homo sapien
gaaagtacctgttgtctcgacctct

SEQ ID NO: 590506 - DNA, 25 bp, Homo sapien
tacctgttgtctcgacctctaacca

SEQ ID NO: 590507 - DNA, 25 bp, Homo sapien
aagtacctgttgtctcgacctctaa

SEQ ID NO: 590508 - DNA, 25 bp, Homo sapien
gagaaagtacctgttgtctcgacct

SEQ ID NO: 590509 - DNA, 25 bp, Homo sapien
tgttacagagtagtcatcgtggatg

SEQ ID NO: 590510 - DNA, 25 bp, Homo sapien
tagtcatcgtggatggtgctttccc

SEQ ID NO: 590511 - DNA, 25 bp, Homo sapien
gggcttggtgttccacttcattcat

SEQ ID NO: 590512 - DNA, 25 bp, Homo sapien
cttggggcttggtgttccacttcat

SEQ ID NO: 590513 - DNA, 25 bp, Homo sapien
tcttggactgcagccaggttgtgga

SEQ ID NO: 590514 - DNA, 25 bp, Homo sapien
tgtccgtcatcgttcttgggcgagc

SEQ ID NO: 590515 - DNA, 25 bp, Homo sapien
ctaagctcactgatggtggtggcca

SEQ ID NO: 590516 - DNA, 25 bp, Homo sapien
ttgggcgagccatctacaatgacaa

SEQ ID NO: 590517 - DNA, 25 bp, Homo sapien
cacacacgcagactaacaggatggg

SEQ ID NO: 590518 - DNA, 25 bp, Homo sapien
gaagccaggaagactgctaactaca

SEQ ID NO: 590519 - DNA, 25 bp, Homo sapien
acaggatgggaactgcttgaagctc

SEQ ID NO: 590520 - DNA, 25 bp, Homo sapien
aaaatctgcagaggccattcttgcc

SEQ ID NO: 590521 - DNA, 25 bp, Homo sapien
tgtgaagcatgttatcagcgcctga

SEQ ID NO: 590522 - DNA, 25 bp, Homo sapien
cagcgcctgaaacaccttgtagtgg

SEQ ID NO: 590523 - DNA, 25 bp, Homo sapien
gacaaacttcctagctgcgtatgtg

SEQ ID NO: 590524 - DNA, 25 bp, Homo sapien
tatgttctcacatgctcccaaggaa

SEQ ID NO: 590525 - DNA, 25 bp, Homo sapien
gtaacaaaatgatctattgtttcaa

SEQ ID NO: 590526 - DNA, 25 bp, Homo sapien
aatccctccagtaggtaacaaaatg

SEQ ID NO: 590527 - DNA, 25 bp, Homo sapien
tccctccagtaggtaacaaaatgat

SEQ ID NO: 590528 - DNA, 25 bp, Homo sapien
ggtaacaaaatgatctattgtttca

SEQ ID NO: 590529 - DNA, 25 bp, Homo sapien
cagagaccaactgggatccaagcag

SEQ ID NO: 590530 - DNA, 25 bp, Homo sapien
gtggcagagagctcaaccgcacttc

SEQ ID NO: 590531 - DNA, 25 bp, Homo sapien
caggaggtcctctgtaaccagtccc

SEQ ID NO: 590532 - DNA, 25 bp, Homo sapien
ttgaagcaagctcctaaatggccct

SEQ ID NO: 590533 - DNA, 25 bp, Homo sapien
ttgtaatggctagaagagacctgcc

SEQ ID NO: 590534 - DNA, 25 bp, Homo sapien
tatgagctatgaccaagagcaggct

SEQ ID NO: 590535 - DNA, 25 bp, Homo sapien
taaccaaagtatatgcaccagccct

SEQ ID NO: 590536 - DNA, 25 bp, Homo sapien
tattgcaataaacactgggaccagt

SEQ ID NO: 590537 - DNA, 25 bp, Homo sapien
cactgatgacaggtaacgaaacttc

SEQ ID NO: 590538 - DNA, 25 bp, Homo sapien
catacgcttgtctcctgaatgtcct

SEQ ID NO: 590539 - DNA, 25 bp, Homo sapien
gaaacttcctatgttatgtcaggta

SEQ ID NO: 590540 - DNA, 25 bp, Homo sapien
tggtggctctcaactggaattggta

SEQ ID NO: 590541 - DNA, 25 bp, Homo sapien
catgtatggatgagtgtcaaagtga

SEQ ID NO: 590542 - DNA, 25 bp, Homo sapien
tctggaagtacttgcttcatgtatg

SEQ ID NO: 590543 - DNA, 25 bp, Homo sapien
tgagtgtcaaagtgaatttgatttg

SEQ ID NO: 590544 - DNA, 25 bp, Homo sapien
tacttagacacacgcgtttacacac

SEQ ID NO: 590545 - DNA, 25 bp, Homo sapien
tgttgttccgtatgctaacatgtgc

SEQ ID NO: 590546 - DNA, 25 bp, Homo sapien
tgttggacttgagtactcagcccag

SEQ ID NO: 590547 - DNA, 25 bp, Homo sapien
aatgttgccacgtgtttttatgtcc

SEQ ID NO: 590548 - DNA, 25 bp, Homo sapien
ggagaggctcctgttcatcttgtgg

SEQ ID NO: 590549 - DNA, 25 bp, Homo sapien
tcttctgacagcacaccagctggag

SEQ ID NO: 590550 - DNA, 25 bp, Homo sapien
tctgtttctgccagcacagtgctgg

SEQ ID NO: 590551 - DNA, 25 bp, Homo sapien
agagacaggatgcaggctcccagtg

SEQ ID NO: 590552 - DNA, 25 bp, Homo sapien
gaaaacagggcatttgcacattagg

SEQ ID NO: 590553 - DNA, 25 bp, Homo sapien
cacagatgccacaaaagtgagactg

SEQ ID NO: 590554 - DNA, 25 bp, Homo sapien
gagactgttttattatcccatgggt

SEQ ID NO: 590555 - DNA, 25 bp, Homo sapien
gtcgcccaggcgtgccagtttaatg

SEQ ID NO: 590556 - DNA, 25 bp, Homo sapien
gagcccacccactttttatgtatgg

SEQ ID NO: 590557 - DNA, 25 bp, Homo sapien
gtagaatgtcgtgccactttctcat

SEQ ID NO: 590558 - DNA, 25 bp, Homo sapien
cagagttgacatcatacagctgtag

SEQ ID NO: 590559 - DNA, 25 bp, Homo sapien
tcatacagctgtagaatgtcgtgcc

SEQ ID NO: 590560 - DNA, 25 bp, Homo sapien
actttctcataagacgtggcttctg

SEQ ID NO: 590561 - DNA, 25 bp, Homo sapien
ctcccgaaaggcctcgcgcgtcgcg

SEQ ID NO: 590562 - DNA, 25 bp, Homo sapien
ctacagctcccgaaaggcctcgcgc

SEQ ID NO: 590563 - DNA, 25 bp, Homo sapien
tcccgaaaggcctcgcgcgtcgcgc

SEQ ID NO: 590564 - DNA, 25 bp, Homo sapien
cagctcccgaaaggcctcgcgcgtc

SEQ ID NO: 590565 - DNA, 25 bp, Homo sapien
atatagtctcgtggtgcgccgtttc

SEQ ID NO: 590566 - DNA, 25 bp, Homo sapien
tgagccaggtgtgggatatagtctc

SEQ ID NO: 590567 - DNA, 25 bp, Homo sapien
tctgagccaggtgtgggatatagtc

SEQ ID NO: 590568 - DNA, 25 bp, Homo sapien
tagtctcgtggtgcgccgtttctta

SEQ ID NO: 590569 - DNA, 25 bp, Homo sapien
gcagtgagctttgattgtgcatttt

SEQ ID NO: 590570 - DNA, 25 bp, Homo sapien
tgcagtgagctttgattgtgcattt

SEQ ID NO: 590571 - DNA, 25 bp, Homo sapien
cagtgagctttgattgtgcatttta

SEQ ID NO: 590572 - DNA, 25 bp, Homo sapien
gtgagctttgattgtgcattttatt

SEQ ID NO: 590573 - DNA, 25 bp, Homo sapien
caaactacaagcatactcctaataa

SEQ ID NO: 590574 - DNA, 25 bp, Homo sapien
caattacaaacacttatagcaacag

SEQ ID NO: 590575 - DNA, 25 bp, Homo sapien
tattcaactattggccattaacaac

SEQ ID NO: 590576 - DNA, 25 bp, Homo sapien
cattaagcatagataagaaaggtcc

SEQ ID NO: 590577 - DNA, 25 bp, Homo sapien
ctgcttgaggaatctcccaactgtg

SEQ ID NO: 590578 - DNA, 25 bp, Homo sapien
ggggtaggggagcacagtccatgct

SEQ ID NO: 590579 - DNA, 25 bp, Homo sapien
gctgggcaccctccaaacatggccc

SEQ ID NO: 590580 - DNA, 25 bp, Homo sapien
cccaggaaggaatggtcagcagtct

SEQ ID NO: 590581 - DNA, 25 bp, Homo sapien
ctgttgacgaccaagctcaggattt

SEQ ID NO: 590582 - DNA, 25 bp, Homo sapien
tcctggttctgtctgttgacgacca

SEQ ID NO: 590583 - DNA, 25 bp, Homo sapien
tgtgggcgagatggtgtgtgtccca

SEQ ID NO: 590584 - DNA, 25 bp, Homo sapien
tatgagctgcacaacttcctggttc

SEQ ID NO: 590585 - DNA, 25 bp, Homo sapien
tgccgcccgcccaccacagatttct

SEQ ID NO: 590586 - DNA, 25 bp, Homo sapien
tcctttacagacacgttctccttgc

SEQ ID NO: 590587 - DNA, 25 bp, Homo sapien
ttcctttacagacacgttctccttg

SEQ ID NO: 590588 - DNA, 25 bp, Homo sapien
acagatttctgcttgcaggatcccc

SEQ ID NO: 590589 - DNA, 25 bp, Homo sapien
aggctgcagttcactcattctccca

SEQ ID NO: 590590 - DNA, 25 bp, Homo sapien
cctcaccaacataggctttcctggg

SEQ ID NO: 590591 - DNA, 25 bp, Homo sapien
tcccaactgcaccttccagggtgtg

SEQ ID NO: 590592 - DNA, 25 bp, Homo sapien
gcctcagaaactttcttcccaactg

SEQ ID NO: 590593 - DNA, 25 bp, Homo sapien
gaagttgagtgttgaattcatgttc

SEQ ID NO: 590594 - DNA, 25 bp, Homo sapien
gactcgatataagtaggtgtcgttg

SEQ ID NO: 590595 - DNA, 25 bp, Homo sapien
gttgtaggattgaatgaagaagttg

SEQ ID NO: 590596 - DNA, 25 bp, Homo sapien
gcatctgacttcgaattagcctctg

SEQ ID NO: 590597 - DNA, 25 bp, Homo sapien
tgtcttgggagagcaaggtacaaac

SEQ ID NO: 590598 - DNA, 25 bp, Homo sapien
aactggcaagaacagggcctgctga

SEQ ID NO: 590599 - DNA, 25 bp, Homo sapien
gcctgctgatgtcttgggagagcaa

SEQ ID NO: 590600 - DNA, 25 bp, Homo sapien
ctgaactggcaagaacagggcctgc

SEQ ID NO: 590601 - DNA, 25 bp, Homo sapien
ttataagtgctaccagatgttggca

SEQ ID NO: 590602 - DNA, 25 bp, Homo sapien
tgtgctaagtgcttccctcctattc

SEQ ID NO: 590603 - DNA, 25 bp, Homo sapien
gatgtcacttgaccaggagcctcag

SEQ ID NO: 590604 - DNA, 25 bp, Homo sapien
ctgaggtctggagagtctggatgtc

SEQ ID NO: 590605 - DNA, 25 bp, Homo sapien
tctccttacttctggctggagggag

SEQ ID NO: 590606 - DNA, 25 bp, Homo sapien
gcagccacagaaagcttctcacctg

SEQ ID NO: 590607 - DNA, 25 bp, Homo sapien
cagccaaagcccctggtcataggtt

SEQ ID NO: 590608 - DNA, 25 bp, Homo sapien
caaaagcatggctcccttctcctta

SEQ ID NO: 590609 - DNA, 25 bp, Homo sapien
tgtgctgttagtgtggactccaagc

SEQ ID NO: 590610 - DNA, 25 bp, Homo sapien
cagttgtgctgttagtgtggactcc

SEQ ID NO: 590611 - DNA, 25 bp, Homo sapien
atcagttgtgctgttagtgtggact

SEQ ID NO: 590612 - DNA, 25 bp, Homo sapien
gttagtgtggactccaagcatccag

SEQ ID NO: 590613 - DNA, 25 bp, Homo sapien
aattgctcgtgtcattcctcttgca

SEQ ID NO: 590614 - DNA, 25 bp, Homo sapien
ggaagaattgctcgtgtcattcctc

SEQ ID NO: 590615 - DNA, 25 bp, Homo sapien
ctatatactccactcccgtcgtcag

SEQ ID NO: 590616 - DNA, 25 bp, Homo sapien
agaattgctcgtgtcattcctcttg

SEQ ID NO: 590617 - DNA, 25 bp, Homo sapien
ggaggaaattggacaaccttagaga

SEQ ID NO: 590618 - DNA, 25 bp, Homo sapien
gccactcatggaccaggaaaaatag

SEQ ID NO: 590619 - DNA, 25 bp, Homo sapien
caaggaggaaattggacaaccttag

SEQ ID NO: 590620 - DNA, 25 bp, Homo sapien
gccagctttcaaggggtgccactca

SEQ ID NO: 590621 - DNA, 25 bp, Homo sapien
tatatcaaagactcgcaaattaaac

SEQ ID NO: 590622 - DNA, 25 bp, Homo sapien
gtatatcaaagactcgcaaattaaa

SEQ ID NO: 590623 - DNA, 25 bp, Homo sapien
gccagtgcacaactcaatcatatga

SEQ ID NO: 590624 - DNA, 25 bp, Homo sapien
tctctaactggcagccaagtctggg

SEQ ID NO: 590625 - DNA, 25 bp, Homo sapien
cttctctaactggcagccaagtctg

SEQ ID NO: 590626 - DNA, 25 bp, Homo sapien
ctctaactggcagccaagtctgggg

SEQ ID NO: 590627 - DNA, 25 bp, Homo sapien
ttctctaactggcagccaagtctgg

SEQ ID NO: 590628 - DNA, 25 bp, Homo sapien
cctttgtgccaccagacaaattgag

SEQ ID NO: 590629 - DNA, 25 bp, Homo sapien
tgtgccaccagacaaattgaggccg

SEQ ID NO: 590630 - DNA, 25 bp, Homo sapien
tgccaccagacaaattgaggccgtc

SEQ ID NO: 590631 - DNA, 25 bp, Homo sapien
tttgtgccaccagacaaattgaggc

SEQ ID NO: 590632 - DNA, 25 bp, Homo sapien
tggcaaggcatgtttgcactgacac

SEQ ID NO: 590633 - DNA, 25 bp, Homo sapien
tgacacaagtgaaggcccatgggct

SEQ ID NO: 590634 - DNA, 25 bp, Homo sapien
gagatgaacattgccagttctgcac

SEQ ID NO: 590635 - DNA, 25 bp, Homo sapien
gcccactgaggtcggagatgaacat

SEQ ID NO: 590636 - DNA, 25 bp, Homo sapien
gtgaagcctgttccccataaggggc

SEQ ID NO: 590637 - DNA, 25 bp, Homo sapien
catgatgacacttgcaagtgaagcc

SEQ ID NO: 590638 - DNA, 25 bp, Homo sapien
gatgacacttgcaagtgaagcctgt

SEQ ID NO: 590639 - DNA, 25 bp, Homo sapien
tgttccccataaggggcacattctc

SEQ ID NO: 590640 - DNA, 25 bp, Homo sapien
agctgcagccaagtaggaattttcc

SEQ ID NO: 590641 - DNA, 25 bp, Homo sapien
gcagccaagtaggaattttccagtc

SEQ ID NO: 590642 - DNA, 25 bp, Homo sapien
ccttctctgctcgttctgacacaga

SEQ ID NO: 590643 - DNA, 25 bp, Homo sapien
tctctgctcgttctgacacagaggg

SEQ ID NO: 590644 - DNA, 25 bp, Homo sapien
ttaattgcccattcaatcctctctg

SEQ ID NO: 590645 - DNA, 25 bp, Homo sapien
tgggagactggcaccctcctgatta

SEQ ID NO: 590646 - DNA, 25 bp, Homo sapien
ggagaacagttttcatgagacatga

SEQ ID NO: 590647 - DNA, 25 bp, Homo sapien
cattcgttcaatttggccaggagaa

SEQ ID NO: 590648 - DNA, 25 bp, Homo sapien
tgtctctccaaagggcagtgagtag

SEQ ID NO: 590649 - DNA, 25 bp, Homo sapien
tctaggtcttgctccaagtcaggca

SEQ ID NO: 590650 - DNA, 25 bp, Homo sapien
tcaggcagtttcctacatcaaggca

SEQ ID NO: 590651 - DNA, 25 bp, Homo sapien
tcccaagcagcgttgaaagtcaaga

SEQ ID NO: 590652 - DNA, 25 bp, Homo sapien
tctctgagacctctggtgagccagt

SEQ ID NO: 590653 - DNA, 25 bp, Homo sapien
aaatctctgagacctctggtgagcc

SEQ ID NO: 590654 - DNA, 25 bp, Homo sapien
aatctctgagacctctggtgagcca

SEQ ID NO: 590655 - DNA, 25 bp, Homo sapien
agaaatctctgagacctctggtgag

SEQ ID NO: 590656 - DNA, 25 bp, Homo sapien
tggagacctcgagcccacctggctt

SEQ ID NO: 590657 - DNA, 25 bp, Homo sapien
gccctgagaagacccggtggagacc

SEQ ID NO: 590658 - DNA, 25 bp, Homo sapien
cggtggagacctcgagcccacctgg

SEQ ID NO: 590659 - DNA, 25 bp, Homo sapien
agccctgagaagacccggtggagac

SEQ ID NO: 590660 - DNA, 25 bp, Homo sapien
gctggtgactcccttctcagctctg

SEQ ID NO: 590661 - DNA, 25 bp, Homo sapien
gccagggacactcaggtggaggagt

SEQ ID NO: 590662 - DNA, 25 bp, Homo sapien
tggtgactcccttctcagctctggg

SEQ ID NO: 590663 - DNA, 25 bp, Homo sapien
gggacactcaggtggaggagtggtg

SEQ ID NO: 590664 - DNA, 25 bp, Homo sapien
tgaatgatccagatgcgggtgctca

SEQ ID NO: 590665 - DNA, 25 bp, Homo sapien
ttttgaatgatccagatgcgggtgc

SEQ ID NO: 590666 - DNA, 25 bp, Homo sapien
ggtgctcagcacaataagtgccatg

SEQ ID NO: 590667 - DNA, 25 bp, Homo sapien
cacaaaatactgatgtctacgaatt

SEQ ID NO: 590668 - DNA, 25 bp, Homo sapien
caacctgtgcgtgtactcttccata

SEQ ID NO: 590669 - DNA, 25 bp, Homo sapien
tccagcaacctgtgcgtgtactctt

SEQ ID NO: 590670 - DNA, 25 bp, Homo sapien
agcaacctgtgcgtgtactcttcca

SEQ ID NO: 590671 - DNA, 25 bp, Homo sapien
tgggctcgctggacctccagcaacc

SEQ ID NO: 590672 - DNA, 25 bp, Homo sapien
gctgagccttcttgcaatgggcaat

SEQ ID NO: 590673 - DNA, 25 bp, Homo sapien
ttttttacaaattgtgaggcccatc

SEQ ID NO: 590674 - DNA, 25 bp, Homo sapien
tgggcaattgtcaatgtcttcatca

SEQ ID NO: 590675 - DNA, 25 bp, Homo sapien
tttacaaattgtgaggcccatctcc

SEQ ID NO: 590676 - DNA, 25 bp, Homo sapien
gatgctttggggttgattttattct

SEQ ID NO: 590677 - DNA, 25 bp, Homo sapien
tcatgatgctttggggttgatttta

SEQ ID NO: 590678 - DNA, 25 bp, Homo sapien
atgatgctttggggttgattttatt

SEQ ID NO: 590679 - DNA, 25 bp, Homo sapien
tgctttggggttgattttattctca

SEQ ID NO: 590680 - DNA, 25 bp, Homo sapien
gaaaaccaaggtcgggcatccatga

SEQ ID NO: 590681 - DNA, 25 bp, Homo sapien
catccatgacaaatgtgcagtatac

SEQ ID NO: 590682 - DNA, 25 bp, Homo sapien
ctgtttccacattacaggtgatgtt

SEQ ID NO: 590683 - DNA, 25 bp, Homo sapien
cattacaggtgatgtttaggaggtt

SEQ ID NO: 590684 - DNA, 25 bp, Homo sapien
caaactttcatactctagaggaaga

SEQ ID NO: 590685 - DNA, 25 bp, Homo sapien
taggcctagaactacaaactttcat

SEQ ID NO: 590686 - DNA, 25 bp, Homo sapien
gcagcataggcctagaactacaaac

SEQ ID NO: 590687 - DNA, 25 bp, Homo sapien
tctgctagtgcagcataggcctaga

SEQ ID NO: 590688 - DNA, 25 bp, Homo sapien
gggcatgcagactggaactgccatc

SEQ ID NO: 590689 - DNA, 25 bp, Homo sapien
agtgagtgatgctggcagctatgaa

SEQ ID NO: 590690 - DNA, 25 bp, Homo sapien
tgctggcagctatgaagccctggct

SEQ ID NO: 590691 - DNA, 25 bp, Homo sapien
tgggtcccagataggtaacacaggc

SEQ ID NO: 590692 - DNA, 25 bp, Homo sapien
cctgcacagaagttggccgaaggac

SEQ ID NO: 590693 - DNA, 25 bp, Homo sapien
cataagccctatggcaaattcatgg

SEQ ID NO: 590694 - DNA, 25 bp, Homo sapien
cagatggagctacccaaagctgttt

SEQ ID NO: 590695 - DNA, 25 bp, Homo sapien
atctttttgccatgacagatggagc

SEQ ID NO: 590696 - DNA, 25 bp, Homo sapien
tgaccagtggttctcctaggtcttc

SEQ ID NO: 590697 - DNA, 25 bp, Homo sapien
ggtcttcagcactcttagttcatgc

SEQ ID NO: 590698 - DNA, 25 bp, Homo sapien
gcactcttagttcatgcctgtggcc

SEQ ID NO: 590699 - DNA, 25 bp, Homo sapien
ggttctcctaggtcttcagcactct

SEQ ID NO: 590700 - DNA, 25 bp, Homo sapien
ccctgtgagcgtcactcttgttatc

SEQ ID NO: 590701 - DNA, 25 bp, Homo sapien
cagtcctgtatgatgtgatcatgaa

SEQ ID NO: 590702 - DNA, 25 bp, Homo sapien
tctgcttctcagtcctgtatgatgt

SEQ ID NO: 590703 - DNA, 25 bp, Homo sapien
agcccttggtggactttcagcctgc

SEQ ID NO: 590704 - DNA, 25 bp, Homo sapien
actgcctcctgttagcgtcagccca

SEQ ID NO: 590705 - DNA, 25 bp, Homo sapien
ctgcctcctgttagcgtcagcccag

SEQ ID NO: 590706 - DNA, 25 bp, Homo sapien
acactgcctcctgttagcgtcagcc

SEQ ID NO: 590707 - DNA, 25 bp, Homo sapien
tgggttcaagaatcttcgagccaca

SEQ ID NO: 590708 - DNA, 25 bp, Homo sapien
aagaggcaaagtcgactctcctcct

SEQ ID NO: 590709 - DNA, 25 bp, Homo sapien
ggcaagaggcaaagtcgactctcct

SEQ ID NO: 590710 - DNA, 25 bp, Homo sapien
cttgggcaagaggcaaagtcgactc

SEQ ID NO: 590711 - DNA, 25 bp, Homo sapien
tgggcaagaggcaaagtcgactctc

SEQ ID NO: 590712 - DNA, 25 bp, Homo sapien
tgaggcattgacgggttttaatttc

SEQ ID NO: 590713 - DNA, 25 bp, Homo sapien
gaggatcagggagagccaccggcac

SEQ ID NO: 590714 - DNA, 25 bp, Homo sapien
ggaggatcagggagagccaccggca

SEQ ID NO: 590715 - DNA, 25 bp, Homo sapien
atttgaggcattgacgggttttaat

SEQ ID NO: 590716 - DNA, 25 bp, Homo sapien
caggaagacatacttgtcctcgctc

SEQ ID NO: 590717 - DNA, 25 bp, Homo sapien
catacttgtcctcgctctctttgtt

SEQ ID NO: 590718 - DNA, 25 bp, Homo sapien
ctgggcttgcagtgtcttgaccacc

SEQ ID NO: 590719 - DNA, 25 bp, Homo sapien
tgcagtgtcttgaccaccaggaaga

SEQ ID NO: 590720 - DNA, 25 bp, Homo sapien
cagatttcattagtgcttaaaggct

SEQ ID NO: 590721 - DNA, 25 bp, Homo sapien
gcttggagttttcttgaatggcgca

SEQ ID NO: 590722 - DNA, 25 bp, Homo sapien
gctttctgcaatcgctgcgggcaat

SEQ ID NO: 590723 - DNA, 25 bp, Homo sapien
tttctacatcaataaggtattccag

SEQ ID NO: 590724 - DNA, 25 bp, Homo sapien
ctctcttgggttcagagctgcctag

SEQ ID NO: 590725 - DNA, 25 bp, Homo sapien
ctcttgggttcagagctgcctaggc

SEQ ID NO: 590726 - DNA, 25 bp, Homo sapien
gctgcctaggccgtcacagatgagt

SEQ ID NO: 590727 - DNA, 25 bp, Homo sapien
cacagatgagtggttcatcacctac

SEQ ID NO: 590728 - DNA, 25 bp, Homo sapien
gataagagtggtcttgacaacatcc

SEQ ID NO: 590729 - DNA, 25 bp, Homo sapien
cagaagtcaatggagcccttgagat

SEQ ID NO: 590730 - DNA, 25 bp, Homo sapien
cagtgtgcctgcatcaaaaggccag

SEQ ID NO: 590731 - DNA, 25 bp, Homo sapien
tgtgcctgcatcaaaaggccagaag

SEQ ID NO: 590732 - DNA, 25 bp, Homo sapien
attcaccattccagggaagtgctcc

SEQ ID NO: 590733 - DNA, 25 bp, Homo sapien
aattcaccattccagggaagtgctc

SEQ ID NO: 590734 - DNA, 25 bp, Homo sapien
tggataaagtagtcacagaggttgg

SEQ ID NO: 590735 - DNA, 25 bp, Homo sapien
gataaagtagtcacagaggttggag

SEQ ID NO: 590736 - DNA, 25 bp, Homo sapien
acagaggttggagggatgcctcaaa

SEQ ID NO: 590737 - DNA, 25 bp, Homo sapien
ggttggagggatgcctcaaaacacc

SEQ ID NO: 590738 - DNA, 25 bp, Homo sapien
tggctgtgttcggtgccagcaaaga

SEQ ID NO: 590739 - DNA, 25 bp, Homo sapien
tgggtagaccatcaagctgaacaaa

SEQ ID NO: 590740 - DNA, 25 bp, Homo sapien
ctgaacaaaggtgcgtggctgtgtt

SEQ ID NO: 590741 - DNA, 25 bp, Homo sapien
aaagaggacctggacatgcccatct

SEQ ID NO: 590742 - DNA, 25 bp, Homo sapien
gtgagtccatgtgaatgcacgtgtg

SEQ ID NO: 590743 - DNA, 25 bp, Homo sapien
gaagagattaagacaggcaggttga

SEQ ID NO: 590744 - DNA, 25 bp, Homo sapien
taggcctgtacaggaagcagatctg

SEQ ID NO: 590745 - DNA, 25 bp, Homo sapien
catatatgtgatgtgtctctaggcc

SEQ ID NO: 590746 - DNA, 25 bp, Homo sapien
caaggacccccctgtgaatcctgag

SEQ ID NO: 590747 - DNA, 25 bp, Homo sapien
ctgcaaggaggacagcaaggtagag

SEQ ID NO: 590748 - DNA, 25 bp, Homo sapien
tggcagcatccaagaccacatgaat

SEQ ID NO: 590749 - DNA, 25 bp, Homo sapien
acagcaaggtagagggcaaggaccc

SEQ ID NO: 590750 - DNA, 25 bp, Homo sapien
gccatgactggtcgccaggtggaca

SEQ ID NO: 590751 - DNA, 25 bp, Homo sapien
catggccatgactggtcgccaggtg

SEQ ID NO: 590752 - DNA, 25 bp, Homo sapien
agcatggccatgactggtcgccagg

SEQ ID NO: 590753 - DNA, 25 bp, Homo sapien
tggccatgactggtcgccaggtgga

SEQ ID NO: 590754 - DNA, 25 bp, Homo sapien
tgctgctaccgcttacagaactgtg

SEQ ID NO: 590755 - DNA, 25 bp, Homo sapien
gacttttatcgcaacacaaacagac

SEQ ID NO: 590756 - DNA, 25 bp, Homo sapien
tgcccaagattgtcctcagctgaat

SEQ ID NO: 590757 - DNA, 25 bp, Homo sapien
taagattgagtgttaaaatgtgcct

SEQ ID NO: 590758 - DNA, 25 bp, Homo sapien
tcactctgtcccctccatagcgagc

SEQ ID NO: 590759 - DNA, 25 bp, Homo sapien
tctgtcccctccatagcgagcggta

SEQ ID NO: 590760 - DNA, 25 bp, Homo sapien
cccctccatagcgagcggtaggtgt

SEQ ID NO: 590761 - DNA, 25 bp, Homo sapien
cggtaggtgtctgaggaggcgtgcc

SEQ ID NO: 590762 - DNA, 25 bp, Homo sapien
tgtgttggtgtcctcgcataggcat

SEQ ID NO: 590763 - DNA, 25 bp, Homo sapien
tctgtgttggtgtcctcgcataggc

SEQ ID NO: 590764 - DNA, 25 bp, Homo sapien
catgtctgtgttggtgtcctcgcat

SEQ ID NO: 590765 - DNA, 25 bp, Homo sapien
tgtctgtgttggtgtcctcgcatag

SEQ ID NO: 590766 - DNA, 25 bp, Homo sapien
gggaggagaacttctcttcgccaat

SEQ ID NO: 590767 - DNA, 25 bp, Homo sapien
gctgatgtggctgagaactcttggg

SEQ ID NO: 590768 - DNA, 25 bp, Homo sapien
gagaactcttgggaccctgtgttga

SEQ ID NO: 590769 - DNA, 25 bp, Homo sapien
cttaacgagtcacatcggggcaggg

SEQ ID NO: 590770 - DNA, 25 bp, Homo sapien
gggcctgaagagcggctcccgttca

SEQ ID NO: 590771 - DNA, 25 bp, Homo sapien
tgtgaactcggcacaagtttatttt

SEQ ID NO: 590772 - DNA, 25 bp, Homo sapien
caccctgtgggaggttgatggcatt

SEQ ID NO: 590773 - DNA, 25 bp, Homo sapien
cccgttcaccctgtgggaggttgat

SEQ ID NO: 590774 - DNA, 25 bp, Homo sapien
gcagtgtctctggtggcgagatcac

SEQ ID NO: 590775 - DNA, 25 bp, Homo sapien
tgaaagtcccggaggcccgtcactg

SEQ ID NO: 590776 - DNA, 25 bp, Homo sapien
ctctggtggcgagatcactgggaca

SEQ ID NO: 590777 - DNA, 25 bp, Homo sapien
tgctgtgtgaaagtcccggaggccc

SEQ ID NO: 590778 - DNA, 25 bp, Homo sapien
ttcttacttgctccttgacctgttg

SEQ ID NO: 590779 - DNA, 25 bp, Homo sapien
actaccccagttcgcattccattgg

SEQ ID NO: 590780 - DNA, 25 bp, Homo sapien
tgacctgttgttgccgccttccaac

SEQ ID NO: 590781 - DNA, 25 bp, Homo sapien
ccattggcacttgggaataccagaa

SEQ ID NO: 590782 - DNA, 25 bp, Homo sapien
cagggctcctaaaggatgtggagtc

SEQ ID NO: 590783 - DNA, 25 bp, Homo sapien
tcagagccccgttatgcaatgccat

SEQ ID NO: 590784 - DNA, 25 bp, Homo sapien
agagccccgttatgcaatgccatgg

SEQ ID NO: 590785 - DNA, 25 bp, Homo sapien
gagccccgttatgcaatgccatggc

SEQ ID NO: 590786 - DNA, 25 bp, Homo sapien
tttcagagccccgttatgcaatgcc

SEQ ID NO: 590787 - DNA, 25 bp, Homo sapien
tgggcccacctcagatccaagttct

SEQ ID NO: 590788 - DNA, 25 bp, Homo sapien
tttggaggccactcttgctagcaca

SEQ ID NO: 590789 - DNA, 25 bp, Homo sapien
tgtcccggcccacgggtggtattgc

SEQ ID NO: 590790 - DNA, 25 bp, Homo sapien
aagttcttcgccacgttcctggctg

SEQ ID NO: 590791 - DNA, 25 bp, Homo sapien
gctcctcagccaagggtcacaggcc

SEQ ID NO: 590792 - DNA, 25 bp, Homo sapien
acaggccaaataccatctatccttt

SEQ ID NO: 590793 - DNA, 25 bp, Homo sapien
caggccaaataccatctatcctttc

SEQ ID NO: 590794 - DNA, 25 bp, Homo sapien
cacaggccaaataccatctatcctt

SEQ ID NO: 590795 - DNA, 25 bp, Homo sapien
ttctggatgcaagggccacagtggc

SEQ ID NO: 590796 - DNA, 25 bp, Homo sapien
aatcttctggatgcaagggccacag

SEQ ID NO: 590797 - DNA, 25 bp, Homo sapien
gaatcttctggatgcaagggccaca

SEQ ID NO: 590798 - DNA, 25 bp, Homo sapien
tcttctggatgcaagggccacagtg

SEQ ID NO: 590799 - DNA, 25 bp, Homo sapien
gctgcacatagacgtagttttgagg

SEQ ID NO: 590800 - DNA, 25 bp, Homo sapien
cacatagacgtagttttgagggata

SEQ ID NO: 590801 - DNA, 25 bp, Homo sapien
tgcctgctgcacatagacgtagttt

SEQ ID NO: 590802 - DNA, 25 bp, Homo sapien
catagacgtagttttgagggatatc

SEQ ID NO: 590803 - DNA, 25 bp, Homo sapien
tgttatactaaagctggccttgtta

SEQ ID NO: 590804 - DNA, 25 bp, Homo sapien
gctgaacttgttatactaaagctgg

SEQ ID NO: 590805 - DNA, 25 bp, Homo sapien
gaacttgttatactaaagctggcct

SEQ ID NO: 590806 - DNA, 25 bp, Homo sapien
taaagctgaacttgttatactaaag

SEQ ID NO: 590807 - DNA, 25 bp, Homo sapien
gatgagatgctccttgcgccagcac

SEQ ID NO: 590808 - DNA, 25 bp, Homo sapien
cattgcacaaactctgcagcagcac

SEQ ID NO: 590809 - DNA, 25 bp, Homo sapien
aagcaaccagccctggtgccaagta

SEQ ID NO: 590810 - DNA, 25 bp, Homo sapien
gtgccaagtatactggaattctctc

SEQ ID NO: 590811 - DNA, 25 bp, Homo sapien
gcaattttgacctcaatatagtact

SEQ ID NO: 590812 - DNA, 25 bp, Homo sapien
cttgcaaattgttcgggcaattttg

SEQ ID NO: 590813 - DNA, 25 bp, Homo sapien
ttcttgcaaattgttcgggcaattt

SEQ ID NO: 590814 - DNA, 25 bp, Homo sapien
tatagtactccaaactatctgtcac

SEQ ID NO: 590815 - DNA, 25 bp, Homo sapien
acttgcctttgtgacagtctccatc

SEQ ID NO: 590816 - DNA, 25 bp, Homo sapien
ttagtcaactacgaggagagtaagg

SEQ ID NO: 590817 - DNA, 25 bp, Homo sapien
caactacgaggagagtaagggactt

SEQ ID NO: 590818 - DNA, 25 bp, Homo sapien
ttgcctttgtgacagtctccatctg

SEQ ID NO: 590819 - DNA, 25 bp, Homo sapien
tcagcatggtgagttcaaatttcca

SEQ ID NO: 590820 - DNA, 25 bp, Homo sapien
ttcagcatggtgagttcaaatttcc

SEQ ID NO: 590821 - DNA, 25 bp, Homo sapien
tttccatggtttagatgcaacaata

SEQ ID NO: 590822 - DNA, 25 bp, Homo sapien
cagcatggtgagttcaaatttccat

SEQ ID NO: 590823 - DNA, 25 bp, Homo sapien
gggaagtatccagcaagaataggct

SEQ ID NO: 590824 - DNA, 25 bp, Homo sapien
gcagcagattatcccagctagtagg

SEQ ID NO: 590825 - DNA, 25 bp, Homo sapien
gcaatgctgtcaaaacacatcatgg

SEQ ID NO: 590826 - DNA, 25 bp, Homo sapien
tgttgttctagttcttgcaagtgtc

SEQ ID NO: 590827 - DNA, 25 bp, Homo sapien
accatggcagggaagtattcagcca

SEQ ID NO: 590828 - DNA, 25 bp, Homo sapien
ccatggcagggaagtattcagccat

SEQ ID NO: 590829 - DNA, 25 bp, Homo sapien
caccatggcagggaagtattcagcc

SEQ ID NO: 590830 - DNA, 25 bp, Homo sapien
ttgagaatacggtcttggactctat

SEQ ID NO: 590831 - DNA, 25 bp, Homo sapien
taccacaccctatgtggcatccaca

SEQ ID NO: 590832 - DNA, 25 bp, Homo sapien
ctaagtctctttgtcagctgcacct

SEQ ID NO: 590833 - DNA, 25 bp, Homo sapien
gagggaagatgttgccctgtcttac

SEQ ID NO: 590834 - DNA, 25 bp, Homo sapien
tatgtggcatccacagctgtgtcca

SEQ ID NO: 590835 - DNA, 25 bp, Homo sapien
agctcacactgcattacccagggct

SEQ ID NO: 590836 - DNA, 25 bp, Homo sapien
gcagagccacctttggagaactgcc

SEQ ID NO: 590837 - DNA, 25 bp, Homo sapien
cagcagagccacctttggagaactg

SEQ ID NO: 590838 - DNA, 25 bp, Homo sapien
agagccacctttggagaactgccag

SEQ ID NO: 590839 - DNA, 25 bp, Homo sapien
ctacagcagagccacctttggagaa

SEQ ID NO: 590840 - DNA, 25 bp, Homo sapien
tcctcagagtcatctgttttcctca

SEQ ID NO: 590841 - DNA, 25 bp, Homo sapien
cctcagagtcatctgttttcctcat

SEQ ID NO: 590842 - DNA, 25 bp, Homo sapien
ctcctcagagtcatctgttttcctc

SEQ ID NO: 590843 - DNA, 25 bp, Homo sapien
gagagagagtgtgaggcagaaggga

SEQ ID NO: 590844 - DNA, 25 bp, Homo sapien
agcagagagagagtgtgaggcagaa

SEQ ID NO: 590845 - DNA, 25 bp, Homo sapien
cagagagagagtgtgaggcagaagg

SEQ ID NO: 590846 - DNA, 25 bp, Homo sapien
gagagagtgtgaggcagaagggact

SEQ ID NO: 590847 - DNA, 25 bp, Homo sapien
gctggctggttactaagaacacgct

SEQ ID NO: 590848 - DNA, 25 bp, Homo sapien
ctgcaggctggctggttactaagaa

SEQ ID NO: 590849 - DNA, 25 bp, Homo sapien
ggttactaagaacacgcttcaccag

SEQ ID NO: 590850 - DNA, 25 bp, Homo sapien
actaagaacacgcttcaccagcatc

SEQ ID NO: 590851 - DNA, 25 bp, Homo sapien
tattaaggatgagcttcaccagtgt

SEQ ID NO: 590852 - DNA, 25 bp, Homo sapien
tcagggcagctggttattaaggatg

SEQ ID NO: 590853 - DNA, 25 bp, Homo sapien
tcaccagtgtccacaccctgtactg

SEQ ID NO: 590854 - DNA, 25 bp, Homo sapien
cagctggttattaaggatgagcttc

SEQ ID NO: 590855 - DNA, 25 bp, Homo sapien
ctcctcagagtcatctgttttcctc

SEQ ID NO: 590856 - DNA, 25 bp, Homo sapien
tcctcagagtcatctgttttcctca

SEQ ID NO: 590857 - DNA, 25 bp, Homo sapien
cctcagagtcatctgttttcctcat

SEQ ID NO: 590858 - DNA, 25 bp, Homo sapien
gattctttcctaaaactgggccatg

SEQ ID NO: 590859 - DNA, 25 bp, Homo sapien
tgttgctaaagccaggacaaagcct

SEQ ID NO: 590860 - DNA, 25 bp, Homo sapien
cagagacatcaaaggtaggaggttc

SEQ ID NO: 590861 - DNA, 25 bp, Homo sapien
ccatgaagccctcgcaagaacagga

SEQ ID NO: 590862 - DNA, 25 bp, Homo sapien
cattagcaagtacaacaaggccacc

SEQ ID NO: 590863 - DNA, 25 bp, Homo sapien
cccttcacttcaccattagcaagta

SEQ ID NO: 590864 - DNA, 25 bp, Homo sapien
tcaatgatgagtgggtacagcgtgc

SEQ ID NO: 590865 - DNA, 25 bp, Homo sapien
aaagatcagtactacagacgcccgc

SEQ ID NO: 590866 - DNA, 25 bp, Homo sapien
caagtagtgcacagaggaccagtgc

SEQ ID NO: 590867 - DNA, 25 bp, Homo sapien
ttttccaagtagtgcacagaggacc

SEQ ID NO: 590868 - DNA, 25 bp, Homo sapien
gagttttccaagtagtgcacagagg

SEQ ID NO: 590869 - DNA, 25 bp, Homo sapien
acagaggaccagtgccggcagcttg

SEQ ID NO: 590870 - DNA, 25 bp, Homo sapien
ttgcattaaacacccctcttgttgg

SEQ ID NO: 590871 - DNA, 25 bp, Homo sapien
aattcaggagcttccacaggttagg

SEQ ID NO: 590872 - DNA, 25 bp, Homo sapien
tcatttccagctagggatcggttta

SEQ ID NO: 590873 - DNA, 25 bp, Homo sapien
ggccggtccctcactcaattcagga

SEQ ID NO: 590874 - DNA, 25 bp, Homo sapien
ccttgtcttctgagagggtccattc

SEQ ID NO: 590875 - DNA, 25 bp, Homo sapien
tcttctgagagggtccattctgggc

SEQ ID NO: 590876 - DNA, 25 bp, Homo sapien
aggaacaggaggctatgccatctac

SEQ ID NO: 590877 - DNA, 25 bp, Homo sapien
ggaggctatgccatctactggccat

SEQ ID NO: 590878 - DNA, 25 bp, Homo sapien
catcagtcaggatgagctgggttat

SEQ ID NO: 590879 - DNA, 25 bp, Homo sapien
ggaacataatgtccaatcttaagaa

SEQ ID NO: 590880 - DNA, 25 bp, Homo sapien
tctcagtcgcatttctcttatctgg

SEQ ID NO: 590881 - DNA, 25 bp, Homo sapien
cagtcgcatttctcttatctggaaa

SEQ ID NO: 590882 - DNA, 25 bp, Homo sapien
gtagttgtacataaaagcccagatt

SEQ ID NO: 590883 - DNA, 25 bp, Homo sapien
tgaaatgctgcctattgggtacaat

SEQ ID NO: 590884 - DNA, 25 bp, Homo sapien
caatgtatagctgatcgttagccac

SEQ ID NO: 590885 - DNA, 25 bp, Homo sapien
cccaaggcaacctgaaagtgtgtcc

SEQ ID NO: 590886 - DNA, 25 bp, Homo sapien
ttgttcccgctgtcgggttcctgct

SEQ ID NO: 590887 - DNA, 25 bp, Homo sapien
tactgaacatgagcacccatgagta

SEQ ID NO: 590888 - DNA, 25 bp, Homo sapien
tttctaggggtgctggattcacagt

SEQ ID NO: 590889 - DNA, 25 bp, Homo sapien
ttcacagtggggtgcaatggtcact

SEQ ID NO: 590890 - DNA, 25 bp, Homo sapien
aatagacatgctgaactggtggtgc

SEQ ID NO: 590891 - DNA, 25 bp, Homo sapien
tgggcaaaatgatgattgtagcaat

SEQ ID NO: 590892 - DNA, 25 bp, Homo sapien
gatgattgtagcaatagacatgctg

SEQ ID NO: 590893 - DNA, 25 bp, Homo sapien
ccatgaggggcaggtctgtgggcaa

SEQ ID NO: 590894 - DNA, 25 bp, Homo sapien
gaagggctggtcatccgtgggtgaa

SEQ ID NO: 590895 - DNA, 25 bp, Homo sapien
aggcacccgaagggctggtcatccg

SEQ ID NO: 590896 - DNA, 25 bp, Homo sapien
tgaggctcgagtagaggcacccgaa

SEQ ID NO: 590897 - DNA, 25 bp, Homo sapien
cagggtgaggctcgagtagaggcac

SEQ ID NO: 590898 - DNA, 25 bp, Homo sapien
tgcaagagaactaatggccctgcac

SEQ ID NO: 590899 - DNA, 25 bp, Homo sapien
agtgcaagagaactaatggccctgc

SEQ ID NO: 590900 - DNA, 25 bp, Homo sapien
taagtgcaagagaactaatggccct

SEQ ID NO: 590901 - DNA, 25 bp, Homo sapien
gtaagtgcaagagaactaatggccc

SEQ ID NO: 590902 - DNA, 25 bp, Homo sapien
agcatctgcactgattttcctgtgc

SEQ ID NO: 590903 - DNA, 25 bp, Homo sapien
cacattccaattgccagcatctgca

SEQ ID NO: 590904 - DNA, 25 bp, Homo sapien
cagcccacattccaattgccagcat

SEQ ID NO: 590905 - DNA, 25 bp, Homo sapien
gcatctgcactgattttcctgtgca

SEQ ID NO: 590906 - DNA, 25 bp, Homo sapien
gcttggctttagagtactggatttc

SEQ ID NO: 590907 - DNA, 25 bp, Homo sapien
ctggcttggctttagagtactggat

SEQ ID NO: 590908 - DNA, 25 bp, Homo sapien
tggcttggctttagagtactggatt

SEQ ID NO: 590909 - DNA, 25 bp, Homo sapien
ggcttggctttagagtactggattt

SEQ ID NO: 590910 - DNA, 25 bp, Homo sapien
tatagcacaggctccaggatgtgcc

SEQ ID NO: 590911 - DNA, 25 bp, Homo sapien
ttatagcacaggctccaggatgtgc

SEQ ID NO: 590912 - DNA, 25 bp, Homo sapien
atagcacaggctccaggatgtgccc

SEQ ID NO: 590913 - DNA, 25 bp, Homo sapien
ctggaggacgccctggaactcagag

SEQ ID NO: 590914 - DNA, 25 bp, Homo sapien
aggaacgcagggcttgcaggatcac

SEQ ID NO: 590915 - DNA, 25 bp, Homo sapien
cacagagagtccttgtgctcagtgg

SEQ ID NO: 590916 - DNA, 25 bp, Homo sapien
attgaaagcaggatcccaggaagga

SEQ ID NO: 590917 - DNA, 25 bp, Homo sapien
acctcggggacccttctctgatcat

SEQ ID NO: 590918 - DNA, 25 bp, Homo sapien
ggtgacctcggggacccttctctga

SEQ ID NO: 590919 - DNA, 25 bp, Homo sapien
ccttctctgatcatcaggattctct

SEQ ID NO: 590920 - DNA, 25 bp, Homo sapien
tcaggattctcttggactctagggt

SEQ ID NO: 590921 - DNA, 25 bp, Homo sapien
cattgtcccgcaggggccgaaatgc

SEQ ID NO: 590922 - DNA, 25 bp, Homo sapien
gggagagagaggcctccattgtccc

SEQ ID NO: 590923 - DNA, 25 bp, Homo sapien
gggcccgggcacaaagggagagaga

SEQ ID NO: 590924 - DNA, 25 bp, Homo sapien
ctctgggtatggaggtctgtctgca

SEQ ID NO: 590925 - DNA, 25 bp, Homo sapien
atggcatttcgtttggtgcaggagc

SEQ ID NO: 590926 - DNA, 25 bp, Homo sapien
gcaggagctcgtccaggaggtctgg

SEQ ID NO: 590927 - DNA, 25 bp, Homo sapien
tgtctggttatatctgatttctcac

SEQ ID NO: 590928 - DNA, 25 bp, Homo sapien
gatgtctggttatatctgatttctc

SEQ ID NO: 590929 - DNA, 25 bp, Homo sapien
gcaagcctcccgtggagctgcagga

SEQ ID NO: 590930 - DNA, 25 bp, Homo sapien
tcctccgctttagccccggcaagcc

SEQ ID NO: 590931 - DNA, 25 bp, Homo sapien
gctggctgtgggatgaggctggtcc

SEQ ID NO: 590932 - DNA, 25 bp, Homo sapien
gctgtgggatgaggctggtcccctc

SEQ ID NO: 590933 - DNA, 25 bp, Homo sapien
aggcctcggatatggaggagtcatt

SEQ ID NO: 590934 - DNA, 25 bp, Homo sapien
tactgggcctagaggcctcggatat

SEQ ID NO: 590935 - DNA, 25 bp, Homo sapien
atatggaggagtcattcctgagggt

SEQ ID NO: 590936 - DNA, 25 bp, Homo sapien
gaaacttgtgtatactgggcctaga

SEQ ID NO: 590937 - DNA, 25 bp, Homo sapien
cactctagtagtgaccccaacgtgg

SEQ ID NO: 590938 - DNA, 25 bp, Homo sapien
tctatccactctagtagtgacccca

SEQ ID NO: 590939 - DNA, 25 bp, Homo sapien
tgaagggcctctatccactctagta

SEQ ID NO: 590940 - DNA, 25 bp, Homo sapien
agaaacggcaggcagaccagaagtc

SEQ ID NO: 590941 - DNA, 25 bp, Homo sapien
tgtatctgccgtcttttcacaatgg

SEQ ID NO: 590942 - DNA, 25 bp, Homo sapien
tctgccgtcttttcacaatgggtgt

SEQ ID NO: 590943 - DNA, 25 bp, Homo sapien
ccgtcttttcacaatgggtgtgacc

SEQ ID NO: 590944 - DNA, 25 bp, Homo sapien
tatctgccgtcttttcacaatgggt

SEQ ID NO: 590945 - DNA, 25 bp, Homo sapien
cttgatgcgctggaatgccacctcc

SEQ ID NO: 590946 - DNA, 25 bp, Homo sapien
gcactcttgatgcgctggaatgcca

SEQ ID NO: 590947 - DNA, 25 bp, Homo sapien
tccttctcccggtccaggtcttcag

SEQ ID NO: 590948 - DNA, 25 bp, Homo sapien
atgcgctggaatgccacctccttct

SEQ ID NO: 590949 - DNA, 25 bp, Homo sapien
cttggcttcagtagctcacccagct

SEQ ID NO: 590950 - DNA, 25 bp, Homo sapien
ttcagtagctcacccagcttacagg

SEQ ID NO: 590951 - DNA, 25 bp, Homo sapien
gcttcagtagctcacccagcttaca

SEQ ID NO: 590952 - DNA, 25 bp, Homo sapien
tggcttcagtagctcacccagctta

SEQ ID NO: 590953 - DNA, 25 bp, Homo sapien
cggtgggctcccctgtcctggcttc

SEQ ID NO: 590954 - DNA, 25 bp, Homo sapien
tggcttccatctgtctcagcgacca

SEQ ID NO: 590955 - DNA, 25 bp, Homo sapien
ggcttccatctgtctcagcgaccat

SEQ ID NO: 590956 - DNA, 25 bp, Homo sapien
tatctgggcccggtgggctcccctg

SEQ ID NO: 590957 - DNA, 25 bp, Homo sapien
taagcgcctggctccgctgttctca

SEQ ID NO: 590958 - DNA, 25 bp, Homo sapien
cctctaagcgcctggctccgctgtt

SEQ ID NO: 590959 - DNA, 25 bp, Homo sapien
cttcctctaagcgcctggctccgct

SEQ ID NO: 590960 - DNA, 25 bp, Homo sapien
tctaagcgcctggctccgctgttct

SEQ ID NO: 590961 - DNA, 25 bp, Homo sapien
gaaatccgtatttcaagcagatcat

SEQ ID NO: 590962 - DNA, 25 bp, Homo sapien
gttgaaatccgtatttcaagcagat

SEQ ID NO: 590963 - DNA, 25 bp, Homo sapien
tctagtctctttgtaccacctgctg

SEQ ID NO: 590964 - DNA, 25 bp, Homo sapien
ttgcctttgcatcctatcctctagt

SEQ ID NO: 590965 - DNA, 25 bp, Homo sapien
catatcgatcacttaggagctgcaa

SEQ ID NO: 590966 - DNA, 25 bp, Homo sapien
gatgagaccagtagcatatcgatca

SEQ ID NO: 590967 - DNA, 25 bp, Homo sapien
gacactagctctgcgttaatcaaag

SEQ ID NO: 590968 - DNA, 25 bp, Homo sapien
tagctgagaggtccggatgagacca

SEQ ID NO: 590969 - DNA, 25 bp, Homo sapien
aatgctcctgatgctttccgagttg

SEQ ID NO: 590970 - DNA, 25 bp, Homo sapien
tccgagttggacctgagctctgtga

SEQ ID NO: 590971 - DNA, 25 bp, Homo sapien
tcctgatgctttccgagttggacct

SEQ ID NO: 590972 - DNA, 25 bp, Homo sapien
cttgatgagatctttctttccccaa

SEQ ID NO: 590973 - DNA, 25 bp, Homo sapien
aggctgacaggctgccctgtacccg

SEQ ID NO: 590974 - DNA, 25 bp, Homo sapien
agacaggtccataggggaaggccat

SEQ ID NO: 590975 - DNA, 25 bp, Homo sapien
gaggctgacaggctgccctgtaccc

SEQ ID NO: 590976 - DNA, 25 bp, Homo sapien
cagagacaggtccataggggaaggc

SEQ ID NO: 590977 - DNA, 25 bp, Homo sapien
ttgtcgtactgagtggctgagcgat

SEQ ID NO: 590978 - DNA, 25 bp, Homo sapien
ctggtgttaatgattgaccgggact

SEQ ID NO: 590979 - DNA, 25 bp, Homo sapien
gctggtgttaatgattgaccgggac

SEQ ID NO: 590980 - DNA, 25 bp, Homo sapien
catcattgtcgtactgagtggctga

SEQ ID NO: 590981 - DNA, 25 bp, Homo sapien
agggacagcagatctgcgttcccac

SEQ ID NO: 590982 - DNA, 25 bp, Homo sapien
gagggacagcagatctgcgttccca

SEQ ID NO: 590983 - DNA, 25 bp, Homo sapien
ttagagggacagcagatctgcgttc

SEQ ID NO: 590984 - DNA, 25 bp, Homo sapien
tagagggacagcagatctgcgttcc

SEQ ID NO: 590985 - DNA, 25 bp, Homo sapien
ctcaatatttctccaggggaccaag

SEQ ID NO: 590986 - DNA, 25 bp, Homo sapien
cttcctgggagtatcagtcttcagg

SEQ ID NO: 590987 - DNA, 25 bp, Homo sapien
aatatttctccaggggaccaagcag

SEQ ID NO: 590988 - DNA, 25 bp, Homo sapien
cctgggagtatcagtcttcaggccc

SEQ ID NO: 590989 - DNA, 25 bp, Homo sapien
taaggtatgcagacacaggttgatt

SEQ ID NO: 590990 - DNA, 25 bp, Homo sapien
ttctgcaccatcctataaggtatgc

SEQ ID NO: 590991 - DNA, 25 bp, Homo sapien
gcactgtcccaatttacaaatgaag

SEQ ID NO: 590992 - DNA, 25 bp, Homo sapien
ggtcaggattcacatggtagtgaac

SEQ ID NO: 590993 - DNA, 25 bp, Homo sapien
caggccaggcatgtgagggccttgc

SEQ ID NO: 590994 - DNA, 25 bp, Homo sapien
agcaggccaggcatgtgagggcctt

SEQ ID NO: 590995 - DNA, 25 bp, Homo sapien
ccaggcatgtgagggccttgctgtc

SEQ ID NO: 590996 - DNA, 25 bp, Homo sapien
ctggggcagagcacgcagcaggcca

SEQ ID NO: 590997 - DNA, 25 bp, Homo sapien
gaagctagccacaggacgctcatgt

SEQ ID NO: 590998 - DNA, 25 bp, Homo sapien
acagcacagtaagcagggaagcggc

SEQ ID NO: 590999 - DNA, 25 bp, Homo sapien
tttgaccccgtcagaggaaacagca

SEQ ID NO: 591000 - DNA, 25 bp, Homo sapien
tcagtgtagaagaagctagccacag

SEQ ID NO: 591001 - DNA, 25 bp, Homo sapien
gctttctgtgccatgcatccaagac

SEQ ID NO: 591002 - DNA, 25 bp, Homo sapien
tgcatgggttctggccagggctttc

SEQ ID NO: 591003 - DNA, 25 bp, Homo sapien
agtgcatgggttctggccagggctt

SEQ ID NO: 591004 - DNA, 25 bp, Homo sapien
ggccagggctttctgtgccatgcat

SEQ ID NO: 591005 - DNA, 25 bp, Homo sapien
gccatgcctgcagatatcactctgg

SEQ ID NO: 591006 - DNA, 25 bp, Homo sapien
ggacatttcagtgtagccaaggctg

SEQ ID NO: 591007 - DNA, 25 bp, Homo sapien
tgcctgcagatatcactctggacat

SEQ ID NO: 591008 - DNA, 25 bp, Homo sapien
atgccatgcctgcagatatcactct

SEQ ID NO: 591009 - DNA, 25 bp, Homo sapien
cactgtaaaatgctcaactggagca

SEQ ID NO: 591010 - DNA, 25 bp, Homo sapien
tccactgtaaaatgctcaactggag

SEQ ID NO: 591011 - DNA, 25 bp, Homo sapien
ccactgtaaaatgctcaactggagc

SEQ ID NO: 591012 - DNA, 25 bp, Homo sapien
gatgggaaacctcagcacaaagaca

SEQ ID NO: 591013 - DNA, 25 bp, Homo sapien
gcggcatttaagatctgggcctgga

SEQ ID NO: 591014 - DNA, 25 bp, Homo sapien
cagaagagcgggaacagcggcattt

SEQ ID NO: 591015 - DNA, 25 bp, Homo sapien
acttccgatgctcttccgggcactg

SEQ ID NO: 591016 - DNA, 25 bp, Homo sapien
agcctgggctccttcaacgactcca

SEQ ID NO: 591017 - DNA, 25 bp, Homo sapien
cgactccattcatggatgtagagaa

SEQ ID NO: 591018 - DNA, 25 bp, Homo sapien
ccttcaacgactccattcatggatg

SEQ ID NO: 591019 - DNA, 25 bp, Homo sapien
tggccatagaggatacgggcagcct

SEQ ID NO: 591020 - DNA, 25 bp, Homo sapien
gttgacacccagggctcctacaaga

SEQ ID NO: 591021 - DNA, 25 bp, Homo sapien
cagggctcctacaagagctccctgc

SEQ ID NO: 591022 - DNA, 25 bp, Homo sapien
gggctcctacaagagctccctgcat

SEQ ID NO: 591023 - DNA, 25 bp, Homo sapien
acacccagggctcctacaagagctc

SEQ ID NO: 591024 - DNA, 25 bp, Homo sapien
ctatgcatcaccaatgcttctctaa

SEQ ID NO: 591025 - DNA, 25 bp, Homo sapien
tcaccaatgcttctctaaactccat

SEQ ID NO: 591026 - DNA, 25 bp, Homo sapien
tgcatcaccaatgcttctctaaact

SEQ ID NO: 591027 - DNA, 25 bp, Homo sapien
catcaccaatgcttctctaaactcc

SEQ ID NO: 591028 - DNA, 25 bp, Homo sapien
gttctggttggctcactgtgctgcc

SEQ ID NO: 591029 - DNA, 25 bp, Homo sapien
cagacgccaggattggacagaacct

SEQ ID NO: 591030 - DNA, 25 bp, Homo sapien
tgctttctcctgcactaggctggat

SEQ ID NO: 591031 - DNA, 25 bp, Homo sapien
gaacctttgtaacaggccatctcat

SEQ ID NO: 591032 - DNA, 25 bp, Homo sapien
tctgaactgaactcctcatctcctc

SEQ ID NO: 591033 - DNA, 25 bp, Homo sapien
gctctgaactgaactcctcatctcc

SEQ ID NO: 591034 - DNA, 25 bp, Homo sapien
ctgctctgaactgaactcctcatct

SEQ ID NO: 591035 - DNA, 25 bp, Homo sapien
ttgggagcatgcactctctgctggg

SEQ ID NO: 591036 - DNA, 25 bp, Homo sapien
tgtcaacataggcactggaggagca

SEQ ID NO: 591037 - DNA, 25 bp, Homo sapien
gggagcttctgtgcgagtccttcag

SEQ ID NO: 591038 - DNA, 25 bp, Homo sapien
tcacacttccctgtgacttggggag

SEQ ID NO: 591039 - DNA, 25 bp, Homo sapien
gagcttctgtgcgagtccttcagac

SEQ ID NO: 591040 - DNA, 25 bp, Homo sapien
tatgagtaagccagtaaagtcagtc

SEQ ID NO: 591041 - DNA, 25 bp, Homo sapien
agtcgagcctcagaaaaacaaagtg

SEQ ID NO: 591042 - DNA, 25 bp, Homo sapien
cagctagttagctatggcagaactg

SEQ ID NO: 591043 - DNA, 25 bp, Homo sapien
aatattggtgttcaaaaggatagca

SEQ ID NO: 591044 - DNA, 25 bp, Homo sapien
tcttgcaacttcttcaaaactgatg

SEQ ID NO: 591045 - DNA, 25 bp, Homo sapien
tctttgattcatcccaagttaacaa

SEQ ID NO: 591046 - DNA, 25 bp, Homo sapien
ccttatcttcctgaaatcttgcaac

SEQ ID NO: 591047 - DNA, 25 bp, Homo sapien
ttcaaaactgatgctttcactttca

SEQ ID NO: 591048 - DNA, 25 bp, Homo sapien
gtgtgtagatctcaggacagagcct

SEQ ID NO: 591049 - DNA, 25 bp, Homo sapien
gagcaagccgtggtggcccagtttt

SEQ ID NO: 591050 - DNA, 25 bp, Homo sapien
gaacacaatgacaggctctgcgagt

SEQ ID NO: 591051 - DNA, 25 bp, Homo sapien
gcaagccgtggtggcccagttttcc

SEQ ID NO: 591052 - DNA, 25 bp, Homo sapien
cgtgtgctacctcatagcacatgga

SEQ ID NO: 591053 - DNA, 25 bp, Homo sapien
atgcacacgtgtgctacctcatagc

SEQ ID NO: 591054 - DNA, 25 bp, Homo sapien
cacacgtgtgctacctcatagcaca

SEQ ID NO: 591055 - DNA, 25 bp, Homo sapien
gtgctacctcatagcacatggacat

SEQ ID NO: 591056 - DNA, 25 bp, Homo sapien
taagtgaggctctcaaccccgatga

SEQ ID NO: 591057 - DNA, 25 bp, Homo sapien
gaggcgcatcctgtgagtgtttcca

SEQ ID NO: 591058 - DNA, 25 bp, Homo sapien
tgtggcttctgggtacgcagcgcat

SEQ ID NO: 591059 - DNA, 25 bp, Homo sapien
gatgatcacttctgaccccgatagg

SEQ ID NO: 591060 - DNA, 25 bp, Homo sapien
aaatattggccactcttctatagaa

SEQ ID NO: 591061 - DNA, 25 bp, Homo sapien
tgccattgagcactgtttgccattg

SEQ ID NO: 591062 - DNA, 25 bp, Homo sapien
tcttctatagaaatacccctttgcc

SEQ ID NO: 591063 - DNA, 25 bp, Homo sapien
tgccattggcctcatagacatctgc

SEQ ID NO: 591064 - DNA, 25 bp, Homo sapien
agcttcaggggatgagccttcagtc

SEQ ID NO: 591065 - DNA, 25 bp, Homo sapien
gcttcaggggatgagccttcagtcc

SEQ ID NO: 591066 - DNA, 25 bp, Homo sapien
ccagttgtgcaatgacatagacaag

SEQ ID NO: 591067 - DNA, 25 bp, Homo sapien
gttgtgcaatgacatagacaagacc

SEQ ID NO: 591068 - DNA, 25 bp, Homo sapien
cctccagttgtgcaatgacatagac

SEQ ID NO: 591069 - DNA, 25 bp, Homo sapien
gcaatgacatagacaagacccagag

SEQ ID NO: 591070 - DNA, 25 bp, Homo sapien
taaggatacttttagagctctttcc

SEQ ID NO: 591071 - DNA, 25 bp, Homo sapien
cttaagtagatgccattggttttac

SEQ ID NO: 591072 - DNA, 25 bp, Homo sapien
aaaatttgctcttgatacactcggg

SEQ ID NO: 591073 - DNA, 25 bp, Homo sapien
ttcttagtaaccaaaggacattcaa

SEQ ID NO: 591074 - DNA, 25 bp, Homo sapien
atgggagtcacgcttctttcagcat

SEQ ID NO: 591075 - DNA, 25 bp, Homo sapien
tgactgatgggagtcacgcttcttt

SEQ ID NO: 591076 - DNA, 25 bp, Homo sapien
actgatgggagtcacgcttctttca

SEQ ID NO: 591077 - DNA, 25 bp, Homo sapien
tgatgggagtcacgcttctttcagc

SEQ ID NO: 591078 - DNA, 25 bp, Homo sapien
tgcaggacagcagttgggcagcaac

SEQ ID NO: 591079 - DNA, 25 bp, Homo sapien
aggacagcagttgggcagcaactgc

SEQ ID NO: 591080 - DNA, 25 bp, Homo sapien
ctgcaggacagcagttgggcagcaa

SEQ ID NO: 591081 - DNA, 25 bp, Homo sapien
gcaggacagcagttgggcagcaact

SEQ ID NO: 591082 - DNA, 25 bp, Homo sapien
ggagggagccaaatgctcgcatgct

SEQ ID NO: 591083 - DNA, 25 bp, Homo sapien
caaaccacatcaccagctctgatcc

SEQ ID NO: 591084 - DNA, 25 bp, Homo sapien
ccacatcaccagctctgatcccatc

SEQ ID NO: 591085 - DNA, 25 bp, Homo sapien
ggagccaaatgctcgcatgctccct

SEQ ID NO: 591086 - DNA, 25 bp, Homo sapien
ttagttctgttttgaaatgagcatt

SEQ ID NO: 591087 - DNA, 25 bp, Homo sapien
agttctgttttgaaatgagcattcc

SEQ ID NO: 591088 - DNA, 25 bp, Homo sapien
ttctgttttgaaatgagcattcctc

SEQ ID NO: 591089 - DNA, 25 bp, Homo sapien
ctgttttgaaatgagcattcctctt

SEQ ID NO: 591090 - DNA, 25 bp, Homo sapien
caaagcgcctctttccttggtggcc

SEQ ID NO: 591091 - DNA, 25 bp, Homo sapien
acaacaaacaaagcgcctctttcct

SEQ ID NO: 591092 - DNA, 25 bp, Homo sapien
tggccacctgctcttgcctttgaga

SEQ ID NO: 591093 - DNA, 25 bp, Homo sapien
aacagcattattgccgtggagatga

SEQ ID NO: 591094 - DNA, 25 bp, Homo sapien
tgctgatcacgcctcactatccatt

SEQ ID NO: 591095 - DNA, 25 bp, Homo sapien
tgctggttgtcatggaagagcctgc

SEQ ID NO: 591096 - DNA, 25 bp, Homo sapien
gttgtcatggaagagcctgctgatc

SEQ ID NO: 591097 - DNA, 25 bp, Homo sapien
agagcctgctgatcacgcctcacta

SEQ ID NO: 591098 - DNA, 25 bp, Homo sapien
ctttgtttctcatttggctgctgat

SEQ ID NO: 591099 - DNA, 25 bp, Homo sapien
catttggctgctgatgaaaacggga

SEQ ID NO: 591100 - DNA, 25 bp, Homo sapien
ttctcatttggctgctgatgaaaac

SEQ ID NO: 591101 - DNA, 25 bp, Homo sapien
ctgctgatgaaaacgggagggggcc

SEQ ID NO: 591102 - DNA, 25 bp, Homo sapien
tcccttgtgaatggaagaggcacca

SEQ ID NO: 591103 - DNA, 25 bp, Homo sapien
tgcaaggaagctgctcaagatcaca

SEQ ID NO: 591104 - DNA, 25 bp, Homo sapien
gaggcaccatcacagtatccggctt

SEQ ID NO: 591105 - DNA, 25 bp, Homo sapien
caagatcacacagctcgggaaaagg

SEQ ID NO: 591106 - DNA, 25 bp, Homo sapien
attccggacacaatactacagagag

SEQ ID NO: 591107 - DNA, 25 bp, Homo sapien
aattccggacacaatactacagaga

SEQ ID NO: 591108 - DNA, 25 bp, Homo sapien
ccggacacaatactacagagagtcc

SEQ ID NO: 591109 - DNA, 25 bp, Homo sapien
ttccggacacaatactacagagagt

SEQ ID NO: 591110 - DNA, 25 bp, Homo sapien
caaacgaagaaacgggatgaggtct

SEQ ID NO: 591111 - DNA, 25 bp, Homo sapien
aaatagaacatgagcttaggacccc

SEQ ID NO: 591112 - DNA, 25 bp, Homo sapien
tcaccttagatagcgcagacaattc

SEQ ID NO: 591113 - DNA, 25 bp, Homo sapien
gacaggattaggcatatacaggact

SEQ ID NO: 591114 - DNA, 25 bp, Homo sapien
ttcctgatcctggtgtctctcctgc

SEQ ID NO: 591115 - DNA, 25 bp, Homo sapien
gggagggcataaacactatctccca

SEQ ID NO: 591116 - DNA, 25 bp, Homo sapien
actttcctgatcctggtgtctctcc

SEQ ID NO: 591117 - DNA, 25 bp, Homo sapien
ctatctcccactacacagattatgc

SEQ ID NO: 591118 - DNA, 25 bp, Homo sapien
gataaggtggatgtagcagttggcc

SEQ ID NO: 591119 - DNA, 25 bp, Homo sapien
cccatggctgataaggtggatgtag

SEQ ID NO: 591120 - DNA, 25 bp, Homo sapien
catggctgataaggtggatgtagca

SEQ ID NO: 591121 - DNA, 25 bp, Homo sapien
taaggtggatgtagcagttggccat

SEQ ID NO: 591122 - DNA, 25 bp, Homo sapien
tcacttaagctcctgcagggccagt

SEQ ID NO: 591123 - DNA, 25 bp, Homo sapien
agctcctgcagggccagtagtgcag

SEQ ID NO: 591124 - DNA, 25 bp, Homo sapien
acttaagctcctgcagggccagtag

SEQ ID NO: 591125 - DNA, 25 bp, Homo sapien
taagctcctgcagggccagtagtgc

SEQ ID NO: 591126 - DNA, 25 bp, Homo sapien
gggcacttggggatctgaaacacag

SEQ ID NO: 591127 - DNA, 25 bp, Homo sapien
gcacttggggatctgaaacacagcc

SEQ ID NO: 591128 - DNA, 25 bp, Homo sapien
tgggcacttggggatctgaaacaca

SEQ ID NO: 591129 - DNA, 25 bp, Homo sapien
ggcacttggggatctgaaacacagc

SEQ ID NO: 591130 - DNA, 25 bp, Homo sapien
ctcctcacggtcttctgcacataaa

SEQ ID NO: 591131 - DNA, 25 bp, Homo sapien
acataaatggactgctaaggctaca

SEQ ID NO: 591132 - DNA, 25 bp, Homo sapien
ggtcttctgcacataaatggactgc

SEQ ID NO: 591133 - DNA, 25 bp, Homo sapien
tctgcacataaatggactgctaagg

SEQ ID NO: 591134 - DNA, 25 bp, Homo sapien
acttctcgtctagttcactttgaac

SEQ ID NO: 591135 - DNA, 25 bp, Homo sapien
ggttttctcctgcatcaattccaac

SEQ ID NO: 591136 - DNA, 25 bp, Homo sapien
gtgaatgataagcttgtgtttcttc

SEQ ID NO: 591137 - DNA, 25 bp, Homo sapien
cactttgaacatagtgaatgataag

SEQ ID NO: 591138 - DNA, 25 bp, Homo sapien
tttggccctatgactctgcaccatc

SEQ ID NO: 591139 - DNA, 25 bp, Homo sapien
tcctcaagtgggtacgtttcttgca

SEQ ID NO: 591140 - DNA, 25 bp, Homo sapien
gggtccgatctttggccctatgact

SEQ ID NO: 591141 - DNA, 25 bp, Homo sapien
tttcttgcacttatcaagaccaggg

SEQ ID NO: 591142 - DNA, 25 bp, Homo sapien
ccagaagcagggatgtcctcaccca

SEQ ID NO: 591143 - DNA, 25 bp, Homo sapien
cagaagcagggatgtcctcacccat

SEQ ID NO: 591144 - DNA, 25 bp, Homo sapien
aagacaccatgccagaagcagggat

SEQ ID NO: 591145 - DNA, 25 bp, Homo sapien
cccataagacaccatgccagaagca

SEQ ID NO: 591146 - DNA, 25 bp, Homo sapien
cccacaaccacctgttaccatctga

SEQ ID NO: 591147 - DNA, 25 bp, Homo sapien
caaccacctgttaccatctgaaggg

SEQ ID NO: 591148 - DNA, 25 bp, Homo sapien
tgtcccacaaccacctgttaccatc

SEQ ID NO: 591149 - DNA, 25 bp, Homo sapien
aaggagatggagtgaattctgagca

SEQ ID NO: 591150 - DNA, 25 bp, Homo sapien
tgtttgccaactggcccaagggctg

SEQ ID NO: 591151 - DNA, 25 bp, Homo sapien
tgccaactggcccaagggctgcgat

SEQ ID NO: 591152 - DNA, 25 bp, Homo sapien
cagggctgcgatgtttgccaactgg

SEQ ID NO: 591153 - DNA, 25 bp, Homo sapien
agtcagggctgcgatgtttgccaac

SEQ ID NO: 591154 - DNA, 25 bp, Homo sapien
ttgactgtccattgaactactagtc

SEQ ID NO: 591155 - DNA, 25 bp, Homo sapien
cttgactgtccattgaactactagt

SEQ ID NO: 591156 - DNA, 25 bp, Homo sapien
gactgtccattgaactactagtcat

SEQ ID NO: 591157 - DNA, 25 bp, Homo sapien
tgactgtccattgaactactagtca

SEQ ID NO: 591158 - DNA, 25 bp, Homo sapien
ccacatcctttagcctcagttcctg

SEQ ID NO: 591159 - DNA, 25 bp, Homo sapien
cccgggaggcgtgctgaaaacattt

SEQ ID NO: 591160 - DNA, 25 bp, Homo sapien
ctcctggaacctgccgggtcacagg

SEQ ID NO: 591161 - DNA, 25 bp, Homo sapien
catttcatccttctcacgtaccttc

SEQ ID NO: 591162 - DNA, 25 bp, Homo sapien
caaggacatcatcaatgttgtttat

SEQ ID NO: 591163 - DNA, 25 bp, Homo sapien
tatctgactagggatctgcatctga

SEQ ID NO: 591164 - DNA, 25 bp, Homo sapien
atctgagagaccgtcagtagtgtgg

SEQ ID NO: 591165 - DNA, 25 bp, Homo sapien
catcaatgttgtttatctgactagg

SEQ ID NO: 591166 - DNA, 25 bp, Homo sapien
catactaaagcatctgataattcac

SEQ ID NO: 591167 - DNA, 25 bp, Homo sapien
tcatactaaagcatctgataattca

SEQ ID NO: 591168 - DNA, 25 bp, Homo sapien
tcatcctgtctagcatgcagagaca

SEQ ID NO: 591169 - DNA, 25 bp, Homo sapien
gatcatcctgtctagcatgcagaga

SEQ ID NO: 591170 - DNA, 25 bp, Homo sapien
cggatcatcctgtctagcatgcaga

SEQ ID NO: 591171 - DNA, 25 bp, Homo sapien
tcctgtctagcatgcagagacactg

SEQ ID NO: 591172 - DNA, 25 bp, Homo sapien
cctcctcaacatctgggccattgca

SEQ ID NO: 591173 - DNA, 25 bp, Homo sapien
tctgggccattgcaagggaactctg

SEQ ID NO: 591174 - DNA, 25 bp, Homo sapien
tcctcctcaacatctgggccattgc

SEQ ID NO: 591175 - DNA, 25 bp, Homo sapien
tggaagtccatatttccgtacgagt

SEQ ID NO: 591176 - DNA, 25 bp, Homo sapien
gagctgaccggaggactagaacaca

SEQ ID NO: 591177 - DNA, 25 bp, Homo sapien
ttccgtacgagtcaggaacagagct

SEQ ID NO: 591178 - DNA, 25 bp, Homo sapien
tgtcaaagcattagtctggaagtcc

SEQ ID NO: 591179 - DNA, 25 bp, Homo sapien
ggcttctgctctcctggaatccggc

SEQ ID NO: 591180 - DNA, 25 bp, Homo sapien
gaatccggcacctgatgaaggtctc

SEQ ID NO: 591181 - DNA, 25 bp, Homo sapien
cctggaatccggcacctgatgaagg

SEQ ID NO: 591182 - DNA, 25 bp, Homo sapien
gctctcctggaatccggcacctgat

SEQ ID NO: 591183 - DNA, 25 bp, Homo sapien
gctggaccagctggcatccaaggct

SEQ ID NO: 591184 - DNA, 25 bp, Homo sapien
catgtgctctagcatgctgggacac

SEQ ID NO: 591185 - DNA, 25 bp, Homo sapien
gggtaagacatcgtccacttcacaa

SEQ ID NO: 591186 - DNA, 25 bp, Homo sapien
ggatgacccttggaccttcgtgttg

SEQ ID NO: 591187 - DNA, 25 bp, Homo sapien
ctgtggagatgtgacaatcatcttc

SEQ ID NO: 591188 - DNA, 25 bp, Homo sapien
tgtggagatgtgacaatcatcttcc

SEQ ID NO: 591189 - DNA, 25 bp, Homo sapien
tagtggagcatgttccttggagaac

SEQ ID NO: 591190 - DNA, 25 bp, Homo sapien
caggcactccatgccagttggtctt

SEQ ID NO: 591191 - DNA, 25 bp, Homo sapien
gtgaagcagaatgtcgactctgatt

SEQ ID NO: 591192 - DNA, 25 bp, Homo sapien
tcattagatcaaagtacacctgaat

SEQ ID NO: 591193 - DNA, 25 bp, Homo sapien
tacgctcagaaaatcccgataatct

SEQ ID NO: 591194 - DNA, 25 bp, Homo sapien
gacgcttgtcttggtaagccatacg

SEQ ID NO: 591195 - DNA, 25 bp, Homo sapien
tgtgattctttgctcaaccagacgc

SEQ ID NO: 591196 - DNA, 25 bp, Homo sapien
tcttggtaagccatacgctcagaaa

SEQ ID NO: 591197 - DNA, 25 bp, Homo sapien
atgggcgtttccactccaagctgtg

SEQ ID NO: 591198 - DNA, 25 bp, Homo sapien
gcttgtggtagacgcagcgagtcca

SEQ ID NO: 591199 - DNA, 25 bp, Homo sapien
gcttcagcagcatcaatgggcgttt

SEQ ID NO: 591200 - DNA, 25 bp, Homo sapien
taatttggtccatgcggtgggacgc

SEQ ID NO: 591201 - DNA, 25 bp, Homo sapien
aaagtgaggagtagacttgggtgct

SEQ ID NO: 591202 - DNA, 25 bp, Homo sapien
gaggagtagacttgggtgctgtctg

SEQ ID NO: 591203 - DNA, 25 bp, Homo sapien
gtgaggagtagacttgggtgctgtc

SEQ ID NO: 591204 - DNA, 25 bp, Homo sapien
ctaaagtgaggagtagacttgggtg

SEQ ID NO: 591205 - DNA, 25 bp, Homo sapien
ccggagataaatgtgcttgggctct

SEQ ID NO: 591206 - DNA, 25 bp, Homo sapien
tgctgaccgcacacataaatcagcg

SEQ ID NO: 591207 - DNA, 25 bp, Homo sapien
tcagcgtggagtgccattccagaaa

SEQ ID NO: 591208 - DNA, 25 bp, Homo sapien
gaaacactggacgtgaatgtccctg

SEQ ID NO: 591209 - DNA, 25 bp, Homo sapien
caggctccaactgccgaatgacatt

SEQ ID NO: 591210 - DNA, 25 bp, Homo sapien
gaatgacattggtaagagtctgctt

SEQ ID NO: 591211 - DNA, 25 bp, Homo sapien
caactgccgaatgacattggtaaga

SEQ ID NO: 591212 - DNA, 25 bp, Homo sapien
tgccgaatgacattggtaagagtct

SEQ ID NO: 591213 - DNA, 25 bp, Homo sapien
tcaggtggttagcactgtgatattt

SEQ ID NO: 591214 - DNA, 25 bp, Homo sapien
caggtggttagcactgtgatatttg

SEQ ID NO: 591215 - DNA, 25 bp, Homo sapien
aggtggttagcactgtgatatttgc

SEQ ID NO: 591216 - DNA, 25 bp, Homo sapien
actgtgatatttgcactcagcaaac

SEQ ID NO: 591217 - DNA, 25 bp, Homo sapien
ctactgtccactttgtcagtgctgg

SEQ ID NO: 591218 - DNA, 25 bp, Homo sapien
aggtgcccaatctgagccccacatg

SEQ ID NO: 591219 - DNA, 25 bp, Homo sapien
catgtagttaaagtctatgccgggg

SEQ ID NO: 591220 - DNA, 25 bp, Homo sapien
tatgccggggtccttgatagctcta

SEQ ID NO: 591221 - DNA, 25 bp, Homo sapien
ggtatatttctccagacaggcaggt

SEQ ID NO: 591222 - DNA, 25 bp, Homo sapien
tcaagggagcccagcttctctaagg

SEQ ID NO: 591223 - DNA, 25 bp, Homo sapien
tgaacttgccttgggtaggactgca

SEQ ID NO: 591224 - DNA, 25 bp, Homo sapien
gatcattgagagcagtgccagccca

SEQ ID NO: 591225 - DNA, 25 bp, Homo sapien
tgtgaggtccacaaagaggctgctg

SEQ ID NO: 591226 - DNA, 25 bp, Homo sapien
atgcattatcatgcgagggaatggg

SEQ ID NO: 591227 - DNA, 25 bp, Homo sapien
caaatgcattatcatgcgagggaat

SEQ ID NO: 591228 - DNA, 25 bp, Homo sapien
ccaaatgcattatcatgcgagggaa

SEQ ID NO: 591229 - DNA, 25 bp, Homo sapien
agcatgagtgacaggagaatttgga

SEQ ID NO: 591230 - DNA, 25 bp, Homo sapien
cacccaggtggaaaacaactcattt

SEQ ID NO: 591231 - DNA, 25 bp, Homo sapien
ggagacaaggacaactcctttcctc

SEQ ID NO: 591232 - DNA, 25 bp, Homo sapien
tcattttccccgttgcaacagcgat

SEQ ID NO: 591233 - DNA, 25 bp, Homo sapien
ggccacgggagctgcttagcctcat

SEQ ID NO: 591234 - DNA, 25 bp, Homo sapien
tgtgtctgatctgtgtgcccactct

SEQ ID NO: 591235 - DNA, 25 bp, Homo sapien
gatgccctgtgatgcctgtgtctga

SEQ ID NO: 591236 - DNA, 25 bp, Homo sapien
tggtggtctccaccctgatgccctg

SEQ ID NO: 591237 - DNA, 25 bp, Homo sapien
ccagaaagatgggtagtggtctcat

SEQ ID NO: 591238 - DNA, 25 bp, Homo sapien
tgaagaagcatggagcaccagagtg

SEQ ID NO: 591239 - DNA, 25 bp, Homo sapien
ggtaagctgtgagtgatcttcccca

SEQ ID NO: 591240 - DNA, 25 bp, Homo sapien
cacaccaggttttaggagattgggc

SEQ ID NO: 591241 - DNA, 25 bp, Homo sapien
atcgcgtccagatggtggcccgcgg

SEQ ID NO: 591242 - DNA, 25 bp, Homo sapien
aggtgacccggcaagtgcgcccaag

SEQ ID NO: 591243 - DNA, 25 bp, Homo sapien
ggtggccaccaactttggcccagac

SEQ ID NO: 591244 - DNA, 25 bp, Homo sapien
ggagactctcgtcgcgctcgcctgg

SEQ ID NO: 591245 - DNA, 25 bp, Homo sapien
tgtctgcatctgtttgtctacggtg

SEQ ID NO: 591246 - DNA, 25 bp, Homo sapien
tgtttgtctacggtgcatggggtct

SEQ ID NO: 591247 - DNA, 25 bp, Homo sapien
tctgcatctgtttgtctacggtgca

SEQ ID NO: 591248 - DNA, 25 bp, Homo sapien
tgcatctgtttgtctacggtgcatg

SEQ ID NO: 591249 - DNA, 25 bp, Homo sapien
ggttgttctgctaatgccacaccag

SEQ ID NO: 591250 - DNA, 25 bp, Homo sapien
tcatcttcggttgttctgctaatgc

SEQ ID NO: 591251 - DNA, 25 bp, Homo sapien
tcttcggttgttctgctaatgccac

SEQ ID NO: 591252 - DNA, 25 bp, Homo sapien
tctgctaatgccacaccagtgctgg

SEQ ID NO: 591253 - DNA, 25 bp, Homo sapien
cttgtggcgctgacccagagtggct

SEQ ID NO: 591254 - DNA, 25 bp, Homo sapien
tataatcagcagaatcttgtggcgc

SEQ ID NO: 591255 - DNA, 25 bp, Homo sapien
gggctggcatctgtttcagagctct

SEQ ID NO: 591256 - DNA, 25 bp, Homo sapien
tcaggagatcgtgcagtcttgacca

SEQ ID NO: 591257 - DNA, 25 bp, Homo sapien
gggcttgaagcagatgaagtgttcc

SEQ ID NO: 591258 - DNA, 25 bp, Homo sapien
tcttgggcaagagccaatgtgatgc

SEQ ID NO: 591259 - DNA, 25 bp, Homo sapien
gggcttgtccagctggtctaccatt

SEQ ID NO: 591260 - DNA, 25 bp, Homo sapien
tcatcagtttgtgcctggagcctgc

SEQ ID NO: 591261 - DNA, 25 bp, Homo sapien
ccactgagctcatcaatgagacacc

SEQ ID NO: 591262 - DNA, 25 bp, Homo sapien
gagctcatcaatgagacaccgtggg

SEQ ID NO: 591263 - DNA, 25 bp, Homo sapien
catcaatgagacaccgtgggcctgc

SEQ ID NO: 591264 - DNA, 25 bp, Homo sapien
gctcatcaatgagacaccgtgggcc

SEQ ID NO: 591265 - DNA, 25 bp, Homo sapien
acagcaaccagacgcacgaggagct

SEQ ID NO: 591266 - DNA, 25 bp, Homo sapien
gccacagcaaccagacgcacgagga

SEQ ID NO: 591267 - DNA, 25 bp, Homo sapien
gcaaccagacgcacgaggagctcca

SEQ ID NO: 591268 - DNA, 25 bp, Homo sapien
agcaaccagacgcacgaggagctcc

SEQ ID NO: 591269 - DNA, 25 bp, Homo sapien
tcacgtctgaggtccctgaagccag

SEQ ID NO: 591270 - DNA, 25 bp, Homo sapien
acgtctgaggtccctgaagccagca

SEQ ID NO: 591271 - DNA, 25 bp, Homo sapien
cacgtctgaggtccctgaagccagc

SEQ ID NO: 591272 - DNA, 25 bp, Homo sapien
ggctacattcccagactcgctgcca

SEQ ID NO: 591273 - DNA, 25 bp, Homo sapien
gactcgctgccattgcatgacagag

SEQ ID NO: 591274 - DNA, 25 bp, Homo sapien
atgacagagaatccgtcagctcggg

SEQ ID NO: 591275 - DNA, 25 bp, Homo sapien
gaactggatgaagcgggctgggact

SEQ ID NO: 591276 - DNA, 25 bp, Homo sapien
actggaggttcagcatttgctgtga

SEQ ID NO: 591277 - DNA, 25 bp, Homo sapien
ctggcggtgccaaattaaggcactt

SEQ ID NO: 591278 - DNA, 25 bp, Homo sapien
ggtgggagctaagtcatactcttgg

SEQ ID NO: 591279 - DNA, 25 bp, Homo sapien
cacttaggataaactggggccagga

SEQ ID NO: 591280 - DNA, 25 bp, Homo sapien
ggcaatgggtatgttctcagctgca

SEQ ID NO: 591281 - DNA, 25 bp, Homo sapien
gggcaatgggtatgttctcagctgc

SEQ ID NO: 591282 - DNA, 25 bp, Homo sapien
gcaatgggtatgttctcagctgcag

SEQ ID NO: 591283 - DNA, 25 bp, Homo sapien
caatgggtatgttctcagctgcagc

SEQ ID NO: 591284 - DNA, 25 bp, Homo sapien
gggcaaatggtacccattagcatgt

SEQ ID NO: 591285 - DNA, 25 bp, Homo sapien
cccaccagcacttctcggagatgag

SEQ ID NO: 591286 - DNA, 25 bp, Homo sapien
tgagtgggaccatggattctgggca

SEQ ID NO: 591287 - DNA, 25 bp, Homo sapien
tggattctgggcaaatggtacccat

SEQ ID NO: 591288 - DNA, 25 bp, Homo sapien
caggaaggcagcttccctgcgcagg

SEQ ID NO: 591289 - DNA, 25 bp, Homo sapien
gaaggcagcttccctgcgcaggttc

SEQ ID NO: 591290 - DNA, 25 bp, Homo sapien
ctgcaggaaggcagcttccctgcgc

SEQ ID NO: 591291 - DNA, 25 bp, Homo sapien
ggaaggcagcttccctgcgcaggtt

SEQ ID NO: 591292 - DNA, 25 bp, Homo sapien
tgttgtatccactgagggtgcttcc

SEQ ID NO: 591293 - DNA, 25 bp, Homo sapien
ctgagaggtcactgttgtatccact

SEQ ID NO: 591294 - DNA, 25 bp, Homo sapien
acttcttcgtagtttggcctgcagt

SEQ ID NO: 591295 - DNA, 25 bp, Homo sapien
agtttggcctgcagtggtcctcttg

SEQ ID NO: 591296 - DNA, 25 bp, Homo sapien
acaggtggtgatggtcctcgttgtt

SEQ ID NO: 591297 - DNA, 25 bp, Homo sapien
gaatatggagatacgtcctctgtga

SEQ ID NO: 591298 - DNA, 25 bp, Homo sapien
gaatcaatactagcaggaagccaga

SEQ ID NO: 591299 - DNA, 25 bp, Homo sapien
tttcacgagtgaaacatggagctgg

SEQ ID NO: 591300 - DNA, 25 bp, Homo sapien
aatttgatgtaagttagttctacac

SEQ ID NO: 591301 - DNA, 25 bp, Homo sapien
gaatttgatgtaagttagttctaca

SEQ ID NO: 591302 - DNA, 25 bp, Homo sapien
ggaatttgatgtaagttagttctac

SEQ ID NO: 591303 - DNA, 25 bp, Homo sapien
tggaatttgatgtaagttagttcta

SEQ ID NO: 591304 - DNA, 25 bp, Homo sapien
aatgagcgccaacgtgtaaccagtg

SEQ ID NO: 591305 - DNA, 25 bp, Homo sapien
ggacctaggtgaccaccagcaggga

SEQ ID NO: 591306 - DNA, 25 bp, Homo sapien
gaccctgcacgcagcacaggagaaa

SEQ ID NO: 591307 - DNA, 25 bp, Homo sapien
taaccagtgggcgagacaaagctgc

SEQ ID NO: 591308 - DNA, 25 bp, Homo sapien
atctctgaccatctctgatcactga

SEQ ID NO: 591309 - DNA, 25 bp, Homo sapien
tctctgaccatctctgatcactgaa

SEQ ID NO: 591310 - DNA, 25 bp, Homo sapien
gaaggaggagtgtataccataccga

SEQ ID NO: 591311 - DNA, 25 bp, Homo sapien
gtgtataccataccgagaaaacaag

SEQ ID NO: 591312 - DNA, 25 bp, Homo sapien
aagactgtgcgctgaccactgatca

SEQ ID NO: 591313 - DNA, 25 bp, Homo sapien
gactgtgcgctgaccactgatcatc

SEQ ID NO: 591314 - DNA, 25 bp, Homo sapien
agactgtgcgctgaccactgatcat

SEQ ID NO: 591315 - DNA, 25 bp, Homo sapien
tgggttcatccgctcagagatgaaa

SEQ ID NO: 591316 - DNA, 25 bp, Homo sapien
cctgggttcatccgctcagagatga

SEQ ID NO: 591317 - DNA, 25 bp, Homo sapien
cctgggcctgggttcatccgctcag

SEQ ID NO: 591318 - DNA, 25 bp, Homo sapien
tgggcctgggttcatccgctcagag

SEQ ID NO: 591319 - DNA, 25 bp, Homo sapien
tacacttgcctcagggaagccattt

SEQ ID NO: 591320 - DNA, 25 bp, Homo sapien
ttacacttgcctcagggaagccatt

SEQ ID NO: 591321 - DNA, 25 bp, Homo sapien
acacttgcctcagggaagccatttc

SEQ ID NO: 591322 - DNA, 25 bp, Homo sapien
ctctccctggctgggcgtcaggctg

SEQ ID NO: 591323 - DNA, 25 bp, Homo sapien
ggtactctctccctggctgggcgtc

SEQ ID NO: 591324 - DNA, 25 bp, Homo sapien
gtactctctccctggctgggcgtca

SEQ ID NO: 591325 - DNA, 25 bp, Homo sapien
cctggctgggcgtcaggctggtggg

SEQ ID NO: 591326 - DNA, 25 bp, Homo sapien
tcctccacatcgtaggacagggtgt

SEQ ID NO: 591327 - DNA, 25 bp, Homo sapien
ggtagcgggactccactgactgctg

SEQ ID NO: 591328 - DNA, 25 bp, Homo sapien
tcagctgagaggtcaatgaacttcc

SEQ ID NO: 591329 - DNA, 25 bp, Homo sapien
ccatccgggtactcgaggctgtctt

SEQ ID NO: 591330 - DNA, 25 bp, Homo sapien
ttcttagagggcctctgacaaacac

SEQ ID NO: 591331 - DNA, 25 bp, Homo sapien
cttagagggcctctgacaaacacat

SEQ ID NO: 591332 - DNA, 25 bp, Homo sapien
tcttagagggcctctgacaaacaca

SEQ ID NO: 591333 - DNA, 25 bp, Homo sapien
ttagagggcctctgacaaacacatc

SEQ ID NO: 591334 - DNA, 25 bp, Homo sapien
gaatcagagtgccagccacgtgtac

SEQ ID NO: 591335 - DNA, 25 bp, Homo sapien
taacacagtctcgtgttcttccggg

SEQ ID NO: 591336 - DNA, 25 bp, Homo sapien
tgagcccaggcaagaatcattcagc

SEQ ID NO: 591337 - DNA, 25 bp, Homo sapien
tgcgggcttcattatccaggaggaa

SEQ ID NO: 591338 - DNA, 25 bp, Homo sapien
aggtgtgagagttgtcttcactgga

SEQ ID NO: 591339 - DNA, 25 bp, Homo sapien
ctggggatgtccttcagagggctcc

SEQ ID NO: 591340 - DNA, 25 bp, Homo sapien
agatgctggggatgtccttcagagg

SEQ ID NO: 591341 - DNA, 25 bp, Homo sapien
ggagatgctggggatgtccttcaga

SEQ ID NO: 591342 - DNA, 25 bp, Homo sapien
tgctggggatgtccttcagagggct

SEQ ID NO: 591343 - DNA, 25 bp, Homo sapien
tacggacgtgcaccatctctgagaa

SEQ ID NO: 591344 - DNA, 25 bp, Homo sapien
tgagctagcagatgtgaattccacc

SEQ ID NO: 591345 - DNA, 25 bp, Homo sapien
tcttgccttgagctcagatagcaca

SEQ ID NO: 591346 - DNA, 25 bp, Homo sapien
cccaggttggcgtgatgagctagca

SEQ ID NO: 591347 - DNA, 25 bp, Homo sapien
ttccaggacttggtgtgaaagatca

SEQ ID NO: 591348 - DNA, 25 bp, Homo sapien
gaaagatcactacgtgattcaggtc

SEQ ID NO: 591349 - DNA, 25 bp, Homo sapien
ggcgcagcaggccatcagtgtaagc

SEQ ID NO: 591350 - DNA, 25 bp, Homo sapien
aggtcaaagtgaccagggcgcagca

SEQ ID NO: 591351 - DNA, 25 bp, Homo sapien
tggatacccccattactgccctggg

SEQ ID NO: 591352 - DNA, 25 bp, Homo sapien
gggcagccctatgtggaacacgacc

SEQ ID NO: 591353 - DNA, 25 bp, Homo sapien
gggttgctggatacccccattactg

SEQ ID NO: 591354 - DNA, 25 bp, Homo sapien
tggaacacgaccatgagactctggg

SEQ ID NO: 591355 - DNA, 25 bp, Homo sapien
tagcagaagctgggaaggcccacag

SEQ ID NO: 591356 - DNA, 25 bp, Homo sapien
gcccacaggtgaccacggctccctt

SEQ ID NO: 591357 - DNA, 25 bp, Homo sapien
aggtgaccacggctccctttcccat

SEQ ID NO: 591358 - DNA, 25 bp, Homo sapien
gcagaagctgggaaggcccacaggt

SEQ ID NO: 591359 - DNA, 25 bp, Homo sapien
cctcactctctgtgtcgcttgagta

SEQ ID NO: 591360 - DNA, 25 bp, Homo sapien
attgtcctcactctctgtgtcgctt

SEQ ID NO: 591361 - DNA, 25 bp, Homo sapien
tctctgtgtcgcttgagtagtcgct

SEQ ID NO: 591362 - DNA, 25 bp, Homo sapien
cactctctgtgtcgcttgagtagtc

SEQ ID NO: 591363 - DNA, 25 bp, Homo sapien
gaggatgcagagcttatatgtcccg

SEQ ID NO: 591364 - DNA, 25 bp, Homo sapien
tatatgtcccggcactgactgctga

SEQ ID NO: 591365 - DNA, 25 bp, Homo sapien
gagcttatatgtcccggcactgact

SEQ ID NO: 591366 - DNA, 25 bp, Homo sapien
gatgcagagcttatatgtcccggca

SEQ ID NO: 591367 - DNA, 25 bp, Homo sapien
aggtgtccagtcgacggccaatgaa

SEQ ID NO: 591368 - DNA, 25 bp, Homo sapien
gaatccaatgggactaaacacgcga

SEQ ID NO: 591369 - DNA, 25 bp, Homo sapien
tgtgtgaccagtgatatccgttgaa

SEQ ID NO: 591370 - DNA, 25 bp, Homo sapien
caaatgcctgagtaaggaggatgct

SEQ ID NO: 591371 - DNA, 25 bp, Homo sapien
tcagagcctctttgcgtcccaccag

SEQ ID NO: 591372 - DNA, 25 bp, Homo sapien
tctttgcgtcccaccagcaaggggt

SEQ ID NO: 591373 - DNA, 25 bp, Homo sapien
gcctctttgcgtcccaccagcaagg

SEQ ID NO: 591374 - DNA, 25 bp, Homo sapien
tgcgtcccaccagcaaggggtgtgc

SEQ ID NO: 591375 - DNA, 25 bp, Homo sapien
aaagtacacgcagccatttccatga

SEQ ID NO: 591376 - DNA, 25 bp, Homo sapien
tttccatgacacaaagccagaatct

SEQ ID NO: 591377 - DNA, 25 bp, Homo sapien
gagagctactgggacaattcttcca

SEQ ID NO: 591378 - DNA, 25 bp, Homo sapien
ctggaagaggaccatggaaaaggac

SEQ ID NO: 591379 - DNA, 25 bp, Homo sapien
cctcatgagctacagcccagttctg

SEQ ID NO: 591380 - DNA, 25 bp, Homo sapien
tcttgaattttttgtgccgtatgtg

SEQ ID NO: 591381 - DNA, 25 bp, Homo sapien
ggtgacatgaaagtacaccagcccc

SEQ ID NO: 591382 - DNA, 25 bp, Homo sapien
agcttgagtgtggactaagatggtc

SEQ ID NO: 591383 - DNA, 25 bp, Homo sapien
caagctcagccagttgctctccagg

SEQ ID NO: 591384 - DNA, 25 bp, Homo sapien
cagcaaacagcgaagctagcaggtg

SEQ ID NO: 591385 - DNA, 25 bp, Homo sapien
agcagcagcaaacagcgaagctagc

SEQ ID NO: 591386 - DNA, 25 bp, Homo sapien
gaagctagcaggtgattttctctcc

SEQ ID NO: 591387 - DNA, 25 bp, Homo sapien
aagtgatgctgcctagctttgaagg

SEQ ID NO: 591388 - DNA, 25 bp, Homo sapien
cagtacagtccagtacaagtgatgc

SEQ ID NO: 591389 - DNA, 25 bp, Homo sapien
tatgaatgccttgaccagtacagtc

SEQ ID NO: 591390 - DNA, 25 bp, Homo sapien
acagctgtggcagactatatagtcc

SEQ ID NO: 591391 - DNA, 25 bp, Homo sapien
tgagaagtctgcagtagttttaatc

SEQ ID NO: 591392 - DNA, 25 bp, Homo sapien
ctgcagtagttttaatccttgtttc

SEQ ID NO: 591393 - DNA, 25 bp, Homo sapien
taaacaggatatatctcagttactt

SEQ ID NO: 591394 - DNA, 25 bp, Homo sapien
tcaattttctatggtttaaacagga

SEQ ID NO: 591395 - DNA, 25 bp, Homo sapien
tagagggggaccatcctgtgctcct

SEQ ID NO: 591396 - DNA, 25 bp, Homo sapien
agctcccaggacattctgagcctgt

SEQ ID NO: 591397 - DNA, 25 bp, Homo sapien
tcaatttgaagccttctaggccaca

SEQ ID NO: 591398 - DNA, 25 bp, Homo sapien
ttcaatttgaagccttctaggccac

SEQ ID NO: 591399 - DNA, 25 bp, Homo sapien
cccaggacattctgagcctgttctc

SEQ ID NO: 591400 - DNA, 25 bp, Homo sapien
tgacagttcctgatgtgtggctgac

SEQ ID NO: 591401 - DNA, 25 bp, Homo sapien
gaatgttgaatttgaggctgacagt

SEQ ID NO: 591402 - DNA, 25 bp, Homo sapien
tgatgaggcccttccgcggtcctga

SEQ ID NO: 591403 - DNA, 25 bp, Homo sapien
tgtggctgacagtgttgctttctgg

SEQ ID NO: 591404 - DNA, 25 bp, Homo sapien
taagtgtttagcatggcagtaagct

SEQ ID NO: 591405 - DNA, 25 bp, Homo sapien
tcagattcgacacggtctgcccatc

SEQ ID NO: 591406 - DNA, 25 bp, Homo sapien
caagccacgtcatgttcagattcga

SEQ ID NO: 591407 - DNA, 25 bp, Homo sapien
taagcttgctgcagcaagccacgtc

SEQ ID NO: 591408 - DNA, 25 bp, Homo sapien
gatggtcttctacgtgtaaatcaaa

SEQ ID NO: 591409 - DNA, 25 bp, Homo sapien
gaaaaagcaagctgcattgcacttt

SEQ ID NO: 591410 - DNA, 25 bp, Homo sapien
cctttgacttggtggaatttcactt

SEQ ID NO: 591411 - DNA, 25 bp, Homo sapien
aaactggtacggacttctggaggag

SEQ ID NO: 591412 - DNA, 25 bp, Homo sapien
accgggtgctagatgtgtgtgcata

SEQ ID NO: 591413 - DNA, 25 bp, Homo sapien
catgaatgctaaagacaataactac

SEQ ID NO: 591414 - DNA, 25 bp, Homo sapien
tccccacagtggtagatggcatggt

SEQ ID NO: 591415 - DNA, 25 bp, Homo sapien
gagaataaactggtgagagggtccc

SEQ ID NO: 591416 - DNA, 25 bp, Homo sapien
ggagccagtgggcacatgcacctgg

SEQ ID NO: 591417 - DNA, 25 bp, Homo sapien
cagtgggcacatgcacctggttcat

SEQ ID NO: 591418 - DNA, 25 bp, Homo sapien
gagccagtgggcacatgcacctggt

SEQ ID NO: 591419 - DNA, 25 bp, Homo sapien
gccagtgggcacatgcacctggttc

SEQ ID NO: 591420 - DNA, 25 bp, Homo sapien
gtctctgcaggctgataagccttca

SEQ ID NO: 591421 - DNA, 25 bp, Homo sapien
gggaatatgccttgaccctactgtc

SEQ ID NO: 591422 - DNA, 25 bp, Homo sapien
ccggagatgccgagatgccttttag

SEQ ID NO: 591423 - DNA, 25 bp, Homo sapien
gctctgatatgcagtggcagggact

SEQ ID NO: 591424 - DNA, 25 bp, Homo sapien
tggtcaacatcacgccgacaactca

SEQ ID NO: 591425 - DNA, 25 bp, Homo sapien
ggatgccattctgtcctggtcaaca

SEQ ID NO: 591426 - DNA, 25 bp, Homo sapien
gactggaaagaatcaggctaaactc

SEQ ID NO: 591427 - DNA, 25 bp, Homo sapien
taaaccacattgataccgcaggatg

SEQ ID NO: 591428 - DNA, 25 bp, Homo sapien
acagctgtggcaccaatgcagccat

SEQ ID NO: 591429 - DNA, 25 bp, Homo sapien
ttcactctccgttgtcctctctccc

SEQ ID NO: 591430 - DNA, 25 bp, Homo sapien
ttctctggagccctgtgccagtttt

SEQ ID NO: 591431 - DNA, 25 bp, Homo sapien
gagccctgtgccagttttccttgct

SEQ ID NO: 591432 - DNA, 25 bp, Homo sapien
caaagaggatgttcgtataatacca

SEQ ID NO: 591433 - DNA, 25 bp, Homo sapien
ccatctggttccttgaaagctgctg

SEQ ID NO: 591434 - DNA, 25 bp, Homo sapien
tttccacacgaaattgacaagtgcc

SEQ ID NO: 591435 - DNA, 25 bp, Homo sapien
cctgtgccgcactttgggatatcca

SEQ ID NO: 591436 - DNA, 25 bp, Homo sapien
tgggataaggggtgaatcctggtag

SEQ ID NO: 591437 - DNA, 25 bp, Homo sapien
ctgggataaggggtgaatcctggta

SEQ ID NO: 591438 - DNA, 25 bp, Homo sapien
ggaggagctcatataagttttgtga

SEQ ID NO: 591439 - DNA, 25 bp, Homo sapien
tggcccttctgacttgtaggttatg

SEQ ID NO: 591440 - DNA, 25 bp, Homo sapien
agagcccagcgtaggacaggcagaa

SEQ ID NO: 591441 - DNA, 25 bp, Homo sapien
tgtgaacgttcctcggtaaggcagc

SEQ ID NO: 591442 - DNA, 25 bp, Homo sapien
tatcactgaccgactattgtggtgg

SEQ ID NO: 591443 - DNA, 25 bp, Homo sapien
gttcactgctaagccaagtgcactg

SEQ ID NO: 591444 - DNA, 25 bp, Homo sapien
gaactttgttagtggatccatctgg

SEQ ID NO: 591445 - DNA, 25 bp, Homo sapien
tgaagagttcgctttcttggaaacc

SEQ ID NO: 591446 - DNA, 25 bp, Homo sapien
ggtccagcatgcaggccgtttagga

SEQ ID NO: 591447 - DNA, 25 bp, Homo sapien
agtgcccctcagcacgcctgctttc

SEQ ID NO: 591448 - DNA, 25 bp, Homo sapien
agcatgcaggccgtttaggaacagg

SEQ ID NO: 591449 - DNA, 25 bp, Homo sapien
caggccgtttaggaacaggaaggat

SEQ ID NO: 591450 - DNA, 25 bp, Homo sapien
aggggtccacggcctgcagctcctg

SEQ ID NO: 591451 - DNA, 25 bp, Homo sapien
gtccacggcctgcagctcctgtgtg

SEQ ID NO: 591452 - DNA, 25 bp, Homo sapien
acggcctgcagctcctgtgtggaat

SEQ ID NO: 591453 - DNA, 25 bp, Homo sapien
tcaggggtccacggcctgcagctcc

SEQ ID NO: 591454 - DNA, 25 bp, Homo sapien
cttgtccacaggggcagacactgtg

SEQ ID NO: 591455 - DNA, 25 bp, Homo sapien
ttgtccacaggggcagacactgtgg

SEQ ID NO: 591456 - DNA, 25 bp, Homo sapien
tggaggtgtgcggaaggcaatgaca

SEQ ID NO: 591457 - DNA, 25 bp, Homo sapien
gtgtgcggaaggcaatgacagttcc

SEQ ID NO: 591458 - DNA, 25 bp, Homo sapien
aggtgtgcggaaggcaatgacagtt

SEQ ID NO: 591459 - DNA, 25 bp, Homo sapien
gaggtgtgcggaaggcaatgacagt

SEQ ID NO: 591460 - DNA, 25 bp, Homo sapien
aagtcattgtaagcaagtcggaaca

SEQ ID NO: 591461 - DNA, 25 bp, Homo sapien
tggagggctcatctacggctcctga

SEQ ID NO: 591462 - DNA, 25 bp, Homo sapien
caagtcggaacaagcagtgagtgga

SEQ ID NO: 591463 - DNA, 25 bp, Homo sapien
ggagggctcatctacggctcctgat

SEQ ID NO: 591464 - DNA, 25 bp, Homo sapien
cacatagacgccagtcccaatggtg

SEQ ID NO: 591465 - DNA, 25 bp, Homo sapien
tggtgatggacagcactgccaggaa

SEQ ID NO: 591466 - DNA, 25 bp, Homo sapien
agcactgccaggaatagggcccgcc

SEQ ID NO: 591467 - DNA, 25 bp, Homo sapien
tgttcttggagaggtaggcgatgag

SEQ ID NO: 591468 - DNA, 25 bp, Homo sapien
tttagtcgacagagtaaggcccatc

SEQ ID NO: 591469 - DNA, 25 bp, Homo sapien
tttggaaggattagcagtgcccgtc

SEQ ID NO: 591470 - DNA, 25 bp, Homo sapien
cattctcgtcttgcagggaaggcgt

SEQ ID NO: 591471 - DNA, 25 bp, Homo sapien
tagctgcagtgcctcgagtttccgg

SEQ ID NO: 591472 - DNA, 25 bp, Homo sapien
ccactgtgccctactgaggtgtaaa

SEQ ID NO: 591473 - DNA, 25 bp, Homo sapien
gctagaaagtagcacagctggattc

SEQ ID NO: 591474 - DNA, 25 bp, Homo sapien
tgccctactgaggtgtaaaccttta

SEQ ID NO: 591475 - DNA, 25 bp, Homo sapien
gccagtgactctaactcctacaggg

SEQ ID NO: 591476 - DNA, 25 bp, Homo sapien
aagtggatcatttcaggacaagtgc

SEQ ID NO: 591477 - DNA, 25 bp, Homo sapien
cagaaatgatgggtgtggatataca

SEQ ID NO: 591478 - DNA, 25 bp, Homo sapien
cctggcttagggtgactgtgacagt

SEQ ID NO: 591479 - DNA, 25 bp, Homo sapien
caaagaagcccatttgacacaatga

SEQ ID NO: 591480 - DNA, 25 bp, Homo sapien
aggtagggatgcctgcggaggtagg

SEQ ID NO: 591481 - DNA, 25 bp, Homo sapien
gtagggatgcctgcggaggtaggga

SEQ ID NO: 591482 - DNA, 25 bp, Homo sapien
gggatgcctgcggaggtagggacgc

SEQ ID NO: 591483 - DNA, 25 bp, Homo sapien
ggaggtagggatgcctgcggaggta

SEQ ID NO: 591484 - DNA, 25 bp, Homo sapien
gcacaggtctcgtggattcagctct

SEQ ID NO: 591485 - DNA, 25 bp, Homo sapien
tgggtacgagcctgctctgggagct

SEQ ID NO: 591486 - DNA, 25 bp, Homo sapien
ctgagcacaggtctcgtggattcag

SEQ ID NO: 591487 - DNA, 25 bp, Homo sapien
cctgggagccctgggtacgagcctg

SEQ ID NO: 591488 - DNA, 25 bp, Homo sapien
ctttcttgtgaactggactcagatg

SEQ ID NO: 591489 - DNA, 25 bp, Homo sapien
ttgccttccacgtcaaccactgcag

SEQ ID NO: 591490 - DNA, 25 bp, Homo sapien
gtcaccactttcttgtgaactggac

SEQ ID NO: 591491 - DNA, 25 bp, Homo sapien
cccggctgcatattctccaggcctt

SEQ ID NO: 591492 - DNA, 25 bp, Homo sapien
agccagggagctcctcatcatagag

SEQ ID NO: 591493 - DNA, 25 bp, Homo sapien
cccagctcagtcaacacagccaagt

SEQ ID NO: 591494 - DNA, 25 bp, Homo sapien
tctgcctgcaggatcctcgggggca

SEQ ID NO: 591495 - DNA, 25 bp, Homo sapien
caagtctgaatcctgtgcagatgcc

SEQ ID NO: 591496 - DNA, 25 bp, Homo sapien
tgccggttcccaaggagctccttga

SEQ ID NO: 591497 - DNA, 25 bp, Homo sapien
ccccagggctgagtggcgaatcctc

SEQ ID NO: 591498 - DNA, 25 bp, Homo sapien
tgactcccacttgaccggggcatgc

SEQ ID NO: 591499 - DNA, 25 bp, Homo sapien
gctgagtggcgaatcctctctgggt

SEQ ID NO: 591500 - DNA, 25 bp, Homo sapien
ggaaactacttcctggctgagatgc

SEQ ID NO: 591501 - DNA, 25 bp, Homo sapien
caccgagatacgatcttcttcctca

SEQ ID NO: 591502 - DNA, 25 bp, Homo sapien
tgagatgcatctccagagcgtaacc

SEQ ID NO: 591503 - DNA, 25 bp, Homo sapien
cctgagagcttgtaacaccgagata

SEQ ID NO: 591504 - DNA, 25 bp, Homo sapien
cagggctagaagtagggtgcgattt

SEQ ID NO: 591505 - DNA, 25 bp, Homo sapien
caatccatgagcatttatccagagg

SEQ ID NO: 591506 - DNA, 25 bp, Homo sapien
gctccctgaatgcaaagaggcgagt

SEQ ID NO: 591507 - DNA, 25 bp, Homo sapien
taaacaggtgcttcaatccatgagc

SEQ ID NO: 591508 - DNA, 25 bp, Homo sapien
gaaattgaggcaccgattgcagggc

SEQ ID NO: 591509 - DNA, 25 bp, Homo sapien
tgcagggcagctcatgatttagacc

SEQ ID NO: 591510 - DNA, 25 bp, Homo sapien
aacagagcttgggtccaccagtgca

SEQ ID NO: 591511 - DNA, 25 bp, Homo sapien
tgtgtgccagtgaacccattagatg

SEQ ID NO: 591512 - DNA, 25 bp, Homo sapien
aggatcactttcaccctgggccggc

SEQ ID NO: 591513 - DNA, 25 bp, Homo sapien
agtgtctcagcttggcaggatcact

SEQ ID NO: 591514 - DNA, 25 bp, Homo sapien
tctgagtgtctcagcttggcaggat

SEQ ID NO: 591515 - DNA, 25 bp, Homo sapien
cactttcaccctgggccggcttttg

SEQ ID NO: 591516 - DNA, 25 bp, Homo sapien
catcctcctccgtcattgcatttaa

SEQ ID NO: 591517 - DNA, 25 bp, Homo sapien
taccgtggtcatttcgtctccatcc

SEQ ID NO: 591518 - DNA, 25 bp, Homo sapien
gccactgatgtcattaccgtggtca

SEQ ID NO: 591519 - DNA, 25 bp, Homo sapien
cctccacatagggtagcaggccact

SEQ ID NO: 591520 - DNA, 25 bp, Homo sapien
gttagggtgttgagcatccccatga

SEQ ID NO: 591521 - DNA, 25 bp, Homo sapien
tggagagagccatgcaaaatcagcc

SEQ ID NO: 591522 - DNA, 25 bp, Homo sapien
tcatcacccggttcgagcagaatag

SEQ ID NO: 591523 - DNA, 25 bp, Homo sapien
aaatcagcccctagagaatgcgagc

SEQ ID NO: 591524 - DNA, 25 bp, Homo sapien
gaagttaggatgtctctgagagagg

SEQ ID NO: 591525 - DNA, 25 bp, Homo sapien
ggagccagcgtgctgtttctgaagt

SEQ ID NO: 591526 - DNA, 25 bp, Homo sapien
gaggcagggctctattctgcaggac

SEQ ID NO: 591527 - DNA, 25 bp, Homo sapien
actgcttgagggccctgtgagcgtc

SEQ ID NO: 591528 - DNA, 25 bp, Homo sapien
ctgcctctgatacacctgtgagggt

SEQ ID NO: 591529 - DNA, 25 bp, Homo sapien
tgcctctgatacacctgtgagggta

SEQ ID NO: 591530 - DNA, 25 bp, Homo sapien
gcctctgatacacctgtgagggtag

SEQ ID NO: 591531 - DNA, 25 bp, Homo sapien
tcccctgggccggacgatgacagcg

SEQ ID NO: 591532 - DNA, 25 bp, Homo sapien
gacagcgggtttgccatgagcacta

SEQ ID NO: 591533 - DNA, 25 bp, Homo sapien
gtgttcagcacccagattcccctgg

SEQ ID NO: 591534 - DNA, 25 bp, Homo sapien
gccatgagcactattgatgaaatga

SEQ ID NO: 591535 - DNA, 25 bp, Homo sapien
ctacagtggccgcagtgtaaactcc

SEQ ID NO: 591536 - DNA, 25 bp, Homo sapien
gccgcagtgtaaactccgatgtagg

SEQ ID NO: 591537 - DNA, 25 bp, Homo sapien
cagtggccgcagtgtaaactccgat

SEQ ID NO: 591538 - DNA, 25 bp, Homo sapien
aactccgatgtaggggccccactgc

SEQ ID NO: 591539 - DNA, 25 bp, Homo sapien
ctccgtgaggactccgagccaggag

SEQ ID NO: 591540 - DNA, 25 bp, Homo sapien
tgcctccgtgaggactccgagccag

SEQ ID NO: 591541 - DNA, 25 bp, Homo sapien
tggctgcctccgtgaggactccgag

SEQ ID NO: 591542 - DNA, 25 bp, Homo sapien
aggactccgagccaggaggctgcca

SEQ ID NO: 591543 - DNA, 25 bp, Homo sapien
tgggaaatagtggtcccgggaggca

SEQ ID NO: 591544 - DNA, 25 bp, Homo sapien
aatcataagtctgggcctcatctgg

SEQ ID NO: 591545 - DNA, 25 bp, Homo sapien
gcctcaaggcgctgagggtcacttg

SEQ ID NO: 591546 - DNA, 25 bp, Homo sapien
tgctatcttagcttggtgttcttgg

SEQ ID NO: 591547 - DNA, 25 bp, Homo sapien
tctggtatttgtccgctcctgagcc

SEQ ID NO: 591548 - DNA, 25 bp, Homo sapien
ttgctgcagacagctagcagcttct

SEQ ID NO: 591549 - DNA, 25 bp, Homo sapien
ggctgctttgctgcagacagctagc

SEQ ID NO: 591550 - DNA, 25 bp, Homo sapien
tttgctgcagacagctagcagcttc

SEQ ID NO: 591551 - DNA, 25 bp, Homo sapien
tgctttgctgcagacagctagcagc

SEQ ID NO: 591552 - DNA, 25 bp, Homo sapien
cactgctatgtctgccacttctctg

SEQ ID NO: 591553 - DNA, 25 bp, Homo sapien
ggccctgaaagtccagctccaatgc

SEQ ID NO: 591554 - DNA, 25 bp, Homo sapien
ccacttaaggccctgaaagtccagc

SEQ ID NO: 591555 - DNA, 25 bp, Homo sapien
cttcttgccactgctatgtctgcca

SEQ ID NO: 591556 - DNA, 25 bp, Homo sapien
tgtgttgttgccgaaggccatggca

SEQ ID NO: 591557 - DNA, 25 bp, Homo sapien
ccctgtgttgttgccgaaggccatg

SEQ ID NO: 591558 - DNA, 25 bp, Homo sapien
gttgttgccgaaggccatggcactg

SEQ ID NO: 591559 - DNA, 25 bp, Homo sapien
ctgccctgtgttgttgccgaaggcc

SEQ ID NO: 591560 - DNA, 25 bp, Homo sapien
ctgtgccccaggattaagaagttga

SEQ ID NO: 591561 - DNA, 25 bp, Homo sapien
tgtgccccaggattaagaagttgat

SEQ ID NO: 591562 - DNA, 25 bp, Homo sapien
gaagtccttatggagtgtgcagtag

SEQ ID NO: 591563 - DNA, 25 bp, Homo sapien
tggcatctgtcacccctccttgagg

SEQ ID NO: 591564 - DNA, 25 bp, Homo sapien
gctgcttcctggaaacatggcccaa

SEQ ID NO: 591565 - DNA, 25 bp, Homo sapien
ttcctggaaacatggcccaaatcca

SEQ ID NO: 591566 - DNA, 25 bp, Homo sapien
aatgtttgtcctacacagggcctgg

SEQ ID NO: 591567 - DNA, 25 bp, Homo sapien
tatcttggctggacggtgctaccca

SEQ ID NO: 591568 - DNA, 25 bp, Homo sapien
agtctcctcaggaccaaccgtgtta

SEQ ID NO: 591569 - DNA, 25 bp, Homo sapien
caggttcttggtgggagtctcctca

SEQ ID NO: 591570 - DNA, 25 bp, Homo sapien
ttgttgagcatggggtctgcagcca

SEQ ID NO: 591571 - DNA, 25 bp, Homo sapien
ctttttgttgagcatggggtctgca

SEQ ID NO: 591572 - DNA, 25 bp, Homo sapien
tgagcatggggtctgcagccagcat

SEQ ID NO: 591573 - DNA, 25 bp, Homo sapien
gttgagcatggggtctgcagccagc

SEQ ID NO: 591574 - DNA, 25 bp, Homo sapien
tgggcggtgccgacacttctcactt

SEQ ID NO: 591575 - DNA, 25 bp, Homo sapien
ggtgccgacacttctcacttgaagt

SEQ ID NO: 591576 - DNA, 25 bp, Homo sapien
ttctcacttgaagtgagaagctgct

SEQ ID NO: 591577 - DNA, 25 bp, Homo sapien
ctgtgtgggcggtgccgacacttct

SEQ ID NO: 591578 - DNA, 25 bp, Homo sapien
gctgctgttggaggcccgcatttcg

SEQ ID NO: 591579 - DNA, 25 bp, Homo sapien
ccagcagcgtggaggagtaggagcc

SEQ ID NO: 591580 - DNA, 25 bp, Homo sapien
cagcgtggaggagtaggagcctcgc

SEQ ID NO: 591581 - DNA, 25 bp, Homo sapien
gaggcccgcatttcggaggccttcc

SEQ ID NO: 591582 - DNA, 25 bp, Homo sapien
cattcccgtggtcagtaagggcgac

SEQ ID NO: 591583 - DNA, 25 bp, Homo sapien
tcactccgtcgtttgaaccagcgag

SEQ ID NO: 591584 - DNA, 25 bp, Homo sapien
ggcttgatgttcttgactgctgtac

SEQ ID NO: 591585 - DNA, 25 bp, Homo sapien
cagtgcatgccccaggtgtttcctt

SEQ ID NO: 591586 - DNA, 25 bp, Homo sapien
ctgggagcggaaaattgaatgaggt

SEQ ID NO: 591587 - DNA, 25 bp, Homo sapien
ctgtggctaatgaaggagacaagag

SEQ ID NO: 591588 - DNA, 25 bp, Homo sapien
ggcactgtggctaatgaaggagaca

SEQ ID NO: 591589 - DNA, 25 bp, Homo sapien
gcactgtggctaatgaaggagacaa

SEQ ID NO: 591590 - DNA, 25 bp, Homo sapien
cactgtggctaatgaaggagacaag

SEQ ID NO: 591591 - DNA, 25 bp, Homo sapien
tcctccttccaggttacacaacaag

SEQ ID NO: 591592 - DNA, 25 bp, Homo sapien
cctccttccaggttacacaacaagg

SEQ ID NO: 591593 - DNA, 25 bp, Homo sapien
tcatggactgaacgctccgggagca

SEQ ID NO: 591594 - DNA, 25 bp, Homo sapien
gaatcatggactgaacgctccggga

SEQ ID NO: 591595 - DNA, 25 bp, Homo sapien
tggaggtagacgagggtcccagcag

SEQ ID NO: 591596 - DNA, 25 bp, Homo sapien
agcaggaatcatggactgaacgctc

SEQ ID NO: 591597 - DNA, 25 bp, Homo sapien
gctttttgggccttccacttctctg

SEQ ID NO: 591598 - DNA, 25 bp, Homo sapien
tccacttctctggacggggctactt

SEQ ID NO: 591599 - DNA, 25 bp, Homo sapien
tctggacggggctacttggcagcat

SEQ ID NO: 591600 - DNA, 25 bp, Homo sapien
cacttctctggacggggctacttgg

SEQ ID NO: 591601 - DNA, 25 bp, Homo sapien
ctgatggtgaccattctggaacatt

SEQ ID NO: 591602 - DNA, 25 bp, Homo sapien
ctggaacattctggttaggaccact

SEQ ID NO: 591603 - DNA, 25 bp, Homo sapien
atagagctggcacccggaatctggc

SEQ ID NO: 591604 - DNA, 25 bp, Homo sapien
agtctgaggccctgatggtgaccat

SEQ ID NO: 591605 - DNA, 25 bp, Homo sapien
cagcagacgagagtggagaaaaccc

SEQ ID NO: 591606 - DNA, 25 bp, Homo sapien
ggggcaggtccggcagcagcagacg

SEQ ID NO: 591607 - DNA, 25 bp, Homo sapien
ggcaggtccggcagcagcagacgag

SEQ ID NO: 591608 - DNA, 25 bp, Homo sapien
gggcaggtccggcagcagcagacga

SEQ ID NO: 591609 - DNA, 25 bp, Homo sapien
ctggccagtggtggggcgtgaccat

SEQ ID NO: 591610 - DNA, 25 bp, Homo sapien
gaccatgttgcctggtgccagtgga

SEQ ID NO: 591611 - DNA, 25 bp, Homo sapien
agtggtggggcgtgaccatgttgcc

SEQ ID NO: 591612 - DNA, 25 bp, Homo sapien
gggcgtgaccatgttgcctggtgcc

SEQ ID NO: 591613 - DNA, 25 bp, Homo sapien
gaggcacaaagaaagtcccgtggca

SEQ ID NO: 591614 - DNA, 25 bp, Homo sapien
agaaagtcccgtggcattttttgct

SEQ ID NO: 591615 - DNA, 25 bp, Homo sapien
cacaaagaaagtcccgtggcatttt

SEQ ID NO: 591616 - DNA, 25 bp, Homo sapien
ggcacaaagaaagtcccgtggcatt

SEQ ID NO: 591617 - DNA, 25 bp, Homo sapien
cttcccatggttccggtgcacaggt

SEQ ID NO: 591618 - DNA, 25 bp, Homo sapien
cgaggtgctctgctgattccgagaa

SEQ ID NO: 591619 - DNA, 25 bp, Homo sapien
ccttcccatggttccggtgcacagg

SEQ ID NO: 591620 - DNA, 25 bp, Homo sapien
gcgccagtcccgaggtgctctgctg

SEQ ID NO: 591621 - DNA, 25 bp, Homo sapien
tagccacgatccaggacatcagaac

SEQ ID NO: 591622 - DNA, 25 bp, Homo sapien
gaggatgtagccacgatccaggaca

SEQ ID NO: 591623 - DNA, 25 bp, Homo sapien
ggatgtagccacgatccaggacatc

SEQ ID NO: 591624 - DNA, 25 bp, Homo sapien
tgtagccacgatccaggacatcaga

SEQ ID NO: 591625 - DNA, 25 bp, Homo sapien
agcatgggcagcagcgagtaaaatg

SEQ ID NO: 591626 - DNA, 25 bp, Homo sapien
aaatgcgggtcttcgtgcccatggc

SEQ ID NO: 591627 - DNA, 25 bp, Homo sapien
tgcccatggcttagacctcagtagt

SEQ ID NO: 591628 - DNA, 25 bp, Homo sapien
tagagaaaccactcagtgccaggag

SEQ ID NO: 591629 - DNA, 25 bp, Homo sapien
aggggacaacaccagacagcacccg

SEQ ID NO: 591630 - DNA, 25 bp, Homo sapien
ctgctgaggggacaacaccagacag

SEQ ID NO: 591631 - DNA, 25 bp, Homo sapien
ctgaggggacaacaccagacagcac

SEQ ID NO: 591632 - DNA, 25 bp, Homo sapien
gggacaacaccagacagcacccggg

SEQ ID NO: 591633 - DNA, 25 bp, Homo sapien
tgggtttctcatcttcccgcgtgtc

SEQ ID NO: 591634 - DNA, 25 bp, Homo sapien
gtttctcatcttcccgcgtgtcttc

SEQ ID NO: 591635 - DNA, 25 bp, Homo sapien
ctgaagacatgggtttctcatcttc

SEQ ID NO: 591636 - DNA, 25 bp, Homo sapien
acatgggtttctcatcttcccgcgt

SEQ ID NO: 591637 - DNA, 25 bp, Homo sapien
gggacagtagcgggaacagtgacag

SEQ ID NO: 591638 - DNA, 25 bp, Homo sapien
acagtagcgggaacagtgacagcag

SEQ ID NO: 591639 - DNA, 25 bp, Homo sapien
tgggggacagtagcgggaacagtga

SEQ ID NO: 591640 - DNA, 25 bp, Homo sapien
gtgggggacagtagcgggaacagtg

SEQ ID NO: 591641 - DNA, 25 bp, Homo sapien
tccaccaggagaggttgacatgggc

SEQ ID NO: 591642 - DNA, 25 bp, Homo sapien
ctccggggaggtcccagtagctcca

SEQ ID NO: 591643 - DNA, 25 bp, Homo sapien
ttggagccgagcacagtaagaccct

SEQ ID NO: 591644 - DNA, 25 bp, Homo sapien
gctcgagttggcttggagaaggctt

SEQ ID NO: 591645 - DNA, 25 bp, Homo sapien
gactcagggagtacttcacaagggt

SEQ ID NO: 591646 - DNA, 25 bp, Homo sapien
gaagcctcattaagttccaaggtgg

SEQ ID NO: 591647 - DNA, 25 bp, Homo sapien
gagaactcgctgctagaagcctcat

SEQ ID NO: 591648 - DNA, 25 bp, Homo sapien
gaacagggtagtgacccgcagagct

SEQ ID NO: 591649 - DNA, 25 bp, Homo sapien
tgcctcaggattcccttctggctgg

SEQ ID NO: 591650 - DNA, 25 bp, Homo sapien
atggacgcattgaagggccaggcct

SEQ ID NO: 591651 - DNA, 25 bp, Homo sapien
tggctggcaagccagatggacgcat

SEQ ID NO: 591652 - DNA, 25 bp, Homo sapien
tgccatggccatgggacggtttgtc

SEQ ID NO: 591653 - DNA, 25 bp, Homo sapien
gcctgagaggcagccgagccgcacg

SEQ ID NO: 591654 - DNA, 25 bp, Homo sapien
tccaggctcttccttgtagaaacct

SEQ ID NO: 591655 - DNA, 25 bp, Homo sapien
ccctgtgtcgaagggcagaggcctc

SEQ ID NO: 591656 - DNA, 25 bp, Homo sapien
agccgcacgcccctgtgtcgaaggg

SEQ ID NO: 591657 - DNA, 25 bp, Homo sapien
gcatctccaggcgaatcatgtctcc

SEQ ID NO: 591658 - DNA, 25 bp, Homo sapien
acgtgtgtctcccatgaggtttggg

SEQ ID NO: 591659 - DNA, 25 bp, Homo sapien
cagtaaactgggccacacgtgtgtc

SEQ ID NO: 591660 - DNA, 25 bp, Homo sapien
tgtccctgaaggtaggccacagtaa

SEQ ID NO: 591661 - DNA, 25 bp, Homo sapien
cagatggttggcaatggggcggtgg

SEQ ID NO: 591662 - DNA, 25 bp, Homo sapien
gctcaggcagatggttggcaatggg

SEQ ID NO: 591663 - DNA, 25 bp, Homo sapien
cagggctcaggcagatggttggcaa

SEQ ID NO: 591664 - DNA, 25 bp, Homo sapien
gcagatggttggcaatggggcggtg

SEQ ID NO: 591665 - DNA, 25 bp, Homo sapien
catgttacctcttgtggcttcagtc

SEQ ID NO: 591666 - DNA, 25 bp, Homo sapien
tgtggcaggaaacttgtccactgaa

SEQ ID NO: 591667 - DNA, 25 bp, Homo sapien
tgtccactgaatgctgcacatgtta

SEQ ID NO: 591668 - DNA, 25 bp, Homo sapien
cccaaagaacccgacaatgtctggg

SEQ ID NO: 591669 - DNA, 25 bp, Homo sapien
ttttccacgtggtcctaaagctggc

SEQ ID NO: 591670 - DNA, 25 bp, Homo sapien
aatatggtcgatatgcttgttagac

SEQ ID NO: 591671 - DNA, 25 bp, Homo sapien
accatcagtgcgctgtatacattgc

SEQ ID NO: 591672 - DNA, 25 bp, Homo sapien
gctctggtcaggaatatggtcgata

SEQ ID NO: 591673 - DNA, 25 bp, Homo sapien
cagtgtcagcactgggaaaataatc

SEQ ID NO: 591674 - DNA, 25 bp, Homo sapien
ggtggtattgtggacaccagtgtca

SEQ ID NO: 591675 - DNA, 25 bp, Homo sapien
cagcactgggaaaataatccatgta

SEQ ID NO: 591676 - DNA, 25 bp, Homo sapien
aggtggtattgtggacaccagtgtc

SEQ ID NO: 591677 - DNA, 25 bp, Homo sapien
gggagaaggattgtggtcccctgcc

SEQ ID NO: 591678 - DNA, 25 bp, Homo sapien
cggtaggagattagagtttccatga

SEQ ID NO: 591679 - DNA, 25 bp, Homo sapien
tgtccctgcagggtttgaaccaagg

SEQ ID NO: 591680 - DNA, 25 bp, Homo sapien
gagatgctccatgccgtgaaatcgg

SEQ ID NO: 591681 - DNA, 25 bp, Homo sapien
gatgcttttcagattcacacggtcc

SEQ ID NO: 591682 - DNA, 25 bp, Homo sapien
agattcacacggtccttcctgggcc

SEQ ID NO: 591683 - DNA, 25 bp, Homo sapien
ctcagcctgatgcttttcagattca

SEQ ID NO: 591684 - DNA, 25 bp, Homo sapien
gcttttcagattcacacggtccttc

SEQ ID NO: 591685 - DNA, 25 bp, Homo sapien
caggagcggcctgagttgggtggtg

SEQ ID NO: 591686 - DNA, 25 bp, Homo sapien
gacttgatgacgcagggagagactc

SEQ ID NO: 591687 - DNA, 25 bp, Homo sapien
gctggcaaatagggtaccagcagga

SEQ ID NO: 591688 - DNA, 25 bp, Homo sapien
gagagactccatgaatgacactggc

SEQ ID NO: 591689 - DNA, 25 bp, Homo sapien
tcctgctggaggaatgagggctgta

SEQ ID NO: 591690 - DNA, 25 bp, Homo sapien
tgtcctgctggaggaatgagggctg

SEQ ID NO: 591691 - DNA, 25 bp, Homo sapien
agtgaccgggtgacgaatgtgttgg

SEQ ID NO: 591692 - DNA, 25 bp, Homo sapien
tgagggctgtaggtgagtgaccggg

SEQ ID NO: 591693 - DNA, 25 bp, Homo sapien
cagccaggcggcagcagaagcctct

SEQ ID NO: 591694 - DNA, 25 bp, Homo sapien
gggtgcaggggccaagctggagggc

SEQ ID NO: 591695 - DNA, 25 bp, Homo sapien
ccaggcggcagcagaagcctctcct

SEQ ID NO: 591696 - DNA, 25 bp, Homo sapien
agggtgcaggggccaagctggaggg

SEQ ID NO: 591697 - DNA, 25 bp, Homo sapien
caggttcagaccccggggacctgca

SEQ ID NO: 591698 - DNA, 25 bp, Homo sapien
cagcaggttcagaccccggggacct

SEQ ID NO: 591699 - DNA, 25 bp, Homo sapien
agcaggttcagaccccggggacctg

SEQ ID NO: 591700 - DNA, 25 bp, Homo sapien
gcaggttcagaccccggggacctgc

SEQ ID NO: 591701 - DNA, 25 bp, Homo sapien
tgcttggcctcccttggaagctgct

SEQ ID NO: 591702 - DNA, 25 bp, Homo sapien
cttggaagctgctgccgttacccca

SEQ ID NO: 591703 - DNA, 25 bp, Homo sapien
tgggtggttttacacacagtcccca

SEQ ID NO: 591704 - DNA, 25 bp, Homo sapien
gagctggggtgcttggcctcccttg

SEQ ID NO: 591705 - DNA, 25 bp, Homo sapien
gcacactccagtgagcgctgttttt

SEQ ID NO: 591706 - DNA, 25 bp, Homo sapien
catctgtcgtgtgtcagtcagtggg

SEQ ID NO: 591707 - DNA, 25 bp, Homo sapien
tgcacaggcgttgcacagaagcagc

SEQ ID NO: 591708 - DNA, 25 bp, Homo sapien
tgtccttgtgttgcacaggcgttgc

SEQ ID NO: 591709 - DNA, 25 bp, Homo sapien
cttctgatggagctagcgtgctgaa

SEQ ID NO: 591710 - DNA, 25 bp, Homo sapien
agagggcgaggtggcctcagtaccc

SEQ ID NO: 591711 - DNA, 25 bp, Homo sapien
atgtgctcccttggacgaggccttc

SEQ ID NO: 591712 - DNA, 25 bp, Homo sapien
tacccctgtggtcggggatgtgctc

SEQ ID NO: 591713 - DNA, 25 bp, Homo sapien
ttcgggaacccccactcatgaaggc

SEQ ID NO: 591714 - DNA, 25 bp, Homo sapien
cccactcatgaaggcttcgatgcta

SEQ ID NO: 591715 - DNA, 25 bp, Homo sapien
aggcctgggcagacattcgggaacc

SEQ ID NO: 591716 - DNA, 25 bp, Homo sapien
gaaggcttcgatgctatcttgctct

SEQ ID NO: 591717 - DNA, 25 bp, Homo sapien
gagcccttcatttgagaacacaaaa

SEQ ID NO: 591718 - DNA, 25 bp, Homo sapien
ccgagcccttcatttgagaacacaa

SEQ ID NO: 591719 - DNA, 25 bp, Homo sapien
cgagcccttcatttgagaacacaaa

SEQ ID NO: 591720 - DNA, 25 bp, Homo sapien
agcccttcatttgagaacacaaaag

SEQ ID NO: 591721 - DNA, 25 bp, Homo sapien
ggcagctgaaggttgggctgggctg

SEQ ID NO: 591722 - DNA, 25 bp, Homo sapien
cacagggcagctgaaggttgggctg

SEQ ID NO: 591723 - DNA, 25 bp, Homo sapien
ctggacacagggcagctgaaggttg

SEQ ID NO: 591724 - DNA, 25 bp, Homo sapien
gacacagggcagctgaaggttgggc

SEQ ID NO: 591725 - DNA, 25 bp, Homo sapien
gggtgctctttgtctcccacagcat

SEQ ID NO: 591726 - DNA, 25 bp, Homo sapien
cagcatcagtcgtgttctgggcaca

SEQ ID NO: 591727 - DNA, 25 bp, Homo sapien
atcagtcgtgttctgggcacatgcc

SEQ ID NO: 591728 - DNA, 25 bp, Homo sapien
ctcccacagcatcagtcgtgttctg

SEQ ID NO: 591729 - DNA, 25 bp, Homo sapien
gatctccaggccccaggtgtgtgtg

SEQ ID NO: 591730 - DNA, 25 bp, Homo sapien
tgggatctccaggccccaggtgtgt

SEQ ID NO: 591731 - DNA, 25 bp, Homo sapien
atctccaggccccaggtgtgtgtgt

SEQ ID NO: 591732 - DNA, 25 bp, Homo sapien
ggatctccaggccccaggtgtgtgt

SEQ ID NO: 591733 - DNA, 25 bp, Homo sapien
tgaccatcgagccaaccagttcttg

SEQ ID NO: 591734 - DNA, 25 bp, Homo sapien
gtgtaaccaagggtgctgaggccca

SEQ ID NO: 591735 - DNA, 25 bp, Homo sapien
gcaagaagaaatgaccatcgagcca

SEQ ID NO: 591736 - DNA, 25 bp, Homo sapien
ttgctgtgtaaccaagggtgctgag

SEQ ID NO: 591737 - DNA, 25 bp, Homo sapien
cccatcccgagtaccggctgcctgg

SEQ ID NO: 591738 - DNA, 25 bp, Homo sapien
ttccccgaaggctgcgcggttgttg

SEQ ID NO: 591739 - DNA, 25 bp, Homo sapien
gctgcggctgtatgcgggcccttcc

SEQ ID NO: 591740 - DNA, 25 bp, Homo sapien
ctgcggctgtatgcgggcccttccc

SEQ ID NO: 591741 - DNA, 25 bp, Homo sapien
tcccgtccgggtccttgagtctcga

SEQ ID NO: 591742 - DNA, 25 bp, Homo sapien
tccgggtccttgagtctcgagaacc

SEQ ID NO: 591743 - DNA, 25 bp, Homo sapien
cgtccgggtccttgagtctcgagaa

SEQ ID NO: 591744 - DNA, 25 bp, Homo sapien
gtccttgagtctcgagaacctcggg

SEQ ID NO: 591745 - DNA, 25 bp, Homo sapien
tacacccagggccagatttcgagcc

SEQ ID NO: 591746 - DNA, 25 bp, Homo sapien
tcaggcccatctacccctgtgagga

SEQ ID NO: 591747 - DNA, 25 bp, Homo sapien
ctgggagcggattctgtgcacgtct

SEQ ID NO: 591748 - DNA, 25 bp, Homo sapien
gagccacgatgttcctgttgtgaga

SEQ ID NO: 591749 - DNA, 25 bp, Homo sapien
tgaagactcatgctcgggtccagac

SEQ ID NO: 591750 - DNA, 25 bp, Homo sapien
aagaccttggccatcaaaggcatgc

SEQ ID NO: 591751 - DNA, 25 bp, Homo sapien
gctgaacttggaaacaagaccttgg

SEQ ID NO: 591752 - DNA, 25 bp, Homo sapien
gggtccagaccatcgcttgtaagtg

SEQ ID NO: 591753 - DNA, 25 bp, Homo sapien
cctggtgtccaatttacttcgatgc

SEQ ID NO: 591754 - DNA, 25 bp, Homo sapien
tccaatttacttcgatgctcctggg

SEQ ID NO: 591755 - DNA, 25 bp, Homo sapien
tgtccaatttacttcgatgctcctg

SEQ ID NO: 591756 - DNA, 25 bp, Homo sapien
ggtgtccaatttacttcgatgctcc

SEQ ID NO: 591757 - DNA, 25 bp, Homo sapien
gatcttgtgctaagtcccccagaac

SEQ ID NO: 591758 - DNA, 25 bp, Homo sapien
tcattccccaggtagccttcatctt

SEQ ID NO: 591759 - DNA, 25 bp, Homo sapien
attccccaggtagccttcatcttca

SEQ ID NO: 591760 - DNA, 25 bp, Homo sapien
cagggaggatcttgtgctaagtccc

SEQ ID NO: 591761 - DNA, 25 bp, Homo sapien
tctcacccctgatactgacccagcc

SEQ ID NO: 591762 - DNA, 25 bp, Homo sapien
cacccctgatactgacccagccaca

SEQ ID NO: 591763 - DNA, 25 bp, Homo sapien
caactctcacccctgatactgaccc

SEQ ID NO: 591764 - DNA, 25 bp, Homo sapien
actctcacccctgatactgacccag

SEQ ID NO: 591765 - DNA, 25 bp, Homo sapien
gccacagggtggcgctgtgatccca

SEQ ID NO: 591766 - DNA, 25 bp, Homo sapien
ccagactgttgcgagccgaaggaga

SEQ ID NO: 591767 - DNA, 25 bp, Homo sapien
cgaaggagagcgtcggccacagggt

SEQ ID NO: 591768 - DNA, 25 bp, Homo sapien
tggaagatctttttcggtctgtgtt

SEQ ID NO: 591769 - DNA, 25 bp, Homo sapien
atgccgggggggaacagctagacct

SEQ ID NO: 591770 - DNA, 25 bp, Homo sapien
gtatgccgggggggaacagctagac

SEQ ID NO: 591771 - DNA, 25 bp, Homo sapien
tagaccttgcctcacattatgctgt

SEQ ID NO: 591772 - DNA, 25 bp, Homo sapien
gctagaccttgcctcacattatgct

SEQ ID NO: 591773 - DNA, 25 bp, Homo sapien
ttaaataatactatagagagcatgt

SEQ ID NO: 591774 - DNA, 25 bp, Homo sapien
tcccatgatataatatttcctaagg

SEQ ID NO: 591775 - DNA, 25 bp, Homo sapien
ggtcccatgatataatatttcctaa

SEQ ID NO: 591776 - DNA, 25 bp, Homo sapien
aataatactatagagagcatgtatc

SEQ ID NO: 591777 - DNA, 25 bp, Homo sapien
tctctacgttcacagcagtgggagt

SEQ ID NO: 591778 - DNA, 25 bp, Homo sapien
tgtgatggatccaggctaggattct

SEQ ID NO: 591779 - DNA, 25 bp, Homo sapien
ctaggattctctctacgttcacagc

SEQ ID NO: 591780 - DNA, 25 bp, Homo sapien
acacggttgtgatggatccaggcta

SEQ ID NO: 591781 - DNA, 25 bp, Homo sapien
aaacactggtttgggagagtgcttg

SEQ ID NO: 591782 - DNA, 25 bp, Homo sapien
gacctccccttgaactaaaatggca

SEQ ID NO: 591783 - DNA, 25 bp, Homo sapien
ccccttgaactaaaatggcaacttg

SEQ ID NO: 591784 - DNA, 25 bp, Homo sapien
ggcagatttaactcctcataaaagg

SEQ ID NO: 591785 - DNA, 25 bp, Homo sapien
gccggtagcattggcagactcatgt

SEQ ID NO: 591786 - DNA, 25 bp, Homo sapien
ggccggtagcattggcagactcatg

SEQ ID NO: 591787 - DNA, 25 bp, Homo sapien
gatcctggacaagcccccattatat

SEQ ID NO: 591788 - DNA, 25 bp, Homo sapien
tattgatgaagagaatgtagcagga

SEQ ID NO: 591789 - DNA, 25 bp, Homo sapien
catccttattgatgaagagaatgta

SEQ ID NO: 591790 - DNA, 25 bp, Homo sapien
tacactaccatacatccttattgat

SEQ ID NO: 591791 - DNA, 25 bp, Homo sapien
caagccaatgaacatctacactacc

SEQ ID NO: 591792 - DNA, 25 bp, Homo sapien
ggtctgaccatctgcatagctgtct

SEQ ID NO: 591793 - DNA, 25 bp, Homo sapien
ggaactgcaagcctagggcaccgct

SEQ ID NO: 591794 - DNA, 25 bp, Homo sapien
accgctggaggctaccccttttctg

SEQ ID NO: 591795 - DNA, 25 bp, Homo sapien
tagctgtctgcttgcaaatgcatcc

SEQ ID NO: 591796 - DNA, 25 bp, Homo sapien
ctagataggtcccatctcagtacag

SEQ ID NO: 591797 - DNA, 25 bp, Homo sapien
gccttgttactatgattgtggatca

SEQ ID NO: 591798 - DNA, 25 bp, Homo sapien
gatgccctggataggccctgccttc

SEQ ID NO: 591799 - DNA, 25 bp, Homo sapien
tatgattgtggatcaattctgcaac

SEQ ID NO: 591800 - DNA, 25 bp, Homo sapien
cagtgccgggcaatggtttgtgcct

SEQ ID NO: 591801 - DNA, 25 bp, Homo sapien
tgtgcccgtgccaatccttctcagg

SEQ ID NO: 591802 - DNA, 25 bp, Homo sapien
cttgggtagatggcgcagggcaggt

SEQ ID NO: 591803 - DNA, 25 bp, Homo sapien
gcagcacgggccagtgccgggcaat

SEQ ID NO: 591804 - DNA, 25 bp, Homo sapien
gtggttggtgcccgtgccgagcctt

SEQ ID NO: 591805 - DNA, 25 bp, Homo sapien
gcagtggttggtgcccgtgccgagc

SEQ ID NO: 591806 - DNA, 25 bp, Homo sapien
aggcagtggttggtgcccgtgccga

SEQ ID NO: 591807 - DNA, 25 bp, Homo sapien
agtggttggtgcccgtgccgagcct

SEQ ID NO: 591808 - DNA, 25 bp, Homo sapien
ggggtggccgtgcagtgccttctca

SEQ ID NO: 591809 - DNA, 25 bp, Homo sapien
ggctgcccgggtagggacagtgcgg

SEQ ID NO: 591810 - DNA, 25 bp, Homo sapien
agttgggggtggccgtgcagtgcct

SEQ ID NO: 591811 - DNA, 25 bp, Homo sapien
gctgcccgggtagggacagtgcggg

SEQ ID NO: 591812 - DNA, 25 bp, Homo sapien
gctcaagaccaggcagcagaaggcc

SEQ ID NO: 591813 - DNA, 25 bp, Homo sapien
gcccccagtggtgctcaagaccagg

SEQ ID NO: 591814 - DNA, 25 bp, Homo sapien
ggcccccagtggtgctcaagaccag

SEQ ID NO: 591815 - DNA, 25 bp, Homo sapien
cccccagtggtgctcaagaccaggc

SEQ ID NO: 591816 - DNA, 25 bp, Homo sapien
agcacctctcaccaccgcatggtcc

SEQ ID NO: 591817 - DNA, 25 bp, Homo sapien
gggggctccaagctaggaaagtgcc

SEQ ID NO: 591818 - DNA, 25 bp, Homo sapien
gtgggggctccaagctaggaaagtg

SEQ ID NO: 591819 - DNA, 25 bp, Homo sapien
cacctctcaccaccgcatggtcctg

SEQ ID NO: 591820 - DNA, 25 bp, Homo sapien
aagaacccacggaccgtcaggcttg

SEQ ID NO: 591821 - DNA, 25 bp, Homo sapien
gccgcgatgacgtcaacggaaagaa

SEQ ID NO: 591822 - DNA, 25 bp, Homo sapien
atgacgtcaacggaaagaacccacg

SEQ ID NO: 591823 - DNA, 25 bp, Homo sapien
cgatgacgtcaacggaaagaaccca

SEQ ID NO: 591824 - DNA, 25 bp, Homo sapien
gatgcgggactccttgaacaagaac

SEQ ID NO: 591825 - DNA, 25 bp, Homo sapien
gaacaagaacatgtcgttcgtgcag

SEQ ID NO: 591826 - DNA, 25 bp, Homo sapien
aactagggcccttgtgatgcgggac

SEQ ID NO: 591827 - DNA, 25 bp, Homo sapien
cacacgtgagttaaggtcctgggaa

SEQ ID NO: 591828 - DNA, 25 bp, Homo sapien
gagagacaacctccaagtcccctcc

SEQ ID NO: 591829 - DNA, 25 bp, Homo sapien
tagagagagacaacctccaagtccc

SEQ ID NO: 591830 - DNA, 25 bp, Homo sapien
gagagagacaacctccaagtcccct

SEQ ID NO: 591831 - DNA, 25 bp, Homo sapien
ctagagagagacaacctccaagtcc

SEQ ID NO: 591832 - DNA, 25 bp, Homo sapien
aaattcctcaggttttagtctcagc

SEQ ID NO: 591833 - DNA, 25 bp, Homo sapien
catttgtggtcttagaggagttgaa

SEQ ID NO: 591834 - DNA, 25 bp, Homo sapien
ttggatatggcagccgccttgttca

SEQ ID NO: 591835 - DNA, 25 bp, Homo sapien
ttacgttgtccccaatatcaccaag

SEQ ID NO: 591836 - DNA, 25 bp, Homo sapien
ggcttacggcagagcctgcagaccc

SEQ ID NO: 591837 - DNA, 25 bp, Homo sapien
tccctgccccgtgctgggtttgtgc

SEQ ID NO: 591838 - DNA, 25 bp, Homo sapien
aaagggactgggttactgggcacag

SEQ ID NO: 591839 - DNA, 25 bp, Homo sapien
ctctgcactcaggagggacgtcaca

SEQ ID NO: 591840 - DNA, 25 bp, Homo sapien
ggtagttctgccaatttccacctcc

SEQ ID NO: 591841 - DNA, 25 bp, Homo sapien
tccacctccagcatatatttcaggc

SEQ ID NO: 591842 - DNA, 25 bp, Homo sapien
tcatccagacgcaggtgctggtttt

SEQ ID NO: 591843 - DNA, 25 bp, Homo sapien
ggtttttcttgcaggtagttctgcc

SEQ ID NO: 591844 - DNA, 25 bp, Homo sapien
gggaagagagggcacatctgagaga

SEQ ID NO: 591845 - DNA, 25 bp, Homo sapien
aagagagggcacatctgagagaagg

SEQ ID NO: 591846 - DNA, 25 bp, Homo sapien
agggcacatctgagagaagggcctg

SEQ ID NO: 591847 - DNA, 25 bp, Homo sapien
ggcacatctgagagaagggcctgct

SEQ ID NO: 591848 - DNA, 25 bp, Homo sapien
ggcgctgcgttagagacgtggtgac

SEQ ID NO: 591849 - DNA, 25 bp, Homo sapien
cggatcctcagtcgtgcgggagtct

SEQ ID NO: 591850 - DNA, 25 bp, Homo sapien
cgtggtgacggtgtttttcacagtc

SEQ ID NO: 591851 - DNA, 25 bp, Homo sapien
ctgttctcccggatcctcagtcgtg

SEQ ID NO: 591852 - DNA, 25 bp, Homo sapien
tgtgtctccgcctctgggacgggag

SEQ ID NO: 591853 - DNA, 25 bp, Homo sapien
cctctgggacgggaggatgtcatct

SEQ ID NO: 591854 - DNA, 25 bp, Homo sapien
tgctctctctgcagagatatgctat

SEQ ID NO: 591855 - DNA, 25 bp, Homo sapien
taaatgttgctgtgttcccgttctc

SEQ ID NO: 591856 - DNA, 25 bp, Homo sapien
caacggagaacaggcacctcgaagt

SEQ ID NO: 591857 - DNA, 25 bp, Homo sapien
tcagtgacaacggagaacaggcacc

SEQ ID NO: 591858 - DNA, 25 bp, Homo sapien
cagggcacgacccagacttcagagt

SEQ ID NO: 591859 - DNA, 25 bp, Homo sapien
gaacaggcacctcgaagtgctggag

SEQ ID NO: 591860 - DNA, 25 bp, Homo sapien
ctgcggtgacccagtggcacttcac

SEQ ID NO: 591861 - DNA, 25 bp, Homo sapien
gaggtgctaccatgctgccattcca

SEQ ID NO: 591862 - DNA, 25 bp, Homo sapien
gtcatggctgtggtcttgctgaaga

SEQ ID NO: 591863 - DNA, 25 bp, Homo sapien
cgctcactcgtcagaggcctgagag

SEQ ID NO: 591864 - DNA, 25 bp, Homo sapien
aagggagatccctggtaaggcttgc

SEQ ID NO: 591865 - DNA, 25 bp, Homo sapien
caacttgtcagaccccttggtaagg

SEQ ID NO: 591866 - DNA, 25 bp, Homo sapien
actctcccgtaaaagggccggcatg

SEQ ID NO: 591867 - DNA, 25 bp, Homo sapien
ggttatagctagcagctcaggctgg

SEQ ID NO: 591868 - DNA, 25 bp, Homo sapien
agtcttcttccaatcctggtgccct

SEQ ID NO: 591869 - DNA, 25 bp, Homo sapien
tcaaggtagcccagtctggcacttc

SEQ ID NO: 591870 - DNA, 25 bp, Homo sapien
aactcagggaggcacagttgtggcc

SEQ ID NO: 591871 - DNA, 25 bp, Homo sapien
tggtgcggacagctcacctgttctg

SEQ ID NO: 591872 - DNA, 25 bp, Homo sapien
cttaatgattccagaagacatggcc

SEQ ID NO: 591873 - DNA, 25 bp, Homo sapien
gcctcccagggatgtgactggagaa

SEQ ID NO: 591874 - DNA, 25 bp, Homo sapien
cattgcaccaatgggaactgaggct

SEQ ID NO: 591875 - DNA, 25 bp, Homo sapien
gaaagttgttcacatacgctgactc

SEQ ID NO: 591876 - DNA, 25 bp, Homo sapien
aattccccccggcgctggtcatgcc

SEQ ID NO: 591877 - DNA, 25 bp, Homo sapien
ttaattccccccggcgctggtcatg

SEQ ID NO: 591878 - DNA, 25 bp, Homo sapien
taattccccccggcgctggtcatgc

SEQ ID NO: 591879 - DNA, 25 bp, Homo sapien
gcagtaaggcactacccagagagct

SEQ ID NO: 591880 - DNA, 25 bp, Homo sapien
gaagtgtaacatatctgccatgagg

SEQ ID NO: 591881 - DNA, 25 bp, Homo sapien
tgattctgcaattcgggacctactg

SEQ ID NO: 591882 - DNA, 25 bp, Homo sapien
tgaaaagcttgttgactctagcggc

SEQ ID NO: 591883 - DNA, 25 bp, Homo sapien
tgtgtatcatcattgctcaaggggc

SEQ ID NO: 591884 - DNA, 25 bp, Homo sapien
gtatcatcattgctcaaggggcatg

SEQ ID NO: 591885 - DNA, 25 bp, Homo sapien
tttgtgtatcatcattgctcaaggg

SEQ ID NO: 591886 - DNA, 25 bp, Homo sapien
atttgtgtatcatcattgctcaagg

SEQ ID NO: 591887 - DNA, 25 bp, Homo sapien
tgagaggaacctggacatggtcccg

SEQ ID NO: 591888 - DNA, 25 bp, Homo sapien
tgctggcctcttgggtgagtgaacc

SEQ ID NO: 591889 - DNA, 25 bp, Homo sapien
taatggaaatcacgacgccagtggg

SEQ ID NO: 591890 - DNA, 25 bp, Homo sapien
tggctgcagggtacacaaatactga

SEQ ID NO: 591891 - DNA, 25 bp, Homo sapien
ggaaggccaccggtttctcagaagc

SEQ ID NO: 591892 - DNA, 25 bp, Homo sapien
gttttgtgacccatatgagcatccg

SEQ ID NO: 591893 - DNA, 25 bp, Homo sapien
gcagcaggacactaagggccattcg

SEQ ID NO: 591894 - DNA, 25 bp, Homo sapien
gataatctgatcatgtaacgcggca

SEQ ID NO: 591895 - DNA, 25 bp, Homo sapien
cagatttcagaacctcaaggaggct

SEQ ID NO: 591896 - DNA, 25 bp, Homo sapien
gaagctttaaaggtctgaggtagga

SEQ ID NO: 591897 - DNA, 25 bp, Homo sapien
tgtcattgagaaattagatttattc

SEQ ID NO: 591898 - DNA, 25 bp, Homo sapien
tccctattaaagtgacagagatgtg

SEQ ID NO: 591899 - DNA, 25 bp, Homo sapien
tggctctgaagacccaagctgctgc

SEQ ID NO: 591900 - DNA, 25 bp, Homo sapien
tgcacactggagtgtgcttggctct

SEQ ID NO: 591901 - DNA, 25 bp, Homo sapien
tctgccctggatcctcgggccccac

SEQ ID NO: 591902 - DNA, 25 bp, Homo sapien
gccccactggacaactgagcggccc

SEQ ID NO: 591903 - DNA, 25 bp, Homo sapien
gcttggaccagcatgttcggaagtc

SEQ ID NO: 591904 - DNA, 25 bp, Homo sapien
aaaaagcaccaagtgtaacatccgc

SEQ ID NO: 591905 - DNA, 25 bp, Homo sapien
cgttgctttgatctgggagcgcgat

SEQ ID NO: 591906 - DNA, 25 bp, Homo sapien
ttttgtacagtcaactgcttggacc

SEQ ID NO: 591907 - DNA, 25 bp, Homo sapien
cgcgggacactctcgtgtgggacac

SEQ ID NO: 591908 - DNA, 25 bp, Homo sapien
cctgggaggccagttaaatgtctct

SEQ ID NO: 591909 - DNA, 25 bp, Homo sapien
tctgggactgcgacttcagcactgg

SEQ ID NO: 591910 - DNA, 25 bp, Homo sapien
gcactggcaagatcggctggttcct

SEQ ID NO: 591911 - DNA, 25 bp, Homo sapien
agctcaggtagcctgcctagatggc

SEQ ID NO: 591912 - DNA, 25 bp, Homo sapien
gaggaatggatggtggcggaagggc

SEQ ID NO: 591913 - DNA, 25 bp, Homo sapien
tggatggtggcggaagggcggagca

SEQ ID NO: 591914 - DNA, 25 bp, Homo sapien
tagcctgcctagatggcggcgcgca

SEQ ID NO: 591915 - DNA, 25 bp, Homo sapien
tctgagatgcggaactgaccgacct

SEQ ID NO: 591916 - DNA, 25 bp, Homo sapien
gcccctttcgcgtgctgctgagact

SEQ ID NO: 591917 - DNA, 25 bp, Homo sapien
tggagaaagtcctcatcgccccata

SEQ ID NO: 591918 - DNA, 25 bp, Homo sapien
gaccgacctattgtcttgggaccca

SEQ ID NO: 591919 - DNA, 25 bp, Homo sapien
ccaatgtattccttactgcagctgc

SEQ ID NO: 591920 - DNA, 25 bp, Homo sapien
atgtattccttactgcagctgccca

SEQ ID NO: 591921 - DNA, 25 bp, Homo sapien
ttgtccaatgtattccttactgcag

SEQ ID NO: 591922 - DNA, 25 bp, Homo sapien
tgtattccttactgcagctgcccac

SEQ ID NO: 591923 - DNA, 25 bp, Homo sapien
gcgctggtgcctggcggttccccta

SEQ ID NO: 591924 - DNA, 25 bp, Homo sapien
cgggactcgctttccgacgggcgca

SEQ ID NO: 591925 - DNA, 25 bp, Homo sapien
cactagcagcagggcgctggtgcct

SEQ ID NO: 591926 - DNA, 25 bp, Homo sapien
ttccgacgggcgcactagcagcagg

SEQ ID NO: 591927 - DNA, 25 bp, Homo sapien
attcctacccaggattttcctattg

SEQ ID NO: 591928 - DNA, 25 bp, Homo sapien
ctattgtctcaggacctaaagggaa

SEQ ID NO: 591929 - DNA, 25 bp, Homo sapien
cctattgtctcaggacctaaaggga

SEQ ID NO: 591930 - DNA, 25 bp, Homo sapien
ctggattcctacccaggattttcct

SEQ ID NO: 591931 - DNA, 25 bp, Homo sapien
tgtccacacagtgcacctgcttttg

SEQ ID NO: 591932 - DNA, 25 bp, Homo sapien
ttgatgtccacacagtgcacctgct

SEQ ID NO: 591933 - DNA, 25 bp, Homo sapien
gtccacacagtgcacctgcttttgt

SEQ ID NO: 591934 - DNA, 25 bp, Homo sapien
cttcttgatgtccacacagtgcacc

SEQ ID NO: 591935 - DNA, 25 bp, Homo sapien
cttccttggaccaggccttgagcat

SEQ ID NO: 591936 - DNA, 25 bp, Homo sapien
gagcatttctctgaccgatctgagc

SEQ ID NO: 591937 - DNA, 25 bp, Homo sapien
tttcatgagcatttctctgaccgat

SEQ ID NO: 591938 - DNA, 25 bp, Homo sapien
catgagcatttctctgaccgatctg

SEQ ID NO: 591939 - DNA, 25 bp, Homo sapien
gcatttctctgaccgatctgagcat

SEQ ID NO: 591940 - DNA, 25 bp, Homo sapien
tgaggtgagagtagtgactgtgatg

SEQ ID NO: 591941 - DNA, 25 bp, Homo sapien
ggtgagagtagtgactgtgatggag

SEQ ID NO: 591942 - DNA, 25 bp, Homo sapien
gagtagtgactgtgatggagtgtct

SEQ ID NO: 591943 - DNA, 25 bp, Homo sapien
gtagtgactgtgatggagtgtctcc

SEQ ID NO: 591944 - DNA, 25 bp, Homo sapien
agtgcagctcaggattccatcctcc

SEQ ID NO: 591945 - DNA, 25 bp, Homo sapien
ttcacctctggtatgctgaaggctc

SEQ ID NO: 591946 - DNA, 25 bp, Homo sapien
tagtctactttcacctctggtatgc

SEQ ID NO: 591947 - DNA, 25 bp, Homo sapien
ctgagttggcattatagtctacttt

SEQ ID NO: 591948 - DNA, 25 bp, Homo sapien
cattatagtctactttcacctctgg

SEQ ID NO: 591949 - DNA, 25 bp, Homo sapien
gctgagagacccataagggagcctc

SEQ ID NO: 591950 - DNA, 25 bp, Homo sapien
ctgagagacccataagggagcctca

SEQ ID NO: 591951 - DNA, 25 bp, Homo sapien
aggagtatgtgttgttgatcgtaac

SEQ ID NO: 591952 - DNA, 25 bp, Homo sapien
tgtgttgttgatcgtaacattgtag

SEQ ID NO: 591953 - DNA, 25 bp, Homo sapien
gttgatcgtaacattgtagagcaca

SEQ ID NO: 591954 - DNA, 25 bp, Homo sapien
ggagtatgtgttgttgatcgtaaca

SEQ ID NO: 591955 - DNA, 25 bp, Homo sapien
tctcagattctgtcctttgatatcc

SEQ ID NO: 591956 - DNA, 25 bp, Homo sapien
ttgatctcagattctgtcctttgat

SEQ ID NO: 591957 - DNA, 25 bp, Homo sapien
tgatctcagattctgtcctttgata

SEQ ID NO: 591958 - DNA, 25 bp, Homo sapien
gatctcagattctgtcctttgatat

SEQ ID NO: 591959 - DNA, 25 bp, Homo sapien
aatgtaacacagacacggtggctcc

SEQ ID NO: 591960 - DNA, 25 bp, Homo sapien
gaacgatcagaactccaaagctagt

SEQ ID NO: 591961 - DNA, 25 bp, Homo sapien
cagtggttaagacacgaaaagtgtg

SEQ ID NO: 591962 - DNA, 25 bp, Homo sapien
cagaactccaaagctagttttctat

SEQ ID NO: 591963 - DNA, 25 bp, Homo sapien
gctgccacgtgagcttgtgggctct

SEQ ID NO: 591964 - DNA, 25 bp, Homo sapien
cctgagggatgagggatgtgcacct

SEQ ID NO: 591965 - DNA, 25 bp, Homo sapien
aatcccatttacaggcgtttgcagg

SEQ ID NO: 591966 - DNA, 25 bp, Homo sapien
ggctctcaggccaaaaatcccattt

SEQ ID NO: 591967 - DNA, 25 bp, Homo sapien
ccacctgaggagaatccatctgagg

SEQ ID NO: 591968 - DNA, 25 bp, Homo sapien
gggcatccacctgaggagaatccat

SEQ ID NO: 591969 - DNA, 25 bp, Homo sapien
gggaatccacctgaggggcatccac

SEQ ID NO: 591970 - DNA, 25 bp, Homo sapien
ggagaatccatctgaggggaatcca

SEQ ID NO: 591971 - DNA, 25 bp, Homo sapien
gggaatccacctgaggggaatccac

SEQ ID NO: 591972 - DNA, 25 bp, Homo sapien
gggagtccacctgaggggcatccac

SEQ ID NO: 591973 - DNA, 25 bp, Homo sapien
cacctgatgggagtccacctgaggg

SEQ ID NO: 591974 - DNA, 25 bp, Homo sapien
ggtgtccacctgatgggagtccacc

SEQ ID NO: 591975 - DNA, 25 bp, Homo sapien
gagtccacctgaggggagtccacct

SEQ ID NO: 591976 - DNA, 25 bp, Homo sapien
ctgatgggaatccacctgatgagtg

SEQ ID NO: 591977 - DNA, 25 bp, Homo sapien
tatggtttgaccagaggtggtcgac

SEQ ID NO: 591978 - DNA, 25 bp, Homo sapien
agaggtggtcgactggtggccggga

SEQ ID NO: 591979 - DNA, 25 bp, Homo sapien
gaccagaggtggtcgactggtggcc

SEQ ID NO: 591980 - DNA, 25 bp, Homo sapien
ctgttggtatggtttgaccagaggt

SEQ ID NO: 591981 - DNA, 25 bp, Homo sapien
ttggtgatgattgcagtcttcccaa

SEQ ID NO: 591982 - DNA, 25 bp, Homo sapien
gatggttggtgatgattgcagtctt

SEQ ID NO: 591983 - DNA, 25 bp, Homo sapien
gttggtgatgattgcagtcttccca

SEQ ID NO: 591984 - DNA, 25 bp, Homo sapien
tggtgatgattgcagtcttcccaat

SEQ ID NO: 591985 - DNA, 25 bp, Homo sapien
ggaaactggccgaccctacagagac

SEQ ID NO: 591986 - DNA, 25 bp, Homo sapien
gaaactggccgaccctacagagaca

SEQ ID NO: 591987 - DNA, 25 bp, Homo sapien
gggaaactggccgaccctacagaga

SEQ ID NO: 591988 - DNA, 25 bp, Homo sapien
aactggccgaccctacagagacaag

SEQ ID NO: 591989 - DNA, 25 bp, Homo sapien
aaggatggggacttttctgctttgc

SEQ ID NO: 591990 - DNA, 25 bp, Homo sapien
ggatggggacttttctgctttgctc

SEQ ID NO: 591991 - DNA, 25 bp, Homo sapien
caaggatggggacttttctgctttg

SEQ ID NO: 591992 - DNA, 25 bp, Homo sapien
atggggacttttctgctttgctctc

SEQ ID NO: 591993 - DNA, 25 bp, Homo sapien
aaatggagactggaggacggccgat

SEQ ID NO: 591994 - DNA, 25 bp, Homo sapien
ttggcactggaatccgggtcttcca

SEQ ID NO: 591995 - DNA, 25 bp, Homo sapien
aggacggccgatggtgagccacggg

SEQ ID NO: 591996 - DNA, 25 bp, Homo sapien
tgctggctccttgcaccccgtgttc

SEQ ID NO: 591997 - DNA, 25 bp, Homo sapien
tgctgtcctacgactgcgttctcaa

SEQ ID NO: 591998 - DNA, 25 bp, Homo sapien
cgggcagcttgccttccgttgaaga

SEQ ID NO: 591999 - DNA, 25 bp, Homo sapien
tttctctctgccgatgccagcagct

SEQ ID NO: 592000 - DNA, 25 bp, Homo sapien
cccagggtctccatgcatcgggcag

SEQ ID NO: 592001 - DNA, 25 bp, Homo sapien
gattttcaggaacagcagcccctcc

SEQ ID NO: 592002 - DNA, 25 bp, Homo sapien
ccttcctggttgaggcagccagcag

SEQ ID NO: 592003 - DNA, 25 bp, Homo sapien
cctccttcctggttgaggcagccag

SEQ ID NO: 592004 - DNA, 25 bp, Homo sapien
agcccctccttcctggttgaggcag

SEQ ID NO: 592005 - DNA, 25 bp, Homo sapien
tgttggaatatgatggtggacttgc

SEQ ID NO: 592006 - DNA, 25 bp, Homo sapien
ctgttggaatatgatggtggacttg

SEQ ID NO: 592007 - DNA, 25 bp, Homo sapien
ggctgcctgtgatactgggttattc

SEQ ID NO: 592008 - DNA, 25 bp, Homo sapien
gatactgggttattccccttgccga

SEQ ID NO: 592009 - DNA, 25 bp, Homo sapien
ccactgccgtttctttggggctgcc

SEQ ID NO: 592010 - DNA, 25 bp, Homo sapien
attccccttgccgagttccactgtg

SEQ ID NO: 592011 - DNA, 25 bp, Homo sapien
tgtggctgcagccagtgcgtgtaaa

SEQ ID NO: 592012 - DNA, 25 bp, Homo sapien
tggaagaaccccgtgatgatttttc

SEQ ID NO: 592013 - DNA, 25 bp, Homo sapien
cagtgcgtgtaaatggaagaacccc

SEQ ID NO: 592014 - DNA, 25 bp, Homo sapien
tgtaaatggaagaaccccgtgatga

SEQ ID NO: 592015 - DNA, 25 bp, Homo sapien
ccacgacagccgcatcgtttttagt

SEQ ID NO: 592016 - DNA, 25 bp, Homo sapien
ggtcacgcgacccaaaaccaaatga

SEQ ID NO: 592017 - DNA, 25 bp, Homo sapien
cagccgcatcgtttttagtggtttg

SEQ ID NO: 592018 - DNA, 25 bp, Homo sapien
tgaggtcacgcgacccaaaaccaaa

SEQ ID NO: 592019 - DNA, 25 bp, Homo sapien
agcacagcgaacacgtgcgcacggg

SEQ ID NO: 592020 - DNA, 25 bp, Homo sapien
ggagccaggaaaagctcgaaaatca

SEQ ID NO: 592021 - DNA, 25 bp, Homo sapien
gaaaagctcgaaaatcagcgtaacg

SEQ ID NO: 592022 - DNA, 25 bp, Homo sapien
aaccgagtgacgacagcaaagagcc

SEQ ID NO: 592023 - DNA, 25 bp, Homo sapien
tggccttcgcacaaaggagggtgtc

SEQ ID NO: 592024 - DNA, 25 bp, Homo sapien
ttgtgaatctgcaagcctgcagttt

SEQ ID NO: 592025 - DNA, 25 bp, Homo sapien
cccaaatagttgcacacttgagcag

SEQ ID NO: 592026 - DNA, 25 bp, Homo sapien
tctgcttagaagacattccaactgc

SEQ ID NO: 592027 - DNA, 25 bp, Homo sapien
cggtgtcccgggcagtcctctgagc

SEQ ID NO: 592028 - DNA, 25 bp, Homo sapien
acgtggccggccagcctaagaccca

SEQ ID NO: 592029 - DNA, 25 bp, Homo sapien
gccaccttcaccatgcggtgtcccg

SEQ ID NO: 592030 - DNA, 25 bp, Homo sapien
cagcctaagacccaggccgtgggct

SEQ ID NO: 592031 - DNA, 25 bp, Homo sapien
ctcagctgcgtaggcgcgatggcct

SEQ ID NO: 592032 - DNA, 25 bp, Homo sapien
tctgcaggtggccttgcggttttct

SEQ ID NO: 592033 - DNA, 25 bp, Homo sapien
gggctcggcagtctggttccccgag

SEQ ID NO: 592034 - DNA, 25 bp, Homo sapien
cgcgggcggagtatgggtgctcagc

SEQ ID NO: 592035 - DNA, 25 bp, Homo sapien
acacccacggagacgagtgcccttt

SEQ ID NO: 592036 - DNA, 25 bp, Homo sapien
tccgccacacccacggagacgagtg

SEQ ID NO: 592037 - DNA, 25 bp, Homo sapien
cacggagacgagtgcccttttccgg

SEQ ID NO: 592038 - DNA, 25 bp, Homo sapien
gcggcagccggtcttttgggctccc

SEQ ID NO: 592039 - DNA, 25 bp, Homo sapien
aggcccctgctatttggcccgccct

SEQ ID NO: 592040 - DNA, 25 bp, Homo sapien
gtggcccaaaacactggacttgccc

SEQ ID NO: 592041 - DNA, 25 bp, Homo sapien
cccctgctatttggcccgccctgtg

SEQ ID NO: 592042 - DNA, 25 bp, Homo sapien
ttggcccgccctgtggcccaaaaca

SEQ ID NO: 592043 - DNA, 25 bp, Homo sapien
gggtctgtccctgacgcagactggg

SEQ ID NO: 592044 - DNA, 25 bp, Homo sapien
cagaaactgctacgcgaagcttccc

SEQ ID NO: 592045 - DNA, 25 bp, Homo sapien
ttccccgccgggctcatccagggcg

SEQ ID NO: 592046 - DNA, 25 bp, Homo sapien
cgccgggctcatccagggcggaggg

SEQ ID NO: 592047 - DNA, 25 bp, Homo sapien
gtgaaccgcccgtcaacaccacctg

SEQ ID NO: 592048 - DNA, 25 bp, Homo sapien
tggcaaaaaccggtgcgtgaaccgc

SEQ ID NO: 592049 - DNA, 25 bp, Homo sapien
tccttggcaaaaaccggtgcgtgaa

SEQ ID NO: 592050 - DNA, 25 bp, Homo sapien
gaagcacattagaaacttccactca

SEQ ID NO: 592051 - DNA, 25 bp, Homo sapien
ttcagttcaagtacacggaagggtc

SEQ ID NO: 592052 - DNA, 25 bp, Homo sapien
gatggctgcctaatctgttggccag

SEQ ID NO: 592053 - DNA, 25 bp, Homo sapien
ctgatgtggattgatggctgcctaa

SEQ ID NO: 592054 - DNA, 25 bp, Homo sapien
catgaatgcaaatgcctgccatgca

SEQ ID NO: 592055 - DNA, 25 bp, Homo sapien
ctgtgggtatcggacttaaggcact

SEQ ID NO: 592056 - DNA, 25 bp, Homo sapien
gaaataagttctgtgggtatcggac

SEQ ID NO: 592057 - DNA, 25 bp, Homo sapien
aagttctgtgggtatcggacttaag

SEQ ID NO: 592058 - DNA, 25 bp, Homo sapien
ttctgtgggtatcggacttaaggca

SEQ ID NO: 592059 - DNA, 25 bp, Homo sapien
ttgggcacagcagaacggaaggaca

SEQ ID NO: 592060 - DNA, 25 bp, Homo sapien
cggggcaaagcacggggagcaggcc

SEQ ID NO: 592061 - DNA, 25 bp, Homo sapien
acagggcccgcggggcaaagcacgg

SEQ ID NO: 592062 - DNA, 25 bp, Homo sapien
acagcagaacggaaggacagggccc

SEQ ID NO: 592063 - DNA, 25 bp, Homo sapien
ctgaaaaatgtagctcgtttttctg

SEQ ID NO: 592064 - DNA, 25 bp, Homo sapien
gaaaaatgtagctcgtttttctgga

SEQ ID NO: 592065 - DNA, 25 bp, Homo sapien
tgaaaaatgtagctcgtttttctgg

SEQ ID NO: 592066 - DNA, 25 bp, Homo sapien
tgcatcaaacatgatcccgtagaag

SEQ ID NO: 592067 - DNA, 25 bp, Homo sapien
gtagaagacctcgtgcccgtctgca

SEQ ID NO: 592068 - DNA, 25 bp, Homo sapien
ccggtgccacttgatgtaggcaaca

SEQ ID NO: 592069 - DNA, 25 bp, Homo sapien
ggcaacatagatgaacacgcccaca

SEQ ID NO: 592070 - DNA, 25 bp, Homo sapien
tgaactggaagacgtgtactcgggt

SEQ ID NO: 592071 - DNA, 25 bp, Homo sapien
cgggtgaactggaagacgtgtactc

SEQ ID NO: 592072 - DNA, 25 bp, Homo sapien
ggccgggtgaactggaagacgtgta

SEQ ID NO: 592073 - DNA, 25 bp, Homo sapien
actggaagacgtgtactcgggtgcc

SEQ ID NO: 592074 - DNA, 25 bp, Homo sapien
tggcttcagtgctttgaaggtttcg

SEQ ID NO: 592075 - DNA, 25 bp, Homo sapien
cttcagtgctttgaaggtttcgtgg

SEQ ID NO: 592076 - DNA, 25 bp, Homo sapien
ctggcttcagtgctttgaaggtttc

SEQ ID NO: 592077 - DNA, 25 bp, Homo sapien
cagtgctttgaaggtttcgtgggtt

SEQ ID NO: 592078 - DNA, 25 bp, Homo sapien
aacatcatcagcataggcagaaaga

SEQ ID NO: 592079 - DNA, 25 bp, Homo sapien
acatcatcagcataggcagaaagac

SEQ ID NO: 592080 - DNA, 25 bp, Homo sapien
caacatcatcagcataggcagaaag

SEQ ID NO: 592081 - DNA, 25 bp, Homo sapien
aaatggcatgaaatgcccaggcagc

SEQ ID NO: 592082 - DNA, 25 bp, Homo sapien
tgaagacagcctaccacattcaaag

SEQ ID NO: 592083 - DNA, 25 bp, Homo sapien
gatttgtgcttctgacctgtaccaa

SEQ ID NO: 592084 - DNA, 25 bp, Homo sapien
tcttctgaccatcccaaatggcatg

SEQ ID NO: 592085 - DNA, 25 bp, Homo sapien
tgataactacaacgaggagccactt

SEQ ID NO: 592086 - DNA, 25 bp, Homo sapien
gaacccaaggctggataaggtccta

SEQ ID NO: 592087 - DNA, 25 bp, Homo sapien
tcagctccgctggacattgcaaagg

SEQ ID NO: 592088 - DNA, 25 bp, Homo sapien
cgtgggttgcatctgtccaagggaa

SEQ ID NO: 592089 - DNA, 25 bp, Homo sapien
agtagttcccggattccctgagcgc

SEQ ID NO: 592090 - DNA, 25 bp, Homo sapien
tgtttagcaacatccagtagttccc

SEQ ID NO: 592091 - DNA, 25 bp, Homo sapien
gaacggaatgtcctgtttagcaaca

SEQ ID NO: 592092 - DNA, 25 bp, Homo sapien
ggccttccagaagtcgaacggaatg

SEQ ID NO: 592093 - DNA, 25 bp, Homo sapien
gccttttctccaggtaacaggcgta

SEQ ID NO: 592094 - DNA, 25 bp, Homo sapien
ccacctaaaagtgatgctgcaaact

SEQ ID NO: 592095 - DNA, 25 bp, Homo sapien
cctaaaagtgatgctgcaaactttt

SEQ ID NO: 592096 - DNA, 25 bp, Homo sapien
cacctaaaagtgatgctgcaaactt

SEQ ID NO: 592097 - DNA, 25 bp, Homo sapien
taaaagtgatgctgcaaacttttct

SEQ ID NO: 592098 - DNA, 25 bp, Homo sapien
tgaagcagtgtgggtggagaagaac

SEQ ID NO: 592099 - DNA, 25 bp, Homo sapien
gcagtgtgggtggagaagaacgaaa

SEQ ID NO: 592100 - DNA, 25 bp, Homo sapien
cagtgtgggtggagaagaacgaaaa

SEQ ID NO: 592101 - DNA, 25 bp, Homo sapien
aagcagtgtgggtggagaagaacga

SEQ ID NO: 592102 - DNA, 25 bp, Homo sapien
acaaggaaaggcgatgctttaaata

SEQ ID NO: 592103 - DNA, 25 bp, Homo sapien
ctacaaggaaaggcgatgctttaaa

SEQ ID NO: 592104 - DNA, 25 bp, Homo sapien
caaggaaaggcgatgctttaaatac

SEQ ID NO: 592105 - DNA, 25 bp, Homo sapien
aggaaaggcgatgctttaaatactt

SEQ ID NO: 592106 - DNA, 25 bp, Homo sapien
tccgttcatgatggaaacacagtca

SEQ ID NO: 592107 - DNA, 25 bp, Homo sapien
ttcatgatggaaacacagtcatccc

SEQ ID NO: 592108 - DNA, 25 bp, Homo sapien
ccgttcatgatggaaacacagtcat

SEQ ID NO: 592109 - DNA, 25 bp, Homo sapien
cgttcatgatggaaacacagtcatc

SEQ ID NO: 592110 - DNA, 25 bp, Homo sapien
tgagtggatcctccgcccaagtcca

SEQ ID NO: 592111 - DNA, 25 bp, Homo sapien
gcaggaaggcgatctgagtggatcc

SEQ ID NO: 592112 - DNA, 25 bp, Homo sapien
ctccacgcgtggcaggaaggcgatc

SEQ ID NO: 592113 - DNA, 25 bp, Homo sapien
agcatgcccacgctgctccctcctg

SEQ ID NO: 592114 - DNA, 25 bp, Homo sapien
gaaaactacccataacaggaggatg

SEQ ID NO: 592115 - DNA, 25 bp, Homo sapien
tcaggtgcagccaattaaatgagct

SEQ ID NO: 592116 - DNA, 25 bp, Homo sapien
caatatcccagtgaagaacggtgct

SEQ ID NO: 592117 - DNA, 25 bp, Homo sapien
tcactaggtcgctggctgcgagaca

SEQ ID NO: 592118 - DNA, 25 bp, Homo sapien
cctgttaaacatccgcagtgccgtc

SEQ ID NO: 592119 - DNA, 25 bp, Homo sapien
cagtgccgtcaggtagccgggtggg

SEQ ID NO: 592120 - DNA, 25 bp, Homo sapien
gcttgtaggtcctgttaaacatccg

SEQ ID NO: 592121 - DNA, 25 bp, Homo sapien
ctgtaggaatagagcttgtaggtcc

SEQ ID NO: 592122 - DNA, 25 bp, Homo sapien
gcgcctccccacgcctgttcccgaa

SEQ ID NO: 592123 - DNA, 25 bp, Homo sapien
ctccccacgcctgttcccgaaagca

SEQ ID NO: 592124 - DNA, 25 bp, Homo sapien
ggtggattcccagcacagggattcc

SEQ ID NO: 592125 - DNA, 25 bp, Homo sapien
ctcaagagggccatgcgaggccctg

SEQ ID NO: 592126 - DNA, 25 bp, Homo sapien
tctgccatccatgacctcaagaggg

SEQ ID NO: 592127 - DNA, 25 bp, Homo sapien
gggtggattcccagcacagggattc

SEQ ID NO: 592128 - DNA, 25 bp, Homo sapien
tagacacattaaaggatgaaggaga

SEQ ID NO: 592129 - DNA, 25 bp, Homo sapien
gtagacacattaaaggatgaaggag

SEQ ID NO: 592130 - DNA, 25 bp, Homo sapien
gatcgccaggcgtgccgacatcagc

SEQ ID NO: 592131 - DNA, 25 bp, Homo sapien
cgacatcagcccgagcccgaggtag

SEQ ID NO: 592132 - DNA, 25 bp, Homo sapien
ccaggatcgccaggcgtgccgacat

SEQ ID NO: 592133 - DNA, 25 bp, Homo sapien
tccacgccgcccaggatcgccaggc

SEQ ID NO: 592134 - DNA, 25 bp, Homo sapien
cagcccccaaatgtctaaaacaggc

SEQ ID NO: 592135 - DNA, 25 bp, Homo sapien
cgcaataaccggtaacaaaacagag

SEQ ID NO: 592136 - DNA, 25 bp, Homo sapien
gagaccatgagaccttcttgctgct

SEQ ID NO: 592137 - DNA, 25 bp, Homo sapien
caggcactttgtacagcctgacgag

SEQ ID NO: 592138 - DNA, 25 bp, Homo sapien
gctgtgagattccagccgcgactgc

SEQ ID NO: 592139 - DNA, 25 bp, Homo sapien
ctgttctttcactctacttgggggg

SEQ ID NO: 592140 - DNA, 25 bp, Homo sapien
tgtgagattccagccgcgactgctg

SEQ ID NO: 592141 - DNA, 25 bp, Homo sapien
ctgtgagattccagccgcgactgct

SEQ ID NO: 592142 - DNA, 25 bp, Homo sapien
tgctgtcccaccgaaaggtgctggt

SEQ ID NO: 592143 - DNA, 25 bp, Homo sapien
tatatcaccgccatggactagggct

SEQ ID NO: 592144 - DNA, 25 bp, Homo sapien
tgctgctccaatacacacaagctgg

SEQ ID NO: 592145 - DNA, 25 bp, Homo sapien
caaaggaagcgtattggtcccaggg

SEQ ID NO: 592146 - DNA, 25 bp, Homo sapien
ctgctttctgccctgaaaccctgta

SEQ ID NO: 592147 - DNA, 25 bp, Homo sapien
tacgtgacttctgcgtgttcccact

SEQ ID NO: 592148 - DNA, 25 bp, Homo sapien
gggagacaagcaagggctgaccaac

SEQ ID NO: 592149 - DNA, 25 bp, Homo sapien
caagcaagggctgaccaactccttt

SEQ ID NO: 592150 - DNA, 25 bp, Homo sapien
cagggcaggtacaggctcttcaaag

SEQ ID NO: 592151 - DNA, 25 bp, Homo sapien
ccctgcaggcctgttaggaaatcag

SEQ ID NO: 592152 - DNA, 25 bp, Homo sapien
gtggaagcagaccctccctctattc

SEQ ID NO: 592153 - DNA, 25 bp, Homo sapien
ggtcaggagcctcccgtggaacgtc

SEQ ID NO: 592154 - DNA, 25 bp, Homo sapien
cccagtctgggaatggcgtttgaac

SEQ ID NO: 592155 - DNA, 25 bp, Homo sapien
tgtcctagttacagctgcgatcgcc

SEQ ID NO: 592156 - DNA, 25 bp, Homo sapien
caatggaccgtgtggacatctgagg

SEQ ID NO: 592157 - DNA, 25 bp, Homo sapien
acctgaacggttcgcgaaggcatgc

SEQ ID NO: 592158 - DNA, 25 bp, Homo sapien
gggacaagcacaaggctagcggtca

SEQ ID NO: 592159 - DNA, 25 bp, Homo sapien
ccagggcattgttggtcccggcgca

SEQ ID NO: 592160 - DNA, 25 bp, Homo sapien
ggacttgagactctgacctgaattg

SEQ ID NO: 592161 - DNA, 25 bp, Homo sapien
tgctccccgcacaggtcaaaagcag

SEQ ID NO: 592162 - DNA, 25 bp, Homo sapien
gttttgaaggacctctgacactctg

SEQ ID NO: 592163 - DNA, 25 bp, Homo sapien
ggagaaagcatagaagtccacatgc

SEQ ID NO: 592164 - DNA, 25 bp, Homo sapien
agcatagaagtccacatgcttcact

SEQ ID NO: 592165 - DNA, 25 bp, Homo sapien
tctgttttgaaggacctctgacact

SEQ ID NO: 592166 - DNA, 25 bp, Homo sapien
ctatgaggcccacaccagctgcaag

SEQ ID NO: 592167 - DNA, 25 bp, Homo sapien
atgaggcccacaccagctgcaaggt

SEQ ID NO: 592168 - DNA, 25 bp, Homo sapien
tgaggcccacaccagctgcaaggtc

SEQ ID NO: 592169 - DNA, 25 bp, Homo sapien
tatgaggcccacaccagctgcaagg

SEQ ID NO: 592170 - DNA, 25 bp, Homo sapien
agctgtaggcggcactcacgtgctc

SEQ ID NO: 592171 - DNA, 25 bp, Homo sapien
tcacgtgctctgaggacggcttctg

SEQ ID NO: 592172 - DNA, 25 bp, Homo sapien
tgtgggagacacaacacccagtctg

SEQ ID NO: 592173 - DNA, 25 bp, Homo sapien
tgccactgagacgtgaggctggcac

SEQ ID NO: 592174 - DNA, 25 bp, Homo sapien
gatctcgaagtcccccaccaccagg

SEQ ID NO: 592175 - DNA, 25 bp, Homo sapien
acttggctgcgatctcgaagtcccc

SEQ ID NO: 592176 - DNA, 25 bp, Homo sapien
cgtacttggctgcgatctcgaagtc

SEQ ID NO: 592177 - DNA, 25 bp, Homo sapien
cgatctcgaagtcccccaccaccag

SEQ ID NO: 592178 - DNA, 25 bp, Homo sapien
cctggtgttagggtcatgggccaat

SEQ ID NO: 592179 - DNA, 25 bp, Homo sapien
cacacattgggaagggcaaccaaga

SEQ ID NO: 592180 - DNA, 25 bp, Homo sapien
tgagctctttggacccacacattgg

SEQ ID NO: 592181 - DNA, 25 bp, Homo sapien
tccggattcacagacaaggccgcag

SEQ ID NO: 592182 - DNA, 25 bp, Homo sapien
ggatgagacacgtcccttcacgctc

SEQ ID NO: 592183 - DNA, 25 bp, Homo sapien
gggatgagacacgtcccttcacgct

SEQ ID NO: 592184 - DNA, 25 bp, Homo sapien
tgagacacgtcccttcacgctccag

SEQ ID NO: 592185 - DNA, 25 bp, Homo sapien
gatgagacacgtcccttcacgctcc

SEQ ID NO: 592186 - DNA, 25 bp, Homo sapien
ggctgtgtctccagggtccgacaca

SEQ ID NO: 592187 - DNA, 25 bp, Homo sapien
atgcatgagaaggggctgctctgcg

SEQ ID NO: 592188 - DNA, 25 bp, Homo sapien
tgctctgcggctgtgtctccagggt

SEQ ID NO: 592189 - DNA, 25 bp, Homo sapien
tctgcggctgtgtctccagggtccg

SEQ ID NO: 592190 - DNA, 25 bp, Homo sapien
tagcaggctgacgtaggtgaggtcc

SEQ ID NO: 592191 - DNA, 25 bp, Homo sapien
tttgctcctgggaaagccgaactcc

SEQ ID NO: 592192 - DNA, 25 bp, Homo sapien
gaaagccgaactcctggagtagcag

SEQ ID NO: 592193 - DNA, 25 bp, Homo sapien
ctcctggagtagcaggctgacgtag

SEQ ID NO: 592194 - DNA, 25 bp, Homo sapien
tctgtctgttcagggagtcgatgta

SEQ ID NO: 592195 - DNA, 25 bp, Homo sapien
tcagggagtcgatgtaatgaaaaat

SEQ ID NO: 592196 - DNA, 25 bp, Homo sapien
ctcttctgtctgttcagggagtcga

SEQ ID NO: 592197 - DNA, 25 bp, Homo sapien
tctgttcagggagtcgatgtaatga

SEQ ID NO: 592198 - DNA, 25 bp, Homo sapien
acagacactgctgacggggacaggg

SEQ ID NO: 592199 - DNA, 25 bp, Homo sapien
acaggtggcattgagcagggcccag

SEQ ID NO: 592200 - DNA, 25 bp, Homo sapien
aagtcacgtccaggacaggagggtt

SEQ ID NO: 592201 - DNA, 25 bp, Homo sapien
gagccagtgtgcagaaagtgccagc

SEQ ID NO: 592202 - DNA, 25 bp, Homo sapien
agccacagccccgcggacggggcat

SEQ ID NO: 592203 - DNA, 25 bp, Homo sapien
cagccacagccccgcggacggggca

SEQ ID NO: 592204 - DNA, 25 bp, Homo sapien
gtgttatggctgtccctcggcttcc

SEQ ID NO: 592205 - DNA, 25 bp, Homo sapien
tgcaccgcctcccagactcttgcag

SEQ ID NO: 592206 - DNA, 25 bp, Homo sapien
gggtgttatggctgtccctcggctt

SEQ ID NO: 592207 - DNA, 25 bp, Homo sapien
ggagacaagactcccatcgcaggga

SEQ ID NO: 592208 - DNA, 25 bp, Homo sapien
tgaactcacacattcatacccaagg

SEQ ID NO: 592209 - DNA, 25 bp, Homo sapien
aaccacacaatgtgtgaggagagca

SEQ ID NO: 592210 - DNA, 25 bp, Homo sapien
gaggcaaacacactcaagtccagag

SEQ ID NO: 592211 - DNA, 25 bp, Homo sapien
gagcaggcctctgggtgaactcaca

SEQ ID NO: 592212 - DNA, 25 bp, Homo sapien
gactccctgaaaggtgggcacctgc

SEQ ID NO: 592213 - DNA, 25 bp, Homo sapien
cagtagcgatacattcacaggacac

SEQ ID NO: 592214 - DNA, 25 bp, Homo sapien
cacaaatagtttacagcagctcatg

SEQ ID NO: 592215 - DNA, 25 bp, Homo sapien
gacagagacgtcactcaagcagcac

SEQ ID NO: 592216 - DNA, 25 bp, Homo sapien
tgccgggcactgtacattcactgaa

SEQ ID NO: 592217 - DNA, 25 bp, Homo sapien
gacactgacgccacactgagcagga

SEQ ID NO: 592218 - DNA, 25 bp, Homo sapien
ggcacagctgcacctaagacatggc

SEQ ID NO: 592219 - DNA, 25 bp, Homo sapien
caccgagagcttggttctgggactg

SEQ ID NO: 592220 - DNA, 25 bp, Homo sapien
ttttattgggagtggaacacatgag

SEQ ID NO: 592221 - DNA, 25 bp, Homo sapien
ttattgggagtggaacacatgaggt

SEQ ID NO: 592222 - DNA, 25 bp, Homo sapien
tttattgggagtggaacacatgagg

SEQ ID NO: 592223 - DNA, 25 bp, Homo sapien
aggtgggcaaatgctactgtcgctc

SEQ ID NO: 592224 - DNA, 25 bp, Homo sapien
gtcgctcaacgagaggaatcccaga

SEQ ID NO: 592225 - DNA, 25 bp, Homo sapien
gcaaatgctactgtcgctcaacgag

SEQ ID NO: 592226 - DNA, 25 bp, Homo sapien
tgctactgtcgctcaacgagaggaa

SEQ ID NO: 592227 - DNA, 25 bp, Homo sapien
tatacccgatgaattagatccatgc

SEQ ID NO: 592228 - DNA, 25 bp, Homo sapien
gacttgcatactttgccgggcccag

SEQ ID NO: 592229 - DNA, 25 bp, Homo sapien
taggattgaaggcaacgtggcaacg

SEQ ID NO: 592230 - DNA, 25 bp, Homo sapien
cagcaccgatgcttgtccagtagga

SEQ ID NO: 592231 - DNA, 25 bp, Homo sapien
aagcaccccgatgcccgcaggtgaa

SEQ ID NO: 592232 - DNA, 25 bp, Homo sapien
aatcattttcaagccgaatccaaga

SEQ ID NO: 592233 - DNA, 25 bp, Homo sapien
gaagaacctgatcacgcaggctcct

SEQ ID NO: 592234 - DNA, 25 bp, Homo sapien
caagccgaatccaagaatctgatga

SEQ ID NO: 592235 - DNA, 25 bp, Homo sapien
atgacccagccattctgcctttaga

SEQ ID NO: 592236 - DNA, 25 bp, Homo sapien
gaaacagcccaggtgactatcaaca

SEQ ID NO: 592237 - DNA, 25 bp, Homo sapien
gcgccgagcccagtaggttcttata

SEQ ID NO: 592238 - DNA, 25 bp, Homo sapien
gccttattcataaagctccaaacag

SEQ ID NO: 592239 - DNA, 25 bp, Homo sapien
gtgtatgtatatctaaagcacagca

SEQ ID NO: 592240 - DNA, 25 bp, Homo sapien
ttgttcatgatgcagagaccattgt

SEQ ID NO: 592241 - DNA, 25 bp, Homo sapien
cattgttcacgtgtttacctgctga

SEQ ID NO: 592242 - DNA, 25 bp, Homo sapien
ttcatgatgcagagaccattgttca

SEQ ID NO: 592243 - DNA, 25 bp, Homo sapien
tacgtcatgacggacatcagatagg

SEQ ID NO: 592244 - DNA, 25 bp, Homo sapien
cagacacacaagagcagacactgga

SEQ ID NO: 592245 - DNA, 25 bp, Homo sapien
catttacataatgttccagaacggg

SEQ ID NO: 592246 - DNA, 25 bp, Homo sapien
ccagaacgggtgacagtaatacgtc

SEQ ID NO: 592247 - DNA, 25 bp, Homo sapien
tctgattcagtgcaccaagaaggac

SEQ ID NO: 592248 - DNA, 25 bp, Homo sapien
gggacaaacccacactatgagtctg

SEQ ID NO: 592249 - DNA, 25 bp, Homo sapien
tatggcagactccagcctcatgaag

SEQ ID NO: 592250 - DNA, 25 bp, Homo sapien
caggcttctaggacacagtttatag

SEQ ID NO: 592251 - DNA, 25 bp, Homo sapien
gcgaacgccgggatggtgcagctgc

SEQ ID NO: 592252 - DNA, 25 bp, Homo sapien
cgcgaacgccgggatggtgcagctg

SEQ ID NO: 592253 - DNA, 25 bp, Homo sapien
ggcggcacacgcgaacgccgggatg

SEQ ID NO: 592254 - DNA, 25 bp, Homo sapien
cacacgcgaacgccgggatggtgca

SEQ ID NO: 592255 - DNA, 25 bp, Homo sapien
tcgctgtccgtcagcggcttcgcca

SEQ ID NO: 592256 - DNA, 25 bp, Homo sapien
ctgatctgcttccgcttctcgctgt

SEQ ID NO: 592257 - DNA, 25 bp, Homo sapien
gctgatctgcttccgcttctcgctg

SEQ ID NO: 592258 - DNA, 25 bp, Homo sapien
tctcgctgtccgtcagcggcttcgc

SEQ ID NO: 592259 - DNA, 25 bp, Homo sapien
gccacgtcgcctagccccgccaggc

SEQ ID NO: 592260 - DNA, 25 bp, Homo sapien
cgtcgcctagccccgccaggccgcg

SEQ ID NO: 592261 - DNA, 25 bp, Homo sapien
ccacgtcgcctagccccgccaggcc

SEQ ID NO: 592262 - DNA, 25 bp, Homo sapien
cgaagaagtagtcgcggggcgtggc

SEQ ID NO: 592263 - DNA, 25 bp, Homo sapien
ttggggtcgcgctcgtagtagtgct

SEQ ID NO: 592264 - DNA, 25 bp, Homo sapien
tgcaagtgccggttgaagctcttcc

SEQ ID NO: 592265 - DNA, 25 bp, Homo sapien
aagtgccggttgaagctcttccgca

SEQ ID NO: 592266 - DNA, 25 bp, Homo sapien
agcgggcacgggcgcacagggcggg

SEQ ID NO: 592267 - DNA, 25 bp, Homo sapien
cacgggcgcacagggcggggcagcg

SEQ ID NO: 592268 - DNA, 25 bp, Homo sapien
cgggcacgggcgcacagggcggggc

SEQ ID NO: 592269 - DNA, 25 bp, Homo sapien
ggcacgggcgcacagggcggggcag

SEQ ID NO: 592270 - DNA, 25 bp, Homo sapien
cttctccatgcagcgcaatcccagg

SEQ ID NO: 592271 - DNA, 25 bp, Homo sapien
ccgccacctcttgccaagcacaaag

SEQ ID NO: 592272 - DNA, 25 bp, Homo sapien
acttcagagaatccattaaatgtct

SEQ ID NO: 592273 - DNA, 25 bp, Homo sapien
taaatgtcttcatgaccaaccgcca

SEQ ID NO: 592274 - DNA, 25 bp, Homo sapien
ccatgttccccagcagaagtctctt

SEQ ID NO: 592275 - DNA, 25 bp, Homo sapien
cttggggttgccacatgagccagct

SEQ ID NO: 592276 - DNA, 25 bp, Homo sapien
agtctcttggctgatgcctgctggc

SEQ ID NO: 592277 - DNA, 25 bp, Homo sapien
tgaagcaccaatgaacgcagcacag

SEQ ID NO: 592278 - DNA, 25 bp, Homo sapien
gtgttctgcagcgtgcgacccatgt

SEQ ID NO: 592279 - DNA, 25 bp, Homo sapien
cagcgtgcgacccatgtagaattcc

SEQ ID NO: 592280 - DNA, 25 bp, Homo sapien
ctgatagatggcttcatcgcaggca

SEQ ID NO: 592281 - DNA, 25 bp, Homo sapien
ggcttcatcgcaggcattctgaagg

SEQ ID NO: 592282 - DNA, 25 bp, Homo sapien
tcctcgagttcctccaagtctaacc

SEQ ID NO: 592283 - DNA, 25 bp, Homo sapien
tcgagttcctccaagtctaacccca

SEQ ID NO: 592284 - DNA, 25 bp, Homo sapien
tgccaggcccaaggtagccattgag

SEQ ID NO: 592285 - DNA, 25 bp, Homo sapien
aaattcatagcggattccatagccg

SEQ ID NO: 592286 - DNA, 25 bp, Homo sapien
gattccatagccgtatgctgccagg

SEQ ID NO: 592287 - DNA, 25 bp, Homo sapien
aatcccaaattcatagcggattcca

SEQ ID NO: 592288 - DNA, 25 bp, Homo sapien
gcaagacccttctggtggcgtctcc

SEQ ID NO: 592289 - DNA, 25 bp, Homo sapien
tctccttgtccgctgtgagattccc

SEQ ID NO: 592290 - DNA, 25 bp, Homo sapien
ccagcaagacccttctggtggcgtc

SEQ ID NO: 592291 - DNA, 25 bp, Homo sapien
tggtggcgtctccttgtccgctgtg

SEQ ID NO: 592292 - DNA, 25 bp, Homo sapien
tgtgctccacgcgtccgtagaagtg

SEQ ID NO: 592293 - DNA, 25 bp, Homo sapien
tccgtagaagtgcacgggaagcata

SEQ ID NO: 592294 - DNA, 25 bp, Homo sapien
gaagcatatactcaggccgcgcttt

SEQ ID NO: 592295 - DNA, 25 bp, Homo sapien
tgcacgggaagcatatactcaggcc

SEQ ID NO: 592296 - DNA, 25 bp, Homo sapien
ctggccacaaaacgggttgctcagg

SEQ ID NO: 592297 - DNA, 25 bp, Homo sapien
tgctcaggacggagtggcaagggcc

SEQ ID NO: 592298 - DNA, 25 bp, Homo sapien
caaaacgggttgctcaggacggagt

SEQ ID NO: 592299 - DNA, 25 bp, Homo sapien
acccagcccatgctcggcaccacag

SEQ ID NO: 592300 - DNA, 25 bp, Homo sapien
ttggcggaccacagccgcatggtgt

SEQ ID NO: 592301 - DNA, 25 bp, Homo sapien
tgttgttcttgtagccgggcactgg

SEQ ID NO: 592302 - DNA, 25 bp, Homo sapien
cgcatggtgttgacggtgttgttct

SEQ ID NO: 592303 - DNA, 25 bp, Homo sapien
tcgttgggagccttggcggaccaca

SEQ ID NO: 592304 - DNA, 25 bp, Homo sapien
aaatggagcggggtcaacacacaca

SEQ ID NO: 592305 - DNA, 25 bp, Homo sapien
gagcggggtcaacacacacatgcct

SEQ ID NO: 592306 - DNA, 25 bp, Homo sapien
aagaagaaatggagcggggtcaaca

SEQ ID NO: 592307 - DNA, 25 bp, Homo sapien
agaagaaatggagcggggtcaacac

SEQ ID NO: 592308 - DNA, 25 bp, Homo sapien
tatcatttggatacaggaccctgga

SEQ ID NO: 592309 - DNA, 25 bp, Homo sapien
tccaggaccgcctcgatgtagtctc

SEQ ID NO: 592310 - DNA, 25 bp, Homo sapien
tttggatacaggaccctggagatgt

SEQ ID NO: 592311 - DNA, 25 bp, Homo sapien
tgttctcagccaagttccggtccag

SEQ ID NO: 592312 - DNA, 25 bp, Homo sapien
cagaaagcgatacggcctgagcaag

SEQ ID NO: 592313 - DNA, 25 bp, Homo sapien
ccacctctctatgccagaaagcgat

SEQ ID NO: 592314 - DNA, 25 bp, Homo sapien
tctatgccagaaagcgatacggcct

SEQ ID NO: 592315 - DNA, 25 bp, Homo sapien
cctctctatgccagaaagcgatacg

SEQ ID NO: 592316 - DNA, 25 bp, Homo sapien
agcgtggcggccaccacgaagtact

SEQ ID NO: 592317 - DNA, 25 bp, Homo sapien
cgtggcggccaccacgaagtactcc

SEQ ID NO: 592318 - DNA, 25 bp, Homo sapien
gcgtggcggccaccacgaagtactc

SEQ ID NO: 592319 - DNA, 25 bp, Homo sapien
tgtctgggaacgtctcgaaacaggt

SEQ ID NO: 592320 - DNA, 25 bp, Homo sapien
tctgggaacgtctcgaaacaggttc

SEQ ID NO: 592321 - DNA, 25 bp, Homo sapien
ggaacgtctcgaaacaggttctcac

SEQ ID NO: 592322 - DNA, 25 bp, Homo sapien
cttgtctgggaacgtctcgaaacag

SEQ ID NO: 592323 - DNA, 25 bp, Homo sapien
tcagtcatttcatcccacgtgggca

SEQ ID NO: 592324 - DNA, 25 bp, Homo sapien
gcacccacggttgttggcatacgaa

SEQ ID NO: 592325 - DNA, 25 bp, Homo sapien
caaggggtgccattcagtcatttca

SEQ ID NO: 592326 - DNA, 25 bp, Homo sapien
gaagctccccaagtgaaggagccag

SEQ ID NO: 592327 - DNA, 25 bp, Homo sapien
accaggatccgcatgagctcaggga

SEQ ID NO: 592328 - DNA, 25 bp, Homo sapien
caggatccgcatgagctcagggatg

SEQ ID NO: 592329 - DNA, 25 bp, Homo sapien
gcggggtgggtgtcgttcagctgga

SEQ ID NO: 592330 - DNA, 25 bp, Homo sapien
ccaccaggatccgcatgagctcagg

SEQ ID NO: 592331 - DNA, 25 bp, Homo sapien
tgcctaggcagggtgagcgtccagg

SEQ ID NO: 592332 - DNA, 25 bp, Homo sapien
tgtttagaaacaagcagctctctgg

SEQ ID NO: 592333 - DNA, 25 bp, Homo sapien
tctctggccagttgcctaggcaggg

SEQ ID NO: 592334 - DNA, 25 bp, Homo sapien
agctctctggccagttgcctaggca

SEQ ID NO: 592335 - DNA, 25 bp, Homo sapien
gcacaggtcttcttcgtgatttccc

SEQ ID NO: 592336 - DNA, 25 bp, Homo sapien
gatggcatagattatctccaggtgc

SEQ ID NO: 592337 - DNA, 25 bp, Homo sapien
tggttggtgtatgcacaggtcttct

SEQ ID NO: 592338 - DNA, 25 bp, Homo sapien
ttctcaaacatggacacgggccagc

SEQ ID NO: 592339 - DNA, 25 bp, Homo sapien
gactgtttcacgatctccgagtgga

SEQ ID NO: 592340 - DNA, 25 bp, Homo sapien
agcatgggacccaatcacacacagg

SEQ ID NO: 592341 - DNA, 25 bp, Homo sapien
tcgatcacagacatcctgcgcaggc

SEQ ID NO: 592342 - DNA, 25 bp, Homo sapien
gggccatgttgatccgcttgcagtc

SEQ ID NO: 592343 - DNA, 25 bp, Homo sapien
cacgatggtatcggccagccccggg

SEQ ID NO: 592344 - DNA, 25 bp, Homo sapien
ctccacgatggtatcggccagcccc

SEQ ID NO: 592345 - DNA, 25 bp, Homo sapien
cgatggtatcggccagccccgggtt

SEQ ID NO: 592346 - DNA, 25 bp, Homo sapien
ccagccccgggttgcacagcagcag

SEQ ID NO: 592347 - DNA, 25 bp, Homo sapien
ctgatgaacacctcgtcactgacca

SEQ ID NO: 592348 - DNA, 25 bp, Homo sapien
tggccacgtccctgatgaacacctc

SEQ ID NO: 592349 - DNA, 25 bp, Homo sapien
catgcacatcgaacatggaggaggg

SEQ ID NO: 592350 - DNA, 25 bp, Homo sapien
gattgtacagggtgacgacgtgcag

SEQ ID NO: 592351 - DNA, 25 bp, Homo sapien
tccaggaaggccgagaacttgagct

SEQ ID NO: 592352 - DNA, 25 bp, Homo sapien
tactcgtggatcctcttcacatgca

SEQ ID NO: 592353 - DNA, 25 bp, Homo sapien
cagcctgggcctttcgggtgtctaa

SEQ ID NO: 592354 - DNA, 25 bp, Homo sapien
tttgcttaaaataaacgtgccacat

SEQ ID NO: 592355 - DNA, 25 bp, Homo sapien
aactgttcacctgctcacgtgaggc

SEQ ID NO: 592356 - DNA, 25 bp, Homo sapien
tcctgggcccttggaggtcaagact

SEQ ID NO: 592357 - DNA, 25 bp, Homo sapien
ctcactgggacagcgggtgagggcc

SEQ ID NO: 592358 - DNA, 25 bp, Homo sapien
agtggcaacctcagccttgtggctg

SEQ ID NO: 592359 - DNA, 25 bp, Homo sapien
agggtcaagccatgacggccggctc

SEQ ID NO: 592360 - DNA, 25 bp, Homo sapien
caaaaaggggatgagcggccaccct

SEQ ID NO: 592361 - DNA, 25 bp, Homo sapien
aagccttggccgggtctctcttgat

SEQ ID NO: 592362 - DNA, 25 bp, Homo sapien
agccttggccgggtctctcttgatt

SEQ ID NO: 592363 - DNA, 25 bp, Homo sapien
gccttggccgggtctctcttgattc

SEQ ID NO: 592364 - DNA, 25 bp, Homo sapien
aaagccttggccgggtctctcttga

SEQ ID NO: 592365 - DNA, 25 bp, Homo sapien
cccgagtatggatgtggtggcacca

SEQ ID NO: 592366 - DNA, 25 bp, Homo sapien
gggcatccggttcccgagtatggat

SEQ ID NO: 592367 - DNA, 25 bp, Homo sapien
tatccccagaccaaacaccacagag

SEQ ID NO: 592368 - DNA, 25 bp, Homo sapien
ccggtgaccgctgggcatccggttc

SEQ ID NO: 592369 - DNA, 25 bp, Homo sapien
ttttcgaactccgtatctctatgga

SEQ ID NO: 592370 - DNA, 25 bp, Homo sapien
actttttcgaactccgtatctctat

SEQ ID NO: 592371 - DNA, 25 bp, Homo sapien
caggacaatcgatcctcctactcag

SEQ ID NO: 592372 - DNA, 25 bp, Homo sapien
gaactccgtatctctatggacttta

SEQ ID NO: 592373 - DNA, 25 bp, Homo sapien
gaggactcctgtccaatgctttagg

SEQ ID NO: 592374 - DNA, 25 bp, Homo sapien
gacggatggtggtactgtgtggtga

SEQ ID NO: 592375 - DNA, 25 bp, Homo sapien
caatgctttaggtgtgacggatggt

SEQ ID NO: 592376 - DNA, 25 bp, Homo sapien
ggacacggaggactcctgtccaatg

SEQ ID NO: 592377 - DNA, 25 bp, Homo sapien
tgttcaggcccttggaggcgctcct

SEQ ID NO: 592378 - DNA, 25 bp, Homo sapien
cttgttcaggcccttggaggcgctc

SEQ ID NO: 592379 - DNA, 25 bp, Homo sapien
aaatgccttgttcaggcccttggag

SEQ ID NO: 592380 - DNA, 25 bp, Homo sapien
gagagggtgaaggtttttagcacaa

SEQ ID NO: 592381 - DNA, 25 bp, Homo sapien
catgattgacgacgtcgccgatgga

SEQ ID NO: 592382 - DNA, 25 bp, Homo sapien
tttctcagccaaggacacacggtag

SEQ ID NO: 592383 - DNA, 25 bp, Homo sapien
tcagcttggccatgtggtaaccggg

SEQ ID NO: 592384 - DNA, 25 bp, Homo sapien
cgccgatggaggtgaccaacttgat

SEQ ID NO: 592385 - DNA, 25 bp, Homo sapien
cccgcaggccgaagatgaagaggtt

SEQ ID NO: 592386 - DNA, 25 bp, Homo sapien
atggtgccgatggtgagggccccgt

SEQ ID NO: 592387 - DNA, 25 bp, Homo sapien
tgcgacagatcagcggccgggatca

SEQ ID NO: 592388 - DNA, 25 bp, Homo sapien
acgttggcgccgtccatggtgccga

SEQ ID NO: 592389 - DNA, 25 bp, Homo sapien
ttcagatggcatgtgtggtttcacc

SEQ ID NO: 592390 - DNA, 25 bp, Homo sapien
tccccagtgcttcaaggcaatcagg

SEQ ID NO: 592391 - DNA, 25 bp, Homo sapien
taattatcgcttggaatcaggcccg

SEQ ID NO: 592392 - DNA, 25 bp, Homo sapien
cacacagtggagtgccctgatggga

SEQ ID NO: 592393 - DNA, 25 bp, Homo sapien
gcagatctgctaggacatagtggct

SEQ ID NO: 592394 - DNA, 25 bp, Homo sapien
tggagagggccactcagaacttggc

SEQ ID NO: 592395 - DNA, 25 bp, Homo sapien
tgtgaagtcagtctaaagccaatcc

SEQ ID NO: 592396 - DNA, 25 bp, Homo sapien
gaaatgtcatcactagcagatctgc

SEQ ID NO: 592397 - DNA, 25 bp, Homo sapien
gccatgggtggttacgaggcccttg

SEQ ID NO: 592398 - DNA, 25 bp, Homo sapien
agtggccatgggtggttacgaggcc

SEQ ID NO: 592399 - DNA, 25 bp, Homo sapien
ccatgggtggttacgaggcccttga

SEQ ID NO: 592400 - DNA, 25 bp, Homo sapien
tggccatgggtggttacgaggccct

SEQ ID NO: 592401 - DNA, 25 bp, Homo sapien
ctgtgaggcgatgggccaggagtca

SEQ ID NO: 592402 - DNA, 25 bp, Homo sapien
ggagtcagcagccagcgccccaggt

SEQ ID NO: 592403 - DNA, 25 bp, Homo sapien
aggcgatgggccaggagtcagcagc

SEQ ID NO: 592404 - DNA, 25 bp, Homo sapien
tgggccaggagtcagcagccagcgc

SEQ ID NO: 592405 - DNA, 25 bp, Homo sapien
gaaaaaaagccactgctgatctggt

SEQ ID NO: 592406 - DNA, 25 bp, Homo sapien
aaaaaagccactgctgatctggtcc

SEQ ID NO: 592407 - DNA, 25 bp, Homo sapien
aaaaaaagccactgctgatctggtc

SEQ ID NO: 592408 - DNA, 25 bp, Homo sapien
ctgtcatggtgcatcagcatgttca

SEQ ID NO: 592409 - DNA, 25 bp, Homo sapien
agcatgttcacgatgtccttgaagc

SEQ ID NO: 592410 - DNA, 25 bp, Homo sapien
tcatggtgcatcagcatgttcacga

SEQ ID NO: 592411 - DNA, 25 bp, Homo sapien
gcatgttcacgatgtccttgaagca

SEQ ID NO: 592412 - DNA, 25 bp, Homo sapien
ccggtacagctggtccacctgtgcc

SEQ ID NO: 592413 - DNA, 25 bp, Homo sapien
cggtacagctggtccacctgtgcct

SEQ ID NO: 592414 - DNA, 25 bp, Homo sapien
cctggcactgcatgtaggcttcata

SEQ ID NO: 592415 - DNA, 25 bp, Homo sapien
tgcctggcactgcatgtaggcttca

SEQ ID NO: 592416 - DNA, 25 bp, Homo sapien
agatctagggagcaaggagctggag

SEQ ID NO: 592417 - DNA, 25 bp, Homo sapien
gatctcccgtgcatactccgtgatg

SEQ ID NO: 592418 - DNA, 25 bp, Homo sapien
cgtgatggtccggtcactggagaac

SEQ ID NO: 592419 - DNA, 25 bp, Homo sapien
gagaacttgcccgagcaggcgatgt

SEQ ID NO: 592420 - DNA, 25 bp, Homo sapien
ggcgatgttcctgatgaccttcttg

SEQ ID NO: 592421 - DNA, 25 bp, Homo sapien
ctttacaagaaactaggagcacttc

SEQ ID NO: 592422 - DNA, 25 bp, Homo sapien
catggtactcagaaaagcagggacc

SEQ ID NO: 592423 - DNA, 25 bp, Homo sapien
ggctggccacgaccctttgtactgt

SEQ ID NO: 592424 - DNA, 25 bp, Homo sapien
tggcccctcctggaaacatggtact

SEQ ID NO: 592425 - DNA, 25 bp, Homo sapien
aatacatagcaagatgtgtgcaaag

SEQ ID NO: 592426 - DNA, 25 bp, Homo sapien
tacatagcaagatgtgtgcaaagtt

SEQ ID NO: 592427 - DNA, 25 bp, Homo sapien
tgtgcaaagttctgggggagcccag

SEQ ID NO: 592428 - DNA, 25 bp, Homo sapien
ctaatacatagcaagatgtgtgcaa

SEQ ID NO: 592429 - DNA, 25 bp, Homo sapien
ggtccatgacccatataccaggtgc

SEQ ID NO: 592430 - DNA, 25 bp, Homo sapien
gaaggcgatgcctagaggatccgac

SEQ ID NO: 592431 - DNA, 25 bp, Homo sapien
tgggcctcctcaagcacaaaagtga

SEQ ID NO: 592432 - DNA, 25 bp, Homo sapien
tagatttctcggcaattccacaggg

SEQ ID NO: 592433 - DNA, 25 bp, Homo sapien
tgttgtgccgttttttaagccagtc

SEQ ID NO: 592434 - DNA, 25 bp, Homo sapien
gccagtcggaaaagcacagtattcg

SEQ ID NO: 592435 - DNA, 25 bp, Homo sapien
tcctgttgtgccgttttttaagcca

SEQ ID NO: 592436 - DNA, 25 bp, Homo sapien
cagtcggaaaagcacagtattcggg

SEQ ID NO: 592437 - DNA, 25 bp, Homo sapien
agcggcttggtaccagtgtcccaca

SEQ ID NO: 592438 - DNA, 25 bp, Homo sapien
aaatccagtgcagggctaccatcct

SEQ ID NO: 592439 - DNA, 25 bp, Homo sapien
ctaagggccagccacagtgaaatcc

SEQ ID NO: 592440 - DNA, 25 bp, Homo sapien
ccatcctgatagagcggcttggtac

SEQ ID NO: 592441 - DNA, 25 bp, Homo sapien
tggcttctcagccagtcgtgcatat

SEQ ID NO: 592442 - DNA, 25 bp, Homo sapien
aaaaagagggtactgagaaagatct

SEQ ID NO: 592443 - DNA, 25 bp, Homo sapien
tcagccagtcgtgcatatagggtcc

SEQ ID NO: 592444 - DNA, 25 bp, Homo sapien
ctgccccaaacaattaagagtctgg

SEQ ID NO: 592445 - DNA, 25 bp, Homo sapien
ccctaacccagaagagtgggtggct

SEQ ID NO: 592446 - DNA, 25 bp, Homo sapien
agtgggtggctgaggttaacatctg

SEQ ID NO: 592447 - DNA, 25 bp, Homo sapien
actttatccaaggttgctaatggct

SEQ ID NO: 592448 - DNA, 25 bp, Homo sapien
agatactttatccaaggttgctaat

SEQ ID NO: 592449 - DNA, 25 bp, Homo sapien
gaagcgccatgagaacaggagcttt

SEQ ID NO: 592450 - DNA, 25 bp, Homo sapien
cacttaagtatctccagtacctggc

SEQ ID NO: 592451 - DNA, 25 bp, Homo sapien
tattgtcgacatacgtggaagtaga

SEQ ID NO: 592452 - DNA, 25 bp, Homo sapien
catagaacagatatccattgcgcca

SEQ ID NO: 592453 - DNA, 25 bp, Homo sapien
caccagctctcacgccaaaatggta

SEQ ID NO: 592454 - DNA, 25 bp, Homo sapien
gctctcacgccaaaatggtatctgg

SEQ ID NO: 592455 - DNA, 25 bp, Homo sapien
gttctagtcctacagcgccaggctc

SEQ ID NO: 592456 - DNA, 25 bp, Homo sapien
ggctctcggcgcctcactcctttcg

SEQ ID NO: 592457 - DNA, 25 bp, Homo sapien
gcgcgatgcagctcgcggatcagtt

SEQ ID NO: 592458 - DNA, 25 bp, Homo sapien
aaggcaggcagttgcccttcgggcg

SEQ ID NO: 592459 - DNA, 25 bp, Homo sapien
cgcggatcagttccatggctttttc

SEQ ID NO: 592460 - DNA, 25 bp, Homo sapien
agttgcccttcgggcgcgcgatgca

SEQ ID NO: 592461 - DNA, 25 bp, Homo sapien
tgcagtttcaacttcctggagccat

SEQ ID NO: 592462 - DNA, 25 bp, Homo sapien
tggagtgtaatagcgtgaccacagt

SEQ ID NO: 592463 - DNA, 25 bp, Homo sapien
gtaatagcgtgaccacagttcactg

SEQ ID NO: 592464 - DNA, 25 bp, Homo sapien
ctggagccatgcaatcctctcactt

SEQ ID NO: 592465 - DNA, 25 bp, Homo sapien
tgattaaatgttacccaataggtct

SEQ ID NO: 592466 - DNA, 25 bp, Homo sapien
tggaaaatgcaagcatgacttctac

SEQ ID NO: 592467 - DNA, 25 bp, Homo sapien
atgctgtggcatatacaaatggcac

SEQ ID NO: 592468 - DNA, 25 bp, Homo sapien
caatcgaaagagaagcaatcccatc

SEQ ID NO: 592469 - DNA, 25 bp, Homo sapien
tggcaatatgctatcaatactgaac

SEQ ID NO: 592470 - DNA, 25 bp, Homo sapien
tataaaccgatattgaaatccactg

SEQ ID NO: 592471 - DNA, 25 bp, Homo sapien
accccactagcatggttataacaag

SEQ ID NO: 592472 - DNA, 25 bp, Homo sapien
tgtaaaacggtatagccctgtgggc

SEQ ID NO: 592473 - DNA, 25 bp, Homo sapien
ggttttgttcatacaaagctttcat

SEQ ID NO: 592474 - DNA, 25 bp, Homo sapien
gttttgttcatacaaagctttcatc

SEQ ID NO: 592475 - DNA, 25 bp, Homo sapien
ctggttttgttcatacaaagctttc

SEQ ID NO: 592476 - DNA, 25 bp, Homo sapien
tggttttgttcatacaaagctttca

SEQ ID NO: 592477 - DNA, 25 bp, Homo sapien
cagtgtcgaaatttgatagttggta

SEQ ID NO: 592478 - DNA, 25 bp, Homo sapien
tttcttaacagagaacagtgtcgaa

SEQ ID NO: 592479 - DNA, 25 bp, Homo sapien
tatgctacagtgcagcgtcgatttc

SEQ ID NO: 592480 - DNA, 25 bp, Homo sapien
tagttggtatcaaatcacttcgtcc

SEQ ID NO: 592481 - DNA, 25 bp, Homo sapien
tgccaccccaagcaaaaactgagaa

SEQ ID NO: 592482 - DNA, 25 bp, Homo sapien
acacagaaaatcctgccaccccaag

SEQ ID NO: 592483 - DNA, 25 bp, Homo sapien
ctgccaccccaagcaaaaactgaga

SEQ ID NO: 592484 - DNA, 25 bp, Homo sapien
gaaaatcctgccaccccaagcaaaa

SEQ ID NO: 592485 - DNA, 25 bp, Homo sapien
tctgatccgaagcaagcggtcatac

SEQ ID NO: 592486 - DNA, 25 bp, Homo sapien
atgtgaaatcgtaatgcatttggca

SEQ ID NO: 592487 - DNA, 25 bp, Homo sapien
cccatctgagtgctctgatccgaag

SEQ ID NO: 592488 - DNA, 25 bp, Homo sapien
aagacgctaccatattcccatctga

SEQ ID NO: 592489 - DNA, 25 bp, Homo sapien
tattgagtgccatcctatgctgtgc

SEQ ID NO: 592490 - DNA, 25 bp, Homo sapien
tactcaggtgactcgtggtgaaccc

SEQ ID NO: 592491 - DNA, 25 bp, Homo sapien
tatgatgtgccctgagagtatgtgc

SEQ ID NO: 592492 - DNA, 25 bp, Homo sapien
gagatttgaacctaagcccacctga

SEQ ID NO: 592493 - DNA, 25 bp, Homo sapien
caaacatagagatgatcatttgaca

SEQ ID NO: 592494 - DNA, 25 bp, Homo sapien
aaacatagagatgatcatttgacaa

SEQ ID NO: 592495 - DNA, 25 bp, Homo sapien
gcaaacatagagatgatcatttgac

SEQ ID NO: 592496 - DNA, 25 bp, Homo sapien
ctgcaaacatagagatgatcatttg

SEQ ID NO: 592497 - DNA, 25 bp, Homo sapien
atctcctcccagtgacctcatataa

SEQ ID NO: 592498 - DNA, 25 bp, Homo sapien
cctctcttcttaaaaggtagcacaa

SEQ ID NO: 592499 - DNA, 25 bp, Homo sapien
ggtagcacaatttacacattaaaga

SEQ ID NO: 592500 - DNA, 25 bp, Homo sapien
agctaacacatattcatatactcct

SEQ ID NO: 592501 - DNA, 25 bp, Homo sapien
tattcatatactcctctcttcttaa

SEQ ID NO: 592502 - DNA, 25 bp, Homo sapien
gaggttgcagttgaggtgaacctgg

SEQ ID NO: 592503 - DNA, 25 bp, Homo sapien
gtggaggttgcagttgaggtgaacc

SEQ ID NO: 592504 - DNA, 25 bp, Homo sapien
ggttgcagttgaggtgaacctggga

SEQ ID NO: 592505 - DNA, 25 bp, Homo sapien
tggaggttgcagttgaggtgaacct

SEQ ID NO: 592506 - DNA, 25 bp, Homo sapien
caaattctccatagtcttttagaca

SEQ ID NO: 592507 - DNA, 25 bp, Homo sapien
attctccatagtcttttagacaccg

SEQ ID NO: 592508 - DNA, 25 bp, Homo sapien
tctccatagtcttttagacaccgga

SEQ ID NO: 592509 - DNA, 25 bp, Homo sapien
ctccatagtcttttagacaccggac

SEQ ID NO: 592510 - DNA, 25 bp, Homo sapien
agtgaacaccaaatccttagggtca

SEQ ID NO: 592511 - DNA, 25 bp, Homo sapien
agaaccacatgacctgaaacattct

SEQ ID NO: 592512 - DNA, 25 bp, Homo sapien
tccctggcatgaacaaagtgaacac

SEQ ID NO: 592513 - DNA, 25 bp, Homo sapien
cctgttaggaaaataagctcaagaa

SEQ ID NO: 592514 - DNA, 25 bp, Homo sapien
tccttgtctgatcagctgctcacat

SEQ ID NO: 592515 - DNA, 25 bp, Homo sapien
cacatttccatcgaggtaaaaagtg

SEQ ID NO: 592516 - DNA, 25 bp, Homo sapien
agctgctcacatttccatcgaggta

SEQ ID NO: 592517 - DNA, 25 bp, Homo sapien
ccttgtctgatcagctgctcacatt

SEQ ID NO: 592518 - DNA, 25 bp, Homo sapien
gaagcctggaagtgcctcggcgcat

SEQ ID NO: 592519 - DNA, 25 bp, Homo sapien
tgaagcctggaagtgcctcggcgca

SEQ ID NO: 592520 - DNA, 25 bp, Homo sapien
agcctggaagtgcctcggcgcatgg

SEQ ID NO: 592521 - DNA, 25 bp, Homo sapien
gtgaagcctggaagtgcctcggcgc

SEQ ID NO: 592522 - DNA, 25 bp, Homo sapien
gacagaccttgtttataggccagaa

SEQ ID NO: 592523 - DNA, 25 bp, Homo sapien
gatttctcggatgcaacacccaaag

SEQ ID NO: 592524 - DNA, 25 bp, Homo sapien
gaaatgctgacatggtagacctgta

SEQ ID NO: 592525 - DNA, 25 bp, Homo sapien
atctcaatcaaggtgcccaacaggg

SEQ ID NO: 592526 - DNA, 25 bp, Homo sapien
ggagaaaaatgtcacagcaccgtgg

SEQ ID NO: 592527 - DNA, 25 bp, Homo sapien
ttatgtaagaaacacccatgtgccc

SEQ ID NO: 592528 - DNA, 25 bp, Homo sapien
tgtgcccatcaacatatctagtaag

SEQ ID NO: 592529 - DNA, 25 bp, Homo sapien
atatctagtaagaataatatcctgc

SEQ ID NO: 592530 - DNA, 25 bp, Homo sapien
gctttcggccttgcatcaacttgtt

SEQ ID NO: 592531 - DNA, 25 bp, Homo sapien
cacagaggttgcgatcagctttgcg

SEQ ID NO: 592532 - DNA, 25 bp, Homo sapien
tataatacataaagcgggctgggcg

SEQ ID NO: 592533 - DNA, 25 bp, Homo sapien
cagctttgcgcaggatctagttgtt

SEQ ID NO: 592534 - DNA, 25 bp, Homo sapien
agccagagcctttcggcgcgagcgc

SEQ ID NO: 592535 - DNA, 25 bp, Homo sapien
gagtggatggggatattgtcccaaa

SEQ ID NO: 592536 - DNA, 25 bp, Homo sapien
ctgaggccggccgcttcgtgcaggg

SEQ ID NO: 592537 - DNA, 25 bp, Homo sapien
gagagagacgcctcgcaaacccagc

SEQ ID NO: 592538 - DNA, 25 bp, Homo sapien
tgaactgccatcgaagcaacatgtt

SEQ ID NO: 592539 - DNA, 25 bp, Homo sapien
ggagagtaagtttcccagcacctga

SEQ ID NO: 592540 - DNA, 25 bp, Homo sapien
cacaagcgagggcttttatttcctg

SEQ ID NO: 592541 - DNA, 25 bp, Homo sapien
gcaacatgttacctgctggccgagt

SEQ ID NO: 592542 - DNA, 25 bp, Homo sapien
cctgagcagggcgtttgtagccaca

SEQ ID NO: 592543 - DNA, 25 bp, Homo sapien
gcagtgtggaaagtcagcccctact

SEQ ID NO: 592544 - DNA, 25 bp, Homo sapien
caagatgccattgctcctcaggagc

SEQ ID NO: 592545 - DNA, 25 bp, Homo sapien
tgtagggacagctttccaggcggct

SEQ ID NO: 592546 - DNA, 25 bp, Homo sapien
tctgccctttcagaacttattctct

SEQ ID NO: 592547 - DNA, 25 bp, Homo sapien
tgtgactgacgactgaaggactatt

SEQ ID NO: 592548 - DNA, 25 bp, Homo sapien
agtggcactgtcaaggcccctgcag

SEQ ID NO: 592549 - DNA, 25 bp, Homo sapien
aaagaaattctggttcttgtgactg

SEQ ID NO: 592550 - DNA, 25 bp, Homo sapien
ttctaattattctagaatagtttcc

SEQ ID NO: 592551 - DNA, 25 bp, Homo sapien
ggagtcagcattgccaacctctgtt

SEQ ID NO: 592552 - DNA, 25 bp, Homo sapien
tgtgaaccctggcatgtgaccttgg

SEQ ID NO: 592553 - DNA, 25 bp, Homo sapien
caggagcatggctgttcgctgactc

SEQ ID NO: 592554 - DNA, 25 bp, Homo sapien
catgggtcaggaagatcccgctgct

SEQ ID NO: 592555 - DNA, 25 bp, Homo sapien
caggaaccttggggaagaccagcat

SEQ ID NO: 592556 - DNA, 25 bp, Homo sapien
taaatgtgcccccatggcaaggagg

SEQ ID NO: 592557 - DNA, 25 bp, Homo sapien
ggcaggaaccttggggaagaccagc

SEQ ID NO: 592558 - DNA, 25 bp, Homo sapien
ccatccttaaatgtgcccccatggc

SEQ ID NO: 592559 - DNA, 25 bp, Homo sapien
tcagccctgtgtaaggttgggtgtg

SEQ ID NO: 592560 - DNA, 25 bp, Homo sapien
cagcacgctcaggtaatggccatct

SEQ ID NO: 592561 - DNA, 25 bp, Homo sapien
cgctcaggtaatggccatctgcaga

SEQ ID NO: 592562 - DNA, 25 bp, Homo sapien
ggccagcacgctcaggtaatggcca

SEQ ID NO: 592563 - DNA, 25 bp, Homo sapien
gcaggggtttcatgttctgtccact

SEQ ID NO: 592564 - DNA, 25 bp, Homo sapien
tttcatgttctgtccactctggcac

SEQ ID NO: 592565 - DNA, 25 bp, Homo sapien
caggggtttcatgttctgtccactc

SEQ ID NO: 592566 - DNA, 25 bp, Homo sapien
gggtttcatgttctgtccactctgg

SEQ ID NO: 592567 - DNA, 25 bp, Homo sapien
ggctccaccaagctagacgcctgat

SEQ ID NO: 592568 - DNA, 25 bp, Homo sapien
tgtacgttacggaagaggtgcctga

SEQ ID NO: 592569 - DNA, 25 bp, Homo sapien
cagggttaggtggacacaagttgat

SEQ ID NO: 592570 - DNA, 25 bp, Homo sapien
aggtgcctgagagccatgtctgaca

SEQ ID NO: 592571 - DNA, 25 bp, Homo sapien
tatccagaaagctactggaggcttc

SEQ ID NO: 592572 - DNA, 25 bp, Homo sapien
gaaaatgtcctgtaatcctgtgagt

SEQ ID NO: 592573 - DNA, 25 bp, Homo sapien
taagtctgagttcctggactgtgaa

SEQ ID NO: 592574 - DNA, 25 bp, Homo sapien
tgtgattatactacagccctgttga

SEQ ID NO: 592575 - DNA, 25 bp, Homo sapien
gatatttagccaccgatggccccag

SEQ ID NO: 592576 - DNA, 25 bp, Homo sapien
gactcctaggagctttgcatgtgac

SEQ ID NO: 592577 - DNA, 25 bp, Homo sapien
gatgccatcttagcactgggtcaca

SEQ ID NO: 592578 - DNA, 25 bp, Homo sapien
cagaaggtccaacaggaggagctcc

SEQ ID NO: 592579 - DNA, 25 bp, Homo sapien
ctgtttgccgccatcggagacctgc

SEQ ID NO: 592580 - DNA, 25 bp, Homo sapien
gatgctagaaggatccggcactgac

SEQ ID NO: 592581 - DNA, 25 bp, Homo sapien
gactattacacagactaaaggtggg

SEQ ID NO: 592582 - DNA, 25 bp, Homo sapien
aaaagtagaagcaagaggagggcca

SEQ ID NO: 592583 - DNA, 25 bp, Homo sapien
aacaatatgtgtgttgtgaggccca

SEQ ID NO: 592584 - DNA, 25 bp, Homo sapien
taattagatgccatgaaataggtgg

SEQ ID NO: 592585 - DNA, 25 bp, Homo sapien
tgaaataggtggcaaggccttaaca

SEQ ID NO: 592586 - DNA, 25 bp, Homo sapien
aggtggcaaggccttaacaatatgt

SEQ ID NO: 592587 - DNA, 25 bp, Homo sapien
taatctaagagtcatgcagcttgtg

SEQ ID NO: 592588 - DNA, 25 bp, Homo sapien
ggtggcatgcatccttgcgtaggtt

SEQ ID NO: 592589 - DNA, 25 bp, Homo sapien
tgcgtaggttccctgtaaacgtgtg

SEQ ID NO: 592590 - DNA, 25 bp, Homo sapien
tcagccatgtgcgagatctctgtag

SEQ ID NO: 592591 - DNA, 25 bp, Homo sapien
gactgtaccaaagtgctgttgctat

SEQ ID NO: 592592 - DNA, 25 bp, Homo sapien
tgtgattgtgcccttgactgtacca

SEQ ID NO: 592593 - DNA, 25 bp, Homo sapien
tgtagattgtacctatctgtgagcc

SEQ ID NO: 592594 - DNA, 25 bp, Homo sapien
gaattctctgcctcatgcaaatgcc

SEQ ID NO: 592595 - DNA, 25 bp, Homo sapien
cttctgtggatccataagaggaaca

SEQ ID NO: 592596 - DNA, 25 bp, Homo sapien
cacatggtgctcctttaccgtgaca

SEQ ID NO: 592597 - DNA, 25 bp, Homo sapien
tgtgcacagtgagccggtagcttcc

SEQ ID NO: 592598 - DNA, 25 bp, Homo sapien
gagataattgcaaggcacgtggcac

SEQ ID NO: 592599 - DNA, 25 bp, Homo sapien
gaggagacatggtagagttagcccc

SEQ ID NO: 592600 - DNA, 25 bp, Homo sapien
tcagactgtcggtgtggagctcgac

SEQ ID NO: 592601 - DNA, 25 bp, Homo sapien
gctttagagaattgtcgccgcagaa

SEQ ID NO: 592602 - DNA, 25 bp, Homo sapien
tagccccagtgttgacccaagaagg

SEQ ID NO: 592603 - DNA, 25 bp, Homo sapien
atctcacttttctcggcggcgcagg

SEQ ID NO: 592604 - DNA, 25 bp, Homo sapien
gacagatcgcgggaattccacccgc

SEQ ID NO: 592605 - DNA, 25 bp, Homo sapien
ggagtctcgcgggatctcacttttc

SEQ ID NO: 592606 - DNA, 25 bp, Homo sapien
gaatgagacagatcgcgggaattcc

SEQ ID NO: 592607 - DNA, 25 bp, Homo sapien
agccacagccactgagaagtcgccg

SEQ ID NO: 592608 - DNA, 25 bp, Homo sapien
gggaggtgatgacggtccctcgcgc

SEQ ID NO: 592609 - DNA, 25 bp, Homo sapien
ggaagaacaccacgcttcggaccaa

SEQ ID NO: 592610 - DNA, 25 bp, Homo sapien
tggcagcgcggacaacctctctcgg

SEQ ID NO: 592611 - DNA, 25 bp, Homo sapien
acccagtgatcccattattgggtgc

SEQ ID NO: 592612 - DNA, 25 bp, Homo sapien
cagtgatcccattattgggtgctat

SEQ ID NO: 592613 - DNA, 25 bp, Homo sapien
gatcccattattgggtgctatatac

SEQ ID NO: 592614 - DNA, 25 bp, Homo sapien
tgatcccattattgggtgctatata

SEQ ID NO: 592615 - DNA, 25 bp, Homo sapien
ggagaacttcccctaatataggaga

SEQ ID NO: 592616 - DNA, 25 bp, Homo sapien
catcagcatccgcacaacaatggtg

SEQ ID NO: 592617 - DNA, 25 bp, Homo sapien
ccttgaggccgttcagttgtaataa

SEQ ID NO: 592618 - DNA, 25 bp, Homo sapien
agacgacaggctcaacgctgggcat

SEQ ID NO: 592619 - DNA, 25 bp, Homo sapien
cagtgaaccaagatggtgccaacac

SEQ ID NO: 592620 - DNA, 25 bp, Homo sapien
gaaccaagatggtgccaacacactc

SEQ ID NO: 592621 - DNA, 25 bp, Homo sapien
gtgaaccaagatggtgccaacacac

SEQ ID NO: 592622 - DNA, 25 bp, Homo sapien
gtaatctcagctacccttgaggctg

SEQ ID NO: 592623 - DNA, 25 bp, Homo sapien
aggtggaggttctcagtgaggtgag

SEQ ID NO: 592624 - DNA, 25 bp, Homo sapien
gtggaggttctcagtgaggtgagat

SEQ ID NO: 592625 - DNA, 25 bp, Homo sapien
ggtggaggttctcagtgaggtgaga

SEQ ID NO: 592626 - DNA, 25 bp, Homo sapien
tggaggttctcagtgaggtgagatc

SEQ ID NO: 592627 - DNA, 25 bp, Homo sapien
agtcctagaataaaccgactggttg

SEQ ID NO: 592628 - DNA, 25 bp, Homo sapien
ctcccatagtttggcctatacccag

SEQ ID NO: 592629 - DNA, 25 bp, Homo sapien
ggctttaggcaattgagtccacaaa

SEQ ID NO: 592630 - DNA, 25 bp, Homo sapien
aagagggatgtttaggccgggcact

SEQ ID NO: 592631 - DNA, 25 bp, Homo sapien
acctaggatttagtgtgggctcttc

SEQ ID NO: 592632 - DNA, 25 bp, Homo sapien
taggcatgcctaatacatctatgta

SEQ ID NO: 592633 - DNA, 25 bp, Homo sapien
tttagctgacaactgtctagggttg

SEQ ID NO: 592634 - DNA, 25 bp, Homo sapien
tctagggttgtgaaacaggttatca

SEQ ID NO: 592635 - DNA, 25 bp, Homo sapien
ttagatgcatgtggttgcaggcaac

SEQ ID NO: 592636 - DNA, 25 bp, Homo sapien
tataaattgagacaactaaaagtta

SEQ ID NO: 592637 - DNA, 25 bp, Homo sapien
ttgtttctattatttgggatctaag

SEQ ID NO: 592638 - DNA, 25 bp, Homo sapien
gcatgtggttgcaggcaactgtaat

SEQ ID NO: 592639 - DNA, 25 bp, Homo sapien
gcttcttacattggtattaaactca

SEQ ID NO: 592640 - DNA, 25 bp, Homo sapien
tacccaggctattccaagtgattct

SEQ ID NO: 592641 - DNA, 25 bp, Homo sapien
aatatctttcagtttccgaaatgta

SEQ ID NO: 592642 - DNA, 25 bp, Homo sapien
tcagtttccgaaatgtatgctgaat

SEQ ID NO: 592643 - DNA, 25 bp, Homo sapien
caaacatcacatattcatatgtggg

SEQ ID NO: 592644 - DNA, 25 bp, Homo sapien
atctcatagaggtagaaagtaaaac

SEQ ID NO: 592645 - DNA, 25 bp, Homo sapien
tattctacaccaaaatggatggaac

SEQ ID NO: 592646 - DNA, 25 bp, Homo sapien
ttctacaccaaaatggatggaactg

SEQ ID NO: 592647 - DNA, 25 bp, Homo sapien
gctgttgatcagtatatctaggagt

SEQ ID NO: 592648 - DNA, 25 bp, Homo sapien
gcaccagatactctgagaccttctc

SEQ ID NO: 592649 - DNA, 25 bp, Homo sapien
ttctcacagtacctggtgaatgaat

SEQ ID NO: 592650 - DNA, 25 bp, Homo sapien
ccactacccacattggagctccggg

SEQ ID NO: 592651 - DNA, 25 bp, Homo sapien
gatgtgatgatgcaggcctttgaaa

SEQ ID NO: 592652 - DNA, 25 bp, Homo sapien
cacaggtaggtggttagctgcaaaa

SEQ ID NO: 592653 - DNA, 25 bp, Homo sapien
gatttcctgagaaaatgcctcaatg

SEQ ID NO: 592654 - DNA, 25 bp, Homo sapien
tggcaggagtaaagcatgttggctg

SEQ ID NO: 592655 - DNA, 25 bp, Homo sapien
tattggtctttgcagagaactccct

SEQ ID NO: 592656 - DNA, 25 bp, Homo sapien
agagcagggataccaaggcaggcct

SEQ ID NO: 592657 - DNA, 25 bp, Homo sapien
agctttgcgaatgggatcaggtgcc

SEQ ID NO: 592658 - DNA, 25 bp, Homo sapien
taagtcaagtcacgaagatagagct

SEQ ID NO: 592659 - DNA, 25 bp, Homo sapien
agaagcgtttttgtacagggagtgt

SEQ ID NO: 592660 - DNA, 25 bp, Homo sapien
ttatatctcaccatccatcagagga

SEQ ID NO: 592661 - DNA, 25 bp, Homo sapien
tgaggctgcataacttgttcgtgaa

SEQ ID NO: 592662 - DNA, 25 bp, Homo sapien
gttacaagctttagttgaggctgca

SEQ ID NO: 592663 - DNA, 25 bp, Homo sapien
gaagggaaatctcctcacacaccag

SEQ ID NO: 592664 - DNA, 25 bp, Homo sapien
cactggcggatacactcaaaggaga

SEQ ID NO: 592665 - DNA, 25 bp, Homo sapien
gagaagtctcaccagacaccactgg

SEQ ID NO: 592666 - DNA, 25 bp, Homo sapien
ccaggagtgtaagcgaggctatacc

SEQ ID NO: 592667 - DNA, 25 bp, Homo sapien
cctttgcgtgcaggcagtgtaagca

SEQ ID NO: 592668 - DNA, 25 bp, Homo sapien
cgggcgaggcttcatcctaaaatca

SEQ ID NO: 592669 - DNA, 25 bp, Homo sapien
tgcagggagtgtcaccagggcttta

SEQ ID NO: 592670 - DNA, 25 bp, Homo sapien
tgtgcagagcgtgggcaagacttca

SEQ ID NO: 592671 - DNA, 25 bp, Homo sapien
gcaacagcaactacaattttctgat

SEQ ID NO: 592672 - DNA, 25 bp, Homo sapien
tcttggacttgcacatcagaggcaa

SEQ ID NO: 592673 - DNA, 25 bp, Homo sapien
cctgcggcccaagaatcttggactt

SEQ ID NO: 592674 - DNA, 25 bp, Homo sapien
atatatgcagaacatgtcctgcggc

SEQ ID NO: 592675 - DNA, 25 bp, Homo sapien
cagtctcattgttggtctattctcc

SEQ ID NO: 592676 - DNA, 25 bp, Homo sapien
tcatagaagacttttcgttactgat

SEQ ID NO: 592677 - DNA, 25 bp, Homo sapien
cttttcgttactgattcagtctcat

SEQ ID NO: 592678 - DNA, 25 bp, Homo sapien
gaattaagcagtaaagcaatatggt

SEQ ID NO: 592679 - DNA, 25 bp, Homo sapien
gattgcatacttgggataaatctca

SEQ ID NO: 592680 - DNA, 25 bp, Homo sapien
cacctatggcttgactacaggcagg

SEQ ID NO: 592681 - DNA, 25 bp, Homo sapien
catagttctgactaggactccctga

SEQ ID NO: 592682 - DNA, 25 bp, Homo sapien
gactccctgaactatggtaataaga

SEQ ID NO: 592683 - DNA, 25 bp, Homo sapien
gattctaatgatactgctgtaaatg

SEQ ID NO: 592684 - DNA, 25 bp, Homo sapien
tgtacccataatcaactgctcttcg

SEQ ID NO: 592685 - DNA, 25 bp, Homo sapien
tacagttaaactatagtcacgctac

SEQ ID NO: 592686 - DNA, 25 bp, Homo sapien
cttctttatggttgactaacattcc

SEQ ID NO: 592687 - DNA, 25 bp, Homo sapien
taactgtcattatccgagtgatcag

SEQ ID NO: 592688 - DNA, 25 bp, Homo sapien
tgacaaagctggttcagtgcaggta

SEQ ID NO: 592689 - DNA, 25 bp, Homo sapien
taaatatctcccctttgtagatgcc

SEQ ID NO: 592690 - DNA, 25 bp, Homo sapien
tgtggatagtgccaaaataacacca

SEQ ID NO: 592691 - DNA, 25 bp, Homo sapien
ggactacatgtcctcaccaccatgc

SEQ ID NO: 592692 - DNA, 25 bp, Homo sapien
actacatgtcctcaccaccatgcct

SEQ ID NO: 592693 - DNA, 25 bp, Homo sapien
gcgcgatcttggctccttggaacct

SEQ ID NO: 592694 - DNA, 25 bp, Homo sapien
gcgatcttggctccttggaacctcc

SEQ ID NO: 592695 - DNA, 25 bp, Homo sapien
gaattgtgcaccctcttaagtccct

SEQ ID NO: 592696 - DNA, 25 bp, Homo sapien
tacctctagggtggacttgttctct

SEQ ID NO: 592697 - DNA, 25 bp, Homo sapien
gcagtactactgttgccagaggtca

SEQ ID NO: 592698 - DNA, 25 bp, Homo sapien
caccgcagtggttcatcaggactca

SEQ ID NO: 592699 - DNA, 25 bp, Homo sapien
gggtgtttaagcacatccagacatc

SEQ ID NO: 592700 - DNA, 25 bp, Homo sapien
tgtggccagtaatgctcaattgact

SEQ ID NO: 592701 - DNA, 25 bp, Homo sapien
tgaacccagtacacattattcagtt

SEQ ID NO: 592702 - DNA, 25 bp, Homo sapien
aatgaaatcattacacccaccactt

SEQ ID NO: 592703 - DNA, 25 bp, Homo sapien
tgtaacctagcagcaaacagttaaa

SEQ ID NO: 592704 - DNA, 25 bp, Homo sapien
gatactagtaacacacagtttagga

SEQ ID NO: 592705 - DNA, 25 bp, Homo sapien
ggaacttcagaaaataaggtcagta

SEQ ID NO: 592706 - DNA, 25 bp, Homo sapien
taggtaaagatagcacagatgggac

SEQ ID NO: 592707 - DNA, 25 bp, Homo sapien
tctttgccaagcatgatccagtgct

SEQ ID NO: 592708 - DNA, 25 bp, Homo sapien
ccccagggatctataggcaagttca

SEQ ID NO: 592709 - DNA, 25 bp, Homo sapien
tcttccctaaggtgtgagatcctca

SEQ ID NO: 592710 - DNA, 25 bp, Homo sapien
gatggtctgttgtatgtctccaccc

SEQ ID NO: 592711 - DNA, 25 bp, Homo sapien
ggcacgatgccactattcttaactt

SEQ ID NO: 592712 - DNA, 25 bp, Homo sapien
cagcttttccctgagagaggcacga

SEQ ID NO: 592713 - DNA, 25 bp, Homo sapien
ccagttctcagtctatggtgacagc

SEQ ID NO: 592714 - DNA, 25 bp, Homo sapien
cattttggtccactctgagagaaac

SEQ ID NO: 592715 - DNA, 25 bp, Homo sapien
aacttcccatttgcttgcttaggtg

SEQ ID NO: 592716 - DNA, 25 bp, Homo sapien
cagcggcctagcgagctgccacggg

SEQ ID NO: 592717 - DNA, 25 bp, Homo sapien
gggccagcggcctagcgagctgcca

SEQ ID NO: 592718 - DNA, 25 bp, Homo sapien
tggggacgggccagcggcctagcga

SEQ ID NO: 592719 - DNA, 25 bp, Homo sapien
ggacgggccagcggcctagcgagct

SEQ ID NO: 592720 - DNA, 25 bp, Homo sapien
ccaggtcctcttgtgccagggtcgc

SEQ ID NO: 592721 - DNA, 25 bp, Homo sapien
tccgttcccggttgcgtgtagtggc

SEQ ID NO: 592722 - DNA, 25 bp, Homo sapien
gatgcgtggtccaccatcggtgacc

SEQ ID NO: 592723 - DNA, 25 bp, Homo sapien
gcgcagagcgttccagatccctggg

SEQ ID NO: 592724 - DNA, 25 bp, Homo sapien
tatcatagaaatgggaaaatatgct

SEQ ID NO: 592725 - DNA, 25 bp, Homo sapien
ctatatcatagaaatgggaaaatat

SEQ ID NO: 592726 - DNA, 25 bp, Homo sapien
tatatcatagaaatgggaaaatatg

SEQ ID NO: 592727 - DNA, 25 bp, Homo sapien
atatcatagaaatgggaaaatatgc

SEQ ID NO: 592728 - DNA, 25 bp, Homo sapien
ctgaaagtccaatggcagattcaga

SEQ ID NO: 592729 - DNA, 25 bp, Homo sapien
tgaaagtccaatggcagattcagaa

SEQ ID NO: 592730 - DNA, 25 bp, Homo sapien
tgaggaccatcactacccgaatgaa

SEQ ID NO: 592731 - DNA, 25 bp, Homo sapien
ggctcatccagtcatgtggcttagg

SEQ ID NO: 592732 - DNA, 25 bp, Homo sapien
ggtatagatacataggcccctcgtc

SEQ ID NO: 592733 - DNA, 25 bp, Homo sapien
ggaggcaaaacatccactacagtga

SEQ ID NO: 592734 - DNA, 25 bp, Homo sapien
gagaacgtgagcagtatttgcggac

SEQ ID NO: 592735 - DNA, 25 bp, Homo sapien
gaagccacagtgaagaatattatgt

SEQ ID NO: 592736 - DNA, 25 bp, Homo sapien
accttaagtagattggtctgggtca

SEQ ID NO: 592737 - DNA, 25 bp, Homo sapien
aaggaaaacactccccacatgatgg

SEQ ID NO: 592738 - DNA, 25 bp, Homo sapien
cacctctgatgcttggacaaaaaga

SEQ ID NO: 592739 - DNA, 25 bp, Homo sapien
gtaacccttttctctggcgaggatc

SEQ ID NO: 592740 - DNA, 25 bp, Homo sapien
ggcaggatgatctgggtaacccttt

SEQ ID NO: 592741 - DNA, 25 bp, Homo sapien
gaaaggctggtactgtgaagatgct

SEQ ID NO: 592742 - DNA, 25 bp, Homo sapien
caatggaacgagagtggcatagaca

SEQ ID NO: 592743 - DNA, 25 bp, Homo sapien
cagagcggatttgtaccaatggaac

SEQ ID NO: 592744 - DNA, 25 bp, Homo sapien
caaggttctagatgctcaggatgac

SEQ ID NO: 592745 - DNA, 25 bp, Homo sapien
caggatgactgggttatacgtccat

SEQ ID NO: 592746 - DNA, 25 bp, Homo sapien
tgattcaggaatcctacctatggtt

SEQ ID NO: 592747 - DNA, 25 bp, Homo sapien
cagcatgattattcatcaaaaaatt

SEQ ID NO: 592748 - DNA, 25 bp, Homo sapien
aataaaactatcatatgattcagga

SEQ ID NO: 592749 - DNA, 25 bp, Homo sapien
gaaccttgtacactgtcactgggaa

SEQ ID NO: 592750 - DNA, 25 bp, Homo sapien
gtgatatgttaacagaatattaatg

SEQ ID NO: 592751 - DNA, 25 bp, Homo sapien
cagcaatgttgcaggatactatatc

SEQ ID NO: 592752 - DNA, 25 bp, Homo sapien
cacttacaacaaaatatatgggaaa

SEQ ID NO: 592753 - DNA, 25 bp, Homo sapien
gtcccgtgtgctcatcattacagga

SEQ ID NO: 592754 - DNA, 25 bp, Homo sapien
ctgatacatgtcataggtgtcattg

SEQ ID NO: 592755 - DNA, 25 bp, Homo sapien
tgtctgttgttgtctgtattgttac

SEQ ID NO: 592756 - DNA, 25 bp, Homo sapien
tgttgtctgtattgttactgctata

SEQ ID NO: 592757 - DNA, 25 bp, Homo sapien
catgtcataggtgtcattgtctgtt

SEQ ID NO: 592758 - DNA, 25 bp, Homo sapien
acatccagcccacagcctggaaaaa

SEQ ID NO: 592759 - DNA, 25 bp, Homo sapien
gcccacagcctggaaaaagctccat

SEQ ID NO: 592760 - DNA, 25 bp, Homo sapien
cagcccacagcctggaaaaagctcc

SEQ ID NO: 592761 - DNA, 25 bp, Homo sapien
atccagcccacagcctggaaaaagc

SEQ ID NO: 592762 - DNA, 25 bp, Homo sapien
tccagggtgaccaacttggaggtcc

SEQ ID NO: 592763 - DNA, 25 bp, Homo sapien
tcctctccagggtgaccaacttgga

SEQ ID NO: 592764 - DNA, 25 bp, Homo sapien
tgctgctgccccagatttgctgggt

SEQ ID NO: 592765 - DNA, 25 bp, Homo sapien
tgggttcctctccagggtgaccaac

SEQ ID NO: 592766 - DNA, 25 bp, Homo sapien
caggcactgtggtcacaggagggaa

SEQ ID NO: 592767 - DNA, 25 bp, Homo sapien
ggtctctctaatggaggcatttcag

SEQ ID NO: 592768 - DNA, 25 bp, Homo sapien
gaaaggtcccctgcttgcttgatgt

SEQ ID NO: 592769 - DNA, 25 bp, Homo sapien
agggacggtccctgtcctctgactc

SEQ ID NO: 592770 - DNA, 25 bp, Homo sapien
ctcagtgggccggacaggttgtcac

SEQ ID NO: 592771 - DNA, 25 bp, Homo sapien
ttcttagccttgagggtgttgctgg

SEQ ID NO: 592772 - DNA, 25 bp, Homo sapien
gtagctatgacgctgcaggagccac

SEQ ID NO: 592773 - DNA, 25 bp, Homo sapien
cagggatccccatgcaacatgctct

SEQ ID NO: 592774 - DNA, 25 bp, Homo sapien
tggtacctcaagttccagagcagtg

SEQ ID NO: 592775 - DNA, 25 bp, Homo sapien
tgaggctgccccaatcacagtgcta

SEQ ID NO: 592776 - DNA, 25 bp, Homo sapien
aaaacactaacagagcagtagtaca

SEQ ID NO: 592777 - DNA, 25 bp, Homo sapien
tcacagtggagttagttggaagtcc

SEQ ID NO: 592778 - DNA, 25 bp, Homo sapien
ggtcaggcctctcacagggacgccc

SEQ ID NO: 592779 - DNA, 25 bp, Homo sapien
ccagccgctgtaataaagtcacatg

SEQ ID NO: 592780 - DNA, 25 bp, Homo sapien
tcggactctccgtgctgccacgaat

SEQ ID NO: 592781 - DNA, 25 bp, Homo sapien
aggagcaccccggtctggctgcgcc

SEQ ID NO: 592782 - DNA, 25 bp, Homo sapien
agggttgccatgataatgttgatcc

SEQ ID NO: 592783 - DNA, 25 bp, Homo sapien
tgcaggccggcaaggaccccagaga

SEQ ID NO: 592784 - DNA, 25 bp, Homo sapien
gacactgtgtctcctcgaagcttcc

SEQ ID NO: 592785 - DNA, 25 bp, Homo sapien
tgattttctgcaggccggcaaggac

SEQ ID NO: 592786 - DNA, 25 bp, Homo sapien
ggtgaagcattttgatcatctccac

SEQ ID NO: 592787 - DNA, 25 bp, Homo sapien
tctattaagtcatacatctgatgag

SEQ ID NO: 592788 - DNA, 25 bp, Homo sapien
catacatctgatgaggaactaatgt

SEQ ID NO: 592789 - DNA, 25 bp, Homo sapien
agtcaatgggtcttagatacaacac

SEQ ID NO: 592790 - DNA, 25 bp, Homo sapien
gatacaacaccaaatgcaagagtga

SEQ ID NO: 592791 - DNA, 25 bp, Homo sapien
agattatacccctggacaccatgat

SEQ ID NO: 592792 - DNA, 25 bp, Homo sapien
tatacccctggacaccatgatgctg

SEQ ID NO: 592793 - DNA, 25 bp, Homo sapien
ctttgggtagcgctggtacatgctc

SEQ ID NO: 592794 - DNA, 25 bp, Homo sapien
ttgggtagcgctggtacatgctcca

SEQ ID NO: 592795 - DNA, 25 bp, Homo sapien
cacagggtgggatgacaagtttgca

SEQ ID NO: 592796 - DNA, 25 bp, Homo sapien
caagtttgcatctggcatggctggg

SEQ ID NO: 592797 - DNA, 25 bp, Homo sapien
gcataggaagcccacacacagggtg

SEQ ID NO: 592798 - DNA, 25 bp, Homo sapien
cacctaaggcctggagttaatctgg

SEQ ID NO: 592799 - DNA, 25 bp, Homo sapien
gtcaacttggaagctgatatccacc

SEQ ID NO: 592800 - DNA, 25 bp, Homo sapien
tggccaccagggatctatgtactca

SEQ ID NO: 592801 - DNA, 25 bp, Homo sapien
ggcctagtgtccacctgaagactga

SEQ ID NO: 592802 - DNA, 25 bp, Homo sapien
gagatgcatccatccgaaacctagg

SEQ ID NO: 592803 - DNA, 25 bp, Homo sapien
gactggtgtctacatagggcctggt

SEQ ID NO: 592804 - DNA, 25 bp, Homo sapien
ctggtgcctgatgtccaacttggga

SEQ ID NO: 592805 - DNA, 25 bp, Homo sapien
ggtgtccacctaggaacctgatgta

SEQ ID NO: 592806 - DNA, 25 bp, Homo sapien
caagtagacaacatggccccaggtt

SEQ ID NO: 592807 - DNA, 25 bp, Homo sapien
tccgtctgggccctaggtgtcaact

SEQ ID NO: 592808 - DNA, 25 bp, Homo sapien
ggcctggtgctggtgaagtggcggc

SEQ ID NO: 592809 - DNA, 25 bp, Homo sapien
taggcctggtgctggtgaagtggcg

SEQ ID NO: 592810 - DNA, 25 bp, Homo sapien
cgcaggtaggcctggtgctggtgaa

SEQ ID NO: 592811 - DNA, 25 bp, Homo sapien
aggtaggcctggtgctggtgaagtg

SEQ ID NO: 592812 - DNA, 25 bp, Homo sapien
catggtggccgcgatggaaggtgac

SEQ ID NO: 592813 - DNA, 25 bp, Homo sapien
gacggggttcgcagcgccaggggac

SEQ ID NO: 592814 - DNA, 25 bp, Homo sapien
tggtggccgcgatggaaggtgacgg

SEQ ID NO: 592815 - DNA, 25 bp, Homo sapien
gatggaaggtgacggggttcgcagc

SEQ ID NO: 592816 - DNA, 25 bp, Homo sapien
gcaagcggctgtgagtgatgcctcc

SEQ ID NO: 592817 - DNA, 25 bp, Homo sapien
tgtcgcaagcggctgtgagtgatgc

SEQ ID NO: 592818 - DNA, 25 bp, Homo sapien
cccggtgtcgcaagcggctgtgagt

SEQ ID NO: 592819 - DNA, 25 bp, Homo sapien
tcgcaagcggctgtgagtgatgcct

SEQ ID NO: 592820 - DNA, 25 bp, Homo sapien
ggtgtggcagaagagtgtccacaaa

SEQ ID NO: 592821 - DNA, 25 bp, Homo sapien
tgtccacaaacttcggaaggtatcc

SEQ ID NO: 592822 - DNA, 25 bp, Homo sapien
gcagctgatggtgaaacttttggtg

SEQ ID NO: 592823 - DNA, 25 bp, Homo sapien
gcctcagtcggcatcgcagctgatg

SEQ ID NO: 592824 - DNA, 25 bp, Homo sapien
acttccaggctggacgagttgggac

SEQ ID NO: 592825 - DNA, 25 bp, Homo sapien
ttctcttgggacacggttatttatg

SEQ ID NO: 592826 - DNA, 25 bp, Homo sapien
cgagttgggactcagttcctgcagt

SEQ ID NO: 592827 - DNA, 25 bp, Homo sapien
cacggttatttatggagctcctgaa

SEQ ID NO: 592828 - DNA, 25 bp, Homo sapien
ggctctatacttcctggaaactgcc

SEQ ID NO: 592829 - DNA, 25 bp, Homo sapien
ctggctctatacttcctggaaactg

SEQ ID NO: 592830 - DNA, 25 bp, Homo sapien
cagctggctctatacttcctggaaa

SEQ ID NO: 592831 - DNA, 25 bp, Homo sapien
agctggctctatacttcctggaaac

SEQ ID NO: 592832 - DNA, 25 bp, Homo sapien
ccctatcaaatggagatatgctggg

SEQ ID NO: 592833 - DNA, 25 bp, Homo sapien
tcctccctatcaaatggagatatgc

SEQ ID NO: 592834 - DNA, 25 bp, Homo sapien
tgaggttcctccctatcaaatggag

SEQ ID NO: 592835 - DNA, 25 bp, Homo sapien
ggcctgaggttcctccctatcaaat

SEQ ID NO: 592836 - DNA, 25 bp, Homo sapien
cagcccatagtccaagtctttttct

SEQ ID NO: 592837 - DNA, 25 bp, Homo sapien
tccagcagcccatagtccaagtctt

SEQ ID NO: 592838 - DNA, 25 bp, Homo sapien
gggagggggtccttgaggccatcca

SEQ ID NO: 592839 - DNA, 25 bp, Homo sapien
ttctccacacctgtatccaaagctt

SEQ ID NO: 592840 - DNA, 25 bp, Homo sapien
gccacaaagcggtttctcgcagggc

SEQ ID NO: 592841 - DNA, 25 bp, Homo sapien
ttgtcaatctttttcgccgccgcgg

SEQ ID NO: 592842 - DNA, 25 bp, Homo sapien
cagggcggcctgtctttggtgaccc

SEQ ID NO: 592843 - DNA, 25 bp, Homo sapien
gcgtgtgtgtctttgccgaatgtgc

SEQ ID NO: 592844 - DNA, 25 bp, Homo sapien
gacatggcagatcagtaaggaaaga

SEQ ID NO: 592845 - DNA, 25 bp, Homo sapien
tcttcgatacgtgatgtaggtgaca

SEQ ID NO: 592846 - DNA, 25 bp, Homo sapien
gaatagagagctcccaagcaaatct

SEQ ID NO: 592847 - DNA, 25 bp, Homo sapien
gaggaccaaagacttacatgtcaga

SEQ ID NO: 592848 - DNA, 25 bp, Homo sapien
tcatcatgctatgtgttaaaacaag

SEQ ID NO: 592849 - DNA, 25 bp, Homo sapien
tctatttcctttagactagtgacca

SEQ ID NO: 592850 - DNA, 25 bp, Homo sapien
tgttatctacgtgtgttcatcatgc

SEQ ID NO: 592851 - DNA, 25 bp, Homo sapien
tagtgaccatgagtttgactgacaa

SEQ ID NO: 592852 - DNA, 25 bp, Homo sapien
actggccctttactccagtgcctgg

SEQ ID NO: 592853 - DNA, 25 bp, Homo sapien
ctggccctttactccagtgcctgga

SEQ ID NO: 592854 - DNA, 25 bp, Homo sapien
tatcaggcactggagaacctcccac

SEQ ID NO: 592855 - DNA, 25 bp, Homo sapien
gcactggagaacctcccacctggtc

SEQ ID NO: 592856 - DNA, 25 bp, Homo sapien
agtgccgtttcctgcgctttcttgc

SEQ ID NO: 592857 - DNA, 25 bp, Homo sapien
ttgtatcaggcactggagaacctcc

SEQ ID NO: 592858 - DNA, 25 bp, Homo sapien
cagcaccataaaggtattggttgag

SEQ ID NO: 592859 - DNA, 25 bp, Homo sapien
gcagcaccataaaggtattggttga

SEQ ID NO: 592860 - DNA, 25 bp, Homo sapien
caccataaaggtattggttgaggaa

SEQ ID NO: 592861 - DNA, 25 bp, Homo sapien
gggaggcagcaccataaaggtattg

SEQ ID NO: 592862 - DNA, 25 bp, Homo sapien
ggaaggcactgctgtttagaaccca

SEQ ID NO: 592863 - DNA, 25 bp, Homo sapien
cagggtcagggcatactgcagcctt

SEQ ID NO: 592864 - DNA, 25 bp, Homo sapien
tatctggagtataggcatatggcac

SEQ ID NO: 592865 - DNA, 25 bp, Homo sapien
cctccaaaagtgcagtggcagggtc

SEQ ID NO: 592866 - DNA, 25 bp, Homo sapien
ggcctccaaaagtgcagtggcaggg

SEQ ID NO: 592867 - DNA, 25 bp, Homo sapien
ccctatcaaatggagatatgctggg

SEQ ID NO: 592868 - DNA, 25 bp, Homo sapien
ggcctgaggttcctccctatcaaat

SEQ ID NO: 592869 - DNA, 25 bp, Homo sapien
tcctccctatcaaatggagatatgc

SEQ ID NO: 592870 - DNA, 25 bp, Homo sapien
tgaggttcctccctatcaaatggag

SEQ ID NO: 592871 - DNA, 25 bp, Homo sapien
cagcccatagtccaagtctttttct

SEQ ID NO: 592872 - DNA, 25 bp, Homo sapien
tccagcagcccatagtccaagtctt

SEQ ID NO: 592873 - DNA, 25 bp, Homo sapien
ttctccacacctgtatccaaagctt

SEQ ID NO: 592874 - DNA, 25 bp, Homo sapien
tccttgggcttctccacacctgtat

SEQ ID NO: 592875 - DNA, 25 bp, Homo sapien
cactcgctttccagatagggcccat

SEQ ID NO: 592876 - DNA, 25 bp, Homo sapien
aaggtccctgtagttgtggttcaca

SEQ ID NO: 592877 - DNA, 25 bp, Homo sapien
gtccctgtagttgtggttcacagga

SEQ ID NO: 592878 - DNA, 25 bp, Homo sapien
tggtggtgggcactcgctttccaga

SEQ ID NO: 592879 - DNA, 25 bp, Homo sapien
agttgctccctactgtgtagatgag

SEQ ID NO: 592880 - DNA, 25 bp, Homo sapien
caggacagagttgctccctactgtg

SEQ ID NO: 592881 - DNA, 25 bp, Homo sapien
cagagttgctccctactgtgtagat

SEQ ID NO: 592882 - DNA, 25 bp, Homo sapien
gacagagttgctccctactgtgtag

SEQ ID NO: 592883 - DNA, 25 bp, Homo sapien
ccgcaggagagcagcggacccacgt

SEQ ID NO: 592884 - DNA, 25 bp, Homo sapien
gaaatgaagccacaccatgatacag

SEQ ID NO: 592885 - DNA, 25 bp, Homo sapien
caggagctctttgtcccgcaggaga

SEQ ID NO: 592886 - DNA, 25 bp, Homo sapien
gatgcttgtatcttttcacggctct

SEQ ID NO: 592887 - DNA, 25 bp, Homo sapien
gaagccatagcacgatacagtctgc

SEQ ID NO: 592888 - DNA, 25 bp, Homo sapien
gcttgattgggcagatctcgtgacc

SEQ ID NO: 592889 - DNA, 25 bp, Homo sapien
tgctcccataagtgtctcagacagg

SEQ ID NO: 592890 - DNA, 25 bp, Homo sapien
tctcgtgaccgtggagctctttgct

SEQ ID NO: 592891 - DNA, 25 bp, Homo sapien
ccatggaggtggcacggtgctatac

SEQ ID NO: 592892 - DNA, 25 bp, Homo sapien
gtgctatacgctgcctgggctccgg

SEQ ID NO: 592893 - DNA, 25 bp, Homo sapien
accacgctacggtctgcaagaggaa

SEQ ID NO: 592894 - DNA, 25 bp, Homo sapien
ctctctcctaggaccaagatgaaca

SEQ ID NO: 592895 - DNA, 25 bp, Homo sapien
tgtacccttgcacggctcttctctg

SEQ ID NO: 592896 - DNA, 25 bp, Homo sapien
ggttgtacccttgcacggctcttct

SEQ ID NO: 592897 - DNA, 25 bp, Homo sapien
gatggttgtacccttgcacggctct

SEQ ID NO: 592898 - DNA, 25 bp, Homo sapien
gaagatggttgtacccttgcacggc

SEQ ID NO: 592899 - DNA, 25 bp, Homo sapien
aagacacagtgcacaagataccatc

SEQ ID NO: 592900 - DNA, 25 bp, Homo sapien
cttacacaaggactggatggagtgg

SEQ ID NO: 592901 - DNA, 25 bp, Homo sapien
tcttggacttctgccctgtggaaat

SEQ ID NO: 592902 - DNA, 25 bp, Homo sapien
tcacgaaagagtttaggtccttaca

SEQ ID NO: 592903 - DNA, 25 bp, Homo sapien
aaatccaggtcaagctagttacttc

SEQ ID NO: 592904 - DNA, 25 bp, Homo sapien
tccctgaacacatgggaatcctgag

SEQ ID NO: 592905 - DNA, 25 bp, Homo sapien
caaatatccgctgtccaaagtctca

SEQ ID NO: 592906 - DNA, 25 bp, Homo sapien
ggtacagataattgagtaaacacag

SEQ ID NO: 592907 - DNA, 25 bp, Homo sapien
agcaagagagtgtcatcgattttta

SEQ ID NO: 592908 - DNA, 25 bp, Homo sapien
gagtgtcatcgatttttatatcaag

SEQ ID NO: 592909 - DNA, 25 bp, Homo sapien
agaaggaacaggtagcctgtttttg

SEQ ID NO: 592910 - DNA, 25 bp, Homo sapien
tcaaggactccatgataaagagaag

SEQ ID NO: 592911 - DNA, 25 bp, Homo sapien
ggacagtcctggataactttccaga

SEQ ID NO: 592912 - DNA, 25 bp, Homo sapien
cagtcctggataactttccagagcc

SEQ ID NO: 592913 - DNA, 25 bp, Homo sapien
gtcctggataactttccagagcctc

SEQ ID NO: 592914 - DNA, 25 bp, Homo sapien
gtggacagtcctggataactttcca

SEQ ID NO: 592915 - DNA, 25 bp, Homo sapien
caaccagtgtgggacaggtgggcaa

SEQ ID NO: 592916 - DNA, 25 bp, Homo sapien
accagtgtgggacaggtgggcaaat

SEQ ID NO: 592917 - DNA, 25 bp, Homo sapien
cagtgtgggacaggtgggcaaatgc

SEQ ID NO: 592918 - DNA, 25 bp, Homo sapien
tcaaccagtgtgggacaggtgggca

SEQ ID NO: 592919 - DNA, 25 bp, Homo sapien
ggtcaggagccaactcatgtattag

SEQ ID NO: 592920 - DNA, 25 bp, Homo sapien
tattagacatgtaaatcttgtgaaa

SEQ ID NO: 592921 - DNA, 25 bp, Homo sapien
tgttgtacaattgaatggaacccac

SEQ ID NO: 592922 - DNA, 25 bp, Homo sapien
tcttctagcattacatcaaatttga

SEQ ID NO: 592923 - DNA, 25 bp, Homo sapien
ctgagagtcgtatgttatgatttca

SEQ ID NO: 592924 - DNA, 25 bp, Homo sapien
gttttctgagagtcgtatgttatga

SEQ ID NO: 592925 - DNA, 25 bp, Homo sapien
gagtcgtatgttatgatttcattag

SEQ ID NO: 592926 - DNA, 25 bp, Homo sapien
ctgttttctgagagtcgtatgttat

SEQ ID NO: 592927 - DNA, 25 bp, Homo sapien
caaatgagtctgtgatgaatgttga

SEQ ID NO: 592928 - DNA, 25 bp, Homo sapien
tctgtgatgaatgttgatggtgact

SEQ ID NO: 592929 - DNA, 25 bp, Homo sapien
ttgatggtgactggtaatttacctg

SEQ ID NO: 592930 - DNA, 25 bp, Homo sapien
tgatggtgactggtaatttacctga

SEQ ID NO: 592931 - DNA, 25 bp, Homo sapien
ttgaacactcagtagtgtaagagtg

SEQ ID NO: 592932 - DNA, 25 bp, Homo sapien
gtttgaacactcagtagtgtaagag

SEQ ID NO: 592933 - DNA, 25 bp, Homo sapien
gaacactcagtagtgtaagagtggt

SEQ ID NO: 592934 - DNA, 25 bp, Homo sapien
tgaacactcagtagtgtaagagtgg

SEQ ID NO: 592935 - DNA, 25 bp, Homo sapien
agagatcaagggacaaaagtaggtc

SEQ ID NO: 592936 - DNA, 25 bp, Homo sapien
gagagatcaagggacaaaagtaggt

SEQ ID NO: 592937 - DNA, 25 bp, Homo sapien
actgtaaataagaggtccaagattc

SEQ ID NO: 592938 - DNA, 25 bp, Homo sapien
cactgtaaataagaggtccaagatt

SEQ ID NO: 592939 - DNA, 25 bp, Homo sapien
gcaatgcttggtcacatgtatccat

SEQ ID NO: 592940 - DNA, 25 bp, Homo sapien
ttaacttgcaatgcttggtcacatg

SEQ ID NO: 592941 - DNA, 25 bp, Homo sapien
catttcggagtgcttgaggccttta

SEQ ID NO: 592942 - DNA, 25 bp, Homo sapien
cccattgaggcctgtagtgaaaagt

SEQ ID NO: 592943 - DNA, 25 bp, Homo sapien
tttcagagaaaatcgatgcctacgg

SEQ ID NO: 592944 - DNA, 25 bp, Homo sapien
ggcaacaattcctagtccactgagg

SEQ ID NO: 592945 - DNA, 25 bp, Homo sapien
ttggcatccagagacgttcctgtcg

SEQ ID NO: 592946 - DNA, 25 bp, Homo sapien
tcggagtcccgacgcccaagtactg

SEQ ID NO: 592947 - DNA, 25 bp, Homo sapien
tgtgatgggagaagcggctcgcgcc

SEQ ID NO: 592948 - DNA, 25 bp, Homo sapien
cttcgtcctggtaggccctttgtga

SEQ ID NO: 592949 - DNA, 25 bp, Homo sapien
taaacaatggcgactgcacagtggc

SEQ ID NO: 592950 - DNA, 25 bp, Homo sapien
gatacgcatttgctgggccgactcg

SEQ ID NO: 592951 - DNA, 25 bp, Homo sapien
caatgatcacatgggcctcaaggtg

SEQ ID NO: 592952 - DNA, 25 bp, Homo sapien
tattaaaacccttgcgagtcaggct

SEQ ID NO: 592953 - DNA, 25 bp, Homo sapien
tcaggccctctcagggtctagagag

SEQ ID NO: 592954 - DNA, 25 bp, Homo sapien
tggcaactaacatgcctcctcaggc

SEQ ID NO: 592955 - DNA, 25 bp, Homo sapien
caagagcctcagattgaaatgttgc

SEQ ID NO: 592956 - DNA, 25 bp, Homo sapien
ccagtaggcaaagtaaggtgccaga

SEQ ID NO: 592957 - DNA, 25 bp, Homo sapien
cagctactctttggtattacctgac

SEQ ID NO: 592958 - DNA, 25 bp, Homo sapien
tagatgctctggtacggtcagcgtc

SEQ ID NO: 592959 - DNA, 25 bp, Homo sapien
tattgctcaataggagtgattgtga

SEQ ID NO: 592960 - DNA, 25 bp, Homo sapien
gacatctcattaatgcatctttgaa

SEQ ID NO: 592961 - DNA, 25 bp, Homo sapien
cagcctggccaagttactccggact

SEQ ID NO: 592962 - DNA, 25 bp, Homo sapien
aaggcgcggcagcagctaattgggc

SEQ ID NO: 592963 - DNA, 25 bp, Homo sapien
tcagctttctccagttccgctcggg

SEQ ID NO: 592964 - DNA, 25 bp, Homo sapien
tggccaagttactccggactccaag

SEQ ID NO: 592965 - DNA, 25 bp, Homo sapien
ggtcccttatcagtgcagctgagga

SEQ ID NO: 592966 - DNA, 25 bp, Homo sapien
aaaggcatttctatgttgggcctcg

SEQ ID NO: 592967 - DNA, 25 bp, Homo sapien
tgaggaatgtctttaggacaacccc

SEQ ID NO: 592968 - DNA, 25 bp, Homo sapien
aaagcgactatttcctggaagcccg

SEQ ID NO: 592969 - DNA, 25 bp, Homo sapien
tgtccagaaaacaaagtggccgccg

SEQ ID NO: 592970 - DNA, 25 bp, Homo sapien
gattcatagaggctcggctcacagt

SEQ ID NO: 592971 - DNA, 25 bp, Homo sapien
tggagatagcacgacttcgcttggc

SEQ ID NO: 592972 - DNA, 25 bp, Homo sapien
aattttggcccaagaccaatcaggg

SEQ ID NO: 592973 - DNA, 25 bp, Homo sapien
gacaaaagttacaagggcatctgcc

SEQ ID NO: 592974 - DNA, 25 bp, Homo sapien
cagtgaaaggctactctaaagaccc

SEQ ID NO: 592975 - DNA, 25 bp, Homo sapien
tcatttagacatgtcaggaccgtgg

SEQ ID NO: 592976 - DNA, 25 bp, Homo sapien
aaacaggtcagagccattggagcca

SEQ ID NO: 592977 - DNA, 25 bp, Homo sapien
cagaaagggacattcccagtattcc

SEQ ID NO: 592978 - DNA, 25 bp, Homo sapien
acagaaagggacattcccagtattc

SEQ ID NO: 592979 - DNA, 25 bp, Homo sapien
agaaagggacattcccagtattcca

SEQ ID NO: 592980 - DNA, 25 bp, Homo sapien
aatgtagtgtgcagaccggctaggc

SEQ ID NO: 592981 - DNA, 25 bp, Homo sapien
gcagaccggctaggctgagagtggg

SEQ ID NO: 592982 - DNA, 25 bp, Homo sapien
agagaatgtagtgtgcagaccggct

SEQ ID NO: 592983 - DNA, 25 bp, Homo sapien
atggagagaatgtagtgtgcagacc

SEQ ID NO: 592984 - DNA, 25 bp, Homo sapien
agagaagtcgatagacagatcctgg

SEQ ID NO: 592985 - DNA, 25 bp, Homo sapien
ctataagtccttctgagcagtgtcc

SEQ ID NO: 592986 - DNA, 25 bp, Homo sapien
ctcctgagagaagtcgatagacaga

SEQ ID NO: 592987 - DNA, 25 bp, Homo sapien
gacagatcctggaacatgcccaacc

SEQ ID NO: 592988 - DNA, 25 bp, Homo sapien
gaccaggctgctatagttctccatc

SEQ ID NO: 592989 - DNA, 25 bp, Homo sapien
gctgctatagttctccatcattaca

SEQ ID NO: 592990 - DNA, 25 bp, Homo sapien
caggctgctatagttctccatcatt

SEQ ID NO: 592991 - DNA, 25 bp, Homo sapien
ctagtgagaccaggctgctatagtt

SEQ ID NO: 592992 - DNA, 25 bp, Homo sapien
aaggtgtaaaggtctgaagcatgga

SEQ ID NO: 592993 - DNA, 25 bp, Homo sapien
gaagtaagacatactcctgctgttc

SEQ ID NO: 592994 - DNA, 25 bp, Homo sapien
cccagacaagtgaaagctacagcca

SEQ ID NO: 592995 - DNA, 25 bp, Homo sapien
caaagttagtcccttagtactcacg

SEQ ID NO: 592996 - DNA, 25 bp, Homo sapien
cgtcccttgaaaccatgcaggactc

SEQ ID NO: 592997 - DNA, 25 bp, Homo sapien
accatcctcctggtacgtcccttga

SEQ ID NO: 592998 - DNA, 25 bp, Homo sapien
cacatcaggctttgggatagagaga

SEQ ID NO: 592999 - DNA, 25 bp, Homo sapien
cctggtacgtcccttgaaaccatgc

SEQ ID NO: 593000 - DNA, 25 bp, Homo sapien
ttcaacccgcgggtgaaggttgcag

SEQ ID NO: 593001 - DNA, 25 bp, Homo sapien
aaagaaattatgacaagagggtagc

SEQ ID NO: 593002 - DNA, 25 bp, Homo sapien
gggtagcacagactgtccaagaggt

SEQ ID NO: 593003 - DNA, 25 bp, Homo sapien
gaagtagctccaagatagaggaaac

SEQ ID NO: 593004 - DNA, 25 bp, Homo sapien
gaatgaatatccattgatgcatgaa

SEQ ID NO: 593005 - DNA, 25 bp, Homo sapien
tgtgcttgtagggaggtcatcccca

SEQ ID NO: 593006 - DNA, 25 bp, Homo sapien
gaaagcgcaggaaacggcactaaag

SEQ ID NO: 593007 - DNA, 25 bp, Homo sapien
ccaagcgtttcttattggcttccag

SEQ ID NO: 593008 - DNA, 25 bp, Homo sapien
gatgacaagactggctgtgcacaag

SEQ ID NO: 593009 - DNA, 25 bp, Homo sapien
ggagccgggcatggaccaggtggga

SEQ ID NO: 593010 - DNA, 25 bp, Homo sapien
ggtgctcaccgggagccgggcatgg

SEQ ID NO: 593011 - DNA, 25 bp, Homo sapien
cacaaggttgggtctcggtgctcac

SEQ ID NO: 593012 - DNA, 25 bp, Homo sapien
agcaccctcggccggcctattttat

SEQ ID NO: 593013 - DNA, 25 bp, Homo sapien
tgtgatggagtttcaatcctcttgc

SEQ ID NO: 593014 - DNA, 25 bp, Homo sapien
ttgtgtctccgcctcacaaatagct

SEQ ID NO: 593015 - DNA, 25 bp, Homo sapien
agtttcaatcctcttgcccaagctg

SEQ ID NO: 593016 - DNA, 25 bp, Homo sapien
caggccgaggtgaatgtgtacgaac

SEQ ID NO: 593017 - DNA, 25 bp, Homo sapien
tatatatcttaagctccatgtggga

SEQ ID NO: 593018 - DNA, 25 bp, Homo sapien
taactcgggtctagcgtctggaaag

SEQ ID NO: 593019 - DNA, 25 bp, Homo sapien
ccatgtgggattgcacctacaagca

SEQ ID NO: 593020 - DNA, 25 bp, Homo sapien
gttcaatactaagatacagacagac

SEQ ID NO: 593021 - DNA, 25 bp, Homo sapien
gataaccacatagaagaggactttg

SEQ ID NO: 593022 - DNA, 25 bp, Homo sapien
gggcagctccatcgcaattgttcaa

SEQ ID NO: 593023 - DNA, 25 bp, Homo sapien
gaaaaacagtgtaagaaggccaaca

SEQ ID NO: 593024 - DNA, 25 bp, Homo sapien
atcctgggccaccacaaatctactt

SEQ ID NO: 593025 - DNA, 25 bp, Homo sapien
gggggtacttactgattgatttgga

SEQ ID NO: 593026 - DNA, 25 bp, Homo sapien
actcccctaatcctgggccaccaca

SEQ ID NO: 593027 - DNA, 25 bp, Homo sapien
agtggggggtacttactgattgatt

SEQ ID NO: 593028 - DNA, 25 bp, Homo sapien
caagtggctctcagaccaaagaaga

SEQ ID NO: 593029 - DNA, 25 bp, Homo sapien
ccttcagggtcgagagagtgcatct

SEQ ID NO: 593030 - DNA, 25 bp, Homo sapien
caaatgcctggagtatgtaggagca

SEQ ID NO: 593031 - DNA, 25 bp, Homo sapien
ccagcaggcaaagtaaggttccagg

SEQ ID NO: 593032 - DNA, 25 bp, Homo sapien
aaacctttctttggagtatgccagg

SEQ ID NO: 593033 - DNA, 25 bp, Homo sapien
tcacccagcgatatgtggcaaaaag

SEQ ID NO: 593034 - DNA, 25 bp, Homo sapien
cctgggagctaggatagagtcaaac

SEQ ID NO: 593035 - DNA, 25 bp, Homo sapien
ggcctactaagtttcctcgactgca

SEQ ID NO: 593036 - DNA, 25 bp, Homo sapien
tgcccaatggtctaaaatgagcctc

SEQ ID NO: 593037 - DNA, 25 bp, Homo sapien
aagggcaaattgtggtccggagaca

SEQ ID NO: 593038 - DNA, 25 bp, Homo sapien
tatcactgagggtacaggtcttcag

SEQ ID NO: 593039 - DNA, 25 bp, Homo sapien
gtagagcaggtcacaaagggcaaat

SEQ ID NO: 593040 - DNA, 25 bp, Homo sapien
gttcttcaatgagagctacaaacca

SEQ ID NO: 593041 - DNA, 25 bp, Homo sapien
tgtagagatttgcttgggagctctc

SEQ ID NO: 593042 - DNA, 25 bp, Homo sapien
tgtcacctacatcacgtatcgaaga

SEQ ID NO: 593043 - DNA, 25 bp, Homo sapien
tagtcagtttatcagtgaggaccac

SEQ ID NO: 593044 - DNA, 25 bp, Homo sapien
tatttggcaggacaaatctttcctc

SEQ ID NO: 593045 - DNA, 25 bp, Homo sapien
gttggccagcctgctctcaaactcc

SEQ ID NO: 593046 - DNA, 25 bp, Homo sapien
gccagcctgctctcaaactcctgac

SEQ ID NO: 593047 - DNA, 25 bp, Homo sapien
tggccagcctgctctcaaactcctg

SEQ ID NO: 593048 - DNA, 25 bp, Homo sapien
caggtgtctgccactgatgcccagc

SEQ ID NO: 593049 - DNA, 25 bp, Homo sapien
tataagataatccaaattgctttcc

SEQ ID NO: 593050 - DNA, 25 bp, Homo sapien
aattactttgccataacatatgaga

SEQ ID NO: 593051 - DNA, 25 bp, Homo sapien
gagaatgctcaaacttataagataa

SEQ ID NO: 593052 - DNA, 25 bp, Homo sapien
catatgagaatgctcaaacttataa

SEQ ID NO: 593053 - DNA, 25 bp, Homo sapien
gacacattcagagcataacacccta

SEQ ID NO: 593054 - DNA, 25 bp, Homo sapien
tccttggctcatagcataccttggc

SEQ ID NO: 593055 - DNA, 25 bp, Homo sapien
tgtaaggatcctaaactcattcgtg

SEQ ID NO: 593056 - DNA, 25 bp, Homo sapien
gactgaatcactaccttaaagccct

SEQ ID NO: 593057 - DNA, 25 bp, Homo sapien
ctaggctgggtaatttctgaagaac

SEQ ID NO: 593058 - DNA, 25 bp, Homo sapien
aatacactaggctgggtaatttctg

SEQ ID NO: 593059 - DNA, 25 bp, Homo sapien
tagaaaatacactaggctgggtaat

SEQ ID NO: 593060 - DNA, 25 bp, Homo sapien
acactaggctgggtaatttctgaag

SEQ ID NO: 593061 - DNA, 25 bp, Homo sapien
cagagaagagccgtgcaggggtaca

SEQ ID NO: 593062 - DNA, 25 bp, Homo sapien
gccgtgcaggggtacaaccatcttc

SEQ ID NO: 593063 - DNA, 25 bp, Homo sapien
aagagccgtgcaggggtacaaccat

SEQ ID NO: 593064 - DNA, 25 bp, Homo sapien
agaagagccgtgcaggggtacaacc

SEQ ID NO: 593065 - DNA, 25 bp, Homo sapien
tgggaagcgatcttcgtagaagtta

SEQ ID NO: 593066 - DNA, 25 bp, Homo sapien
actgggaagcgatcttcgtagaagt

SEQ ID NO: 593067 - DNA, 25 bp, Homo sapien
ctgggaagcgatcttcgtagaagtt

SEQ ID NO: 593068 - DNA, 25 bp, Homo sapien
gacacccaagctctgccgcggaagg

SEQ ID NO: 593069 - DNA, 25 bp, Homo sapien
taggtctgccctttgcaactcctgg

SEQ ID NO: 593070 - DNA, 25 bp, Homo sapien
agcccggacacccaagctctgccgc

SEQ ID NO: 593071 - DNA, 25 bp, Homo sapien
tctaggtctgccctttgcaactcct

SEQ ID NO: 593072 - DNA, 25 bp, Homo sapien
agacaggccgccatgcgagaaaccg

SEQ ID NO: 593073 - DNA, 25 bp, Homo sapien
aagacaggccgccatgcgagaaacc

SEQ ID NO: 593074 - DNA, 25 bp, Homo sapien
caaagacaggccgccatgcgagaaa

SEQ ID NO: 593075 - DNA, 25 bp, Homo sapien
aaagacaggccgccatgcgagaaac

SEQ ID NO: 593076 - DNA, 25 bp, Homo sapien
ttgtcctcggttgctgtgttttcat

SEQ ID NO: 593077 - DNA, 25 bp, Homo sapien
catttctcagacaaaagccgtgaaa

SEQ ID NO: 593078 - DNA, 25 bp, Homo sapien
acaaaagccgtgaaaagatacaagc

SEQ ID NO: 593079 - DNA, 25 bp, Homo sapien
cagacaaaagccgtgaaaagataca

SEQ ID NO: 593080 - DNA, 25 bp, Homo sapien
tctcagacaaaagccgtgaaaagat

SEQ ID NO: 593081 - DNA, 25 bp, Homo sapien
gcggaggcattaagccccttcacca

SEQ ID NO: 593082 - DNA, 25 bp, Homo sapien
tgggaggggtattaaaactcctgca

SEQ ID NO: 593083 - DNA, 25 bp, Homo sapien
taaaactcctgcaagacagcggagg

SEQ ID NO: 593084 - DNA, 25 bp, Homo sapien
agcacaggatgggaggggtattaaa

SEQ ID NO: 593085 - DNA, 25 bp, Homo sapien
gagtccggcggcagatcctttaaaa

SEQ ID NO: 593086 - DNA, 25 bp, Homo sapien
tcctaagggctgcaaggcgaactgt

SEQ ID NO: 593087 - DNA, 25 bp, Homo sapien
gcaatcactacgaccaaagcggagg

SEQ ID NO: 593088 - DNA, 25 bp, Homo sapien
taatgttccccaagagcagatggag

SEQ ID NO: 593089 - DNA, 25 bp, Homo sapien
ccggcgatccgcctgaggtttctac

SEQ ID NO: 593090 - DNA, 25 bp, Homo sapien
cccggcgatccgcctgaggtttcta

SEQ ID NO: 593091 - DNA, 25 bp, Homo sapien
ggtcttagcccggactctgactaat

SEQ ID NO: 593092 - DNA, 25 bp, Homo sapien
taatccctctagtaccaggtactcg

SEQ ID NO: 593093 - DNA, 25 bp, Homo sapien
tgaacctgggatcctgcgctgcttg

SEQ ID NO: 593094 - DNA, 25 bp, Homo sapien
cgtgaatcccggcctccagagacta

SEQ ID NO: 593095 - DNA, 25 bp, Homo sapien
tgacaacaacccactggtgagagag

SEQ ID NO: 593096 - DNA, 25 bp, Homo sapien
atgacaacaacccactggtgagaga

SEQ ID NO: 593097 - DNA, 25 bp, Homo sapien
ccatgacaacaacccactggtgaga

SEQ ID NO: 593098 - DNA, 25 bp, Homo sapien
taattctttgtatatttgaagagac

SEQ ID NO: 593099 - DNA, 25 bp, Homo sapien
ttctttgtatatttgaagagacggg

SEQ ID NO: 593100 - DNA, 25 bp, Homo sapien
aattctttgtatatttgaagagacg

SEQ ID NO: 593101 - DNA, 25 bp, Homo sapien
gctaattctttgtatatttgaagag

SEQ ID NO: 593102 - DNA, 25 bp, Homo sapien
gacatttcacccaaaattccagatt

SEQ ID NO: 593103 - DNA, 25 bp, Homo sapien
ctggaaacagacatttcacccaaaa

SEQ ID NO: 593104 - DNA, 25 bp, Homo sapien
gaattttccatttgagagcattttc

SEQ ID NO: 593105 - DNA, 25 bp, Homo sapien
gagcattttcaccttctggaaacag

SEQ ID NO: 593106 - DNA, 25 bp, Homo sapien
ctctggcgccttctattcctggtag

SEQ ID NO: 593107 - DNA, 25 bp, Homo sapien
gctctggcgccttctattcctggta

SEQ ID NO: 593108 - DNA, 25 bp, Homo sapien
ctggcgccttctattcctggtagga

SEQ ID NO: 593109 - DNA, 25 bp, Homo sapien
tctggcgccttctattcctggtagg

SEQ ID NO: 593110 - DNA, 25 bp, Homo sapien
tgggcttgtattgggagcttggggg

SEQ ID NO: 593111 - DNA, 25 bp, Homo sapien
ggattctatcacctggcatcttccc

SEQ ID NO: 593112 - DNA, 25 bp, Homo sapien
gttcgcaagttaggcttcctgctgc

SEQ ID NO: 593113 - DNA, 25 bp, Homo sapien
cacacctgcagttcgcaagttaggc

SEQ ID NO: 593114 - DNA, 25 bp, Homo sapien
ggagcacacctgcagttcgcaagtt

SEQ ID NO: 593115 - DNA, 25 bp, Homo sapien
tgcagttcgcaagttaggcttcctg

SEQ ID NO: 593116 - DNA, 25 bp, Homo sapien
atggttttgcagtgggggtatcgat

SEQ ID NO: 593117 - DNA, 25 bp, Homo sapien
agtgggggtatcgatgggatccatc

SEQ ID NO: 593118 - DNA, 25 bp, Homo sapien
ggtatcgatgggatccatctgtcaa

SEQ ID NO: 593119 - DNA, 25 bp, Homo sapien
tgggggtatcgatgggatccatctg

SEQ ID NO: 593120 - DNA, 25 bp, Homo sapien
tgtgaaccacaactacagggacctt

SEQ ID NO: 593121 - DNA, 25 bp, Homo sapien
tgggccctatctggaaagcgagtgc

SEQ ID NO: 593122 - DNA, 25 bp, Homo sapien
catgctatgcaatgggcggatgacc

SEQ ID NO: 593123 - DNA, 25 bp, Homo sapien
caccggtatcgcatttgaaggacaa

SEQ ID NO: 593124 - DNA, 25 bp, Homo sapien
aggatgcaacataggatgggcagca

SEQ ID NO: 593125 - DNA, 25 bp, Homo sapien
tatctccatttgatagggaggaacc

SEQ ID NO: 593126 - DNA, 25 bp, Homo sapien
tggtataggtgctggctgaaccaca

SEQ ID NO: 593127 - DNA, 25 bp, Homo sapien
acagtgcacccatgttggaggatgc

SEQ ID NO: 593128 - DNA, 25 bp, Homo sapien
caggaacccctccatccagcatttc

SEQ ID NO: 593129 - DNA, 25 bp, Homo sapien
aggaacccctccatccagcatttcc

SEQ ID NO: 593130 - DNA, 25 bp, Homo sapien
gaacccctccatccagcatttcctt

SEQ ID NO: 593131 - DNA, 25 bp, Homo sapien
ggaacccctccatccagcatttcct

SEQ ID NO: 593132 - DNA, 25 bp, Homo sapien
tacatttcacatgttgtgggttatg

SEQ ID NO: 593133 - DNA, 25 bp, Homo sapien
tattaagtatcaatttggagtatca

SEQ ID NO: 593134 - DNA, 25 bp, Homo sapien
taatgtcagtagaatgagccataca

SEQ ID NO: 593135 - DNA, 25 bp, Homo sapien
ccatgatagtcatttctgtatatta

SEQ ID NO: 593136 - DNA, 25 bp, Homo sapien
tgaggcgcagagacccctccgggat

SEQ ID NO: 593137 - DNA, 25 bp, Homo sapien
ctgaggcgcagagacccctccggga

SEQ ID NO: 593138 - DNA, 25 bp, Homo sapien
actgaggcgcagagacccctccggg

SEQ ID NO: 593139 - DNA, 25 bp, Homo sapien
tcacaaaaggatgcgtggatatttt

SEQ ID NO: 593140 - DNA, 25 bp, Homo sapien
aaaggatgcgtggatattttattca

SEQ ID NO: 593141 - DNA, 25 bp, Homo sapien
tccattcctcactctgagcagcgat

SEQ ID NO: 593142 - DNA, 25 bp, Homo sapien
tattcaaaacacaactccattcctc

SEQ ID NO: 593143 - DNA, 25 bp, Homo sapien
gaacctggggctatgttgtccattt

SEQ ID NO: 593144 - DNA, 25 bp, Homo sapien
tgggacccagttgttcacctgggac

SEQ ID NO: 593145 - DNA, 25 bp, Homo sapien
actgtaaccgcaaccaccataacga

SEQ ID NO: 593146 - DNA, 25 bp, Homo sapien
cctggacagtctttcctgaggcaga

SEQ ID NO: 593147 - DNA, 25 bp, Homo sapien
gtgggcttcctatgccctggacagt

SEQ ID NO: 593148 - DNA, 25 bp, Homo sapien
tcatcccaccctgtgtgtgggcttc

SEQ ID NO: 593149 - DNA, 25 bp, Homo sapien
tatgccctggacagtctttcctgag

SEQ ID NO: 593150 - DNA, 25 bp, Homo sapien
tgctgcaatcagagccgagaatccc

SEQ ID NO: 593151 - DNA, 25 bp, Homo sapien
tcaaagcatttgacagcctggcaga

SEQ ID NO: 593152 - DNA, 25 bp, Homo sapien
gaacacagacatcaagattcccctg

SEQ ID NO: 593153 - DNA, 25 bp, Homo sapien
gaggagagctaagtgaatccacctg

SEQ ID NO: 593154 - DNA, 25 bp, Homo sapien
tgagcagaggtccggggaggagtcc

SEQ ID NO: 593155 - DNA, 25 bp, Homo sapien
agcgtgttaggtgctgaaatggtct

SEQ ID NO: 593156 - DNA, 25 bp, Homo sapien
gagcagaggtccggggaggagtcct

SEQ ID NO: 593157 - DNA, 25 bp, Homo sapien
cagcgtgttaggtgctgaaatggtc

SEQ ID NO: 593158 - DNA, 25 bp, Homo sapien
catgtgccagtgctaccccaaggta

SEQ ID NO: 593159 - DNA, 25 bp, Homo sapien
gcatgtgccagtgctaccccaaggt

SEQ ID NO: 593160 - DNA, 25 bp, Homo sapien
atgtgccagtgctaccccaaggtat

SEQ ID NO: 593161 - DNA, 25 bp, Homo sapien
agttttataattatagggctttcat

SEQ ID NO: 593162 - DNA, 25 bp, Homo sapien
tcctgccccgtgctcatgctctgtg

SEQ ID NO: 593163 - DNA, 25 bp, Homo sapien
tcccatgcgagctagattgcacggc

SEQ ID NO: 593164 - DNA, 25 bp, Homo sapien
tctggtagcctccaagtaagggatg

SEQ ID NO: 593165 - DNA, 25 bp, Homo sapien
gaaggcgattttctcccatgcgagc

SEQ ID NO: 593166 - DNA, 25 bp, Homo sapien
ctatctctccgttgctgccaacaac

SEQ ID NO: 593167 - DNA, 25 bp, Homo sapien
gctatctctccgttgctgccaacaa

SEQ ID NO: 593168 - DNA, 25 bp, Homo sapien
tctataattattcaacggacataag

SEQ ID NO: 593169 - DNA, 25 bp, Homo sapien
ttcaacggacataagaatacttgat

SEQ ID NO: 593170 - DNA, 25 bp, Homo sapien
tcattcaaaaaaggtttgggcatta

SEQ ID NO: 593171 - DNA, 25 bp, Homo sapien
cctcattcaaaaaaggtttgggcat

SEQ ID NO: 593172 - DNA, 25 bp, Homo sapien
catcttcaatgaccccagaagaaga

SEQ ID NO: 593173 - DNA, 25 bp, Homo sapien
ccacctgtttagagataagacgtac

SEQ ID NO: 593174 - DNA, 25 bp, Homo sapien
gtaagacagaacacatcttcaatga

SEQ ID NO: 593175 - DNA, 25 bp, Homo sapien
taagacgtacttagtggtaacagaa

SEQ ID NO: 593176 - DNA, 25 bp, Homo sapien
cctgataggcagcagttgttccagg

SEQ ID NO: 593177 - DNA, 25 bp, Homo sapien
gcagttgttccaggatctctgctaa

SEQ ID NO: 593178 - DNA, 25 bp, Homo sapien
ctaaaactcctcatatctaatagca

SEQ ID NO: 593179 - DNA, 25 bp, Homo sapien
aggatctctgctaaaactcctcata

SEQ ID NO: 593180 - DNA, 25 bp, Homo sapien
aaggtgcattactcaaaatcaggag

SEQ ID NO: 593181 - DNA, 25 bp, Homo sapien
tacagtctgtgctttgttcgaatca

SEQ ID NO: 593182 - DNA, 25 bp, Homo sapien
caggagtaaaacatcctgtacagtc

SEQ ID NO: 593183 - DNA, 25 bp, Homo sapien
ggacatctgaaggagaaggtgcatt

SEQ ID NO: 593184 - DNA, 25 bp, Homo sapien
taccagaaaggatagcgaagtaatc

SEQ ID NO: 593185 - DNA, 25 bp, Homo sapien
gaaaggatagcgaagtaatctgtca

SEQ ID NO: 593186 - DNA, 25 bp, Homo sapien
ataccagaaaggatagcgaagtaat

SEQ ID NO: 593187 - DNA, 25 bp, Homo sapien
ccagaaaggatagcgaagtaatctg

SEQ ID NO: 593188 - DNA, 25 bp, Homo sapien
ttaatcctgcaagtccgataatttc

SEQ ID NO: 593189 - DNA, 25 bp, Homo sapien
aatcctgcaagtccgataatttctg

SEQ ID NO: 593190 - DNA, 25 bp, Homo sapien
tcttaatcctgcaagtccgataatt

SEQ ID NO: 593191 - DNA, 25 bp, Homo sapien
taatcctgcaagtccgataatttct

SEQ ID NO: 593192 - DNA, 25 bp, Homo sapien
tatttcccattatgctgccttccaa

SEQ ID NO: 593193 - DNA, 25 bp, Homo sapien
cagtgcttggatctcgtctttctca

SEQ ID NO: 593194 - DNA, 25 bp, Homo sapien
tgccttccaatcactgaattccatt

SEQ ID NO: 593195 - DNA, 25 bp, Homo sapien
gaaccttcccagataaacaccttca

SEQ ID NO: 593196 - DNA, 25 bp, Homo sapien
ttgagtgccgttataacaagaaatg

SEQ ID NO: 593197 - DNA, 25 bp, Homo sapien
cttgagtgccgttataacaagaaat

SEQ ID NO: 593198 - DNA, 25 bp, Homo sapien
gggatagcaaatgctcctccaggtt

SEQ ID NO: 593199 - DNA, 25 bp, Homo sapien
agggatagcaaatgctcctccaggt

SEQ ID NO: 593200 - DNA, 25 bp, Homo sapien
cagggatagcaaatgctcctccagg

SEQ ID NO: 593201 - DNA, 25 bp, Homo sapien
gagtggttgtgaaggatggctatga

SEQ ID NO: 593202 - DNA, 25 bp, Homo sapien
agagacaatttctctggcacatctt

SEQ ID NO: 593203 - DNA, 25 bp, Homo sapien
gagacaatttctctggcacatcttc

SEQ ID NO: 593204 - DNA, 25 bp, Homo sapien
ttttagattttctgccttggcaccc

SEQ ID NO: 593205 - DNA, 25 bp, Homo sapien
tttagattttctgccttggcaccca

SEQ ID NO: 593206 - DNA, 25 bp, Homo sapien
gagtaaacatattaaacttcctctg

SEQ ID NO: 593207 - DNA, 25 bp, Homo sapien
aggaaaccagtatgattgagtaaac

SEQ ID NO: 593208 - DNA, 25 bp, Homo sapien
cctttgttctaaatagctcccacat

SEQ ID NO: 593209 - DNA, 25 bp, Homo sapien
acctttgttctaaatagctcccaca

SEQ ID NO: 593210 - DNA, 25 bp, Homo sapien
cacctttgttctaaatagctcccac

SEQ ID NO: 593211 - DNA, 25 bp, Homo sapien
gtacactggtcgacaaaaccttgaa

SEQ ID NO: 593212 - DNA, 25 bp, Homo sapien
acactggtcgacaaaaccttgaaat

SEQ ID NO: 593213 - DNA, 25 bp, Homo sapien
ggtacactggtcgacaaaaccttga

SEQ ID NO: 593214 - DNA, 25 bp, Homo sapien
tggtacactggtcgacaaaaccttg

SEQ ID NO: 593215 - DNA, 25 bp, Homo sapien
attttcgtatatgtttcaaaagttg

SEQ ID NO: 593216 - DNA, 25 bp, Homo sapien
tagataattttcgtatatgtttcaa

SEQ ID NO: 593217 - DNA, 25 bp, Homo sapien
tgaggatttttagataattttcgta

SEQ ID NO: 593218 - DNA, 25 bp, Homo sapien
ttcgtatatgtttcaaaagttgttg

SEQ ID NO: 593219 - DNA, 25 bp, Homo sapien
gaacttgattcattttaccctggat

SEQ ID NO: 593220 - DNA, 25 bp, Homo sapien
caggaaactatatatcacaggccaa

SEQ ID NO: 593221 - DNA, 25 bp, Homo sapien
taatggcaaagaaagacctacaggt

SEQ ID NO: 593222 - DNA, 25 bp, Homo sapien
ggccaaattcagcttaccaaatggt

SEQ ID NO: 593223 - DNA, 25 bp, Homo sapien
tatcaacccctatctgatatatggt

SEQ ID NO: 593224 - DNA, 25 bp, Homo sapien
ggccatttatcagtcggattgtttt

SEQ ID NO: 593225 - DNA, 25 bp, Homo sapien
taaccatcctaacagttgcgaagtg

SEQ ID NO: 593226 - DNA, 25 bp, Homo sapien
catatacttgttgcccttcgtatgt

SEQ ID NO: 593227 - DNA, 25 bp, Homo sapien
ttgagtttgtggctgtggtcgcttc

SEQ ID NO: 593228 - DNA, 25 bp, Homo sapien
gcagcgttccgtccggcgagtgacc

SEQ ID NO: 593229 - DNA, 25 bp, Homo sapien
cggctcaccggctttacgtcggttg

SEQ ID NO: 593230 - DNA, 25 bp, Homo sapien
atcacgagcgatgtggccctggcgt

SEQ ID NO: 593231 - DNA, 25 bp, Homo sapien
aatttatttccatacagtatttaca

SEQ ID NO: 593232 - DNA, 25 bp, Homo sapien
tgttcttcaacgtggcccaaatatt

SEQ ID NO: 593233 - DNA, 25 bp, Homo sapien
tccttctatctttagccttccgtgg

SEQ ID NO: 593234 - DNA, 25 bp, Homo sapien
cttgttcttcaacgtggcccaaata

SEQ ID NO: 593235 - DNA, 25 bp, Homo sapien
cttccgtggtttctcacatggacta

SEQ ID NO: 593236 - DNA, 25 bp, Homo sapien
tatacaatggtgtgctgtttgggag

SEQ ID NO: 593237 - DNA, 25 bp, Homo sapien
agaagaatggaatgaatatgtcagt

SEQ ID NO: 593238 - DNA, 25 bp, Homo sapien
tatttctgtcttaatggctttaaca

SEQ ID NO: 593239 - DNA, 25 bp, Homo sapien
ttttgaagaagcaagtggcacttac

SEQ ID NO: 593240 - DNA, 25 bp, Homo sapien
gaacccgcaatgtccaagattatga

SEQ ID NO: 593241 - DNA, 25 bp, Homo sapien
caatgaagtatgactcttgcagcaa

SEQ ID NO: 593242 - DNA, 25 bp, Homo sapien
aatgtagggccattatccctctggg

SEQ ID NO: 593243 - DNA, 25 bp, Homo sapien
gaaaccgtgtgagaaattgtagcta

SEQ ID NO: 593244 - DNA, 25 bp, Homo sapien
ttcccagtatgtcgtcaattttgga

SEQ ID NO: 593245 - DNA, 25 bp, Homo sapien
agctttacttcccagtatgtcgtca

SEQ ID NO: 593246 - DNA, 25 bp, Homo sapien
ctttacttcccagtatgtcgtcaat

SEQ ID NO: 593247 - DNA, 25 bp, Homo sapien
cccagtatgtcgtcaattttggaat

SEQ ID NO: 593248 - DNA, 25 bp, Homo sapien
ggttgtcaatcatttccgcggcggt

SEQ ID NO: 593249 - DNA, 25 bp, Homo sapien
tttagtgggcctctgtctgcgtctc

SEQ ID NO: 593250 - DNA, 25 bp, Homo sapien
tggctttctgaagacctcgacaatg

SEQ ID NO: 593251 - DNA, 25 bp, Homo sapien
gaagcttcggtctcaaagaaaccga

SEQ ID NO: 593252 - DNA, 25 bp, Homo sapien
tgttctccagaccagttttgcaatt

SEQ ID NO: 593253 - DNA, 25 bp, Homo sapien
cagaccagttttgcaattatcttca

SEQ ID NO: 593254 - DNA, 25 bp, Homo sapien
ccagaccagttttgcaattatcttc

SEQ ID NO: 593255 - DNA, 25 bp, Homo sapien
ctttgttctccagaccagttttgca

SEQ ID NO: 593256 - DNA, 25 bp, Homo sapien
ggatatgacctgtgaaatccctcct

SEQ ID NO: 593257 - DNA, 25 bp, Homo sapien
gctggctcagtgctgactgaatgtg

SEQ ID NO: 593258 - DNA, 25 bp, Homo sapien
gcaggagagccccaggagcaacaca

SEQ ID NO: 593259 - DNA, 25 bp, Homo sapien
ctcagtgctgactgaatgtggggca

SEQ ID NO: 593260 - DNA, 25 bp, Homo sapien
ggctgttgacctgcaagtgtttctg

SEQ ID NO: 593261 - DNA, 25 bp, Homo sapien
gcaaaatcctacaatagtggagatg

SEQ ID NO: 593262 - DNA, 25 bp, Homo sapien
tatttgtgcttaggcaaaatcctac

SEQ ID NO: 593263 - DNA, 25 bp, Homo sapien
gttgacctgcaagtgtttctgggct

SEQ ID NO: 593264 - DNA, 25 bp, Homo sapien
aaatcgatgacactttcttgcttct

SEQ ID NO: 593265 - DNA, 25 bp, Homo sapien
tcttgcttctggtgtgcttcccttt

SEQ ID NO: 593266 - DNA, 25 bp, Homo sapien
tcttcttcaatttccataagcagtt

SEQ ID NO: 593267 - DNA, 25 bp, Homo sapien
tggagtctttgatgtaaaaatcgat

SEQ ID NO: 593268 - DNA, 25 bp, Homo sapien
tctgacgtgggtctgctcctgtcct

SEQ ID NO: 593269 - DNA, 25 bp, Homo sapien
tctctgacgtgggtctgctcctgtc

SEQ ID NO: 593270 - DNA, 25 bp, Homo sapien
tcctgtcctgcaggacaaagagctc

SEQ ID NO: 593271 - DNA, 25 bp, Homo sapien
gctcctatggggctcttgtccttgg

SEQ ID NO: 593272 - DNA, 25 bp, Homo sapien
agtgttctcaaatgctgccagtttc

SEQ ID NO: 593273 - DNA, 25 bp, Homo sapien
tcagtgttctcaaatgctgccagtt

SEQ ID NO: 593274 - DNA, 25 bp, Homo sapien
tgttctcaaatgctgccagtttcat

SEQ ID NO: 593275 - DNA, 25 bp, Homo sapien
cttcaagtctgggtcagtgttctca

SEQ ID NO: 593276 - DNA, 25 bp, Homo sapien
ttttcccttggcataggccctggta

SEQ ID NO: 593277 - DNA, 25 bp, Homo sapien
cagtttttcccttggcataggccct

SEQ ID NO: 593278 - DNA, 25 bp, Homo sapien
tacacagtttttcccttggcatagg

SEQ ID NO: 593279 - DNA, 25 bp, Homo sapien
ttcccttggcataggccctggtatt

SEQ ID NO: 593280 - DNA, 25 bp, Homo sapien
tcacaaggtgacagaagagagggaa

SEQ ID NO: 593281 - DNA, 25 bp, Homo sapien
gtctggggtggcctcaggaagctga

SEQ ID NO: 593282 - DNA, 25 bp, Homo sapien
tcttcacaaggtgacagaagagagg

SEQ ID NO: 593283 - DNA, 25 bp, Homo sapien
agctctgcatgtctggggtggcctc

SEQ ID NO: 593284 - DNA, 25 bp, Homo sapien
tcaccttcgtttggaccttgccgga

SEQ ID NO: 593285 - DNA, 25 bp, Homo sapien
ggttgagcccactgagacttcagac

SEQ ID NO: 593286 - DNA, 25 bp, Homo sapien
gatccctgttgattgtcaccttcgt

SEQ ID NO: 593287 - DNA, 25 bp, Homo sapien
tggaccttgccggatgttgaacagg

SEQ ID NO: 593288 - DNA, 25 bp, Homo sapien
ccagttaccttggaatagctgattt

SEQ ID NO: 593289 - DNA, 25 bp, Homo sapien
cccagttaccttggaatagctgatt

SEQ ID NO: 593290 - DNA, 25 bp, Homo sapien
cagtcctggagattgttaaggctct

SEQ ID NO: 593291 - DNA, 25 bp, Homo sapien
cctggagattgttaaggctctactt

SEQ ID NO: 593292 - DNA, 25 bp, Homo sapien
agcagtcctggagattgttaaggct

SEQ ID NO: 593293 - DNA, 25 bp, Homo sapien
agattgttaaggctctacttcagat

SEQ ID NO: 593294 - DNA, 25 bp, Homo sapien
gcaggtctagagacaaatactacta

SEQ ID NO: 593295 - DNA, 25 bp, Homo sapien
taacaagtggcaagaccatgtggcc

SEQ ID NO: 593296 - DNA, 25 bp, Homo sapien
ggccaggtcagataagctgccttca

SEQ ID NO: 593297 - DNA, 25 bp, Homo sapien
caaaatcatggactgtaagagttct

SEQ ID NO: 593298 - DNA, 25 bp, Homo sapien
aagcacctgcttggctgcaaaccaa

SEQ ID NO: 593299 - DNA, 25 bp, Homo sapien
ctttcatgacgtgaagcacctgctt

SEQ ID NO: 593300 - DNA, 25 bp, Homo sapien
ttaagcggcctgtggacaggactgc

SEQ ID NO: 593301 - DNA, 25 bp, Homo sapien
caaattcgaattggatttaagcggc

SEQ ID NO: 593302 - DNA, 25 bp, Homo sapien
tgggttgtgatcattgttgaagaca

SEQ ID NO: 593303 - DNA, 25 bp, Homo sapien
ggactgggttgtgatcattgttgaa

SEQ ID NO: 593304 - DNA, 25 bp, Homo sapien
ttgaagacattcagcgagagcgaga

SEQ ID NO: 593305 - DNA, 25 bp, Homo sapien
tgaagacattcagcgagagcgagag

SEQ ID NO: 593306 - DNA, 25 bp, Homo sapien
tcctcttgctgactgtatcgtggtg

SEQ ID NO: 593307 - DNA, 25 bp, Homo sapien
caccgtcacaggcataaggggtggg

SEQ ID NO: 593308 - DNA, 25 bp, Homo sapien
cctaaagggtggcttgtgcagggag

SEQ ID NO: 593309 - DNA, 25 bp, Homo sapien
cttgccaccgtcacaggcataaggg

SEQ ID NO: 593310 - DNA, 25 bp, Homo sapien
gaaagagaaacaatcacgacacggg

SEQ ID NO: 593311 - DNA, 25 bp, Homo sapien
aaagagaaacaatcacgacacgggt

SEQ ID NO: 593312 - DNA, 25 bp, Homo sapien
agagaaacaatcacgacacgggtct

SEQ ID NO: 593313 - DNA, 25 bp, Homo sapien
aagagaaacaatcacgacacgggtc

SEQ ID NO: 593314 - DNA, 25 bp, Homo sapien
aagccgaccgcgctttacaggtcaa

SEQ ID NO: 593315 - DNA, 25 bp, Homo sapien
gctcaccacatctggtgaggcagac

SEQ ID NO: 593316 - DNA, 25 bp, Homo sapien
gatccggaaagccgaccgcgcttta

SEQ ID NO: 593317 - DNA, 25 bp, Homo sapien
accgcgctttacaggtcaactgcaa

SEQ ID NO: 593318 - DNA, 25 bp, Homo sapien
tccggtaggcattcgaaaacgtggc

SEQ ID NO: 593319 - DNA, 25 bp, Homo sapien
cacgcgtagtcacatggtctctgcc

SEQ ID NO: 593320 - DNA, 25 bp, Homo sapien
tctttcaaaggaggagggcattgaa

SEQ ID NO: 593321 - DNA, 25 bp, Homo sapien
tgacacacgttaacaccaactgctg

SEQ ID NO: 593322 - DNA, 25 bp, Homo sapien
gaagatgtttgagtcttttcgcggc

SEQ ID NO: 593323 - DNA, 25 bp, Homo sapien
agaagatgtttgagtcttttcgcgg

SEQ ID NO: 593324 - DNA, 25 bp, Homo sapien
gtttgagtcttttcgcggctcttct

SEQ ID NO: 593325 - DNA, 25 bp, Homo sapien
gatgtttgagtcttttcgcggctct

SEQ ID NO: 593326 - DNA, 25 bp, Homo sapien
tgcgtcggtcttggagcaattgctg

SEQ ID NO: 593327 - DNA, 25 bp, Homo sapien
attgctgtctcgtccccatcctgag

SEQ ID NO: 593328 - DNA, 25 bp, Homo sapien
ccccgcggatctgctttggctgcgt

SEQ ID NO: 593329 - DNA, 25 bp, Homo sapien
tgctttggctgcgtgaaagcctggc

SEQ ID NO: 593330 - DNA, 25 bp, Homo sapien
tctgctgtatgaccctttgtttgtg

SEQ ID NO: 593331 - DNA, 25 bp, Homo sapien
tgcctggtggtgtgtgtttcaatgc

SEQ ID NO: 593332 - DNA, 25 bp, Homo sapien
gtgtttcaatgcctctgctgtatga

SEQ ID NO: 593333 - DNA, 25 bp, Homo sapien
tgcctctgctgtatgaccctttgtt

SEQ ID NO: 593334 - DNA, 25 bp, Homo sapien
gatggagttacaaaaggtaaataga

SEQ ID NO: 593335 - DNA, 25 bp, Homo sapien
atggagttacaaaaggtaaatagag

SEQ ID NO: 593336 - DNA, 25 bp, Homo sapien
tacaaaaggtaaatagagcttagtg

SEQ ID NO: 593337 - DNA, 25 bp, Homo sapien
aaaaggtaaatagagcttagtgagc

SEQ ID NO: 593338 - DNA, 25 bp, Homo sapien
ttatgtacatttgatatcctgacag

SEQ ID NO: 593339 - DNA, 25 bp, Homo sapien
tgtacatttgatatcctgacagatt

SEQ ID NO: 593340 - DNA, 25 bp, Homo sapien
catttgatatcctgacagatttata

SEQ ID NO: 593341 - DNA, 25 bp, Homo sapien
tgatatcctgacagatttatatctc

SEQ ID NO: 593342 - DNA, 25 bp, Homo sapien
tgggcttgcttcaggaatatcttac

SEQ ID NO: 593343 - DNA, 25 bp, Homo sapien
tggagacactgtggctctattgaca

SEQ ID NO: 593344 - DNA, 25 bp, Homo sapien
caccctgttatatgactgggcttgc

SEQ ID NO: 593345 - DNA, 25 bp, Homo sapien
ccagacacctttgcaccctgttata

SEQ ID NO: 593346 - DNA, 25 bp, Homo sapien
tttcccaaagtccagcgacttccga

SEQ ID NO: 593347 - DNA, 25 bp, Homo sapien
cttctggattgcgttgggagcgggc

SEQ ID NO: 593348 - DNA, 25 bp, Homo sapien
tggcgactccgctaggcctccgaag

SEQ ID NO: 593349 - DNA, 25 bp, Homo sapien
aagggccaaacgactcaagccagac

SEQ ID NO: 593350 - DNA, 25 bp, Homo sapien
tgcatacaaatgtgctctgcgctct

SEQ ID NO: 593351 - DNA, 25 bp, Homo sapien
acaaatgtgctctgcgctctgtaga

SEQ ID NO: 593352 - DNA, 25 bp, Homo sapien
catacaaatgtgctctgcgctctgt

SEQ ID NO: 593353 - DNA, 25 bp, Homo sapien
gatgcatacaaatgtgctctgcgct

SEQ ID NO: 593354 - DNA, 25 bp, Homo sapien
gctgctgcacctttaacgctttctg

SEQ ID NO: 593355 - DNA, 25 bp, Homo sapien
ctgctgcacctttaacgctttctgg

SEQ ID NO: 593356 - DNA, 25 bp, Homo sapien
ttcaacagcagcgaaagccgtgtga

SEQ ID NO: 593357 - DNA, 25 bp, Homo sapien
cttcaacagcagcgaaagccgtgtg

SEQ ID NO: 593358 - DNA, 25 bp, Homo sapien
acagcagcgaaagccgtgtgaactc

SEQ ID NO: 593359 - DNA, 25 bp, Homo sapien
caacagcagcgaaagccgtgtgaac

SEQ ID NO: 593360 - DNA, 25 bp, Homo sapien
aatagtcccacttgtcaagggaaga

SEQ ID NO: 593361 - DNA, 25 bp, Homo sapien
gtcccacttgtcaagggaagaccat

SEQ ID NO: 593362 - DNA, 25 bp, Homo sapien
tagtcccacttgtcaagggaagacc

SEQ ID NO: 593363 - DNA, 25 bp, Homo sapien
tcaatagtcccacttgtcaagggaa

SEQ ID NO: 593364 - DNA, 25 bp, Homo sapien
aggtggtatgcgggaagatctccct

SEQ ID NO: 593365 - DNA, 25 bp, Homo sapien
ggtggtatgcgggaagatctccctt

SEQ ID NO: 593366 - DNA, 25 bp, Homo sapien
gtggtatgcgggaagatctcccttt

SEQ ID NO: 593367 - DNA, 25 bp, Homo sapien
tgaggtggtatgcgggaagatctcc

SEQ ID NO: 593368 - DNA, 25 bp, Homo sapien
tcaacttctagcattgcttctgggc

SEQ ID NO: 593369 - DNA, 25 bp, Homo sapien
tgcacttggaggaactgcttcacag

SEQ ID NO: 593370 - DNA, 25 bp, Homo sapien
ttccttggatgctgttctgggctgg

SEQ ID NO: 593371 - DNA, 25 bp, Homo sapien
cccctcatctggcatgcacttggag

SEQ ID NO: 593372 - DNA, 25 bp, Homo sapien
tgaggcttctgagcttctaagcatg

SEQ ID NO: 593373 - DNA, 25 bp, Homo sapien
ctgtgaggcttctgagcttctaagc

SEQ ID NO: 593374 - DNA, 25 bp, Homo sapien
gcttctgagcttctaagcatgcaga

SEQ ID NO: 593375 - DNA, 25 bp, Homo sapien
gaggcttctgagcttctaagcatgc

SEQ ID NO: 593376 - DNA, 25 bp, Homo sapien
tcttcatgaccaaagcatacttggg

SEQ ID NO: 593377 - DNA, 25 bp, Homo sapien
gatgtgcagggcaagaatgaggtgg

SEQ ID NO: 593378 - DNA, 25 bp, Homo sapien
ctcccgaatctggtggaggacttgg

SEQ ID NO: 593379 - DNA, 25 bp, Homo sapien
taataatgccaaagggatgtgcagg

SEQ ID NO: 593380 - DNA, 25 bp, Homo sapien
cagaggccgagacaccaagtagtaa

SEQ ID NO: 593381 - DNA, 25 bp, Homo sapien
ttataaataattctggcactaagtg

SEQ ID NO: 593382 - DNA, 25 bp, Homo sapien
caagtagtaaacagtgatctaggtc

SEQ ID NO: 593383 - DNA, 25 bp, Homo sapien
tccattgatcgagctttcaaagaga

SEQ ID NO: 593384 - DNA, 25 bp, Homo sapien
gattaacagtgtcataatcggacag

SEQ ID NO: 593385 - DNA, 25 bp, Homo sapien
aggaggcattcaatagataaattag

SEQ ID NO: 593386 - DNA, 25 bp, Homo sapien
ctgtccatgtaagtgataaaagagt

SEQ ID NO: 593387 - DNA, 25 bp, Homo sapien
attagatatcgctcccaattatgtc

SEQ ID NO: 593388 - DNA, 25 bp, Homo sapien
aagatcatgctggttaccaagtgga

SEQ ID NO: 593389 - DNA, 25 bp, Homo sapien
aggtcactggtgatcgccctgtgag

SEQ ID NO: 593390 - DNA, 25 bp, Homo sapien
ggcaaagtgctgacaagggtaaaac

SEQ ID NO: 593391 - DNA, 25 bp, Homo sapien
gctggttaccaagtggagtattcca

SEQ ID NO: 593392 - DNA, 25 bp, Homo sapien
tggtcacagattccacggacaagaa

SEQ ID NO: 593393 - DNA, 25 bp, Homo sapien
tagacgcaggtaattagattggccc

SEQ ID NO: 593394 - DNA, 25 bp, Homo sapien
ctctgattttatagacgcaggtaat

SEQ ID NO: 593395 - DNA, 25 bp, Homo sapien
tccacggacaagaacatctttatgg

SEQ ID NO: 593396 - DNA, 25 bp, Homo sapien
caaacggtgaatgcccgagatttcc

SEQ ID NO: 593397 - DNA, 25 bp, Homo sapien
gtcttcacccaaacggtgaatgccc

SEQ ID NO: 593398 - DNA, 25 bp, Homo sapien
tgacagcctacgtctgtccagaacc

SEQ ID NO: 593399 - DNA, 25 bp, Homo sapien
cacccaaacggtgaatgcccgagat

SEQ ID NO: 593400 - DNA, 25 bp, Homo sapien
ccgaaaagaactgaggaggctccca

SEQ ID NO: 593401 - DNA, 25 bp, Homo sapien
cgaaaagaactgaggaggctcccac

SEQ ID NO: 593402 - DNA, 25 bp, Homo sapien
accacggcttccaccggattcgcgg

SEQ ID NO: 593403 - DNA, 25 bp, Homo sapien
agcgaagcctgggaggccacaaagc

SEQ ID NO: 593404 - DNA, 25 bp, Homo sapien
ccggattcgcgggggtggagtgcat

SEQ ID NO: 593405 - DNA, 25 bp, Homo sapien
acaaagccggctctctgcaccacgg

SEQ ID NO: 593406 - DNA, 25 bp, Homo sapien
cctctctgcacaggcgccaggaacc

SEQ ID NO: 593407 - DNA, 25 bp, Homo sapien
gtccggcctccgtccagcccagaca

SEQ ID NO: 593408 - DNA, 25 bp, Homo sapien
tctgcacaggcgccaggaaccgcgg

SEQ ID NO: 593409 - DNA, 25 bp, Homo sapien
gcacaggcgccaggaaccgcggtcc

SEQ ID NO: 593410 - DNA, 25 bp, Homo sapien
tgcctcaggggacccaaactcgtgg

SEQ ID NO: 593411 - DNA, 25 bp, Homo sapien
caggcagaggcctggagagatgcct

SEQ ID NO: 593412 - DNA, 25 bp, Homo sapien
cgcccgtctatcctgtttccagggt

SEQ ID NO: 593413 - DNA, 25 bp, Homo sapien
gccacgggtcacccgcccgtctatc

SEQ ID NO: 593414 - DNA, 25 bp, Homo sapien
tacaagatcagactaacgcagaccc

SEQ ID NO: 593415 - DNA, 25 bp, Homo sapien
ttcatcccggtttcactctacatat

SEQ ID NO: 593416 - DNA, 25 bp, Homo sapien
aatgaactacaagatcagactaacg

SEQ ID NO: 593417 - DNA, 25 bp, Homo sapien
cactctacatattagcttagaaaaa

SEQ ID NO: 593418 - DNA, 25 bp, Homo sapien
gaggaaatgctcaatatttgtatgt

SEQ ID NO: 593419 - DNA, 25 bp, Homo sapien
tatcaaaacccctgtttatcacgga

SEQ ID NO: 593420 - DNA, 25 bp, Homo sapien
tgtttatcacggaggccaggaggaa

SEQ ID NO: 593421 - DNA, 25 bp, Homo sapien
tatgtacagtcaacctcaggcaaat

SEQ ID NO: 593422 - DNA, 25 bp, Homo sapien
agactcctcgagagggttctcaagg

SEQ ID NO: 593423 - DNA, 25 bp, Homo sapien
tgaggccagactcctcgagagggtt

SEQ ID NO: 593424 - DNA, 25 bp, Homo sapien
ggccagactcctcgagagggttctc

SEQ ID NO: 593425 - DNA, 25 bp, Homo sapien
tcatgaggccagactcctcgagagg

SEQ ID NO: 593426 - DNA, 25 bp, Homo sapien
caggcatttcacatagtaaaaatct

SEQ ID NO: 593427 - DNA, 25 bp, Homo sapien
cacaggcatttcacatagtaaaaat

SEQ ID NO: 593428 - DNA, 25 bp, Homo sapien
ggcatttcacatagtaaaaatctca

SEQ ID NO: 593429 - DNA, 25 bp, Homo sapien
tcacaggcatttcacatagtaaaaa

SEQ ID NO: 593430 - DNA, 25 bp, Homo sapien
atggtgcagcatctacaggaaacag

SEQ ID NO: 593431 - DNA, 25 bp, Homo sapien
aatggtgcagcatctacaggaaaca

SEQ ID NO: 593432 - DNA, 25 bp, Homo sapien
ttactcctaagtatgtatacccaag

SEQ ID NO: 593433 - DNA, 25 bp, Homo sapien
aaatggtgcagcatctacaggaaac

SEQ ID NO: 593434 - DNA, 25 bp, Homo sapien
gtgataaatcaatatcgtaagattg

SEQ ID NO: 593435 - DNA, 25 bp, Homo sapien
ggaagacttacattgctatgccctc

SEQ ID NO: 593436 - DNA, 25 bp, Homo sapien
tcgtaagattgaaacttggaagtct

SEQ ID NO: 593437 - DNA, 25 bp, Homo sapien
ttaggaagacttacattgctatgcc

SEQ ID NO: 593438 - DNA, 25 bp, Homo sapien
tttttctcttcttatctttgctctt

SEQ ID NO: 593439 - DNA, 25 bp, Homo sapien
caacgtatcaagctgggtttcttca

SEQ ID NO: 593440 - DNA, 25 bp, Homo sapien
acgtatcaagctgggtttcttcatc

SEQ ID NO: 593441 - DNA, 25 bp, Homo sapien
ttctcttcttatctttgctcttttt

SEQ ID NO: 593442 - DNA, 25 bp, Homo sapien
cagtggcgctggcacaaatggctat

SEQ ID NO: 593443 - DNA, 25 bp, Homo sapien
aaacattaaaagcttctgaccatcc

SEQ ID NO: 593444 - DNA, 25 bp, Homo sapien
tgatgcctctaaaagacaatgtaga

SEQ ID NO: 593445 - DNA, 25 bp, Homo sapien
ggaggataaaatagcgcaaccactt

SEQ ID NO: 593446 - DNA, 25 bp, Homo sapien
agctcccagggtaaaaagaccattg

SEQ ID NO: 593447 - DNA, 25 bp, Homo sapien
catttgaaaataaatttgacatttg

SEQ ID NO: 593448 - DNA, 25 bp, Homo sapien
acatttgaaaataaatttgacattt

SEQ ID NO: 593449 - DNA, 25 bp, Homo sapien
aaacatttgaaaataaatttgacat

SEQ ID NO: 593450 - DNA, 25 bp, Homo sapien
aacatttgaaaataaatttgacatt

SEQ ID NO: 593451 - DNA, 25 bp, Homo sapien
ctggaatcagataatttgacagcca

SEQ ID NO: 593452 - DNA, 25 bp, Homo sapien
tggaatcagataatttgacagccat

SEQ ID NO: 593453 - DNA, 25 bp, Homo sapien
gttcccattgttctcttggtccaat

SEQ ID NO: 593454 - DNA, 25 bp, Homo sapien
tggttcccattgttctcttggtcca

SEQ ID NO: 593455 - DNA, 25 bp, Homo sapien
gactggttcccattgttctcttggt

SEQ ID NO: 593456 - DNA, 25 bp, Homo sapien
actggttcccattgttctcttggtc

SEQ ID NO: 593457 - DNA, 25 bp, Homo sapien
tcagctgagtccttttcgcaataca

SEQ ID NO: 593458 - DNA, 25 bp, Homo sapien
tcgcaatacagttttaagaccctct

SEQ ID NO: 593459 - DNA, 25 bp, Homo sapien
tgtctgagggacttttgtgtgtgaa

SEQ ID NO: 593460 - DNA, 25 bp, Homo sapien
gcgatttaaacctgtgccacagatt

SEQ ID NO: 593461 - DNA, 25 bp, Homo sapien
tatgtcccctgcttcattgcatcta

SEQ ID NO: 593462 - DNA, 25 bp, Homo sapien
tgcttctatgtcccctgcttcattg

SEQ ID NO: 593463 - DNA, 25 bp, Homo sapien
tcccctgcttcattgcatctaataa

SEQ ID NO: 593464 - DNA, 25 bp, Homo sapien
tctatgtcccctgcttcattgcatc

SEQ ID NO: 593465 - DNA, 25 bp, Homo sapien
cgagaagactatagagaaggttgcc

SEQ ID NO: 593466 - DNA, 25 bp, Homo sapien
cacaggtgagtaagatgcatggcag

SEQ ID NO: 593467 - DNA, 25 bp, Homo sapien
taatggcaaggtagctcctagatgc

SEQ ID NO: 593468 - DNA, 25 bp, Homo sapien
taaaaagagcatgtggaactaccag

SEQ ID NO: 593469 - DNA, 25 bp, Homo sapien
tataacgcatgtgcgcatgtgccgg

SEQ ID NO: 593470 - DNA, 25 bp, Homo sapien
cctcacaggatcattatggaaattc

SEQ ID NO: 593471 - DNA, 25 bp, Homo sapien
ttcctgtctgtaaggctgagctcac

SEQ ID NO: 593472 - DNA, 25 bp, Homo sapien
catgtgccggatgcatgcaacgaaa

SEQ ID NO: 593473 - DNA, 25 bp, Homo sapien
accacaccttgaaatcactgtgatt

SEQ ID NO: 593474 - DNA, 25 bp, Homo sapien
taccacaccttgaaatcactgtgat

SEQ ID NO: 593475 - DNA, 25 bp, Homo sapien
tacgaaaagtgtcctaaataatcac

SEQ ID NO: 593476 - DNA, 25 bp, Homo sapien
gtacgaaaagtgtcctaaataatca

SEQ ID NO: 593477 - DNA, 25 bp, Homo sapien
tgtgttctggtagacaaggcaaggt

SEQ ID NO: 593478 - DNA, 25 bp, Homo sapien
gacaaggcaaggtcataaagatgaa

SEQ ID NO: 593479 - DNA, 25 bp, Homo sapien
tttagtaagagggatgtgtgttctg

SEQ ID NO: 593480 - DNA, 25 bp, Homo sapien
cataaagatgaagggctgacagaga

SEQ ID NO: 593481 - DNA, 25 bp, Homo sapien
taattgttctgcattcaacgattag

SEQ ID NO: 593482 - DNA, 25 bp, Homo sapien
cagatgcttactatcacatgtcata

SEQ ID NO: 593483 - DNA, 25 bp, Homo sapien
atgcttactatcacatgtcataaat

SEQ ID NO: 593484 - DNA, 25 bp, Homo sapien
attgttctgcattcaacgattagga

SEQ ID NO: 593485 - DNA, 25 bp, Homo sapien
cttccccactttatgtgtcacataa

SEQ ID NO: 593486 - DNA, 25 bp, Homo sapien
tcaagatgatttcttatgcagaaga

SEQ ID NO: 593487 - DNA, 25 bp, Homo sapien
aattaactgagcaactataatcaga

SEQ ID NO: 593488 - DNA, 25 bp, Homo sapien
tgagtaagtgctgtcacatgcttcc

SEQ ID NO: 593489 - DNA, 25 bp, Homo sapien
tcttcttctggaatgtcatcttttt

SEQ ID NO: 593490 - DNA, 25 bp, Homo sapien
cataattgatttcacattgttttac

SEQ ID NO: 593491 - DNA, 25 bp, Homo sapien
tggtttctttttcagcacaggatct

SEQ ID NO: 593492 - DNA, 25 bp, Homo sapien
tttctttttcagcacaggatctaat

SEQ ID NO: 593493 - DNA, 25 bp, Homo sapien
gactaacccaagtgactagctttgg

SEQ ID NO: 593494 - DNA, 25 bp, Homo sapien
attgtgttgcctcttcttgtctatc

SEQ ID NO: 593495 - DNA, 25 bp, Homo sapien
tagagagattgactaacccaagtga

SEQ ID NO: 593496 - DNA, 25 bp, Homo sapien
tgtgttgcctcttcttgtctatcag

SEQ ID NO: 593497 - DNA, 25 bp, Homo sapien
aaggccccacttctattagggcatg

SEQ ID NO: 593498 - DNA, 25 bp, Homo sapien
ccatagcacagcctttgactggcat

SEQ ID NO: 593499 - DNA, 25 bp, Homo sapien
ccacttctattagggcatgctggct

SEQ ID NO: 593500 - DNA, 25 bp, Homo sapien
tagcacagcctttgactggcatcac

SEQ ID NO: 593501 - DNA, 25 bp, Homo sapien
taagctggagcttttgaacaacaaa

SEQ ID NO: 593502 - DNA, 25 bp, Homo sapien
ttttaataagctggagcttttgaac

SEQ ID NO: 593503 - DNA, 25 bp, Homo sapien
gagcttttgaacaacaaagatgacc

SEQ ID NO: 593504 - DNA, 25 bp, Homo sapien
gctggagcttttgaacaacaaagat

SEQ ID NO: 593505 - DNA, 25 bp, Homo sapien
gaaaatgtcttcattgaaaaatacc

SEQ ID NO: 593506 - DNA, 25 bp, Homo sapien
aagaaaatgtcttcattgaaaaata

SEQ ID NO: 593507 - DNA, 25 bp, Homo sapien
aatgtcttcattgaaaaatacctca

SEQ ID NO: 593508 - DNA, 25 bp, Homo sapien
aaatgtcttcattgaaaaatacctc

SEQ ID NO: 593509 - DNA, 25 bp, Homo sapien
ccagaagcgtctcatgcaaaaatcc

SEQ ID NO: 593510 - DNA, 25 bp, Homo sapien
cagaagcgtctcatgcaaaaatcca

SEQ ID NO: 593511 - DNA, 25 bp, Homo sapien
gatacatatccatttgctcagctgg

SEQ ID NO: 593512 - DNA, 25 bp, Homo sapien
taacataggacttaaatgagcggct

SEQ ID NO: 593513 - DNA, 25 bp, Homo sapien
tattccggaatttaagggtgctcta

SEQ ID NO: 593514 - DNA, 25 bp, Homo sapien
gaggttattccgtttcagagtccac

SEQ ID NO: 593515 - DNA, 25 bp, Homo sapien
ttctataaaaaatggattctaatct

SEQ ID NO: 593516 - DNA, 25 bp, Homo sapien
catgccatatatattcaactgctac

SEQ ID NO: 593517 - DNA, 25 bp, Homo sapien
tggattctaatcttataaaagttat

SEQ ID NO: 593518 - DNA, 25 bp, Homo sapien
ggttattgtattaccacaacacata

SEQ ID NO: 593519 - DNA, 25 bp, Homo sapien
aaattccagtcatttgcagtatctg

SEQ ID NO: 593520 - DNA, 25 bp, Homo sapien
aaaaattccagtcatttgcagtatc

SEQ ID NO: 593521 - DNA, 25 bp, Homo sapien
cagtcatttgcagtatctgtcggct

SEQ ID NO: 593522 - DNA, 25 bp, Homo sapien
ttccagtcatttgcagtatctgtcg

SEQ ID NO: 593523 - DNA, 25 bp, Homo sapien
aacacacgatgagagaaagtccagc

SEQ ID NO: 593524 - DNA, 25 bp, Homo sapien
tggctaacctgtcctccgtagggag

SEQ ID NO: 593525 - DNA, 25 bp, Homo sapien
tagatagggtctttcaggttaggcc

SEQ ID NO: 593526 - DNA, 25 bp, Homo sapien
tcatgcttcaggacaggaaatccag

SEQ ID NO: 593527 - DNA, 25 bp, Homo sapien
gaggcaaaatagtcaccagttggga

SEQ ID NO: 593528 - DNA, 25 bp, Homo sapien
aatagtcaccagttgggaactggaa

SEQ ID NO: 593529 - DNA, 25 bp, Homo sapien
aaaatagtcaccagttgggaactgg

SEQ ID NO: 593530 - DNA, 25 bp, Homo sapien
ggcaaaatagtcaccagttgggaac

SEQ ID NO: 593531 - DNA, 25 bp, Homo sapien
caagactcagtctcttgaaggcggt

SEQ ID NO: 593532 - DNA, 25 bp, Homo sapien
caagctagtgttgggaagcaagact

SEQ ID NO: 593533 - DNA, 25 bp, Homo sapien
tatcgcttgcttcagaatgacctgg

SEQ ID NO: 593534 - DNA, 25 bp, Homo sapien
gatggtctcagataccaagctagtg

SEQ ID NO: 593535 - DNA, 25 bp, Homo sapien
atatggagtcgaggaacacactggg

SEQ ID NO: 593536 - DNA, 25 bp, Homo sapien
ggttgatatggagtcgaggaacaca

SEQ ID NO: 593537 - DNA, 25 bp, Homo sapien
gaacgggttgatatggagtcgagga

SEQ ID NO: 593538 - DNA, 25 bp, Homo sapien
acatgagggtgaacgggttgatatg

SEQ ID NO: 593539 - DNA, 25 bp, Homo sapien
gccactgcaccaagctactttgtat

SEQ ID NO: 593540 - DNA, 25 bp, Homo sapien
tagagactgacttcgagatgaccca

SEQ ID NO: 593541 - DNA, 25 bp, Homo sapien
aaaatgtgagcagtcataggttggg

SEQ ID NO: 593542 - DNA, 25 bp, Homo sapien
gataagattactagactgatccatc

SEQ ID NO: 593543 - DNA, 25 bp, Homo sapien
ttatgtagctttcctagctccacaa

SEQ ID NO: 593544 - DNA, 25 bp, Homo sapien
tatgtagctttcctagctccacaat

SEQ ID NO: 593545 - DNA, 25 bp, Homo sapien
catggatatggtcctctaatggatc

SEQ ID NO: 593546 - DNA, 25 bp, Homo sapien
aacatatgtagatcaagggagtcac

SEQ ID NO: 593547 - DNA, 25 bp, Homo sapien
gaaaaggagccttcaccgagattct

SEQ ID NO: 593548 - DNA, 25 bp, Homo sapien
agttctctgattgtcgccctgctgt

SEQ ID NO: 593549 - DNA, 25 bp, Homo sapien
cgtggtggcgtgtgcctgcaatggc

SEQ ID NO: 593550 - DNA, 25 bp, Homo sapien
gtggtggcgtgtgcctgcaatggca

SEQ ID NO: 593551 - DNA, 25 bp, Homo sapien
ggtggcgtgtgcctgcaatggcagg

SEQ ID NO: 593552 - DNA, 25 bp, Homo sapien
tggcgtgtgcctgcaatggcaggca

SEQ ID NO: 593553 - DNA, 25 bp, Homo sapien
cggacgaggcagctagccgggcagg

SEQ ID NO: 593554 - DNA, 25 bp, Homo sapien
acctcccggacgaggcagctagccg

SEQ ID NO: 593555 - DNA, 25 bp, Homo sapien
cccggacgaggcagctagccgggca

SEQ ID NO: 593556 - DNA, 25 bp, Homo sapien
ccggacgaggcagctagccgggcag

SEQ ID NO: 593557 - DNA, 25 bp, Homo sapien
tgaacaaagaaacaaggagcatgct

SEQ ID NO: 593558 - DNA, 25 bp, Homo sapien
aagtgaacaaagaaacaaggagcat

SEQ ID NO: 593559 - DNA, 25 bp, Homo sapien
acaaagaaacaaggagcatgctgcc

SEQ ID NO: 593560 - DNA, 25 bp, Homo sapien
aacaaagaaacaaggagcatgctgc

SEQ ID NO: 593561 - DNA, 25 bp, Homo sapien
taatcaaagaactttgtgcttagca

SEQ ID NO: 593562 - DNA, 25 bp, Homo sapien
tcagtccagatgaatactacacatg

SEQ ID NO: 593563 - DNA, 25 bp, Homo sapien
atcaaagaactttgtgcttagcaaa

SEQ ID NO: 593564 - DNA, 25 bp, Homo sapien
tgaatactacacatgcagtgggttt

SEQ ID NO: 593565 - DNA, 25 bp, Homo sapien
gatgagtgagcatctgctataacat

SEQ ID NO: 593566 - DNA, 25 bp, Homo sapien
ttggcaaccgtatgtgggaaaattc

SEQ ID NO: 593567 - DNA, 25 bp, Homo sapien
tatcttattgtatgaattggcaacc

SEQ ID NO: 593568 - DNA, 25 bp, Homo sapien
atttcaaggcaggttgatgagtgag

SEQ ID NO: 593569 - DNA, 25 bp, Homo sapien
tttaagtctaacatataagtcttta

SEQ ID NO: 593570 - DNA, 25 bp, Homo sapien
ttaagtctaacatataagtctttaa

SEQ ID NO: 593571 - DNA, 25 bp, Homo sapien
tggttttaagtctaacatataagtc

SEQ ID NO: 593572 - DNA, 25 bp, Homo sapien
tttatggttttaagtctaacatata

SEQ ID NO: 593573 - DNA, 25 bp, Homo sapien
cactgcctaggtgcctaggtactaa

SEQ ID NO: 593574 - DNA, 25 bp, Homo sapien
tgaactacgatgatttgctgtacct

SEQ ID NO: 593575 - DNA, 25 bp, Homo sapien
cctgacatgtgttagctatttatcc

SEQ ID NO: 593576 - DNA, 25 bp, Homo sapien
cataggtaaacgtgaactacgatga

SEQ ID NO: 593577 - DNA, 25 bp, Homo sapien
tgggagcagtttctaatggataagc

SEQ ID NO: 593578 - DNA, 25 bp, Homo sapien
ggattctgattaataacgctggata

SEQ ID NO: 593579 - DNA, 25 bp, Homo sapien
ccactgtcggagatgtggcctgctg

SEQ ID NO: 593580 - DNA, 25 bp, Homo sapien
ccctagcgctgctcttgtgatagag

SEQ ID NO: 593581 - DNA, 25 bp, Homo sapien
aaccatatttgctaatttatcaaga

SEQ ID NO: 593582 - DNA, 25 bp, Homo sapien
aattctactgctaaacgttgaagca

SEQ ID NO: 593583 - DNA, 25 bp, Homo sapien
atgaagattatcaccccttccctaa

SEQ ID NO: 593584 - DNA, 25 bp, Homo sapien
tatttatttgaagtcgtgttgtaat

SEQ ID NO: 593585 - DNA, 25 bp, Homo sapien
aagcagagaaagaataccctattca

SEQ ID NO: 593586 - DNA, 25 bp, Homo sapien
tccccattaaagtgctaacatcagt

SEQ ID NO: 593587 - DNA, 25 bp, Homo sapien
gcagagaaagaataccctattcaac

SEQ ID NO: 593588 - DNA, 25 bp, Homo sapien
ccattaaagtgctaacatcagtctt

SEQ ID NO: 593589 - DNA, 25 bp, Homo sapien
gagcagccccaagtttaccaaggaa

SEQ ID NO: 593590 - DNA, 25 bp, Homo sapien
gattgcatgcaatgacgaggctgcc

SEQ ID NO: 593591 - DNA, 25 bp, Homo sapien
ttcattcgaggtgggtcagtttgcc

SEQ ID NO: 593592 - DNA, 25 bp, Homo sapien
cactactgtgttgaggagaggtcca

SEQ ID NO: 593593 - DNA, 25 bp, Homo sapien
caaggacaactaaggccaggacaga

SEQ ID NO: 593594 - DNA, 25 bp, Homo sapien
taaggccaggacagagagtttaatg

SEQ ID NO: 593595 - DNA, 25 bp, Homo sapien
gacagagagtttaatgtctcctgag

SEQ ID NO: 593596 - DNA, 25 bp, Homo sapien
gtctgagccaggaccacaaggacaa

SEQ ID NO: 593597 - DNA, 25 bp, Homo sapien
cacaggatgagactgttgacatatg

SEQ ID NO: 593598 - DNA, 25 bp, Homo sapien
ggccagaggcattcaggatactaga

SEQ ID NO: 593599 - DNA, 25 bp, Homo sapien
tctgcatatggaagggacttcatat

SEQ ID NO: 593600 - DNA, 25 bp, Homo sapien
tactagagatgttggggttgcttct

SEQ ID NO: 593601 - DNA, 25 bp, Homo sapien
cttagagcattgttgggctacagca

SEQ ID NO: 593602 - DNA, 25 bp, Homo sapien
actattattagtcatatccagggac

SEQ ID NO: 593603 - DNA, 25 bp, Homo sapien
tccagggacagcttagagcattgtt

SEQ ID NO: 593604 - DNA, 25 bp, Homo sapien
attattagtcatatccagggacagc

SEQ ID NO: 593605 - DNA, 25 bp, Homo sapien
gagtaatctggtttgcaataagaaa

SEQ ID NO: 593606 - DNA, 25 bp, Homo sapien
gatggagtaatctggtttgcaataa

SEQ ID NO: 593607 - DNA, 25 bp, Homo sapien
tggagtaatctggtttgcaataaga

SEQ ID NO: 593608 - DNA, 25 bp, Homo sapien
gggatggagtaatctggtttgcaat

SEQ ID NO: 593609 - DNA, 25 bp, Homo sapien
agctctcttgggcatgagcatcgtg

SEQ ID NO: 593610 - DNA, 25 bp, Homo sapien
catgagcatcgtggatagaggctgc

SEQ ID NO: 593611 - DNA, 25 bp, Homo sapien
tcttgttggtagttcctagggaggc

SEQ ID NO: 593612 - DNA, 25 bp, Homo sapien
ctcttgttggtagttcctagggagg

SEQ ID NO: 593613 - DNA, 25 bp, Homo sapien
gtctttcggaggacagcccggagtg

SEQ ID NO: 593614 - DNA, 25 bp, Homo sapien
gatggagctctgcatggaagttgtc

SEQ ID NO: 593615 - DNA, 25 bp, Homo sapien
cattgtggtgggacctccaccgtgg

SEQ ID NO: 593616 - DNA, 25 bp, Homo sapien
gaagttgtccatagccttccggatg

SEQ ID NO: 593617 - DNA, 25 bp, Homo sapien
gatagactagggagacgatgctgtt

SEQ ID NO: 593618 - DNA, 25 bp, Homo sapien
acagagccctctgtcgtggagcgac

SEQ ID NO: 593619 - DNA, 25 bp, Homo sapien
tcttcccggaatcagactcaaagga

SEQ ID NO: 593620 - DNA, 25 bp, Homo sapien
caggtggcagaagacgcgattgact

SEQ ID NO: 593621 - DNA, 25 bp, Homo sapien
tgctccatttttgccattcttgatc

SEQ ID NO: 593622 - DNA, 25 bp, Homo sapien
tccatttttgccattcttgatcatc

SEQ ID NO: 593623 - DNA, 25 bp, Homo sapien
ctctcctcagttccctggctattcc

SEQ ID NO: 593624 - DNA, 25 bp, Homo sapien
agttccctggctattccttcctctt

SEQ ID NO: 593625 - DNA, 25 bp, Homo sapien
tattccgtaggctcagcattggtga

SEQ ID NO: 593626 - DNA, 25 bp, Homo sapien
ttaagaagggtgctctgaattcccc

SEQ ID NO: 593627 - DNA, 25 bp, Homo sapien
aattcccctgattatcctgtggaac

SEQ ID NO: 593628 - DNA, 25 bp, Homo sapien
gaaggttgtgagttcccctgccata

SEQ ID NO: 593629 - DNA, 25 bp, Homo sapien
tagtcagtggatatttgctcaaacc

SEQ ID NO: 593630 - DNA, 25 bp, Homo sapien
cagaatggcatgtcgttgaataagc

SEQ ID NO: 593631 - DNA, 25 bp, Homo sapien
gaagccctctaattgatccagaatg

SEQ ID NO: 593632 - DNA, 25 bp, Homo sapien
aacttcaaacatggtgtccagccct

SEQ ID NO: 593633 - DNA, 25 bp, Homo sapien
acaagattgttgcatttagggtggt

SEQ ID NO: 593634 - DNA, 25 bp, Homo sapien
catccaagtcccaacaaggcctgac

SEQ ID NO: 593635 - DNA, 25 bp, Homo sapien
gatcagacaagattgttgcatttag

SEQ ID NO: 593636 - DNA, 25 bp, Homo sapien
ccatccaagtcccaacaaggcctga

SEQ ID NO: 593637 - DNA, 25 bp, Homo sapien
atggctttttaacctgttcaccagg

SEQ ID NO: 593638 - DNA, 25 bp, Homo sapien
tttacatggctttttaacctgttca

SEQ ID NO: 593639 - DNA, 25 bp, Homo sapien
tttatgatccagcaagatttttggc

SEQ ID NO: 593640 - DNA, 25 bp, Homo sapien
ggtttgcagtttttcctgcagtgtc

SEQ ID NO: 593641 - DNA, 25 bp, Homo sapien
ggtcatcagaggtctgggagctgtc

SEQ ID NO: 593642 - DNA, 25 bp, Homo sapien
gagggtcatcagaggtctgggagct

SEQ ID NO: 593643 - DNA, 25 bp, Homo sapien
agggtcatcagaggtctgggagctg

SEQ ID NO: 593644 - DNA, 25 bp, Homo sapien
gggtcatcagaggtctgggagctgt

SEQ ID NO: 593645 - DNA, 25 bp, Homo sapien
ggtccttgggaagcaggaggtggta

SEQ ID NO: 593646 - DNA, 25 bp, Homo sapien
ggaagcaggaggtggtagatccagg

SEQ ID NO: 593647 - DNA, 25 bp, Homo sapien
cttgggaagcaggaggtggtagatc

SEQ ID NO: 593648 - DNA, 25 bp, Homo sapien
tgggaagcaggaggtggtagatcca

SEQ ID NO: 593649 - DNA, 25 bp, Homo sapien
acttggggtaggagcacaagcatag

SEQ ID NO: 593650 - DNA, 25 bp, Homo sapien
aggagcacaagcataggaagagcca

SEQ ID NO: 593651 - DNA, 25 bp, Homo sapien
ctgggatcacttggggtaggagcac

SEQ ID NO: 593652 - DNA, 25 bp, Homo sapien
gtaggagcacaagcataggaagagc

SEQ ID NO: 593653 - DNA, 25 bp, Homo sapien
tgcagtgggagtctgaacaagagtt

SEQ ID NO: 593654 - DNA, 25 bp, Homo sapien
aggcgttcagaacgctgtgtgcagt

SEQ ID NO: 593655 - DNA, 25 bp, Homo sapien
agtctgaacaagagttattggcctc

SEQ ID NO: 593656 - DNA, 25 bp, Homo sapien
ctgaacgccagggtagacccaggcg

SEQ ID NO: 593657 - DNA, 25 bp, Homo sapien
tcaataattcctggtgttgagtcac

SEQ ID NO: 593658 - DNA, 25 bp, Homo sapien
cattggatggaatgcagcaagctcg

SEQ ID NO: 593659 - DNA, 25 bp, Homo sapien
tgggagatgtcgcaggaactcgcct

SEQ ID NO: 593660 - DNA, 25 bp, Homo sapien
gaactcgcctgtggtcttcattgga

SEQ ID NO: 593661 - DNA, 25 bp, Homo sapien
tcaaagtagtctgtcgtgaacctta

SEQ ID NO: 593662 - DNA, 25 bp, Homo sapien
caaagtagtctgtcgtgaaccttac

SEQ ID NO: 593663 - DNA, 25 bp, Homo sapien
tggtgaacatttggaagagaggtct

SEQ ID NO: 593664 - DNA, 25 bp, Homo sapien
tcatgagctatggtgaacatttgga

SEQ ID NO: 593665 - DNA, 25 bp, Homo sapien
tgttgttggaatagctaactaagct

SEQ ID NO: 593666 - DNA, 25 bp, Homo sapien
tgagaagacagaacgatacatgaag

SEQ ID NO: 593667 - DNA, 25 bp, Homo sapien
aaattttagacttctttacacagct

SEQ ID NO: 593668 - DNA, 25 bp, Homo sapien
tgaagttgtgcataggtcactagca

SEQ ID NO: 593669 - DNA, 25 bp, Homo sapien
tcaaggcttggtcaaaaagatgggt

SEQ ID NO: 593670 - DNA, 25 bp, Homo sapien
caaataaagctctcagtaatcaggt

SEQ ID NO: 593671 - DNA, 25 bp, Homo sapien
gaccacttatgctgccatgaagaca

SEQ ID NO: 593672 - DNA, 25 bp, Homo sapien
ggagtcttcatagctcacacctggg

SEQ ID NO: 593673 - DNA, 25 bp, Homo sapien
tgtctataaatctttgtccacaagt

SEQ ID NO: 593674 - DNA, 25 bp, Homo sapien
tgcacctgtctataaatctttgtcc

SEQ ID NO: 593675 - DNA, 25 bp, Homo sapien
ttttgcacctgtctataaatctttg

SEQ ID NO: 593676 - DNA, 25 bp, Homo sapien
cacctgtctataaatctttgtccac

SEQ ID NO: 593677 - DNA, 25 bp, Homo sapien
tgtagaggtcaaatgcgctcaaggc

SEQ ID NO: 593678 - DNA, 25 bp, Homo sapien
agaaacttggcttcgttttcactga

SEQ ID NO: 593679 - DNA, 25 bp, Homo sapien
gcttcttgagatcttgcctattttc

SEQ ID NO: 593680 - DNA, 25 bp, Homo sapien
aaattgtaactaaaatgtatcgagc

SEQ ID NO: 593681 - DNA, 25 bp, Homo sapien
ctgcaagtccgatgccacggctgag

SEQ ID NO: 593682 - DNA, 25 bp, Homo sapien
ctccctttgtcatttaggtcagcag

SEQ ID NO: 593683 - DNA, 25 bp, Homo sapien
gctaaggcagcccaaaatgaagctg

SEQ ID NO: 593684 - DNA, 25 bp, Homo sapien
ccctcagctgcccacgggtacagcc

SEQ ID NO: 593685 - DNA, 25 bp, Homo sapien
gctgggataagagcagcagcacagt

SEQ ID NO: 593686 - DNA, 25 bp, Homo sapien
gagcagcagcacagtcaaagtcagc

SEQ ID NO: 593687 - DNA, 25 bp, Homo sapien
tcaaagtcagcaaaaggagcttcat

SEQ ID NO: 593688 - DNA, 25 bp, Homo sapien
cagcagcacagtcaaagtcagcaaa

SEQ ID NO: 593689 - DNA, 25 bp, Homo sapien
tgcctcttagagcatagctcaggga

SEQ ID NO: 593690 - DNA, 25 bp, Homo sapien
gaaactggtagctcttcagagaaat

SEQ ID NO: 593691 - DNA, 25 bp, Homo sapien
aactggtagctcttcagagaaattc

SEQ ID NO: 593692 - DNA, 25 bp, Homo sapien
tctctgcctcttagagcatagctca

SEQ ID NO: 593693 - DNA, 25 bp, Homo sapien
caagtaggctccggatttgaaaggt

SEQ ID NO: 593694 - DNA, 25 bp, Homo sapien
acaagtaggctccggatttgaaagg

SEQ ID NO: 593695 - DNA, 25 bp, Homo sapien
aacaagtaggctccggatttgaaag

SEQ ID NO: 593696 - DNA, 25 bp, Homo sapien
gcagaaagaagggagacagtatcag

SEQ ID NO: 593697 - DNA, 25 bp, Homo sapien
aagcagaaagaagggagacagtatc

SEQ ID NO: 593698 - DNA, 25 bp, Homo sapien
ctgacacaaagcagaaagaagggag

SEQ ID NO: 593699 - DNA, 25 bp, Homo sapien
agaaagaagggagacagtatcagtc

SEQ ID NO: 593700 - DNA, 25 bp, Homo sapien
gtacttgggcttcacgcagcacatt

SEQ ID NO: 593701 - DNA, 25 bp, Homo sapien
gagcatctgtaacggcatttgccat

SEQ ID NO: 593702 - DNA, 25 bp, Homo sapien
tccttcttggagcatctgtaacggc

SEQ ID NO: 593703 - DNA, 25 bp, Homo sapien
tttgccataaagattccagcatctt

SEQ ID NO: 593704 - DNA, 25 bp, Homo sapien
gtgggaatccactgggagcttcatc

SEQ ID NO: 593705 - DNA, 25 bp, Homo sapien
gggtggcagacgagaaaggaaggat

SEQ ID NO: 593706 - DNA, 25 bp, Homo sapien
ggtggcagacgagaaaggaaggatg

SEQ ID NO: 593707 - DNA, 25 bp, Homo sapien
agggtggcagacgagaaaggaagga

SEQ ID NO: 593708 - DNA, 25 bp, Homo sapien
ggatgctccaggctgtaccacccgc

SEQ ID NO: 593709 - DNA, 25 bp, Homo sapien
tccaggctgtaccacccgcctcagt

SEQ ID NO: 593710 - DNA, 25 bp, Homo sapien
gggtccagggtccctcgcagctcca

SEQ ID NO: 593711 - DNA, 25 bp, Homo sapien
ccgcctcagtgagcagcccctcagg

SEQ ID NO: 593712 - DNA, 25 bp, Homo sapien
cctggcgaactctgctccaacttga

SEQ ID NO: 593713 - DNA, 25 bp, Homo sapien
tggcggcgcgtagcgcagggcttta

SEQ ID NO: 593714 - DNA, 25 bp, Homo sapien
cctattcctgccaacgctgccgaat

SEQ ID NO: 593715 - DNA, 25 bp, Homo sapien
tccaacttgagcaagttggcggcgc

SEQ ID NO: 593716 - DNA, 25 bp, Homo sapien
actgcttttggggacgggagctgcc

SEQ ID NO: 593717 - DNA, 25 bp, Homo sapien
ttggggacgggagctgccgccggtc

SEQ ID NO: 593718 - DNA, 25 bp, Homo sapien
gagcggctggcgctacggcctccaa

SEQ ID NO: 593719 - DNA, 25 bp, Homo sapien
aggccccaggttaggtgacaggaca

SEQ ID NO: 593720 - DNA, 25 bp, Homo sapien
ctttctatagtgtcctgatgagctg

SEQ ID NO: 593721 - DNA, 25 bp, Homo sapien
cttcttggggcagaaagtccctagg

SEQ ID NO: 593722 - DNA, 25 bp, Homo sapien
gcagaaagtccctaggttttctggc

SEQ ID NO: 593723 - DNA, 25 bp, Homo sapien
ggaattggctgtcagccaattgctt

SEQ ID NO: 593724 - DNA, 25 bp, Homo sapien
ggattcagaagaccaatcatctggg

SEQ ID NO: 593725 - DNA, 25 bp, Homo sapien
gagccttcagagtcgctggattcag

SEQ ID NO: 593726 - DNA, 25 bp, Homo sapien
gattgagtggaaggcactgtgctca

SEQ ID NO: 593727 - DNA, 25 bp, Homo sapien
ggatctccaagtagcaccacacggt

SEQ ID NO: 593728 - DNA, 25 bp, Homo sapien
ccttgaccattgtgcaggctgtgcc

SEQ ID NO: 593729 - DNA, 25 bp, Homo sapien
gggcatcgtgcatgtcatagtctaa

SEQ ID NO: 593730 - DNA, 25 bp, Homo sapien
catagtctaagtgaatgatgcccct

SEQ ID NO: 593731 - DNA, 25 bp, Homo sapien
gatgccccttagagttgaacagtgc

SEQ ID NO: 593732 - DNA, 25 bp, Homo sapien
tctcttctatcttccctgtacccca

SEQ ID NO: 593733 - DNA, 25 bp, Homo sapien
cttctatcttccctgtaccccatca

SEQ ID NO: 593734 - DNA, 25 bp, Homo sapien
ttctatcttccctgtaccccatcat

SEQ ID NO: 593735 - DNA, 25 bp, Homo sapien
catctcttctatcttccctgtaccc

SEQ ID NO: 593736 - DNA, 25 bp, Homo sapien
aggtgtccacgaccaccagtgtggt

SEQ ID NO: 593737 - DNA, 25 bp, Homo sapien
ccaggtgtccacgaccaccagtgtg

SEQ ID NO: 593738 - DNA, 25 bp, Homo sapien
catccaccgtgagggtcctctcata

SEQ ID NO: 593739 - DNA, 25 bp, Homo sapien
caccgtgagggtcctctcatataca

SEQ ID NO: 593740 - DNA, 25 bp, Homo sapien
caggaaggagtctagtattaggctc

SEQ ID NO: 593741 - DNA, 25 bp, Homo sapien
agtctagtattaggctcagcacccc

SEQ ID NO: 593742 - DNA, 25 bp, Homo sapien
gacaggaaggagtctagtattaggc

SEQ ID NO: 593743 - DNA, 25 bp, Homo sapien
gaaggagtctagtattaggctcagc

SEQ ID NO: 593744 - DNA, 25 bp, Homo sapien
gatgatgggcacatggtctgcctga

SEQ ID NO: 593745 - DNA, 25 bp, Homo sapien
tctgcctgatgtgtgcgccgcagct

SEQ ID NO: 593746 - DNA, 25 bp, Homo sapien
gcctcggtctgcgatggagtatacg

SEQ ID NO: 593747 - DNA, 25 bp, Homo sapien
tccacagagacttctcggcagcggg

SEQ ID NO: 593748 - DNA, 25 bp, Homo sapien
gaatttacagtcgaacaccacagcg

SEQ ID NO: 593749 - DNA, 25 bp, Homo sapien
agagctcggccacattgtgctgcag

SEQ ID NO: 593750 - DNA, 25 bp, Homo sapien
cacattgtgctgcagcgtggcggat

SEQ ID NO: 593751 - DNA, 25 bp, Homo sapien
gtcccggcggcgcaagcgcagttgg

SEQ ID NO: 593752 - DNA, 25 bp, Homo sapien
tcagagcacggccagattgtggcag

SEQ ID NO: 593753 - DNA, 25 bp, Homo sapien
gtgccaggaagcgacgagcgcgctg

SEQ ID NO: 593754 - DNA, 25 bp, Homo sapien
gtgcgctgcgggctgtcaggcgtgc

SEQ ID NO: 593755 - DNA, 25 bp, Homo sapien
ggagcgggccttgagtgcccggcgg

SEQ ID NO: 593756 - DNA, 25 bp, Homo sapien
cagactccaggtaacggcgcctttg

SEQ ID NO: 593757 - DNA, 25 bp, Homo sapien
caggcaagcaagacccatgatgcag

SEQ ID NO: 593758 - DNA, 25 bp, Homo sapien
tggagcccagaatgcacctcagtga

SEQ ID NO: 593759 - DNA, 25 bp, Homo sapien
aaaactactttgtgcccagcttggg

SEQ ID NO: 593760 - DNA, 25 bp, Homo sapien
ctggaagagccgagatggagaggtc

SEQ ID NO: 593761 - DNA, 25 bp, Homo sapien
tactttattgatgcgccctgacgcc

SEQ ID NO: 593762 - DNA, 25 bp, Homo sapien
gggcagtaggtggagacgcctggaa

SEQ ID NO: 593763 - DNA, 25 bp, Homo sapien
agaccagtctacagtcaagtgtaga

SEQ ID NO: 593764 - DNA, 25 bp, Homo sapien
tggggtgtgggagtgagtgccatcc

SEQ ID NO: 593765 - DNA, 25 bp, Homo sapien
tgtgggagtgagtgccatccatccc

SEQ ID NO: 593766 - DNA, 25 bp, Homo sapien
gggtgtgggagtgagtgccatccat

SEQ ID NO: 593767 - DNA, 25 bp, Homo sapien
gtgtgggagtgagtgccatccatcc

SEQ ID NO: 593768 - DNA, 25 bp, Homo sapien
tctgccaactttccacagctagagc

SEQ ID NO: 593769 - DNA, 25 bp, Homo sapien
gcatttttccgggtttgatatcatt

SEQ ID NO: 593770 - DNA, 25 bp, Homo sapien
tcattttttccactctcccggctgc

SEQ ID NO: 593771 - DNA, 25 bp, Homo sapien
tccatccggcctgcatttttccggg

SEQ ID NO: 593772 - DNA, 25 bp, Homo sapien
taagatatgatagcagggtgagacc

SEQ ID NO: 593773 - DNA, 25 bp, Homo sapien
gcaaggccttaagatatgatagcag

SEQ ID NO: 593774 - DNA, 25 bp, Homo sapien
tagcagggtgagacccagtggctca

SEQ ID NO: 593775 - DNA, 25 bp, Homo sapien
tttctgcaaggccttaagatatgat

SEQ ID NO: 593776 - DNA, 25 bp, Homo sapien
cactgagggcccttccctcaaggag

SEQ ID NO: 593777 - DNA, 25 bp, Homo sapien
ctgggatcagagcagcactgagggc

SEQ ID NO: 593778 - DNA, 25 bp, Homo sapien
cactgttgtaggtgctgggatcaga

SEQ ID NO: 593779 - DNA, 25 bp, Homo sapien
tcagagcagcactgagggcccttcc

SEQ ID NO: 593780 - DNA, 25 bp, Homo sapien
ttaaactataataggctgaggaaga

SEQ ID NO: 593781 - DNA, 25 bp, Homo sapien
aaactataataggctgaggaagagt

SEQ ID NO: 593782 - DNA, 25 bp, Homo sapien
taaactataataggctgaggaagag

SEQ ID NO: 593783 - DNA, 25 bp, Homo sapien
catccccagagagtcgagtttgcca

SEQ ID NO: 593784 - DNA, 25 bp, Homo sapien
gccctggcgaagatctctgagaata

SEQ ID NO: 593785 - DNA, 25 bp, Homo sapien
tctcagatcttaaccagccctggcg

SEQ ID NO: 593786 - DNA, 25 bp, Homo sapien
agatttaccaggcagagggaccgca

SEQ ID NO: 593787 - DNA, 25 bp, Homo sapien
tacccgaagaggtggctagactgtg

SEQ ID NO: 593788 - DNA, 25 bp, Homo sapien
gatcagggagatctcctacccgaag

SEQ ID NO: 593789 - DNA, 25 bp, Homo sapien
ggcaccgtggtcagaggcttcacgt

SEQ ID NO: 593790 - DNA, 25 bp, Homo sapien
tggttcagtgccaggcggagtccct

SEQ ID NO: 593791 - DNA, 25 bp, Homo sapien
gcagctccccttgctcaggtgccct

SEQ ID NO: 593792 - DNA, 25 bp, Homo sapien
ggaggctgcagctccccttgctcag

SEQ ID NO: 593793 - DNA, 25 bp, Homo sapien
tgggaggctgcagctccccttgctc

SEQ ID NO: 593794 - DNA, 25 bp, Homo sapien
gctgcagctccccttgctcaggtgc

SEQ ID NO: 593795 - DNA, 25 bp, Homo sapien
aggatgtccatgctgccaggatcct

SEQ ID NO: 593796 - DNA, 25 bp, Homo sapien
tctctttcacagaaaaccaggcttg

SEQ ID NO: 593797 - DNA, 25 bp, Homo sapien
gaagccaggatgtccatgctgccag

SEQ ID NO: 593798 - DNA, 25 bp, Homo sapien
ccctggaagccaggatgtccatgct

SEQ ID NO: 593799 - DNA, 25 bp, Homo sapien
tttgatttgggggtggattccagtc

SEQ ID NO: 593800 - DNA, 25 bp, Homo sapien
catgatgctttgatttgggggtgga

SEQ ID NO: 593801 - DNA, 25 bp, Homo sapien
atgctttgatttgggggtggattcc

SEQ ID NO: 593802 - DNA, 25 bp, Homo sapien
gatttgggggtggattccagtccat

SEQ ID NO: 593803 - DNA, 25 bp, Homo sapien
aaggcaacaggaagtgacgtgctcc

SEQ ID NO: 593804 - DNA, 25 bp, Homo sapien
caacaggaagtgacgtgctccctcc

SEQ ID NO: 593805 - DNA, 25 bp, Homo sapien
ctaaggcaacaggaagtgacgtgct

SEQ ID NO: 593806 - DNA, 25 bp, Homo sapien
ggcaacaggaagtgacgtgctccct

SEQ ID NO: 593807 - DNA, 25 bp, Homo sapien
cagcagggacgcaggcggagacacc

SEQ ID NO: 593808 - DNA, 25 bp, Homo sapien
ctccggttgctgcagcagggacgca

SEQ ID NO: 593809 - DNA, 25 bp, Homo sapien
ggttgctgcagcagggacgcaggcg

SEQ ID NO: 593810 - DNA, 25 bp, Homo sapien
agcagggacgcaggcggagacaccg

SEQ ID NO: 593811 - DNA, 25 bp, Homo sapien
cgagggtgcgttcgggatccgactc

SEQ ID NO: 593812 - DNA, 25 bp, Homo sapien
gggtgcgttcgggatccgactccag

SEQ ID NO: 593813 - DNA, 25 bp, Homo sapien
agggtgcgttcgggatccgactcca

SEQ ID NO: 593814 - DNA, 25 bp, Homo sapien
ggcgagggtgcgttcgggatccgac

SEQ ID NO: 593815 - DNA, 25 bp, Homo sapien
gaggctgccgtaggccagcgcgatg

SEQ ID NO: 593816 - DNA, 25 bp, Homo sapien
gcgccgaagaagatgggcagcagcg

SEQ ID NO: 593817 - DNA, 25 bp, Homo sapien
atgccctcgggcgtggaaggcggcc

SEQ ID NO: 593818 - DNA, 25 bp, Homo sapien
cactgccgttatgcggatcgctgag

SEQ ID NO: 593819 - DNA, 25 bp, Homo sapien
tctgtctgggatataggactctgac

SEQ ID NO: 593820 - DNA, 25 bp, Homo sapien
tactgcctgggtcatattcgcttct

SEQ ID NO: 593821 - DNA, 25 bp, Homo sapien
gattaaccgctgcattgctttcagg

SEQ ID NO: 593822 - DNA, 25 bp, Homo sapien
tcgctgagggccctttaaaccaatg

SEQ ID NO: 593823 - DNA, 25 bp, Homo sapien
gaagttctttccatagtagccaggc

SEQ ID NO: 593824 - DNA, 25 bp, Homo sapien
tccaaacagggtcaaaagcttccag

SEQ ID NO: 593825 - DNA, 25 bp, Homo sapien
aagcaccagcatccctagaagaagg

SEQ ID NO: 593826 - DNA, 25 bp, Homo sapien
taccaaaagtcctagcaatgccaga

SEQ ID NO: 593827 - DNA, 25 bp, Homo sapien
cagaggccattccagtatggaataa

SEQ ID NO: 593828 - DNA, 25 bp, Homo sapien
ctggctgatcctgccattctaccat

SEQ ID NO: 593829 - DNA, 25 bp, Homo sapien
aacccagggcatgtgtgacacatct

SEQ ID NO: 593830 - DNA, 25 bp, Homo sapien
tggaccctgatcaagagaccaagga

SEQ ID NO: 593831 - DNA, 25 bp, Homo sapien
tggggaagcgggcggcatcccggct

SEQ ID NO: 593832 - DNA, 25 bp, Homo sapien
gcatcccggctggtgattgtttcag

SEQ ID NO: 593833 - DNA, 25 bp, Homo sapien
atgatggggaagcgggcggcatccc

SEQ ID NO: 593834 - DNA, 25 bp, Homo sapien
tcccggctggtgattgtttcaggca

SEQ ID NO: 593835 - DNA, 25 bp, Homo sapien
agtggggttttggatgactgctgtt

SEQ ID NO: 593836 - DNA, 25 bp, Homo sapien
ctccgaagggaaactgtgactgtct

SEQ ID NO: 593837 - DNA, 25 bp, Homo sapien
gtagtggggttttggatgactgctg

SEQ ID NO: 593838 - DNA, 25 bp, Homo sapien
tggggttttggatgactgctgtttt

SEQ ID NO: 593839 - DNA, 25 bp, Homo sapien
agctgacgtactattaaaaagaaca

SEQ ID NO: 593840 - DNA, 25 bp, Homo sapien
tggctcactgaaaactgtgcctccc

SEQ ID NO: 593841 - DNA, 25 bp, Homo sapien
ttggctcactgaaaactgtgcctcc

SEQ ID NO: 593842 - DNA, 25 bp, Homo sapien
cttggctcactgaaaactgtgcctc

SEQ ID NO: 593843 - DNA, 25 bp, Homo sapien
taagcccatttctagcaagagtaca

SEQ ID NO: 593844 - DNA, 25 bp, Homo sapien
caagagtacaggctttagagcatgg

SEQ ID NO: 593845 - DNA, 25 bp, Homo sapien
taaaaagccagagccacaactaagc

SEQ ID NO: 593846 - DNA, 25 bp, Homo sapien
cccatgtggattgggcaccaggtct

SEQ ID NO: 593847 - DNA, 25 bp, Homo sapien
tgttggaacctcagaactcgctctt

SEQ ID NO: 593848 - DNA, 25 bp, Homo sapien
gggagtcttcagtatagagccccag

SEQ ID NO: 593849 - DNA, 25 bp, Homo sapien
agagtccctgcgtctcttctggagg

SEQ ID NO: 593850 - DNA, 25 bp, Homo sapien
gttctgaagggataagggagtcttc

SEQ ID NO: 593851 - DNA, 25 bp, Homo sapien
cagcaggaggttgatgtactcctgg

SEQ ID NO: 593852 - DNA, 25 bp, Homo sapien
gcaggaggttgatgtactcctggga

SEQ ID NO: 593853 - DNA, 25 bp, Homo sapien
acgaagaaatacatggacagcagga

SEQ ID NO: 593854 - DNA, 25 bp, Homo sapien
acagcaggaggttgatgtactcctg

SEQ ID NO: 593855 - DNA, 25 bp, Homo sapien
atccaagaccctgtactggttcccg

SEQ ID NO: 593856 - DNA, 25 bp, Homo sapien
caagaccctgtactggttcccgaga

SEQ ID NO: 593857 - DNA, 25 bp, Homo sapien
ccctgtactggttcccgagaaagct

SEQ ID NO: 593858 - DNA, 25 bp, Homo sapien
gtactggttcccgagaaagctgctt

SEQ ID NO: 593859 - DNA, 25 bp, Homo sapien
tctgaatgatgccaaaagtcatgtt

SEQ ID NO: 593860 - DNA, 25 bp, Homo sapien
ctgaatgatgccaaaagtcatgttc

SEQ ID NO: 593861 - DNA, 25 bp, Homo sapien
ctctgaatgatgccaaaagtcatgt

SEQ ID NO: 593862 - DNA, 25 bp, Homo sapien
cacgatcatgtgtgaggagcccaac

SEQ ID NO: 593863 - DNA, 25 bp, Homo sapien
taaggtagtcaaatgccagagccca

SEQ ID NO: 593864 - DNA, 25 bp, Homo sapien
tggctccttacgaaacacgatcatg

SEQ ID NO: 593865 - DNA, 25 bp, Homo sapien
cactgaaaggacacgagcatgtggc

SEQ ID NO: 593866 - DNA, 25 bp, Homo sapien
tttgtcctgtgagcaagggcgactg

SEQ ID NO: 593867 - DNA, 25 bp, Homo sapien
gggtctcaagcgtctcacagatgct

SEQ ID NO: 593868 - DNA, 25 bp, Homo sapien
caggtccaccacgaaaggaatggtt

SEQ ID NO: 593869 - DNA, 25 bp, Homo sapien
ccgagtagctgggtgcgtcatcaca

SEQ ID NO: 593870 - DNA, 25 bp, Homo sapien
gatctgttgtttggatcctgaggaa

SEQ ID NO: 593871 - DNA, 25 bp, Homo sapien
agtttgtggatacaggcagctgatc

SEQ ID NO: 593872 - DNA, 25 bp, Homo sapien
cctgaggaaggtctaagtttgtgga

SEQ ID NO: 593873 - DNA, 25 bp, Homo sapien
tgaatcctggtggttacataacccc

SEQ ID NO: 593874 - DNA, 25 bp, Homo sapien
ggcccttgatggctcatgtcaaacg

SEQ ID NO: 593875 - DNA, 25 bp, Homo sapien
ttttgtagcaggcagagattcttcc

SEQ ID NO: 593876 - DNA, 25 bp, Homo sapien
tagacatctgctaaaatgcttgctg

SEQ ID NO: 593877 - DNA, 25 bp, Homo sapien
caaacgtaaaggtcattgcttccca

SEQ ID NO: 593878 - DNA, 25 bp, Homo sapien
tcatctggaatgctacaacaccttt

SEQ ID NO: 593879 - DNA, 25 bp, Homo sapien
cagttaaagacatggactccggagc

SEQ ID NO: 593880 - DNA, 25 bp, Homo sapien
taaatgagcacttggcaccctataa

SEQ ID NO: 593881 - DNA, 25 bp, Homo sapien
tcttgggaaacttacttaactgctc

SEQ ID NO: 593882 - DNA, 25 bp, Homo sapien
tatatgagtcccttgtcaagaagca

SEQ ID NO: 593883 - DNA, 25 bp, Homo sapien
tacagactcagctggaatcaatcag

SEQ ID NO: 593884 - DNA, 25 bp, Homo sapien
cagaagcagatagactgaaggcaaa

SEQ ID NO: 593885 - DNA, 25 bp, Homo sapien
cagatgaatcatagcccctgggcag

SEQ ID NO: 593886 - DNA, 25 bp, Homo sapien
ggtactgtcgatttggaaagctggc

SEQ ID NO: 593887 - DNA, 25 bp, Homo sapien
gaagagcagctggtactgtcgattt

SEQ ID NO: 593888 - DNA, 25 bp, Homo sapien
tgtcgatttggaaagctggctggaa

SEQ ID NO: 593889 - DNA, 25 bp, Homo sapien
cagctggtactgtcgatttggaaag

SEQ ID NO: 593890 - DNA, 25 bp, Homo sapien
cccagggtcccatgtctagacaata

SEQ ID NO: 593891 - DNA, 25 bp, Homo sapien
tcagagaggtaaggcgttcacccag

SEQ ID NO: 593892 - DNA, 25 bp, Homo sapien
tggagaaccccaatattggagagac

SEQ ID NO: 593893 - DNA, 25 bp, Homo sapien
cacttcatcagttgctctattggag

SEQ ID NO: 593894 - DNA, 25 bp, Homo sapien
atgctttccacttattgactcgcca

SEQ ID NO: 593895 - DNA, 25 bp, Homo sapien
gaggcagtgatcacactaaaaatat

SEQ ID NO: 593896 - DNA, 25 bp, Homo sapien
tttcaaaccttaggtgaggcagtga

SEQ ID NO: 593897 - DNA, 25 bp, Homo sapien
tccacttattgactcgccatcttaa

SEQ ID NO: 593898 - DNA, 25 bp, Homo sapien
tgctgtttggtcaagcattgataat

SEQ ID NO: 593899 - DNA, 25 bp, Homo sapien
ctgtttggtcaagcattgataatct

SEQ ID NO: 593900 - DNA, 25 bp, Homo sapien
ttgaatccataccctaactaaccta

SEQ ID NO: 593901 - DNA, 25 bp, Homo sapien
ttggtcaagcattgataatcttgtt

SEQ ID NO: 593902 - DNA, 25 bp, Homo sapien
acagaggttccttagagatgcacaa

SEQ ID NO: 593903 - DNA, 25 bp, Homo sapien
attgtttaacagaggttccttagag

SEQ ID NO: 593904 - DNA, 25 bp, Homo sapien
tttaacagaggttccttagagatgc

SEQ ID NO: 593905 - DNA, 25 bp, Homo sapien
taacagaggttccttagagatgcac

SEQ ID NO: 593906 - DNA, 25 bp, Homo sapien
cggcctgccagacggtcagagccgt

SEQ ID NO: 593907 - DNA, 25 bp, Homo sapien
ctgccagacggtcagagccgttgtc

SEQ ID NO: 593908 - DNA, 25 bp, Homo sapien
cacgcggcctgccagacggtcagag

SEQ ID NO: 593909 - DNA, 25 bp, Homo sapien
gcctgccagacggtcagagccgttg

SEQ ID NO: 593910 - DNA, 25 bp, Homo sapien
gaagcgggcgacaacagggaaacaa

SEQ ID NO: 593911 - DNA, 25 bp, Homo sapien
atccagggtgaagcgggcgacaaca

SEQ ID NO: 593912 - DNA, 25 bp, Homo sapien
acaaacggaattggcaaggctccgg

SEQ ID NO: 593913 - DNA, 25 bp, Homo sapien
gaaacaaacggaattggcaaggctc

SEQ ID NO: 593914 - DNA, 25 bp, Homo sapien
ctcttaatgcccttaataactgacg

SEQ ID NO: 593915 - DNA, 25 bp, Homo sapien
cagttggctcttaatgcccttaata

SEQ ID NO: 593916 - DNA, 25 bp, Homo sapien
ggaaattgctctaccagttggctct

SEQ ID NO: 593917 - DNA, 25 bp, Homo sapien
tctaccagttggctcttaatgccct

SEQ ID NO: 593918 - DNA, 25 bp, Homo sapien
gatttctgtatgttcgtggcatcgg

SEQ ID NO: 593919 - DNA, 25 bp, Homo sapien
aggatttctgtatgttcgtggcatc

SEQ ID NO: 593920 - DNA, 25 bp, Homo sapien
ggtaaggatttctgtatgttcgtgg

SEQ ID NO: 593921 - DNA, 25 bp, Homo sapien
ttctgtatgttcgtggcatcggact

SEQ ID NO: 593922 - DNA, 25 bp, Homo sapien
tatttgtgaagcaaccttagagttg

SEQ ID NO: 593923 - DNA, 25 bp, Homo sapien
tgtgaagcaaccttagagttggaca

SEQ ID NO: 593924 - DNA, 25 bp, Homo sapien
tttgtgaagcaaccttagagttgga

SEQ ID NO: 593925 - DNA, 25 bp, Homo sapien
tgaagcaaccttagagttggacaaa

SEQ ID NO: 593926 - DNA, 25 bp, Homo sapien
tccgctgtgactgctacaatcgtat

SEQ ID NO: 593927 - DNA, 25 bp, Homo sapien
taaacctggacacataatatttgcg

SEQ ID NO: 593928 - DNA, 25 bp, Homo sapien
aacctggacacataatatttgcgcc

SEQ ID NO: 593929 - DNA, 25 bp, Homo sapien
tgctacaatcgtatctactgcagca

SEQ ID NO: 593930 - DNA, 25 bp, Homo sapien
aattgcttccaagcttcctaagaag

SEQ ID NO: 593931 - DNA, 25 bp, Homo sapien
agtttgccgggagtcacagagtcca

SEQ ID NO: 593932 - DNA, 25 bp, Homo sapien
gacatcttgatgttagaccattctc

SEQ ID NO: 593933 - DNA, 25 bp, Homo sapien
caactagaggctgtggagtttgccg

SEQ ID NO: 593934 - DNA, 25 bp, Homo sapien
gagcccaggtctttagaaaggtcga

SEQ ID NO: 593935 - DNA, 25 bp, Homo sapien
gatgaagaaggttagcggcagcctc

SEQ ID NO: 593936 - DNA, 25 bp, Homo sapien
cctcagttcactagcaggcgatgaa

SEQ ID NO: 593937 - DNA, 25 bp, Homo sapien
atgcaggtctcaaggaaaggccgga

SEQ ID NO: 593938 - DNA, 25 bp, Homo sapien
cacagtgtcagcgggaagtggtctt

SEQ ID NO: 593939 - DNA, 25 bp, Homo sapien
ttgttacttgtagctgggtgacctt

SEQ ID NO: 593940 - DNA, 25 bp, Homo sapien
ggtctttggtgttagaagcacaggc

SEQ ID NO: 593941 - DNA, 25 bp, Homo sapien
aagcacaggctttgttacttgtagc

SEQ ID NO: 593942 - DNA, 25 bp, Homo sapien
tggctgccccagattagtatgagtt

SEQ ID NO: 593943 - DNA, 25 bp, Homo sapien
tgtgagaggttcacaggctggcggg

SEQ ID NO: 593944 - DNA, 25 bp, Homo sapien
cagattagtatgagtttcagaaggg

SEQ ID NO: 593945 - DNA, 25 bp, Homo sapien
caacccctccaatttcctacaggag

SEQ ID NO: 593946 - DNA, 25 bp, Homo sapien
cagagaggccaggtaagtccactcc

SEQ ID NO: 593947 - DNA, 25 bp, Homo sapien
ccaggtaagtccactccctgaggca

SEQ ID NO: 593948 - DNA, 25 bp, Homo sapien
gcagagaggccaggtaagtccactc

SEQ ID NO: 593949 - DNA, 25 bp, Homo sapien
gaggccaggtaagtccactccctga

SEQ ID NO: 593950 - DNA, 25 bp, Homo sapien
agacgccaacgatgctgctcaggcc

SEQ ID NO: 593951 - DNA, 25 bp, Homo sapien
ggtaccagacgccaacgatgctgct

SEQ ID NO: 593952 - DNA, 25 bp, Homo sapien
ctcagcaggtaccagacgccaacga

SEQ ID NO: 593953 - DNA, 25 bp, Homo sapien
caggtccttggtgtcaaattcataa

SEQ ID NO: 593954 - DNA, 25 bp, Homo sapien
catcctccccttctgcccaggtcct

SEQ ID NO: 593955 - DNA, 25 bp, Homo sapien
accctgccctgtcaaccccatcctc

SEQ ID NO: 593956 - DNA, 25 bp, Homo sapien
gagtgagaccagcttgctgtgaccc

SEQ ID NO: 593957 - DNA, 25 bp, Homo sapien
ctgaggaaagcggggagtgagacca

SEQ ID NO: 593958 - DNA, 25 bp, Homo sapien
tgcaggagctctactccattaaggg

SEQ ID NO: 593959 - DNA, 25 bp, Homo sapien
aggagctctactccattaagggaga

SEQ ID NO: 593960 - DNA, 25 bp, Homo sapien
caggagctctactccattaagggag

SEQ ID NO: 593961 - DNA, 25 bp, Homo sapien
aggtgcaggagctctactccattaa

SEQ ID NO: 593962 - DNA, 25 bp, Homo sapien
ccagaagacatcgtagatgaagagt

SEQ ID NO: 593963 - DNA, 25 bp, Homo sapien
ccactgatactggttctgggcaaca

SEQ ID NO: 593964 - DNA, 25 bp, Homo sapien
agaggacttgctctgcggtccggaa

SEQ ID NO: 593965 - DNA, 25 bp, Homo sapien
taggtaacacccctgctagcaagga

SEQ ID NO: 593966 - DNA, 25 bp, Homo sapien
tagaaaagacctctgatggcccaag

SEQ ID NO: 593967 - DNA, 25 bp, Homo sapien
actgtcaccatcacattggtgccaa

SEQ ID NO: 593968 - DNA, 25 bp, Homo sapien
tcaccatcacattggtgccaaatac

SEQ ID NO: 593969 - DNA, 25 bp, Homo sapien
ttttattggtgcctcgaaggacttg

SEQ ID NO: 593970 - DNA, 25 bp, Homo sapien
ttggtgcctcgaaggacttggccac

SEQ ID NO: 593971 - DNA, 25 bp, Homo sapien
tttggctcatttcacgccatgctgc

SEQ ID NO: 593972 - DNA, 25 bp, Homo sapien
agaggcacgggatagacagcacccg

SEQ ID NO: 593973 - DNA, 25 bp, Homo sapien
aaccaaggcagtttgagaggcacgg

SEQ ID NO: 593974 - DNA, 25 bp, Homo sapien
gccatgctgcaccacgaccaagtgg

SEQ ID NO: 593975 - DNA, 25 bp, Homo sapien
tttacagttctagaaaccagggctc

SEQ ID NO: 593976 - DNA, 25 bp, Homo sapien
cttgttctgaagcagggtgagcccg

SEQ ID NO: 593977 - DNA, 25 bp, Homo sapien
ggatttcatccatagggccttgcaa

SEQ ID NO: 593978 - DNA, 25 bp, Homo sapien
caacaggtacacagaggtgcgtgca

SEQ ID NO: 593979 - DNA, 25 bp, Homo sapien
aagttgtttgcttcgaggcctttct

SEQ ID NO: 593980 - DNA, 25 bp, Homo sapien
gaatgacgacatctccaagtcccag

SEQ ID NO: 593981 - DNA, 25 bp, Homo sapien
cccagcatggcaaagttgtttgctt

SEQ ID NO: 593982 - DNA, 25 bp, Homo sapien
ctggaatgacgacatctccaagtcc

SEQ ID NO: 593983 - DNA, 25 bp, Homo sapien
ctgactggccctccgtaaacggatg

SEQ ID NO: 593984 - DNA, 25 bp, Homo sapien
tgttcactgacacctgaccaggacc

SEQ ID NO: 593985 - DNA, 25 bp, Homo sapien
gagtgtacctcaatctgtcattaga

SEQ ID NO: 593986 - DNA, 25 bp, Homo sapien
ctgttaagattgtcatgaaacgtgc

SEQ ID NO: 593987 - DNA, 25 bp, Homo sapien
cctgcttggattgtggacagggccc

SEQ ID NO: 593988 - DNA, 25 bp, Homo sapien
gccagcctctgcagataagcaggtg

SEQ ID NO: 593989 - DNA, 25 bp, Homo sapien
tgtggttgcgcaggatgtgctatcc

SEQ ID NO: 593990 - DNA, 25 bp, Homo sapien
acagacacactgactagaacccaca

SEQ ID NO: 593991 - DNA, 25 bp, Homo sapien
atgtcaaagcgcagcagcaaggcaa

SEQ ID NO: 593992 - DNA, 25 bp, Homo sapien
ctgatgtcaaagcgcagcagcaagg

SEQ ID NO: 593993 - DNA, 25 bp, Homo sapien
aagcgcagcagcaaggcaatgaaga

SEQ ID NO: 593994 - DNA, 25 bp, Homo sapien
caaagcgcagcagcaaggcaatgaa

SEQ ID NO: 593995 - DNA, 25 bp, Homo sapien
gcccaggccgaagatgtaggctgca

SEQ ID NO: 593996 - DNA, 25 bp, Homo sapien
aagatgtgcatgatgaagatggtaa

SEQ ID NO: 593997 - DNA, 25 bp, Homo sapien
gctggtgtagaagtaggtgtgggta

SEQ ID NO: 593998 - DNA, 25 bp, Homo sapien
gccgaagatgtaggctgcaaagctg

SEQ ID NO: 593999 - DNA, 25 bp, Homo sapien
cagagttccatggttactgggtggt

SEQ ID NO: 594000 - DNA, 25 bp, Homo sapien
ttgcagtgtgtcacctgaactccag

SEQ ID NO: 594001 - DNA, 25 bp, Homo sapien
tgctgggattcacaacagggctccc

SEQ ID NO: 594002 - DNA, 25 bp, Homo sapien
ctgttcaatgctgcgtttcccatgg

SEQ ID NO: 594003 - DNA, 25 bp, Homo sapien
aagatggctcgtctgtatttgggcc

SEQ ID NO: 594004 - DNA, 25 bp, Homo sapien
aaagatggctcgtctgtatttgggc

SEQ ID NO: 594005 - DNA, 25 bp, Homo sapien
attcaaagatggctcgtctgtattt

SEQ ID NO: 594006 - DNA, 25 bp, Homo sapien
tcaaagatggctcgtctgtatttgg

SEQ ID NO: 594007 - DNA, 25 bp, Homo sapien
tccaaggattttcagagaggtaccc

SEQ ID NO: 594008 - DNA, 25 bp, Homo sapien
ggcccagcctgatgtagtgttcgcg

SEQ ID NO: 594009 - DNA, 25 bp, Homo sapien
tcagcgctgcagttttccgataaag

SEQ ID NO: 594010 - DNA, 25 bp, Homo sapien
caatgctagcactgggactacctgt

SEQ ID NO: 594011 - DNA, 25 bp, Homo sapien
cagcaatttgtaatggaacatcccc

SEQ ID NO: 594012 - DNA, 25 bp, Homo sapien
ccccataggtggtgagttcagtgag

SEQ ID NO: 594013 - DNA, 25 bp, Homo sapien
tcccagacggaagtgcagtgatatg

SEQ ID NO: 594014 - DNA, 25 bp, Homo sapien
tcatggtgcgtcttcatgggtgctc

SEQ ID NO: 594015 - DNA, 25 bp, Homo sapien
cgcccagcccaaagagtttctttct

SEQ ID NO: 594016 - DNA, 25 bp, Homo sapien
caccacgttcgccatggtggtctcg

SEQ ID NO: 594017 - DNA, 25 bp, Homo sapien
gggtttcaccacgttcgccatggtg

SEQ ID NO: 594018 - DNA, 25 bp, Homo sapien
cacgcccagcccaaagagtttcttt

SEQ ID NO: 594019 - DNA, 25 bp, Homo sapien
gcacggcactgcctcagggccgtgc

SEQ ID NO: 594020 - DNA, 25 bp, Homo sapien
cagtgactggtccaggaccatagca

SEQ ID NO: 594021 - DNA, 25 bp, Homo sapien
ctggtccaggaccatagcaagtcag

SEQ ID NO: 594022 - DNA, 25 bp, Homo sapien
ggactgaaggacagtgactggtcca

SEQ ID NO: 594023 - DNA, 25 bp, Homo sapien
caccaggacaggaaaaccgatgcag

SEQ ID NO: 594024 - DNA, 25 bp, Homo sapien
caggacaggaaaaccgatgcaggcg

SEQ ID NO: 594025 - DNA, 25 bp, Homo sapien
ccaccaggacaggaaaaccgatgca

SEQ ID NO: 594026 - DNA, 25 bp, Homo sapien
gatgcaggcggggaccaggtatagg

SEQ ID NO: 594027 - DNA, 25 bp, Homo sapien
aacaatgttcccctggagaggtgta

SEQ ID NO: 594028 - DNA, 25 bp, Homo sapien
agatacccccagcaggttccactga

SEQ ID NO: 594029 - DNA, 25 bp, Homo sapien
tcccctggagaggtgtaaagatacc

SEQ ID NO: 594030 - DNA, 25 bp, Homo sapien
ggtggcaggaacaatgttcccctgg

SEQ ID NO: 594031 - DNA, 25 bp, Homo sapien
gccaggtacccatgtactgctgaaa

SEQ ID NO: 594032 - DNA, 25 bp, Homo sapien
ctaacatttggatgggggatgccta

SEQ ID NO: 594033 - DNA, 25 bp, Homo sapien
tagagggctctgatgccttgcgctc

SEQ ID NO: 594034 - DNA, 25 bp, Homo sapien
taaggttcccactggtgtccacagg

SEQ ID NO: 594035 - DNA, 25 bp, Homo sapien
cagaggtgaatgaacagggactgac

SEQ ID NO: 594036 - DNA, 25 bp, Homo sapien
taggacttctgacagtaggcagaga

SEQ ID NO: 594037 - DNA, 25 bp, Homo sapien
cacaacagctattcttaagatccag

SEQ ID NO: 594038 - DNA, 25 bp, Homo sapien
gcactttctaccacactagggcatc

SEQ ID NO: 594039 - DNA, 25 bp, Homo sapien
gggcagacacctgttggagtcacgc

SEQ ID NO: 594040 - DNA, 25 bp, Homo sapien
acctgttggagtcacgcaggccttg

SEQ ID NO: 594041 - DNA, 25 bp, Homo sapien
tgtggtaggtgtggatatggccctg

SEQ ID NO: 594042 - DNA, 25 bp, Homo sapien
gccttgcggtatgggtggggctgtg

SEQ ID NO: 594043 - DNA, 25 bp, Homo sapien
tttagcaccaagcaggtaaaggcca

SEQ ID NO: 594044 - DNA, 25 bp, Homo sapien
gctaagctcagggatcgggtgccat

SEQ ID NO: 594045 - DNA, 25 bp, Homo sapien
cctgatgagggcacaatagcattgg

SEQ ID NO: 594046 - DNA, 25 bp, Homo sapien
cctgtatggcagagcatttagcacc

SEQ ID NO: 594047 - DNA, 25 bp, Homo sapien
acacatcagtgcacaggtgtctgaa

SEQ ID NO: 594048 - DNA, 25 bp, Homo sapien
tgccaccgtctgtgcaagaaaaagt

SEQ ID NO: 594049 - DNA, 25 bp, Homo sapien
gtagctggagcatgagggtgctctc

SEQ ID NO: 594050 - DNA, 25 bp, Homo sapien
tgtgcagaatgctccaagaatgcca

SEQ ID NO: 594051 - DNA, 25 bp, Homo sapien
aagaaagatgcacctagacaaaggc

SEQ ID NO: 594052 - DNA, 25 bp, Homo sapien
ctgtggaaacacctctaagaaatac

SEQ ID NO: 594053 - DNA, 25 bp, Homo sapien
actgtgcagaagaacaagcatgctc

SEQ ID NO: 594054 - DNA, 25 bp, Homo sapien
tagacaaaggcacatcaggccactg

SEQ ID NO: 594055 - DNA, 25 bp, Homo sapien
gaggcaggatttccgccgaggactc

SEQ ID NO: 594056 - DNA, 25 bp, Homo sapien
tatgaggcaggatttccgccgagga

SEQ ID NO: 594057 - DNA, 25 bp, Homo sapien
cctcggggtatgaggcaggatttcc

SEQ ID NO: 594058 - DNA, 25 bp, Homo sapien
gggtatgaggcaggatttccgccga

SEQ ID NO: 594059 - DNA, 25 bp, Homo sapien
gcgccggcggcgagggccagctagc

SEQ ID NO: 594060 - DNA, 25 bp, Homo sapien
cgccggcggcgagggccagctagct

SEQ ID NO: 594061 - DNA, 25 bp, Homo sapien
gccggcggcgagggccagctagctt

SEQ ID NO: 594062 - DNA, 25 bp, Homo sapien
cggggcagtagggggaagcgggcag

SEQ ID NO: 594063 - DNA, 25 bp, Homo sapien
cgggcaggtgggcacccgctgggca

SEQ ID NO: 594064 - DNA, 25 bp, Homo sapien
gcagtagggggaagcgggcaggtgg

SEQ ID NO: 594065 - DNA, 25 bp, Homo sapien
aagcgggcaggtgggcacccgctgg

SEQ ID NO: 594066 - DNA, 25 bp, Homo sapien
tactgcatgacaagggccatttcca

SEQ ID NO: 594067 - DNA, 25 bp, Homo sapien
gataaaccccgtgaggcaggaatgt

SEQ ID NO: 594068 - DNA, 25 bp, Homo sapien
atgtgggccccgcattactggtgag

SEQ ID NO: 594069 - DNA, 25 bp, Homo sapien
ctgtactggcaagcggcaaggtgct

SEQ ID NO: 594070 - DNA, 25 bp, Homo sapien
aacaacaataaaaattcatttagag

SEQ ID NO: 594071 - DNA, 25 bp, Homo sapien
acaacaataaaaattcatttagagg

SEQ ID NO: 594072 - DNA, 25 bp, Homo sapien
gccccttcgatgctgatgcctctgt

SEQ ID NO: 594073 - DNA, 25 bp, Homo sapien
ctgtcactgccgctggatccttagg

SEQ ID NO: 594074 - DNA, 25 bp, Homo sapien
gatccttaggatttgactcctcata

SEQ ID NO: 594075 - DNA, 25 bp, Homo sapien
agccccttcgatgctgatgcctctg

SEQ ID NO: 594076 - DNA, 25 bp, Homo sapien
atctgtctggtctggccctgagagg

SEQ ID NO: 594077 - DNA, 25 bp, Homo sapien
accggtgcacgcctgtgtgggccca

SEQ ID NO: 594078 - DNA, 25 bp, Homo sapien
ctcctgtgccctctaccggtgcacg

SEQ ID NO: 594079 - DNA, 25 bp, Homo sapien
tctgtctggtctggccctgagaggc

SEQ ID NO: 594080 - DNA, 25 bp, Homo sapien
caaaatcagtccacaatacaaaatc

SEQ ID NO: 594081 - DNA, 25 bp, Homo sapien
tgaggcaaaatcagtccacaataca

SEQ ID NO: 594082 - DNA, 25 bp, Homo sapien
gaggcaaaatcagtccacaatacaa

SEQ ID NO: 594083 - DNA, 25 bp, Homo sapien
ggcaaaatcagtccacaatacaaaa

SEQ ID NO: 594084 - DNA, 25 bp, Homo sapien
cagagaatcttccaggagcacagtg

SEQ ID NO: 594085 - DNA, 25 bp, Homo sapien
gagacctagaaaacccagggcaaga

SEQ ID NO: 594086 - DNA, 25 bp, Homo sapien
acccagggcaagacactgggtgctt

SEQ ID NO: 594087 - DNA, 25 bp, Homo sapien
cactgggtgcttaaacagagaatct

SEQ ID NO: 594088 - DNA, 25 bp, Homo sapien
ggtgggcacccttaaggggcttgca

SEQ ID NO: 594089 - DNA, 25 bp, Homo sapien
taaggtcaaatcgatgtccatgggc

SEQ ID NO: 594090 - DNA, 25 bp, Homo sapien
gagatttcagctcttaggccccaga

SEQ ID NO: 594091 - DNA, 25 bp, Homo sapien
acagtcattaggtggcaggcgctcg

SEQ ID NO: 594092 - DNA, 25 bp, Homo sapien
tcatcagccgaagccatatgggcac

SEQ ID NO: 594093 - DNA, 25 bp, Homo sapien
tgagggaggttcaattgttcacccc

SEQ ID NO: 594094 - DNA, 25 bp, Homo sapien
tgagcaagagtgagaaccgccgttt

SEQ ID NO: 594095 - DNA, 25 bp, Homo sapien
ccatctagtaaaggcagggaccggg

SEQ ID NO: 594096 - DNA, 25 bp, Homo sapien
cacgaaaatagctgaggcacggcgc

SEQ ID NO: 594097 - DNA, 25 bp, Homo sapien
tatgttgccgacgatagtttcaaac

SEQ ID NO: 594098 - DNA, 25 bp, Homo sapien
ctatgttgccgacgatagtttcaaa

SEQ ID NO: 594099 - DNA, 25 bp, Homo sapien
ttgccgacgatagtttcaaactcct

SEQ ID NO: 594100 - DNA, 25 bp, Homo sapien
tgttgccgacgatagtttcaaactc

SEQ ID NO: 594101 - DNA, 25 bp, Homo sapien
aaagactccaccaggcattctctgc

SEQ ID NO: 594102 - DNA, 25 bp, Homo sapien
gccagcttccggcagcaaaggaaag

SEQ ID NO: 594103 - DNA, 25 bp, Homo sapien
gctgggtacccccaactgggctgat

SEQ ID NO: 594104 - DNA, 25 bp, Homo sapien
tgaagcagcaccttcgctgggtacc

SEQ ID NO: 594105 - DNA, 25 bp, Homo sapien
tgccaattacagacacaatgcgact

SEQ ID NO: 594106 - DNA, 25 bp, Homo sapien
ctgtcaagaagaaaggatcccggtc

SEQ ID NO: 594107 - DNA, 25 bp, Homo sapien
atcccggtcaggcagaaagaggctc

SEQ ID NO: 594108 - DNA, 25 bp, Homo sapien
tgagctgtgatactcgctgtaaagg

SEQ ID NO: 594109 - DNA, 25 bp, Homo sapien
tgtagaaacccaaacattagcatag

SEQ ID NO: 594110 - DNA, 25 bp, Homo sapien
tcctgagtagatggcgagaggtgag

SEQ ID NO: 594111 - DNA, 25 bp, Homo sapien
taccattacccacaacttgtagaaa

SEQ ID NO: 594112 - DNA, 25 bp, Homo sapien
caaacattagcatagactctccttt

SEQ ID NO: 594113 - DNA, 25 bp, Homo sapien
aaatctgaggcttacgcagcatgcg

SEQ ID NO: 594114 - DNA, 25 bp, Homo sapien
tgtaaatacgtcctaggtcactctg

SEQ ID NO: 594115 - DNA, 25 bp, Homo sapien
gaatcagttggccaaaccacacagg

SEQ ID NO: 594116 - DNA, 25 bp, Homo sapien
tgctgcgcatttgggcctgaacaga

SEQ ID NO: 594117 - DNA, 25 bp, Homo sapien
cttgctcgggggcaatgccaatctc

SEQ ID NO: 594118 - DNA, 25 bp, Homo sapien
gcgtgtcattcttgctcgggggcaa

SEQ ID NO: 594119 - DNA, 25 bp, Homo sapien
gtcattcttgctcgggggcaatgcc

SEQ ID NO: 594120 - DNA, 25 bp, Homo sapien
gctcgggggcaatgccaatctctgt

SEQ ID NO: 594121 - DNA, 25 bp, Homo sapien
ttgccttatcattgtactggatgct

SEQ ID NO: 594122 - DNA, 25 bp, Homo sapien
ggaggtagtgattgccttatcattg

SEQ ID NO: 594123 - DNA, 25 bp, Homo sapien
agtgattgccttatcattgtactgg

SEQ ID NO: 594124 - DNA, 25 bp, Homo sapien
cttggaggtagtgattgccttatca

SEQ ID NO: 594125 - DNA, 25 bp, Homo sapien
ctggacccatgattaattaggtcta

SEQ ID NO: 594126 - DNA, 25 bp, Homo sapien
tggacccatgattaattaggtctaa

SEQ ID NO: 594127 - DNA, 25 bp, Homo sapien
gacccatgattaattaggtctaata

SEQ ID NO: 594128 - DNA, 25 bp, Homo sapien
ggacccatgattaattaggtctaat

SEQ ID NO: 594129 - DNA, 25 bp, Homo sapien
aggaagagcgggtgttgggcggcgg

SEQ ID NO: 594130 - DNA, 25 bp, Homo sapien
gcccgaagtgttcggtgcaggagga

SEQ ID NO: 594131 - DNA, 25 bp, Homo sapien
agagcgggtgttgggcggcggacag

SEQ ID NO: 594132 - DNA, 25 bp, Homo sapien
tcagtgagcccgaagtgttcggtgc

SEQ ID NO: 594133 - DNA, 25 bp, Homo sapien
cgcgcacactaccgaaacaccaaat

SEQ ID NO: 594134 - DNA, 25 bp, Homo sapien
ctccgcgcacactaccgaaacacca

SEQ ID NO: 594135 - DNA, 25 bp, Homo sapien
tccgcgcacactaccgaaacaccaa

SEQ ID NO: 594136 - DNA, 25 bp, Homo sapien
ccgcgcacactaccgaaacaccaaa

SEQ ID NO: 594137 - DNA, 25 bp, Homo sapien
acagtgcaatcttccagccgccagg

SEQ ID NO: 594138 - DNA, 25 bp, Homo sapien
tcctaggagtcttggccttgtaggc

SEQ ID NO: 594139 - DNA, 25 bp, Homo sapien
ttgtaggctccaggacggtcctgcc

SEQ ID NO: 594140 - DNA, 25 bp, Homo sapien
ggagtcttggccttgtaggctccag

SEQ ID NO: 594141 - DNA, 25 bp, Homo sapien
tacagcgggcactgtatgaagagtt

SEQ ID NO: 594142 - DNA, 25 bp, Homo sapien
cgggcactgtatgaagagtttgtct

SEQ ID NO: 594143 - DNA, 25 bp, Homo sapien
ttgtacagcgggcactgtatgaaga

SEQ ID NO: 594144 - DNA, 25 bp, Homo sapien
cagcgggcactgtatgaagagtttg

SEQ ID NO: 594145 - DNA, 25 bp, Homo sapien
tgggcaaagcgaaaaaaatgaggtg

SEQ ID NO: 594146 - DNA, 25 bp, Homo sapien
gtggaagcccgaagcagatacggaa

SEQ ID NO: 594147 - DNA, 25 bp, Homo sapien
acagttaagaacgtggaatgagagt

SEQ ID NO: 594148 - DNA, 25 bp, Homo sapien
gaagcagatacggaaaatggaacag

SEQ ID NO: 594149 - DNA, 25 bp, Homo sapien
cgctcgctgtcttgccggccttcag

SEQ ID NO: 594150 - DNA, 25 bp, Homo sapien
acctcgcccgcaccgctcgctgtct

SEQ ID NO: 594151 - DNA, 25 bp, Homo sapien
ttgccggccttcagcgcgcagctgg

SEQ ID NO: 594152 - DNA, 25 bp, Homo sapien
caccgctcgctgtcttgccggcctt

SEQ ID NO: 594153 - DNA, 25 bp, Homo sapien
ccggcgcagcgcgagatggccacgc

SEQ ID NO: 594154 - DNA, 25 bp, Homo sapien
ggcgcagcgcgagatggccacgctc

SEQ ID NO: 594155 - DNA, 25 bp, Homo sapien
gcgcagcgcgagatggccacgctct

SEQ ID NO: 594156 - DNA, 25 bp, Homo sapien
gcagcgcgagatggccacgctctgc

SEQ ID NO: 594157 - DNA, 25 bp, Homo sapien
tgaaggtccctgatgtagtcgatga

SEQ ID NO: 594158 - DNA, 25 bp, Homo sapien
cagccgttcatgtcgtagagcagca

SEQ ID NO: 594159 - DNA, 25 bp, Homo sapien
tcgatgacgtgctggagaatctcca

SEQ ID NO: 594160 - DNA, 25 bp, Homo sapien
tcggattccgagttcagctccaact

SEQ ID NO: 594161 - DNA, 25 bp, Homo sapien
catagccaggtacccgcaaggatgg

SEQ ID NO: 594162 - DNA, 25 bp, Homo sapien
acggaagtggtgcaagcgcccacgc

SEQ ID NO: 594163 - DNA, 25 bp, Homo sapien
gctttttccaggctccttaggcacc

SEQ ID NO: 594164 - DNA, 25 bp, Homo sapien
tgaaaacgagaagaaatgagaccgg

SEQ ID NO: 594165 - DNA, 25 bp, Homo sapien
gacacaagatgcgatcgtccgcagg

SEQ ID NO: 594166 - DNA, 25 bp, Homo sapien
caagatgcgatcgtccgcaggaacg

SEQ ID NO: 594167 - DNA, 25 bp, Homo sapien
tgcgatcgtccgcaggaacgcatgc

SEQ ID NO: 594168 - DNA, 25 bp, Homo sapien
gatcgtccgcaggaacgcatgccgc

SEQ ID NO: 594169 - DNA, 25 bp, Homo sapien
cttgttctccctcagatccggcgag

SEQ ID NO: 594170 - DNA, 25 bp, Homo sapien
caggctggatgcagttaagggcgca

SEQ ID NO: 594171 - DNA, 25 bp, Homo sapien
acagagcacgtaattcctcttgccc

SEQ ID NO: 594172 - DNA, 25 bp, Homo sapien
cagtggccgccgatcggtcttgttc

SEQ ID NO: 594173 - DNA, 25 bp, Homo sapien
tgtgcagagaggagcgccctctcct

SEQ ID NO: 594174 - DNA, 25 bp, Homo sapien
ctctggtgactagtaggtgtgcaga

SEQ ID NO: 594175 - DNA, 25 bp, Homo sapien
gccccacagaactattgtaaaacaa

SEQ ID NO: 594176 - DNA, 25 bp, Homo sapien
gaaacacacgagtggaatcccaccc

SEQ ID NO: 594177 - DNA, 25 bp, Homo sapien
tcattcaggccggtaagagcaacaa

SEQ ID NO: 594178 - DNA, 25 bp, Homo sapien
gaaacactcattcaggccggtaaga

SEQ ID NO: 594179 - DNA, 25 bp, Homo sapien
cggaaacactcattcaggccggtaa

SEQ ID NO: 594180 - DNA, 25 bp, Homo sapien
ccggtaagagcaacaatccagatgt

SEQ ID NO: 594181 - DNA, 25 bp, Homo sapien
ccacttggatgagccaggagcccca

SEQ ID NO: 594182 - DNA, 25 bp, Homo sapien
tggatgagccaggagccccagggct

SEQ ID NO: 594183 - DNA, 25 bp, Homo sapien
gatgagccaggagccccagggctgc

SEQ ID NO: 594184 - DNA, 25 bp, Homo sapien
cttggatgagccaggagccccaggg

SEQ ID NO: 594185 - DNA, 25 bp, Homo sapien
ccagggagttgccacgtgaactttt

SEQ ID NO: 594186 - DNA, 25 bp, Homo sapien
ccaggacctaacgatagcccaggga

SEQ ID NO: 594187 - DNA, 25 bp, Homo sapien
tccagacccgcagaggcccaggaat

SEQ ID NO: 594188 - DNA, 25 bp, Homo sapien
tgaggaagggtttgcccaaacacag

SEQ ID NO: 594189 - DNA, 25 bp, Homo sapien
gctgtttgtctagcgcggctgtgcc

SEQ ID NO: 594190 - DNA, 25 bp, Homo sapien
tcctcgggcccagctgatggaaacg

SEQ ID NO: 594191 - DNA, 25 bp, Homo sapien
taaatagctccgcattcctcgggcc

SEQ ID NO: 594192 - DNA, 25 bp, Homo sapien
ggaacagagggaaacgtggaatcca

SEQ ID NO: 594193 - DNA, 25 bp, Homo sapien
accgaacgctgagggtgtctcggca

SEQ ID NO: 594194 - DNA, 25 bp, Homo sapien
gctctgcggagctatgggaatcacc

SEQ ID NO: 594195 - DNA, 25 bp, Homo sapien
acgtcgcgggaagacccgcagctct

SEQ ID NO: 594196 - DNA, 25 bp, Homo sapien
tctggtggaccgtccagcaagcgct

SEQ ID NO: 594197 - DNA, 25 bp, Homo sapien
gccagcccagaggggatactgtgga

SEQ ID NO: 594198 - DNA, 25 bp, Homo sapien
aggggatactgtggaagagctaggc

SEQ ID NO: 594199 - DNA, 25 bp, Homo sapien
gaagagctaggcctcacgcaggacc

SEQ ID NO: 594200 - DNA, 25 bp, Homo sapien
ggaagagctaggcctcacgcaggac

SEQ ID NO: 594201 - DNA, 25 bp, Homo sapien
tgaacctgggaagagacggactgtc

SEQ ID NO: 594202 - DNA, 25 bp, Homo sapien
tgaatatagcctgcaggacaactgc

SEQ ID NO: 594203 - DNA, 25 bp, Homo sapien
ccagagccgaggaataagggtcttc

SEQ ID NO: 594204 - DNA, 25 bp, Homo sapien
cattcaggccacttgtcgtgacagg

SEQ ID NO: 594205 - DNA, 25 bp, Homo sapien
cactgagcaggatgttctacagaac

SEQ ID NO: 594206 - DNA, 25 bp, Homo sapien
ctgagcaggatgttctacagaacag

SEQ ID NO: 594207 - DNA, 25 bp, Homo sapien
gagcaggatgttctacagaacagcc

SEQ ID NO: 594208 - DNA, 25 bp, Homo sapien
actgagcaggatgttctacagaaca

SEQ ID NO: 594209 - DNA, 25 bp, Homo sapien
ctgagaacccgctgcggagggacct

SEQ ID NO: 594210 - DNA, 25 bp, Homo sapien
gggctcggcagtgggagcgcgacct

SEQ ID NO: 594211 - DNA, 25 bp, Homo sapien
tgggagcgcgacctgggtctgccca

SEQ ID NO: 594212 - DNA, 25 bp, Homo sapien
tgcccagcgagcaactgagaacccg

SEQ ID NO: 594213 - DNA, 25 bp, Homo sapien
tgaaggtatagatgagttctgcccc

SEQ ID NO: 594214 - DNA, 25 bp, Homo sapien
ctgggggcgtgaaggtatagatgag

SEQ ID NO: 594215 - DNA, 25 bp, Homo sapien
cgtgaaggtatagatgagttctgcc

SEQ ID NO: 594216 - DNA, 25 bp, Homo sapien
gggcgtgaaggtatagatgagttct

SEQ ID NO: 594217 - DNA, 25 bp, Homo sapien
cttctgagctgtgcatccctcgtct

SEQ ID NO: 594218 - DNA, 25 bp, Homo sapien
tctgagctgtgcatccctcgtcttc

SEQ ID NO: 594219 - DNA, 25 bp, Homo sapien
ttctgagctgtgcatccctcgtctt

SEQ ID NO: 594220 - DNA, 25 bp, Homo sapien
tgagctgtgcatccctcgtcttcca

SEQ ID NO: 594221 - DNA, 25 bp, Homo sapien
ctcagcgttgagttctgtgcagaag

SEQ ID NO: 594222 - DNA, 25 bp, Homo sapien
ctcttctggcatggggtagtagcgc

SEQ ID NO: 594223 - DNA, 25 bp, Homo sapien
caccttttcggcgtgggtcagctgg

SEQ ID NO: 594224 - DNA, 25 bp, Homo sapien
tagcgctgggcatagcagttggtgt

SEQ ID NO: 594225 - DNA, 25 bp, Homo sapien
aatgcaagctcacaggcaggaacgg

SEQ ID NO: 594226 - DNA, 25 bp, Homo sapien
tgcaagctcacaggcaggaacggag

SEQ ID NO: 594227 - DNA, 25 bp, Homo sapien
ggaaatgcaagctcacaggcaggaa

SEQ ID NO: 594228 - DNA, 25 bp, Homo sapien
agctcacaggcaggaacggagcctg

SEQ ID NO: 594229 - DNA, 25 bp, Homo sapien
gagcgacggttcatctccgcaaagg

SEQ ID NO: 594230 - DNA, 25 bp, Homo sapien
ccagagctgcgaatccaatgaagaa

SEQ ID NO: 594231 - DNA, 25 bp, Homo sapien
actgtcttccactcattggagcgac

SEQ ID NO: 594232 - DNA, 25 bp, Homo sapien
tccgcaaaggtctcattgaactgga

SEQ ID NO: 594233 - DNA, 25 bp, Homo sapien
tgggctttccgctcgtccgtcaagg

SEQ ID NO: 594234 - DNA, 25 bp, Homo sapien
ttcttctcatagtcccagcgggagg

SEQ ID NO: 594235 - DNA, 25 bp, Homo sapien
tccgtcaaggtgatcggctttggag

SEQ ID NO: 594236 - DNA, 25 bp, Homo sapien
cttcttccactgcttcttctcatag

SEQ ID NO: 594237 - DNA, 25 bp, Homo sapien
ctcccagccagggcggagcctcagg

SEQ ID NO: 594238 - DNA, 25 bp, Homo sapien
tggagctttactggggttaagggca

SEQ ID NO: 594239 - DNA, 25 bp, Homo sapien
taagaacctttgacactgtatataa

SEQ ID NO: 594240 - DNA, 25 bp, Homo sapien
ctaagaacctttgacactgtatata

SEQ ID NO: 594241 - DNA, 25 bp, Homo sapien
actaagaacctttgacactgtatat

SEQ ID NO: 594242 - DNA, 25 bp, Homo sapien
aaactaagaacctttgacactgtat

SEQ ID NO: 594243 - DNA, 25 bp, Homo sapien
tctgtatttatgtgtgaggagctgc

SEQ ID NO: 594244 - DNA, 25 bp, Homo sapien
ctgctggcttgcagtgcgcgtgcac

SEQ ID NO: 594245 - DNA, 25 bp, Homo sapien
tgcccggagattggacggcctgatg

SEQ ID NO: 594246 - DNA, 25 bp, Homo sapien
aaggtgaaagtgcagttcagtaata

SEQ ID NO: 594247 - DNA, 25 bp, Homo sapien
gtgaaagggagctatcaggaacagc

SEQ ID NO: 594248 - DNA, 25 bp, Homo sapien
tcagctgcctcacttcctacaagag

SEQ ID NO: 594249 - DNA, 25 bp, Homo sapien
ccatgaccatactgagggaccaact

SEQ ID NO: 594250 - DNA, 25 bp, Homo sapien
ttcaggggactcagccctgaggtga

SEQ ID NO: 594251 - DNA, 25 bp, Homo sapien
agttcccttggcctcagaattcaca

SEQ ID NO: 594252 - DNA, 25 bp, Homo sapien
ttccacaaaatctgtccaaaggagg

SEQ ID NO: 594253 - DNA, 25 bp, Homo sapien
tctgccagggagcttgaaagttttc

SEQ ID NO: 594254 - DNA, 25 bp, Homo sapien
ggagggccctacctgattggtgcaa

SEQ ID NO: 594255 - DNA, 25 bp, Homo sapien
ctggctaggaatccatgactctcct

SEQ ID NO: 594256 - DNA, 25 bp, Homo sapien
taggaatccatgactctcctgtgga

SEQ ID NO: 594257 - DNA, 25 bp, Homo sapien
ggaatccatgactctcctgtggagg

SEQ ID NO: 594258 - DNA, 25 bp, Homo sapien
aatccatgactctcctgtggaggtc

SEQ ID NO: 594259 - DNA, 25 bp, Homo sapien
agtctccaatgccagcctcagtgca

SEQ ID NO: 594260 - DNA, 25 bp, Homo sapien
cagtgcatacccctggtataaacag

SEQ ID NO: 594261 - DNA, 25 bp, Homo sapien
ggaagccttgctcacggctgagtct

SEQ ID NO: 594262 - DNA, 25 bp, Homo sapien
tacccctggtataaacagaagtcca

SEQ ID NO: 594263 - DNA, 25 bp, Homo sapien
atgtgctcaggaagtgtgcgctgct

SEQ ID NO: 594264 - DNA, 25 bp, Homo sapien
tgctcaggaagtgtgcgctgctgct

SEQ ID NO: 594265 - DNA, 25 bp, Homo sapien
agtatgtgctcaggaagtgtgcgct

SEQ ID NO: 594266 - DNA, 25 bp, Homo sapien
agagtatgtgctcaggaagtgtgcg

SEQ ID NO: 594267 - DNA, 25 bp, Homo sapien
cagaaagaagtcctagtttttggag

SEQ ID NO: 594268 - DNA, 25 bp, Homo sapien
tggagattgctaccccattcctgcc

SEQ ID NO: 594269 - DNA, 25 bp, Homo sapien
gaagctgctttggactatggagcac

SEQ ID NO: 594270 - DNA, 25 bp, Homo sapien
gcacttggggtcaaagacctcagaa

SEQ ID NO: 594271 - DNA, 25 bp, Homo sapien
ctgcaaatcagcgatggaactggga

SEQ ID NO: 594272 - DNA, 25 bp, Homo sapien
gcactgatctgcatcagacaaggga

SEQ ID NO: 594273 - DNA, 25 bp, Homo sapien
cacagcatccagcactgatctgcat

SEQ ID NO: 594274 - DNA, 25 bp, Homo sapien
tgactgtcagcccagtactctcttc

SEQ ID NO: 594275 - DNA, 25 bp, Homo sapien
tacagaacgcttaccatggaccatt

SEQ ID NO: 594276 - DNA, 25 bp, Homo sapien
tgcaaccaggtagtcacagaactag

SEQ ID NO: 594277 - DNA, 25 bp, Homo sapien
tttcattttgcagccggaacaccag

SEQ ID NO: 594278 - DNA, 25 bp, Homo sapien
ggaccattgaactctgctgctaggc

SEQ ID NO: 594279 - DNA, 25 bp, Homo sapien
gagattcagtctctttgtccacacc

SEQ ID NO: 594280 - DNA, 25 bp, Homo sapien
ctttcctgagattcagtctctttgt

SEQ ID NO: 594281 - DNA, 25 bp, Homo sapien
ggacagggctgtggttccaaggcat

SEQ ID NO: 594282 - DNA, 25 bp, Homo sapien
tctctttgtccacaccctgggggac

SEQ ID NO: 594283 - DNA, 25 bp, Homo sapien
tctgactaagtctcaggtcctttct

SEQ ID NO: 594284 - DNA, 25 bp, Homo sapien
gaggtcttctgactaagtctcaggt

SEQ ID NO: 594285 - DNA, 25 bp, Homo sapien
ggtgaactgaggtcttctgactaag

SEQ ID NO: 594286 - DNA, 25 bp, Homo sapien
cttgggtgaactgaggtcttctgac

SEQ ID NO: 594287 - DNA, 25 bp, Homo sapien
tcaagctaagggaacagagcgtcct

SEQ ID NO: 594288 - DNA, 25 bp, Homo sapien
gcatgttcggacttagccagctgag

SEQ ID NO: 594289 - DNA, 25 bp, Homo sapien
tactcccagctgagaggactctttc

SEQ ID NO: 594290 - DNA, 25 bp, Homo sapien
taagtccgaggcttaggcctagcac

SEQ ID NO: 594291 - DNA, 25 bp, Homo sapien
tgaactatcgaggatcagtgctgct

SEQ ID NO: 594292 - DNA, 25 bp, Homo sapien
cacagcacccatgttcagttggagc

SEQ ID NO: 594293 - DNA, 25 bp, Homo sapien
cagggagtcactcagaaatagcctt

SEQ ID NO: 594294 - DNA, 25 bp, Homo sapien
tacctgcctacgctggacttcagtg

SEQ ID NO: 594295 - DNA, 25 bp, Homo sapien
aattgaagcttatatagcatcctga

SEQ ID NO: 594296 - DNA, 25 bp, Homo sapien
cccagatactgttgagggggtgtac

SEQ ID NO: 594297 - DNA, 25 bp, Homo sapien
acatagttgtacacaggaatcctac

SEQ ID NO: 594298 - DNA, 25 bp, Homo sapien
gaaagaattggtggtggcgtgtgtc

SEQ ID NO: 594299 - DNA, 25 bp, Homo sapien
agcagaggccttgggcatagcagat

SEQ ID NO: 594300 - DNA, 25 bp, Homo sapien
ttattggtgtggtacctggcaaaac

SEQ ID NO: 594301 - DNA, 25 bp, Homo sapien
ttatgtgcagagaagacatttctaa

SEQ ID NO: 594302 - DNA, 25 bp, Homo sapien
ttggtagagcttaaattatgtgcag

SEQ ID NO: 594303 - DNA, 25 bp, Homo sapien
tgaaggagtcactctactcctggat

SEQ ID NO: 594304 - DNA, 25 bp, Homo sapien
tgagtcaggcaatcccactgggtct

SEQ ID NO: 594305 - DNA, 25 bp, Homo sapien
ccttgttcccagttggcagacctga

SEQ ID NO: 594306 - DNA, 25 bp, Homo sapien
gaatatcaccagcttcagatatctg

SEQ ID NO: 594307 - DNA, 25 bp, Homo sapien
tagacccagaccttcgtaagaccca

SEQ ID NO: 594308 - DNA, 25 bp, Homo sapien
tgagcttcgcaattcctgtgtcgcc

SEQ ID NO: 594309 - DNA, 25 bp, Homo sapien
gaagtatcttggaacctagacccag

SEQ ID NO: 594310 - DNA, 25 bp, Homo sapien
gactgcccagggagtgactttccga

SEQ ID NO: 594311 - DNA, 25 bp, Homo sapien
tggaggacccggcaatccccaactg

SEQ ID NO: 594312 - DNA, 25 bp, Homo sapien
ccagcggcatttgttgggggtctcc

SEQ ID NO: 594313 - DNA, 25 bp, Homo sapien
gccttcccaaagtcagattgcagat

SEQ ID NO: 594314 - DNA, 25 bp, Homo sapien
tccccaactgccacgttctgggcct

SEQ ID NO: 594315 - DNA, 25 bp, Homo sapien
ccagtctttgtgcagggcgccggcg

SEQ ID NO: 594316 - DNA, 25 bp, Homo sapien
gtcgagcaggcctcgacccctcttc

SEQ ID NO: 594317 - DNA, 25 bp, Homo sapien
ctgtccccaggaaaacgtggtctca

SEQ ID NO: 594318 - DNA, 25 bp, Homo sapien
gaaagccactttgggcctgtcccca

SEQ ID NO: 594319 - DNA, 25 bp, Homo sapien
cctgggctccggagaggtgcagccc

SEQ ID NO: 594320 - DNA, 25 bp, Homo sapien
gctcggcgggtacccggcctagtga

SEQ ID NO: 594321 - DNA, 25 bp, Homo sapien
ggcctagtgagctcgagaagccgct

SEQ ID NO: 594322 - DNA, 25 bp, Homo sapien
tgagctcgagaagccgctaggccgc

SEQ ID NO: 594323 - DNA, 25 bp, Homo sapien
gtacccggcctagtgagctcgagaa

SEQ ID NO: 594324 - DNA, 25 bp, Homo sapien
cgcggcaccggaagtgactgagctt

SEQ ID NO: 594325 - DNA, 25 bp, Homo sapien
aatgttgattttttgcgcctcccga

SEQ ID NO: 594326 - DNA, 25 bp, Homo sapien
gtctggaagctaccgggccgatgaa

SEQ ID NO: 594327 - DNA, 25 bp, Homo sapien
cggtcctgatgccagtcactcaagg

SEQ ID NO: 594328 - DNA, 25 bp, Homo sapien
ctatatataaactgacggacggatg

SEQ ID NO: 594329 - DNA, 25 bp, Homo sapien
tgcttaaccacaaggcgatgcttct

SEQ ID NO: 594330 - DNA, 25 bp, Homo sapien
tagaatccagacaaagtgcttaacc

SEQ ID NO: 594331 - DNA, 25 bp, Homo sapien
gttgagaaacttgcctaactagcag

SEQ ID NO: 594332 - DNA, 25 bp, Homo sapien
tcagagcgccgggaaagcaattcca

SEQ ID NO: 594333 - DNA, 25 bp, Homo sapien
cctcagatctgacaacgaagcgcga

SEQ ID NO: 594334 - DNA, 25 bp, Homo sapien
tcagaaggaggtaccagcgaacaac

SEQ ID NO: 594335 - DNA, 25 bp, Homo sapien
tacagaccgcagcaataccggaagt

SEQ ID NO: 594336 - DNA, 25 bp, Homo sapien
agaagccaggcctagcggcgcgaac

SEQ ID NO: 594337 - DNA, 25 bp, Homo sapien
gttattagccgacagcctcccgcaa

SEQ ID NO: 594338 - DNA, 25 bp, Homo sapien
tcagccgttccaaactccgggagga

SEQ ID NO: 594339 - DNA, 25 bp, Homo sapien
gtttcccggacggacttcacagcaa

SEQ ID NO: 594340 - DNA, 25 bp, Homo sapien
tctgttttcctccatcaaacgccac

SEQ ID NO: 594341 - DNA, 25 bp, Homo sapien
catcaaacgccacacttcctgaggg

SEQ ID NO: 594342 - DNA, 25 bp, Homo sapien
caaacgccacacttcctgagggcat

SEQ ID NO: 594343 - DNA, 25 bp, Homo sapien
ttttcctccatcaaacgccacactt

SEQ ID NO: 594344 - DNA, 25 bp, Homo sapien
attagacaagggtggctttgtgaag

SEQ ID NO: 594345 - DNA, 25 bp, Homo sapien
acaaactggctcttgaactccctca

SEQ ID NO: 594346 - DNA, 25 bp, Homo sapien
cagaaacacaaactggctcttgaac

SEQ ID NO: 594347 - DNA, 25 bp, Homo sapien
tcaagaattagacaagggtggcttt

SEQ ID NO: 594348 - DNA, 25 bp, Homo sapien
tatcaggcctacaggtctgactcaa

SEQ ID NO: 594349 - DNA, 25 bp, Homo sapien
ggtttaatcagtctatcaggcctac

SEQ ID NO: 594350 - DNA, 25 bp, Homo sapien
cttgaagtctggcaaatatgtatca

SEQ ID NO: 594351 - DNA, 25 bp, Homo sapien
aatcagtctatcaggcctacaggtc

SEQ ID NO: 594352 - DNA, 25 bp, Homo sapien
gatcacgccactgaagtgcacactc

SEQ ID NO: 594353 - DNA, 25 bp, Homo sapien
aattgactattaacttacccaaatg

SEQ ID NO: 594354 - DNA, 25 bp, Homo sapien
tgacaagcaatgattgtctaatctc

SEQ ID NO: 594355 - DNA, 25 bp, Homo sapien
caacaaaatagttaagcagtattta

SEQ ID NO: 594356 - DNA, 25 bp, Homo sapien
taatccttcccatttacgtggccta

SEQ ID NO: 594357 - DNA, 25 bp, Homo sapien
gcagaagagcaggtttttcccagta

SEQ ID NO: 594358 - DNA, 25 bp, Homo sapien
gtatttgtaccacttttctcagcag

SEQ ID NO: 594359 - DNA, 25 bp, Homo sapien
accacttttctcagcaggtcacctt

SEQ ID NO: 594360 - DNA, 25 bp, Homo sapien
tcccagtatttgtaccacttttctc

SEQ ID NO: 594361 - DNA, 25 bp, Homo sapien
aaaattgatgaaatccgagggggca

SEQ ID NO: 594362 - DNA, 25 bp, Homo sapien
taggaataagagcttttaacttgtg

SEQ ID NO: 594363 - DNA, 25 bp, Homo sapien
tgttttgagtatctccttcatcatc

SEQ ID NO: 594364 - DNA, 25 bp, Homo sapien
aatctatgttttgagtatctccttc

SEQ ID NO: 594365 - DNA, 25 bp, Homo sapien
caaatcactatcacgcatttaaaat

SEQ ID NO: 594366 - DNA, 25 bp, Homo sapien
tgcaaactaaagctccctaccagta

SEQ ID NO: 594367 - DNA, 25 bp, Homo sapien
agcaaaacaaatcactatcacgcat

SEQ ID NO: 594368 - DNA, 25 bp, Homo sapien
ctgtgaaaagggaagatcatcattg

SEQ ID NO: 594369 - DNA, 25 bp, Homo sapien
tgccctgaaaaagccctccagttcc

SEQ ID NO: 594370 - DNA, 25 bp, Homo sapien
caaaggtgtgacaatagcttgctga

SEQ ID NO: 594371 - DNA, 25 bp, Homo sapien
tgtgacaatagcttgctgaagatta

SEQ ID NO: 594372 - DNA, 25 bp, Homo sapien
gtttcaaaggtgtgacaatagcttg

SEQ ID NO: 594373 - DNA, 25 bp, Homo sapien
tttcagaggccgaggcaggtagatc

SEQ ID NO: 594374 - DNA, 25 bp, Homo sapien
cctggccaaaatggtgaaactccat

SEQ ID NO: 594375 - DNA, 25 bp, Homo sapien
ttcagaggccgaggcaggtagatca

SEQ ID NO: 594376 - DNA, 25 bp, Homo sapien
cctgaggtcaggagttcgagaccag

SEQ ID NO: 594377 - DNA, 25 bp, Homo sapien
catggaagaaacagcacttaatcac

SEQ ID NO: 594378 - DNA, 25 bp, Homo sapien
tcaggcaaagtaggtttcagagcac

SEQ ID NO: 594379 - DNA, 25 bp, Homo sapien
taaactgcaacaagatgacagggaa

SEQ ID NO: 594380 - DNA, 25 bp, Homo sapien
catagcatatgaactgactcctgat

SEQ ID NO: 594381 - DNA, 25 bp, Homo sapien
ttttcttgatatggctgcctcaact

SEQ ID NO: 594382 - DNA, 25 bp, Homo sapien
ctgcctctttgtagtaagtgttgtc

SEQ ID NO: 594383 - DNA, 25 bp, Homo sapien
ttgacggaatggattgttccacaag

SEQ ID NO: 594384 - DNA, 25 bp, Homo sapien
gggaagaacaagcatttgacggaat

SEQ ID NO: 594385 - DNA, 25 bp, Homo sapien
atttcatcgatgattacaggagtgg

SEQ ID NO: 594386 - DNA, 25 bp, Homo sapien
catcgatgattacaggagtggcaca

SEQ ID NO: 594387 - DNA, 25 bp, Homo sapien
gatgattacaggagtggcacatctc

SEQ ID NO: 594388 - DNA, 25 bp, Homo sapien
gattacaggagtggcacatctcttg

SEQ ID NO: 594389 - DNA, 25 bp, Homo sapien
ttgaggtacaccaaacatattacag

SEQ ID NO: 594390 - DNA, 25 bp, Homo sapien
aagaaacttacaagtggtatacaag

SEQ ID NO: 594391 - DNA, 25 bp, Homo sapien
agaaacttacaagtggtatacaagg

SEQ ID NO: 594392 - DNA, 25 bp, Homo sapien
cctgaagcatagcctgtaccctcct

SEQ ID NO: 594393 - DNA, 25 bp, Homo sapien
ctcctccccaaatctactgcatatg

SEQ ID NO: 594394 - DNA, 25 bp, Homo sapien
gttttcaattccctgaagcatagcc

SEQ ID NO: 594395 - DNA, 25 bp, Homo sapien
cctccccaaatctactgcatatgga

SEQ ID NO: 594396 - DNA, 25 bp, Homo sapien
agtatcttgatgagcactgccttct

SEQ ID NO: 594397 - DNA, 25 bp, Homo sapien
caggtggcatacaaggcacagtatg

SEQ ID NO: 594398 - DNA, 25 bp, Homo sapien
tctctggggaagatgcattcttttc

SEQ ID NO: 594399 - DNA, 25 bp, Homo sapien
acagtatgtctacccttggctttct

SEQ ID NO: 594400 - DNA, 25 bp, Homo sapien
tcttgctgcattttcatactcttct

SEQ ID NO: 594401 - DNA, 25 bp, Homo sapien
ccacctcttgctgcattttcatact

SEQ ID NO: 594402 - DNA, 25 bp, Homo sapien
cctcttgctgcattttcatactctt

SEQ ID NO: 594403 - DNA, 25 bp, Homo sapien
cttgctgcattttcatactcttctc

SEQ ID NO: 594404 - DNA, 25 bp, Homo sapien
gaaggatgctttcgtagttcagatg

SEQ ID NO: 594405 - DNA, 25 bp, Homo sapien
tgatttggtgacctggctcactgat

SEQ ID NO: 594406 - DNA, 25 bp, Homo sapien
catctgtgcggaagtggaagtcaac

SEQ ID NO: 594407 - DNA, 25 bp, Homo sapien
taggatgttgtttgattcgctcatc

SEQ ID NO: 594408 - DNA, 25 bp, Homo sapien
caaagaaagaagcataacctcaggg

SEQ ID NO: 594409 - DNA, 25 bp, Homo sapien
cttcaaggacctgtatctcaaagaa

SEQ ID NO: 594410 - DNA, 25 bp, Homo sapien
gagactgatgaagaagcctattcct

SEQ ID NO: 594411 - DNA, 25 bp, Homo sapien
gagatttgactggtctgccccaacc

SEQ ID NO: 594412 - DNA, 25 bp, Homo sapien
aatgaaatgtcacggaagagctcac

SEQ ID NO: 594413 - DNA, 25 bp, Homo sapien
taccataagccacatattcggcaca

SEQ ID NO: 594414 - DNA, 25 bp, Homo sapien
cataagccacatattcggcacagag

SEQ ID NO: 594415 - DNA, 25 bp, Homo sapien
tctaccataagccacatattcggca

SEQ ID NO: 594416 - DNA, 25 bp, Homo sapien
tggtacatcccttagtcactcgggc

SEQ ID NO: 594417 - DNA, 25 bp, Homo sapien
ggaagtcttcaacttgctgtgcaag

SEQ ID NO: 594418 - DNA, 25 bp, Homo sapien
tgaaaggcttaacaatggtacatcc

SEQ ID NO: 594419 - DNA, 25 bp, Homo sapien
gggcacatatgtagaaactgtttca

SEQ ID NO: 594420 - DNA, 25 bp, Homo sapien
ggagttggacactgaagtgagccat

SEQ ID NO: 594421 - DNA, 25 bp, Homo sapien
tgggtgacggagcaagaccctgtct

SEQ ID NO: 594422 - DNA, 25 bp, Homo sapien
caggagttggacactgaagtgagcc

SEQ ID NO: 594423 - DNA, 25 bp, Homo sapien
agcccaggagttggacactgaagtg

SEQ ID NO: 594424 - DNA, 25 bp, Homo sapien
cagtttacttgtaagtggtgattca

SEQ ID NO: 594425 - DNA, 25 bp, Homo sapien
gacagatgttcatctagatccgcaa

SEQ ID NO: 594426 - DNA, 25 bp, Homo sapien
gttcatctagatccgcaagacccag

SEQ ID NO: 594427 - DNA, 25 bp, Homo sapien
tctagatccgcaagacccagtttac

SEQ ID NO: 594428 - DNA, 25 bp, Homo sapien
tccagctctgctgtacttttgcagg

SEQ ID NO: 594429 - DNA, 25 bp, Homo sapien
tgttgcaatttctcgagctcctcag

SEQ ID NO: 594430 - DNA, 25 bp, Homo sapien
ttgcaggtcacagcccgtgcacggt

SEQ ID NO: 594431 - DNA, 25 bp, Homo sapien
tcacagaagatttggagggtaacag

SEQ ID NO: 594432 - DNA, 25 bp, Homo sapien
ctcagatactgccagtgggacttac

SEQ ID NO: 594433 - DNA, 25 bp, Homo sapien
tctggaatgaaattcaaagtgttca

SEQ ID NO: 594434 - DNA, 25 bp, Homo sapien
caccttcaagtattctgggatcaag

SEQ ID NO: 594435 - DNA, 25 bp, Homo sapien
caaaatcttagtagggcaaggtctg

SEQ ID NO: 594436 - DNA, 25 bp, Homo sapien
cttctttgattctcgctcctggatt

SEQ ID NO: 594437 - DNA, 25 bp, Homo sapien
aaaagccgctttcgcatttatgcag

SEQ ID NO: 594438 - DNA, 25 bp, Homo sapien
cactgaaatgtaactaaaagccgct

SEQ ID NO: 594439 - DNA, 25 bp, Homo sapien
tcggttacctcatctgaaacaggtg

SEQ ID NO: 594440 - DNA, 25 bp, Homo sapien
tatgcaggtgcttaactccattgct

SEQ ID NO: 594441 - DNA, 25 bp, Homo sapien
tagtgtctaggtgcatgtcagcttc

SEQ ID NO: 594442 - DNA, 25 bp, Homo sapien
tagaagaccccgtagtaactgttca

SEQ ID NO: 594443 - DNA, 25 bp, Homo sapien
taatatagatacacacggtccctgt

SEQ ID NO: 594444 - DNA, 25 bp, Homo sapien
gacaagggccgtgtcttataccatc

SEQ ID NO: 594445 - DNA, 25 bp, Homo sapien
tagatatcacaaaatgatctccact

SEQ ID NO: 594446 - DNA, 25 bp, Homo sapien
attagatatcacaaaatgatctcca

SEQ ID NO: 594447 - DNA, 25 bp, Homo sapien
ctgaaaggagtaagcaactcaatta

SEQ ID NO: 594448 - DNA, 25 bp, Homo sapien
gaaaggagtaagcaactcaattaga

SEQ ID NO: 594449 - DNA, 25 bp, Homo sapien
ggtgattggaagtaccttcttttca

SEQ ID NO: 594450 - DNA, 25 bp, Homo sapien
gattggaagtaccttcttttcagga

SEQ ID NO: 594451 - DNA, 25 bp, Homo sapien
tgattggaagtaccttcttttcagg

SEQ ID NO: 594452 - DNA, 25 bp, Homo sapien
tggaagtaccttcttttcaggaaca

SEQ ID NO: 594453 - DNA, 25 bp, Homo sapien
ggcattcgaattctgttcttcaatg

SEQ ID NO: 594454 - DNA, 25 bp, Homo sapien
tttggtgggcattcgaattctgttc

SEQ ID NO: 594455 - DNA, 25 bp, Homo sapien
tctttggtgggcattcgaattctgt

SEQ ID NO: 594456 - DNA, 25 bp, Homo sapien
ggtgggcattcgaattctgttcttc

SEQ ID NO: 594457 - DNA, 25 bp, Homo sapien
taactgacgttctttgtctcgagaa

SEQ ID NO: 594458 - DNA, 25 bp, Homo sapien
gagcttttatcactaccggttcgtc

SEQ ID NO: 594459 - DNA, 25 bp, Homo sapien
tcgagaatcaaacgagaaagggcat

SEQ ID NO: 594460 - DNA, 25 bp, Homo sapien
gcttaaaaggcaccccataatgtgg

SEQ ID NO: 594461 - DNA, 25 bp, Homo sapien
ggttaatggtgtcaaaatgaggcaa

SEQ ID NO: 594462 - DNA, 25 bp, Homo sapien
agggaagtgccttgaacttgggcac

SEQ ID NO: 594463 - DNA, 25 bp, Homo sapien
aaaggttcaatctgggtcacattct

SEQ ID NO: 594464 - DNA, 25 bp, Homo sapien
ctgtcagtctccaagcagaaaggtt

SEQ ID NO: 594465 - DNA, 25 bp, Homo sapien
cattttggctgctctccccatcccc

SEQ ID NO: 594466 - DNA, 25 bp, Homo sapien
tttggctgctctccccatcccctac

SEQ ID NO: 594467 - DNA, 25 bp, Homo sapien
aagcaattaacattttggctgctct

SEQ ID NO: 594468 - DNA, 25 bp, Homo sapien
caagcaattaacattttggctgctc

SEQ ID NO: 594469 - DNA, 25 bp, Homo sapien
tcattaggaactatacagtatcacc

SEQ ID NO: 594470 - DNA, 25 bp, Homo sapien
catgttggtgtgctaaagtttactt

SEQ ID NO: 594471 - DNA, 25 bp, Homo sapien
tataaagtattcttcccacctccaa

SEQ ID NO: 594472 - DNA, 25 bp, Homo sapien
cattttctgccttcacacatgattc

SEQ ID NO: 594473 - DNA, 25 bp, Homo sapien
gtgtttggacgagccttgaaacaag

SEQ ID NO: 594474 - DNA, 25 bp, Homo sapien
agatgacggtgtttggacgagcctt

SEQ ID NO: 594475 - DNA, 25 bp, Homo sapien
ctcctgagagatgacggtgtttgga

SEQ ID NO: 594476 - DNA, 25 bp, Homo sapien
gacggtgtttggacgagccttgaaa

SEQ ID NO: 594477 - DNA, 25 bp, Homo sapien
cagtagccagctgaaaaggttcctg

SEQ ID NO: 594478 - DNA, 25 bp, Homo sapien
cttctcagtagccagctgaaaaggt

SEQ ID NO: 594479 - DNA, 25 bp, Homo sapien
ctcttcctcctgtagtctggcctcc

SEQ ID NO: 594480 - DNA, 25 bp, Homo sapien
gtagccagctgaaaaggttcctgaa

SEQ ID NO: 594481 - DNA, 25 bp, Homo sapien
cagaggcatgtttgtgttcgtcagt

SEQ ID NO: 594482 - DNA, 25 bp, Homo sapien
gtgttcgtcagtgctcatgctccca

SEQ ID NO: 594483 - DNA, 25 bp, Homo sapien
tgtttgtgttcgtcagtgctcatgc

SEQ ID NO: 594484 - DNA, 25 bp, Homo sapien
gcatgtttgtgttcgtcagtgctca

SEQ ID NO: 594485 - DNA, 25 bp, Homo sapien
gacgaacactgtaactccaaggagt

SEQ ID NO: 594486 - DNA, 25 bp, Homo sapien
gccctcctagcagattggtccttaa

SEQ ID NO: 594487 - DNA, 25 bp, Homo sapien
tagaggattacctggagcgacgaac

SEQ ID NO: 594488 - DNA, 25 bp, Homo sapien
cagtcctaggaaaggcatcatggtt

SEQ ID NO: 594489 - DNA, 25 bp, Homo sapien
tctattcaggtctctattgggtccc

SEQ ID NO: 594490 - DNA, 25 bp, Homo sapien
gaatgccaaacctatgtcctgtgtg

SEQ ID NO: 594491 - DNA, 25 bp, Homo sapien
caagctaagaatttcccagagtaca

SEQ ID NO: 594492 - DNA, 25 bp, Homo sapien
tacaggtcccagtcactagtttcag

SEQ ID NO: 594493 - DNA, 25 bp, Homo sapien
tcagaggctggtcacttgactttat

SEQ ID NO: 594494 - DNA, 25 bp, Homo sapien
tgcgtattggatttgccttatgcac

SEQ ID NO: 594495 - DNA, 25 bp, Homo sapien
cacagtcagaggctggtcacttgac

SEQ ID NO: 594496 - DNA, 25 bp, Homo sapien
gaccctggtacttgcgtattggatt

SEQ ID NO: 594497 - DNA, 25 bp, Homo sapien
ttagcagtggaatcgagtggagaat

SEQ ID NO: 594498 - DNA, 25 bp, Homo sapien
cagtggaatcgagtggagaatttgg

SEQ ID NO: 594499 - DNA, 25 bp, Homo sapien
tagcagtggaatcgagtggagaatt

SEQ ID NO: 594500 - DNA, 25 bp, Homo sapien
agcagtggaatcgagtggagaattt

SEQ ID NO: 594501 - DNA, 25 bp, Homo sapien
ggcggtatccgcagctcacagctga

SEQ ID NO: 594502 - DNA, 25 bp, Homo sapien
tctccatgcccaatgacaaagcaag

SEQ ID NO: 594503 - DNA, 25 bp, Homo sapien
tctcaggcacgggtaggtaaaagtc

SEQ ID NO: 594504 - DNA, 25 bp, Homo sapien
ttaagagcaggtcccattgccgggc

SEQ ID NO: 594505 - DNA, 25 bp, Homo sapien
aggatttaactatctttattttctg

SEQ ID NO: 594506 - DNA, 25 bp, Homo sapien
catgaatccacgcagtcttcttcct

SEQ ID NO: 594507 - DNA, 25 bp, Homo sapien
gattgttcctcatttaaaccatgac

SEQ ID NO: 594508 - DNA, 25 bp, Homo sapien
gaaagaacgtgccttaacggcagcc

SEQ ID NO: 594509 - DNA, 25 bp, Homo sapien
attcacggtatgcagagaagaggac

SEQ ID NO: 594510 - DNA, 25 bp, Homo sapien
cttaaaatgcacactgcacggttcc

SEQ ID NO: 594511 - DNA, 25 bp, Homo sapien
tcttaaaatgcacactgcacggttc

SEQ ID NO: 594512 - DNA, 25 bp, Homo sapien
gtcttaaaatgcacactgcacggtt

SEQ ID NO: 594513 - DNA, 25 bp, Homo sapien
ggtcttaaaatgcacactgcacggt

SEQ ID NO: 594514 - DNA, 25 bp, Homo sapien
gacaaaacgtatttattccaggcca

SEQ ID NO: 594515 - DNA, 25 bp, Homo sapien
ggctaacagcttttttaactgctgc

SEQ ID NO: 594516 - DNA, 25 bp, Homo sapien
ccagcagacaagattcagtaagacg

SEQ ID NO: 594517 - DNA, 25 bp, Homo sapien
ccccagcagacaagattcagtaaga

SEQ ID NO: 594518 - DNA, 25 bp, Homo sapien
gccacgtggctaacagcttttttaa

SEQ ID NO: 594519 - DNA, 25 bp, Homo sapien
cctccttggcccagaatccctccat

SEQ ID NO: 594520 - DNA, 25 bp, Homo sapien
acctccttggcccagaatccctcca

SEQ ID NO: 594521 - DNA, 25 bp, Homo sapien
ctgcctttcttataaggagctcaaa

SEQ ID NO: 594522 - DNA, 25 bp, Homo sapien
tggagagcacactccgcactcttga

SEQ ID NO: 594523 - DNA, 25 bp, Homo sapien
aagaaccaccgaagaggggccagtg

SEQ ID NO: 594524 - DNA, 25 bp, Homo sapien
gctcaaacataagaaccaccgaaga

SEQ ID NO: 594525 - DNA, 25 bp, Homo sapien
acgtcccgggagcagacttggaagc

SEQ ID NO: 594526 - DNA, 25 bp, Homo sapien
gaaacgtcccgggagcagacttgga

SEQ ID NO: 594527 - DNA, 25 bp, Homo sapien
caggaaacgtcccgggagcagactt

SEQ ID NO: 594528 - DNA, 25 bp, Homo sapien
agaacaggaaacgtcccgggagcag

SEQ ID NO: 594529 - DNA, 25 bp, Homo sapien
aatccagcctgggacaacttcaggg

SEQ ID NO: 594530 - DNA, 25 bp, Homo sapien
tctttctaaaatggaccaggccctg

SEQ ID NO: 594531 - DNA, 25 bp, Homo sapien
tatgccaaagatccagctccctgga

SEQ ID NO: 594532 - DNA, 25 bp, Homo sapien
aacggccaggccagactatgccaaa

SEQ ID NO: 594533 - DNA, 25 bp, Homo sapien
gtatccctgacttggacaggatcag

SEQ ID NO: 594534 - DNA, 25 bp, Homo sapien
gctcagtatccctgacttggacagg

SEQ ID NO: 594535 - DNA, 25 bp, Homo sapien
aagggaggggtatctgggacgctgg

SEQ ID NO: 594536 - DNA, 25 bp, Homo sapien
tccccaggccttgctcagtatccct

SEQ ID NO: 594537 - DNA, 25 bp, Homo sapien
gttcagaggacacggcattcttccc

SEQ ID NO: 594538 - DNA, 25 bp, Homo sapien
aggacacggcattcttcccatggcc

SEQ ID NO: 594539 - DNA, 25 bp, Homo sapien
cagaggacacggcattcttcccatg

SEQ ID NO: 594540 - DNA, 25 bp, Homo sapien
cagttcagaggacacggcattcttc

SEQ ID NO: 594541 - DNA, 25 bp, Homo sapien
agcaaagaggggcaacctggttgcc

SEQ ID NO: 594542 - DNA, 25 bp, Homo sapien
ctggagcaaagaggggcaacctggt

SEQ ID NO: 594543 - DNA, 25 bp, Homo sapien
cagttgtaagggattgggccgggtg

SEQ ID NO: 594544 - DNA, 25 bp, Homo sapien
ggattgggccgggtgggcagaggcg

SEQ ID NO: 594545 - DNA, 25 bp, Homo sapien
aatttcccctctcgtctggctgcag

SEQ ID NO: 594546 - DNA, 25 bp, Homo sapien
aagccgaggcctgctaactgagggg

SEQ ID NO: 594547 - DNA, 25 bp, Homo sapien
tccaatttcccctctcgtctggctg

SEQ ID NO: 594548 - DNA, 25 bp, Homo sapien
ttcccctctcgtctggctgcagtga

SEQ ID NO: 594549 - DNA, 25 bp, Homo sapien
ctgctgcttgtctaactcaagtctt

SEQ ID NO: 594550 - DNA, 25 bp, Homo sapien
gtagggaggcgtgtgctgctgcttg

SEQ ID NO: 594551 - DNA, 25 bp, Homo sapien
gctgcttgtctaactcaagtctttc

SEQ ID NO: 594552 - DNA, 25 bp, Homo sapien
ggtagggaggcgtgtgctgctgctt

SEQ ID NO: 594553 - DNA, 25 bp, Homo sapien
gaattcccagctcaactgctccatt

SEQ ID NO: 594554 - DNA, 25 bp, Homo sapien
cacctgtgggacctttaggtgcctt

SEQ ID NO: 594555 - DNA, 25 bp, Homo sapien
cttggctgctagttgagggttgggc

SEQ ID NO: 594556 - DNA, 25 bp, Homo sapien
cttgggcttcttgacgctggtctca

SEQ ID NO: 594557 - DNA, 25 bp, Homo sapien
tggtctcaggtgtcgcagtctgctg

SEQ ID NO: 594558 - DNA, 25 bp, Homo sapien
agggtgggtggatccggagctttct

SEQ ID NO: 594559 - DNA, 25 bp, Homo sapien
gctatgcagaaaggcaggtgagccc

SEQ ID NO: 594560 - DNA, 25 bp, Homo sapien
ggcaggacagctggggctatgcaga

SEQ ID NO: 594561 - DNA, 25 bp, Homo sapien
acagctggggctatgcagaaaggca

SEQ ID NO: 594562 - DNA, 25 bp, Homo sapien
aaaggcaggtgagcccctcctggct

SEQ ID NO: 594563 - DNA, 25 bp, Homo sapien
gaggtgaagccctcagcggccacag

SEQ ID NO: 594564 - DNA, 25 bp, Homo sapien
aggtgaagccctcagcggccacagc

SEQ ID NO: 594565 - DNA, 25 bp, Homo sapien
gctgtgggtcatgggcaccccttca

SEQ ID NO: 594566 - DNA, 25 bp, Homo sapien
aaggtgagctctgatgcctcgcttg

SEQ ID NO: 594567 - DNA, 25 bp, Homo sapien
cctgggatccgtggggctgtgggtc

SEQ ID NO: 594568 - DNA, 25 bp, Homo sapien
ggctctctgccaggatgttctttcc

SEQ ID NO: 594569 - DNA, 25 bp, Homo sapien
ggtgtccccttgcatcttagcctgg

SEQ ID NO: 594570 - DNA, 25 bp, Homo sapien
cctccctggctgtgagacagagggc

SEQ ID NO: 594571 - DNA, 25 bp, Homo sapien
caaaatctggaagcagtcctcctcc

SEQ ID NO: 594572 - DNA, 25 bp, Homo sapien
tcggatttctctgagggaacagcct

SEQ ID NO: 594573 - DNA, 25 bp, Homo sapien
agcacagccctcatggtcagtgcca

SEQ ID NO: 594574 - DNA, 25 bp, Homo sapien
gggctgctgaggattccccttggca

SEQ ID NO: 594575 - DNA, 25 bp, Homo sapien
ctgctgaggattccccttggcacca

SEQ ID NO: 594576 - DNA, 25 bp, Homo sapien
gggacagagcacagccctcatggtc

SEQ ID NO: 594577 - DNA, 25 bp, Homo sapien
tcactgctgacattcccggtcctca

SEQ ID NO: 594578 - DNA, 25 bp, Homo sapien
ggagttcatactgaattcactgctg

SEQ ID NO: 594579 - DNA, 25 bp, Homo sapien
cagctccaccatgcggtgagggaag

SEQ ID NO: 594580 - DNA, 25 bp, Homo sapien
tccgagcgcctccttggagttcata

SEQ ID NO: 594581 - DNA, 25 bp, Homo sapien
gatgcgacccttagaggtttagggc

SEQ ID NO: 594582 - DNA, 25 bp, Homo sapien
tgcgacccttagaggtttagggcag

SEQ ID NO: 594583 - DNA, 25 bp, Homo sapien
ctgggatgcgacccttagaggttta

SEQ ID NO: 594584 - DNA, 25 bp, Homo sapien
acccttagaggtttagggcaggcag

SEQ ID NO: 594585 - DNA, 25 bp, Homo sapien
gagctgttctgccaggacaatggct

SEQ ID NO: 594586 - DNA, 25 bp, Homo sapien
agagcaggcgtgtagggaggatggc

SEQ ID NO: 594587 - DNA, 25 bp, Homo sapien
gttctgccaggacaatggctgaagc

SEQ ID NO: 594588 - DNA, 25 bp, Homo sapien
gctgttctgccaggacaatggctga

SEQ ID NO: 594589 - DNA, 25 bp, Homo sapien
tgtctttgggagtctgtttcttgat

SEQ ID NO: 594590 - DNA, 25 bp, Homo sapien
cttgtctttgggagtctgtttcttg

SEQ ID NO: 594591 - DNA, 25 bp, Homo sapien
caggtacagactgccccaaacttgc

SEQ ID NO: 594592 - DNA, 25 bp, Homo sapien
tgtggctttctccatgcaggtacag

SEQ ID NO: 594593 - DNA, 25 bp, Homo sapien
tgtccatccatctctctatctgtgt

SEQ ID NO: 594594 - DNA, 25 bp, Homo sapien
gagggaggcgagaggtgcccactcc

SEQ ID NO: 594595 - DNA, 25 bp, Homo sapien
atctggttatgggtagggtcctcag

SEQ ID NO: 594596 - DNA, 25 bp, Homo sapien
catccatctctctatctgtgtagta

SEQ ID NO: 594597 - DNA, 25 bp, Homo sapien
ccgtgggtactagaggcaaagctct

SEQ ID NO: 594598 - DNA, 25 bp, Homo sapien
gggaagtccccagataagttcacta

SEQ ID NO: 594599 - DNA, 25 bp, Homo sapien
gaaccagagggcatgaatatcccat

SEQ ID NO: 594600 - DNA, 25 bp, Homo sapien
tctaggccaggcttgtttaccttgg

SEQ ID NO: 594601 - DNA, 25 bp, Homo sapien
taggagacaataacacggacccagg

SEQ ID NO: 594602 - DNA, 25 bp, Homo sapien
tcaaagccctcgctcaaaaggcagc

SEQ ID NO: 594603 - DNA, 25 bp, Homo sapien
gcctgtgacagaggcctgggaccta

SEQ ID NO: 594604 - DNA, 25 bp, Homo sapien
gccccagttaattgagccgcaggta

SEQ ID NO: 594605 - DNA, 25 bp, Homo sapien
ggtggttcagctggttcatgacctc

SEQ ID NO: 594606 - DNA, 25 bp, Homo sapien
cggagtctcgatggctgcatacagc

SEQ ID NO: 594607 - DNA, 25 bp, Homo sapien
cagctggatcagattgcggtggttc

SEQ ID NO: 594608 - DNA, 25 bp, Homo sapien
tgaacaggacgatctcatgcggagt

SEQ ID NO: 594609 - DNA, 25 bp, Homo sapien
acggcttgctccgtgcctggtggta

SEQ ID NO: 594610 - DNA, 25 bp, Homo sapien
ccagcccctaccactacttcgggca

SEQ ID NO: 594611 - DNA, 25 bp, Homo sapien
ccctaccactacttcgggcactcac

SEQ ID NO: 594612 - DNA, 25 bp, Homo sapien
tgtgtgcacagacccctccacggct

SEQ ID NO: 594613 - DNA, 25 bp, Homo sapien
acctcggtcagatggtagtcctcat

SEQ ID NO: 594614 - DNA, 25 bp, Homo sapien
gtcagatggtagtcctcatccacaa

SEQ ID NO: 594615 - DNA, 25 bp, Homo sapien
tcggtcagatggtagtcctcatcca

SEQ ID NO: 594616 - DNA, 25 bp, Homo sapien
tcatccacaatcctctcgaagagct

SEQ ID NO: 594617 - DNA, 25 bp, Homo sapien
gaggtccaggtgcaaaaccctcatc

SEQ ID NO: 594618 - DNA, 25 bp, Homo sapien
tgaggtccaggtgcaaaaccctcat

SEQ ID NO: 594619 - DNA, 25 bp, Homo sapien
gcatgaagaggatcccgtcacagat

SEQ ID NO: 594620 - DNA, 25 bp, Homo sapien
ctcatcttgtgcatgaagaggatcc

SEQ ID NO: 594621 - DNA, 25 bp, Homo sapien
ccttcccaggaggccccagtctggt

SEQ ID NO: 594622 - DNA, 25 bp, Homo sapien
cttcccaggaggccccagtctggta

SEQ ID NO: 594623 - DNA, 25 bp, Homo sapien
ttcccaggaggccccagtctggtac

SEQ ID NO: 594624 - DNA, 25 bp, Homo sapien
ggagcaggtacccagcacgtgctta

SEQ ID NO: 594625 - DNA, 25 bp, Homo sapien
tcctagtacctatcatgggccaagg

SEQ ID NO: 594626 - DNA, 25 bp, Homo sapien
gacagctacggacaactgactggag

SEQ ID NO: 594627 - DNA, 25 bp, Homo sapien
tgtatacacctatctgtggccaggc

SEQ ID NO: 594628 - DNA, 25 bp, Homo sapien
accaaatgcccggtggtgttgacac

SEQ ID NO: 594629 - DNA, 25 bp, Homo sapien
aaatgcccggtggtgttgacacaca

SEQ ID NO: 594630 - DNA, 25 bp, Homo sapien
cggtggtgttgacacacaggatgtt

SEQ ID NO: 594631 - DNA, 25 bp, Homo sapien
atgatcttcaccaaatgcccggtgg

SEQ ID NO: 594632 - DNA, 25 bp, Homo sapien
accttcagcttctcgttggggttat

SEQ ID NO: 594633 - DNA, 25 bp, Homo sapien
ccttcagcttctcgttggggttata

SEQ ID NO: 594634 - DNA, 25 bp, Homo sapien
cttcagcttctcgttggggttatac

SEQ ID NO: 594635 - DNA, 25 bp, Homo sapien
tatcggagatttggtcataattcac

SEQ ID NO: 594636 - DNA, 25 bp, Homo sapien
ccacatgtctgtcttatcggagatt

SEQ ID NO: 594637 - DNA, 25 bp, Homo sapien
cccatactccacatgtctgtcttat

SEQ ID NO: 594638 - DNA, 25 bp, Homo sapien
gcatgtaggtgatcacccccatact

SEQ ID NO: 594639 - DNA, 25 bp, Homo sapien
aaatgggcataatcatcccagcttc

SEQ ID NO: 594640 - DNA, 25 bp, Homo sapien
ggaggtgagattggaggtgctgagt

SEQ ID NO: 594641 - DNA, 25 bp, Homo sapien
gaacgttgtttagggtctctgtgtc

SEQ ID NO: 594642 - DNA, 25 bp, Homo sapien
tggcctcgtctgatacggcctcaaa

SEQ ID NO: 594643 - DNA, 25 bp, Homo sapien
aaagtctttggcctcgtctgatacg

SEQ ID NO: 594644 - DNA, 25 bp, Homo sapien
agtaccagttgccagatagaacgtt

SEQ ID NO: 594645 - DNA, 25 bp, Homo sapien
ttctccgccaggttgttgagccagg

SEQ ID NO: 594646 - DNA, 25 bp, Homo sapien
tctgggacttaaggcgtcggttaca

SEQ ID NO: 594647 - DNA, 25 bp, Homo sapien
gttacagcgtttggctttctccgcc

SEQ ID NO: 594648 - DNA, 25 bp, Homo sapien
ggtatttcttaagcaagatctggga

SEQ ID NO: 594649 - DNA, 25 bp, Homo sapien
cttgaagcggttggcagcgctgaca

SEQ ID NO: 594650 - DNA, 25 bp, Homo sapien
agagccatcagtgcccccgagctgc

SEQ ID NO: 594651 - DNA, 25 bp, Homo sapien
tcagtgcccccgagctgctgatctt

SEQ ID NO: 594652 - DNA, 25 bp, Homo sapien
ttcttgaagcggttggcagcgctga

SEQ ID NO: 594653 - DNA, 25 bp, Homo sapien
acagaagccctacatgctgagaccc

SEQ ID NO: 594654 - DNA, 25 bp, Homo sapien
gccttgtcctaacgaggctgccctg

SEQ ID NO: 594655 - DNA, 25 bp, Homo sapien
tgtgggctcggccttatctgctgga

SEQ ID NO: 594656 - DNA, 25 bp, Homo sapien
tgggccttaggaatcagcgttgcag

SEQ ID NO: 594657 - DNA, 25 bp, Homo sapien
agtgcaggcacacacagagggaagg

SEQ ID NO: 594658 - DNA, 25 bp, Homo sapien
tgcaggcacacacagagggaaggag

SEQ ID NO: 594659 - DNA, 25 bp, Homo sapien
ccagtgcaggcacacacagagggaa

SEQ ID NO: 594660 - DNA, 25 bp, Homo sapien
gcaggcacacacagagggaaggagg

SEQ ID NO: 594661 - DNA, 25 bp, Homo sapien
gggtggtggactcattgagcttaaa

SEQ ID NO: 594662 - DNA, 25 bp, Homo sapien
cattgagcttaaactcatgtgctgg

SEQ ID NO: 594663 - DNA, 25 bp, Homo sapien
gtctggcaacaaggatctctttgct

SEQ ID NO: 594664 - DNA, 25 bp, Homo sapien
atggctgtctggcaacaaggatctc

SEQ ID NO: 594665 - DNA, 25 bp, Homo sapien
ctggaggagcgcttcggcgagagcc

SEQ ID NO: 594666 - DNA, 25 bp, Homo sapien
cgaggaggagttgcgcgcgctgctg

SEQ ID NO: 594667 - DNA, 25 bp, Homo sapien
cccttccgcgacgaggaggagttgc

SEQ ID NO: 594668 - DNA, 25 bp, Homo sapien
gcgagagccccttccgcgacgagga

SEQ ID NO: 594669 - DNA, 25 bp, Homo sapien
gggataggtgacgtcatgcccacgc

SEQ ID NO: 594670 - DNA, 25 bp, Homo sapien
tcaggaatcacaagtggtcacagct

SEQ ID NO: 594671 - DNA, 25 bp, Homo sapien
tagctacttgataaaggttcctggg

SEQ ID NO: 594672 - DNA, 25 bp, Homo sapien
taggagacaccatgtgcttagaagg

SEQ ID NO: 594673 - DNA, 25 bp, Homo sapien
cgaggcgggagaagttgggtgcttt

SEQ ID NO: 594674 - DNA, 25 bp, Homo sapien
gcagagagccctcggcgatcaaagt

SEQ ID NO: 594675 - DNA, 25 bp, Homo sapien
gtcacgtttctgctagaagccgagg

SEQ ID NO: 594676 - DNA, 25 bp, Homo sapien
gggacgtccaggcagagccggaagg

SEQ ID NO: 594677 - DNA, 25 bp, Homo sapien
tcttggggcacctaatggcagttgt

SEQ ID NO: 594678 - DNA, 25 bp, Homo sapien
tttcttggggcacctaatggcagtt

SEQ ID NO: 594679 - DNA, 25 bp, Homo sapien
ctgtaatttcttggggcacctaatg

SEQ ID NO: 594680 - DNA, 25 bp, Homo sapien
aatttcttggggcacctaatggcag

SEQ ID NO: 594681 - DNA, 25 bp, Homo sapien
tccccaggggccagatccaaaccgc

SEQ ID NO: 594682 - DNA, 25 bp, Homo sapien
caccgcgcgcctcgcgtgcttatgc

SEQ ID NO: 594683 - DNA, 25 bp, Homo sapien
gggccagatccaaaccgccaccgcg

SEQ ID NO: 594684 - DNA, 25 bp, Homo sapien
gcctcgcgtgcttatgcgtcccgtt

SEQ ID NO: 594685 - DNA, 25 bp, Homo sapien
tgatgcccttgctgaatgattagtt

SEQ ID NO: 594686 - DNA, 25 bp, Homo sapien
gtatttgatgcccttgctgaatgat

SEQ ID NO: 594687 - DNA, 25 bp, Homo sapien
tttgatgcccttgctgaatgattag

SEQ ID NO: 594688 - DNA, 25 bp, Homo sapien
cttgtatttgatgcccttgctgaat

SEQ ID NO: 594689 - DNA, 25 bp, Homo sapien
aatccatggcccttgtaattttggt

SEQ ID NO: 594690 - DNA, 25 bp, Homo sapien
cctttgacaatccatggcccttgta

SEQ ID NO: 594691 - DNA, 25 bp, Homo sapien
tcttttccctttgacaatccatggc

SEQ ID NO: 594692 - DNA, 25 bp, Homo sapien
caatccatggcccttgtaattttgg

SEQ ID NO: 594693 - DNA, 25 bp, Homo sapien
catttgctcaggatcaatgattttc

SEQ ID NO: 594694 - DNA, 25 bp, Homo sapien
cgaaggacgtccatgagtgtgttca

SEQ ID NO: 594695 - DNA, 25 bp, Homo sapien
acccatcctggcctgtggcgaagga

SEQ ID NO: 594696 - DNA, 25 bp, Homo sapien
ggtcttgaaccggatcgatgctctc

SEQ ID NO: 594697 - DNA, 25 bp, Homo sapien
gaaccggatcgatgctctctgctct

SEQ ID NO: 594698 - DNA, 25 bp, Homo sapien
gaaggaaaccctgtgcggatattag

SEQ ID NO: 594699 - DNA, 25 bp, Homo sapien
gatcacaagagaaccaagaaggcaa

SEQ ID NO: 594700 - DNA, 25 bp, Homo sapien
tattagcatgatcacaagagaacca

SEQ ID NO: 594701 - DNA, 25 bp, Homo sapien
actgtcattgttgtaatattcccca

SEQ ID NO: 594702 - DNA, 25 bp, Homo sapien
cataaattacacaatcgagtttccc

SEQ ID NO: 594703 - DNA, 25 bp, Homo sapien
ggagagcaatacatgagccttgccc

SEQ ID NO: 594704 - DNA, 25 bp, Homo sapien
cagtctccgaccatcataaattaca

SEQ ID NO: 594705 - DNA, 25 bp, Homo sapien
tcagcacatcgggagagcaatacat

SEQ ID NO: 594706 - DNA, 25 bp, Homo sapien
tgaataataacgagagttggtgagg

SEQ ID NO: 594707 - DNA, 25 bp, Homo sapien
tcaagatgagtctaggtaacataat

SEQ ID NO: 594708 - DNA, 25 bp, Homo sapien
ggatgtggaaaaatcggcaccctca

SEQ ID NO: 594709 - DNA, 25 bp, Homo sapien
taggatggccataataaatgtgagg

SEQ ID NO: 594710 - DNA, 25 bp, Homo sapien
ttccggaagtgactgatccgcacat

SEQ ID NO: 594711 - DNA, 25 bp, Homo sapien
gacgtcacaccagtagaaatcccac

SEQ ID NO: 594712 - DNA, 25 bp, Homo sapien
gatccgcacatgttcatccatgtag

SEQ ID NO: 594713 - DNA, 25 bp, Homo sapien
gtggtcgaagttctcccggagccag

SEQ ID NO: 594714 - DNA, 25 bp, Homo sapien
tcaccatgtagttcttccgggtcag

SEQ ID NO: 594715 - DNA, 25 bp, Homo sapien
ttccggaaccgcttcaggttcttca

SEQ ID NO: 594716 - DNA, 25 bp, Homo sapien
aggtggtactcgcaaggcatctcaa

SEQ ID NO: 594717 - DNA, 25 bp, Homo sapien
ggtggtactcgcaaggcatctcaaa

SEQ ID NO: 594718 - DNA, 25 bp, Homo sapien
tgattcctgggtttttgcgaaactc

SEQ ID NO: 594719 - DNA, 25 bp, Homo sapien
gtccttcagcctacggaagaggaag

SEQ ID NO: 594720 - DNA, 25 bp, Homo sapien
cgatgtccttcagcctacggaagag

SEQ ID NO: 594721 - DNA, 25 bp, Homo sapien
tgcctttcccttgagaccgggctac

SEQ ID NO: 594722 - DNA, 25 bp, Homo sapien
acgatgtccttcagcctacggaaga

SEQ ID NO: 594723 - DNA, 25 bp, Homo sapien
agggactgaccgtgctccaggcagg

SEQ ID NO: 594724 - DNA, 25 bp, Homo sapien
ccagagggactgaccgtgctccagg

SEQ ID NO: 594725 - DNA, 25 bp, Homo sapien
cagagggactgaccgtgctccaggc

SEQ ID NO: 594726 - DNA, 25 bp, Homo sapien
tctggtcgtcagagcttcttgtgtc

SEQ ID NO: 594727 - DNA, 25 bp, Homo sapien
tccacgggaatatcatctttctggt

SEQ ID NO: 594728 - DNA, 25 bp, Homo sapien
tgagccacatagttctccacgggaa

SEQ ID NO: 594729 - DNA, 25 bp, Homo sapien
aggattttcaatgtaacgctgagcc

SEQ ID NO: 594730 - DNA, 25 bp, Homo sapien
cagaacccatctctttccatgcatc

SEQ ID NO: 594731 - DNA, 25 bp, Homo sapien
gactgtttgatgaccatgcaatgga

SEQ ID NO: 594732 - DNA, 25 bp, Homo sapien
gttgactgactgtttgatgaccatg

SEQ ID NO: 594733 - DNA, 25 bp, Homo sapien
gactgactgtttgatgaccatgcaa

SEQ ID NO: 594734 - DNA, 25 bp, Homo sapien
gcagtgctgccaccaagtaggtgct

SEQ ID NO: 594735 - DNA, 25 bp, Homo sapien
ggcagccagtattcagggcagtgct

SEQ ID NO: 594736 - DNA, 25 bp, Homo sapien
acatgccgggcagagggaactgtac

SEQ ID NO: 594737 - DNA, 25 bp, Homo sapien
ttggataaacgcatgaataagttgg

SEQ ID NO: 594738 - DNA, 25 bp, Homo sapien
tcaccagcacatagacacgcaggtc

SEQ ID NO: 594739 - DNA, 25 bp, Homo sapien
acatcaccagcacatagacacgcag

SEQ ID NO: 594740 - DNA, 25 bp, Homo sapien
cacatagacacgcaggtcaaacttg

SEQ ID NO: 594741 - DNA, 25 bp, Homo sapien
ccagcacatagacacgcaggtcaaa

SEQ ID NO: 594742 - DNA, 25 bp, Homo sapien
gggcaaagccatcccggtagagcca

SEQ ID NO: 594743 - DNA, 25 bp, Homo sapien
gtgttggagaatcgggcaaagccat

SEQ ID NO: 594744 - DNA, 25 bp, Homo sapien
tgaagcgggtgttggagaatcgggc

SEQ ID NO: 594745 - DNA, 25 bp, Homo sapien
tggtcatcaatgctgttcagtgtga

SEQ ID NO: 594746 - DNA, 25 bp, Homo sapien
cgggggtggttagccaggatcccag

SEQ ID NO: 594747 - DNA, 25 bp, Homo sapien
tgtcgggggtggttagccaggatcc

SEQ ID NO: 594748 - DNA, 25 bp, Homo sapien
taggtgtgtcgggggtggttagcca

SEQ ID NO: 594749 - DNA, 25 bp, Homo sapien
gtgtgtcgggggtggttagccagga

SEQ ID NO: 594750 - DNA, 25 bp, Homo sapien
tgtgcccagaccacagcaggcattc

SEQ ID NO: 594751 - DNA, 25 bp, Homo sapien
gcccagaccacagcaggcattcagc

SEQ ID NO: 594752 - DNA, 25 bp, Homo sapien
ctgtctcctgtgcccagaccacagc

SEQ ID NO: 594753 - DNA, 25 bp, Homo sapien
cctgtctcctgtgcccagaccacag

SEQ ID NO: 594754 - DNA, 25 bp, Homo sapien
cagcctcgccaggacactgtgttat

SEQ ID NO: 594755 - DNA, 25 bp, Homo sapien
gaatgagtgagccaatgactaggca

SEQ ID NO: 594756 - DNA, 25 bp, Homo sapien
aacgtatgtattctcccagcctcgc

SEQ ID NO: 594757 - DNA, 25 bp, Homo sapien
ctgtgcagtgaatgaccttgaagcc

SEQ ID NO: 594758 - DNA, 25 bp, Homo sapien
tcaccatcgtcaccaccagtgacat

SEQ ID NO: 594759 - DNA, 25 bp, Homo sapien
gtggtcaagggtcagcgtgaacaaa

SEQ ID NO: 594760 - DNA, 25 bp, Homo sapien
agggtggtggtcaagggtcagcgtg

SEQ ID NO: 594761 - DNA, 25 bp, Homo sapien
caagggtcagcgtgaacaaaaaggg

SEQ ID NO: 594762 - DNA, 25 bp, Homo sapien
cagcgtgaacaaaaagggtgagctc

SEQ ID NO: 594763 - DNA, 25 bp, Homo sapien
gatgttttttgcacagccacgttgg

SEQ ID NO: 594764 - DNA, 25 bp, Homo sapien
cttctttgggtggtagtcgggagat

SEQ ID NO: 594765 - DNA, 25 bp, Homo sapien
cacagccacgttggtgaggtgaaca

SEQ ID NO: 594766 - DNA, 25 bp, Homo sapien
ggtagtcgggagatgttttttgcac

SEQ ID NO: 594767 - DNA, 25 bp, Homo sapien
gagaggagcctcagttagtcaggac

SEQ ID NO: 594768 - DNA, 25 bp, Homo sapien
cagtgtttcccttagacctgggcaa

SEQ ID NO: 594769 - DNA, 25 bp, Homo sapien
taattaggatgaccccaggtgtgcc

SEQ ID NO: 594770 - DNA, 25 bp, Homo sapien
gacttgctaaggacagaccacactg

SEQ ID NO: 594771 - DNA, 25 bp, Homo sapien
tagccgtacagctcgaagcagtgct

SEQ ID NO: 594772 - DNA, 25 bp, Homo sapien
cctggtcgatgaggatgtcatagcc

SEQ ID NO: 594773 - DNA, 25 bp, Homo sapien
caaagatgttgtcgatgtccctgaa

SEQ ID NO: 594774 - DNA, 25 bp, Homo sapien
tgtttggacgccaggtactgccgga

SEQ ID NO: 594775 - DNA, 25 bp, Homo sapien
gatggggacgcattgacctccagga

SEQ ID NO: 594776 - DNA, 25 bp, Homo sapien
tggggacgcattgacctccaggagc

SEQ ID NO: 594777 - DNA, 25 bp, Homo sapien
cagtgatggggacgcattgacctcc

SEQ ID NO: 594778 - DNA, 25 bp, Homo sapien
ggacgcattgacctccaggagccac

SEQ ID NO: 594779 - DNA, 25 bp, Homo sapien
tccacaacatgcagggtgtcttcca

SEQ ID NO: 594780 - DNA, 25 bp, Homo sapien
gtccacaacatgcagggtgtcttcc

SEQ ID NO: 594781 - DNA, 25 bp, Homo sapien
gtgtcccagttaccagcaaggagaa

SEQ ID NO: 594782 - DNA, 25 bp, Homo sapien
accagcaaggagaatcagccctcaa

SEQ ID NO: 594783 - DNA, 25 bp, Homo sapien
ccagcaaggagaatcagccctcaaa

SEQ ID NO: 594784 - DNA, 25 bp, Homo sapien
tcattccacatgaggtcaaagcccc

SEQ ID NO: 594785 - DNA, 25 bp, Homo sapien
cagggccatcattccacatgaggtc

SEQ ID NO: 594786 - DNA, 25 bp, Homo sapien
aagtttcccattcccgacaggtcag

SEQ ID NO: 594787 - DNA, 25 bp, Homo sapien
cgagatgtgtgttggtcacaaagtt

SEQ ID NO: 594788 - DNA, 25 bp, Homo sapien
tagactacctggtacctcccatgac

SEQ ID NO: 594789 - DNA, 25 bp, Homo sapien
ctgcctcctagactacctggtacct

SEQ ID NO: 594790 - DNA, 25 bp, Homo sapien
caatctaaccactatcccaagctgc

SEQ ID NO: 594791 - DNA, 25 bp, Homo sapien
tctaaccactatcccaagctgcctc

SEQ ID NO: 594792 - DNA, 25 bp, Homo sapien
taaaagatttcatccggactggacc

SEQ ID NO: 594793 - DNA, 25 bp, Homo sapien
gagtctaccacgtgaagaagccagg

SEQ ID NO: 594794 - DNA, 25 bp, Homo sapien
taatcaatagagcatcacccaggag

SEQ ID NO: 594795 - DNA, 25 bp, Homo sapien
tatgttttacctcaccagttggcac

SEQ ID NO: 594796 - DNA, 25 bp, Homo sapien
cagaagagctgcctcagttgtttct

SEQ ID NO: 594797 - DNA, 25 bp, Homo sapien
tgtttcttccgatcgttgacgcagc

SEQ ID NO: 594798 - DNA, 25 bp, Homo sapien
ctcagttgtttcttccgatcgttga

SEQ ID NO: 594799 - DNA, 25 bp, Homo sapien
cagttgtttcttccgatcgttgacg

SEQ ID NO: 594800 - DNA, 25 bp, Homo sapien
ctgatttcctcctggcagctgggga

SEQ ID NO: 594801 - DNA, 25 bp, Homo sapien
gctaaggctgatttcctcctggcag

SEQ ID NO: 594802 - DNA, 25 bp, Homo sapien
taaggctgatttcctcctggcagct

SEQ ID NO: 594803 - DNA, 25 bp, Homo sapien
ctgctaaggctgatttcctcctggc

SEQ ID NO: 594804 - DNA, 25 bp, Homo sapien
ggctgtctcctggtgcaaagatgcc

SEQ ID NO: 594805 - DNA, 25 bp, Homo sapien
ccaattcaggtagtaagctgcagct

SEQ ID NO: 594806 - DNA, 25 bp, Homo sapien
gaggtatccaagtgtcaaagccagg

SEQ ID NO: 594807 - DNA, 25 bp, Homo sapien
tggtgcccagtgactccaagtaggg

SEQ ID NO: 594808 - DNA, 25 bp, Homo sapien
ggttttccggtttctggctcagctc

SEQ ID NO: 594809 - DNA, 25 bp, Homo sapien
gctgtcctgcccatgagcccagggt

SEQ ID NO: 594810 - DNA, 25 bp, Homo sapien
agctgtcctgcccatgagcccaggg

SEQ ID NO: 594811 - DNA, 25 bp, Homo sapien
cagggttttccggtttctggctcag

SEQ ID NO: 594812 - DNA, 25 bp, Homo sapien
tgttgcaacccctcttaaaccaaga

SEQ ID NO: 594813 - DNA, 25 bp, Homo sapien
ctactctgaagcaggcggagtggta

SEQ ID NO: 594814 - DNA, 25 bp, Homo sapien
taagatgtgaaaaggcagattttta

SEQ ID NO: 594815 - DNA, 25 bp, Homo sapien
ccatttgcagccagagaaactactc

SEQ ID NO: 594816 - DNA, 25 bp, Homo sapien
gagaagtcctcatgctctgaaggca

SEQ ID NO: 594817 - DNA, 25 bp, Homo sapien
tgacaggcgggtgataacaaatggc

SEQ ID NO: 594818 - DNA, 25 bp, Homo sapien
tgttagctccagatagtgcaatacc

SEQ ID NO: 594819 - DNA, 25 bp, Homo sapien
taagggcacgccactccatttagaa

SEQ ID NO: 594820 - DNA, 25 bp, Homo sapien
caccacactggcaggccatagagag

SEQ ID NO: 594821 - DNA, 25 bp, Homo sapien
ccaaagttggcgaagatgtgcatca

SEQ ID NO: 594822 - DNA, 25 bp, Homo sapien
agaggtggaaatgcccaaagttggc

SEQ ID NO: 594823 - DNA, 25 bp, Homo sapien
cactggtaggagtgaaaatgaggaa

SEQ ID NO: 594824 - DNA, 25 bp, Homo sapien
cttcgaggaagcttgtggaacccct

SEQ ID NO: 594825 - DNA, 25 bp, Homo sapien
caccttcgaggaagcttgtggaacc

SEQ ID NO: 594826 - DNA, 25 bp, Homo sapien
aggaagcttgtggaacccctgggct

SEQ ID NO: 594827 - DNA, 25 bp, Homo sapien
cccctgagcaccttcgaggaagctt

SEQ ID NO: 594828 - DNA, 25 bp, Homo sapien
ggtttgggctggtgtgttccgagtg

SEQ ID NO: 594829 - DNA, 25 bp, Homo sapien
ttgtacaggggactctaccctgaag

SEQ ID NO: 594830 - DNA, 25 bp, Homo sapien
tttgggctggtgtgttccgagtggc

SEQ ID NO: 594831 - DNA, 25 bp, Homo sapien
tctggggtattgtacaggggactct

SEQ ID NO: 594832 - DNA, 25 bp, Homo sapien
attgttccatcccctcctttgatct

SEQ ID NO: 594833 - DNA, 25 bp, Homo sapien
tcttccttactctccgctttccctc

SEQ ID NO: 594834 - DNA, 25 bp, Homo sapien
tactctccgctttccctctctcggg

SEQ ID NO: 594835 - DNA, 25 bp, Homo sapien
tattgtcttcgttttgaagctgaga

SEQ ID NO: 594836 - DNA, 25 bp, Homo sapien
cttcctcggaggcgcggggctccaa

SEQ ID NO: 594837 - DNA, 25 bp, Homo sapien
tctccctccttcctcggaggcgcgg

SEQ ID NO: 594838 - DNA, 25 bp, Homo sapien
ggggctccaaccccatgctttctgt

SEQ ID NO: 594839 - DNA, 25 bp, Homo sapien
ggctccaaccccatgctttctgtct

SEQ ID NO: 594840 - DNA, 25 bp, Homo sapien
gccgccgctccatccgacttcgcgg

SEQ ID NO: 594841 - DNA, 25 bp, Homo sapien
gaggccgccgctccatccgacttcg

SEQ ID NO: 594842 - DNA, 25 bp, Homo sapien
ccgctccatccgacttcgcggccat

SEQ ID NO: 594843 - DNA, 25 bp, Homo sapien
ccgaggccgccgctccatccgactt

SEQ ID NO: 594844 - DNA, 25 bp, Homo sapien
caccgtcggagaagaacacgagcag

SEQ ID NO: 594845 - DNA, 25 bp, Homo sapien
agccacaggtccgtggcaccgtcgg

SEQ ID NO: 594846 - DNA, 25 bp, Homo sapien
ctgcaggtagtaggaggccgccagc

SEQ ID NO: 594847 - DNA, 25 bp, Homo sapien
agaagaacacgagcagcgcgcacag

SEQ ID NO: 594848 - DNA, 25 bp, Homo sapien
gaccctgcgggctccgagtagtcgt

SEQ ID NO: 594849 - DNA, 25 bp, Homo sapien
gtccttggtgctgacggcgggtccc

SEQ ID NO: 594850 - DNA, 25 bp, Homo sapien
tgccttctttggtccggaaggcgcc

SEQ ID NO: 594851 - DNA, 25 bp, Homo sapien
tgctgatggcggctccgccggctac

SEQ ID NO: 594852 - DNA, 25 bp, Homo sapien
gataagaggagtagggattctccct

SEQ ID NO: 594853 - DNA, 25 bp, Homo sapien
tgcaatgataagacaatgagataag

SEQ ID NO: 594854 - DNA, 25 bp, Homo sapien
catcccaacaggtaagaataatgca

SEQ ID NO: 594855 - DNA, 25 bp, Homo sapien
ggaggagggcggcttgcctaagatc

SEQ ID NO: 594856 - DNA, 25 bp, Homo sapien
taaaatgttacagtctgcagggccc

SEQ ID NO: 594857 - DNA, 25 bp, Homo sapien
tagcaattctagctactcccctggg

SEQ ID NO: 594858 - DNA, 25 bp, Homo sapien
caccttgtgtggatagagctccgcc

SEQ ID NO: 594859 - DNA, 25 bp, Homo sapien
ggaatatacacatcatcttggcagg

SEQ ID NO: 594860 - DNA, 25 bp, Homo sapien
gggactaggttctggcctcccacat

SEQ ID NO: 594861 - DNA, 25 bp, Homo sapien
ggttagattccatcctcccgatggc

SEQ ID NO: 594862 - DNA, 25 bp, Homo sapien
tctgaaggtatcacgggaccaaggc

SEQ ID NO: 594863 - DNA, 25 bp, Homo sapien
taggccctaactgagaagctgagac

SEQ ID NO: 594864 - DNA, 25 bp, Homo sapien
gtgagaggtaaggatggcccggaca

SEQ ID NO: 594865 - DNA, 25 bp, Homo sapien
aagacaggagaccagttgccaggtg

SEQ ID NO: 594866 - DNA, 25 bp, Homo sapien
gagagccacaggaaggttttaaaca

SEQ ID NO: 594867 - DNA, 25 bp, Homo sapien
gaatagagtctagagccattagaga

SEQ ID NO: 594868 - DNA, 25 bp, Homo sapien
gagaccaaggtgattccaggaaagc

SEQ ID NO: 594869 - DNA, 25 bp, Homo sapien
taggaccccggtaagacacaatgga

SEQ ID NO: 594870 - DNA, 25 bp, Homo sapien
ttagtgccagatctaggactcagcc

SEQ ID NO: 594871 - DNA, 25 bp, Homo sapien
gaaggacaagtctcatcccacggga

SEQ ID NO: 594872 - DNA, 25 bp, Homo sapien
tggctagctccctagtctcaatgcg

SEQ ID NO: 594873 - DNA, 25 bp, Homo sapien
tagctccctagtctcaatgcgggcc

SEQ ID NO: 594874 - DNA, 25 bp, Homo sapien
tccctagtctcaatgcgggccaggg

SEQ ID NO: 594875 - DNA, 25 bp, Homo sapien
cctagtctcaatgcgggccagggtc

SEQ ID NO: 594876 - DNA, 25 bp, Homo sapien
agcttccagtggctcccccgctgcc

SEQ ID NO: 594877 - DNA, 25 bp, Homo sapien
ctctccatccaggaaccaccctcat

SEQ ID NO: 594878 - DNA, 25 bp, Homo sapien
agttctgggccaaacacacagcagc

SEQ ID NO: 594879 - DNA, 25 bp, Homo sapien
ttctgggccaaacacacagcagctt

SEQ ID NO: 594880 - DNA, 25 bp, Homo sapien
tgcttgaagttgcaaagagccagga

SEQ ID NO: 594881 - DNA, 25 bp, Homo sapien
ttgaagttgcaaagagccaggacac

SEQ ID NO: 594882 - DNA, 25 bp, Homo sapien
tctgcttgaagttgcaaagagccag

SEQ ID NO: 594883 - DNA, 25 bp, Homo sapien
tctctgcttgaagttgcaaagagcc

SEQ ID NO: 594884 - DNA, 25 bp, Homo sapien
ccccaggtacagggcgcgcaggtac

SEQ ID NO: 594885 - DNA, 25 bp, Homo sapien
gtcggcgctctcgaacagcatctgc

SEQ ID NO: 594886 - DNA, 25 bp, Homo sapien
caccgcggtgcaccagcaggctgag

SEQ ID NO: 594887 - DNA, 25 bp, Homo sapien
gctgcagcactagctgcggcgcgct

SEQ ID NO: 594888 - DNA, 25 bp, Homo sapien
cagcaagcgcagcatgctcacgtcg

SEQ ID NO: 594889 - DNA, 25 bp, Homo sapien
tggagacagggcaggggcggggtgg

SEQ ID NO: 594890 - DNA, 25 bp, Homo sapien
tgtggagacagggcaggggcggggt

SEQ ID NO: 594891 - DNA, 25 bp, Homo sapien
ctgtggagacagggcaggggcgggg

SEQ ID NO: 594892 - DNA, 25 bp, Homo sapien
cagaagtccgtctccccttggatga

SEQ ID NO: 594893 - DNA, 25 bp, Homo sapien
gccttacggaagatgcaaccaggtg

SEQ ID NO: 594894 - DNA, 25 bp, Homo sapien
caggccgggtacttcttgcgaggca

SEQ ID NO: 594895 - DNA, 25 bp, Homo sapien
ggagccggcggtcaataaaatgagc

SEQ ID NO: 594896 - DNA, 25 bp, Homo sapien
agtgtagcaccagatgattccccag

SEQ ID NO: 594897 - DNA, 25 bp, Homo sapien
gatgtgggatcagccaagcctgtcc

SEQ ID NO: 594898 - DNA, 25 bp, Homo sapien
cagggcagctcgaaaagtgtagcac

SEQ ID NO: 594899 - DNA, 25 bp, Homo sapien
aatgggccacaaggctgaaaacggg

SEQ ID NO: 594900 - DNA, 25 bp, Homo sapien
cctctgataactgtgctaaaacctc

SEQ ID NO: 594901 - DNA, 25 bp, Homo sapien
tgaagacctgtatctagaagccacg

SEQ ID NO: 594902 - DNA, 25 bp, Homo sapien
catcttatctgctgtgttgaagacc

SEQ ID NO: 594903 - DNA, 25 bp, Homo sapien
gagcccacaacacaacaagagacgt

SEQ ID NO: 594904 - DNA, 25 bp, Homo sapien
catctgtccttaacatccgctgctg

SEQ ID NO: 594905 - DNA, 25 bp, Homo sapien
gctgaaccagggagggctaagcatc

SEQ ID NO: 594906 - DNA, 25 bp, Homo sapien
ccatcaccttttgatgggcagccca

SEQ ID NO: 594907 - DNA, 25 bp, Homo sapien
cccgtatcatggttgtgcttgtgct

SEQ ID NO: 594908 - DNA, 25 bp, Homo sapien
tctcttgcagggacgtcgtgaccag

SEQ ID NO: 594909 - DNA, 25 bp, Homo sapien
tctgggtccgcatcttcagagctcc

SEQ ID NO: 594910 - DNA, 25 bp, Homo sapien
tcgaggcctcgttcctgagggtgct

SEQ ID NO: 594911 - DNA, 25 bp, Homo sapien
ggtgaccctcatgctacatctctgg

SEQ ID NO: 594912 - DNA, 25 bp, Homo sapien
gcacagaatgggactcttgggtcct

SEQ ID NO: 594913 - DNA, 25 bp, Homo sapien
ccttccattgagacactgcaaagca

SEQ ID NO: 594914 - DNA, 25 bp, Homo sapien
atcctgcacctggactcccctgcaa

SEQ ID NO: 594915 - DNA, 25 bp, Homo sapien
tactactgcccatgcggcttgacac

SEQ ID NO: 594916 - DNA, 25 bp, Homo sapien
cagaagctaagcacaagggggtaac

SEQ ID NO: 594917 - DNA, 25 bp, Homo sapien
ggtgcccttgcagtggttatgcata

SEQ ID NO: 594918 - DNA, 25 bp, Homo sapien
ggacccagaaatgtcctatcctctc

SEQ ID NO: 594919 - DNA, 25 bp, Homo sapien
cacatctcccactctagagtttttc

SEQ ID NO: 594920 - DNA, 25 bp, Homo sapien
cacagatgtagtaaataccaggagg

SEQ ID NO: 594921 - DNA, 25 bp, Homo sapien
tgacttgaggccttagaaacattta

SEQ ID NO: 594922 - DNA, 25 bp, Homo sapien
gaatcactcggaattgtgctgacag

SEQ ID NO: 594923 - DNA, 25 bp, Homo sapien
cctcaggcatggctagtgattccta

SEQ ID NO: 594924 - DNA, 25 bp, Homo sapien
tattggctgtagtggagttaggaac

SEQ ID NO: 594925 - DNA, 25 bp, Homo sapien
gccaaaacaataggacacaagcagc

SEQ ID NO: 594926 - DNA, 25 bp, Homo sapien
tgaaatgctgcccaataaacaggag

SEQ ID NO: 594927 - DNA, 25 bp, Homo sapien
tgttcactatgccaagaactgcctg

SEQ ID NO: 594928 - DNA, 25 bp, Homo sapien
atcagacgagatcggtcagctttct

SEQ ID NO: 594929 - DNA, 25 bp, Homo sapien
cctgccaccctcctggccatccctt

SEQ ID NO: 594930 - DNA, 25 bp, Homo sapien
actcctgccaccctcctggccatcc

SEQ ID NO: 594931 - DNA, 25 bp, Homo sapien
ggtgaaatgtcccctctactcctgc

SEQ ID NO: 594932 - DNA, 25 bp, Homo sapien
ctactcctgccaccctcctggccat

SEQ ID NO: 594933 - DNA, 25 bp, Homo sapien
tccctttcttgacttcatattccat

SEQ ID NO: 594934 - DNA, 25 bp, Homo sapien
tcttccctttcttgacttcatattc

SEQ ID NO: 594935 - DNA, 25 bp, Homo sapien
cttcttccctttcttgacttcatat

SEQ ID NO: 594936 - DNA, 25 bp, Homo sapien
ttccctttcttgacttcatattcca

SEQ ID NO: 594937 - DNA, 25 bp, Homo sapien
taaaggggcatcgagtgcaggggcc

SEQ ID NO: 594938 - DNA, 25 bp, Homo sapien
ccggcggctcacgctgctcctacag

SEQ ID NO: 594939 - DNA, 25 bp, Homo sapien
ccagccttcggatgggggatacaaa

SEQ ID NO: 594940 - DNA, 25 bp, Homo sapien
aatctgggggtcgatgaggtagtcg

SEQ ID NO: 594941 - DNA, 25 bp, Homo sapien
ttcagtgaggaagtcacccaggtaa

SEQ ID NO: 594942 - DNA, 25 bp, Homo sapien
agctcgtcccgactggaggggttca

SEQ ID NO: 594943 - DNA, 25 bp, Homo sapien
ggcggtgtctagcagctgcaggagc

SEQ ID NO: 594944 - DNA, 25 bp, Homo sapien
tgcaggagctcgtcccgactggagg

SEQ ID NO: 594945 - DNA, 25 bp, Homo sapien
tagggattcgcagaatgagctcttc

SEQ ID NO: 594946 - DNA, 25 bp, Homo sapien
tgagctcttcattgtcgcgccaggt

SEQ ID NO: 594947 - DNA, 25 bp, Homo sapien
gcggcggcgatctcgtgcgtaggga

SEQ ID NO: 594948 - DNA, 25 bp, Homo sapien
tcattgtcgcgccaggtgagcagca

SEQ ID NO: 594949 - DNA, 25 bp, Homo sapien
ccgccgcttctcgggcgccccgcct

SEQ ID NO: 594950 - DNA, 25 bp, Homo sapien
ggccggcaccgggtccacacccaga

SEQ ID NO: 594951 - DNA, 25 bp, Homo sapien
ggggtcgcgtcctgcgccgcctggg

SEQ ID NO: 594952 - DNA, 25 bp, Homo sapien
ctgggctggcatccacgccggccgg

SEQ ID NO: 594953 - DNA, 25 bp, Homo sapien
atggtgtggcgccgctccgcggtgc

SEQ ID NO: 594954 - DNA, 25 bp, Homo sapien
tgcagatggtgtggcgccgctccgc

SEQ ID NO: 594955 - DNA, 25 bp, Homo sapien
gctgcagatggtgtggcgccgctcc

SEQ ID NO: 594956 - DNA, 25 bp, Homo sapien
aggctgcagatggtgtggcgccgct

SEQ ID NO: 594957 - DNA, 25 bp, Homo sapien
gcgctggcgctccaagctgccgccg

SEQ ID NO: 594958 - DNA, 25 bp, Homo sapien
gccccggcgcgctggcgctccaagc

SEQ ID NO: 594959 - DNA, 25 bp, Homo sapien
ccccggcgcgctggcgctccaagct

SEQ ID NO: 594960 - DNA, 25 bp, Homo sapien
ggcgcgctggcgctccaagctgccg

SEQ ID NO: 594961 - DNA, 25 bp, Homo sapien
tccgctcccagctaccgcccggctt

SEQ ID NO: 594962 - DNA, 25 bp, Homo sapien
cctccgctcccagctaccgcccggc

SEQ ID NO: 594963 - DNA, 25 bp, Homo sapien
ccagctaccgcccggctttcccgcg

SEQ ID NO: 594964 - DNA, 25 bp, Homo sapien
cgctcccagctaccgcccggctttc

SEQ ID NO: 594965 - DNA, 25 bp, Homo sapien
tgaccaggttgcagtaggcgtcggg

SEQ ID NO: 594966 - DNA, 25 bp, Homo sapien
agccaggatgaccaggttgcagtag

SEQ ID NO: 594967 - DNA, 25 bp, Homo sapien
ctacagccaggatgaccaggttgca

SEQ ID NO: 594968 - DNA, 25 bp, Homo sapien
ccaggatgaccaggttgcagtaggc

SEQ ID NO: 594969 - DNA, 25 bp, Homo sapien
ccagatttgtggaggattcatcagc

SEQ ID NO: 594970 - DNA, 25 bp, Homo sapien
ttgtgccatgaaaaatgtaccccag

SEQ ID NO: 594971 - DNA, 25 bp, Homo sapien
tcaaaattcgatggctactctctgg

SEQ ID NO: 594972 - DNA, 25 bp, Homo sapien
tgaagatgcgcacaaagatacacac

SEQ ID NO: 594973 - DNA, 25 bp, Homo sapien
tctggtccccgtagatgatctggaa

SEQ ID NO: 594974 - DNA, 25 bp, Homo sapien
gatgagtgcgcaggactcctctgca

SEQ ID NO: 594975 - DNA, 25 bp, Homo sapien
cggtccacacactcaatactctggt

SEQ ID NO: 594976 - DNA, 25 bp, Homo sapien
gaagacctgacagatgagtgcgcag

SEQ ID NO: 594977 - DNA, 25 bp, Homo sapien
cataggcatacgtcccatctgtgtg

SEQ ID NO: 594978 - DNA, 25 bp, Homo sapien
cagcagctgaagtcggcatcatagg

SEQ ID NO: 594979 - DNA, 25 bp, Homo sapien
gtcggcatcataggcatacgtccca

SEQ ID NO: 594980 - DNA, 25 bp, Homo sapien
gcagcagctgaagtcggcatcatag

SEQ ID NO: 594981 - DNA, 25 bp, Homo sapien
gtaatcctgtaactgctccaagccc

SEQ ID NO: 594982 - DNA, 25 bp, Homo sapien
ctgctgtggtcgctgccgctgcagt

SEQ ID NO: 594983 - DNA, 25 bp, Homo sapien
tgtaacatgcttcaaaggtgtcctg

SEQ ID NO: 594984 - DNA, 25 bp, Homo sapien
aggtgtggacgtgccgctgtaacat

SEQ ID NO: 594985 - DNA, 25 bp, Homo sapien
tgctggatctcgaggggccccagct

SEQ ID NO: 594986 - DNA, 25 bp, Homo sapien
tcagcaggcctgtgcaatagtcctg

SEQ ID NO: 594987 - DNA, 25 bp, Homo sapien
gtgcaatagtcctggatgggcagcc

SEQ ID NO: 594988 - DNA, 25 bp, Homo sapien
cagcagcatcgcaaactgctggatc

SEQ ID NO: 594989 - DNA, 25 bp, Homo sapien
aacttgcgccggtctccgtagagct

SEQ ID NO: 594990 - DNA, 25 bp, Homo sapien
ggaggaggaacttgcgccggtctcc

SEQ ID NO: 594991 - DNA, 25 bp, Homo sapien
ggaggaacttgcgccggtctccgta

SEQ ID NO: 594992 - DNA, 25 bp, Homo sapien
aggaacttgcgccggtctccgtaga

SEQ ID NO: 594993 - DNA, 25 bp, Homo sapien
ctctgggggtacagcgggggctcac

SEQ ID NO: 594994 - DNA, 25 bp, Homo sapien
tacatactagattactgtactttta

SEQ ID NO: 594995 - DNA, 25 bp, Homo sapien
ctacatactagattactgtactttt

SEQ ID NO: 594996 - DNA, 25 bp, Homo sapien
actacatactagattactgtacttt

SEQ ID NO: 594997 - DNA, 25 bp, Homo sapien
aggtagttgtcttctgcggcgtcgc

SEQ ID NO: 594998 - DNA, 25 bp, Homo sapien
cttgatgcggccgaagctgtcagtg

SEQ ID NO: 594999 - DNA, 25 bp, Homo sapien
tcgatgtcgtgcgtgatgtcagcca

SEQ ID NO: 595000 - DNA, 25 bp, Homo sapien
caggaagccctcgaagtagccgatg

SEQ ID NO: 595001 - DNA, 25 bp, Homo sapien
gatgggagaccctgacatttagagc

SEQ ID NO: 595002 - DNA, 25 bp, Homo sapien
gtcttaagaccagaatgggacccag

SEQ ID NO: 595003 - DNA, 25 bp, Homo sapien
ttcttttctcagtcggccagcaggt

SEQ ID NO: 595004 - DNA, 25 bp, Homo sapien
tagggtccccgaagcaaagctgaga

SEQ ID NO: 595005 - DNA, 25 bp, Homo sapien
gccaagaccgtccccaggggatcca

SEQ ID NO: 595006 - DNA, 25 bp, Homo sapien
ccaagaccgtccccaggggatccag

SEQ ID NO: 595007 - DNA, 25 bp, Homo sapien
caagaccgtccccaggggatccagc

SEQ ID NO: 595008 - DNA, 25 bp, Homo sapien
cagggataccgtgtagggctcttaa

SEQ ID NO: 595009 - DNA, 25 bp, Homo sapien
gcacattggtttccactcgtgtggg

SEQ ID NO: 595010 - DNA, 25 bp, Homo sapien
tataaatgccggagaaattcttggc

SEQ ID NO: 595011 - DNA, 25 bp, Homo sapien
tgtatcggtgcacagagctacctag

SEQ ID NO: 595012 - DNA, 25 bp, Homo sapien
gcctacagtgctaactattttgagg

SEQ ID NO: 595013 - DNA, 25 bp, Homo sapien
agatcagatgtgttcggtgtggtat

SEQ ID NO: 595014 - DNA, 25 bp, Homo sapien
gatgtgttcggtgtggtatggcata

SEQ ID NO: 595015 - DNA, 25 bp, Homo sapien
tattttgagggggtctcccatccaa

SEQ ID NO: 595016 - DNA, 25 bp, Homo sapien
ctttggtgccgcgggcgtttctcgt

SEQ ID NO: 595017 - DNA, 25 bp, Homo sapien
agtcccttcccactcgcctctaagc

SEQ ID NO: 595018 - DNA, 25 bp, Homo sapien
gtgccgcgggcgtttctcgtcctgc

SEQ ID NO: 595019 - DNA, 25 bp, Homo sapien
ctctgatgtgctcccgagctgggac

SEQ ID NO: 595020 - DNA, 25 bp, Homo sapien
agtgccgggaaactgactttctaga

SEQ ID NO: 595021 - DNA, 25 bp, Homo sapien
gtgccgggaaactgactttctagaa

SEQ ID NO: 595022 - DNA, 25 bp, Homo sapien
tgaggttccggggtgccagtgccgg

SEQ ID NO: 595023 - DNA, 25 bp, Homo sapien
ctgaggttccggggtgccagtgccg

SEQ ID NO: 595024 - DNA, 25 bp, Homo sapien
gtctcgcgggcagcccggatcctcg

SEQ ID NO: 595025 - DNA, 25 bp, Homo sapien
gcgcccgctcctcgtctcgcgggca

SEQ ID NO: 595026 - DNA, 25 bp, Homo sapien
tcctcgtctcgcgggcagcccggat

SEQ ID NO: 595027 - DNA, 25 bp, Homo sapien
gcagcccggatcctcgcagcttgag

SEQ ID NO: 595028 - DNA, 25 bp, Homo sapien
gaaccacctgtacatgggccgaaag

SEQ ID NO: 595029 - DNA, 25 bp, Homo sapien
tgtagtgaacgcctaggaacaactt

SEQ ID NO: 595030 - DNA, 25 bp, Homo sapien
ggccgaaagctacacatccaggatg

SEQ ID NO: 595031 - DNA, 25 bp, Homo sapien
gaaatactgtagagtcgttacctgc

SEQ ID NO: 595032 - DNA, 25 bp, Homo sapien
aattaaaaataatcgctgcgggtgg

SEQ ID NO: 595033 - DNA, 25 bp, Homo sapien
tccagattatgtgagctctcctgag

SEQ ID NO: 595034 - DNA, 25 bp, Homo sapien
gttgtctgaagagcactggagtcgt

SEQ ID NO: 595035 - DNA, 25 bp, Homo sapien
tcagggctgctaactcttctaatgt

SEQ ID NO: 595036 - DNA, 25 bp, Homo sapien
tccatgcgcgttgagcaccttgtat

SEQ ID NO: 595037 - DNA, 25 bp, Homo sapien
gagcaccttgtatgcttcacttacg

SEQ ID NO: 595038 - DNA, 25 bp, Homo sapien
ccttgtatgcttcacttacgtgatc

SEQ ID NO: 595039 - DNA, 25 bp, Homo sapien
tcttgtgatttccaatccatgcgcg

SEQ ID NO: 595040 - DNA, 25 bp, Homo sapien
cggcttgatggtggatgtgggatcc

SEQ ID NO: 595041 - DNA, 25 bp, Homo sapien
tttgagaatgtattgcctccgacct

SEQ ID NO: 595042 - DNA, 25 bp, Homo sapien
gaatgtattgcctccgacctggagg

SEQ ID NO: 595043 - DNA, 25 bp, Homo sapien
tggatgtgggatccggcacgtacac

SEQ ID NO: 595044 - DNA, 25 bp, Homo sapien
aaatacctctcctagcatgactgct

SEQ ID NO: 595045 - DNA, 25 bp, Homo sapien
tcccggagagtcgagtcaggacact

SEQ ID NO: 595046 - DNA, 25 bp, Homo sapien
caacagtgctgggttcatagtcagc

SEQ ID NO: 595047 - DNA, 25 bp, Homo sapien
tggtcttatactcacgcaattatgg

SEQ ID NO: 595048 - DNA, 25 bp, Homo sapien
cctccctgattcctggtgtgttgct

SEQ ID NO: 595049 - DNA, 25 bp, Homo sapien
cctggtgtgttgctgttgtggctat

SEQ ID NO: 595050 - DNA, 25 bp, Homo sapien
tgttgctgttgtggctattaggccc

SEQ ID NO: 595051 - DNA, 25 bp, Homo sapien
tgtgttgctgttgtggctattaggc

SEQ ID NO: 595052 - DNA, 25 bp, Homo sapien
ggtgaatggcctcgtaatcatacag

SEQ ID NO: 595053 - DNA, 25 bp, Homo sapien
ctgaggtcttcgtggtgaatggcct

SEQ ID NO: 595054 - DNA, 25 bp, Homo sapien
cgtaatcatacagggcaaccacgat

SEQ ID NO: 595055 - DNA, 25 bp, Homo sapien
agggcaaccacgatgatgtcctcag

SEQ ID NO: 595056 - DNA, 25 bp, Homo sapien
tcaacgcgggcgacatagttgcttg

SEQ ID NO: 595057 - DNA, 25 bp, Homo sapien
ggatgtagccctccttccgggtggc

SEQ ID NO: 595058 - DNA, 25 bp, Homo sapien
ggtggccagggatcgagccttccac

SEQ ID NO: 595059 - DNA, 25 bp, Homo sapien
gtctccagagagtcaacgcgggcga

SEQ ID NO: 595060 - DNA, 25 bp, Homo sapien
tatcccggatcatgaaggagcccag

SEQ ID NO: 595061 - DNA, 25 bp, Homo sapien
gcgtccttccggctgatgcccttga

SEQ ID NO: 595062 - DNA, 25 bp, Homo sapien
atgttgccgggagccagcagttggc

SEQ ID NO: 595063 - DNA, 25 bp, Homo sapien
ctttagtggtctcgctatcccggat

SEQ ID NO: 595064 - DNA, 25 bp, Homo sapien
acagcacctggttgggtttttcagc

SEQ ID NO: 595065 - DNA, 25 bp, Homo sapien
gccacagcacctggttgggtttttc

SEQ ID NO: 595066 - DNA, 25 bp, Homo sapien
aggaaagggtggtggccagccccag

SEQ ID NO: 595067 - DNA, 25 bp, Homo sapien
cagctggggcacctcggcagggagg

SEQ ID NO: 595068 - DNA, 25 bp, Homo sapien
ctaagctggcagctatggtggataa

SEQ ID NO: 595069 - DNA, 25 bp, Homo sapien
gctggcagctatggtggataagaag

SEQ ID NO: 595070 - DNA, 25 bp, Homo sapien
aagctggcagctatggtggataaga

SEQ ID NO: 595071 - DNA, 25 bp, Homo sapien
agctggcagctatggtggataagaa

SEQ ID NO: 595072 - DNA, 25 bp, Homo sapien
ggtgcacttagcacatgaaatctga

SEQ ID NO: 595073 - DNA, 25 bp, Homo sapien
gtcaagcagttgtgaacctaaatgt

SEQ ID NO: 595074 - DNA, 25 bp, Homo sapien
caatatacttggcttatttgagtca

SEQ ID NO: 595075 - DNA, 25 bp, Homo sapien
cagggtaccgtgaggtcacatatta

SEQ ID NO: 595076 - DNA, 25 bp, Homo sapien
cttgtaatgtttcacggtatctccc

SEQ ID NO: 595077 - DNA, 25 bp, Homo sapien
tccctgccgagggtcgtagtctcgc

SEQ ID NO: 595078 - DNA, 25 bp, Homo sapien
tctcgcacggacaaagagtagcttc

SEQ ID NO: 595079 - DNA, 25 bp, Homo sapien
cgttgtccagggtccggatcttgta

SEQ ID NO: 595080 - DNA, 25 bp, Homo sapien
gtttctggcagagcccgtcgttccc

SEQ ID NO: 595081 - DNA, 25 bp, Homo sapien
gcttgagggattcccgagggatctc

SEQ ID NO: 595082 - DNA, 25 bp, Homo sapien
ggaagacatgcagggcaccgacagt

SEQ ID NO: 595083 - DNA, 25 bp, Homo sapien
ttctccagcttgagggattcccgag

SEQ ID NO: 595084 - DNA, 25 bp, Homo sapien
tgaagtttgaccagcttgtcatgct

SEQ ID NO: 595085 - DNA, 25 bp, Homo sapien
ccatgaactccgtgatgatgtagat

SEQ ID NO: 595086 - DNA, 25 bp, Homo sapien
tgaccaccgcatgaagtttgaccag

SEQ ID NO: 595087 - DNA, 25 bp, Homo sapien
tccttggtgaccaccgcatgaagtt

SEQ ID NO: 595088 - DNA, 25 bp, Homo sapien
atgagttttggcaatggctgcttgc

SEQ ID NO: 595089 - DNA, 25 bp, Homo sapien
tcaatgagttttggcaatggctgct

SEQ ID NO: 595090 - DNA, 25 bp, Homo sapien
gagttttggcaatggctgcttgctg

SEQ ID NO: 595091 - DNA, 25 bp, Homo sapien
aagtcaatgagttttggcaatggct

SEQ ID NO: 595092 - DNA, 25 bp, Homo sapien
ccactgtttgatgctcactggcaga

SEQ ID NO: 595093 - DNA, 25 bp, Homo sapien
tggctctggagctggaccaactcag

SEQ ID NO: 595094 - DNA, 25 bp, Homo sapien
gcagggatgacaccccacttaggag

SEQ ID NO: 595095 - DNA, 25 bp, Homo sapien
gacagcagagggtaatagctaaatg

SEQ ID NO: 595096 - DNA, 25 bp, Homo sapien
gcaagttgcggagccagggctggag

SEQ ID NO: 595097 - DNA, 25 bp, Homo sapien
tgcaagttgcggagccagggctgga

SEQ ID NO: 595098 - DNA, 25 bp, Homo sapien
ttgcaagttgcggagccagggctgg

SEQ ID NO: 595099 - DNA, 25 bp, Homo sapien
aagttgcggagccagggctggagct

SEQ ID NO: 595100 - DNA, 25 bp, Homo sapien
atgagtccttagatgaacagttaac

SEQ ID NO: 595101 - DNA, 25 bp, Homo sapien
ctgagctgtcatgcccaagggagac

SEQ ID NO: 595102 - DNA, 25 bp, Homo sapien
tttaatagagaagaggtcccactat

SEQ ID NO: 595103 - DNA, 25 bp, Homo sapien
ggagtgtgggaaatttatgagtcct

SEQ ID NO: 595104 - DNA, 25 bp, Homo sapien
tgcaccccaaacagagacacctttg

SEQ ID NO: 595105 - DNA, 25 bp, Homo sapien
ccaaacagagacacctttgtcctca

SEQ ID NO: 595106 - DNA, 25 bp, Homo sapien
aacagagacacctttgtcctcagac

SEQ ID NO: 595107 - DNA, 25 bp, Homo sapien
gagacacctttgtcctcagacctgg

SEQ ID NO: 595108 - DNA, 25 bp, Homo sapien
ttgtcctcaatgacccgggccaggc

SEQ ID NO: 595109 - DNA, 25 bp, Homo sapien
ttcccgagccgtgtactcgttgtcc

SEQ ID NO: 595110 - DNA, 25 bp, Homo sapien
aagtcagcaatcttacacaccaggg

SEQ ID NO: 595111 - DNA, 25 bp, Homo sapien
ggatgcagagaccaagatgttggca

SEQ ID NO: 595112 - DNA, 25 bp, Homo sapien
ccaaatgggcaacgtggggctgctt

SEQ ID NO: 595113 - DNA, 25 bp, Homo sapien
catccaaatgggcaacgtggggctg

SEQ ID NO: 595114 - DNA, 25 bp, Homo sapien
ggggctgcttggcagcgttccctac

SEQ ID NO: 595115 - DNA, 25 bp, Homo sapien
tggggctgcttggcagcgttcccta

SEQ ID NO: 595116 - DNA, 25 bp, Homo sapien
cagggttgaacagagcagagtcggg

SEQ ID NO: 595117 - DNA, 25 bp, Homo sapien
ctggggagtagtgagggttggctct

SEQ ID NO: 595118 - DNA, 25 bp, Homo sapien
ggctggggagtagtgagggttggct

SEQ ID NO: 595119 - DNA, 25 bp, Homo sapien
tgcagggttgaacagagcagagtcg

SEQ ID NO: 595120 - DNA, 25 bp, Homo sapien
ggatccggccgtaggtgacgatctc

SEQ ID NO: 595121 - DNA, 25 bp, Homo sapien
tccggccgtaggtgacgatctccat

SEQ ID NO: 595122 - DNA, 25 bp, Homo sapien
ggagccaaagttgatggcttcagga

SEQ ID NO: 595123 - DNA, 25 bp, Homo sapien
cgtaggtgacgatctccatcagcag

SEQ ID NO: 595124 - DNA, 25 bp, Homo sapien
cgtggaattagaaacggaagcagtt

SEQ ID NO: 595125 - DNA, 25 bp, Homo sapien
gagccgtggaattagaaacggaagc

SEQ ID NO: 595126 - DNA, 25 bp, Homo sapien
tggaattagaaacggaagcagttgg

SEQ ID NO: 595127 - DNA, 25 bp, Homo sapien
gaattagaaacggaagcagttggga

SEQ ID NO: 595128 - DNA, 25 bp, Homo sapien
cgcatcatgatgttgtagagctcct

SEQ ID NO: 595129 - DNA, 25 bp, Homo sapien
ttctctgggcgaggcatccggtatc

SEQ ID NO: 595130 - DNA, 25 bp, Homo sapien
ccagagctcggatcacttcagggtt

SEQ ID NO: 595131 - DNA, 25 bp, Homo sapien
gatgtattcgaaggtcggccgctcc

SEQ ID NO: 595132 - DNA, 25 bp, Homo sapien
caaccattccaggaaatagaaatat

SEQ ID NO: 595133 - DNA, 25 bp, Homo sapien
gaaatatcaacttgggggcttcctg

SEQ ID NO: 595134 - DNA, 25 bp, Homo sapien
gggcttcctgagaatgtcagattgt

SEQ ID NO: 595135 - DNA, 25 bp, Homo sapien
cagattgtggattgcaagagtcaaa

SEQ ID NO: 595136 - DNA, 25 bp, Homo sapien
cacaaggtggtcgtctggcttcaac

SEQ ID NO: 595137 - DNA, 25 bp, Homo sapien
catcttggatccacgtgtcgccgta

SEQ ID NO: 595138 - DNA, 25 bp, Homo sapien
tcgccgtaatgacgtcagcggaagt

SEQ ID NO: 595139 - DNA, 25 bp, Homo sapien
tggcttcaaccgctcctgtagtggc

SEQ ID NO: 595140 - DNA, 25 bp, Homo sapien
ggaagacaagcccagtcagaggtag

SEQ ID NO: 595141 - DNA, 25 bp, Homo sapien
gcgaaggcagcagccgaggtcttcc

SEQ ID NO: 595142 - DNA, 25 bp, Homo sapien
agtgggcggagaccaaaagtagaat

SEQ ID NO: 595143 - DNA, 25 bp, Homo sapien
tggaagatcctgggataccccggag

SEQ ID NO: 595144 - DNA, 25 bp, Homo sapien
cagaggagaggtcacatctgcggac

SEQ ID NO: 595145 - DNA, 25 bp, Homo sapien
tctgaaaaggatctgaggcagcgct

SEQ ID NO: 595146 - DNA, 25 bp, Homo sapien
catctgcggactggttatgatggtg

SEQ ID NO: 595147 - DNA, 25 bp, Homo sapien
gagcaaggatgagaataacgggagg

SEQ ID NO: 595148 - DNA, 25 bp, Homo sapien
ctttgaggatttgccccactcgtgg

SEQ ID NO: 595149 - DNA, 25 bp, Homo sapien
aggcagtatgcaggaagacccagga

SEQ ID NO: 595150 - DNA, 25 bp, Homo sapien
tccccggacgaaattatctgctgag

SEQ ID NO: 595151 - DNA, 25 bp, Homo sapien
tcccagtgcagtgccgtaaatacca

SEQ ID NO: 595152 - DNA, 25 bp, Homo sapien
ttcaaaatgcaatccacagacaaca

SEQ ID NO: 595153 - DNA, 25 bp, Homo sapien
aacagttgctcttgcttccctccag

SEQ ID NO: 595154 - DNA, 25 bp, Homo sapien
tcatcttgtatcattctctcctacc

SEQ ID NO: 595155 - DNA, 25 bp, Homo sapien
tgtagaccgcagtccttcccatttc

SEQ ID NO: 595156 - DNA, 25 bp, Homo sapien
gtgcttagactaaaatccaaactcc

SEQ ID NO: 595157 - DNA, 25 bp, Homo sapien
catttgggaaactctagtgtcagca

SEQ ID NO: 595158 - DNA, 25 bp, Homo sapien
tattattcatccgtggccagatggc

SEQ ID NO: 595159 - DNA, 25 bp, Homo sapien
taatgccaagatcaaagggagacgt

SEQ ID NO: 595160 - DNA, 25 bp, Homo sapien
gaggcaacttaatgtgatcccaacc

SEQ ID NO: 595161 - DNA, 25 bp, Homo sapien
tctggagacggatagtgctaacagc

SEQ ID NO: 595162 - DNA, 25 bp, Homo sapien
caggcttagatagctcaccacggga

SEQ ID NO: 595163 - DNA, 25 bp, Homo sapien
ggagtaaagttacagagtgccctct

SEQ ID NO: 595164 - DNA, 25 bp, Homo sapien
aaaagaactctcagctagcccaagc

SEQ ID NO: 595165 - DNA, 25 bp, Homo sapien
ctactgggaagtgaggagcccctct

SEQ ID NO: 595166 - DNA, 25 bp, Homo sapien
cctctgcccggccgcccctactggg

SEQ ID NO: 595167 - DNA, 25 bp, Homo sapien
tctgcccggccgcccctactgggaa

SEQ ID NO: 595168 - DNA, 25 bp, Homo sapien
actgggaagtgaggagcccctctgc

SEQ ID NO: 595169 - DNA, 25 bp, Homo sapien
tgcctggcacagcatggggactcag

SEQ ID NO: 595170 - DNA, 25 bp, Homo sapien
aatgtgatctctaggaaagcagcac

SEQ ID NO: 595171 - DNA, 25 bp, Homo sapien
gaaatatctgcatgcagcataggca

SEQ ID NO: 595172 - DNA, 25 bp, Homo sapien
gaaagcagcaccacgaacagtgcct

SEQ ID NO: 595173 - DNA, 25 bp, Homo sapien
ctcagggctcccattacccatttct

SEQ ID NO: 595174 - DNA, 25 bp, Homo sapien
tctgcactgaccattctatctaaaa

SEQ ID NO: 595175 - DNA, 25 bp, Homo sapien
acgcccaatggcacatctccttatt

SEQ ID NO: 595176 - DNA, 25 bp, Homo sapien
tctcctcatggacttatctaattga

SEQ ID NO: 595177 - DNA, 25 bp, Homo sapien
agcagtaaagaccacggcaaccaat

SEQ ID NO: 595178 - DNA, 25 bp, Homo sapien
gcagtaaagaccacggcaaccaatc

SEQ ID NO: 595179 - DNA, 25 bp, Homo sapien
aagcagtaaagaccacggcaaccaa

SEQ ID NO: 595180 - DNA, 25 bp, Homo sapien
aaagcagtaaagaccacggcaacca

SEQ ID NO: 595181 - DNA, 25 bp, Homo sapien
tgatttctacgggatcgttctggtg

SEQ ID NO: 595182 - DNA, 25 bp, Homo sapien
ttgataggcgcgaccccaggcacat

SEQ ID NO: 595183 - DNA, 25 bp, Homo sapien
tctacgggatcgttctggtggaagt

SEQ ID NO: 595184 - DNA, 25 bp, Homo sapien
tctggtggaagttgataggcgcgac

SEQ ID NO: 595185 - DNA, 25 bp, Homo sapien
ggttcgagagctggtgagcttcaca

SEQ ID NO: 595186 - DNA, 25 bp, Homo sapien
ctgggttcgagagctggtgagcttc

SEQ ID NO: 595187 - DNA, 25 bp, Homo sapien
tgggttcgagagctggtgagcttca

SEQ ID NO: 595188 - DNA, 25 bp, Homo sapien
ttcgagagctggtgagcttcacagc

SEQ ID NO: 595189 - DNA, 25 bp, Homo sapien
agaagggcagtgaatagtattcata

SEQ ID NO: 595190 - DNA, 25 bp, Homo sapien
cagaagggcagtgaatagtattcat

SEQ ID NO: 595191 - DNA, 25 bp, Homo sapien
gcagaagggcagtgaatagtattca

SEQ ID NO: 595192 - DNA, 25 bp, Homo sapien
cagattctctgccttgtaggttatc

SEQ ID NO: 595193 - DNA, 25 bp, Homo sapien
ccagattctctgccttgtaggttat

SEQ ID NO: 595194 - DNA, 25 bp, Homo sapien
tctctgccttgtaggttatcttgct

SEQ ID NO: 595195 - DNA, 25 bp, Homo sapien
gattctctgccttgtaggttatctt

SEQ ID NO: 595196 - DNA, 25 bp, Homo sapien
ctggaaaggggtgttgacaatccgg

SEQ ID NO: 595197 - DNA, 25 bp, Homo sapien
cacacttcttctcgctgttcatgag

SEQ ID NO: 595198 - DNA, 25 bp, Homo sapien
agaacttcacacttcttctcgctgt

SEQ ID NO: 595199 - DNA, 25 bp, Homo sapien
tcggccacgagtcggctctgctcca

SEQ ID NO: 595200 - DNA, 25 bp, Homo sapien
gtagtcttctgtgatccgctcggcc

SEQ ID NO: 595201 - DNA, 25 bp, Homo sapien
tgacatctgtgaagccgagccggta

SEQ ID NO: 595202 - DNA, 25 bp, Homo sapien
agtagagctccagccgggtggccac

SEQ ID NO: 595203 - DNA, 25 bp, Homo sapien
tagccgtgttcaaactgcacatctt

SEQ ID NO: 595204 - DNA, 25 bp, Homo sapien
tcatcgctgtctcggttggagtaga

SEQ ID NO: 595205 - DNA, 25 bp, Homo sapien
gtcctcccgatgatagtaaaggatg

SEQ ID NO: 595206 - DNA, 25 bp, Homo sapien
cctcccgatgatagtaaaggatgaa

SEQ ID NO: 595207 - DNA, 25 bp, Homo sapien
tcctcccgatgatagtaaaggatga

SEQ ID NO: 595208 - DNA, 25 bp, Homo sapien
ctcccgatgatagtaaaggatgaat

SEQ ID NO: 595209 - DNA, 25 bp, Homo sapien
aagcggacgacacggtacgtgtgct

SEQ ID NO: 595210 - DNA, 25 bp, Homo sapien
cggacgacacggtacgtgtgctcct

SEQ ID NO: 595211 - DNA, 25 bp, Homo sapien
ctcgaagcggacgacacggtacgtg

SEQ ID NO: 595212 - DNA, 25 bp, Homo sapien
cgacacggtacgtgtgctcctggtc

SEQ ID NO: 595213 - DNA, 25 bp, Homo sapien
ctccagcctgatgctctggggaatc

SEQ ID NO: 595214 - DNA, 25 bp, Homo sapien
cctccagcctgatgctctggggaat

SEQ ID NO: 595215 - DNA, 25 bp, Homo sapien
ccagcctgatgctctggggaatcac

SEQ ID NO: 595216 - DNA, 25 bp, Homo sapien
tccagcctgatgctctggggaatca

SEQ ID NO: 595217 - DNA, 25 bp, Homo sapien
cagactcagtctgttcctgtggtgg

SEQ ID NO: 595218 - DNA, 25 bp, Homo sapien
gctgcctgtcgcggagacccagcct

SEQ ID NO: 595219 - DNA, 25 bp, Homo sapien
agactcagtctgttcctgtggtggc

SEQ ID NO: 595220 - DNA, 25 bp, Homo sapien
taggtgaagtacagctgattctcct

SEQ ID NO: 595221 - DNA, 25 bp, Homo sapien
ttggtaccctcaggcagagtgcacg

SEQ ID NO: 595222 - DNA, 25 bp, Homo sapien
gcagagtgcacgaactcttctcatc

SEQ ID NO: 595223 - DNA, 25 bp, Homo sapien
gattctccttggtggggtcaatttc

SEQ ID NO: 595224 - DNA, 25 bp, Homo sapien
gaagaagaccacaacaacggagtta

SEQ ID NO: 595225 - DNA, 25 bp, Homo sapien
gatctggacgtcactcatggtcagg

SEQ ID NO: 595226 - DNA, 25 bp, Homo sapien
gcgagaggcccatttgatatcactt

SEQ ID NO: 595227 - DNA, 25 bp, Homo sapien
catggtcaggtaagtgtcccagcga

SEQ ID NO: 595228 - DNA, 25 bp, Homo sapien
tccggagggtccgaatgataatcat

SEQ ID NO: 595229 - DNA, 25 bp, Homo sapien
ggtccgaatgataatcatgctcagg

SEQ ID NO: 595230 - DNA, 25 bp, Homo sapien
tagttggcaatgtccttccggaggg

SEQ ID NO: 595231 - DNA, 25 bp, Homo sapien
ggcaatgtccttccggagggtccga

SEQ ID NO: 595232 - DNA, 25 bp, Homo sapien
ccctccccatccaacttcatccctc

SEQ ID NO: 595233 - DNA, 25 bp, Homo sapien
ctccccatccaacttcatccctccc

SEQ ID NO: 595234 - DNA, 25 bp, Homo sapien
ccccatccaacttcatccctcccca

SEQ ID NO: 595235 - DNA, 25 bp, Homo sapien
tccctccccagccaagacctcgtac

SEQ ID NO: 595236 - DNA, 25 bp, Homo sapien
gatgacgatgaggatcatacagaac

SEQ ID NO: 595237 - DNA, 25 bp, Homo sapien
gaagacgtcgccgtgcaccaacttc

SEQ ID NO: 595238 - DNA, 25 bp, Homo sapien
gggcctgaagacgtcgccgtgcacc

SEQ ID NO: 595239 - DNA, 25 bp, Homo sapien
cgatgaggatcatacagaacagctg

SEQ ID NO: 595240 - DNA, 25 bp, Homo sapien
cttctctccttgaggcacctggaag

SEQ ID NO: 595241 - DNA, 25 bp, Homo sapien
cttgaggcacctggaagaggaagcc

SEQ ID NO: 595242 - DNA, 25 bp, Homo sapien
gcacctggaagaggaagccatgccc

SEQ ID NO: 595243 - DNA, 25 bp, Homo sapien
ggaagaggaagccatgcccccatgc

SEQ ID NO: 595244 - DNA, 25 bp, Homo sapien
gctggagggcgacagcatcccaagc

SEQ ID NO: 595245 - DNA, 25 bp, Homo sapien
ccggctggagggcgacagcatccca

SEQ ID NO: 595246 - DNA, 25 bp, Homo sapien
ctggagggcgacagcatcccaagca

SEQ ID NO: 595247 - DNA, 25 bp, Homo sapien
atgagagctccccggctggagggcg

SEQ ID NO: 595248 - DNA, 25 bp, Homo sapien
ggtacagacggccagcagaaaatcc

SEQ ID NO: 595249 - DNA, 25 bp, Homo sapien
ttaaagtgcggtacagacggccagc

SEQ ID NO: 595250 - DNA, 25 bp, Homo sapien
agacggccagcagaaaatccgccaa

SEQ ID NO: 595251 - DNA, 25 bp, Homo sapien
gtgcggtacagacggccagcagaaa

SEQ ID NO: 595252 - DNA, 25 bp, Homo sapien
tctgcttcccaccaaacaagagaag

SEQ ID NO: 595253 - DNA, 25 bp, Homo sapien
ttctcctgaggagcccaggaagaag

SEQ ID NO: 595254 - DNA, 25 bp, Homo sapien
aacaagagaaggtttaggacactca

SEQ ID NO: 595255 - DNA, 25 bp, Homo sapien
tctctgcttcccaccaaacaagaga

SEQ ID NO: 595256 - DNA, 25 bp, Homo sapien
gccagaagcgtcgcagccagaactg

SEQ ID NO: 595257 - DNA, 25 bp, Homo sapien
aagcgtcgcagccagaactgataca

SEQ ID NO: 595258 - DNA, 25 bp, Homo sapien
agaactgatacagcctgagctctcc

SEQ ID NO: 595259 - DNA, 25 bp, Homo sapien
cagaagcgtcgcagccagaactgat

SEQ ID NO: 595260 - DNA, 25 bp, Homo sapien
tggctgaaatttactaactgggcac

SEQ ID NO: 595261 - DNA, 25 bp, Homo sapien
tgaaatttactaactgggcactgtg

SEQ ID NO: 595262 - DNA, 25 bp, Homo sapien
ctcaaggcccggctcaaaggtcact

SEQ ID NO: 595263 - DNA, 25 bp, Homo sapien
cctttgtgttcctgcatgactctgt

SEQ ID NO: 595264 - DNA, 25 bp, Homo sapien
gagaaaaattacctccagaatcgct

SEQ ID NO: 595265 - DNA, 25 bp, Homo sapien
aaaattacctccagaatcgcttgag

SEQ ID NO: 595266 - DNA, 25 bp, Homo sapien
aattacctccagaatcgcttgagct

SEQ ID NO: 595267 - DNA, 25 bp, Homo sapien
gaaaaattacctccagaatcgcttg

SEQ ID NO: 595268 - DNA, 25 bp, Homo sapien
caattcaatacgaagcagatgccaa

SEQ ID NO: 595269 - DNA, 25 bp, Homo sapien
ccacaccagggtacagagttgccgt

SEQ ID NO: 595270 - DNA, 25 bp, Homo sapien
ccaaaaaccacaccagggtacagag

SEQ ID NO: 595271 - DNA, 25 bp, Homo sapien
gctcctgatgagtgctttccccaaa

SEQ ID NO: 595272 - DNA, 25 bp, Homo sapien
caatacaaattaaaaaacaatatag

SEQ ID NO: 595273 - DNA, 25 bp, Homo sapien
tcggaagccgaagtagtagcccaag

SEQ ID NO: 595274 - DNA, 25 bp, Homo sapien
tcatatggctgctttcggaagccga

SEQ ID NO: 595275 - DNA, 25 bp, Homo sapien
gggcagggagatcccgaaccacatg

SEQ ID NO: 595276 - DNA, 25 bp, Homo sapien
ggttcatgtaccaccgctgctcggg

SEQ ID NO: 595277 - DNA, 25 bp, Homo sapien
gagagagcacctacacgagtgtggt

SEQ ID NO: 595278 - DNA, 25 bp, Homo sapien
attcttctggcatatttctgtacta

SEQ ID NO: 595279 - DNA, 25 bp, Homo sapien
tattataatctcttgagaggtaggc

SEQ ID NO: 595280 - DNA, 25 bp, Homo sapien
ggcagggtgggcattattctcctca

SEQ ID NO: 595281 - DNA, 25 bp, Homo sapien
ctgccacagaacgagaggttgacat

SEQ ID NO: 595282 - DNA, 25 bp, Homo sapien
gagaggttgacattgttagagacca

SEQ ID NO: 595283 - DNA, 25 bp, Homo sapien
cagaacgagaggttgacattgttag

SEQ ID NO: 595284 - DNA, 25 bp, Homo sapien
ccacagaacgagaggttgacattgt

SEQ ID NO: 595285 - DNA, 25 bp, Homo sapien
tgaagaagagctcgatgaacatggc

SEQ ID NO: 595286 - DNA, 25 bp, Homo sapien
cgccgaagggcaagatcccagccat

SEQ ID NO: 595287 - DNA, 25 bp, Homo sapien
aacatggcgccgaagggcaagatcc

SEQ ID NO: 595288 - DNA, 25 bp, Homo sapien
ctcgatgaacatggcgccgaagggc

SEQ ID NO: 595289 - DNA, 25 bp, Homo sapien
ttcaatgctgccctgagagggaagg

SEQ ID NO: 595290 - DNA, 25 bp, Homo sapien
tgagagggaaggctgttgtccaatt

SEQ ID NO: 595291 - DNA, 25 bp, Homo sapien
tgtccaatttcagggtgaagaatgg

SEQ ID NO: 595292 - DNA, 25 bp, Homo sapien
tcatttcactttcaatgctgccctg

SEQ ID NO: 595293 - DNA, 25 bp, Homo sapien
tgtgtgtgtctatgaaagcttggcc

SEQ ID NO: 595294 - DNA, 25 bp, Homo sapien
tgactgacctgctctgggtagaccc

SEQ ID NO: 595295 - DNA, 25 bp, Homo sapien
gatcagagacgctggtgactggccc

SEQ ID NO: 595296 - DNA, 25 bp, Homo sapien
gctgggccactactctggaatagca

SEQ ID NO: 595297 - DNA, 25 bp, Homo sapien
tacaccatgacgatgctgatttgtg

SEQ ID NO: 595298 - DNA, 25 bp, Homo sapien
tgtgaacaggataccaccaggatga

SEQ ID NO: 595299 - DNA, 25 bp, Homo sapien
gatgctgatttgtgaacaggatacc

SEQ ID NO: 595300 - DNA, 25 bp, Homo sapien
cagctggaagtacaccatgacgatg

SEQ ID NO: 595301 - DNA, 25 bp, Homo sapien
ggaggaaacagaggaaggtcagtgt

SEQ ID NO: 595302 - DNA, 25 bp, Homo sapien
acagaggaaggtcagtgttgtcctg

SEQ ID NO: 595303 - DNA, 25 bp, Homo sapien
gaaacagaggaaggtcagtgttgtc

SEQ ID NO: 595304 - DNA, 25 bp, Homo sapien
gaggaaacagaggaaggtcagtgtt

SEQ ID NO: 595305 - DNA, 25 bp, Homo sapien
accaggacgtagaatgcagagcccc

SEQ ID NO: 595306 - DNA, 25 bp, Homo sapien
cttgttaacgaaataaaagatggca

SEQ ID NO: 595307 - DNA, 25 bp, Homo sapien
cataaaccaggacgtagaatgcaga

SEQ ID NO: 595308 - DNA, 25 bp, Homo sapien
cagagcccccggagactaggaaatt

SEQ ID NO: 595309 - DNA, 25 bp, Homo sapien
ttcctaccctatgaggactaagagg

SEQ ID NO: 595310 - DNA, 25 bp, Homo sapien
cctaccctatgaggactaagaggac

SEQ ID NO: 595311 - DNA, 25 bp, Homo sapien
ccttcctaccctatgaggactaaga

SEQ ID NO: 595312 - DNA, 25 bp, Homo sapien
aaaaggaagattcaggcacttgggt

SEQ ID NO: 595313 - DNA, 25 bp, Homo sapien
tattcacattgtcacgtatcctgat

SEQ ID NO: 595314 - DNA, 25 bp, Homo sapien
acgtatcctgatggcctttgtctcc

SEQ ID NO: 595315 - DNA, 25 bp, Homo sapien
ctatacctcgtaagttttacaagca

SEQ ID NO: 595316 - DNA, 25 bp, Homo sapien
tggctatggctatacctcgtaagtt

SEQ ID NO: 595317 - DNA, 25 bp, Homo sapien
aaggtctaaagatggaagtcacagc

SEQ ID NO: 595318 - DNA, 25 bp, Homo sapien
gacaggagctgtccagaaagaatgg

SEQ ID NO: 595319 - DNA, 25 bp, Homo sapien
gactgcagtgtgaatcaagaccttg

SEQ ID NO: 595320 - DNA, 25 bp, Homo sapien
gcaatcttttacttagagggccaga

SEQ ID NO: 595321 - DNA, 25 bp, Homo sapien
aagccgatggtacccgttagcagcc

SEQ ID NO: 595322 - DNA, 25 bp, Homo sapien
ccagaaggacaagaccatgagggcc

SEQ ID NO: 595323 - DNA, 25 bp, Homo sapien
ccatgagggccgtgtagccaaagta

SEQ ID NO: 595324 - DNA, 25 bp, Homo sapien
tcttgcgaacaaacatgtaggctgc

SEQ ID NO: 595325 - DNA, 25 bp, Homo sapien
tacattccaaacgagcaggagttat

SEQ ID NO: 595326 - DNA, 25 bp, Homo sapien
agttattttattttgcgtgcctgca

SEQ ID NO: 595327 - DNA, 25 bp, Homo sapien
ggcttcctgtccgaggacggagcaa

SEQ ID NO: 595328 - DNA, 25 bp, Homo sapien
caagcttggccgtggtccactccaa

SEQ ID NO: 595329 - DNA, 25 bp, Homo sapien
tagcacaccttggagagcggtacct

SEQ ID NO: 595330 - DNA, 25 bp, Homo sapien
taaagaagtgagtatgaccccagag

SEQ ID NO: 595331 - DNA, 25 bp, Homo sapien
gaatgcctggccacttacaggaggg

SEQ ID NO: 595332 - DNA, 25 bp, Homo sapien
ttagtcatagggtggccaacagccc

SEQ ID NO: 595333 - DNA, 25 bp, Homo sapien
ggacatcttcctagcatcaccagca

SEQ ID NO: 595334 - DNA, 25 bp, Homo sapien
ttgaaccctaatccctgggtggatg

SEQ ID NO: 595335 - DNA, 25 bp, Homo sapien
cgtgagacccttctttctaagttgg

SEQ ID NO: 595336 - DNA, 25 bp, Homo sapien
caaatgtttgtgatgacatgcacgg

SEQ ID NO: 595337 - DNA, 25 bp, Homo sapien
gaatgaacaaaagactccaatatcg

SEQ ID NO: 595338 - DNA, 25 bp, Homo sapien
tggatgccgcttggcgctgcagtca

SEQ ID NO: 595339 - DNA, 25 bp, Homo sapien
aaattgatgatctttgaacccttta

SEQ ID NO: 595340 - DNA, 25 bp, Homo sapien
cctttatgaggtgtccgtttcccat

SEQ ID NO: 595341 - DNA, 25 bp, Homo sapien
ggtatatttatttacaatccgacca

SEQ ID NO: 595342 - DNA, 25 bp, Homo sapien
aggacaatggtatatttatttacaa

SEQ ID NO: 595343 - DNA, 25 bp, Homo sapien
atggtatatttatttacaatccgac

SEQ ID NO: 595344 - DNA, 25 bp, Homo sapien
tatatttatttacaatccgaccaaa

SEQ ID NO: 595345 - DNA, 25 bp, Homo sapien
tacccaagtggatcatgtaagtctg

SEQ ID NO: 595346 - DNA, 25 bp, Homo sapien
tgggctaaaaccagtttgaccgatg

SEQ ID NO: 595347 - DNA, 25 bp, Homo sapien
tgggaatccaaaaccagatcttgct

SEQ ID NO: 595348 - DNA, 25 bp, Homo sapien
ataacaggacagagtgacgccggag

SEQ ID NO: 595349 - DNA, 25 bp, Homo sapien
gattctgacagctggaaagttcaag

SEQ ID NO: 595350 - DNA, 25 bp, Homo sapien
gtgcagagattacatggggagagaa

SEQ ID NO: 595351 - DNA, 25 bp, Homo sapien
ccagtctggctcatgattctgacag

SEQ ID NO: 595352 - DNA, 25 bp, Homo sapien
gacttcctctcaagcctggcgtttg

SEQ ID NO: 595353 - DNA, 25 bp, Homo sapien
tccgagcccctcttgtaggcaaagg

SEQ ID NO: 595354 - DNA, 25 bp, Homo sapien
tattaggatgtaaaggaactggcac

SEQ ID NO: 595355 - DNA, 25 bp, Homo sapien
tcctcacaaaggtaggtggaccaaa

SEQ ID NO: 595356 - DNA, 25 bp, Homo sapien
aacataccatttacaccaggcgtag

SEQ ID NO: 595357 - DNA, 25 bp, Homo sapien
cataccatttacaccaggcgtagtg

SEQ ID NO: 595358 - DNA, 25 bp, Homo sapien
ataccatttacaccaggcgtagtgg

SEQ ID NO: 595359 - DNA, 25 bp, Homo sapien
acataccatttacaccaggcgtagt

SEQ ID NO: 595360 - DNA, 25 bp, Homo sapien
acaaacagtcaataagcatacgaaa

SEQ ID NO: 595361 - DNA, 25 bp, Homo sapien
caattctacacctgggtatgtaccc

SEQ ID NO: 595362 - DNA, 25 bp, Homo sapien
gaaatcggagtctttgtgcattgct

SEQ ID NO: 595363 - DNA, 25 bp, Homo sapien
cttcatctacactaggataggtatt

SEQ ID NO: 595364 - DNA, 25 bp, Homo sapien
cctttggcactagaactcctgagac

SEQ ID NO: 595365 - DNA, 25 bp, Homo sapien
tatctaggagctgtttgtaagcacg

SEQ ID NO: 595366 - DNA, 25 bp, Homo sapien
taccagcggtcaaggctttggagcc

SEQ ID NO: 595367 - DNA, 25 bp, Homo sapien
tggaactctgaacctgctgtggaag

SEQ ID NO: 595368 - DNA, 25 bp, Homo sapien
aagaatagctttatcctgcactcag

SEQ ID NO: 595369 - DNA, 25 bp, Homo sapien
tatgacaaagaccaatgagggacca

SEQ ID NO: 595370 - DNA, 25 bp, Homo sapien
tactgaggccatgagaacctgaggg

SEQ ID NO: 595371 - DNA, 25 bp, Homo sapien
ctggtcagggctgagtacagtcctg

SEQ ID NO: 595372 - DNA, 25 bp, Homo sapien
ctctgcgctgctaatgtggacttct

SEQ ID NO: 595373 - DNA, 25 bp, Homo sapien
ggccctcctagatgaagcactgctt

SEQ ID NO: 595374 - DNA, 25 bp, Homo sapien
ttgcccgacaaattgcccaaagtgg

SEQ ID NO: 595375 - DNA, 25 bp, Homo sapien
gaagcctgtctctctcatccgctga

SEQ ID NO: 595376 - DNA, 25 bp, Homo sapien
gccgcggcgcacagtcggggaggga

SEQ ID NO: 595377 - DNA, 25 bp, Homo sapien
ccgcggcgcacagtcggggagggaa

SEQ ID NO: 595378 - DNA, 25 bp, Homo sapien
gcggcgcacagtcggggagggaagg

SEQ ID NO: 595379 - DNA, 25 bp, Homo sapien
cagccgcggcgcacagtcggggagg

SEQ ID NO: 595380 - DNA, 25 bp, Homo sapien
acgctcagcggccgtgcccacgcgg

SEQ ID NO: 595381 - DNA, 25 bp, Homo sapien
gcaggcatccccgggagcggcagaa

SEQ ID NO: 595382 - DNA, 25 bp, Homo sapien
ggtcccaggagcccgcaggcatccc

SEQ ID NO: 595383 - DNA, 25 bp, Homo sapien
cgcaggcatccccgggagcggcaga

SEQ ID NO: 595384 - DNA, 25 bp, Homo sapien
aagtgatcggcctggttcccaaagc

SEQ ID NO: 595385 - DNA, 25 bp, Homo sapien
tgcaaatgccagagagcccaagaag

SEQ ID NO: 595386 - DNA, 25 bp, Homo sapien
gggacagccaaggtacggtttagca

SEQ ID NO: 595387 - DNA, 25 bp, Homo sapien
gtactcaatccaaggagggacagcc

SEQ ID NO: 595388 - DNA, 25 bp, Homo sapien
tcaaagcagtatgccacccgcttct

SEQ ID NO: 595389 - DNA, 25 bp, Homo sapien
ctgatgacccgatggtaagcctgga

SEQ ID NO: 595390 - DNA, 25 bp, Homo sapien
catggggcacgtcttcttatctggg

SEQ ID NO: 595391 - DNA, 25 bp, Homo sapien
ccatgaaatcctccaagctgatgac

SEQ ID NO: 595392 - DNA, 25 bp, Homo sapien
atgaaactgatcccagaatgggcca

SEQ ID NO: 595393 - DNA, 25 bp, Homo sapien
tgatcccagaatgggccaaaggggt

SEQ ID NO: 595394 - DNA, 25 bp, Homo sapien
gaaactgatcccagaatgggccaaa

SEQ ID NO: 595395 - DNA, 25 bp, Homo sapien
aactgatcccagaatgggccaaagg

SEQ ID NO: 595396 - DNA, 25 bp, Homo sapien
aaaagctccgacttgttgaaactca

SEQ ID NO: 595397 - DNA, 25 bp, Homo sapien
aaagctccgacttgttgaaactcac

SEQ ID NO: 595398 - DNA, 25 bp, Homo sapien
ggtaacacaggagtgattctcacgc

SEQ ID NO: 595399 - DNA, 25 bp, Homo sapien
aggtaacacaggagtgattctcacg

SEQ ID NO: 595400 - DNA, 25 bp, Homo sapien
agtaaggtaacacaggagtgattct

SEQ ID NO: 595401 - DNA, 25 bp, Homo sapien
taaggtaacacaggagtgattctca

SEQ ID NO: 595402 - DNA, 25 bp, Homo sapien
catttctcggtctgcacctgaagct

SEQ ID NO: 595403 - DNA, 25 bp, Homo sapien
tcatttctcggtctgcacctgaagc

SEQ ID NO: 595404 - DNA, 25 bp, Homo sapien
tcaacagctcaatgaccttgggaag

SEQ ID NO: 595405 - DNA, 25 bp, Homo sapien
tataaatgtttcacggcctgtgccc

SEQ ID NO: 595406 - DNA, 25 bp, Homo sapien
tacgaggcagataccatcagcgctg

SEQ ID NO: 595407 - DNA, 25 bp, Homo sapien
tactatgtctcacacgtgacaggcg

SEQ ID NO: 595408 - DNA, 25 bp, Homo sapien
gattcagacttctgggttcaaaacc

SEQ ID NO: 595409 - DNA, 25 bp, Homo sapien
caagctctgcaacttcaagctttat

SEQ ID NO: 595410 - DNA, 25 bp, Homo sapien
gttcaaaaccaagctctgcaacttc

SEQ ID NO: 595411 - DNA, 25 bp, Homo sapien
acttcaagctttatgaccttgggca

SEQ ID NO: 595412 - DNA, 25 bp, Homo sapien
ggcacatgaactaggtccaaagcta

SEQ ID NO: 595413 - DNA, 25 bp, Homo sapien
ttaaatctgccatgactgaggatcc

SEQ ID NO: 595414 - DNA, 25 bp, Homo sapien
caaagctaggtccaaaggcaagtcc

SEQ ID NO: 595415 - DNA, 25 bp, Homo sapien
ggaactggcagctgttaaaggcaca

SEQ ID NO: 595416 - DNA, 25 bp, Homo sapien
aaaccagcccttgacactcaggaag

SEQ ID NO: 595417 - DNA, 25 bp, Homo sapien
tcccctgttagactatgagttccat

SEQ ID NO: 595418 - DNA, 25 bp, Homo sapien
tctaagcaccatctcactctggaac

SEQ ID NO: 595419 - DNA, 25 bp, Homo sapien
aaaacttggctgtaaggcacaaact

SEQ ID NO: 595420 - DNA, 25 bp, Homo sapien
agtgcagtggacagatcatgggttc

SEQ ID NO: 595421 - DNA, 25 bp, Homo sapien
gcagtggacagatcatgggttcact

SEQ ID NO: 595422 - DNA, 25 bp, Homo sapien
tagtgcagtggacagatcatgggtt

SEQ ID NO: 595423 - DNA, 25 bp, Homo sapien
tgcagtggacagatcatgggttcac

SEQ ID NO: 595424 - DNA, 25 bp, Homo sapien
ggaggacatgccctttcgcaacttt

SEQ ID NO: 595425 - DNA, 25 bp, Homo sapien
tgtgccctcgtactagccaatgaga

SEQ ID NO: 595426 - DNA, 25 bp, Homo sapien
ttggcccatgaggtgatagaaaagc

SEQ ID NO: 595427 - DNA, 25 bp, Homo sapien
ttcttgatgacactatggagctggc

SEQ ID NO: 595428 - DNA, 25 bp, Homo sapien
ttggtcaggccctttgcctcttgct

SEQ ID NO: 595429 - DNA, 25 bp, Homo sapien
gctgggcccagtgaacctctgggat

SEQ ID NO: 595430 - DNA, 25 bp, Homo sapien
gcctcttgctatccagctgaagtca

SEQ ID NO: 595431 - DNA, 25 bp, Homo sapien
gctgaagtcagctggctttcctgct

SEQ ID NO: 595432 - DNA, 25 bp, Homo sapien
ttttggtgaggtaagacagcgctgt

SEQ ID NO: 595433 - DNA, 25 bp, Homo sapien
cttttggtgaggtaagacagcgctg

SEQ ID NO: 595434 - DNA, 25 bp, Homo sapien
tacttttggtgaggtaagacagcgc

SEQ ID NO: 595435 - DNA, 25 bp, Homo sapien
ttacttttggtgaggtaagacagcg

SEQ ID NO: 595436 - DNA, 25 bp, Homo sapien
cagtgggacaacatcagctcagacc

SEQ ID NO: 595437 - DNA, 25 bp, Homo sapien
gggacaacatcagctcagacccaac

SEQ ID NO: 595438 - DNA, 25 bp, Homo sapien
agacccaacaagcagcaagaggcta

SEQ ID NO: 595439 - DNA, 25 bp, Homo sapien
caagcagcaagaggctaaggctgat

SEQ ID NO: 595440 - DNA, 25 bp, Homo sapien
gccaaccttcggtgaattccagact

SEQ ID NO: 595441 - DNA, 25 bp, Homo sapien
tccagacttggaatgtgtgtcccct

SEQ ID NO: 595442 - DNA, 25 bp, Homo sapien
ccttcggtgaattccagacttggaa

SEQ ID NO: 595443 - DNA, 25 bp, Homo sapien
ctgcagccaaccttcggtgaattcc

SEQ ID NO: 595444 - DNA, 25 bp, Homo sapien
caagggaattatccttgggtcaggg

SEQ ID NO: 595445 - DNA, 25 bp, Homo sapien
caacccagacgtcactcacaagtaa

SEQ ID NO: 595446 - DNA, 25 bp, Homo sapien
gagggtgggcaatctcaaaggttat

SEQ ID NO: 595447 - DNA, 25 bp, Homo sapien
caacaatttggatgatgtcaaggga

SEQ ID NO: 595448 - DNA, 25 bp, Homo sapien
cgcgcccggtcaatacttcttgact

SEQ ID NO: 595449 - DNA, 25 bp, Homo sapien
cacaatgcactttcaagttctagat

SEQ ID NO: 595450 - DNA, 25 bp, Homo sapien
gcacgaaaccccttgctgttccatg

SEQ ID NO: 595451 - DNA, 25 bp, Homo sapien
tgttccctcttcagctaaacccaga

SEQ ID NO: 595452 - DNA, 25 bp, Homo sapien
gccaatgcgcagatgaatgcccaca

SEQ ID NO: 595453 - DNA, 25 bp, Homo sapien
gtacttctgtagtggcctgtgttcc

SEQ ID NO: 595454 - DNA, 25 bp, Homo sapien
aatgcccacatagggccggacaagg

SEQ ID NO: 595455 - DNA, 25 bp, Homo sapien
cgtctgaccataccatgtacttctg

SEQ ID NO: 595456 - DNA, 25 bp, Homo sapien
ccttcagcatggcacaggcgttctt

SEQ ID NO: 595457 - DNA, 25 bp, Homo sapien
ggagctcaggcacataactctcgga

SEQ ID NO: 595458 - DNA, 25 bp, Homo sapien
tcaggtcaggcaggcacatagtcat

SEQ ID NO: 595459 - DNA, 25 bp, Homo sapien
tagcaacgtagaccgactgggcatc

SEQ ID NO: 595460 - DNA, 25 bp, Homo sapien
tcccagcagggatacgtgagctcca

SEQ ID NO: 595461 - DNA, 25 bp, Homo sapien
tgatatagggccacgaaggtcccag

SEQ ID NO: 595462 - DNA, 25 bp, Homo sapien
ctggaaagactacggaggaggcctc

SEQ ID NO: 595463 - DNA, 25 bp, Homo sapien
ggtaggtccaggcaaaaggcttgta

SEQ ID NO: 595464 - DNA, 25 bp, Homo sapien
gaggcccttgatataaagccagcgg

SEQ ID NO: 595465 - DNA, 25 bp, Homo sapien
cagctctgattttctgttcagtagg

SEQ ID NO: 595466 - DNA, 25 bp, Homo sapien
tgacttagcacttcctctctgcact

SEQ ID NO: 595467 - DNA, 25 bp, Homo sapien
gagattagaatgtgctgacttagca

SEQ ID NO: 595468 - DNA, 25 bp, Homo sapien
cttggccgaggatgtacaggtcgac

SEQ ID NO: 595469 - DNA, 25 bp, Homo sapien
tcagaactcgtcccgcagcttaggg

SEQ ID NO: 595470 - DNA, 25 bp, Homo sapien
gggcctgtccatgccgaagaaagaa

SEQ ID NO: 595471 - DNA, 25 bp, Homo sapien
cacagttgccaataaagtggtcggc

SEQ ID NO: 595472 - DNA, 25 bp, Homo sapien
tatgccctgggatatggagcgtctc

SEQ ID NO: 595473 - DNA, 25 bp, Homo sapien
tcctgctcctaggaacctgcaagtc

SEQ ID NO: 595474 - DNA, 25 bp, Homo sapien
aaaccacagagagttctaggatagt

SEQ ID NO: 595475 - DNA, 25 bp, Homo sapien
agaagagcagaaagcacgtgcgatg

SEQ ID NO: 595476 - DNA, 25 bp, Homo sapien
gaacatgctgcgtgagtggcactta

SEQ ID NO: 595477 - DNA, 25 bp, Homo sapien
tccctcgtgagaatacggcctgaag

SEQ ID NO: 595478 - DNA, 25 bp, Homo sapien
tgagagcaagtctggacaggcaaac

SEQ ID NO: 595479 - DNA, 25 bp, Homo sapien
tacaggcttacaacctagtggtggc

SEQ ID NO: 595480 - DNA, 25 bp, Homo sapien
ctgggcctttgaacaacctgtcggt

SEQ ID NO: 595481 - DNA, 25 bp, Homo sapien
ataggaggtctccatggcacacagg

SEQ ID NO: 595482 - DNA, 25 bp, Homo sapien
ttgtactgagcaaccatccaacggg

SEQ ID NO: 595483 - DNA, 25 bp, Homo sapien
taaagcaattagcaagcacagtgcc

SEQ ID NO: 595484 - DNA, 25 bp, Homo sapien
ctgggctcatctaaaatagatccac

SEQ ID NO: 595485 - DNA, 25 bp, Homo sapien
agaggtcttacctgggctcatctaa

SEQ ID NO: 595486 - DNA, 25 bp, Homo sapien
tacctgggctcatctaaaatagatc

SEQ ID NO: 595487 - DNA, 25 bp, Homo sapien
tcttacctgggctcatctaaaatag

SEQ ID NO: 595488 - DNA, 25 bp, Homo sapien
tatggaacactcctcgacagaattt

SEQ ID NO: 595489 - DNA, 25 bp, Homo sapien
tggccgtccaggctgcagaatgtca

SEQ ID NO: 595490 - DNA, 25 bp, Homo sapien
ttatccaggctacataccaacaggg

SEQ ID NO: 595491 - DNA, 25 bp, Homo sapien
gaatgtgaatcagctcatgcccctc

SEQ ID NO: 595492 - DNA, 25 bp, Homo sapien
gagatctacaatgtttcaggacagt

SEQ ID NO: 595493 - DNA, 25 bp, Homo sapien
tccaaatgtctggagatctacaatg

SEQ ID NO: 595494 - DNA, 25 bp, Homo sapien
tgtctggagatctacaatgtttcag

SEQ ID NO: 595495 - DNA, 25 bp, Homo sapien
atttctctatccaatcagatgcaga

SEQ ID NO: 595496 - DNA, 25 bp, Homo sapien
ctctttgggcattgttagcaggatt

SEQ ID NO: 595497 - DNA, 25 bp, Homo sapien
gagaggagttaatgacacaatagca

SEQ ID NO: 595498 - DNA, 25 bp, Homo sapien
gaggtctactctgttacaaggacag

SEQ ID NO: 595499 - DNA, 25 bp, Homo sapien
accagcttgtgcagtgtcagagagg

SEQ ID NO: 595500 - DNA, 25 bp, Homo sapien
tagagacagagtttccccacggtgg

SEQ ID NO: 595501 - DNA, 25 bp, Homo sapien
tgaggcccgagccgaaagcgggcgg

SEQ ID NO: 595502 - DNA, 25 bp, Homo sapien
aggcccgagccgaaagcgggcggcg

SEQ ID NO: 595503 - DNA, 25 bp, Homo sapien
ctgaggcccgagccgaaagcgggcg

SEQ ID NO: 595504 - DNA, 25 bp, Homo sapien
gaggcccgagccgaaagcgggcggc

SEQ ID NO: 595505 - DNA, 25 bp, Homo sapien
gcatgatgttggctcgccatagcct

SEQ ID NO: 595506 - DNA, 25 bp, Homo sapien
tgtatgtctatgcaaagattaacgc

SEQ ID NO: 595507 - DNA, 25 bp, Homo sapien
cctatataaatcttggagaactcct

SEQ ID NO: 595508 - DNA, 25 bp, Homo sapien
ttaacgcaattcaagctgtacagag

SEQ ID NO: 595509 - DNA, 25 bp, Homo sapien
caaaatgtctcaggatgctacggtc

SEQ ID NO: 595510 - DNA, 25 bp, Homo sapien
atccagtcaaatcttgagaagtgtc

SEQ ID NO: 595511 - DNA, 25 bp, Homo sapien
caaatcttgagaagtgtcaattcaa

SEQ ID NO: 595512 - DNA, 25 bp, Homo sapien
agaagtgtcaattcaaaatgtctca

SEQ ID NO: 595513 - DNA, 25 bp, Homo sapien
cgaaaattgcatgagaacgcgagct

SEQ ID NO: 595514 - DNA, 25 bp, Homo sapien
aacaagtggtcggaacgtctcatcg

SEQ ID NO: 595515 - DNA, 25 bp, Homo sapien
catgttggtagcaccgacagaacgg

SEQ ID NO: 595516 - DNA, 25 bp, Homo sapien
ttctacgttgtaagaggcaggcccc

SEQ ID NO: 595517 - DNA, 25 bp, Homo sapien
gggccttgagccgagcaatctcttc

SEQ ID NO: 595518 - DNA, 25 bp, Homo sapien
cctggaattctcgaaggagggcatc

SEQ ID NO: 595519 - DNA, 25 bp, Homo sapien
gaattctcgaaggagggcatccttg

SEQ ID NO: 595520 - DNA, 25 bp, Homo sapien
tcctcattgacccttggtttgttct

SEQ ID NO: 595521 - DNA, 25 bp, Homo sapien
cttccctccgcttctctcgcctctt

SEQ ID NO: 595522 - DNA, 25 bp, Homo sapien
tccctccgcttctctcgcctcttcc

SEQ ID NO: 595523 - DNA, 25 bp, Homo sapien
ttccctccgcttctctcgcctcttc

SEQ ID NO: 595524 - DNA, 25 bp, Homo sapien
cctccgcttctctcgcctcttcctc

SEQ ID NO: 595525 - DNA, 25 bp, Homo sapien
atcatccccttcctcctcaccctct

SEQ ID NO: 595526 - DNA, 25 bp, Homo sapien
cctcctcaccctcttctccctcctc

SEQ ID NO: 595527 - DNA, 25 bp, Homo sapien
tcatccccttcctcctcaccctctt

SEQ ID NO: 595528 - DNA, 25 bp, Homo sapien
cttcctcctcaccctcttctccctc

SEQ ID NO: 595529 - DNA, 25 bp, Homo sapien
atcttggcgcccagcatctcggcag

SEQ ID NO: 595530 - DNA, 25 bp, Homo sapien
ttgatcttggcgcccagcatctcgg

SEQ ID NO: 595531 - DNA, 25 bp, Homo sapien
ttggcgcccagcatctcggcagcat

SEQ ID NO: 595532 - DNA, 25 bp, Homo sapien
gatcttggcgcccagcatctcggca

SEQ ID NO: 595533 - DNA, 25 bp, Homo sapien
tcatccctcatatggttatgttttt

SEQ ID NO: 595534 - DNA, 25 bp, Homo sapien
ttgttgttgtttgatgaaagcaaaa

SEQ ID NO: 595535 - DNA, 25 bp, Homo sapien
aaagcagtgacagggcaagggccta

SEQ ID NO: 595536 - DNA, 25 bp, Homo sapien
ttgttgtttgatgaaagcaaaagca

SEQ ID NO: 595537 - DNA, 25 bp, Homo sapien
caggcaactgcaggcatagtgcatt

SEQ ID NO: 595538 - DNA, 25 bp, Homo sapien
gcctctgaagtaaaatagcacccag

SEQ ID NO: 595539 - DNA, 25 bp, Homo sapien
tcagccttccaagtctacctttgca

SEQ ID NO: 595540 - DNA, 25 bp, Homo sapien
tgtggttagccagtggccatcctca

SEQ ID NO: 595541 - DNA, 25 bp, Homo sapien
tctcatgaacggtttctctcagaac

SEQ ID NO: 595542 - DNA, 25 bp, Homo sapien
ttctctcagaacataattcctcaca

SEQ ID NO: 595543 - DNA, 25 bp, Homo sapien
gaatccatctcatgaacggtttctc

SEQ ID NO: 595544 - DNA, 25 bp, Homo sapien
aagtagaatccatctcatgaacggt

SEQ ID NO: 595545 - DNA, 25 bp, Homo sapien
gctctgcaatttcctgtcgtttctg

SEQ ID NO: 595546 - DNA, 25 bp, Homo sapien
tttctgctgttcattcgtatgatct

SEQ ID NO: 595547 - DNA, 25 bp, Homo sapien
ccaacaagcaacttactctccatgg

SEQ ID NO: 595548 - DNA, 25 bp, Homo sapien
gctgttcattcgtatgatctactat

SEQ ID NO: 595549 - DNA, 25 bp, Homo sapien
gagcaacatgacaaaattcatcagc

SEQ ID NO: 595550 - DNA, 25 bp, Homo sapien
acatgacaaaattcatcagcttgcc

SEQ ID NO: 595551 - DNA, 25 bp, Homo sapien
ctgagcaacatgacaaaattcatca

SEQ ID NO: 595552 - DNA, 25 bp, Homo sapien
gcaacatgacaaaattcatcagctt

SEQ ID NO: 595553 - DNA, 25 bp, Homo sapien
gtccacctcttgctgcaatgagctg

SEQ ID NO: 595554 - DNA, 25 bp, Homo sapien
tccacctcttgctgcaatgagctgt

SEQ ID NO: 595555 - DNA, 25 bp, Homo sapien
gtgagctcattctgagtctgctcta

SEQ ID NO: 595556 - DNA, 25 bp, Homo sapien
tagctcttggcgctccttgatgtgt

SEQ ID NO: 595557 - DNA, 25 bp, Homo sapien
tgctctagctcttggcgctccttga

SEQ ID NO: 595558 - DNA, 25 bp, Homo sapien
gctccctggtgagctcattctgagt

SEQ ID NO: 595559 - DNA, 25 bp, Homo sapien
tccagtctggttataggatgtagtt

SEQ ID NO: 595560 - DNA, 25 bp, Homo sapien
cttcatcaaagaaggctctattcat

SEQ ID NO: 595561 - DNA, 25 bp, Homo sapien
tcttccagagggataaagttttcta

SEQ ID NO: 595562 - DNA, 25 bp, Homo sapien
tataggatgtagtttccaatgatct

SEQ ID NO: 595563 - DNA, 25 bp, Homo sapien
aatgaactgcagtgttaaagccctg

SEQ ID NO: 595564 - DNA, 25 bp, Homo sapien
ggaaatgaactgcagtgttaaagcc

SEQ ID NO: 595565 - DNA, 25 bp, Homo sapien
tgaactgcagtgttaaagccctggc

SEQ ID NO: 595566 - DNA, 25 bp, Homo sapien
gaaatgaactgcagtgttaaagccc

SEQ ID NO: 595567 - DNA, 25 bp, Homo sapien
gggcctctggacgaatcatcatgga

SEQ ID NO: 595568 - DNA, 25 bp, Homo sapien
gactggccgcttcatcatctgctgg

SEQ ID NO: 595569 - DNA, 25 bp, Homo sapien
tcatggacattcttgcgtgctggct

SEQ ID NO: 595570 - DNA, 25 bp, Homo sapien
tatatcccacggctgagactggccg

SEQ ID NO: 595571 - DNA, 25 bp, Homo sapien
gccttggatttcttatttgcagtgc

SEQ ID NO: 595572 - DNA, 25 bp, Homo sapien
tgatgatgcatccacctgtatctca

SEQ ID NO: 595573 - DNA, 25 bp, Homo sapien
tgcagagccgcatccaatgcagcct

SEQ ID NO: 595574 - DNA, 25 bp, Homo sapien
aatggctggaccctcatagtctctg

SEQ ID NO: 595575 - DNA, 25 bp, Homo sapien
tcatttcaggccattcttcaatggc

SEQ ID NO: 595576 - DNA, 25 bp, Homo sapien
cagcccccgagactgtggataaagc

SEQ ID NO: 595577 - DNA, 25 bp, Homo sapien
aggaggatcccgacttccttccact

SEQ ID NO: 595578 - DNA, 25 bp, Homo sapien
accagcccccgagactgtggataaa

SEQ ID NO: 595579 - DNA, 25 bp, Homo sapien
agaggaggaggatcccgacttcctt

SEQ ID NO: 595580 - DNA, 25 bp, Homo sapien
tcagaaggcaaatgctgtttccgcc

SEQ ID NO: 595581 - DNA, 25 bp, Homo sapien
agtttgggccgaatcctctctgcag

SEQ ID NO: 595582 - DNA, 25 bp, Homo sapien
tggactcagacacccacatgggaat

SEQ ID NO: 595583 - DNA, 25 bp, Homo sapien
tgaaaacctagtccctcagtgggct

SEQ ID NO: 595584 - DNA, 25 bp, Homo sapien
ttgatctgcaaagaggccaccgctt

SEQ ID NO: 595585 - DNA, 25 bp, Homo sapien
gcaggttcctggtgttacgtctata

SEQ ID NO: 595586 - DNA, 25 bp, Homo sapien
tccccattaaagtgcaagttccatg

SEQ ID NO: 595587 - DNA, 25 bp, Homo sapien
cacaaagtgttcatggtgtcttcta

SEQ ID NO: 595588 - DNA, 25 bp, Homo sapien
gtgcctagaacagcttgacacatag

SEQ ID NO: 595589 - DNA, 25 bp, Homo sapien
tttttgagacggagtctcactctgt

SEQ ID NO: 595590 - DNA, 25 bp, Homo sapien
ttttgagacggagtctcactctgtc

SEQ ID NO: 595591 - DNA, 25 bp, Homo sapien
gcccagtctggtctttttattatta

SEQ ID NO: 595592 - DNA, 25 bp, Homo sapien
tgaattcttcacagagctccatgaa

SEQ ID NO: 595593 - DNA, 25 bp, Homo sapien
ttctagagagctcaccacatgccag

SEQ ID NO: 595594 - DNA, 25 bp, Homo sapien
taaggcttcaatgaaggccacatgc

SEQ ID NO: 595595 - DNA, 25 bp, Homo sapien
atgctcatggcacagtcaccttcag

SEQ ID NO: 595596 - DNA, 25 bp, Homo sapien
gggacttacagcctagatagacaca

SEQ ID NO: 595597 - DNA, 25 bp, Homo sapien
tagtaggtgccctagcagatagaag

SEQ ID NO: 595598 - DNA, 25 bp, Homo sapien
gatggcaagccaacgtagtaggtgc

SEQ ID NO: 595599 - DNA, 25 bp, Homo sapien
gatagcctcttactgggatgccagc

SEQ ID NO: 595600 - DNA, 25 bp, Homo sapien
aaagtcttgaccacctcctgtaaca

SEQ ID NO: 595601 - DNA, 25 bp, Homo sapien
tgtaacaaccagctcaatagagcta

SEQ ID NO: 595602 - DNA, 25 bp, Homo sapien
gggcagatcccaagcaaagtcttga

SEQ ID NO: 595603 - DNA, 25 bp, Homo sapien
tatgatctgagctcatatattggct

SEQ ID NO: 595604 - DNA, 25 bp, Homo sapien
aagacaagctcactgactccgaggg

SEQ ID NO: 595605 - DNA, 25 bp, Homo sapien
tccgagggcccctggtctaatggga

SEQ ID NO: 595606 - DNA, 25 bp, Homo sapien
gaggcagcaacaaactccgagaggg

SEQ ID NO: 595607 - DNA, 25 bp, Homo sapien
gaccagagtgggttgccctatccct

SEQ ID NO: 595608 - DNA, 25 bp, Homo sapien
tgaggtaattcgtttcacagcaatt

SEQ ID NO: 595609 - DNA, 25 bp, Homo sapien
gtgcccagccgaaatgttgattgtt

SEQ ID NO: 595610 - DNA, 25 bp, Homo sapien
agtcactagattttgaggtaattcg

SEQ ID NO: 595611 - DNA, 25 bp, Homo sapien
ctgagtggtgcttaccttttgtgaa

SEQ ID NO: 595612 - DNA, 25 bp, Homo sapien
tgaattccaaaaccatcatacgagg

SEQ ID NO: 595613 - DNA, 25 bp, Homo sapien
ccctagaatggcctcaaaggaagga

SEQ ID NO: 595614 - DNA, 25 bp, Homo sapien
gagctgctttttaccgaaatcacgg

SEQ ID NO: 595615 - DNA, 25 bp, Homo sapien
tcaagtatagatttcaggacctcaa

SEQ ID NO: 595616 - DNA, 25 bp, Homo sapien
gctaggagtaggtagggccacagac

SEQ ID NO: 595617 - DNA, 25 bp, Homo sapien
agccatggacatattaccttttgtt

SEQ ID NO: 595618 - DNA, 25 bp, Homo sapien
cctacctcagttggtgggataacag

SEQ ID NO: 595619 - DNA, 25 bp, Homo sapien
agtagctaggagtaggtagggccac

SEQ ID NO: 595620 - DNA, 25 bp, Homo sapien
tgaagactaatttccctttgagccc

SEQ ID NO: 595621 - DNA, 25 bp, Homo sapien
ttgaataaatgacccgatctccgta

SEQ ID NO: 595622 - DNA, 25 bp, Homo sapien
ggtaggcacccaatctgttgaataa

SEQ ID NO: 595623 - DNA, 25 bp, Homo sapien
ctcagggagaatcgggaaagaccaa

SEQ ID NO: 595624 - DNA, 25 bp, Homo sapien
tatgaaacctctcactgactcagtg

SEQ ID NO: 595625 - DNA, 25 bp, Homo sapien
tatatcccataaactgcactgcaag

SEQ ID NO: 595626 - DNA, 25 bp, Homo sapien
gacactcaaccctgcctagtttggg

SEQ ID NO: 595627 - DNA, 25 bp, Homo sapien
agaaccaagttaacaggccaccagc

SEQ ID NO: 595628 - DNA, 25 bp, Homo sapien
agttaagtgtgaaaacagtatgttc

SEQ ID NO: 595629 - DNA, 25 bp, Homo sapien
cagagaacggtacagatatgttaga

SEQ ID NO: 595630 - DNA, 25 bp, Homo sapien
caagtgacaacatcgtagttaagtg

SEQ ID NO: 595631 - DNA, 25 bp, Homo sapien
tcagcgaacactgcctgacttcagc

SEQ ID NO: 595632 - DNA, 25 bp, Homo sapien
tcaatctacggctgatacagtactc

SEQ ID NO: 595633 - DNA, 25 bp, Homo sapien
tgaagtagctttactgccctctgac

SEQ ID NO: 595634 - DNA, 25 bp, Homo sapien
gctgatacagtactctttggcaagt

SEQ ID NO: 595635 - DNA, 25 bp, Homo sapien
tttggcttctttccgatgtcttctg

SEQ ID NO: 595636 - DNA, 25 bp, Homo sapien
ttcggcgcccgggtgcgtgcgtgtc

SEQ ID NO: 595637 - DNA, 25 bp, Homo sapien
tgcgtgcgtgtctgccgtgggtgtg

SEQ ID NO: 595638 - DNA, 25 bp, Homo sapien
gcgagacgcggctttcccttcggcg

SEQ ID NO: 595639 - DNA, 25 bp, Homo sapien
gggactgagacaggaccgacggcgg

SEQ ID NO: 595640 - DNA, 25 bp, Homo sapien
tccgcataaccacggggtcagaggt

SEQ ID NO: 595641 - DNA, 25 bp, Homo sapien
ggtcagaggtcacggctccggcctc

SEQ ID NO: 595642 - DNA, 25 bp, Homo sapien
gcggctccgcataaccacggggtca

SEQ ID NO: 595643 - DNA, 25 bp, Homo sapien
tgcggcggctccgcataaccacggg

SEQ ID NO: 595644 - DNA, 25 bp, Homo sapien
agctccacgcgggacctccgggctg

SEQ ID NO: 595645 - DNA, 25 bp, Homo sapien
accggctggcgcgagagcggcggtg

SEQ ID NO: 595646 - DNA, 25 bp, Homo sapien
cgcgcgaggtctcgggtgcggccgg

SEQ ID NO: 595647 - DNA, 25 bp, Homo sapien
cgctgcgtcagtcgcccacggcggc

SEQ ID NO: 595648 - DNA, 25 bp, Homo sapien
gcgcgcggcctcggcccacgtgcgc

SEQ ID NO: 595649 - DNA, 25 bp, Homo sapien
ggcgcgcggcctcggcccacgtgcg

SEQ ID NO: 595650 - DNA, 25 bp, Homo sapien
cgcgcggcctcggcccacgtgcgct

SEQ ID NO: 595651 - DNA, 25 bp, Homo sapien
aggcgcgcggcctcggcccacgtgc

SEQ ID NO: 595652 - DNA, 25 bp, Homo sapien
cctccgccggaatttagctgcgcgg

SEQ ID NO: 595653 - DNA, 25 bp, Homo sapien
tgccattggcgtccttgaatgtggg

SEQ ID NO: 595654 - DNA, 25 bp, Homo sapien
aagcgagggaggagcttccgaccct

SEQ ID NO: 595655 - DNA, 25 bp, Homo sapien
tgaatgtggggtcgcttttccaccc

SEQ ID NO: 595656 - DNA, 25 bp, Homo sapien
gctcagcaggtcttacgaagggccc

SEQ ID NO: 595657 - DNA, 25 bp, Homo sapien
taaagttagagaaccgctgctcagg

SEQ ID NO: 595658 - DNA, 25 bp, Homo sapien
gagccactgcgtttgaatcacctgg

SEQ ID NO: 595659 - DNA, 25 bp, Homo sapien
tggtgaaagcgcagattcccaggct

SEQ ID NO: 595660 - DNA, 25 bp, Homo sapien
ctctgacgctctgaacacaaaattc

SEQ ID NO: 595661 - DNA, 25 bp, Homo sapien
tgacgctctgaacacaaaattcaca

SEQ ID NO: 595662 - DNA, 25 bp, Homo sapien
ctgcaagtcctctgacgctctgaac

SEQ ID NO: 595663 - DNA, 25 bp, Homo sapien
caagtcctctgacgctctgaacaca

SEQ ID NO: 595664 - DNA, 25 bp, Homo sapien
caagagacacttatgctatccgcac

SEQ ID NO: 595665 - DNA, 25 bp, Homo sapien
aactcattgtcgaggaggagaacga

SEQ ID NO: 595666 - DNA, 25 bp, Homo sapien
ccgcataacaggaacgccaaggaga

SEQ ID NO: 595667 - DNA, 25 bp, Homo sapien
ggtgcagaaccgttagagaaatcct

SEQ ID NO: 595668 - DNA, 25 bp, Homo sapien
cagaaatagcaacctcgatgttgaa

SEQ ID NO: 595669 - DNA, 25 bp, Homo sapien
tgaagttcagaccacggtaaattcg

SEQ ID NO: 595670 - DNA, 25 bp, Homo sapien
cggtaaattcgagaatctaaagaga

SEQ ID NO: 595671 - DNA, 25 bp, Homo sapien
aagttgagtcaatgataaaacagaa

SEQ ID NO: 595672 - DNA, 25 bp, Homo sapien
gcaccacaaagtaattcctactcat

SEQ ID NO: 595673 - DNA, 25 bp, Homo sapien
catgtataacagcaccacaaagtaa

SEQ ID NO: 595674 - DNA, 25 bp, Homo sapien
caaagtctcgcaaatcctttttcac

SEQ ID NO: 595675 - DNA, 25 bp, Homo sapien
tgtggtggcaaacaaacgaaaaaca

SEQ ID NO: 595676 - DNA, 25 bp, Homo sapien
tggacagtggcatggccttggctct

SEQ ID NO: 595677 - DNA, 25 bp, Homo sapien
ggctggacagtggcatggccttggc

SEQ ID NO: 595678 - DNA, 25 bp, Homo sapien
gacagtggcatggccttggctctct

SEQ ID NO: 595679 - DNA, 25 bp, Homo sapien
ctggacagtggcatggccttggctc

SEQ ID NO: 595680 - DNA, 25 bp, Homo sapien
cagaatctctaaagggaagttacat

SEQ ID NO: 595681 - DNA, 25 bp, Homo sapien
tgtttgatgtaagaactggtcagtc

SEQ ID NO: 595682 - DNA, 25 bp, Homo sapien
gcctccagctcttggtataagaaca

SEQ ID NO: 595683 - DNA, 25 bp, Homo sapien
gggagaatccatttagcgtcctcga

SEQ ID NO: 595684 - DNA, 25 bp, Homo sapien
taagtaatgcctacaatgtctggca

SEQ ID NO: 595685 - DNA, 25 bp, Homo sapien
ggcctggcatatggaaccctcacaa

SEQ ID NO: 595686 - DNA, 25 bp, Homo sapien
gatatacctaattcccacacgttgc

SEQ ID NO: 595687 - DNA, 25 bp, Homo sapien
tctcctgctatgtgttgtcaccagc

SEQ ID NO: 595688 - DNA, 25 bp, Homo sapien
cctaattcagaaacgcaggtgtcat

SEQ ID NO: 595689 - DNA, 25 bp, Homo sapien
gatctcgtctgataggtctgctgcg

SEQ ID NO: 595690 - DNA, 25 bp, Homo sapien
tctgctgcggaaggtactctctatg

SEQ ID NO: 595691 - DNA, 25 bp, Homo sapien
gtattccctaccttgattgacagcc

SEQ ID NO: 595692 - DNA, 25 bp, Homo sapien
ccatagccaagtactgctgtcacaa

SEQ ID NO: 595693 - DNA, 25 bp, Homo sapien
ccaagtcatggcagtattgcagtat

SEQ ID NO: 595694 - DNA, 25 bp, Homo sapien
tgtactttgtctacctgtgcagcta

SEQ ID NO: 595695 - DNA, 25 bp, Homo sapien
tgtgcagctactcagggtactccaa

SEQ ID NO: 595696 - DNA, 25 bp, Homo sapien
tggtgtcattggagcatccgagtag

SEQ ID NO: 595697 - DNA, 25 bp, Homo sapien
gagcatccgagtagttttctaatac

SEQ ID NO: 595698 - DNA, 25 bp, Homo sapien
cagaatctgttttggtgtcattgga

SEQ ID NO: 595699 - DNA, 25 bp, Homo sapien
tgcctctatgacctgcagaatctgt

SEQ ID NO: 595700 - DNA, 25 bp, Homo sapien
caaagtggtccaacagcagtgcaga

SEQ ID NO: 595701 - DNA, 25 bp, Homo sapien
ctataggcaaagtggtccaacagca

SEQ ID NO: 595702 - DNA, 25 bp, Homo sapien
taggcaaagtggtccaacagcagtg

SEQ ID NO: 595703 - DNA, 25 bp, Homo sapien
ggtccaacagcagtgcagacagcag

SEQ ID NO: 595704 - DNA, 25 bp, Homo sapien
agccatcatgactgcttcataattc

SEQ ID NO: 595705 - DNA, 25 bp, Homo sapien
cactcatcatgagccatcatgactg

SEQ ID NO: 595706 - DNA, 25 bp, Homo sapien
tcatcatgagccatcatgactgctt

SEQ ID NO: 595707 - DNA, 25 bp, Homo sapien
catgagccatcatgactgcttcata

SEQ ID NO: 595708 - DNA, 25 bp, Homo sapien
tagcatagcattgaggcatgcgaga

SEQ ID NO: 595709 - DNA, 25 bp, Homo sapien
attcggccaggcagtttataaaaca

SEQ ID NO: 595710 - DNA, 25 bp, Homo sapien
tgaattggaatgtagcatagcattg

SEQ ID NO: 595711 - DNA, 25 bp, Homo sapien
cttgagcgtgaaaaggctgattcgg

SEQ ID NO: 595712 - DNA, 25 bp, Homo sapien
tctcttccaaggctcgattacaaga

SEQ ID NO: 595713 - DNA, 25 bp, Homo sapien
ggaaaaagtttgtactgactgctaa

SEQ ID NO: 595714 - DNA, 25 bp, Homo sapien
cacaaagctaggttttgggctcagt

SEQ ID NO: 595715 - DNA, 25 bp, Homo sapien
gcacagacatctgaccccaagataa

SEQ ID NO: 595716 - DNA, 25 bp, Homo sapien
gaccagtttaaccaacatagcaaga

SEQ ID NO: 595717 - DNA, 25 bp, Homo sapien
tgctttgtgaagctgtggtgggaag

SEQ ID NO: 595718 - DNA, 25 bp, Homo sapien
cccagtgctttgtgaagctgtggtg

SEQ ID NO: 595719 - DNA, 25 bp, Homo sapien
ttgagaccagtttaaccaacatagc

SEQ ID NO: 595720 - DNA, 25 bp, Homo sapien
gcacatctcagacacaagctgtaga

SEQ ID NO: 595721 - DNA, 25 bp, Homo sapien
tacagtctaactagaggaaccaacc

SEQ ID NO: 595722 - DNA, 25 bp, Homo sapien
gcttacagcaggttcatacaatggt

SEQ ID NO: 595723 - DNA, 25 bp, Homo sapien
taaaagagcacaacgaatatcagag

SEQ ID NO: 595724 - DNA, 25 bp, Homo sapien
agccatcgcagctggccacaggtag

SEQ ID NO: 595725 - DNA, 25 bp, Homo sapien
agctggccacaggtagaattttatg

SEQ ID NO: 595726 - DNA, 25 bp, Homo sapien
atcgcagctggccacaggtagaatt

SEQ ID NO: 595727 - DNA, 25 bp, Homo sapien
gctggccacaggtagaattttatgg

SEQ ID NO: 595728 - DNA, 25 bp, Homo sapien
agacatactatctaaagtgctcaga

SEQ ID NO: 595729 - DNA, 25 bp, Homo sapien
cactgcgccgggctatgtctttgtt

SEQ ID NO: 595730 - DNA, 25 bp, Homo sapien
gttcttaagacatactatctaaagt

SEQ ID NO: 595731 - DNA, 25 bp, Homo sapien
ctgcgccgggctatgtctttgttct

SEQ ID NO: 595732 - DNA, 25 bp, Homo sapien
ttggacaacctggaacagtagacat

SEQ ID NO: 595733 - DNA, 25 bp, Homo sapien
tggtcgaccactatgcaaaacttcc

SEQ ID NO: 595734 - DNA, 25 bp, Homo sapien
caaactagcccttggtcgaccacta

SEQ ID NO: 595735 - DNA, 25 bp, Homo sapien
ctttggacaacctggaacagtagac

SEQ ID NO: 595736 - DNA, 25 bp, Homo sapien
aagtacaaatagccataactgacat

SEQ ID NO: 595737 - DNA, 25 bp, Homo sapien
tgcagttgcgcaataggctcattgc

SEQ ID NO: 595738 - DNA, 25 bp, Homo sapien
gcagttgcgcaataggctcattgca

SEQ ID NO: 595739 - DNA, 25 bp, Homo sapien
tcagcaattacaacgaaccagatta

SEQ ID NO: 595740 - DNA, 25 bp, Homo sapien
tcaagtgacttcctgacgactcagc

SEQ ID NO: 595741 - DNA, 25 bp, Homo sapien
tggccacaccctgagaaaggtttat

SEQ ID NO: 595742 - DNA, 25 bp, Homo sapien
aaaggtttatttctaacgtcagcag

SEQ ID NO: 595743 - DNA, 25 bp, Homo sapien
taggaatactgacaacggaataccc

SEQ ID NO: 595744 - DNA, 25 bp, Homo sapien
tcttctcccagagctagctaggaat

SEQ ID NO: 595745 - DNA, 25 bp, Homo sapien
taggctaccacaaaatcgtcccagt

SEQ ID NO: 595746 - DNA, 25 bp, Homo sapien
tcatcccttgggcataaaaccagac

SEQ ID NO: 595747 - DNA, 25 bp, Homo sapien
ctgaactgacgagaaaaaactgaag

SEQ ID NO: 595748 - DNA, 25 bp, Homo sapien
gaaaatctgaactgacgagaaaaaa

SEQ ID NO: 595749 - DNA, 25 bp, Homo sapien
gaaccgctcataggcaataaagaac

SEQ ID NO: 595750 - DNA, 25 bp, Homo sapien
cagatgagaatctggaaccgctcat

SEQ ID NO: 595751 - DNA, 25 bp, Homo sapien
ggaaatctgacccataatgacaaga

SEQ ID NO: 595752 - DNA, 25 bp, Homo sapien
taagaaacaaaccaggtgtggtcgc

SEQ ID NO: 595753 - DNA, 25 bp, Homo sapien
caacattgagcacgttaagcagaga

SEQ ID NO: 595754 - DNA, 25 bp, Homo sapien
tttattaggattgcaaagaactggg

SEQ ID NO: 595755 - DNA, 25 bp, Homo sapien
cacagggttgatcatggcatactgc

SEQ ID NO: 595756 - DNA, 25 bp, Homo sapien
tcagaaatcagacaaacaggtatcg

SEQ ID NO: 595757 - DNA, 25 bp, Homo sapien
gacagcaagcagtaccatatcaaca

SEQ ID NO: 595758 - DNA, 25 bp, Homo sapien
taccatgtgatcaaggatgagatcc

SEQ ID NO: 595759 - DNA, 25 bp, Homo sapien
catttgccagggttgaagaaaaaag

SEQ ID NO: 595760 - DNA, 25 bp, Homo sapien
agaccaacatgagcaacgtaaggag

SEQ ID NO: 595761 - DNA, 25 bp, Homo sapien
gcaacgtaaggagacccccgctcta

SEQ ID NO: 595762 - DNA, 25 bp, Homo sapien
cataaaactttatcaagaaaggctt

SEQ ID NO: 595763 - DNA, 25 bp, Homo sapien
gattttggccacattgtgacatttg

SEQ ID NO: 595764 - DNA, 25 bp, Homo sapien
aactgcccaagattagattctgaag

SEQ ID NO: 595765 - DNA, 25 bp, Homo sapien
aatttatccatcagccgggtgtggg

SEQ ID NO: 595766 - DNA, 25 bp, Homo sapien
tcagacctagtaaaagattttggcc

SEQ ID NO: 595767 - DNA, 25 bp, Homo sapien
tccatgggttctcactgttcactcc

SEQ ID NO: 595768 - DNA, 25 bp, Homo sapien
ggctgcatgagcacttcttaatgtg

SEQ ID NO: 595769 - DNA, 25 bp, Homo sapien
gtgcttattggccatattcatatct

SEQ ID NO: 595770 - DNA, 25 bp, Homo sapien
taagtatctgttcaagtctttcacc

SEQ ID NO: 595771 - DNA, 25 bp, Homo sapien
atggcgagaccactgcagggcatcc

SEQ ID NO: 595772 - DNA, 25 bp, Homo sapien
ggcgagaccactgcagggcatcctt

SEQ ID NO: 595773 - DNA, 25 bp, Homo sapien
ctggatggcgagaccactgcagggc

SEQ ID NO: 595774 - DNA, 25 bp, Homo sapien
ggatggcgagaccactgcagggcat

SEQ ID NO: 595775 - DNA, 25 bp, Homo sapien
catcgttttcaccactcacagtgct

SEQ ID NO: 595776 - DNA, 25 bp, Homo sapien
acagtgctggcttcattagacccac

SEQ ID NO: 595777 - DNA, 25 bp, Homo sapien
gctggcttcattagacccacagctc

SEQ ID NO: 595778 - DNA, 25 bp, Homo sapien
agtgctggcttcattagacccacag

SEQ ID NO: 595779 - DNA, 25 bp, Homo sapien
aaaggttagtccctagtgcctgctg

SEQ ID NO: 595780 - DNA, 25 bp, Homo sapien
aataaaggttagtccctagtgcctg

SEQ ID NO: 595781 - DNA, 25 bp, Homo sapien
gttagtccctagtgcctgctgtggc

SEQ ID NO: 595782 - DNA, 25 bp, Homo sapien
cctcacccatccattaaagggtcct

SEQ ID NO: 595783 - DNA, 25 bp, Homo sapien
gaggaagctctgtagctgtccctgg

SEQ ID NO: 595784 - DNA, 25 bp, Homo sapien
aaagaggtcgactctgagattctgt

SEQ ID NO: 595785 - DNA, 25 bp, Homo sapien
gattggaaagaggtcgactctgaga

SEQ ID NO: 595786 - DNA, 25 bp, Homo sapien
tgtagaacaggatgcgttcgaagat

SEQ ID NO: 595787 - DNA, 25 bp, Homo sapien
tgcagattccacgtgggccccgttt

SEQ ID NO: 595788 - DNA, 25 bp, Homo sapien
gagtcaggacaactcgaggcagcat

SEQ ID NO: 595789 - DNA, 25 bp, Homo sapien
gccccgtttaccttcagaggagtca

SEQ ID NO: 595790 - DNA, 25 bp, Homo sapien
ggcagcatcaccccagtctttttct

SEQ ID NO: 595791 - DNA, 25 bp, Homo sapien
tatggcaggcctcatccattggcag

SEQ ID NO: 595792 - DNA, 25 bp, Homo sapien
tggtcaaaagtatcaccaagccgcg

SEQ ID NO: 595793 - DNA, 25 bp, Homo sapien
gaaggcacagcattccactggtcaa

SEQ ID NO: 595794 - DNA, 25 bp, Homo sapien
gagcccagcactagaacctatggca

SEQ ID NO: 595795 - DNA, 25 bp, Homo sapien
tgccgctctcgccatcggcgtggca

SEQ ID NO: 595796 - DNA, 25 bp, Homo sapien
cgaatagcagcgctgcccagggcca

SEQ ID NO: 595797 - DNA, 25 bp, Homo sapien
tcgccatcggcgtggcagcccgaga

SEQ ID NO: 595798 - DNA, 25 bp, Homo sapien
ctcggcctggccacgaatagcagcg

SEQ ID NO: 595799 - DNA, 25 bp, Homo sapien
cagtacaaggcaggcatagactagg

SEQ ID NO: 595800 - DNA, 25 bp, Homo sapien
agtacaaggcaggcatagactaggc

SEQ ID NO: 595801 - DNA, 25 bp, Homo sapien
gcagtacaaggcaggcatagactag

SEQ ID NO: 595802 - DNA, 25 bp, Homo sapien
aggacacttcccacagaaaatcagg

SEQ ID NO: 595803 - DNA, 25 bp, Homo sapien
tgctgtgtcacagcctgaaaaggac

SEQ ID NO: 595804 - DNA, 25 bp, Homo sapien
tctttccaggttactgtcattgcca

SEQ ID NO: 595805 - DNA, 25 bp, Homo sapien
caaaactctgtaccgtgctgtgtca

SEQ ID NO: 595806 - DNA, 25 bp, Homo sapien
tgctcaattgtccagtccatcctaa

SEQ ID NO: 595807 - DNA, 25 bp, Homo sapien
aagctacccaggagttatctgcaca

SEQ ID NO: 595808 - DNA, 25 bp, Homo sapien
ggaaaactttggtgacagcacccaa

SEQ ID NO: 595809 - DNA, 25 bp, Homo sapien
tttgaagcaaggtatagatttcagc

SEQ ID NO: 595810 - DNA, 25 bp, Homo sapien
gatcagggcacggaggttggtgttg

SEQ ID NO: 595811 - DNA, 25 bp, Homo sapien
tgatggtaaggcatggaaggtccga

SEQ ID NO: 595812 - DNA, 25 bp, Homo sapien
aaggtccgagagttgatcagggcac

SEQ ID NO: 595813 - DNA, 25 bp, Homo sapien
ttcccctctgttgcgcttcatttga

SEQ ID NO: 595814 - DNA, 25 bp, Homo sapien
caaaggggaggctgcccatgtgcac

SEQ ID NO: 595815 - DNA, 25 bp, Homo sapien
cagagagaggcaaaggggaggctgc

SEQ ID NO: 595816 - DNA, 25 bp, Homo sapien
ccagagagaggcaaaggggaggctg

SEQ ID NO: 595817 - DNA, 25 bp, Homo sapien
agaggcaaaggggaggctgcccatg

SEQ ID NO: 595818 - DNA, 25 bp, Homo sapien
tgctgagacgcaacaggccatccgt

SEQ ID NO: 595819 - DNA, 25 bp, Homo sapien
cgttatttagtgcactgctgctgag

SEQ ID NO: 595820 - DNA, 25 bp, Homo sapien
tctgagccgcatgggtaaaaaactc

SEQ ID NO: 595821 - DNA, 25 bp, Homo sapien
aaaaactcgttatttagtgcactgc

SEQ ID NO: 595822 - DNA, 25 bp, Homo sapien
tcctgacttgcatctcatgagtaaa

SEQ ID NO: 595823 - DNA, 25 bp, Homo sapien
tgtccatagtagtcttcaaagaact

SEQ ID NO: 595824 - DNA, 25 bp, Homo sapien
ttctgtccatagtagtcttcaaaga

SEQ ID NO: 595825 - DNA, 25 bp, Homo sapien
ctgtccatagtagtcttcaaagaac

SEQ ID NO: 595826 - DNA, 25 bp, Homo sapien
tatacgcactgattctcctgggaca

SEQ ID NO: 595827 - DNA, 25 bp, Homo sapien
gatccacagtttcctgaggcaggct

SEQ ID NO: 595828 - DNA, 25 bp, Homo sapien
taaaatgcccatctcgctgtcgggt

SEQ ID NO: 595829 - DNA, 25 bp, Homo sapien
gaaaggactgacgatcttcaagccg

SEQ ID NO: 595830 - DNA, 25 bp, Homo sapien
ggctttaatgtctgcgagggtcctg

SEQ ID NO: 595831 - DNA, 25 bp, Homo sapien
atgatccgggggcatatctggtaag

SEQ ID NO: 595832 - DNA, 25 bp, Homo sapien
tatggcagtggtgacctctcgcccc

SEQ ID NO: 595833 - DNA, 25 bp, Homo sapien
cccagggtggtttgatacgtgaaag

SEQ ID NO: 595834 - DNA, 25 bp, Homo sapien
cacccccccctccgatggcagtggt

SEQ ID NO: 595835 - DNA, 25 bp, Homo sapien
ataaggcggcagtagttgtgttcgc

SEQ ID NO: 595836 - DNA, 25 bp, Homo sapien
tagatctgacgtacactttccaggg

SEQ ID NO: 595837 - DNA, 25 bp, Homo sapien
cactttccaggggtgctcgggcctc

SEQ ID NO: 595838 - DNA, 25 bp, Homo sapien
tgttcgctgtagatctgacgtacac

SEQ ID NO: 595839 - DNA, 25 bp, Homo sapien
tggacatggcagttccggcctgggt

SEQ ID NO: 595840 - DNA, 25 bp, Homo sapien
gttccggcctgggtatgctccccat

SEQ ID NO: 595841 - DNA, 25 bp, Homo sapien
gcagttccggcctgggtatgctccc

SEQ ID NO: 595842 - DNA, 25 bp, Homo sapien
gacatggcagttccggcctgggtat

SEQ ID NO: 595843 - DNA, 25 bp, Homo sapien
caactgtagccctctgtagtaggca

SEQ ID NO: 595844 - DNA, 25 bp, Homo sapien
gaggcatctcctagcccatctgtga

SEQ ID NO: 595845 - DNA, 25 bp, Homo sapien
ggatgcaactgaggctgctccacta

SEQ ID NO: 595846 - DNA, 25 bp, Homo sapien
ctcagctactgaggtttgggaggac

SEQ ID NO: 595847 - DNA, 25 bp, Homo sapien
cactagagacagaatgggaccattg

SEQ ID NO: 595848 - DNA, 25 bp, Homo sapien
caggcaatcagtcggtgaggattca

SEQ ID NO: 595849 - DNA, 25 bp, Homo sapien
gatgggtatccaatgcaaagaactg

SEQ ID NO: 595850 - DNA, 25 bp, Homo sapien
taaggctgtcaagaggatctagacc

SEQ ID NO: 595851 - DNA, 25 bp, Homo sapien
gtggactcaccgtgaggactcagtg

SEQ ID NO: 595852 - DNA, 25 bp, Homo sapien
tcagaggctgtatccgtggactcac

SEQ ID NO: 595853 - DNA, 25 bp, Homo sapien
gctgtcctccgtgaggtgaccttca

SEQ ID NO: 595854 - DNA, 25 bp, Homo sapien
tcagagtctccgttgattttcagct

SEQ ID NO: 595855 - DNA, 25 bp, Homo sapien
tccaccgaagatccctttgtcactg

SEQ ID NO: 595856 - DNA, 25 bp, Homo sapien
ttggttccaattgggtttctcatcc

SEQ ID NO: 595857 - DNA, 25 bp, Homo sapien
gtaaccagacgcatgtcaccattca

SEQ ID NO: 595858 - DNA, 25 bp, Homo sapien
tctgtccttgtaaccagacgcatgt

SEQ ID NO: 595859 - DNA, 25 bp, Homo sapien
catggacaggcacacggctcttggc

SEQ ID NO: 595860 - DNA, 25 bp, Homo sapien
gaatctgggatcttttggcggaccg

SEQ ID NO: 595861 - DNA, 25 bp, Homo sapien
tcttggctggtactcagtactggcc

SEQ ID NO: 595862 - DNA, 25 bp, Homo sapien
tttggcggaccgcacatactcgaga

SEQ ID NO: 595863 - DNA, 25 bp, Homo sapien
gctctggaccaaaggagatcacatt

SEQ ID NO: 595864 - DNA, 25 bp, Homo sapien
gtaaagatcccatgcgtagcgagcc

SEQ ID NO: 595865 - DNA, 25 bp, Homo sapien
taacattgctctgatcacccagggc

SEQ ID NO: 595866 - DNA, 25 bp, Homo sapien
tgtaccccaccagacatggagtttg

SEQ ID NO: 595867 - DNA, 25 bp, Homo sapien
gagcgagatgctttccaccgtgctg

SEQ ID NO: 595868 - DNA, 25 bp, Homo sapien
gctgcacgcacactggagcgagatg

SEQ ID NO: 595869 - DNA, 25 bp, Homo sapien
tgtggctcgcaccaaagtttgcttt

SEQ ID NO: 595870 - DNA, 25 bp, Homo sapien
ttccaagtgacccaccagttccagg

SEQ ID NO: 595871 - DNA, 25 bp, Homo sapien
cacagagctttgagggtccaataca

SEQ ID NO: 595872 - DNA, 25 bp, Homo sapien
caatacagtcatcgtgacagaacgc

SEQ ID NO: 595873 - DNA, 25 bp, Homo sapien
ggcacaatacacagagctttgaggg

SEQ ID NO: 595874 - DNA, 25 bp, Homo sapien
tgagggtccaatacagtcatcgtga

SEQ ID NO: 595875 - DNA, 25 bp, Homo sapien
tacacaggtgcgtggagatgcccac

SEQ ID NO: 595876 - DNA, 25 bp, Homo sapien
cccttggtggagaatgcaaccttct

SEQ ID NO: 595877 - DNA, 25 bp, Homo sapien
cctgcaaacatctggacggctgact

SEQ ID NO: 595878 - DNA, 25 bp, Homo sapien
aaatgactcaactgtgaccctgagg

SEQ ID NO: 595879 - DNA, 25 bp, Homo sapien
cctggcaggtcacaagtcaatcatt

SEQ ID NO: 595880 - DNA, 25 bp, Homo sapien
tgggcagcctcatggaccagatcag

SEQ ID NO: 595881 - DNA, 25 bp, Homo sapien
gactggacatgtttgggcccctgtt

SEQ ID NO: 595882 - DNA, 25 bp, Homo sapien
tcaaaagtacgtcaaaaggagcctc

SEQ ID NO: 595883 - DNA, 25 bp, Homo sapien
cagtttgtgactcgcactcccaagg

SEQ ID NO: 595884 - DNA, 25 bp, Homo sapien
gcagagggatgtcacagtttgtgac

SEQ ID NO: 595885 - DNA, 25 bp, Homo sapien
attctcattgctctcagtagaacgc

SEQ ID NO: 595886 - DNA, 25 bp, Homo sapien
tcattgctctcagtagaacgctgac

SEQ ID NO: 595887 - DNA, 25 bp, Homo sapien
aggaactcactacaccattctgcct

SEQ ID NO: 595888 - DNA, 25 bp, Homo sapien
gaactcactacaccattctgcctcc

SEQ ID NO: 595889 - DNA, 25 bp, Homo sapien
ctaggaactcactacaccattctgc

SEQ ID NO: 595890 - DNA, 25 bp, Homo sapien
taggaactcactacaccattctgcc

SEQ ID NO: 595891 - DNA, 25 bp, Homo sapien
ccctcagcgcagtgggcacaaggcc

SEQ ID NO: 595892 - DNA, 25 bp, Homo sapien
cctgcatcacccctcagcgcagtgg

SEQ ID NO: 595893 - DNA, 25 bp, Homo sapien
aggcctacatcctgacagctccttt

SEQ ID NO: 595894 - DNA, 25 bp, Homo sapien
acaaggcctacatcctgacagctcc

SEQ ID NO: 595895 - DNA, 25 bp, Homo sapien
ctcttctaagcaggtgaggacttcc

SEQ ID NO: 595896 - DNA, 25 bp, Homo sapien
tggaatgactagcacaggccgactc

SEQ ID NO: 595897 - DNA, 25 bp, Homo sapien
tatgcacctatgcaacttaacgtgg

SEQ ID NO: 595898 - DNA, 25 bp, Homo sapien
cagggctccagatagtaagcactta

SEQ ID NO: 595899 - DNA, 25 bp, Homo sapien
gcctgtatctacctaagaccaatgt

SEQ ID NO: 595900 - DNA, 25 bp, Homo sapien
gaggatttcaaacaggtggaaccca

SEQ ID NO: 595901 - DNA, 25 bp, Homo sapien
ggaagatgcacctcactaagctcat

SEQ ID NO: 595902 - DNA, 25 bp, Homo sapien
gctcctaattttggactcagtgaaa

SEQ ID NO: 595903 - DNA, 25 bp, Homo sapien
tccagtgaaactacacctgaagccc

SEQ ID NO: 595904 - DNA, 25 bp, Homo sapien
cacctgaagccctagagatggcaga

SEQ ID NO: 595905 - DNA, 25 bp, Homo sapien
ttccatttagctggctcagtcaggg

SEQ ID NO: 595906 - DNA, 25 bp, Homo sapien
tcatgtcgaccccacctcttgggtg

SEQ ID NO: 595907 - DNA, 25 bp, Homo sapien
agaatcaccttcgtggaccctgatg

SEQ ID NO: 595908 - DNA, 25 bp, Homo sapien
gaatctcaccacacgggtgctctga

SEQ ID NO: 595909 - DNA, 25 bp, Homo sapien
tgacctgcttggaagaggccaacgg

SEQ ID NO: 595910 - DNA, 25 bp, Homo sapien
tgtctgatcagaaggatgtatcccc

SEQ ID NO: 595911 - DNA, 25 bp, Homo sapien
gccactcccaagcatgacgcagagg

SEQ ID NO: 595912 - DNA, 25 bp, Homo sapien
gcatctggctgtaaccagagtctac

SEQ ID NO: 595913 - DNA, 25 bp, Homo sapien
ctcatgttgactatgccaggaggct

SEQ ID NO: 595914 - DNA, 25 bp, Homo sapien
ggaaccgggaccactgctcatgttg

SEQ ID NO: 595915 - DNA, 25 bp, Homo sapien
tgagcactagtacctcatttgaaga

SEQ ID NO: 595916 - DNA, 25 bp, Homo sapien
aatggctcagagctcctcactttgc

SEQ ID NO: 595917 - DNA, 25 bp, Homo sapien
gccgggcagccgtattaatggctca

SEQ ID NO: 595918 - DNA, 25 bp, Homo sapien
aatcagtttggtacctcagccgggc

SEQ ID NO: 595919 - DNA, 25 bp, Homo sapien
cattcatggagcctacatctgagac

SEQ ID NO: 595920 - DNA, 25 bp, Homo sapien
cctgtagctgggtgattcagtaggt

SEQ ID NO: 595921 - DNA, 25 bp, Homo sapien
ggcctccgttcttgcccctgcattc

SEQ ID NO: 595922 - DNA, 25 bp, Homo sapien
tcagtaggtgcttttccggtaactc

SEQ ID NO: 595923 - DNA, 25 bp, Homo sapien
tcatcgagtcctgcagccggcagtt

SEQ ID NO: 595924 - DNA, 25 bp, Homo sapien
taaggccttcaacgtgagcaccggc

SEQ ID NO: 595925 - DNA, 25 bp, Homo sapien
tggaccctgagcgtcttaaggcctt

SEQ ID NO: 595926 - DNA, 25 bp, Homo sapien
tctttgtggacgagaacctggaccg

SEQ ID NO: 595927 - DNA, 25 bp, Homo sapien
gcagttccccatccttgttgaagca

SEQ ID NO: 595928 - DNA, 25 bp, Homo sapien
atgagagtgttgcttttcgggccga

SEQ ID NO: 595929 - DNA, 25 bp, Homo sapien
aagcacaagcttttttcgaggctga

SEQ ID NO: 595930 - DNA, 25 bp, Homo sapien
tttccccacagaattccacgagggc

SEQ ID NO: 595931 - DNA, 25 bp, Homo sapien
ttcatgcctacagaaaatcactgct

SEQ ID NO: 595932 - DNA, 25 bp, Homo sapien
tctcagggatagtaaatgagttcac

SEQ ID NO: 595933 - DNA, 25 bp, Homo sapien
caactgttttctgtgggttgagcag

SEQ ID NO: 595934 - DNA, 25 bp, Homo sapien
gcagtgccgctcaacagccaggttt

SEQ ID NO: 595935 - DNA, 25 bp, Homo sapien
taggtcacccgattcctcattggga

SEQ ID NO: 595936 - DNA, 25 bp, Homo sapien
ctatacaaggttactccaggagtgg

SEQ ID NO: 595937 - DNA, 25 bp, Homo sapien
taaaaagccccatcagagcataccc

SEQ ID NO: 595938 - DNA, 25 bp, Homo sapien
ctcattgggactcatgctgtggcca

SEQ ID NO: 595939 - DNA, 25 bp, Homo sapien
gctctggtcacgctaagatcctatt

SEQ ID NO: 595940 - DNA, 25 bp, Homo sapien
gcttgaacagtgtctgctctggtca

SEQ ID NO: 595941 - DNA, 25 bp, Homo sapien
taatggcaaaccagagtcccatggc

SEQ ID NO: 595942 - DNA, 25 bp, Homo sapien
cacttgtgggacatgcttacttcat

SEQ ID NO: 595943 - DNA, 25 bp, Homo sapien
tagagtccaagactgttgtgttgtg

SEQ ID NO: 595944 - DNA, 25 bp, Homo sapien
tcatcttatcgtttagaaagtcaat

SEQ ID NO: 595945 - DNA, 25 bp, Homo sapien
tgtctcttgaggagcagattcaggt

SEQ ID NO: 595946 - DNA, 25 bp, Homo sapien
gaaagtcaattagtgacaatgaatg

SEQ ID NO: 595947 - DNA, 25 bp, Homo sapien
accacacaccctggagacccacaca

SEQ ID NO: 595948 - DNA, 25 bp, Homo sapien
gcacagccagcagcttctagctcca

SEQ ID NO: 595949 - DNA, 25 bp, Homo sapien
gagacccacacatcttggtccagca

SEQ ID NO: 595950 - DNA, 25 bp, Homo sapien
accctggagacccacacatcttggt

SEQ ID NO: 595951 - DNA, 25 bp, Homo sapien
agccctgagctttggcttgcggtgc

SEQ ID NO: 595952 - DNA, 25 bp, Homo sapien
ttgcggtgccgaagatagtcaagga

SEQ ID NO: 595953 - DNA, 25 bp, Homo sapien
gggctcgatccagcacaaccacaag

SEQ ID NO: 595954 - DNA, 25 bp, Homo sapien
acaagcagcctcctcgacagatatg

SEQ ID NO: 595955 - DNA, 25 bp, Homo sapien
aatgccatcgaccacattttcagta

SEQ ID NO: 595956 - DNA, 25 bp, Homo sapien
ggaaaggcctgaaatgccatcgacc

SEQ ID NO: 595957 - DNA, 25 bp, Homo sapien
tgccaccatgagagcacgggaaagg

SEQ ID NO: 595958 - DNA, 25 bp, Homo sapien
tctgagaatctatagcccaaacctt

SEQ ID NO: 595959 - DNA, 25 bp, Homo sapien
tagggatcaaggttcagatttccag

SEQ ID NO: 595960 - DNA, 25 bp, Homo sapien
gggatcaaggttcagatttccagca

SEQ ID NO: 595961 - DNA, 25 bp, Homo sapien
ctagggatcaaggttcagatttcca

SEQ ID NO: 595962 - DNA, 25 bp, Homo sapien
gatcaaggttcagatttccagcagg

SEQ ID NO: 595963 - DNA, 25 bp, Homo sapien
tattcctttcaagaggcagggcggc

SEQ ID NO: 595964 - DNA, 25 bp, Homo sapien
ggctccttggccagatccatggtga

SEQ ID NO: 595965 - DNA, 25 bp, Homo sapien
catcatgtccttgtggccctagcag

SEQ ID NO: 595966 - DNA, 25 bp, Homo sapien
tggcttgaacctgcagagctgcgta

SEQ ID NO: 595967 - DNA, 25 bp, Homo sapien
cacctggaggcgtcctgacttgcct

SEQ ID NO: 595968 - DNA, 25 bp, Homo sapien
acttgcctggcggtggttgattctt

SEQ ID NO: 595969 - DNA, 25 bp, Homo sapien
taaacacacgggaaatcaaagaggc

SEQ ID NO: 595970 - DNA, 25 bp, Homo sapien
tcgagtgatgaattcccaggagcag

SEQ ID NO: 595971 - DNA, 25 bp, Homo sapien
cagtccccagtaacctcgagttact

SEQ ID NO: 595972 - DNA, 25 bp, Homo sapien
gcctattctaagtatttcgtgtaag

SEQ ID NO: 595973 - DNA, 25 bp, Homo sapien
taacctcgagttactttctgtctct

SEQ ID NO: 595974 - DNA, 25 bp, Homo sapien
cagtggttgtcgttttatgtctggc

SEQ ID NO: 595975 - DNA, 25 bp, Homo sapien
tatccgggtggcactcaagtagcat

SEQ ID NO: 595976 - DNA, 25 bp, Homo sapien
aaacagactcgaatgaagggcgcgc

SEQ ID NO: 595977 - DNA, 25 bp, Homo sapien
caggcccgaggatggaaacagactc

SEQ ID NO: 595978 - DNA, 25 bp, Homo sapien
ggctttggcacattgagacggccca

SEQ ID NO: 595979 - DNA, 25 bp, Homo sapien
ggtgactcccgattccctgtcctag

SEQ ID NO: 595980 - DNA, 25 bp, Homo sapien
cttcctatgaggtggcgaaagccat

SEQ ID NO: 595981 - DNA, 25 bp, Homo sapien
ctgtcaacagtcattagcgcggccc

SEQ ID NO: 595982 - DNA, 25 bp, Homo sapien
cattatgcctatggtgtctgctcac

SEQ ID NO: 595983 - DNA, 25 bp, Homo sapien
gagaggggattaacgtctcctgcag

SEQ ID NO: 595984 - DNA, 25 bp, Homo sapien
ttaacgtctcctgcagaatacactt

SEQ ID NO: 595985 - DNA, 25 bp, Homo sapien
ctgcagaatacacttcctctggtgg

SEQ ID NO: 595986 - DNA, 25 bp, Homo sapien
cctgcagaatacacttcctctggtg

SEQ ID NO: 595987 - DNA, 25 bp, Homo sapien
gactgtgggcaaatcgcttcagctc

SEQ ID NO: 595988 - DNA, 25 bp, Homo sapien
cacgatgctgggacagaacctgcgt

SEQ ID NO: 595989 - DNA, 25 bp, Homo sapien
agaggcagctactcacgatgctggg

SEQ ID NO: 595990 - DNA, 25 bp, Homo sapien
tttctcaggtatggctaggagaggc

SEQ ID NO: 595991 - DNA, 25 bp, Homo sapien
tgggactaatggagcccagtagttg

SEQ ID NO: 595992 - DNA, 25 bp, Homo sapien
aatagttgtcgagtgcctactgtgt

SEQ ID NO: 595993 - DNA, 25 bp, Homo sapien
tagttttgaaatagttgtcgagtgc

SEQ ID NO: 595994 - DNA, 25 bp, Homo sapien
actgtgtgccagagaacaggacaaa

SEQ ID NO: 595995 - DNA, 25 bp, Homo sapien
gtgccctgcattcagttccagactc

SEQ ID NO: 595996 - DNA, 25 bp, Homo sapien
catttaaatggagcctgcctcaaac

SEQ ID NO: 595997 - DNA, 25 bp, Homo sapien
tagtcctaaagcgacgtcctgggca

SEQ ID NO: 595998 - DNA, 25 bp, Homo sapien
gctcagattccaggcccgggccgat

SEQ ID NO: 595999 - DNA, 25 bp, Homo sapien
cagacgagctcctgacagccggctt

SEQ ID NO: 596000 - DNA, 25 bp, Homo sapien
tactaagtgccaggaacagtggcag

SEQ ID NO: 596001 - DNA, 25 bp, Homo sapien
agccactgggccctcagaactaggc

SEQ ID NO: 596002 - DNA, 25 bp, Homo sapien
gggccctcagaactaggccatgcat

SEQ ID NO: 596003 - DNA, 25 bp, Homo sapien
aacagtggcagccactgggccctca

SEQ ID NO: 596004 - DNA, 25 bp, Homo sapien
tcagaatggtcattattcagcaggc

SEQ ID NO: 596005 - DNA, 25 bp, Homo sapien
aggccacgattggtgcccactgggt

SEQ ID NO: 596006 - DNA, 25 bp, Homo sapien
tcagtactcagaatggtcattattc

SEQ ID NO: 596007 - DNA, 25 bp, Homo sapien
tattcagcaggccacgattggtgcc

SEQ ID NO: 596008 - DNA, 25 bp, Homo sapien
tggctccatcgtgaaaggaggaaga

SEQ ID NO: 596009 - DNA, 25 bp, Homo sapien
gggagagcaacgtcagctacttctt

SEQ ID NO: 596010 - DNA, 25 bp, Homo sapien
gaatacatgaagtcctcagtccgtg

SEQ ID NO: 596011 - DNA, 25 bp, Homo sapien
tctggaatacatgaagtcctcagtc

SEQ ID NO: 596012 - DNA, 25 bp, Homo sapien
catcttaacttcttccattctcaca

SEQ ID NO: 596013 - DNA, 25 bp, Homo sapien
gacaatagctatggattcagttata

SEQ ID NO: 596014 - DNA, 25 bp, Homo sapien
caaggtgtggacagtcaagccctca

SEQ ID NO: 596015 - DNA, 25 bp, Homo sapien
cctcaatgaaaggaagctgtgatcg

SEQ ID NO: 596016 - DNA, 25 bp, Homo sapien
tagaagtatctataccaaggtgtgg

SEQ ID NO: 596017 - DNA, 25 bp, Homo sapien
gtctctcagagcaaagatcccaaag

SEQ ID NO: 596018 - DNA, 25 bp, Homo sapien
tccagaaggcggtatggccaaggac

SEQ ID NO: 596019 - DNA, 25 bp, Homo sapien
ttatgttgattcgaggcccctgcag

SEQ ID NO: 596020 - DNA, 25 bp, Homo sapien
tggcataaaaccaagcctgcccggt

SEQ ID NO: 596021 - DNA, 25 bp, Homo sapien
ccttttcactgatccaagaggaaca

SEQ ID NO: 596022 - DNA, 25 bp, Homo sapien
ccggagccaggcaggagatgccacc

SEQ ID NO: 596023 - DNA, 25 bp, Homo sapien
tgatccaagaggaacaaatcctgct

SEQ ID NO: 596024 - DNA, 25 bp, Homo sapien
ttcactgatccaagaggaacaaatc

SEQ ID NO: 596025 - DNA, 25 bp, Homo sapien
cagttccgggactggtgcttgcgca

SEQ ID NO: 596026 - DNA, 25 bp, Homo sapien
agttccagttctgggtgcgctccaa

SEQ ID NO: 596027 - DNA, 25 bp, Homo sapien
ccgcagccggcgagaaaggcaagtt

SEQ ID NO: 596028 - DNA, 25 bp, Homo sapien
cagcaaataccagcggatcgccgag

SEQ ID NO: 596029 - DNA, 25 bp, Homo sapien
aggcactctcatcctgttgaatctc

SEQ ID NO: 596030 - DNA, 25 bp, Homo sapien
catcctgttgaatctctacatctgt

SEQ ID NO: 596031 - DNA, 25 bp, Homo sapien
gtgacatcctgtcccgctatacaga

SEQ ID NO: 596032 - DNA, 25 bp, Homo sapien
tctcatcctgttgaatctctacatc

SEQ ID NO: 596033 - DNA, 25 bp, Homo sapien
gaaagttgctatgcaggtaaaagca

SEQ ID NO: 596034 - DNA, 25 bp, Homo sapien
ctgaggcatgtaactcagggctggt

SEQ ID NO: 596035 - DNA, 25 bp, Homo sapien
tctcaaagggatttcaagatgctgt

SEQ ID NO: 596036 - DNA, 25 bp, Homo sapien
cagcccatcttggtggatggcgagt

SEQ ID NO: 596037 - DNA, 25 bp, Homo sapien
ggtctctctcaggtacttccggctg

SEQ ID NO: 596038 - DNA, 25 bp, Homo sapien
tctctcaggtacttccggctggaaa

SEQ ID NO: 596039 - DNA, 25 bp, Homo sapien
ttgggcaaggtgcttcatgctccct

SEQ ID NO: 596040 - DNA, 25 bp, Homo sapien
tctcaggtacttccggctggaaaag

SEQ ID NO: 596041 - DNA, 25 bp, Homo sapien
tgcacgctttggggatttacaatcc

SEQ ID NO: 596042 - DNA, 25 bp, Homo sapien
tttgcacgctttggggatttacaat

SEQ ID NO: 596043 - DNA, 25 bp, Homo sapien
cacgctttggggatttacaatccat

SEQ ID NO: 596044 - DNA, 25 bp, Homo sapien
gtttgcacgctttggggatttacaa

SEQ ID NO: 596045 - DNA, 25 bp, Homo sapien
accctggaacgggtggaactgccag

SEQ ID NO: 596046 - DNA, 25 bp, Homo sapien
ggctctgaggactgggcaactgtag

SEQ ID NO: 596047 - DNA, 25 bp, Homo sapien
tgctcttacaccaccctggaacggg

SEQ ID NO: 596048 - DNA, 25 bp, Homo sapien
gatggatctggtgcccctgggcctt

SEQ ID NO: 596049 - DNA, 25 bp, Homo sapien
cataacacagttgtcactgctgttc

SEQ ID NO: 596050 - DNA, 25 bp, Homo sapien
ctgtacaagtgggccccgggaagca

SEQ ID NO: 596051 - DNA, 25 bp, Homo sapien
ctgcccgaggtccttctcgcatggg

SEQ ID NO: 596052 - DNA, 25 bp, Homo sapien
cctgtgggcccttggaggattatac

SEQ ID NO: 596053 - DNA, 25 bp, Homo sapien
ttcagcaattatttcctccatgcct

SEQ ID NO: 596054 - DNA, 25 bp, Homo sapien
tattcagcaattatttcctccatgc

SEQ ID NO: 596055 - DNA, 25 bp, Homo sapien
tttatgtctcatagaatgtcgattt

SEQ ID NO: 596056 - DNA, 25 bp, Homo sapien
ttatgtctcatagaatgtcgatttt

SEQ ID NO: 596057 - DNA, 25 bp, Homo sapien
ggtctgccagcttgcgagtctgtac

SEQ ID NO: 596058 - DNA, 25 bp, Homo sapien
cagcttgcgagtctgtactgagctt

SEQ ID NO: 596059 - DNA, 25 bp, Homo sapien
ttggaagccagcatctctcgggcct

SEQ ID NO: 596060 - DNA, 25 bp, Homo sapien
cactggtggttacagaaggagttgg

SEQ ID NO: 596061 - DNA, 25 bp, Homo sapien
tcctctaggcagtgagccagcgtca

SEQ ID NO: 596062 - DNA, 25 bp, Homo sapien
ttcctctaggcagtgagccagcgtc

SEQ ID NO: 596063 - DNA, 25 bp, Homo sapien
gctgctatgactagtcatgtaagat

SEQ ID NO: 596064 - DNA, 25 bp, Homo sapien
aatgctgctatgactagtcatgtaa

SEQ ID NO: 596065 - DNA, 25 bp, Homo sapien
gctatgactagtcatgtaagatttt

SEQ ID NO: 596066 - DNA, 25 bp, Homo sapien
ctatgactagtcatgtaagattttt

SEQ ID NO: 596067 - DNA, 25 bp, Homo sapien
cttcatcaagccaggattacattcc

SEQ ID NO: 596068 - DNA, 25 bp, Homo sapien
gaattgtacggccagaaacagggtg

SEQ ID NO: 596069 - DNA, 25 bp, Homo sapien
tacggccagaaacagggtgaccttc

SEQ ID NO: 596070 - DNA, 25 bp, Homo sapien
tctcctccttggtgaattgtacggc

SEQ ID NO: 596071 - DNA, 25 bp, Homo sapien
gcctcagagagcttcccactgggct

SEQ ID NO: 596072 - DNA, 25 bp, Homo sapien
cacagcctcagagagcttcccactg

SEQ ID NO: 596073 - DNA, 25 bp, Homo sapien
cagcctcagagagcttcccactggg

SEQ ID NO: 596074 - DNA, 25 bp, Homo sapien
ctcagagagcttcccactgggctgc

SEQ ID NO: 596075 - DNA, 25 bp, Homo sapien
tgcctggggctcgtggagactggat

SEQ ID NO: 596076 - DNA, 25 bp, Homo sapien
gactggattgagggccttgtgtgca

SEQ ID NO: 596077 - DNA, 25 bp, Homo sapien
tcgtggagactggattgagggcctt

SEQ ID NO: 596078 - DNA, 25 bp, Homo sapien
ttgagggccttgtgtgcagcaccca

SEQ ID NO: 596079 - DNA, 25 bp, Homo sapien
acgccaccatgcccagctaagtttt

SEQ ID NO: 596080 - DNA, 25 bp, Homo sapien
tgacctcgtgaatccaccctcctca

SEQ ID NO: 596081 - DNA, 25 bp, Homo sapien
cacgccaccatgcccagctaagttt

SEQ ID NO: 596082 - DNA, 25 bp, Homo sapien
agctgggattatgggattacaggca

SEQ ID NO: 596083 - DNA, 25 bp, Homo sapien
tgcatgtcatctttggagggatgcc

SEQ ID NO: 596084 - DNA, 25 bp, Homo sapien
ggagggatgcctattcaagtccttt

SEQ ID NO: 596085 - DNA, 25 bp, Homo sapien
tcatgttcttgttgaccacttgcat

SEQ ID NO: 596086 - DNA, 25 bp, Homo sapien
tcttgttgaccacttgcatgtcatc

SEQ ID NO: 596087 - DNA, 25 bp, Homo sapien
gcacagggagtaggaaaaggtctct

SEQ ID NO: 596088 - DNA, 25 bp, Homo sapien
ggaaaaggtctctgctgccggagcc

SEQ ID NO: 596089 - DNA, 25 bp, Homo sapien
tctgtttagatgcaggggcacaggg

SEQ ID NO: 596090 - DNA, 25 bp, Homo sapien
aggcccctctcctatgctgggtctg

SEQ ID NO: 596091 - DNA, 25 bp, Homo sapien
tccggcagctatggctgaggcgcca

SEQ ID NO: 596092 - DNA, 25 bp, Homo sapien
tgcggtgaggctccccgaatgtggg

SEQ ID NO: 596093 - DNA, 25 bp, Homo sapien
gaccgtgtggccgttgagcccatct

SEQ ID NO: 596094 - DNA, 25 bp, Homo sapien
gttgagcccatctccggcagctatg

SEQ ID NO: 596095 - DNA, 25 bp, Homo sapien
taggcgggtgggtagcgtgtggaag

SEQ ID NO: 596096 - DNA, 25 bp, Homo sapien
cccaggaactcagaaggagtattcc

SEQ ID NO: 596097 - DNA, 25 bp, Homo sapien
cagaaggagtattccctaggcgggt

SEQ ID NO: 596098 - DNA, 25 bp, Homo sapien
agatggaacgtgcagggagcctttt

SEQ ID NO: 596099 - DNA, 25 bp, Homo sapien
cgtctggatggcaaattcctggact

SEQ ID NO: 596100 - DNA, 25 bp, Homo sapien
gtctggatggcaaattcctggactt

SEQ ID NO: 596101 - DNA, 25 bp, Homo sapien
gagacagtcactattgagactgttg

SEQ ID NO: 596102 - DNA, 25 bp, Homo sapien
tagagacagtcactattgagactgt

SEQ ID NO: 596103 - DNA, 25 bp, Homo sapien
gcacttctctatgcatatgtctcac

SEQ ID NO: 596104 - DNA, 25 bp, Homo sapien
aatagagacagtcactattgagact

SEQ ID NO: 596105 - DNA, 25 bp, Homo sapien
tctaagcaatttgcaggcggctgca

SEQ ID NO: 596106 - DNA, 25 bp, Homo sapien
tcaacacttctaagcaatttgcagg

SEQ ID NO: 596107 - DNA, 25 bp, Homo sapien
tgggcctgctgtaattatcaacact

SEQ ID NO: 596108 - DNA, 25 bp, Homo sapien
ggtgttgatgggattgggcctgctg

SEQ ID NO: 596109 - DNA, 25 bp, Homo sapien
ccttcctcagactcgcaaagtgcta

SEQ ID NO: 596110 - DNA, 25 bp, Homo sapien
gccaccgtgcctgggcatgttttct

SEQ ID NO: 596111 - DNA, 25 bp, Homo sapien
accttcctcagactcgcaaagtgct

SEQ ID NO: 596112 - DNA, 25 bp, Homo sapien
ccgtgcctgggcatgttttcttatt

SEQ ID NO: 596113 - DNA, 25 bp, Homo sapien
tggagagggcctgtagcttgtctcc

SEQ ID NO: 596114 - DNA, 25 bp, Homo sapien
aaattggtgtccagtccattggtgc

SEQ ID NO: 596115 - DNA, 25 bp, Homo sapien
tctctctggagagggcctgtagctt

SEQ ID NO: 596116 - DNA, 25 bp, Homo sapien
ctctggagagggcctgtagcttgtc

SEQ ID NO: 596117 - DNA, 25 bp, Homo sapien
gcagtgccaccggggcgccgcggtg

SEQ ID NO: 596118 - DNA, 25 bp, Homo sapien
cagccgcagtgccaccggggcgccg

SEQ ID NO: 596119 - DNA, 25 bp, Homo sapien
gccgcagtgccaccggggcgccgcg

SEQ ID NO: 596120 - DNA, 25 bp, Homo sapien
tccagccgcagtgccaccggggcgc

SEQ ID NO: 596121 - DNA, 25 bp, Homo sapien
cgggccggacggggcagcgggagtg

SEQ ID NO: 596122 - DNA, 25 bp, Homo sapien
gaagcggcgcgggccggacggggca

SEQ ID NO: 596123 - DNA, 25 bp, Homo sapien
ctgcgaggaagcggcgcgggccgga

SEQ ID NO: 596124 - DNA, 25 bp, Homo sapien
gcgcgggccggacggggcagcggga

SEQ ID NO: 596125 - DNA, 25 bp, Homo sapien
gcggccgcggagccgggagcagctg

SEQ ID NO: 596126 - DNA, 25 bp, Homo sapien
ctgcggccgcggagccgggagcagc

SEQ ID NO: 596127 - DNA, 25 bp, Homo sapien
tgcggccgcggagccgggagcagct

SEQ ID NO: 596128 - DNA, 25 bp, Homo sapien
acttgggccacttaaccccagcgct

SEQ ID NO: 596129 - DNA, 25 bp, Homo sapien
gcccgctcgcccgaccgccagggag

SEQ ID NO: 596130 - DNA, 25 bp, Homo sapien
ggggcgctcggagcgtccacgcggg

SEQ ID NO: 596131 - DNA, 25 bp, Homo sapien
ccgggcagcgttgccgcccgctcgc

SEQ ID NO: 596132 - DNA, 25 bp, Homo sapien
ctggcggccgtgcagggcgctgggc

SEQ ID NO: 596133 - DNA, 25 bp, Homo sapien
cagggcgctgggctcgcgaatctcc

SEQ ID NO: 596134 - DNA, 25 bp, Homo sapien
cggctggcggccgtgcagggcgctg

SEQ ID NO: 596135 - DNA, 25 bp, Homo sapien
gggctcgcgaatctccggcgccgat

SEQ ID NO: 596136 - DNA, 25 bp, Homo sapien
ctagcagccctcgaagcagctggcg

SEQ ID NO: 596137 - DNA, 25 bp, Homo sapien
ccctcgaagcagctggcggccgagc

SEQ ID NO: 596138 - DNA, 25 bp, Homo sapien
gccctcgaagcagctggcggccgag

SEQ ID NO: 596139 - DNA, 25 bp, Homo sapien
ctcgaagcagctggcggccgagcct

SEQ ID NO: 596140 - DNA, 25 bp, Homo sapien
ccctcctcgggaggtccctggagag

SEQ ID NO: 596141 - DNA, 25 bp, Homo sapien
agccgggtctccaacccggcgagag

SEQ ID NO: 596142 - DNA, 25 bp, Homo sapien
ccagccgggtctccaacccggcgag

SEQ ID NO: 596143 - DNA, 25 bp, Homo sapien
tctccaacccggcgagagcccctcc

SEQ ID NO: 596144 - DNA, 25 bp, Homo sapien
tcatatttagtactgagcaattccc

SEQ ID NO: 596145 - DNA, 25 bp, Homo sapien
tgtggttgtagtaacaatcatattt

SEQ ID NO: 596146 - DNA, 25 bp, Homo sapien
tttgtggttgtagtaacaatcatat

SEQ ID NO: 596147 - DNA, 25 bp, Homo sapien
gagcaattcccctaattcagcatcc

SEQ ID NO: 596148 - DNA, 25 bp, Homo sapien
ccacaagcttctccccgaggggcct

SEQ ID NO: 596149 - DNA, 25 bp, Homo sapien
aggctggggtccagcgtgtgattca

SEQ ID NO: 596150 - DNA, 25 bp, Homo sapien
gggtccagcgtgtgattcagagtgg

SEQ ID NO: 596151 - DNA, 25 bp, Homo sapien
tccagcgtgtgattcagagtgggca

SEQ ID NO: 596152 - DNA, 25 bp, Homo sapien
cttgtgatgagaggtgaactctgac

SEQ ID NO: 596153 - DNA, 25 bp, Homo sapien
agtgcattattttccctcctgaccc

SEQ ID NO: 596154 - DNA, 25 bp, Homo sapien
attagccggccccttcaaacaatgc

SEQ ID NO: 596155 - DNA, 25 bp, Homo sapien
aaacaatgccatttaggacctgcct

SEQ ID NO: 596156 - DNA, 25 bp, Homo sapien
agactgctctgtgcaattagccggc

SEQ ID NO: 596157 - DNA, 25 bp, Homo sapien
ttggaggctcaggacttggttccat

SEQ ID NO: 596158 - DNA, 25 bp, Homo sapien
caagcttggaggctcaggacttggt

SEQ ID NO: 596159 - DNA, 25 bp, Homo sapien
gcttggaggctcaggacttggttcc

SEQ ID NO: 596160 - DNA, 25 bp, Homo sapien
agcttggaggctcaggacttggttc

SEQ ID NO: 596161 - DNA, 25 bp, Homo sapien
gctctgtgttctcaggccaaggccc

SEQ ID NO: 596162 - DNA, 25 bp, Homo sapien
ctgtgttctcaggccaaggccccag

SEQ ID NO: 596163 - DNA, 25 bp, Homo sapien
ggctctgtgttctcaggccaaggcc

SEQ ID NO: 596164 - DNA, 25 bp, Homo sapien
tgttctcaggccaaggccccaggat

SEQ ID NO: 596165 - DNA, 25 bp, Homo sapien
gctgcaggccccgttgacgaggatc

SEQ ID NO: 596166 - DNA, 25 bp, Homo sapien
agtcggaggactggtcgctgcaggc

SEQ ID NO: 596167 - DNA, 25 bp, Homo sapien
cgttgacgaggatcgagtcttccct

SEQ ID NO: 596168 - DNA, 25 bp, Homo sapien
gatctccggggtgcggatagcctcc

SEQ ID NO: 596169 - DNA, 25 bp, Homo sapien
tatgtcagcgcctgacaccacccca

SEQ ID NO: 596170 - DNA, 25 bp, Homo sapien
atgtcagcgcctgacaccaccccag

SEQ ID NO: 596171 - DNA, 25 bp, Homo sapien
gagagtcgcgagcttgatcttcggc

SEQ ID NO: 596172 - DNA, 25 bp, Homo sapien
ctgtgtgtagcttagcagactggac

SEQ ID NO: 596173 - DNA, 25 bp, Homo sapien
tggacacctccctcttggagagtcg

SEQ ID NO: 596174 - DNA, 25 bp, Homo sapien
tgtagcttagcagactggacacctc

SEQ ID NO: 596175 - DNA, 25 bp, Homo sapien
agagctttggcatgactggggtgtc

SEQ ID NO: 596176 - DNA, 25 bp, Homo sapien
tctgaacgagtcctggtttcccgga

SEQ ID NO: 596177 - DNA, 25 bp, Homo sapien
gctgggctttctgaacgagtcctgg

SEQ ID NO: 596178 - DNA, 25 bp, Homo sapien
gctttctgaacgagtcctggtttcc

SEQ ID NO: 596179 - DNA, 25 bp, Homo sapien
cactgttgttatttcgagttcggac

SEQ ID NO: 596180 - DNA, 25 bp, Homo sapien
gtccacatggttgcggccctgccgg

SEQ ID NO: 596181 - DNA, 25 bp, Homo sapien
ccctgccggcctcgggtggaacgtg

SEQ ID NO: 596182 - DNA, 25 bp, Homo sapien
actccacgggggactcgtccacatg

SEQ ID NO: 596183 - DNA, 25 bp, Homo sapien
tgctctggggcgtcccatgtgtgtc

SEQ ID NO: 596184 - DNA, 25 bp, Homo sapien
ggtcgatggtaaggtaagagctggg

SEQ ID NO: 596185 - DNA, 25 bp, Homo sapien
gccatggcgttcctgccgatgctgt

SEQ ID NO: 596186 - DNA, 25 bp, Homo sapien
tctgtgtcgtctgtgaggtcgatgg

SEQ ID NO: 596187 - DNA, 25 bp, Homo sapien
tggacccaccgcatgccagacatag

SEQ ID NO: 596188 - DNA, 25 bp, Homo sapien
agaacttgccatcgccaaaccactg

SEQ ID NO: 596189 - DNA, 25 bp, Homo sapien
tggaggtggccttccaagacaccac

SEQ ID NO: 596190 - DNA, 25 bp, Homo sapien
catagcctgtcgcttggaggtggcc

SEQ ID NO: 596191 - DNA, 25 bp, Homo sapien
ttttcacaactgataccaggtgacc

SEQ ID NO: 596192 - DNA, 25 bp, Homo sapien
catgcttccggtctcttccaggctt

SEQ ID NO: 596193 - DNA, 25 bp, Homo sapien
taaatgacaagaggccgcggccatg

SEQ ID NO: 596194 - DNA, 25 bp, Homo sapien
taaaaggctagaatcaatcatcaag

SEQ ID NO: 596195 - DNA, 25 bp, Homo sapien
ctccagagcatggtacatggctttt

SEQ ID NO: 596196 - DNA, 25 bp, Homo sapien
cagtgccaccagtttgtctgcagag

SEQ ID NO: 596197 - DNA, 25 bp, Homo sapien
ccaaattaaagtgctggctgaacag

SEQ ID NO: 596198 - DNA, 25 bp, Homo sapien
gagacgagcttattgaaggtggcca

SEQ ID NO: 596199 - DNA, 25 bp, Homo sapien
ggtcctccaatgagtctccagggct

SEQ ID NO: 596200 - DNA, 25 bp, Homo sapien
tgttgttgggtttgaggccctcgat

SEQ ID NO: 596201 - DNA, 25 bp, Homo sapien
ggtttgaggccctcgatcccagtgg

SEQ ID NO: 596202 - DNA, 25 bp, Homo sapien
ggaaggtcttgccagctcgcaccct

SEQ ID NO: 596203 - DNA, 25 bp, Homo sapien
tatttccttgattctaatttcctac

SEQ ID NO: 596204 - DNA, 25 bp, Homo sapien
cgtatttccttgattctaatttcct

SEQ ID NO: 596205 - DNA, 25 bp, Homo sapien
gtatttccttgattctaatttccta

SEQ ID NO: 596206 - DNA, 25 bp, Homo sapien
gaaaatcttaatggacatggttaaa

SEQ ID NO: 596207 - DNA, 25 bp, Homo sapien
ttttacataatatggctcccattct

SEQ ID NO: 596208 - DNA, 25 bp, Homo sapien
gatggttatttgcatcccaaaatgc

SEQ ID NO: 596209 - DNA, 25 bp, Homo sapien
taacatcttggaaatttagcgctaa

SEQ ID NO: 596210 - DNA, 25 bp, Homo sapien
tcggtctttgccgttgttatagcaa

SEQ ID NO: 596211 - DNA, 25 bp, Homo sapien
tctgatcttcatcccctcggtcttt

SEQ ID NO: 596212 - DNA, 25 bp, Homo sapien
agctgtgcgtcttcgagtcttgttc

SEQ ID NO: 596213 - DNA, 25 bp, Homo sapien
caatttgtcttgaggcgcttgggtg

SEQ ID NO: 596214 - DNA, 25 bp, Homo sapien
gctcttgttgttggcaacatctgaa

SEQ ID NO: 596215 - DNA, 25 bp, Homo sapien
ttgttgttggcaacatctgaagcca

SEQ ID NO: 596216 - DNA, 25 bp, Homo sapien
ccaggctgctcttgttgttggcaac

SEQ ID NO: 596217 - DNA, 25 bp, Homo sapien
gctgctcttgttgttggcaacatct

SEQ ID NO: 596218 - DNA, 25 bp, Homo sapien
ggggagtgagtcttggggaatagga

SEQ ID NO: 596219 - DNA, 25 bp, Homo sapien
gaataggatttctaaaccgaagctc

SEQ ID NO: 596220 - DNA, 25 bp, Homo sapien
taggatttctaaaccgaagctcttc

SEQ ID NO: 596221 - DNA, 25 bp, Homo sapien
aataggatttctaaaccgaagctct

SEQ ID NO: 596222 - DNA, 25 bp, Homo sapien
gtttttcctgccacaagacaaacag

SEQ ID NO: 596223 - DNA, 25 bp, Homo sapien
agagccccccctcaaagagagggtg

SEQ ID NO: 596224 - DNA, 25 bp, Homo sapien
ccctcaaagagagggtggaaggaca

SEQ ID NO: 596225 - DNA, 25 bp, Homo sapien
ttcctgccacaagacaaacagccat

SEQ ID NO: 596226 - DNA, 25 bp, Homo sapien
ttcactgagtctccacacaggtgct

SEQ ID NO: 596227 - DNA, 25 bp, Homo sapien
ggacaactggctgtgacctgcgtgc

SEQ ID NO: 596228 - DNA, 25 bp, Homo sapien
cagaggcagagtgcaaggcagctgg

SEQ ID NO: 596229 - DNA, 25 bp, Homo sapien
gacctgcgtgccattggcctctgtg

SEQ ID NO: 596230 - DNA, 25 bp, Homo sapien
ggccctgccggcttgctggtggagg

SEQ ID NO: 596231 - DNA, 25 bp, Homo sapien
agccagagagaaacaccagtgaaat

SEQ ID NO: 596232 - DNA, 25 bp, Homo sapien
cagtgaaatcggagaccagagaagg

SEQ ID NO: 596233 - DNA, 25 bp, Homo sapien
gaaacaccagtgaaatcggagacca

SEQ ID NO: 596234 - DNA, 25 bp, Homo sapien
gcacacagtgcagtaagactgatag

SEQ ID NO: 596235 - DNA, 25 bp, Homo sapien
tcatacatgtaaaacagctcaagga

SEQ ID NO: 596236 - DNA, 25 bp, Homo sapien
gatagccatcgtcatcatacatgta

SEQ ID NO: 596237 - DNA, 25 bp, Homo sapien
cagctcgtgttgctgcaaagcagca

SEQ ID NO: 596238 - DNA, 25 bp, Homo sapien
tggcctcggccgctgtgcctgtgcc

SEQ ID NO: 596239 - DNA, 25 bp, Homo sapien
ggagacacatgtaacagctccaggg

SEQ ID NO: 596240 - DNA, 25 bp, Homo sapien
gccgcaggacgccatgacagcgctg

SEQ ID NO: 596241 - DNA, 25 bp, Homo sapien
catgacagcgctgcgggagacacat

SEQ ID NO: 596242 - DNA, 25 bp, Homo sapien
caagccccgtgtcactggtgaagaa

SEQ ID NO: 596243 - DNA, 25 bp, Homo sapien
atattcaagccccgtgtcactggtg

SEQ ID NO: 596244 - DNA, 25 bp, Homo sapien
agccccgtgtcactggtgaagaagg

SEQ ID NO: 596245 - DNA, 25 bp, Homo sapien
ttcaagccccgtgtcactggtgaag

SEQ ID NO: 596246 - DNA, 25 bp, Homo sapien
aatgaaccctggcacggctgaaaac

SEQ ID NO: 596247 - DNA, 25 bp, Homo sapien
gaggagctggcaattcgccaggtct

SEQ ID NO: 596248 - DNA, 25 bp, Homo sapien
ctgaaaaccgtgcagaggagctggc

SEQ ID NO: 596249 - DNA, 25 bp, Homo sapien
ccaagaggtacaacgtgtctttact

SEQ ID NO: 596250 - DNA, 25 bp, Homo sapien
ttcttcatcaggcccctgaaaatcc

SEQ ID NO: 596251 - DNA, 25 bp, Homo sapien
ttcatcaggcccctgaaaatccata

SEQ ID NO: 596252 - DNA, 25 bp, Homo sapien
accatttcttcatcaggcccctgaa

SEQ ID NO: 596253 - DNA, 25 bp, Homo sapien
aaccatttcttcatcaggcccctga

SEQ ID NO: 596254 - DNA, 25 bp, Homo sapien
tgaaaaggtatcaccccagacagga

SEQ ID NO: 596255 - DNA, 25 bp, Homo sapien
tcagagggcttcaaaccttgccgta

SEQ ID NO: 596256 - DNA, 25 bp, Homo sapien
caatttatccttggacatgagccag

SEQ ID NO: 596257 - DNA, 25 bp, Homo sapien
tgtgtaccacacgagcctgcatttg

SEQ ID NO: 596258 - DNA, 25 bp, Homo sapien
caaacaatgacaggactcgaatggg

SEQ ID NO: 596259 - DNA, 25 bp, Homo sapien
acaatgacaggactcgaatgggccg

SEQ ID NO: 596260 - DNA, 25 bp, Homo sapien
caggactcgaatgggccgccttcgg

SEQ ID NO: 596261 - DNA, 25 bp, Homo sapien
atgacaggactcgaatgggccgcct

SEQ ID NO: 596262 - DNA, 25 bp, Homo sapien
cacacttcagaagcgacgtactttc

SEQ ID NO: 596263 - DNA, 25 bp, Homo sapien
tgtgatgttcctcacgtcgttcacg

SEQ ID NO: 596264 - DNA, 25 bp, Homo sapien
gcttcacggttccaacagcaatgga

SEQ ID NO: 596265 - DNA, 25 bp, Homo sapien
tgatattcccctcgtgcttcacggt

SEQ ID NO: 596266 - DNA, 25 bp, Homo sapien
agtcaaatgggccccattcttcaat

SEQ ID NO: 596267 - DNA, 25 bp, Homo sapien
ttccgccaatcaccaagtcaaatgg

SEQ ID NO: 596268 - DNA, 25 bp, Homo sapien
agatcgttgcatgggcttccgccaa

SEQ ID NO: 596269 - DNA, 25 bp, Homo sapien
ttcacatttgagagatcgttgcatg

SEQ ID NO: 596270 - DNA, 25 bp, Homo sapien
gccagtggtcaggtgacataggctc

SEQ ID NO: 596271 - DNA, 25 bp, Homo sapien
ggtgacataggctctccagggactg

SEQ ID NO: 596272 - DNA, 25 bp, Homo sapien
agtggtcaggtgacataggctctcc

SEQ ID NO: 596273 - DNA, 25 bp, Homo sapien
gtcaggtgacataggctctccaggg

SEQ ID NO: 596274 - DNA, 25 bp, Homo sapien
ggtgatgcctaccagtctatgtcca

SEQ ID NO: 596275 - DNA, 25 bp, Homo sapien
tcccaatggcctcctgacagttcag

SEQ ID NO: 596276 - DNA, 25 bp, Homo sapien
tgacagttcagggtgatgcctacca

SEQ ID NO: 596277 - DNA, 25 bp, Homo sapien
cttattccctgagaccagcaggttc

SEQ ID NO: 596278 - DNA, 25 bp, Homo sapien
gcgtgagtaattcagcaggtggtaa

SEQ ID NO: 596279 - DNA, 25 bp, Homo sapien
attcgaagaagagccggcctgtacc

SEQ ID NO: 596280 - DNA, 25 bp, Homo sapien
tggtaaaattcgaagaagagccggc

SEQ ID NO: 596281 - DNA, 25 bp, Homo sapien
cgtgagtaattcagcaggtggtaaa

SEQ ID NO: 596282 - DNA, 25 bp, Homo sapien
atgtccctcttgtcgccaaccttca

SEQ ID NO: 596283 - DNA, 25 bp, Homo sapien
tacaacattctcaaacatccagaag

SEQ ID NO: 596284 - DNA, 25 bp, Homo sapien
gccaaccttcatggctacaacattc

SEQ ID NO: 596285 - DNA, 25 bp, Homo sapien
acatccagaagaacggccggtcatc

SEQ ID NO: 596286 - DNA, 25 bp, Homo sapien
ccagaccaagaacgggaaagtcatt

SEQ ID NO: 596287 - DNA, 25 bp, Homo sapien
aatgttggcaacacccaccaatcat

SEQ ID NO: 596288 - DNA, 25 bp, Homo sapien
ccaatgttggcaacacccaccaatc

SEQ ID NO: 596289 - DNA, 25 bp, Homo sapien
agccagaccaagaacgggaaagtca

SEQ ID NO: 596290 - DNA, 25 bp, Homo sapien
tgttcatcccgggtaggttgcccca

SEQ ID NO: 596291 - DNA, 25 bp, Homo sapien
ttcatcccgggtaggttgccccaga

SEQ ID NO: 596292 - DNA, 25 bp, Homo sapien
gccccagaagtatcgggccctgtga

SEQ ID NO: 596293 - DNA, 25 bp, Homo sapien
gcagtcctgcagctcgagtttatca

SEQ ID NO: 596294 - DNA, 25 bp, Homo sapien
gcagctcgagtttatcattctttga

SEQ ID NO: 596295 - DNA, 25 bp, Homo sapien
gtcctgcagctcgagtttatcattc

SEQ ID NO: 596296 - DNA, 25 bp, Homo sapien
ttggctatcctattgtattccaagc

SEQ ID NO: 596297 - DNA, 25 bp, Homo sapien
caagacgttaacaggaaggaccagc

SEQ ID NO: 596298 - DNA, 25 bp, Homo sapien
gactagttgccttttctcgtcgtga

SEQ ID NO: 596299 - DNA, 25 bp, Homo sapien
gagtcaaggctcaaaagtacctggg

SEQ ID NO: 596300 - DNA, 25 bp, Homo sapien
ccacccagatacagagaatgctcaa

SEQ ID NO: 596301 - DNA, 25 bp, Homo sapien
ttttcccctgtttgatcgagttcga

SEQ ID NO: 596302 - DNA, 25 bp, Homo sapien
ccctgtttgatcgagttcgacttgg

SEQ ID NO: 596303 - DNA, 25 bp, Homo sapien
tcgagttcgacttggtggttattgt

SEQ ID NO: 596304 - DNA, 25 bp, Homo sapien
ttgccattcatgacaacagggaaaa

SEQ ID NO: 596305 - DNA, 25 bp, Homo sapien
caatggctgcgtgggttattcagaa

SEQ ID NO: 596306 - DNA, 25 bp, Homo sapien
gaaggaccatgctagatgactccag

SEQ ID NO: 596307 - DNA, 25 bp, Homo sapien
tctataggattctaccaggcctgga

SEQ ID NO: 596308 - DNA, 25 bp, Homo sapien
caaagatgtgatacctcaggcctgt

SEQ ID NO: 596309 - DNA, 25 bp, Homo sapien
gacacgtctgtgtagtgcacaggaa

SEQ ID NO: 596310 - DNA, 25 bp, Homo sapien
gtgtcggatgacaggcacgctccag

SEQ ID NO: 596311 - DNA, 25 bp, Homo sapien
accacggcccatgttggacacgtct

SEQ ID NO: 596312 - DNA, 25 bp, Homo sapien
aagtagtccttcagaggggcgaaga

SEQ ID NO: 596313 - DNA, 25 bp, Homo sapien
taacctgagtattggagagctgtcg

SEQ ID NO: 596314 - DNA, 25 bp, Homo sapien
tctgatttgtgcacaaggaggcggc

SEQ ID NO: 596315 - DNA, 25 bp, Homo sapien
gatttagctaagagtggcccctgcc

SEQ ID NO: 596316 - DNA, 25 bp, Homo sapien
ggtacacggtatgacccacacagct

SEQ ID NO: 596317 - DNA, 25 bp, Homo sapien
taaacataaggtaaactctaggcat

SEQ ID NO: 596318 - DNA, 25 bp, Homo sapien
ttaaacataaggtaaactctaggca

SEQ ID NO: 596319 - DNA, 25 bp, Homo sapien
aaacataaggtaaactctaggcatc

SEQ ID NO: 596320 - DNA, 25 bp, Homo sapien
aagcacctttctaataacatgttca

SEQ ID NO: 596321 - DNA, 25 bp, Homo sapien
catggcaacctgcacgtgggctgtt

SEQ ID NO: 596322 - DNA, 25 bp, Homo sapien
cacgtgggctgttctagtcctgaag

SEQ ID NO: 596323 - DNA, 25 bp, Homo sapien
gggctgttctagtcctgaagcacct

SEQ ID NO: 596324 - DNA, 25 bp, Homo sapien
gtaaaggctcgccatcctccgccgg

SEQ ID NO: 596325 - DNA, 25 bp, Homo sapien
tcgttacgcgccgacgtaaaggctc

SEQ ID NO: 596326 - DNA, 25 bp, Homo sapien
ctccgccggctccttttatagagag

SEQ ID NO: 596327 - DNA, 25 bp, Homo sapien
tccgccggctccttttatagagagg

SEQ ID NO: 596328 - DNA, 25 bp, Homo sapien
gctctcggcagaaccgcgtccactg

SEQ ID NO: 596329 - DNA, 25 bp, Homo sapien
gcccgcgcgatgacctcacacgcac

SEQ ID NO: 596330 - DNA, 25 bp, Homo sapien
tccggttccgtcttcgtctcgttca

SEQ ID NO: 596331 - DNA, 25 bp, Homo sapien
cactgcccgcaaccggctccggttc

SEQ ID NO: 596332 - DNA, 25 bp, Homo sapien
tccagtcgctgcagcgcagggacca

SEQ ID NO: 596333 - DNA, 25 bp, Homo sapien
accctgggacctccagtcgctgcag

SEQ ID NO: 596334 - DNA, 25 bp, Homo sapien
tgggacctccagtcgctgcagcgca

SEQ ID NO: 596335 - DNA, 25 bp, Homo sapien
aaccaccctgggacctccagtcgct

SEQ ID NO: 596336 - DNA, 25 bp, Homo sapien
ccaggccagcatgtcatgtcgactt

SEQ ID NO: 596337 - DNA, 25 bp, Homo sapien
aggccagcatgtcatgtcgacttag

SEQ ID NO: 596338 - DNA, 25 bp, Homo sapien
gacgttgagtatacgttcactgcca

SEQ ID NO: 596339 - DNA, 25 bp, Homo sapien
tggtcactgacgttgagtatacgtt

SEQ ID NO: 596340 - DNA, 25 bp, Homo sapien
aaatgatccagcagatttctcttac

SEQ ID NO: 596341 - DNA, 25 bp, Homo sapien
aaaatgatccagcagatttctctta

SEQ ID NO: 596342 - DNA, 25 bp, Homo sapien
aaaaatgatccagcagatttctctt

SEQ ID NO: 596343 - DNA, 25 bp, Homo sapien
ttgggaataagaaatgccactgatg

SEQ ID NO: 596344 - DNA, 25 bp, Homo sapien
tagactttgatcttgtacttcttgg

SEQ ID NO: 596345 - DNA, 25 bp, Homo sapien
acttcttgggaataagaaatgccac

SEQ ID NO: 596346 - DNA, 25 bp, Homo sapien
taagaaatgccactgatgaacataa

SEQ ID NO: 596347 - DNA, 25 bp, Homo sapien
gaaccagttctctgctggttccagc

SEQ ID NO: 596348 - DNA, 25 bp, Homo sapien
tcaggccgaaccagttctctgctgg

SEQ ID NO: 596349 - DNA, 25 bp, Homo sapien
ggtcaggccgaaccagttctctgct

SEQ ID NO: 596350 - DNA, 25 bp, Homo sapien
ttgaggtcaggccgaaccagttctc

SEQ ID NO: 596351 - DNA, 25 bp, Homo sapien
tccataaactgacaatacgcagccc

SEQ ID NO: 596352 - DNA, 25 bp, Homo sapien
gatgtactcgtgttctagcttagct

SEQ ID NO: 596353 - DNA, 25 bp, Homo sapien
tactcgtgttctagcttagcttgga

SEQ ID NO: 596354 - DNA, 25 bp, Homo sapien
cattctcttaaaacctgcttgtagt

SEQ ID NO: 596355 - DNA, 25 bp, Homo sapien
aacttcttgaaccactgaacgaatt

SEQ ID NO: 596356 - DNA, 25 bp, Homo sapien
agccacagggtcatagtcttttcca

SEQ ID NO: 596357 - DNA, 25 bp, Homo sapien
accactgaacgaattcaaaattgtc

SEQ ID NO: 596358 - DNA, 25 bp, Homo sapien
ccatcatagtttgcatcgaaaaact

SEQ ID NO: 596359 - DNA, 25 bp, Homo sapien
gtgagaggtttcttcggtttattca

SEQ ID NO: 596360 - DNA, 25 bp, Homo sapien
tcgtcgtctccgttgcccacaccag

SEQ ID NO: 596361 - DNA, 25 bp, Homo sapien
ctcagctgcctcgtcgtctccgttg

SEQ ID NO: 596362 - DNA, 25 bp, Homo sapien
ccagccttaggagccgcagcggttc

SEQ ID NO: 596363 - DNA, 25 bp, Homo sapien
agggttctttcgcaccacaccaggg

SEQ ID NO: 596364 - DNA, 25 bp, Homo sapien
tgctccccgcacagcacctgaggct

SEQ ID NO: 596365 - DNA, 25 bp, Homo sapien
cacgttcatgctccccgcacagcac

SEQ ID NO: 596366 - DNA, 25 bp, Homo sapien
ctgaggctcacacgtgtcacatgct

SEQ ID NO: 596367 - DNA, 25 bp, Homo sapien
acctgaggctcacacgtgtcacatg

SEQ ID NO: 596368 - DNA, 25 bp, Homo sapien
cacacgtgaggcagtaagttcagag

SEQ ID NO: 596369 - DNA, 25 bp, Homo sapien
tcaatctatggaaccccaagcctgg

SEQ ID NO: 596370 - DNA, 25 bp, Homo sapien
catcacccaggataagagctgagcg

SEQ ID NO: 596371 - DNA, 25 bp, Homo sapien
tatcccagtggtattggcaacaaac

SEQ ID NO: 596372 - DNA, 25 bp, Homo sapien
cagaatgtctacaatcctctgcaat

SEQ ID NO: 596373 - DNA, 25 bp, Homo sapien
agctttccgaagtagaaatccctct

SEQ ID NO: 596374 - DNA, 25 bp, Homo sapien
acagaatgtctacaatcctctgcaa

SEQ ID NO: 596375 - DNA, 25 bp, Homo sapien
ctttccgaagtagaaatccctctct

SEQ ID NO: 596376 - DNA, 25 bp, Homo sapien
tgtgcaataaacatggatccaaaga

SEQ ID NO: 596377 - DNA, 25 bp, Homo sapien
tgcatagtgctacacatactaccag

SEQ ID NO: 596378 - DNA, 25 bp, Homo sapien
tcttccctgatcaactaacatgtcg

SEQ ID NO: 596379 - DNA, 25 bp, Homo sapien
tggacacagccggataacaatccta

SEQ ID NO: 596380 - DNA, 25 bp, Homo sapien
tgggcccccttcatcaggtatcaca

SEQ ID NO: 596381 - DNA, 25 bp, Homo sapien
tgtgggcccccttcatcaggtatca

SEQ ID NO: 596382 - DNA, 25 bp, Homo sapien
ggcccccttcatcaggtatcacaaa

SEQ ID NO: 596383 - DNA, 25 bp, Homo sapien
cctgtgggcccccttcatcaggtat

SEQ ID NO: 596384 - DNA, 25 bp, Homo sapien
gatcccaaggtaacgatggccttca

SEQ ID NO: 596385 - DNA, 25 bp, Homo sapien
cagaggtccagaaagaacttgcagc

SEQ ID NO: 596386 - DNA, 25 bp, Homo sapien
caaagcctaggcctatgagggttca

SEQ ID NO: 596387 - DNA, 25 bp, Homo sapien
tctccaaagagattagtgcactggc

SEQ ID NO: 596388 - DNA, 25 bp, Homo sapien
tatgtcaaacaagttccccatgtga

SEQ ID NO: 596389 - DNA, 25 bp, Homo sapien
tcaaattcaagagccaggtcaatgc

SEQ ID NO: 596390 - DNA, 25 bp, Homo sapien
gattctgaagcccatcagtttgaga

SEQ ID NO: 596391 - DNA, 25 bp, Homo sapien
tcaatgcacttggtcagatacccac

SEQ ID NO: 596392 - DNA, 25 bp, Homo sapien
aaagcagcaagcgtcatgaagatac

SEQ ID NO: 596393 - DNA, 25 bp, Homo sapien
tcagttataccctcgcatgtgaaaa

SEQ ID NO: 596394 - DNA, 25 bp, Homo sapien
acactcagttataccctcgcatgtg

SEQ ID NO: 596395 - DNA, 25 bp, Homo sapien
gctgaagtcatctaggttaatggtt

SEQ ID NO: 596396 - DNA, 25 bp, Homo sapien
cccactctactgctaaaacagaaag

SEQ ID NO: 596397 - DNA, 25 bp, Homo sapien
taaatgaaaggctcagtagatggaa

SEQ ID NO: 596398 - DNA, 25 bp, Homo sapien
gacagattgactctcacccaacaaa

SEQ ID NO: 596399 - DNA, 25 bp, Homo sapien
gcttgaccttggacttaacttcaat

SEQ ID NO: 596400 - DNA, 25 bp, Homo sapien
tccactggcaatgttcgctgggaac

SEQ ID NO: 596401 - DNA, 25 bp, Homo sapien
ggtactagaattagcaaggccctcc

SEQ ID NO: 596402 - DNA, 25 bp, Homo sapien
cagataaaccatgacaggtcctggg

SEQ ID NO: 596403 - DNA, 25 bp, Homo sapien
ggtcttaactcctggtccgtggcat

SEQ ID NO: 596404 - DNA, 25 bp, Homo sapien
tcatctggcagtaggttgaggtcag

SEQ ID NO: 596405 - DNA, 25 bp, Homo sapien
cacacaacactaccagagagagcta

SEQ ID NO: 596406 - DNA, 25 bp, Homo sapien
gttgaggtcagtaactcagctcaca

SEQ ID NO: 596407 - DNA, 25 bp, Homo sapien
gagagctacaggttcagatgccaat

SEQ ID NO: 596408 - DNA, 25 bp, Homo sapien
taacagatgcaattacctgccctag

SEQ ID NO: 596409 - DNA, 25 bp, Homo sapien
tgagattaattcaggcgtcactggc

SEQ ID NO: 596410 - DNA, 25 bp, Homo sapien
gagatttcaatcagggacgtggctt

SEQ ID NO: 596411 - DNA, 25 bp, Homo sapien
cactggctaatgctaagggaattct

SEQ ID NO: 596412 - DNA, 25 bp, Homo sapien
gcagggttcaccaaaaccagaaggc

SEQ ID NO: 596413 - DNA, 25 bp, Homo sapien
agtagcgggaaactggaagatgcca

SEQ ID NO: 596414 - DNA, 25 bp, Homo sapien
cagggagtcctcttataaaagcagg

SEQ ID NO: 596415 - DNA, 25 bp, Homo sapien
gaaaggagttacagcactccaggac

SEQ ID NO: 596416 - DNA, 25 bp, Homo sapien
tggttttaatgcatgtgatactagg

SEQ ID NO: 596417 - DNA, 25 bp, Homo sapien
ttttaatgcatgtgatactaggctg

SEQ ID NO: 596418 - DNA, 25 bp, Homo sapien
gcatgtgatactaggctgtccaatt

SEQ ID NO: 596419 - DNA, 25 bp, Homo sapien
taatgcatgtgatactaggctgtcc

SEQ ID NO: 596420 - DNA, 25 bp, Homo sapien
gagggagaagactgaacggtaccca

SEQ ID NO: 596421 - DNA, 25 bp, Homo sapien
gctctaatctagcagtgtcttggca

SEQ ID NO: 596422 - DNA, 25 bp, Homo sapien
gaacggtacccaagaatgctctaat

SEQ ID NO: 596423 - DNA, 25 bp, Homo sapien
ttggcaacagctcacacctaaggac

SEQ ID NO: 596424 - DNA, 25 bp, Homo sapien
gaacaaaatgaagggcaactatgaa

SEQ ID NO: 596425 - DNA, 25 bp, Homo sapien
tacctggccagacagtctgaacaaa

SEQ ID NO: 596426 - DNA, 25 bp, Homo sapien
aaatgaagggcaactatgaaagtca

SEQ ID NO: 596427 - DNA, 25 bp, Homo sapien
tctgaacaaaatgaagggcaactat

SEQ ID NO: 596428 - DNA, 25 bp, Homo sapien
ttgagcctttcttcccctgatagag

SEQ ID NO: 596429 - DNA, 25 bp, Homo sapien
gaccacgtggaaggctgacttagcc

SEQ ID NO: 596430 - DNA, 25 bp, Homo sapien
tggacactcccagcgagcagtggat

SEQ ID NO: 596431 - DNA, 25 bp, Homo sapien
tccagtcgttgtaaggaccacgtgg

SEQ ID NO: 596432 - DNA, 25 bp, Homo sapien
tgctaagtcttcagaagacattagc

SEQ ID NO: 596433 - DNA, 25 bp, Homo sapien
tctgctaagtcttcagaagacatta

SEQ ID NO: 596434 - DNA, 25 bp, Homo sapien
gctaagtcttcagaagacattagcc

SEQ ID NO: 596435 - DNA, 25 bp, Homo sapien
taagtcttcagaagacattagcctt

SEQ ID NO: 596436 - DNA, 25 bp, Homo sapien
acgaatataacaagaaccagggact

SEQ ID NO: 596437 - DNA, 25 bp, Homo sapien
ctggaacgaatataacaagaaccag

SEQ ID NO: 596438 - DNA, 25 bp, Homo sapien
gaacgaatataacaagaaccaggga

SEQ ID NO: 596439 - DNA, 25 bp, Homo sapien
cgaatataacaagaaccagggactg

SEQ ID NO: 596440 - DNA, 25 bp, Homo sapien
ggtcaggcacctggctaagggtgat

SEQ ID NO: 596441 - DNA, 25 bp, Homo sapien
ggagctagcagcctccttgttctgg

SEQ ID NO: 596442 - DNA, 25 bp, Homo sapien
ggcacctggctaagggtgatggatg

SEQ ID NO: 596443 - DNA, 25 bp, Homo sapien
tgatggatggtgttggggagctagc

SEQ ID NO: 596444 - DNA, 25 bp, Homo sapien
ctccagtcgagttgatgtcctcctc

SEQ ID NO: 596445 - DNA, 25 bp, Homo sapien
tatcttggccaggtgtatctcagta

SEQ ID NO: 596446 - DNA, 25 bp, Homo sapien
cttggccaggtgtatctcagtaaac

SEQ ID NO: 596447 - DNA, 25 bp, Homo sapien
tggccaggtgtatctcagtaaacag

SEQ ID NO: 596448 - DNA, 25 bp, Homo sapien
cttcaaagagagaacagagagcatc

SEQ ID NO: 596449 - DNA, 25 bp, Homo sapien
cttcctcacaagtccctcggcccat

SEQ ID NO: 596450 - DNA, 25 bp, Homo sapien
tccccttcctcacaagtccctcggc

SEQ ID NO: 596451 - DNA, 25 bp, Homo sapien
gagagaacagagagcatcatcccct

SEQ ID NO: 596452 - DNA, 25 bp, Homo sapien
ccaggtgacaaagccttcacagtcc

SEQ ID NO: 596453 - DNA, 25 bp, Homo sapien
caaaaacagctcctttagcatctcg

SEQ ID NO: 596454 - DNA, 25 bp, Homo sapien
atctcgtccgacacactgctcagaa

SEQ ID NO: 596455 - DNA, 25 bp, Homo sapien
gtccgagtccaccttcaaaaacagc

SEQ ID NO: 596456 - DNA, 25 bp, Homo sapien
gaagtgcaggcggtactggctcttt

SEQ ID NO: 596457 - DNA, 25 bp, Homo sapien
gacgaccgtcatgggaaggtagaag

SEQ ID NO: 596458 - DNA, 25 bp, Homo sapien
gcatcatgtaatccacatacttttg

SEQ ID NO: 596459 - DNA, 25 bp, Homo sapien
tccctggaactcacgcatcatgtaa

SEQ ID NO: 596460 - DNA, 25 bp, Homo sapien
accagcaaggtcacggattgaggga

SEQ ID NO: 596461 - DNA, 25 bp, Homo sapien
gtcctaacacttacagggctgtgag

SEQ ID NO: 596462 - DNA, 25 bp, Homo sapien
tcagcaccagcaaggtcacggattg

SEQ ID NO: 596463 - DNA, 25 bp, Homo sapien
tgagccaaaggacatcaggcagcag

SEQ ID NO: 596464 - DNA, 25 bp, Homo sapien
taaaggagctcatcagcgagaagga

SEQ ID NO: 596465 - DNA, 25 bp, Homo sapien
gaactgcaggatcccgtctttggtg

SEQ ID NO: 596466 - DNA, 25 bp, Homo sapien
gaaggactcagaccagaactgcagg

SEQ ID NO: 596467 - DNA, 25 bp, Homo sapien
tgacagtcaggaaacacccgatctt

SEQ ID NO: 596468 - DNA, 25 bp, Homo sapien
cggctggttgtagagctgctgggtc

SEQ ID NO: 596469 - DNA, 25 bp, Homo sapien
tggttgtagagctgctgggtctggt

SEQ ID NO: 596470 - DNA, 25 bp, Homo sapien
ttgtagagctgctgggtctggttaa

SEQ ID NO: 596471 - DNA, 25 bp, Homo sapien
gctggttgtagagctgctgggtctg

SEQ ID NO: 596472 - DNA, 25 bp, Homo sapien
ctatcttttgcctggtagacgcaac

SEQ ID NO: 596473 - DNA, 25 bp, Homo sapien
tagacgcaactgcaacgaggttcat

SEQ ID NO: 596474 - DNA, 25 bp, Homo sapien
caacgaggttcatattgtgcagaca

SEQ ID NO: 596475 - DNA, 25 bp, Homo sapien
gcctggtagacgcaactgcaacgag

SEQ ID NO: 596476 - DNA, 25 bp, Homo sapien
gaggctatttaagtgacagtgaagg

SEQ ID NO: 596477 - DNA, 25 bp, Homo sapien
agaggctatttaagtgacagtgaag

SEQ ID NO: 596478 - DNA, 25 bp, Homo sapien
cagaggatcttggactagagggtca

SEQ ID NO: 596479 - DNA, 25 bp, Homo sapien
gggcatcagggaagcgcggcatgca

SEQ ID NO: 596480 - DNA, 25 bp, Homo sapien
tgagatgagagccaaaagaaaagca

SEQ ID NO: 596481 - DNA, 25 bp, Homo sapien
gagactactggaggcggcagggctc

SEQ ID NO: 596482 - DNA, 25 bp, Homo sapien
cgtcatgttgtctcccgcatctgaa

SEQ ID NO: 596483 - DNA, 25 bp, Homo sapien
ttgtctcccgcatctgaacggcagc

SEQ ID NO: 596484 - DNA, 25 bp, Homo sapien
ctctgcctctctacgtggccggcca

SEQ ID NO: 596485 - DNA, 25 bp, Homo sapien
tgttgtctcccgcatctgaacggca

SEQ ID NO: 596486 - DNA, 25 bp, Homo sapien
cacagctgtccagatcaacaaaggt

SEQ ID NO: 596487 - DNA, 25 bp, Homo sapien
aacaaaggtgaaggcccggacacat

SEQ ID NO: 596488 - DNA, 25 bp, Homo sapien
cagatcaacaaaggtgaaggcccgg

SEQ ID NO: 596489 - DNA, 25 bp, Homo sapien
tgaaggcccggacacatttgtggtc

SEQ ID NO: 596490 - DNA, 25 bp, Homo sapien
tcatgttttcggaggtgaagacaat

SEQ ID NO: 596491 - DNA, 25 bp, Homo sapien
gaacacacctctgtgatagtcagac

SEQ ID NO: 596492 - DNA, 25 bp, Homo sapien
ttgcctttggcgtctccatagcaga

SEQ ID NO: 596493 - DNA, 25 bp, Homo sapien
ggtgaagacaatgacgttgcctttg

SEQ ID NO: 596494 - DNA, 25 bp, Homo sapien
ccaggctccacagagcccacatcca

SEQ ID NO: 596495 - DNA, 25 bp, Homo sapien
tccacagagcccacatccaggacag

SEQ ID NO: 596496 - DNA, 25 bp, Homo sapien
acagagcccacatccaggacagccc

SEQ ID NO: 596497 - DNA, 25 bp, Homo sapien
aggctccacagagcccacatccagg

SEQ ID NO: 596498 - DNA, 25 bp, Homo sapien
tcatttaagagtttctgcaaggaaa

SEQ ID NO: 596499 - DNA, 25 bp, Homo sapien
tgcaaggaaactttgatccagtgat

SEQ ID NO: 596500 - DNA, 25 bp, Homo sapien
gcaaagcagacttctcatttaagag

SEQ ID NO: 596501 - DNA, 25 bp, Homo sapien
ctatgcaaagcagacttctcattta

SEQ ID NO: 596502 - DNA, 25 bp, Homo sapien
ccagagaggacttctcgatggctga

SEQ ID NO: 596503 - DNA, 25 bp, Homo sapien
gggatgaacttgacctgctcacacc

SEQ ID NO: 596504 - DNA, 25 bp, Homo sapien
ggctgaacaggagactaccacattc

SEQ ID NO: 596505 - DNA, 25 bp, Homo sapien
tgctcacaccagttgggatggagag

SEQ ID NO: 596506 - DNA, 25 bp, Homo sapien
acttctgccacacggccccattcaa

SEQ ID NO: 596507 - DNA, 25 bp, Homo sapien
caatgcagacagatagcctcagcaa

SEQ ID NO: 596508 - DNA, 25 bp, Homo sapien
ttcacgtcagacattcccggaggcc

SEQ ID NO: 596509 - DNA, 25 bp, Homo sapien
aaacttccccttcacgtcagacatt

SEQ ID NO: 596510 - DNA, 25 bp, Homo sapien
atccctttccttaaacgcagcactg

SEQ ID NO: 596511 - DNA, 25 bp, Homo sapien
gaatccctttccttaaacgcagcac

SEQ ID NO: 596512 - DNA, 25 bp, Homo sapien
tccctttccttaaacgcagcactga

SEQ ID NO: 596513 - DNA, 25 bp, Homo sapien
ccctttccttaaacgcagcactgac

SEQ ID NO: 596514 - DNA, 25 bp, Homo sapien
caaggatgtgcgtcactgaggtctg

SEQ ID NO: 596515 - DNA, 25 bp, Homo sapien
cttggagacactgatgaggatgctg

SEQ ID NO: 596516 - DNA, 25 bp, Homo sapien
tgttcctgctatccacaaggatgtg

SEQ ID NO: 596517 - DNA, 25 bp, Homo sapien
gatgaaggcatcgtagccaccagtc

SEQ ID NO: 596518 - DNA, 25 bp, Homo sapien
tgaggaacagaaggagtcaggcgga

SEQ ID NO: 596519 - DNA, 25 bp, Homo sapien
ctgaggaacagaaggagtcaggcgg

SEQ ID NO: 596520 - DNA, 25 bp, Homo sapien
gaggaacagaaggagtcaggcggac

SEQ ID NO: 596521 - DNA, 25 bp, Homo sapien
ggcagggaggtcatgccatttctct

SEQ ID NO: 596522 - DNA, 25 bp, Homo sapien
tgggcagggaggtcatgccatttct

SEQ ID NO: 596523 - DNA, 25 bp, Homo sapien
cgtgggcagggaggtcatgccattt

SEQ ID NO: 596524 - DNA, 25 bp, Homo sapien
gggcagggaggtcatgccatttctc

SEQ ID NO: 596525 - DNA, 25 bp, Homo sapien
ccagcatgtcccacacgcgaatatt

SEQ ID NO: 596526 - DNA, 25 bp, Homo sapien
gagggtattgtccttctcgaagaag

SEQ ID NO: 596527 - DNA, 25 bp, Homo sapien
tgtccttctcgaagaagtaggcact

SEQ ID NO: 596528 - DNA, 25 bp, Homo sapien
gtgctgcagatgagggtattgtcct

SEQ ID NO: 596529 - DNA, 25 bp, Homo sapien
tcaggacagacctcacaggggttcc

SEQ ID NO: 596530 - DNA, 25 bp, Homo sapien
gctgagtcctgagtcacagatggcc

SEQ ID NO: 596531 - DNA, 25 bp, Homo sapien
gtgcttgtcccaatctttcctgtcc

SEQ ID NO: 596532 - DNA, 25 bp, Homo sapien
tccacaggaagcccctcgtgcttgt

SEQ ID NO: 596533 - DNA, 25 bp, Homo sapien
tcttccttgctttgataagcccctg

SEQ ID NO: 596534 - DNA, 25 bp, Homo sapien
tgataagcccctgggcctctaagta

SEQ ID NO: 596535 - DNA, 25 bp, Homo sapien
taaagatcttgctgtagaggacagc

SEQ ID NO: 596536 - DNA, 25 bp, Homo sapien
gagcaatgagtggtcctcttccttg

SEQ ID NO: 596537 - DNA, 25 bp, Homo sapien
tgtgagcaggcaccgctctgactca

SEQ ID NO: 596538 - DNA, 25 bp, Homo sapien
tcattgtgccatcccgcaaacctgt

SEQ ID NO: 596539 - DNA, 25 bp, Homo sapien
cggactgggaaaggtcaacaggcat

SEQ ID NO: 596540 - DNA, 25 bp, Homo sapien
tgccaatgttgtagttccacatctt

SEQ ID NO: 596541 - DNA, 25 bp, Homo sapien
tccatcctgtcacatagaacacttt

SEQ ID NO: 596542 - DNA, 25 bp, Homo sapien
ctcttactccatcctgtcacataga

SEQ ID NO: 596543 - DNA, 25 bp, Homo sapien
tactccatcctgtcacatagaacac

SEQ ID NO: 596544 - DNA, 25 bp, Homo sapien
tcctgtcacatagaacactttgttc

SEQ ID NO: 596545 - DNA, 25 bp, Homo sapien
ggctgaagccatgtcccattgacct

SEQ ID NO: 596546 - DNA, 25 bp, Homo sapien
tactctcaggtgtcggagctgggct

SEQ ID NO: 596547 - DNA, 25 bp, Homo sapien
ccattgacctcatttactaagcgct

SEQ ID NO: 596548 - DNA, 25 bp, Homo sapien
ggagccgactcagaggaggatactc

SEQ ID NO: 596549 - DNA, 25 bp, Homo sapien
cagtggtagcacaagagcactggct

SEQ ID NO: 596550 - DNA, 25 bp, Homo sapien
agtggtagcacaagagcactggctt

SEQ ID NO: 596551 - DNA, 25 bp, Homo sapien
gtggtagcacaagagcactggcttg

SEQ ID NO: 596552 - DNA, 25 bp, Homo sapien
gccagtggtagcacaagagcactgg

SEQ ID NO: 596553 - DNA, 25 bp, Homo sapien
tgtgccggtgttccagaagaggatg

SEQ ID NO: 596554 - DNA, 25 bp, Homo sapien
ccggtacttggccatgctcaggatg

SEQ ID NO: 596555 - DNA, 25 bp, Homo sapien
gaactggttccggtacttggccatg

SEQ ID NO: 596556 - DNA, 25 bp, Homo sapien
tgaagatgggcttgagtgtgccggt

SEQ ID NO: 596557 - DNA, 25 bp, Homo sapien
ccaggcagttgttcacatcttgcac

SEQ ID NO: 596558 - DNA, 25 bp, Homo sapien
caggttggtattggccacagactcg

SEQ ID NO: 596559 - DNA, 25 bp, Homo sapien
ttgtctctcgggcaccgcatcactg

SEQ ID NO: 596560 - DNA, 25 bp, Homo sapien
acttctcccgctccacatagggtct

SEQ ID NO: 596561 - DNA, 25 bp, Homo sapien
tcttgcttgactgcctggatgtgcc

SEQ ID NO: 596562 - DNA, 25 bp, Homo sapien
atggactgtttgctgtggatcttgc

SEQ ID NO: 596563 - DNA, 25 bp, Homo sapien
tctccaccgaggcactggattgaac

SEQ ID NO: 596564 - DNA, 25 bp, Homo sapien
ttcatcctctttgtaaatggactgt

SEQ ID NO: 596565 - DNA, 25 bp, Homo sapien
gacggtgagagcaggtagggtgaag

SEQ ID NO: 596566 - DNA, 25 bp, Homo sapien
acagggtcaactgcgtagccagcat

SEQ ID NO: 596567 - DNA, 25 bp, Homo sapien
tgcacaggattcaccaaagtgatgc

SEQ ID NO: 596568 - DNA, 25 bp, Homo sapien
ccaaagtgatgcaccacaaagttct

SEQ ID NO: 596569 - DNA, 25 bp, Homo sapien
tacaatcccccgtgatgaggatcca

SEQ ID NO: 596570 - DNA, 25 bp, Homo sapien
catccccattgtctaggtccacagg

SEQ ID NO: 596571 - DNA, 25 bp, Homo sapien
atttttatcagtggccatggcaccc

SEQ ID NO: 596572 - DNA, 25 bp, Homo sapien
gaccaggcgtagatgtagccgtcca

SEQ ID NO: 596573 - DNA, 25 bp, Homo sapien
gcgcagtaatccttgatgtcccaga

SEQ ID NO: 596574 - DNA, 25 bp, Homo sapien
tatcctccaagggaatgtagtgtgg

SEQ ID NO: 596575 - DNA, 25 bp, Homo sapien
tggccccactggattggaatggctg

SEQ ID NO: 596576 - DNA, 25 bp, Homo sapien
tgctgaggaattaacaaccggaact

SEQ ID NO: 596577 - DNA, 25 bp, Homo sapien
caaatgaatactagatgcgttgaag

SEQ ID NO: 596578 - DNA, 25 bp, Homo sapien
tgaatactagatgcgttgaagattt

SEQ ID NO: 596579 - DNA, 25 bp, Homo sapien
acccaaatgaatactagatgcgttg

SEQ ID NO: 596580 - DNA, 25 bp, Homo sapien
tactagatgcgttgaagattttatt

SEQ ID NO: 596581 - DNA, 25 bp, Homo sapien
tctgccacactattcaaatggcctt

SEQ ID NO: 596582 - DNA, 25 bp, Homo sapien
caggtcatcaggagcgtggggggaa

SEQ ID NO: 596583 - DNA, 25 bp, Homo sapien
tacaggatgtctgccacactattca

SEQ ID NO: 596584 - DNA, 25 bp, Homo sapien
tcctggccagcgctgataaccagct

SEQ ID NO: 596585 - DNA, 25 bp, Homo sapien
taccagcttatgttcagacagggac

SEQ ID NO: 596586 - DNA, 25 bp, Homo sapien
tcataccagcttatgttcagacagg

SEQ ID NO: 596587 - DNA, 25 bp, Homo sapien
ataccagcttatgttcagacaggga

SEQ ID NO: 596588 - DNA, 25 bp, Homo sapien
cataccagcttatgttcagacaggg

SEQ ID NO: 596589 - DNA, 25 bp, Homo sapien
ttacaaatgcacttggaggagccat

SEQ ID NO: 596590 - DNA, 25 bp, Homo sapien
cagcagggatcacttgttacaaatg

SEQ ID NO: 596591 - DNA, 25 bp, Homo sapien
tacagcagcgcagtcttaactcact

SEQ ID NO: 596592 - DNA, 25 bp, Homo sapien
tcttgtctctaatggccagctagga

SEQ ID NO: 596593 - DNA, 25 bp, Homo sapien
ggcctcagccagatcccgctgctcc

SEQ ID NO: 596594 - DNA, 25 bp, Homo sapien
ggggctttccttcacaagatgtccc

SEQ ID NO: 596595 - DNA, 25 bp, Homo sapien
agatcccgctgctccctagtgtggg

SEQ ID NO: 596596 - DNA, 25 bp, Homo sapien
gggctttccttcacaagatgtcccc

SEQ ID NO: 596597 - DNA, 25 bp, Homo sapien
aggagagccatcagcgccgcctgct

SEQ ID NO: 596598 - DNA, 25 bp, Homo sapien
tctccggcccacggggacatcaggg

SEQ ID NO: 596599 - DNA, 25 bp, Homo sapien
tccttatctgccttcccatgcagga

SEQ ID NO: 596600 - DNA, 25 bp, Homo sapien
ccttatctgccttcccatgcaggag

SEQ ID NO: 596601 - DNA, 25 bp, Homo sapien
gatgcttcatccagccatatggcac

SEQ ID NO: 596602 - DNA, 25 bp, Homo sapien
gacaggaacctggtattctgcaagc

SEQ ID NO: 596603 - DNA, 25 bp, Homo sapien
cgttccttgggcttatacgccgctc

SEQ ID NO: 596604 - DNA, 25 bp, Homo sapien
tatggcaccctggtggacaggaacc

SEQ ID NO: 596605 - DNA, 25 bp, Homo sapien
caaactggccacattagtctcatcc

SEQ ID NO: 596606 - DNA, 25 bp, Homo sapien
ggctcctgtccaccctcactgaagg

SEQ ID NO: 596607 - DNA, 25 bp, Homo sapien
tggccacattagtctcatcccagac

SEQ ID NO: 596608 - DNA, 25 bp, Homo sapien
ggacaaaggctcctgtccaccctca

SEQ ID NO: 596609 - DNA, 25 bp, Homo sapien
ggtccttctggacatggtgggccac

SEQ ID NO: 596610 - DNA, 25 bp, Homo sapien
gctgagtcggcatcagatcactgaa

SEQ ID NO: 596611 - DNA, 25 bp, Homo sapien
cactgaagtgcaggctttggtagac

SEQ ID NO: 596612 - DNA, 25 bp, Homo sapien
gctggtcttgctggtctgggcccct

SEQ ID NO: 596613 - DNA, 25 bp, Homo sapien
tgtgcttgggggtcactgacccctg

SEQ ID NO: 596614 - DNA, 25 bp, Homo sapien
gaggcggccgcaggcgtgctgtccg

SEQ ID NO: 596615 - DNA, 25 bp, Homo sapien
cagtgacagataacaaggaagatgg

SEQ ID NO: 596616 - DNA, 25 bp, Homo sapien
gggccgctcgaaggaggagacaatg

SEQ ID NO: 596617 - DNA, 25 bp, Homo sapien
tgaaggctggaagccaataaccacg

SEQ ID NO: 596618 - DNA, 25 bp, Homo sapien
gccacaggatgagctgaaccgagca

SEQ ID NO: 596619 - DNA, 25 bp, Homo sapien
agtgcggccttgactgaactcttgc

SEQ ID NO: 596620 - DNA, 25 bp, Homo sapien
ctgctgtgcttgcagaagtgaaggc

SEQ ID NO: 596621 - DNA, 25 bp, Homo sapien
gtgggcgaggcctccaagaactgca

SEQ ID NO: 596622 - DNA, 25 bp, Homo sapien
ccattcctttgtctggtggcagcag

SEQ ID NO: 596623 - DNA, 25 bp, Homo sapien
cagccgggcccgaggagacagttct

SEQ ID NO: 596624 - DNA, 25 bp, Homo sapien
aggcaggatgccctcatgcgtgtct

SEQ ID NO: 596625 - DNA, 25 bp, Homo sapien
cctttaaagagtagctgggtggcag

SEQ ID NO: 596626 - DNA, 25 bp, Homo sapien
agaccaggatttggacatgcgtggc

SEQ ID NO: 596627 - DNA, 25 bp, Homo sapien
gcaggacagcggctcccagatgctt

SEQ ID NO: 596628 - DNA, 25 bp, Homo sapien
ccaggatttggacatgcgtggccag

SEQ ID NO: 596629 - DNA, 25 bp, Homo sapien
acagcggctcccagatgcttttgga

SEQ ID NO: 596630 - DNA, 25 bp, Homo sapien
ccatcccatgcccacgttggttcac

SEQ ID NO: 596631 - DNA, 25 bp, Homo sapien
tgcccacgttggttcacggttgagc

SEQ ID NO: 596632 - DNA, 25 bp, Homo sapien
catgcccacgttggttcacggttga

SEQ ID NO: 596633 - DNA, 25 bp, Homo sapien
tcccatgcccacgttggttcacggt

SEQ ID NO: 596634 - DNA, 25 bp, Homo sapien
ggcccatgaagacaggccatccagc

SEQ ID NO: 596635 - DNA, 25 bp, Homo sapien
tgaagacaggccatccagccagggt

SEQ ID NO: 596636 - DNA, 25 bp, Homo sapien
ccctggatggtgtccgggatgccag

SEQ ID NO: 596637 - DNA, 25 bp, Homo sapien
catggcccatgaagacaggccatcc

SEQ ID NO: 596638 - DNA, 25 bp, Homo sapien
acagcaggggcttcgggcccccatc

SEQ ID NO: 596639 - DNA, 25 bp, Homo sapien
ccccactcatctctagcctgagccc

SEQ ID NO: 596640 - DNA, 25 bp, Homo sapien
ccactcatctctagcctgagccctg

SEQ ID NO: 596641 - DNA, 25 bp, Homo sapien
catcccccactcatctctagcctga

SEQ ID NO: 596642 - DNA, 25 bp, Homo sapien
cgcatatcctcggagccgtggctgg

SEQ ID NO: 596643 - DNA, 25 bp, Homo sapien
ggcgcatatcctcggagccgtggct

SEQ ID NO: 596644 - DNA, 25 bp, Homo sapien
ccagggagggcgcatatcctcggag

SEQ ID NO: 596645 - DNA, 25 bp, Homo sapien
ggagggcgcatatcctcggagccgt

SEQ ID NO: 596646 - DNA, 25 bp, Homo sapien
ggacgttgatcaggacaaagaacac

SEQ ID NO: 596647 - DNA, 25 bp, Homo sapien
gatctgcggggggacgttgatcagg

SEQ ID NO: 596648 - DNA, 25 bp, Homo sapien
cagggagggatctgcggggggacgt

SEQ ID NO: 596649 - DNA, 25 bp, Homo sapien
tgcggggggacgttgatcaggacaa

SEQ ID NO: 596650 - DNA, 25 bp, Homo sapien
tggccccagccgaagtctagaagcc

SEQ ID NO: 596651 - DNA, 25 bp, Homo sapien
cagcaagtgtgagctcctgatgagt

SEQ ID NO: 596652 - DNA, 25 bp, Homo sapien
ccgaagtctagaagcctgaggttgc

SEQ ID NO: 596653 - DNA, 25 bp, Homo sapien
tcagaggccacgatccatggcccca

SEQ ID NO: 596654 - DNA, 25 bp, Homo sapien
cagcatgcccctaccctcaaagcct

SEQ ID NO: 596655 - DNA, 25 bp, Homo sapien
tcagcatgcccctaccctcaaagcc

SEQ ID NO: 596656 - DNA, 25 bp, Homo sapien
gtcagcatgcccctaccctcaaagc

SEQ ID NO: 596657 - DNA, 25 bp, Homo sapien
accagcccatgtcttctccccacca

SEQ ID NO: 596658 - DNA, 25 bp, Homo sapien
agcccatgtcttctccccaccaggg

SEQ ID NO: 596659 - DNA, 25 bp, Homo sapien
gccaccagcccatgtcttctcccca

SEQ ID NO: 596660 - DNA, 25 bp, Homo sapien
ccccgccaccagcccatgtcttctc

SEQ ID NO: 596661 - DNA, 25 bp, Homo sapien
cactgctggcaagtttgataagcac

SEQ ID NO: 596662 - DNA, 25 bp, Homo sapien
agctccacaagggtgcacatctcca

SEQ ID NO: 596663 - DNA, 25 bp, Homo sapien
gaaccattgggtccacacagcagca

SEQ ID NO: 596664 - DNA, 25 bp, Homo sapien
cactgtggggtacctgtggctgtcc

SEQ ID NO: 596665 - DNA, 25 bp, Homo sapien
tcagtggggaggagtccggcagggc

SEQ ID NO: 596666 - DNA, 25 bp, Homo sapien
ctcagtggggaggagtccggcaggg

SEQ ID NO: 596667 - DNA, 25 bp, Homo sapien
cctcagtggggaggagtccggcagg

SEQ ID NO: 596668 - DNA, 25 bp, Homo sapien
ccctcagtggggaggagtccggcag

SEQ ID NO: 596669 - DNA, 25 bp, Homo sapien
ctcttcatgtccacagagacagtga

SEQ ID NO: 596670 - DNA, 25 bp, Homo sapien
cacagagacagtgagtttgcatcca

SEQ ID NO: 596671 - DNA, 25 bp, Homo sapien
catgtccacagagacagtgagtttg

SEQ ID NO: 596672 - DNA, 25 bp, Homo sapien
tccacagagacagtgagtttgcatc

SEQ ID NO: 596673 - DNA, 25 bp, Homo sapien
caggttctgccttcggtgtccacac

SEQ ID NO: 596674 - DNA, 25 bp, Homo sapien
gaggtcgctacaggatctggtgatc

SEQ ID NO: 596675 - DNA, 25 bp, Homo sapien
cctttcccgagaccagaggtcgcta

SEQ ID NO: 596676 - DNA, 25 bp, Homo sapien
aggcaaagctagctcattccccctt

SEQ ID NO: 596677 - DNA, 25 bp, Homo sapien
cagaggctactttataaggctccca

SEQ ID NO: 596678 - DNA, 25 bp, Homo sapien
aggcagatgcagaggctactttata

SEQ ID NO: 596679 - DNA, 25 bp, Homo sapien
tactttataaggctcccaatgtgca

SEQ ID NO: 596680 - DNA, 25 bp, Homo sapien
gggagcggcgagtttgcttgtggtt

SEQ ID NO: 596681 - DNA, 25 bp, Homo sapien
gccctggccgctgcccacaggatct

SEQ ID NO: 596682 - DNA, 25 bp, Homo sapien
ggccgctgcccacaggatctgtggg

SEQ ID NO: 596683 - DNA, 25 bp, Homo sapien
ctgccctggccgctgcccacaggat

SEQ ID NO: 596684 - DNA, 25 bp, Homo sapien
cctggccgctgcccacaggatctgt

SEQ ID NO: 596685 - DNA, 25 bp, Homo sapien
gccttgttgagtcggaccacggtgc

SEQ ID NO: 596686 - DNA, 25 bp, Homo sapien
ggcccagcctacttgcccaagccat

SEQ ID NO: 596687 - DNA, 25 bp, Homo sapien
tggcgtggaggcaccgaccacgggc

SEQ ID NO: 596688 - DNA, 25 bp, Homo sapien
cgtagctcaatgctgccttgttgag

SEQ ID NO: 596689 - DNA, 25 bp, Homo sapien
gggctgaagcgcctctccactccag

SEQ ID NO: 596690 - DNA, 25 bp, Homo sapien
tggtgggctgaagcgcctctccact

SEQ ID NO: 596691 - DNA, 25 bp, Homo sapien
ctggtgggctgaagcgcctctccac

SEQ ID NO: 596692 - DNA, 25 bp, Homo sapien
ggtgggctgaagcgcctctccactc

SEQ ID NO: 596693 - DNA, 25 bp, Homo sapien
cactttgccccgtggataggagcat

SEQ ID NO: 596694 - DNA, 25 bp, Homo sapien
ttcagtggagagtgctcatctggtg

SEQ ID NO: 596695 - DNA, 25 bp, Homo sapien
atctggtggactggaacactttgcc

SEQ ID NO: 596696 - DNA, 25 bp, Homo sapien
cttcagtggagagtgctcatctggt

SEQ ID NO: 596697 - DNA, 25 bp, Homo sapien
gcactccgaaaccagcaatgaattt

SEQ ID NO: 596698 - DNA, 25 bp, Homo sapien
agcaggcgcactccgaaaccagcaa

SEQ ID NO: 596699 - DNA, 25 bp, Homo sapien
gggcacatggacattcagaatccgg

SEQ ID NO: 596700 - DNA, 25 bp, Homo sapien
ttgaaagtaaaattagctgctgcca

SEQ ID NO: 596701 - DNA, 25 bp, Homo sapien
tggcgtggcccgagaataaagagca

SEQ ID NO: 596702 - DNA, 25 bp, Homo sapien
ggagctctgggtcacgcgggtgtca

SEQ ID NO: 596703 - DNA, 25 bp, Homo sapien
agcagttccacaggcagcgtcagct

SEQ ID NO: 596704 - DNA, 25 bp, Homo sapien
ccacaggggtcctgatggagctctg

SEQ ID NO: 596705 - DNA, 25 bp, Homo sapien
ttactcaagacagctttaatgtgct

SEQ ID NO: 596706 - DNA, 25 bp, Homo sapien
gacagctttaatgtgcttctgcacc

SEQ ID NO: 596707 - DNA, 25 bp, Homo sapien
cagctttaatgtgcttctgcaccag

SEQ ID NO: 596708 - DNA, 25 bp, Homo sapien
tcaagacagctttaatgtgcttctg

SEQ ID NO: 596709 - DNA, 25 bp, Homo sapien
caattaaggtgcccaggtggacatt

SEQ ID NO: 596710 - DNA, 25 bp, Homo sapien
aattaaggtgcccaggtggacattg

SEQ ID NO: 596711 - DNA, 25 bp, Homo sapien
aggtggacattgacaccctgcacca

SEQ ID NO: 596712 - DNA, 25 bp, Homo sapien
ccaggtggacattgacaccctgcac

SEQ ID NO: 596713 - DNA, 25 bp, Homo sapien
ggcatatttagcactgctcaccaac

SEQ ID NO: 596714 - DNA, 25 bp, Homo sapien
tatttagcactgctcaccaacgttt

SEQ ID NO: 596715 - DNA, 25 bp, Homo sapien
catatttagcactgctcaccaacgt

SEQ ID NO: 596716 - DNA, 25 bp, Homo sapien
ttagcactgctcaccaacgtttcat

SEQ ID NO: 596717 - DNA, 25 bp, Homo sapien
tagcggatctgggactcaggaccca

SEQ ID NO: 596718 - DNA, 25 bp, Homo sapien
cactgaccatggaatagcggatctg

SEQ ID NO: 596719 - DNA, 25 bp, Homo sapien
ggaaatgtagtcactggtgacagtg

SEQ ID NO: 596720 - DNA, 25 bp, Homo sapien
tgacagtgggcacactgaccatgga

SEQ ID NO: 596721 - DNA, 25 bp, Homo sapien
aggttgagggcaccggccttctgca

SEQ ID NO: 596722 - DNA, 25 bp, Homo sapien
cacatgccttggcaacacaaaaggg

SEQ ID NO: 596723 - DNA, 25 bp, Homo sapien
gcaggagcgcagagtcaaacagctg

SEQ ID NO: 596724 - DNA, 25 bp, Homo sapien
ctgccctgtgatgtccaggttgagg

SEQ ID NO: 596725 - DNA, 25 bp, Homo sapien
tgttcagcaggttgtcatccgacct

SEQ ID NO: 596726 - DNA, 25 bp, Homo sapien
cagaggtgttcagcaggttgtcatc

SEQ ID NO: 596727 - DNA, 25 bp, Homo sapien
ctccgggatgagccggcccagagca

SEQ ID NO: 596728 - DNA, 25 bp, Homo sapien
ggtgttcagcaggttgtcatccgac

SEQ ID NO: 596729 - DNA, 25 bp, Homo sapien
cagccgcagggtggcgttgtttgtg

SEQ ID NO: 596730 - DNA, 25 bp, Homo sapien
gtggccaggacctccacgaagggct

SEQ ID NO: 596731 - DNA, 25 bp, Homo sapien
actggaaagccgagttggaggctgt

SEQ ID NO: 596732 - DNA, 25 bp, Homo sapien
cagggtggcgttgtttgtgtggagc

SEQ ID NO: 596733 - DNA, 25 bp, Homo sapien
acagacgtggtcccctgaagcttca

SEQ ID NO: 596734 - DNA, 25 bp, Homo sapien
atcaatgaagcccacgttggaggag

SEQ ID NO: 596735 - DNA, 25 bp, Homo sapien
caatgaagcccacgttggaggaggc

SEQ ID NO: 596736 - DNA, 25 bp, Homo sapien
cccacgttggaggaggccaccgtga

SEQ ID NO: 596737 - DNA, 25 bp, Homo sapien
tgaagcccacgttggaggaggccac

SEQ ID NO: 596738 - DNA, 25 bp, Homo sapien
tggatgtatggtggccgatgaccca

SEQ ID NO: 596739 - DNA, 25 bp, Homo sapien
gctgacattctttgtccaactgacc

SEQ ID NO: 596740 - DNA, 25 bp, Homo sapien
gatgacccaatcacatcacctggct

SEQ ID NO: 596741 - DNA, 25 bp, Homo sapien
atggcatgccggctgacaagtggat

SEQ ID NO: 596742 - DNA, 25 bp, Homo sapien
tgcctgacgcagatgaccgacagac

SEQ ID NO: 596743 - DNA, 25 bp, Homo sapien
gcaggggcttctcaaaaacggtgcc

SEQ ID NO: 596744 - DNA, 25 bp, Homo sapien
tctcaaaaacggtgcccatcagtgt

SEQ ID NO: 596745 - DNA, 25 bp, Homo sapien
gcccatcagtgtgcgcacctgatct

SEQ ID NO: 596746 - DNA, 25 bp, Homo sapien
aaaaacggtgcccatcagtgtgcgc

SEQ ID NO: 596747 - DNA, 25 bp, Homo sapien
caaagatctcaggggcgacatagtg

SEQ ID NO: 596748 - DNA, 25 bp, Homo sapien
gagggcaattcccatggccaagaga

SEQ ID NO: 596749 - DNA, 25 bp, Homo sapien
catagtggaggttgaccacaccagg

SEQ ID NO: 596750 - DNA, 25 bp, Homo sapien
cagggagggcaattcccatggccaa

SEQ ID NO: 596751 - DNA, 25 bp, Homo sapien
ctctggtcacacccaaaggctctca

SEQ ID NO: 596752 - DNA, 25 bp, Homo sapien
tctggtcacacccaaaggctctcac

SEQ ID NO: 596753 - DNA, 25 bp, Homo sapien
gctctggtagaagagtccactggat

SEQ ID NO: 596754 - DNA, 25 bp, Homo sapien
gtagaagagtccactggatatcacc

SEQ ID NO: 596755 - DNA, 25 bp, Homo sapien
ctggtagaagagtccactggatatc

SEQ ID NO: 596756 - DNA, 25 bp, Homo sapien
tcagctctggtagaagagtccactg

SEQ ID NO: 596757 - DNA, 25 bp, Homo sapien
cagcccagctaagcagtccagcttg

SEQ ID NO: 596758 - DNA, 25 bp, Homo sapien
gaaattcgcctgagcagcgagctgg

SEQ ID NO: 596759 - DNA, 25 bp, Homo sapien
tccccagtggcttgaaatgagaaat

SEQ ID NO: 596760 - DNA, 25 bp, Homo sapien
gaaagttgcagctcaagagaagttg

SEQ ID NO: 596761 - DNA, 25 bp, Homo sapien
tttgagctttggctgaaaagaatga

SEQ ID NO: 596762 - DNA, 25 bp, Homo sapien
cagttttgagctttggctgaaaaga

SEQ ID NO: 596763 - DNA, 25 bp, Homo sapien
tgaaactcttccaaccaagggccaa

SEQ ID NO: 596764 - DNA, 25 bp, Homo sapien
tgtatatttcagttttgagctttgg

SEQ ID NO: 596765 - DNA, 25 bp, Homo sapien
ctcgcgtgccagtcagcaggctgca

SEQ ID NO: 596766 - DNA, 25 bp, Homo sapien
gtgccccagggtcagctcgcgtgcc

SEQ ID NO: 596767 - DNA, 25 bp, Homo sapien
ccagggtcagctcgcgtgccagtca

SEQ ID NO: 596768 - DNA, 25 bp, Homo sapien
gtcagctcgcgtgccagtcagcagg

SEQ ID NO: 596769 - DNA, 25 bp, Homo sapien
agctgcacgcccgggcccacaagct

SEQ ID NO: 596770 - DNA, 25 bp, Homo sapien
gctgcacgcccgggcccacaagctc

SEQ ID NO: 596771 - DNA, 25 bp, Homo sapien
tcccagctgcacgcccgggcccaca

SEQ ID NO: 596772 - DNA, 25 bp, Homo sapien
ccagctgcacgcccgggcccacaag

SEQ ID NO: 596773 - DNA, 25 bp, Homo sapien
ggctggacgatggcagagacccaga

SEQ ID NO: 596774 - DNA, 25 bp, Homo sapien
tgggctggacgatggcagagaccca

SEQ ID NO: 596775 - DNA, 25 bp, Homo sapien
cccagagatgagtcccacagcgccc

SEQ ID NO: 596776 - DNA, 25 bp, Homo sapien
gggctggacgatggcagagacccag

SEQ ID NO: 596777 - DNA, 25 bp, Homo sapien
ttgataggtttcatccctggctgtt

SEQ ID NO: 596778 - DNA, 25 bp, Homo sapien
tccaggatatgactctcatccatgg

SEQ ID NO: 596779 - DNA, 25 bp, Homo sapien
cctgcctcggctgccatcttctcca

SEQ ID NO: 596780 - DNA, 25 bp, Homo sapien
atgcccttgataggtttcatccctg

SEQ ID NO: 596781 - DNA, 25 bp, Homo sapien
ttgccagtgacggtcatgcctgtgg

SEQ ID NO: 596782 - DNA, 25 bp, Homo sapien
gacacacattggaagatgcccactc

SEQ ID NO: 596783 - DNA, 25 bp, Homo sapien
caaagttcagtgtgatgacgggcag

SEQ ID NO: 596784 - DNA, 25 bp, Homo sapien
cccactccaggtacaaagttcagtg

SEQ ID NO: 596785 - DNA, 25 bp, Homo sapien
tcagggccacgatgatctccatgtt

SEQ ID NO: 596786 - DNA, 25 bp, Homo sapien
tcacattgaccaggatgacctcaca

SEQ ID NO: 596787 - DNA, 25 bp, Homo sapien
catcccgcagaagccggttggtggc

SEQ ID NO: 596788 - DNA, 25 bp, Homo sapien
gctaggcaggttagtcttcacattg

SEQ ID NO: 596789 - DNA, 25 bp, Homo sapien
cttgttgaccatcttggggagcatg

SEQ ID NO: 596790 - DNA, 25 bp, Homo sapien
ctttgtgcagggtgctgtccaggaa

SEQ ID NO: 596791 - DNA, 25 bp, Homo sapien
cagcccagggaggactttgtgcagg

SEQ ID NO: 596792 - DNA, 25 bp, Homo sapien
ggactttgtgcagggtgctgtccag

SEQ ID NO: 596793 - DNA, 25 bp, Homo sapien
agggaggactttgtgcagggtgctg

SEQ ID NO: 596794 - DNA, 25 bp, Homo sapien
cctgttcacatacaccaggactgca

SEQ ID NO: 596795 - DNA, 25 bp, Homo sapien
ttcctgttcacatacaccaggactg

SEQ ID NO: 596796 - DNA, 25 bp, Homo sapien
acaccaggactgcatcgatggcggg

SEQ ID NO: 596797 - DNA, 25 bp, Homo sapien
ggactgcatcgatggcgggacacat

SEQ ID NO: 596798 - DNA, 25 bp, Homo sapien
tgaagtccagttggatgtagctggc

SEQ ID NO: 596799 - DNA, 25 bp, Homo sapien
catatttgacggtgcccatctggcc

SEQ ID NO: 596800 - DNA, 25 bp, Homo sapien
gctggtgcggacatcagaacatatt

SEQ ID NO: 596801 - DNA, 25 bp, Homo sapien
catcagaacatatttgacggtgccc

SEQ ID NO: 596802 - DNA, 25 bp, Homo sapien
ctccccggcatcagcaagcttgatg

SEQ ID NO: 596803 - DNA, 25 bp, Homo sapien
cagcaagcttgatggttttgccctt

SEQ ID NO: 596804 - DNA, 25 bp, Homo sapien
cccggcatcagcaagcttgatggtt

SEQ ID NO: 596805 - DNA, 25 bp, Homo sapien
gcatcagcaagcttgatggttttgc

SEQ ID NO: 596806 - DNA, 25 bp, Homo sapien
cagctgcgacgagcctttggcataa

SEQ ID NO: 596807 - DNA, 25 bp, Homo sapien
ggagcagcagctgcgacgagccttt

SEQ ID NO: 596808 - DNA, 25 bp, Homo sapien
gctgcgacgagcctttggcataacc

SEQ ID NO: 596809 - DNA, 25 bp, Homo sapien
cagcagctgcgacgagcctttggca

SEQ ID NO: 596810 - DNA, 25 bp, Homo sapien
caggaatgaagcgagccagggtctt

SEQ ID NO: 596811 - DNA, 25 bp, Homo sapien
ggtcttggtggtttgtgggggcagc

SEQ ID NO: 596812 - DNA, 25 bp, Homo sapien
ttcaggaatgaagcgagccagggtc

SEQ ID NO: 596813 - DNA, 25 bp, Homo sapien
tggtttgtgggggcagctcaccaat

SEQ ID NO: 596814 - DNA, 25 bp, Homo sapien
ttcatagtgaccttgggaggcttct

SEQ ID NO: 596815 - DNA, 25 bp, Homo sapien
ccgagctgcgaacatctccagggtg

SEQ ID NO: 596816 - DNA, 25 bp, Homo sapien
gggctttgacttgggataagctaca

SEQ ID NO: 596817 - DNA, 25 bp, Homo sapien
tgatctgggtcgtcaagggctttga

SEQ ID NO: 596818 - DNA, 25 bp, Homo sapien
gctggttctcatgcactgagtactg

SEQ ID NO: 596819 - DNA, 25 bp, Homo sapien
tgagtactggaccttcagattgaag

SEQ ID NO: 596820 - DNA, 25 bp, Homo sapien
gttctcatgcactgagtactggacc

SEQ ID NO: 596821 - DNA, 25 bp, Homo sapien
tgcactgagtactggaccttcagat

SEQ ID NO: 596822 - DNA, 25 bp, Homo sapien
agttgccaatcgatgaggacttccg

SEQ ID NO: 596823 - DNA, 25 bp, Homo sapien
cgatgaggacttccgggacaagctc

SEQ ID NO: 596824 - DNA, 25 bp, Homo sapien
attgaagttgccaatcgatgaggac

SEQ ID NO: 596825 - DNA, 25 bp, Homo sapien
caatcgatgaggacttccgggacaa

SEQ ID NO: 596826 - DNA, 25 bp, Homo sapien
caactgggatgtaggcttcttcgag

SEQ ID NO: 596827 - DNA, 25 bp, Homo sapien
cttcgagatagctggtgatgaagcc

SEQ ID NO: 596828 - DNA, 25 bp, Homo sapien
gatgtaggcttcttcgagatagctg

SEQ ID NO: 596829 - DNA, 25 bp, Homo sapien
tgatgaagccagttaattccctctc

SEQ ID NO: 596830 - DNA, 25 bp, Homo sapien
ctactatgtccagctcagccaggtt

SEQ ID NO: 596831 - DNA, 25 bp, Homo sapien
tggccagaaagtccgggagtgggag

SEQ ID NO: 596832 - DNA, 25 bp, Homo sapien
ctctactatgtccagctcagccagg

SEQ ID NO: 596833 - DNA, 25 bp, Homo sapien
ttcatggccagaaagtccgggagtg

SEQ ID NO: 596834 - DNA, 25 bp, Homo sapien
tcagcccagcttcaagtccagcatc

SEQ ID NO: 596835 - DNA, 25 bp, Homo sapien
gcttcaagtccagcatcagggcatt

SEQ ID NO: 596836 - DNA, 25 bp, Homo sapien
ccagcttcaagtccagcatcagggc

SEQ ID NO: 596837 - DNA, 25 bp, Homo sapien
agcccagcttcaagtccagcatcag

SEQ ID NO: 596838 - DNA, 25 bp, Homo sapien
tgcaggtggttggtggtaagcaggc

SEQ ID NO: 596839 - DNA, 25 bp, Homo sapien
cagggggtctcctccatggggtgca

SEQ ID NO: 596840 - DNA, 25 bp, Homo sapien
aggtggttggtggtaagcaggcagc

SEQ ID NO: 596841 - DNA, 25 bp, Homo sapien
tcagggggtctcctccatggggtgc

SEQ ID NO: 596842 - DNA, 25 bp, Homo sapien
ccattcactccttgtcaaaggaggc

SEQ ID NO: 596843 - DNA, 25 bp, Homo sapien
cccattcactccttgtcaaaggagg

SEQ ID NO: 596844 - DNA, 25 bp, Homo sapien
cagcccaggcctgacccattcactc

SEQ ID NO: 596845 - DNA, 25 bp, Homo sapien
cccaggcctgacccattcactcctt

SEQ ID NO: 596846 - DNA, 25 bp, Homo sapien
gagctgatcctcacatgaatgaaag

SEQ ID NO: 596847 - DNA, 25 bp, Homo sapien
tgaaagacatagaaacacccttggc

SEQ ID NO: 596848 - DNA, 25 bp, Homo sapien
cagatacggcaaatgtcagggagct

SEQ ID NO: 596849 - DNA, 25 bp, Homo sapien
tatacactgatacgtgcgctggttc

SEQ ID NO: 596850 - DNA, 25 bp, Homo sapien
taagaaggcgttggaggtggcgcag

SEQ ID NO: 596851 - DNA, 25 bp, Homo sapien
gtggcgcaggtggtcgtggatgtcc

SEQ ID NO: 596852 - DNA, 25 bp, Homo sapien
ggtggtcgtggatgtcctgcagctc

SEQ ID NO: 596853 - DNA, 25 bp, Homo sapien
gatgtgaagtccctggtcatgggta

SEQ ID NO: 596854 - DNA, 25 bp, Homo sapien
acggccgccagaatcccgtcaatat

SEQ ID NO: 596855 - DNA, 25 bp, Homo sapien
tatgtcatgtcagaagcaaattgcg

SEQ ID NO: 596856 - DNA, 25 bp, Homo sapien
agaatcccgtcaatatgtcatgtca

SEQ ID NO: 596857 - DNA, 25 bp, Homo sapien
tgtcatgtcagaagcaaattgcggt

SEQ ID NO: 596858 - DNA, 25 bp, Homo sapien
gaggaactctgagacccttctcctg

SEQ ID NO: 596859 - DNA, 25 bp, Homo sapien
gagcagaaggaggaactctgagacc

SEQ ID NO: 596860 - DNA, 25 bp, Homo sapien
gaaggaggaactctgagacccttct

SEQ ID NO: 596861 - DNA, 25 bp, Homo sapien
gcagaaggaggaactctgagaccct

SEQ ID NO: 596862 - DNA, 25 bp, Homo sapien
ttgtcaatccgagcgagcgtgccca

SEQ ID NO: 596863 - DNA, 25 bp, Homo sapien
ctggcatggagtcgccaggccccag

SEQ ID NO: 596864 - DNA, 25 bp, Homo sapien
gctcctggcatggagtcgccaggcc

SEQ ID NO: 596865 - DNA, 25 bp, Homo sapien
ctttgccgagttcatccttgtcaat

SEQ ID NO: 596866 - DNA, 25 bp, Homo sapien
ggttcacagctgtgaccgatcccag

SEQ ID NO: 596867 - DNA, 25 bp, Homo sapien
tgtgaccgatcccagcacattctgc

SEQ ID NO: 596868 - DNA, 25 bp, Homo sapien
agagctcctcgacaacgccaaaaac

SEQ ID NO: 596869 - DNA, 25 bp, Homo sapien
gggctccccaaccagtgagttctgg

SEQ ID NO: 596870 - DNA, 25 bp, Homo sapien
cttcagcaacacctttggcagcgtg

SEQ ID NO: 596871 - DNA, 25 bp, Homo sapien
ggcagcgtgagctcctcaatcttca

SEQ ID NO: 596872 - DNA, 25 bp, Homo sapien
caacacctttggcagcgtgagctcc

SEQ ID NO: 596873 - DNA, 25 bp, Homo sapien
cagagcaatgcatgcccactttggt

SEQ ID NO: 596874 - DNA, 25 bp, Homo sapien
gcgatgtcacgttcacctccgcagc

SEQ ID NO: 596875 - DNA, 25 bp, Homo sapien
tgctgcagcgcttgaggataaggat

SEQ ID NO: 596876 - DNA, 25 bp, Homo sapien
gccagctgcagaaggccaccaaggg

SEQ ID NO: 596877 - DNA, 25 bp, Homo sapien
atgggtgtgccccttgagctcacgg

SEQ ID NO: 596878 - DNA, 25 bp, Homo sapien
gcaccttgaagagcatctgttccac

SEQ ID NO: 596879 - DNA, 25 bp, Homo sapien
tctgttccacgaccccaaagagtgg

SEQ ID NO: 596880 - DNA, 25 bp, Homo sapien
ccacgaccccaaagagtggtgtggg

SEQ ID NO: 596881 - DNA, 25 bp, Homo sapien
agcatctgttccacgaccccaaaga

SEQ ID NO: 596882 - DNA, 25 bp, Homo sapien
tgctttgctatctgctgctatgtgg

SEQ ID NO: 596883 - DNA, 25 bp, Homo sapien
taaatgctttgctatctgctgctat

SEQ ID NO: 596884 - DNA, 25 bp, Homo sapien
ctttgctatctgctgctatgtggtg

SEQ ID NO: 596885 - DNA, 25 bp, Homo sapien
aaatgctttgctatctgctgctatg

SEQ ID NO: 596886 - DNA, 25 bp, Homo sapien
ccagcacactgtccaccacggggca

SEQ ID NO: 596887 - DNA, 25 bp, Homo sapien
agcacactgtccaccacggggcaca

SEQ ID NO: 596888 - DNA, 25 bp, Homo sapien
acagcccccaggagctcattcacca

SEQ ID NO: 596889 - DNA, 25 bp, Homo sapien
cccaggagctcattcaccacaccca

SEQ ID NO: 596890 - DNA, 25 bp, Homo sapien
gttgatgtccagttctatgtactgg

SEQ ID NO: 596891 - DNA, 25 bp, Homo sapien
agagagaattccacggacccaagag

SEQ ID NO: 596892 - DNA, 25 bp, Homo sapien
catcacctgggatgtgtggtccttc

SEQ ID NO: 596893 - DNA, 25 bp, Homo sapien
tgatgtccatgtcgagggcgccgtt

SEQ ID NO: 596894 - DNA, 25 bp, Homo sapien
gcgccgttggtctgcaggagtccaa

SEQ ID NO: 596895 - DNA, 25 bp, Homo sapien
aggagtccaaacgtggtgttgaaga

SEQ ID NO: 596896 - DNA, 25 bp, Homo sapien
tgtagttgtcagtgggacatcgctg

SEQ ID NO: 596897 - DNA, 25 bp, Homo sapien
ttgtcagtgggacatcgctgggaac

SEQ ID NO: 596898 - DNA, 25 bp, Homo sapien
agttgtcagtgggacatcgctggga

SEQ ID NO: 596899 - DNA, 25 bp, Homo sapien
ctgtagttgtcagtgggacatcgct

SEQ ID NO: 596900 - DNA, 25 bp, Homo sapien
tccccttagggacatagaacagcac

SEQ ID NO: 596901 - DNA, 25 bp, Homo sapien
agttcagctcaaagagggattcagg

SEQ ID NO: 596902 - DNA, 25 bp, Homo sapien
gagtgtgaccgtgggagcttccctc

SEQ ID NO: 596903 - DNA, 25 bp, Homo sapien
gaccaaggccttcttgttgtggagt

SEQ ID NO: 596904 - DNA, 25 bp, Homo sapien
tgcagcttggtagccgagggagcca

SEQ ID NO: 596905 - DNA, 25 bp, Homo sapien
gggagatgtgcagcttggtagccga

SEQ ID NO: 596906 - DNA, 25 bp, Homo sapien
gatgtgcagcttggtagccgaggga

SEQ ID NO: 596907 - DNA, 25 bp, Homo sapien
agcttggtagccgagggagccagct

SEQ ID NO: 596908 - DNA, 25 bp, Homo sapien
gtcaaaggcatgggtaaaggaggag

SEQ ID NO: 596909 - DNA, 25 bp, Homo sapien
aggaggaggccaccttgacactgag

SEQ ID NO: 596910 - DNA, 25 bp, Homo sapien
aaggcatgggtaaaggaggaggcca

SEQ ID NO: 596911 - DNA, 25 bp, Homo sapien
ggaggaggccaccttgacactgagc

SEQ ID NO: 596912 - DNA, 25 bp, Homo sapien
ctgaagactctcatcactgccaagc

SEQ ID NO: 596913 - DNA, 25 bp, Homo sapien
actctcatcactgccaagcccctca

SEQ ID NO: 596914 - DNA, 25 bp, Homo sapien
aagactctcatcactgccaagcccc

SEQ ID NO: 596915 - DNA, 25 bp, Homo sapien
tgaagactctcatcactgccaagcc

SEQ ID NO: 596916 - DNA, 25 bp, Homo sapien
cgttaagctttggtgcatacactgc

SEQ ID NO: 596917 - DNA, 25 bp, Homo sapien
tgagccattcttctaaacgcgatcc

SEQ ID NO: 596918 - DNA, 25 bp, Homo sapien
tttggtgcatacactgccccgacca

SEQ ID NO: 596919 - DNA, 25 bp, Homo sapien
catggctgagccattcttctaaacg

SEQ ID NO: 596920 - DNA, 25 bp, Homo sapien
tctacgatctccagaactgaattgg

SEQ ID NO: 596921 - DNA, 25 bp, Homo sapien
gatattaagaaccttaggcagggga

SEQ ID NO: 596922 - DNA, 25 bp, Homo sapien
attgatattaagaaccttaggcagg

SEQ ID NO: 596923 - DNA, 25 bp, Homo sapien
ctctacgatctccagaactgaattg

SEQ ID NO: 596924 - DNA, 25 bp, Homo sapien
ctgggccgtatctgcagagaaggct

SEQ ID NO: 596925 - DNA, 25 bp, Homo sapien
aggatgccacggtcagcacaacagc

SEQ ID NO: 596926 - DNA, 25 bp, Homo sapien
atgccacggtcagcacaacagcatt

SEQ ID NO: 596927 - DNA, 25 bp, Homo sapien
gatgccacggtcagcacaacagcat

SEQ ID NO: 596928 - DNA, 25 bp, Homo sapien
tcaggatgccacggtcagcacaaca

SEQ ID NO: 596929 - DNA, 25 bp, Homo sapien
gccagagggcatttttactgtcacc

SEQ ID NO: 596930 - DNA, 25 bp, Homo sapien
aaacttggagtagtgcttcagggcc

SEQ ID NO: 596931 - DNA, 25 bp, Homo sapien
ctctctctgaggcagttctatgatt

SEQ ID NO: 596932 - DNA, 25 bp, Homo sapien
aggcagagtagacaggtggtctcta

SEQ ID NO: 596933 - DNA, 25 bp, Homo sapien
ggcatttacgtccttatcatcctgg

SEQ ID NO: 596934 - DNA, 25 bp, Homo sapien
gagtggcatttacgtccttatcatc

SEQ ID NO: 596935 - DNA, 25 bp, Homo sapien
tcagcgagtggcatttacgtcctta

SEQ ID NO: 596936 - DNA, 25 bp, Homo sapien
ttatcatcctgggtcccacacggca

SEQ ID NO: 596937 - DNA, 25 bp, Homo sapien
aggtccctgccgctgagtcttgaga

SEQ ID NO: 596938 - DNA, 25 bp, Homo sapien
tccctgccgctgagtcttgagaagt

SEQ ID NO: 596939 - DNA, 25 bp, Homo sapien
cctaggaggtccctgccgctgagtc

SEQ ID NO: 596940 - DNA, 25 bp, Homo sapien
tgccgctgagtcttgagaagtcctg

SEQ ID NO: 596941 - DNA, 25 bp, Homo sapien
gaacttctgctcccaaatcacaaac

SEQ ID NO: 596942 - DNA, 25 bp, Homo sapien
cccaaatcacaaacaagttgtatct

SEQ ID NO: 596943 - DNA, 25 bp, Homo sapien
tattgttattactttgggactgtta

SEQ ID NO: 596944 - DNA, 25 bp, Homo sapien
aagttgtatctcatacatagtagac

SEQ ID NO: 596945 - DNA, 25 bp, Homo sapien
cattgctcaacacatctttcgtcac

SEQ ID NO: 596946 - DNA, 25 bp, Homo sapien
ccctgaggaccgtgtttgtctcgtg

SEQ ID NO: 596947 - DNA, 25 bp, Homo sapien
acatctttcgtcaccctgaggaccg

SEQ ID NO: 596948 - DNA, 25 bp, Homo sapien
cgtgtttgtctcgtggctggtgcca

SEQ ID NO: 596949 - DNA, 25 bp, Homo sapien
gagtggagagcatcactttgctgca

SEQ ID NO: 596950 - DNA, 25 bp, Homo sapien
agggccgagtggagagcatcacttt

SEQ ID NO: 596951 - DNA, 25 bp, Homo sapien
tggagagcatcactttgctgcagca

SEQ ID NO: 596952 - DNA, 25 bp, Homo sapien
ggccgagtggagagcatcactttgc

SEQ ID NO: 596953 - DNA, 25 bp, Homo sapien
tcattgtagggaatatcaccaacac

SEQ ID NO: 596954 - DNA, 25 bp, Homo sapien
cggacatggaagtcattgtagggaa

SEQ ID NO: 596955 - DNA, 25 bp, Homo sapien
gggtcctcggacatggaagtcattg

SEQ ID NO: 596956 - DNA, 25 bp, Homo sapien
gaagtcattgtagggaatatcacca

SEQ ID NO: 596957 - DNA, 25 bp, Homo sapien
ctcaatgtgaccatactggtaaata

SEQ ID NO: 596958 - DNA, 25 bp, Homo sapien
aatgtgaccatactggtaaatacca

SEQ ID NO: 596959 - DNA, 25 bp, Homo sapien
ataccatcaagttttttgccgttgg

SEQ ID NO: 596960 - DNA, 25 bp, Homo sapien
ctggtaaataccatcaagttttttg

SEQ ID NO: 596961 - DNA, 25 bp, Homo sapien
tgatgcttccctcggactcaaggat

SEQ ID NO: 596962 - DNA, 25 bp, Homo sapien
catatgcattctcggcactgcgata

SEQ ID NO: 596963 - DNA, 25 bp, Homo sapien
tgtttcggaggtccctgatgcttcc

SEQ ID NO: 596964 - DNA, 25 bp, Homo sapien
cactgcgatagccactgtttcggag

SEQ ID NO: 596965 - DNA, 25 bp, Homo sapien
accttggcctgcgaggatgccatca

SEQ ID NO: 596966 - DNA, 25 bp, Homo sapien
ccttggcctgcgaggatgccatcag

SEQ ID NO: 596967 - DNA, 25 bp, Homo sapien
ttggcctgcgaggatgccatcagct

SEQ ID NO: 596968 - DNA, 25 bp, Homo sapien
caccttggcctgcgaggatgccatc

SEQ ID NO: 596969 - DNA, 25 bp, Homo sapien
agtcctccatcaccaaggagaccac

SEQ ID NO: 596970 - DNA, 25 bp, Homo sapien
ctcgccgagcacgcccaggacaccc

SEQ ID NO: 596971 - DNA, 25 bp, Homo sapien
tccaagaagtcctccatcaccaagg

SEQ ID NO: 596972 - DNA, 25 bp, Homo sapien
tcgccgagcacgcccaggacacccc

SEQ ID NO: 596973 - DNA, 25 bp, Homo sapien
cttgcacagtgctgaggatgccacc

SEQ ID NO: 596974 - DNA, 25 bp, Homo sapien
ccttgcacagtgctgaggatgccac

SEQ ID NO: 596975 - DNA, 25 bp, Homo sapien
cccgtgatgccttgcacagtgctga

SEQ ID NO: 596976 - DNA, 25 bp, Homo sapien
gtgatgccttgcacagtgctgagga

SEQ ID NO: 596977 - DNA, 25 bp, Homo sapien
gtacaagctcaggtagacacccacg

SEQ ID NO: 596978 - DNA, 25 bp, Homo sapien
ggagggtcagctccacgatacgcag

SEQ ID NO: 596979 - DNA, 25 bp, Homo sapien
acgggtgtacaagctcaggtagaca

SEQ ID NO: 596980 - DNA, 25 bp, Homo sapien
tcttcccgttgatggccacacgggt

SEQ ID NO: 596981 - DNA, 25 bp, Homo sapien
catcgctcaatgaccagccgaggat

SEQ ID NO: 596982 - DNA, 25 bp, Homo sapien
ttcacttctactgcgatgtccagga

SEQ ID NO: 596983 - DNA, 25 bp, Homo sapien
ccggaccttggctgtgatgttcact

SEQ ID NO: 596984 - DNA, 25 bp, Homo sapien
cctaggagggtgtcacatcgctcaa

SEQ ID NO: 596985 - DNA, 25 bp, Homo sapien
accccacagcatcatcgtcctgccc

SEQ ID NO: 596986 - DNA, 25 bp, Homo sapien
cagcatcatcgtcctgcccacccca

SEQ ID NO: 596987 - DNA, 25 bp, Homo sapien
agcatcatcgtcctgcccaccccag

SEQ ID NO: 596988 - DNA, 25 bp, Homo sapien
ccacagcatcatcgtcctgcccacc

SEQ ID NO: 596989 - DNA, 25 bp, Homo sapien
aagtcagggaggacgtcggccagga

SEQ ID NO: 596990 - DNA, 25 bp, Homo sapien
cagggaggacgtcggccaggactcg

SEQ ID NO: 596991 - DNA, 25 bp, Homo sapien
tcactaaattgtccacgagattggg

SEQ ID NO: 596992 - DNA, 25 bp, Homo sapien
ccaggactcggttcactaaattgtc

SEQ ID NO: 596993 - DNA, 25 bp, Homo sapien
cagctggtcattgacaagacccagc

SEQ ID NO: 596994 - DNA, 25 bp, Homo sapien
ccagctggtcattgacaagacccag

SEQ ID NO: 596995 - DNA, 25 bp, Homo sapien
gctggagaaggtgtactggacactt

SEQ ID NO: 596996 - DNA, 25 bp, Homo sapien
gtccagctccaggaattccccggtc

SEQ ID NO: 596997 - DNA, 25 bp, Homo sapien
gagaaggtgtactggacacttccca

SEQ ID NO: 596998 - DNA, 25 bp, Homo sapien
ttccccggtcacaagcgggaggctg

SEQ ID NO: 596999 - DNA, 25 bp, Homo sapien
agttggcagacatggccagctggga

SEQ ID NO: 597000 - DNA, 25 bp, Homo sapien
ttggtgatatccaggtctagagcat

SEQ ID NO: 597001 - DNA, 25 bp, Homo sapien
tgcttctgcagtagagtcagcactg

SEQ ID NO: 597002 - DNA, 25 bp, Homo sapien
agctggccaccccaatgggtagtcg

SEQ ID NO: 597003 - DNA, 25 bp, Homo sapien
tcagggctcccagtgtggctgtggt

SEQ ID NO: 597004 - DNA, 25 bp, Homo sapien
cagtgtggctgtggtaagtggagga

SEQ ID NO: 597005 - DNA, 25 bp, Homo sapien
ctgtggtaagtggaggaagctcttc

SEQ ID NO: 597006 - DNA, 25 bp, Homo sapien
tggggatcagggctcccagtgtggc

SEQ ID NO: 597007 - DNA, 25 bp, Homo sapien
cctgatgataagtgggcaggactcg

SEQ ID NO: 597008 - DNA, 25 bp, Homo sapien
atgaggcagatggtagtctccaggt

SEQ ID NO: 597009 - DNA, 25 bp, Homo sapien
ctgggagaccatgacctcggcagtg

SEQ ID NO: 597010 - DNA, 25 bp, Homo sapien
aggactcggggtactgctggaacac

SEQ ID NO: 597011 - DNA, 25 bp, Homo sapien
agcttatctccttctgtggaaaatg

SEQ ID NO: 597012 - DNA, 25 bp, Homo sapien
ttatctccttctgtggaaaatgagg

SEQ ID NO: 597013 - DNA, 25 bp, Homo sapien
tatctccttctgtggaaaatgaggc

SEQ ID NO: 597014 - DNA, 25 bp, Homo sapien
aaaatgaggccaagaattctgtgtc

SEQ ID NO: 597015 - DNA, 25 bp, Homo sapien
gttgcccacgtttgaggttctgagg

SEQ ID NO: 597016 - DNA, 25 bp, Homo sapien
gcccacgtttgaggttctgaggttg

SEQ ID NO: 597017 - DNA, 25 bp, Homo sapien
tgcccacgtttgaggttctgaggtt

SEQ ID NO: 597018 - DNA, 25 bp, Homo sapien
atcaaagttgcccacgtttgaggtt

SEQ ID NO: 597019 - DNA, 25 bp, Homo sapien
ccggaagacacgtcctgggctcctt

SEQ ID NO: 597020 - DNA, 25 bp, Homo sapien
tgccctgggaactaaacatggtact

SEQ ID NO: 597021 - DNA, 25 bp, Homo sapien
accattcccggaagacacgtcctgg

SEQ ID NO: 597022 - DNA, 25 bp, Homo sapien
atcttgccctgggaactaaacatgg

SEQ ID NO: 597023 - DNA, 25 bp, Homo sapien
cagagggccccttgggtctgctccc

SEQ ID NO: 597024 - DNA, 25 bp, Homo sapien
cagggggtttgctcagctccagagg

SEQ ID NO: 597025 - DNA, 25 bp, Homo sapien
gcagggggtttgctcagctccagag

SEQ ID NO: 597026 - DNA, 25 bp, Homo sapien
cattgcgggcatgaatgccaggtca

SEQ ID NO: 597027 - DNA, 25 bp, Homo sapien
gcgggcatgaatgccaggtcaaaaa

SEQ ID NO: 597028 - DNA, 25 bp, Homo sapien
tgccaggtcaaaaatcttctccacc

SEQ ID NO: 597029 - DNA, 25 bp, Homo sapien
gttcattgcgggcatgaatgccagg

SEQ ID NO: 597030 - DNA, 25 bp, Homo sapien
taaagtcgatgttgaggattttggg

SEQ ID NO: 597031 - DNA, 25 bp, Homo sapien
gagagggacgccagaacccagcaca

SEQ ID NO: 597032 - DNA, 25 bp, Homo sapien
aatgtctgcattgctaaagtcgatg

SEQ ID NO: 597033 - DNA, 25 bp, Homo sapien
ctccaacacgtcaatgtctgcattg

SEQ ID NO: 597034 - DNA, 25 bp, Homo sapien
ggtagtggctggaccctttctcagg

SEQ ID NO: 597035 - DNA, 25 bp, Homo sapien
tgggaatactcaacctgctgtcagg

SEQ ID NO: 597036 - DNA, 25 bp, Homo sapien
gaccatggaagggaatgtttgccaa

SEQ ID NO: 597037 - DNA, 25 bp, Homo sapien
tcatggaaactcgtcacaagtgccg

SEQ ID NO: 597038 - DNA, 25 bp, Homo sapien
ggcatcaatgcattcatgatctggt

SEQ ID NO: 597039 - DNA, 25 bp, Homo sapien
tccaggcatcaatgcattcatgatc

SEQ ID NO: 597040 - DNA, 25 bp, Homo sapien
tcaatgcattcatgatctggtacca

SEQ ID NO: 597041 - DNA, 25 bp, Homo sapien
catcaatgcattcatgatctggtac

SEQ ID NO: 597042 - DNA, 25 bp, Homo sapien
agggacaaggagagcaacttgcaac

SEQ ID NO: 597043 - DNA, 25 bp, Homo sapien
cttggtgctggccttagcacctgct

SEQ ID NO: 597044 - DNA, 25 bp, Homo sapien
ttggccagtcgtgggactgactctt

SEQ ID NO: 597045 - DNA, 25 bp, Homo sapien
ctgccattggccagtcgtgggactg

SEQ ID NO: 597046 - DNA, 25 bp, Homo sapien
ggccctcggaacatcccaggccaga

SEQ ID NO: 597047 - DNA, 25 bp, Homo sapien
gtttcctcagagctatcattgtcca

SEQ ID NO: 597048 - DNA, 25 bp, Homo sapien
gaagatactgtacaaatcctgcagg

SEQ ID NO: 597049 - DNA, 25 bp, Homo sapien
aattggcaatgttcccaagggatcc

SEQ ID NO: 597050 - DNA, 25 bp, Homo sapien
ggtgctggctgacagaagtgtcacc

SEQ ID NO: 597051 - DNA, 25 bp, Homo sapien
catgaactcgtttctggaagtgagg

SEQ ID NO: 597052 - DNA, 25 bp, Homo sapien
cagagtatgggcatgaactcgtttc

SEQ ID NO: 597053 - DNA, 25 bp, Homo sapien
gtgaatggctcctcacgcggcttcc

SEQ ID NO: 597054 - DNA, 25 bp, Homo sapien
ggaagtgagggtgctcccttctcac

SEQ ID NO: 597055 - DNA, 25 bp, Homo sapien
ccaactgagcatggcttatgctaag

SEQ ID NO: 597056 - DNA, 25 bp, Homo sapien
tggaacctcccaactgagcatggct

SEQ ID NO: 597057 - DNA, 25 bp, Homo sapien
cctcccaactgagcatggcttatgc

SEQ ID NO: 597058 - DNA, 25 bp, Homo sapien
gggacctggaacctcccaactgagc

SEQ ID NO: 597059 - DNA, 25 bp, Homo sapien
cattctcaaggtggtttggctcaga

SEQ ID NO: 597060 - DNA, 25 bp, Homo sapien
ttttgtcagtagagcctggaccgcc

SEQ ID NO: 597061 - DNA, 25 bp, Homo sapien
tactgaccgtaactgccaggtgaag

SEQ ID NO: 597062 - DNA, 25 bp, Homo sapien
catctgaaggttgaccactgcctga

SEQ ID NO: 597063 - DNA, 25 bp, Homo sapien
tgtggccaagatctccagatggtgt

SEQ ID NO: 597064 - DNA, 25 bp, Homo sapien
gtgttggggagccttatcatccact

SEQ ID NO: 597065 - DNA, 25 bp, Homo sapien
cagatggtgtttccccaggtggacc

SEQ ID NO: 597066 - DNA, 25 bp, Homo sapien
gggatcccatgtggccaagatctcc

SEQ ID NO: 597067 - DNA, 25 bp, Homo sapien
cagttgttggcaattgctgactgag

SEQ ID NO: 597068 - DNA, 25 bp, Homo sapien
tcttttccagtaggtaaggtcctgc

SEQ ID NO: 597069 - DNA, 25 bp, Homo sapien
gcccaggaggatcttaagtagcatc

SEQ ID NO: 597070 - DNA, 25 bp, Homo sapien
gcctccagcagatgatcttttccag

SEQ ID NO: 597071 - DNA, 25 bp, Homo sapien
tcccgaaagaagtgctcttcagaac

SEQ ID NO: 597072 - DNA, 25 bp, Homo sapien
gatgccaacaagactcccgtggcca

SEQ ID NO: 597073 - DNA, 25 bp, Homo sapien
aacaagactcccgtggccacagagg

SEQ ID NO: 597074 - DNA, 25 bp, Homo sapien
gaagtgctcttcagaacattgttga

SEQ ID NO: 597075 - DNA, 25 bp, Homo sapien
taaaggatagaccttcttccacgcc

SEQ ID NO: 597076 - DNA, 25 bp, Homo sapien
ctagttggaggttggataaaggata

SEQ ID NO: 597077 - DNA, 25 bp, Homo sapien
gagtttgatagtcaacctggtctga

SEQ ID NO: 597078 - DNA, 25 bp, Homo sapien
gccacctggatgatatcaaagttga

SEQ ID NO: 597079 - DNA, 25 bp, Homo sapien
agtcaagagagatttgacccagctt

SEQ ID NO: 597080 - DNA, 25 bp, Homo sapien
tcaagagagatttgacccagcttgg

SEQ ID NO: 597081 - DNA, 25 bp, Homo sapien
agagagatttgacccagcttggtct

SEQ ID NO: 597082 - DNA, 25 bp, Homo sapien
caagagagatttgacccagcttggt

SEQ ID NO: 597083 - DNA, 25 bp, Homo sapien
aggatccatttcaacatggtctcca

SEQ ID NO: 597084 - DNA, 25 bp, Homo sapien
caggatccatttcaacatggtctcc

SEQ ID NO: 597085 - DNA, 25 bp, Homo sapien
aacgttcaactgttgatagataatg

SEQ ID NO: 597086 - DNA, 25 bp, Homo sapien
cagaacgttcaactgttgatagata

SEQ ID NO: 597087 - DNA, 25 bp, Homo sapien
ttttcagaacgttcaactgttgata

SEQ ID NO: 597088 - DNA, 25 bp, Homo sapien
tttcagaacgttcaactgttgatag

SEQ ID NO: 597089 - DNA, 25 bp, Homo sapien
gtgagaggtggtccctaaataatct

SEQ ID NO: 597090 - DNA, 25 bp, Homo sapien
agaggtgagaggtggtccctaaata

SEQ ID NO: 597091 - DNA, 25 bp, Homo sapien
gcagtgatactgctgagacaacagg

SEQ ID NO: 597092 - DNA, 25 bp, Homo sapien
aactccaggcagtgatactgctgag

SEQ ID NO: 597093 - DNA, 25 bp, Homo sapien
tttcaagcagccagttaatgaaaga

SEQ ID NO: 597094 - DNA, 25 bp, Homo sapien
tcaagcagccagttaatgaaagagc

SEQ ID NO: 597095 - DNA, 25 bp, Homo sapien
ttcaagcagccagttaatgaaagag

SEQ ID NO: 597096 - DNA, 25 bp, Homo sapien
caagcagccagttaatgaaagagcc

SEQ ID NO: 597097 - DNA, 25 bp, Homo sapien
tctgtgtcaggtaggtgctctgagg

SEQ ID NO: 597098 - DNA, 25 bp, Homo sapien
ccaatgtttgaggaaggactgtcct

SEQ ID NO: 597099 - DNA, 25 bp, Homo sapien
ggtgctctgaggtcctacggtttta

SEQ ID NO: 597100 - DNA, 25 bp, Homo sapien
ctacggttttacaccaatgtttgag

SEQ ID NO: 597101 - DNA, 25 bp, Homo sapien
tagtcttggcggggtcccatgctca

SEQ ID NO: 597102 - DNA, 25 bp, Homo sapien
gtcttggcggggtcccatgctcatc

SEQ ID NO: 597103 - DNA, 25 bp, Homo sapien
catagtcttggcggggtcccatgct

SEQ ID NO: 597104 - DNA, 25 bp, Homo sapien
agtcttggcggggtcccatgctcat

SEQ ID NO: 597105 - DNA, 25 bp, Homo sapien
cagtgatgctccagcgtttgaacat

SEQ ID NO: 597106 - DNA, 25 bp, Homo sapien
tgctccagcgtttgaacatccttac

SEQ ID NO: 597107 - DNA, 25 bp, Homo sapien
tgatgctccagcgtttgaacatcct

SEQ ID NO: 597108 - DNA, 25 bp, Homo sapien
cacagtgatgctccagcgtttgaac

SEQ ID NO: 597109 - DNA, 25 bp, Homo sapien
gtgtccagcttctgtcactgtgctt

SEQ ID NO: 597110 - DNA, 25 bp, Homo sapien
tgtccagcttctgtcactgtgcttg

SEQ ID NO: 597111 - DNA, 25 bp, Homo sapien
gtccagcttctgtcactgtgcttgt

SEQ ID NO: 597112 - DNA, 25 bp, Homo sapien
ggccagcagcgggagagacgtggaa

SEQ ID NO: 597113 - DNA, 25 bp, Homo sapien
tctgctggacaattcccaaagcctc

SEQ ID NO: 597114 - DNA, 25 bp, Homo sapien
ctctgtttctgctggacaattccca

SEQ ID NO: 597115 - DNA, 25 bp, Homo sapien
tgtttctgctggacaattcccaaag

SEQ ID NO: 597116 - DNA, 25 bp, Homo sapien
tttctgctggacaattcccaaagcc

SEQ ID NO: 597117 - DNA, 25 bp, Homo sapien
gcactgaatggggtcgaagttagca

SEQ ID NO: 597118 - DNA, 25 bp, Homo sapien
aaattttctgtgcattgatggcccc

SEQ ID NO: 597119 - DNA, 25 bp, Homo sapien
gaaggtccttcctttaagcactgaa

SEQ ID NO: 597120 - DNA, 25 bp, Homo sapien
ggccaacacgcacactgacaattac

SEQ ID NO: 597121 - DNA, 25 bp, Homo sapien
ttagaggaggatgctcatgaaatcc

SEQ ID NO: 597122 - DNA, 25 bp, Homo sapien
atgaaatccttgccccactgcacag

SEQ ID NO: 597123 - DNA, 25 bp, Homo sapien
cgtttagaggaggatgctcatgaaa

SEQ ID NO: 597124 - DNA, 25 bp, Homo sapien
gcgtttagaggaggatgctcatgaa

SEQ ID NO: 597125 - DNA, 25 bp, Homo sapien
cacgacattgcttaggtcattgcca

SEQ ID NO: 597126 - DNA, 25 bp, Homo sapien
agtccctcgtgaagaacaggttcca

SEQ ID NO: 597127 - DNA, 25 bp, Homo sapien
gcacgccgcacaggagaacaagttt

SEQ ID NO: 597128 - DNA, 25 bp, Homo sapien
tgtcaactgtctcaagtccctcgtg

SEQ ID NO: 597129 - DNA, 25 bp, Homo sapien
taggtcgaccttcagtttctcaagg

SEQ ID NO: 597130 - DNA, 25 bp, Homo sapien
ccgtgttagttggaagcagcttaga

SEQ ID NO: 597131 - DNA, 25 bp, Homo sapien
caaaaatgtccgtgttagttggaag

SEQ ID NO: 597132 - DNA, 25 bp, Homo sapien
tggatttctgaagcactcctaggtc

SEQ ID NO: 597133 - DNA, 25 bp, Homo sapien
gtgtgaaacccacaattcacccttg

SEQ ID NO: 597134 - DNA, 25 bp, Homo sapien
tgaaacccacaattcacccttgtca

SEQ ID NO: 597135 - DNA, 25 bp, Homo sapien
tgtgaaacccacaattcacccttgt

SEQ ID NO: 597136 - DNA, 25 bp, Homo sapien
ctgtgtgaaacccacaattcaccct

SEQ ID NO: 597137 - DNA, 25 bp, Homo sapien
tgacattcgcggtgacagggaagct

SEQ ID NO: 597138 - DNA, 25 bp, Homo sapien
gaagctcaggttaaggcctttgcca

SEQ ID NO: 597139 - DNA, 25 bp, Homo sapien
cctttgccatcatcgatcggttcag

SEQ ID NO: 597140 - DNA, 25 bp, Homo sapien
gatcggttcagctttgacatccagg

SEQ ID NO: 597141 - DNA, 25 bp, Homo sapien
cagtttcaattgtgactgcggtcag

SEQ ID NO: 597142 - DNA, 25 bp, Homo sapien
ggttgggtcactggcgcattctccc

SEQ ID NO: 597143 - DNA, 25 bp, Homo sapien
tccaaggaggctttcaggttgataa

SEQ ID NO: 597144 - DNA, 25 bp, Homo sapien
ggttgataatctggccaatgatggg

SEQ ID NO: 597145 - DNA, 25 bp, Homo sapien
ccagctctactaagatgaatgggac

SEQ ID NO: 597146 - DNA, 25 bp, Homo sapien
ctctactaagatgaatgggacttac

SEQ ID NO: 597147 - DNA, 25 bp, Homo sapien
gcccagctctactaagatgaatggg

SEQ ID NO: 597148 - DNA, 25 bp, Homo sapien
cagctctactaagatgaatgggact

SEQ ID NO: 597149 - DNA, 25 bp, Homo sapien
tctgaaattagagcccgtggcaggc

SEQ ID NO: 597150 - DNA, 25 bp, Homo sapien
ttacgagagagaataggaggagccc

SEQ ID NO: 597151 - DNA, 25 bp, Homo sapien
gagccttgagaaacagcctatctga

SEQ ID NO: 597152 - DNA, 25 bp, Homo sapien
tggagtcagataaaccccagggaca

SEQ ID NO: 597153 - DNA, 25 bp, Homo sapien
gcgtgttgatcacgctattcacgaa

SEQ ID NO: 597154 - DNA, 25 bp, Homo sapien
gggaggatacagtgcttttcagcgt

SEQ ID NO: 597155 - DNA, 25 bp, Homo sapien
cagtgcttttcagcgtgttgatcac

SEQ ID NO: 597156 - DNA, 25 bp, Homo sapien
cacgctattcacgaacttgttgatg

SEQ ID NO: 597157 - DNA, 25 bp, Homo sapien
aagtttgggacctggcaatttcagc

SEQ ID NO: 597158 - DNA, 25 bp, Homo sapien
cccaccaggctgattagtagaggag

SEQ ID NO: 597159 - DNA, 25 bp, Homo sapien
tcacctccgaaggaaaagtgctcag

SEQ ID NO: 597160 - DNA, 25 bp, Homo sapien
agtgctcagaggatacagccaggcc

SEQ ID NO: 597161 - DNA, 25 bp, Homo sapien
atgaagatgcggatcagtggacata

SEQ ID NO: 597162 - DNA, 25 bp, Homo sapien
tgaagatgcggatcagtggacatat

SEQ ID NO: 597163 - DNA, 25 bp, Homo sapien
agggagtggatgaagatgcggatca

SEQ ID NO: 597164 - DNA, 25 bp, Homo sapien
ccagggagtggatgaagatgcggat

SEQ ID NO: 597165 - DNA, 25 bp, Homo sapien
cagctgggttttgtgctgaggatta

SEQ ID NO: 597166 - DNA, 25 bp, Homo sapien
agctgggttttgtgctgaggattat

SEQ ID NO: 597167 - DNA, 25 bp, Homo sapien
gatgagggtttgcagctgggttttg

SEQ ID NO: 597168 - DNA, 25 bp, Homo sapien
tcagatgagggtttgcagctgggtt

SEQ ID NO: 597169 - DNA, 25 bp, Homo sapien
atgcaccacagtggtcctcctcatt

SEQ ID NO: 597170 - DNA, 25 bp, Homo sapien
acagtggtcctcctcattcgtcctc

SEQ ID NO: 597171 - DNA, 25 bp, Homo sapien
caccacagtggtcctcctcattcgt

SEQ ID NO: 597172 - DNA, 25 bp, Homo sapien
gcatgcaccacagtggtcctcctca

SEQ ID NO: 597173 - DNA, 25 bp, Homo sapien
ggttcagggcccaatatgtgatcag

SEQ ID NO: 597174 - DNA, 25 bp, Homo sapien
gaaaagattgattgaggccactact

SEQ ID NO: 597175 - DNA, 25 bp, Homo sapien
gatgggacccaagttgacctggctc

SEQ ID NO: 597176 - DNA, 25 bp, Homo sapien
taggacatttgctgctaggctgccc

SEQ ID NO: 597177 - DNA, 25 bp, Homo sapien
ggactcaggctttcacgctggttag

SEQ ID NO: 597178 - DNA, 25 bp, Homo sapien
caggacaacatgtgtagaggctgct

SEQ ID NO: 597179 - DNA, 25 bp, Homo sapien
ggtatctgggaaggtccttctggtg

SEQ ID NO: 597180 - DNA, 25 bp, Homo sapien
gctgttctgactgtgaggagaaggg

SEQ ID NO: 597181 - DNA, 25 bp, Homo sapien
gattctccaagaatcctcagggccc

SEQ ID NO: 597182 - DNA, 25 bp, Homo sapien
ggtgtcccctgattctccaagaatc

SEQ ID NO: 597183 - DNA, 25 bp, Homo sapien
tgtcccctgattctccaagaatcct

SEQ ID NO: 597184 - DNA, 25 bp, Homo sapien
ctaggtgtcccctgattctccaaga

SEQ ID NO: 597185 - DNA, 25 bp, Homo sapien
tttggctctgtggacatatttcccc

SEQ ID NO: 597186 - DNA, 25 bp, Homo sapien
agacacgcaccgtcttcaggcacag

SEQ ID NO: 597187 - DNA, 25 bp, Homo sapien
gctcctcagtgaccctgtggtctcc

SEQ ID NO: 597188 - DNA, 25 bp, Homo sapien
atatttcccccgtaccatcctgtgg

SEQ ID NO: 597189 - DNA, 25 bp, Homo sapien
agtgatttggtcagtaaaggtgagc

SEQ ID NO: 597190 - DNA, 25 bp, Homo sapien
gaacatagcagtcaatcagatgaaa

SEQ ID NO: 597191 - DNA, 25 bp, Homo sapien
cttgccacataggacagagtgcaat

SEQ ID NO: 597192 - DNA, 25 bp, Homo sapien
ttcccacccgtctgctcatccttac

SEQ ID NO: 597193 - DNA, 25 bp, Homo sapien
agtgggttcacagagctgctataga

SEQ ID NO: 597194 - DNA, 25 bp, Homo sapien
tgggttcacagagctgctatagaga

SEQ ID NO: 597195 - DNA, 25 bp, Homo sapien
gtgggttcacagagctgctatagag

SEQ ID NO: 597196 - DNA, 25 bp, Homo sapien
gggttcacagagctgctatagagat

SEQ ID NO: 597197 - DNA, 25 bp, Homo sapien
ttggtaaaggccgttcccagatatc

SEQ ID NO: 597198 - DNA, 25 bp, Homo sapien
ggtaaaggccgttcccagatatcac

SEQ ID NO: 597199 - DNA, 25 bp, Homo sapien
tgttggtaaaggccgttcccagata

SEQ ID NO: 597200 - DNA, 25 bp, Homo sapien
aaaggccgttcccagatatcactgt

SEQ ID NO: 597201 - DNA, 25 bp, Homo sapien
caaaagagcctgtactagagttgag

SEQ ID NO: 597202 - DNA, 25 bp, Homo sapien
gcagtctgtcgagttggtgtaacaa

SEQ ID NO: 597203 - DNA, 25 bp, Homo sapien
tatccccttatggtaggtgtccctc

SEQ ID NO: 597204 - DNA, 25 bp, Homo sapien
gcatcattgtgattccagctaagca

SEQ ID NO: 597205 - DNA, 25 bp, Homo sapien
cactctggcctctgtaggttgattc

SEQ ID NO: 597206 - DNA, 25 bp, Homo sapien
ggtgtgctgtcaagacactctggcc

SEQ ID NO: 597207 - DNA, 25 bp, Homo sapien
gactgtataaatggcaagtgatccc

SEQ ID NO: 597208 - DNA, 25 bp, Homo sapien
ggttgattcccgatgactttgtagg

SEQ ID NO: 597209 - DNA, 25 bp, Homo sapien
aggagaacaaagaggccggagacat

SEQ ID NO: 597210 - DNA, 25 bp, Homo sapien
ggagaacaaagaggccggagacatt

SEQ ID NO: 597211 - DNA, 25 bp, Homo sapien
caaagaggccggagacattcagcat

SEQ ID NO: 597212 - DNA, 25 bp, Homo sapien
gaacaaagaggccggagacattcag

SEQ ID NO: 597213 - DNA, 25 bp, Homo sapien
tcatttacgcaggaggtcaaggaag

SEQ ID NO: 597214 - DNA, 25 bp, Homo sapien
tgcatgacccaaagcaggacagtct

SEQ ID NO: 597215 - DNA, 25 bp, Homo sapien
caggtacaaaggctgcgacagggac

SEQ ID NO: 597216 - DNA, 25 bp, Homo sapien
tgttttaaccacgatgaccatgccg

SEQ ID NO: 597217 - DNA, 25 bp, Homo sapien
gggaagaaagtctgccctgaggagt

SEQ ID NO: 597218 - DNA, 25 bp, Homo sapien
ggaagaaagtctgccctgaggagtc

SEQ ID NO: 597219 - DNA, 25 bp, Homo sapien
tgggaagaaagtctgccctgaggag

SEQ ID NO: 597220 - DNA, 25 bp, Homo sapien
gatacaccatcgaaggcactactca

SEQ ID NO: 597221 - DNA, 25 bp, Homo sapien
ctgatacaccatcgaaggcactact

SEQ ID NO: 597222 - DNA, 25 bp, Homo sapien
gcctgatacaccatcgaaggcacta

SEQ ID NO: 597223 - DNA, 25 bp, Homo sapien
tacaccatcgaaggcactactcaat

SEQ ID NO: 597224 - DNA, 25 bp, Homo sapien
acgtgaatggtacttgtacagtggc

SEQ ID NO: 597225 - DNA, 25 bp, Homo sapien
gggtgctctcgatggagacatggag

SEQ ID NO: 597226 - DNA, 25 bp, Homo sapien
tcctttctttgaggggtgctctcga

SEQ ID NO: 597227 - DNA, 25 bp, Homo sapien
caatcaactcagacgtgaatggtac

SEQ ID NO: 597228 - DNA, 25 bp, Homo sapien
tctcaaactccattgccttgatggc

SEQ ID NO: 597229 - DNA, 25 bp, Homo sapien
ctcaaactccattgccttgatggcc

SEQ ID NO: 597230 - DNA, 25 bp, Homo sapien
gtctcaaactccattgccttgatgg

SEQ ID NO: 597231 - DNA, 25 bp, Homo sapien
agtctcaaactccattgccttgatg

SEQ ID NO: 597232 - DNA, 25 bp, Homo sapien
tctggacttttatatctgactgcat

SEQ ID NO: 597233 - DNA, 25 bp, Homo sapien
tgtgaagggcttcatggtcaggagc

SEQ ID NO: 597234 - DNA, 25 bp, Homo sapien
gactgcatattagctgtgaagggct

SEQ ID NO: 597235 - DNA, 25 bp, Homo sapien
tcttctccaaacgaatctggacttt

SEQ ID NO: 597236 - DNA, 25 bp, Homo sapien
tggatccaaatagcctcgggcaaga

SEQ ID NO: 597237 - DNA, 25 bp, Homo sapien
tccaaatagcctcgggcaagagcct

SEQ ID NO: 597238 - DNA, 25 bp, Homo sapien
actccagtttggatccaaatagcct

SEQ ID NO: 597239 - DNA, 25 bp, Homo sapien
gtttggatccaaatagcctcgggca

SEQ ID NO: 597240 - DNA, 25 bp, Homo sapien
ataatcatattcagcacttttccca

SEQ ID NO: 597241 - DNA, 25 bp, Homo sapien
ctcagaataatcatattcagcactt

SEQ ID NO: 597242 - DNA, 25 bp, Homo sapien
agcacttttcccagcaccaagcagg

SEQ ID NO: 597243 - DNA, 25 bp, Homo sapien
gaataatcatattcagcacttttcc

SEQ ID NO: 597244 - DNA, 25 bp, Homo sapien
acaacaaattttgcgctggggcgag

SEQ ID NO: 597245 - DNA, 25 bp, Homo sapien
ttgccacaacaaattttgcgctggg

SEQ ID NO: 597246 - DNA, 25 bp, Homo sapien
gtttgccacaacaaattttgcgctg

SEQ ID NO: 597247 - DNA, 25 bp, Homo sapien
atgtttgccacaacaaattttgcgc

SEQ ID NO: 597248 - DNA, 25 bp, Homo sapien
ttttcgtcccagatcatgggctact

SEQ ID NO: 597249 - DNA, 25 bp, Homo sapien
tgggctactatgtttttcaggtttc

SEQ ID NO: 597250 - DNA, 25 bp, Homo sapien
gatcatgggctactatgtttttcag

SEQ ID NO: 597251 - DNA, 25 bp, Homo sapien
gtcccagatcatgggctactatgtt

SEQ ID NO: 597252 - DNA, 25 bp, Homo sapien
aatcaactctttaaccacatgctgg

SEQ ID NO: 597253 - DNA, 25 bp, Homo sapien
gctggtccaggttgtagagccattt

SEQ ID NO: 597254 - DNA, 25 bp, Homo sapien
taatcaactctttaaccacatgctg

SEQ ID NO: 597255 - DNA, 25 bp, Homo sapien
aggttgtagagccatttattaatca

SEQ ID NO: 597256 - DNA, 25 bp, Homo sapien
aaagagatactcagactgtgggggt

SEQ ID NO: 597257 - DNA, 25 bp, Homo sapien
gcaaaagagatactcagactgtggg

SEQ ID NO: 597258 - DNA, 25 bp, Homo sapien
aatgcaaaagagatactcagactgt

SEQ ID NO: 597259 - DNA, 25 bp, Homo sapien
gggaagtttcccccttggagcagca

SEQ ID NO: 597260 - DNA, 25 bp, Homo sapien
gatacacacatagcttcttcacttt

SEQ ID NO: 597261 - DNA, 25 bp, Homo sapien
ttgatacacacatagcttcttcact

SEQ ID NO: 597262 - DNA, 25 bp, Homo sapien
cggattgatacacacatagcttctt

SEQ ID NO: 597263 - DNA, 25 bp, Homo sapien
tacacacatagcttcttcactttgg

SEQ ID NO: 597264 - DNA, 25 bp, Homo sapien
tacagggaatcagcacatgggttct

SEQ ID NO: 597265 - DNA, 25 bp, Homo sapien
gtccagggtgggtcatgcaattcca

SEQ ID NO: 597266 - DNA, 25 bp, Homo sapien
cacatggcgctgtggaagctggaca

SEQ ID NO: 597267 - DNA, 25 bp, Homo sapien
taatcaacacgatctacgcaggtgg

SEQ ID NO: 597268 - DNA, 25 bp, Homo sapien
gattgtgtgactctgagggtgacat

SEQ ID NO: 597269 - DNA, 25 bp, Homo sapien
gtgtgactctgagggtgacattctc

SEQ ID NO: 597270 - DNA, 25 bp, Homo sapien
tgactctgagggtgacattctccat

SEQ ID NO: 597271 - DNA, 25 bp, Homo sapien
ctttgggagagggattgtgtgactc

SEQ ID NO: 597272 - DNA, 25 bp, Homo sapien
cctaaattctcgtggttgctggaga

SEQ ID NO: 597273 - DNA, 25 bp, Homo sapien
gctggagatagctgcagcactaaat

SEQ ID NO: 597274 - DNA, 25 bp, Homo sapien
ttcacccggatcctctgggaattgg

SEQ ID NO: 597275 - DNA, 25 bp, Homo sapien
ctgatcctaaattctcgtggttgct

SEQ ID NO: 597276 - DNA, 25 bp, Homo sapien
aacaatgttgcacacagtaccagga

SEQ ID NO: 597277 - DNA, 25 bp, Homo sapien
tgttgcacacagtaccaggattgcc

SEQ ID NO: 597278 - DNA, 25 bp, Homo sapien
caagccaaacaatgttgcacacagt

SEQ ID NO: 597279 - DNA, 25 bp, Homo sapien
ttgcacacagtaccaggattgccat

SEQ ID NO: 597280 - DNA, 25 bp, Homo sapien
gagggatgggaacgtcctttgcaaa

SEQ ID NO: 597281 - DNA, 25 bp, Homo sapien
gctctgagacaaaggcgtttgtcac

SEQ ID NO: 597282 - DNA, 25 bp, Homo sapien
ccttggggctattcttgggcaattc

SEQ ID NO: 597283 - DNA, 25 bp, Homo sapien
catactacgggcgacatagagggtc

SEQ ID NO: 597284 - DNA, 25 bp, Homo sapien
cagagtctattgttgggtcatccaa

SEQ ID NO: 597285 - DNA, 25 bp, Homo sapien
tattgttgggtcatccaacaggagt

SEQ ID NO: 597286 - DNA, 25 bp, Homo sapien
ctggcacaggctggatgttagtgac

SEQ ID NO: 597287 - DNA, 25 bp, Homo sapien
gggtcatccaacaggagtcctctcc

SEQ ID NO: 597288 - DNA, 25 bp, Homo sapien
acatgtggaaccctgggaggaggcc

SEQ ID NO: 597289 - DNA, 25 bp, Homo sapien
gatgacatcagaattagcccccagc

SEQ ID NO: 597290 - DNA, 25 bp, Homo sapien
ctgggcagacggctttgagggtggc

SEQ ID NO: 597291 - DNA, 25 bp, Homo sapien
tgctcacattgggagagcaacatgt

SEQ ID NO: 597292 - DNA, 25 bp, Homo sapien
ctgcttgtgtggtgccaagggcaag

SEQ ID NO: 597293 - DNA, 25 bp, Homo sapien
gtggatttgttgtctctgtgggctt

SEQ ID NO: 597294 - DNA, 25 bp, Homo sapien
ttcttgccagggtggatttgttgtc

SEQ ID NO: 597295 - DNA, 25 bp, Homo sapien
caaggccagcaacccgaggaagatg

SEQ ID NO: 597296 - DNA, 25 bp, Homo sapien
cagtctggagcacggagctaacata

SEQ ID NO: 597297 - DNA, 25 bp, Homo sapien
acatacaggatgtagatcagagtca

SEQ ID NO: 597298 - DNA, 25 bp, Homo sapien
gcaacagctgctcaaagtggggtat

SEQ ID NO: 597299 - DNA, 25 bp, Homo sapien
tggttgaaagttcacccaacactgt

SEQ ID NO: 597300 - DNA, 25 bp, Homo sapien
gcattcagtctgtccccaaagtgga

SEQ ID NO: 597301 - DNA, 25 bp, Homo sapien
cgttgtgctttatgaggccctgagc

SEQ ID NO: 597302 - DNA, 25 bp, Homo sapien
tgctggtgtttcctgccgctgatta

SEQ ID NO: 597303 - DNA, 25 bp, Homo sapien
gatgttctgaattcggctttctgcg

SEQ ID NO: 597304 - DNA, 25 bp, Homo sapien
aaattcaagtgagatatttgccgag

SEQ ID NO: 597305 - DNA, 25 bp, Homo sapien
ccacagtccagctgaatgttggtga

SEQ ID NO: 597306 - DNA, 25 bp, Homo sapien
gatatttgccgagaaccactcctta

SEQ ID NO: 597307 - DNA, 25 bp, Homo sapien
tatggaatgatatctggatcccacc

SEQ ID NO: 597308 - DNA, 25 bp, Homo sapien
gtgcacacatctttacgatgttgtt

SEQ ID NO: 597309 - DNA, 25 bp, Homo sapien
cacatctttacgatgttgttatcga

SEQ ID NO: 597310 - DNA, 25 bp, Homo sapien
catctttacgatgttgttatcgaag

SEQ ID NO: 597311 - DNA, 25 bp, Homo sapien
ctttacgatgttgttatcgaaggac

SEQ ID NO: 597312 - DNA, 25 bp, Homo sapien
gccagaactccacaacgatgctcat

SEQ ID NO: 597313 - DNA, 25 bp, Homo sapien
ctttctccagccagaactccacaac

SEQ ID NO: 597314 - DNA, 25 bp, Homo sapien
ccagccagaactccacaacgatgct

SEQ ID NO: 597315 - DNA, 25 bp, Homo sapien
ctccagccagaactccacaacgatg

SEQ ID NO: 597316 - DNA, 25 bp, Homo sapien
tgggctctgcatcgcatttgcctat

SEQ ID NO: 597317 - DNA, 25 bp, Homo sapien
ggctctgcatcgcatttgcctatca

SEQ ID NO: 597318 - DNA, 25 bp, Homo sapien
gctctgcatcgcatttgcctatcac

SEQ ID NO: 597319 - DNA, 25 bp, Homo sapien
gggctctgcatcgcatttgcctatc

SEQ ID NO: 597320 - DNA, 25 bp, Homo sapien
ggcaatagagcaccagattccagag

SEQ ID NO: 597321 - DNA, 25 bp, Homo sapien
catagaagatgggacgggcattcca

SEQ ID NO: 597322 - DNA, 25 bp, Homo sapien
acaccgtcctcccatgaatgtctgg

SEQ ID NO: 597323 - DNA, 25 bp, Homo sapien
gaacagaacagagcaatccaggcaa

SEQ ID NO: 597324 - DNA, 25 bp, Homo sapien
ctttctaccatgtgtgggagaactt

SEQ ID NO: 597325 - DNA, 25 bp, Homo sapien
catgtgtgggagaactttttgcaga

SEQ ID NO: 597326 - DNA, 25 bp, Homo sapien
ctgactttctaccatgtgtgggaga

SEQ ID NO: 597327 - DNA, 25 bp, Homo sapien
taccatgtgtgggagaactttttgc

SEQ ID NO: 597328 - DNA, 25 bp, Homo sapien
tggaccatcagcacagagagaagga

SEQ ID NO: 597329 - DNA, 25 bp, Homo sapien
ctggaccatcagcacagagagaagg

SEQ ID NO: 597330 - DNA, 25 bp, Homo sapien
gctgcccgaggatttcaccgatcag

SEQ ID NO: 597331 - DNA, 25 bp, Homo sapien
tgcccgaggatttcaccgatcagag

SEQ ID NO: 597332 - DNA, 25 bp, Homo sapien
ccgaggatttcaccgatcagaggac

SEQ ID NO: 597333 - DNA, 25 bp, Homo sapien
ggatttcaccgatcagaggacatac

SEQ ID NO: 597334 - DNA, 25 bp, Homo sapien
tgggggactctccagcctggcatgc

SEQ ID NO: 597335 - DNA, 25 bp, Homo sapien
ggggactctccagcctggcatgcag

SEQ ID NO: 597336 - DNA, 25 bp, Homo sapien
tttcatggtgggttggttcatgagc

SEQ ID NO: 597337 - DNA, 25 bp, Homo sapien
tggtttcatggtgggttggttcatg

SEQ ID NO: 597338 - DNA, 25 bp, Homo sapien
gagaggatggtatgtccacagagcc

SEQ ID NO: 597339 - DNA, 25 bp, Homo sapien
tttagggtagcagaagccccactct

SEQ ID NO: 597340 - DNA, 25 bp, Homo sapien
cactctaagggagacttaaggttgc

SEQ ID NO: 597341 - DNA, 25 bp, Homo sapien
cagagctagagtttattgtaggaga

SEQ ID NO: 597342 - DNA, 25 bp, Homo sapien
ctgacttctagacctaaaccccagg

SEQ ID NO: 597343 - DNA, 25 bp, Homo sapien
agggcccaggtgggagggacctgtg

SEQ ID NO: 597344 - DNA, 25 bp, Homo sapien
ccagggcccaggtgggagggacctg

SEQ ID NO: 597345 - DNA, 25 bp, Homo sapien
gtctgacttctagacctaaacccca

SEQ ID NO: 597346 - DNA, 25 bp, Homo sapien
tctgtcctcacaagaaccctgagag

SEQ ID NO: 597347 - DNA, 25 bp, Homo sapien
aaaacaacgccaacagcagacactg

SEQ ID NO: 597348 - DNA, 25 bp, Homo sapien
ttttcagagcccctattgcacgtca

SEQ ID NO: 597349 - DNA, 25 bp, Homo sapien
gggtgcgtctccattccagggcaag

SEQ ID NO: 597350 - DNA, 25 bp, Homo sapien
cttcttagaggtctcagcagctgtc

SEQ ID NO: 597351 - DNA, 25 bp, Homo sapien
ggacttcttagaggtctcagcagct

SEQ ID NO: 597352 - DNA, 25 bp, Homo sapien
acttcttagaggtctcagcagctgt

SEQ ID NO: 597353 - DNA, 25 bp, Homo sapien
gacttcttagaggtctcagcagctg

SEQ ID NO: 597354 - DNA, 25 bp, Homo sapien
ggatggaattccggtcaacccctga

SEQ ID NO: 597355 - DNA, 25 bp, Homo sapien
ctggatggaattccggtcaacccct

SEQ ID NO: 597356 - DNA, 25 bp, Homo sapien
atggaattccggtcaacccctgagg

SEQ ID NO: 597357 - DNA, 25 bp, Homo sapien
gatggaattccggtcaacccctgag

SEQ ID NO: 597358 - DNA, 25 bp, Homo sapien
caaactgggccatggtctgggctaa

SEQ ID NO: 597359 - DNA, 25 bp, Homo sapien
catggtctgggctaacagcccgtag

SEQ ID NO: 597360 - DNA, 25 bp, Homo sapien
agcccgtagaagacaatgaggcccc

SEQ ID NO: 597361 - DNA, 25 bp, Homo sapien
ggctaacagcccgtagaagacaatg

SEQ ID NO: 597362 - DNA, 25 bp, Homo sapien
gtgggactcaagggcagggctggat

SEQ ID NO: 597363 - DNA, 25 bp, Homo sapien
gactcaagggcagggctggattcac

SEQ ID NO: 597364 - DNA, 25 bp, Homo sapien
gggactcaagggcagggctggattc

SEQ ID NO: 597365 - DNA, 25 bp, Homo sapien
ctgtgggactcaagggcagggctgg

SEQ ID NO: 597366 - DNA, 25 bp, Homo sapien
gaatcactgacgtcacttttccaag

SEQ ID NO: 597367 - DNA, 25 bp, Homo sapien
tgatgttgttcaggccaggaatcac

SEQ ID NO: 597368 - DNA, 25 bp, Homo sapien
gttcaggccaggaatcactgacgtc

SEQ ID NO: 597369 - DNA, 25 bp, Homo sapien
tcaatgatgttgttcaggccaggaa

SEQ ID NO: 597370 - DNA, 25 bp, Homo sapien
caaggtgggcaggttatactctcgc

SEQ ID NO: 597371 - DNA, 25 bp, Homo sapien
tactctcgctaacatcaaaggccgt

SEQ ID NO: 597372 - DNA, 25 bp, Homo sapien
caaaggccgtctgtgttctaaggga

SEQ ID NO: 597373 - DNA, 25 bp, Homo sapien
tcacttggcatcactctagcagcgt

SEQ ID NO: 597374 - DNA, 25 bp, Homo sapien
tctccagtctatgaggtattcagga

SEQ ID NO: 597375 - DNA, 25 bp, Homo sapien
taacagtacccatcccagaggtaga

SEQ ID NO: 597376 - DNA, 25 bp, Homo sapien
catcctgtatgccagctaagagcct

SEQ ID NO: 597377 - DNA, 25 bp, Homo sapien
tattcaggacaacaactgtgtctgg

SEQ ID NO: 597378 - DNA, 25 bp, Homo sapien
ccagcagctgggggtcagtgacctt

SEQ ID NO: 597379 - DNA, 25 bp, Homo sapien
agcagctgggggtcagtgaccttta

SEQ ID NO: 597380 - DNA, 25 bp, Homo sapien
ctgcacaaggccaagttccagcagc

SEQ ID NO: 597381 - DNA, 25 bp, Homo sapien
gcacaaggccaagttccagcagctg

SEQ ID NO: 597382 - DNA, 25 bp, Homo sapien
ggtgacatagagacggtggccatca

SEQ ID NO: 597383 - DNA, 25 bp, Homo sapien
gtattcacttggagctttatgccga

SEQ ID NO: 597384 - DNA, 25 bp, Homo sapien
ctttatgccgagagggatggtgaca

SEQ ID NO: 597385 - DNA, 25 bp, Homo sapien
atggtgacatagagacggtggccat

SEQ ID NO: 597386 - DNA, 25 bp, Homo sapien
accagggtctccctcggtgagccat

SEQ ID NO: 597387 - DNA, 25 bp, Homo sapien
ggttaaccatggtcaccagggtctc

SEQ ID NO: 597388 - DNA, 25 bp, Homo sapien
caggtctgttagactccaatacccc

SEQ ID NO: 597389 - DNA, 25 bp, Homo sapien
ccgttatggttaaccatggtcacca

SEQ ID NO: 597390 - DNA, 25 bp, Homo sapien
gctaagatttctgcagtgatgtcca

SEQ ID NO: 597391 - DNA, 25 bp, Homo sapien
aggtggatcctctcctgcttatctc

SEQ ID NO: 597392 - DNA, 25 bp, Homo sapien
cttccaggggaatgggtgcagtcac

SEQ ID NO: 597393 - DNA, 25 bp, Homo sapien
aagcagagaaatttgcaggcttcca

SEQ ID NO: 597394 - DNA, 25 bp, Homo sapien
tgcgtaataggtttgacacagtctc

SEQ ID NO: 597395 - DNA, 25 bp, Homo sapien
taacctagttaggatccacgtctat

SEQ ID NO: 597396 - DNA, 25 bp, Homo sapien
cccttactgggacaaagcactttca

SEQ ID NO: 597397 - DNA, 25 bp, Homo sapien
ggttctatcaataactccagtgcag

SEQ ID NO: 597398 - DNA, 25 bp, Homo sapien
ctgtgaggctgtccagaagaccttg

SEQ ID NO: 597399 - DNA, 25 bp, Homo sapien
ggctgtccagaagaccttgaatggg

SEQ ID NO: 597400 - DNA, 25 bp, Homo sapien
gaggctgtccagaagaccttgaatg

SEQ ID NO: 597401 - DNA, 25 bp, Homo sapien
tgtccagaagaccttgaatggggag

SEQ ID NO: 597402 - DNA, 25 bp, Homo sapien
ccaactcaggcaggactttattcaa

SEQ ID NO: 597403 - DNA, 25 bp, Homo sapien
gttgccctgaaccaactcaggcagg

SEQ ID NO: 597404 - DNA, 25 bp, Homo sapien
cctgaaccaactcaggcaggacttt

SEQ ID NO: 597405 - DNA, 25 bp, Homo sapien
tcaggcaggactttattcaagatcc

SEQ ID NO: 597406 - DNA, 25 bp, Homo sapien
atgcaccagggtgatgtccaagcct

SEQ ID NO: 597407 - DNA, 25 bp, Homo sapien
ccaagcctctgagaacctcattgac

SEQ ID NO: 597408 - DNA, 25 bp, Homo sapien
caagcctctgagaacctcattgacc

SEQ ID NO: 597409 - DNA, 25 bp, Homo sapien
tgcaccagggtgatgtccaagcctc

SEQ ID NO: 597410 - DNA, 25 bp, Homo sapien
cttgatgacaaactgtagtccgtgg

SEQ ID NO: 597411 - DNA, 25 bp, Homo sapien
agaccttgatgacaaactgtagtcc

SEQ ID NO: 597412 - DNA, 25 bp, Homo sapien
gacaaactgtagtccgtggatcagc

SEQ ID NO: 597413 - DNA, 25 bp, Homo sapien
aactgtagtccgtggatcagcatgt

SEQ ID NO: 597414 - DNA, 25 bp, Homo sapien
gctcagcagaggccagccccttcct

SEQ ID NO: 597415 - DNA, 25 bp, Homo sapien
agaggccagccccttcctggaaggc

SEQ ID NO: 597416 - DNA, 25 bp, Homo sapien
gcagaggccagccccttcctggaag

SEQ ID NO: 597417 - DNA, 25 bp, Homo sapien
cagctcagcagaggccagccccttc

SEQ ID NO: 597418 - DNA, 25 bp, Homo sapien
gagtccactgatgtgtgcatatgtg

SEQ ID NO: 597419 - DNA, 25 bp, Homo sapien
tcaggatggagactcaaggtcagtg

SEQ ID NO: 597420 - DNA, 25 bp, Homo sapien
gctctgtgagcatgtgtttgagtga

SEQ ID NO: 597421 - DNA, 25 bp, Homo sapien
gagcgttactgatattgactcatca

SEQ ID NO: 597422 - DNA, 25 bp, Homo sapien
aaatggattgagcagcaagaaatag

SEQ ID NO: 597423 - DNA, 25 bp, Homo sapien
ctgggccagaggaaatggattgagc

SEQ ID NO: 597424 - DNA, 25 bp, Homo sapien
ccagaggaaatggattgagcagcaa

SEQ ID NO: 597425 - DNA, 25 bp, Homo sapien
atggattgagcagcaagaaatagtt

SEQ ID NO: 597426 - DNA, 25 bp, Homo sapien
gaggcacatgggatgttacacacgc

SEQ ID NO: 597427 - DNA, 25 bp, Homo sapien
ggatgttacacacgcctggtgggaa

SEQ ID NO: 597428 - DNA, 25 bp, Homo sapien
agagccattttattaggtgaggcac

SEQ ID NO: 597429 - DNA, 25 bp, Homo sapien
tcggagagaaggcaactgtgtcatc

SEQ ID NO: 597430 - DNA, 25 bp, Homo sapien
tcaagtaatggtgaaggatgacaag

SEQ ID NO: 597431 - DNA, 25 bp, Homo sapien
gaggggtgtccatagccaattgcct

SEQ ID NO: 597432 - DNA, 25 bp, Homo sapien
gcatgagaggggtgtccatagccaa

SEQ ID NO: 597433 - DNA, 25 bp, Homo sapien
agagtccatccgtggcatgagaggg

SEQ ID NO: 597434 - DNA, 25 bp, Homo sapien
gccttgcactggctattggggggat

SEQ ID NO: 597435 - DNA, 25 bp, Homo sapien
gagaaagaggcaacgaggagcccag

SEQ ID NO: 597436 - DNA, 25 bp, Homo sapien
agaaagaggcaacgaggagcccagc

SEQ ID NO: 597437 - DNA, 25 bp, Homo sapien
tccctggactgtgaatgtcgtgttc

SEQ ID NO: 597438 - DNA, 25 bp, Homo sapien
cccaaaccaaatgaagtgagttctc

SEQ ID NO: 597439 - DNA, 25 bp, Homo sapien
ctttgtacctttccggactgtgtga

SEQ ID NO: 597440 - DNA, 25 bp, Homo sapien
aaccaaatgaagtgagttctccaaa

SEQ ID NO: 597441 - DNA, 25 bp, Homo sapien
cctgacaactacctttagcttctcc

SEQ ID NO: 597442 - DNA, 25 bp, Homo sapien
gggtttttatggacttagcatgcat

SEQ ID NO: 597443 - DNA, 25 bp, Homo sapien
ccctgacaactacctttagcttctc

SEQ ID NO: 597444 - DNA, 25 bp, Homo sapien
ctgacaactacctttagcttctcca

SEQ ID NO: 597445 - DNA, 25 bp, Homo sapien
tgtggaccaaaagaataaggaggga

SEQ ID NO: 597446 - DNA, 25 bp, Homo sapien
ctttaggaatctccatgagcacttg

SEQ ID NO: 597447 - DNA, 25 bp, Homo sapien
ccatgagcacttgtggaccaaaaga

SEQ ID NO: 597448 - DNA, 25 bp, Homo sapien
gaatctccatgagcacttgtggacc

SEQ ID NO: 597449 - DNA, 25 bp, Homo sapien
ggagtcctcggcccgctcctctcct

SEQ ID NO: 597450 - DNA, 25 bp, Homo sapien
gaggcctcagaccaggccgaggtct

SEQ ID NO: 597451 - DNA, 25 bp, Homo sapien
ctggaagtccaaccttatatcctgc

SEQ ID NO: 597452 - DNA, 25 bp, Homo sapien
tctgctgaaccacagccccgcccgg

SEQ ID NO: 597453 - DNA, 25 bp, Homo sapien
gctgaataattgcatagcctctgga

SEQ ID NO: 597454 - DNA, 25 bp, Homo sapien
tctggaagccccgaaagaattggaa

SEQ ID NO: 597455 - DNA, 25 bp, Homo sapien
gatgaaccctagttggaggcctgcc

SEQ ID NO: 597456 - DNA, 25 bp, Homo sapien
gcgttcagtagatggtagcttccac

SEQ ID NO: 597457 - DNA, 25 bp, Homo sapien
tatctccctgatgaactcctattca

SEQ ID NO: 597458 - DNA, 25 bp, Homo sapien
tggaaggtctcagaacatactgtgt

SEQ ID NO: 597459 - DNA, 25 bp, Homo sapien
tcctgtgtccgtgcctttgctcttg

SEQ ID NO: 597460 - DNA, 25 bp, Homo sapien
gttctagcaagttccaagcagttgg

SEQ ID NO: 597461 - DNA, 25 bp, Homo sapien
tcccaggtgtcagagggcagcaagt

SEQ ID NO: 597462 - DNA, 25 bp, Homo sapien
agagggcagcaagtgcaggatgcca

SEQ ID NO: 597463 - DNA, 25 bp, Homo sapien
gggcagcaagtgcaggatgccagac

SEQ ID NO: 597464 - DNA, 25 bp, Homo sapien
tcagagggcagcaagtgcaggatgc

SEQ ID NO: 597465 - DNA, 25 bp, Homo sapien
ttctttgatgacttttgggccgagg

SEQ ID NO: 597466 - DNA, 25 bp, Homo sapien
ggtggcttggatcaaggtggctgcc

SEQ ID NO: 597467 - DNA, 25 bp, Homo sapien
ttgatgacttttgggccgaggatga

SEQ ID NO: 597468 - DNA, 25 bp, Homo sapien
tgggactgagggtggcttggatcaa

SEQ ID NO: 597469 - DNA, 25 bp, Homo sapien
tggaggcagaccccagggattaggg

SEQ ID NO: 597470 - DNA, 25 bp, Homo sapien
gaggcagaccccagggattagggcc

SEQ ID NO: 597471 - DNA, 25 bp, Homo sapien
ctggaggcagaccccagggattagg

SEQ ID NO: 597472 - DNA, 25 bp, Homo sapien
ggaggcagaccccagggattagggc

SEQ ID NO: 597473 - DNA, 25 bp, Homo sapien
atgctggtggcgttgtggtccttca

SEQ ID NO: 597474 - DNA, 25 bp, Homo sapien
cttttcccgcatggcactgagcagc

SEQ ID NO: 597475 - DNA, 25 bp, Homo sapien
cacagggatgcctccggctggcttt

SEQ ID NO: 597476 - DNA, 25 bp, Homo sapien
tcaggacggtgttcaccaggctgcc

SEQ ID NO: 597477 - DNA, 25 bp, Homo sapien
ctggaggatgttagctgtgatgacc

SEQ ID NO: 597478 - DNA, 25 bp, Homo sapien
ccagggggatcttgactagcagctc

SEQ ID NO: 597479 - DNA, 25 bp, Homo sapien
ggtcattggccgagggcttcacctg

SEQ ID NO: 597480 - DNA, 25 bp, Homo sapien
ctcctggtcattggccgagggcttc

SEQ ID NO: 597481 - DNA, 25 bp, Homo sapien
tggggccacttgcactggtgtccat

SEQ ID NO: 597482 - DNA, 25 bp, Homo sapien
tgtccatgcggatggtggcttgggc

SEQ ID NO: 597483 - DNA, 25 bp, Homo sapien
ctccacgatggtcttgaccaggggc

SEQ ID NO: 597484 - DNA, 25 bp, Homo sapien
ttatgcagcagttggatgcgcaggc

SEQ ID NO: 597485 - DNA, 25 bp, Homo sapien
ggttcatgacctgcttagctaaggc

SEQ ID NO: 597486 - DNA, 25 bp, Homo sapien
ggatggcactaggaggttcatgacc

SEQ ID NO: 597487 - DNA, 25 bp, Homo sapien
tagctaaggcgttcaccaggaagga

SEQ ID NO: 597488 - DNA, 25 bp, Homo sapien
tggtttttcactagattgggcaggg

SEQ ID NO: 597489 - DNA, 25 bp, Homo sapien
catcacactggtcgcctaaaattgg

SEQ ID NO: 597490 - DNA, 25 bp, Homo sapien
cagggaaatccgcaaaagctacaaa

SEQ ID NO: 597491 - DNA, 25 bp, Homo sapien
aatttctgagctgggtgctaagccc

SEQ ID NO: 597492 - DNA, 25 bp, Homo sapien
ggccctgaagggagtatttccacca

SEQ ID NO: 597493 - DNA, 25 bp, Homo sapien
tcagggcagtgctccaagattattg

SEQ ID NO: 597494 - DNA, 25 bp, Homo sapien
ttgaccaccccttaatactcttgag

SEQ ID NO: 597495 - DNA, 25 bp, Homo sapien
aaattgccagcagtcctcaacaggg

SEQ ID NO: 597496 - DNA, 25 bp, Homo sapien
tgtcagactctggaacagaggccag

SEQ ID NO: 597497 - DNA, 25 bp, Homo sapien
gccattgaaggaagcctcgatcacg

SEQ ID NO: 597498 - DNA, 25 bp, Homo sapien
aggaagcctcgatcacgggacacag

SEQ ID NO: 597499 - DNA, 25 bp, Homo sapien
gaggtctgcatacatgccattgaag

SEQ ID NO: 597500 - DNA, 25 bp, Homo sapien
ccagctgcaggaggtctgcatacat

SEQ ID NO: 597501 - DNA, 25 bp, Homo sapien
aatatctgacgattggaagaactct

SEQ ID NO: 597502 - DNA, 25 bp, Homo sapien
caaatatctgacgattggaagaact

SEQ ID NO: 597503 - DNA, 25 bp, Homo sapien
attcctgcttcatgtatacaactgg

SEQ ID NO: 597504 - DNA, 25 bp, Homo sapien
aacggcggtagaatagtaattcctg

SEQ ID NO: 597505 - DNA, 25 bp, Homo sapien
tggctggtctcttctcgcgtctgaa

SEQ ID NO: 597506 - DNA, 25 bp, Homo sapien
aaatgagggtatagtgcccgccagg

SEQ ID NO: 597507 - DNA, 25 bp, Homo sapien
ggacttcggtttgagccccagtgac

SEQ ID NO: 597508 - DNA, 25 bp, Homo sapien
tctgtttcctcgtcttaaaatgagg

SEQ ID NO: 597509 - DNA, 25 bp, Homo sapien
catactatgagagcatgggaaccca

SEQ ID NO: 597510 - DNA, 25 bp, Homo sapien
gtctggacaccctatgagcacctgg

SEQ ID NO: 597511 - DNA, 25 bp, Homo sapien
taagtgccaggcctctgcatgtcag

SEQ ID NO: 597512 - DNA, 25 bp, Homo sapien
caaagatctcgtgttcgcgtcagaa

SEQ ID NO: 597513 - DNA, 25 bp, Homo sapien
aaggtcaaactccagacggtcaatg

SEQ ID NO: 597514 - DNA, 25 bp, Homo sapien
ctccagacggtcaatgctgagggaa

SEQ ID NO: 597515 - DNA, 25 bp, Homo sapien
tgtcacccttgatggcaggatacag

SEQ ID NO: 597516 - DNA, 25 bp, Homo sapien
gtcaaactccagacggtcaatgctg

SEQ ID NO: 597517 - DNA, 25 bp, Homo sapien
tattgaaccacttggtcacctttcc

SEQ ID NO: 597518 - DNA, 25 bp, Homo sapien
gctgcagagttattgaaccacttgg

SEQ ID NO: 597519 - DNA, 25 bp, Homo sapien
ggtcacctttccctgtgagtccaac

SEQ ID NO: 597520 - DNA, 25 bp, Homo sapien
ggaagctgcagagttattgaaccac

SEQ ID NO: 597521 - DNA, 25 bp, Homo sapien
cagctttcaccacgtcctgactcac

SEQ ID NO: 597522 - DNA, 25 bp, Homo sapien
tgcagctttcaccacgtcctgactc

SEQ ID NO: 597523 - DNA, 25 bp, Homo sapien
gcagctttcaccacgtcctgactca

SEQ ID NO: 597524 - DNA, 25 bp, Homo sapien
ttgacttcagccgatgggcactctc

SEQ ID NO: 597525 - DNA, 25 bp, Homo sapien
gatcagcccgatgcttgacttcagc

SEQ ID NO: 597526 - DNA, 25 bp, Homo sapien
gatgcttgacttcagccgatgggca

SEQ ID NO: 597527 - DNA, 25 bp, Homo sapien
cttttcattgatcagcccgatgctt

SEQ ID NO: 597528 - DNA, 25 bp, Homo sapien
catggccttggtctataaaaaactc

SEQ ID NO: 597529 - DNA, 25 bp, Homo sapien
taggatcttcacgatctgggtagat

SEQ ID NO: 597530 - DNA, 25 bp, Homo sapien
gggaaacacttccagcacgatcagt

SEQ ID NO: 597531 - DNA, 25 bp, Homo sapien
gggtagatcccagcttatctgcagc

SEQ ID NO: 597532 - DNA, 25 bp, Homo sapien
caagttgagtataagttggtcacct

SEQ ID NO: 597533 - DNA, 25 bp, Homo sapien
cctttggtgtaaaactgagcttccg

SEQ ID NO: 597534 - DNA, 25 bp, Homo sapien
ctgatgttattcaagttgagtataa

SEQ ID NO: 597535 - DNA, 25 bp, Homo sapien
ttggtcacctttggtgtaaaactga

SEQ ID NO: 597536 - DNA, 25 bp, Homo sapien
catgaagcccttgcgtcgtggagct

SEQ ID NO: 597537 - DNA, 25 bp, Homo sapien
tgcgggctccagtgaaccacatgaa

SEQ ID NO: 597538 - DNA, 25 bp, Homo sapien
attaaacagcccagccctatgtggg

SEQ ID NO: 597539 - DNA, 25 bp, Homo sapien
gaaaacaaatagcagtccagtgagc

SEQ ID NO: 597540 - DNA, 25 bp, Homo sapien
agagttcatcagctggatccgatca

SEQ ID NO: 597541 - DNA, 25 bp, Homo sapien
ttggaaccagccaatcccagagttc

SEQ ID NO: 597542 - DNA, 25 bp, Homo sapien
gagttcatcagctggatccgatcag

SEQ ID NO: 597543 - DNA, 25 bp, Homo sapien
gttcatcagctggatccgatcagag

SEQ ID NO: 597544 - DNA, 25 bp, Homo sapien
gatctcagtgatgatgtttttcaga

SEQ ID NO: 597545 - DNA, 25 bp, Homo sapien
aggatggagtggatgatctcagtga

SEQ ID NO: 597546 - DNA, 25 bp, Homo sapien
cattctggttcggcagcaggatgga

SEQ ID NO: 597547 - DNA, 25 bp, Homo sapien
gagtggatgatctcagtgatgatgt

SEQ ID NO: 597548 - DNA, 25 bp, Homo sapien
cccagcagaggtttctatactttga

SEQ ID NO: 597549 - DNA, 25 bp, Homo sapien
attctcttacgctcttgctcaagaa

SEQ ID NO: 597550 - DNA, 25 bp, Homo sapien
cgctcttgctcaagaaccatcaggg

SEQ ID NO: 597551 - DNA, 25 bp, Homo sapien
ccccagcagaggtttctatactttg

SEQ ID NO: 597552 - DNA, 25 bp, Homo sapien
aaatgtggtcagaaactgatgggcc

SEQ ID NO: 597553 - DNA, 25 bp, Homo sapien
gtggtcagaaactgatgggcctggg

SEQ ID NO: 597554 - DNA, 25 bp, Homo sapien
atgtggtcagaaactgatgggcctg

SEQ ID NO: 597555 - DNA, 25 bp, Homo sapien
caaatgtggtcagaaactgatgggc

SEQ ID NO: 597556 - DNA, 25 bp, Homo sapien
tcaccaatgacactgggaccccaga

SEQ ID NO: 597557 - DNA, 25 bp, Homo sapien
ggccttcaccaatgacactgggacc

SEQ ID NO: 597558 - DNA, 25 bp, Homo sapien
gctgcctcgaatcccaaggccttca

SEQ ID NO: 597559 - DNA, 25 bp, Homo sapien
ctgcctcgaatcccaaggccttcac

SEQ ID NO: 597560 - DNA, 25 bp, Homo sapien
cctcctcaggcattggctcaaatgt

SEQ ID NO: 597561 - DNA, 25 bp, Homo sapien
atttcggtggcctcaagcactcaga

SEQ ID NO: 597562 - DNA, 25 bp, Homo sapien
gagaacggcctaatacgctgtccct

SEQ ID NO: 597563 - DNA, 25 bp, Homo sapien
ctcttctgctaaaaggtaggcttga

SEQ ID NO: 597564 - DNA, 25 bp, Homo sapien
gatttgcacttagcacccgccttga

SEQ ID NO: 597565 - DNA, 25 bp, Homo sapien
gactgtgagctgttcttcttaaggg

SEQ ID NO: 597566 - DNA, 25 bp, Homo sapien
taaggtgtccatctcagttagcagg

SEQ ID NO: 597567 - DNA, 25 bp, Homo sapien
caaagtcacgcactcagtaggtggc

SEQ ID NO: 597568 - DNA, 25 bp, Homo sapien
aggctggagtaagcacaagggcatc

SEQ ID NO: 597569 - DNA, 25 bp, Homo sapien
ggtctatagagctcacacccatact

SEQ ID NO: 597570 - DNA, 25 bp, Homo sapien
aagtgtttattgattgcagagaggg

SEQ ID NO: 597571 - DNA, 25 bp, Homo sapien
ggatggtctatagagctcacaccca

SEQ ID NO: 597572 - DNA, 25 bp, Homo sapien
cagagagggatggtctatagagctc

SEQ ID NO: 597573 - DNA, 25 bp, Homo sapien
cagctgtttgttacttcatctccca

SEQ ID NO: 597574 - DNA, 25 bp, Homo sapien
agctgtttgttacttcatctcccat

SEQ ID NO: 597575 - DNA, 25 bp, Homo sapien
taatctctgctgagagatgggaggt

SEQ ID NO: 597576 - DNA, 25 bp, Homo sapien
gtttcatgggggtgtcttccacaaa

SEQ ID NO: 597577 - DNA, 25 bp, Homo sapien
gaggtttcatgggggtgtcttccac

SEQ ID NO: 597578 - DNA, 25 bp, Homo sapien
atctctgctgagagatgggaggttt

SEQ ID NO: 597579 - DNA, 25 bp, Homo sapien
ggcgcagggtgttagtggaaccact

SEQ ID NO: 597580 - DNA, 25 bp, Homo sapien
accaggaaggcgcagggtgttagtg

SEQ ID NO: 597581 - DNA, 25 bp, Homo sapien
ggaaggcgcagggtgttagtggaac

SEQ ID NO: 597582 - DNA, 25 bp, Homo sapien
cgcagggtgttagtggaaccactga

SEQ ID NO: 597583 - DNA, 25 bp, Homo sapien
ttcccactgattcttgtcctctgaa

SEQ ID NO: 597584 - DNA, 25 bp, Homo sapien
agcaagcagtgacatccagagcagc

SEQ ID NO: 597585 - DNA, 25 bp, Homo sapien
ctgaaggcagagtaggtgctgggcc

SEQ ID NO: 597586 - DNA, 25 bp, Homo sapien
ctgattcttgtcctctgaaggcaga

SEQ ID NO: 597587 - DNA, 25 bp, Homo sapien
ctgtccgaggatgcaagccccgctt

SEQ ID NO: 597588 - DNA, 25 bp, Homo sapien
ccgaggatgcaagccccgcttcagt

SEQ ID NO: 597589 - DNA, 25 bp, Homo sapien
tccgaggatgcaagccccgcttcag

SEQ ID NO: 597590 - DNA, 25 bp, Homo sapien
gatgcaagccccgcttcagtgtggg

SEQ ID NO: 597591 - DNA, 25 bp, Homo sapien
tcttggagaggcgtttgcctacaaa

SEQ ID NO: 597592 - DNA, 25 bp, Homo sapien
agcatgcagtccagggtgtagtgct

SEQ ID NO: 597593 - DNA, 25 bp, Homo sapien
gcatgcagtccagggtgtagtgctc

SEQ ID NO: 597594 - DNA, 25 bp, Homo sapien
aggcgtttgcctacaaagggcaggt

SEQ ID NO: 597595 - DNA, 25 bp, Homo sapien
gccctgagtagctcccacagcaggg

SEQ ID NO: 597596 - DNA, 25 bp, Homo sapien
gaggctcttccctgaaagcagttcc

SEQ ID NO: 597597 - DNA, 25 bp, Homo sapien
agcagggggaggctcttccctgaaa

SEQ ID NO: 597598 - DNA, 25 bp, Homo sapien
ctgccctgagtagctcccacagcag

SEQ ID NO: 597599 - DNA, 25 bp, Homo sapien
ctctgtggggtgtgagtatccggat

SEQ ID NO: 597600 - DNA, 25 bp, Homo sapien
aggatgttggtgtggcctggccagg

SEQ ID NO: 597601 - DNA, 25 bp, Homo sapien
ctgtgagaggcatggaggatgttgg

SEQ ID NO: 597602 - DNA, 25 bp, Homo sapien
cctggccaggcctctgtgactctgt

SEQ ID NO: 597603 - DNA, 25 bp, Homo sapien
caggctatcacttaggatttgcagg

SEQ ID NO: 597604 - DNA, 25 bp, Homo sapien
tgacctgcagcaggctatcacttag

SEQ ID NO: 597605 - DNA, 25 bp, Homo sapien
tttgcagcgcaacgtgacctgcagc

SEQ ID NO: 597606 - DNA, 25 bp, Homo sapien
gaggtacagtttgcagcgcaacgtg

SEQ ID NO: 597607 - DNA, 25 bp, Homo sapien
tccagccgtactccaatgtgaatgc

SEQ ID NO: 597608 - DNA, 25 bp, Homo sapien
gaatgctcttgatgactttgagcca

SEQ ID NO: 597609 - DNA, 25 bp, Homo sapien
ctcttgatgactttgagccacggga

SEQ ID NO: 597610 - DNA, 25 bp, Homo sapien
cttggtggtattccctgtctgttcc

SEQ ID NO: 597611 - DNA, 25 bp, Homo sapien
ctgcagagcctcagtgctcaggtgt

SEQ ID NO: 597612 - DNA, 25 bp, Homo sapien
cagagcctcagtgctcaggtgtcca

SEQ ID NO: 597613 - DNA, 25 bp, Homo sapien
gcctcagtgctcaggtgtccaggtg

SEQ ID NO: 597614 - DNA, 25 bp, Homo sapien
ccaggtgggctgtggcactcctcac

SEQ ID NO: 597615 - DNA, 25 bp, Homo sapien
ccctgggctgatgttgggaagggct

SEQ ID NO: 597616 - DNA, 25 bp, Homo sapien
tgtagacttccagccaaaagagcag

SEQ ID NO: 597617 - DNA, 25 bp, Homo sapien
aaaagagcaggtctgccacgcttcc

SEQ ID NO: 597618 - DNA, 25 bp, Homo sapien
caggccttgaggctctctggcccgg

SEQ ID NO: 597619 - DNA, 25 bp, Homo sapien
ctgggggtccacgtggaactccttg

SEQ ID NO: 597620 - DNA, 25 bp, Homo sapien
agctcaatccgtgacaatagctgaa

SEQ ID NO: 597621 - DNA, 25 bp, Homo sapien
gctccagctcaatccgtgacaatag

SEQ ID NO: 597622 - DNA, 25 bp, Homo sapien
ccagctcaatccgtgacaatagctg

SEQ ID NO: 597623 - DNA, 25 bp, Homo sapien
tgggctccagctcaatccgtgacaa

SEQ ID NO: 597624 - DNA, 25 bp, Homo sapien
tagcactagcaagcccggctggatg

SEQ ID NO: 597625 - DNA, 25 bp, Homo sapien
tcaaggcggaccgtgggaggatcag

SEQ ID NO: 597626 - DNA, 25 bp, Homo sapien
tggtggccgtgtggccgtcaaggcg

SEQ ID NO: 597627 - DNA, 25 bp, Homo sapien
ggtcagttgtatgctccctctggac

SEQ ID NO: 597628 - DNA, 25 bp, Homo sapien
accatgcccggtcatgtagttcctg

SEQ ID NO: 597629 - DNA, 25 bp, Homo sapien
ccatgcccggtcatgtagttcctga

SEQ ID NO: 597630 - DNA, 25 bp, Homo sapien
catgcccggtcatgtagttcctgat

SEQ ID NO: 597631 - DNA, 25 bp, Homo sapien
atgcccggtcatgtagttcctgatt

SEQ ID NO: 597632 - DNA, 25 bp, Homo sapien
ttgaggggaatagccccaaacacta

SEQ ID NO: 597633 - DNA, 25 bp, Homo sapien
gaggggaatagccccaaacactata

SEQ ID NO: 597634 - DNA, 25 bp, Homo sapien
tgaggggaatagccccaaacactat

SEQ ID NO: 597635 - DNA, 25 bp, Homo sapien
ggggaatagccccaaacactatatg

SEQ ID NO: 597636 - DNA, 25 bp, Homo sapien
cctgatgttgggcacagggaggctg

SEQ ID NO: 597637 - DNA, 25 bp, Homo sapien
acccctgatgttgggcacagggagg

SEQ ID NO: 597638 - DNA, 25 bp, Homo sapien
gatgttgggcacagggaggctgtgt

SEQ ID NO: 597639 - DNA, 25 bp, Homo sapien
ggacccctgatgttgggcacaggga

SEQ ID NO: 597640 - DNA, 25 bp, Homo sapien
ttgcccagaatggccagcagcaggt

SEQ ID NO: 597641 - DNA, 25 bp, Homo sapien
gcccagaatggccagcagcaggtaa

SEQ ID NO: 597642 - DNA, 25 bp, Homo sapien
cccagaatggccagcagcaggtaat

SEQ ID NO: 597643 - DNA, 25 bp, Homo sapien
ccagaatggccagcagcaggtaatc

SEQ ID NO: 597644 - DNA, 25 bp, Homo sapien
tggggcgggatctttttctgttcac

SEQ ID NO: 597645 - DNA, 25 bp, Homo sapien
cgtgcacgttttgactctggggcgg

SEQ ID NO: 597646 - DNA, 25 bp, Homo sapien
ctctggggcgggatctttttctgtt

SEQ ID NO: 597647 - DNA, 25 bp, Homo sapien
gcacgttttgactctggggcgggat

SEQ ID NO: 597648 - DNA, 25 bp, Homo sapien
gctccagtgtcactatggctgcatt

SEQ ID NO: 597649 - DNA, 25 bp, Homo sapien
gtcactatggctgcatttgcctgtg

SEQ ID NO: 597650 - DNA, 25 bp, Homo sapien
aagggcaacaggttggctctgaata

SEQ ID NO: 597651 - DNA, 25 bp, Homo sapien
ttggctctgaatagctccagtgtca

SEQ ID NO: 597652 - DNA, 25 bp, Homo sapien
tgcatcccaattttatagcccaatg

SEQ ID NO: 597653 - DNA, 25 bp, Homo sapien
caagttttcggaagctgcctttcct

SEQ ID NO: 597654 - DNA, 25 bp, Homo sapien
tgggtccaagttttcggaagctgcc

SEQ ID NO: 597655 - DNA, 25 bp, Homo sapien
tgctcctgccgccagactgttgatg

SEQ ID NO: 597656 - DNA, 25 bp, Homo sapien
acttggtgacgggtggacacctgcc

SEQ ID NO: 597657 - DNA, 25 bp, Homo sapien
caatccaggtggaaaacggacaggc

SEQ ID NO: 597658 - DNA, 25 bp, Homo sapien
tagggaaggcctatctgcgagctcc

SEQ ID NO: 597659 - DNA, 25 bp, Homo sapien
gacttttgagactgacagacttcca

SEQ ID NO: 597660 - DNA, 25 bp, Homo sapien
ggtcccaagcaaaccagccaagtta

SEQ ID NO: 597661 - DNA, 25 bp, Homo sapien
gctcactgtggataatacggtccca

SEQ ID NO: 597662 - DNA, 25 bp, Homo sapien
cagcaggtccaagtcgctcactgtg

SEQ ID NO: 597663 - DNA, 25 bp, Homo sapien
gctggcacctccaagtatatcaagg

SEQ ID NO: 597664 - DNA, 25 bp, Homo sapien
agtttcgaggacttgccgccacttc

SEQ ID NO: 597665 - DNA, 25 bp, Homo sapien
gcaatggaagtttcgaggacttgcc

SEQ ID NO: 597666 - DNA, 25 bp, Homo sapien
cagcaccagtgagttctgagagcaa

SEQ ID NO: 597667 - DNA, 25 bp, Homo sapien
cagtgagttctgagagcaatggaag

SEQ ID NO: 597668 - DNA, 25 bp, Homo sapien
tacagggttcttgtctgaaccagtg

SEQ ID NO: 597669 - DNA, 25 bp, Homo sapien
tccttttacagggttcttgtctgaa

SEQ ID NO: 597670 - DNA, 25 bp, Homo sapien
cagtgccaccgaggagtccttttac

SEQ ID NO: 597671 - DNA, 25 bp, Homo sapien
ctgaaccagtgggtagtaggctcac

SEQ ID NO: 597672 - DNA, 25 bp, Homo sapien
tgaggtcttggactttgtcggtcac

SEQ ID NO: 597673 - DNA, 25 bp, Homo sapien
ggtcttggactttgtcggtcacatc

SEQ ID NO: 597674 - DNA, 25 bp, Homo sapien
caggtctgggagtgcatcgctgatg

SEQ ID NO: 597675 - DNA, 25 bp, Homo sapien
cttggactttgtcggtcacatcctt

SEQ ID NO: 597676 - DNA, 25 bp, Homo sapien
cctgtcgtggttgacttcatgctct

SEQ ID NO: 597677 - DNA, 25 bp, Homo sapien
aaggccgtagtcgtggcttggacat

SEQ ID NO: 597678 - DNA, 25 bp, Homo sapien
tcatgctctccacagttactttttc

SEQ ID NO: 597679 - DNA, 25 bp, Homo sapien
acatggatcccatcgcctgtcgtgg

SEQ ID NO: 597680 - DNA, 25 bp, Homo sapien
ggtctttgctcactggatgttacaa

SEQ ID NO: 597681 - DNA, 25 bp, Homo sapien
tctttgctcactggatgttacaacc

SEQ ID NO: 597682 - DNA, 25 bp, Homo sapien
ctggtctttgctcactggatgttac

SEQ ID NO: 597683 - DNA, 25 bp, Homo sapien
tggtctttgctcactggatgttaca

SEQ ID NO: 597684 - DNA, 25 bp, Homo sapien
tgctgctgtcctctctgttgtctct

SEQ ID NO: 597685 - DNA, 25 bp, Homo sapien
ccatgctgctgtcctctctgttgtc

SEQ ID NO: 597686 - DNA, 25 bp, Homo sapien
catgctgctgtcctctctgttgtct

SEQ ID NO: 597687 - DNA, 25 bp, Homo sapien
ctgctgtcctctctgttgtctctac

SEQ ID NO: 597688 - DNA, 25 bp, Homo sapien
tctgtataccattataaatgttgtc

SEQ ID NO: 597689 - DNA, 25 bp, Homo sapien
cttaggttttttggacagattcctg

SEQ ID NO: 597690 - DNA, 25 bp, Homo sapien
tcctgtaagtgaaactaactgagtc

SEQ ID NO: 597691 - DNA, 25 bp, Homo sapien
gaatacccctatgtctttgtgttta

SEQ ID NO: 597692 - DNA, 25 bp, Homo sapien
ctgaagagagagaacttccaggcac

SEQ ID NO: 597693 - DNA, 25 bp, Homo sapien
cagtgacggtatttttgttaaagtg

SEQ ID NO: 597694 - DNA, 25 bp, Homo sapien
aacttccaggcacagtgacggtatt

SEQ ID NO: 597695 - DNA, 25 bp, Homo sapien
ggcacagtgacggtatttttgttaa

SEQ ID NO: 597696 - DNA, 25 bp, Homo sapien
cagcatcgcgtaggacagaattagg

SEQ ID NO: 597697 - DNA, 25 bp, Homo sapien
gacagaattagggaaacgctgacat

SEQ ID NO: 597698 - DNA, 25 bp, Homo sapien
atgatgaccttcagcatcgcgtagg

SEQ ID NO: 597699 - DNA, 25 bp, Homo sapien
gaccttcagcatcgcgtaggacaga

SEQ ID NO: 597700 - DNA, 25 bp, Homo sapien
gacaaggcctatttctaaacattca

SEQ ID NO: 597701 - DNA, 25 bp, Homo sapien
tgttgcagtatgaaacactctcgca

SEQ ID NO: 597702 - DNA, 25 bp, Homo sapien
tatcgtctggtgtaagttggtcacc

SEQ ID NO: 597703 - DNA, 25 bp, Homo sapien
cactctcgcatcattcagatcatac

SEQ ID NO: 597704 - DNA, 25 bp, Homo sapien
cagtagctggcttagattttatgtc

SEQ ID NO: 597705 - DNA, 25 bp, Homo sapien
tggtgatgttaacccagtagctggc

SEQ ID NO: 597706 - DNA, 25 bp, Homo sapien
gtaggttagtttggtgattcttgca

SEQ ID NO: 597707 - DNA, 25 bp, Homo sapien
gacaaagctcccaccgtccttggtg

SEQ ID NO: 597708 - DNA, 25 bp, Homo sapien
tctgagcctcagagtttagggagta

SEQ ID NO: 597709 - DNA, 25 bp, Homo sapien
tcccaggtcagagggttgtctgcct

SEQ ID NO: 597710 - DNA, 25 bp, Homo sapien
taaacactgctccttgcaattcttc

SEQ ID NO: 597711 - DNA, 25 bp, Homo sapien
ggccttatcctcctaagccaacctg

SEQ ID NO: 597712 - DNA, 25 bp, Homo sapien
gaaatcttgctcacgaatgagatga

SEQ ID NO: 597713 - DNA, 25 bp, Homo sapien
agtttgtctttcgaaatcttgctca

SEQ ID NO: 597714 - DNA, 25 bp, Homo sapien
tctttcgaaatcttgctcacgaatg

SEQ ID NO: 597715 - DNA, 25 bp, Homo sapien
aagtttgatgtctgtgatcagtttg

SEQ ID NO: 597716 - DNA, 25 bp, Homo sapien
aacccagtccctacacacacagaca

SEQ ID NO: 597717 - DNA, 25 bp, Homo sapien
tcagtagtttgagaatagaccagct

SEQ ID NO: 597718 - DNA, 25 bp, Homo sapien
tggtgaaacccagtccctacacaca

SEQ ID NO: 597719 - DNA, 25 bp, Homo sapien
gtttgagaatagaccagcttgtgca

SEQ ID NO: 597720 - DNA, 25 bp, Homo sapien
cacgcccagtgaattttttaattat

SEQ ID NO: 597721 - DNA, 25 bp, Homo sapien
gcagcatcacctgcctggactcaag

SEQ ID NO: 597722 - DNA, 25 bp, Homo sapien
caattctcccacttcagcctcccaa

SEQ ID NO: 597723 - DNA, 25 bp, Homo sapien
ctcactgcagcatcacctgcctgga

SEQ ID NO: 597724 - DNA, 25 bp, Homo sapien
tttccccacagattcaacagtagta

SEQ ID NO: 597725 - DNA, 25 bp, Homo sapien
tgtatgtacctgcaaataggtacct

SEQ ID NO: 597726 - DNA, 25 bp, Homo sapien
ataggtacctcaatattcccaccct

SEQ ID NO: 597727 - DNA, 25 bp, Homo sapien
taatgtaggtagcatggagcatatt

SEQ ID NO: 597728 - DNA, 25 bp, Homo sapien
ggaaccactgatgtttagcacctgc

SEQ ID NO: 597729 - DNA, 25 bp, Homo sapien
ggaacctgccagtttactagggctg

SEQ ID NO: 597730 - DNA, 25 bp, Homo sapien
taagaatctaaatgcctgaggtgga

SEQ ID NO: 597731 - DNA, 25 bp, Homo sapien
caccgcactggctcaagattgcatg

SEQ ID NO: 597732 - DNA, 25 bp, Homo sapien
cactttgaggagctcaattgccgct

SEQ ID NO: 597733 - DNA, 25 bp, Homo sapien
gcttaagtccgtggctagtggctgc

SEQ ID NO: 597734 - DNA, 25 bp, Homo sapien
aattgccgcttaagtccgtggctag

SEQ ID NO: 597735 - DNA, 25 bp, Homo sapien
gtggctgccctaaagttcagcaccg

SEQ ID NO: 597736 - DNA, 25 bp, Homo sapien
tagggctaaccctagagctgctgct

SEQ ID NO: 597737 - DNA, 25 bp, Homo sapien
tacttcggaaactgcgatgtgctgg

SEQ ID NO: 597738 - DNA, 25 bp, Homo sapien
caagttgtcggctagggctgcagtc

SEQ ID NO: 597739 - DNA, 25 bp, Homo sapien
caaacagtgcctcttatgacccggt

SEQ ID NO: 597740 - DNA, 25 bp, Homo sapien
gtcccatctgaagctggagtaccct

SEQ ID NO: 597741 - DNA, 25 bp, Homo sapien
ccgccgagggtgtgcaggaggtgtc

SEQ ID NO: 597742 - DNA, 25 bp, Homo sapien
tggtaataagcctcttatccccagg

SEQ ID NO: 597743 - DNA, 25 bp, Homo sapien
gcctggacccgccagcttgtggatg

SEQ ID NO: 597744 - DNA, 25 bp, Homo sapien
tgttcagcgtggagtcaccgcagga

SEQ ID NO: 597745 - DNA, 25 bp, Homo sapien
tgccttgtgctgcatggttcagagg

SEQ ID NO: 597746 - DNA, 25 bp, Homo sapien
aaggtccccattagccactcattcg

SEQ ID NO: 597747 - DNA, 25 bp, Homo sapien
gccactcattcgctgacacttatgc

SEQ ID NO: 597748 - DNA, 25 bp, Homo sapien
cagagctgaccccaacagtttctgc

SEQ ID NO: 597749 - DNA, 25 bp, Homo sapien
gtctccacccatttgtgcctgcagg

SEQ ID NO: 597750 - DNA, 25 bp, Homo sapien
tctgctcggcagatggtcaagacac

SEQ ID NO: 597751 - DNA, 25 bp, Homo sapien
cagctgcagcctaatggtcaggtcc

SEQ ID NO: 597752 - DNA, 25 bp, Homo sapien
tcgcttgttcctatgccccatgaag

SEQ ID NO: 597753 - DNA, 25 bp, Homo sapien
gacaaaagccaaagagtcttttctg

SEQ ID NO: 597754 - DNA, 25 bp, Homo sapien
cggttttcttcttcgtggaggcagg

SEQ ID NO: 597755 - DNA, 25 bp, Homo sapien
tgctagtattttggctatctgttgc

SEQ ID NO: 597756 - DNA, 25 bp, Homo sapien
tgttgctgtatcacaaaccaaccct

SEQ ID NO: 597757 - DNA, 25 bp, Homo sapien
gcatgagccatcgcctgtattttta

SEQ ID NO: 597758 - DNA, 25 bp, Homo sapien
atgagccatcgcctgtatttttaat

SEQ ID NO: 597759 - DNA, 25 bp, Homo sapien
ggcatgagccatcgcctgtattttt

SEQ ID NO: 597760 - DNA, 25 bp, Homo sapien
gagccatcgcctgtatttttaatag

SEQ ID NO: 597761 - DNA, 25 bp, Homo sapien
taggtgtaagcaactgtgccctgcc

SEQ ID NO: 597762 - DNA, 25 bp, Homo sapien
tataggtgtaagcaactgtgccctg

SEQ ID NO: 597763 - DNA, 25 bp, Homo sapien
gttggccacgctggtttcgcactgc

SEQ ID NO: 597764 - DNA, 25 bp, Homo sapien
tgtaagcaactgtgccctgcctaac

SEQ ID NO: 597765 - DNA, 25 bp, Homo sapien
catcttttactgactagcagattga

SEQ ID NO: 597766 - DNA, 25 bp, Homo sapien
ggttacacagttagacagtgctgga

SEQ ID NO: 597767 - DNA, 25 bp, Homo sapien
atccaagagcatctgactccagagg

SEQ ID NO: 597768 - DNA, 25 bp, Homo sapien
ggtaaatgaccttgtccatggttac

SEQ ID NO: 597769 - DNA, 25 bp, Homo sapien
taagcactgggataagtactggaga

SEQ ID NO: 597770 - DNA, 25 bp, Homo sapien
cttgagcttagaggacaggcttccc

SEQ ID NO: 597771 - DNA, 25 bp, Homo sapien
tgtcactgcttatcaggctcccagg

SEQ ID NO: 597772 - DNA, 25 bp, Homo sapien
gcctgatgagtgatcctgccctgtt

SEQ ID NO: 597773 - DNA, 25 bp, Homo sapien
tttgctccacactgagaagccccag

SEQ ID NO: 597774 - DNA, 25 bp, Homo sapien
cggccccagacccactttcaatgtt

SEQ ID NO: 597775 - DNA, 25 bp, Homo sapien
tgtagttgcatgatcatagcagcct

SEQ ID NO: 597776 - DNA, 25 bp, Homo sapien
agccccagggctttcagtgtttatt

SEQ ID NO: 597777 - DNA, 25 bp, Homo sapien
ccgcctcgacctcgcgaagcactgg

SEQ ID NO: 597778 - DNA, 25 bp, Homo sapien
gagcaaggacgttattacaagcctg

SEQ ID NO: 597779 - DNA, 25 bp, Homo sapien
gcaaggacgttattacaagcctgcc

SEQ ID NO: 597780 - DNA, 25 bp, Homo sapien
acagagcaaggacgttattacaagc

SEQ ID NO: 597781 - DNA, 25 bp, Homo sapien
aaacttggcttaatccagccctggc

SEQ ID NO: 597782 - DNA, 25 bp, Homo sapien
ttgattaaaatgtcttgtgggcctc

SEQ ID NO: 597783 - DNA, 25 bp, Homo sapien
gcatagctttggaccatgtgactcc

SEQ ID NO: 597784 - DNA, 25 bp, Homo sapien
ggcctctgtaggcaggttctggccc

SEQ ID NO: 597785 - DNA, 25 bp, Homo sapien
gagccaccgcgactggcctaatttt

SEQ ID NO: 597786 - DNA, 25 bp, Homo sapien
gccaccgcgactggcctaatttttg

SEQ ID NO: 597787 - DNA, 25 bp, Homo sapien
cgtgagccaccgcgactggcctaat

SEQ ID NO: 597788 - DNA, 25 bp, Homo sapien
gtgagccaccgcgactggcctaatt

SEQ ID NO: 597789 - DNA, 25 bp, Homo sapien
tggccctctgcaagagtctccatag

SEQ ID NO: 597790 - DNA, 25 bp, Homo sapien
gccccgtgatggtcagtttattgcg

SEQ ID NO: 597791 - DNA, 25 bp, Homo sapien
gaccacagcaggtgttatcccctct

SEQ ID NO: 597792 - DNA, 25 bp, Homo sapien
cagcagtttaactgtaggctgagtc

SEQ ID NO: 597793 - DNA, 25 bp, Homo sapien
cttgagagtgagcaggtaaaaccaa

SEQ ID NO: 597794 - DNA, 25 bp, Homo sapien
tcaacttgagagtgagcaggtaaaa

SEQ ID NO: 597795 - DNA, 25 bp, Homo sapien
tatcatcaacttgagagtgagcagg

SEQ ID NO: 597796 - DNA, 25 bp, Homo sapien
ttatcatcaacttgagagtgagcag

SEQ ID NO: 597797 - DNA, 25 bp, Homo sapien
tgcagccgccgagctaaccagacac

SEQ ID NO: 597798 - DNA, 25 bp, Homo sapien
ctctacccgcgacacgggtccctcg

SEQ ID NO: 597799 - DNA, 25 bp, Homo sapien
aggcgtcgccgcgagatctgcagcc

SEQ ID NO: 597800 - DNA, 25 bp, Homo sapien
agctaaccagacaccaccaccgctg

SEQ ID NO: 597801 - DNA, 25 bp, Homo sapien
gcggccgctccagggacgcctacca

SEQ ID NO: 597802 - DNA, 25 bp, Homo sapien
cggccgctccagggacgcctaccat

SEQ ID NO: 597803 - DNA, 25 bp, Homo sapien
gctgcagaagctatgctcactgggc

SEQ ID NO: 597804 - DNA, 25 bp, Homo sapien
gcaccgattttaagactgaactcct

SEQ ID NO: 597805 - DNA, 25 bp, Homo sapien
caaaacttcaatcaagggcgggtgc

SEQ ID NO: 597806 - DNA, 25 bp, Homo sapien
acagttctagactacttccccaagg

SEQ ID NO: 597807 - DNA, 25 bp, Homo sapien
cacaacccatgagacgggagtagga

SEQ ID NO: 597808 - DNA, 25 bp, Homo sapien
agagtcagctaagggcacaacccat

SEQ ID NO: 597809 - DNA, 25 bp, Homo sapien
ccggccgagaggaccacatttagag

SEQ ID NO: 597810 - DNA, 25 bp, Homo sapien
gagaagcagtgaccttcagtcaagg

SEQ ID NO: 597811 - DNA, 25 bp, Homo sapien
tcggctgacgtatctgcttattgac

SEQ ID NO: 597812 - DNA, 25 bp, Homo sapien
caaacactagctcatgtcgcacatg

SEQ ID NO: 597813 - DNA, 25 bp, Homo sapien
ctaaaatttcagatagcctcaaggg

SEQ ID NO: 597814 - DNA, 25 bp, Homo sapien
gacttaaagtcatactcggctgacg

SEQ ID NO: 597815 - DNA, 25 bp, Homo sapien
agaacacatgtctaaaaacccctag

SEQ ID NO: 597816 - DNA, 25 bp, Homo sapien
tatgggaaatcaattatcttcagga

SEQ ID NO: 597817 - DNA, 25 bp, Homo sapien
gaagccatgcgatagagggttaaaa

SEQ ID NO: 597818 - DNA, 25 bp, Homo sapien
cccctagtctagcaaaaagaagcca

SEQ ID NO: 597819 - DNA, 25 bp, Homo sapien
aaattagcatggacatttcttgggc

SEQ ID NO: 597820 - DNA, 25 bp, Homo sapien
cctcatagagccatgcaaaattagc

SEQ ID NO: 597821 - DNA, 25 bp, Homo sapien
ccatatttgacagctcctcatagag

SEQ ID NO: 597822 - DNA, 25 bp, Homo sapien
tagcatggacatttcttgggctttt

SEQ ID NO: 597823 - DNA, 25 bp, Homo sapien
ggccagtagcgcagttgcgcaatct

SEQ ID NO: 597824 - DNA, 25 bp, Homo sapien
cggccagtagcgcagttgcgcaatc

SEQ ID NO: 597825 - DNA, 25 bp, Homo sapien
acccggccagtagcgcagttgcgca

SEQ ID NO: 597826 - DNA, 25 bp, Homo sapien
tcacccggccagtagcgcagttgcg

SEQ ID NO: 597827 - DNA, 25 bp, Homo sapien
aaaagcaaaatgtaagctgggcacg

SEQ ID NO: 597828 - DNA, 25 bp, Homo sapien
aataaaagcaaaatgtaagctgggc

SEQ ID NO: 597829 - DNA, 25 bp, Homo sapien
taaaagcaaaatgtaagctgggcac

SEQ ID NO: 597830 - DNA, 25 bp, Homo sapien
aaaataaaagcaaaatgtaagctgg

SEQ ID NO: 597831 - DNA, 25 bp, Homo sapien
gaccctggagtctctatttcaattc

SEQ ID NO: 597832 - DNA, 25 bp, Homo sapien
ttccttccaagagtctatgaccctg

SEQ ID NO: 597833 - DNA, 25 bp, Homo sapien
attcttcagtgcatggaacctgtga

SEQ ID NO: 597834 - DNA, 25 bp, Homo sapien
ttcttcagtgcatggaacctgtgac

SEQ ID NO: 597835 - DNA, 25 bp, Homo sapien
gtgaagtaattaagggtgagggtca

SEQ ID NO: 597836 - DNA, 25 bp, Homo sapien
ctgtgaagtaattaagggtgagggt

SEQ ID NO: 597837 - DNA, 25 bp, Homo sapien
tgaagtaattaagggtgagggtcat

SEQ ID NO: 597838 - DNA, 25 bp, Homo sapien
tgtgaagtaattaagggtgagggtc

SEQ ID NO: 597839 - DNA, 25 bp, Homo sapien
cactggctttcactactcgtttctg

SEQ ID NO: 597840 - DNA, 25 bp, Homo sapien
cttggtagtaccagatgagctgaga

SEQ ID NO: 597841 - DNA, 25 bp, Homo sapien
agctgagatcatgtacactagtggt

SEQ ID NO: 597842 - DNA, 25 bp, Homo sapien
tatcactgaatttgatccactggct

SEQ ID NO: 597843 - DNA, 25 bp, Homo sapien
gaaaacaggtcacaaatccatcaac

SEQ ID NO: 597844 - DNA, 25 bp, Homo sapien
tgtcagtagatcatcagtacacacc

SEQ ID NO: 597845 - DNA, 25 bp, Homo sapien
aatgtattcattgctgggcgcagtg

SEQ ID NO: 597846 - DNA, 25 bp, Homo sapien
caaacgttgaactagcaaatcctga

SEQ ID NO: 597847 - DNA, 25 bp, Homo sapien
ttcctacaagtggatcaagaatggg

SEQ ID NO: 597848 - DNA, 25 bp, Homo sapien
catgtgcttttatagtgcttcctac

SEQ ID NO: 597849 - DNA, 25 bp, Homo sapien
gttcatgtgcttttatagtgcttcc

SEQ ID NO: 597850 - DNA, 25 bp, Homo sapien
tagtgcttcctacaagtggatcaag

SEQ ID NO: 597851 - DNA, 25 bp, Homo sapien
ttaaacccttgctctcaattcgtcc

SEQ ID NO: 597852 - DNA, 25 bp, Homo sapien
tgcaccctgcatttagtccttaaac

SEQ ID NO: 597853 - DNA, 25 bp, Homo sapien
ctgaagaagcatactcttccccttc

SEQ ID NO: 597854 - DNA, 25 bp, Homo sapien
gacactgacactgtactgcaccctg

SEQ ID NO: 597855 - DNA, 25 bp, Homo sapien
tgattcagaaaaactgctgggagct

SEQ ID NO: 597856 - DNA, 25 bp, Homo sapien
gttgtcaacgggtccactgggtcat

SEQ ID NO: 597857 - DNA, 25 bp, Homo sapien
cagatgaagaggatatacagcagca

SEQ ID NO: 597858 - DNA, 25 bp, Homo sapien
gaattccaaatgctagactcctggc

SEQ ID NO: 597859 - DNA, 25 bp, Homo sapien
gaaataagccaaatggacatcatct

SEQ ID NO: 597860 - DNA, 25 bp, Homo sapien
gcaagtcagaatactcccctggctt

SEQ ID NO: 597861 - DNA, 25 bp, Homo sapien
gagaaacacggttccaaaacacaga

SEQ ID NO: 597862 - DNA, 25 bp, Homo sapien
ctgaggattccatgcagtttgaaac

SEQ ID NO: 597863 - DNA, 25 bp, Homo sapien
gaaggaaaggagtgcatattgtatg

SEQ ID NO: 597864 - DNA, 25 bp, Homo sapien
aaggaaaggagtgcatattgtatga

SEQ ID NO: 597865 - DNA, 25 bp, Homo sapien
aggaaaggagtgcatattgtatgat

SEQ ID NO: 597866 - DNA, 25 bp, Homo sapien
aactcaaacatctatccacaggcaa

SEQ ID NO: 597867 - DNA, 25 bp, Homo sapien
caacaactggtactaaaacagctgg

SEQ ID NO: 597868 - DNA, 25 bp, Homo sapien
caatccggtagaggaatgatagtcc

SEQ ID NO: 597869 - DNA, 25 bp, Homo sapien
tgaaaacgaatatagctagaggact

SEQ ID NO: 597870 - DNA, 25 bp, Homo sapien
caggcataaagataaggtaaacata

SEQ ID NO: 597871 - DNA, 25 bp, Homo sapien
cctcgaaacatgaggaagatgcaga

SEQ ID NO: 597872 - DNA, 25 bp, Homo sapien
gacctcgaaacatgaggaagatgca

SEQ ID NO: 597873 - DNA, 25 bp, Homo sapien
ttgacctcgaaacatgaggaagatg

SEQ ID NO: 597874 - DNA, 25 bp, Homo sapien
tcattgacctcgaaacatgaggaag

SEQ ID NO: 597875 - DNA, 25 bp, Homo sapien
aggttgcagcgagctaacagcgcac

SEQ ID NO: 597876 - DNA, 25 bp, Homo sapien
cagaactatgagcttcacagcaggg

SEQ ID NO: 597877 - DNA, 25 bp, Homo sapien
gcatatgcctactagtaaactggag

SEQ ID NO: 597878 - DNA, 25 bp, Homo sapien
gataatcttgcaaactcctgtgaca

SEQ ID NO: 597879 - DNA, 25 bp, Homo sapien
ttcactggaaaaggaccatgcccat

SEQ ID NO: 597880 - DNA, 25 bp, Homo sapien
tgctacagcgttcagcctataaaag

SEQ ID NO: 597881 - DNA, 25 bp, Homo sapien
gaatgctgcctgaatcctttaatgc

SEQ ID NO: 597882 - DNA, 25 bp, Homo sapien
taataactccttacttgcacagaag

SEQ ID NO: 597883 - DNA, 25 bp, Homo sapien
taaggcaagtgcctagctacagcca

SEQ ID NO: 597884 - DNA, 25 bp, Homo sapien
agtagggtgcagctgctcatgctta

SEQ ID NO: 597885 - DNA, 25 bp, Homo sapien
ggtgcagctgctcatgcttataatg

SEQ ID NO: 597886 - DNA, 25 bp, Homo sapien
ctagtagggtgcagctgctcatgct

SEQ ID NO: 597887 - DNA, 25 bp, Homo sapien
cactagtagggtgcagctgctcatg

SEQ ID NO: 597888 - DNA, 25 bp, Homo sapien
gaatccccagatacagtcagtctct

SEQ ID NO: 597889 - DNA, 25 bp, Homo sapien
tcccattccagggaaacacagatgg

SEQ ID NO: 597890 - DNA, 25 bp, Homo sapien
aaagctcaatcggagaccagccttc

SEQ ID NO: 597891 - DNA, 25 bp, Homo sapien
tcactgactagagctgcctgtccca

SEQ ID NO: 597892 - DNA, 25 bp, Homo sapien
taacattcgtaaaatgggtgtcctg

SEQ ID NO: 597893 - DNA, 25 bp, Homo sapien
gggagactatttgccatcccattat

SEQ ID NO: 597894 - DNA, 25 bp, Homo sapien
tattatcacatacaacaggcaattc

SEQ ID NO: 597895 - DNA, 25 bp, Homo sapien
gggtgtcctggaaactcaacataat

SEQ ID NO: 597896 - DNA, 25 bp, Homo sapien
acagagcaggcacgcgcccgccggc

SEQ ID NO: 597897 - DNA, 25 bp, Homo sapien
ggacagagcaggcacgcgcccgccg

SEQ ID NO: 597898 - DNA, 25 bp, Homo sapien
gagcaggcacgcgcccgccggcagc

SEQ ID NO: 597899 - DNA, 25 bp, Homo sapien
gggacagagcaggcacgcgcccgcc

SEQ ID NO: 597900 - DNA, 25 bp, Homo sapien
tctagacaggaactggtatggtggc

SEQ ID NO: 597901 - DNA, 25 bp, Homo sapien
ttgtgctccacaaaaactaccatcc

SEQ ID NO: 597902 - DNA, 25 bp, Homo sapien
aatcttcatcataatatctagacag

SEQ ID NO: 597903 - DNA, 25 bp, Homo sapien
atatctagacaggaactggtatggt

SEQ ID NO: 597904 - DNA, 25 bp, Homo sapien
ttcaagcttattccagattctttag

SEQ ID NO: 597905 - DNA, 25 bp, Homo sapien
tttcaagcttattccagattcttta

SEQ ID NO: 597906 - DNA, 25 bp, Homo sapien
tcaagcttattccagattctttagc

SEQ ID NO: 597907 - DNA, 25 bp, Homo sapien
tatacacttggaacggtttaactca

SEQ ID NO: 597908 - DNA, 25 bp, Homo sapien
cggatgtgctgtagcaaaaatgtac

SEQ ID NO: 597909 - DNA, 25 bp, Homo sapien
cacaagtgtgagcagaaatacggat

SEQ ID NO: 597910 - DNA, 25 bp, Homo sapien
aaaatgtacagctgcagcctgcaga

SEQ ID NO: 597911 - DNA, 25 bp, Homo sapien
tcatagaccactccacccagtacag

SEQ ID NO: 597912 - DNA, 25 bp, Homo sapien
tataagatctcatagaccactccac

SEQ ID NO: 597913 - DNA, 25 bp, Homo sapien
tagaccactccacccagtacagaat

SEQ ID NO: 597914 - DNA, 25 bp, Homo sapien
ataagatctcatagaccactccacc

SEQ ID NO: 597915 - DNA, 25 bp, Homo sapien
tgacactctgaaagataaccaggta

SEQ ID NO: 597916 - DNA, 25 bp, Homo sapien
tctgaaagataaccaggtactctac

SEQ ID NO: 597917 - DNA, 25 bp, Homo sapien
cactctgaaagataaccaggtactc

SEQ ID NO: 597918 - DNA, 25 bp, Homo sapien
aacaatgacactctgaaagataacc

SEQ ID NO: 597919 - DNA, 25 bp, Homo sapien
attaggtgtaccaatactaaagtag

SEQ ID NO: 597920 - DNA, 25 bp, Homo sapien
ggagggcagacatatatactcattc

SEQ ID NO: 597921 - DNA, 25 bp, Homo sapien
cttggcctcctaggtagcctgggac

SEQ ID NO: 597922 - DNA, 25 bp, Homo sapien
gcacatacatcctacccaaatggag

SEQ ID NO: 597923 - DNA, 25 bp, Homo sapien
tatatactcattccaatactcatgc

SEQ ID NO: 597924 - DNA, 25 bp, Homo sapien
cgctggcacccttttctcaggacca

SEQ ID NO: 597925 - DNA, 25 bp, Homo sapien
gctggcacccttttctcaggaccaa

SEQ ID NO: 597926 - DNA, 25 bp, Homo sapien
gaggatctggactgtatcttcactt

SEQ ID NO: 597927 - DNA, 25 bp, Homo sapien
tggactgtatcttcacttccacagg

SEQ ID NO: 597928 - DNA, 25 bp, Homo sapien
tcttcacttccacaggcgatccagg

SEQ ID NO: 597929 - DNA, 25 bp, Homo sapien
aggtgaggatctggactgtatcttc

SEQ ID NO: 597930 - DNA, 25 bp, Homo sapien
tgcagtaggagtgaaggacactggc

SEQ ID NO: 597931 - DNA, 25 bp, Homo sapien
cctccaggatttattggtgggaggg

SEQ ID NO: 597932 - DNA, 25 bp, Homo sapien
ggtcctccaggatttattggtggga

SEQ ID NO: 597933 - DNA, 25 bp, Homo sapien
aggacactggcctcggtcctccagg

SEQ ID NO: 597934 - DNA, 25 bp, Homo sapien
ctgaataatatatgtggaacgcttc

SEQ ID NO: 597935 - DNA, 25 bp, Homo sapien
caaatgtcactctgaactacaaaca

SEQ ID NO: 597936 - DNA, 25 bp, Homo sapien
aacataagtaactaagaggtctcac

SEQ ID NO: 597937 - DNA, 25 bp, Homo sapien
gtcagtcacttagatccaaatgtca

SEQ ID NO: 597938 - DNA, 25 bp, Homo sapien
tgcccgagccttggccaaattcata

SEQ ID NO: 597939 - DNA, 25 bp, Homo sapien
gaagtcttaccccttgtacctcaga

SEQ ID NO: 597940 - DNA, 25 bp, Homo sapien
ggttatggactgaattctgcccgag

SEQ ID NO: 597941 - DNA, 25 bp, Homo sapien
ttacagggcacgtggaaattcagca

SEQ ID NO: 597942 - DNA, 25 bp, Homo sapien
gaggagaatggttgatgccattgct

SEQ ID NO: 597943 - DNA, 25 bp, Homo sapien
gtaggaggagaatggttgatgccat

SEQ ID NO: 597944 - DNA, 25 bp, Homo sapien
gatggggcaccattcagggtaggag

SEQ ID NO: 597945 - DNA, 25 bp, Homo sapien
atggggcaccattcagggtaggagg

SEQ ID NO: 597946 - DNA, 25 bp, Homo sapien
tgcaagaacaagagtccgcaccttc

SEQ ID NO: 597947 - DNA, 25 bp, Homo sapien
gtcattgccaaactgttgcagagtg

SEQ ID NO: 597948 - DNA, 25 bp, Homo sapien
tcaacttgctgagttgtcgagcacc

SEQ ID NO: 597949 - DNA, 25 bp, Homo sapien
tgcagagtggtaagaaagcgtttca

SEQ ID NO: 597950 - DNA, 25 bp, Homo sapien
cagtatggttcatgctaaacacggg

SEQ ID NO: 597951 - DNA, 25 bp, Homo sapien
gcattgagtctgtaataggcttccc

SEQ ID NO: 597952 - DNA, 25 bp, Homo sapien
tctgtgttaccattcaggagaggca

SEQ ID NO: 597953 - DNA, 25 bp, Homo sapien
tgcagatgggttcctccagactgtg

SEQ ID NO: 597954 - DNA, 25 bp, Homo sapien
tagtctagtgggaaaagaggcaact

SEQ ID NO: 597955 - DNA, 25 bp, Homo sapien
tacaggacactactgactcacagag

SEQ ID NO: 597956 - DNA, 25 bp, Homo sapien
tacatagtggatatagggcagtcct

SEQ ID NO: 597957 - DNA, 25 bp, Homo sapien
tatgggtgttacctggccagagaag

SEQ ID NO: 597958 - DNA, 25 bp, Homo sapien
tttcaattgccgataacactgtatg

SEQ ID NO: 597959 - DNA, 25 bp, Homo sapien
tacaagagtcatgtatcagaatgct

SEQ ID NO: 597960 - DNA, 25 bp, Homo sapien
gagcagatttgtacgcattaaggca

SEQ ID NO: 597961 - DNA, 25 bp, Homo sapien
tagtatgtaacatgcaacttacccc

SEQ ID NO: 597962 - DNA, 25 bp, Homo sapien
gcataccagaataactcccaaccgg

SEQ ID NO: 597963 - DNA, 25 bp, Homo sapien
tcaagtggcctgtatgcattatgca

SEQ ID NO: 597964 - DNA, 25 bp, Homo sapien
tagttgccttctaccttcaagtggc

SEQ ID NO: 597965 - DNA, 25 bp, Homo sapien
tgttctctaaaaggtggacgtcctc

SEQ ID NO: 597966 - DNA, 25 bp, Homo sapien
gatctcctgacggtgaactcctgac

SEQ ID NO: 597967 - DNA, 25 bp, Homo sapien
tcttatgacagaaaccctccttgat

SEQ ID NO: 597968 - DNA, 25 bp, Homo sapien
gaactcagacgcctggcaaaggtaa

SEQ ID NO: 597969 - DNA, 25 bp, Homo sapien
cagcctaggctgcagaatagggcac

SEQ ID NO: 597970 - DNA, 25 bp, Homo sapien
gggaaagtttgtggcttcttggagc

SEQ ID NO: 597971 - DNA, 25 bp, Homo sapien
aatggaatcacaaaaggacgaaggg

SEQ ID NO: 597972 - DNA, 25 bp, Homo sapien
cttacagtggaattcctcaattgtc

SEQ ID NO: 597973 - DNA, 25 bp, Homo sapien
gcttcttggagcttacagtggaatt

SEQ ID NO: 597974 - DNA, 25 bp, Homo sapien
accgtgactggccaaaagctgttta

SEQ ID NO: 597975 - DNA, 25 bp, Homo sapien
aatctctccaaaagttatgctccag

SEQ ID NO: 597976 - DNA, 25 bp, Homo sapien
tacccaaaggattagtgaccagtta

SEQ ID NO: 597977 - DNA, 25 bp, Homo sapien
ttcacactctgactatacccaaagg

SEQ ID NO: 597978 - DNA, 25 bp, Homo sapien
gagcgcagtgcagcagttcccgctg

SEQ ID NO: 597979 - DNA, 25 bp, Homo sapien
gacgagtcagcaggcgatgcaatgc

SEQ ID NO: 597980 - DNA, 25 bp, Homo sapien
gatgcaatgcttgtgttgagcagaa

SEQ ID NO: 597981 - DNA, 25 bp, Homo sapien
tccatgagcaactctgacgagtcag

SEQ ID NO: 597982 - DNA, 25 bp, Homo sapien
gaccagtgcggttccaggaaggcaa

SEQ ID NO: 597983 - DNA, 25 bp, Homo sapien
gacattacaaccacagcaatcaaat

SEQ ID NO: 597984 - DNA, 25 bp, Homo sapien
tataagcaaaggggaggaccagtgc

SEQ ID NO: 597985 - DNA, 25 bp, Homo sapien
aaaagtttgagacattacaaccaca

SEQ ID NO: 597986 - DNA, 25 bp, Homo sapien
catagattttagatgtattatgcag

SEQ ID NO: 597987 - DNA, 25 bp, Homo sapien
tgtctggaagctactcccatagatt

SEQ ID NO: 597988 - DNA, 25 bp, Homo sapien
caggcatctgaagagttcccgaaaa

SEQ ID NO: 597989 - DNA, 25 bp, Homo sapien
agagttcccgaaaaatactcatgtc

SEQ ID NO: 597990 - DNA, 25 bp, Homo sapien
aaggcagaactgtactcctgaggct

SEQ ID NO: 597991 - DNA, 25 bp, Homo sapien
ggcagaactgtactcctgaggcttc

SEQ ID NO: 597992 - DNA, 25 bp, Homo sapien
tctggaacagtcgacccataaattc

SEQ ID NO: 597993 - DNA, 25 bp, Homo sapien
aattctctagagtagagtttcttac

SEQ ID NO: 597994 - DNA, 25 bp, Homo sapien
tgtcattaaagcctatccactattg

SEQ ID NO: 597995 - DNA, 25 bp, Homo sapien
ggtccaattgtgtagtagcagggtt

SEQ ID NO: 597996 - DNA, 25 bp, Homo sapien
tattttgatagccactcatagggag

SEQ ID NO: 597997 - DNA, 25 bp, Homo sapien
tagcagggttttcagtcactcagat

SEQ ID NO: 597998 - DNA, 25 bp, Homo sapien
gaagaagcagaagtgcgtatctgat

SEQ ID NO: 597999 - DNA, 25 bp, Homo sapien
tagaagaagcagaagtgcgtatctg

SEQ ID NO: 598000 - DNA, 25 bp, Homo sapien
tgtagaagaagcagaagtgcgtatc

SEQ ID NO: 598001 - DNA, 25 bp, Homo sapien
gtagaagaagcagaagtgcgtatct

SEQ ID NO: 598002 - DNA, 25 bp, Homo sapien
gctctagcatcttgttgggttcccg

SEQ ID NO: 598003 - DNA, 25 bp, Homo sapien
gaagttgcaatatcctctaaggtgt

SEQ ID NO: 598004 - DNA, 25 bp, Homo sapien
gcagggctgatggtacatactctct

SEQ ID NO: 598005 - DNA, 25 bp, Homo sapien
tgtggtgtctatcacgaacttctcg

SEQ ID NO: 598006 - DNA, 25 bp, Homo sapien
tgtcaaacgatgatctaccaactca

SEQ ID NO: 598007 - DNA, 25 bp, Homo sapien
cctttctgtcaaacgatgatctacc

SEQ ID NO: 598008 - DNA, 25 bp, Homo sapien
cattccctttctgtcaaacgatgat

SEQ ID NO: 598009 - DNA, 25 bp, Homo sapien
agcccattccctttctgtcaaacga

SEQ ID NO: 598010 - DNA, 25 bp, Homo sapien
cagaactgccatagagcgccttgtt

SEQ ID NO: 598011 - DNA, 25 bp, Homo sapien
tgattcctgacagcgccgcagaact

SEQ ID NO: 598012 - DNA, 25 bp, Homo sapien
cagctctgtgttttcattgtaccgt

SEQ ID NO: 598013 - DNA, 25 bp, Homo sapien
gagttcttcacgatctgattcctga

SEQ ID NO: 598014 - DNA, 25 bp, Homo sapien
atatgtacatagaaaattctacaag

SEQ ID NO: 598015 - DNA, 25 bp, Homo sapien
cattaggaaacattatctttaaata

SEQ ID NO: 598016 - DNA, 25 bp, Homo sapien
aataaaacattaggaaacattatct

SEQ ID NO: 598017 - DNA, 25 bp, Homo sapien
cagggtggtctctttcaaaatttct

SEQ ID NO: 598018 - DNA, 25 bp, Homo sapien
tggcctgctgttgaactctctctga

SEQ ID NO: 598019 - DNA, 25 bp, Homo sapien
ggcctgctgttgaactctctctgag

SEQ ID NO: 598020 - DNA, 25 bp, Homo sapien
ccaaaactccacaggtacgtatcct

SEQ ID NO: 598021 - DNA, 25 bp, Homo sapien
aaaactccacaggtacgtatcctgt

SEQ ID NO: 598022 - DNA, 25 bp, Homo sapien
aactccacaggtacgtatcctgtac

SEQ ID NO: 598023 - DNA, 25 bp, Homo sapien
ttccaaaactccacaggtacgtatc

SEQ ID NO: 598024 - DNA, 25 bp, Homo sapien
acacattccatatgtttgagcctca

SEQ ID NO: 598025 - DNA, 25 bp, Homo sapien
tttgagcctcagcccaatgagaatg

SEQ ID NO: 598026 - DNA, 25 bp, Homo sapien
tgagcctcagcccaatgagaatgtg

SEQ ID NO: 598027 - DNA, 25 bp, Homo sapien
cattccatatgtttgagcctcagcc

SEQ ID NO: 598028 - DNA, 25 bp, Homo sapien
ttcctcccatcaccaatgccctgct

SEQ ID NO: 598029 - DNA, 25 bp, Homo sapien
caatgccctgcttgatttccctaat

SEQ ID NO: 598030 - DNA, 25 bp, Homo sapien
atcaccaatgccctgcttgatttcc

SEQ ID NO: 598031 - DNA, 25 bp, Homo sapien
tcccatcaccaatgccctgcttgat

SEQ ID NO: 598032 - DNA, 25 bp, Homo sapien
aagacatagatttgggcagactgcc

SEQ ID NO: 598033 - DNA, 25 bp, Homo sapien
ccaggtgtaaatggccaggaggcaa

SEQ ID NO: 598034 - DNA, 25 bp, Homo sapien
taagactaggtgcacaaacaagggc

SEQ ID NO: 598035 - DNA, 25 bp, Homo sapien
gaatttaggcaggaataagtggcac

SEQ ID NO: 598036 - DNA, 25 bp, Homo sapien
tcaactggccgagaaatcttttccc

SEQ ID NO: 598037 - DNA, 25 bp, Homo sapien
catcccacggcaattctaagtaagg

SEQ ID NO: 598038 - DNA, 25 bp, Homo sapien
ttccaaggagaaaagtgatcagctc

SEQ ID NO: 598039 - DNA, 25 bp, Homo sapien
gacgcaagtgactagacacaggcca

SEQ ID NO: 598040 - DNA, 25 bp, Homo sapien
tcattgatgacgaggaaagcatcct

SEQ ID NO: 598041 - DNA, 25 bp, Homo sapien
tcagcgacggccttctgtacttctg

SEQ ID NO: 598042 - DNA, 25 bp, Homo sapien
ttgacatccgctatggtttgctcca

SEQ ID NO: 598043 - DNA, 25 bp, Homo sapien
gtttgctccattcgtgctctctctg

SEQ ID NO: 598044 - DNA, 25 bp, Homo sapien
gggcgtggtcactccagctgctcac

SEQ ID NO: 598045 - DNA, 25 bp, Homo sapien
cctgcccagcgtatgagaggaaggc

SEQ ID NO: 598046 - DNA, 25 bp, Homo sapien
gctcaagagtggactgcctgtgtct

SEQ ID NO: 598047 - DNA, 25 bp, Homo sapien
taaaagagtcttagcatgagaacca

SEQ ID NO: 598048 - DNA, 25 bp, Homo sapien
gaggctactttgtggcttatttaaa

SEQ ID NO: 598049 - DNA, 25 bp, Homo sapien
taaacctacgcagtccagatccagg

SEQ ID NO: 598050 - DNA, 25 bp, Homo sapien
aagtgattttgcagggataggtcca

SEQ ID NO: 598051 - DNA, 25 bp, Homo sapien
cacaatgctcaaaatggagagctgg

SEQ ID NO: 598052 - DNA, 25 bp, Homo sapien
gcaagacacaggcatcagttagtgg

SEQ ID NO: 598053 - DNA, 25 bp, Homo sapien
caagacacaggcatcagttagtggt

SEQ ID NO: 598054 - DNA, 25 bp, Homo sapien
ctgcaagacacaggcatcagttagt

SEQ ID NO: 598055 - DNA, 25 bp, Homo sapien
agacacaggcatcagttagtggttg

SEQ ID NO: 598056 - DNA, 25 bp, Homo sapien
aacgcgatgtggttgccgaggtctt

SEQ ID NO: 598057 - DNA, 25 bp, Homo sapien
tcagagtccgttggtgtcgatagct

SEQ ID NO: 598058 - DNA, 25 bp, Homo sapien
cagtccttgtgctggcagaaagagc

SEQ ID NO: 598059 - DNA, 25 bp, Homo sapien
tatcgcgcgatattgcagccactgc

SEQ ID NO: 598060 - DNA, 25 bp, Homo sapien
aagtccccgtgaggccaatcagtgt

SEQ ID NO: 598061 - DNA, 25 bp, Homo sapien
aagagtcctgaatgccgcctgttgc

SEQ ID NO: 598062 - DNA, 25 bp, Homo sapien
gcagctacatgcacgggttccaaca

SEQ ID NO: 598063 - DNA, 25 bp, Homo sapien
catttcttgctgatgacccggcagc

SEQ ID NO: 598064 - DNA, 25 bp, Homo sapien
caggtcccaaactaaagtagccagc

SEQ ID NO: 598065 - DNA, 25 bp, Homo sapien
ttgacgatactagttggccaacatg

SEQ ID NO: 598066 - DNA, 25 bp, Homo sapien
caggagggcttttcagatgagacca

SEQ ID NO: 598067 - DNA, 25 bp, Homo sapien
caagatgactgtgcaaatagccaag

SEQ ID NO: 598068 - DNA, 25 bp, Homo sapien
gatatgagtgatgtcccatttgaaa

SEQ ID NO: 598069 - DNA, 25 bp, Homo sapien
gctatcagataacacaagagaagga

SEQ ID NO: 598070 - DNA, 25 bp, Homo sapien
gttcctaacattctgaaagggatat

SEQ ID NO: 598071 - DNA, 25 bp, Homo sapien
caaggagggacgctatcagataaca

SEQ ID NO: 598072 - DNA, 25 bp, Homo sapien
aggctacctgtgtggatcccttttc

SEQ ID NO: 598073 - DNA, 25 bp, Homo sapien
cagtaagatgtacctgtatccaagg

SEQ ID NO: 598074 - DNA, 25 bp, Homo sapien
aacttgtgcttcaaaggccagctgg

SEQ ID NO: 598075 - DNA, 25 bp, Homo sapien
tagactctggtcagtgcacagaagg

SEQ ID NO: 598076 - DNA, 25 bp, Homo sapien
taaaggtgtcgtgcactagatttct

SEQ ID NO: 598077 - DNA, 25 bp, Homo sapien
cctgcttaaggtgttaatccaacaa

SEQ ID NO: 598078 - DNA, 25 bp, Homo sapien
ctgaaaatgcttggttagagtaaat

SEQ ID NO: 598079 - DNA, 25 bp, Homo sapien
tactttaggcaatggaaatctaggc

SEQ ID NO: 598080 - DNA, 25 bp, Homo sapien
cctgagcggatctgctagagcacca

SEQ ID NO: 598081 - DNA, 25 bp, Homo sapien
tgggaaccacgcaaggaacctggat

SEQ ID NO: 598082 - DNA, 25 bp, Homo sapien
gaagagcctgcgcttgactgatacc

SEQ ID NO: 598083 - DNA, 25 bp, Homo sapien
taccctttgcaagcaggtgacaagc

SEQ ID NO: 598084 - DNA, 25 bp, Homo sapien
cccgaggaaagaggcaggtagtcaa

SEQ ID NO: 598085 - DNA, 25 bp, Homo sapien
tagctcacgatggaaaaggtcacct

SEQ ID NO: 598086 - DNA, 25 bp, Homo sapien
ggagcctttgtagcctcgtcaggaa

SEQ ID NO: 598087 - DNA, 25 bp, Homo sapien
tctttggaaatgagcacgtcgatgc

SEQ ID NO: 598088 - DNA, 25 bp, Homo sapien
catagtgctcttgtggagggctgac

SEQ ID NO: 598089 - DNA, 25 bp, Homo sapien
tcagtttccattgcagatgggcaga

SEQ ID NO: 598090 - DNA, 25 bp, Homo sapien
ctgccattgtggaaaggccccggtt

SEQ ID NO: 598091 - DNA, 25 bp, Homo sapien
tttcacggtgccaaaggtgctgagc

SEQ ID NO: 598092 - DNA, 25 bp, Homo sapien
tcaccactggggacgatggcccaca

SEQ ID NO: 598093 - DNA, 25 bp, Homo sapien
gtcaccactggggacgatggcccac

SEQ ID NO: 598094 - DNA, 25 bp, Homo sapien
actggggacgatggcccacactccg

SEQ ID NO: 598095 - DNA, 25 bp, Homo sapien
accactggggacgatggcccacact

SEQ ID NO: 598096 - DNA, 25 bp, Homo sapien
ttgtccatgtcagccggcctctcct

SEQ ID NO: 598097 - DNA, 25 bp, Homo sapien
gaacgatttccaccaggccttgtcc

SEQ ID NO: 598098 - DNA, 25 bp, Homo sapien
tccttgcgggcctgcttgggtgctt

SEQ ID NO: 598099 - DNA, 25 bp, Homo sapien
tgctttggtccttttgtgggaacta

SEQ ID NO: 598100 - DNA, 25 bp, Homo sapien
ttgtccagctttctctgccccccag

SEQ ID NO: 598101 - DNA, 25 bp, Homo sapien
gtccagctttctctgccccccagct

SEQ ID NO: 598102 - DNA, 25 bp, Homo sapien
cctgctccccatcccccgccctcac

SEQ ID NO: 598103 - DNA, 25 bp, Homo sapien
ccagctttctctgccccccagctgc

SEQ ID NO: 598104 - DNA, 25 bp, Homo sapien
ctgtcgtccacccgggtcctgtcat

SEQ ID NO: 598105 - DNA, 25 bp, Homo sapien
ggccgctccgcgcttctcctgggac

SEQ ID NO: 598106 - DNA, 25 bp, Homo sapien
tcgtccacccgggtcctgtcgtcca

SEQ ID NO: 598107 - DNA, 25 bp, Homo sapien
tcctgtcatcctctcgtgcacaggg

SEQ ID NO: 598108 - DNA, 25 bp, Homo sapien
aatccgttgcccagcgttggccagc

SEQ ID NO: 598109 - DNA, 25 bp, Homo sapien
tgccgcttgtccagggggagaatca

SEQ ID NO: 598110 - DNA, 25 bp, Homo sapien
cgtagtcaatccgttgcccagcgtt

SEQ ID NO: 598111 - DNA, 25 bp, Homo sapien
ttgcccagcgttggccagcggctgc

SEQ ID NO: 598112 - DNA, 25 bp, Homo sapien
tccgcgcaatctgggtgccgccggg

SEQ ID NO: 598113 - DNA, 25 bp, Homo sapien
cggcatcctcggctcgcgctcgcta

SEQ ID NO: 598114 - DNA, 25 bp, Homo sapien
taccttcgcccgctccgcgcaatct

SEQ ID NO: 598115 - DNA, 25 bp, Homo sapien
tcggctcgcgctcgctaccttcgcc

SEQ ID NO: 598116 - DNA, 25 bp, Homo sapien
accggaagcgcgagagcagccgcgg

SEQ ID NO: 598117 - DNA, 25 bp, Homo sapien
ggaagcgcgagagcagccgcggcca

SEQ ID NO: 598118 - DNA, 25 bp, Homo sapien
gggaccggaagcgcgagagcagccg

SEQ ID NO: 598119 - DNA, 25 bp, Homo sapien
cccggggaccggaagcgcgagagca

SEQ ID NO: 598120 - DNA, 25 bp, Homo sapien
taaagctgcgggcgagggcagcggc

SEQ ID NO: 598121 - DNA, 25 bp, Homo sapien
aaagctgcgggcgagggcagcggca

SEQ ID NO: 598122 - DNA, 25 bp, Homo sapien
ttaaagctgcgggcgagggcagcgg

SEQ ID NO: 598123 - DNA, 25 bp, Homo sapien
aagctgcgggcgagggcagcggcac

SEQ ID NO: 598124 - DNA, 25 bp, Homo sapien
ttgccacgcactctttattgggcgg

SEQ ID NO: 598125 - DNA, 25 bp, Homo sapien
tgccacgcactctttattgggcggg

SEQ ID NO: 598126 - DNA, 25 bp, Homo sapien
ctgacgagatggctaggactgatcc

SEQ ID NO: 598127 - DNA, 25 bp, Homo sapien
gatccttttagatcctaagaagccc

SEQ ID NO: 598128 - DNA, 25 bp, Homo sapien
ccgggaggagcagaactttgagggc

SEQ ID NO: 598129 - DNA, 25 bp, Homo sapien
taaggccatttggacatatatcccc

SEQ ID NO: 598130 - DNA, 25 bp, Homo sapien
acgctctcaggacccgcctctgctt

SEQ ID NO: 598131 - DNA, 25 bp, Homo sapien
tccacgctctcaggacccgcctctg

SEQ ID NO: 598132 - DNA, 25 bp, Homo sapien
gctccacgctctcaggacccgcctc

SEQ ID NO: 598133 - DNA, 25 bp, Homo sapien
ctcaggacccgcctctgctttgctg

SEQ ID NO: 598134 - DNA, 25 bp, Homo sapien
ggcccctagttcaggcttcagtctc

SEQ ID NO: 598135 - DNA, 25 bp, Homo sapien
cttcagtctccgctctggctgggtt

SEQ ID NO: 598136 - DNA, 25 bp, Homo sapien
cgtggctagttcctaggcctgaggc

SEQ ID NO: 598137 - DNA, 25 bp, Homo sapien
tctgcctccggagcctaagttcttc

SEQ ID NO: 598138 - DNA, 25 bp, Homo sapien
actcggcttcgtcggcccgatacct

SEQ ID NO: 598139 - DNA, 25 bp, Homo sapien
gcgccactcggcttcgtcggcccga

SEQ ID NO: 598140 - DNA, 25 bp, Homo sapien
gccactcggcttcgtcggcccgata

SEQ ID NO: 598141 - DNA, 25 bp, Homo sapien
ctccgcgccactcggcttcgtcggc

SEQ ID NO: 598142 - DNA, 25 bp, Homo sapien
actgccagggtctcgaacagcagct

SEQ ID NO: 598143 - DNA, 25 bp, Homo sapien
tcttcagcactatgcgcggctggtt

SEQ ID NO: 598144 - DNA, 25 bp, Homo sapien
cgatgcggcccagggaggacggccg

SEQ ID NO: 598145 - DNA, 25 bp, Homo sapien
cagctgggcaccaagctagagctct

SEQ ID NO: 598146 - DNA, 25 bp, Homo sapien
gttacccacgctgaaactggccgga

SEQ ID NO: 598147 - DNA, 25 bp, Homo sapien
tacatggcccgagttatccagcggc

SEQ ID NO: 598148 - DNA, 25 bp, Homo sapien
tgaacacatcgtacagcagcctgga

SEQ ID NO: 598149 - DNA, 25 bp, Homo sapien
tgctgcctgccacgttcagtcggaa

SEQ ID NO: 598150 - DNA, 25 bp, Homo sapien
cacctttattgccataaagtagggc

SEQ ID NO: 598151 - DNA, 25 bp, Homo sapien
gactctttagatagagagctgtccc

SEQ ID NO: 598152 - DNA, 25 bp, Homo sapien
agtagggccctgtgggtaggcagct

SEQ ID NO: 598153 - DNA, 25 bp, Homo sapien
gctggactggcattctctgaactgg

SEQ ID NO: 598154 - DNA, 25 bp, Homo sapien
gaggcccttgagtggtgacttccaa

SEQ ID NO: 598155 - DNA, 25 bp, Homo sapien
tgggatatcattcagggctgggcta

SEQ ID NO: 598156 - DNA, 25 bp, Homo sapien
tgagtaggcaggtacgtgaacaccc

SEQ ID NO: 598157 - DNA, 25 bp, Homo sapien
tgtatacacaagctcgaacagtgct

SEQ ID NO: 598158 - DNA, 25 bp, Homo sapien
gttttacccacttgtgtcaccctga

SEQ ID NO: 598159 - DNA, 25 bp, Homo sapien
tgaggatacagacgccccaaaaggt

SEQ ID NO: 598160 - DNA, 25 bp, Homo sapien
gcacttgacattgaatgagtcccaa

SEQ ID NO: 598161 - DNA, 25 bp, Homo sapien
ttgcatagggtgtctgccagtacca

SEQ ID NO: 598162 - DNA, 25 bp, Homo sapien
gacacgggtgttacctcctttcatg

SEQ ID NO: 598163 - DNA, 25 bp, Homo sapien
ggtgttacctcctttcatggtgctc

SEQ ID NO: 598164 - DNA, 25 bp, Homo sapien
cgggtgttacctcctttcatggtgc

SEQ ID NO: 598165 - DNA, 25 bp, Homo sapien
cacgggtgttacctcctttcatggt

SEQ ID NO: 598166 - DNA, 25 bp, Homo sapien
ccgaagtgcagagtaatgagtggcc

SEQ ID NO: 598167 - DNA, 25 bp, Homo sapien
ctcataactcgaagaaaggtcagct

SEQ ID NO: 598168 - DNA, 25 bp, Homo sapien
cgtgcccgatttgatttgagcctca

SEQ ID NO: 598169 - DNA, 25 bp, Homo sapien
gaatgctattcagtgctgcccgaag

SEQ ID NO: 598170 - DNA, 25 bp, Homo sapien
caggatcccagccctattcattttt

SEQ ID NO: 598171 - DNA, 25 bp, Homo sapien
aggatcccagccctattcatttttt

SEQ ID NO: 598172 - DNA, 25 bp, Homo sapien
gaaactagaaagttgacggcaggat

SEQ ID NO: 598173 - DNA, 25 bp, Homo sapien
taagaaactagaaagttgacggcag

SEQ ID NO: 598174 - DNA, 25 bp, Homo sapien
gcgctcggcggctcgtggctctttc

SEQ ID NO: 598175 - DNA, 25 bp, Homo sapien
agccaataggaaccgccgccgttgt

SEQ ID NO: 598176 - DNA, 25 bp, Homo sapien
gcggcaaaaaggatttggcgcgtaa

SEQ ID NO: 598177 - DNA, 25 bp, Homo sapien
aaaagtggccgggactttgcaggca

SEQ ID NO: 598178 - DNA, 25 bp, Homo sapien
aaagattagctaggtatggtggtgt

SEQ ID NO: 598179 - DNA, 25 bp, Homo sapien
cctgtaatcccagctacttgggagg

SEQ ID NO: 598180 - DNA, 25 bp, Homo sapien
ctgagttgggaggatcgcttgaacc

SEQ ID NO: 598181 - DNA, 25 bp, Homo sapien
tcgcttgaacctgggaggtggaggt

SEQ ID NO: 598182 - DNA, 25 bp, Homo sapien
ggggtggctgccgggcagagacgct

SEQ ID NO: 598183 - DNA, 25 bp, Homo sapien
acggggtggctgccgggcagagacg

SEQ ID NO: 598184 - DNA, 25 bp, Homo sapien
ggtggctgccgggcagagacgctcc

SEQ ID NO: 598185 - DNA, 25 bp, Homo sapien
ggacggggtggctgccgggcagaga

SEQ ID NO: 598186 - DNA, 25 bp, Homo sapien
tgcaccgacccatttaatcctgagt

SEQ ID NO: 598187 - DNA, 25 bp, Homo sapien
ccgacccatttaatcctgagtggac

SEQ ID NO: 598188 - DNA, 25 bp, Homo sapien
gcacatcttgcaccgacccatttaa

SEQ ID NO: 598189 - DNA, 25 bp, Homo sapien
cttgcaccgacccatttaatcctga

SEQ ID NO: 598190 - DNA, 25 bp, Homo sapien
tatatccgccgcacacgcggaactt

SEQ ID NO: 598191 - DNA, 25 bp, Homo sapien
agtcaccgggccaccgagtgtggac

SEQ ID NO: 598192 - DNA, 25 bp, Homo sapien
tgaacgaccaagtctacaccgacct

SEQ ID NO: 598193 - DNA, 25 bp, Homo sapien
tgtggaccccgcctcacttgaacga

SEQ ID NO: 598194 - DNA, 25 bp, Homo sapien
cgccgtcgccgccacaggaaccgaa

SEQ ID NO: 598195 - DNA, 25 bp, Homo sapien
ccgtcgccgccacaggaaccgaagc

SEQ ID NO: 598196 - DNA, 25 bp, Homo sapien
cgccgccacaggaaccgaagcccgg

SEQ ID NO: 598197 - DNA, 25 bp, Homo sapien
gtcgccgccacaggaaccgaagccc

SEQ ID NO: 598198 - DNA, 25 bp, Homo sapien
ccagggcctcaaagatcgcctgcgc

SEQ ID NO: 598199 - DNA, 25 bp, Homo sapien
agggcctcaaagatcgcctgcgcca

SEQ ID NO: 598200 - DNA, 25 bp, Homo sapien
gggcctcaaagatcgcctgcgccat

SEQ ID NO: 598201 - DNA, 25 bp, Homo sapien
tccagggcctcaaagatcgcctgcg

SEQ ID NO: 598202 - DNA, 25 bp, Homo sapien
tccttggccatccaataatgactgg

SEQ ID NO: 598203 - DNA, 25 bp, Homo sapien
catccaataatgactggacagccag

SEQ ID NO: 598204 - DNA, 25 bp, Homo sapien
aataatgactggacagccagaacgg

SEQ ID NO: 598205 - DNA, 25 bp, Homo sapien
cagccagaacggtctgattgtccat

SEQ ID NO: 598206 - DNA, 25 bp, Homo sapien
ctgttcccgcttgtgggtcataaac

SEQ ID NO: 598207 - DNA, 25 bp, Homo sapien
ctggcagcgagttgaattgcttctt

SEQ ID NO: 598208 - DNA, 25 bp, Homo sapien
agttgaattgcttcttacacttccc

SEQ ID NO: 598209 - DNA, 25 bp, Homo sapien
gcactgttcccgcttgtgggtcata

SEQ ID NO: 598210 - DNA, 25 bp, Homo sapien
ctggtccagggatgtgaaggctgac

SEQ ID NO: 598211 - DNA, 25 bp, Homo sapien
ggtccagggatgtgaaggctgacat

SEQ ID NO: 598212 - DNA, 25 bp, Homo sapien
catcgctcaccaagatgttcccctg

SEQ ID NO: 598213 - DNA, 25 bp, Homo sapien
acatgagcacatcatcgctcaccaa

SEQ ID NO: 598214 - DNA, 25 bp, Homo sapien
tgtcccatactgcatccgtgtgcgg

SEQ ID NO: 598215 - DNA, 25 bp, Homo sapien
gaatgtcccatactgcatccgtgtg

SEQ ID NO: 598216 - DNA, 25 bp, Homo sapien
aagaatgtcccatactgcatccgtg

SEQ ID NO: 598217 - DNA, 25 bp, Homo sapien
gtcccatactgcatccgtgtgcggt

SEQ ID NO: 598218 - DNA, 25 bp, Homo sapien
agctgggcacggaatgcatgttcag

SEQ ID NO: 598219 - DNA, 25 bp, Homo sapien
ggtagctgggcacggaatgcatgtt

SEQ ID NO: 598220 - DNA, 25 bp, Homo sapien
ctgggcacggaatgcatgttcaggc

SEQ ID NO: 598221 - DNA, 25 bp, Homo sapien
tagctgggcacggaatgcatgttca

SEQ ID NO: 598222 - DNA, 25 bp, Homo sapien
ctccaccacaccgttcccaccaggg

SEQ ID NO: 598223 - DNA, 25 bp, Homo sapien
tggcttgcatcttacatctgtgggt

SEQ ID NO: 598224 - DNA, 25 bp, Homo sapien
tacctgcaggcagcttatatttctg

SEQ ID NO: 598225 - DNA, 25 bp, Homo sapien
gactgttctgagcattacctgcagg

SEQ ID NO: 598226 - DNA, 25 bp, Homo sapien
taaagtccttctcccctgtgatgtg

SEQ ID NO: 598227 - DNA, 25 bp, Homo sapien
ctggagagtcaaaggtggccaccgt

SEQ ID NO: 598228 - DNA, 25 bp, Homo sapien
ttagctcgtcgggtcttcagcgttg

SEQ ID NO: 598229 - DNA, 25 bp, Homo sapien
ttgggtttgaatccctgtttgccag

SEQ ID NO: 598230 - DNA, 25 bp, Homo sapien
ggtgggatatactggaggctccaca

SEQ ID NO: 598231 - DNA, 25 bp, Homo sapien
tttctattacatgcaaccaaacttg

SEQ ID NO: 598232 - DNA, 25 bp, Homo sapien
aagggaagaccagaaccaagtagct

SEQ ID NO: 598233 - DNA, 25 bp, Homo sapien
tgtggattggccaatgttgaggaaa

SEQ ID NO: 598234 - DNA, 25 bp, Homo sapien
ctattacatgcaaccaaacttgaac

SEQ ID NO: 598235 - DNA, 25 bp, Homo sapien
ttttggtgaatgacttgtcacagta

SEQ ID NO: 598236 - DNA, 25 bp, Homo sapien
ttggtgaatgacttgtcacagtatg

SEQ ID NO: 598237 - DNA, 25 bp, Homo sapien
tttggtgaatgacttgtcacagtat

SEQ ID NO: 598238 - DNA, 25 bp, Homo sapien
ggaagacaagcttgtcagtgccctc

SEQ ID NO: 598239 - DNA, 25 bp, Homo sapien
cttgtgggtctgcatgtgtttctta

SEQ ID NO: 598240 - DNA, 25 bp, Homo sapien
gtgggtctgcatgtgtttcttaaca

SEQ ID NO: 598241 - DNA, 25 bp, Homo sapien
accttgtgggtctgcatgtgtttct

SEQ ID NO: 598242 - DNA, 25 bp, Homo sapien
tctgcatgtgtttcttaacattaga

SEQ ID NO: 598243 - DNA, 25 bp, Homo sapien
gggctgtggcgcacccggcaggggc

SEQ ID NO: 598244 - DNA, 25 bp, Homo sapien
tgtggcgcacccggcaggggctggc

SEQ ID NO: 598245 - DNA, 25 bp, Homo sapien
cctggggctgtggcgcacccggcag

SEQ ID NO: 598246 - DNA, 25 bp, Homo sapien
tggggctgtggcgcacccggcaggg

SEQ ID NO: 598247 - DNA, 25 bp, Homo sapien
accacctgcttggactccggcttgt

SEQ ID NO: 598248 - DNA, 25 bp, Homo sapien
ggcagaattggcacaggtaggagct

SEQ ID NO: 598249 - DNA, 25 bp, Homo sapien
ggtaggagctgtcgatgaggaccac

SEQ ID NO: 598250 - DNA, 25 bp, Homo sapien
tgtcgatgaggaccacctgcttgga

SEQ ID NO: 598251 - DNA, 25 bp, Homo sapien
ccagaaatgtgtcgagctttgggaa

SEQ ID NO: 598252 - DNA, 25 bp, Homo sapien
tgctccagaaatgtgtcgagctttg

SEQ ID NO: 598253 - DNA, 25 bp, Homo sapien
gaaatgtgtcgagctttgggaacgt

SEQ ID NO: 598254 - DNA, 25 bp, Homo sapien
ttgatgtgctccagaaatgtgtcga

SEQ ID NO: 598255 - DNA, 25 bp, Homo sapien
ggcggtctgcaggtggtgctccagg

SEQ ID NO: 598256 - DNA, 25 bp, Homo sapien
cctcaggggtggagtatttgttgac

SEQ ID NO: 598257 - DNA, 25 bp, Homo sapien
ggagtatttgttgacacatttgaca

SEQ ID NO: 598258 - DNA, 25 bp, Homo sapien
gaagttgtgagtggcggtctgcagg

SEQ ID NO: 598259 - DNA, 25 bp, Homo sapien
gacactgtgtcatctgtggagcagc

SEQ ID NO: 598260 - DNA, 25 bp, Homo sapien
atggccacatctggaatgtgatgga

SEQ ID NO: 598261 - DNA, 25 bp, Homo sapien
agacactgtgtcatctgtggagcag

SEQ ID NO: 598262 - DNA, 25 bp, Homo sapien
agcagccccgacatggccacatctg

SEQ ID NO: 598263 - DNA, 25 bp, Homo sapien
gtggatgtgagcatgcagtttgaga

SEQ ID NO: 598264 - DNA, 25 bp, Homo sapien
cgtgggtgggcagatgacgccgcag

SEQ ID NO: 598265 - DNA, 25 bp, Homo sapien
taatgctcccgccggaagaacttct

SEQ ID NO: 598266 - DNA, 25 bp, Homo sapien
agtttgagataatgctcccgccgga

SEQ ID NO: 598267 - DNA, 25 bp, Homo sapien
tcaacccagtcgatacggaaatgct

SEQ ID NO: 598268 - DNA, 25 bp, Homo sapien
cgtttggcggtgctgatgaacaaca

SEQ ID NO: 598269 - DNA, 25 bp, Homo sapien
ccacaggaaatcaagggaggtgcct

SEQ ID NO: 598270 - DNA, 25 bp, Homo sapien
tacccctatggttgcgggagctaag

SEQ ID NO: 598271 - DNA, 25 bp, Homo sapien
cttgcggttgaacgcagactcgcac

SEQ ID NO: 598272 - DNA, 25 bp, Homo sapien
ttgaacgcagactcgcacactgagc

SEQ ID NO: 598273 - DNA, 25 bp, Homo sapien
tgtccttgcggttgaacgcagactc

SEQ ID NO: 598274 - DNA, 25 bp, Homo sapien
gcggttgaacgcagactcgcacact

SEQ ID NO: 598275 - DNA, 25 bp, Homo sapien
ggccttcagcttgtccggccggttg

SEQ ID NO: 598276 - DNA, 25 bp, Homo sapien
tgggccttcagcttgtccggccggt

SEQ ID NO: 598277 - DNA, 25 bp, Homo sapien
ccttcagcttgtccggccggttgaa

SEQ ID NO: 598278 - DNA, 25 bp, Homo sapien
gccttcagcttgtccggccggttga

SEQ ID NO: 598279 - DNA, 25 bp, Homo sapien
acaacgatggacagcaccgcgtccg

SEQ ID NO: 598280 - DNA, 25 bp, Homo sapien
agcccctcagcgtgtccaggtacca

SEQ ID NO: 598281 - DNA, 25 bp, Homo sapien
gcctggatgtagacgggcacagcga

SEQ ID NO: 598282 - DNA, 25 bp, Homo sapien
aggtaccaccagctcagtttccgcg

SEQ ID NO: 598283 - DNA, 25 bp, Homo sapien
ccaggaaacagacacctcaggtccg

SEQ ID NO: 598284 - DNA, 25 bp, Homo sapien
actggtaaggatcaccggtctgccc

SEQ ID NO: 598285 - DNA, 25 bp, Homo sapien
gggccctggacccaaacaggagcat

SEQ ID NO: 598286 - DNA, 25 bp, Homo sapien
tcgcttccactggtaaggatcaccg

SEQ ID NO: 598287 - DNA, 25 bp, Homo sapien
ctgcccccaaccctagaatgttgca

SEQ ID NO: 598288 - DNA, 25 bp, Homo sapien
gcccccaaccctagaatgttgcagg

SEQ ID NO: 598289 - DNA, 25 bp, Homo sapien
gaaaccgtggatggccctgccccca

SEQ ID NO: 598290 - DNA, 25 bp, Homo sapien
ccccaaccctagaatgttgcagggc

SEQ ID NO: 598291 - DNA, 25 bp, Homo sapien
aaggtgcaacacgtaaactccgaag

SEQ ID NO: 598292 - DNA, 25 bp, Homo sapien
tcatagctgcagtctagccgtgaca

SEQ ID NO: 598293 - DNA, 25 bp, Homo sapien
tatgaggtagtagtatcgtaagccc

SEQ ID NO: 598294 - DNA, 25 bp, Homo sapien
ccctggcgcacttcatcatactgga

SEQ ID NO: 598295 - DNA, 25 bp, Homo sapien
cctgccgccgcaggcctctcctccg

SEQ ID NO: 598296 - DNA, 25 bp, Homo sapien
gccgcaggcctctcctccgcctccg

SEQ ID NO: 598297 - DNA, 25 bp, Homo sapien
ctcggctcgggtcggctccggcgcc

SEQ ID NO: 598298 - DNA, 25 bp, Homo sapien
ccagtcccgccgctccctgccgccg

SEQ ID NO: 598299 - DNA, 25 bp, Homo sapien
ggttgctgctcgccgcgccggcctt

SEQ ID NO: 598300 - DNA, 25 bp, Homo sapien
ggccttcgccgcccgctccggctcg

SEQ ID NO: 598301 - DNA, 25 bp, Homo sapien
tgctcgccgcgccggccttcgccgc

SEQ ID NO: 598302 - DNA, 25 bp, Homo sapien
cggccttcgccgcccgctccggctc

SEQ ID NO: 598303 - DNA, 25 bp, Homo sapien
cgaacagcttcccgaacaccgacat

SEQ ID NO: 598304 - DNA, 25 bp, Homo sapien
ccgaacagcttcccgaacaccgaca

SEQ ID NO: 598305 - DNA, 25 bp, Homo sapien
ccctccagccccgaacagcttcccg

SEQ ID NO: 598306 - DNA, 25 bp, Homo sapien
cagccccgaacagcttcccgaacac

SEQ ID NO: 598307 - DNA, 25 bp, Homo sapien
tggatggcctcctggggggtcgggc

SEQ ID NO: 598308 - DNA, 25 bp, Homo sapien
ctggatggcctcctggggggtcggg

SEQ ID NO: 598309 - DNA, 25 bp, Homo sapien
ccgtcagctcctgctcgattttctt

SEQ ID NO: 598310 - DNA, 25 bp, Homo sapien
ggggagcccgtggcaagtctgaagg

SEQ ID NO: 598311 - DNA, 25 bp, Homo sapien
ggagcccgtggcaagtctgaagggg

SEQ ID NO: 598312 - DNA, 25 bp, Homo sapien
gggagcccgtggcaagtctgaaggg

SEQ ID NO: 598313 - DNA, 25 bp, Homo sapien
accagaccccgaggcgagtctgatg

SEQ ID NO: 598314 - DNA, 25 bp, Homo sapien
agaccccgaggcgagtctgatgaag

SEQ ID NO: 598315 - DNA, 25 bp, Homo sapien
gttccagggtcagaccagaccccga

SEQ ID NO: 598316 - DNA, 25 bp, Homo sapien
ccggagagttccagggtcagaccag

SEQ ID NO: 598317 - DNA, 25 bp, Homo sapien
gagagggcagaataagtctgacgat

SEQ ID NO: 598318 - DNA, 25 bp, Homo sapien
tcccagacccggcaagaagtctgac

SEQ ID NO: 598319 - DNA, 25 bp, Homo sapien
taagtctgacgatggaaaagtccag

SEQ ID NO: 598320 - DNA, 25 bp, Homo sapien
cagaataagtctgacgatggaaaag

SEQ ID NO: 598321 - DNA, 25 bp, Homo sapien
gggagagggcacaggtaggaccagg

SEQ ID NO: 598322 - DNA, 25 bp, Homo sapien
gagggcacaggtaggaccaggaagc

SEQ ID NO: 598323 - DNA, 25 bp, Homo sapien
ccaccgaggagtcgggagagggcac

SEQ ID NO: 598324 - DNA, 25 bp, Homo sapien
cacaggtaggaccaggaagcacaga

SEQ ID NO: 598325 - DNA, 25 bp, Homo sapien
tcaagattcaatactggggccctga

SEQ ID NO: 598326 - DNA, 25 bp, Homo sapien
tggggagcagtcgggagtctctatt

SEQ ID NO: 598327 - DNA, 25 bp, Homo sapien
ctggggccctgaatcctagtagtgg

SEQ ID NO: 598328 - DNA, 25 bp, Homo sapien
aatactggggccctgaatcctagta

SEQ ID NO: 598329 - DNA, 25 bp, Homo sapien
gatgatatttaagtcccttggatgg

SEQ ID NO: 598330 - DNA, 25 bp, Homo sapien
cctaggacacagtaagggcctgcca

SEQ ID NO: 598331 - DNA, 25 bp, Homo sapien
catctggttcacgtctgcattctca

SEQ ID NO: 598332 - DNA, 25 bp, Homo sapien
ccaaattttgctctaggctcctcac

SEQ ID NO: 598333 - DNA, 25 bp, Homo sapien
taaactatgatcttgtctacaactg

SEQ ID NO: 598334 - DNA, 25 bp, Homo sapien
agggtgttttagatgccactctcca

SEQ ID NO: 598335 - DNA, 25 bp, Homo sapien
ctcttgttaaactatgatcttgtct

SEQ ID NO: 598336 - DNA, 25 bp, Homo sapien
cagtatagggtgttttagatgccac

SEQ ID NO: 598337 - DNA, 25 bp, Homo sapien
tcactcaaataagccctccaagcca

SEQ ID NO: 598338 - DNA, 25 bp, Homo sapien
tgccacacccagctaattttggttt

SEQ ID NO: 598339 - DNA, 25 bp, Homo sapien
tgggactacagctgccagctgccac

SEQ ID NO: 598340 - DNA, 25 bp, Homo sapien
gactacagctgccagctgccacacc

SEQ ID NO: 598341 - DNA, 25 bp, Homo sapien
agccaccacgcctggccagaatcca

SEQ ID NO: 598342 - DNA, 25 bp, Homo sapien
gaggcctttgcagaaaagcccgctg

SEQ ID NO: 598343 - DNA, 25 bp, Homo sapien
gatggagccaggacttatgctaagc

SEQ ID NO: 598344 - DNA, 25 bp, Homo sapien
gaaaagcccgctgctctttctgaca

SEQ ID NO: 598345 - DNA, 25 bp, Homo sapien
attgattttctcttcgatcgccatc

SEQ ID NO: 598346 - DNA, 25 bp, Homo sapien
taaggaattcgtcttactagccaat

SEQ ID NO: 598347 - DNA, 25 bp, Homo sapien
aaaatcttgatcctaggttcttctg

SEQ ID NO: 598348 - DNA, 25 bp, Homo sapien
ttgtgaataaccaaccagcagagtc

SEQ ID NO: 598349 - DNA, 25 bp, Homo sapien
tgaggcccggagagattatctcaaa

SEQ ID NO: 598350 - DNA, 25 bp, Homo sapien
aaacacatagggagtacagtactca

SEQ ID NO: 598351 - DNA, 25 bp, Homo sapien
atcagcaaacacatagggagtacag

SEQ ID NO: 598352 - DNA, 25 bp, Homo sapien
tcagcaaacacatagggagtacagt

SEQ ID NO: 598353 - DNA, 25 bp, Homo sapien
agcaaacacatagggagtacagtac

SEQ ID NO: 598354 - DNA, 25 bp, Homo sapien
taaccagctttattggctgtgaaag

SEQ ID NO: 598355 - DNA, 25 bp, Homo sapien
gttgcttcattagcccctccaaaca

SEQ ID NO: 598356 - DNA, 25 bp, Homo sapien
aaaacaactccaaccatgttgaaat

SEQ ID NO: 598357 - DNA, 25 bp, Homo sapien
taaacattggtctccagacagttgc

SEQ ID NO: 598358 - DNA, 25 bp, Homo sapien
acaccaggggatcctcaagaccttc

SEQ ID NO: 598359 - DNA, 25 bp, Homo sapien
gtcacaccaggggatcctcaagacc

SEQ ID NO: 598360 - DNA, 25 bp, Homo sapien
accaggggatcctcaagaccttcac

SEQ ID NO: 598361 - DNA, 25 bp, Homo sapien
gcagtcacaccaggggatcctcaag

SEQ ID NO: 598362 - DNA, 25 bp, Homo sapien
gagatgtgcctcattaaaatctgaa

SEQ ID NO: 598363 - DNA, 25 bp, Homo sapien
gattctgatgttggctggaatggcc

SEQ ID NO: 598364 - DNA, 25 bp, Homo sapien
gaactcgtaaaacatctgaacaaca

SEQ ID NO: 598365 - DNA, 25 bp, Homo sapien
gaaaagccactgaatccgtaatctc

SEQ ID NO: 598366 - DNA, 25 bp, Homo sapien
cgccttcatggccttggcggcatag

SEQ ID NO: 598367 - DNA, 25 bp, Homo sapien
ccttcatggccttggcggcatagcc

SEQ ID NO: 598368 - DNA, 25 bp, Homo sapien
ccgccttcatggccttggcggcata

SEQ ID NO: 598369 - DNA, 25 bp, Homo sapien
gccttcatggccttggcggcatagc

SEQ ID NO: 598370 - DNA, 25 bp, Homo sapien
taactcatcaactttatcgatgtcc

SEQ ID NO: 598371 - DNA, 25 bp, Homo sapien
caagttcttgctggtcagcaatgtc

SEQ ID NO: 598372 - DNA, 25 bp, Homo sapien
aaccctacaggtttcgaaattgctg

SEQ ID NO: 598373 - DNA, 25 bp, Homo sapien
acaggtttcgaaattgctgttgaaa

SEQ ID NO: 598374 - DNA, 25 bp, Homo sapien
ctagttcttctaattccgccatgag

SEQ ID NO: 598375 - DNA, 25 bp, Homo sapien
tagttcttctaattccgccatgagc

SEQ ID NO: 598376 - DNA, 25 bp, Homo sapien
gttcttctaattccgccatgagctc

SEQ ID NO: 598377 - DNA, 25 bp, Homo sapien
cttctaattccgccatgagctcatc

SEQ ID NO: 598378 - DNA, 25 bp, Homo sapien
ttgatggtagggctatagagggaac

SEQ ID NO: 598379 - DNA, 25 bp, Homo sapien
gttttgatggtagggctatagaggg

SEQ ID NO: 598380 - DNA, 25 bp, Homo sapien
ggttttgatggtagggctatagagg

SEQ ID NO: 598381 - DNA, 25 bp, Homo sapien
atggtagggctatagagggaacatt

SEQ ID NO: 598382 - DNA, 25 bp, Homo sapien
taggatgactggtgcgttcaacatg

SEQ ID NO: 598383 - DNA, 25 bp, Homo sapien
gcgttcaacatgttctggccggaaa

SEQ ID NO: 598384 - DNA, 25 bp, Homo sapien
aaaggctatttaggatgactggtgc

SEQ ID NO: 598385 - DNA, 25 bp, Homo sapien
ttctggccggaaatgagggctgcct

SEQ ID NO: 598386 - DNA, 25 bp, Homo sapien
tggatccagcccagttctccaattc

SEQ ID NO: 598387 - DNA, 25 bp, Homo sapien
aattccttcatgtcgtcgtcctcct

SEQ ID NO: 598388 - DNA, 25 bp, Homo sapien
tctccaattccttcatgtcgtcgtc

SEQ ID NO: 598389 - DNA, 25 bp, Homo sapien
gcccagttctccaattccttcatgt

SEQ ID NO: 598390 - DNA, 25 bp, Homo sapien
ggtgcagaccatgctatgcagagag

SEQ ID NO: 598391 - DNA, 25 bp, Homo sapien
tacacaaagagatgtgcggcaagtc

SEQ ID NO: 598392 - DNA, 25 bp, Homo sapien
aaccagtcgaccctttccattgagg

SEQ ID NO: 598393 - DNA, 25 bp, Homo sapien
cacagggccaatacacaggtgatgg

SEQ ID NO: 598394 - DNA, 25 bp, Homo sapien
ttcagcagtggagtcagcgtagtcc

SEQ ID NO: 598395 - DNA, 25 bp, Homo sapien
gcacgtttccaatgagttatctatc

SEQ ID NO: 598396 - DNA, 25 bp, Homo sapien
aatataaatgtatgcacgtttccaa

SEQ ID NO: 598397 - DNA, 25 bp, Homo sapien
gatatttaatagacagtgcaaacca

SEQ ID NO: 598398 - DNA, 25 bp, Homo sapien
gtgcaaaccataatttcatctgaat

SEQ ID NO: 598399 - DNA, 25 bp, Homo sapien
tgcagacataggcagggcaccagcc

SEQ ID NO: 598400 - DNA, 25 bp, Homo sapien
gtagagctgagggtcttgcagacat

SEQ ID NO: 598401 - DNA, 25 bp, Homo sapien
tagagctgagggtcttgcagacata

SEQ ID NO: 598402 - DNA, 25 bp, Homo sapien
ggtcttgcagacataggcagggcac

SEQ ID NO: 598403 - DNA, 25 bp, Homo sapien
cctggctccagtgagggcaaaacct

SEQ ID NO: 598404 - DNA, 25 bp, Homo sapien
gcctggctccagtgagggcaaaacc

SEQ ID NO: 598405 - DNA, 25 bp, Homo sapien
cagaatgagtgtctggtagtaggac

SEQ ID NO: 598406 - DNA, 25 bp, Homo sapien
ctcagtgacactcccgccacccaga

SEQ ID NO: 598407 - DNA, 25 bp, Homo sapien
agaatgagtgtctggtagtaggact

SEQ ID NO: 598408 - DNA, 25 bp, Homo sapien
tcctcagtgacactcccgccaccca

SEQ ID NO: 598409 - DNA, 25 bp, Homo sapien
agaagaccatcaacactttttgagc

SEQ ID NO: 598410 - DNA, 25 bp, Homo sapien
ctaagaagaccatcaacactttttg

SEQ ID NO: 598411 - DNA, 25 bp, Homo sapien
gaagaccatcaacactttttgagct

SEQ ID NO: 598412 - DNA, 25 bp, Homo sapien
aagaagaccatcaacactttttgag

SEQ ID NO: 598413 - DNA, 25 bp, Homo sapien
ataactgtgcaaagatttcatgttc

SEQ ID NO: 598414 - DNA, 25 bp, Homo sapien
tctcttgctctattagaagcgcaat

SEQ ID NO: 598415 - DNA, 25 bp, Homo sapien
aataactgtgcaaagatttcatgtt

SEQ ID NO: 598416 - DNA, 25 bp, Homo sapien
gctctattagaagcgcaattttctt

SEQ ID NO: 598417 - DNA, 25 bp, Homo sapien
tcggcctgaggcatgtggaaatcca

SEQ ID NO: 598418 - DNA, 25 bp, Homo sapien
gctgacaatgtagcatcgtgaggtg

SEQ ID NO: 598419 - DNA, 25 bp, Homo sapien
agtggccgccaaacaagagctgaca

SEQ ID NO: 598420 - DNA, 25 bp, Homo sapien
gagaaatcctggagaacaaagtccc

SEQ ID NO: 598421 - DNA, 25 bp, Homo sapien
aatagaagcctacacgaggtaaagt

SEQ ID NO: 598422 - DNA, 25 bp, Homo sapien
gaggtaatgcaactgtccaatattt

SEQ ID NO: 598423 - DNA, 25 bp, Homo sapien
tatctgtgattgtacgaatggagtc

SEQ ID NO: 598424 - DNA, 25 bp, Homo sapien
gaaggccataaatcggtctttctgg

SEQ ID NO: 598425 - DNA, 25 bp, Homo sapien
gttcccaatgatgtccctggtggcc

SEQ ID NO: 598426 - DNA, 25 bp, Homo sapien
gggcttgctaccaacttgatagttc

SEQ ID NO: 598427 - DNA, 25 bp, Homo sapien
taaagtggtttcatagttcccaatg

SEQ ID NO: 598428 - DNA, 25 bp, Homo sapien
cattgatgggcctcctaaggcacag

SEQ ID NO: 598429 - DNA, 25 bp, Homo sapien
gtaaaggtaaacatcaaatctgggc

SEQ ID NO: 598430 - DNA, 25 bp, Homo sapien
gaacattctgagtagggagacctgg

SEQ ID NO: 598431 - DNA, 25 bp, Homo sapien
gtcatttggattggcactgtgggct

SEQ ID NO: 598432 - DNA, 25 bp, Homo sapien
tctgggctggttcatcaggagagaa

SEQ ID NO: 598433 - DNA, 25 bp, Homo sapien
ttctcaactttggatccaataaggg

SEQ ID NO: 598434 - DNA, 25 bp, Homo sapien
gttcttatttgctatacctcaggaa

SEQ ID NO: 598435 - DNA, 25 bp, Homo sapien
taagtgacccaagagcttctcaact

SEQ ID NO: 598436 - DNA, 25 bp, Homo sapien
caggaattcttgactaagtgaccca

SEQ ID NO: 598437 - DNA, 25 bp, Homo sapien
taacagacgggattcctgagaatgg

SEQ ID NO: 598438 - DNA, 25 bp, Homo sapien
tggagcagagtttgaattcagagtc

SEQ ID NO: 598439 - DNA, 25 bp, Homo sapien
ccagcagttataattgtccttctgt

SEQ ID NO: 598440 - DNA, 25 bp, Homo sapien
ttccccagaacctgcttaacagacg

SEQ ID NO: 598441 - DNA, 25 bp, Homo sapien
gaggagtctgcagccccgcccagaa

SEQ ID NO: 598442 - DNA, 25 bp, Homo sapien
tgacacgagcacgaggagtctgcag

SEQ ID NO: 598443 - DNA, 25 bp, Homo sapien
gaaggacacggtgacacgagcacga

SEQ ID NO: 598444 - DNA, 25 bp, Homo sapien
gcccggcttcccaggcgcatgggct

SEQ ID NO: 598445 - DNA, 25 bp, Homo sapien
gctccggccctggttccgggctctc

SEQ ID NO: 598446 - DNA, 25 bp, Homo sapien
cggagcggctccccgcagctcggct

SEQ ID NO: 598447 - DNA, 25 bp, Homo sapien
gctccccgcagctcggctccgcccg

SEQ ID NO: 598448 - DNA, 25 bp, Homo sapien
cgctccggccctggttccgggctct

SEQ ID NO: 598449 - DNA, 25 bp, Homo sapien
cactgaggcgcgcgggggtgggggc

SEQ ID NO: 598450 - DNA, 25 bp, Homo sapien
ctgaggcgcgcgggggtgggggcac

SEQ ID NO: 598451 - DNA, 25 bp, Homo sapien
actgaggcgcgcgggggtgggggca

SEQ ID NO: 598452 - DNA, 25 bp, Homo sapien
cgccgcactgacagcggcgcgagcc

SEQ ID NO: 598453 - DNA, 25 bp, Homo sapien
gcgagccccgcaaccgcgagccctg

SEQ ID NO: 598454 - DNA, 25 bp, Homo sapien
tctgggttccgctgccccgagctgg

SEQ ID NO: 598455 - DNA, 25 bp, Homo sapien
acgcgcgggagtcgtcgtcgtcgcc

SEQ ID NO: 598456 - DNA, 25 bp, Homo sapien
gggaaggaggcggtactgccgcact

SEQ ID NO: 598457 - DNA, 25 bp, Homo sapien
cggtactgccgcactcggggacgta

SEQ ID NO: 598458 - DNA, 25 bp, Homo sapien
tactgccgcactcggggacgtaagg

SEQ ID NO: 598459 - DNA, 25 bp, Homo sapien
aggaggcggtactgccgcactcggg

SEQ ID NO: 598460 - DNA, 25 bp, Homo sapien
taaatgaggataaaccagaaggccg

SEQ ID NO: 598461 - DNA, 25 bp, Homo sapien
gaactatggtaaccccagaatggga

SEQ ID NO: 598462 - DNA, 25 bp, Homo sapien
tatagtggacaacggcccagaagtc

SEQ ID NO: 598463 - DNA, 25 bp, Homo sapien
taaatggtgtgacccaaggctaggt

SEQ ID NO: 598464 - DNA, 25 bp, Homo sapien
tgttcccgctgaacagttcacctcc

SEQ ID NO: 598465 - DNA, 25 bp, Homo sapien
gttcccgctgaacagttcacctcca

SEQ ID NO: 598466 - DNA, 25 bp, Homo sapien
tgttccccagattccttcagcatct

SEQ ID NO: 598467 - DNA, 25 bp, Homo sapien
tcattccatcattattctatgttcc

SEQ ID NO: 598468 - DNA, 25 bp, Homo sapien
ttccatcattattctatgttcccca

SEQ ID NO: 598469 - DNA, 25 bp, Homo sapien
catcattattctatgttccccagat

SEQ ID NO: 598470 - DNA, 25 bp, Homo sapien
cacaagcagatgtttaggcccaagg

SEQ ID NO: 598471 - DNA, 25 bp, Homo sapien
cctctgagttaactgccaacattca

SEQ ID NO: 598472 - DNA, 25 bp, Homo sapien
aaatgtcagaggtctggcgatgcca

SEQ ID NO: 598473 - DNA, 25 bp, Homo sapien
caaagggcctgctataatcctgtaa

SEQ ID NO: 598474 - DNA, 25 bp, Homo sapien
cctacagaggatgtttaatgtggga

SEQ ID NO: 598475 - DNA, 25 bp, Homo sapien
cactcctgcttatggttagtttcaa

SEQ ID NO: 598476 - DNA, 25 bp, Homo sapien
cctgtgagttatagaagctgtttcc

SEQ ID NO: 598477 - DNA, 25 bp, Homo sapien
aagggatatggtagcctgtgagtta

SEQ ID NO: 598478 - DNA, 25 bp, Homo sapien
cagggaaccttctactgggcagaaa

SEQ ID NO: 598479 - DNA, 25 bp, Homo sapien
ggcaagcaaggcacaacgagggata

SEQ ID NO: 598480 - DNA, 25 bp, Homo sapien
ctttgcaccaagaagaggctcagca

SEQ ID NO: 598481 - DNA, 25 bp, Homo sapien
gatagatctatctcggccctgaggc

SEQ ID NO: 598482 - DNA, 25 bp, Homo sapien
ataatccaccactttaactgtcacg

SEQ ID NO: 598483 - DNA, 25 bp, Homo sapien
tacatatacataatccaccacttta

SEQ ID NO: 598484 - DNA, 25 bp, Homo sapien
ctttaactgtcacgtttacccgcag

SEQ ID NO: 598485 - DNA, 25 bp, Homo sapien
caaaggaccaaaggccaagtcaatc

SEQ ID NO: 598486 - DNA, 25 bp, Homo sapien
gatatctcaagatactttccagata

SEQ ID NO: 598487 - DNA, 25 bp, Homo sapien
cactgatatctcaagatactttcca

SEQ ID NO: 598488 - DNA, 25 bp, Homo sapien
aatttagactgtttagctttccact

SEQ ID NO: 598489 - DNA, 25 bp, Homo sapien
gactgtttagctttccactgatatc

SEQ ID NO: 598490 - DNA, 25 bp, Homo sapien
ctccagtctttgaacagctccaggg

SEQ ID NO: 598491 - DNA, 25 bp, Homo sapien
gagacagcctgagctcccgttcagt

SEQ ID NO: 598492 - DNA, 25 bp, Homo sapien
ttgaacagctccagggagacagcct

SEQ ID NO: 598493 - DNA, 25 bp, Homo sapien
taaagaatttcctccagtctttgaa

SEQ ID NO: 598494 - DNA, 25 bp, Homo sapien
tgcaggaagactgaccgaaaggtgt

SEQ ID NO: 598495 - DNA, 25 bp, Homo sapien
agactgaccgaaaggtgttgggcca

SEQ ID NO: 598496 - DNA, 25 bp, Homo sapien
tttagaataagcaagctccagggcc

SEQ ID NO: 598497 - DNA, 25 bp, Homo sapien
tagctaacacggctaaactccgtct

SEQ ID NO: 598498 - DNA, 25 bp, Homo sapien
cgcacagttggaaacagactaggta

SEQ ID NO: 598499 - DNA, 25 bp, Homo sapien
ctaggtactggcctaagcactgttt

SEQ ID NO: 598500 - DNA, 25 bp, Homo sapien
ggtactggcctaagcactgttttat

SEQ ID NO: 598501 - DNA, 25 bp, Homo sapien
aaacagactaggtactggcctaagc

SEQ ID NO: 598502 - DNA, 25 bp, Homo sapien
gtaacaatgatgagcttagccagct

SEQ ID NO: 598503 - DNA, 25 bp, Homo sapien
ctttgggttacagggtcagcaccac

SEQ ID NO: 598504 - DNA, 25 bp, Homo sapien
atgatgagcttagccagctgtttcc

SEQ ID NO: 598505 - DNA, 25 bp, Homo sapien
acctgcctctgggaatagggctcac

SEQ ID NO: 598506 - DNA, 25 bp, Homo sapien
catggtaggagtacacacatgagac

SEQ ID NO: 598507 - DNA, 25 bp, Homo sapien
ctgcatggtaggagtacacacatga

SEQ ID NO: 598508 - DNA, 25 bp, Homo sapien
tggtaggagtacacacatgagacgt

SEQ ID NO: 598509 - DNA, 25 bp, Homo sapien
aggagtacacacatgagacgtgagg

SEQ ID NO: 598510 - DNA, 25 bp, Homo sapien
aacacagtgcgaagagaatggcccc

SEQ ID NO: 598511 - DNA, 25 bp, Homo sapien
aagactaagctatgggtagggccca

SEQ ID NO: 598512 - DNA, 25 bp, Homo sapien
cctagggccaaaagaggaatagcct

SEQ ID NO: 598513 - DNA, 25 bp, Homo sapien
caagagcctttttcactagcagtaa

SEQ ID NO: 598514 - DNA, 25 bp, Homo sapien
gatggtattaatatagcagctcttc

SEQ ID NO: 598515 - DNA, 25 bp, Homo sapien
gtattaatatagcagctcttctccc

SEQ ID NO: 598516 - DNA, 25 bp, Homo sapien
agctttcagctctcacccctagatg

SEQ ID NO: 598517 - DNA, 25 bp, Homo sapien
gctttcagctctcacccctagatgg

SEQ ID NO: 598518 - DNA, 25 bp, Homo sapien
tctgagaggccttctttaataatcc

SEQ ID NO: 598519 - DNA, 25 bp, Homo sapien
gatacacatagctcactactccagt

SEQ ID NO: 598520 - DNA, 25 bp, Homo sapien
cactggcctcctttcgttccttaga

SEQ ID NO: 598521 - DNA, 25 bp, Homo sapien
tccttagaatcaagaagcacgctct

SEQ ID NO: 598522 - DNA, 25 bp, Homo sapien
gtttcttaagctgttgttatccagc

SEQ ID NO: 598523 - DNA, 25 bp, Homo sapien
ggtttcttaagctgttgttatccag

SEQ ID NO: 598524 - DNA, 25 bp, Homo sapien
tttcttaagctgttgttatccagct

SEQ ID NO: 598525 - DNA, 25 bp, Homo sapien
ggatcaggtgaaccaaggcatttct

SEQ ID NO: 598526 - DNA, 25 bp, Homo sapien
tgaaatcctcagtaccaaaggcaaa

SEQ ID NO: 598527 - DNA, 25 bp, Homo sapien
gaaagattaagctagtactggcagg

SEQ ID NO: 598528 - DNA, 25 bp, Homo sapien
cattctaaatactctagggctagac

SEQ ID NO: 598529 - DNA, 25 bp, Homo sapien
aatgagaaatgggaccaggctgacc

SEQ ID NO: 598530 - DNA, 25 bp, Homo sapien
tagagtccagcctgaagaagacctg

SEQ ID NO: 598531 - DNA, 25 bp, Homo sapien
ggagcacgggcgcacatgatcttaa

SEQ ID NO: 598532 - DNA, 25 bp, Homo sapien
aagtagttgggtgcagggctctcaa

SEQ ID NO: 598533 - DNA, 25 bp, Homo sapien
tgtgagctgggagttatctgaatag

SEQ ID NO: 598534 - DNA, 25 bp, Homo sapien
tcccttcccaaatagtgctccttaa

SEQ ID NO: 598535 - DNA, 25 bp, Homo sapien
aaattgccaatctgcttcttaggag

SEQ ID NO: 598536 - DNA, 25 bp, Homo sapien
taggctgtctgacagactcacacta

SEQ ID NO: 598537 - DNA, 25 bp, Homo sapien
gcagaatagaaggagatgtaagaca

SEQ ID NO: 598538 - DNA, 25 bp, Homo sapien
agcagaatagaaggagatgtaagac

SEQ ID NO: 598539 - DNA, 25 bp, Homo sapien
tgtgccacgtaagcatagacaggaa

SEQ ID NO: 598540 - DNA, 25 bp, Homo sapien
gacatgtgccacgtaagcatagaca

SEQ ID NO: 598541 - DNA, 25 bp, Homo sapien
ctgacatgtgccacgtaagcataga

SEQ ID NO: 598542 - DNA, 25 bp, Homo sapien
aggaatactcccaggatggacagct

SEQ ID NO: 598543 - DNA, 25 bp, Homo sapien
caccgtgctcaccagtcttctgctc

SEQ ID NO: 598544 - DNA, 25 bp, Homo sapien
ctacttgcttttcaagaagccccct

SEQ ID NO: 598545 - DNA, 25 bp, Homo sapien
gcttttcaagaagccccctctctgg

SEQ ID NO: 598546 - DNA, 25 bp, Homo sapien
acaccgtgctcaccagtcttctgct

SEQ ID NO: 598547 - DNA, 25 bp, Homo sapien
acaattgctgcataaaagctgggcc

SEQ ID NO: 598548 - DNA, 25 bp, Homo sapien
tagcagagacaagattaccccatgg

SEQ ID NO: 598549 - DNA, 25 bp, Homo sapien
ggactggctccccaataagtgcctt

SEQ ID NO: 598550 - DNA, 25 bp, Homo sapien
tcttctgacgctaagtctagggtcc

SEQ ID NO: 598551 - DNA, 25 bp, Homo sapien
ggtttccaatgaagactcgagagtt

SEQ ID NO: 598552 - DNA, 25 bp, Homo sapien
tagagaagatggtctccacatctga

SEQ ID NO: 598553 - DNA, 25 bp, Homo sapien
ccagagctgtgttgaggtttccaat

SEQ ID NO: 598554 - DNA, 25 bp, Homo sapien
tgttggttacattgcttgcctgaag

SEQ ID NO: 598555 - DNA, 25 bp, Homo sapien
gtactgaacaaaggcatagcccttg

SEQ ID NO: 598556 - DNA, 25 bp, Homo sapien
ctcattggagtactgaacaaaggca

SEQ ID NO: 598557 - DNA, 25 bp, Homo sapien
catggcgctcattggagtactgaac

SEQ ID NO: 598558 - DNA, 25 bp, Homo sapien
agctgcccgggcatggcgctcattg

SEQ ID NO: 598559 - DNA, 25 bp, Homo sapien
taggagaatatagtgaagagaggct

SEQ ID NO: 598560 - DNA, 25 bp, Homo sapien
ggagaatatagtgaagagaggctta

SEQ ID NO: 598561 - DNA, 25 bp, Homo sapien
ctaggagaatatagtgaagagaggc

SEQ ID NO: 598562 - DNA, 25 bp, Homo sapien
gagaatatagtgaagagaggcttac

SEQ ID NO: 598563 - DNA, 25 bp, Homo sapien
tacacggtatacacatggattctgc

SEQ ID NO: 598564 - DNA, 25 bp, Homo sapien
tgctcactgatggtgccaacaaagg

SEQ ID NO: 598565 - DNA, 25 bp, Homo sapien
gaatgctaacatgacagtgtgccca

SEQ ID NO: 598566 - DNA, 25 bp, Homo sapien
tacatgggaacgcatacacagagcc

SEQ ID NO: 598567 - DNA, 25 bp, Homo sapien
gtctgtcaggcttaggctctccagc

SEQ ID NO: 598568 - DNA, 25 bp, Homo sapien
ttagccccttgggtctgtcaggctt

SEQ ID NO: 598569 - DNA, 25 bp, Homo sapien
ggtctgtcaggcttaggctctccag

SEQ ID NO: 598570 - DNA, 25 bp, Homo sapien
tctgtcaggcttaggctctccagcc

SEQ ID NO: 598571 - DNA, 25 bp, Homo sapien
ccagcatttactccctctgtggaaa

SEQ ID NO: 598572 - DNA, 25 bp, Homo sapien
gtggaaagagagagtcatcccacca

SEQ ID NO: 598573 - DNA, 25 bp, Homo sapien
aaagagagagtcatcccaccagaca

SEQ ID NO: 598574 - DNA, 25 bp, Homo sapien
gttctagattcagcacactgtcaca

SEQ ID NO: 598575 - DNA, 25 bp, Homo sapien
gagggctggagcttagggacggcca

SEQ ID NO: 598576 - DNA, 25 bp, Homo sapien
gaaacaaaggggagagggctggagc

SEQ ID NO: 598577 - DNA, 25 bp, Homo sapien
gagagggctggagcttagggacggc

SEQ ID NO: 598578 - DNA, 25 bp, Homo sapien
gggagagggctggagcttagggacg

SEQ ID NO: 598579 - DNA, 25 bp, Homo sapien
tagaagtcgtcccggtagtaatcat

SEQ ID NO: 598580 - DNA, 25 bp, Homo sapien
tgtcgtagaagtcgtcccggtagta

SEQ ID NO: 598581 - DNA, 25 bp, Homo sapien
ctgtcgtagaagtcgtcccggtagt

SEQ ID NO: 598582 - DNA, 25 bp, Homo sapien
agtcgtcccggtagtaatcatagtc

SEQ ID NO: 598583 - DNA, 25 bp, Homo sapien
tagctcttggctgtacggtctcctt

SEQ ID NO: 598584 - DNA, 25 bp, Homo sapien
gcccgccagggactaattagacttc

SEQ ID NO: 598585 - DNA, 25 bp, Homo sapien
gaactcagtgggctgcaccaacaat

SEQ ID NO: 598586 - DNA, 25 bp, Homo sapien
tcagctctgctaccgactggtggag

SEQ ID NO: 598587 - DNA, 25 bp, Homo sapien
gcactgttcttcttgggctgcctgg

SEQ ID NO: 598588 - DNA, 25 bp, Homo sapien
cggacgactcatgctcagagaggca

SEQ ID NO: 598589 - DNA, 25 bp, Homo sapien
ggcactgttcttcttgggctgcctg

SEQ ID NO: 598590 - DNA, 25 bp, Homo sapien
gggatgggggcggacgactcatgct

SEQ ID NO: 598591 - DNA, 25 bp, Homo sapien
ggatggctatccacattcagtgtcc

SEQ ID NO: 598592 - DNA, 25 bp, Homo sapien
gcccagtaagggcaggcaaggcatc

SEQ ID NO: 598593 - DNA, 25 bp, Homo sapien
catcaggtggtagcagttatacccc

SEQ ID NO: 598594 - DNA, 25 bp, Homo sapien
aaatccccagctaggaatagagagg

SEQ ID NO: 598595 - DNA, 25 bp, Homo sapien
ggtcgcttcacagggaccgccctgg

SEQ ID NO: 598596 - DNA, 25 bp, Homo sapien
tgacacgccggaccaaagggactgt

SEQ ID NO: 598597 - DNA, 25 bp, Homo sapien
cagacggccccggtagtcgaagagc

SEQ ID NO: 598598 - DNA, 25 bp, Homo sapien
caggtacgttagttttgacacgccg

SEQ ID NO: 598599 - DNA, 25 bp, Homo sapien
ggtctcctccttagactacctggcg

SEQ ID NO: 598600 - DNA, 25 bp, Homo sapien
ctgaaagggaccaaagacagacagg

SEQ ID NO: 598601 - DNA, 25 bp, Homo sapien
taagcagcatgtgtgtaccagagtg

SEQ ID NO: 598602 - DNA, 25 bp, Homo sapien
tgtgttagagcagcagaactgtgga

SEQ ID NO: 598603 - DNA, 25 bp, Homo sapien
cagggcatcgatattggacttgatc

SEQ ID NO: 598604 - DNA, 25 bp, Homo sapien
ggattggccttttgctccgcagcga

SEQ ID NO: 598605 - DNA, 25 bp, Homo sapien
gatctgtgtcagctccgtcttgatg

SEQ ID NO: 598606 - DNA, 25 bp, Homo sapien
gatctgctccaagcggctcagcagg

SEQ ID NO: 598607 - DNA, 25 bp, Homo sapien
gccgccggcgccacctccatcaccc

SEQ ID NO: 598608 - DNA, 25 bp, Homo sapien
cggcgccacctccatcacccttctt

SEQ ID NO: 598609 - DNA, 25 bp, Homo sapien
gcgccacctccatcacccttcttct

SEQ ID NO: 598610 - DNA, 25 bp, Homo sapien
ctggtggccggctgctgccaccgcc

SEQ ID NO: 598611 - DNA, 25 bp, Homo sapien
tcgccgtcgtctcgggtccgtgctt

SEQ ID NO: 598612 - DNA, 25 bp, Homo sapien
ttcctcgctgtgtgtcaggagccct

SEQ ID NO: 598613 - DNA, 25 bp, Homo sapien
gctcttcctcgctgtgtgtcaggag

SEQ ID NO: 598614 - DNA, 25 bp, Homo sapien
ttcctcatcgccgtcgtctcgggtc

SEQ ID NO: 598615 - DNA, 25 bp, Homo sapien
caactcatgtggaaaccggaggcca

SEQ ID NO: 598616 - DNA, 25 bp, Homo sapien
ggtgtctgagataggcaagtgcccc

SEQ ID NO: 598617 - DNA, 25 bp, Homo sapien
gccgtgtgtgctcccttatgtccga

SEQ ID NO: 598618 - DNA, 25 bp, Homo sapien
aggagcacagtcgagtcccagtcgt

SEQ ID NO: 598619 - DNA, 25 bp, Homo sapien
gaggtaagagagaccacacatcact

SEQ ID NO: 598620 - DNA, 25 bp, Homo sapien
ttgtccagaaaaacttcatggtcca

SEQ ID NO: 598621 - DNA, 25 bp, Homo sapien
tgtccagaaaaacttcatggtccag

SEQ ID NO: 598622 - DNA, 25 bp, Homo sapien
aggaggtaagagagaccacacatca

SEQ ID NO: 598623 - DNA, 25 bp, Homo sapien
tgcaaggccccatcatccgcgtctg

SEQ ID NO: 598624 - DNA, 25 bp, Homo sapien
aaggccccatcatccgcgtctgtgt

SEQ ID NO: 598625 - DNA, 25 bp, Homo sapien
ccatcatccgcgtctgtgtcctggc

SEQ ID NO: 598626 - DNA, 25 bp, Homo sapien
atcatccgcgtctgtgtcctggctg

SEQ ID NO: 598627 - DNA, 25 bp, Homo sapien
tcacactaggtggtaatggcttatg

SEQ ID NO: 598628 - DNA, 25 bp, Homo sapien
gactgtcacagctctgtatggctaa

SEQ ID NO: 598629 - DNA, 25 bp, Homo sapien
agacacctccctggaaacactagtg

SEQ ID NO: 598630 - DNA, 25 bp, Homo sapien
tctaccagactaggagctcctcaag

SEQ ID NO: 598631 - DNA, 25 bp, Homo sapien
ggggcagcgatgcccttcacctgct

SEQ ID NO: 598632 - DNA, 25 bp, Homo sapien
tctggtacccgctggggggtggcat

SEQ ID NO: 598633 - DNA, 25 bp, Homo sapien
ctctggtacccgctggggggtggca

SEQ ID NO: 598634 - DNA, 25 bp, Homo sapien
ctggggcagcgatgcccttcacctg

SEQ ID NO: 598635 - DNA, 25 bp, Homo sapien
ctgtgctctaccctctggcctgggc

SEQ ID NO: 598636 - DNA, 25 bp, Homo sapien
agggctcatggggaaggagtaggcc

SEQ ID NO: 598637 - DNA, 25 bp, Homo sapien
ggaaacccctgtgctctaccctctg

SEQ ID NO: 598638 - DNA, 25 bp, Homo sapien
catggggaaggagtaggccagtaac

SEQ ID NO: 598639 - DNA, 25 bp, Homo sapien
tattgtcagggtcccctccctgtgg

SEQ ID NO: 598640 - DNA, 25 bp, Homo sapien
ctttattgtcagggtcccctccctg

SEQ ID NO: 598641 - DNA, 25 bp, Homo sapien
ttattgtcagggtcccctccctgtg

SEQ ID NO: 598642 - DNA, 25 bp, Homo sapien
tatagtgtcctaagccagaagagag

SEQ ID NO: 598643 - DNA, 25 bp, Homo sapien
taggcaccctagaccagctttttgg

SEQ ID NO: 598644 - DNA, 25 bp, Homo sapien
ccaagtgggtcacaactgcttgaca

SEQ ID NO: 598645 - DNA, 25 bp, Homo sapien
tacgtttcagaaagactgcgtggct

SEQ ID NO: 598646 - DNA, 25 bp, Homo sapien
ctatgagtgattaggaaaaaaaatt

SEQ ID NO: 598647 - DNA, 25 bp, Homo sapien
tgagtgattaggaaaaaaaattaca

SEQ ID NO: 598648 - DNA, 25 bp, Homo sapien
tatgagtgattaggaaaaaaaatta

SEQ ID NO: 598649 - DNA, 25 bp, Homo sapien
cccgcagttcactggaccagggtag

SEQ ID NO: 598650 - DNA, 25 bp, Homo sapien
gaatcccgcagttcactggaccagg

SEQ ID NO: 598651 - DNA, 25 bp, Homo sapien
tgaatcccgcagttcactggaccag

SEQ ID NO: 598652 - DNA, 25 bp, Homo sapien
atatgaatcccgcagttcactggac

SEQ ID NO: 598653 - DNA, 25 bp, Homo sapien
tcaataaggattccagcagatctgc

SEQ ID NO: 598654 - DNA, 25 bp, Homo sapien
cttccctggaggctgtagaccgggt

SEQ ID NO: 598655 - DNA, 25 bp, Homo sapien
tgcaaactttgatcaacacgtaaag

SEQ ID NO: 598656 - DNA, 25 bp, Homo sapien
cctaaagccctttttgatgatggga

SEQ ID NO: 598657 - DNA, 25 bp, Homo sapien
cagagtgctcgcctgcccaggatga

SEQ ID NO: 598658 - DNA, 25 bp, Homo sapien
tggggcctcagagtgctcgcctgcc

SEQ ID NO: 598659 - DNA, 25 bp, Homo sapien
cttggggctggcctagtcaggcccc

SEQ ID NO: 598660 - DNA, 25 bp, Homo sapien
gctcgcctgcccaggatgacaggca

SEQ ID NO: 598661 - DNA, 25 bp, Homo sapien
taaagcatgcttgggtaggacctgc

SEQ ID NO: 598662 - DNA, 25 bp, Homo sapien
taaggaagcctatggtcacaagccc

SEQ ID NO: 598663 - DNA, 25 bp, Homo sapien
tcctttaggcagaatccggtaccac

SEQ ID NO: 598664 - DNA, 25 bp, Homo sapien
tttgctgccccgactcagaggaagg

SEQ ID NO: 598665 - DNA, 25 bp, Homo sapien
gatagagatgccacctttacttggg

SEQ ID NO: 598666 - DNA, 25 bp, Homo sapien
tcggtcacagagtttagataaaggc

SEQ ID NO: 598667 - DNA, 25 bp, Homo sapien
tagagtcccaagagataataagtgg

SEQ ID NO: 598668 - DNA, 25 bp, Homo sapien
tagaatagacataaccacacagtgg

SEQ ID NO: 598669 - DNA, 25 bp, Homo sapien
atactgctgtcagctgaacatgtac

SEQ ID NO: 598670 - DNA, 25 bp, Homo sapien
actgctgtcagctgaacatgtacac

SEQ ID NO: 598671 - DNA, 25 bp, Homo sapien
tggcatcagtgaggcagttcttact

SEQ ID NO: 598672 - DNA, 25 bp, Homo sapien
tcctctctcatgtctgacatttgat

SEQ ID NO: 598673 - DNA, 25 bp, Homo sapien
cagggatgccagaggaagctttccg

SEQ ID NO: 598674 - DNA, 25 bp, Homo sapien
tgcttgtgtggtgctctgcttcctg

SEQ ID NO: 598675 - DNA, 25 bp, Homo sapien
ggattctccgctggcacatgggaga

SEQ ID NO: 598676 - DNA, 25 bp, Homo sapien
taaaagtcgcttttgaatatgacca

SEQ ID NO: 598677 - DNA, 25 bp, Homo sapien
ccagtatcaaaaccggcttccaggc

SEQ ID NO: 598678 - DNA, 25 bp, Homo sapien
ttctgttgccagtatcaaaaccggc

SEQ ID NO: 598679 - DNA, 25 bp, Homo sapien
tgttgccagtatcaaaaccggcttc

SEQ ID NO: 598680 - DNA, 25 bp, Homo sapien
tgcagaggaatatgtcacttgtcac

SEQ ID NO: 598681 - DNA, 25 bp, Homo sapien
tccaagtatccatcacctaggtttg

SEQ ID NO: 598682 - DNA, 25 bp, Homo sapien
aaggccacctttgtatcttttcctg

SEQ ID NO: 598683 - DNA, 25 bp, Homo sapien
tctgttgtgctaccatggaaccctt

SEQ ID NO: 598684 - DNA, 25 bp, Homo sapien
tggaacccttctagacatacacttt

SEQ ID NO: 598685 - DNA, 25 bp, Homo sapien
tcaactcctaattagagaggtctct

SEQ ID NO: 598686 - DNA, 25 bp, Homo sapien
cctctaattattccaatgcattatt

SEQ ID NO: 598687 - DNA, 25 bp, Homo sapien
catttcagtatgttatcaactccta

SEQ ID NO: 598688 - DNA, 25 bp, Homo sapien
tttggtttctttatgcttaaggctg

SEQ ID NO: 598689 - DNA, 25 bp, Homo sapien
gccaaaataatgtcagcccacgtca

SEQ ID NO: 598690 - DNA, 25 bp, Homo sapien
tggcctctgccgtgattctgacagt

SEQ ID NO: 598691 - DNA, 25 bp, Homo sapien
gaaagatcccacaagtgtcttgaag

SEQ ID NO: 598692 - DNA, 25 bp, Homo sapien
gagtctctgtgagccagtttggtcc

SEQ ID NO: 598693 - DNA, 25 bp, Homo sapien
caaactgtttagctgtagaccataa

SEQ ID NO: 598694 - DNA, 25 bp, Homo sapien
ttttcaggggataagaaggcacttg

SEQ ID NO: 598695 - DNA, 25 bp, Homo sapien
ctgtttagctgtagaccataaggtt

SEQ ID NO: 598696 - DNA, 25 bp, Homo sapien
tctggtgatatcaggatccttgcca

SEQ ID NO: 598697 - DNA, 25 bp, Homo sapien
acgtgcatgctcttgcacccgctaa

SEQ ID NO: 598698 - DNA, 25 bp, Homo sapien
caaaacataacgattttcaacctag

SEQ ID NO: 598699 - DNA, 25 bp, Homo sapien
tcaacctagtagaactatgattttt

SEQ ID NO: 598700 - DNA, 25 bp, Homo sapien
catgctcttgcacccgctaattttt

SEQ ID NO: 598701 - DNA, 25 bp, Homo sapien
tccggaatggagagcacacgttgag

SEQ ID NO: 598702 - DNA, 25 bp, Homo sapien
tcttggcttggtataacgccctcgt

SEQ ID NO: 598703 - DNA, 25 bp, Homo sapien
gattgaggcgagaagcctaacccac

SEQ ID NO: 598704 - DNA, 25 bp, Homo sapien
gcaggcgcatttccaacgcttggag

SEQ ID NO: 598705 - DNA, 25 bp, Homo sapien
acgcggcgtcgcctggtaactcgcg

SEQ ID NO: 598706 - DNA, 25 bp, Homo sapien
aagtcccggcatgcctggcgacgcg

SEQ ID NO: 598707 - DNA, 25 bp, Homo sapien
ggtaactcgcgccacacgaagcgcg

SEQ ID NO: 598708 - DNA, 25 bp, Homo sapien
aggttggctcttctgcgcgcctgcg

SEQ ID NO: 598709 - DNA, 25 bp, Homo sapien
tagggattcagattctcaaggtggt

SEQ ID NO: 598710 - DNA, 25 bp, Homo sapien
cagccactggcatcagattgtctgg

SEQ ID NO: 598711 - DNA, 25 bp, Homo sapien
ggtttgatggcactagtccaggctc

SEQ ID NO: 598712 - DNA, 25 bp, Homo sapien
gctggctgtatatggcttctgacta

SEQ ID NO: 598713 - DNA, 25 bp, Homo sapien
cagatacttgaggattgattcacaa

SEQ ID NO: 598714 - DNA, 25 bp, Homo sapien
tctctgtggaatataacatagaatg

SEQ ID NO: 598715 - DNA, 25 bp, Homo sapien
gaacctactttgtgcgaagcattat

SEQ ID NO: 598716 - DNA, 25 bp, Homo sapien
tctaaggaactagggacacagctgt

SEQ ID NO: 598717 - DNA, 25 bp, Homo sapien
tggccccggatgccaccgccgaaac

SEQ ID NO: 598718 - DNA, 25 bp, Homo sapien
gcggaagccaccgcggttccccatc

SEQ ID NO: 598719 - DNA, 25 bp, Homo sapien
cgaaacctccgcggaagccaccgcg

SEQ ID NO: 598720 - DNA, 25 bp, Homo sapien
cctggccccggatgccaccgccgaa

SEQ ID NO: 598721 - DNA, 25 bp, Homo sapien
cctctgcgagctccatggcctcggc

SEQ ID NO: 598722 - DNA, 25 bp, Homo sapien
tgcctctgcgagctccatggcctcg

SEQ ID NO: 598723 - DNA, 25 bp, Homo sapien
gcctctgcgagctccatggcctcgg

SEQ ID NO: 598724 - DNA, 25 bp, Homo sapien
gaagagacatcctccaggtacttga

SEQ ID NO: 598725 - DNA, 25 bp, Homo sapien
aagagacatcctccaggtacttgat

SEQ ID NO: 598726 - DNA, 25 bp, Homo sapien
gagaagagacatcctccaggtactt

SEQ ID NO: 598727 - DNA, 25 bp, Homo sapien
gagacatcctccaggtacttgatct

SEQ ID NO: 598728 - DNA, 25 bp, Homo sapien
cttccttgagagaggaccccagaaa

SEQ ID NO: 598729 - DNA, 25 bp, Homo sapien
tcaaaccctcttccttgagagagga

SEQ ID NO: 598730 - DNA, 25 bp, Homo sapien
caaaccctcttccttgagagaggac

SEQ ID NO: 598731 - DNA, 25 bp, Homo sapien
ccctcttccttgagagaggacccca

SEQ ID NO: 598732 - DNA, 25 bp, Homo sapien
ttggagcacttaacgcacagaccga

SEQ ID NO: 598733 - DNA, 25 bp, Homo sapien
tggagcacttaacgcacagaccgac

SEQ ID NO: 598734 - DNA, 25 bp, Homo sapien
cttggagcacttaacgcacagaccg

SEQ ID NO: 598735 - DNA, 25 bp, Homo sapien
gatgacggacccgcggatggcagta

SEQ ID NO: 598736 - DNA, 25 bp, Homo sapien
tgcttggtcaggatgacggacccgc

SEQ ID NO: 598737 - DNA, 25 bp, Homo sapien
gacggacccgcggatggcagtagcc

SEQ ID NO: 598738 - DNA, 25 bp, Homo sapien
agtgcttggtcaggatgacggaccc

SEQ ID NO: 598739 - DNA, 25 bp, Homo sapien
tgtccatcttgttcccccgtagcct

SEQ ID NO: 598740 - DNA, 25 bp, Homo sapien
ttgtccatcttgttcccccgtagcc

SEQ ID NO: 598741 - DNA, 25 bp, Homo sapien
tgcagggatgaggtgcaccagcaca

SEQ ID NO: 598742 - DNA, 25 bp, Homo sapien
cttcttgggcacaggtgcggagacg

SEQ ID NO: 598743 - DNA, 25 bp, Homo sapien
ttgggcacaggtgcggagacgatgc

SEQ ID NO: 598744 - DNA, 25 bp, Homo sapien
cctgggtgcagggatgaggtgcacc

SEQ ID NO: 598745 - DNA, 25 bp, Homo sapien
agttgccagggtggcagtgcagccc

SEQ ID NO: 598746 - DNA, 25 bp, Homo sapien
cttggcgaagttgccagggtggcag

SEQ ID NO: 598747 - DNA, 25 bp, Homo sapien
gccagggtggcagtgcagcccctgg

SEQ ID NO: 598748 - DNA, 25 bp, Homo sapien
ttgccagggtggcagtgcagcccct

SEQ ID NO: 598749 - DNA, 25 bp, Homo sapien
ctgtaggtcttagagatggtgtcaa

SEQ ID NO: 598750 - DNA, 25 bp, Homo sapien
tcttagagatggtgtcaaaggtggc

SEQ ID NO: 598751 - DNA, 25 bp, Homo sapien
gtcttagagatggtgtcaaaggtgg

SEQ ID NO: 598752 - DNA, 25 bp, Homo sapien
taggtcttagagatggtgtcaaagg

SEQ ID NO: 598753 - DNA, 25 bp, Homo sapien
tgcctgcaatcccaggcactcagca

SEQ ID NO: 598754 - DNA, 25 bp, Homo sapien
tggaaagacagggagaaggagaccg

SEQ ID NO: 598755 - DNA, 25 bp, Homo sapien
ccaggcactcagcaggctgaggcag

SEQ ID NO: 598756 - DNA, 25 bp, Homo sapien
aaggagaccgtggggagagggagat

SEQ ID NO: 598757 - DNA, 25 bp, Homo sapien
ccagacggggcagcggggcagagac

SEQ ID NO: 598758 - DNA, 25 bp, Homo sapien
ccagacgatggacggccaggcagag

SEQ ID NO: 598759 - DNA, 25 bp, Homo sapien
atgggatggcggccgggaagaggcg

SEQ ID NO: 598760 - DNA, 25 bp, Homo sapien
cagcggggcagagacgctccccaca

SEQ ID NO: 598761 - DNA, 25 bp, Homo sapien
gcacagggttgggacaagagttaca

SEQ ID NO: 598762 - DNA, 25 bp, Homo sapien
gactttcaccaatatactgcctgca

SEQ ID NO: 598763 - DNA, 25 bp, Homo sapien
aatggcgatgactttcaccaatata

SEQ ID NO: 598764 - DNA, 25 bp, Homo sapien
gccatcttcattatggcctgttctt

SEQ ID NO: 598765 - DNA, 25 bp, Homo sapien
gcctggatgtgcacaatcgctagat

SEQ ID NO: 598766 - DNA, 25 bp, Homo sapien
ttttatgctgagacatccaatccca

SEQ ID NO: 598767 - DNA, 25 bp, Homo sapien
caggagacagatgccacgctcttat

SEQ ID NO: 598768 - DNA, 25 bp, Homo sapien
tgtctcagaatagaatatatggtcg

SEQ ID NO: 598769 - DNA, 25 bp, Homo sapien
taggaaagacaaatctaatttatag

SEQ ID NO: 598770 - DNA, 25 bp, Homo sapien
gtgacagaaatccataacaattgcc

SEQ ID NO: 598771 - DNA, 25 bp, Homo sapien
tgggattgactgagaagaggcacaa

SEQ ID NO: 598772 - DNA, 25 bp, Homo sapien
cacaagcggagtttctgaggtaata

SEQ ID NO: 598773 - DNA, 25 bp, Homo sapien
gaatgtcagacatagtgaattttat

SEQ ID NO: 598774 - DNA, 25 bp, Homo sapien
aggctcgctgatgtgctctttttaa

SEQ ID NO: 598775 - DNA, 25 bp, Homo sapien
tattaggccacctgatgttgtctca

SEQ ID NO: 598776 - DNA, 25 bp, Homo sapien
ctgatcagcactaatttcaggaggg

SEQ ID NO: 598777 - DNA, 25 bp, Homo sapien
cagggaatgatactttgctgccgga

SEQ ID NO: 598778 - DNA, 25 bp, Homo sapien
caatgactcgaatgtcagggaatga

SEQ ID NO: 598779 - DNA, 25 bp, Homo sapien
tgctgccggatactacaaagttggt

SEQ ID NO: 598780 - DNA, 25 bp, Homo sapien
agctgtaaccaagctcctcacaggg

SEQ ID NO: 598781 - DNA, 25 bp, Homo sapien
cctgttccaggaaatcgtcagtggc

SEQ ID NO: 598782 - DNA, 25 bp, Homo sapien
ctctctctatacagggccctgttcc

SEQ ID NO: 598783 - DNA, 25 bp, Homo sapien
cagggccctgttccaggaaatcgtc

SEQ ID NO: 598784 - DNA, 25 bp, Homo sapien
ccaggaaatcgtcagtggctgctct

SEQ ID NO: 598785 - DNA, 25 bp, Homo sapien
agaacctcattagcttgacactgag

SEQ ID NO: 598786 - DNA, 25 bp, Homo sapien
gaagtttggcaccagactgaacact

SEQ ID NO: 598787 - DNA, 25 bp, Homo sapien
tagtgttctagaagccctgaacatg

SEQ ID NO: 598788 - DNA, 25 bp, Homo sapien
taggataacctgtgaacaaagttca

SEQ ID NO: 598789 - DNA, 25 bp, Homo sapien
tccactctagggataagggcaaatt

SEQ ID NO: 598790 - DNA, 25 bp, Homo sapien
ccactctagggataagggcaaattg

SEQ ID NO: 598791 - DNA, 25 bp, Homo sapien
ctccactctagggataagggcaaat

SEQ ID NO: 598792 - DNA, 25 bp, Homo sapien
taaggtgagactggtatttggagac

SEQ ID NO: 598793 - DNA, 25 bp, Homo sapien
tggagacactttactctgaagacaa

SEQ ID NO: 598794 - DNA, 25 bp, Homo sapien
gctatggaagagctacaaaagcagt

SEQ ID NO: 598795 - DNA, 25 bp, Homo sapien
agaatttgctagtccaagatctgga

SEQ ID NO: 598796 - DNA, 25 bp, Homo sapien
agccgccattgtcatcctggcccgt

SEQ ID NO: 598797 - DNA, 25 bp, Homo sapien
aagccgccattgtcatcctggcccg

SEQ ID NO: 598798 - DNA, 25 bp, Homo sapien
tggcatatgggacaaaaaattaggg

SEQ ID NO: 598799 - DNA, 25 bp, Homo sapien
gaattaagtggcatatgggacaaaa

SEQ ID NO: 598800 - DNA, 25 bp, Homo sapien
gaaaaagtcttggtcatgtttgcca

SEQ ID NO: 598801 - DNA, 25 bp, Homo sapien
gtttgccaagctttgaatattagac

SEQ ID NO: 598802 - DNA, 25 bp, Homo sapien
agagcgtctttcctgtccgtggata

SEQ ID NO: 598803 - DNA, 25 bp, Homo sapien
ctaagggtcgccaaagcagagcgtc

SEQ ID NO: 598804 - DNA, 25 bp, Homo sapien
cctgtccgtggatagcagaggcaag

SEQ ID NO: 598805 - DNA, 25 bp, Homo sapien
tgtgcctctattagcccctctaagg

SEQ ID NO: 598806 - DNA, 25 bp, Homo sapien
cttctttgggctggtgttgtgaccc

SEQ ID NO: 598807 - DNA, 25 bp, Homo sapien
cctgttaggcaagtgtcctggtgga

SEQ ID NO: 598808 - DNA, 25 bp, Homo sapien
tcaggggtaatggtaagaggccttc

SEQ ID NO: 598809 - DNA, 25 bp, Homo sapien
ctggaggattagcaaggcttaggat

SEQ ID NO: 598810 - DNA, 25 bp, Homo sapien
gggtggccaggagtaagcgggtgac

SEQ ID NO: 598811 - DNA, 25 bp, Homo sapien
agacagaagggacatccagtaggtt

SEQ ID NO: 598812 - DNA, 25 bp, Homo sapien
ccaggagtaagcgggtgacatccat

SEQ ID NO: 598813 - DNA, 25 bp, Homo sapien
catccagtaggttcacagaggagtt

SEQ ID NO: 598814 - DNA, 25 bp, Homo sapien
gcaaagtcagatgtttctggggacg

SEQ ID NO: 598815 - DNA, 25 bp, Homo sapien
agtcagatgtttctggggacgttga

SEQ ID NO: 598816 - DNA, 25 bp, Homo sapien
caaagtcagatgtttctggggacgt

SEQ ID NO: 598817 - DNA, 25 bp, Homo sapien
gagcaaagtcagatgtttctgggga

SEQ ID NO: 598818 - DNA, 25 bp, Homo sapien
ttttctgccgatctgtttggatttc

SEQ ID NO: 598819 - DNA, 25 bp, Homo sapien
cttttctgccgatctgtttggattt

SEQ ID NO: 598820 - DNA, 25 bp, Homo sapien
gcttttctgccgatctgtttggatt

SEQ ID NO: 598821 - DNA, 25 bp, Homo sapien
taaactccatgagaccaaggataag

SEQ ID NO: 598822 - DNA, 25 bp, Homo sapien
taaatgctacttccttacagaggcc

SEQ ID NO: 598823 - DNA, 25 bp, Homo sapien
caagatcacacagtgccagatccta

SEQ ID NO: 598824 - DNA, 25 bp, Homo sapien
gacgctgctgctctaggttactgag

SEQ ID NO: 598825 - DNA, 25 bp, Homo sapien
cagctgttgcgggtggccacgcagg

SEQ ID NO: 598826 - DNA, 25 bp, Homo sapien
ggtgccggcggcttgcagctgttgc

SEQ ID NO: 598827 - DNA, 25 bp, Homo sapien
agcagttgaggctgagcacgcggca

SEQ ID NO: 598828 - DNA, 25 bp, Homo sapien
caggcgctgcggaagaagcggcact

SEQ ID NO: 598829 - DNA, 25 bp, Homo sapien
tgggaagccgccctgttagggatca

SEQ ID NO: 598830 - DNA, 25 bp, Homo sapien
tattgtatttcgattttagcccaag

SEQ ID NO: 598831 - DNA, 25 bp, Homo sapien
tatttcgattttagcccaagccagg

SEQ ID NO: 598832 - DNA, 25 bp, Homo sapien
tgttagggatcacccgcccgagaag

SEQ ID NO: 598833 - DNA, 25 bp, Homo sapien
cttcgcaaatgggaattggcccttg

SEQ ID NO: 598834 - DNA, 25 bp, Homo sapien
gaacaagtcacttttgatgctacca

SEQ ID NO: 598835 - DNA, 25 bp, Homo sapien
tctgtggttgctcaaaaagatggag

SEQ ID NO: 598836 - DNA, 25 bp, Homo sapien
ggatcatttgatcaccgttctggga

SEQ ID NO: 598837 - DNA, 25 bp, Homo sapien
cattagtgaggagtttttatgctga

SEQ ID NO: 598838 - DNA, 25 bp, Homo sapien
gctgtttatggagcagtggactgaa

SEQ ID NO: 598839 - DNA, 25 bp, Homo sapien
tgacgctcgaatgatagaacattag

SEQ ID NO: 598840 - DNA, 25 bp, Homo sapien
cagatggctgtcttgacgctcgaat

SEQ ID NO: 598841 - DNA, 25 bp, Homo sapien
agatggttcctttcacaaccctggg

SEQ ID NO: 598842 - DNA, 25 bp, Homo sapien
atgaggttagtacttttagtccctg

SEQ ID NO: 598843 - DNA, 25 bp, Homo sapien
catgaatgcaggcagatttcgtgaa

SEQ ID NO: 598844 - DNA, 25 bp, Homo sapien
tctcttaaacctcattacaatgagg

SEQ ID NO: 598845 - DNA, 25 bp, Homo sapien
tttgcaaaggcatcacaggtgaaac

SEQ ID NO: 598846 - DNA, 25 bp, Homo sapien
gggagaaaagcccacctatgtgagg

SEQ ID NO: 598847 - DNA, 25 bp, Homo sapien
tagggtgtcagttcccggctaggca

SEQ ID NO: 598848 - DNA, 25 bp, Homo sapien
gctaggtcctgcactagtctagggt

SEQ ID NO: 598849 - DNA, 25 bp, Homo sapien
acagtttagatgaaggtggtgagat

SEQ ID NO: 598850 - DNA, 25 bp, Homo sapien
cacttgttgagccaaaaacgtgctg

SEQ ID NO: 598851 - DNA, 25 bp, Homo sapien
cctaaaatgggaagattgggagagt

SEQ ID NO: 598852 - DNA, 25 bp, Homo sapien
agtagctggttgaatggtggtttca

SEQ ID NO: 598853 - DNA, 25 bp, Homo sapien
gaacaatcctagtgaattttcagca

SEQ ID NO: 598854 - DNA, 25 bp, Homo sapien
ttgacactattggaccgggtgtggt

SEQ ID NO: 598855 - DNA, 25 bp, Homo sapien
ctggtagcttttcaagtaactttga

SEQ ID NO: 598856 - DNA, 25 bp, Homo sapien
cggaacaatcctagtgaattttcag

SEQ ID NO: 598857 - DNA, 25 bp, Homo sapien
ttctggccgcgcgaagccagctgga

SEQ ID NO: 598858 - DNA, 25 bp, Homo sapien
tctctgggcctcctacagggacggc

SEQ ID NO: 598859 - DNA, 25 bp, Homo sapien
gaagttggagttctcgcgcggccat

SEQ ID NO: 598860 - DNA, 25 bp, Homo sapien
tctgcgagccgcaaactggcggcgt

SEQ ID NO: 598861 - DNA, 25 bp, Homo sapien
acagtatttctgcatactgcaatgt

SEQ ID NO: 598862 - DNA, 25 bp, Homo sapien
gcagctaaagcgcaggcgcctgagc

SEQ ID NO: 598863 - DNA, 25 bp, Homo sapien
cgaccacagctactagagcgagtta

SEQ ID NO: 598864 - DNA, 25 bp, Homo sapien
ctagactaagatggcagccggtccc

SEQ ID NO: 598865 - DNA, 25 bp, Homo sapien
ggcgactcctcagtccctagactaa

SEQ ID NO: 598866 - DNA, 25 bp, Homo sapien
tgtgctgggcccttctagcgactgg

SEQ ID NO: 598867 - DNA, 25 bp, Homo sapien
ctttcacaacttggagcccgcgagg

SEQ ID NO: 598868 - DNA, 25 bp, Homo sapien
cagacaccggctctggaagaaggag

SEQ ID NO: 598869 - DNA, 25 bp, Homo sapien
gaaaagtctcgagaaggccagctgg

SEQ ID NO: 598870 - DNA, 25 bp, Homo sapien
tacttcgggcgcacaaattctgcga

SEQ ID NO: 598871 - DNA, 25 bp, Homo sapien
actttaggcccagcgtctacttcgg

SEQ ID NO: 598872 - DNA, 25 bp, Homo sapien
tttctgtcgcggacgggaactgtct

SEQ ID NO: 598873 - DNA, 25 bp, Homo sapien
agaaaagggcactctccggaggaag

SEQ ID NO: 598874 - DNA, 25 bp, Homo sapien
ttggactcacaaaacttaaattcac

SEQ ID NO: 598875 - DNA, 25 bp, Homo sapien
gaatgtaatggaattccttttggac

SEQ ID NO: 598876 - DNA, 25 bp, Homo sapien
tgatatccttggtgacttgacctgt

SEQ ID NO: 598877 - DNA, 25 bp, Homo sapien
ttgacctgtatgctgaatgtaatgg

SEQ ID NO: 598878 - DNA, 25 bp, Homo sapien
gtttcaaaatgctctccttccccat

SEQ ID NO: 598879 - DNA, 25 bp, Homo sapien
cgtttcaaaatgctctccttcccca

SEQ ID NO: 598880 - DNA, 25 bp, Homo sapien
cttgcgtttcaaaatgctctccttc

SEQ ID NO: 598881 - DNA, 25 bp, Homo sapien
tgcgtttcaaaatgctctccttccc

SEQ ID NO: 598882 - DNA, 25 bp, Homo sapien
agactgggcaacgtaaagagaacct

SEQ ID NO: 598883 - DNA, 25 bp, Homo sapien
ttagccagagcacagtagcttacac

SEQ ID NO: 598884 - DNA, 25 bp, Homo sapien
tttagccagagcacagtagcttaca

SEQ ID NO: 598885 - DNA, 25 bp, Homo sapien
ttattcagacttgctaatgggttct

SEQ ID NO: 598886 - DNA, 25 bp, Homo sapien
tataacctggcaatattattcagac

SEQ ID NO: 598887 - DNA, 25 bp, Homo sapien
aaggagccctttacccagattagct

SEQ ID NO: 598888 - DNA, 25 bp, Homo sapien
tcttccaaattacacctgacatagt

SEQ ID NO: 598889 - DNA, 25 bp, Homo sapien
cagagtctcattcttgttgccaggc

SEQ ID NO: 598890 - DNA, 25 bp, Homo sapien
tggagtgcagtggcacaatctcagc

SEQ ID NO: 598891 - DNA, 25 bp, Homo sapien
acagagtctcattcttgttgccagg

SEQ ID NO: 598892 - DNA, 25 bp, Homo sapien
tggcacaatctcagctcactgcaac

SEQ ID NO: 598893 - DNA, 25 bp, Homo sapien
aaggccaccgtgaaatgcatggtac

SEQ ID NO: 598894 - DNA, 25 bp, Homo sapien
tccttgggttaaggcgttgtctcca

SEQ ID NO: 598895 - DNA, 25 bp, Homo sapien
cacagtttgagtcacttccttgggt

SEQ ID NO: 598896 - DNA, 25 bp, Homo sapien
aagttctcacagtttgagtcacttc

SEQ ID NO: 598897 - DNA, 25 bp, Homo sapien
ggtataagaccagagcttggcctct

SEQ ID NO: 598898 - DNA, 25 bp, Homo sapien
agcaggtataagaccagagcttggc

SEQ ID NO: 598899 - DNA, 25 bp, Homo sapien
tgcatcactcttgcccccaatttct

SEQ ID NO: 598900 - DNA, 25 bp, Homo sapien
caggtataagaccagagcttggcct

SEQ ID NO: 598901 - DNA, 25 bp, Homo sapien
tttgtgtggagtcagggtctcgcca

SEQ ID NO: 598902 - DNA, 25 bp, Homo sapien
gcacctggccatgttgtcttctttt

SEQ ID NO: 598903 - DNA, 25 bp, Homo sapien
tcccatgtcaccctcccaatcagct

SEQ ID NO: 598904 - DNA, 25 bp, Homo sapien
tgtcttctttttcattacccacctc

SEQ ID NO: 598905 - DNA, 25 bp, Homo sapien
tgctctgttgacagagctagggtac

SEQ ID NO: 598906 - DNA, 25 bp, Homo sapien
ctgttgacagagctagggtacagtg

SEQ ID NO: 598907 - DNA, 25 bp, Homo sapien
agggacttgctctgttgacagagct

SEQ ID NO: 598908 - DNA, 25 bp, Homo sapien
caagggatcctactgcctcattctc

SEQ ID NO: 598909 - DNA, 25 bp, Homo sapien
aaccaagttgtgatccactgtcaga

SEQ ID NO: 598910 - DNA, 25 bp, Homo sapien
caagttgtgatccactgtcagacat

SEQ ID NO: 598911 - DNA, 25 bp, Homo sapien
gaaccaagttgtgatccactgtcag

SEQ ID NO: 598912 - DNA, 25 bp, Homo sapien
ccaagttgtgatccactgtcagaca

SEQ ID NO: 598913 - DNA, 25 bp, Homo sapien
gtgatttcatggtgaggctacccat

SEQ ID NO: 598914 - DNA, 25 bp, Homo sapien
gctgtgatttcatggtgaggctacc

SEQ ID NO: 598915 - DNA, 25 bp, Homo sapien
atctgaagctgtgatttcatggtga

SEQ ID NO: 598916 - DNA, 25 bp, Homo sapien
tgaagctgtgatttcatggtgaggc

SEQ ID NO: 598917 - DNA, 25 bp, Homo sapien
ccacatgtactcatgtgagacaagg

SEQ ID NO: 598918 - DNA, 25 bp, Homo sapien
tgtactcatgtgagacaaggcccat

SEQ ID NO: 598919 - DNA, 25 bp, Homo sapien
acatgtactcatgtgagacaaggcc

SEQ ID NO: 598920 - DNA, 25 bp, Homo sapien
catgtactcatgtgagacaaggccc

SEQ ID NO: 598921 - DNA, 25 bp, Homo sapien
aagagctgcatatgtgtgctgctag

SEQ ID NO: 598922 - DNA, 25 bp, Homo sapien
gagctgcatatgtgtgctgctagga

SEQ ID NO: 598923 - DNA, 25 bp, Homo sapien
agagctgcatatgtgtgctgctagg

SEQ ID NO: 598924 - DNA, 25 bp, Homo sapien
tataatcacttgctggctatctcac

SEQ ID NO: 598925 - DNA, 25 bp, Homo sapien
tctggagcactctgggatttaatct

SEQ ID NO: 598926 - DNA, 25 bp, Homo sapien
gcctcttgattgcacagatatagcc

SEQ ID NO: 598927 - DNA, 25 bp, Homo sapien
catatttacgtatggctccgtcagc

SEQ ID NO: 598928 - DNA, 25 bp, Homo sapien
catctactgtgacctctacgtaagg

SEQ ID NO: 598929 - DNA, 25 bp, Homo sapien
tgacctctacgtaaggacttggtcc

SEQ ID NO: 598930 - DNA, 25 bp, Homo sapien
tccacttgggactgtttgtgttgtt

SEQ ID NO: 598931 - DNA, 25 bp, Homo sapien
tctttgactgtccatctactgtgac

SEQ ID NO: 598932 - DNA, 25 bp, Homo sapien
acaggagcaatcatatcaaactgca

SEQ ID NO: 598933 - DNA, 25 bp, Homo sapien
gcaagatccatatgtactcaggtaa

SEQ ID NO: 598934 - DNA, 25 bp, Homo sapien
cacatggatgtatctgcaatactgc

SEQ ID NO: 598935 - DNA, 25 bp, Homo sapien
tactgcctaatagcgcaacattaga

SEQ ID NO: 598936 - DNA, 25 bp, Homo sapien
ccatgcctggccaaatcattctttt

SEQ ID NO: 598937 - DNA, 25 bp, Homo sapien
accctggctggaacgcaatggcacg

SEQ ID NO: 598938 - DNA, 25 bp, Homo sapien
agagtttcacttgtcaccctggctg

SEQ ID NO: 598939 - DNA, 25 bp, Homo sapien
cctggccaaatcattctttttcttc

SEQ ID NO: 598940 - DNA, 25 bp, Homo sapien
tcactgcaccccttacagtttacta

SEQ ID NO: 598941 - DNA, 25 bp, Homo sapien
tacaatcaatattggcctatgttca

SEQ ID NO: 598942 - DNA, 25 bp, Homo sapien
cacttgcagttgaactacagaagta

SEQ ID NO: 598943 - DNA, 25 bp, Homo sapien
ggcctatgttcagtaatcttatgaa

SEQ ID NO: 598944 - DNA, 25 bp, Homo sapien
agttcccaacaaaacatcagatttc

SEQ ID NO: 598945 - DNA, 25 bp, Homo sapien
catattgtttgactttaatgtttca

SEQ ID NO: 598946 - DNA, 25 bp, Homo sapien
tggtgactccacacacgaaaatgta

SEQ ID NO: 598947 - DNA, 25 bp, Homo sapien
gtttcataaatatctaatgcagcag

SEQ ID NO: 598948 - DNA, 25 bp, Homo sapien
gaatccaaaatgaatggtcaaacca

SEQ ID NO: 598949 - DNA, 25 bp, Homo sapien
catgagtcattatgcatgtttgaca

SEQ ID NO: 598950 - DNA, 25 bp, Homo sapien
tcaaaccaaggttactcagaatact

SEQ ID NO: 598951 - DNA, 25 bp, Homo sapien
caaacagctaagtgcaatttctatt

SEQ ID NO: 598952 - DNA, 25 bp, Homo sapien
ttcagactctaactgtagcccatca

SEQ ID NO: 598953 - DNA, 25 bp, Homo sapien
caagctgcaaagtcacaactacttc

SEQ ID NO: 598954 - DNA, 25 bp, Homo sapien
gacaaattgacaagtctcctattgt

SEQ ID NO: 598955 - DNA, 25 bp, Homo sapien
gtttcaccattggtaacaacttcag

SEQ ID NO: 598956 - DNA, 25 bp, Homo sapien
ttcattgtcttcaggcctctaaaat

SEQ ID NO: 598957 - DNA, 25 bp, Homo sapien
tcataatgcagttcctaagtaaacc

SEQ ID NO: 598958 - DNA, 25 bp, Homo sapien
aaccaaaagatcttcgtcaaactca

SEQ ID NO: 598959 - DNA, 25 bp, Homo sapien
tccattaatctgctctttcattgtc

SEQ ID NO: 598960 - DNA, 25 bp, Homo sapien
gcctgggcaaacagagcgaaacccc

SEQ ID NO: 598961 - DNA, 25 bp, Homo sapien
cctgggcaaacagagcgaaacccca

SEQ ID NO: 598962 - DNA, 25 bp, Homo sapien
tgagtttcaagagagtagttttcat

SEQ ID NO: 598963 - DNA, 25 bp, Homo sapien
acatcaaagtttaaacagaaaatga

SEQ ID NO: 598964 - DNA, 25 bp, Homo sapien
aacatcaaagtttaaacagaaaatg

SEQ ID NO: 598965 - DNA, 25 bp, Homo sapien
cagaaaatgagtttcaagagagtag

SEQ ID NO: 598966 - DNA, 25 bp, Homo sapien
gagccatcatcattctgagaagcac

SEQ ID NO: 598967 - DNA, 25 bp, Homo sapien
tggagccatcatcattctgagaagc

SEQ ID NO: 598968 - DNA, 25 bp, Homo sapien
ccttggatctggagccatcatcatt

SEQ ID NO: 598969 - DNA, 25 bp, Homo sapien
cttgtttcatccttggatctggagc

SEQ ID NO: 598970 - DNA, 25 bp, Homo sapien
gactactcctcctgtggttcatcat

SEQ ID NO: 598971 - DNA, 25 bp, Homo sapien
tgctgttaccgatttccaggataac

SEQ ID NO: 598972 - DNA, 25 bp, Homo sapien
tggttaagacatgccactcactact

SEQ ID NO: 598973 - DNA, 25 bp, Homo sapien
aactcccatgtacctaacagcacag

SEQ ID NO: 598974 - DNA, 25 bp, Homo sapien
cgtgccaccaggcctaactaccgtt

SEQ ID NO: 598975 - DNA, 25 bp, Homo sapien
tctcagctcactgatctccccagct

SEQ ID NO: 598976 - DNA, 25 bp, Homo sapien
cactttgggcaccctccccactcca

SEQ ID NO: 598977 - DNA, 25 bp, Homo sapien
gcaccctccccactccaacagctgg

SEQ ID NO: 598978 - DNA, 25 bp, Homo sapien
gtggaaccaacaccaccaattggct

SEQ ID NO: 598979 - DNA, 25 bp, Homo sapien
tagtaaagtgtgaggctaaaactaa

SEQ ID NO: 598980 - DNA, 25 bp, Homo sapien
tcaatccggaaatctatacagtata

SEQ ID NO: 598981 - DNA, 25 bp, Homo sapien
gagaagcagggccatactaaaatag

SEQ ID NO: 598982 - DNA, 25 bp, Homo sapien
gatcgcgtcactgcattcccatctg

SEQ ID NO: 598983 - DNA, 25 bp, Homo sapien
attagccaagtctagtggtgcacgc

SEQ ID NO: 598984 - DNA, 25 bp, Homo sapien
tagccaagtctagtggtgcacgcat

SEQ ID NO: 598985 - DNA, 25 bp, Homo sapien
gcgtcactgcattcccatctgggcg

SEQ ID NO: 598986 - DNA, 25 bp, Homo sapien
ttttgtaatcttgtactcccacttc

SEQ ID NO: 598987 - DNA, 25 bp, Homo sapien
tggtttgtcctcttcctaccatcca

SEQ ID NO: 598988 - DNA, 25 bp, Homo sapien
aatataggtctctatgattgtgttc

SEQ ID NO: 598989 - DNA, 25 bp, Homo sapien
caccggccaaatgtcccatctttta

SEQ ID NO: 598990 - DNA, 25 bp, Homo sapien
tctattacaagggaataattttgcc

SEQ ID NO: 598991 - DNA, 25 bp, Homo sapien
tacaacctgagaatactgagcatct

SEQ ID NO: 598992 - DNA, 25 bp, Homo sapien
acatcgaatctactctcatcttggg
